United States Patent Application Publication US 2013/0332133 A1 - sequence listing, part 34

SEQ ID NO: 248416 - DNA, 541 bp, Unknown
  Bacterial polypeptide expressing nucleotide sequence isolated from the Sargasso Sea
ctggaattgttcagcgatgctgccgaaacggaatcaatggcgctttccgttcctgatagtggtggggtgtttgttgtcccggcctttgtcgggttaggtgccccgcattgggacccttatgccaggggattgatggtcggtttgacccgtgacacccgacgaagtcacatcgttagggcttcgcttgaggcaatcgccttccagtcggcggaggtcctcaacagcatcagccaggatacttatgaatccttgaatgaactgagaatcgatggcggagcagctgccaatcagttcctctgccagttccaggccgatttacttggattggatgtgagacgtccacaaatccttgaaaccactgccatgggtgctgcttttctggcaggtctggctgttggaatctggagtgaccagcaggttttgagcaatctctggaaggaagaaaaaatcttccgctcctccatcgaccgggatacagcggatgccaaaatgaaggagtggctcagggcggttgaacgttcaaaatcatggattcagtaat

SEQ ID NO: 248417 - DNA, 616 bp, Unknown
  Bacterial polypeptide expressing nucleotide sequence isolated from the Sargasso Sea
atgaccgacctcatccttgccctggaccagggcactaccagttcacgcagcatcctttttacggaaaaggctggaatccgggcggttgcctccgaacccctggagtgccgttttccggattcaggttgggtggaacaggacgcagaagcaatctgggaaactcagcgaagcaccatcgtcaaggtcctggatcaggcgggtatcggccttttcgaagtttccgccattggaatcaccaaccagcgggaatccaccatcgcctggaaccgtgaaaccggagaagcgctttgccccgccattaactggcaatgccgacgcactgctgggttttgtgatgagttgaaagaggagggttttgatgaattgatccggaaccgaaccggtttggttaccgatccctatttttcaggaacgaagatgcactggattctccagaatgttcctgaagctgcgaaccttgaacgccaggggaaactctgtttcggtaccgtcgacagctggctgatctggaaactgagtggaggtaaaacccacgccatcgaaatcagcaatgcttcccgaaccctcgtttttgacatccaaaaatgcgaatgggactccgagatcctttcaagat

SEQ ID NO: 248418 - DNA, 283 bp, Unknown
  Bacterial polypeptide expressing nucleotide sequence isolated from the Sargasso Sea
tatgagtagaattttaacaattgatcaaggtactacaagttcaagaagcataatttttgatatcaatggtgatattgaacaagtagctcaagaagagtatccactaatttttccgaatgatggatgggtagagatagatcctgatgtcttatataaatctgtaacaaatacgctaaaccaattggacttggagggcgtaaaatttgggggtataaccaaccaaagagaaacaaccataatatggaataaaaatacactggagccaatttataatgcaattgtt

SEQ ID NO: 248419 - DNA, 592 bp, Unknown
  Bacterial polypeptide expressing nucleotide sequence isolated from the Sargasso Sea
ggcaaaagtgtctcctatgctcttgagggttttatcttttctgccggtacctcaattcaatggctgagagatgaaatgcagttctttgatgattcttctgaaagtgaggaacttattaacgaggactttgactcaaggggtcttaattttattcctgcatttactggtcttggagctccgcattggaattctgaaataagagggagtattcatggcattcagagagatagtagtaaagaagatataatcacagcagtatttaaagcaatttgtttccaaacccttgaaatcgttgaggctttggaacttgacggtgtttcagtccattctttaaaggtcgatggtgggatggtaaaaaataggaagtttcttcagctattaagcaatactttatcgataaatgtaaaaaaacctgaccaaattgaatcaactgcagtaggtgcttttaagattgccttgctgggatctggcattaaagatatagatgaaatccaagaaattggttcatatgatgaagttaagtcaaaacaatctccacaattaattgatgattatctaatatggaagaaatacttaacaaaaaatctttagc

SEQ ID NO: 248420 - DNA, 279 bp, Unknown
  Bacterial polypeptide expressing nucleotide sequence isolated from the Sargasso Sea
aatgaaatttgttctttccattgatcagggaacaacctcatcaagagcgattttgtttgaccaatacttgaatccagcctttaaagctcaaaaagaattccgacaactttttcctaaatcatgttgggttgaacatgatccagacgaaatttggaaatctgtggtttttgtctgtaaagaagttttaaaaaaagcgaacatagacgcttctcaaataatatcaattggaattacaaaccaacgtgaaaccactctggtttgggaaaagaatagtggaag

SEQ ID NO: 248421 - DNA, 223 bp, Unknown
  Bacterial polypeptide expressing nucleotide sequence isolated from the Sargasso Sea
atgagaaaatttattatttcaattgatgctgggacaacatcaaatagatcaattttgtttgacctaaagggaaaaccaattttttcttcacagaaagaatttactcagtattttcctaaaagtgggtgggtagaacataatccagatgagatatggaaaacgactataaaaactttaaaagatgtaattcaaaaggcaaaaaaattaaaaggtaaaatttaag

SEQ ID NO: 248422 - DNA, 766 bp, Unknown
  Bacterial polypeptide expressing nucleotide sequence isolated from the Sargasso Sea
gggagatcaacatgctgctctatttggacaaattgtcttaaagctgggcaaatgaaaagtacctatggaactggatgttttttaatgttgaatactggagataagccaatctattcaacagatggtttacttacaactcttgcttttcattggaatggagattgccactatgcaattgaaggaagcatctattctgctggaacaattgttcaatggcttagagatgggctaaaactaatacatgaatcaagagattgtgaaaaatatctagatccaaattttcaaaccaataacgtcatatttacaccagcatttaacggtcttggggctccattttggaattctagaataagggcatcgtttgaaggcatcaccagagatacatcaaaagaagaccttattacagcttctttatcatcaataagctatcaaacaaaagaaatagtagattgtttattaaatattggaatagaaattaatgaactgaaaattgatggagggatgtcagtaaataagtggttccaaaaacatcttgcaaccactattaataaaaatgtattaattccatctaatacagaatcaacagctctaggagttacaataatgtcattaatgaatgctgaattaactaatgtagatatatttaatggtatatcatttaataaggtcgagccggatgctgatttaaaaagttacgtagatgaagataataaaaaatggcgcaataacttactaaaaaaattaaatccatctccgagtagttagc

SEQ ID NO: 248423 - DNA, 157 bp, Unknown
  Bacterial polypeptide expressing nucleotide sequence isolated from the Sargasso Sea
aatggacacatatatttctatagatcagggaacaactagtagtagagctatattgtttggagaagatggttcaattttgaaaacctgtcagatggaatttaaacaaatatatccaaaaccaggttgggttgaacataatccagaagagatttgggaa

SEQ ID NO: 248424 - DNA, 292 bp, Unknown
  Bacterial polypeptide expressing nucleotide sequence isolated from the Sargasso Sea
aatggataaaaaatatattttgtccctagatgcagggacaacaagttctagatcaataatctttgataaaaatggtaatcaaattgctatatctcaatatgaatttgaacaatttttccccaataaaggatgggtcgaacacgatcctgaagaaatttggatttctcaattaaaatcaattaaaaacgtcataaagcttgcaaaaatagatccggatgaaatcgactccattggaataacaaatcagagagaaacaactgttattggaataaaaaaacaggaaaacccaatt

SEQ ID NO: 248425 - DNA, 866 bp, Unknown
  Bacterial polypeptide expressing nucleotide sequence isolated from the Sargasso Sea
tatacaaatgcttcaagaacaatgttatttaatatacacactctctcctgggatcaagatttgttaaaactttttgatattccagaatctttattgcctgagcccgttgcttgtgactcgaaatttgggaatattgaatttgcaaataatccagaaattaatgcagtacttggagatcaacacgcagcactatttggccaaaattgccttaatagaggtcaaatgaagagcacttatggaaccggttgttttttaatggtaaatactggtttaaaaccaattaattctcaagatgggttacttaccaccttagcatttcactggcaaaataattgtcattatgcgttagaaggaagcatctattctgcaggtacaattgttcagtggttacgtgatggtctaatgttatttaaagaatctaaagattgtgaaaactttttagatgaaaatttttttacgaataatcttatttttattcccgcattcaatggactaggtactccattttggaattccgaaataagaagctcctttcatggaattactagagatacaacgaaaattaatcttgtaactgccgctctggcgtctgtaagctatcaaactaatgagatagtatcgtgtttatcaaatattggaatagaagtagatgaattaaaaattgatgggggcatgacagtaaataaatggtttcgaagacatttagcaacaactttaaacaaaaatataatgacacctgataatcctgaatcaacagcattaggtgttgcaatcatgtctctaataaatgctagcattgttgacaatgagatatttaagacacttaatttttctatgacaactcctacaaaatcattggtaggtga

SEQ ID NO: 248426 - DNA, 547 bp, Unknown
  Bacterial polypeptide expressing nucleotide sequence isolated from the Sargasso Sea
cgtgatgaaatgaattttattaacgatgcaagtaaggttgaagagcttgcaaagaaaagcgctaacacaatacaattcattcctgcatttactggtttaggtgctccttattggaactctgatgttaggggtcaaattacaggaattactcgggatacttccaaggctgacattgccatggctgcattaaaatcagtatgttatcaaacaagagatcttcttgaatgtttaattagtgatacagaactaaagagaaatgattttacaattagagttgatggaggcatgtctaaaaataatcttattatgcaattgttatcggatatcactcaagtaagaattgagaggcccatgaatcaagaatcgaccgctatgggcgcagcttacttagctggaatgaaatccggcgtttacaaagatgttgcagaggttgagaaattgtggaagactgaccgcaaatttgagcctgctatttcgttggacgaggcagatcagcaatatgataaatggttaaaaactgtaaaaggattgattaataatggttgat

SEQ ID NO: 248427 - DNA, 793 bp, Unknown
  Bacterial polypeptide expressing nucleotide sequence isolated from the Sargasso Sea
aatcaatgctgggatgatgagttactcaaactttttggtatacccaaaaacattttacctgaagtaactgcttcaaattttgagttcggtaaatgtaaaaactcaggtctaaaattaaatgctgttataggtgatcaacaagctgcattagttggtcagcagtgctttaacaaaaattcaatgaaagttacttttggaactgggtgttttcttatgatgaatatgggtaaagaattcaggatttcaaataaaaaacttcttaccactattgcgtataaatttaatgatcaatgcatttatggcatggagggtagtattttttctgctggtaccattatcaagtggcttagagataatcttaatttttttaattcagcaaaagaaagtgagtcctatatcaatcttgaatggaattctaatggggtcctctttgtcccagcatttacagggctaggagtgcctcagtggaatcctaatataaaagcatcattttatggaataaccgctgagaacgacaagaatgatcttgtaacagctgctttcaagtctatcgtctatcaactgaaggatattcttatgataatcaaagaagatggttatgacattagtagtctctcaatagatggcggcatgtcaaataatcgtaaattctgtcaaatgataagtgatattcttgggttagaaatattagtgcctgaaaatgttgaatctactgccacaggagcagccattgtaagctccattagagatgtgaaacaagacttaaaagatttacccttaccgagctacacaa

SEQ ID NO: 248428 - DNA, 793 bp, Unknown
  Bacterial polypeptide expressing nucleotide sequence isolated from the Sargasso Sea
acagttttagtattcgatgaaaaattagaaatattaaaaaaatttcaaaaagagcactcccaaatagttactcaggaaggttacattgaacacgacctagaggagatttatcagaatttattagaattagtacaaaaagcttcagaaatattaccaaatccaaaatttatcagcatcacaaaccagcgagaaacttttacattattcaacgaaaaagatgggaaacccttacataacgctattgtgtggcaatgtaccagaggtcaagatatatgtgaaaaaattttaaacgatgacttaaagcgagcaaagattattaacaagacaggtttaaaaccaaatacttttttttcaggtagtaaattaaaatggatttatgatgaaaaagaagaaataagaagaaaaattgataatggagaaatactatttggaacaattgaaacgtatttaatttataggcttactaatatggagtcatatgtctcggacacgacaaacgcatcaagaaccctgttatttaattgtttaactaatgaatgggatcaagaattattaaatatttttgatattaaaaaaattaaacttccaaaagtaattaatagttcaaatatctttggagaaagtgactttaataaaatttttaataaaataataccaatcattggagtagctggtgatgcgcaagcatcattatttgctaatttttgtttcaataaaggagatactaaaataactacaggcacaggttttaatattcaaactaacattggtaatgaaatgtttattgatgaaa

SEQ ID NO: 248429 - DNA, 545 bp, Unknown
  Bacterial polypeptide expressing nucleotide sequence isolated from the Sargasso Sea
acggactgggaatatcaaagaggcgtccgaacttgaaagccttgcactccaatgtgattcaacgggcggggtatttctggttccagctttcacaggtcttggtagcccttggtgggattcatcagctagaggcaccttaatcggaatcacgagagggacaggtcgtagtgagatagcacgtgcggcgattgaatcaatggtttttcaaactcgtgatgtggttgagagcatgaggagagtgactggaagacctataaagagtcttaaagttgatggcggggcttcagtgatgaacacgatgctacaactacaggcgaaacatttgcaggttaatgtatctcgacccgtttcgcatgagacgacggctttaggtgctgcgtatctggctggacttgcccatgggttttggaaatcaatggaggagattgctagtctttggtccgttgaattcactgcccacccaacagatcttaccgataaagatgaattcacataccagcaatggttgcttgccgtcagtcgaagcttagagtgggttgtttagg

SEQ ID NO: 248430 - DNA, 286 bp, Unknown
  Bacterial polypeptide expressing nucleotide sequence isolated from the Sargasso Sea
atgaaaaaatttatagtttctatagatcaaggaactactagctctaaggttatattatataataaaaaatttcatgttattgatattttacaaaaggaatttagacaattttttcctaaaaacggttgggtagaacatgaccctctagaaatatttaaagatattaaatttttaataaaaaaactaataaagaaaaatgatataaaatgctctgaaattatttcaataggtatagcaaatcaaagagaaacaactattctgtgggataaactatctggtaaaccag

SEQ ID NO: 248431 - DNA, 727 bp, Unknown
  Bacterial polypeptide expressing nucleotide sequence isolated from the Sargasso Sea
ttgttattagatccatatttttctgctactaaaatcaaatggatattagacaatgttgatggggctaaatctatggctgaaaaaggagatcttctttttggaacaatagattcatatttaatatatgttctttctaaagaaaaaaatcatttaaccgatgtaacgaatgcatctaggacattattgttcaatattaaaactatggaatgggataatgatttgctcgagctatttaatattcctaaatcaatgatgccaaaagtattagcatgtgatgataattttggaactctcttaacagatgatcatgaaatacctataagaggggtaattggtgatcagcaagcagctcttgttggtcaagattgttttaaagagggtgatatgaagtcaacatatggaacgggttgttttttgatggttaatactaacaaagagcctttcacaattaacgaaggcttattaacgaccgtggcttacaaattaagagatgaggttcattatgctattgaaggaagtatttactcatgtggaaacataattaaatggcttagagatagaatgaatttttttagtagcgcaagcgaaagtgaaaaatttattaataattctggtaattctaacaatgttttatttttacctgcattcaatggtcttggtgctcctttctggaattcagacataaggggaggcttttatggaataacgcaagatacgacaaaagaag

SEQ ID NO: 248432 - DNA, 594 bp, Unknown
  Bacterial polypeptide expressing nucleotide sequence isolated from the Sargasso Sea
aatgttgtttaatattaataataataaatgggacaaagagattttaaaaaaattaaatattccaaaaagtattttgcctgaagtaaaaaactcagctgatgactttggcgaaactgataaaaaaattactggaaaagagattccaatatctgctgtcttaggtgatcaacaggctgctgcagttggtcagacttgttttgaaaaaggttcaattaaaagtacttacggtacaggtgctttcgtaattatgaatacaggctctaagaaaataaattccaaaaataaattattaacaacagtatgttatcgattgaataataagactacttatgctttagagggatcaatttttatagcaagtgctggtgtacaatggttaagagataaaatgaaattaataaaaaaagcaccaaagacggaaaaaattgctaaatcatcaaaaataaatgatggtatctatatcgttcccgcttttaatggtatgggcgcaccttattggagaccacatgcaagaggtttaattacaggtttaactacagatagtaattggcaaagtttggtaagagcaacagtagagtcaattgcttatcgaag

SEQ ID NO: 248433 - DNA, 544 bp, Unknown
  Bacterial polypeptide expressing nucleotide sequence isolated from the Sargasso Sea
gacgccgcgacgggcgcccccatcggcaacgccgtggtgtggctcgacgcgaggaccgcggaggcggtgaaggcgctcgagaaggcgcgcggcggcgcggacgcgttccgcgccgtctgcggcttacccctcagcacgtacttcgccggggtcaagatgcgctggctcctcgacaacgacccggcggtcgccgcggcgaacaaagccggcacgctccggttcggcacgatggacgcctggctcgtgcacagactgaccggcggcgcgaagtacgtcaccgacgtcaccaacgcgtcgcggaccatgctcatgcgcctcgacgaccaaacctggcacgagccgacgctcgccgcgttcggcgttcgacgctccgccctcccctccatcgtctccaacgccgagcccgaggcgttcggcgcgatcgccgagggcgcgctccggggcgttccgatcaccgggtgcctcggcgaccagcacgcggcgacgctcgggcagcggtgcggcgtaggggaggcgaagaacacgtacggcaccgggtgcttcg

SEQ ID NO: 248434 - DNA, 430 bp, Unknown
  Bacterial polypeptide expressing nucleotide sequence isolated from the Sargasso Sea
agaaatctatcaaatatattaacagtcaacagaaaattatttgatgatggtatcacgagtacttttgcatcgatacacgactcctgttgccttgcaaaccaatcaaattatgataccacaaaagtaagatattatcatgatggtgaatattatgagcctcatacggatagaccatttcaatttttagcattttcatatttttataaagaacctaaaaaatttgaaggaggagagttattttttccaaaatataattacgaaattccttgtgataataattccatgattatttttcctggttgggttgaacatggagtgaaaaaagtcagtattgaagattcagattattttgatgggcatggtagatatgctattacatcattttttggatgtaaagataagagcaaaaaccttgacaaatcaacataat

SEQ ID NO: 248435 - DNA, 923 bp, Unknown
  Bacterial polypeptide expressing nucleotide sequence isolated from the Sargasso Sea
aatgtatttatcaattgatcaaagcacttcatcttctactgtttttttatataataaaaatcttaaacttatatctaagttttccaagccacataaacaaattcaaaaatctttaggttttgtagagcatgatgcaaatgaaataattagtaatatttttttattagttagaaaaatttcaaaaaaaatgaaattcaaaaaagatttattccttagtatcacaaatcagagagaaacttttgttatatttgataaaaattcaggtaaacctcttcataatgctattgtttggcaatgtagaagaggacaaaaagtttgtgataaaataaataagtcaaaaaaaaataaaaatttaattaaaaaaaagacaggtcttactttagatacttattttcctgcttcaaagttaataacattattaaattcaaataaaaaaataaaagataaattaaagaatggaactgctttatttggaacaatagatacatatctaatttatcgattaactaatcaaaaaatgtatgccactgattatacaaatgcatctagaactcttttttttgataatagctctttatgttggagcaaagatcttttgaaattatttaaattaaatttaaaaaatttaccagatgttagagaaagttcttcaatatttggatacacaaattttaatggaatatttaaaaaccatattcctatttcaggagttattggggattcacaagcttctatttttgcaaatcaatgtttccataagggcaatacaaaaattacattgggtactggtgcatccatacttacaaatattggaaaaacttttaaatataataataatattattaccaccctctcttatgtttataaaaataaaccatcatattcatacgaatgtttaattaattatgctggtgctacattaa

SEQ ID NO: 248436 - DNA, 481 bp, Unknown
  Bacterial polypeptide expressing nucleotide sequence isolated from the Sargasso Sea
atggaaagtaattctggtgtttatttagttcctgcatttacaggtctgggatgtccgtattgggatccagatgcgagaggtgctatttatggaataacaagggatactggcaagaatgaaataacaagagctgcgatagaatctgttgcttatcaaacaagagatttattcaaggctatgtctgaagatggagtttctcctaaaatgcttagagttgatgggggcatgacagataatgattggcttatgcagtttttatcaaatattttagatataagtgttgaagtacctaaaataactgaaacaactgctttaggagttgccatgatggctgcgttaacagatggtaagtattcaactttagaagaactttcaaatttatggagttcaaataaatcgtatattcccaaaatagataaaagtgaaagagacaatttacttaaaaactgggattactatgttaataaaacactgacgtaat

SEQ ID NO: 248437 - DNA, 1147 bp, Unknown
  Bacterial polypeptide expressing nucleotide sequence isolated from the Sargasso Sea
aacatatattgcaaagaattaatttctaagggttatgaaaaaattgttaaagaaaagacgggacttgttcttgatccatatttctcagcaacaaaaataaaatggattcttgaaaatgtagatggtgcaaaagatttggcaaaaaaaggtgacttattatttggaacagttgattcatatttgatatataagctgacagaagaaaagaatcattttaccgatgttacaaacgcatcaagaacattgctttttaatataaatactatggagtgggatgaggatttattgaatttatttgaaattccaaagtcaatgatgccagaagttctaagttgtgatggcaattttggtaatttagtttttgataataaaaaaataccgataagaggtgtaattggtgaccaacaagctgcgcttgttgggcaaggctgcttcaaaagtggcgacatgaaatcaacttatgggacaggttgttttttaatggtcaatacagaggataaaccaattgtcatcaatgagggattgctaactacagtagcttataagttaaacggaaatgttcactatgctatcgagggtagtatttattcttgtggcaatattattaagtggttaagagataagatgctcttttttaaatgcgctcatgagagtgagaaatatctaaatataaatggtgacaccaataacgttctttttttgcctgcttttaatggtttaggtgctcctttttggaattccgacataagaggtggtttttatggtatcacgcaagataccactataaatgatatggtaacttcagcatttaattcgataagctttcagacaaaagaaatcacaacgattttggagaaatatgatataaaaataaataatttattagttgatggcggaatggttcaaaataaaacattttgtcagatgttatccaatgcattaaacaaggaaatactaactccagtaaatgttgaatcaaccgctattggggcttgcaaggtttgcatgttatcttctgaaatagatattaataatttatcaaaagaaatgaattcttatagaccagattcaagtttacaagatgttaatttaaccaattttgataattggaagacatatgtttcaaaatcaataaaaactatttaat

SEQ ID NO: 248438 - DNA, 751 bp, Unknown
  Bacterial polypeptide expressing nucleotide sequence isolated from the Sargasso Sea
ggatcaacaagctgcgctctttggtcagggttgtcttgagaaaggacaactgaaaagtacctatggtactggctgttttataatgtcgaacgtaggagataaacccatacattctgatgatggattgcttactacaatcggattttcattgaatggcaaagttttctatgcaatagaaggaagtatttatgcctctggaacaaccgttcaatggctaagagataatttacaattcttcgacaaaagcgatcaatctgagatttatttgaatgaagatggaaatgcaaataatgtgttatttataccagcttttactggtctaggtgctccgtactggaactcagaaattcgagcaagttttcatggcattacaagagacacatcaagaacagatatgattaatgcagcttttaattctgttacatatcaaaccaaagatatcattgattgtttaatacgctcaggcattaaaattgaatccttaaacgttgatgggggcatggtagcgaataaaaaattcattcagcaaattgcaaatttattgaatattaaggtatcaataccagaaaatagtgaatcaactgcaagaggagtagctgttcttgctggagtagcaagtaaaaccttcgatcttaaacttgtttctaatcaaaaaagaacatcaacccaccctgatatagaagcacatgatttcatgttaaaggattatgaaaattggaaaggtttaataactaaactgctatcaccatag

SEQ ID NO: 248439 - DNA, 262 bp, Unknown
  Bacterial polypeptide expressing nucleotide sequence isolated from the Sargasso Sea
tatgaaaaactttttatctatagaccaaggaactacaagctcgagatcaataatttttgactctaatctaaaattagttaaagactcacaaaaagaatacgaccttgagtatccacatgatggatgggttgagctgaaaccagaaaatgtaatagagacagtcttagagaccctagaagaggttttaagtagcaatcatgatatagaagcatgtggtataacaaatcaaagagaaacgactatcgtttgtcaaaactatctg

SEQ ID NO: 248440 - DNA, 208 bp, Unknown
  Bacterial polypeptide expressing nucleotide sequence isolated from the Sargasso Sea
tttgaaaaaatttatcgtctccatagatcaaggaacaacctcgtcaagagtagttttgtttgatactaaaggtaacattcaatttatttcgcaatatgaatttaagcaatactttccaagaaatggatgggtcgaacataatccaaatgaaatatggttgacaacaattaaagcattaaaacaagtaattaaaaaagctataagttga

SEQ ID NO: 248441 - DNA, 475 bp, Unknown
  Bacterial polypeptide expressing nucleotide sequence isolated from the Sargasso Sea
atggttccagctttcaccggtttaggagcacctcattggaaacctgatagtcgagcatctatttctggattaacgcgcgatactaataaaaatgatataataatagcttcaattcagtctgtatctttgcaaacatatgatcttattaaagctattcatgaagatacgcatgatttatttaaaaaatcgtttcaaggtattaaagttgatggtggaatgacagataatcaatggtttttacagaatctttcagatatttgtgaaacaaagataataaaatcaagtgaacaggaggctacagcgcttggcgcggcaacattatctgctttaggttcaaatgaaattaatgaattaagtgaattcaatattaattctaatgaaaacattgaattccttcccataataaaaaaacaattaagatcgaaaattatcaaaaattggggtatagcaataaataaaaccattaatgactaat

SEQ ID NO: 248442 - DNA, 522 bp, Unknown
  Bacterial polypeptide expressing nucleotide sequence isolated from the Sargasso Sea
aattagaagatatacttaaaaatacttccattaatagtgagattgtaatggtacctgcttttactggtttaggtgcaccacattggaaaccaaatagtcgggcatctatttcaggtttaacacgtgattccaataaaaatgagataatagcctcatcagttcagtctatttctttacaaacgtatgatcttatgaatgccataaatgaggatactaataagttatttgagaatccccttaatagtattagagttgatggaggtatgacagaaaatgactggtttatgcagaatctttctgatatttgtgacataaaaataagtaaatcaaatgaacaagaagcgactgcattgggcgcggcttcattatcagctcttggctctcaagaaattaatgatttaaaagaatttaatgttaatttatataaaaataaggaatttctgccacaaatggaaaatcaaacaagagaagaaataataaaaaattggaataaagcaataaataaaatcatcaatgtctaat

SEQ ID NO: 248443 - DNA, 510 bp, Unknown
  Bacterial polypeptide expressing nucleotide sequence isolated from the Sargasso Sea
ttccctccgctccggaaattgagaatttagcaaaaaattcgaataagaattcaaatgtttactttattccagcatttacaggccttggagcaccttattgggatccagaagccagaggggcaatttttggattatccagagagacaacaaaaaatgatatttctcaagcgctccttgaagcaattgcattccaaacaaaagatatttttgaatgcatgtcttctgatggggtagacctaaagtccctcaaaattgatggcggaatggtagaaaataaatatttcaatcaaattttagcggatgtactaaatttaaaaattcttttgccggataataaagaggcaacagcaaaaggagctgcttttctagcttccttgggctccaatcatacgaactcgctgtccgacctcgacgaattcgttggatcttacgaacagttcactccgctggaatctagagacagcaaatatcagagctggaagaatttagttactaaaattttagcttagt

SEQ ID NO: 248444 - DNA, 619 bp, Unknown
  Bacterial polypeptide expressing nucleotide sequence isolated from the Sargasso Sea
taccctagggtttagttttaataaagaaattcattatgcgattgaaggcagcatatattcagcaggaaccgtcgttcaatggttaagagataatcttgaattttttgctgaaagcccagaatctgaaaaatttttaaactccgatgcgaatgctaatggagtgtattttattccagcgtttactggtttaggagcaccatattgggactctaacataagagctagttatcatggcataacaagagacacgtcaaaaaaagatttaattaacgctgcatttaattcaatttcataccaaactaaagatattgttgactgtctagaacaaaccaatatagaagttaagtctttgagtgtagatgggggtatggcagctaacaaaacttttgtttctcatgtagctaacatactaaatatccctatacaggttcctaaaaatacagaatcaacagctaaaggtgtagcctgtttagctggaataactactggcttgatgaatattgatttaatagagaatcaagaaaaaacagtatgtaatccaaataatgctttaaaccaatctatggaaaaagattataaagaatggaaaaagttaattaaaaagaatgtatcaccataa

SEQ ID NO: 248445 - DNA, 939 bp, Unknown
  Bacterial polypeptide expressing nucleotide sequence isolated from the Sargasso Sea
taataaataaagcaaaaaagttaaaaggtcacatacttacacttggaattacaaatcaaagggaaacgacaattttatggaataaaaaaacaggaaagccaatttataatgcaattgtttggcaagatagaagaactcaagattactgtaaattacttaagaaaaaaaattatgaaaatttatttagaaataaaactggattatttatagatccatatttctcagcaactaaaattaaatggattttagacaatgttaaaagttcaaaaaaattactgagttctaatgatttattatttggaactgtagatacatttttaatttggaaattaacaaaaggtaagcaacatttaaccgaagcatctaatgcaagccgaacaatgctgtataatattaatagtaataaatgggacaaagaaattttaaaaaaactaaatattccacaaaaaattttaccagaagttaaaaactcagcagataattttggaaaaacagataaaaaaattacaggagttgaaatttcaatttctgcagttcttggagatcagcaagctgcagcatttggacaaacctgttttgaaaaaggatctataaaaagcacatatggcactggtgcatttgttattatgaataccggtctaaagaaaattaattcaaaaaacaaattactgactactatttgctatcgattaaataataaaaatacttacgccttagaaggttcaatctttatagcgggcgcaggagttcaatggttaagagataaagtaaaattaataaaaaaagcacctgaaactgaaaagatttcaaaatcctctaaagttaatgacggtgtttttgttgtaccagcttttagtggaatgggagctccttattggagaccagatgctagaggagtaattacaggactaacaagagacagtgatggaaaagtatagt

SEQ ID NO: 248446 - DNA, 947 bp, Unknown
  Bacterial polypeptide expressing nucleotide sequence isolated from the Sargasso Sea
aatactaaacagtgttaaagaaacaataaaaaaagcattagaaacctctgaggttgatattgctgcatgcggaattacaaatcaaagagaaacagtggttgtttgggataggttatcaggtaagccaatatatccagcaatcatatggcaggacagaagaacttcagatttgtgcaatgatttaaaaaagaacaaaaatttagaaaatgaaattagaaaaaaaacaggtcttctgttagacccatatttttcagctacaaaaattaagtggattcttgataatgtggagaatgctaggaaaatggcagaaaatggcgagctttgctttggaacaatagaaacttatctagtttggaatctcacaaaagaaaaaaatcataaaacagatgcaactaatgcctctaggacaatgttaatgaatcttgagactctagagtgggataattctcttcttgagatattcaatataccaaaaagcattctacctaaaatatgttcctgtgatgataactttggttcaattgatgtatctaatcaaagctttccaataactggagtgataggcgatcaacaatcagcgctttttgggcaaaattgctttgaatttggcgaaatgaaaagtacctatggaactggctgttttttaatggtcaacacaaaagaaaagatctataaatctgaagcaaaattgctgtcaacagttggatgcatgcttggcaacaaagcctcttatgctcttgaggggagcatcttttcagcaggaacttccgttcaatggttaagagatgaaatgaggtttttcgatgattcttcagaaagtgaagaccttattgacgatgaatttgattcaaagggcgtgaacttcattcctgcatttactggtcttggagcgccgcactggaattctgaaataagaggtagcattcatggaatccaaagagatagca

SEQ ID NO: 248447 - DNA, 346 bp, Unknown
  Bacterial polypeptide expressing nucleotide sequence isolated from the Sargasso Sea
tatgaaatatttcggagctatagatcaaggaacaacaagctcaagatttattgtatttgatcagaatggctcaatagttaaacaacatcaacaagaggttactcaataccttcctgatgaagtttctgtagagcatgatcctaatgaaatatgggaatcaattctcaattgcattaatgaagtaaataaagatttccaaattgaccagttagatagtattggaattactaatcaaagagaaactactttagcttggaaaaaatcaactggagaacccttacataatgcattagtttggcaggacactagaactcaaaatatttgtgatgaacttaaaactatttct

SEQ ID NO: 248448 - DNA, 847 bp, Unknown
  Bacterial polypeptide expressing nucleotide sequence isolated from the Sargasso Sea
aaaaaaaacaggtttatttattgatccatacttctctgcaacaaagattaaatggattttagactatgttaaagattctaaaaaactactgaaatcaaataatttattatttgggacagtagatacttttttaatttggaaactaactagaggaaaacatcatttaacagaagcaacaaacgcaagtagaacaatgttatttaatattaataacaatcaatgggataatgaaattttaaaaaaattaaatatttctaaaaatattttaccaaaggttaaaaactcagctgataattttgggaaaactgataaaaaaatcacaggaatagaaatccctatttctgcagtaatgggtgatcaacaagctgctgctgtaggccaaacttgttttgaaaaaggtgctgtcaaaactacttacggaacaggagcttttgtaattttgaatactggatcaaagaaaataaattcaaaaaataagttactaacaacaatatgttatcgattaaaaaataagaatacatatgcattagaaggatcaatttttatagcgggtgcaggtgtacaatggttgagagataaaattaaattaattaataatgcttatgaaacagaaaaaattgtaaaatcaacaaaaagtaataataaagtatatttagttccagcatttagtggaatgggagctccatactggagacccgatgcaagaggtttgatcacaggtcttacaagagatagtgattggaagaacttggttagagctacaatagagtcagttgcttatcaaagttatgacttatttagtgcaatgaacaaagatggtttaaagcccaagaattgtaaaaattga

SEQ ID NO: 248449 - DNA, 516 bp, Unknown
  Bacterial polypeptide expressing nucleotide sequence isolated from the Sargasso Sea
tctctttaagagataaaacatctaatgtcctagttgttcctgcttttaccggtttaggtgcacctcattgggatcccgaagcaagaggggcaatatttggaattacaagagcaacaggaataaatgaaattaccacagcaactttagagtctatagctttccaaacacgagaccttatagaagcatcagcaaaagatggagccgtgataaaagaactgagagtagatggcggcatggtagctaatgattggtttaataagcaactatcaaatttgttaggtgtaaaaatactaaaaccaaaattccttgaaactacagctttgggggctgcttatcttgcaggaatctcttctggcttagtagatgatttcaatcatttacaaaactcgatattagttgataaagaaatttctcccatggaagctgaaaaagtttccttagaattaaaatacaagaattggttaaaggccgtagaggctgtaaagttaataaaatctaaccaagaagagatataag

SEQ ID NO: 248450 - DNA, 961 bp, Unknown
  Bacterial polypeptide expressing nucleotide sequence isolated from the Sargasso Sea
atgataaaaaaatatatactatcaatagatgcaggaacaacaagttcaagagcaattctttttaataaaaatgctgaggtaattgaaattgcccagtatgagttcaatcagttttttccgaaggagggatgggtagaacataatgctactgaaatatggaatacccaactaaaggctataaaagatgtaataaataaatcaaaaattgaccctaatgaaatagattcaattggtattacaaatcaaagagaaacaacaataatttgggataagcaaacaggaaaacctgtttacaatgcaattgtgtggcaggatagaagaaccgcaagtttttgtgatgaactaattgaaaaaaataaaactactttgattcaacaaaaaacaggtcttgttatagatgcctatttttcaggtacaaaaattaaatggatacttgataatactaaagagttaagagagaaagcaaatgataataaattattatttggtactgtagatacatggttaatttggaatctgacaaatggaaagtctcatattactgatccttcaaatgctagcagaacattgctatacaacataaaagatgataaatgggacaaagaattacttgaactatttgatgttccagaaaatattctaccaaaggttgttgattcatcctcagtatctactaatattgataaagaaattctaggtgtagagattccaatttcaggaattgcaggtgatcaacaagcagcattatttggtcaattatgcatcaatgaaggtgatatcaaaaacacttatggtacaggttgtttttgtatgatgaacacaggagaaaattttgtaatgtcgaaaaacaaaatgctttcaacaattgcatggagaattaatggagaaattacttatgcacttgagggtagtgtttttgttgcaggagccttgattcaatggctacgagatcaactggaat

SEQ ID NO: 248451 - DNA, 846 bp, Unknown
  Bacterial polypeptide expressing nucleotide sequence isolated from the Sargasso Sea
aatgaattatgttttagctattgatcaaggcactacatcttcgagagctattctatttaacgagagcatggagccagcttttatatctcagaaagaattcccacaatattttccgcattccggatgggttgagcatgatcccgatgaaatttgggaatcagtaatttttgtttgcagagatgtaatcaaaaagtctggtataaaatcgagtcaaattgtatctatgggtataactaatcaacgagaaactacattgatttgggatagaatcactgggaaagctttgcacagagctatagtttggcaagatcgtcgtacgtcatctatttgtagggaattaaaggataaaggttatgagccgctgataactaaaataactggccttttgttggacccttacttctcagcaacaaaggttaaatggttactggatcgtaatgagaaagttcgcaaaaattcaatgcgtggtaattatatttttggaaccgtagatacatttttaatttggaaattaactggtggaaaagttcatgctacagatgcaaccaatgcatctcgtaccatgttatatgatattgggaaagatgattggtctgaggaaatatgtaaattatttggagttccgattgaaattctacctaaggttttggattgcgcagatgatttcggcgtagctgattccaggttttttggtcataaaattcctattagaggagtggcgggtgaccagcatgctgcaacgattggacaggcatgttttgaacctggaatgataaaatctacctacggaacaggttgttttgtgatgcttaatacaggtgagggccgagtcaagtcaacaaataa

SEQ ID NO: 248452 - DNA, 497 bp, Unknown
  Bacterial polypeptide expressing nucleotide sequence isolated from the Sargasso Sea
aagcatttcaaaaaattcaaaaaataacagtgatgtttattttgtaccagcatttactgggttaggggctccatattggatacctgaggcaagaggaataatttctggattaacccgggatacaggacaaaacgaaattgtaaaagcggccttacaatccgtagtttatcaatcgaaagatttattagatgcaatgaaagatgacggactaaaaccgagtttaattaaagtagatggaggtatgacccaaaatgattggtttaaccaattccttgctaatgtttcgaacttaaaagtattaaaacctaaaacacaggagacaacagctttaggagcggctctcattgctgctttaggtgctggaatattcaaatcactatctcaaatagcaaaaaaaaatagaataaataagcaatttagaccaaaaatgaataagaaaattagattaaagttgttgaacggatggagtcaagcaattagaaaaactattatataaa

SEQ ID NO: 248453 - DNA, 1048 bp, Unknown
  Bacterial polypeptide expressing nucleotide sequence isolated from the Sargasso Sea
ttatccaaaagatggctgggttgagttaaatgtagaagatgtattacgaactgtaagagagacagtcaaatcagttttaagcaataatttagaaattgaagcttgtggcattaccaatcaaagagaaaccactgtggtatggtctaagagcacaggagaggctatatatccagcaattgtttggcaagatagaagaactcacaaatattgcaataatttaaaattagaaggtcatgaagaaactataagaaataaaacaggattagtacttgatccttatttctctgcaacaaaaattaagtggatattagacaatgtaaatggggcaagagataaagcagaggagggagatttgttatttggcacaatcgacaccttcttgatttacaaattaaccggacatcaaaatcattttactgatgtgacaaatgcatcaagaacaatgctttttaacatacatactcttgagtgggataaagaattattacaactttttgatataccaaaatcaatgctgcctgaggtattaagctgcgatggtaactttggaaatttaaatgtaaataatactaatattcccataaggggcgttattggagatcagcaagctgctttagttggtcaaagatgtatgaaaaatggtgacatgaagtccacttatggcacaggatgtttcttgatggctaatactgaagaaaaaccagtttcaattaatgaaggtctgcttaccacagtagcttatacgttagacggaaaaactcattatgcaattgaaggaagtatatattcgtgtggaaatataattaaatggcttagagacaaaatgaatttttttgaaacatcagaacaaagtgaaagttatctgaatataaacggagaaagcaacaatgttctgtttttgccagcttttaatggactaggagcgccattttgggattcagacataagaggaggtttttatggcttaacacaagactcctcaattcaagacatggtaacagcctgctttaattcagtagcatttcaaacaaaagaaatcacctcaatc

SEQ ID NO: 248454 - DNA, 407 bp, Unknown
  Bacterial polypeptide expressing nucleotide sequence isolated from the Sargasso Sea
tatgaaaaaatatataatttcaattgatgccggaactacttcaaatagatccatactttttgatttaaaaggtaagccagtcttctcttctcaaaaagaatttacccagtattttccaaaaagtggatgggtagaacataatccagaagagatttggagaacaactttaaaaactttaaaagatgtaattcaaaaagctaaaagattaagaggcaaaattttaagcattggtattactaaccaaagagaaacaacggttttatgggataaaaaaacgggaaagcccgtttataatgcaatagtctggcaagatcgtagacaagaggagttttgcaaaaaattaagaaaacagaataaagatactatgatctttaacaaaacaggtcttttaattgactcttactttt

SEQ ID NO: 248455 - DNA, 863 bp, Unknown
  Bacterial polypeptide expressing nucleotide sequence isolated from the Sargasso Sea
attttccaaaaatggatgggttgagcataatccaaacgaaattttgtcttcatctattaaatctttaaaaaatgtaattagaaaagcttcagctttaaaaggtaaaatattaactattggaattacaaatcaaagagaaacaaccatcctttggaataaaaaaactggcaaagcaatttataatgcaattgtttggcaagacagaagaacacaagaatattgtcaaaaactaaagaaaaaaaaatatgaaaatacttttagaaaaaaaactgggctatttattgatccatatttttcagctacaaaaattaaatggatcttagagaatgtaaaaatttcaaagaaaattttaaaatccaacaatttactatttggtacagtagatacttatttaatttggaagttaaccaatggaaagcatcatttaactgatgcaacaaatgcaagtaggacaatgttatttaatattaataacaatacttgggacaaagaaattttaaaaaagctgaatgtcccaaaaagcattctaccagatgtaaaaaattcagcagataattttggagtaacaaataaaaaaatagttggacacgaaattcccatatctgcagttttaggtgatcaacaagctgcagctgttggccaatcttgttttgaaaaaggctcaataaaaagtacgtatggaactggcgcttttgcaataatgaatacaggatcgaaaaaaattttctcaaaaaataaattattaactacaatttgttacaggttaaatggaaaaaatacttttgctcttgaaggttctatttttattgctggggcaggtgtgcaatggttaagagataagttaaagttaataaataatgcta

SEQ ID NO: 248456 - DNA, 883 bp, Unknown
  Bacterial polypeptide expressing nucleotide sequence isolated from the Sargasso Sea
ataaccaaccagagagagacaactattctatggaacaagaaaacgggtaaaccagtatacaatgcaattgtttggcaagatagaagaacgcatgagtactgtgaaaagcttaagcaaaaaaaatatgaaaatatttttagaagaaaaactggtttatttattgatccatatttttcagctactaaaattaaatggatcttagaaaacgtaaaaatttcaaagaaacttcaaaaatctaataatttattatttggcactgttgatactttcttaatttggaaattaactaacggacaacatcatttaacagaggcaaccaatgcaagtagaacaatgttgtttaatataaataataacacttgggacaaagaaattttaaaaaagctcaatatctctaaaagtattttacctgatgtaaaaaattcagcggataattttggatcaacaaataaaaaaatagttggatatgaaattcctatatctgcggttttgggtgatcaacaagctgcagcagtaggacaatcttgttttaaaaaaggctcaattaaaagtacttatggcacaggtgcttttgtaataatgaatactgggtcaaaaaaaattttttcaaaaaataaattattaaccacaatttgttacagattaaacggaaaaaatacttttgctctcgaaggttcaatttttatcgctggagcaggtgttcaatggttaagagataagttaaaattaattaataatgcttccgacacagatcaaattgctaaatcaaaaaaaaataatgaaggtgtctacgtcgtaccagcttttagtggactgggagctccatactggagacctgacgcaagaggagttataactggattaactagagatagtgattgga

SEQ ID NO: 248457 - DNA, 643 bp, Unknown
  Bacterial polypeptide expressing nucleotide sequence isolated from the Sargasso Sea
ttgaaaaagtttattatttcgattgatcagggcacaacttcatcaagagtaattcttttcgacagtaaagctaaaatagtttttaaatctcaatttgaatttaaacaatattttccaaaaaatggatgggttgaacataatccaaaagaaatatggttgacaacaattaaagccttaaaaaatgttataaaaaaagcttctagacttaaaggaaaaattattagcatcggtattacaaatcaaagagaaaccactattctgtggaataaaaagactggaaagcctgtttataatgcaattgtttggcaggacagaagaactgagaaatattgcaatgtattaaaaaaaaaaaattatgaaaagagctttagaaaaaaaactggtttatttatagatccatatttttcagctaccaaaataaagtggattttagataatgttgccgaaactaaaaatttagtaaaatcaaataatttactttttggtacagtcgatacttatttgatatggaaacttactaatggcaaaaaccatcttacagatgcaactaatgctagtcggactatgctctttaatattaataataataaatgggacaatgaaatcattaaaaaattaaaaattcctaaaaatattttaccag

SEQ ID NO: 248458 - DNA, 880 bp, Unknown
  Bacterial polypeptide expressing nucleotide sequence isolated from the Sargasso Sea
ttcagcagaagctatactttttgatcttaaaggtaatccaaaatacacatctcaaatggaatttactcaatattttccaaaagatggttgggttgagcacgatccagaagaaatttggtctacaactttaaaagtcataaaaaatgtaataaaaaaaagtaaacagcttaagggtaaaattataactataggtattaccaaccaaagagaaactacaattctatgggacaaaagtacaggtaagccagtatataatgcaattgtttggcaggatagaagatcggcagattattgtaacaagctaattaaaaaaaaaaaagaaacaatcatttataataagacaggcttgctaattgatgcatatttttcagcaacaaaaattaaatggataattgacaacattccaaaagcaaaacaactcattaaacaaaagagattattatttggtacagtcgattgctttttactttggagattaacaggtggcacaaaacattttactgatgcaactaatgcaagcagaacaatgttgtacaatatttcttcaaataagtgggataaacaaattttagatattttaaaaataccaaatcatattcttcctgaagtaaaagattgctcagatgattttggacatacagatccaaaaataaccggagagtcttactctgtaacaagtatggtgggagaccaacaggcagcaactataggacaatgttgctttgaaccaggatctttaaaaagcacttatggaacaggagcttttgtattattaaatactggaagtaaaatcatttattcgaaaaatagattattaaccacaataggatatcgaataaatggtaaaacaacctatgcccttgaagggtcaatatttatt

SEQ ID NO: 248459 - DNA, 789 bp, Unknown
  Bacterial polypeptide expressing nucleotide sequence isolated from the Sargasso Sea
accgggggcaaggttcatgcaacagacgcaactaacgcttcaagaacgatgctttttaatattaataaaaataattgggataatgaaattttaaaaatttttaaaataaataaaaatattctaccgatagtaaaaaactcagcagatgattttggctatactagtaaaaaagttataggtgaaaaaatatcaatttctgctgtcctaggtgaccaacaagcagcagcatttggtcaagcctgttttgaaaaaggatccgttaaaagcacttatggtacaggagcttttataattatgaatactggcaataaaaaattgatttcaaaaaataaattactcacaactatttgttatagattaaataataagaatacttttgcacttgagggatctatttttgtagctggcgctggagttcaatggttaagagataaaatagggttaataaataatgctaatgaaacagaaaaaattgtaaaatcaaaagaaaataatgatggcgtttatatcgtacctgctttcacaggtttaggagcaccatattggagttcaagttctcgtggattaattactggactaacaagaaatagtgattggaaagatctggttcgcgcaaccatagaatctgttgcttaccaaagctatgatttatttgatgctatgaaaaaagatggaataaaacccaagattgttaaagtagatggaggaatggttactaacaattggttttctcaatttttatctaatataattaatacaaaagttataagaccaaaggttaaagaaact

SEQ ID NO: 248460 - DNA, 616 bp, Unknown
  Bacterial polypeptide expressing nucleotide sequence isolated from the Sargasso Sea
ttgctatagattaaataataagaatacttttgcaatagagggttctatttttgtagctggagctggagttcagtggttaagagataaaattaggctaataaataacgcttacgaaacagaaaaaatcgcaaaattaaaagaaaataatgatggtgtctatattgtgcctgctttcaccggtttaggagcaccgtattggagcccaaattctcgaggattaattaccggtttaacaagaaatagtgattggaaagatctggtgcgcgcagttatagagtctgttgcttatcaaagttatgatttatttgagtgtatgagaaaagatggactaaagcccaagattgttaaagtagatggaggaatggttattaacaattggtttagtcaatttttatctaatataattgatgcaaaagttgtaagaccaaaggttaaagaaactacagctttaggagcagctttaatggcaggcttaaaaataggagtttataaatctctttcagatatttcaaattattggaaaatagataaaaaattcactccaaaaataagcaaatcaaaccgtactaagctgttgaaaggttggcaacaagcaattagaaaaaccttagtttaa

SEQ ID NO: 248461 - DNA, 820 bp, Unknown
  Bacterial polypeptide expressing nucleotide sequence isolated from the Sargasso Sea
taccccgccgacggttgggtggaacaggacccgctggcgatttggagcagccagctgcaagccatgcagcagctggaggaccaattgagccaggagcagcgtgctgctgtggccgcctgtggcatcaccaatcagcgcgaaaccacggtgctctggcgatcggatcagggccaaccctgcggcccggccctggtctggcaggaccggcggaccgcttccatttgccgccactggcgtcagcagccggacgctgagagctggcagcagcgcacggggctggtgctcgacccctatttcagtgccagcaaggtgcagtggctgctgcagaacaacgccgaggcggctgcagcccaggccgatggcagcctgcgctttggcactgttgatagttggttgctgtggcagctcaccgcaggctcggtgcacgccaccgacctcagcaatgccagccgcaccttgctgttggatctcgaccgtggctgttggctgccagaggcctgtgagcgtgcgggtttaacggcctcagccctgccggagctcaagccctgccgcagcaatttcggctgcatcgcggcaggcctgcccttttccggggtaccgatcaccgccttgttgggggatcaacaggccgccagttttggtcagctgtgcttggagcctggccaagccaaatgcacctatggaacgggcgcttttctggttatcaatgtggggccaaagcctgtgcgcgcacccgggggcttgctcagcaccgtgggatggaccgaggccgatggcagcaccacctattgcatcgaaggcagccttttcaacgccggaa

SEQ ID NO: 248462 - DNA, 724 bp, Unknown
  Bacterial polypeptide expressing nucleotide sequence isolated from the Sargasso Sea
aagaacacctacggcaccggctgtttcatgtgctcaaacacgggcgacaaagcggtccagtcgcacaacggcctcatcagcacggcggcatgccagagcggcacgaagcgcagctatgcgctcgaaggcagtgtgtttgtgggcggcgcggtcgtgcagtggctgcgcgacggcctgcgcgcgatccagcggtccgccgacgtcgaagggctggccgcctcggtgcccgattccggaggtgtggtgttcgtgccgtcgttcacaggcctgggtgcgccgtactgggaccctaccgcacaaggcgccatcgtcggcctgtcacgcggcaccaccatcggccacatcgctcgtgcggcactcgaatccatcgccttccaaagcacggcactgctgcaggccatgacgcgcgatgccgtttccaccatctcggaactgcgcgtcgatggcggtgcctcggccaacaacctgctgctgcagttccaggcagatttgctgggtattccggtggtgcgcccggagatcatcgagacgacggcgctcggcgcggcttacctggcgggcatcgcaaccggcttctatcgtgatgaagcggaagtcgcccagcaatggcgtgcctcgcgcacgttccacccggtcatcagccgcgacgaggcggcgcatcgcatcgcccagtgggaaatggccgtcgcgcaggtccgcctgccgaccgcgcgtgctcactgaa

SEQ ID NO: 248463 - DNA, 496 bp, Unknown
  Bacterial polypeptide expressing nucleotide sequence isolated from the Sargasso Sea
catggcagtcgtagtatctatcgatgctggaaccactggcgttcggtctttcgctctcaacgaagcaggccatcagttggccctctcctatcaagagttcactcagcattacccaaaccccggttgggtagaacacgacccaaatgagatttggaatgccgttcacttcaccctgtctgaactcaaggaccaacttcaagaacctgtcgttgccatcggtataaccaaccaacgagaaactgtcgtagcttggaaccgcaagacaggtgaacccctctgcaatgcgattgtttggcaagacttgagaacatctcatcgctgcgaacagcttctagagctcggttatttagatcaaatccgtcagacaactgggctactacttaacccatatttcacagcgacgaagatcgagtggttgttaaacaacaacgtcgtagaacacaactccgatctggctttcggcactatcgacagctggcttctatggaaactgact

SEQ ID NO: 248464 - DNA, 862 bp, Unknown
  Bacterial polypeptide expressing nucleotide sequence isolated from the Sargasso Sea
catgactaagattttaacaattgaccaaggtactacaagctcaagatctattgtttttgattctaatgcaaacattgttgaagtatctcaaaaagaatatccattaatttatcctgaagatggctgggttgaaattgatccagaggttctaattaaatccgtgactgatacattggggaatattaaccttgatgatattgcttcagctgctattactaatcagagagaaacaacaatagtttgggaaagagatacaggaaaacctatctataacgctatagtttggcaagataggagaactaaagatttttgttcttctattaacgataaagagatacgaaaagaagtatctgctagaacaggactattgttagacccttatttctctgcaacaaaaataaaatggatattagaaaatgttgaaggtgctaagaagaaagctaaagaaggaaaactatgctttggaacagttgatacatatctaatgtatgtcttatcaaataaaaaaattcataaaacggatataacaaatgcttctagaaccatgttattcaatataaatactttatcttgggataattatctcttagatctatttgatatacctgaatcaatgttgccagaagtatctaattcagatgaattatttggaactttatctgattgcaataatatcaatgtaaatgctgtgttaggagatcaacaagctgctctatttggtcaaggttgtttaaatactggtagcttaaaaagtacatatggaacaggatgttttttaatggcaaatattggagctgagcctttagcttcggataaaggtcttttaactaccatagggtttagttttaataaagaaattcat

SEQ ID NO: 248465 - DNA, 409 bp, Unknown
  Bacterial polypeptide expressing nucleotide sequence isolated from the Sargasso Sea
aatgtcttctatattagcaatcgatcaaggcacaacttctactcggtcaattatttttgatgaaaacctcaaaataattggaacagcacaagaagaatttactcagcattttcctcagagcggttgggttgaacacaatccaaaagatttgctaggaaccacgataggtacttgcaaatcggtactaaatagtacgtctattgacccaaaaaatgttgctgccattggcattacaaaccaacgcgaaacaaccttagtttgggataaaaatacgggtgagccagtttataatgcaattgtatggcaggaccggagaacagcaattcattgcgagaaactacggaaaggtggccatgaaaagaaagttactgaaatcacgggcctacttttagacccatatttttcttca

SEQ ID NO: 248466 - DNA, 862 bp, Unknown
  Bacterial polypeptide expressing nucleotide sequence isolated from the Sargasso Sea
ggttgaacataacccagacgatttatggaattctgtcctccggacttgccgcaaagtgatggcagatctgaatattacggctaatgatatcatcgctataggcattactaatcagcgcgaaactacactggtctgggataaaaaaaccggtaaaccagtctacaacgccatagtctggcaagatcgccgcactacagcctattgtgaatcgatctacagtagcgaaacagaggcattaatcaacgcaaaaacaggcctgctacttgatccctatttttcagccagcaaaattcgctggatcctggaccacgtgcctgatgcaaaacagcgcgcagccgcaggtgaactagcttttggtactgtggatagttttttactttggcaactcaccaatggcaaagtacaccgcacagatgccactaacgcatcacgtactatgttatttgatattcatcaccagcaatgggatgacgaattactgacactgtttgatatcccaaagtctatgctgccggaagtcttagattcttcagctgatttcggtgttacagccgcagaatggcttggtggtgaaattcctgtttatggcatggctggggatcaacaagcggccttatttggtcacgcctgttttgaccaaggcatggccaagagtacttatggcacaggctgctttttgatgctaaataccggcgataccgcgctgaaatccacgaatcgcctgctaacaacggttgcttatcgcttaaatggcaaagtcacttatgctattgaaggcagtatttttatggctggagcgactatgcaatggattgttgagggtttaaactacttcgccacgcaggtgaaagtgaagcaatag

SEQ ID NO: 248467 - DNA, 778 bp, Unknown
  Bacterial polypeptide expressing nucleotide sequence isolated from the Sargasso Sea
taagagagaacgtctaataaatagaaagacaggcttactaattgatccttatttttcaggaaccaaaattaaatggataattcaaaatatttctaaggcaaaaaaacttttaaaaagaaaacaattactttttggtaccattgacactttcttgctatggagacttactaaaggaaaaattcattctacagatgcaacaaatgcttcaagaactatgttatataacatcaatacaaacaaatgggataatcaagtactaaaaagtctaaaaattcctgttcatatactgccggtcattaaaaattcttctgataattttggagtgacacataaatctattactggaaaatcttacccaattactggtgtagtaggggatcaacaagctgctaccatcggacaatgttgttttgataaaggttcagtcaaaagcacttatggaacaggcgctttcgtattaatgaatacaggtaacaagaaaatatattcaaaaaatagattgttaactactgtttgttatagattaaacggtaaatccacttatgctttagaaggttcaatatttattgctggcgcgggagttcaatggctaagagataaaatgaaattgatacgatcagcaaatgaaactgagaaaattgtaaagtctttaaaaacaaatagtaacgtttatttagttcccgctttcgttggcctaggtgctccatattgggattctaatgcaagaggggttttatctggattaacaagagatacaggaccaaaagaaattatcagg

SEQ ID NO: 248468 - DNA, 858 bp, Unknown
  Bacterial polypeptide expressing nucleotide sequence isolated from the Sargasso Sea
aagcaaaaaaacttttaaaaagaaaacaattactttttggaaccatcgatactttcttgttatggagacttactaaaggagaagtgcatgctacggatgcaacaaacgcatcgagaactatgttatataatatcaatacaaacaaatgggataatcaaatattgaaaagcttgaaaattccttcacacatacttccaatcattaaaaattcatctgatagttttggaagaacacataaatctattactggaaaaccttacctaattactggtgtagtgggggatcaacaagccgctacaattggacaatgttgttttgaaaaaggatcggtcaaaagcacttatggaacaggtgcttttgttttaatgaatacgggttacaaaaaaatatattcgaaaaatagattattaacgactgtttgttatagattaaacggtaaatccacttatgctttagaagggtcaatctttattgctggagcaggagttcagtggctaagagatcaaatgaaatttgtaaaaaaagcttcagatacagaaaaaattgttaagtcattaaaagataacaagggaatttatttagttccggcttttacaggtattggagcaccgtattggaatacaaaagccaggggagttttaagtggaataagcagagatactggtcctaaagaaattgtaaaagccgttatagaatctgtagcttatcaaactcacgatttgtttgaagccatgcgatacgatggtttaacacctaaatttgtaaaagttgatggaggaatggtaatgaacaattggttttcacaatatttatcagacatgatcaatgtgaaagtgttaaggccaaaaagttcatgag

SEQ ID NO: 248469 - DNA, 357 bp, Unknown
  Bacterial polypeptide expressing nucleotide sequence isolated from the Sargasso Sea
gttgaaaaaatttataatttctattgatcaaggtaccacttcttcaagagtaattctttttaacactaaaggaaaaattgaatttatttcacagtatgaatttaaacaatatttcccaaaaaatgggtgggtagaacataacccaaatgagatttggtcaacaactcttaaagcacttaagaatgttattaataaggccaataaaatcagaggccatattattagtattggaattaccaatcaaagagaaacaaccattttatggaataagaaaacaggaaagccaatttataatgcaatagtttggcaagatcgaagaactcaagagtattgtaaaaaacttaaaaataaaaaata

SEQ ID NO: 248470 - DNA, 659 bp, Unknown
  Bacterial polypeptide expressing nucleotide sequence isolated from the Sargasso Sea
ccgttcccaaaacggactgctcaccaccatcggctggaagcttggtgatgaggtgacctatgccctggaaggctcggtcttcattgccggtgcgttggtgcagtggctccgggacgggctggaattgttcagcgatgctgccgaaacggaatcgatggcgctttccgttcctgatagcggaggggtgtttgttgtcccggcctttgttggtttaggtgccccgcattgggatccctatgctaggggattgatggtcggtttgacccgtgacacccgacgcagtcacatcgtcagggcttcgcttgaggcgatcgccttccagtcggcggaggtcctcaacggcatcagccaggatacttctgaatccttgaatgaactgagaatcgatggcggagcggctgccaatcagttcctttgtcagtttcaggccgatttgcttggattggatgtgagacgtccacaaatccttgaaaccaccgccatgggtgctgcttttctggcaggtctggctgttggcacatggagtgaccaggaggctctgagcaatctctggaaggaagaaaaaaccttccgctcctccatagaccgggatacagctgatgccaaaatgaaggagtggctcagggcggttgaacgttcaaaatcctggattcagtaat

SEQ ID NO: 248471 - DNA, 397 bp, Unknown
  Bacterial polypeptide expressing nucleotide sequence isolated from the Sargasso Sea
atgaaaaaaaaatacatcttatctattgacgctggaacaacaagctcaagggcaattatttttaacaaaaatgcagaggtaattgaaattgctcaatatgagttcagtcaattttttccaaaggagggatgggtagaacatgatgctattgaaatatggaatacacaattaaaggcaataaaagatgtaattagtaaatcaaaaattgatcctaacgatatagattcaattggtattacaaatcagagagaaacaacaataatttgggataagcaaacaggaaaaccagttgataatgcaattgtatggcaggatagaaggactgcaagtttttgtgatgaattaattgaaaaaaataaaacctctttgattcaacaaaaaacaggtctgttataga

SEQ ID NO: 248472 - DNA, 626 bp, Unknown
  Bacterial polypeptide expressing nucleotide sequence isolated from the Sargasso Sea
catgtcacacgttctagcaatcgaccaaggtacatcctcatctagaacaataatttttgacacgcaacttagaaaagttgaatctctgcaggaagaatacccgttagattatccaaaatctggctgggtagagattgaccctgagtcattgatggcctctgtagaaaataccttggagccattgttaaaaaaatacaaaaataccatcgaagctattggaatcactaaccaaagagaatccactgtggtgtgggaaagaagatcaggtaaaccaatttatccaattattgtttggcaagatagacgaactgaagatttatgcaaaaagatcaaagcagatggcaatgaggagcttatttttaaaaagactggacttcaagttgatccttatttctccgcgaccaagatagcttggattttagataatattcctgaggcaagacaaaaggccgagaaaggcgatttgctgtttggaaccatagatactttccttttatggcagttagctggtgaacataaaactgatgtcacaaatgcttccagaaccatgctctataacatcaacagcagagaatgggatgacgatttattaaaactttttaatatacccaagacaatattgccgc

SEQ ID NO: 248473 - DNA, 905 bp, Unknown
  Bacterial polypeptide expressing nucleotide sequence isolated from the Sargasso Sea
gctcacaatcgacccttatttctcggcaacaaaaattcattggctcttaaacaatgtcgaaggtgcaaaagaacaagcattaaacggagacttgctatttggaacagtagacacctttttaatttggaaattgacagaaggtagatgtcataagacagatataactaatgcctcaagaactatgttattcaatatagctaaacaacaatgggatgatgacttattgaatatctttgaaattccaagacaaatacttccggaagtttgtgacaacgtatcagattacggaatgactgaagtgtttggaggtgaagtgagcataggcggagtggctggagatcaacaagctgcattaataggccaatgttgtttcgatccaggagatgttaaaagcacttacggtactggttgttttatgatggtaaattcaggagataagattttatattcagagaacaaattgctttcaaccattggttatcgaattgatggcaaaacaacatatgctttagagggcagcatatttgttgcaggttcagcaattcagtggttgagagatggattgaatttttttgaagactccttcgaaactgaggcgatgtcgagaaaagcttctttagattctagagtactagtaataccagcactgactggtttaggcgctccttattgggatgctgaagcaagaggagccatattcggaataactagagatacaagtaaagaagatattacgaaagctactcttgagtcagtggctttccagtctaaagatttagttgaggctatgcaaaaagataatggcactttcaaaagattaatgattgacggaggaatggttaaatataattggttttgtcaacaactttgcaatactctttcagtagaagtatctcgcccagtaa

SEQ ID NO: 248474 - DNA, 874 bp, Unknown
  Bacterial polypeptide expressing nucleotide sequence isolated from the Sargasso Sea
attcggcattcctccagaatccctgcctgaagtcgttccttcaagtggagtaattgccgaagtagacgaatccctgtttggaggctccgcgccgattgccggtgctgcaggagaccaacaggcggcactgttcgggcaggcatgtttttatccgggaatggccaaaaacacttacggtaccggttgcttcatgatttccaacaccgggaagcatctggtccgttcccaaaacggactgctcaccactatcggctggaagcttggtgatgaggtgacctatgccctggaaggctcggtcttcattgccggtgcgttggtacagtggcttcgggacgggctggaattgttcaacgatgctgcagaaacggagtccatggcgctttctgttcctgatagcggaggggtgtttgttgtcccggcttttgtcgggttaggtgccccgcattgggacccttatgccaggggattgatggtcggtttgacccgtgacacacgacgcagtcacatcgtcagggcttcgcttgaggcgatcgcctttcagtcggcggaggtgctcaacagcatcagccaggatacttctgaatctttgaatgaactgagaattgatggcggagcggctgccaatcagttcctctgtcagttccaggccgatttacttggattggatgtgagacgtccacaaatccttgaaaccactgccatgggtgctgcttttctggcaggtctggctgttggaacctggagtgaccagcaggttttgagcaatctctggaaggaagaaaaaaccttccgctcctccatcgaccgggatactgcggatgccaaaatgaaggaatggctcagggcggttgaacgttccaaagcctggattcag

SEQ ID NO: 248475 - DNA, 961 bp, Unknown
  Bacterial polypeptide expressing nucleotide sequence isolated from the Sargasso Sea
aaattggaaggatatgaagaagttataaaagaaagcacaggccttattcttgatccatatttttctgcaacaaaaattaaatggattttagataatgttgaaggagcaagaaataaagcagaaaatggtgaattgctatttggtactattgattcttttttaatttataaccttacaaaagaaaaaaaccacttcacagatgttactaatgcttctagaacattattatttaatattaaatcaatgaaatgggatgatgaattacttaaattatttgatattcctaaatcaatgatgcctaaagtattaagttgcgactcaactttcggtactttatcaatagatggaaataatattcctattagaggtgttataggtgatcaacaagctgcattagtaggtcaaaattgctttaaaagcggtgatatgaaatcaacttacggaacaggatgttttttaatggtgaatactgaagaaaagatttataaaatcgatgaaggtcttctcacgacagtagcatataaattagaaggtaagattcattatgcaattgaaggaagtatctattcatgtggaaacattattaaatggttaagagataaaatgaagttctttgataaatctaaagaaagtgaaaagtttttaaatagaaatggatgctcaaataatgttctttttttaccaggttttaatgggcttggggctccattttggaattctgatgtaagagggggattttatggattaacacaagatacatccataaatgatcttgtaacgtcagcttttcaggctattacttttcaaacaaaagaaattactacaattttagaagattatgatattcaaattagcaaattattagtcgatggcggcatggtaaataataataaattttgtcaagcattatcagacactctagaaaaagaaatcgttaagcccagcaaatgtcgagtctacc

SEQ ID NO: 248476 - DNA, 666 bp, Unknown
  Bacterial polypeptide expressing nucleotide sequence isolated from the Sargasso Sea
catgactgtttcagcagttctggcaatcgaccaagggacgacggggacgacttgccttgtcatagatgccgacggccgtgtgcttggacgcggctactctgaatttaaacagcacttccccaggaatggttgggtcgagcatgatgccaacgagatctgggaggtaacattaagagtcgctcgtgatgcagttgccgaggcatcgggagccgaagtctgctccatcggaatcgcgaatcaacgcgaaaccgttgttttgtgggatagggaaaccatcgagcctgttcatcgtgcgatagtgtggcaggatcggagaaccgcgccgatgtgccgctcccttaaggaagcaggtcacgaagaagaagtacgccgcagaacagggcttgtgcttgatccttatttctctggcacaaagatctcgtggttgttggagtccgacccagaaatccgtcgaaaagcggaagaggggctccttgctgcgggcaccgtggattcatggttgatcgcgaagctcacgagtggtggctcacatcttactgacccaacgaatgcttcgcgtacgctgttattcaatctgcatgactcatcgtgggatcactgggctcttgatttgctgggggtgccggccggtcttcttccggaggttcgagccagttcggggggagt

SEQ ID NO: 248477 - DNA, 806 bp, Unknown
  Bacterial polypeptide expressing nucleotide sequence isolated from the Sargasso Sea
tgacccttcaattacagggaaatcaataccaataacaggtgtagtgggagaccaacagtcagccacaattggtcaatgttgtttcgagcctggttctttaaaaagtacatatggaacaggtgcatttattttattaaacacaggatcaagaaaaatatattcaaagaataggttgcttacaacgattggatatagattaaatggaaagacaacttacgctcttgaaggatcaatttttattgctggtgctggtgttcagtggcttagagatagaatgaaatttgtaaacagagcgtccgatactgaaaaaattgtaaaatcgttaaaagataattctggaatttatttagtccctgcttttactggattaggagctcctcattggaatgctaatgctagaggagttttaagtggcgttactagagatacaggaccaaaagaaatagttagagctattatagagtcagtaggatatcaaacttatgatttatttgaagctatgaggcacgatggtttaagacctaaaatagtaaaagttgatggaggcatggttatgaataattggttctcacaatttcttgccgatataaataatgtaaaagttttaagacctaagattcatgagacaaccgcattaggagcaagttttatggctggacttaaaattggggtttataaatctttaaaagatatatctaaaagatggagtctagataaacaattttcaccaaaagttagtaataagtttagaatgaatctaattaagggatggaatgttgccgttaaaaggactttaattacttgaa

SEQ ID NO: 248478 - DNA, 856 bp, Unknown
  Bacterial polypeptide expressing nucleotide sequence isolated from the Sargasso Sea
gcgcaacgtcgggccgttgtgagctgcggcatcaccaatcaacgcgaaacaacagtgctctggcgccgcagcagcggcaatccctgcgggccggccctggtctggcaggacggtcgtacagctgacatctgccaagcctggaaagcagacggcctcgaagccgcgtggtgccagcgcaccggcttgctgctggatccgtacttcagcgccagcaagatccgttggatgctcgagcatcaccccgaggcggcagccgctgcggcccaagacgatctgtgcttcggcacggtggagtcgtggctgctctggaacctcacgggaggacaacgccacggcagtgacatgagcaatgccagccgcacgctgctgatggatctcgagcagcgctgctggatggatgaattccgcgaacagacggatcttcctgcgaacgctttaccggagctgttgccctgccgtggggagttcggccacatcgcagcggagcttcccttcgccggattgaccatccaggccatgctcggtgatcaacaggccgcgacccttggtcagctctgcctgcagcctggcgaagccaaatgcacctatggcactggtgcctttctggtaatcaataccggcgacagcatccgccgctccagcgccggtctactcagcacccttggctggaccgatgccagcggaacacccacctactgcctggagggcagcctgttcaatgcaggaactgtggtgcagtggctgagggacggtctaaagatcatcgagcgggccgatgaggtgaatgcccttgcgcaatcggtgccggacagcggcggggtgatgctggtgccagccttcaccggttgggggaccc

SEQ ID NO: 248479 - DNA, 856 bp, Unknown
  Bacterial polypeptide expressing nucleotide sequence isolated from the Sargasso Sea
aatgaatctttttaatattcctatgtctatgatgccagaagtaaaagattgtgactctgaattcggaactctatcaatatctgatacagaaataccaattaaaggagtgataggtgaccagcaagccgctttagttggtcaaaactgttttaaagatggtgatatgaaatcaacatatggaacaggatgttttttaatggttaatacaaatcagaatattatttctgttgatgaaggtcttctgaccacagtggcatataaaataaataatgaagttcattatgcaattgagggaagtatatattcttgtggaaatattattaaatggctgagagataaaatgaaattttttgaaaactctgaagatagtgaagattttttaaggaaagatggaaattcaaataatgttctttttctaccagcttttaatggtctaggcgccccatattggaattctgagataagaggtggtttttatggaattactcaagatacaagtattgaagacatgactacagcagcattccaatcagtagcttttcagacaaaagatataacaaatattcttagtctttatgatattaaaattcaaaaacttttagttgatggaggcatggtttctaataaaacattttgtcaggtgcttgctgacacacttcaaatagaaattgttaaacctaaaaatgttgaatcaactgcaattggtgcttgtaaggttgcaatgctcagctcaggtatcagtatagagaatctttcaaaaaacgagataccttataaagtgaataaagatcgcagagatgtttattttaggaattactcaaaatggcaagaatatcttttaaacacgatcaaataa

SEQ ID NO: 248480 - DNA, 529 bp, Unknown
  Bacterial polypeptide expressing nucleotide sequence isolated from the Sargasso Sea
atggacacatatatttctatagatcagggaacaactagtagtagagctatattgtttggagaagatggttcaattttaaaaacctgtcagatggaatttgaacaaatatatccaaaaccaggttgggttgaacataatccagaagagatttgggaaacaacaaagtctgttttaaaagatttatatcattcaaatattgcaaaaaaacacaaaattagagggattggaattacaaatcagagggaaacaacaattctatgggataaaaaatctggaaagccaatttacaatgcaattgtttggcaagacagaagaacttcagatttttgtaagtctctagtaaaacagggattagaagaaactgtcatgaataagtcaggcttagtaattgacccctactttagtgcaacaaaaataaaatggattttagataatgtccatggagcaagatcaaaagctgaaaataatgaaatctgttttggtactgtggatagttttttattatggaagttaactggtgggaaggttc

SEQ ID NO: 248481 - DNA, 847 bp, Unknown
  Bacterial polypeptide expressing nucleotide sequence isolated from the Sargasso Sea
ggccacataacgagtattggaataaccaatcaaagagaaacaactatattgtggaataagaaaacaggaaaaccaatttataacgctatagtctggcaagatagaagaactcaagaatattgcaaaaaactaaaaaataaaaattacgaaaatatttttagaaaaaaaacgggcttatttatagatccatatttttcagcaacaaaagtcaaatggattttagataacgtaaaagggtctaaaaaattattaaaatcaaaaaatttattatttggtacggttgatacttttttgatttggaaactaacaaaagggaaacaacatttaacggaagctacaaatgcaagtagaacaatgttatttaatataaataataataaatgggatcaagaaattttaaaaaaattaaatattccaaaaagtattttacctgcagttaaaaactcggccgatgattttggtaaaacagataaaaaaatcactggaaaagaaattccaatagcagcagttttgggagatcaacaggctgcagcagtaggacaaacttgttttgaaaaaggttcaattaaaagtacttatggaacaggggcttttgtaattatgaacactggtccaaagaaaataaattcaaaaaataaactattaacaacaatatgttatcgattaaacaacaagacgacttatgcattagagggatcaatttttatagcaggtgctggagtgcaatggttaagagataaaatgaagttaattaaaaaagctccagagacagaagaaatagctaaagcatcaaagataaatgatggtatatatgtagtgcctgcttttagtggtatgggagcacctt

SEQ ID NO: 248482 - DNA, 745 bp, Unknown
  Bacterial polypeptide expressing nucleotide sequence isolated from the Sargasso Sea
attacaaatcaaagagaaacaactattgtatggtcaaaggagacaggtattccaatttatccagcaattgtttggcaagacaggagaacaaatgatctctgtgaaagcatgagatctattgaactagataatttaattaaagaaaaaactggattgatcttagatccttatttttcagctacaaaaattaaatggattcttgataatgtagaaggcgcaagaaaaaaagcagaaaatggggaattgttatttggaacagtagatacatttctaatttataacttaacttcagaacagaatcactttactgatattacaaatgcatcaagaacaatgctttttaatatagtagaaaaaaaatgggatgaagaattattaaaactctttgatatacctatttctatgatgcctacagtcaaatcttgtgacgcttactatggaacgatcaaaaaaaatgataaaaaaattcccattaatggtgtaattggtgatcaacagagcgcattagttggtcaagggtgttttcaaaaaggagatataaaatccacttatggcactggctgttttttaatagcaaatactggtgatgaagtagtaaatgtaaaagaaggattattaacaactattggatatgagttaaataatgaggtttgctatgcacttgaaggcagtatttattcttgcgggactcttgtgaaatggctaagagatcaaatgaaattatttaataaggcttctgaaagtg

SEQ ID NO: 248483 - DNA, 283 bp, Unknown
  Bacterial polypeptide expressing nucleotide sequence isolated from the Sargasso Sea
atgaaaaaatttataatctcaattgatgctgggactacttctaatcgatcaatattatttgacttgaaaggcaaaccagttttttcttcacaaaaagaatttacacagtattttcctaaaagtggttgggttgagcataatccagaagagatttggagaacaactttaaaaactttaaaagatgttattcaaagagcaaaaagattaagaggtgaaattttaagtataggtatcacaaatcaaagagaaactactgttttgtgggacaaaaaaacaggtaagc

SEQ ID NO: 248484 - DNA, 708 bp, Unknown
  Bacterial polypeptide expressing nucleotide sequence isolated from the Sargasso Sea
aacaacaaagactgccttaaatgatttatatcaatcagaaattgcaaaaaaacataacattagaggaatagggattacaaatcagagagagacaactatcctatgggataaaaaatccggaaaaccactttacaatgcaattgtttggcaagatagaagaacttctgatttttgtaagtctttggtaaaacaaggtttagaagaaactgtgatgaataagtctgggttagtaattgacccctactttagtgcgacaaaaattaaatggattttagataatgttccagaagcaagatcaaaagctgaaaataatgaaatctgttttggaactgtggatagttttttattatggaaattaactggtggaaaagttcatgcaacagatgctacaaatgcttcaagaacaagtctttacaatatagaaagtcttgaatgggataatgaattacttaagatttttgatgttccaaaatccttgatgccagacgttatggattcaaatagccattttggtgatacttcaaatgatataatgaattttgaacttccagttttatccatattaggtgaccagcaagctgcagctgttgggcaagcttgctttaagcctggaagcattaaatcgacctatggaacaggttgttttgttattatcaattcaggaagtaaaattatcaaatctaattctagattacttggtacaatttg

SEQ ID NO: 248485 - DNA, 829 bp, Unknown
  Bacterial polypeptide expressing nucleotide sequence isolated from the Sargasso Sea
gatcgtgatttaaatgttattcattctcagcaaaaggagtattcattaaagtatccaaacgatggctgggtcgagatcgagcctgatgagctaatggcttcagttcacaatactcttgatccagtaattgaggcttgctcagaaattaccgctctcggaattacgaaccaaagagaaacaactctagtttgggacgcctcgtctggcaaaccaatctataacgcaattgtttggcaagatcgaaggactgcacaggattgtatgagattaaaaaaagacgggcaagaggaaataataaaaaacaagacaggccttttgcttgatccatatttttcggcaacaaagatttcttggattctggataatgttgatggggcgagaaaaaaagccataaatggcgagctaagatttggaacagtagatacttatttgttatggcaattatcagatggagcaatatataaaactgatttaacaaatgcatcaagaaccaacttatttaatattcattcaaaagtttgggatcaagaactgttggatatttttaatattccatcttcaatgcttccagaagttcattcatctgactccgtttttggagagatttctagaaagaatataaagataatgatttcaggagttataggagaccagcaaagcgctctagttgggcaaaaatgttttgaacctggtcaaatgaaagcaacttttggaacaggttgctttttaatggttaacaccggcgaaaaatctaatccttcctcctcgggcttactaaatacaatagggtatggtatttctaatgaaaatccatatgctttagagggta

SEQ ID NO: 248486 - DNA, 805 bp, Unknown
  Bacterial polypeptide expressing nucleotide sequence isolated from the Sargasso Sea
ttcggacagatccgcgagggactccccttcgcgggactgccgatccaggcgctgctgggggatcagcaggccgccacgctggggcagctctgcctcgaacctggtgaaggcaagtgcacctacggcacgggagccttcctggtgatcaataccggcgagcgcatccgtcgttccgatgccggcctgctcagcaccctgggctggacggacgccgccgggacacccacgtactgcctcgaggggagcctgttcaatgcgggcaccgtcgtccagtggctgcgggacggccttcagatcatcgacagcgctgatgaagtgaaccgcctggccatggaggtgcccgattccggcggcgtgatgcttgtgccggcattcaccggctgggggactccgcactgggacccgcaggcccggggcctgatggtgggtctgacccgcgacagcagccgtggccacatcgcccgggccgctctagaaggcatcgcgctctccgtggcgaccctggtggagctggcggagaacgcccttggcaaaagcctcggggagctggcggtggatggaggagcagccgcctccgatccgctgctgcaggcccaggccgacagcaccgggctgacggtgcggcggcctgccagcctggagagcactgcccgcggagtcgccctgttcgctggtcttcaggccggcgtggtgacggacctgcacgatcttgctcagcagcgcagtgagggagccgatcgattcgagccgcagatcgacacatccgcccgcacggcctggcgacgtcgctggaatgacgccgtga

SEQ ID NO: 248487 - DNA, 768 bp, Unknown
  Bacterial polypeptide expressing nucleotide sequence isolated from the Sargasso Sea
tttgaaaaaatttattgtctccattgatcagggaacgacctcatcgagagctgttttatttgacactaaaggtaacattaaatttatttcacaatatgaatttaaacaatactttcctagaaatggctgggttgagcataatccaaatgaaatttggtccacaactattaaagcattaaaacaagtaattaaaacagctaaaagtttaaaaggtcatatacttacaattggaattacgaatcaaagagaaactacaattttgtggaataaaaaaactggaaaacctatttataatgcaatcgtttggcaagatagaagaactcaggaatattgtaaatctataaagaataaaaattttgaaaatacttttagaaaaaaaacaggattatttatagatccctatttttctgccactaaaattaaatggattttagataatgtaaaagtttcaaaaaagttaataaaaacaaataatttattgtttggtacagtagacactttcttaatctggaaattaaccaaaggtaaacagcatttaactgaagcaaccaatgcaagcagaaccatgttgtttaacattaataacaataaatgggataatgaaattttacagaaattaaaaattccaaggagcatcttgccagaggtaaaaaattctgcagataattttggaaaaacagataagagagttacaggaaaagaaataccaatttcagccgttttaggagatcaaacagcagctgctgtaggacaagcttgttttgaaaa

SEQ ID NO: 248488 - DNA, 958 bp, Unknown
  Bacterial polypeptide expressing nucleotide sequence isolated from the Sargasso Sea
aataaaataaagttaaatcaaattatctctattggcattaccaatcaaagagaaacaactgtattatgggataaaattactgggaaacctgtatataaagcaatcgtatggcaagatagaagaacagctgactactgtaagagattgaagttaaaaaaaatagataaaaaaattcaaaaaattacaggattgttattagatccatatttttcagctacaaaaattaactggatattaaaaaatgttgttaacaaaaaaaaacttcaatataaaaatattttatttggaactattgatacgtggctactctggaaactaactgaaggtaaatcacatttaactgatattacaaatgcttcaagaactatgctgtatgatgctaataaagagcgatggtctgaagaacttttaaaactttttaagattgataaaaatattttgcctgaggtaaaagaaaatgcatataattttggaacaaccaaattatttggaggagaaatagaaataggtggaatggctggggatcaacaagcggcaactataggtcaggcttgttttaatgcagggcaatcaaaaagcacatatggtacaggatgttttttattaatgaatataggtagtaaatttaaactttcttcaaataaacttttaacaacagttgcttttaaaattcatggaaaaaaaatgttttgttatgaaggcagtatatttgtagctggatcagcaattcaatggcttagagacaacatgatgttttttaaagagtctaaagaaactgataaaatatattctaaagcaaataaatatgaaaatgtaattgttgtccctgctctcactggtcttggagcacctcactggcaaccaaatacaaggggcgcaatatttggcttaaccagaaatacctccaaagcagatattgtaaaagcaactcttgatagccttgcatttcaaactagag

SEQ ID NO: 248489 - DNA, 868 bp, Unknown
  Bacterial polypeptide expressing nucleotide sequence isolated from the Sargasso Sea
agactaacaaatggaagggtccatgcaacagacgctacgaacgcgtccagaactatgctttatgacatcgaaaaagatgagtggtcaaaagatctttgtgatttgatgggaataccaaagcggatgctacctcgagttctgaattcagcagatgattatggtatgacttgcccatcgatctttggtgtggaaattccaattaatggaatagctggggatcagcatgccgcaactattggacaggcatgtttcgaaccaggaatggttaagtcaacatacggcactggttgttttgctatggtaaacactggaaaaaagctaagaaggtcccgtaaaaatctgttaagtactatagcctacaaactagaaggtaagatcacatatgcacttgaaggatcaatttttgtagctggagcggttgtacaatggttgcgtgatgggatacaaattattgatcaggcaaaacagtcaggagaaatagctgtatcagctgatccgtcgcaaaggttatatttggttccagcttttactgggcttggagcaccatactgggactctgaggcaaggggtgctatatttggcttaactcggaattctggaagagctgaaatcagtagagctgcattagaaagtgtaggttttcaaacacttgatctattagaagcgatgaaggctgatatcccaggaattaaagaatcaattttaagagttgatggaggaatgagtgcatctaattggactatgcagtttatttccgatatcctggggtccccagttgacagaccaaaaaaccttgaaacgaccgctttaggcgctgcctggttggcaggcatgcacttaaatttttatcccagtatgtctgaatttt

SEQ ID NO: 248490 - DNA, 798 bp, Unknown
  Bacterial polypeptide expressing nucleotide sequence isolated from the Sargasso Sea
cttcgaaaagacgggcatgaaaaaagagttactgaaattacgggcctgcttttagatccttacttttcttcaacaaaattagcgtggattttggataatgtagatggtgcaagatcaaaagcagaaatgggcagtctactgtttgggaccgtggacagttacttaatttggcatctgactggacgacaaagtcatgtcaccgatgcaaccaatgccgcaaggacaatgctctatgatatcagaaacggtgcttggagcacagagatgtgtgatatgttaaatataccgattaaaatgttgcccgaagtgtgtgactgcgctgcagattttggaatgacatcaccagatttttttggagtttctatctctgttacgggtgtcgctggggatcaacatgctgcaacacttggacaagcttgtttcgagcctggaatgatgaaatcaacttatggtacgggttgttttgcgctgcttaacaccggtgatgcaatggtcagttcgcataaccgaatgttaaccacaataggctaccaacttgatggcaaaacaacctacgcgcttgaaggatctatctttattgcgggagctgttgtccagtggttgagagatggattgaaaatattggctaaagcctctgaatcgggtgatttggcaaaattatcagataatagtcaaaacctaattttagttcctgcatttacgggtttgggtgcgccatattggaatgctgagtgtcggggtgctgtatatgggttgacgcgaaattctgggccggctgagttttctagggcggcttta

SEQ ID NO: 248491 - DNA, 837 bp, Unknown
  Bacterial polypeptide expressing nucleotide sequence isolated from the Sargasso Sea
caattattatttggaactattgattgttttttggtttggagacttacaaaaggtaaagtccatgcaacagatgctacaaatgcgagtagaacaatgatatttaatatatcttctaacaaatgggataaaagtattttaaaattgctgaaaattaaagaaaatatccttcctgaagttaaagattgtgctgatgattacggtcaaacacacccatcaataactggaaaatctattccaattacgggagtagttggggatcaacaatctgcaacaattggtcaatgttgttttgaaccaggttctcttaaaagcacatatggaactggcgcatttgtattgcttaacacaggaaataaaaaaatatattctaaaaatagattacttacaactatcggttatagaattaacggtaaaactacttatgctatggagggttcaatttttattgcaggtgcaggagttcaatggttaagagatagaatgaaattttttaaaaaagcaccagaaacagaaaaaattgtcaaatcgttgaaaagcaataatggaatttatttagttccagcatttactggtttaggagcgccatattggaacgctaactcaagaggggttttaagtggaataaccagagacacaaatcctaaagagattgttagagcaaccatagaagctgtggcgtatcaaacttatgatttgttcgaagcaatgaaacatgacggattaagacctagaatagtaaaagttgacggaggcatggttatgaacaattggttttctcaatttttatctgatgtagtcaatgtgaaagtgcttagaccaaaagtacaagaaacaaca

SEQ ID NO: 248492 - DNA, 748 bp, Unknown
  Bacterial polypeptide expressing nucleotide sequence isolated from the Sargasso Sea
tgcattatttggacaatatggatacaatctaaatgatacaaagtgtacttatggaacaggttgcttcattttagcaaatacaggcaagattaaagttgatagtaataatggtttgcttacaactatatcttgtgataaaaatggaaaacctacatatgctattgaaggatctgtttttataggtggtgcagttatacagtggttgcgagatgagctgaagctaattaaaaatgcacaagaaactgaaggaatagctgaaaaactaactggaaacgacggtgtgtatatagttcctgcattttctggattaggagctccctattgggacatggagtctaaagggatcataacagggctaacaagaggaactaatgctagtcatataattagggcagcattagaatcaatagcttttcaagtaaatgatatgatcaaatgcttaaatagtgacttaaagtgtcaaataaaaacacttaaagttgatggaggagcgactctaaacagatttttaatgcagttccaatctaatatatcaaatataaatgtacaaaaaccaaataatatcgagtcaacagcattaggagcagcattgctatcaggtataggatcaaaatattggattgatatagatgatttgaaaaaacaaaaaaaagatacagtatacctacctaaaatgaacgatacctcaagagaaaaaatattacaagaatggaagcaggctgttgaaaaatgcttacagtccaattaa

SEQ ID NO: 248493 - DNA, 334 bp, Unknown
  Bacterial polypeptide expressing nucleotide sequence isolated from the Sargasso Sea
aatgtcttttattttagcaatcgatcaaggcacgacttctagtcggtcaattatttttgatgaaaacctcaaaataattggaaccgcacaagaagaatttactcagcattttcctcacagcggttgggtcgaacataatccacaagatttattaattaccaccatcgatacttgcaaatcagcattaaaccaaaagtctattgatccaaaaaaaatagcggcgattggtattaccaaccagcgcgaaacgaccttagtttgggataaaaataaaggtgagccagtttataatgcaattgtatggcaggatcgaagaactgcaacttattgtgag

SEQ ID NO: 248494 - DNA, 649 bp, Unknown
  Bacterial polypeptide expressing nucleotide sequence isolated from the Sargasso Sea
aatgaatgaaaataacctgttagttggaactattgatacttggcttatttggaattttacaaaaggtgaatgtcattacactgatgttacaaatgcatcaagaacaatgctttataatataaatgaagattgttgggatgatgaattattaaaaatttttaatattaacaaaaatattttacctgacgtaaaaaattgcgttgatgattttggatcaatagactctagtttatttggagaaaaaatttcgataggcggtgtagctggtgatcaacaggcagcaacaattggacaggcttgtttcaaagaaggaatggttaaatcgacttatggcacaggttgttttttattaatgaatactggaaataaatttatagagtccaagtccaaattattgtccactaaagcttataatatatttgataaaaaagatttcgctttagagggcagcatctttaatgcgggcactgttgttcaatggatgcgtgatgaaatgaattttattaatgatgcaagcaaggttgaagaactcgcaaataatagcactaacgaaatacaattcattcctgcttttactggtttgggtgctccttattggaactctgatgtaaggggtcaaattacaggaattactagagatacattctaa

SEQ ID NO: 248495 - DNA, 529 bp, Unknown
  Bacterial polypeptide expressing nucleotide sequence isolated from the Sargasso Sea
ataaagtcttcttcagaaatgaaaaaagtagctttgtctgtaggtgataccaatggagtatatcttgttcctgccttttcggggttaggtgcacctcattgggatcctcatgctaaagggattatccttggcttaacgcgtggaacaaatcgtggacacattgctcgagcagcactggagtccattgcctatcagagccttgatttgttgaaggcaatggaatctgattctaaaattcgattgacgcaattacgtgttgatggtggtgcctgtgttaataatcttctattgcaattccagaccgatttaattagagtgcctttaattagaccgcaaactatagaaactacagcgctgggggcagcctatttagcgggcctttcagttggtttttggaaaaacaaggaagaaatttcactccaatggagatcagaaaggatgtttcatcctgttaaagcaaaaaatgaaatggaatctttatatcttgggtggcaaaacgcagtagaaatatccaaatcaaaaaattaaa

SEQ ID NO: 248496 - DNA, 890 bp, Unknown
  Bacterial polypeptide expressing nucleotide sequence isolated from the Sargasso Sea
acaaatgcaagcaggacaatgatttataatataagttcaaataaatgggatgagacgattttaaatttattaaagatcaaaaaacatattcttcctgaagtaaaagattgtgccgatgattacggtcaaactcactcatcaataacaggtaagtccataccaataaatggcgtagtaggtgatcagcaatcagctactattggtcaatgttgtttcgaaccagggtctcttaaaagtacgtatggtacgggagcatttgttttacttaatacaggtagtaaaaagatttattcaaaaaacagattgttaactacaatagcatatagaattaatggtaagactacatacgctatggaaggatcaatttttatagctggcgcaggcgttcaatggctaagagatagaatgaagttttttaaaaaagctccggagacagaaaaaatagtaaagtctttaaaagataataataatatttatctagtaccagcttttactggactaggagctccatactgggatgctaatgcaagaggcgtattaagtggcattacacgagataccagccccaaggaaatagtaagagctactatagaagcagttgcttaccaaacctatgacttattcgaagcgatgaaacatgatggattaagaccaaaaattgtaaaagttgatggaggaatggtaatgaacaattggttttcacaatttttatctgacattgtaaatgtaaaagttcttagacctacagttcaagaaacgaccgctttgggagctgcttttatggcaggtttacaaatcggtgtttacaaatctttaaaagatatttctaaaaattggcacttagataaaaaattctcacctaaaatggaaaaatcgtataagaaattaac

SEQ ID NO: 248497 - DNA, 548 bp, Unknown
  Bacterial polypeptide expressing nucleotide sequence isolated from the Sargasso Sea
tatgtcattaagtggttatattctctcaatagatcaagggacaactagttcaagagccttaattttgaatgaattaggccaaatacttgctcaaaaaaatattgagtttaagcaatattatcctgaaaacggatgggttgagcatgatccagttgaaatattaaaaacaacaacagacgcaattaagcaagttttagcagagcttaaaataaatgcacaagatgttgtcgtagcaggtataaccaaccaaagggaaacaattgtcgcttgggataaattgactggcaaaccaatttataatgccattgtttggcaggatagacgtacagaaaattattgtaatgaactaaaagaaaaaaatctcacagacaccataaaatcaaaaacaggattagtcattgatccatattttactgctacaaaaattaagtggattttagaaaatattgatgaagcaaaagaatgtctcaacaaaggaaacttattagttggaacaatcgatacatggttgatatggaattttacaaaaagatcagaacattctaccg

SEQ ID NO: 248498 - DNA, 417 bp, Unknown
  Bacterial polypeptide expressing nucleotide sequence isolated from the Sargasso Sea
aatgaaaaaatttatcatttctattgatgcaggaacaacatctaatagatcaattttatttgatttaaaagggagaccaatattttcttcacaaaaagaatttacacaatattttccaaaaagtggatgggttgagcataatccagatgaaatttggaaaacaacaataaaaactttaaaagatgtaatacaaaaagctaaacgcttaaaaggtaaaattttaagcatcggaatcaccaatcaaagagagactactgttctatgggataaaaaaactggaaaacctgtttataaagctattgtttggcaagatagaagaaccgaagaattttgtaaaaagcttagaaagcaaaacaaggatacaatggtttttaataaaactggcctactgattgactcatatttttctggaacaaa

SEQ ID NO: 248499 - DNA, 919 bp, Unknown
  Bacterial polypeptide expressing nucleotide sequence isolated from the Sargasso Sea
aatccagatgaaatttggaggacaactttaaaaaccttacaggatgttattcaaaaagcaaaaagactaaaaggtgaaattttaagtattggtatcactaatcaaagagaaaccacggttttgtgggataaaaaaacaggtaagccagtttacaatgcaattgtttggcaagatcgaagacaagaagatttttgtaaaaaattaagaaaacaaaacaaagatacaatgatcttcaataaaacaggtcttttaattgactcttatttttcgggaacgaaaattaaatggatattagataatgtttctaaagctaaagtactaatgagcaaaaaacaattattgtttggtactattgatagctttttaatttggagattaactcgaggaaaaacacatgcaactgatgctacaaatgcaagtaggacaatgatttataatatcagctcaaatcaatgggatgatacgattttaaatttattaaagatcaaaaaacatattcttcctgaagtaaaagattgtgctgatgattacggtaaaactcattcatcgatcacaggaaagtctataccaataaatggcgtggtaggggatcaacaatcagctactattggtcaatgttgtttcgaaccaggatctctaaaaagcacgtatggtacgggagcatttgttttacttaatacaggaagtaaaaaaatttattcaaaaaatagattgttaactacaattgcatatagaattaaaggaaagacaacatacgcaatggaaggatcaatatttattgctggagcaggggtccaatggttaagagatagaatgaaattttttaaaaaagctcctgaaacagaaaaaatagtaaagtcactaaataataataatgatatttatttagttcccggcttttactggattaggagcgcct

SEQ ID NO: 248500 - DNA, 812 bp, Unknown
  Bacterial polypeptide expressing nucleotide sequence isolated from the Sargasso Sea
actacttctaatagatcgattttattcgatttaaaaggcaaacctgtttattcatctcaaaaagaattcactcaatattttcctaaaagtggatgggtagagcacgacccagatgaaatttggaagacaactattaaaacattaaaggatgtaattactaaagccaaaaaattaagaggaaaaattttaagcatcggtattacaaatcaaagagaaacaacagttctatgggatagcaaaacaggcaaacctgtttacaaggcaattgtttggcaagataggagacaagaagagttttgtaagaaattgagaaaacaaaataaagatacaatgatttttaataagaccggtttactaattgactcatatttttctggaacaaaaataaaatggatactagacaatattccaagagcaagacaattaatgaataaaaaacaattgttatttggaactattgacagttttttaatttggaaacttactaaagggaaagtccacgctactgatgctaccaatgctagtagaacaatgatttataatatttcttcaaataaatgggatgatacaatcttaaatttactaaaaattaaaaaacatattcttccagaagttaaagattgtgctgatgattatggtcaaacagattcttcagttactggtatttcaatacctattaatggagtggtaggtgatcaacaatctgcaactattggtcaatgttgttttgaaccaggttcattaaaaagcacatatggaacaggagcttttgttttattaaatacaggaaataaaaaaatttattccaaaaa

SEQ ID NO: 248501 - DNA, 779 bp, Unknown
  Bacterial polypeptide expressing nucleotide sequence isolated from the Sargasso Sea
tcaaggaacgacctcatcaagagttgttttatttgacactaaggggaacattaaatttatttcacaatatgaatttaaacaatactttcctaaaaatggttgggtagagcataatccaaatgaaatttggtcaacaacacttaaagcattaaaacaagtaattaaaaaagctataagtttgaaaggtcatgtaattaccattggaattacaaatcaaagagaaactacaattttgtggaataaaaaaaccggaaaacctatttataatgcaatcgtttggcaagatagaagaacacaggaatattgtaaatctctaaagaataaaaattatgaaaaaactttcagaaaaaaaactggattatttatagatccttatttttctgctactaaaataaaatggattttagataatgtaaaaatttcaaaaaagttacttaaaactaataatttattatttggcacagtagataccttcttaatctggaaattaaccaaaggtaaacagcatttaaccgaagctaccaatgcaagtagaacaatgttgtttaatattaataacaataaatgggataatgaaatattacagaaattaaaaattccaaagggtatattgcccgaggtaaaaaattccgcagataattttggaaaaacagacatgagagttacaggaaaagaaatacctatttcagctgttttaggagatcaacaagcagctgctgtaggacaagcttgttttgaaaaaggatctataaaaagtacttatggcactggtgcattta

SEQ ID NO: 248502 - DNA, 376 bp, Unknown
  Bacterial polypeptide expressing nucleotide sequence isolated from the Sargasso Sea
atgaagtatattcttgccatcgatcagggtacaacgtcgtccagagcaatactttttgatgataagttgaatatggcctttgttgctcaggaagaattcactcagcattttcctaagcctggttgggttgaacataatcctgatgatatttggaattctgtcctctcagtttgtaaaaatgttatcagacaggctggaattacaggaaacgatattttatcaataggaatatcaaaccagcgtgagacaacactgatttggaataagaaaacaggtaagcctcttcaaaatgcaatcgtctggcaggataggcgaacatcagatatttgttatgagttaaggactgatggtcatcaagagacgataacaaaaatta

SEQ ID NO: 248503 - DNA, 664 bp, Unknown
  Bacterial polypeptide expressing nucleotide sequence isolated from the Sargasso Sea
atgaaatatttcggcgctattgatcagggaacaacaagttcaagatttatagtttttgatgaaactggttcaatagtaaagcaacaccaacaagagtttacccagtaccttcctgatgaggtctctgttgagcatgatcataatgatatatgggaatcagtacttaattgtattatggaagtaaacaaagagttttcaattgaccagttagatagtattggtattacaaatcaaagagaaacaacattagcttggagaaaatcaacagcagagccgctacataatgcattagtctggcaagacactagaacacaaaatatttgtgatgaacttaaaggtttaactgaattagaggaatcgtttcataagacaggattaccaattgctacatatttttcattatccaaaattttatggttattgagaaatgttaaggaagtaaaacaagcacgtgaagataatgatctatcctttggaacaattgatagttggttgctttttaagcttactggagaacacgtaacagatgtaacaaatgcaagcagaactttgttgatggatttggaaacattgaaatggatgaaagacatattaatgactttagatattccagaaagttcactgccagagataaaaccatctctttataatttcggaacataat

SEQ ID NO: 248504 - DNA, 834 bp, Unknown
  Bacterial polypeptide expressing nucleotide sequence isolated from the Sargasso Sea
aaaggaaaaccgatatattcatcacaacaggaatttacacaacactttcccaaaagtggttgggtagaacataatccagaagaaatttggaacacaactaaaaaaactcttaaaaaagttattgccaaagttagagacttcagaggaaacgttttggcaatcggaataacaaatcaaagagaaactacagttctatgggataaaaaaactggtaaacctgtttacaatgctattgtctggcaagataggagaacagaagattattgtaaaaagctgagaaaacaaaacaaagaaacagtaatttttaataaaacaggacttctaattgattcatacttttctggaaccaaaattaaatggatattggacaacgtacctcttgctagaaagttgatgaatagtaaaagacttctttttggaactatagatagttttttaatctggagacttaccaaaggaaaagttcatgctacagatgccactaatgcaagcagaactatgatttacaatattacctcaaataaatgggatgatagtattttaaaaatattaaaaattaaaaaacatattcttccagaagtaaaaaattgtgcagatgattatggtagcacccactcttcaattacgggtaaacctattcctataacaggtgttgttggagatcaacaatctgccactataggacaatgctgctttgagccgggttctttaaaaagtacttacggaactggagcatttattttattaaacactggatcaagaaaaatttattcaaaaaatagattgcttacaacgatctgttatagattaaatggcaaaaccacttatgctctg

SEQ ID NO: 248505 - DNA, 742 bp, Unknown
  Bacterial polypeptide expressing nucleotide sequence isolated from the Sargasso Sea
atgtcgaagtatctgcttagctttgatcagggcacaaccagtagtcgcgccatattatttgggctgtcgggtgaagtgattgcgcagtcacaggaagaatttgaacagcattttccgaacccaggttgggtcgagcatgcgccttcagatctttggcaaacctctctgaagtgcgcgcgcgatgttcttaagcaagtgggtgctaaagcctctgatattgtttcgattggtattactaatcaacgggagacaacgctgatctgggacaggcagactggcgaacctgtgtatcctgctattgtctggcaagacagacgaaccgcggatctttgtcgtcagtgggaaggccagaaaaatgagatatcagcgcgcaccggacttttgctggatccttatttttcggccaccaaaatccgctggatactggacaacgttgagggggccagagcgcgcgctgaagcgggtgagctggcgtttggcacggtcgatacctggttgatctggcagctgacaggcgggcgctctcacttaacggacgcaaccaatgcctgtcgcaccatgctctataacatccatgaagagtgctgggatgccgatctgctgtccttgtttgatatcccagcgccactgcttcctgaggttcaggacagcgcatcagactttggcaaaactctgagcggctggttaggtggagcggttcagattggcggcgtggccggtgatcagcaggctgctttgatcg

SEQ ID NO: 248506 - DNA, 559 bp, Unknown
  Bacterial polypeptide expressing nucleotide sequence isolated from the Sargasso Sea
atgaaaaattatttggcaattgatcaaggcactactagctcaagatctatactatttaatagtaaattagaaaagattcacgattcacaaaaagaatatgatctgtcatatccagacgatggctgggtagagcttaatcctgatgacgttttaatgacggtaaaggagacattgcaaaatgttctaaataaatgtgctgaagttgaagcctgtggcataacaaatcaacgagaaacaacaatcgtttggtctagggaaacaggggagcctatatatcctggaattgtttggcaggacagaagaacaagttcgtactgtgataaccttaaatcagaaggacatgaggaaattattaagtgcaaaacaggcttagttttagatccttatttttcagccacaaaaataaaatggattttagataatgtagatggagcgagagagcaagcagaagaaggaaagcttgcatttggaactatagattcatatctaatttataaactatctattgaaaaaaatcatttcactgatgtaactaatgcctcaaagaactttgttattt

SEQ ID NO: 248507 - DNA, 663 bp, Unknown
  Bacterial polypeptide expressing nucleotide sequence isolated from the Sargasso Sea
tatgtcattaagtggttatattctctcaatagatcaagggacaactagttcaagagccttaattttgaatgaattaggccaaatacttgctcaaaaaaatattgagtttaagcaatattatcctgaaaacggatgggttgagcatgatccagttgaaatattaaaaacaacaacagacgcgatcaagcaagttttagcagagcttaaaataaatgcacaagatgttgtcgtagcaggcataaccaaccaaagggaaacaattgtcgcttgggataaattgactggcaaaccaatttacaatgccattgtttggcaggatagacggacagaaaattattgtaatgaactaaaagaaaaaaatttcatagacaccataaaatcaaaaacgggattagtcattgatccatatttttctgctacaaaaattaagtggattatagaaaatattgaggaagcaaaagaatgtctcaacaaaggggacttattagttggaacaatcgatacatggttgatatggaattttacaaaagggtcagaacattttaccgatgttacaaatgcatccagaacaatgctttacaatattgtagaaaatgaatgggatgatgagctattagatatatttgcattaccaaagagtatacttcctcatgttaaaaactc

SEQ ID NO: 248508 - DNA, 755 bp, Unknown
  Bacterial polypeptide expressing nucleotide sequence isolated from the Sargasso Sea
attaaaaggaaaaatactaacgatcggcataacaaaccaaagagagacaacaattctttgggataaaaaaactggcaaacatgtttataatgcaattgtgtggcaagatagaagaactgcagaattttgtaaaaaatatagaactgaaaaaaaagaaaagataataaacaaaaaaactggattattaattgatccttatttttctggaacaaaaatcaaatggatattagaaaatgttcctaaagcaaaaaaattagcaaaaaaaaacagactcctttttgggactgttgacacttttttaatttggaaacttaccaagggcaaagtgcacgcaacagatgctactaatgcaagtagaacaatgttatataatataactaccaataaatgggacaaaagtattttatcaaatttgaaaattccaaaaaatattttaccaaaagttaaaaattcttctgatgattttggttttacttccaaatcaattactggaatatcttatggtataaatggagttgtcggagatcaacaagcagcagcgtttggacagtcttgttttcaaagaggatcggtaaaaagcacttatggaactggtgcatttgtattaatgaatactggaaataaaaaaatatactcaaaaaataaattattaactacaattttttataaacttaaaggtaagacaacctacgctcttgaaggttcgatttttattgcaggagcaggagttcaatggttaagagataaattaaaaa

SEQ ID NO: 248509 - DNA, 875 bp, Unknown
  Bacterial polypeptide expressing nucleotide sequence isolated from the Sargasso Sea
aatgactgacctcatccttgccctggaccagggcacttccagttcacgcagcatcctttttacggaaaaggctgaaatccgggcggttgcctcggaacccctggagtgccgttttccgaattcaggttgggtggaacaggacgcagaagcaatctgggaaacccagcgaagtaccatcgtcaaggttctggatcaggcgggtatcggcctttccgaagtttccgccataggaatcaccaaccagcgggaatccaccatcgcctggaatcgtgaaaccggagaagcgctttgccccgcgatcaactggcaatgccgacgcactgctgggttttgtgatgagttgaaagaggagggttttgatgaattgatccggaaccgaaccggcttggtcaccgatccatatttttcaggaacgaagatgcactggattttccagaatgttcctgaagctgcgaaccttgcacgccagggaaaactctgtttcggtaccgtcgacagttggctgatctggaaactgagtggaggtaaaactcatgccatcgaaatcagcaatgcttcccgaaccctcgtttttgacatccaaaaatgcgaatgggactccgagatcctttcacgattccgcattcccccggaatctctgcctgaggtcgttccttctagcggggtgattgccgaagtagacgaatccctttttagaggctccgcgccgattgccggtgccgcaggagaccaacaggctgctttgttcggacaggcatgtttttctccagggatggccaaaaacacttacggaaccggatgcttcatgatttccaacaccgggaagcatctggtccgttcccaaaacggactgctcaccaccatcggctggaagc

SEQ ID NO: 248510 - DNA, 819 bp, Unknown
  Bacterial polypeptide expressing nucleotide sequence isolated from the Sargasso Sea
accctgccggacctgctgggcggcgcgatcgccgtgcgcggcatcgccggcgaccagcaggccgccaccatcggccaggcctgcttcacgccgggcatgatgaagtcgacctacggcaccggctgcttcgccctgctcaacaccggcgcgaccccggtggcatcgaagaacaagcttctgaccacggtcgcctatcagctcgacggccagcgcacctacgcgctcgaaggctcgatcttcgtcgccggctccgcagtgcagtggctgcgtgacgggctcggcatcatcaggcaggctgccgacaccggcccgctggccgaccagtcggatcccatgcaggcggtctatctggtaccggctttcgtcggcatgggcgcgccgtactggaatccgcgggtgcgaggcgcgctgttcgggctgacccgcaacaccggtccggcggagctcgcgcacgctgcgctcgagagcgtctgctaccagacctatgacctatgggcggcgatgcgcgccgactggcccgaggcgcaggccgccaacaccgtgctgcgggtcgacggcggcatgacggcgtccgactggaccatgcagcgtctcgccgacctgctcgacgcgccggtcgaccggccggtgatccaggagaccacggcgctcggcgccgcctatctcgccggcctcggcgccgggctctatccggagcccaagcgcttcgccgacaactggcggctcgagcatcgcttcaagcccaacatgagcgaggccacccggtcgcgcaaattgcagggctggagccgcgccgtgcagggcctgctggccagcgat

SEQ ID NO: 248511 - DNA, 284 bp, Unknown
  Bacterial polypeptide expressing nucleotide sequence isolated from the Sargasso Sea
aatggcggattttattatatctatcgatcaaggtactacttcaagcagggctattttatttaacctaaaaggtaaacctatatattcttctcaaaaagagtttactcaatattttcctaaaagtggttgggtagaacataatccagaagaaatttggagcacgactaaaaaaactcttaagaaggttatagataaagttaaagattttaaaggtaatattttagctatcggcataacaaatcaaagagaaacaactgttctatgggataagaaaactggtaaga

SEQ ID NO: 248512 - DNA, 745 bp, Unknown
  Bacterial polypeptide expressing nucleotide sequence isolated from the Sargasso Sea
ttaaaagcaaaaagattaaaaggaaaaatattaactattgggattactaatcaaagagaaactacagttctatgggataaaaaaactggcaaaactgtttatagagctattgtttggcaagaccgaagacaagcagattattgtaaaaaattaaaaaatcaaaataaagaaacccttatttttaataaaactggattaccaatcgattcttacttctcagggactaaaataaaatggatattagacaatgttccattagctaaaaaattaatgaataaaaaacaacttaagtttggaactatagatagttttttaatttggagattaactaaaggtaagacgcacgcaacagatgctaccaatgctagtagaacaatgatttataatatttccacaaataaatgggatgatacaattttaaagatattaaaaataaaaaaacatattcttcctgatgttaaagactgtgctgataactacggctcaactcatccttcaattacaggcaaagcgattccaattactggtgtcgttggtgatcaacaatctgctgctataggtcaatgttgttttgaaccgggttcattaaaaagtacttatggcacaggggcattcgtattattaaacacaggatataaaaaaatatactctaaaaatagattattaacgactattgcttatagaattaaaggcaaaacaacttatgcgatggagggatctatctttatagctggagctggagttc

SEQ ID NO: 248513 - DNA, 766 bp, Unknown
  Bacterial polypeptide expressing nucleotide sequence isolated from the Sargasso Sea
atgaaaaaatttatagtatcaattgatcaaggaacgacctcatcaagggtggttttgtttgatactaaaggcaacattcaatttatttcgcaatatgaatttaaacaatattttccaagaaatggctgggttgaacataatccaaatgaaatttggttgacaacaattaaagcattaaaacaagtaattaaaaaagctataagcttgaaaggtcatatacttacaattggaataacaaatcaaagagaaacaacaattttgtggaataaaaaaactggtaaaccaatttataacgcaatcgtttggcaagatagaagaacgcaggaatattgtaaaactctaaagaataaaaattatgaaaatactttcagaaaaaaaactggattatttatagatccttatttttcagccactaaaataaaatggattttagataatgtaaaagtttcaaaaaagctacttaaatcaaataatttattatttggtacagtagacacattcttaatctggaaattaactaaaggtaaacagcatttaactgaggctaccaatgcaagcagaaccatgttgtttaatatcaataacaataaatgggataatgaaattttacaaaaattaaaaattccaaagagtatattgccagaggtaaaaaattctgcagacaattttggaaaaacagataagagaataacagggatagaaatacccatttcagctgttttaggtgatcaacaggcagctgctgttggacaaacttgtttgaaaa

SEQ ID NO: 248514 - DNA, 944 bp, Unknown
  Bacterial polypeptide expressing nucleotide sequence isolated from the Sargasso Sea
gctattttgtttaatttgtctggtaaacctatttatatttctcaaaaagaatttagacaatattttccaaagaatggctgggtagaacataatccaagtgagatttggaacacagtaaaaaaagttttgttagacgtaatagttaaaagtaaaaagttaaaaggtaaaatattatcaattggcataacaaatcagagagaaactactattctatgggataaaaaaacaggaaagcatgtttataatgcaattgtttggcaggatagaagaactgaagaatattgtaagaaaataaaaaaaaaagaaaatttaataagaaaaaaaacaggcttatttattgatccatatttttctgccaccaaaataaagtggatattagaaaatgttccaaaggcaagtaatcttttaaagaaaaaacggttattatttggaactattgatagttttttaatctggaaacttactaagggcaaagttcatgcaacagacgcaactaatgcttcaagaacaatgctttttaatattaataaaaataattgggataatgaaattttaaaaatttttaaaataaataaaagtatattaccaatagtaaaaaactcagcagatgattttggttatactagtaaaaaagttattggcgaaaaaatatctatttcagctgttctaggtgatcaacaagcagcagcatttggtcaagcttgttttgaaaaaggatctgtaaaaagcacatatggcacaggagcttttgtaattatgaatactggtaataaaaaattgatttcaaaaaataaattgctcacaaccatttgctacagattaaataacaagaatacttttgcaatagagggctctatttttgtagctggagctggagttcagtggttaagagataaaattaggttaataagtaacgcttatgaaacagaaaaaattgcaaaatc

SEQ ID NO: 248515 - DNA, 754 bp, Unknown
  Bacterial polypeptide expressing nucleotide sequence isolated from the Sargasso Sea
atgagaaaatttattgtatctattgatcaaggtactacctctagtagagcaattttatttgatttaaaagggaaaccagtttttgtttcacagctagagtttactcaatactttccaaaagatggatgggtagaacacaatccagaagagatttggtctacaactcaaaaagttttaaaaaaagttattcaaaaaagtaaatcacttaaaggaaagattttaacaattggaataacaaaccaaagagaaacaacaattctttgggataagcataccggaaaggctgtttacaatgcaatagtctggcaagatagaagggcagttgaatattgtaataaacttataaaacaaaaaaaagaaacgttaatttataataaaactggattattaatagacgcttatttctcagcaacaaaaattaaatggatcatagataatgttccaaaagcaaaacaatttataaaacaaaaaagattattatttggaacagtagattgctttttactttggagattaacgggaggaaccaatcatttcacagatgcaacaaatgcaagcagaactatgctatttaatatagcaacaaataagtgggacaaacaaatattagatattttaaaaattccaagtcatatacttcctgaggtaaaggatagttctgatgattttggtcacacagacccaaagattacaggagagtcgtattctgttactggaatggtgggagatcaacaatctgcaacaattggacaat

SEQ ID NO: 248516 - DNA, 598 bp, Unknown
  Bacterial polypeptide expressing nucleotide sequence isolated from the Sargasso Sea
tatgaaaaaatttataatttcgattgatcagggaactacttctagtagagctgtattatttgatcttaaaggtaaaccaatatttatttcacaattagaatttacacaatacttcccaaaagacggttgggttgaacataatccagaggaaatttggtcaacaacaaaaaaagtattaataaatgtaattaaaaaaagtaaaagtttaaagggtaaaatcttaacaataggtataactaatcaaagagaaacaaccattctttgggataaacatacaggcaaaccagtttacaatgcaatcgtatggcaagatagaagagcagttgaatactgtaataaacttatcaaacaaaaaaaagaaacaattatttataataaaactggcttgttaatcgatgcatacttttctgcaacaaaaattaaatggataatagacaatgtccctaaggctaaaaaattattaaaacaaaaaagacttttatttggcactgtagattgttttttgttatggagacttacaggaggcacaaatcattcaacagatgcaacaaatgctagccgtacaatgttatttaatattgtaaataataaatgggat

SEQ ID NO: 248517 - DNA, 667 bp, Unknown
  Bacterial polypeptide expressing nucleotide sequence isolated from the Sargasso Sea
aatgaaaaaatttatcatctctatcgatcaaggcaccacttcaagtagagctattttgttcaatttaaaaggtcaatcagtttatgtatctcaaactgaatttacccagtattttccaaaagccggttgggttgagcacaatcctgatgaaatatggaagactacattaaaagtcttaagagatgtaataaatcaaagtaaaaaattaaaaggaaaaattttaactattgggataacaaaccaaagagaaacaacaatattatgggataaaacaacaggcaaaccagtttacaatgctatagtttggcaagatagaagatcttcagaatattgtaaaaaattaataaaacaaaaaaaggaaactataatttacaataaaacaggattgttaattgacgcttatttttcagctacaaaaatcaaatggattatagacaatgtaccgaaagctaaagatttaattaaaaagaaaagattattatttggaactgtagattgtttccttttatggaaattaactaatggagcagatcatgcaactgatgcgacgaacgcaagtagaacaatgttatttaatatttctacaaatgaatgggataaccaaatattaaaaatattaaaaattcctagagaaattttacctatagttaaagattgttcagctgat

SEQ ID NO: 248518 - DNA, 734 bp, Unknown
  Bacterial polypeptide expressing nucleotide sequence isolated from the Sargasso Sea
acaatgttgttttgatccaggttcattgaaaagcacatatggaactggggcatttgttttattaaacacaggtagtcgaaaaatttattcaaaaaatagactcttaactactatagcttaccgaattaaaggaaaaactacatatgcaatggaaggatcaatatttattgcaggagctggcgtacaatggctaagagatagaatgaaattttttaaaaatgcaagcgaaactgaaaagattattaaatctcttaaagacaataaagatgtatatttggttccagcttttactggaatgggagcaccttattggaatcaaaatgcaaggggtgttttaagtggtctgactagagacaccggtcctaaagaaattgttagggctacagttgagtcagtcgcgtatcaaactcatgatttatttgaagctatgaaacatgatggcttaagaccaaaaatagttaaagttgatgggggcatggttatgaataattggtttgcccaatttttatctgatgttgtaaatgtaaaagttttaagaccaaaagtacatgaaactaccgctctaggagcagcatttatggcaggacttaaaattggcgcttataaatctttaaaagatatttctaaaaactggagcttggataagaaattttcccctaaaatgaaaaaaaaatctagaaatttacttcttcatggttggtccaaggcaattaaacgagctttaattaattaat

SEQ ID NO: 248519 - DNA, 628 bp, Unknown
  Bacterial polypeptide expressing nucleotide sequence isolated from the Sargasso Sea
atgtcaaaatttataatctcattagatcagggtaccacgagctctagagctgtcttatttgatgaaaaaggaatatgtatagctattaagcaaaaggagtttcgtcaaatatttcctcaacaagcctgggtagaacacgatcctaaagaaatttgggagactcagcaggcggttcttaatgaaatattagagcttccagaagtgaaacaaggcaaggttatttccataggtgttacaaaccaaagagagacgactgttatttggaatcgactcacgggtgagcccatatacaatgctttggtttggcaagacaagaggacagcacctatttgtgaggatttacgtgaacaaggtcttgtagattattgtaagaaaaataccggattggtgattgactcctatttttcaggaacgaaaattaaatggattttagatcatatagaaggggctagagaaaaggctaagaagggagaattatgctttggaacgattgatacttggttgctatggaacttaacaaaaggaagcgctcatgctaccgattattctaatgcttctcgtactttaatatacaatataagtgatttagcctgggatgaaaaaatgttagaagcacttcaaattccaa

SEQ ID NO: 248520 - DNA, 772 bp, Unknown
  Bacterial polypeptide expressing nucleotide sequence isolated from the Sargasso Sea
taaagcagaaataatttacaccgctcaaaaggaaataggcctcatcttgcctcatgacggctacgtagaacaggatcccaaggaaatatggcaatcagtactatattgtatgaatcaggccttaaaacaggctaagaagcttaaacaggctgttttgagtattggtataaccaatcagcgcgaaactacccttatctggcataagaaaagcggcaaagctatttataatgctattagctggcaagacagccgtactggtgagtcatgcaaaagatattcagcaagaaacaaaagctatattgctaaaaaaactgggctaattctaaatccttatttttctgctaccaaaatcaaatggctaattgaacataagcttaaaggtaaaaatctagataattatgcttttggaactatcgatagttttttagtttatcgtttaactggcggaaaaaaccatgcgactgacactagcaacgcttctagaacattgatttttgacatcaagaaaatcgcctatgatgataagctgctcaaactgtttcacgtgaaaaaatctatgctgccacaggttaaaaattcagttgatgattttgggctcacagataagaacttatttaagcaagaaatacctatttgttcggttataggtgaccaacaagccgcaactataggccattgttgctttaaggcgggtgaagccaaagcgacctatggtaccggttgttttgtgatggttaataccagtaaaaaaatcgttaaatctaagtttaaa

SEQ ID NO: 248521 - DNA, 676 bp, Unknown
  Bacterial polypeptide expressing nucleotide sequence isolated from the Sargasso Sea
atgaaaaaatatattttatcaattgaccagggcactactagttcaagagtaatactttacaataaaaattttaaaaaaattgatactttgcaaaaagaatttaaacaatattttccaaaagatggttgggtagagcatgatgctttagaaatttggagtgatgtaaaaagtttaatatctagaataataaaaaaaaataaaattaaaagtagagatataatttcaattggaattacaaatcagcgagaaactactgttttatggaataaaaaaacaggtaaaccaattaataaagcaattgtttggcaagatagaagaacttttaattattgtaaaaaactcattgctgaaaaaaaagaaccaataatacaaaaaattactggtttattaatagatccatatttttcagctacaaaaataaaatggattttagaaaataataaaaaagcaaagaaagtttttagagaaggcaaccttttatttggcactattgatacttggttgctatggaatttaagcgaaaaacgatcacatttaacagatataacgaatgcatcaagaactatgctatttgatctaaaaaaagatcagtggtcaaaaaaattgttaaaattatttaaaattccaaaaactatattacctaaagtggttgaaaatgtttttgattttggtgtaa

SEQ ID NO: 248522 - DNA, 685 bp, Unknown
  Bacterial polypeptide expressing nucleotide sequence isolated from the Sargasso Sea
attgaaatcaataataattgcattggatcagggcacaactagttcacgagcagtcgcatttgatcaagatgggatgcttataggtatcgctcaaaaagaattcaaacagcactaccctaagcccggatgggtagaacacgatgccatggaaatatggaatacccaattggaggtatttgaacaactactttcgaaccaaaaaattgatataaaatctattcgatcgatcggaattaccaatcaacgagaaacgacagtcgtatggaacaaaaaaactggtaagccaatccataatgcgattgtttggcaggataaaagaacggcagatatttgcgaacgtcttaaaagacaaaatttagaaagctatgtgaaaaaaaataccggacttgtactggattcgtatttctccggaacaaaaattaattggattttaaagcatgttgaaggagcaaaagaagcaagtgaaaaaggagaattattatttggaaccatcgatacatggcttatatggaaacttactgaggggaaagttcatgccacggattattccaatgcttccagaacgttaatttttaatattcattctcttcaatgggataaaaaactcctctccactttagaaataccagaaaacatgcttccggaagttcgaaattctagtggggattttgggactttttcatac

SEQ ID NO: 248523 - DNA, 412 bp, Unknown
  Bacterial polypeptide expressing nucleotide sequence isolated from the Sargasso Sea
ttgaaaaaattaataatttccattgatcaaggtacgacatcctcgagggtaattctttttaacaccaaaggtaaagttgagtttgtttcacagtatgagtttaaacaatatttccctaaaaatggatgggtagaacataatcctaatgagatttggtcaacaacacttaaggcactaaagaatgttattaataaggctaataaaatcaaaggccacataacgagtattggaataaccaatcaaagagaaacaacaatattgtggaataagaaaacaggaaaaccaatttataacgctatagtctggcaagatagaagaactcaagaatattgcaaaaaactaaaaaataaaaattacgaaaatatttttagaaaaaaaacgggcttatttttagatccatattttttcagca

SEQ ID NO: 248524 - DNA, 517 bp, Unknown
  Bacterial polypeptide expressing nucleotide sequence isolated from the Sargasso Sea
gatgccgccgaatcggaggcacttgcacagcgagcaagacaagataacggcgtgttccttgtcccggcatttactggtttaggcgcgccgtattgggatccggatgcccgcggcgccatattaggtttgacgcgcgacacgggcattagcgaaatcgttgcagcgggcctacagtctgtttgctatcaaacaaaagatctccaaaaagcaatggaaagcgacggcgctcgccctaccactattcgtgtagatggcgggatgtcccgtaatgactgggtcatgggctttctttcggacattttaggtgctgaagtggaacggccagaaattacagagacgaccgcattaggtgcagcttttctcgctggattacaggcaggaatcttcgattctatcgatgatttaacccattgctggaagagtgatagcgttttcactccaaggttaaccaagcaagaacgcgataaagcctatgacggctggaaagcggcagtcgaccgtatccgctgtagctaat

SEQ ID NO: 248525 - DNA, 754 bp, Unknown
  Bacterial polypeptide expressing nucleotide sequence isolated from the Sargasso Sea
ccggaaccgaaccggtttggtcaccgatccttatttttcaggaacgaagatgcactggattctccagaatgtgcctgaagccacgaaccttgcacgccagggaaagctttgtttcggtaccgtcgatagttggctgatttggaaactgagtggaggaaaaacccacgccatcgaaatcagcaatgcttcccgtactctagtttttgacattcaaaaatgcgaatgggactccgagatcctttcacgattcggcattcccccggaatccttacctgaggtcgttccttccagtggggtgattgccgaagtagatgaatccctgtttggaggctccgcgccgattgccggtgctgcaggagaccaacaggcggcattgttcggacaggcatgtttttctccggggatggccaaaaacacttacggaaccggttgcttcatgatttccaacaccgggaagcatctggtccgttcccaaaacggactgctcaccaccatcggctggaagcttggtgatgaggtgacctatgccctggaaggctcggtcttcattgccggtgcgttggtgcaatggctccgggacgggctagaattgttcaacgatgctgcagaaacggagtccatggcactttccgtttctgacagcggaggggtgtttgttgtcccggcttttgttgggttaggtgctccgcattgggacccctatgccaggggattgatggtcggtttgacccgtgacacccgacgtagtcacatc

SEQ ID NO: 248526 - DNA, 844 bp, Unknown
  Bacterial polypeptide expressing nucleotide sequence isolated from the Sargasso Sea
tttgtgaaaaaatttcttgttgctattgatcaaggaactacgtcaacaagagtaattttgtttgatacctctggaaatgtaaaatttacatctcagcaagaattcaggcaatattttccaaaaaatggttgggtagaacataatccaaatgaaatttggaaaactacacttaattcattaaaaaaaataatacaaaaagcaaataaacttaatggaagaatattaagtattgggattacaaatcaaagagaaacaactattatttggaataaacaaaatggtaaagcaatctataatgcaattgtttggcaagatagacgaactcaacaatattgtgatagtttaaaaaaaaataattttgagaaaaagattagaaataaaacaggattatttattgatccatatttttcagcaacaaaaataaaatggatattaaataatgtaaaaaattctaaaaaattattaaaatcaaacgacttattatttggcactattgacacctttttgatttggaaattaaccaagggtcaaaaacacttaacagaaacaaccaatgcatcgaggacaatgctgttcaatattaacacaaataaatgggacaaagacatattaaaaaaattaaaaattccttacaaaatacttcctaaaataaaaaactctgcagataattttggaagcactaatagagaaattgtaggtaaagaaattcccataactgctgtacttggagaccaacaagcagcagccgtaggtcaatcgtgttttcaaaaaggttctataaaaagcacatatggtactggagcatttgtaattatgaatactgggtcaaagaaaatttatcaaa

SEQ ID NO: 248527 - DNA, 847 bp, Unknown
  Bacterial polypeptide expressing nucleotide sequence isolated from the Sargasso Sea
ttgaaaaaattaataatttccattgatcaaggtaccacatcctcaagggtaattctttttaacaccaaaggtaaagttgagtttgtttcacagtatgagtttaaacaatatttccctaaaaatggatgggtagaacataatcctaatgagatttggtcaacaacacttaaggcactaaagaatgttattaataaggctaataaaattaaaggccacataacgagtattggaataaccaatcaaagagaaacaacaatattgtggaacaagaaaacaggaaaaccaatttataacgctatagtctggcaagatagaagaactcaagaatattgtaaaaaactaaaaaataaaaattacgaaaatatttttagaaaaaaaacaggcttatttatagatccatatttttcagcaacaaaagtgaaatggattttagataatgtaaaagaatccaaaaaattattaaaatcaaataatttattattcggtacagttgatacttttttgatttggaaactaacaaaaggaaaaaaacatttaactgaagctacaaatgcaagcagaacaatgttatttaatattaatataaataaatgggatcaagaaattttaaaaaaattaaatattccaaaaagtattttacctgaagttaaaaactcagccgatgattttggtaaaacagataaaaaaatcactggaaaagaaattccaatagcagccgttttaggagatcaacaggcagcagctgtaggacaaacttgttttgaaaaaggctcaattaaaagcacttatggaacaggagcttttgtaattatgaacactggtccaaagaaaataaatcaaaaaataa

SEQ ID NO: 248528 - DNA, 781 bp, Unknown
  Bacterial polypeptide expressing nucleotide sequence isolated from the Sargasso Sea
ggagttgctaggagatcagcaagccgcaactatcggtcaagcatgctttaatcaaggtcaagcaaaaagtacttacggcacaggatgttttttattaatgaatattggaaaaaaatttaaaaaatcatcaaataatcttctaacaacagtagcttataaaattaatggtaaaaaaatgtacagttatgaaggtagtatatttgttgcaggatcagctgtacaatggcttagagataaattatttttgtttaaaaaatcagaagaaactgacaaactgtataaagaatccagtaaagatcaaaatattatagttattccagcattaaccggtttaggagctcctcactggcagcctaatgtcagaggagcaatatttgggctaaatagaaatacttccatacctgaaatagttaaagctactttggatagtctatcttttcaaactttagatttaattgagtcaatggagaaggattcaaaaataaaaataaatgaaattcgcgttgatggaggaatgatcagcaataatagttttattcaaagtatttctaacatgactaggattaaaattgtaagaccttcaaatatagaaacaacagcgttgggagcagcgtacctggctggtcttcattctggagtattaaaaaatacaatacaaatagaaaagttatggaaaaaaaacaaatcctttaaaccactaattgacaaaaaggaagtaaacttaaaaattaaacactggagaaaaagtttaaaaatattaattaatttgaatcctttataa

SEQ ID NO: 248529 - DNA, 802 bp, Unknown
  Bacterial polypeptide expressing nucleotide sequence isolated from the Sargasso Sea
attaaaagaagtatctgctagaacagggttattgttagatccttacttctctgcaacaaaaataaaatggatattagacaatgttgaaggcgctaagaagaaagctaaagaaggaaaactatgttttggaacagttgatgcatatctcatgtatgtcttatcaaataaaaaaattcataaaacggatataacaaatgcttctagaaccatgttatttaatataaatactttgtcctgggataattatctcttagatctatttgatattcctgaatcaatgttgccagaagtatctaattcagatgaatcatttggaactttatctgattgcaacaatatcaatgtaaatgctgtattaggagatcaacaagctgctctatttggtcaaggatgtttaaatgccggtagcttaaaaagcacatacggaacaggatgttttctaatggcaaatattggaactaagcctttagcttcggataaaggtcttttaactaccctagggtttagttttaataaagaaattcattatgcgattgaaggcagcatatattcagcaggaaccgtcgttcaatggttaagagataatcttgaattttttgctgaaagcccagaatctgaaaaatttttaaactccgatgcgaatgctaatggagtgtattttattccagcgtttactggtttaggagcaccatattgggactctaacataagagctagttatcatggcataacaagagacacgtcaaaaaaagatttaattaacgctgcatttaattcaatttcataccaaactaaagatatt

SEQ ID NO: 248530 - DNA, 422 bp, Unknown
  Bacterial polypeptide expressing nucleotide sequence isolated from the Sargasso Sea
tatgaaatatataatatcattagaccaagggacaacaagttctagagcaatattaattaatgatcaaggggctctagtcggaatagaacaaatggagtttgaacaaatatttcctaaaccaggatgggttgagcatagtccaatggaaattttaaattctcaaataaaagtttttgaagatttaatagttaacaataacatatcattagattcaattattagtttaggtattacaaaccaaagagaaactattgttctttgggataaggattcaggaaaaccattatataatgctatagtatggcaggataaacgtacaacgaatatttgtgaaaagattaaaaaagatgatttagaaaaatatataaaagaaaatacaggttttggttgtcgactcatatttttctgctacaaaaataaaa

SEQ ID NO: 248531 - DNA, 834 bp, Unknown
  Bacterial polypeptide expressing nucleotide sequence isolated from the Sargasso Sea
aattacaaaccaaaccgagaaacaacagtcctatggggataaaaaaacgggcaaaacagtttataaagcaatagtttggcaggatcgtagacaagctgaatattgtaaaaaattaaaaaaacaaaacaaggaaactctaatatttaataaaacaggtcttcctattgactcatatttttcagggacaaaaatcaaatggatactagataatgtctcattagctagaaaattaatgaataaaaaacaacttctttttggaacaattgatagcttcttaatttggagattaactaaaggcaaagtccatgcaacagatgcaacgaatgcaagtagaactatgatatttaatatatcaacaaacaaatgggacgatacaattttaaatatattaaaaattaaaaaacacattcttcctgaggtaaaaaattgtgctgatgattatggttcaacacattcatcaattacaggcaaatcgataccaataactggagttgtgggagaccaacagtcagcatcaataggtcaatgctgttttgaaccaggctcattaaaaagtacttatggaacaggggcttttgtattattaaatactggttacaaaaaaatttattccaaaaatagactactcactacaattggatatagaattaatggaaaaactacttatgctatggaaggatcaatttttattgcaggagcaggtgttcaatggctaagagatcgaatgaaattttttaagaaagcttttgaaacagaaaagatcttaaagtcattaaaagataataaggatgtatatttagttccagcatttacaggtatgggcgcgccatactg

SEQ ID NO: 248532 - DNA, 644 bp, Unknown
  Bacterial polypeptide expressing nucleotide sequence isolated from the Sargasso Sea
ttcaaaaaataaattattaactacaatttgttatagattgaataataaaactacctacgctcttgaaggatctatttttatagcaggagcgggagtacaatggttaagggataaaataaaattaataaataattcttatgaaactgaaaaaatagctaaatcaacaaaaagcaataatgaagtttatgttgttcctgcttttagtggaataggtgcaccttattggagacctgatgcaagaggtttaataacaggacttacaagagatagtgattggaaaacgttagtgagagctacagttgagtcagttgcttaccaaagttatgatttattttattcaatgaaaaaagatggtttaaagcctagaataattaaaattgatggtggtatggtagctaataattggttttcacaatttttggcagatgtaattaatttaaaagtaattagaccgaaagtcttagaaaccaccgcccttggagtcgctttgtttgcaggatatcaagtaggagaattcaaatcattaaatcagataaaaaatacatggaaaaaagataaagcttttaagccaaaaattaataaaaaacttagaaatcatatattgcatggttggaagcaagcaattaaaaaaaccttagcataaa

SEQ ID NO: 248533 - DNA, 764 bp, Unknown
  Bacterial polypeptide expressing nucleotide sequence isolated from the Sargasso Sea
tgcaactaaaattaagtggattcttgataatgttgaaggagctcgagaaaaagcttcactaggacaactatcttttggcacagttgatacctatttaatgtcatttttatctgatggtgctatccattccactgacatgactaatgcttcacgtaccatgctttacaacatcaatacactcgaatgggatcatgaattgatgcagcttttcgatattccattagacatgatgcctgatgtaaaaacttccaacgcagattttggctcattatcaaatgttaataatatttctgtttgtggagtcttaggtgatcaacaagctgctttatttggacaaggctgtcttgatacaggagaaagcaagtgtacttatggaactggttgcttccttatgacaaatataggttcaaaaccatcattcaatgattgcggtttattaactaccattgggtacagtattaatgaagacgttatttatgctttagaaggaagtatttattctgcaggtaccattattcaatggctacgagacaatctggaattttttactgatagttctgactcagagggattaattaatgtaaatgcaaactccaatggagtgaagtttattcctgctttcaatggactaggagcaccatattggaattctgacattagagcaagctttcacggtattaccagggatacaaacaaaaatgatcttactacagccgcatacaattcaattgcttatcaaactcttgatattgtcaatttgtaaa

SEQ ID NO: 248534 - DNA, 567 bp, Unknown
  Bacterial polypeptide expressing nucleotide sequence isolated from the Sargasso Sea
tagctggtgctggagttcaatggttgagagacagaatgaaattttttgagaaagcgcttgaaacagaaaaaatagtaaaatcacttcaaaacaacaatgatatttatctagttccagcatttactggattaggagctccttattgggacgctaatgctagaggagttttaagtggtataacaagagatactggccctaaagaaatagttagagctactattgaagcagttgcatatcaaactcacgatctttttgaagctatgaaacatgatggtttaagacctaaaattgtaaaagtggatggcggaatggttatgaataattggttttcacaatttttatccgacattgttaatgtaaaagttttaagacctaaggtccaagagacgactgctttaggagctgcttttatggctggtttaaaaataggggtttacaaatctctaaaagatatttcaaaaaactggcaattagataaaaagttttcctcaaaaatgaaaatttcttcgagaaaaattctaataaatggatgggaaaaagctattaagcgcgcattgataaattaat

SEQ ID NO: 248535 - DNA, 787 bp, Unknown
  Bacterial polypeptide expressing nucleotide sequence isolated from the Sargasso Sea
atcggtctttccgaggtttccgccataggaatcaccaaccagcgggaatccaccatcgcctggaatcgtgaaaccggagaagcactttgccccgcgatcaactggcaatgccgacgaactgctgggttttgtgatgtattgaaagaggagggttttgatgaattgatccggaaccgaaccggtttggtcaccgatccttatttttcaggaacgaagatgcactggattctccagattgttcctgaagctgctagccttgcgcgccaggggaaactctgtttcggtaccgtcgacagttggctgatctggaaactgagtggaggaacaactcatgccatcgaaatcagtaatgcttcccggaccctcgtttttgacatccaaaaatgcgagtgggactccgagatcctttcacgattcggcattcccccggaatccctgcctgaagttgttccttccagtggagtgattgccgaagtagacgaatctctttttggagactccgcgccgattgccggtgccgcaggagaccaacaggcggcattgttcggacaggcatgtttttctccggggatggccaaaaacacttacggaaccggttgcttcatgatttccaacaccgggaagcatctgatccgttcccaaaacggactgcttaccaccatcggctggaagcttggtaatgaggtgacctatgccctggaaggctcggtcttcattgccggtgctttggtgcaatggctccgggacgggctggaattgttcagtgatgctgccgaaacggaatcga

SEQ ID NO: 248536 - DNA, 980 bp, Unknown
  Bacterial polypeptide expressing nucleotide sequence isolated from the Sargasso Sea
ttctgctactaaaattaaatggatattagaaaatgtaagaaatgctaagaaacttttaaaatcaaacaatttattattcggcactgttgatacctttttaatttggaaacttactaatggaaaatatcatttaacagaggcaactaatgctagtagaacattattattcaacatcaataccaataaatgggataaagaaattttaaaaaagcttaaaatttctgaaaatattttgccagaagttaaaaattcagctgataattttggctacacaaataagaaaattattggtactgaaataccaatatctgcagtcttaggtgatcaacaagctgctgctgtaggacagtcttgctttgaaaaaggttcagtcaaaagtacatatggcactggtgcttttgtgataatgaatactggatataaaaaaatttattctaagaataaattattaacaactatttgttatagacttaatggaaaaaacacttatgcccttgaggggtcaatttttatagcaggtgcaggagtgcaatggttaagagataagttaaaattagttgataatgcttatgatactgagagaattgcccaatctaaaaaaaataataatgaagtttatattgtgccggcgtttagtggaatgggtgcgccatactggagacccgatgcaagaggtttaataacaggtttaacaagagacagtgactggaaaatactagttagggcagtactcgagtcagtcgcttaccaaagtcatgatttatttaatgctatgggaaaagatggattaaaacctaatattgttaaaattgatggaggtatggttgaaaataactggttttctcaatttttagcaaatattataaacataaatacagaaagacccaaaatactagaaaccacagccctcggtgttgctttttttgctggatatcaaattggagtatttaaatcattagatcagataaagaaaaaatgaa

SEQ ID NO: 248537 - DNA, 855 bp, Unknown
  Bacterial polypeptide expressing nucleotide sequence isolated from the Sargasso Sea
taccaatcaaagagaaaccactattctttgggataaatataccggcaaaccagtttataatgcaattgtttggcaagatagaagatcggcagattattgtaataaactaattaaacaaaaaaaagaaacgatcatttacaataagactggcttactgattgatgcatatttttcagcaacaaaaattaaatggataattgacaatgttccaaaagcaaaacaacttataaaacaaaagagattattatttggtacagttgactgctttttgctttggagattaacaggcggaactaatcattttactgatgctacaaatgcaagtagaacaatgttgtataatatatcttctaataagtgggataagcagattttagatattttaaaaattccatatcatatacttccagaagtaaaagattgctctgacgattttggacacactgatccaaaaataacaggagagtcttattctgttacaggtatggttggagatcagcaagcagcaactataggacaatgttgttttgaaccaggttctctaaaaagcacttatggcactggggcttttgtattattaaatactggaaataaaatcatttattcaaaaaatagattgttaacaacaataggatatagaataaatggaaaaaccacgtatgcactcgaaggatcaatatttatcgcaggtgctggagttcagtggcttagagataaggttaaatttttaataaaagcttcagactcagaaaaaataattaaaaaattaaaaaataattgtggagtttatttagtaccagcttttacaggcattggagctccttattggaattcaaaatcaagaggagttttaag

SEQ ID NO: 248538 - DNA, 373 bp, Unknown
  Bacterial polypeptide expressing nucleotide sequence isolated from the Sargasso Sea
atgtcccgttatctcttagccattgatcagggcaccaccagttcccgagcgattgtctttaacgaaaccggtaaccaggttgccgtggcccagcaggaattccatcaatattttccaaaagacggctgggtagaacacgatgcccgggaaatctgggacagcacgctggcggtgtgccgcggggtgctggacaaagcaggcctgcaggcgtcagatctggcgggaatcggcattaccaatcagcgggaaaccaccatcatctgggaccgggcgaccggagagccgatccatcacgccattgtctggcaggaccggcgcacggcctctttgtgcaccaagttgcgggccgacggctacgaatcgctggtggtag

SEQ ID NO: 248539 - DNA, 664 bp, Unknown
  Bacterial polypeptide expressing nucleotide sequence isolated from the Sargasso Sea
atgacaaaatttattatatcaattgatcaagggacgacttcaagtcgagcaattctctttaacattaaaggcagaccagtttattcatctcaaaaggaatttactcaatattttccaaaaagtggttgggtcgaacacaatcctgaggaaatttggaacacaacaaagaaaacactaaaagatgtgattaataaatctaaaagactgaaaggaagtgttctagcaataggaattacaaatcaaagggaaacgactgttttatgggataaaaaaactggaaggacagtttataatgcaattgtttggcaagatcgtagacaagcagaattttgtaaaaaattaaaaaaacaaaataaagaaacattaattttcaataaaactggtcttccaatagactcgtatttctcaggaacaaaaataaaatggattttagacaatgttccaaaagcaaaaaaattaatgaacaaaaaacaattactctttggtactattgacagctttttaatttggcgtcttactaagggaaaagtccatgctactgatgccactaatgctagcagaacaatgatttataacatttcaaccaataagtgggatgattcaattttaaaaattcttaagattcaaaaacatattttaccagaagtaaaaaattgctctgatg

SEQ ID NO: 248540 - DNA, 803 bp, Unknown
  Bacterial polypeptide expressing nucleotide sequence isolated from the Sargasso Sea
catggcactggaccaaggcaccacgagctcacgtacactttttttcagtgaaaaaggagaaataattgctgattcaaatgcacttttagcctgttactatccacagtcaggatgggtagaacaggatgcgcaggaaatatgggtcagtcagtctcaaaccattcgtgaagtattgaagaaagcagcgctgacaatgaaggacattgccgctgtgggaattactaatcagcgtgagaccactattgcatggaacagaaaaactggagaagcaattacacctgccatcaactggcagtgtcgccgaaccgctgatttttgtgaagagttgaagcatgagggttttaaccgtgtcttgaaaaacaggactggactagtaaccgatccctatttttccggaacaaaaatgcgttggattatggaaaacgtcccagaggccagtgagttagcgcaacagggtaatctttgttttggtactgtcgattcatggcttatatggaagttgacaagtggtcaggttcacgccactgaaataagtaatgcttcgcgcaccatggttttcaatattgatgtgtgttcatgggacgatgaaatactggctcgattcaacattcctcgtgagacccttccagatgtaaaacccacaagtggaattattgcagagattgatccagatttatttggaggtgctgctcctattgctggagtagctggggatcagcaggccgcactttttggccaggcatgctttgaaacaggaatggctaaaaatacctatggtactggctgttttatgatctcaaata

SEQ ID NO: 248541 - DNA, 439 bp, Unknown
  Bacterial polypeptide expressing nucleotide sequence isolated from the Sargasso Sea
gttggaagatgatgtatgttttggaacaattgatagttggattgtatataacctaacaggaaacttttatacagatgttacaaatgcttcaagaacgcttatgtacgacttgcataacatggaatggtcagatgatattttgaatgaactttccattccaaagcattcccttcctgaggtcaaaccatctttatcaaattttggggaaatcgttggtgtcattaaaggtgttcccataacagcaattttaggagatcaacaggcagcactgttcggtcaaaattgtacgagcaaaggtgatgttaaaaacacttatggaactggatgctttgctcttactaacacaggaaaagatattattgaatcagataatggattattgacgacactagcatatcaaatagaaggtgaagatcctctttatgcactagaaggttca

SEQ ID NO: 248542 - DNA, 829 bp, Unknown
  Bacterial polypeptide expressing nucleotide sequence isolated from the Sargasso Sea
ttttccggagaaacttccttaatatcttcaaaaaatattccaatttcaggcgttatgggcgaccagcaagctgctttctttggacaaagatgttttcagaggggctcaaccaaatgcacatatggaaccggatgctttactcttataaacacaggtgatgaagccaatacaacatcatcgggcttactaactaccattgcattcagtgacggaattagcactgagtatgctctggaagcaagcatatttatgggaggttctacagttcaatggctaaaagatggtctagggataatagatcgctcggaggaaatagaagaactcgccgaaaaagttgaagatgcaaatggggtgatattggtgccggcattcacaggtcttggtgctcctcattgggatccacatgctcgtggaattataattgggctaacgagggacacgaacaaaaaccatattgcccgatctgttttagatgccatagcatggcaagtgactgacgtcatagatttgatgtcggaaactgccgaaatagaaatagacttcattcgagtcgacggaggagcggtggaaaataatctcctcatgcaaattcaagctgattatcttcaaaggccagtgtatcgctcgtctcataaagaaactacagccttaggagctgccatggtctccagtcttggtattaagctacataagaataaacaagaaatcccggtaatagcttctgaacccaaaatatttaaacctaagattacccaagccatgaaagagtcagctcaaagcacatggtatcgcgcagttaaaagatccctttcttggacaatcgattaaa

SEQ ID NO: 248543 - DNA, 885 bp, Unknown
  Bacterial polypeptide expressing nucleotide sequence isolated from the Sargasso Sea
aatccaaatgaaatttggtcgacaacacttaaagcattaaaacaagtaattaaaaaagctataagtttgaaaggtcatatacttacaattggaattacaaatcagagggaaactacaattttgtggaataaaaaaactggaaaacccgtttataatgcaatcgtttggcaagatagaagaacgcaggaatattgtaaatctcttaagaataaaaattatgaaaatactttcagaaaaaaaactggattatttatagatccttatttttctgccactaaaataaaatggattttagataatgtaaaagtttcaaaaaagttactcaaaactaataatttattgtttggtacggtggataccttcttaatctggaaattaaccaaaggtaaacagcatttaactgaagctaccaatgcaagtagaacaatgttgtttaatattaataacaataaatgggataatgaaatattacagaaattaaaaattccaaaaggtatattgccagaggtaaaaaattccgcagataattttggaaaaacagacaagagagttacaagaaaagaaatacccatttcagctgttttaggagatcaacaagcagctgctgtgggacaagcttgttttgaaaaaggatctataaaaagtacttatggtactggtgcatttataataatgaacactggatcaaaaaaaattaattcaaaaaataagttattaacgacaatttgttatcgattgaataataagactacctatgctcttgaaggatctattttcatagcaggagcaggcgtacaatggttaagggataaaattaaattaataaacaatgcttatgaaactgaaaaaatagctaaatcaacaaaaagcaataatgaagtttat

SEQ ID NO: 248544 - DNA, 889 bp, Unknown
  Bacterial polypeptide expressing nucleotide sequence isolated from the Sargasso Sea
taaagaaactattatttttaataaaacagggcttttaattgatccatatttttcaggaactaaaatcaaatgggtgttagataacgtacctttagccaagaagttaatgaataggaaaagacttctctttggaactattgatagttttttaatttggagacttaccaagggaaaaattcacgctactgatgctacaaatgcaagcagaactatgatttacaatattacatcaaataagtgggacgatactattttaaatctttttaagattaaaaaacacattcttccggaagtaaaaaattgtgccgatgattatggtcacacccatccttcaataacaggtaaatctatacctatatctggcgtcgtaggagatcaacagtcagccgcaattggtcaatgttgtttcgaaacaggttctctgaagagcacatatggaactggagcatttattttattaaacacaggatcaagaaaaatatattctaaaaacagactattaactacaatttgttatcgattgaatggtaaaactacatatgctcttgagggttcaatttttattgctggcgctggtgtacagtggcttagagatagaatgaagtttataaataaagcttcagatagtgaaaaaattataaaatctttaaaagataattctggaatttatttagttccagcttttactggaattggtgcgccttattggaacgcaaacgctagaggtgtcttgagcggaattaccagagatactggtcccaaacaaattgtaagagcgattattgaatctgttgcttatcaaacacatgacctattcgaagctatgagacatgatggattaagacctaagctggtgaaagttgatggtggtatggttatgaataattgg

SEQ ID NO: 248545 - DNA, 256 bp, Unknown
  Bacterial polypeptide expressing nucleotide sequence isolated from the Sargasso Sea
atgtcttacatagtagcaatcgatcagggaacaacttctacaagatctattttatttgaccacaatatgagtgcgattaatatttcacaaaaagagtttacacaatatttccctcattcaggttgggttgagcatgatccagaagacctatggaatacagcagtatctacatttagagatgtgttaaaaaaatcaaaattaactgcagataaaattactgcaataggaataacaaaccaaagagaaacgactgtgt

SEQ ID NO: 248546 - DNA, 322 bp, Unknown
  Bacterial polypeptide expressing nucleotide sequence isolated from the Sargasso Sea
ttattaaccacaatttgttacagattaaacggaaaaaatacttttgctctcgaaggttcaatttttatcgctggagcaggtgttcaatggttaagagataagttaaaattaattaataatgcttccgacacatatcaaattgctaaatcaaaaaaaaataatgaaggtgtctacgtcgtaccagcttttagtggactgggagctccatactggagacctgacgcaagaggagttataactggattaactagagatagtgattggaaaaccctagtaagagcagttctagaatctgtggcataccaaagctatgatctattta

SEQ ID NO: 248547 - DNA, 867 bp, Unknown
  Bacterial polypeptide expressing nucleotide sequence isolated from the Sargasso Sea
acagcaaaaaaccggtttgctggctgacccttatttctccgctactaagttagcctggttgctacagcatgtcgcaggggcgaagcagcaagcaaaaaacggtgagctgtgttttgggactgtggatagttacctgctgtggcagctaaccggcggcaaagtacatgccacagatgccagcaacgccagccgcacgttactgttcaatattcacagccaatgctgggatgatgagctgcttaagctatttgatattcccgcagccttattgccagaggtgaaagacaacgctggcctgttcggcttgaccgacagcaaactgtttggcgccgctatcccggtgctgagtatgataggtgatcagcaagccgcgctgcttggtcaggcctgtgttagtgccggtatgagcaaaagcacttatggcaccggttgctttgccgtggtaaataccggcgataacatcattagcagccagcataagttattaacgactgttgcctggcggctaaacggcaactgcacctatgcgctggaaggcagcatttttatggccggtgccactgtgcaatggctgcgtgataagctgggggttattcaacaagccagtgagacagaagccctggcagagcaaagccattatcagcaaactgagctgctgatccccgctttcactggccttggtacaccctactggcaaccggagatcaaagccgctttgtttggcatgacccgggataccggtcgcgttgagcttgctgcggcagcactttgtagcgtggcgtatcaaagccgcgatcttcttacggccatcgctcaggatggtataacagtggacagcctgcgtgttgatggtggtatgacagcaaa

SEQ ID NO: 248548 - DNA, 706 bp, Unknown
  Bacterial polypeptide expressing nucleotide sequence isolated from the Sargasso Sea
  misc_feature (686)..(687): n is a, c, g, or t
atggacacatatatttctatagatcagggaacaactagtagtagagctatattgtttggagaagatggttcaattttaaaaacctgtcagatggaatttgaacaaatatatccaaaaccaggttgggttgaacataatccagaagagatttgggaaacaacaaagtctgttttaaaagatttatatcattcagacattacaaaaaaacataaaattagagggattgggattacaaatcagagagagacaacaatcctatgggataaaaaatctggaaagccactttacaatgcaattgtttggcaagacagaagaacttcagatttttgtaagtctctagtaaaaaagggattagaagaaaccgtcatgaacaagtcaggcttagtaattgacccctactttagcgcaacaaaaataaaatggattttagataatgttcctggagcaagatcaaaagccgaaaaaaatgaaatctgttttggtactgtggatagttttttattatggaagttaactggtggaaaggttcatgctactgatgctactaatgcttcacgaacaagtctttataatatagaaagtcttgaatgggataatgaattactcaagatttttgatgtgcctaaatccttgatgccagttgttatggactcaaatagccccattttggtgatatttccaaaganntataataaatgtgaactcc

SEQ ID NO: 248549 - DNA, 894 bp, Unknown
  Bacterial polypeptide expressing nucleotide sequence isolated from the Sargasso Sea
tacaaagcaatagtatggcaagatcgaagaacagtaaattactgtaaagaattacaaaaaaaaggttatacaaaaaaaattcaaaaaattactggattagtgattgactcatatttttcagcaaccaaaataaaatggattattgacaatatagaatcctctaaaaaacttttaaaagaaaataggcttttatttgggacaattgatacttggattctttggaagttaactgaaggcaggtcacactatactgaggctactaatgcatctaggacaatgctgtatgatataactaaaaattcatggtctaaaagcttattaaaaatatttaatataccagcatcgattttgcccgtggttaaagatagtgtagatgaatttggctacactaagatttttggctcaaaaattaaaattggggggattgctggagatcaacaagcagcaactataggacaggcatgctttgagccaggctctataaagtcaacatatggtactggctgttttatgattatgaatataggaaaaaatataaagatatctaagaataatttgttaacaacaattgcctaccgtatcgaaggaaaaactacatacgctcttgagggttcaatttttattgcgggtgcagcgatacaatggcttcgagattcattaaaagtgattagtagtgcagaagaaaccgaggatttatataaaagtaatgacaaatctcaacaaatctactttgtgcctgcatttgtaggattaggtgcaccttattgggacggtgaggcaagaggagcaatttttggaatgacaagaaatactggtgtttcagaacttggtaaatcagcaatagatagtgttgcctatcaaacgaaagacttgattatttctatggaaaaagac

SEQ ID NO: 248550 - DNA, 589 bp, Unknown
  Bacterial polypeptide expressing nucleotide sequence isolated from the Sargasso Sea
ttatgctttagaaggttctatattcattgcaggcgcaggcgttcaatggttaagagacaaaattaaactaataaataatgcatatgaaactgaaaaaattgcaaaatcaagaaatgatagtaaaggtgtttatattgttccagcctttacgggattagctgctccttattggagcactaaagcaagggggataattacaggtcttacaagagatagtgattggaaagacttagttagagcaacaatagagtcggttgcttatcaaacttttgatttatttgagtcaatgcgaaaagatggtgtaaatcttacaagtgttaaagtagatggtggtatggcttcaaataattggtttacacagtttttatccgaaattttaaaaattaaaataacgcgatcaaagataaacgaaacaactgccttgggagctgcatttatagctggctatcaagtaggtatatacaggtctttaaaagatattaagagaaactggaagaaagatagagactttaaaccaaaattcaataataattatagaaataacttattgcaaggttgggagcaagcaattaaaaaaactttagcataa

SEQ ID NO: 248551 - DNA, 949 bp, Unknown
  Bacterial polypeptide expressing nucleotide sequence isolated from the Sargasso Sea
tgatcaaggtacaacaagtagtagagcaatcttatttggacaagatggaactattttaaattcttttcaagaagaatttaagcagatttaccctaaacctggttgggtcgaacataatcctgaagaaatttgggaaacaacaaaatcagtacttagtgatctttataattctgaaattgcaaaaaaaaataatattagaggtataggaattaccaatcaaagagaaacaaccatagtttgggataaaaaaactggaaagcctctttataacgcgattgtttggcaagatagaagaacatcagatttttgcaaaaaattagttgaaaatggtttagaacaaaaggttattaacaaatcaggattagttattgatccttattttagcgcttcaaaaattaaatggatattagataatatttcagatgctagggaaaaagctaataagaatgaaattttctttggaactgtagatagtttcttgctttggagattaacggataaaaaagttcatgcaactgatgcaacaaatgcatcaagaacaagtctttacaatattgaaaaactggagtgggacgacgagttactatctatttttgatgtacctaagtctatgatgcctaaggttatggattcaaacagtgactttggtaaagtttcaaaaaatgtgatgaattttgagctaccaatcttatcaattctaggtgatcagcaagctgccgctgttggacaagcgtgtttcaccccaggaagcataaagtccacatatgggactgggtgttttgtaataatcaactctggagacaagattattaaatcgaaatcaagattattaggaacaatatgttacaaggtagatggaaaacctacttatgctttagaaggttctatttttgtcgctggcgcagtagttcaatggcttagagataatcttaaattaattcaaaatgca

SEQ ID NO: 248552 - DNA, 784 bp, Unknown
  Bacterial polypeptide expressing nucleotide sequence isolated from the Sargasso Sea
acaactattttatgggacaaacatacaggagcccctgttcataatgcgattgtctggcaatgccgaagaacaacgcagagagttaaaggtctagaaacctacaaagatatgataaaagaaaaaacagggctttttttagacccctacttttctgcaactaaaatagaatggatcttaaatacaattccaggtttaacagatcgagctgcaaaaggacaggtcttattcggcactgttgattcatggattctatggaaattaacaaagggtgccgttcatgcgacggatgtcagtaatgcttctcgaacgatgctctataatattcataccctaaattacgatgatgaattattgcagcttttttcagttcccccggctatgttacctgaggtaaggccaagtgccagctactttggagaaacagctgcagatattactggaaaatctattccaattacgggcattatcggagaccaacaagcctctttatttgcacaatgtggtagcaaccctaaacgtattaagaacacgtatgggacaggtttatttgttgtcgttaatacaggaaaagaaatcccgagtacatctaaactacttaataccattggttggcaaataggagatgatatctcttatgcactcgaggggagtatttttgttggtggatctgctgtgcaatggcttcgagatggaattaagcttataaaagaagccaaggacactgaacccttggcagaaagtattccgggtaatgaaggtgtctactttgttccagcacttgcag

SEQ ID NO: 248553 - DNA, 960 bp, Unknown
  Bacterial polypeptide expressing nucleotide sequence isolated from the Sargasso Sea
tatgtcttattatatagccattgattgtggaacaactagtacgagagttattacattcgatattaatttttcaattgttcattgtgagtcaatggatatccccctcatagaatctaaaaataattatattgaccaatcacccgttgatttatggcaactaacgcataaatgcttaaccaatacactgtctattattgaacctaaaaaaatcattagtattggtttaaccaatcagcgtgaaacttgtatgatttgggataaagaaactgggcaacctttaggtaatgcaattagttggcaatgttctcgaacaagcagcttttgtaaatctttagatgaacatgcatcaatcattcgttacaaaactggattgcctattgatccatatttttcagctactaaatataactggcttattaatgagtactctgaatcaattgaattaatcaacaaaaatcaattacactttggtacagttgatacttggttattatggaatttaacaaaccgtgctgtatttgcaacagatgttacaaatgcatccagaactctattatttaacattcgttcacttaaatatgacccagatttatgttcattatttaatattccaattcatttattgccgaaagtatattcatcttcacataattttggtcattattcattcaataatattaatattccaattactgcaattatgggtgatcagcaggccgcattatttgctcaatgtggtcgaaaccaaaatcaaattaaaaacacttatggaactggactttttttaatggcgaatactggttccagcattattgaatctgatgaactaattactactattgggattggggttaacagtaaagttgattatgctattgaaggagctgtatttactggaggttcgctcatttcatggttaagagataatttaaatataattgatgatccagaaattactga

SEQ ID NO: 248554 - DNA, 738 bp, Unknown
  Bacterial polypeptide expressing nucleotide sequence isolated from the Sargasso Sea
gaagtcattaaagaaaaaacaggattagttcttgatccatatttctcagcttctaaaataaaatggattttagataatgtaaaaggggcaagggaaaaagccagcaaaggcgaactgctatttggcaccatcgattcatatctggtttacaagctatcaaaagagaacaatcattttacagatgtgacaaatgcttcaaggacacttctttttaatataaagactatggattgggatgatgagctattggatttgtttgatatacccagaaatatgatgcctgaagtattatgttgtgatggcaatttcggacatttgaatatcaataataaagaaatcccaattagaggtgtcataggagatcaacaagcagcgctagtaggacaaggatgctttaaaaatggagacatgaaatcaacatttggtacaggatgttttttaatggttaataccaaagaaaaacccgttcatattgaagaaggattgctaacaactattgcatacagctttaatggtgaggtgaactatgcaatagaagggagcatatactcttgtgggaatattattaaatggttgagagataagatgaacttctttaaaacagcaaaagatagtgaaaaatttataaacaataatggagaaactaacaatgtactttttctacctgcatttaatggcttaggagcaccattttgggattcagatattcgaggtggtttctatggcattactcaagat

SEQ ID NO: 248555 - DNA, 913 bp, Unknown
  Bacterial polypeptide expressing nucleotide sequence isolated from the Sargasso Sea
ggcaccacatccaacagatcaattttatttgatataagaggaaagcccgtttattcatctcaaaaggaatttactcaatatttccctaaaagcggatgggtagaacatgacccagatgaaatttggaaaacaactattaaaacattaaaagatgtaattgctaaagccaaaagactaagaggaaaaattttaagtatagggattacaaatcaaagagaaacaacggttctatgggataaaaaaactggaaagacagtttataaagcaattgtttggcaagacagaagacaagaagaattttgcaaaaaattaagaaaaaaaaataaagatacaatgatctttaataaaactggtttattaatagactcatatttttctggaacaaaaattaaatggatattagacaacgtcccaagagcaaaatatttaatgaaccaaaaacaattattatttggtacaattgatagttttttaatctggaaacttactaaaggtaaggtgcacgcaactgatgctacaaacgctagtagaactatgatttataacatttcatccaataaatgggatgatgcaattttaaaacttttaaaaattaagaaacatattcttccagaggttaaaaattgtgctgacgattatggttacacccattcaacaattaccggtaaaccaataccaataaacggagtcgttggcgatcaacaatctgctgccataggtcaatgctgttttgagccaggctcactaaaaagtacttacggaacaggtgcatttgttttgcttaatactggtaacaaaaaaatttattcaaaaaatagattgctaactacaatcgcttatagaattaatggaaaaacaacctatgctatggaaggatcaatttttattgcaggtgcaggcgttcaatggtaag

SEQ ID NO: 248556 - DNA, 856 bp, Unknown
  Bacterial polypeptide expressing nucleotide sequence isolated from the Sargasso Sea
tattgcaaaaaattgaaagaaaaaggtctggaaaaaacaattcaaaatattaccggattagttattgatccttatttttctgctacaaaaataaaatggatcattgataataatcaaacagcaaaaaaaattttaaaaaaaggggacttattatttggcacaatagatacatggttgatatggaatcttactgagagaaaatctcatattacagatattacaaatgcttctagaacgatgttatttgattctaaaaaagaagaatggtcaaaaaaattgttaaaattatttaaaattcctgaaaaaatcttacctaaagttgttgaaaattcttataattttggctcaacaagcttgtttggtggaaagataaatattggtggtgttgctggagatcaacaagccgcaacaataggtcaagcctgttttaaaaaaggtcaatctaagagtacttatggcactggttgctttttgcttatgaacataggggaaaactttaaaaaatcatcaaataggcttttaacaacagttgcttttaaaattaatggcaaaaaaatgtactgttatgaaggaagtatttttgttgctggatcagctattcaatggctaagagataaattattattttttaaaaattccaatgaaactgataaattatttaaaaaagcaaatacaaaaaattcactagtagttttgccagctttaacaggacttggtgcaccccactggcaacctaatacaagaggcgctatttttggactaacaagaaacacttctattgcggaaattgtcaaagccaccctagacagcatatcatttcaaacattagatctaattcagtgcatgcaaagagatt

SEQ ID NO: 248557 - DNA, 676 bp, Unknown
  Bacterial polypeptide expressing nucleotide sequence isolated from the Sargasso Sea
aatggaagtaattctttcaattgatgctgggaccacaggagttagatcaatgctggttgataggcaagggtctatagttatgagctcatatcgagaattttctcaatattttcctcaagctgggtacgtagagcatgatcctatggaaatttgggtagctattgaagagacgatagccgaagttattcaaaggtttgggtcgcaaccggtcgcaatcggtataacaaatcaacgggagaccatagtttgttgggataagaaaagttcactccctcaatgtaatgctcttgtctggcaggataggcggacttctgagaggtgcactcaattattagaggatggtgttctccccttggtgagggaatcaactgggcttgtcttagatccttacttttcagccacgaaaattgagtggataatcaaaaatagaattgagctatctgaaagtattgctttcgggaccattgacagttggattctgtggaaattaaccgacggtgcagtattcgctaccgatgtcactaatgcgtcccgcaccatgctcttcaacatccatgatttatgttgggatgataacctgcttggaatatttggagtttcttccagtaatttgccagaggttttcccgtcaagtggacatttcggaacgacaaaaatcaatcatttactcatgcag

SEQ ID NO: 248558 - DNA, 566 bp, Unknown
  Bacterial polypeptide expressing nucleotide sequence isolated from the Sargasso Sea
taccaatcaacgagaaaccgttattatttgggaccgggaaactggtcgacctattcatagagcaattgtttggcaagatcgaagaactgctgagttatgcgataacctaaaaaaacagaacaatgaacaaacagtcacggaaaagacaggattagtactggacccatatttttcagctacaaagataaactggatattggataacgttgacggggcaagagcatcagccaatttagggagattagcttttggaacagtagacacgtttcttctgtggcgcctgacagacggtgctgtacacgctacagatattactaatgcgtcacgcacttctttattcaatattcataaaaaagcttgggacgatgacttattaaaactttttaacgttcctaaaacattactgccagaagtaaaaaattgtaccgggtcgtatggatatacgagccctaaactttttggttcaagcattcccattactggtattgccggagaccagcaagccgcgtcaataggtcaggcgtgcttcaaacaaggaatggtgaaatcaacttatggcacgggtt

SEQ ID NO: 248559 - DNA, 948 bp, Unknown
  Bacterial polypeptide expressing nucleotide sequence isolated from the Sargasso Sea
ataatatctattgaccaaggaacaacttcaagcagagcaattctgtttagtttaaaaggaaaacctgtttattcatctcaaaaagagtttacccaatattttcctaaaagtggttgggtagaacacgatcctgaagaaatttggagtacaacaaaaaaaactcttggagacgttattaataaagctcaaagaatcaaaggaaatgttttggcaatcggaatcactaatcaaagagaaactacggttttatgggataaaaaaaccggcaatccagtttataaagcaattgtttggcaagaccgtagacaggaacaattttgtaaaaaacttagaaaacaaaacaaagaaacacttatttttaatcgaacagggcttttaatcgattcgtatttctcaggaacgaagattaaatggatattagataatgtgccattggcgagaaaattaatggcaaagaaacaacttctttttggaactatagacagctttttaatttggagattaacaaaaggaaaagttcatgcaaccgatgctacaaatgcaagcagaactatgatttacaatatttcatcaaacaaatgggacgatacaattttaaaaatattaaagattaaaaaacatattttgcccgaggttaaagattgtgcagacaattatggttcaacacatccttctataacaggaaaatctattccaattagaggtgttgttggagatcagcagtcagcaactatcggacagtgttgctttgaaccaggttctctaaaaagcacctacggaactggagcttttattctattaaatacaggccctagaaagatatattctaaaaacagattgctaacaaccattggttatagaataaatggtaaaacaacttatgcactcgaagggtcaattttcatcgcaggtgcaggcgtttcatggggcagagaccgaatgaaattt

SEQ ID NO: 248560 - DNA, 723 bp, Unknown
  Bacterial polypeptide expressing nucleotide sequence isolated from the Sargasso Sea
catgaaagaaaaaattatttctattgaccaaggaaccacaagcacaagatcagtcttgtatgataagggaggaaattttatttgttctgcccaacaagaattcaatcagttctttcctaatgatgggtgggtagaacacaatcctgaagacatctggcaatctgttttatctactttacagaaattagttaaagagagcggaataactagttccgaaatagcttccataggtataactaaccaaagggaaactacactaatatggaataaaaaaacaggtaaaccaattcataatgctatagtctggcaagatagaagaacatcagaattctgcaatgatttagtttcgtacgagaatattattcataaaaaaacagggcttactatcgacccttatttctcagcaacaaaaattcattggctcttaaataatgtcgaaggtgtaaaggaactcgcattaaatggagacctattatttggaacaatagacacttttttaatttggaaattaacagaaggtaggtgtcacaagacagatatcacaaatgcctcaagaactatgctattcaatatagcagaacaacaatgggatgatgacttattggaagtctttgaaattccaaggcaaatacttccagaagtttgtgacaacgtatcagattacgggatgactgaaatactaggaggtgaggtgagcataggcggagtagctggagatcaaca

SEQ ID NO: 248561 - DNA, 536 bp, Unknown
  Bacterial polypeptide expressing nucleotide sequence isolated from the Sargasso Sea
tgagcataacccagaagaaatttggagcacaactaaaaaagttctaaaagatgtaatttttaaagctaaaaaattaagaggaaaaatattaactattggaattactaatcaaagagaaaccacaattttatgggataaaaaaactggcaaaacggtctacaaagccattgtttggcaagatcgtagacaagcagattattgtaaaaaattaaaaaatcaaaataaagaaacacttatttttaataaaactggattacccatcgactcttatttttctggaactaaaataaaatggatattagacaacgttccattagctaaaaaattaatgaataaaaaacaacttatgtttgggactatagatagttttttaatttggaggttaacaaaaggtaagatacatgcaacagatgctactaatgcaagtagaacaatgatttataatatttctacaaataaatgggatgacacaattttaaaaatattaaaaataaaaaagcatattcttcctcgatgtaaaagactctgcagataat

SEQ ID NO: 248562 - DNA, 847 bp, Unknown
  Bacterial polypeptide expressing nucleotide sequence isolated from the Sargasso Sea
tacaaatacacttaataaagttgtaaacgctgatttaggtattgaagcgtgtggcattacaaatcaaagagaaacgacaatagtctggtcaaaatcgtctggtgaagcaatttatcctggaattgtctggcaagatagaagaacacatgaatactgctcatatcttaaatcaaatggtcatgaatcagtcataaaagaaaaaacaggattacttctcgatccatatttttcagcaacaaaaattaagtgggttttagataatgttgacggagcaagagaaaaggcgagtaaaggtgagttattgtttggaactgttgattcatatcttatttatatgctttctaaagaaaagaatcatttcacagatgttacgaacgcgtcgagaactttactttttaatataaaaaatatggaatgggatgatgagctattggaactatttgaaataccgaaaaacatgatgcctgaagtgttaagttgtgatggtgattttggtaatttaaaaataaatgattgcgagattccaattagaggtgttattggagatcaacaagcggctcttgttggtcaaggttgctttaaaaatggtgatatgaaatctacatatggtacgggttgcttcttaatggtaaatacagaagaaaaccccttaaatgttgatgaaggtctgcttacaacggtggcatatcaattagatgacaaagttcattatgctattgaaggtagcatttactcatcaggaactataattaaatggctccgagacaaaatgaaattttttgaaagcgctgaagatagcgagaaatatctcaataagagaggaaatagcaataatgttctttttttg

SEQ ID NO: 248563 - DNA, 484 bp, Unknown
  Bacterial polypeptide expressing nucleotide sequence isolated from the Sargasso Sea
aatgaaaaaaaactttataatatcaattgaccaaggaactacatcaagtcgggcaattctatttaatataaaaggcaaacttatttattcatctcaaaaagaattcacacaatattttcctaaaagtggttgggtcgaacataatccagaagaaatttggagcacaactaaaaaaactctcaagaacgtaattagtaaagccaaaagactcaaaggaaaaattttggcaataggtattacaaaccaaagagagacaactgttatgtgggaaaaaaaaacaggaaaggctgtatataaagcaattgtttggcaagacagaaggcaagaagaattttgtaaaaaattaaggaaacaaaataaagaaacactaattttcaatcgaactggattattaatagactcctatttttctggaactaagatcaagtggatactagacaatgtaccattggctagaaaactgatgtcaaagaaacaacttctt

SEQ ID NO: 248564 - DNA, 374 bp, Unknown
  Bacterial polypeptide expressing nucleotide sequence isolated from the Sargasso Sea
tatgaagagatatatattatcaattgatcaaggcacaaccagctcaagagtggttttatatgataataaatttaaaattaaatatattgaacaaaaagaattcagacaattttttccaaaagacggatgggtagaacatgatgctgaggaaatatgggatgatgtaaaaaaattaattcaattaacaataaaaaaaaataaactaaaaactaatcaaattgcctctataggcattaccaaccaaagagaaacaacagttctctggaataaaatcactggcaaacctctatataaagcaattgtatggcaagacaggagaacggctgactattgtgacaagttgaaagcacaaaataaagataaaataattcaaa

SEQ ID NO: 248565 - DNA, 381 bp, Unknown
  Bacterial polypeptide expressing nucleotide sequence isolated from the Sargasso Sea
aatgaatactaagattttaacaattgatcaagggactacaagctctcgagctgtaatatttggtgaaaatatggaagtactcgatcaatcgcaacaagaatatccattaatatatcctgctgacggatgggtagaaatagatccaaacgtattattaaactccgtgattgaaacattatccgctttcaaagatgagcacattgaaaacgttgctatcaccaatcaaagagagacaacgcttgtgtgggacaaaaaaactggaaaccctatttataatgcaattgtatggcaagacagaagaacaagtgattactgtgaatctataaagacaaaggatgtgcagtcattagttcagaaaaaaactggtttaattctcgatcc

SEQ ID NO: 248566 - DNA, 259 bp, Unknown
  Bacterial polypeptide expressing nucleotide sequence isolated from the Sargasso Sea
atgaaatatataattgctctagatcagggaacaacgagctcaagggctttacttattaatgaagttggaaagctaattgacgtcaaacaaaaagagtttaaacaaatttttcctaaacagggctgggtagaacatgatccaattgaaattttaaatactcagttggaagtttttgaagaacttataagttctatttcactgagtgatataattagtattggaatcacaaatcaaagagaaactactgttatctgggata

SEQ ID NO: 248567 - DNA, 919 bp, Unknown
  Bacterial polypeptide expressing nucleotide sequence isolated from the Sargasso Sea
agtaaaaaacaacttcttttcggaacaattgatagcttcttaatttggagactaactaaaggcaaagtccatgcaacagatgcaactaatgcaagtagaacgatgatttttaatatatctacaaataagtgggatgatacaattttaaatatattaaaaattaaaaaacatattctgcctgaggtcaaaaattgcgctgatgattatggatcaacacatccatcaattacaggcaaaccaataccaataaccggagttgtaggtgaccaacaatctgcatcaataggccaatgttgttttgagccaggttcattaaaaagtacttatgggactggagcctttgtattattaaacactggttataaaaaaatatattcaaagaatagactacttactacaataggatatagaattaacggcaagaccacttatgcgatggaggggtctattttcattgcaggagcaggtgttcagtggctaagagatcgaatgaaattctttaaaaaagcatatgaaactgaaaagattttaaagtctttaaaaaataacaaagatgtttatttagttccagcctttacaggtatgggggcaccttattggaaccagcactcaagaggtgttttaagcggtttaacaagagatacaggtcccagagaaattgtaagagctacgatagagtctgttgcctatcaaacacatgatttatttgaagcaatgaaacatgatggtttaagacctagaatggtaaaagtagatggaggaatggttatgaataattggttttctcaatttttatctgatgtagttaacgtaaaagtttacaggcctaaagttcatgagactacagcattaggcgctgcattcatggctggcttaaaaattggtgcatataaatctttaaaagatatctctaaaaatt

SEQ ID NO: 248568 - DNA, 915 bp, Unknown
  Bacterial polypeptide expressing nucleotide sequence isolated from the Sargasso Sea
actgaaaactttttgtgagacattaagagaaaagaatttaacaaaactaatccaatctaagactggtcttataatcgacccttacttttcagcaactaaaattaaatggattattgaaaatattgatgaagcaaaaattgcaatgagtcaaaataatctgttagtcggtactattgatacttggcttatctggaattttacaaaaggtgaatgtcattacacagatgttactaatgcatcaagaacaatgctttataatataaatgaagattgttgggatgatgaactattaaatatttttaatattaacaaaaatattttgcctgatgtaaaaaattgcgttgatgactttggagtaattgattctagtttctttggagaaaaaatttcaataggcggagtagctggcgatcaacaggcagcaaccattggacagacttgtttcaaggaaggaatggttaaatcaacttatggtacaggttgttttttattaatgaatacaggaaataaattcatagaatctgagtccaaattattgtcgacaaaagcttataatatatttgataaaaaagattttgctttagagggcagtatctttaatgcgggtacggttgttcaatggatgcgcgatgagatgaatttcattaaagatgcaagtaaggtagaagagttagcaaataacagtaccaacgaaatacaattcatccctgctttcactggtttgggagctccttattggaactctgatgtaaggggtcaaattataggaattactcgggatacttctaaggctgatattgctatggctgcattaaaatcaatatgttatcaaacaagagatctcattgagtgcctgcttaaagatacagaactaaagagaagtgattttactattcgagttgatggaggcatgtc

SEQ ID NO: 248569 - DNA, 844 bp, Unknown
  Bacterial polypeptide expressing nucleotide sequence isolated from the Sargasso Sea
aatgccattggtttggcaagatagaagaacatcagaattctgccatgaattaggctcgtacgagaatattattcaaaaaagtacagggcttacagtcgacccttatttctcggcatcgaaaattcattggctcttaaataatgttgaaggtgcaagggaactcgcattaaacggagagttgttatttggaacagtagatacctttttaatttggaaattgacggaaggtagatgtcataagacagatatcaccaatgcctcaagaacaatgctgttcaatatagaagaacaacaatgggatgacgaattattggatatatttgagattccaagacaaatacttccggaagtttgtgacaacgtatcagattacggaatgactgaagtgcttggaggtgaggtgagtataggcggagtagctggagatcaacaagctgcattaatcggccaatgttgtttcgatcccggggatgttaaaagcacttacggtacaggttgtttcatgatggtaaattcaggagataagattttatattctaagaacaaattgctttcaaccataggttatcgaattgatggcaaaacaacatacgctttagaaggaagcatatttgttgcaggttcagcaattcagtggttgagagatggattgaatttttttgaagacaccatcgaatctgaggcgatgtcgaaaaaagcctctttagattctagagtactagtaattccggccttgactggtttaggcgctccttattgggatgctgaagcaagaggagccatattcggaataactagagatacaagtaaagaagatattacgaaggctacacttgagtcagta

SEQ ID NO: 248570 - DNA, 942 bp, Unknown
  Bacterial polypeptide expressing nucleotide sequence isolated from the Sargasso Sea
aaaaacaggaaagcccgtttataatgcaatcgtttggcaagatcgaagacaagaggaattttgtaaaaaacttagaaagcaaaataaagatactatgatctttaacaaaaccggtcttttaatagactcttatttttcaggtacaaaaatcaagtggatattagataacgttccaaaagcaaaacaacttatgaacaaaaaacaattgttgtttggtacaattgatagttttttaatttggcgtttaactcgaggaaaagttcatgcgactgacgcaactaatgcaagcagaacgatgatttacaatatatcatctaacaaatgggatgaaacgatactaaatcttttaaaaattaaaaaacatatcttaccagaagtgaaagattgcgcagatgactatggtcaaacacactcatcaattacaggtaaatcaataccaataaatggtgtagtaggagatcagcaatcagctactattggtcaatgctgttttgaaccagggtcacttaaaagcacgtatggtacaggagcatttgttttacttaatacaggcagtaaaaagatttattcaaaaaatagattgttaactacaattgcatatagaattaatggaaagacaacatacgctatggaaggatcaatttttatagcaggtgcaggtgttcaatggctcagagacagaatgaaattttttaaaaaagccccagaaacagaaaaaattgtgaaatctttaaaagataataacaatatttatctagtaccagcttttacaggactaggagctccctattgggatgcaaacgctagaggagttttaagtggaattactagagatacaagtccaaaagaaatagtgagagctacaattgaagccgttgcctatcaaacatacgatttatttgaagctatgaaacacgatggtttaagacaaaaaattgttaa

SEQ ID NO: 248571 - DNA, 640 bp, Unknown
  Bacterial polypeptide expressing nucleotide sequence isolated from the Sargasso Sea
actggacttctgttagatccatatttttccgctacaaaaattaagtggatcctagataatgtgaagaatgccaggagaaaggcagaaaatggcgagctttgttttggaacaatagaaacttatctaatttggaatcttacagaagaaaaaaaccataaaacagatgcaacaaatgcctcaagaacaatgttaatgaatcttgaaactctagggtgggatgactcacttcttgagatatttggtataccaaaaaatattcttcctgaaatatgttcgtgtgatgataattttggttcaatcggtgcttgtgatcaaaactttccagtaactggggtaataggcgatcaacaatcagcactttttggacaaaattgcttcgagttcggcgaaatgaaaagcacttacggaacgggctgttttttaatggttaatacgaaagaaaaaatctatgaatctcaagcaagattgctttcaacagtaggatgtatgcttggcaaaagtgtctcctatgctcttgagggtagtatcttttctgccggtacctcaattcaatggcttagagatgaaatgcagttctttgatgattcttctgaaagtgaggaacttattaacgaagactttgactcaaggggggttaact

SEQ ID NO: 248572 - DNA, 463 bp, Unknown
  Bacterial polypeptide expressing nucleotide sequence isolated from the Sargasso Sea
atggcagatcagcctctcctgttggcgctggatcaaggcaccagcagttcccgagcagcggtgtttgacgccaagggcgaccttgtggccagtgcgacggcgcccctaccaatccaataccccgccgatggctgggtggaacaacaccccggcgacatctggaacagccaaaggcaggcactgcaggatctgcaccaacagctcgatgaggagcaacgtcgggccgtggtgagctgcggcatcaccaatcaacgcgaaaccacggtgctctggcgtcgcagcagcggcagcccctgcggaccggccctggtctggcaggacggccgtacagcagacatctgccaagcctggaaagcagacggcctcgaatccgcgtggtgccagcgcaccggcttgctgctggatccgtacttcagcgccagcaagatccgttggatgctcgagcatcaccccgaggcggcag

SEQ ID NO: 248573 - DNA, 550 bp, Unknown
  Bacterial polypeptide expressing nucleotide sequence isolated from the Sargasso Sea
aatgaaaagatttataatttcaattgacgccggaactacttctaataggtcaattctttttgatttaaaaggtaaaccaattttttcttctcaaaaagaatttactcaattttttccaaaaagtggttgggtagaacataatccagacgaaatttggaaaacaacaattaaaactttaaaagatgtaatccaaaaagctaaaaagctaaaaggtgaaattttaagtattggaattaccaatcagagagagactactgttttatgggataaaaaaacaggtaatccagtttatagagctattgtttggcaagataggcgtactgaagaattttgtaaaaagttgagaaaacaaaataaagatacaatggtttttaataaaactggtctattaattgactcatatttttctggaacaaaaattaaatggattttagacaatgttccaaaagcgagacaattaatgtcaaaaaaacaattattgtttggaacaatcgatagctttttgatttggagactcacaaagggaaaagtacatgctactgacgcaact

SEQ ID NO: 248574 - DNA, 709 bp, Unknown
  Bacterial polypeptide expressing nucleotide sequence isolated from the Sargasso Sea
gatcagggtactacttctagcagagcaatattatttgatttaaaaggaaaacctatttttacttcacagctagaatttacgcaatattttcctagagatggttgggtagagcacgatccagaagaaatatggaaaactactttaaaagttttaaaagaagttattaaaaaaagtaaaaagcttaaaggaaaagtactaactatcggaattacaaatcaaagagaaacaactattttgtgggataaaaaaactggaaagtcagtttataatgcaattgtttggcaagatagaagatcctctgagtattgtaaaaaattaattaaactaaaaaaagaaacaattatttataataagacaggtctattaattgatgcatatttttcagcaactaaaattaagtggataattgacaatgtaccccaggctagagatttaattaaaaaaaagagattattgtttggaactgttgatagttttttattgtggaagttaacaaaaggtgtggatcatgcaacagacgcaactaatgctagtaggacaatgttatttaatatttctacaaataaatgggatgatcaaatattaaaaattttaaatatacctaaagaaatattaccaacggttaaagattgtgctgctgattttggttatacagatccttcaattactggctcttcttatccaattacaggaatggtggagatcaaca

SEQ ID NO: 248575 - DNA, 688 bp, Unknown
  Bacterial polypeptide expressing nucleotide sequence isolated from the Sargasso Sea
tttgatcattaatacaggagataaaaaaatagattccacaagtaggctgctttcaacaatagcttatagatttaacaacaaaattacttatggcctagaaggaagtgtatttgttgccggttcctctattcaatggctaagagatgaactagggttttttaagaatgcttctgatacagaaagtttagtttcatcaagagataacacttcaaatgttttggtcgtgcctgcttttactgggctcggggcaccacattgggatcctgaagcaagaggagcaatatttggaattacaagagcaacaggagtaaaagaaattactgcagctactttagagtctattgctttccaaacacgagaccttatagaagcatctgtaatagatggagctgatataaaggaactgagggtagacggaggaatggtcgcaaatgattggtttattaagcaactatcaagtttgctaggcatgaaaattttaaaaccaaaatttctagaaactactgctttgggagctgcttatcttgctggaatttcttcaagcttagtagatgactttaatcatttacaaaatacactattagtagataaagagatctctccagtagagaccgaaaacgctttattagatataaaatacagaaattggttaaaggctgtagaggcaataaagacaataaaagactag

SEQ ID NO: 248576 - DNA, 499 bp, Unknown
  Bacterial polypeptide expressing nucleotide sequence isolated from the Sargasso Sea
atgaaaaattttattctttctattgatcagggaactacttcaacaaggtcaatacttttcgatctaaaaggcaaaccagtatttgtgtcgcaaaaagaatttaaacagtattaccctcaagatggatgggttgaacataatcctgaggaaatatgggttactacaaaaaaagtaataaaagaaattataaataaaaataaaaaaataaaaggaaatattttaacgatagggataacaaaccaaagagagacaactttgctttgggatagcaaaactgggaaatgtatttataacgcgatcgtttggcaagataggagaactacaaatttgtgtaataaactaaaaaaaaaaggattagaaaatttaataaaatcaagaacaggtttactgttagatccatatttctcagctacaaaaattaaatggataattgaaaatattccgttagcaaaaaaactattaaaaaaagataggttgttatttggaacaaatagataca

SEQ ID NO: 248577 - DNA, 663 bp, Unknown
  Bacterial polypeptide expressing nucleotide sequence isolated from the Sargasso Sea
aatatttcaaaaaatattttgcctgaagtaaaaaattctgcagacaattttggatttactaataaaaaaattattggacaagagattcctatatctgctgttttaggtgatcaacaagctgctgcagtaggccaagcgtgttttgcaaaaggttcagtcaaatgtacttatggtactggagcttttattattatgaacactgggtcaaaaaaaatttattcaaaaaataaattattaactacaatttgctatagaataaatggaaaaaatacttatgcattagaaggttcaatttttatagcaggtgctggcattcaatggttaagagataaattaaaattaattaataatgcatatgaaacagaaaaaattgctaaatcaaaaaaaaataatgataatgtttatgtggttcctgcatttagtgggatgggagcaccttattggagacctaatgctagaggattaataacaggattaacgagaaatagtgattggaaaaatttggtaagagctactattgagtctgttgcgtaccaaagttatgatttatttaatagcatgagaaaagatggattaaagcctaagtttgtaaaagttgatggaggtatggtagctaataattggttttctcaatttttatcagacattataaatttaaatgtt

SEQ ID NO: 248578 - DNA, 791 bp, Unknown
  Bacterial polypeptide expressing nucleotide sequence isolated from the Sargasso Sea
ttttggacaggcgattcctatatctgcagtacttggagatcaacaagcagcagcgattggtcaggcttgttttcaaaaaggaacaataaaaagcacatatggcactggtgcatttgttataatgaatactggatcaaagaaaattttttctaataacaaattgttaactacaatttgttatagattacacggaaaaaatacttatgctctagaaggttcaatttttattgcaggtgcaggagtacaatggcttagagataaaataaaattaattaataatgctaatgaaacagaaaaaattataaaatcaaaaaaaaataatgacggtgtgtatatagttccagcatttagtggaataggagctccttactggagatcagatgcaagagggattattactggtttaacaagaaatagtgattggaaatctttagtgagggctattatcgagtcagttgcatatcaaagctatgacttgttttatgctatgaaaaaagatggtttaaaacctaaacttattaaaatcgatggaggaatggtcgcaaatgattggtttgctcaatttttatcagatataataaatttaaatgttattagaccaaaagtattagaaacgactgctttaggtgctgcttttttagcggggtatcaaattggagagttcaaatcattaaaagaaattcaaattaaatggaaaaaaagtagaattttttctccaaaacttagcaaatcgttgagaaataatttattgcaaggttggagacaagcaattagaaaaactttagcgtaat

SEQ ID NO: 248579 - DNA, 862 bp, Unknown
  Bacterial polypeptide expressing nucleotide sequence isolated from the Sargasso Sea
gatacttggctactttggaaactcactgaaggcagatcacatttaacagatataacaaatgcttccaggacaatgatctatgatccaaaaaaagagagatggtctgaagaacttttaaatttatttaatatagataagagcatgttgcccgatgtaaaagaaaactcatataattttggaacaactaaattatttggtggtaaaattgaaataggtggaatggcgggcgaccaacaagcggccacaataggtcaagcatgttttaatgcaggtcaatcaaaaagcacttatggaactgggtgttttttattaatgaacataggaaataaatttaaaatttcttcaaataaacttctaacaacagtagcttttaaaattaatggaaaaaagatgttttgttatgaaggcagtatatttgttgctggatcagcaattcaatggcttagagataatatgttattttttaaagattcaaaagaaactgataaaatctattctcaagccaatagatatgaagaagttattgttgtgcctgctcttacaggtttgggagctcctcattgggaaccaaatacaagaggagcaatatttggattaaccagaaatacatcacaggcagatattataaaggcaacactagatagcctctcattccaaacattagacttaatagaattaatggagcgagatgctaaaattaaaattacagaaataagagttgatggcggaatgataaataataataactttcttcaaagtttatcagatgtaacacaagtaaaaattatcaaaccagaaaacatcgaaaccacatctcttggcgcagcttatttagcaggacttaattcaggattaattaata

SEQ ID NO: 248580 - DNA, 361 bp, Unknown
  Bacterial polypeptide expressing nucleotide sequence isolated from the Sargasso Sea
tatgcctaaaaaaattatttcaattgatcaaggaacaactagttctagagcagttgtgtatagtgatcaaggtgagttaatagggtatgaacagatggaattttcccaaaagtttccagatgatggttgggttgagcatgacccggaagaaatttggcaatcagttgttcaggtattaaaaaggtccattcagcgtttcgatttgatcccttcagatattgcatcgataggaattaccaatcaacgagagactgtcgtgatttgggataaaaaaacaggtaaaccaatttacaatgctatcgtttggcaagatagaagaacgagtgatttctgtgatgctttaaaagagagtgaaagagct

SEQ ID NO: 248581 - DNA, 616 bp, Unknown
  Bacterial polypeptide expressing nucleotide sequence isolated from the Sargasso Sea
aatgtcaaaaatagtcatggcactggaccagggtaccacaagctcacgtacaattcttttcaatgaaaaaggagaaataattgctaatgcaagcgcacctttaacctgctactatccccagtccggatgggttgagcaggacccgcaggagatatggacaagccagtctaaaacaattcaggaggtgttgaaaaaagctgccctgacaatgaaggacattacagcggtgggaatcacaaaccagcgtgagaccactatagcatgggatagaaatactggtgaggcaattacaccggctattaattggcagtgccggcgtactgctgattattgtgaggtgttgaaggaggagggttttgaatgtgttctgagaaacaggacaggactggtaattgatccctatttttccggaacaaaaatgcgctggatcctggaaaacgttcctcaggcacataagctggccgaacagggtaatctatgttttggtactgttgactcttggctgatctggaagctgacaagtggccagtatcatgttacggaaattagcaatgcatcccgtacgatggtttttaatattgatgcatgttcatgggattatgaaatatggcaaaat

SEQ ID NO: 248582 - DNA, 763 bp, Unknown
  Bacterial polypeptide expressing nucleotide sequence isolated from the Sargasso Sea
atattcaagtgaaggattgctaactacacccgcataccgtctcgatggcaaagttacctatgccttacaaggatctattttcatggctggtgcaaccatacaatggctgcgtgataatttaaaaataattcaaaatgcttctgatactgaattgttagcgcaagaattgaattcaaatgcaggcgtttatttggttccagcatttgtaggtcttggaactccatactgggagcctgatgctcgtgcttctataactggactggggcgtgattcagaaatagctcatattgcccgtgcagccttagaatcagtggcttatcagacctttgatttaattactgcaatggttcgtgactcaggattaaacattcccagtgttcgggttgatggaggaatgacacagaataattggctgatgcaattcctagctaatgtaattgatataactgtggaacgtcctacttttacagaaactacggcgaaaggtgcatttgtattggccgctcttcaatcaaatattttaaattcgattagcgatgttgaatctgcctggatcgttgataaaagttttgaatccgatattaaagaatcacaacggcgacaacttattgatggatggcagcaagctgttgattcagtgatagggctttcgaaatttaaatcatcgaaacaaccgaatgaagatcagtactattctgaaataggtaaaaaaattgctgatgaaaatcttgatgatctaatgtcacgtttgatggatgattaa

SEQ ID NO: 248583 - DNA, 780 bp, Unknown
  Bacterial polypeptide expressing nucleotide sequence isolated from the Sargasso Sea
attgaaaaatagaaataaatttattgtagcaatagatcaaggaaccacttcaagtagagctattctatttgatagtaatggccagtcattatttaaatctcaattagagcataaacaatattttccaaaaaatggctgggttgaacataatccagaagaaatatggaacaagacaaaaaaagtattagtaaatgttattaataaaagtaaaaattttaagggtgaagtattaagtataggcattacaaaccaaagagaaactacaattttatgggataaactttcaggaaaacctgtgtatagagcaatagtttggcaagatagaagaactgcagatttttgtaaaaaatttaaatcccccaaaaaagaacttttaattaataaaaaaacaggattatttattgatccttatttttcagcaacaaaaattaaatggataattcaaaacgttcctaaagccaggaaacttttaaagaaaaaacaacttctttttggaacaattgatacttttttactatggagactaacaaaaggaaaaattcatgctacagatgcgactaatgcatctcggacaatgttatataatattaataccaataaatgggatgaacaaatattaaaaagtttaaaaattccaaatcacatattacctactattaaaaattcttctgatttttttggaaaaactcataaatcaattacgggaaaatcatattatataactggagtaataggggaccaacaagcagcagcctttggacagtgttgttttgacaaagg

SEQ ID NO: 248584 - DNA, 813 bp, Unknown
  Bacterial polypeptide expressing nucleotide sequence isolated from the Sargasso Sea
tcggtcgatcaggaaacaacaagctcgagagcaataatttttgatgaaaatcagaaagttatcgcagaatcacaaagagagtacaagctttcatacccaaaggatggttgggttgaagcaaatcccagaactatattggacactgtgaaagaggttataaatgaagtgctgacaacaacaggagtcaaggttgcatgttgtggcattacaaatcaacgcgagtcggttgttgtatggaataaacacactggtgaagaagtttaccctgcgataatatggcaagatagaagaacaagtgagttttgtcggagtctcgcattaaagaagccaaaatttgagaaacaactcagacagaaaactgggcttttacttgatccatatttttcagcaacaaaaattcaatggattctaaaaaatgtttcaggtgcgatgaaattagctcaaaaaggagacctatgttgtggaacgattgatagttttctagtctggcacttaactgaagaaaacaatcatcttacggatgtaacaaatgcatcaagaacaatgcttatggacattagaagttgccaatgggatcaagaattactcagagagtttgacataccagaaagcatgcttcctgaaataaaaaataatgattacaatttcggcacaataaaatctaatcactcttttccaattacaggtgtaataggcgatcaacaaagtgctttatttggccaagactgtctttcctcaggggacatgaagataacttttggaactggttgctttttaatggttaatactcttaaagaaattgtttactgtaaa

SEQ ID NO: 248585 - DNA, 931 bp, Unknown
  Bacterial polypeptide expressing nucleotide sequence isolated from the Sargasso Sea
aatatggggtgacgttaaaaatcttataaaaaaaatcttaaaaaaaaataacctgagttcagctaatataatatcaattggaattactaatcaaagagaaacgactatattatggaataaaaataatggtaagccaatatataaagctatagtctggcaagatagaagaacaagcaaatattgtatacatttaaaaaaaaataagaaagataaaataattcaacaaattacaggattagaacttgatccatatttttcagctacaaaaattaaatggatattggagaatattaaatctgctaaatcaaatctcaaaaaaaataatcttatgtttggtaccattgatacctggttgctatggaatttgactaagggtaaatctcatttgacagatataacaaatgcttcaagaactatgatttttgatgctaaaaaagaaaagtggtctaatcaaatgatgagtatttttggtataccaaaaaacatacttccaaaagtagttgaaaattcttatgattttggaacaacagatttatttggaagttcaatcagaattggaggtatggcgggtgatcaacaagcagcaactattggacaagcatgttttgacaaggggcaatcaaagagtacctatggcactggttgttttcttcttatgaatactggtaataaatttaaattatctaaaaatagattacttacaactgtagcatacaaaataaaaggtaaaaaaatgttttgttatgaaggaagtatctttgttgctggttcggcaattcaatggctaagagataatttaaaattttttaaattttctgacgaaactgataaactctataataaagctaataaaggtgagaatattttttttgttcctgcattgactggattgggggcaccttattggaatccaaatgctcgtggtacattt

SEQ ID NO: 248586 - DNA, 760 bp, Unknown
  Bacterial polypeptide expressing nucleotide sequence isolated from the Sargasso Sea
atagaaatttttgaaagtgtttcaaacgctgtaggtaaattattagatgaatgtaaaatacagttttcatcaattacttctgttggtattaccaatcagagagaaacaattatagcttgggataaaactactggaaaacctgtatataacgcaatagtttggcaatgcaggagaacaactaattactgtaatttgcttattgataaaggactttcccaaacaataaaaaacactacagggttaacaatcgatccatatttttctgctaccaagatttcatggatcctagaaaatgtgccaggagcacgcacgttagcagacaatggttctttagcttttggtaccgtggattcatggttagtatggaacttgtctcatggatcaagtcatattattgatataactaatgctagtcggacaatgctttttgatattaataaattagagtggtcagatgagcttctcaatattatgaatattcctgaatcaatgctccctgaagttgtgccatctagtggaaaattagctaatgtatcctttggattaaataatccttctcttcctttaactggaatagctggtgatcaacaaagcgctttatttgggcaaggttgttttgaaccagggatggtcaaagtaacctatggaactggagcctttttattaattaatacggggtctcaattgatttctactggaaaagaacttttaaccacaataggatggagtttaaatgggcatgtttcttatgctttagaag

SEQ ID NO: 248587 - DNA, 858 bp, Unknown
  Bacterial polypeptide expressing nucleotide sequence isolated from the Sargasso Sea
gaataaaaaaaacaggaaagccaattaacaaagcaatagtttggcaagatagaagaactgctcattattgtaaaaagcttaaaaaatctaataatttaaaaataataaaaaaaattactggattagaaattgatccatatttctctgctacaaaaataaaatggatacttgagaataataaatctgcaaaaaaattattaaaagaggagaacctactatttgggacaatagatacatggttgttatggaatttaactgaaaaaaaatctcatttgactgatatcaccaatgcttcaagaacaatgatatttaattctcaaactgaaaattggtctaaaagattattaaaattatttaaaattccacattctattttacctagtgttgttgaaaatacatttaattttggaacaacaaatttattcggatatcctataaacattggagcaatggctggagatcagcaagcatcaaatattggacaagcatgctttaatactggacaatcaaaaagcacttatggaacaggttgtttttttttaatgaatattggaaataaatttaaagtttctaatcataaactacttacaactattgcattcaaaataaatggaaaaaaaatgtattgttatgaaggaagtatatttgttgcgggatctgctattcaatggatgcgggataatcttaatttttttaaagattctgttaagacaaataaattgtacttaaaagccaataaacaagaaaaaattatagttgtgccagctttaacaggtcttggagcaccgcactgggatccaaatatacgcggtgcaatttttggattaactcgaaatacttcaataccggatatttaaa

SEQ ID NO: 248588 - DNA, 760 bp, Unknown
  Bacterial polypeptide expressing nucleotide sequence isolated from the Sargasso Sea
tttgggtgatcaacaagctgcagctgtaggacaatcttgttttaaaaaaggctcaattaaaagtacttatggcacaggtgcttttgtaataatgaatactgggtcaaaaaaaattttttcaaaaaataaattattaactacaatttgttacagattaaatggaaaaaatacttttgctctcgaaggttcgatttttattgctggagcaggtgtccaatggttaagagataagttaaaattaattaataatgctcatgacacagaacaaattgctacatcaaaaaaaaataatgaaggtgtctatgttgtaccagcttttagtggactgggagctccatactggagacctgatgcaagaggagttataactggattaactagagatagtgattggaaaaccttggtaagagcagttatagaatctgtggcataccaaagctatgatctatttagtgccatgagaaaagatggattaaaacctaatatagtaaaaattgatggaggcatggtggaaaataactggttttcacagtttttggcaaatattattgatattaaaacagaaagacccaaagttttggaaaccacagcacttggagtggctttatttgctggataccaaataggaatatttaaatcattagatcaaataaagagaaaatggaaaaaagataaaacctttaaacctaaactaagttcgacaatgagaaaaaaactattgaatggatggaagctgtcagtcgaaaaaactttattgtaa

SEQ ID NO: 248589 - DNA, 751 bp, Unknown
  Bacterial polypeptide expressing nucleotide sequence isolated from the Sargasso Sea
caatcagcaactattggtcaatgctgttttgaaccaggttcattaaaaagcacatacggcactggagcttttgtattattaaatactggttcaaaaaaaatttattcaaaaaatcgattgttaaccactattgcctatagaattaatggaaagacaatatacgcaatggagggatctatttttatagctggtgctggtgtgcaatggttaagagatagaatgaaattttttaagaaagcacctgaaacagaaaaaatagttaaatcacttcaaaacaacaatgatatttatttagttccagcattcactggattaggtgctccatattgggacgctaacgctagaggagttttaagcggcattactagagatactagtcctaaagaaatagtcagagctacgatcgaggcagttgcttatcaaactcacgatctttttgaagctatgaaacatgacggtttgagacctaaaattgtaaaagttgatggtgggatggtaatgaataattggttttcacaatttttatctgatgtagtgaatgtaaaagtattaagacctaaagttcaagaaaccactgccttaggtgcagcttttatggctggtttgtacatagggatatacaaatcgttaaaagatatttctaaaaactggaacttagataaaaaattttcaccaaaaatgaaaaataaatctagaacaattctaattaacggctgggaaaaagcagtcaagagagccttaataaattaac

SEQ ID NO: 248590 - DNA, 880 bp, Unknown
  Bacterial polypeptide expressing nucleotide sequence isolated from the Sargasso Sea
actaaaattaaatggattatcgataacgtaaaggaagtaaagaagaatttaaagagtaataatttactttttggaactatagatacctggctgttatggaatttgactaatggaaaatctcacttaacagatatatcaaatgcttcacgaactatgatttttgattctcaaaaagaaaaatggtcagacgaaatattaaaaatattaaatattccaaagaaaattttaccaactgtagttgaaaatacatttgattttggctctactaaattatttggtaatgaaatacctatcggagggatggctggagatcaacaatctgcaacaattgggcaagcttgttttataaaaggacaatcaaaaagtacttatggtacaggctgttttcttctcatgaatattggtgaaaaatttaaattatcaaagaatagactgcttacaactgttgcttttaaaataaatggtaaaaaaatgttttgttatgaaggaagtatttttgtagcaggttctgtaatacaatggcttcgggataatttaaaacttataaaagatactggtgaaactgataaactgtataaaaaagctaataaagatgagaatttatattttgttccggccttgactggacttggcgcaccgtattggaaccctaatgcaagaggaacattttttggcataaccagaaaaacttctaaagaagatattatcaaagcatcactagatagtctatcttttcaaacctatgaattaattgaatgtatggaaaaagattctaaaataaagattagcgaaattcgagttgatggaggtatggtaaaaaataatagttttcttcaaaagtttggcaaatgtctctcaaataaaaaatcattaggccaaa

SEQ ID NO: 248591 - DNA, 608 bp, Unknown
  Bacterial polypeptide expressing nucleotide sequence isolated from the Sargasso Sea
aatgaaaaaatttatcatctcaattgatcaaggaacaacctccagtagagcaattttatttgatctaaaaggtaaaccagtttttacagcacaaactgagtttactcagtattttcctaatgacggatgggtagagcataatccagaagaaatttggaaaacaactttaaaagttttacggcaagttatctctaaaagtaaaaaactaaaaggtaaagttttaactattgggataaccaatcaaagagagacaactatattatgggacaaagcttcaggaaaacctgtttataatgcgattgtttggcaggacaggagagcatcagaatattgtaaaaaattaattaaacaaaaaaaggaaacaataatttacaataaaacaggtttattaattgatgcttatttttcagcaacaaaaattaagtggataattgaaaatgtaccaaaagctagagagttaattaaaaaaaagagattattatttgggacagttgatagttttttattatggaaacttactaacggcgttgatcatgcaacagatgctacaaatgctagtaggactatgttgtttaatatttcaacaaataaatgggatgaccaaattt

SEQ ID NO: 248592 - DNA, 427 bp, Unknown
  Bacterial polypeptide expressing nucleotide sequence isolated from the Sargasso Sea
atggaatattatggagccattgatcaaggtacaacaagctctcgttttatagtatttgataattcaggaaatattgtcgaacaacaccaagaagaatttaatcaatattttccagatgaatattctgttgaacacaatcctctagaaatttggacaagtgtagttaagtgtgtcgatgaagttctaaaaaatatagataaaaaacacataagatctatcgggatttctaaccaaagagaaacaactattgcctggtcaaaatcaacaggtaaaccattatttaatgcaattgtctggcaagatacaagaacacaattaatatgtgacgatatatcaaagaacaaaaatattgaggaagatattaagagaacagggcttcctatcgcaacctacttttcactttctaaaatactttggcttatagata

SEQ ID NO: 248593 - DNA, 607 bp, Unknown
  Bacterial polypeptide expressing nucleotide sequence isolated from the Sargasso Sea
ttggcatcgattaaaattgtgaaaaaatttcttgttgccattgaccagggtactacttctagtagggctattttgtttagtttatctggtatacctatttacacttctcaaatggagtttacacagtattttccaaaagatggatgggttgaacatgatccaagtgagatttggagtactactaaaaaagtattaataaatgtaatagaaaaaagtaaaaaattaaaaggaaaaattctaacaattggtataaccaatcaaagagagacaacaattctttgggataaaaaaactggcaaacatgtttacaatgcaattgtatggcaagacagaagaacagcagaattttgtaaaaggtttaaaacaaaaaatagagaaaaaattattaaaaaaaaaactggattattaattgatccttatttttcaggaactaaaattaaatggatattagaaaatattcccaaagcaaaaaaattagcaaaaaacaatcaacttcttttcgggacagttgatactttcttaatttggaaactcacaaaaggaaagaaacatttcacagatgctactaatgcctgtagaacaatgttatttaatatttccaaataat

SEQ ID NO: 248594 - DNA, 802 bp, Unknown
  Bacterial polypeptide expressing nucleotide sequence isolated from the Sargasso Sea
aaggcaattctcccaaatgtttgtaattcttccgaaataattggaagaacaaataaatctcatctaggatatgaaattccaattggaggaatagctggagaccaacaagcagctttatttggccaaatgtgtgttaatccaggggatgttaaaaatacttatgggactggatgcttttgtattatgaataccgggaaaaagccagtgatatcaaaaaataaaatgctaacaacaattgcatggagcattaaaaatgagactacatatgctattgagggaagcgtatttattgcaggagcgttagttcagtggctgagagatcaattaaatattgtaaaatcttcccctgaaattgagcaattagcaaaaactgtaaagaataatggaggcgtaacatttatacctgctctttctggattgggtgctcccttttgggatccgcatgcaactggagctataatgggtataacaagaggcactaaaaaaggtcatattgctcgtgcagcacttgaatcaattgccctaagatcaagagatataattctagagatggaaaaagatgcaaatacaaaatttcattctctaaaagtagatggaggagccagtaaaaataatttactaatgcaaatacaagctgatttattaaaaacaaaagttataaggccaaaaattactgagacaactgcccttggagcagcatttttttctggtctatccactgaattttggccttcaattaattcaatcaatgacatgtgggaagaggatcaatcttttgttccaaaattatctgatcaaaaag

SEQ ID NO: 248595 - DNA, 841 bp, Unknown
  Bacterial polypeptide expressing nucleotide sequence isolated from the Sargasso Sea
ttactttggaataaaaaaaatggcagacctatacataatgctattgtttggcaggatagacgtacacaaaaattttgccaaaatttaaaaaaaaataattatgaaaatagtattagaaaaaaaactggtttatttattgatccatatttttcagcaccaaaaattaggtggatattagataacgtaaaagaatctaaaaaattattaaagtccaataatttactatttggaaccattgatacttttttaatttggaagcttactaaaggaaaaggacatttaaccgaagcaactaatgcatccagaacaatgctttacaatataaataccaatcagtgggataaaaatatattgaaaaaattaaaaataccgtacaaaattcttccagaagtaaaaaattcagctgacaattttggaactacagataaaaaaattattggacaagaaattcctatatctgccgttttaggagatcaacaggcagctgcaattggtcaatcttgttttcaaaaaggttcaataaaaagtacttatggtactggtgcatttgtaataatgaataccggttcaaaaaaaattttttcaaaaaataaattattaaccacaatttgttatcggctaaatggaaaaaatacttatgcattagagggttcaatttttattgctggagcaggagtgcaatggcttagagataaaataaaactaatcaataatgcatatgaaacagaaaaaattgctaaatcaaaaaaaaataacgatggtgtatatgtggttccagcgtttagtggaataggtgctccttattggagatcagatgccaggggagtcattaccggttaac

SEQ ID NO: 248596 - DNA, 713 bp, Unknown
  Bacterial polypeptide expressing nucleotide sequence isolated from the Sargasso Sea
tgatgtcaaaaacacctacggaactggatgtttctgcgttatgaatactggagataaggtagttaaatcaaaaaataaaatgcttagcactattggatggagaattaatggaaaaataacatatgctctagaaggaagtgtttttgttgcaggggcattagttcaatggttgagagataaacttgaaattatttcagagtcatctgatattgaagaattagcaaaaactgttgatacaaatggtgggattacatttataccagcattatcaggtttaggcgccccttactgggacccatttgctcaaggtgctgtttttggattaaatagggggactgaaaaaggtcatattgctcgagcagccctagaatctattgcacttagaacaagagatattataattgagatgcaaaaagatgctgagattgaatttaaaaaccttaaagttgacggaggagctagtaataacaatttattgatgcaaattcaatctaatctccttggcaacaaagttgttagaccaaaaacaactgaaacaactgcaatgggtgtagctttcatggctggtctagcaacaggattttggtcagatatttctgaactaaataacctttgggagatggataaaacatttaatcctaatgaagattttgattcaaaatcaataattgatttatgggataaaaggatagttaagacactttcagattaat

SEQ ID NO: 248597 - DNA, 717 bp, Unknown
  Bacterial polypeptide expressing nucleotide sequence isolated from the Sargasso Sea
cctgttttttcttcacaaaaggaatttactcaatactttcctaaaagtggctgaggtagagcataaccctgaagaaatttggaaaaccacagttaaaactttaaaagatgtaatccaaaaagcaaaaaaattaagaggaaaaattttaagtataggcattaccaatcaaagagagacaacagttttatgggataaaaaaactggcaaagcgatttacaaagctattgtatggcaagatcgaagaacagaagacttttgtaaaatattgagaaaaaagaataaagatacaatgatttttaataaaacaggattattaattgactcttatttttcaggtacaaaaataaaatggatattggataacgtatctaaagctagagggctaatgaaaaaaaaacaattactttttggaactatagatagttttttaatatggagattaaccaaaggaaaaattcatgcgacagacgcaacgaatgccagtaggacaatgatatacaatatttcgtctaataaatgggatgatacaatattaaaattattaaaaattgataaaaacatcttaccagatgtaaaaaattgtgctgatgattttggagcaacccacccttcgataactggaaaagcaataccaattaatggtgttgttggtgatcagcaatcagcaacaatcggacagtgttgttttgagccaggttcacttaaaagcacatatgg

SEQ ID NO: 248598 - DNA, 582 bp, Unknown
  Bacterial polypeptide expressing nucleotide sequence isolated from the Sargasso Sea
gatgaaaaaatttatagtatcaattgaccaaggaacgacatcatctagagtggttttgtttgatactaaagggaacatgaaatttatttcacaatatgaatttaaacaattctttcctagaaatggttgggtagagcataatccaaatgaaatttggtcgacaacaattaaagcactaaaacaagtaattaaaaaagctaagagtttaaaaggtcatatacttactattggaattacaaatcaaagagaaactacaattttgtggaataaaaaaactggaaaacctatttataatgcgatcgtctggcaagatagaagaacccaggaatattgtaaatctttaaagaataaaaattatgaaaatatttttagaaaaaaaacaggattatttatagatccttatttttctgctactaaaataaaatggattttagataatgtaaaagtttcaaaaaagttactgaaaactaataatttattgtttggtacagtagatacatttttaatatggaaattaactaaaggtaaacagcatttaaccgaagctaccaacgcaagtagaacaatgttgtttaatatcaa

SEQ ID NO: 248599 - DNA, 334 bp, Unknown
  Bacterial polypeptide expressing nucleotide sequence isolated from the Sargasso Sea
atgaaaaaatttattgtttcaattgatgctggcacaacttcaaacagagctattctttttaatttgaaaggaaaaccagttttttcatctcaaaaagaatttacacaatattttccgaagagtggatgggtcgagcataacccagaagaaatttggaatactactaaaaaagttttaaaagatgttatttcaaaagctaaaaaacttcatgggaaagttttagcaatcggaattactaatcaaagagaaacaacagtcttatgggacaaaaaaacaggtaaaacagtatataaagacatagtttggcaagatcgtagacaagcagaatactgta

SEQ ID NO: 248600 - DNA, 841 bp, Unknown
  Bacterial polypeptide expressing nucleotide sequence isolated from the Sargasso Sea
tatgagcaaatttttcttagttatagatcaaggaacaacaagttctagaattgtactatatgatcaaaaatttgaaatatttgattttgttcaaaaagaatttaaacaatattttccaaatgaaggatgggtagagcataatgcaacagaaatttgggacgatgtaagaaatttaatttcaaaaatactaaaaaaaaataagttaattgcgaaaaatataatttcaattggaattaccaatcaacgagaaactacagttttatgggataaaaaaactggcaaaccaatttatagagcaatagtctggcaagatagaagaacagctaatctttgtgaaaagttaaaaagaaaagggattgataaaaaaattcaaaaaataactggtttagaacttgatccctatttctctgctactaaaattaaatggattatagataacgttaaggaggtaaataaaaatttaaagaataataatttactttttggaactatagatacctggctattatggaatttaaccaaaggaaaatctcacctaacagatatatcaaatgcctcaagaaccatgatttttgactctcaaaaagaaaaatggtcagacgagattttaaaattatttaaaattccaaaaaaaatcttaccaactgtagttgaaaatgcatatgattttggtcctactaaattatttggtgatgcaataccaattggcggtatggctggagaccaacagtcagcaacaattggtcaagcttgctttaaaaaaggacaatcaaaaagtacttatggtacaggttgttttcttcttatgaatattggagaaaaatttaaattatctaagaat

SEQ ID NO: 248601 - DNA, 856 bp, Unknown
  Bacterial polypeptide expressing nucleotide sequence isolated from the Sargasso Sea
ttaaaaaaagttatagccaaagcatctaaattgaaaggtaatataataagtataggaataaccaatcagagagagacaactattctttggaataagaaaacaggcaaaccagtttataatgctattgtatggcaagacagaagaacccaaaaatattgtgaaaaacttaaaaaaagaaaatatgaaaaaagttttagaaaaaaaactggactttttatcgatccatatttttctgcaactaaaataaaatggattttagaaaatataaaagagtctaagaaattattgaaatctaaaaatttgttatttggtacggtcgacacttttttaatatggaaacttacaaggggtaaaaaacatttaacagaagcaagcaatgcaagtagaacaatgttatttaatataaataataataaatgggataatgaaattttaagaaaattaaatattcctgcaagcattcttcccctagtaataaactctgcagataattttggtattacaaataaaaaagttgttggaaaagaaattcctatatcggctgtattaggagatcagcaagctgctgctgtagggcaatcttgttttgaaaaaggttctattaaaagcacttatggcactggtgcttttgttataatgaatactggatcaaaaaaaatttattccaataataaattgttaactacaatttgttacagattaaatggtaagaatacctatgctttagaaggttcaatctttatagctggtgctggtattcaatggctaagagataaattaaaattaattaataacgcttacgacactgaaaaaatagctaaatcaaaaaagaataatgaaggtttatatgtagttc

SEQ ID NO: 248602 - DNA, 664 bp, Unknown
  Bacterial polypeptide expressing nucleotide sequence isolated from the Sargasso Sea
ttgaaaaaatttataatttctattgatcaaggcaccacttcttcaagagtaattctttttaacaccaaagggagaattgaatttgtttcacagtatgaatttaaacaatatttcccaaagaatggttgggtagaacataacccaaatgagatttggtcaacaacccttaaagcacttaagaatgttattaataaagctaataaaattagaggtcgcattatcagtattggaattaccaaccaaagagaaacaacaatcttatggaataagaaaacaggaaaaccaatttacaatgcaatagtttggcaagatcgaagaactcaagaatactgtaaaaaacttaaaaataaaaaatatgaaaatgattttagaaagaaaacaggattatttattgatccttatttttcagcaacaaaagtaaggtggattttagacaatgtaaaggagtctaaaaaattattaaaatcaaacaatttattatttgggacagttgacacttttttaatttggaaattaactaaaggaaaacaacatttaaccgaagctacaaacgcaagtaggacaatgttgtttaatattaataacaataaatgggatcatgagattttaaaaaaattaaatattccagaagagtattctgccggaagtaaaaaattcagctgat

SEQ ID NO: 248603 - DNA, 271 bp, Unknown
  Bacterial polypeptide expressing nucleotide sequence isolated from the Sargasso Sea
aatgaaaaaatttctattaagtattgatcaaggaactaccagcactaaagtaattctttataataaaaattttaaggtaattgatactcaacaaaaagagtttaaacaattttttcctaaaaacggatgggttgaacatgatgctcttgaaatttggaaagatgttaaatatttagttactaaaactattagaaaaaataatctaaaaagttctaatattctttcaattggtatcaccaaccaacgtgagactacagtattaggaacaaaa

SEQ ID NO: 248604 - DNA, 781 bp, Unknown
  Bacterial polypeptide expressing nucleotide sequence isolated from the Sargasso Sea
ttacttttcctttcgaaaatactttggcttatcgataatgtaccaacagtacagagttcactagaaaatgatgatataaattttggaacagttgactcttggctaatttataaattaaatggtacatttcaaactgatgtaactaacgcaagtagaactttattatttgatttagatagtttgaattggaatgataatttattaaatgaatttaatattcctactaattctcttcctataattaagccttctcttcataattatggagaatgcaaaaatattttagaaggaataccaataacagctgtattaggagatcaacaagcatccttatttggtcaacactgttttcataaaggcgaagttaaaaatacatatggaacaggttgttttgctttaactaatacaggtgatgatattatttattcaaataatggtttacttacaactgttgcatatcaatatggagaaagaaatgttaaatatgcagtagaagggtcagttgccatagcaggcgctgcagtacagtggttaagagacaatctcaatcttatagaaagaagtgatcaaatagagtcttatgctcttgaagaaaaaaacaacggtggagtatattttgttcctgctttctcaggtttgttttcaccgcattgggatgaaactgccaggggagtattagtaggattaactcgttattcgaataaaagtcacatatgtagagctgtgcttgagagcgttgcctatcagagtcatgacttgttgcaggcaatggaaaaagata

SEQ ID NO: 248605 - DNA, 562 bp, Unknown
  Bacterial polypeptide expressing nucleotide sequence isolated from the Sargasso Sea
gctggagcaggagtacaatggttgagagacaaaataagatttattaaaaaagcgtctgataccgaaaaaattataaaatctttaaaatccaataatggaatttatttagttccagcttttacaggactcggcgctccttattgggctgttaatgcaagaggaatactttcaggtttaactagagatactggacaaaaagaaattgtaagagcgacagtagaatctgttgcgtaccaaacttatgatttgtttgaagctatgaaaaatgatggtttgagaccaaaaataataaaagtagatggaggaatggttaaaaataattggttttcacaatttttagcagatattgttaatattaaagtattaagaccaaaagtagatgaaactactgcattaggagctgcatttatggctgggcttcaaataggagtttataagtctctaaatgatatatctaaaaattggcaagtagataaaggtttttatcctagaatgaaaaactcagagagaaaaaatcttattaaagggtggagcgcggcaattaaaaaaacactatcttaga

SEQ ID NO: 248606 - DNA, 746 bp, Unknown
  Bacterial polypeptide expressing nucleotide sequence isolated from the Sargasso Sea
gatgcagaagcaatctggggaaacccagcgaagcaccatcgtcaaggttctggatcaggcgggtatcagcctttccgaggttcccgccataggaatcaccaaccagcgggaatccaccatcgcctggaatcgtgaaaccggagaagcgctttgtcccgcgatcaactggcaatgccgacgcactgctgggttttgtgatgagttgaaagaggagggttttgatgaattgatccggaaccgaacaggtttggtcaccgatccttatttttcaggaacgaagatgcactggattctccagaatgttcctgaagctgcgaaccttgcacgccagggaaagctctgtttcggtaccgtcgacagttggctgatctggaaactgagtggaggaacaacccacgccatcgaaatcagtaatgcttcccgtacccttgtttttgacattcaaaaatgtgaatgggactccgagatcctttcacgattcggcattcctccggaatccctgcctgaagtcgttccttccagtggagtgattgctgaagttgacgaatccctgtttggaggctctgcgccgattgccggtgccgcaggagaccaacaggctgcattgttcgggcaggcatgtttttctccagggatggccaaaaacacttacggaaccggctgcttcatgatttcaaacaccgggaagcatctgatccgttcccaaaacggactgctaaccaccatcggctggaagcttggtgatg

SEQ ID NO: 248607 - DNA, 700 bp, Unknown
  Bacterial polypeptide expressing nucleotide sequence isolated from the Sargasso Sea
tatgaaagaaaaaatcatctcaattgatcagggtacttcaagcacacgttccgtcttatatgataaaaaaggacaatatattgattcagttcaacaagaatttgaccaactttttcccagtgaaggatgggtggagcacaatccagaacaaatttggaaaacggttattgataccctttcttcccttgttcaaagaaataggcttacaagtgaagagatagcttctataggtataaccaaccagagggaaacaactattgtatggaatagaaaaacaggaaaaccaatttacaacgccatagtctggcaagatcgacgcacggcaagtttttgcgaagagctagtttcttatgaaaaagaaattcagaagaaaacaggcttaacaatagatccctatttttcagctactaaagtaaattggatattaagtaatgttgatggggctgcagaattagcacaaaagggcgagttattattcggcacggtagatactttcttgatatggaaaatgactgaaggacagaagcatttaactgatgtaacaaatgcttctagaaccatgctgtttaatatagttgatcaggtatgggatgaagaattattagagttatttaagattccaagaaatatgcttcctgacgtttgtgacaatgttcataatttcggtataacaaatatattaggtggtgatgtcagtata

SEQ ID NO: 248608 - DNA, 862 bp, Unknown
  Bacterial polypeptide expressing nucleotide sequence isolated from the Sargasso Sea
aataaaaactttaaaagatgtaatacaaaaagctaaacgcttaaaaggtaaaattttaagcattggcattactaatcaaagagaaactactgttctatgggataaaaaaactggaaaacctgtttataaagctattgtttggcaagacagaagaaccgaagaattttgtaaaaagctgagaaaccaaaacaaggatacgatggtttttaataaaaccggccttttgattgactcatatttttctggaacaaaaattaaatggattttagacaatatccctaaagcaaggcagttaatgaacaagaaacagttgttatttggaacaattgacagctttttaatttggagacttacaaagggaaaagttcatgcaacagatgcaacaaatgcaagtagaacaatgatatataatatttcctcaaataaatgggatgatacaatattaaatctccttaaaattaaaaaacatattttaccagaagtgaaagattgtgctgatgattatggtcaaacccatccttctgtaactggtaaaccaattccaatcaatggagtagtaggtgatcaacaatctgcaacaattggccaatgttgttttgaacctggatcattaaaaagcacttacggtactggagcttttgtattattaaacaccggttctaaaaaaatttactcaaaaaatagactattaacaactattgcttacagaattaatggaaagacaacatacgctatggagggatctatctttatagctggtgctggtgtgcaatggttaagagatcggatgaaattttttaagaaagcacctgaaacagaaaaaatagttaaatcacttcaaaacaacaatgatatttattta

SEQ ID NO: 248609 - DNA, 802 bp, Unknown
  Bacterial polypeptide expressing nucleotide sequence isolated from the Sargasso Sea
agacaagctgagtattgtaaaaaattaaaaaaacaaaacaaggaaactcttatatttaataaaacaggtcttcctattgactcttatttttcagggacaaaaataaaatggatattagataacgtctcattagctagaaaattaatgaataaaaaacaacttctttttggaacaattgatagttttttaatttggagattaactaaaggcaaaatccatgcaacagatgcaacgaatgcaagtagaacaatgatttataatatatcaacaaataaatgggatgatacaattttaaatatattaaaaattaaaaaacatattcttcctgaggtaaagaattgtgctgatgattatggttcaacacatccatcaattacaggcaaatcgataccaataactggagttgtgggagatcaacagtctgcatcaataggtcaatgctgttttgaaccaggctcattaaagagcacttatggaacaggggcttttgtattattaaatactggttacaaaaaaatttattccaaaaatagactactcactacaattggatatagaattaacggaaaaactacttatgctatggaaggatctatttttattgcaggagcgggtgttcagtggctaagagatcgaatgaaattctttaaaaaagcctatgaaactgaaaagatcttaaagtctttaaaagacaataaggatgtctatttagttccagcctttacaggcatgggcgcaccatattggaatcaaaactcaagaggagttttaagtggattaacaagagatacaggtccaaagg

SEQ ID NO: 248610 - DNA, 824 bp, Unknown
  Bacterial polypeptide expressing nucleotide sequence isolated from the Sargasso Sea
gaatcaccaaaccagcgggaatccaccatcgcatggaatcgtgaaaccggagaagcgctttgccccgcgatcaactggcaatgccgacgcactgctgggttttgtgatgagttgaaagaggagggttttgatgaattgatccaaaaccgaaccggtttggtcaccgatccttatttttcaggaacgaagatgcactggattctccagaatgttcctgaggctacgaaccttgcacgccaggggaagctctgtttcggtactgtcgacagctggctgatctggaaactgagtggaggtaaaacctacgccatcgaaatcagcaatgcttcccgtaccctcgtttttgacatccaaaaatgcgaatgggactctgagatccttgcacgattcggtattcccctggaatccctgcctgaggtctttccttccagtgggatgattgccgaagtagacgaatccctgtttggaggctccgcgccgattgccggtgccgcaggagaccaacaggcggcattgttcgggcaggcatgtttttctccggggatggccaaaaacacttacggaaccggttgctttatgatttctaacaccgggaagcatctgatccgttcccaaaacggactactcaccaccatcggctggaagcttggtgatgaggtgacctatgctctggaaggctcggtattcattgccggtgcgttggtgcagtggctccgggacggtctggaattgttcaaagatgctgccgaaacggaatcgatggcactttccgttcctgatagcggaggggtgtttgttgtcccggcctttgttgggttaggtgc

SEQ ID NO: 248611 - DNA, 715 bp, Unknown
  Bacterial polypeptide expressing nucleotide sequence isolated from the Sargasso Sea
cctgatcgtggctcttgtcggcgccctcgatcagggaactaccagcacccgattcctggtggtcgacgaggcagggacagtggtggcatcggcccagcgaccccacgcacaacactttccgaagcccgggtgggttgagcacgacgccgtcgagatcctcgagaacacctggacggtgattggcgcggcactcgccacagttgatttagccgccgccgacctcgctgcggtgggcatcactaaccagcgcgagaccctcgtcgtctgggacccgacaaccggacagccactacaccgggcgatcgtgtggcaggacacccgcaccgctggaatcgttgatcgactcgccgacggaaacccggaccgctttcgggcggctaccggtcttccccttaccacgtacttcagtggaccacgggctacctggctgcttgagaacgtggacgggctacgggaactcggcgagagcggtggggcggtcctgggcaccctcgactcctggttgctctggaacctcaccggtggagcggacggtggccgtcatgcaaccgacgtcaccaacgcctccagaaccctccttatggacctgaccaccctggaatgggatccgaatctgctggacgccatggacattccggtagccatgctgccccagatcgttccatcgatcgggcgtctgggtgtcggtgtgggcccgttggccggagtacccata

SEQ ID NO: 248612 - DNA, 276 bp, Unknown
  Bacterial polypeptide expressing nucleotide sequence isolated from the Sargasso Sea
attgaaaaaatttattatttctatcgatcaaggaacaacatcatcaagagtaattttatttgatactaaaggcaatattgtttttgtttcacaatttgaatttaaacaatattttccaaaaaatggatgggttgaacataatccaaatgagatttggttcacaactcttaaagctttaaaacaagtaataaataaagcaaaaaaattaaaaggtcacatacttacaatcggaattacaaatcaaagggaaactacaattttatggaataaaaaaac

SEQ ID NO: 248613 - DNA, 661 bp, Unknown
  Bacterial polypeptide expressing nucleotide sequence isolated from the Sargasso Sea
catgtctgctgataagaaatatgtcgtcgccctggatcaaggcaccacctcgtcccgcgccatcgtctttgaccagaatgccaacatagtcgcgacctcccagcgcgaattcacccagcactacccgaaagcgggctgggtcgagcacgaccccatggagatctgggccacccagtcctccgtcttcaccgaggtgctggccaagagcggcctgcacagcgagcagatcgccgccatcggcatcaccaaccagcgtgaaacgactgtggtgtgggaaaaagccaccggcaagcccatctacaacgccatcgtctggcagtgccgccgcaccgccgccatctgcgaagagctcaaggctcgcggcctggaagagtatgtgcgcgaaaacaccggcctggtgctggacgcctacttctccggcaccaaggtgaagtggatcctggacaacgtggaaggggcccgcgagaaggcgatgaacggcgagctgctgtttggcaccatcgacacctggctggtgtggaagatgaccaacggcgaggtgcacgtcaccgacccgaccaacgcgtcccgcaccatgctctacaacatccgggatctgaagtgggatcagcgcatgctggacgagctcggcatccccatgtccatgctgccggaggtcaag

SEQ ID NO: 248614 - DNA, 751 bp, Unknown
  Bacterial polypeptide expressing nucleotide sequence isolated from the Sargasso Sea
gatgggaaaatttattgttgctttagatcaaggaacaacatcaagcagagcaattttatttaacaaagcaggaaaattaatttattcatcacaaaaagaatttactcaatattttcctaaagatggctgggtagaacatgatccaaatgatatttggagaacaacaaaaaaagtattaaaggatgttgtttataaagctaatcaattaaaaggagaaattttaactataggaattgcaaaccaaagagaaacaacggttttgtggaataagaaatcaggaaaaaaaatttataatgcaattgtttggcaagatagaagaacagcagaattttgtaaaaaaattaaaacaaaaaaaaaagaaaaattaattaaaaaaaaaacaggacttttgatagatccatatttttctagcactaaaattaaatggatatttgataatgttcctaaagccaaaaagttagcgaaaaaaaatctacttgcatttggtacaattgatacttttttaatttggaaacttactggaggaaaggttcatgcaactgatgcaacaaatgcatgtagaactatgctatttaatatttccacaagtaaatgggataaagaaatcttaaaaatttttaatatacctttcaatattcttccagaaatcaaaaattcatctgataattttggttttacactaaagtcaataactggaaaatcaataccaattaaatggagtttgttggagatcaacaagctgcaactatag

SEQ ID NO: 248615 - DNA, 864 bp, Unknown
  Bacterial polypeptide expressing nucleotide sequence isolated from the Sargasso Sea
ttctattgaccaaggaacaaccagctcaagagctgttatttttagtgataaaggagaattaattggctttgagcaaatggagtttacacaatattttcctaaagacggttgggttgaacatgaccctgaagaaatttggcaatcggttgttacggtattaaaaaaatctataaaaagttttggtttaactgcctctgatatagcttcgataggaatcacaaatcaaagagagacagttgtgctttgggaaaagaaaactggtaaacctatttataacgcaattgtttggcaagacagaaggacaagtgatttctgtgaatccttaagaggtgaacaagatttgatacagcagaaaacaggtttaacagtagacccttatttttctgcatctaaagttaattggattcttgatcaagttaaaggtgcaaggaaaagagcagagaaaggggaactcttatttggaacgatagactcttttttaatatggaaattaacagaaggaagggaccataaaaccgatgtatctaatgcttcaaggacaatgttatataacattgaagccaataagtgggacaaagagttattaagtttatttgacgttcctgataatctattaccttcagtttgcgataattcccatgattttggctatacaaaattgtttggaggtgagatcagtataggtggggtcgctggagaccagcagtctgctttaataggccaatgttgctttgatgtaggggaagtgaaaagcacctacggtaccggttgctttatgatgattaataccggtaatgggattattaaatccagcaataagctcttatctactattgcctatagacttgaaggtaaaaccacgta

SEQ ID NO: 248616 - DNA, 368 bp, Unknown
  Bacterial polypeptide expressing nucleotide sequence isolated from the Sargasso Sea
tatgaaagaatattttttagttattgaccaaggcacaactagttccagagtagttttgtataataagaaatttagaatttttgatatagttcaaaaagagtttaatcaatattttcctaatgagggttgggttgagcatgatgcattagaaatatggaatgatgtaaaaaatcttattaaaaaaattcttaaaaaaaataaattattatctaaaaatattatttcaattggcataacaaatcaaagagagactacagtgttgtggaataaaaaaactggtgtccctatatataatgcaattgtatggcaagatagaaggactagtttttactgttccaaattacaaaaaaaaggaatgcaaaaaaaaa

SEQ ID NO: 248617 - DNA, 739 bp, Unknown
  Bacterial polypeptide expressing nucleotide sequence isolated from the Sargasso Sea
atggccgatataatcttagctattgatcaaggtacaacaagttcacgagccatactctttaacagtgatgggctatctctgggctcagcacagaaggagattccgcaacattttcctgacaacggatgggtcgaacatgaccctgaagatatttgggggtcggtccttgagaccacaacgttagcaattgaagagtcaggtaccgacgttagcaacgttaaggccatagggatcacaaaccaaagagagacaacagttgtctgggaccgacgaaccggaatccccatttacagagcaattgtatggcaagacagaagaacgaccgaatattgcgaaaacctgaaaaatgatggcttagaggactttatagtcgcaaagactggactacttattgatccttacttctcagcaactaaaataagatggattcttgataacgtcgatggagcgcgagagaaagcagaagccggtcaattagcattcggcactgttgacacatttttgctttggaagttaacaaatggagagtctcacaaaaccgacgcgacgaacgcctcgcgtacaatgctgtacaacattcatgattcgaaatgggatttggaattgctcgaattattcgggatcccagagagtatcctccctgaagtgatgaattcctcggactcctttgggcacacatgcgagagtatcttaggcagtgctatcccaatcgcaggtatagctggagatcaacaagcag

SEQ ID NO: 248618 - DNA, 718 bp, Unknown
  Bacterial polypeptide expressing nucleotide sequence isolated from the Sargasso Sea
tttgaaaaaatttataatttcaattgaccaagggaccacatcatcaagagtaattctttttgatagtaaagctaaaatagtttttaaatctcaatttgaatttaaacaatattttcctaaaaatggctgggttgaacatgatccgaaagaaatatggtcgacaacaattaaagctttaaaaaaagttataaaaaaagcctctagacttaatggtaaaattttaagcattggtataacaaatcaaagagagacgactattatgtgggataaaagaaccggcaaaccagtttataatgcaattgtttggcaggatagaagaactcaaaagtattgtaatttactaaaaagtaaaaaatatgaaaataattttagaaaaaaaactggtttatttatagatccatatttttcagccaccaaaataaagtgggttttaaataatattccacaaactaagagattaataaaatcaaataatctactttttggaacagtagatacttttttgatatggaaacttactaatggtaaacagcatttaacagatgctacaaacgcaagtaggacgatgctttacaacattaacaccaatgaatgggataacgaaattattaaaaaattgagaattcctatgaatattttgcccaaagttaaaaattccatagacgattttggatattcagatacaaaaattactggaaaaaaaattcctatctttgct

SEQ ID NO: 248619 - DNA, 910 bp, Unknown
  Bacterial polypeptide expressing nucleotide sequence isolated from the Sargasso Sea
gctggatcaaggcaccagcagctcccgagcagcggtgtttgacgccaagggcgaccttgtggccagtgcaacggctcccctgccgattcagtaccccgccgatggctgggtggaacaacaccccggcgacatctggaacagccaaaagcaggcactgcaggatctgcaccaacagctgagtgaggcgcaacgtcgggccgttgtgagctgcggcatcaccaatcaacgcgaaacaacagtgctctggcgccgcagcagcggcaatccctgcgggccggccctggtctggcaggacggtcgtacagctgacatctgccaagcctggaaagcagacggcctcgaagccgcgtggtgccagcgcaccggcttgctgctggatccgtacttcagcgccagcaagatccgttggatgctcgagcatcaccccgaggcggcagccgctgcggcccaagacgatctgtgcttcggcacggtggagtcgtggctgctctggaacctcacgggaggacaacgccacggcagtgacatgagcaatgccagccgcacgctgctgatggatctcgagcagcgctgctggatggatgaattccgcgaacagacggatcttcctgcgaacgctttaccggagctgttgccctgccgtggggagttcggccacatcgcagcggagcttcccttcgccggattgaccatccaggccatgctcggtgatcaacaggccgcgacccttggtcagctctgcctgcagcctggcgaagccaaatgcacctatggcactggtgcctttctggtaatcaataccggcgacagcatccgccgctccagcgccggtctactcagcacccttggctggaccgatgccagcggaacacccacctactgcctggagggcagcctgttcaatgcagga

SEQ ID NO: 248620 - DNA, 343 bp, Unknown
  Bacterial polypeptide expressing nucleotide sequence isolated from the Sargasso Sea
tatgagaaaatttatcatttctatagatgctggaactacttctaatagatctattctttttgatttaaaaggtaaaccggttttttcctctcaaaaagaatttacacaatactttcctaaaagtggttgggtagaacatgatcctgatgagatttggagaactactgtaaaaacactaaaagatgtaattcaaaaagctaaaaaacttagaggtaaaattttaaatattggaattaccaatcaaagagaaacaactgttttatgggacaagagaacaggtaaaccaatttacaacgctattgtatggcaagaccgtagacaagaagagttttgtgtaaattga

SEQ ID NO: 248621 - DNA, 729 bp, Unknown
  Bacterial polypeptide expressing nucleotide sequence isolated from the Sargasso Sea
ttcagctgttttaggagaccaacaagcagctgctgtaggacaagcttgttttgaaaaaggatctattaaaagcacttatggtactggtgcatttataataatgaacactggatcaaaaaaaattaattcaaaaaataagttattaactacaatttgttatagattgaacaataaaaatacttatgctcttgaaggttctattttcattgctggagcgggggtacagtggttaagggacaaaataaaattaataaacaatgcttatgaaactgaaaaaattgccaaattaacaaaaagcaataatgaggtttatattgttccagcttttagtggaataggcgctccttattggagacctgatgcaagaggattgataacaggaattacaagagatacagattggaaaaatttagttagagcaacagtcgagtcagttgcttatcaaagttatgacttattttattcaatgaataaagatggtttaaagcctagaatagttaaaattgatggtggtatggtagctaataattggttctcacaatttttggcagatgtaattaatttaaaagtaattcgacccaaagtcttagaaacgactgctctaggagctgctttgtttgcaggatatcaaataggagaattcaaatcattaaatcagataaaaaacacgtggaaaaaagataaagcttttaagccaaaaattaataaaaaacttagaaatcatatatt

SEQ ID NO: 248622 - DNA, 742 bp, Unknown
  Bacterial polypeptide expressing nucleotide sequence isolated from the Sargasso Sea
agattttattatatctatcgatcaaggaacaacttcaagcagagcaattctatttaatttaaaaggaaaacccgtttactcatctcaaaaggaatttactcaatattttcctaaaagtggttgggtagaacacaatccagaagaaatttggagcacaacaaaaaaaactctaaaagacgtaatcaataaagccaaaagacttagaggaaaagttttagcaatcggaattactaatcaaagagaaactacagttttatgggataaaaaaactgggaaagcagtttataaagcaattgtttggcaagatcgtagacaagaagagttttgtaaaaaattaagaaaacaaaacaaagaaacacttatttttaatcgaacaggacttctaatcgactcatatttctcaggaactaagattaaatggatactggacaatgtacctttagctagaaaactgatgtcaaaaaaacaacttctttttggaactatagatagtttcttaatttggagattaaccaaaggaaaagttcatgcaaccgatgcaacaaatgctagtagaaccatgatatataatatttcatcgaataaatgggatgatacgattttaaaaatcctaaagataaaaaaacatatacttcccgaggtaaaagattgtgcagataattatggatcaacacacccatcaattactggaaaatctatcccaatcagaggtgttgttggagatcaacaatcagcaacaatt

SEQ ID NO: 248623 - DNA, 718 bp, Unknown
  Bacterial polypeptide expressing nucleotide sequence isolated from the Sargasso Sea
caatcaaaaagcacttatggaacaggttgttttttattaatgaatattggtaataaatttaaattatctaaaaatagattacttacaaccgtagctttcaagataaatggaaaaaaaatgtactgttacgagggaagtatttttgttgctggatctgcaattcaatggttgagagataacttgagtttttttaaagactctaaagaaactgataaactttatgacaaagctaataataatggaaaaatatattttgtaccagcgttaaccggacttggtgccccatattggaatccgaatgcaagaggtacattttttggtttaacaagaaatacttctaaggaagatattattaaagcaactatagatagtttatcttatcaaacttatgaacttattgaatgcatggaaaaagactcaaaaactagaataaatcaaataaaggtagatgggggaatggtaaaaaataataatttcctcaaaagtctatctaatattactcaaattaaaattatgagacctaaaaatattgaaacaacttcattaggagtcgcctatcttgcggggttacaatctggcataataaaaaatactaacgaaattaatcagttttggaaaaaagataaaatatttaaagctgtgatttcaaaaaataaagcaaaatcaaacataaaaatttggaaatcaataattaaaacggtaaataatttttattaat

SEQ ID NO: 248624 - DNA, 703 bp, Unknown
  Bacterial polypeptide expressing nucleotide sequence isolated from the Sargasso Sea
agagttattctgtataacaataaatttaaaaaaattgatacattgcaaaaagaatttaaacaacactttccaaaagatggttgggttgaacatgatgcattagaaatatggaaagatgtaaaaaatttaatattaagaataataaaaaataataaaataagtagcaaaaatatattaacaataggaataacgaaccaacgtgaaaccacagttttatggaataaaaaaactggaatacctgtaaataaagcaattgtttggcaagatagaagaacttcagattattgtaaaaaaattaaatcagcaaataaagaagtaataatacaaaaaattaccggattactgatagacccatatttttcagcgacaaaaataaaatggatattggaaaataataaaaaagcaaaaaaaattttaaaagaaggtaatcttatttttggaactatagatacttggttgctatggaatttaacagaaaaaagatcacattatactgacataacaaatgcatccagaactatgctttttgattgcaaaaaagaagaatggtccaaaacattattaaaactttttaatattccaatcaatattttaccagaagttgaagaaaatgtatttaattttggaataacaaatctatttggctcgcccattccaattggaggtatggctggcgatcaacaatcagctactattggtcaag

SEQ ID NO: 248625 - DNA, 861 bp, Unknown
  Bacterial polypeptide expressing nucleotide sequence isolated from the Sargasso Sea
taaaaaaacaggaaagccaatttataatgcaattgtatggcaagatagaagaacccaagattattgtaaattacttaagaaaaaaaattatgaaaactcatttagaaataaaactggattatttatagatccatatttttcagcaactaaaattaaatggattttagacaatggtaaaatttcaaaaaaactacttggttcaaatgatttattgtttggaactgtagatacatttttaatttggaaattaacaaaaggtaagcagcatttaactgaagcatctaatgcaagccgaacaatgctgtataatataaataataataaatgggacaaagaaattttaaaaaaactaaatattccacaaaagattttaccagaagtcaaaaattcagcagataattttggaaaaacagataaaaaaattacaggagttgaaatttcaatttctgcagttcttggtgatcagcaagcggcagcatttggacaaacttgttttgaaaaaggatctataaaaagtacatatggcactggtgcatttattattatgaataccggcccgaagaaaattaattcaaaaaataaattactgactactatttgttatcgattaaataataaaaatacttacgccttagaaggttcaatttttatagctggcgcaggggttcaatggttaagagataaagtaaatttgatcaaaaaagcatccgaaactgaaacgatttcaaaatcatctaaaattaatgatggtgtttttgttgtaccagcttttagcggaatgggagcaccttattggagaccagatgcaagaggagtaatcacaggactaacaagagacagtgattggaaaagtatagtaag

SEQ ID NO: 248626 - DNA, 646 bp, Unknown
  Bacterial polypeptide expressing nucleotide sequence isolated from the Sargasso Sea
tcataaccttctcacaactattgcatggaagatcaatgataaagtggaatatgcattagagggaagtgtatttatgggtggtgccgtggttcaatggctgcgagatggattaggcataattaattcttctgaagaaattgaaacggtcgcaacctcaatcaaagattctggtggtgtatacctggttccggccttcgctggtatgggagcacctcactgggatcctcatgcaaggggattgatcatggggctgacaagagggtccacctccgcgcatattgcgagagctgcgctagaatctatcgcgtatcaatgttatgatctgctaaacgcaatgcaggctgattcaaatattaaactcaggcaattacgtgtagatgggggcgcctctgttaataattttttaatgcagtttcaggctaatttattagatatacctgttgtcaggccaaggattacagaaacaacagccttgggagcggcatttttagcaggtttggcagttagtttttgggaagatcaagccgatatatcaaggcaatgggagccagaaatgatatttagttcaaaaattcataaggatgagatggatcagcattattctggctgggttaaggctgttgaaaaggctagatcgaatgtgtag

SEQ ID NO: 248627 - DNA, 646 bp, Unknown
  Bacterial polypeptide expressing nucleotide sequence isolated from the Sargasso Sea
atgtcttatattctttcaatagaccaaggaacatcaagttctcgagctatactctttgatgagtccttccgtgctgtacactcaagtcaaaaggaatttacccaatattttccaaatgagggttgggtagaacatgatcccagtgaaatttggagaagcgtatttgatgtagttgaagatgttctaaaaaattgtcctgctgacataaatgaaatagcttctataggtataacaaaccaaagagaaacaactgtcatatgggataaagagacaggcaaggaagtttatccagctatagtttggcaagacagaagaacgacagatttttgtaattctcttgtggacgatcaactggaaggaatggtaagtaaaaaaactggtctaattattgatccttatttctcggcatcaaaaataaaatggatattagataatgttcctgatgcaaaaaagaaagcagaagagggtaagttggcttttggaacaattgattcttttttggtctggaaattgacagaaggaagagttcataaaagtgacgcaactaatgcctctaggacaatgctgtataacattaatgaagactgttgggatgaagggttactaaatctatttgatataccattaaaaatgatgccagaagtct

SEQ ID NO: 248628 - DNA, 955 bp, Unknown
  Bacterial polypeptide expressing nucleotide sequence isolated from the Sargasso Sea
gataatgtaaaagagtcaaaaaaattattaaaatcaaataatttattatttgggacagttgatacttttttaatttggaaattaactaaaggaaaacaacatttaaccgaagctacaaacgcaagtaggacaatgttgtttaatattaataataataaatgggaccatgagattttaaaaaaattaaatattccaaagagtattttacccgaagtaaaaaattcagctgatgactttggcaaaactgataaaaaaattactggaaaagagattcctatatctgctgttttaggtgatcaacaggctgctgcagttggtcaaacgtgttttgaaaaaggttcaattaaaagtacttatggaacaggagcttttgtgattatgaatacaggttccaaaaaaataaattcaaaaaataaattgttaacaacaatatgttatcgattgaataataagactacttatgctttagagggatcaattttcatagcaggcgctggtgtgcagtggttaagagataaaatgaaattaataaaaaaagcaccagaaacagaaaaaatagcaagatcatcaagtataaatgatggcatgtatatcgttcccgcttttagcggcatgggtgcaccttattggagaccagatgcaagaggtttaattacaggtttaactagagatagtaattggcaaagtttagtaagagcaacagtagagtccgttgcttatcaaagttatgacctttttaacgctatgaataaagacggtttgaaacctagaatagtaaaaattgatggtggtatggttgcaaacaattggttttctcaattcttgtcagatacaataaatctaaaagtaattagaccaaaagtattggaaactactgctttaggtgttgctctctttgctgcatatcaagttggtgagtttaaatcgttaaatgaaatcaaaaatattggccaaa

SEQ ID NO: 248629 - DNA, 781 bp, Unknown
  Bacterial polypeptide expressing nucleotide sequence isolated from the Sargasso Sea
aatggcaggagaccaacaagctgcaaacattggtcaagcatgtttcaaagtaggacaatcaaaaagcacttatggaactggttgtttttttttaatgaatataggaaataaatttctaatttctaaaaataaacttttgactactgtagcatttaaaatacacggaaataaaatgttttgctacgaaggaagtatttttgtagctggttcggcaatacaatggctaagggataaattaaatttatttaacagttctgataaatcatctgatttatataataaagcaaatatagaagaaaaaacaattattatacctgcattaactggcttaggcgctccacattgggagccaaaagttagaggagcaatttttggattaactaggaatacttcaataccagaaattgtaaaaggaacacttgatagtatatgttatcaaacaaatgatttaattgaatctatggaaaaagactcaaaactaaagattaaagaaattcgtatagatggaggaatggtcaacaatgaaagctttgtaaaaagtttatctaatattactcaaaaaaagattattaaaccattaaatattgaaactacttctttaggagttgcttatttagctggattaaatgcaggaattttgaaaaatacttttcaaattaataagttatggaaacaagataaaatttatttatctaaattaagtaaaaaagaagttacaaaaaatataaaaaaatggaaaaacgcagtaagttttttaattagatttagctcaaaaatttaa

SEQ ID NO: 248630 - DNA, 880 bp, Unknown
  Bacterial polypeptide expressing nucleotide sequence isolated from the Sargasso Sea
attaatattgtgaaaaaattcattgttgccattgatcaaggcactacgtcaacaagagtaatattgtttgatgtaacaggtaatgtaaaatttatatcacaatttgagtttaagcaatattttccaaaaaatggttgggtagaacataatccaaatgaaatttggctaactactcttaaagcactaagaaaagttataaaaaaatccttgcagttaaaaggcaatataataagcattggaataaccaatcagagagaaaccaccattctatggaacaagaaaactggcaaaccaatttacaatgctattgtttggcaagatagaagaactcaacaatattgtgaaaaacttaaaaaaagaaagtatgaaaaaagttttagaaaaaaaactggactatttatagatccatatttttctgcaacaaaaataaaatggattttggagaatgtaaaagattcaaaaaaattattaaaatctaataatttattatttggtactgtagatacttttttgatatggaaacttactaaaggtaaaaaacatttaacagatgccactaatgcaagtagaacaatgttatttaatataaacaacaacaaatgggataaagaaattttaagaaaattacacattccaaaaaatattttaccagaggtaaaaaattctgctgatgattttggcattacaaataaaaaaatcattggaaaagaaattcctatatcagctgttttaggtgatcaacaagctgctgcagttggtcagacatgttttgaaaaaggatcaattaaaagtacttacggtactggcgcttttgtaataatgaatactggatcaaaaaaaatctattcaaataataagttattaacaaccaatttgttat

SEQ ID NO: 248631 - DNA, 505 bp, Unknown
  Bacterial polypeptide expressing nucleotide sequence isolated from the Sargasso Sea
attgtctggcaggacagacgcacagcagattattgccagcagcttaaagagcagggccatgaagagtgggtgcagcaaaaaaccggtttgctgctggatccttatttttccgccagcaaaattcagtggttactgcgcaacaatgccgatgtgcagcaggcgctggctgacaatgaactggcttttggcaccatcgatagttttttgctgtggcgtttaacatcggggcaagtgcacgctacagacaccaccaatgccagccgtactttattgctgaatattcaaagcttaaattgggatcaagaactgctgcagttgtttgatgtgccggagcagattctgccgcaggtaaaacaaagcgctgatagctatggcttgtgtgatacccgcttatttggcttggccttgcctgtgctggcgttggtgggcgatcaacaagcagcggctttaggccaggggtgcattagtgcgggttcgttaaaaagtacctatggcacaggctgtt

SEQ ID NO: 248632 - DNA, 832 bp, Unknown
  Bacterial polypeptide expressing nucleotide sequence isolated from the Sargasso Sea
gtttataatgctattgtatggcaagatagaagaacagaagagtattgcaaaaagttaagaaaaaaaaataaagaaactataatttttaataaaaccggacttttaattgatccgtatttctctggaacgaaaattaaatggatattggataatgtgccaatagcaaaaagtctaatgaataaaaaacgattactttttggaaccatagatagttttttaatttggagacttacaaaaggaaaagttcatgctactgacgctactaatgcaagcagaactatgatttataatattacatcgaataaatgggatgattcaattttaaagcttttaaaaattaaaaaacatattcttccagaagtaaaaaattgtgctgatgattacggttatacacatccttcaataacaggaaaatccattcctataacaggtgtagtaggggatcaacaatcagcaacaattggccaatgttgttttgaaccaggctcattaaaaagcacatatggaactggagcatttattttactaaatactggttcaagaaaaatatactcaaagaacagattgttaactacgattggatatagattaaatggaaaaacaacttatgctcttgaaggttcaatttttattgcaggagcaggcgttcaatggcttagagatagaatgaaatttgtaaataaagcatctgacactgaaaaaattgtaaaatctttaaaaagtaattctggaatttatttagttccagcgtttactggtctaggagcgcctcattggaatgctaatgcaagaggagttctgagtggagttactagagatacatggacctaat

SEQ ID NO: 248633 - DNA, 906 bp, Unknown
  Bacterial polypeptide expressing nucleotide sequence isolated from the Sargasso Sea
aaagttttaaaagaagttattaaaaagagtaaaacgcttaaaggaaaagtattaaccataggaattacaaatcaaagagaaacaactataatgtgggataaaaaaactggaaagtctgtttataatgcaatcgtatggcaagatagaagatcttttgaatactgtaaaaaacttattaaacaaaaaaaagaaactattatttataataagacaggtctactaattgatgcatatttctcagcaacaaaaataaaatggataattgataatgttcctaaggcaaaagatttaataaaaaagaaaagattgttgttcggaacagttgatagttttttgttgtggaaattaactaaaggtgttgatcatgcaacagatgcaacaaacgctagtaggacaatgctatttaatatttcaacgaacaaatgggatgaccaaatacttaaaattttaaaaattcctaaagaaatactaccagtagttaaagattgtgcagctgactttggttataccgatccttctattacaggtacttcatatccaattacaggaatggtaggagaccaacaatcagctacaattggacagtgttgttttgaaccaggatcgttaaaaagcacctatggcacaggtgcatttgtgcttttaaatacaggaagcaaaaaagtttattcaaaaaatagattgttgactactattggctacagaattaatggcaaaacaacttatgctttggagggaacaattttcattgctggagcaggagtacaatggctaagagataaaataaaatttatttcgaaggcatctgatactgaaactattgcaaaatctcttagttcaaataatggaatatatttagtaccagccttcactgggctaggagctccatattggatgcgagtgcgc

SEQ ID NO: 248634 - DNA, 560 bp, Unknown
  Bacterial polypeptide expressing nucleotide sequence isolated from the Sargasso Sea
aatctggtcgtccaccctcgaggtctgccgcaaggccatcgccgacagtggtctggacagtgcggagatcgccgccatcggcatcaccaaccagcgcgagaccacgctggtgtgggaggccgagaccggcaagccgatccatccggccatcgtctggcaggaccggcgcaccgccgattactgtgcggggctgaagggcgaggggcatgaggcgatggtcgcggccaagaccggcctgttgatcgatccgtatttctcggccaccaagttgcgctggattctgcacaacgtgcccggcgcccgtgagcgggcacagcgcggcgaactgcgcttcggcaccgtcgacagctacctgctgtggcacctgactggcggcaaggtgcaccgtaccgacgccagcaacgcctcgcgcacgctgatgttcaacattcaccagcagtgctgggacgaggaactgctcgcgctgttcgatatccccgccagcctgctgccggaagtgctcgactgcgccgctgactttggccacaccgacagccagctgctcggtgccagcattccgg

SEQ ID NO: 248635 - DNA, 334 bp, Unknown
  Bacterial polypeptide expressing nucleotide sequence isolated from the Sargasso Sea
ctggcaatcgatcagggtacaaccggcactacggttgcggtgatgaacacccgaggggtgctgctggggagcgtcaactatgagttcccccagatctaccccaagccgggctgggtagagcacgacccggaggcgatctgggcatccgttctcaaaggcattcgcgctgtcttccgcaaggggctatgcaagcctgccgacgttgcgtgtattggtattaccaaccagcgagagacggcgttgctgtgggagcgccggagcggcaagccactgggaaatgccattgtctggcaatgccgacgcacagcgagtttctgcgagggattacgcaaaa

SEQ ID NO: 248636 - DNA, 322 bp, Unknown
  Bacterial polypeptide expressing nucleotide sequence isolated from the Sargasso Sea
atgaaaaactttttatcaatagatcaaggaaccacaagttcaagatcaataatttttgatgcaaatttaaatttagttaaagatgcgcaagaagaatatgatcttacttaccctgaagatggctgggttgagttagagccaaagaaaataatagaaacagttacaaatacacttaataaagttgtaagcgctgatataggccttgaagcatgtggcattaccaatcaaagagaaacgacaatagtttggtcaaaatcaactggtgaagcaatttatcctggaattgtttggcaagatagaagaacacatgaatattgcacat

SEQ ID NO: 248637 - DNA, 669 bp, Unknown
  Bacterial polypeptide expressing nucleotide sequence isolated from the Sargasso Sea
tgaagagttttgcaaaaagctgagaaaacaaaataaggatacgatggtttttaataaaactggccttttgatagactcatatttttctggaacaaaaattaaatggattttagacaatgtccctaaagcacggcaattaatgaataggaaacaattgttatttggaacaattgatagctttttaatttggagacttacaaagggaaaagttcatgcaacagatgcaacaaacgcgagcaggacaatgatttataatatttcttcaaacaaatgggatgatacaattttaaatctactaaaaattaaaaaacatattttacctgaagtgaaagattgcgcagatgattatggtcaaactcacccttctttaactggtaaaccaattcccattaatggagtagtaggtgatcaacaatcagcaacagttggtcaatgttgttttgaacctggttcattaaaaagcacatatggaacaggagcttttgtattattaaatactggttcaaaaaaaatttactcaaaaaatagactcctaacaactattgcttacagaattaatggaaagacaacatatgcaatggaagggtctatttttatagctggtgctggcgttcaatggttaagagatagaatgaaattttttaagaaagcacctgaaacagaaaaaaa

SEQ ID NO: 248638 - DNA, 834 bp, Unknown
  Bacterial polypeptide expressing nucleotide sequence isolated from the Sargasso Sea
gttctatggggataaaaaaacaggaaaacctgtttataaagctattgtttggcaagacagaagaactgaagaattttgtaaaaagctgagaaagcaaaacaaggatacgatggtttttaataaaactggtcttttaatcgactcatatttttctggaacaaaaattaaatggatcttagacaatgttcctaaagcacggcagttaatgaatagaaaacatttgttatttggaacaattgatagctttttaatttggagacttactaagggaaaaatccatgcaacagatgcaacaaacgcaagtagaacaatgatttataatatttctacgaatagatgggatgatacaatattaaatctccttaaaattaaaaaacatattttaccagaagtgaaagattgtgcagatgattatggtcaaacccatccttctataactggtaaatcaatcccaattaatggagtagtaggtgatcaacaatcagcgactattggccaatgttgttttgaacctggatcattaaaaagtacttacggaactggagcttttgtattattaaataccggttctaaaaaaatttactcaaaaaatagactattaacaactattgcttacagaattaatggaaagacaacatatgcaatggagggatctatttttatagctggtgctggtgtgcaatggttaagagatcggatgaaattttttaagaaagcacctgaaacagaaaaaatagttaaatcacttcaaaacaacaatgaaatttatttagttccagcattcactggattaggtgctccatattgggacgctaacgctagaggagttttaag

SEQ ID NO: 248639 - DNA, 345 bp, Unknown
  Bacterial polypeptide expressing nucleotide sequence isolated from the Sargasso Sea
gatgtcttatgtaatatcaatagatcaaggaacaacttctacaagatctattttatttgatcacaaaatgaatgcaattaattcctcacaaatagagtttaaacaatactttcctaagtcaggctgggttgagcataatcctgaagatttatggaataccacagtttcaacttttaaagatgttttaaaaaaatcaaatttaactccaaatatggttgctgccattgggattactaatcaaagggaaacaactgttgtttgggatcccaaaactggtgaatgtccaacaaaagcaattgtttggcaagatagaagaactagtgatttttgtaaaagactcaaaaa

SEQ ID NO: 248640 - DNA, 850 bp, Unknown
  Bacterial polypeptide expressing nucleotide sequence isolated from the Sargasso Sea
acaatgttgtttaacataaatacaaatagatgggataatgaaatattaaaaaaattaaaaattccttataaaattttgcctgaagtaaaaaattcagcagataattttggaacaacaaataaaaaagttataggtgaagaaattcctatatccgctgttcttggagatcaacaagccgcagtcgttggtcaggcatgctttgaaactggttctataaaaagtacatatggaactggtgcatttgtgattatgaatactggatgtaagaaaattatctcaaaaaataaattattaactacaatatgttatactttaaatgggaaaaatacttatggattggaaggctcaatatttatagctggagcaggagttcaatggttaagagataaaataaaattaattaaaaatgcctatgaaacagaaaagattgctaaatcaaaaaaaaataatgaagatgtttatgtcgttccagcatttagtggattaggagcaccatattggaggcctgatgcaagaggactggttacaggtttaactagagatagtgattggaaaagcctagtgagagcagttgtagagtctgttgcatatcaaagttttgatttatttgaatcaatgaaaaaagatggactgaaaccaaaaattattaaagtagatggtggtatggtggcaaataactggttttctcagtttttgtcagacataataaatttaaaagtaaagaggtctaaagttttagaaactactgctttaggagtagcattattatccggatatcaaattggagaattcaaatcattaaaagaaattcaagttaaatggaaaaaagatagagttttttctccaaaaa

SEQ ID NO: 248641 - DNA, 792 bp, Unknown
  Bacterial polypeptide expressing nucleotide sequence isolated from the Sargasso Sea
ccgcgccgattgccggtgccgcaggagaccaacaggcggcattgttcgggcaggcatgtttttctccagggatggcgaaaaacacttacggaaccggttgcttcatgatttccaacaccgggaagcatctggtccgttcccaaaacggactgctcaccactatcggctggaagcttggtgatgaggtgacctatgccctggaaggctcggtcttcattgccggtgcgttggtgcagtggctacgggacggactggaattgttcaaggatgctgccgaaacggaatcgatggcgctttccgtttctgacagcggaggggtgtttgttgtcccggcctttgtcgggttaggtgccccgcattgggacccctatgccaggggattgatggtcggtttgacccgtgacagccggcccagtcacatcgtcagagcttcgcttgaggcgatcgccttccagtcggccgaagtcctcaacagcatcagccaggatacttctgaatccttgaatgaactgagaatcgatggcggagcggctgccaatcagttcctctgtcagttccaggccgatttgcttggattggatgtgaaacgtccacaaatccttgaaaccactgccatgggtgctgcttttctggcaggtctggctgttggaacgtggagtgaccagcaggttttgagcaatctctggaaggaagaaaaaaccttccgctcctccatcgaccgggatacagcggatgccaaaatggaggaatggctcagggcggttgaacgttccaaagcctggattcagtaat

SEQ ID NO: 248642 - DNA, 987 bp, Unknown
  Bacterial polypeptide expressing nucleotide sequence isolated from the Sargasso Sea
ggataaacaaaaaaagtactattgcaagcaattaaaaaaagtacaaaacttaatgggagaaattttatcaattggtattactaaccaaagagaaacaaccattctttgggataaaaaaactggtcgttcaatttataatgcaatagtgtggcaagacagaagaacaacagacttttgtaaaaaatatagtctgaacaaaattagagaaaagataataagaaaaaaaactggattaataattgatccttatttttcagccacaaaaattaaatggattattaaaaatgtaaagaaagcgaaaattcttttaaagcaaaaaagacttctttttggaactatagatacatttttattatggaaacttagtaaagggaaaattcatgctactgacgcaaccaatgcatcaagaactatgctatacaacattaataaaaataaatgggatatagaaatattaaaaagttttaatataccatctaatattcttccaattattaaaaactcttccgattattatggtttaacaagcaaaagtataactaaaaaggtctatccaattactggcgtagttggagatcaacaagccgcagcaatcggtcaagcttgttttaaaaatggttcagttaaaagcacatatggaacaggagcgtttgttttaatgaatacaggtgataaaaaaatttattcaaagaatagattattaacaacagtttgctatcgaataaataataaatcaacttttgcattggagggttcaatttttgttgctggatctggtgttcaatggttaagagataaaatgaaactaatcaagtcagctgcggaaatagaaaagataattaaattattaaaaactaatagtggtgtatatctagttccagcatttgttgggttaggtgctccgcactggaattctgaagcaagaggagttttgtctggactaacgagagatacaggtcctaaagaaattataagggctataataga

SEQ ID NO: 248643 - DNA, 709 bp, Unknown
  Bacterial polypeptide expressing nucleotide sequence isolated from the Sargasso Sea
tttgaaaaaatttattgtctccattgatcaaggaacaacctcttcgagagttgttttgtttgataccaaaggaaacattaaatttatttcacaatatgaatttaaacaatactttcctagaaatggatgggtagaacataatccaaatgaaatttggtcgacaacacttaaagcattaaaacaagtaattaaaaaagctataagtttgaaaggtcatatacttacaattggaattacaaatcaaagagaaactacaattttgtggaataaaaaaactggaaaacctatttataatgcaatcgtttggcaagatagaagaactcaggaatattgtaaatctcttaagaataaaaattatgaaaatgcttttagaaaaaaaacaggattatttatagatccttatttttctgccactaaaataaaatggattttagataatgtaaaagtttcaaaaaagttactcaaaacaaataatttattgtttggtacggttgataccttcttaatctggaaattaactaaaggtaaacagcatttaaccgaagctaccaacgcaagtagaaccatgttgtttaatattaataacaataaatgggataatgaaattttacagaaattaaaaattccaaagagtatcttgccagaggtaaaaaattctgcagataattttggaaaaacagacaagagagttgtaggaaaagaaatacct

SEQ ID NO: 248644 - DNA, 868 bp, Unknown
  Bacterial polypeptide expressing nucleotide sequence isolated from the Sargasso Sea
aaatttataatttctattgatgcaggcactacatcaaacagatcaattttatttgatttaagaggaaaacctgtttactcatctcaaaaagaatttactcaatattttcctaaaagcggatgggtggaacacaaccccgaagaaatatggagaactactgttaaaactttaaaagatgttattcagaaagcaaaaaggttaaacggaaaaattttaaccataggaattacaaaccaaagagagacaactgttctttgggataaaaagactggcaaaacagtttataatgcaatcgtttggcaggatagaagacaagaagactactgtaaaaatttgagaaaacaaaataaagaaaatatgatttttaataaaactggccttttgattgactcatatttttcaggcacgaaaatcaaatggattttagataatatacctaaagcaaaacaattgatgaataaaaaacaattgatgtttggaactattgatagctttttaatatggagattaactcgaggaagtgttcatgctactgatgccactaatgctagcagaacaatgatttttaatattacgactaataaatgggatgatgcaattttaaagattttaaaaattaaaaaacatattttaccaattgttaaggactgtgcagatgattatggtcaaacacattcttctattactggaaaatctattcctattaatggtgtagtaggagatcaacaatcagctacaataggtcaatgttgttttgaaccaggttctttaaaaagtacttatggaactggagcttttgtcttattgaatactggaaataaaaagatttattcaaccaaccaggttattaactacaatagcttacaga

SEQ ID NO: 248645 - DNA, 726 bp, Unknown
  Bacterial polypeptide expressing nucleotide sequence isolated from the Sargasso Sea
catgctaccgacgcaaccaacgcatcaagaacaatgctttttaatataaataaaaacaaatgggataataaattattaaaaatttttaaagttccttatcaaatattaccgattgtgaaaaattctgctgatagttttggatttacagataggtctgttactcttaaaacatatcctataacaggtgtaattggcgatcaacaagcagcaatcatagggcagggttgtttttcaaaaggatccacaaaaattacttatggcactggtgcttttgtaataatgaatacagggaataaaaaaataatttcaaaaaacaaattaataacaactatttgttacagattaaataataaaaccacttatgccctagaaggttcaatttttaatgcaggggcagccgttcaatggctaagggataaaattaaattaattaaagatgtgcatgagactgaaaaaattttaaaatccaaaaaaaatcatgaatcaatatatattgtgccagcttttacaggcttaggcgctccatactggatacctgattctagggggctaattactggattaacaagaaatagtgactggaaaagtttggtaagagcaacaatcgagtcagttgcctatcaaacttttgatttattggaatctatgacaaaagatggattaagacttacaaatgtaaaagttgatggaggaatggcatcaaacaattggttcactcaatttctt

SEQ ID NO: 248646 - DNA, 688 bp, Unknown
  Bacterial polypeptide expressing nucleotide sequence isolated from the Sargasso Sea
agtaaatgacaataaattgctctttggtactgtagatacatggttaatttggaatctgacaaatggaaattctcatattactgatccttcaaatgctagcagaacattgctatacaatataaaagatgataaatgggacaaagaattactagagctatttgatgttccagaaaacattttaccaaaggttgttgattcttcctcagtatctactagtattgataaagaaattctaggtgtagagattccaatttcaggaattgcaggtgatcaacaggcagcattatttggtcaattatgtataaatgaaggtgatatcaaaaacacttatggtacaggttgtttttgtatgatgaacacaggagaaaattttgtaatgtcgaaaaataaaatgctttcaacaattgcatggagaattaatggagaaattacttatgcacttgagggtagtgttttcgttgcaggagcattgattcaatggctacgagatcaactcggaattataaaatcatcacctgaggttgaagagttggctaaaactgttaacgacaatggaggtttaacatttgtcccagcattatcgggcctggctgctccatattgggatccatatgttcaaggaacaatttttggaataacaagaggtactgaaaatggacatatagctagagcagccttagaatcaatt

SEQ ID NO: 248647 - DNA, 814 bp, Unknown
  Bacterial polypeptide expressing nucleotide sequence isolated from the Sargasso Sea
atggtaaaaaaatatattctatcaatagatgctggaacaacaagttcaagagcaatactttttaataaaaaagctgaggtaattgaaattgcccaatatgagttcaatcaattttttccaaaggaaggatgggtagagcatgatgctattgaaatatggaatacacaactaaaggctataaaagatgtaattaataaatcaaaaattgaccctaatgaaatagattcaattggtattacaaatcaaagagaaacaacaataatttgggataagcagactggtaaaccagtttataatgcaattgtttggcaggatagaagaaccgcaaatttttgtgataaactaattcaaaaaaataaaacctctttgattcaacaaaaaacaggtcttgttatagatgcctatttttcaggaacaaaaattaaatggatacttgataataatcaagagttaagagagaaagcaaatgataacaaattgttatttggtactgtagatacatggttaatttggaatatgacaaatggaaagtctcatatcactgatccctcaaatgcaagtagaacattgctatacaatataaaagatgacaaatgggacaaagaattactagaactatttaatgttccagaaaatattctaccaaaggttgttgattcatcctcaatatctactaatattgataaagaaattttaggtgtagagattccaatttcaggaatgcaggtgatcaacaagcagcattatttggtcagttatgcatcaatgaaggtgatatcaaaaacacttatggtacaggttgtttttgtatgat

SEQ ID NO: 248648 - DNA, 704 bp, Unknown
  Bacterial polypeptide expressing nucleotide sequence isolated from the Sargasso Sea
aagcacttatggaactggtgcttttgtaataatgaatactggatctaaaaaaatttattcaaaaaataaattactaactacaatttgttacagacttaatggaaaaaatacttatgctttagaaggttcaatttttatagctggtgctggtattcaatggctcagagataaattaaaattaattaataatgcttatgaaactgaaaaaattgctaaatctaaaaataataatgataatgtttatgtagttcctgcatttagtggaatgggagctccttattggagaccagatgctagaggattaataacgggattaacaagaaatagtgattggaaaagcttggtaagagcagtagtggagtctgttgcgtatcaaagttatgatttgtttaactctatgagaaaagacggtttaaaaccaaagtttgtaaaagttgacggaggtatggtagcaaataattggttttctcaatttttgtcagatataattaatttgaatgtaactagaccaaagatattagaaaccactgcgttaggggttgcactttttgctggatatcaagtaggacaatttaaatctttaaatgaaattaaacttaaatggaaaaaagatagaattttttcaccaaaattaaataaatcatcgagaattaaattattaaatggttggaaatcagctgttaatagaactttattaaaataaa

SEQ ID NO: 248649 - DNA, 1516 bp, Unknown
  Bacterial polypeptide expressing nucleotide sequence isolated from the Sargasso Sea
atggccgaacctcttttgctggctcttgatcagggcaccagcagctcccgcgccgtgattttcgatggcagcggacaagcgttggcttcggcgcaagttccgttgccgattgagtacccggccgatggctgggtggaacaagacccgctcgcgatctggagcagccaactgcaagccatgcagcagctcgaggatcaattgagccccgagcagcgtgctgctgtggccgcctgtggcatcaccaatcagcgcgaaaccacggtgctgtggcgttctggcgatagccagccctgtggcccggccctggtctggcaagaccggcgcactgcgtccatttgccgccagtggcaggagcagccgggagccgaaagctggcagcagcgcacgggcctggtgctcgatccctatttcagtgccagcaaggtgcagtggctgctgcagaacaacgccgaggctgctgcagcccaggcggatgggaccctgcgctttggcaccgttgacagttggttgctgtggcagctgaccggtggatcggtgcacgccaccgatctcagtaatgccagccgcaccttgctgttggatctcgaccgtggctgttggttgccggaagcctgtgagcgtgtcggtttaacggcctcggccctgccggagctcaggccttgccgcagccgcttcggctgcatcgctgaagatctgccctttgccggcgtgccgatcaccgccctgctgggagatcaacaggccgccagttttggtcagctgtgcttggagcctggtcaagccaaatgcacctatggaacgggagcttttctggttatcaacgttggttcaaagcctgtgcgagcacctgggggcttgctcagcaccgtggggtggaccgaggctgatggaaccatcacttattgcattgaaggcagcctctttaatgccggaaccgttgtgcaatggctgcgcgatggcttgggtctgattcccacgtcagccgcgattgaggagctggccgcttcggtcgatagcgctggtgaactgatgctggtgcccgccttcacaggttggggcactccccactgggatcccgaagcccgcggcttgatgattggcctgacccgagacacaggtccgggccacattgcccgtgcggccctcgagggcattgcgttagcagtgacaactctcacgcaactggctgagcaagccttgggacaaccgctgcaagagcttgcggtcgatggcggcgccgccgcgtccgatctcttgttgcaggctcaagccgatagcagtggggtgcctgtgcgccgccccgatcagctggagagcaccgcattgggtgttgccctgctggctggtctctcggctggatgtttgatcgacctcaacgccgtgcgccaagcccgtgccgccggcagccggctctttgatccggcgattgatgcggccgagcgtgaacgctggctgcagcgctgggagagcgccgttcatcgttgtttggagtggcatggcgatgccctgcgctgac

SEQ ID NO: 248650 - DNA, 1206 bp, Unknown
  Bacterial polypeptide expressing nucleotide sequence isolated from the Sargasso Sea
ccggaaaccactttacaatgcaattggtttggcaagacagaagaactgctgatttttgtaagtctttggtgaaacagggtttagaagaaacagtcatgaataaatcagggttggtaattgatccatactttagtgcaacaaaaattaaatggattttagataatgtaccagaagcaagatcaagagctgaaaataatgaaatctgttttggaactgtagatagttttttattatggaaattaactggtggaaaggttcacgctactgatgccacaaatgcatccaggacaagtctttacaatatcgaaagtcttgaatgggacgatgaattacttaagatttttgatgttcctaaatccttgatgccagatgttatggattcaaatagccattttggtgatatttctaaagatgtgatgaattttgaacttccaattttatccatattaggagaccagcaagctgcggctgttggccagacctgcttcaaaccgggaagtattaagtcaacctatggaacaggttgttttgttataattaattcaggaaaaaaaattatcaaatctaattctagattacttggtacaatttgctacaagattaatggacaggccacatatgcccttgaagggtctatttttattgcaggagcagttgttcaatggcttagagacagtctcaagataattgaaactgcaactcaaactgaagacattattgaaaacatgcaaaataattcaaatgtttacttagtacctgcatttacaggattagggtgcccatattgggatccagatgccagaagcgctatttatggaataacgagagatacaggcaaaaaagagattacaagagcagcaatagaatctgttgcttatcaaactagagacttatttaaagcaatgtctgaagatggaatttctccccaaattcttagggttgatggtggaatgacagataatgattggcttatgcagtttttatcaaatattttagatattagcgtagaagtacctaaaataactgaaacaactgcattaggcgctgcaatgatggctatgttaacagatggtaagtattctactttagaagaactttcaaatttatggggttcgaataaatcatatattcctaaaataaataaaaatgaaagagacaatttactcaaaaattgggattactacgtcagtaaaacattaacgtagt

SEQ ID NO: 248651 - DNA, 1228 bp, Unknown
  Bacterial polypeptide expressing nucleotide sequence isolated from the Sargasso Sea
catgtctgctgaaaagaaatatgtcgtcgctctggaccagggaactacctcttcccgtgccatcgtgtttgatcaggatgcgaatatagtcgcgacctcccagcgcgaattcacccagcactacccgaaagcgggctgggtggagcacgacccgatggagatctgggcaacccagtcctccgtcttcaccgaagtgctggccaagagcggccttcgcagcgaagagatcgccgccatcggcatcaccaaccagcgtgaaaccacagtggtgtgggaaaaggccaccggcaagcctatctacaacgccatcgtctggcagtgccgccgtaccgcagccatctgtgaagaactgaaagcgcgcggcctggaagagtacgtgcgcgacaataccggtctggtgctggacgcctatttctccggcaccaaggtgaagtggatcctcgacaacgtcgaaggggcccgcgagaaggcgatgaacggcgagctgctgttcggcaccatcgatacctggctggtatggaagatgaccaacggcgaagtgcacgtcaccgacccgaccaacgcctcccgtaccatgctctacaacatccgcgacctgaagtgggatcagaagatgctggacgagctgggcatccccatgtccatgctgccacaagtgaagccctcttccgaagtgtacggctacaccacccgtggcggcggctcccgcatccccatcgccggtatcgccggtgaccagcagtctgccctgttcggccagctctgcttcgagaaagggatggccaagaacacctacggcaccggctgcttcatgctgatgaacacgggtaccgaaccggttcgctccaataacggcctgctgaccacggtcgccatcggcccgaaaggggaagtgaattatgccctcgagggtgcggtatttatgggcggcgccaccatccagtggctgcgtgacgagctgaagatcattcacgatgcccgcgacaccgactacttcgcctccaaggtgggcgacaccaacggcgtctacctggtaccggccttcgtcggtctgggtgccccctactgggatccgtatgctcgcggcaccatggtcggcctgacccgcggcgccaaccgcaaccacatcatccgtgccgcgctggaatccatcgcctatcagagccgcgatgtgctggatgcgatgcagcaggactccggcatcaagctggccgccctcaaggtcgac

SEQ ID NO: 248652 - DNA, 1492 bp, Unknown
  Bacterial polypeptide expressing nucleotide sequence isolated from the Sargasso Sea
atgagttacgttctggcgattgaccaagggacaacatcaactagagctatagtctttgacaacaatttacaaatagtggcagcatctcaaaaggaaatagaacaattttttccttttcctggttgggtagagcatgatctagaggaaatttatgcaactgtcattgctacagtaagagatgctgtaaaaggagcgaaaatatcttcgcaagatattttaagtattgggattacaaaccaaagagaaactacagctatatggaacgctgaaacgggccaagcactttctaaagcaatagtgtggcaggataggcgtacttctgaattttgtaatgaacttaaaaaaaacgggaaagagagagtttatcaaagaaagacaggcttactaatcgacccctatttttctgcaacaaaagttaagtggcttcttgataagtatgaccctgaaagaactagggcaaattctggaaaattattatttggtacgattgattgctatttgatttggagacttaccaataaaaaaagccattcaactgatataaccaatgcatccagaaccatgctatttaatatcgagagtttagaatgggacaatgatattctcggtgatctaaatgtgccgaaaaaaattcttccaaatgtcaaagagtgtgctgatgattttggggaaatggtatcagaaatacttggttccccaataccgattagaggagttgcaggtgatcaacaagcggcaacaatagggcaagcatgttttcaaaagggcatgattaaatcaacttatggaacgggatgttttgcgctactgaacacaggagatcaatttgtactgagtaaaaataagcttttgtcgactattgcgtataaaatagatgggaagatttgttacgccctagaagggtcaatattcatagccggtgcggttgtccaatggcttagagactcgattaatattatagataaagcagaccaagtgggtgagcttgcatcggaagcaaaagatcaagatatttattttgttccagcttttacagggctaggcgctccgtattgggatcctaatgcacgtggagcgatttttggattattaagagatacagggagagaagagattgctttggcagctctagagagcgttggttttcaaacgagagacttactagaagctatgataaaagatgtaaatgggatggaaagaggccatataaagttgcgcgtagatggtgggatgacccaatcaagtttaaccatgaaaatcttggctaatcttacaggagtagagatcaatatacctgatatacaggagtctaccgcgaaaggggtagcatggttggcaggtatgaaaataggtctatataatcagttggaagcgtttgaagaagagtggactctcaaggagaaattttctcccaaactttctccagacgaacgcgataagaaatatgagggttggaaaaaagcgataggaagaacgagaatttcagcttaaa

SEQ ID NO: 248653 - DNA, 1492 bp, Unknown
  Bacterial polypeptide expressing nucleotide sequence isolated from the Sargasso Sea
atgaccgacctgattcttgctctggaccagggcaccaccagttcacgcagcatccttttcacggaaaaagctgaaatctttgcggttgcctcggaacccctggagtgccgttacccggattcaggttgggtggaacaggacgcagaagcaatctgggaaacccagcgaagcaccatcgtcaaggtcctggatcaggcaggtatcggtctttcccaagtttgcgcgataggaatcaccaaccagcgggaatccaccatcgcctggaatcgtgaaaccggtgaagcgctttgtcccgcgatcaactggcaatgccgacgtactgctggattttgtgatgaattgaaagaggagggttttgatcaattgatccggaaccgaaccggtttggtcaccgatccttatttctcaggaacgaagatgcactggattctcaagaatgttcctgaagctgcgaaccttgcacaccagggaaagctctgtttcggtaccgtcgacagttggctgatctggaaactgagtggaggtaaaacccatgccatcgaaatcagcaatgcttcccgtaccctcgtttttgacatccaaaaatgcgaatgggactctgagatccttgcacgattcggcattcccccggaatccctgcctgaagttgttccttccagtggggtgattgccgaagtagacgaatccctgtttggacgctccgcgccgattgccggtgccgcaggagaccaacaggcggcattgttcgggcaagcatgtttttctccggggatggccaaaaacacttacggaaccggttgcttcatgatttccaacaccgggaagcatctggtccgttcccaaaacggactgctcaccaccatcggctggaagcttggtgatgaggtgacctatgccctggaaggctcggtattcattgccggtgcgttggtgcaatggcttcgggatgggctagaatttttcaacgatgttgccgaaacggaatcgatggcgctttccgttcctgatagcggaggggtgtttgttgtcccggcctttgttggtttaggtgccccgcattgggacccctatgccaggggattgatggtcggtttgacccgtgacacccgacccagtcacatcgtcagggcttcacttgaagcgatcgccttccagtcggcggaggtcctcaacagcatcagccaggatacttctgaatccttgaatgaactgagaatcgatggcggggcggctgctaatcagttcctctgtcagttccaggccgatttgcttggattggatgtgagacgtccacaaatccttgaaaccactgccatgggtgctgcttttctggcaggtctagctgttggcacgtggagtgaccagcaggttttgagcaatctttggaaggaagaaaaaaccttccgaccctccatcgatcgggatacagcggatgccaaaatgaaggaatggctcagggcggttgaacgttccaaagcctggattcagtaaa

SEQ ID NO: 248654 - DNA, 1384 bp, Unknown
  Bacterial polypeptide expressing nucleotide sequence isolated from the Sargasso Sea
atgacaaaaaatggctatattttatccattgatcagggaacaactagttcaagagccgcactgatttcagaggatggcaatattgtttctcaaaagaatatagaatttaaacagtattttccaaataatggatgggtcgaacatgatcctcgcgatattctctcatcaactattgattgcattaaatacgtaattaatgagagcaaagtgaaaccagaggatatcatgacttctggagtcacaaatcaaagggaaacaattgttgcatgggataaaacatcaggtgacccagtatataatgcaatagtttggcaagaccgaagaacagaggacatttgtgagtctcttagagagaaagatgttgaaggctcgatacaaaaaaaaactggcctgttaattgatccatatttttctgcttcaaaaataaaatggattttggaaaatgttgatagggcaaaaagtttgatagcggataataatttaatcataggaactatcgatacgtggttaatttggaatttaaccaataagcaatatcatcttacagatgtaacaaatgcatcaaggacaatgatttataatataattgatgattgttgggatgaagagttattaaaactattcaatattcctagagaaattcttccagaagttaaaaattcaatggataattttggagtaattagtagagatttttttggttctgagattcccatcactggggttgctggagatcagcaggcagctgcgtttggacaactttgcattgagaaaggtatggttaagtcaacttatggaacagggtgctttatgctaatgaatactggaaaagaagtttatcaatctcaaaataaacttttatctacgaccgcctttaaaacaagtgatcaaaaaatgtatgccttggaaggaagtatatttaatgcagggacaatagttcaatggatgagagatgaactttctttttttaaaaaggcaggagagattgagttactagcctctgaatctaaaaatgatattgtttttgttccagcattcactggacttggagctccatattggaggtcggatatacgaggatcaattcatggaataactagagatacatcgaagagtgatattgcaatggcagcattaaaatctgtttgcttccaatcaaaagatctatatttgagtttacaaaaagatatggctaatgatgacctaaattctgtcatacgtgttgatggtggcatgtctcagaataatttgatgatgcaataccttgcagatctgttgcagataaatgttgaaagaccagttattcaagaaactactgtcatgggagcagcatatctagcagggttacaacatggaatatataaaagtattgatgatcttaaag

SEQ ID NO: 248655 - DNA, 439 bp, Unknown
  Bacterial polypeptide expressing nucleotide sequence isolated from the Sargasso Sea
gatgaaaaattttattatatcaatcgatgctgggaccacatccaatagatcaatattatttgatttaaaagggaaacctatttactcgtctcaaaaagaatttactcaatattttccaaaaagcggttgggttgaacataatcccgaagaaatatggaaaactactttaaaaacactgaaagatgtaattaataaagccaaaagattaaagggtaaaattttaagtataggtattactaatcaaagagaaacaacagttttgtgggataaaaaaacaggaaagcccgtttacaacgcaatagtttggcaggaccgtaggcaagaggagttttgccaaaaattaagaaaacaaaacaaagatactatgatttttaacaaaactggtcttttaattgactcttatttttcaggtacaaaaataaagtggatattagacaat

SEQ ID NO: 248656 - DNA, 468 bp, Unknown
  Bacterial polypeptide expressing nucleotide sequence isolated from the Sargasso Sea
tatgtctgtcataatagctatagatcagggtacaactagcacaagagcggtggcgtttgataaagatctaaatatcatcgattctgagcaaaaagaatatcctttgatatatccaaaggatggttgggtggaaattgagcctgaacatttaatggattctgtttatgcaacgattgatcctgttatcagtgcttgcaaagatatttctgctattggaataaccaatcagcgtgaaacaactttagtatgggatgcagattctggacaaccaatttataacgcaattgtttggcaggatagaagaacagcagagcaatgtgcgcaattaaaaaaagatgggcatgaagaagttataaatagtgcaactggattgttgcttgatccatacttttcatcaacaaaaatagcttggattttagacaatattgatggcgcgagaaaaaaagcggaagcaggtaagttgcggtt

SEQ ID NO: 248657 - DNA, 1006 bp, Unknown
  Bacterial polypeptide expressing nucleotide sequence isolated from the Sargasso Sea
agtttttgatgaaaatcaaaatataatttcggaaagccaaaaagaatatgaacttcaatacccaaacgatggttgggtgaaagcaaatccagatgaaatactgggaagtgtaaaagaaacaataaaaaaagcacttgaaagctctaaggttgagattgctgcttgtggaattaccaaccaaagagaaacagtggttgtttgggatagggtgtcaggagaagctatatatcctgcaatcgtatggcaagacagaaggacttcagacttatgtagtgaactgaaacagaaggaaaatttagagagcgaaattagagaaaaaacagggcttctattagatccatatttttcagctacaaaaattaagtggattcttgataatgtagagaatgccaagaaaatggcagaaagaggtgagctttgttttggaacaatagaaacctatctaatatggaatctcacagaagaaaaaaatcataaaacagacgcaacaaatgcttccagaacaatgctaatgaatctcgagactttagaatgggatgattctcttcttgagatatttaatatcccaaaaaatattcttcctgaaatatgttcatgtgatgatactttcggctcaatcgatctatttgatcaaaagttcccaataactggagttataggcgatcaacaatcagctctttttgggcaaaattgctttgaatttggcgaaatgaaaagcacttatggaacagggtgttttttaatggttaatacaaaagaaaagatttataaatctgaagcaagattgctgtcaacagttggatgtatgcttggaaacacagtctcctatgctctcgagggtagtatcttttcggctggtacctctattcaatggttaagagatgaaatgaaattttttgatgattcttctgaaagtgaagaccttattgacgatgaatttgattcaaggggtgttaactttattcctgcatttactggtcttggatctccacattggaattctgaa

SEQ ID NO: 248658 - DNA, 1288 bp, Unknown
  Bacterial polypeptide expressing nucleotide sequence isolated from the Sargasso Sea
caaagctaataaaataaaaggtcatatactttgtattggaattgctaatcaaagggaaacgtcaattttatggaataaaaaaacaggtaaaccaatttacaacgcaattgtatggcaagatagaaggactcaacaatattgtaaaaatcttaaaaataaaaaaaatgaaaatttttttaggaaaaaaacaggcttatttatagatccatatttctctgcaacaaaaataaaatggattttagataatgttaaagtgtctaaaaaattattaaaatcaaataatttattatttggtacagttgatacttttttaatatggaaactaaccaatggaaaaaagcatttaactgaagctacaaatgcaagtagaactatgctatttaatattaatactaacaaatgggataaagaaattttaaaaaaattaaatattcctaaaaaaattctaccaaaagttaaaaattctgcagatgattttgggaaaattgataaaaaaattattggaaaagaaattccaatatcagctgtactaggcgatcagcaagccgcagctgtaggtcaagcatgttttgaaaaaggctccattaaaagtacctatggaacaggtgcatttataattttgaacactggatccaagaaaataaattcaaaaaataagttattaactacaatctgttatagactaaataataagaatacatatgcattagaaggatcaatttttatagctggtgctggtatacaatggctgagagataaaattaaattaattaacaatgcttatgaaacagagcaaattgtgaaatctacaaaaagtaataatgaagtttatatcgttccagcatttagtggaattggagccccgtattggagacctgatgcaagaggtttaattactggattaactagagatagtaattggaagatgttagttagagcaacagtagagtcggttgcctatcaaagtcatgatctttttaatgcaatgaacaaggatggcttgaagccaagaattgtaaaaatagatggtggcatggttgcaaataattggttttgtcaatttttatcaaatattataaatcttaaagtaattagaccacgagtgttagaaactacagctttgggagcagctctttttgctgcatatcagattggtgaattcaattcattaaatgaaatcaaaaatttatggcgaaaagatagagttttttcaacgaaaattgataattcattaagaaaaaagttattgcagggttggaaactagcaattaaaaaaacattagcgtag

SEQ ID NO: 248659 - DNA, 798 bp, Unknown
  Bacterial polypeptide expressing nucleotide sequence isolated from the Sargasso Sea
ttggaaagcctataacaattggtggtatggcaggagatcaacaatccgctactattggtcaagcctgtttcaataaaggtcaatcaaaaagcacttatggaacaggctgttttttgcttatgaatattgggaataaatttaaaatgtctaaaaatcggttgcttactacagttgcatttaaaattaatggtaagaaaatgttttgttatgagggaagtatatttgtagccgggtctgcaattcagtggttaagagataatttaaatttttttagcagctcatcagaaactgataagctatatgtaaaagcaaataaaaatgagagtgtgtattttgtacctgcattaacaggactaggggctccatattggaattctaatgcaagaggtaccttttttggaataactagaaatacatccaaggaagatataattaaagcaacaattgatagtttatcatatcaaacttatgagttgattgaatgtatggaaaaggactcaaaaactagaataaatgaaataaaagttgatggcgggatggtaaaaaataacaattttattcaaagtttatcaaatattactcaaattaaaattataagaccaaaaaatattgaaacaacctcgttaggtgcagcttatcttgcaggcttgcaatctggtataattaaaaatactaaagaaattaacaaattttgggaaaaagataaaatcttaaaatctaaaattccaaaaaataaagcaatttcaaatattaataaatggaagtcaacaattagagcagtaaataagttttattaat

SEQ ID NO: 248660 - DNA, 863 bp, Unknown
  Bacterial polypeptide expressing nucleotide sequence isolated from the Sargasso Sea
cttggaccaaggcaccacgagctcgcgtacaattcttttcagtgaaaaaggtgaaatagttgcggatgcaagcacaccattagcttgttactatcctcagtcaggatgggtagagcaggacgcacaggaaatatgggtcagccagtctcaaaccattcgggaagcattgaagaaagcagcgctgaaaatgaaagacattgctgctgtgggaattacaaatcagcgagagaccactattgcatggaatagaaatactggagaagcaatttcgccggccatcaactggcagtgccgccgcaccgctgattattgcgagcagttgaaagatgagggttttgaccgtgtactgagaaaaaagaccggactggtaaccgatccctatttttctggaacaaaaatgcgctggattctggaaaatgtcccagaagccagcaaattggtggaacatgggaatctttgttttggcactgtcgattcttggctaatttggcagatgacaagtggtcaagttcacgccactgagatcagcaatgcttctcgaacgatggttttcaatattgattcatgttcatgggataatgaaataatgtctcgattcaatatacctcgtgagacccttccggatgttataccctcaagtgccattattgcagagattgatccagatttatttggaggttctgctcctattgctggtgtagctggggatcagcaggcggcactttttgggcaggcatgctttgaaacaggaatggcaaaaaatacctatggtactggctgttttatgatctcaaatacaggctccgaacaggtgcattcaaagcatggtttacttactacaatagcctggcaaatgacaagga

SEQ ID NO: 248661 - DNA, 622 bp, Unknown
  Bacterial polypeptide expressing nucleotide sequence isolated from the Sargasso Sea
tattgcctatagaattaatggaaagacaacatatgcgatggagggatctatttttatagctggtgctggtgtgcaatggttaagagatcgaatgaaattttttaagaaagcacctgagacagaaaaaatagttaaatcacttcaaaacaacaatgatatttatttagttccagcattcaccggattaggagctccgtattgggatgctaatgctagaggagttttaagcggcattactagagatacaagtcctaaagaaatagtcagagctattattgaagcagttgcatatcaaactcacgatctttttgaagctatgaaacatgacggtttgagacctaaaattgtaaaagttgatggcgggatggtaatgaataattggttttcacaatttttatctgacatagtgaatgtaaaagtattaagaccaaaagtacaagaaactactgccttaggtgcagcttttatggccggtcttaatattggagtttacaaatcattaaaagatatttctaaaaattggcaattggataaaaagttttcctcaaaaatgaaaaattcatcgagaaaaatcctaattaacggttgggaaaaagctgtgaagagagccttaataaattaa

SEQ ID NO: 248662 - DNA, 613 bp, Unknown
  Bacterial polypeptide expressing nucleotide sequence isolated from the Sargasso Sea
atggcagatcagcctctcctgttggcgctggatcaaggcaccagcagttcccgcgcagtggtgtttgacgccaagggtggcctcgtggccagtgcgacggcccccctgcccattcagtaccccgccgatggctgggtggaacaacatccaggcgacatctgggacagccaacgaaaggcgctgcaggatctgcaccagcagctcgctgaggagcaacggcgggcggtcgtgagctgcggcatcaccaatcagcgcgaaaccaccgtgctctggagacgcagcagtggctctccctgcggtccagccctggtctggcaggacggccgcacggcggacatctgccaagggtggaaaacagacggcctcgaagacgcctggtgccggcgcacggggctgctgctggatccctatttcagcgccagcaagatccgctggatgctcgagcatcactccgaggcggcagccgctgcggcccagggcgatctgtgcttcggcacggtggagtcctggctgctctggaacctcaccgcggggcaacgccacgggagcgatatgagcaatgccagccgcacgctgctgatggatctggagcagcgttgctggatggatgcct

SEQ ID NO: 248663 - DNA, 1088 bp, Unknown
  Bacterial polypeptide expressing nucleotide sequence isolated from the Sargasso Sea
aacaggattaactatggatccttatttctctgcttcaaaagtgaactggattcttgatcaagtaaacggggcaaggcaaagagctgagaacggagaattgctatttggaactatagactcttttttgatatggaaattaactgaaggaagagaccataaaactgatgtatctaatgcatcaagaaccatgctgtacaatattgaaactaatgaatgggacgaggagttattaagtttattcaaagtcccatctaatttgctgcccacagtttgtgacaatgcatatgattatggttacacagaattgttaggaggtaagattagtatcggaggagtagctggcgatcaacaatcggctttgatagggcaatgttgttttgaagtaggtgaagtaaaaagtacctacggcacgggctgttttatgatgattaatactggtaatgagattattcagtcaagcaataaactcttatctactatagcttatagacttgaaggcaaaacaacttatgctttagaagggagtatttttgtcgctggctctgccatacagtggcttagagatggattaaatttctttgagaatgctagtgaatcggaagacttagctttgcaagcaaaagataattccagggtcttggttgttccagctttaactggtttgggcgccccttattgggatgctgatgccagaggagctatatttggtttaactagagacacgggtattcctgaaataaccaaagctgtattagagtctgttgtttatcaaacaaaagatttgttggaagctatgaaaaatgacaatgcttcctttaattcacttaagatcgatggaggtatggtggcaaataattggttttctcaagaattgtctaatgtacttgaagtaaaggtatccagaccaagtgtaatagagacaacttctttaggggcagcttatttagcaggacttcatgcaggtgtgtttgataccttatcatctcttaaagagaattggtcgacagataaagagtttgagcctcaggatactagaaatagatatttggaatggaaagaggctgtaaataaagtcttaacacattaat

SEQ ID NO: 248664 - DNA, 589 bp, Unknown
  Bacterial polypeptide expressing nucleotide sequence isolated from the Sargasso Sea
ttttgctcttgaaggttcaatttttatcgctggcgcaggtgttcagtggttaagagataagttaaaattaattaataatgcttatgacacagaacaaattgctaaatcaaaaaaaaataatgaaggtgtatatgttgtaccagcttttagtggactgggagctccatactggagacctgaagcaagaggagttataactggattaactagagatagtgattggaaaaccttagtaagagcagttatagaatctgtggcatatcaaagttatgatctatttaatgctatgagaaaagatggattaaagccaaatatagtaaaaattgacggaggcatggtggaaaacgactggttttctcagtttttggcaaatattatagatattaaaacagaaagacctaaagttttggaaactacagcacttggagttgctttgtttgctggataccaaattggagtatttaaatcattagaccaaataagtagaaaatggaaaaaagacaaaacttttaaacctaaattaactcacactgttagaaaaaaactattgaatgggtggaaattatcagttgataaaaccttattgtaa

SEQ ID NO: 248665 - DNA, 1003 bp, Unknown
  Bacterial polypeptide expressing nucleotide sequence isolated from the Sargasso Sea
cctgttatttggaacagtggatacatatttagtgtggaaattgactggtggaaaaattcacgcaacagactcaacaaacgcatctagaacaatgatttttaatattaaaaaaaattgttgggataaaaaattattaaaattattaaaaatccccaatattattttgcctgatataaaaaactctgctgatgattttggttcaacaaataaatctataacttataaatcttatcctataagcggagttattggagatcaacaagcagctgcaattggacaatcatgttatacaagaggttctacgaaaattacttatggaactggtgcgtttgtcataatgaacacaggtgataaaataattaaatcaaagaataaacttttatctacagtttgttatagaattgataacaagacaacatatgctctagaaggttcaatttttgttgccggggctgcagttcaatggttaagggataaattaaaaataataaaatatgcaaatttaactgaaaagatttcaagaaaacaaaaaaacaacaataatttatatttagttccagcatttacaggactaggtgctccttattggaaaccagatgctcgaggaactttagtaggtatcacgagagatactgaaagagaccatgttattagagcaacattagagtcgattgcttatcagtcctcagatcttttaaacgcaatgcaaaaagacggcgttaaacctttgattgttaaggttgatggtggaatggttcaaaataactggttaatgcaattcatatctgatgttttaaatctgcctatctatagaccgaaagttcatgaaacaactgctttaggagcagccttaatagctggttatgggattggcatttataaatctttatcatatatgtctaaaaaattgaaatatgataaaaaattttatccaaaaatggctcataagaaaagatttaagttgttgaatggttggagccaagcaattagaaaaagtatataa

SEQ ID NO: 248666 - DNA, 878 bp, Unknown
  Bacterial polypeptide expressing nucleotide sequence isolated from the Sargasso Sea
tatgcgccagcaagccattttatctatagatcagggcacctcttccagccgggctttgttatttaaccgcgatggcaaggtattggctgtcgcacagcaggagctggattgtgtttatccggagcagggctgggtggagcaagacgcagagctgatttggctctctgtgctcaaggtgtgtcggcaggtgttggtgcaggctgtgcagctggggattgaagtcctgggcgtgagcatcagcaatcagcgcgaaactactgtgctttggcataaagccaaagacaaagtgctggcacctgctattgtctggcaggacagacgcacagcagattattgccagcaactgaaagatcagggccatgaggagtgggtgcagcaaaaaaccggtttgctgctggacccttatttttccgccagcaaaattcagtggttactgcgccacaataccgaggtgcagcaggcgctggccgataacgaactcgcctttggcaccatagatagttttttgctctggcgtctcacatcggggcaagtgcatgccatagacaccaccaacgccagccgtactttattgctgaatattcaaagcttaaattgggatcaagaactgctgcagttgtttggtgtaccagagcagattctgccgcaggttaaacaaagcgctgatagttatggtttgtgtgatacccgcttatttggtttggctttgcctgtgctggcgctggtgggcgatcaacaagctgcggctttaggtcagggttgtattagtgcaggttcgttaaaaagcacgtacggtacaggctgttttgccttattaaataccggctgcagcccgttattttccaaacacagattactgaccactgtggcttttactg

SEQ ID NO: 248667 - DNA, 1492 bp, Unknown
  Bacterial polypeptide expressing nucleotide sequence isolated from the Sargasso Sea
tatgaagagatttatattatcaattgatcaaggcacaaccagctctagagtggttttgtatgatgataaatttaaaataaaaaatattgaacaaaaagaatttagacaattttttccaaaagatggatgggtagaacacgatgctcaggaaatatggaatgatgttaaaaaattaattcaattaacaatcaaaaaaaataaacttaaaccaaaccagatagcctctattggcataaccaaccaaagagagacaacagttctctggaacaaaattactggaaaacctatacataaagcaattgtatggcaagatagaagaacagctgagtattgtgaaaaattaaaagcacaaaataaagataaaattattcaaaaaattacaggtttagtcttagatccatatttttctgcgacaaaaattaagtggattttaaataaagtctcaaacaaaaaaaaaattttaaacaaaaaaattttatttggaactattgatacttggcttctttggaaacttacagaaggaaaatcgcatttcacagacataacaaatgcatcaagaacgatgctttatgactctagaaaagaagagtggtccaaggaactattaacactttttaaaattgataaaaatattttacctaaagtaaaagaaaatgcttatgactttggtagcactaaattatttggtggtgaaattcaaataggtggaatggctggagatcagcaagcagcaacaattggtcaagcctgttttagtgctggacaatcaaaaagcacctatggaactggatgctttttattaatgaatataggaagcaagtttaagctatcttcaaataaacttttaactactgttgcatttaaaataaatggaaaaaaaatgttttgttatgaaggtagtatttttgttgcgggatcagcaattcaatggctaagagacaatatgatgttttttaaaaactcaaaagcgactgatagactttactccctagcaaataaaaatgaaaacgttattgtaattccggcacttacaggccttggagcacctcattggcaaccaaatacaagaggtgcaatatttggattaacaagaaatacttctcaagcagatattataaaagcaacactagatagtctttcataccaaacattagatctaatagagtcaatggaaaaagatgcaaagattagtatttcagagatcagagttgatggtggtatgatcaataataataattttcttcaaagtttatctaatgtaacgcaagtaaaaattataaaacctgaaaatatagaaacaacatctcttggagttgcatatttagctggacttagttcaggtataataaaaaatacaaatgatattaaaaaattttggaaaaaaaataaagaaataaaaccaaaaattaaaaaatcaattgtacaaaaaaaagttgcaacttggaaaaaaactataaaaaatttaatagaacttaataatcaaacgacttaa

SEQ ID NO: 248668 - DNA, 1444 bp, Unknown
  Bacterial polypeptide expressing nucleotide sequence isolated from the Sargasso Sea
tacatcaacaaaagtaattttgtttgatacaaaaggtaatacaaaatttatatcacagtttgaatttaaacaatattttccaaaaaatggctgggtagaacataatccaaaagagatttggatgactacacttaaatcattaaaaaaagttatacaaaaagcaaagcagttaaaaggaaatatattaagcattggaattactaatcagagagaaacaactttactttggaataaaaaaaatggcagacctatatataacgctattgtttggcaggatagaagaacacaaaaattttgccaaaatttaaaaagaaataactatgaaaatagtattagaaaaaaaactggtttatttatcgatccatatttttcagcaacaaaaattaggtggatattagataacgtaaaagaatctaaaaaattatttaagtccaataatttactatttggaaccattgatacttttttaatctggaagcttactaaaggaaaaagacatttaaccgacgcaacaaatgcagccagaacaatgctgtacaatataaatacaaatcaatgggataaaaatatattgaaaaaattaaaaataccgtacaaaattcttccagaagtaaaaaattcagctgacaattttggaactacaaacaaaaaaattattggacaagaaattcctatatctgccgttttaggagatcaacaggcagcagcaattggtcaatcttgttttcaaaaaggctcaataaaaagtacttatggaactggcgcatttgtaataatgaatactggatcaaaaaaaattttttcaaaaaataaattattaacaacaatttgttatcggctaaatggaaaaaatacttatgcattagaaggttcaatttttattgctggagcaggagtacaatggcttagagataaaataaaactaatcaataatgcttatgaaacagaaaaaattgctaaatcaaaaaaaaataacgatggtgtatatgtagttccagcttttagcgggataggtgctccctattggagaccagatgctagaggagtcattaccggtttaacaagaaacagtgattggaaatgtttagtaagagctgttgtagaatctgtagcttatcaaagttatgatttatttgatgcaatgaaaaaagatggactgaaacctaaattgattaaagttgatggaggaatggtggccaacaattggtttactcaatttttatcagatataataaaattaaatgttattagaccgaagactctagaaacaacagccttaggagctgcatttttagccggatatcagattggagaatttaaatctttgaacgaaattcaaggtaagtggaaaaaagatagagttttttctccaaaacttaataaatcattgagaaataatttattgcaaggatggaaacaagcaattagaaaaactttagcataa

SEQ ID NO: 248669 - DNA, 1396 bp, Unknown
  Bacterial polypeptide expressing nucleotide sequence isolated from the Sargasso Sea
atgaaaaaatttatagtatcaattgatcaaggaacaacctcatctagagttgttttgtttgacattaaagggaacattaaatttatttcacaatatgaatttaaacaatattttccaaaaaatggctgggtagaacacaatccaaatgaaatttggtcaacaacacttaaagcgctaaaacaagtaatcaaaaaaactaaaagtttgaaaggtcatataattacaattggaattacaaatcaaagagaaaccacaattttgtggaataaaaaaactggaaaacctatttataatgcaatcgtgtggcaagatagaagaacccaggaatattgtaaatctctaaagaataataattttgaaaaaacttttagaaaaaaaacaggattatttatagatccttatttttctgctactaaaataaaatggattttagataatgtaaaagtttcaaaaaagttactaaaaaccaataatttattgtttggtacagtagacaccttcttaatctggaaattaactaaaggtaaacagcatttaaccgaagctaccaatgcaagcagaaccatgttgtttaatatcaataacaataaatgggataatgaaattttacagaaattaaaaattccaaggagcatcttgccagaagtaaaaaattctgcagataattttggaaaaacagataagagagttacaggaaaagaaattcccatttcagccgttttaggtgatcaacaagcagctgctgtaggacaagcttgttttgaaaaaggatctataaaaagcacttatggtactggtgcttttataatcatgaacactggatcaaaaaaaattaattcaaaaaataagttattaactacaatttgctatagattgaataataagaccacgtatgctcttgaaggatctattttcatagcaggagcaggcgtacaatggttaagggataaaattaaattaataaacaatgcttatgaaactgaaaaaatagctaaatcaacaaaaagcaataatgaagtttatgttgtcccagcttttagtggaataggcgcaccttattggagacctgatgcaagaggtttaataacaggacttacaagagatagtgattggaaaactttagtaagagcaacagtcgagtcagttgcttatcaaagttatgatttattttattcaatgaagaaagatggcttaaagcctagaatagttaaaattgatggtggcatggtagctaataattggttttcacaatttttggcaaatgtaattaatttaaaagtaattcgacctaaagttttagaaactaccgctcttggagcggctctgttggcaggttatcaagtaggagaatttaaatcattaaatcaaattaaaaatacatggaaaaagagataaa

SEQ ID NO: 248670 - DNA, 1459 bp, Unknown
  Bacterial polypeptide expressing nucleotide sequence isolated from the Sargasso Sea
atgcctaaaaaaattatatcgatagaccaaggaactaccagctcaagagcagttatctttagtgatagtggtgaattgataggttttaaacaaaaggagttttcccaaatctttccaagcgatggttgggtagagcataatccagaagaaatttggcaatcagtattagaagtattagatcaatcaataactagttttaatatagaagcttctgatattgcctctataggaattactaaccaaagagagaccgttgtaatctggaataaaaaaaccggtaaaccaatctataacgctatcgtttggcaagacagaagaactagtgatttttgtaattcattacaagacaatcaaaaaatgatacagcaaaggactggattgacattagacccttatttttctgcttcaaaaataagatgggttctaaacaaggttgatggagctagagaaaaagcagagaacggagaactgttatttgggacaatagatagttacttaatatggaaattaacagaaggtagagagcacaagactgatgcaaccaatgcatcaagaactatgctttacaatattgaaaccaaccagtgggatcaggatttactagatttattttgtgttcccgcaaatatgcttccccaagtttgtgacaactcttctgattttggtcacacagaattattgggtggaaagataaatattggtggcgtagctggtgatcaacaatctgctttaattggacaatgctgttttgacataggagaagtaaaaagcacttatggcacaggctgcttcatgatgatcaacaccggaaatgaggtccttaaatccaacaacaagctcttatctactatagcttatagacttgatggcaaaacaacatatgcacttgaaggtagtatttttgttgcaggttccgcaatacaatggcttagagatggactgaatttctttgatgacgcaagtgagtctgaaagtttggctttgcaagcaaaagataattccaagatttttgttgtgccagcattaacaggtttaggagctccttattgggattctgaagctagaggtgctatttttggtttaactagagataccggagtccctgagataactaaagcggtgttagagtctgtagtttatcaaactaaagatttactagaagctatgaataatgacgaggcttcctttacatctttaaaggtagatggaggcatggtcgcaaacaattggtttactcaagagctttctaatgttcttggagttcaagtaactcgaccaaaaataactgagaccacttctttaggggcagcatacttggctggacttagtgcggatgtcttcgataacttttcatctctaaagaaaaattggtctatagataaagaatttgttcctcagaaaactactaatggctatttaaaatggaaggaggcagttaaaaaggttttaactaactagc

SEQ ID NO: 248671 - DNA, 1396 bp, Unknown
  Bacterial polypeptide expressing nucleotide sequence isolated from the Sargasso Sea
atgaaatattttttagtaatagatcaggggacatccagcacaagagcaattctttttgatgagaaatttgtcgtggtaaatgtttctcaaaccgaatttaaacaattttttccaaaagatggatgggttgagcatgatgctaatgaaatttttgacacggttgtaggctgtatcaaagaagtaatgaaaaagtccgaaacaacccataaagaaatcatagcaattggaatcacgaatcaaagagaaacatgtcttttatgggataagaaaggcaatcccttaggtaaagcaattgtttggcaagacagaagaaccgcggaactttgtaataaatttaaaaaagaaggactagaaaaaaaaattaatcaaattactggcttgctgcctgacccttatttctcaggtacaaaattaagttggctattagaagatactgaaactccaaaagactttttcatggggacgatcgatacttttctagtttggaagctaacagagggtaggtcttattccgttgatgccacaaatgcctctagaactttattgatggatataaacaatgtttcgtggtcagaagaaatgtgtaatttacttaatatacctattaataggttgccagaaatcaaaaattctgccgatgaatatggagaaacctctctgtttggcgggaaaatcaaaatttcaggtatagctggagaccaacaagcagctttaattggacaaggttgctttaaagcaggagaagccaaaagcacctatgggacaggctgttttatgatgctgaatactggaccagacgtaaagctttctaaatctaaactgctttccacaataggatatcaaatcgatgggaaagtaagttatgcgctcgaaggaagtatatttatggctggcgcgtctgttcaatggctaagggataatttagaatttttcccctccgctccggaaatagagaatttagcaaaaaattcgaataagaattcaaatgtttcctttattccagcatttacaggccttggagcaccttattgggatccagaagccagaggggctatttttggattatccagagagacaacaaaaaatgatatttctcaagcgctccttgaagcaattgcattccaaacaaaagatgtttttgaatgcatgtcttctgatggagtagacctgaagtccctcaaaatcgatggcggaatggtagaaaataaatatttcaatcaaattttagcggatgtactaaatttaaaaattcttttgcctgataataaagaggcaactgcaaaaggagctgcttttctagcttctttgggctccaaacatacgaactcgctgtccgatctcaacgaattcattggatcgtacgaacaattcactccgctgaatcaagagacagcaa

SEQ ID NO: 248672 - DNA, 1183 bp, Unknown
  Bacterial polypeptide expressing nucleotide sequence isolated from the Sargasso Sea
cctatatatccagcagttatatggcaggacagaagaacctcggatttatgtaatgatctaaaaaaggaaaaaaatttagaaagtgaaattagaaaaaaaactggacttctgttagatccatatttttccgctacaaaaattaagtggatccttgataatgtggagaatgccaggagaatggcagaaaatggagagctttgttttggaacaatagaaacttatctaatttggaatctcacagaagaaaaaaaccataaaactgatgcaacaaatgcctcgagaacaatgttaatgaatcttgaaactttagggtgggatgactcacttcttgagatatttgatataccaaaaaatattcttcctgaaatatgttcctgtgatgataattttggttcaatcggtgcttatgatcaaaagtttccaataactggagtaataggcgatcaacaatcagcactctttggacaaaattgcttcgagttcggcgaaatgaaaagcacttacggaacgggctgttttttaatggttaatacgaaagaaaaaatctttgaatctcaagcaagattgctttcaacagtgggatgtatgcttggcaaaagtgtttcctatgctcttgagggcagtatcttttctgccggtacctcaattcaatggctgagagatgaaatgcagttctttgatgattcttctgaaagtgaggaacttattaacgaagactttgactcaaggggtattaactttattcctgcatttactggtcttggagccccacattggaattctgaaataagaggaagtattcatggcattcagagagatagtagcaaagaagatataatcacagcagtatttaaagctatttgtttccaaacccttgaaatcgttgaggctttggaacttgacggtgtttcagtccgttctttaaaggttgatggtgggatggtaaaaaataggaagtttcttcaactattaagcaatactttatcgacaaatgtaaaaaaacctgaccaaattgaatcaactgcagtaggtgcttttaagattgccttgctgggatctggcatcaaagatatagatgaaatccaagaaattggttcatatgatgaagttaagtcaaaacaatctccaaaattaattgatgattatcaaatctggaagaattacttaacaaaaaatctctaat

SEQ ID NO: 248673 - DNA, 865 bp, Unknown
  Bacterial polypeptide expressing nucleotide sequence isolated from the Sargasso Sea
tatgaaaaactttttagctattgatcagggaaccacaagctctagagcaattgtgtttaattcaaatttacaacctatttcagaatcacaaaaggaatatgatttaagttatccgaatgatggatgggttgaattggatatcagtgatgtattaaattcagttagagaaacagtgacatcagttttaagcgataatttaactattgaggcatgtggtatcacaaaccaaagagagactactgttgtgtggtctaagagctctggagaggcaatatatcctgcaatagtctggcaggacagaagaacacatgaatattgcaataaattaaaatcagagggtcatgaagaaagtgtaagaaataagactggtttagtgcttgatccgtacttttctgcaacaaaaattaagtggatattagataatgtagacggcgcaaaagataaagcagaaaaaggagatttattattcggtacaatcgatacctatttaatatataaattaacgggtaataaaaatcatctaacagatgtaacaaacgcatcacgaacaatgcttttcaatatcaatacccttgaatgggataaagaattgttagatttgtttgaaattccagaatctatgttacctaaagtattaagctgcgatggtgattttggaaatattactataaataatcaaactattcctataaagggtgtgattggtgatcagcaggcagccttagttggccagagatgcataaaaaaaggtgatatgaaatctacttacggcacaggatgttttctaatgcttaataccgaagaagaacccatttcgatcgatgaaggccttctaacaactatagcttattcaatccgagggtaa

SEQ ID NO: 248674 - DNA, 1480 bp, Unknown
  Bacterial polypeptide expressing nucleotide sequence isolated from the Sargasso Sea
tttgaaaaaatttattatctcgatagaccaagggacaacatcctcgagggtagtgctttttgataccaacggcaataaactatttatatctcaatacgaatttaaacaatactttccaagaaacggttgggtagagcacaatccaaatgaaatttggtcgacaacacttaaagcgttaaaacatgtaatcaaaaaagctaaaagtttaaaaggtcacatacttacaattggaattacaaatcaaagagaaactacaattttgtggaataaaaaaactggaaaacctgtttataatgcaattgtttggcaagatagaagaactcaggaatattgtaaatttctaaagaataaaaattatgaaaatatttttagaaaaaaaacaggattatttttagatccttatttttctgctacaaaaataaaatggattttagataatgtaaaagtttcaaaaaaattactaaaaactaataatttattatttggtacggtagacacctttttaatctggaaactaactaaaggtaaacagcatttaaccgaagctactaatgcaagcagaaccatgttgtttaatattaataacaataaatgggataatgaaattttacagaaattaaaaattccaatgaatattttgccagaggtaaaaaattctgcagataatttcggaaaaactgataagagagttacagggaaagaaatacctatttcagctgttttaggagatcaacaagctgcagctgtaggacaagcttgttttgaaaaaggatcaactaaaagcacttatggcacaggcgcttttataataatgaatactgggtcaaaaaaaattaattcaaaaaataagttattaaccacaatttgttatcgattgaataataagactacgtatgctcttgaaggatctattttcatggctggagcgggagtgcaatggttaagagataaaattaaactaataaacaatgcttacgaaactgaaaaaatagccaaatcaacaaaaagcaacgatgaagtttatgttgtaccagcttttagtggaataggggctccttactggagacctgatgcaagaggtttgattacagggcttacaagagatagtaattggaaaaccttagttagagcaaccgtagagtcagttgcttatcaaagtaatgacttattttattcaatgaataaagacggtttaaaacccacaatagttaaaattgatggtggcatggtagctaataattggttttcgcaatttttggcaaatattattaatttaaaagtagttcgacctaaaattttagaaacaactgctctcggagccgcgctgttagcaggttaccaaataggagaatttaaatcattaaatcatattaaaaatacatggagaaaagataaggaatttgtaccaaaaattgataaaaaattaagaaatcacttattgcaaggttggcagcaagcaattaaaaaaactttagcataa

SEQ ID NO: 248675 - DNA, 1090 bp, Unknown
  Bacterial polypeptide expressing nucleotide sequence isolated from the Sargasso Sea
aaaaaaactggacttctgctagatccatatttttccgctacaaaaattaagtggatccttgataatgtggagaatgctaggagtatggcagaaaatggcgagctttgttttggaacaatagaaacttatctaatttggaatctcacagaagaaaaaaaccataaaacagatgcaacaaatgcctcgagaacaatgttaatgaatcttgaaactttagggtgggatgactcgcttcttgaaatatttgatataccaaaaaacatccttcctgaaatttgttcctgtgatgataattttggttcaatcggtgcttgtgatcaaaagtttccaataactggagtaataggcgatcaacaatcagcactttttggacaaaattgcttcgagttaggcgaaatgaaaagcacttatggaacgggctgttttttaatggttaatacgaaagaaaaaatctatgaatctcaagcaagattgctttcgacagtagggtgtatgcttggcaaaagtgtctcctatgctcttgagggtagtatcttttctgccggtacctcaattcagtggctgagagatgaaatgcagttctttgatgattcttctaaaagtgaggaacttattaacgaagactttgactcaaggggtgttaactttattcctgcatttactggtcttggagctccgcattggaattctgaaataagaggaagtattcatggcattcaaagagatagtagtaaagaagatataatcacagcagtatttaaagctatttgtttccaaacccttgaaatcgttgaggctttggaacttgacggtgtttcagtccgttctttaaaggttgatggcgggatggtaaaaaataagaagtttcttcagctattaagcaatactttatcgacaaatgtaaaaaaacctgaccaaattgagtcaaccgcagtaggtgcttttaagattgcattgctgggatctggcattaaagatatagatgaaatccaagaaattggttcatatgatgaagttaagtcaaaacaatctcaacaattaagagatgattatcaaacctggaagaactacttaacaaaaaatctttagc

SEQ ID NO: 248676 - DNA, 1398 bp, Unknown
  Bacterial polypeptide expressing nucleotide sequence isolated from the Sargasso Sea
tatgaaaaaatttatagtttctatagatcaaggaactactagcactaaggttgtattatataataaaaattttcatgttattgatactttacaaaaagaatttaaacaattcttccctaaaaatggctgggtagaacatgaccctatagaaatatttaaagatgttaaatttttaataaaaaaattaataaagaaaaatgatattaaatgttcagaaattctttcaataggtatagctaatcaacgagaaacaacagttctatgggataaactatcaggaaaaccagtatataaagcaattgtatggcaagatagaagaactatatccatttgcgaaaaattgataaataagaaactagcttctaaaattcaaaaaattactggattagtaattgatccatatttctccgcaacgaaaattaaatggcttttaaagaatgttaaaaaaacaaaaaaattactaaaagaaaatagacttttatttggcacaattgatacttggctgttatggaatttgacagaaaaaaaatctcatttcactgatattacaaatgcttctagaacgatgctttatgattcaaataaagaagaatggtctaaatcactactaaaacttcttgaaatccctcataaaattttacctgaagttaaaccaaatgtatttgattttggttatacaaaaatttttggatcacccatcaatattggaggcatggcaggagatcagcaagcatcagctataggtcatacatgttttactttaggaaaagccaaaagtacatatggaactggttgttttttattaatgaatattggtaataaatttaagatatcaaaaaacaaactattaactagtgtagcatataaaataggaaataaaaaaatgtattgttatgaaggtagtatatttgttgctggctcttccatacaatggttaagagataaattattaatgtttaaagattctaaagatacggataaactatactcaaattcaaataaagatgaaaatgtaatttctataccagcgctaactggattaggtgctcctcattggcaaccacaagttagaggtgctttttttggattaacaagaaatacatcaagaaatgaaatagttaaatcaatcttagacagcttaggttttcaaacattggaattagttcattgtatggaaaaagattcaaaaattaagattaaagaaatgagagtagatggaggaatgacaaaaaatgatagttttattcagagtttatgcaacattttacaaataaaaattattaaaccaaataatactgaaactacttctcttggagtagcatatttatctgggatacatagtggcctaataaaaaatttagatgaaatttctaaactttggaacagaaaaaaagttta

SEQ ID NO: 248677 - DNA, 1483 bp, Unknown
  Bacterial polypeptide expressing nucleotide sequence isolated from the Sargasso Sea
atgaaaaaatttattctttctatagatcaaggcacaacttcaagcagagctatactttttgatcttaaaggcaacccaaaatacacatcccaaatggaatttactcaatattttccaaaagatggttgggttgaacatgatccagaagaaatctggtctacaactttaaaagttttaaaaaatgtagtcaaaaaaagcaaaatccttaagggaaaaattctaactattggaattaccaatcaaagagaaaccactattctttgggataaatatactggcaaaccagtttacaatgcaattgtttggcaagatagaagatcagcagattattgtaataaattaattaaacaaaaaaaagaaacaatcatttacaataagaccggtttgctaattgatgcgtatttttcagcaacaaaaattaaatgggttattgataatgttccaaaagctaaacaacttattaaacaaaagagattattatttggtacagttgattgttttttactttggaaactaactggtggaactaaccattttactgatgctacaaatgcaagtagaacaatgttgtataatatatcttctaataagtgggataagcagattttagatatcttaaaaattccaaattatatacttcccgaagtaaaagattgctcagatgattttggacatactgatccaaaaataacaggtgagtcttattctataacaggtatggttggagaccaacaagcagcaactatagggcaatgttgttttgaacccggttccctaaaaagcacttatggaactggagcatttgtattgttaaataccggaagtaaaattatttattcaaaaaatagattgttaacaacaattggatatagaataaatggaaaaactacctatgctcttgaaggttcaatatttattgccggagctggggttcagtggcttagagataaggttaaatttttaacaaaagcttcagattcagaaaaaataattaaaaaattaaaaagtaatcatggagtttatttagtaccagcttttacaggtattggggctccttattggaattctaaatcaagaggagttttaagtggtattacaagagataccggtattagtgaaattgttagagcaacagtagagtctgttggctatcaaacatatgatttgtttgaagctatgaaaaatgatgggcttcgtccaaaaatagttagagtagatggaggaatggttaaaaataattggttttcacaatttctttcagatgtaataaacataaaagttttaagaccaaaagttgaagaaactacagctttaggtgccgcttttatggcaggtttaaagataggagtttataaatcaataaatgatatttcaaaaaactggtctttagataaaaaattttcaccaaaaatgaaaaaaacaacaagaaaaaaattgataaatggctggcaaaaagcaattaagcgagctttaataacttaat

SEQ ID NO: 248678 - DNA, 1495 bp, Unknown
  Bacterial polypeptide expressing nucleotide sequence isolated from the Sargasso Sea
atgtcattaagtggttatattcttttaatagatcaagggacaactagttcaagagccttaattttgaatgaattaggccaaatacttgctcaaaaaaatattgagtttaagcaatattatcctgaaaacggatgggttgagcatgatccagttgaaatattaaaaacaacaacagatgcaattaagcaagttttagcagagcttaaaataaatgcgcaagatgttgtcgtagcaggcataaccaaccaaagggaaacaattgttgcttgggataaattgactgctaaaccaatttacaatgctattgtttggcaggatagacgtacagaaaattattgtaacgaactaaaagaaaaaaatctcatagataccataaaatcaaaaacaggattagtcattgacccatatttttctgctacaaaaattaagtggattttagaaaatattgaggaagcaaaagaatgtctcaacaaaggcaacttattagttggaacaatcgatacatggttgatttggaattttacaaaaggatcagaacattctaccgatgtaacaaatgcatccagaacaatgctttacaatattgctgatgatcaatgggatgaagagttattggatatatttgtattgccaaggagtatacttccccatgttaaaaactcagttgatgattttggtaaaattgtacctgacttttttggaaatgaaattcaaattggtggagttgctggggatcaacaagcagcttctgttggtcaatcttgctttaaagaaggtatggtaaaatcaacttacggcacaggctgttttttacttatgaatacaggggataatatattaaattccaaatcaaacctcctttccacagtagcttataatattaagggaaaaaaaagttacgcaattgaaggcagtatatttaatgctggaacagttgtgcaatggatgcgtgatgagcttcaattttataataaagcatcagaggttgagaatttagctagtaaaagcgttaatgatattcattttgtcccagcatttactggattaggagccccttattggagatcagatatccgaggtcaaatttctggcattacgagagatacctcaaaagctgatatagccatggcagctcttaaatctatttgttttcaaactagagatttatttgagtgtctcttaaatgactcaaatcttacaagagagaagtttataattcgtgttgatggtggaatgacaagcaataatatgatgatgcaatttttgtctgatattctgcaggtaaaaatagaaagaccggtgaaccaagaatctacagcaattggagctgcgtacttagcaggtatttatgctggcatatacaaagatgttgcagacgtagaaaaattgtggaaaactgatcagatatttgagccgaaaatttcaattgatcaagctgaacaattctatgacggctggaaaaaaacgatagaaagactaataagcaatggttgat

SEQ ID NO: 248679 - DNA, 1028 bp, Unknown
  Bacterial polypeptide expressing nucleotide sequence isolated from the Sargasso Sea
tatgaaatatttcttatcaatcgatcagggtaccacgagtactaggtgcatattgtttaatactgatggttcaattgcatcttctcatcaaattgagttgacacagtattttccagataataattctgttgaacatgatccaattgaaataattgattcagttaataaatgtatacaaaatgtcgttaatgatattgatgttaatgaaattgtaagtattggaattacaaatcaaagagaaactacagttgcttggagtaaatcaacaggaaagcctttttacaatgccattgtgtggcaagatactagaacacagagcatttgtgatgaattgtcaaagaataaaagattcactgaagttattaaaaatacaggcttacctatatcaacatatttttctctttcaaaaatattatggcttattgaaaatgtccctgagattagatcatctttggaagataatgtatgttttggaacaattgatagttggattgtatataacctaacaggaaacttttataccgatgttacaaatgcttcaagaacgcttatgtacgacttgcataacatggaatggtcagatgatattttgaatgaactttccattccaaagcattctctacctgaggtcaaaccatctttatcaaattttgggaaaattgatggggtcatcaaaggtgttcccataacagcaattttaggagatcaacaggcagcactgtttggtcagaattgtacgagcaaaggtgatgttaaaaacacttatggaactggatgctttgctcttactaacacaggaacagatattattgaatcagataatggattattgacgacactagcatatcaaatagaaggtgaagatcctctttatgcactagaaggttcagttcctatcgctggtgctgcagttcaatggttgagggataacctaaacattatcaagtcgagtgatgaaattgaatccctagctatgggagaaaaagacaatggtgacgtatattttgtaccagccttttctggattat

SEQ ID NO: 248680 - DNA, 1465 bp, Unknown
  Bacterial polypeptide expressing nucleotide sequence isolated from the Sargasso Sea
tatggattattttttatcaattgatcaaggaacaaccagtacacggtgtatcttgtttgatcaagatggtggcataaaggaaactcatcaagttgaatttaaacagatctttccagataataaatcagttgaacacgatgctaatgaaattttagaaacagtaaaaacttgcattcaatatgtcataaaagatacagagttagagagtattaaaagtattggtataacaaatcaacgagaaactactgttgcttggagtaaatctactggtaaacccctttataacgctatcgtttggcaagatacacgaacacaggatatctgtgatgaattaattgctgacgagagtctttcaagtctttttgaaaaaaccgggctacctattgctacttatttttctttatctaagattttatggcttatacgcaatgttcctaatattaaaaattctttagaagatgatgtttgttttggaacgattgatagttggttgatttataatttaaccggaaatttctatactgatgtaacaaacgcatccagaactcttctatatgacttatatgatatggaatggtgcagtgatctactagaaaaattagatatacctatcaactctttaccacaggtaaaaccatctttctcaaactttggagagatgaaggagataatacctggtgttcctgttactgccattttaggagatcaacaagctgcattatttggacaaaactgtattaacaaaggtgatgttaaaaatacatatggtacgggttgttttgcactcacaaacacaggaaaagatattgttaaatcaaacaatggattgttaacaactattgcttaccaaaaagaaggtgaagatccaatgtttgctttggaagggtcagttccaattgctggtgctgcagtccaatggttaagagataatctaaatattatcgataaaagtgaagatattgaatcattagcgatgctggagaaagataacggtgatgtatattttgtacctgctttctctggattattttctcctcattgggacgagacagcaagaggttctttatttgggttaacaagattttcaaataagtcacacatggcaagagcggtaattgaatctgttgcattccaaacatacgagttgcttgaaagtatggaaaaagatcttgatactgattttgaaagtctcaaagtagatgggggaatggttgcaaacaatctattaatgcaatttcaatcagacatattgaataaatctattcattcacaggaaattaatgaaataactgctcttggagttggagtggcaagttatctttatgtcatggatttgccgctttcatcaatgggaaattatattacctcatcaaagacttggaatcctaatatgagtaatgagacaagaattaactctcttaaatcttggtataaagcaattgaaaaagctaaaaattggttataa

SEQ ID NO: 248681 - DNA, 829 bp, Unknown
  Bacterial polypeptide expressing nucleotide sequence isolated from the Sargasso Sea
atgaaaaggtactttttaattattgatcaaggaacaaccagctcaagagttgttatttataaaaaaaattttgaaatttttgatattgtacaaaaagaatttaagcaattttttcctaatgaaggatgggtagaacacgatgcaaatgagatatggactgatgtaaaatatcttattactaaagcattaaaaaaaaataaattactagctaaaaatatcatatctataggaatagctaatcaaagagagactactgtcttatggaacaaagcaactggtaaaccaatttgtagagctattgtttggcaagatagaaggacaagtgaatattgttctaatttaaaaaaaagaggattaggtaaaaaaatacaaaaaattacaggacttgaacttgatccttatttttcagcttctaaaattaaatggatatttgataatgttaaagaagcaaacataaacttaaaacaaaataatcttttgtttggaacaatagatacatggcttttgtggaatttaactgagggtaaatctcacttaactgatatatctaatgcatcaagaacaatgatttttgactcaaaaaaagaagaatggtcaaatgaaatattaaaaatttttagaatttcaaaaaaaattttaccccaagttgttgaaaattcatttaattttggatcaactaaattgtttggagagcaaatctctataggtggaatggcaggcgatcaacaggccgcaacgattggtcaagcttgttttgataaagggcaatcaaaaagtacatatggcactggttgttttcttttaatgaatattggagataagtttaagt

SEQ ID NO: 248682 - DNA, 970 bp, Unknown
  Bacterial polypeptide expressing nucleotide sequence isolated from the Sargasso Sea
tatgtctttagatgggtatttactctcaatagatcaaggcacaaccagctcacgagccttaattttagatatccaaggaaatattattagtcaaaaaaacttcgaatttaaacagtatttcccaaatgatggctgggttgagcatgatccaatagaaattttaaagacaacacaagacgctgtcaattttgtgattagagaaacaaacataagcccaaaagatattaatattgcaggtataacaaatcaaagagagacggtcgttgcatggaacaaaataactggaaagccagtctacaatgctattgtgtggcaggacagacgaacagaaaacttttgcgagacactcagagaaaagaatttaacaaaacttattcaatcaaagactggcctaataatagatccttacttttcagcaacgaaaattaaatggataattgaaaatatcgaagaagcaaaaaaaatagctaatgaaaataatttattagttggaactattgactcatggcttatttggaattttacaaaaggtgaatgccattacactgatgttacaaacgcatcaagaacaatgctttacaatgtaaaagaagattgttgggatgatgaattattggatatttttaatattaacaaaaatattttgcctgatgtaaaaaattgcgttgatgattttggagcaattgattctagtttctttggagaaaaaatttcaataggtggagtagccggtgatcagcaggcagcaaccattggacaggcttgtttcaaggaaggaatggttaagtcaacttatggtacaggttgttttttattaatgaatactggaaataaatttatagaatcagagtccaaattattatccacaaaagcttataatatatttgataaaaaagattttgccctagagggtagcatttttaatgcaggtactgttatacaatggatgcgtgatgaaatgaatttcatt

SEQ ID NO: 248683 - DNA, 1456 bp, Unknown
  Bacterial polypeptide expressing nucleotide sequence isolated from the Sargasso Sea
atgaaaaattttttatcaatagatcagggaaccacaagttcaagatcaataatttttgatgcaaatttaaatttagtgacagatgcacaagaagaatatgatcttacttatcctgaagatggctgggttgagttagagccaaagaaaataatagaaacagttacaaatacacttaaaaaagttgtaaacgctgatataggtcttgaagcgtgtggtattacaaatcaaagagaaacgacgatagtttggtcaaaatcaactggtgaagcaatttatcctggaattgtctggcaagatagaagaacacatgaatactgctcatatctgaaatcaaatgggcatgaaccagtcataaaagaaaaaacaggattacttcttgatccatatttttcagcaacaaagatcaagtggattctagataatgtcgagggcgctagagaaaaagcgagtaaaggtgagttattgtttggaactgttgattcatatcttatttatatgctttccaaagaaaagaatcatttcacggatgtcacaaacgcatcaagaacattgctttttaatataaaaagtatggaatgggatgatgagctattggaattatttgaaataccgaaaaccatgatgcctgaagtgctaagttgtgatggcgattttggtaatttaacaataaataattgtgagatacccattagaggtgttattggtgatcagcaagcagctcttgttggacaaggttgctttaataatggcgatatgaaatctacatatggaacaggttgtttcttaatggtaaatacagaagaaaagcccttaaatattgacgaaggcctgctaacaacggtggcatatcaattagatgataaagttcattatgccattgaaggtagcatttactcatcaggaaccataattaaatggctccgagataaaatgaaattttttgaaagcgccaaagatagcgagaaatatcttaataagaaaggtaatagcaataatgttctttttttgccagcttttaatggtttgggtgctccttattggaattcagatatcagaggaggcttttatgggcttactcaggattcctcaatagaagatatggtaactgctgcattccattcaatatcttttcaaactaaagaaattactgccattttgcaaaagtatgatattcaaataaccaatctttcagtagatggcggcatggtaaaaaataactcattttgtcaactacttgcagatactcttaataaaaaaatcattcaaccaaaaaatgttgaatcaactgctattggcgcatgtaaagtttgcatgcttgcttctggattaagtattatcaatgcaaaaaatgacgacgtgaatgtttttacaccaaatattgagttaactaaaacttatgatagggcctttaatgattggaaatcatatgttgaaaaatcgctaacaactagctgat

SEQ ID NO: 248684 - DNA, 1417 bp, Unknown
  Bacterial polypeptide expressing nucleotide sequence isolated from the Sargasso Sea
attgatcagcacaagaagaattactcagcattttcctcagagcggttgggtcgagcacaatccaaaagatttattaaataccaccatcgatacttgcaaatcagcattaaatcaaaagtctattaacccaaaaaaaatagcggcgattgggattacaaaccagcgcgaaacaaccttagtttgggataaaaatacgggtaaacctgtctacaacgcgattgtttggcaagatcgaaggacagcgtctcattgtgaagagcttcgcaaaaagggatatgaaaagaaagttacagatattactggtttgttgttagacccttacttttcttcaacgaaattagcttgggtccttgataatgttgaaggcgtaagatcgagagcagaggcgggcaatctgctctttgggactgtcgatagttacctgatttggcatcttacaggacgtcaaagtcatgtaaccgacgcaaccaatgccgccaggacaatgctctatgatattagaaatggtgcttggagcacagagatgtgtgatatgttaaatattccgattaaaatgttgcccgaagtgtgtgactgcgctgcagaatttggattaacatcacaagaaatttttggggtatctatccctattaagggtgtcgctggggatcaacatgctgcaacacttggacaggcttgtttcgagcctggaatgatgaaatcaacttatggtacgggttgttttgcgctgctgaacactggtgatacaatagtcagttctcataaccgaatgttaaccacaataggctaccaacttgatggaaaaacaacttacgcgcttgaaggatctatctttattgcgggagctgttgttcagtggttgagggacggattgaaaatcttggctaaagcctctgaatctggtgatttggcaaaattatcagacaatagtcaaaacctaattttagtgcctgcatttacaggtttgggtgcaccctactggaatgctgagtgtcggggtgctgtatatggtttgacacgaaattctggtccagctgagttttccagggcggctttagaaagtgttggctttcaaacgcgagacttacttgaagcaatgatttcagactggcaaggtggtgcaaagggcggagtcctacgcgtagatggaggcatgtcagcgtctgattggacgatgcaatttttatcaaatattcttaatgcacctgtcgatagacccgaaatcttagaaacgacggctatgggagcggcttggttggcagggatgcgcgttggcctttatcctgaacaaagtgagtttgcaaaatcctggtcactggaaaaacgatttcaacctgacatggatgatgagttaagggagcagcgatataaagactggaagtcggcagtcgccgcaactttagaggtgaggacttaa

SEQ ID NO: 248685 - DNA, 901 bp, Unknown
  Bacterial polypeptide expressing nucleotide sequence isolated from the Sargasso Sea
atggaatattttctctcaattgatcaaggtactaccagcactagatgtattttattcaatgaaaatggagaaattaagttatcgcatcaagttgaaataaaacagtattttcctgattctaattcggttgagcatgatggtaaggaaattattaaaactgttgaagaatgtataaaagctgttgtaaaaaatattgatacgaattctataaaaagtgttggccttaccaatcaaagagaaactactatcgcatggagcaaatctactggagagccatttcataatgcaatcgtttggcaagatacgcgtactcaagatatttgtaatgaattattagctaacaaaaaacttaaaaatcattttgagagaacaggattacctgttgctacgtatttttcactttcaaaaatcttatggttgatccgaaatgtaccttctataaaaaatggattagatgacgatgtttgttttggaactatcgacagttggattatttataatctgacaggcaaatttttaaccgatgtaacaaatgcttcaagaacattgatgttcgatatatatgatttggattggtcacaagcaatattagaagagttaggtattccaattgattcattacccaaagtaatgccatctttatcaaattttggcgacataaacaaaatcattcctggagttccaattacagctgtgttaggtgatcaacaagctgcattatttgggcaaaactgcacaactagaggcgatgttaaaaatacttatggaactggttgttttgctcttactaatacaggtgaagaaataattaaatcatcacatgggctattaaactacatcgcttatcaagttgaagggagaaaaccactgtatgcgctagaaggctctgtacccattgcag

SEQ ID NO: 248686 - DNA, 1480 bp, Unknown
  Bacterial polypeptide expressing nucleotide sequence isolated from the Sargasso Sea
atgaaaaaatttataatttccattgatcaaggtactacttcaagtagagcgatattgtttgatttaaaaggcaaacttatttttacttctcaaacagaatttacgcaatattttccgaaggatggttgggttgaacatgatccagaggaaatatggaaaactactttaaaagttttcaaagaagttattaaaaaaagcaaaaagctaaaaggaaaagttttaactataggaattacaaatcaaagagaaacaactattttatgggataaaaaaactggtaaaccagtttataatgcaatcgtatggcaggataggaggtcctcagaatattgtaaaaaattaattaaacaaaaaaaagaaactattatctataataagacaggtttactaattgattcttatttctcagcaacaaaaattaaatggattatagataacgttcctaaagcaagagacttaattaaaaagaaaagattattatttggtacagtcgatagttttctattatggaaattaacaaaaggagttgatcatgcaacagatgcaactaacgcaagtagaacaatgttgtttaatatctcgacgaataagtgggatgatcaaatattaaaaatattaaaaattcctaaagaaatattaccagtagttaaagattgtgcagctgattttggttatactgacccttcaattactggaacttcttatccaataacaggaatggtaggtgatcaacaatcggccactataggtcaatgttgttttgaaccaggttctgtaaaaagtacttatgggacaggtgcctttctacttttaaatacaggaagtaaaaaagtttattcaaaaaataggttgttgaccacaatatgttacagaataaatggcaaaacaacatatgcattggaaggaacaatatttatagcaggtgctggtgttcaatggctaagagataaaataaaatttattaaaaaagcatcagacactgaaaaaattgcaaaatctcttagttcaaatcaaggaatatatttagtgccagcttttacgggattaggtgcgccttattggaatgtaaacgctagaggtattttaacaggattaacaagagatacaggtccaaaggaaatcacaagagctacggttgagtcggttgcctatcaaacttatgatttatttgaggctatgaagaatgacggtttaaaaccaaaattaattaaagttgatggtggcatggttttaaataattggttctcacagtttttgtctgatacgattaatacaaaagtattaagacctaaagtaaatgaaactacagcacttggtgcggcctttatggcaggtcttcagataggagtttataaatctttaaaagatattgcaaaaaattggcaagcagacaaaagttttaaaccaagaattaaaaattcagaaagaaaaattcttgttgatggttggagcaaagcaattaaaaaaactttatcctaat

SEQ ID NO: 248687 - DNA, 1504 bp, Unknown
  Bacterial polypeptide expressing nucleotide sequence isolated from the Sargasso Sea
atgcaggatcagtacatcctcgcgcttgaccagggcaccacgagttcccgcgcgatgctgttcgatcgccagggcaatatcgtatcgatcgcccagaaggaattcgagcagatctacccgcaacccggctgggtcgagcacgacccgcaggaaatctggtcgacgcaagccggcgtcgccgccgaagccgtcacgcgcacgggcctgaacggcacgtcgatcgccgcgatcggcatcaccaaccagcgtgaaaccacgatcgtctgggatcgcgaaacgggccagcccgtctacaacgcgatcgtctggcaggatcgccgcacggccgacttctgcgattcgctgaaggcacagggcttcgaggcgaaggtgcgcgcgaagaccggcctgccgatcgattcgtacttctcgggaaccaagatccgctggattctcgacaacgtgccgggcgcacgcgagaaagccaagcagggcaagctcgcgttcggcaccgtcgacagctggctcgtgtggaacttcacgaagcacgaactgcacgtgaccgacgtgacgaacgcgtcgcgcacgatgctgttcaacatccacacgcgcgagtgggacaacgaactgctcgacatgctcgacatcccgcgcagcatgctgccggaagtgaaggcatcgtcggaaatctacggccacacgaaaaccaccgtgttcgcgtcgaagatcccgctcgcgggtatcgcaggcgaccagcaggcggcgctgttcggccagatgtgcacgcagtccggcatggtgaagaacacctacggcaccggctgcttcctgatgatgaacaccggcgacaagccgatcgaatcgaagaacaacctcgtcacgacgatcgcctggcagatcggcgacaacgtgcagtacgcgctggaaggcagcatcttcatcgcgggcgcggtggtgcagtggctgcgcgacggcgtgggcatcatcaagtcggccgctgaaatcgaagcgctcgccgcgagcgtgccgcacaccgacggcgtctacctggtccctgcgttcgccggcctcggcgcgccgcactggaacgcacgggcgcgcggctcggtattcggcgtcacgcgcggcacgacctccgcgcacctcgcacgcgcggcgctcgattcgatcgcataccagtcgctcgacgtgctggccgcgatggaagccgactcgggcatcagcatcggcgagctgcgtgtggacggcggcgcgagcgcgaacaacctgctgatgcagttccaggcggacctgctcggcgttgacgcggtgcgtccgcagatcaccgagacgaccgccctcggcgcggcctacctcgcgggcctcgcgatcggctactggaagaacctcgacgaagtgcgcagccagtggcagctcgatcgccgcttctcgccgtcgatgccgaaggagcaggtcgaacgctgcatgtcgggctggcagcgcgcggtgcgtgccgccaaggcatgggcagacgacgcgcagtaac

SEQ ID NO: 248688 - DNA, 1331 bp, Unknown
  Bacterial polypeptide expressing nucleotide sequence isolated from the Sargasso Sea
gatgacgcgcgcgtacgtcggatccgtggaccaagggacgacgtcgacgcgattcgtcgtgtacgaagcggcgaacgcgcgggatccgtcgacatacgaggcgatcgcgtcgcatcagatcgaacacgcgcaaaagtatccgcgaccgggatggtgcgcgcacgacggtgaggagattttcgaacgcgcggtgacgtgcgcgagagaggcgttgaagcgtgcgtcgatcgaggcgagcgatttggcgtgcgttgggatcacgaatcagcgagagacgacgatggcgtggagacggagcgacgggacgccgtgttgcgacgccgtggtgtggttggatacgcgcacgagggagacgtgcgagtggttggttcgagagaaatgcggtggagataagcgtgcgttcgcaaacgtgtgcggtttaccggtgagcacgtatttcagtggggtgaagatgcgatggttgttggacaacgaaccgagcgtgcgcgcggcggcggacgcgggcgatttgtgtttcggaacgatcgagagttggctcgtgtacaagctgacgggcggtaaagtgcacgtcacggacgcgtcgaacgcgtcgcggacgatgttgatgcgtttggatgatttgacgtgggacgacgcgacgtgcgaggcgttcggcgtgcccaaggaggcgctaccagagatcaaatcgtgcgccgagttttacggcgaagtcgatgcgagcgtggagggattgggtggaattaagatcaccgggtgcatcggcgatcaacaatcggccacgctcgggcagaggtgcgacgtgggcgaggcgaagaatacgtacggaacgggttgtttcatgattctcaacacgggcgcgacggccgtgccttccaagcacggtttgctcacgacgctcgcgtggcaactcggtgggagagacaaggcgccgaaatacgcgttggagggatcggtcgcgatcggcggtgccgtcgtgcactggttacgcgataacctcggtttgattacaaaggcgagcgagatcgaaggtttggcgagcggcgtcgaggacgccgccggcgtgacttttgttcccgcctttagcggtcttttcgcgccgagatggcgtgaagacgcgcgaggcgtcatagtcggtctgacgcagtacgcgaacaaaggccacatcgctcgcgccgctcttgacgcgatcgcgtttcagtcgagagacgttctcgaagcgatgcgccaagacgcggctgagtcgacatcgcacgcgctgaacactctaaaagtggacggtggcgcccagtgtgaacgatctactcatgcaaatccaatcggattgcgtcgga

SEQ ID NO: 248689 - DNA, 457 bp, Unknown
  Bacterial polypeptide expressing nucleotide sequence isolated from the Sargasso Sea
atgaaatacatactatcaatagatcaaggaacaacaagctcacgcgcaatagtttttgatgaaaatcaaaatataatttcagaaagtcagaaagaataccagcttcactatccaaaagatggctgggttgaggcaaatcccgatgaaatacttggcactgttaaagaaacaataaaaaaagcattagaaacttctgaggttgatattgctgcatgtggaattacaaatcaaagagaaacagtggttgtttgggacaggttatcaggtaaaccgatatatccagcaatcatatggcaggacagaaggacttccgatttatgcaatgagttaaaaaataaggaaaatttagaaagtgaaattagaaaaaaaacaggtcttctattagatccatatttttcagctacaaaaattaagtggattcttgataatgtggagaatgccaggaaaatggcagaaa

SEQ ID NO: 248690 - DNA, 938 bp, Unknown
  Bacterial polypeptide expressing nucleotide sequence isolated from the Sargasso Sea
gcatctaatggcagcagaacaatggctgtataatatcaataacaataaatgggacaaagaaattttaaaaaaattaaatattccacaaaaaattttaccagaagttaaaaactcagcagataattttggaaaaacagataaaaaaattacaggagttgaaatttcaatttctgcagttcttggagatcagcaggctgcagcatttggacaaacttgttttgaaaaaggatctataaaaagtacatatggcactggtgcatttgttattatgaacactggtccaaagaaaattaattcaaaaaacaaattactgactactatttgctatcgattaaataataaaaatacttatgccttagaaggttcaatctttatagcgggcgcaggagttcaatggttaagagataaagtaaaattgatcaaaaaagcacctgaaactgaaaagatttcaaagtcctctaaagttaatgacggtgtttttgttgtaccagcttttagtggaatgggagctccttattggagaccagatgctagaggggtaattacaggactaacaagagacagtgactggaaaagtatagtgagggcaacagttgaatctgttggttatcaaagttttgatttgtttgattcaatgaacaaggatggtttgaaaccaaaaatagttaaagtagatggtggaatggttgcaaataattggttcacacaatttttagctgacattattaatttaaaagtagttagaccaaaaatattagagacaactgctttaggtgtagctttgttagcaggacatcaaataggagaatataaatctttaaatcaaattaaaaatatgtggaaaaaagacagaatatttaaacctaaaatgaaacaaaattttcgaaaagatcttttaaatggttggaaattagcaattaaaaagactttagcttagt

SEQ ID NO: 248691 - DNA, 721 bp, Unknown
  Bacterial polypeptide expressing nucleotide sequence isolated from the Sargasso Sea
tatgaaaaactttttatcaatagatcaaggaaccacaagttcaagatcaataatttttgacgcaaatttaaatttagtgacagatgcgcaagaagaatatgatcttacatatcctgaggatggttgggttgagttagagccaaagaaaataatagaaacagttacaaatacacttaataaagtagtaagcgctgatatagatcttgaagcgtgcggtattactaatcaaagagaaacgacaatagtctggtcaaaatcaactggtgaagcaatctatcctggaattgtttggcaagatagaagaacacatgaatattgctcatatctgaaatcaaacgggcatgaaacaatcataaaagaaaaaacaggactacttcttgatccatatttttcagcaacaaagattaaatggattctagataatgttgacggcgcaagagaaaaagcaagcaaaggtgagttattgtttggaactgttgattcatatcttatttatatgctttctaaagaaaagaatcatttcacggatgttacaaacgcgtcaagaacattactttttaatataaaaagtatggaatgggatgatgagctattggaattatttgaaataccgaaaaccatgatgcctgaggtgttaagttgcgatggcgattttggaaatttaaaaataaatgattgtgagattccaattagaggcgttattggagatcagcaagcagct

SEQ ID NO: 248692 - DNA, 1122 bp, Unknown
  Bacterial polypeptide expressing nucleotide sequence isolated from the Sargasso Sea
aacaggtaaaccaatttacccaattattgtttggcaagatagacgaaccgaagatttatgcaaaaaaattaaagcagaaggcaatgaggagcttatttttaaaaagactgggcttcaagttgatccatatttctctgcgaccaagatagcttggattttagataatgttcctgaggcaagacaaaaggctgaaaatggggatttgctttttggaactatagatactctccttttatggcaattagctggtgaacataaaactgatgtcacaaatgcctctagaaccatgctctataacatcaacaacaaagaatgggatgaggatttattagaactttttaatatacctaaaacaatattgccgcaggttgaagaaagcagtcatgaatttggtcagcataaggagacaaaaattaaaattacaggaattattggcgatcaacaggcagcattattcggtcagcagtgttttagcatgaattcaatgaaggcaacctttggaaccgggtgttttttgatggcaaacacggggggtgaacctaaatattctgatcagggattattgaccaccattggttacggagtctccaatacaacggcatacgcactggaaggcagtattttttcatgcggaactattgttaaatggttgcgagatggtcttggcttttttaaggatgcaagcgataccgaagcactcataaataaaggctggaattcaaatggtgttcttttcattccagctctgtcggggcttggagtaccgcactggaacccaaccattaaaggctcgttttatggtctaaccgccgacaataccaaagaagaccttataacagcagcttttaaatcaattgcctatcagttaaaggatatcctaaagctgcttaaatctgaggggctagtcgttgaaggcctatcaattgatggcgggatgactgtgaataagactttttgccaattacttagtgatttattggaggagcaagttaatgtttccgagaaccctgagagcacagcaattggagcagcttctgttgcaatggttggtgttggtttgctttcaagtattgatgatttaaagaaaagtttcatcagttggtgcaacattaacccagaggg

SEQ ID NO: 248693 - DNA, 1112 bp, Unknown
  Bacterial polypeptide expressing nucleotide sequence isolated from the Sargasso Sea
aacaggattgcttttagatccgtacttttctgctacgaaggttaggtggattttagaaaacatcgatgggtgtaggaaaaaagctgaggatggtaagttggcattcggtacgattgatgcctggttaatttggaacctaacaggagggaagcaccatataacagatgtcaccaacgcatcaagaaccttgctttacaatatacatgacatggactgggacaatgacctactagaaatgttttctatcccaaaggaaatcctcccaaaagtgcgacctagcagttttatttacggaaaaaccaaatcaaatttgttcaaacaaaaaatagctattagtggaattgctggagatcagcaggccgcgcttttcgggcagaattgtatcgaatctggtatggttaagaatacatatggcacgggttgttttatgctgatgaatactggggataaaccgattagatcagatcataaccttctcacaactattgcttggatgttagataataaagtagagtatgcgctagagggaagcgtttttatgggaggcgctattgttcaatggctccgagatggattaggaataattaattcttctgaagaaattgaaacggtcgcaacctcaatcaaagattctggtggtgtataccttgttccggccttcgctggtatgggagcacctcactgggatcctcatgcaagaggattgatcatggggctgacaagagggtccacctccgcgcatattgcgagagctgcgctagaatctatcgcatatcaatgttatgatctgctaaacgcaatgcaggctgattcaaatattaaactcaggcaattacgtgtagatgggggcgcctctgttaataattttttaatgcagtttcaggctaatttattagatatacctgttgtcaggccaaggattaaagaaacaacagccttgggagcagcatttttagcaggtttggcagttagtttttgggaagatcaagccgatatatcaaggcaatgggagccagaaatgatatttagttcaaaaattcataaggatgagatggatcagcattattctggctgggttaaggctgttgaaaaggctagatcgaatgtgtaga

SEQ ID NO: 248694 - DNA, 1453 bp, Unknown
  Bacterial polypeptide expressing nucleotide sequence isolated from the Sargasso Sea
tatgaaaaattatttatctatagatcagggcacaacaagctcaagggcaattatttttaattcaaatttggaattggtaagagactcccaaaaagaatatgacttagtttatccaaatgatggttgggtagagctagatccaagagatgtaattgaaactgtcaaagaaactataacagctgttttagataaaaatgaagaaattgaagcatgcggtattactaatcagagagaaacaacattagtttggtccaaatcaaccggggagccgatatattctgctatcgtttggcaggatagaagaacccatgaaatatgtagtaaattaaaatcagatggatacgaagagctgatatcacaaaagacaggattattattagatccttatttctctgcaactaaaataaaatggatcctagataatgtagatggggcaagatcaatggctgaagaaggcgatcttctttttggaacaatagatacatacttaatatataagttttctaaggagaaaaaccatttcacagatgtaactaatgcttcaaggacattactttttaatataaatacaatggaatgggatgatgagttgctagaactgttcgatatacctaagccaatgatgccaaaagttttggcatgtgatgaagattttggaactatttctataaatggaaataatatacctattagaggggttattggggatcagcaggcagccttggttggccagggctgttttagtaatggtgacatgaaatcaacctatggaaccggttgcttcttaatggttaatactgaagataatccagtttcaataaaagaaggacttttaactacaatcgcttataaattagagggcagagtccattacgctattgaaggtagtatttattcatgcggaaatattatcaaatggcttagggataaaatgaaattttttaattctgctattgagagcgaaagctttattgataaagaaggtaactcaaataatgttttatttttaccagcctttaatggtcttggtgcacctttttgggattcggatataagaggaggcttttatggcattacccaagataccaccattactgacatgactacagcttctttcttggctatcgcttttcaaactaaagaaataacctccattctagaaaaatacaaaatagaaataagtaagcttctggttgatggtggaatggttcaaaataaaacgttttgccaattgctagcggatgctttacagaaagaaattattaaacctacaaatgtagaatcaactgctcttggagcatgcaaagttgccatgattgggtctggggtggatttaagagaaatatcaaaccaaaatctatcaacttttaggcccaataaagatttaaaagagcaatacttaattaatcataagaattggaaagaatatattacagattcactaaaaaattaa

SEQ ID NO: 248695 - DNA, 907 bp, Unknown
  Bacterial polypeptide expressing nucleotide sequence isolated from the Sargasso Sea
taatattaatgaaaataattgggataatgaaattttaaaaatttttaaaataaataaaaatattttaccaatagtaaaaaactcagcagatgattttggctatactagtaaaaaaattataggagaaaaaatctcaatttctgctgtcctaggagatcaacaggcagcagcatttggtcaagcctgttttgaaaaaggatccgtaaaaagcacttatggcacaggagcttttgtaattatgaatactggtaataaaagattgatttctaaaaataaattactcacaactatttgttatagattaaataataagaatacatttgcacttgaggggtctatttttgtagctggtgctggggttcagtggttaagagataaaataaggttaataaataatgctaacgaaacagaaaaaattctaaaatcaaaagaaaataatgatggcgtctatatcgtgcctgccttcacaggtttaggagtaccatattggagttcgagttctcgtggattaattactggcctaacaagaaatagtgattggaaagacttagtgcgtgcaatcatagagtctgttgcttatcaaagctatgatttatttgaatctatgagaaaagatggattaaagcccaagattgttaaagtagatggaggaatggttactaacaattggttttctcaatttttatctaatataattgatacaaaagttataagaccaaaggttaaagaaactacagctttaggagtagcttttatggcaggtttaaaaataggagtttataaatcactttcagatatttcaaattattggaaaatagataaaaaatttactccaaaaataagcaaatcaaaccgtactaagctgttgaaaggttggcaacaagcaattagaaaaaccttagtttaa

SEQ ID NO: 248696 - DNA, 805 bp, Unknown
  Bacterial polypeptide expressing nucleotide sequence isolated from the Sargasso Sea
acaagtaaaaaagttataggtgaaaaaattccattttcagctgttttaggagatcaacaagctgcagcatttggtcaagcttgttttaaaaaagggtctgtaaaaagcacatatggcacaggagcttttgtaattatgaacactggtaataaaaaattgatttcaaaaaataaattactcacaaccatttgttacagattaaataacaagactactttcgctattgaagggtctatttttgtagcaggtgctggcgttcagtggctaagagataaaataaagttaataaataacgcttatgaaacagaaaaaattgcaaaatcaagagaaaataatgatggtgtctatattgtacctgctttcactggtttaggagcaccatattggaactcgagttctcgtggattaattaccggactgacaagaaatagtgattggaaagatctggttcgtgcaactatagagtctgttgcctatcaaagttatgatttatttgagtctatgagaaaagatggattaaaacccaaaattattaaaatagatggtggaatggttgctaacaattggttttcgcaatttttatctaatataattgatacaaaagctattagaccaaaagttaaagaaactacagctttaggagtagcttttatggcaggattaaaaataggagtttataaatcactttctgatatttcaaattattggaaaatagataaaaaattcactccaaaaataagcaaatcataccgtactaagctgttgaaaggttggcaacaagcaattagaaaaacattagtttaat

SEQ ID NO: 248697 - DNA, 892 bp, Unknown
  Bacterial polypeptide expressing nucleotide sequence isolated from the Sargasso Sea
atgggacgataccattctaaagctttaaaaattaaaaaacatattttaccagaggttaaagactgcgcagatgattatggtcaaactcattcttcaattacaggaaagtctattccaataaatggagttgtaggtgaccaacagtcagcaacaataggtcaatgttgttttgaaccaggttctttaaaaagcacttatggaaccggagcttttgttctattgaacacagggaccaaaaagatttactcaaaaaaccgcttattaacaacgatagcttatagaattaatggtagaactacttacgctatggaaggatcaatttttattgctggtgctggtgttcagtggttaagagatagaatgaaattttttaaaaaagcccctgagacagagaaaattgtaaaatctcttaacacaaataatgatatatatttggtacccgcattcacgggtttaggagctccctattggaacgcaaatgcaagaggagttcttagtggaattactagagacacaagtcccaaagaaattgtcagggctacaatagaagctgttgcatatcaaacacacgatctttttgaagctatgaagcacgatggattaaggccaaaattggtaaaagttgatggaggtatggtaatgaacaattggttttctcaatttttatgtgacgttgtaaacgtaaatgttttaagaccaaaggttcaagaaacaaccgcattaggagctgcatttatggcagggcttcaaattggcgtttataaatcgttaaaagatatttctaagaaatggagtttagatagaaaattcaaaccaaaaatgaaaaatcaattaagaaacgcacttgttaaaggctgggcaacttccgtaaaaagagcattaatagtttaac

SEQ ID NO: 248698 - DNA, 1435 bp, Unknown
  Bacterial polypeptide expressing nucleotide sequence isolated from the Sargasso Sea
atgactaagattttaacaattgaccaaggtactacaagctcaagatctattgtttttgattctaatgcaaacattgttgaagtatctcaaaaggaatatccattaatttatcctgaagatggttgggttgaaattgatccagaggttctaattaaatcagtcactgatacattaggtaaggtcaaccttgatggtattgcttcagctgctatcactaatcagagagaaacaacaataatttgggaaagagatacaggaaaacctatctataacgccatagtttggcaagacagaagaaccaaagatttttgttcttctattgatgacaaagaaatattaaaagaagtatctgctagaacagggttattgttagatccttacttctctgcaacaaaaataaaatggatattagacaatgttgaaggcgctaagaagaaagctaaagaaggaaaactatgttttggaacagttgatgcatatctcatgtatgtcttatcaaataaaaaaattcataaaacggatataacaaatgcttctagaaccatgttatttaatataaatactttgtcctgggataattatctcttagatctatttgatattcctgaatcaatgttgccagaagtatctaattcagatgaatcatttggaactttatctgattgcaacaatatcaatgtaaatgctgtattaggagatcaacaagctgctctatttggtcaaggatgtttaaatgccggtagcttaaaaagcacatacggaacaggatgttttctaatggcaaatattggaactaagcctttagcttcggataaaggtcttttaactaccctagggtttagttttaataaagaaattcattatgcgattgaaggcagcatatattcagcaggaaccgtcgttcaatggttaagagataatcttgaattttttgctgaaagcccagaatctgaaaaatttttaaactccgatgcgaatgctaatggagtgtattttattccagcgtttactggtttaggagcaccatattgggactctaacataagagctagttatcatggcataacaagagacacgtcaaaaaaagatttaattaacgctgcatttaattcaatttcataccaaactaaagatattgttgactgtctagaacaaaccaatatagaagttaagtctttgagtgtggatgggggtatggcagctaacaaaacttttgtttctcatgtagccaacatactaaatatccctatacaggttcctaaaaatacagaatcaacagctaaaggtgtagcctgtttagctggaataactactggcttgatgaatattgatttaatagagaatcaagaaaaaacagtatgtaatccaaataatgctttaaaccaatctatggaaaaagattataaagaatggaaaaagttaattaaaaagaatg

SEQ ID NO: 248699 - DNA, 1453 bp, Unknown
  Bacterial polypeptide expressing nucleotide sequence isolated from the Sargasso Sea
atgaaaaaatatttatcaatagatcagggtacttcaagctcaagagcaattatttttgatgctaatttgaacttaatcaatgattctcaacaagaatatgatttagcatatccaaatgacggttgggttgaattaaatccaaatgatgtcttagaaactgttagagatactgttgtaaatgttctcagcgagggtcaagcaatagaagcatgcggaataacaaaccaaagagaaactactgttgtctggtctaaagaaactggagatccaatctatccagcaattgtttggcaagatagaagaacgaatgagtattgcaataaacttaaatcaaagggatttgaaaaaagggttaaagagaaaactggattagttttagatccgtatttttctgcaacaaaaatcaagtggattttagataatgttgatggggcaaaagatatggccaaaaaaggagatcttttattcgggacggtcgatacttatttaatttataagctaacaaatgagaaaaatcatttaacagacgttacaaatgcctcaaggacattgttatttaacataaaaacaatgcaatgggatgatgaattgttagaattatttgatattccaaaatcaatgctgccagaggtcttgggttgtgatggtgattttgggaccttgtcactaggaacaactaatattcctattagaggggtaattggagaccaacaagctgcattggtaggtcaaggttgctttaaaaatggtgatatgaagtcaacttatgggacagggtgttttttaatggttaatacagaaaataagcattatgaaattgatgaaggattacttaccacagtagcttataaactgggtgatgaagtccattacgctattgaaggcagtatctactcttgtgggaatattattcaatggttgagagataaaatggaattttttactaattcaaaagacagtgaaaagtttcttaacccaaatggcaatacaaataatgtgctttttttgcctgctttcaatggcctgggtgctccattttggaattctgatgtgagaggcggtttttatggaattactcaggattcatctattaatgatatggtcacagcagcctttcaatcaattacatttcaaacaaaggagataactacaattttagagaattacgatattgaaattaataagttattagttgatgggggtatggtaaacaataatacattttgtcaggttttgtcagataccctaggaaaagatattattcaaccatcaaatgtagaatcaacagctataggggcatgtaaggtagctatgattggatctggagaagatttatcgaatattactgatgattctcaatcaatttataagcctaatttagatcttattaaagtctacgaagataatcatgctaaatggaaaggatatttattaaactctttgaaaaattaag

SEQ ID NO: 248700 - DNA, 1392 bp, Unknown
  Bacterial polypeptide expressing nucleotide sequence isolated from the Sargasso Sea
tatgaaaaattatttgtctattgatcaaggaacaacaagctcaagatcaataatatttaactcaaacttagaaaaacaaatagattctcagttggaatacaaattagactatcctgatgacggttgggtagagttacgtccagacgatgtagttaatactgttaaaaaaaccatagcaaatgttttagacaattttaatggttcaattgaagcatgcgggataactaatcagagagagactacgatagtttggtcaagagatacaggagagccaatatatccaggaatagtatggcaagacagaagaacgaacgaatattgccaagaactaaaatcgaatggatatgagaagaaagtaagtgaaaagacaggtctggttcttgatccatatttttcagctacaaaggttaaatggatacttgataatgttgagggcgctaaagaacgtgctcaaaaaggtgaactagcctttggaacagtcgattcgtacttgatatttaaattgactaaggaaaagaatcatttaacagatgtaaccaatgcctctagaacaatgctttttaatattcacaacaaagagtgggaccaagaattgctggatatttttgaaataccaaattctatgcttccagaagtactattttgtgatggtgattatggaactatcgttcattcagataagaaaataccaatcagaggcgttataggtgatcaacaaggtgctttagttggacaagattgttatgaatatggagatatgaaatcaacatatggtaccggttgttttttaatggtgaacacaaaagatgaggcagttaagagtgatcaaggccttttaacgacaattgcatatggtttaaatggaaatatttcatatgcattagaagggagcatttactcgagtggaaatattattcaatggcttagagataagatgaaattttttgacgatgcaaaagaaagtgagaaatacataaatgcatctggaaattccaataacgtactttttttaccagcttttaatggattaggagctccattttgggactcaaatataagggcaggattaaaaggaattactcaagatacctcaataaacgatattgtgactgctgcatttaattcaatagcattccaaacaaaagaaattacaaaagtattagaaactaataacattaatattaataaacttttagttgatggtggaatggttgcaaatgaatctttttgtcagatgcttgctgatactttacaaaaaaatataaaaaggcctgcaaatgttgaatctacagctcttggagcatgtaaagtggcaatgatggcatctggagaaaatatctcaaaaattaaaagtaattcatcaaacttcgaaccaaataaatcattagagaa

SEQ ID NO: 248701 - DNA, 391 bp, Unknown
  Bacterial polypeptide expressing nucleotide sequence isolated from the Sargasso Sea
atgaaaaaatttattgtttccattgatgctggcactacatcaaatagatcaattttatttgatattaatggtaagccagttttttcatctcaaaaagaatttactcagtactttccaaaaagtgggtgggtagaacatgatccagatgaaatttggagaactactttaaagactttaaaagatgtaattaaaaaggcaaaacgattaaagggagaaattttaacaattggtattaccaaccaaagagaaacaactgttctttgggacaaaagatcaggtaagcctgtatataaagcaattgtttggcaagatagacgaaccgaagatttttgtaaaaaattaagaaaacaaaataaagatacagcaatatttaataaaactggtcttctga

SEQ ID NO: 248702 - DNA, 1358 bp, Unknown
  Bacterial polypeptide expressing nucleotide sequence isolated from the Sargasso Sea
tcagggtaccacaagctcgagagcaattatttttgattctgatttgaacttaatcaatgattcacaaaaagaatatgatttggcatatccaaatgatggttgggttgaattaaatccaaatgatgtgctagaaacagtgagagatactgttgttaatgttttaagtgaagatcaagagatagaagcatgcggaataacaaaccaaagagaaactactgttgtttggtccaaagaaactggggatccaatttatccagcaattgtttggcaggacagaagaacaaatgaattttgtaatgaacttaaatcaaaaggttttgagaaaaccgttaagaaaaagactggattagttttagacccatatttttctgcaacaaaaataaagtggattttagataatgttgatggggcaaaagatatggcaaaaaaaggaaaccttttattcgggacgatcgatacttatttaatttataagctaaccaatgaaaaaagtcatttaacagatgttacaaacgcctcaaggaccatgctatttaatataaaaactatgcaatgggataacgaattgcttgaattatttgatattccaaaatcaatgttgccagaggtcttgggttgtgatggtgagtttggaactttgtctataggaacaaccaatattcctattagaggagtgattggtgaccaacaggctgcattggtaggccagagttgttttaaaaacggtgatatgaagtcaacttacggaacagggtgttttttaatggttaatacagaaaacaagccttacgagattgatgaaggactgcttaccacagtagcttataaacttggcgatgaagtccattacgctattgaaggcagtatctactcttgtgggaatattattcaatggttgagagacaaaatggaattttttgctaattcaaaagacagtgaaaagtttcttaacccaaatggcaatacaaacaatgtgctttttttacctgcttttaatggtctaggtgctccattttggaattctgatgtgaggggcggcttttatggaattactcaagattcatccattaatgatatggtcacagcagcctttcaatcaattacatttcaaacaaaggagataactacaattttagagaattatgatattgaaattaataagttattagttgatggaggtatggtaaacaataatacattttgtcaggttttgtccgataccttaggaaaagatattattcaaccatcaaatgtagaatcaacagctataggggcatgcaaggtagctatgatcggatctggagaagattatcgagtattgctgatgattccacatccatttataagccaaatataga

SEQ ID NO: 248703 - DNA, 361 bp, Unknown
  Bacterial polypeptide expressing nucleotide sequence isolated from the Sargasso Sea
ttgaaaaaatttataatttcaatagatcaaggaacaacttcctcaagagtaattctttttaatactaaaggaaaaattgagtttattagtcagtatgagttgaaacagtattttccaaaaaatggatgggtagaacaaaatccaaatgagatttggtcaacaactcttaaagcgctaaaacaagtaattaagaaagctaataaatttaaaggtcgaatacttacaatagggatcgcgaaccaaagagaaacgacaatattgtggaacaaaaaaacaggtaaaccactatacaatgctattgtatggcaagatagaagaacacaagaatattgtaaaatccttaaaaataaaaaatatgaaa

SEQ ID NO: 248704 - DNA, 1294 bp, Unknown
  Bacterial polypeptide expressing nucleotide sequence isolated from the Sargasso Sea
tatgaaaaaatttatagtttctatagatcaaggaactactagttctaaggttatattatataataaaaaatttcatgttattgatattttacaaaaggaatttagacaattctttcctaaaaatggctgggtagaacatgaccctctagaaatatttaaagatattaaatttttaataaaaaaattaataaagaaaaatgatataaaatgctctgaaattatttcaataggtatagcaaatcaaagagaaacaactgttctgtgggataaactatctggtaaaccagtatataaagctattgtatggcaagatagaagaaccatacccatgtgcaaaaaattgataaataataaattagcttctaaaattcaaaaaattactggattagtaattgatccatatttctcagcaacaaaaattaagtggctgttaaataatgtaagaaaaactaaaaaattattaaaagaaaatagactattatttgggacaattgatacttggttattatggaatttgacagaaaaaaaatctcattttactgatattacaaatgcatctagaacaatgctttatgactcaaaaaaagaagaatggtctaaatcaatacttaaacttcttcaaataccccataaaattttacctgaagttaaaccaaatgtttttgattttggttctacaaaaatttttgggtcacctataaaaattggaggtatggcaggagatcagcaagcatcagctataggtcatacatgttttactttaggaaaagccaaaagcacatatggaacaggttgttttctattaatgaatattggtaataaatttaaaatatcaaaaaataaactattaactagtgttgcttataaaataggaaataaaaaaatgtattgttacgaaggtagcatattcattgctggttcttcaatacaatggctaagagataaattattaatgtttaaaaattctaaagatacgaacaaactatactcaaatgcaaataaagatgaaaatgtaattgctataccagcattaactggtttaggcgcaccacattggcagcctcaagtaagaggtgctttttttggattaacaagaaatacatccagaaatgaaatagttaaatcaatcttagagagcttaggctttcaaacattagaattagttaattgcatggaaaaagattcaaaaattaaaattaaagaaatgagagtagatggaggcatgacaaaaaatgatagttttgttcagagtttatgcaacattttacaaataaaaaatattaaaccaaaataa

SEQ ID NO: 248705 - DNA, 1387 bp, Unknown
  Bacterial polypeptide expressing nucleotide sequence isolated from the Sargasso Sea
tctcaacttgagtttaaacagtattatccaaagaatggatgggtagaacataatccaaatgaaatctggtcttcagtaatcaaagtcactaaaaatgttttagaaaaatcaaaaaaattaaaaattaaaattaaagcacttggaattactaatcaaagagagacaaccatttgctgggataaaaaaaatggcaaacctgtttataacgctattgtttggcaagatagaagaacagaaaattattgtaaaaaaatcaaaaataaagaaaaattaattagaaaaaaaactggtttatttttagatccttatttctctgccactaaagtaaaatggataatagataatgttccaaaagcaaaaaaattgttgagaaaaaatcaattattatttggcacaatcgatagttttttaatttggaaattaactgagggtaaaattcatgcaacagacgcaactaatgcttcaagaactatgctttttaacatagtggataatagatgggataaagaaattttaaaaatttttaaattaaataaaaaaattcttccgattgtaaaaaattctgctgataactacggatttactagtaaaaatattattggtcaaaatattccaattacaggtgtactgggtgaccaacaggcatcaatgattggacaagcttgttttgaaaaaggagctgttaaaagcacttatggaactggagcttttgtgttgatgaatacaggtgatgaaagattattttcaaaaaacaaattaataacatcaatctgttacagaataaaaaataaaaccacatatgctttagaaggttctatatttatagcaggtgcaggtgttcagtggttaagagataaaattaaactaataaacaatgcatccgaaactgaaaaaattgcaaaatcaaaaaataataataagggtgtttttgttgtgccagcatttactggattaggagcaccatattggaactccaaatcaagaggtttagttacaggacttacaagagatagtgattggaaggatctagtaagagcaactttagaatctgtagcttatcaaacatttgatttatttgagtctatgagaaaagatggcttaaaaccatcaagagtaaaagttgatggcggtatggtatctaacaattggtttacacaatttttatcagatattttaaaaattaatattacaagaccaaaaataaacgagacaactgccttaggagcagcctacatagcagggtatcaaattggcatatttaaatcttttaaagatattaagagaaattggaaaaaaaatagagactttaaaccaaaattaaataaaacgtatagaaataagttattgcaaggatggaaacaagcaattaaaaaaactttagcataat

SEQ ID NO: 248706 - DNA, 1183 bp, Unknown
  Bacterial polypeptide expressing nucleotide sequence isolated from the Sargasso Sea
cattgtatggcaggatagaagaactcagcaatactgccaaaatttaaaaaaaaataattatgaaaatattttaagaaaaaaaactggtttatttattgatccatatttttctgcaacaaaaataagatggatattagataatattaaaaattcaaaaaaattattaaaatcaaataacttattatttggaactattgatacttttctaatttggaaacttactaatggaagaaaacatttaacagaagctacaaatgcatctagaacaatgctttttaatataaatacaaatcagtgggataaagatattttaaaaaaattaaatataccttacaaaattttaccagaagtaaaaaattcagcggataattttggaagtacagacaaaaaagttattggacaagaaatccctatttctgcagtccttggagaccaacaggctgctgcagtagggcagtcatgttttcaaaaaggttcgatcaaaagtacatatggcacaggtgcatttgtaataatgaatactggttctaagaagattttttctaaaaataaattattaaccacaatttgttatcgtttaaatggaaaaaatacttatgctttagaaggttcaatttttattgcaggtgcaggagttcaatggcttagagataaaataagacttattaataatgcatatgaaacggaagaaattgctaaatcaataaaaaataatgatggtgtttatatagttccagcttttagcggaataggagcaccttattggaaaccagatgcaagaggtatagttacaggcttaactagaaatagtgattggaaaaatttggtaagagcagttgttgagtctgttgcttatcaaagctatgatttatttgatgcaatgaaaagtgatggactaaaacctaaactaattaaagttgatggaggaatgatagccaataattggttttctcaatttttatcaaacataataaatttaaatgttgttagaccaaagatcttagaaacaacagcccttggagctgcacttttagctggatatcagattggagaattcaaatcattaaatgaaattcaaactaaatggaaaaaagacagagtttttactccaaaaattaatgtatcattgagaaataatttattgcaaggatggaaacaagcaattagaaaaactttagcgtaa

SEQ ID NO: 248707 - DNA, 841 bp, Unknown
  Bacterial polypeptide expressing nucleotide sequence isolated from the Sargasso Sea
atggaatattttggtgcaattgatcaaggaacaacaagttcacgatttatagtatttgataataaaggaaatattgttgaacaacatcaagaagaatttagtcaatattttccggatgaatattcagtcgaacacaatcctgaagaaatatggataagcgtagttaattgtattaaaaaagtattaaaaacaataaatataaatgatataaaatctattggcatttcgaaccaaagagaaacaactgttgcctggtcaaaaacaacaggtaagccgttatttaatgcgattgtctggcaagatacgcgaacacaatcaatatgtgatgatatatccaataagaaaaatattaaggaagatattaaaagaacaggcctacctatcgcaacttacttttcactgtcgaaaatactttggcttattgataatgtaccagaagtacagaatgcattagaaaaggacgatgtaatatttggaacagttgactcttggctaatttataaattaaatggtacttttcaaactgacgtaactaacgcaagcagaactttattattcgatttacacagtttggattggaatgttaacttattaaaagaatttaaaataccttctaattctttacctattattaaaccttctcttcataattatggtgaatgcaaaagtattttagaagggataccaataacagctgtcttaggagatcaacaagcatccttatttggtcaacactgttttaaaaaaggtgaagttaaaaatacgtatggaacaggttgttttgctttaactaatacaggtgatgatattatttattctagtaatggtttacttacaactg

SEQ ID NO: 248708 - DNA, 1504 bp, Unknown
  Bacterial polypeptide expressing nucleotide sequence isolated from the Sargasso Sea
cttgaagaaaggaaagagtgtgcagaaaaaatatgtagtggcgttagatcaaggcacaaccagctcaagagcgattgtgtttgaccacgatgccaatattgtcagtgtttcacagcgggagtttactcagctttatcctaatcccggctgggttgaacacgatccaatggagatttgggcaagccaaagttcagtgcttattgagtcgttggctcgagcggggattcacagcgatgaagtggcggcgattggtattaccaatcagcgggaaaccaccgttgtttgggaaaaggccacaggcaaaccggtttacaatgccattgtgtggcagtgtcgccgcagcgctgagatctgtgagcaactgaaagcgcacggcttagaagattatgtgcgtgagaataccggccttttactcgatccttatttttcaggcactaagatcaaatggatcttagataatgtgccggatgcacgtgcgaaggccaaacgaggtgaactgttatttggtacggttgacacttggttactgtggaaactcacggaaggcaaagtgcatgtgaccgatcccaccaacgccgctcgcacgttgctgtttaatatccatagcttgagttgggatagtaagctgcttgaggcgctcgatattcctgctgccatgttgcccgaagtaaaaccttcctgcagtgtctatggcacaacccgtattgccggtgagggcagtgaaattccactggcggggattgcgggcgatcaacaggcggcgctctttggccagctctgtgttgagccgggaatggccaaaaacacttatggtacaggctgctttttgctgatgaacacaggtaacaaagccgtgcgttcatcccatggtttattaaccacagtggcggtaggtgcgcaaggtgaagtgaactacgccctcgaaggctcagtatttatgggcggtgcgactattcaatggttgcgggatgagctgggacttattcgcgacgccagcgataccgaatattttgcctctaaagtggcggatactaatggggtgtatttagtccccgcttttgtggggctcggcgcaccctattgggaccccaatgcccgtggtgcattatttggattaacgcgcggtgctaaccgtaatcatattatccgcgcggcattagagtcgattgcctaccagagcaaggatttgctcgatgccatgatcaaagacagtggcgtcagtctaaagcgtttgaaagtggatggtggcgcggtcgcgaatgactttttaatgcaatttcaagcagatattaccgatgttgaagtgttacggccgagtgtttgcgaaacgaccgctttgggtgcggcattcttagctgggctggccgttggattttggcactcggtaactgagctggagcataaggcctgtatcgataaacacttcaaaccgaatattgatgcgagtaaaagggagcggttatacgctggctggcaagatgcggtggcaagaacgcgttcttag

SEQ ID NO: 248709 - DNA, 1471 bp, Unknown
  Bacterial polypeptide expressing nucleotide sequence isolated from the Sargasso Sea
atgaaggctatattagctatagatcaaggcacaacatcaacaagggcaatagccttttcatttgatggtaaaaaattattttcatcacaactagaatttaaacaatattttcctaaaagtggatgggttgaacacaatccaaatgaaatttggttaaaaaccttaaaagtaataaaaaatgtaggaaataaatgtaaaaaaaataaaataacaatcgttacaattggaattacaaatcaacgtgaaacaacagttttatgggacaaaacaaatggcaaaccagtttataacgcaattgtatggcaagatagaagaacggaaaattattgtaaaaaaattaaaaataaagaaaatttaattagaaaaaaaacaggcttatttattgatccttatttttcagcaactaaaattaaatgggtattagataacgttgcaaaagcaaaaaaacttttaaaaaaaaaccttttgctatttggaacaattgacagttttttaatctggaaattgacaggaggaaaactacatgcaacagatgcaacaaacgcttctagaacgatgctttttaatctaaataaaaataaatgggatcacgatattttaaaaatttttaaaataaagaaaaatattctaccagttgttaaaaattctgctgataactttggcttcacaagtaaaaaaattcttggaaaaaaaatatcaatttcagcagttcttggagatcaacaagcagcagtagttggccaaggatgttttgaaaaaggatcagtgaaaagtacctacggtaccggagcctttgttataatgaatacaggtaacaaaaaattaatatcaaaaaataggttacttagcactatttgttatagattaaataataaaacaacttatgccctagaaggttcaatttttatagctggtgctggagttcaatggctaagagataaaattaaattaattaacaatgcatatgaaaccgaaaaaatagcgcgatcaaaaaaaaataaccaaggcatttatcttgtgccagcctttactggtttaggagcaccttattggagcccaaactcacgtgggcttataacaggccttacaagaaatactgattggaaagatttggtaagagcagttgttgagtcagtagcttatcaaagttttgatttatttgagtctatgagaaaagatgggttaagaccaaaaattgttaaagttgatggtggaatggttacaaacaattggttttcacaatttttagctgacatattaaatataaaagtaataagatctaaaacagaggaaacaacagcattgggagtagcctttatggcaggataccaagttggtgtttacaaatctcttggtcatataaaatccaaatggaaaaaaagaagagattttacaccaaaattgaacaaaacttatcgaaataagttattgcaaggatggaaacaagcaattagaaaaactttagcataat

SEQ ID NO: 248710 - DNA, 928 bp, Unknown
  Bacterial polypeptide expressing nucleotide sequence isolated from the Sargasso Sea
atggacctggagcagcagcactgggtggatgacttccgagagcccacagggctccccgccagcgctctgcccgaactgctgccctgccgcggagaattcgggcgcatggctgcggaccttccgtttgcaggcttgccgatccaggccatgctcggcgaccagcaggccgccaccctgggccagctctgtctgcagcccggagaagggaagtgcacctacggcacgggggcttttctggtgatcaacaccggcgatgtcgtccgccgctcagatgcagggctgctcagcaccctcggctggacggatgccgctggaacacccagcttctgccttgagggaagtctgttcaacgccggcaccgtcatccagtggctccgggatgggctgcagatcattgatcaagccccccaggtgaacgaactggcgcgttcggttccggattcagggggggtgatgctcgtgcccgccttcaccggctgggggacaccgcactgggacccccaggcacgcggtgttctggtgggcctcacccgtgacagcggacgcggtcacatcgcccgcgctgcacttgaggggatcgccctgtcggtagcgacattggtggagcttgccgaacaggccctcgggagcggcttgggtgaactggcggtggatggtggcgccgcggcctccgatcctctgctgcaggcgcaggcagattgcaccggtctgacggtgcggcgacccgccagcctcgagagcaccgcccggggggtggcgctgttcgcaggcctccaggctggggtgatcagcgacctggagcagctcgcaaccgcaaggagggacggagcggaactgttccacccccagatggatgcatcccagcgcgaccgctggcgcacacgctggcaagacgccgtctccagaagtctggggtggcatggctgat

SEQ ID NO: 248711 - DNA, 1159 bp, Unknown
  Bacterial polypeptide expressing nucleotide sequence isolated from the Sargasso Sea
aatgtcaacaatagtcatggcactggaccaaggcaccacaagttcacgtacaattctgttcagtgaaaatggagaaatagttgctgatgcaaacgcacctttagcctgtcactatcctcagtctggatgggttgagcaggacccgcaggaaatatggactagccagtctcaaaccattcaggaggcgttgaagaaagcagcgctgacaatgaaggaaattgccgcggtgggaattacaaatcagcgtgagagcactattgcctgggacagaaataccggagaagcaattgcgccggctatcaactggcagtgccgccgtaccgctgatttttgtgaggagttgaaggatgagggttttgaccgtgttctgagaaacaagactggactggtaaccgatccctatttttccgggacaaaaatgcgctggattctggaaaacgtcccgcaggcacgcgaactggccgaacagggtaacctgtgttttggtactgttgactcttggctgatctggcagctgacaagtggccatcttcatgtcacggaaatcagcaatgcatcccggacgatggttttcaatatttatacatgtttatgggatgatgagatactttcgcgattcggcattcctcgcgagacccttccggaagtaaggccctcaagcggaattattgcccagattgatccggagttatttagaggttcagctcctattgccggtgtggccggagaccagcaagctgcgctttatggccaggcatgttttgaaacaggaatggcaaaaaatacttatggcactggttgcttcatgatctcaaacacaggctccgaaccggttcactcaaagaatggtcttcttactaccatagcatggcaaattgagcaggaaattacttacgcccttgagggatcagtcttcattgcgggggcacttgttcagtggctaagggacggactacagctttttgcagatgcttcagaaactcagaagatggcagagtctgtttctgactccgggggtgtctttgtggttcctgcctttgtaggtcttggtgcaccacactgggacccttatgcccgtggtacaattgtgggcttgagccgcgataccaaccgcaatcacattgttcgtgcctcgctggaagcaattgctttcaatcag

SEQ ID NO: 248712 - DNA, 1501 bp, Unknown
  Bacterial polypeptide expressing nucleotide sequence isolated from the Sargasso Sea
aatgcaggatcagtacatcctcgcgcttgaccaaggcaccaccagctcgcgcgcgatgctgttcgaccggctcggcaatgtcgtgtcgaccgctcagaaagaattccagcaaatctatccgcgtccgggctgggtcgagcacgacccgcaggaaatctggtcgacccaggccggcgtcgccgccgaagccgtcacgcgtgccggcatgaacggcacgtcgatcgccgcgatcggcattaccaatcagcgtgaaaccaccatcgtgtgggatcgcgaaaccggccatccgatctataacgcgattgtctggcaggaccgccgcaccgccgacttctgcgatcaactcaaagagcagggtctcgaagaaaaagtccgcgcgaaaaccggcttgccgatcgactcgtatttctcggcgaccaagatccgctggattctcgacaacgtcgaaggcgcgcgcgaaaaagccaaacaaggccgtctcgctttcggcaccgtggatagctggctggtgtggaatttcaccaagggcggcttgcacgtcaccgacgtgaccaacgcgtcgcgcacgatgctgttcaacatccacacgctgaagtgggacgacgaactgctcgaagcgctcgacattccgcgcaacatgctgccggaagtgcgtgcgtcgtcggaagtgtacgggccgaccaagaccaccgtattcgcctccaagattccgctcgcgggcatcgccggcgaccagcacgcggccctgttcggccagatgtgcacggaatcgggcatggtgaagaacacctacggtacgggttgtttcctcgtgatgaacaccggcgacaagccgatcgaatcgaagaacaatctcgtcaccacgattgcctggcagatcggcgatcagatcaactacgcgctcgaaggcagcatcttcatcggcggcgcggtggtgcaatggctgcgcgacggcctgggcatcatcaagaacgccgctgaaatcgaaacgatggcgcgcagcgtgccgcattgcgatggcgtgtatctggtgcccgcctttgccggtctcggtgcgccgcactggaacgcccgggcacgcggcacgctgttcggcgtgacgcgtggcacgagttcggcgcatatcgcccgcgccgcactcgattcgatcgcctatcaatcgctcgacgtgctcaaggcgatggaagccgattccggcatccgcatcggcgaattgcgggtggacggcggcgcttgcgcgaacaatctgctgatgcaattccaggcggacattcttggtgtcgacgcagtacggccgaaggtatcggaaaccaccgcattgggcgcggcgtatctggccggtctcgcggtgggctactggaaagacgtgaacgagctgcaaagccaatgggcgctcgaccgccgcttcacacctgccctgccgcatgccgaggtcaaggaatgcctcgacggctggcagcgcgcgattcgcgcggcgaaggcctgggccgatacgccctga

SEQ ID NO: 248713 - DNA, 1483 bp, Unknown
  Bacterial polypeptide expressing nucleotide sequence isolated from the Sargasso Sea
atgaaaaaatattttttggtaatagatcaaggaacaacaagttcaagaattgtactgtataataaaaaatttgaaatattcgatattgtccaaaaagaatttaaacaatattttcccaatgaaggatgggtagaacataatgcaacagaaatttgggatgatgttagaaatttaatttcaaaaatattaagaaaaaataagttaaattcaaaaaatataatttcaattggaattaccaatcaaagagaaacaacagttttgtggaataagaaaactgggaaaccagtttacagagcaatagtctggcaagatagaagaacagctaatctttgtgaaaatttaaaaagaaaagggattgataaaaaaattcaaaaaataactggtctagagcttgatccatatttttcagctactaaaattaaatggattattgataatgttaaggaagtaaataagaatttaaaaaataataatttactttttggaacaatagacacctggctattatggaaattaaccaagggaaaatctcacctaacagatatatcaaatgcctcaagaaccatgatttttgattctcaaaaagagcagtggtctgacaaaattttaaaaatatttaatattccaaaaaatatcttaccaactgtagttgaaaatgcatatgattttggctctactaaattatttggtgattcaataccaattggaggcatggctggagaccaacagtcagcaacaattggtcaagcttgttttaaaaaagggcaatcaaaaagtacatatggtacaggctgttttcttcttatgaatattggagaaaaatttaaattatctaaaaatagattactaacaactgttgcttttaaaataaatggtaaaaaaatgttttgctatgaaggaagtatttttgtagcaggctctgccatacaatggcttcgcgataatttaaaatttataaaagattctagtgaaactgataaattgtataaaaaagctaataaagatgaaagtttattttttgtcccagccttaactggacttggcgccccatattggaaccctaatgcaagaggaacattttttggcatcactagaaatacgtctaaagaagatatcatcaaagcaactttggacagcctatcttttcaaacttatgaattaattgagtgtatggaaaaagattctaagacaaagattagtgaaataagagttgatggaggtatggttaaaaataatagctttctacaaagtttagcaaatatttctcaaattaaaattattagaccaagtaatgttgagactacttcacttggcgcagcatatcttgcagcaattcaatctggatatttaaaaaatacaagccaaataagtaaactttggaaaaaagataaaacagtaaaagcaaatattaacaaatccatttcaacttctagtattagtaagtggaaatcaattataaatgtagtcaataatttttattaag

SEQ ID NO: 248714 - DNA, 1169 bp, Unknown
  Bacterial polypeptide expressing nucleotide sequence isolated from the Sargasso Sea
aacaagcgatttctgtaaaaaacttaaagagcaatctaaagaagaaatgattaaaaataaaactggtcttcttttagacccttatttttcatctacaaaacttaattggcttattaataatattcctgatggttataacagagctaagaatggtgagcttatttttggaactgtagactcatatttaatttggaaacttactgggggaaaatcacacgtaactgatgcaaccaacgcgtcgaggacaatgctattcaatattaaagacaataaatgggataaagaaatttgcaatttaatgggaattcctatgaatatgttacctagagtattagattcatcagatttttttggagaagtagaagaaaacatttttggcacatcaatacctattcttggtgttgctggagatcaacaagctgctgcgataggtcaagcatgttttaatcctggtatgataaaatcaacatatggaacaggatgtttttcacttttaaatacaggctctaaatttgtaaaaagtgaaaacaatatgcttactacaattgcttatagaattaataataaaacgacttatgcactagaaggttcaatcttcatagctggtgcagttatacaatggcttcgagatgagatgaagtttcttaaatcagctgataaaagtggtattatggctgaagaagctgatcaagatcaaaggctatattttgtaccagcttttacaggtcttggagcaccttattggcagccagatgtaagaggtgcaatttttggtctaaatagaaatactggacaaaaagaaattacaaaggcagctcttgaaagtgtagcttttcaatcactagatcttataaatgccatgttattagattttgaaatgtcattagataaacttattttaagggtagatggaggtatgtcagcatcaaattggacaatgcaaaatttatcaaatataattcaagccccggtagatagacctaaatttttagaaactaccgcacttggagcagcatggttggcaggtttaaaggctggtgtttatcctaaaatggatgacttttcagagcagtgggatcttgatattaggtttaagccaaagatacaaaaatatattgcaagtgatttatataagggttggaaaaaagctgtttcttgcactttataaa

SEQ ID NO: 248715 - DNA, 1468 bp, Unknown
  Bacterial polypeptide expressing nucleotide sequence isolated from the Sargasso Sea
atggaatattttggagccatagatcaaggtacaacaagttcacgatttatagtatttgataataaaggaaatattgttgaacaacatcaagaagaatttactcaatattttcctgatgaatattcagttgaacacaatccagatgaaatatggataagcgtagttaattgtattaacgaagtattaaaaaaaataaatataaatgatattaaatctataggcatatcgaaccaaagagaaacaactgttgcctggtccaaatcaacaggtaaaccattatttaatgcaatagtgtggcaagatacaagaacacaatcaatatgtgacgatatatccaataacaaaaatgttacggaagatattaaaagaacaggtttacctatcgcaacttacttttcactttcgaaaatactttggcttatcgataatgtaccagcagtacagagttcactagaaaatgatgatataatttttggaacagttgactcttggctaatttataaattaaatggtacatttcaaactgatgtaactaatgcaagtagaactttattatttgatttagatagtttgaattggaatgataatttattaaatgaatttaatattcctattaattctcttcctataattaatccttctcttcataattatggagaatgcaaaagtattttagaaggaataccaataacagctgtattaggagatcaacaagcatccttatttggtcaacactgttttaataaaggcgaagttaaaaatacatatggaacaggttgttttgctttaactaatacaggtgatgatattatttattcaaataatggtttacttacaactgttgcatatcaatatggcgaaagaaatgttaaatatgcattagaaggatcagttgccatagcaggcgctgcagtacagtggttaagagacaatctcaatcttatagaaacaagtgaacaaatagagtcttatgctcttgaagaaaaaaacaacggtggagtatattttgttcctgctttctcaggtttgttttcaccgcattgggatgaaactgccaggggagtattagtaggattaactcgttattcgaataaaagtcacatatgtagagctgtacttgagagcgttgcttatcaaagttatgacttgttgcaggcaatggaaaaagatataggtactaaatttaatgaagttaaagttgatggtggaatggtaaataataatctactaatgcagtttcaatctgatatattcaataaaaatataatttcaagagacatacaagaaataactgcatatggagctgcaattgcttcttatgtttcatttaaaggtatagagattgaagatttagatattgatattaaaacatttaattcttggtcaccaaatataaatgaaacatctagaagtgagtacgtatttttatggaataaagctatagaaaagtctaaaaattggttgtagt

SEQ ID NO: 248716 - DNA, 485 bp, Unknown
  Bacterial polypeptide expressing nucleotide sequence isolated from the Sargasso Sea
tttgaaaaaatttatagtctccattgatcaaggaacgacctcatcaagagttgttttatttgacactaaagggaacattaaatttatttcacaatatgaatttaaacaatactttcctagaaatggatgggtagaacataatccaaatgaaatttggtcgacaacacttaaaggattaaagcaagtaattaaaaaagctaaaagtttaaaaggtaatatacttactattggaattacaaatcagagggaaactacaattttgtggaataaaaaaactggaaaacccatttataatgcaatcgtttggcaagatagaagaacccaggaatattgtaaatctctaaagaataaaaattatgaaaatacttttagaaaaaaaactggattatttatagatccttatttttctgccactaaaataaaatggattttagataatgttaaagtttcaaaaaagttactcaaaactaataatttattatttg

SEQ ID NO: 248717 - DNA, 1257 bp, Unknown
  Bacterial polypeptide expressing nucleotide sequence isolated from the Sargasso Sea
gatcctaacgaaatagattcaattggtattacaaatcaaagagaaacaacaataatttgggataagcaaacaggaaaaccagtttataatgcaattgtatggcaggatagaaggactgcaagtttttgtgatgaattaattgaaaaaaataaaacctctttgattcaacaaaaaacaggtcttgttatagatgcatatttttcaggaacaaaaattaaatggatacttgataataatcaagagttaagagagaaagcaaatgataataaattgttatttggtactgtagatacatggttaacttggaatctgacaaatgggaagtctcatattactgatccctcaaatgctagtagaacattgctatacaatataaaaaatgataaatgggacaaagaattactagaattatttgatgttccagaaaatattctaccaaaggttgttgattcatcctcagtatctactaatattgataaagaaattcttggtatagagattccaatttcaggaattgcaggtgatcaacaggcagcattatttggtcaactatgtataaatgaaggtgacatcaaaaacacttatggtacaggttgtttttgtatgatgaatacaggagaaaattttgtaatgtcaaaaaacaaaatgctttcaacaattgcatggagaattaatggagaaattacttatgcacttgagggtagtgttttcgttgctggagccctgattcaatggctacgagatcaactcggaattataaaatcatcacctgaggttgaagagttggctaaaacagttgatgacaatggaggtttaacatttattccagcattatctggcctggctgctccatattgggatccatacgttcaaggaacaatttttggaataacaagaggtactgaaaatggccatatagctagagcagctctagaatcaattgcactaagaacaagagatatagttgttgaaatggaaaaagatgctggaataaaatttaaagatttaaaagttgacggtggggcaagcaataataacttattaatgcaaatccaagcaaatcttctaagtacaaatgttgtaagaccaaaaacaactgagactactgctttaggtgttgcttttcttgcaggactggcgacaggtttttggaaagatatatcagatttaaaaaaactgtggatagaggatatgtcttttcatccagatacaagttttaaatcaaatgatattatagaactttggcaaaatagaatt

SEQ ID NO: 248718 - DNA, 1495 bp, Unknown
  Bacterial polypeptide expressing nucleotide sequence isolated from the Sargasso Sea
atgagaaaaatagtcatggcgctggaccaaggcaccacgagctcacgtacaattcttttcagtgaaaaaggagaaatagttgcggatgcaagcacaccattagcctgttactatccacagtcaggatgggtagagcaggacgcgcaggaaatatgggttagccagtctcaaaccattcgggaagcattgaataaggcagcgctgaaaatgaaagacattgccgctgtgggaattacaaatcaacgagaaactactattgcatggaacagaaatactggagaagcaattacgccggccatcaactggcagtgccgtcgcaccgctgattattgtgagcagttgaaagatcagggttttgaccgtgtactgagaaaaaggaccggactggtaaccgatccctatttttctggaacaaaaatgcgctggattctggaaaacgtctctgaggccagtgagttggcgaaatatgggaatctttgttttgggactgtcgattcttggctaatttggcagatgacaagtggccaggttcacgccactgaaataagcaatgcttctaggacgatggttttcaatattgaagcatgttcatgggatgatgaaatactggctcgattcggcattcctcgtgagacccttccggatgttaaaccctcaagtgaaattattgcagagattgattcagatttatttggaggttctgctcctattgctggtgtagctggggatcagcaggcagcgctttttggccaggcatgctttgaaacaggaatggcaaaaaatacctatggtactggctgttttatgatctcaaatacaggcacagaacaggttcattcaaagcatggtcttcttactacaattgcctggcaaattgatcaggaagttacttatgcacttgaagggtcagttttcattgctggggcactggtgcagtggcttagggacggcctgcagtttttttctgatgcttcagaaactcaggagatggcagaatctgtttctgattccgggggtgtttttgtggttcccgcctttgtaggacttggtgctccgcactgggacccttatgcccgaggaacaattgtgggcttaagtcgcgataccaaccgtaatcacattgttcgtgcctctcttgaagcaattgcctttcaatcagctgaagtactgcagagtattgccaaagataccggacaggaaatcaaggaacttcggattgacgggggagcagccgcaaatgattttctctgtcagttccagactgacgttttggggctgtatgtaaaacgacctaaggttcttgaaacaaccgcaatgggcgcagcattcctggcaggactctcagttggagtctggcgggataaggatcaaatcagcaagttgtggcagcaggaaaaaatgttctctccgagtatttctagggaagattcagcacggatgatggtggagtggggccgcgcattagaacgtgcaaaaggatggattgtttcctgaa

SEQ ID NO: 248719 - DNA, 1477 bp, Unknown
  Bacterial polypeptide expressing nucleotide sequence isolated from the Sargasso Sea
atgtttcttataattgaccaaggtaccacatctacaaaagtaatgctttttgacttaaacggaaaaaaagttgattctagtcagaaatcttttgaacaagtattccctaataatggttgggttgagcataatcccgaagagattattggaactgttataagttgttgtaatgaaattatagaaaataatcctaatcataatatttgttcaattggtattactaatcaaagagaaactgtagttgtatgggataaacaaaccggtaaatctttatataatgcaatagtatggcaagacagaagaacagagagtttatgtagagatttaaaagaaaaaggctacgaagaattaattattaataaaacaggattattattagacccgtatttttcatcaactaagatatcctggataataaataatgttgatggcgttaaagaaagcataaatcaagatagagtatgtgcaggaacaatagattcatggattatttggcatcttacaaaaggtaaagtttttgctactgatattacaaatgcagctagaacaaatctttttaatattgaagaattaaaatgggatgatgatttattgaatctttttcaagtgaataaatcaatacttccggaagttctggaatctgatgctttttatggacaatcagaggctctcataaagaaattaccaatttatggtgttataggagatcaacaatcagctgcaattggacaaaaatgctttaattttggagatattaagtcaacttatggtactggatgctttgttttattaaatacaggtaaaaatattgcatattctaaaaatggccttttatcgaccgtagcatataaaattaatggagagatagcttatgctcttgagggttctattttcatggctggtgctattatagattggttaaagaataatctacaagtatttgataatattaatgaattagaagatatacttaaaaatacttccattaatagtgagattgtaatggtacctgcttttactggtttaggtgcaccacattggcaaccaaatagtcgggcaactatttcaggtttaacgcgtgattccaataaaaatgagataatagcctcatcagttcagtctatttctttacaaacgtatgatcttatgaatgccataaatgaggatactaaaaaattatttgagaacccccttaatagtatcagagttgatggaggtatgacagaaaatgactggtttatgcagaatctttctgatatttgtgacataaaaataagtaaatcaaatgaacaagaagcgactgcattgggcgcggcttcattatcagctcttggctctcaagaaattaatgatttaaaagaatttaatgttaatttatataaaaataaggaatttctgccacaaatggaaaatcaaacaagagaagaaataataaaaaattggaataaagcaataaataaaatcatcaatgtctaat

SEQ ID NO: 248720 - DNA, 1256 bp, Unknown
  Bacterial polypeptide expressing nucleotide sequence isolated from the Sargasso Sea
aatgaaaaaatttatagtttctattgatgccggaactacttcaaatagagcaatactttttgatttaaaaggcaaacctgttttttcatcacaaaaagaatttacacaatattttcctaaaagtggatgggtagaacataacccagaggaaatttggaacactacaaaaaaagtcttaaaagatgtaatttcgaaagcaaaaaaatttcggggcgaagtgttagcaattggaattactaatcaaagagaaacaacagtcctatgggataaaaaaacgggcaaaacagtttataaagcaatagtttggcaggatcgtagacaagctgaatattgtaaaaaattaaaaaaacaaaacaaggaaactctaatatttaataaaacaggtcttcctattgactcatatttttcaggaacaaaaattaaatggatattagataatgtcccattagccagaaaattaatgaataaaaaacaacttctttttggaacaattgatagtttcttgatttggagattaactaaaggcaaagtccatgcaacagatgcaacgaatgcaagtagaactatgatttttaatatatcaacaaacaaatgggacgatacaattttaaatatattaaaaattaaaaaacacattcttcctgaggtaaaaaattgcgctgatgattatggttctacacatccaacaattacaggcaaatcgataccaattgctggagttgtgggagatcaacagtctgcatcaataggtcaatgctgttttgaaccaggctcattaaagagcacttatggaacaggggcttttgtattattaaatactggttacaaaaaaatttattccaaaaatagactgctcactacaattggatatagaattaacggaaaaactacttatgctatggaaggatcaatttttattgcaggagcaggtgttcagtggttaagagatcgaatgaaattctttaaaaaagcttatgaaactgaaaagattttaaagtctttaaaagacaataaagatgtctatttagttccagcctttacaggtatgggtgcgccatattggaatcaaaactcaagaggagttttaagtggattaacaagagacacaggtccaaaggaaatagtaagggccacgatagagtcagtagcatatcagacacatgacttgtttgaagcaatgaaacacgatggtttgcgaccaagaatggttaaagtagatggaggaatggtcatgaataattggttctcacaatttt

SEQ ID NO: 248721 - DNA, 1492 bp, Unknown
  Bacterial polypeptide expressing nucleotide sequence isolated from the Sargasso Sea
atggaaaaaaaatatatcttgtctattgacgctggaacaacaagctcaagggcaattatttttaacaaaaatgcagaggtaattgaaattgctcaatatgagttcagtcaattttttccaaaggagggatgggttgaacataatgctattgaaatatggaatacacaattaaaagcaataaaagatgtaattagtaaatcaaaaattgatcctaacgaaatagattcaattggtattacaaatcaaagagaaacaacaataatttgggataagcaaacaggaaaaccagtttataatgcaattgtatggcaagacagaaggacagctagtttttgtgatgaactaattaaaaaaaataaaacctctttgattcaacaaaaaacaggtctagttatagatgcctatttttcaggtacaaaaattaaatggatactagataataataaagaattaacagagaaattaaatgataataaattgctgttcggtactgtagatacatggttaatttggaatctgacaaatgggaagtcccatattactgatccttcaaatgccagtaggacattgctctacaatataaaagatgataaatgggataaagacttacttgatttatttgatgttccagaaaatattctaccaaatgttgttgattcatcttcagtatctactaatattgataaagaaattcttggtgtagaaattccaatttcaggaattgctggtgatcaacaggcagcattatttggtcaattatgtataaatgaaggtgacatcaaaaacacctatggtacaggttgtttttgtatgatgaacacaggagaaaattttgtattgtcgaaaaataaaatgctttcaacaattgcatggagaattaatggagaaattacttatgcacttgagggtagtgttttcgttgctggagccttgattcaatggctacgagatcaactaggaattataaaatcatcccctgaggttgaggagttggctaaaacagttattgacaatggaggtttaacatttgttccagcattatctggtttggctgctccatattgggatccatatgttcaaggaacaatttttggaataacaagaggtactgaaaatggtcatatagctagagcagctttagaatcaattgcactaagaactagagatatagttattgaaatggaaaaagatgctggaataaaatttaaagatttaaaagttgacggtggtgcaagtaataataatttattaatgcaaatccaagcaaatttattaagtacaaatgttgttagaccaaaaacaactgaaactactgcattgggagttgctttccttgcaggattagccacaggtttttggaaggatatatcagatttaaaaaaattatggattgaggatatttcttttaatccagattcaaattttaattcaaatgatattatagagctttggcaagatagaattaataaactactgaaagttaatgaataga

SEQ ID NO: 248722 - DNA, 1396 bp, Unknown
  Bacterial polypeptide expressing nucleotide sequence isolated from the Sargasso Sea
atgaaaaaatttataatttcaattgatgctggaacaacatcaaatagatcaattctttttgatctaaaaggtaaaccaattttttcatcacaaaaagaatttactcaatatttccctaaaagtggatgggtcgagcatgatcccgatgaaatatggagaacaactataaaaactttaaaagatgtcatccaaaaagcaaaaaagttaaaaggagaaattttaagtataggtattacaaatcaaagggaaaccacagttttatgggataaaaaaaatggccaacctgtttataaagcaattgtatggcaagatagaagacaagaagaattttgtaaaaaactgagaaagcaaaataaagatacgatgatttttaataagactgggctgcttatcgactcttatttttccggaactaaaatcaaatggattctagataatgtgccaaaagcaagacaattaatgaataaaaaacagttattgtttggaacaattgatagttttttaatatggagacttacaaaaggtaaagttcacgcaacagacgctactaatgctagtagaacaatgatttataatatctcatctaataaatgggatgatacaatattaaacttacttaaaattaaaaaacatatcttacctgaagtaaaagattgtgcagacgattatggacaaactcattctttaattaccggaaaatcaatacctataaatggtgtagtgggagatcaacaatcagcaactattggtcaatgttgttttgaaccagggtctttaaaaagtacatatggtacgggagctttcgttttattaaatacaggttcaaagaaaatttattcgaaaaatcgtttattgacgacaattgcctataggattaagggtaaaacaacatacgctatggaaggctcaatttttattgctggagcaggggtccaatggttaagagacagaatgaaattttttaaaaaagcacctgaaacagaaaaaatagtaaagtcactcgataataataatgatatttatttagttcccgcattcactggattaggagcgccttactgggatgccaacgccaggggtgttttaagtggcattacaagggatacaagccctaaagaaatagttagagctactatagaagcagtagcctatcagacttttgatctcttcgaagccatgaagcatgatggtcttagacctaaaatagtaaaagtagatggcggtatggttatgaataattggttctctcaatttttgtcagacattgtaaatgtaaaagttttaagacctaaagttcaagagactacagctttaggtgcagcttttatggctggtttacaaatcggaaaatataaatctttaaaagatatttcaaaaaaattggcatttagataaa

SEQ ID NO: 248723 - DNA, 469 bp, Unknown
  Bacterial polypeptide expressing nucleotide sequence isolated from the Sargasso Sea
atgggggtatattttgtacccgcatttactgggcttggtgctccgtattggagatctgatgcaagaggtaccatagtagggttaacaggttcatcaggtaaagctgaaatagttagagctgcattagaagcagtcgcttaccaaagtgtagatctctttgatgcgatgtcatcagatggacaaaaaccaattgtgttaaaagtagatggtgctatgagtaataatgattggttaattcaatttttatcaaatattagtaaaacaaaaattcaaaaatcttataattctgaaactacatcacagggagcagcaatattatcttctattgggtctggattgcttacgtctcttaaagagtctagtaagttttggaaattaaataaaagttacaaccctaaaatgcaaagtgcagaaataaataaatacagaaatggctggaaaaaagcaataaaacgaactattatgtaaa

SEQ ID NO: 248724 - DNA, 1480 bp, Unknown
  Bacterial polypeptide expressing nucleotide sequence isolated from the Sargasso Sea
gttgaaaaaatttataatttctattgatcaaggtaccacttcttcaagagtaattctttttaacaccaaaggaaaaattgaatttgtttcacagtatgaatttaaacaatatttcccaaaaaatgggtgggtagaacatgacccaaatgagatttggtcaacaacccttaaagcacttaagaatgttattagtaaagccaataaaatcagaggacatattattagtattggaattactaatcaaagggaaacaacaattttatggaataagaaaacaggaaagccaatctataatgcaatagtttggcaagatcgtagaactcaagaatattgtaaaaaacttaaaaacaaaaaatatgaaaatgattttagaaagaaaacaggattatttattgatccttatttttcagcaacaaaagtaaggtggattttagataatgttaagcagtctaaaaaattattaaagtcaaacaatttattatttgggacagttgatacttttttaatttggaaattaactaaaggaaaacaacatttaactgaagctacaaacgcaagtaggacaatgttgtttaatattaataacaataaatgggattatgagattttaaaaaaattaaatattccaaagagtattttacccgaagtaaaaaattcagctgataactttggtaaaactgataaaaaaattactggaaaagagatacctatatctgctgttttaggtgatcaacaggctgctgcggttggtcaaacgtgttttgaaaaaggttcaattaaaagtacttatggaacaggagcttttgtgattatgaatacaggttccaaaaaaataaattcaaaaaataaattgttaacaacaatatgttatcgattgaataataagactacttatgctttagagggatcaattttcatagcaggcgctggtgtgcaatggttaagagataaaatgaaattaataaaaaaagcaccagaaacagaaaaaatagcaagatcatcaagtataaatgatggcatctatatcgttcccgcttttagcggcatgggtgcaccttattggagaccagatgcaagaggtttaattacaggtttaactagagatagtaattggcaaagtttagtaagagcaacagtagagtccgttgcttatcaaagttatgacctttttaacgctatgaataaagacggtttgaaacctagaatagtaaaaattgatggtggtatggttgcaaacaattggttttctcaattcttgtcagatacaataaatctaaaagtaattagaccaaaagtattggaaactactgctttaggtgttgctctctttgctggatatcaagttggtgagtttaaatcgttaaatgaaatcaaaaatatttggcaaaaagacagagctttttctccaaaaatcaaaaattcattgagaaatcaattattacaaggatggaaactagcaattgaaaaaactttggcatag

SEQ ID NO: 248725 - DNA, 1447 bp, Unknown
  Bacterial polypeptide expressing nucleotide sequence isolated from the Sargasso Sea
catgactaagattttaacaattgaccaaggtactacaagttcaagagctattgttttcgattcaaatgctcaaatcgttgaagtgcatcaagaagaatatccattaatctatcctgaggatggctgggttgaaattgatccagaaattttagttaaatctgtcgcagacaccttagaaaagattaactttaatggaatagcctcagccgctattaccaaccaaagagagacaacaataatttgggaaagagattcaggaaaacctatttataacgctatagtttggcaagatagaagaactaaggatttctgttcttctattaatgatcaagaaatagtaaatgaagtgtctaccagaaccggtttagttcttgatccttatttttctgcaacaaaaataaaatggatactggaaaatgttgaaggcgcaagaaaaaaagctgatgagggaaaattatgctttggtacagtcgatacttatctaatgtatgtcttatcaaataaaaaaattcataaaacagatataacaaatgcttctagaaccatgttgttcaatataaatacgttgtcctgggataattatcttttagaactatttaatattcctgaatcaatgttgcctgaagtatctaattcggatgatctatttgggacattatcagaatgcaataatctcgatataagagccgtattaggagatcaacaggctgcattatttggacaaggctgtttaaatgctggggatcttaaaagtacgtatggaaccggtggttttttaatgtctaatatcggacttacgcctttaaattcagataaagggcttttaactacaataggttttagtttcaataatgaaattcactatgcaatcgaaggtagtatttattcagctggtacagtagttcaatggttaagagatggactcgatttttttagtgaaagttctcattctgaaaagttcttaaatttagatgctaatgctaatggtgtgcactttattcctgcttttactggtttaggagcgccatattgggattctgaaattagagcaagcttccatgggataacaagagatacaacgaaaaaaaatctgataacggcagcttttaattcaatttcttatcaaactaaggatatagttgattgtctcgagcaaactaatattagtgttaattctttgagtgttgatggaggtatggcagaaaataaaacttttgtgggacacatagctagtatcttaaatattcctatacaagtgcctaaaaatactgaagcaactgcaaaaggtgtcgcttgtttagcaggaataaccactggattaatgaatgttgatctaataacaaggcaagaaaaaactatatatgatccagaaatcgctctcaattcgataatgaaagaggattaccaaatttggaaaaagttaattaatgctaatgtttcaccataa

SEQ ID NO: 248726 - DNA, 523 bp, Unknown
  Bacterial polypeptide expressing nucleotide sequence isolated from the Sargasso Sea
atgaaaaaatttattatctctatcgatcaaggtaccacttcaagtagagctattttatttaatttaaaaggtcagtcagtttatgtatcacaattagaatttactcagcattttccaaaaaatggatgggttgagcataatccagatgagatatggaagactacattgaaagtcttacgagatgtaattaaaaaaagtaaaaaattaaaaggaaagattttaacaatagggattacaaaccagagagaaacgacaatattatgggataaaataacaggcaaacctgtttacaatgctatagtttggcaagacagaagatcatctgaatattgtaaaaagttaattagacaaaaaaaagaaaccataatttataataaaacaggattgttaattgacgcatacttttcagcaacaaaaattaaatggataatagacaatgtgcctaaagcaaaagaattgatcaaaaagaaaagattattatttggaacggtagactgttttcttttatggaaattaactaatg

SEQ ID NO: 248727 - DNA, 786 bp, Unknown
  Bacterial polypeptide expressing nucleotide sequence isolated from the Sargasso Sea
aatgaaaaaatttattatttctattgatcaaggtacgacttcaagtagggcaatattatttgatttaaaaggaaaacctatttttatttcacaaaaagaatttacacaatattttcctaaggatggttgggtagaacatgatccagaagaaatatggaaaactactttaaaagttttaaaagaagttattaaaaaaagtaagaagcttaaagggaaagtgttaaccataggaattacaaatcaaagagaaacaactattttgtgggacaaaaaaactggaaagtcagtttataacgcaattgtatggcaagacagaagatcttccgaatattgtaaaaaacttattaaacaaaaaaaagaaactataatttataataagacaggtttattaattgatgcttatttctcagcaactaaaataaagtggataattgacaatgttcctaaagcaaaagatttaatcaaaaagaaaagattgttgtttggaacagttgatagttttttattgtggaaattaaccaaaggtgttgatcatgcaactgatgcaactaatgctagtagaacaatgttatttaatatttcaacaaacaaatgggatgaccaaatactcaaaattttaaaaattcctaaagaaatacttccagtagttaaagattgtgctgctgactttggttatactgatccttctattacaggtacttcttatccaatcaccggaatggtgggagaccaacaatctgctacgattggacagtgttgttttgaaccaggatcattaaaaagtac

SEQ ID NO: 248728 - DNA, 1158 bp, Unknown
  Bacterial polypeptide expressing nucleotide sequence isolated from the Sargasso Sea
catggacggtatattagctttagatcaaggaaccaccagtactaaaggcatcattttcactacaaccggggaaataattacgacatctagggctcccttgcatcaaatataccccgaggatggatgggtagaacaagaccctaatgaaatcatctcttctgtgttatcggtaatgacagattgttatagaagaagtaaagagcaaggaattcggataactagcgttggtatcactaaccaaagagaaacaactatcatatgggataaaaccaccggattgcctatctacaacgcaattgtttggcaagaccgtcggacaacaaaactaatccaatcgttaaaggaccaaaacctcgaagatactatcaatgcaaaaacgggattgatgctagatccatacttttctgccagcaagatcacatggattttagacaatgtacccaatgcccgtaatttggtaaagcaaaacaaattaatgtttggaacagtagatacgtatctgatttggaaacttacagaaggcgaggttcatgccactgatgtaactaacgcttctaggactagtttattcaatttaacgactttaacatgggatgacgacctcttgaaaatatataacatccccaaaaacattcttcctaatataaaaaaatgcactgaccattatggtgatatatctaaaacctttgttggtgaatctttcccgatttatggggttgcaggagatcaacaagcagctttagtagggcagtcatgtttccaagaaggtcaggtgaaatctacatacggcacagggtgttttgcactcgtcaatacaggtagcaaaatcctacattcgaagaataatcttataacaaccataagctatcaattacaagatacccttgcttatggcttagaaggttctatctttatcgctggggcttcctcagactggcttttagataacttagaggtaataaataatcactctgaaatagaacaaatctgccgttctactccagatgatcataacgtgtatatggttccagcgttcactggattgggggctccttggtggcaacccaatgccagagcagcaatttatggtttaaccaggcaaaccactaaaaatgaagtggtccgagctgccattgaatcagtggcatatcaaacaaa

SEQ ID NO: 248729 - DNA, 1322 bp, Unknown
  Bacterial polypeptide expressing nucleotide sequence isolated from the Sargasso Sea
catgaccgacctgatcctagccctggaccagggcaccaccagttcacgcagcatccttttcacggaaaaagccgaaatccgggcggttgcttcggaacccctggagtgccgttacccggattcgggttgggtggaacaggacgcagaagcaatctgggaaacccagcgaagcactatcgtcaaggttctggatcaggcaggtatcggcctttccgaggtttccgccataggaatcaccaatcagcgggaatccaccatcgcctggaatcgtgaaaccggagaagcgctttgccccgcgatcaactggcaatgccgacgtactgctgggttttgcgatgtgttgaaagaggagggttttgatgaattgatccggaaccgaaccggtttggtcaccgatccttatttttcaggaacgaagatgcactggattctacagaatgttcctgaagctgcgaactttgcacgccaggggaagctctgttttggtaccgttgacagctggctaatctggaaactgagtggaggaacaacccacgctatcgaaatcagcaatgcttcccgtaccctcgtttttgacatccaaaaatgcgaatgggactccgagatcctttcacgattcggcatttctccggaatccctgcctgaggtcgttccctccagtggggtgattgtcgaagtagacgaatccctttttggaggctccgcaccgattgccggtgctgcaggagaccaacaggcggcattgttcgggcaggcatgtttttctccggggatggccaaaaacacttacggaaccggttgcttcatgatttccaacaccgggaagcatctggtccgttctcaaaacggactgctcaccaccatcgcctggaagcttggtgatgaggtgacctatgccctggaaggctcggtcttcattgctggtgcgttggtgcaatggctccgggacggattggaattgttcaacgatgctgcagaaacggaatcgatggcgctttccgttcctgatagcggaggggtgtttgttgtcccggcctttgtcggtttaggtgccccgcattgggatccctatgccaggggattgattgtcggtttgacccgtgacatccgaagcagtcacatcgtcagggcttcgcttgaggcgatcgccttccagtcggcggaggtcctcaacagcatcagccaagatacttctgaatccttgaatgaactgagaatcgatggcggagcggctgccaatcagttcctctgccagttccaggccgatttacttggattggatgtgagacgtccacaaattcttgaaactactgccatgggtg

SEQ ID NO: 248730 - DNA, 1483 bp, Unknown
  Bacterial polypeptide expressing nucleotide sequence isolated from the Sargasso Sea
atgaaaaaatttataatttcaattgatcaaggaactacttctagtagagctgtattatttgatcttaagggtaaaccaatatttatttcacaattagaatttacacaatacttcccaaaggacggttgggttgaacataatccagaggaaatttggtcaacaacaaaaaaagtattaataaatgtaattaaaaaaagcaaaagtttaaagggtaaaatcttaacaataggtataaccaatcaaagagaaacaaccattctttgggataaacatacaggcaaaccagtttacaatgcaatcgtatggcaagataggagagcagttgaatattgcaataaacttatcaaacaaaaaaaagagacaattatttacaataaaactggcttattaattgacgcatacttttcagcaacaaaaattaaatggattatagataatgttcccaaaacaaaaaagttacttaaacaaaaaagactcttatttggtacagtagattgttttttattatggagacttactggaggcacaaatcattttactgatgctactaatgcaagtcgaacaatgttattcaatattgtaaataacagatgggataaacaaatcttagatattctaaaaatacctgaaaatatattaccagaagttaaggattgttcagatgattttggtcatactgatcctaagatcacaggagagtcttattcgattactggcatggtaggtgatcaacaatctgcaacaataggacagtgttgttttgagccaggatcattaaaaagcacttatggtactggagcatttgttttattaaatacaggtaataaagttatttattctaaaaatagacttttaactacaattggttacagaatagatggaaaaaccacttatgctttggaaggttcaatatttgttgcaggagcaggggttcaatggttaagagataaaattaattttattaaaaaagcatctgatacagaaaaaattcttaaaagtcttgagacaaataaaggtatttatttggtaccagcgtttacaggtttaggaactccatattggaatgcaaaatcaagaggagtgttgagtggattgacaagagatacaggaattaaagaaattgtaagagcaactgttgagtccgttgcttaccaaacttatgatttgtttgaggcaatgaaaaatgatggtttgagacccaagatagttagagttgatggtggtatggtaaaaaataattggttttctcaatttctgagcgatatagttaatgtaaaagttttgagaccaaaagtagacgagacaactgcacttggagctgcttttatggcagggcttaaaatcggagtttataaatctttaaaagatatttcaaaaaattggtcattagataaaaaattttctccacgaatgaaaaaatcaaaaagaaaattaaacattcaaggttggggaaaggctataaaacgaagcctaataacttagt

SEQ ID NO: 248731 - DNA, 928 bp, Unknown
  Bacterial polypeptide expressing nucleotide sequence isolated from the Sargasso Sea
atgtttttaattattgaccaaggtacaacatcaacaaaggtaatgctttttaatctagagggtaaaaaagttgactccagtcaaaagccttttaaacagatttttccaaataatggctgggttgaacataatcccgaagagataattgagactgtaataagttgttgtaatgaagttatagacaataaccccgatcagaatatttgctctataggaataacgaatcaaagagaaactgtagttttatgggataagacaaccggcaagtcattatacaatgcgattgtatggcaagataggcgaactgacattttttgtaatgagctcaaggataaaggtcatgaaaaatttataaatcaaaaaactggattgctgttagacccatatttttcatcaacaaaaatacgttggattattgataatgtaaaaggtgtcaaagaaggtattgatgataatagggtgtgcgcaggaactattgatacatggattatttggcatctgacaaaaggtaaagtgtttgcaacagatttaacgaatgcagcaagaacaaacttatttaatattaaagatttaaaatgggatgatgatttacttgatttatttggagtaaataaatcaattcttccagatgttcaagaatctgacgggttttatggaaaatcagaagtacttataaagaaaatacccatttacggtgttgtaggcgatcagcaatcagcagcaattggacagaaatgctttaatgttggcgatatcaaatctacatatggaacgggttgttttgttatacaaaatactggaaaagaaattgtatattcaaaaaataaacttttatcaacaatagcttataaggttaaagggagaaacagcttatgctttagagggctctatttttatggctggagctataatagattggttgaataat

SEQ ID NO: 248732 - DNA, 458 bp, Unknown
  Bacterial polypeptide expressing nucleotide sequence isolated from the Sargasso Sea
tatgaaaaaatattttttagttattgatcaaggaacaacaagttcgagaatagtactttataatagaaattttgaaatttttgatattgcccaaaaagaatttagacaattttttccaaatgaaggttgggtagaacacgatgctattgaaatatggaatgatgtaaaaaatcttattaaaaaaatactaaaaaaaaataaattaaatcctaaaaatattatatccattggaataaccaatcaaagagaaactactgttttatgggataagataactggtaaaccagtttacaaagctattgtttggcaagatagaagaacaggtaattattgttctaatttaagaaaaaaaggactgcataaaaaaatacaaaaaattactggattagaacttgatccatatttttcagctactaaaattaaatggatttttgataatataaaagaagctaaaaaaa

SEQ ID NO: 248733 - DNA, 478 bp, Unknown
  Bacterial polypeptide expressing nucleotide sequence isolated from the Sargasso Sea
tatgacaaaatacatactcgctattgatcaagggacaacatcttcacgagctataatttttgataaaaacctaaatgttataagtagtgatcagaaggaatttaatcaacattttccaagttctggatgggtagaacacgatcctgaggatatatggcaaactactctagaaacctgtcataatgcaatcacccgcgcattgatctcatcctcggatctgttatctatcggaatagcaaaccaacgagaaacaattattttatgggacagagaaacaggcacgccaatctatagagcaattgtttggcaagatcgtagaacagcaaatatttgtcaaaagctaaagagtcaaaaccttgaagtagaggtcaaagaaaaaactggtttgttattagatccatacttttctgctacaaagattagctggatattagaaaatgtgagtggagcgaggtggccgcgacccaaggcaaactgg

SEQ ID NO: 248734 - DNA, 1309 bp, Unknown
  Bacterial polypeptide expressing nucleotide sequence isolated from the Sargasso Sea
atgtttaagaaaaacaattcaaaaagtaaaaaaactaaaaggaaaaatattaactattggaattacaaatcagagagaaacaactctactttggaataaaaaaaatggtagacctatacataaagctattgtttggcaggatagacgtacacaaaatttttgccaaaatttaaaaaaaaataattatgaaaatattattagaaaaaaaaccggtttatttatcgatccatatttttcagcaacaaaaattagatggatattggataatataaaagaatcaaaaagattattaaaatcaaataatttactatttggaaccattgatacttttttaatctggaagctcactaaaggaaaaagacatttaaccgaagcaaccaatgcatctagaacaatgctttttaatataaatacgaaccaatgggataaaaatatattaaaaaaactaaaaataccttacaaaattcttccagaagtaaaaaattcagctgataattttggaattacagacaaaaaaattattggacaagaaattcctatatctgctgttttaggagatcagcagtcagcagcaattggtcaatcttgttttcaaaaaggttcaatcaaaagtacttatggtactggtgcatttataataatgaataccggctcaaagaaaattttttcaaaaaataaattattgaccacaatttgttatcgaataaatggaaaaaatacttatgcattagaaggttcaatttttattgctggagcaggagtacaatggcttagagataaaataaaattaatcaataatgcatatgaaacagaaaaagttgctaaatcaaaaaaaaataatgatggcgtatatatagttccagcgtttagtggaataggcgctccttattggagatcagatgcaagaggagtcattaccggtttaacaagaaatagtgattggaaaaatttagtaagagctgtcgtagaatctgttgcttatcaaagttacgatttatttgatgcgatgaaaaaagatggactaaaacctaaattgattaaagttgatggaggaatggtcgcgaacaattggtttactcaatttttatcagatataataaatttaaatgttattagaccaaagattctagaaacaacagccttaggagttgcacttttagcgggatatcagattggagaatttaaatctttgaatgaaattcaaggtaagtggaaaaaagatagagttttttctccaaaacttaataaatcaatgagaaataatttattgcaaggttggaaacaagcaattagaaaaactttagcataa

SEQ ID NO: 248735 - DNA, 1462 bp, Unknown
  Bacterial polypeptide expressing nucleotide sequence isolated from the Sargasso Sea
tatgtctttaattattgctattgatcagggaacaacaagcactagaactgttgctttcgatcgtgatttaaacattattcattctcagcaaaaagagtattcattaaagtatccaaatgatggatgggtcgagatcgagcctgatgagctaatggcttcggttcacaatactcttgatccagtgctcgaggcttgctcggatatcgtcgctttaggaattacgaatcaaagagaaacaactttagtttgggatgcatcgactggaaaatctatttataacgcaattgtttggcaggatcgaaggactgcggaggattgcgctagattaaaaaaagatggttatgaggaaacaataaaaaataagacagggcttttgcttgatccgtatttttcagcaacaaaaatttcttggattcttgaaaacgttgatggcgcgagacaaaaagctgcaaatggtgaactaagatttggaacagtagacacttatttgttatggcaattatctgaaggggcgattcataaaactgatgtaacaaatgcatcaagaacaaacttgtttaatattcattcaaaggtttgggatcaagaactgctggatatttttaatataccatcctcaatgcttccagatgttcatttatccgactctgtttttggagagatttctagacagaatagaaagataaagatttcaggactaataggagatcaacaaagtgccttggttggacaaaaatgttttgagccgggtcaaatgaaagcaacttttgggacaggatgttttctaatggttaacactggcgataaatccaatccttcttcatcgggcttactaaatactatagggtatggcatctctaatcagactccgtatgctttagagggtagtattttttcagctggaactattatccaatggttaagagatgaaatgaaattctttccagattcaaaaaatagtattgattttttaagcactacaggtgattcaaaggatatttttttcataccaggctttacaggaattggagcaccacattggaattcagagattagagcagctttttatggaataactagggatacatctcaaaaagatattactaccgcagcatttaaagctttaatttatcaagtaatcgatatcaaagaggcgcttgctaaagatagtattaaaattaaaaacttatctattgatggcgggatggcatcaaatagtatgttttgtcagttgctttcagattatcttggccaagaagtaaatgttccttccagccttgaatctactgcaattggagcagcaattaccgctggattaggagtaaattatttttcaattaaagagctgcaggaaggcacgaaaaattctgtaatttttaaaccccgcgaggggatttttgatcctgaggatttaacaaaatggagaaaatttcttagcgtcttaatggaggcatataattaa

SEQ ID NO: 248736 - DNA, 670 bp, Unknown
  Bacterial polypeptide expressing nucleotide sequence isolated from the Sargasso Sea
tatgaacaccggtccaaagaaaattaattcaaaaaacaaattactgactactatttgctatcgattaaataataaaaatacttacgccttagaaggttcaatctttatagcgggcgcaggagttcaatggttaagagataaagtaaaattaataaaaaaagcgcctgaaactgaaaagatttcaaagtcctctaaagttaatgacggtgtttttgttgtaccagcttttagcggaatgggagctccttactggagaccagatgctagaggagtaattacaggactaacaagagacagtgattggaaaagtatagtgagggcaacagtagagtctgttggttatcaaagttttgatttgtttgattcaatgaacaaggatggtttgaaaccaaaaatagttaaagtagatggtggaatggttgcaaataattggtttacacaatttttagctgatattattaatttaaaagttgttagaccaaaaatattagagacaactgctttgggtgtggctttgttggctggacatcaaataggagaatataaatctttagatcaaattaaaaatatgtggaaaaaagacagaatatttaatcctaaaatgaaaaaaaattttagaaaagaccttttaaatggttggaaattagcaattaaaaagactttagcttag

SEQ ID NO: 248737 - DNA, 343 bp, Unknown
  Bacterial polypeptide expressing nucleotide sequence isolated from the Sargasso Sea
aatggcaaaatttttaatatctatcgatcaaggaacaacatctagtagggctattctttttagtttaaaaggaaaacctgtttattcatctcaaaaagaatttacacaatacttccctaaaagtggttgggtagagcacaatcctgaggaaatatggagtacaacaaaaaaaactcttaaagatgttattactaaggctaaaaaacttagaggaaatattctcgccattgggataaccaatcaaagagaaactacagttttatgggataaaaaaacaggcaaaccagtttataatgcaatagttggcaagatcggagacaagagcagtattgtatcaaattaa

SEQ ID NO: 248738 - DNA, 1447 bp, Unknown
  Bacterial polypeptide expressing nucleotide sequence isolated from the Sargasso Sea
aacatctagtcgaacaattctgtttaatttaaaaggtaaacctgtttactcatctcaaaaggaatttacccaattttttcctaaaagtggttgggtagaacatagtcccgaagaaatatggaatacaacaaaaaaaactcttaaagattctattaataaagcaaaaaaactaagaggaaatgttttgacaataggcattacaaaccaaagagaaactacagttttgtgggataaaaaaactggtaaagccgtatacaaagcaattgtttggcaagacagaagaacggaagatttttgtaaaaaattaagaaaacaaaataaagaaacaatgatttttaataaaactggtttattaattgatccgtatttttcaggtacaaaaatcaaatggatattagacaatgttacagaagcaagaaaattaatgtccaaaaaaagacttctatttggaacaatagatagttttttaatatggagattaactaagggcgaagtacatgctaccgatgctacaaatgcgagtaggactatgatttataatatctctacaaataaatgggatgatacaatattaaaaattttaaaaataaaaaaacatatacttcctgtggttaaagattgtgcggatgattatggatatactcatccttcaattacaggaaaatcaattccaataactggtgtagtaggagatcaacaagctgctacaatcggacaatgttgttttgagccaggttcgttaaaaagcacttatgggactggagcttttattttattaaatacaggttcaaaaaaaatttattcaaaaaatagacttctaacaacgattggatacagacttaaaggcaaaacaacatatgcattagaaggttcaatctttattgctggtgccggcgttcaatggataagagacaagatgaactttgtgaaaaaagcttcagatacagaaaaaataataaaatctttaaaagataattctgaaatttatctagttcctgcgtttactggaataggtgctccttattggaacgcaaacgctagaggtgttttgagtggtattacaagagatacaggtcctaaagaaattgttagagccatcatagagtcagttgcttatcaaacttatgatttatttgaagctatgagacgcgacggattaaaacctaaacttgtcaaagtagatggaggcatggttatgaataattggtttacacaatacttgtctgacataattaacgtaaaagttctaaggccaaaagttcatgaaaccacagctcttggggcagcatttatggccggtcttaaaattggtgtttataaatccttaaaagaaatttctcgacaatggagtttagacaaaaaattttcaccaaaagttaaaaaaacttttagaaaaaaagttcttaagggctggaatacagctattaaaagaactttaattacctaa

SEQ ID NO: 248739 - DNA, 1264 bp, Unknown
  Bacterial polypeptide expressing nucleotide sequence isolated from the Sargasso Sea
ttagcaattggaattaccaatcagagagagacaacagttttatgggataaaaaaagtggtaagacaatttacaaagctatagtttggcaagatcgtagacaagctgaatactgtaaaaaattaaaaaaacaaaataaagaaactctaatatttaataaaacaggtcttccaattgattcttatttttcaggcacaaaaataaaatggatcttggacaatgtttcaactgccaaaaaattaatgaaaaaaaaacaacttctttttggaacaattgatagttttttaatttggaggcttacaaaaggtaaagtgcacgctactgatgcaaccaatgcaagtagaactatgatttttaatatttctacaaacaagtgggatgacactattcttaaaatattaaaaattaaaaaacatatcctcccagaggtaaaaaattgtgctgatgattacggacatacacattcatcaattactggtatgtcaattccaataacaggagttgttggtgatcagcaatctgcttcaattggccaatgttgttttgaacccggctcattaaaaagtacttacggaacaggtgcttttgtattgttaaatactggttataaaaagatttattctaaaaatagattactcactacgattggttatagaattaacaacaagaccacttatgctatggaagggtctatttttattgccggagctggtgttcagtggttaagagatagaatgaaattttttaagaaagctttcgaaacagaaaagattttaaaatctttaaaagataatagagatgtatatttagttccagcatttactggtatgggtgcaccttattggaaccagcagtccagaggtgttttaagtggtttaacaagagatacaggtcccaaagaaatcgtaagagccacgatagagtctgttgcttatcaaacgtatgatttgtttgaagcaatgaaacacgacggtttaagaccgaaaatggtaaaggtagatggaggaatggttatgaacaattggttctctcaatttttatctgatgtagttaacgtaaaagtttacagacccaaggttcatgagactacagcattaggtgcagcattcatggccggcttaaaaattggagcgtataaatctttaaaagatatttctaaaaattggagtcttgagaaaaaatttactcctaaaatgaaaaatagcgacagaaaaacacttctactaggctggtcaaaggctattaaaagagcgctcattaattaaa

SEQ ID NO: 248740 - DNA, 1477 bp, Unknown
  Bacterial polypeptide expressing nucleotide sequence isolated from the Sargasso Sea
atgtttttaattattgaccaaggtacaacatcaacaaaggtaatgctttttaatctagagggtaaaaaagttgactccagtcaaaagccttttaaacagatttttccaaataatggctgggttgaacataatccagaagagataattgagactgtaataagttgttgtaatgaagttatagacaataactccgatcagaatatttgttctataggaataacaaatcaaagagaaactgtaattttatgggataagacaaccggcaaatcattatacaatgcgattgtatggcaagatagaagaactgacacctattgtaatgaactcaaagctaaaggttatgaagaattgataaatcagaaaactggattactgttagacccatatttttcatcaacaaaaatacgctggattattgataatgtaaaaggagtcaaagaaggtattgatgataataaggtatgcgcaggaactattgatacatggattatttggcatctgacaaaaggtaaagtgtttgcaacagatttaacgaatgcggcaagaacaaacttatttaatattaaagatttaaaatgggatgatgatttacttgatctatttggagtaaataaatcaattcttccagatgttcaagaatctgacgggttttacggaaaatcagaagcacttgtaaagaaaatacccattcacggtgttataggtgatcaacaatcagcagcaattggacagaaatgctttaatgttggcgatattaaatctacatacgggacgggttgttttgttatacaaaatactggaaaagaaattgcatattcaaaaaataaacttttatcaacaatagcctataaggttaagggggaaaccgcttatgctttggagggatctatttttatggctggagctataatagattggttgaataataacttgcaagtatttgataattatagtgaattagatgatatattaataaatgctgaaattaatcctgaagttgtaatggttccagctttcaccggtttaggagcacctcattggaaacctgatagtcgagcatctatttctggattaactcgtgatgctaataaaaatgatataatagtagcttcaattcagtctgtatctttgcaaacatatgatcttattaaagctattcatgaagatacgcatgatttatttaaaaaatcgtttcaaggtattaaagttgatggtggaatgacagataatcagtggtttttacagaatctttcagatatttgtgaaacaaagataataaaatcaagtgaacaggaagctacagcgcttggcgcggcaacattatctgctttaggttcaaatgaaattaatgaattaagtgaattcaatattaattctaatgaaaatgttgaattccttcccataataaaaaaacaattaagatcgaaaattatcaaaaactggggtatagcaataaataaaaccatcaatgactaat

SEQ ID NO: 248741 - DNA, 997 bp, Unknown
  Bacterial polypeptide expressing nucleotide sequence isolated from the Sargasso Sea
gactatagatagctttttaatttggagatttactaagggtaaagtccacgcaaccgacgctacaaatgcaagtcgaacaatgatttataatatatcatctaacaaatgggatgacgcaattttaaaacttttaaatattaaaaaacatattttaccggaggtaaaagactgcgcagatgattttggtcaaacacattcatcaataacaggtaaatctattccaattaatggtgtagttggagatcagcaagcagcaactattggtcaatgctgttttgaacctggttcccttaaaagcacatatggaacaggagcttttgttttattaaacacaggttcaaagaaaatttattcaaaaaatcgtttattgacgactatagcttacaggattaagggtaaaacaacatacgccatggaaggttcaatctttattgctggagcaggagttcaatggttaagagatagaatgaagttttttaagaaagcacctgaaacagaaaagatagtaaaatcattaagtaataataatgatatttatttagttccagctttcactggattaggagcaccttactgggatgctaatgccagaggtattttaagtggcataacaagggatacaagcccaaaagaaatagttagagctactatagaagcggtagcctatcaaacatttgatctcttcgaagcaatgaaacatgatggtcttagacctaaaatagtaaaagtagatggtggcatggttatgaataattggttttctcaatttttatcagacattgtaaatgtgaaagtcttaagacctaaagttcaagaaactacggcattgggcgcagcttttatggctggattacaaattggcgtatataaatcattaaaagatatttcaaaaaattggcacttagacaaaaagtttttgccaaaaatgaaaaataaatctagatcagtgctaattaaaggttgggaaaaagcagtcaagcgagctttaataaattaa

SEQ ID NO: 248742 - DNA, 1189 bp, Unknown
  Bacterial polypeptide expressing nucleotide sequence isolated from the Sargasso Sea
aatgcaattgtttggcaagatagaagaactcatgagtactgtgaaaagcttaagcaaaaaaaatatgaaaatatttttagaagaaaaactggtttatttattgatccatatttttcagctactaaaattaaatggatcttagaaaacgtaaaaatttcgaagaaacttcaaaaatctaataatttattatttggcactgttgatactttcttaatttggaaactaactaacggacaacatcatttaacagaggcaacaaatgcaagtagaacaatgttgtttaatataaataataacacttgggacaaagaaattttaaaaaagctcaatatctcaaagagtattttacctgatgtaaaaaattcagcggataattttggaataacaaataaaaaaatagttggatatgaaattcctatatctgcagttttgggtgatcaacaagctgcagctgtaggacaatcttgttttaaaaaaggctcaattaaaagtacttatggcacaggtgcttttgtaataatgaatactgggtcaaaaaaaattttttcaaaaaataaattactaaccacaatttgttacagattaaacggaaaaaatacttttgctctcgaaggttcgatttttatcgctggagcaggtgttcaatggttaagagataagttaaaattaattaataatgcttatgacacagaacaaattgttaaatcaaaaaaaaataatgaaggtgtctatgttgtgccagcttttagtggactgggagctccatactggagacctgacgcaagaggagttataactggattaactagaaatagtgattggaaaaccttagtaagagctgttatagaatctgtggcataccaaagctatgatctatttaatgccatgagaaaagatggattaaaaccaaatatattaaaaattgacggaggcatggtggaaaacgactggttttcacagtttttggcaaatattattgatattaaaacagaaagacccaaagttttagaaactacagcacttggtgttgctttatttgctggataccaaataggaatatttaaatctttacatcaaataaggagaaaatggaaaaaagatagaacctttaaacctaaactaagttcgacaatgagaaaaaaactattgaatgggtggaagctgtcagtcgagaaaactttattgtaaa

SEQ ID NO: 248743 - DNA, 676 bp, Unknown
  Bacterial polypeptide expressing nucleotide sequence isolated from the Sargasso Sea
tttgcttaatactggaagtaaaattatttactccaaaaatagattactaacgacaattggatatagaattaatggaaagacaacctatgcacttgaaggttcaatattcatagcaggggcaggcgttcaatggttaagagataaaataaaatttttaaaaaaggcagcagactccgaaaaaataataaaaaaattaaaagataatcatggcgtttatctggttccagcctttacaggccttggaacaccatattggaatgcaaaatctagaggtgttttaagtggtttaacaagagacaccggaataagcgaaattgtaagagcaacagtagagtctgttgggtatcaaacttatgatctatttgaagcaatgaaaaatgatggccttcgtccaaaaatagttagggtagatggaggtatggtaaaaaataattggttttcacaatttttatcagacataattaatgtaaaagttttaagaccaaaagttgacgaaacaactgcattaggtgcagcctttatggcaggtttaaaaattggagtttacaaatctctaaacgacatttcaaaaaattggtctttagataaaaaattttctccaaaaatgaaaaacaaagatagaagaaaattaatttttggatggcagaaagcaattaaaagaactttgataacctaa

SEQ ID NO: 248744 - DNA, 589 bp, Unknown
  Bacterial polypeptide expressing nucleotide sequence isolated from the Sargasso Sea
atgaaatatatactatcaatagatcaaggaacaacgagttcacgagcaatagtttttgatgaaaaccaaaatataatttcagaaagtcaaaaagaatacaagcttcaatatccaaatgatggttgggttgaggcaaaacctgatgaaatactagaaagtgtaaaagaaacaacaaaaaaagcactagagagttctaaggttgatattgctgcatgcggaattacaaatcaaagagaaacagtagttgtttggaatagggcatcaggagatcccatatatcctgcaatcatatggcaggacagaagaacttcagatttatgcaatgaactaaaaaagaagaaaaatttagaaagtgaaattagaaaaaaaacaggacttctattagatccatatttttcagcttcaaaaattaagtggattcttgataatgtggataatgcgaggaaaatggcagaaaatggtgagctttgttttggaacaatagaaacttatctaatttggaatctcacaaaagaaaaaaatcataaaacagacgcaacaaatgcttccagaacaatgttaatgaatcttgagactttagattgggatg

SEQ ID NO: 248745 - DNA, 766 bp, Unknown
  Bacterial polypeptide expressing nucleotide sequence isolated from the Sargasso Sea
attgaaaaaatttattatttctatcgatcaaggaacaacatcatcaagagtaattttatttgatacaaaaggtaatattgtttttgtttcacaatttgaatttaaacaatattttccaaaaaatggttgggtagaacataatccaaatgagatctggtccacaacactcaaagctttaaaacaagtaatagataaagcaaaaaaattaaaaggtaacatactcacaatcggaattacaaatcaaagggaaacgacaattctatggaacaaaagaacagggaaacctatttataatgcaattgtatggcaagatagaagaacccaagattactgtaaattacttaagaaaaaaaattatgaaaactcatttagaaataaaactgggttatttatagatccatatttttcagcaactaaaattaaatggattttagacaatgttaaaatttcaaaaaaacttttaagttcaaatgatttattgtttggaactgtagatacatttttaatttggaaattaacaaaaggtaagcagcatttaacggaagcatctaatgcgagccgaacaatgctgtataatatcaataataataattgggataaagaaattttaaaaaaactaaatattccacaaaaaattttaccagaagtgaagaattcagcagataattttggaaaaacagataaaaaaattacaggagttgagattttcatttctgcagttcttggtgatcagcaagccgcagcatttggacaaacttgtttttga

SEQ ID NO: 248746 - DNA, 490 bp, Unknown
  Bacterial polypeptide expressing nucleotide sequence isolated from the Sargasso Sea
gcaaaatcaaaagaaaacagtgatggcgtctatatcgtaccagcttttaccggtttaggggcaccgtactggagtccaagttctcgtggattaattactggtttaacaagaaatagtgactggaaagatctggtgcgtgcaacgatagagtctgttgcttatcaaagttatgatttatttgagtctatgagaaaagatggattaaaacccaggattgttaaagtagatggtggaatggttactaacaattggttttcccaatttttatctaatataattgatacaaaagttataagaccaaaggttaaagaaactacagctttaggagtagcttttatggcaggtttaaaaataggagtttataagtctctttcagatatttcaaattattggaaaatagataaaaaatttactccaaaaataagcaaatcaaaccgtactaagctgttgaaaggttggcaacaagcaattagaaaaaccttagtttaat

SEQ ID NO: 248747 - DNA, 1459 bp, Unknown
  Bacterial polypeptide expressing nucleotide sequence isolated from the Sargasso Sea
atgaaagaaaaaattatttctattgaccaaggaaccacaagcacaagatcagttttgtatgataaggagggaaattttatttgttctgcccaacaagaattcaatcaattctttcctaaagatgggtgggtagaacacaatcctgaagacatttggcaatctgttttatctactttgcagaaattagtaaaggaaagcggaataacgagttccgaaatagcttccataggcataaccaaccaaagggaaactacactaatttggaataaaaaaacaggtaatccaattcataatgctattgtttggcaagatagaagaacatcagaattctgccatgaattaggctcgtacgagaatattattcaaaaaagtacagggctcactatcgacccttatttctcggcaacaaaaattcattggctcttaaataatgtcgaaggtgcaaaggaactcgcattaaatggagacttgttatttggaacagtagacacctttttaatttggaaattgacggaaggtaaatgtcataagacagatatcactaatgcatcaagaactatgttgttcaatatagcagaacaacaatgggatgatgaattattagatatctttgagattcctaaacaaatacttccggaagtttgtgacaacgtatcagattacgggatgactgaattactaggaggtgaggttagcataggcggagtagctggagatcaacaagctgcattaatcggtcaatgttgtttcgatcccggggatgtaaaaagcacttacggtactggttgtttcatgatggtaaattcaggagataagattttatattctaagaacaaattgctctcaactgtagggtatcgaattgatggcaaaacaacatatgctttggaaggcagcatatttgttgcaggttcagcaattcagtggttgagagatggattgaatttttttgaagattccatcgaaactgaggcgatgtcgaaaaaagcctctttaaattctaaagtattagtaattccggccctaactggtttaggtgctccttattgggatgctgaagcaagaggagccatattcgggataactagagataccagtaaagaagatattacgaaagctacacttgaatcaatatctttccagtcaaaagatttggttgaggctatgaaaaaagataatgcaacttttaaaaaattaatgattgacggaggaatggtaaataataattggttttgtcaacaacttgcaaatactctacaagtagaagtatctcgtccggtaattattgaaacaacctctttgggagcagcctttctagcaggattaaaagcagatctatttgaagatttgagttctttaaaagaaacaaaggttatagataaggtcttttcacccgatgcagatgaggacagatatcaagagtggaaggatgcagttaaaaggatcttagttaagtaat

SEQ ID NO: 248748 - DNA, 667 bp, Unknown
  Bacterial polypeptide expressing nucleotide sequence isolated from the Sargasso Sea
agaaaaatttaaattatcaaagaatagattacttacaacagttgcatttaaaataaatggtaaaaaaatgttttgctatgagggaagtatattcgttgcaggttctgccatacaatggcttcgggataatttaaaatttataaaagattctagtgaaactgataaactgtataaaaaagctaatatagaagaaaatttattttttgtgccagccttaacagggcttggcgcaccatattggaaccctaatgcgagaggaacattttttggtatcactagaaatacatctaaagaagatattataaaagcaactttggatagcctatcctttcaaacctatgaattaattgaatgtatggaaaaagattctaaaacaaagattagtgagatacgagttgatggaggtatggttaaaaataatagctttcttcaaagtttagcaaatatttctcaaattaaaattattagaccaagtaatgttgagactacttcacttggtgcagcatatcttgcggcaattcaatctggatatttaaaaaatacaagccaaataagtaatctttggaaaaaagataaaacagtaaaagcaaatattagtaaatccatttcaacatctagtattattaagtggaaatcaattattaatgtagttaataatttttattaa

SEQ ID NO: 248749 - DNA, 1177 bp, Unknown
  Bacterial polypeptide expressing nucleotide sequence isolated from the Sargasso Sea
tggcaagatagaagaacccaagaattttgcgaacaacttaagcaaaaaaaatatgaagatatttttagaagaaaaactggtttatttattgatccatatttttcagctactaaaattaaatggatcctagaaaatgtaaaaatttcgaagaaacttcaaaaatctaataatttattatttggtactgttgacactttcttaatttggaaattaactaacggacaacatcatttaacagaggcaacaaatgcaagtagaacaatgttgtttaatataaataataacacttgggacaaagaaattttaaaaaagctcaatatctcaaaaaatattttacccgatgtaaaaaattcagcggataattttggatcaacaaacaaaaaaatagttggatatgaaatacctatatctgcagttttgggtgatcaacaagctgcagccgtaggacaatcttgttttaaaaaaggctcaattaaaagtacttatggcacaggtgcttttgtaataatgaatactgggtcaaaaaaaattttttcaaaaaataaattattaactacaatttgttacagattaaatggaaaaaatacttttgctgtcgaaggttcaatctttattgcaggagcaggtgttcaatggctacgagataagttaaaattaattaataatgcctatgacactgaacaaattgctaaatcaaaaaaaaataatgaaggtgtctatgttgtaccagctttaagtgggctgggagctccatactggagacctgacgcaagaggagttataactggattaactagagatagtgattggaaaaccttggtaagagcagttatagaatctgtggcataccaaagctatgatctatttagtgccatgagaaatgatggattaaaacctaatatagtaaaaattgatggaggcatggtggaaaataactggttttcacagtttttggcaaatattattgatattaaaacagaaagacccaaagttttggaaaccacagcacttggagtggctttatttgctggataccaaataggaatatttaaatcattagatcaaataaagagaaaatggaaaaaagataaaacctttaaacctaaactaagttcgacaatgagaaaaaaactattgaatggatggaagctgtcagtcgagaaaactttattgtaaa

SEQ ID NO: 248750 - DNA, 373 bp, Unknown
  Bacterial polypeptide expressing nucleotide sequence isolated from the Sargasso Sea
atgaaaaaatttatagtttctatagatcaaggaactactagtacaaaggttgtactatataataaaaattttcatgttattgatactttacaaaaagaatttaaacaattctttcctaaaaatggctgggtagaacatgaccctatagaaatatttaaagatgttaaatttttaataaaaaaattaataaagaaaaatcatattaaatgctcagaaattctttcaataggcatagctaatcaacgagaaacaacagttctatgggataaactatcaggaaaaccagtatataaagcaattgtatggcaagatagaagaactatatccatttgcgaaaaattgataaataagaaactagcttctaaaattcaaa

SEQ ID NO: 248751 - DNA, 1507 bp, Unknown
  Bacterial polypeptide expressing nucleotide sequence isolated from the Sargasso Sea
ttggaagagtttattttagcgctagatcagggcacttcgagcagtcgagccttgctttacgacaactccggaaggtctatttcatttgcccagcaggcgatagaaatgtcacatccaaaagatggctgggtagagcaagatccaaacgaaatttggaactcagttttgaccactgggcgagaagctatcagcagcagcggtattgatcccaagttcatcaagggtattggtataacaaatcagagagaaactacactggtttggaataaaaaaactggtgaatgtgtttatgacgcaattgtttggcaggatcgaaggaccataacgacttgtatagaaatggattcagctaccttggatggaaaagcattgtctgagcagatagctgacaaaaccggtctgcttattgacccctacttctcgagtaccaagcttcattggatactgtcggaaatagtggccagtgacagcagtttacacactgatgatttgttatttggcactgttgatacttatctgatctggaaactgactggtggtcattctcatacaaccgacgtaactaatgcgagccgcactcaattattgaatatttcctcacttaaatgggatgaagaccttttaagatatttcgatataccgcggtttcttctgccaaaggttttggatagctctgcccaatatggttatgcagaagaaaagtggtttggtgctccaatacccataacaggcgtggcgggtgatcagcaagcagcgttagtcggccaatgttgttttgattctggaatgtctaaagttacgttagggacgggttgttttataatgaccaacactgggtccgaaaaatcgctgcctaaaaatggtctgttaaccaccatagcctatagaataaacgggcaaacatcctatgcttcagaaggtagtatttttgttgctgggcaagctgttaagtggttaagagaccagcttggtattattgagagtgtcaaagacacagagaaggcttttgcagcgacgaaaggggatgcaggcggtgtgagtgtcgtgccggcttttactggtttgggagcgccgcactgggttccagaggctcgcggattaatttctggtttaactcttgataccagcgtggagcaaatcgtggttgcgacccttcaaagtatcgccctccagatcgccgatctggtaagccttatgctaaaaggtggcccggtagataagctgcgagtcgacggggggatggccgtgaatgatccattttgccagtttttggcggacattttaggtcaaaacgtagacagaccaatcgatacggaaacaactgcaaggggagccgccttattggctgggctcggctcaggtgtttggaaggacttaaatgaaataagggccacatggcaggcggaaagaatatttactcctgacatggagccgagtttaagagattcgctagtagaagaatttgctctctcagtagaaagagctaaattacgcctaaaaagctgac

SEQ ID NO: 248752 - DNA, 883 bp, Unknown
  Bacterial polypeptide expressing nucleotide sequence isolated from the Sargasso Sea
aaaaatttttaatatcccttataaaattcttcccgaagtaaaagatagtgcagatgattttgggtacacaactctttttggagataagatcaaaataggaggtatagctggtgaccaacaagcagcaacaattggacaggcatgttttaaacctggatctattaagtctacatatgggactggttgttttatgatcatgaatattggacaaaaacttaaaatatcaaaaaataatttgcttacgaccattgcatataaaattaataataagaccacttatgccttagaaggttctatcttcattgctggggctgctgttcagtggttaagagactcacttaaagttatcaaaacagcacaagagacagagattttttattctaagagtgatcaaagtcaaaaaatttactttgttcccgcttttgttggtttaggggctccttattgggatggggaagccagaggtgcaatttttggaatgacaagaaatactggaatagcagagtttgtcaaagccgctatagatagtgttgcataccaaactaaagacttggtcattgccatgcagaaagatagtggtgtacccataaaacaacttaaagtcgatggtggaatggtagcaaatgaagatttcctgcaatttttgtcaaatattttaattttaaattgtgatagaccaaaagtaacagaaacaactgcattgggagcagcctatttagctggactttcttcaggatttattaaaaatactgaggaaatctctaaaagatggcaaagtgataaaatatttaaaccaaaacttcacaagaaagaagtaaaatacctttacgatgggtggttgaaagcagtaaagaaaacaacaacaaaaaagaatagcaaataa

SEQ ID NO: 248753 - DNA, 1147 bp, Unknown
  Bacterial polypeptide expressing nucleotide sequence isolated from the Sargasso Sea
aatgaagatagttatcgcccccgattcctttaaagaaagcttaagcgcactcgatgtggctaatgcgatcgaacaaggcttaacacaagtgatcccagactgtaagattgtcaaaatccccgtcgccgatggcggcgaaggcactgtgcaatctatggtcgatgccactggcggcagcattgttaatttagaggtcatggggccactcggccataaagtcaaagcccattacggcattttaggccagcaagccaaaggcacgattgcggtgattgaaatggcctccgcctcgggtttacaccatgtaccaagggatctgcgtaatccgctgctcaccaccagttatggtacgggcgagctgatttgtgatgcactcaaccgcgggataaagcacattattttaggcttaggcggcagtgcaactaatgatggcggcgcaggtatggcccaagcgctggatattttactgctggataaacaaggtaaaaccttaagtgcaggcggcgcggcgctgtctcagcttgccagtatcgatataagccacgcccatccgctactgaaagaatgcatctttgaagtggcctgcgatgtcgataatccgctgtgcggcgagcgtggcgcttcggccatatttggtccgcaaaaaggcgcaacgccagagatggtcagcattttagacgccgcactgggtcactatgccgatgtgattgccaaaagtggtgtaaccgatcaccgcaaccaagctggcgcgggcgcagcgggcggtatggggctgggcgtaatggcgtttttaggcgctgagcttaaacccggtgtcgagattgtgatgcaaacagtaggactggcagacaaaattcgcggcgcggatcttgttatcacaggcgaaggccgaatcgatggccaaaccatctttggcaaaaccccgatgggcgtcttaaagcaagcgcagctgcaaaatattccgactatcgggattgcgggttgccttggcgacaatgccaatgcagtgcttgagcaagggatggcggcgattttccccatcattccacacttaagtccactggacgatgtgctggcgaatgccaaagcgaatctgaccaataccgcccgtaatattggcgcggtcttgatgctgggccagcgctaa

SEQ ID NO: 248754 - DNA, 1147 bp, Unknown
  Bacterial polypeptide expressing nucleotide sequence isolated from the Sargasso Sea
atgaagatagttattgcccccgattcctttaaagagagcttaagcgcactcgatgtggctaatgcaatcgaacaaggcttaacacaagtgatcccagactgtgagattgtcaaaatccccgtagccgatggcggcgaaggaacggtacaatctatggtcgatgccactggcggcagccttgtcaatttagaggtcatggggccactcggccataaagtcaaagcccattacggcattttaggccagcaagccaaaggcacgattgcggtgattgaaatggcctccgcctcgggtttacaccatgtaccaagggatcagcgtaacccgctgatcaccaccagttatggtacgggcgagctggtttgtgatgcgctcaatcgcgggataaaacacattattttaggcttgggcggcagcgcaaccaatgatggcggcgcaggtatggcccaagcgctggatattttactgctggataaacaaggtaaaaccttaagtgcgggcggcgcagcgctatctcagcttgccagtatcgatatgagcaacgcccatccgctactgaaagaatgtacctttgaagtggcctgcgatgtcgataatccgctgtgcggcgagcgtggcgcttcggccatctttggcccgcaaaaaggcgcaacacccgagatggtgagcattttagacgccgcactgagtcactatgccgatgtgatcgcccaaagtggcgtgaccgatcaccgtaaccaagctggcgcgggcgcggcgggcggtatggggcttggcgtgatggcctttttaggcgccgagcttaaacccggtgtcgagattgtgatgcaaacggtaggactggctgacaaaattcgcggcgcggatcttgtcatcacgggtgaaggccgaatcgatggccagaccatatttggcaagaccccgatgggtgtattaaagcaagcgcagctgcaaaatattccgactatcgggattgcgggttgccttggcgacaatgctaatgcggtgctcgagcaaggtatggcggcgattttccccatcattccacatttaagtccgctggacgatgtgctagctaacgccaaaaccaatctaatcaataccgcccgtaatattggcgccgtcttgatgctgggaaagcgttaac

SEQ ID NO: 248755 - DNA, 343 bp, Unknown
  Bacterial polypeptide expressing nucleotide sequence isolated from the Sargasso Sea
ttttgcaacacctatcagtatagatgataattatgaacaagatatttctcatttttttgatttttcaatctacttagatgcagatgaaccagtaattagaaaatggtatattgagaggtttctggacttgcgaaaagaagctttttcagatgaaagttctttctttaataggtttacctctataaatgatgatgaggctgttgatctggccacaacaatctgggaaacaattaacctaagaaatttgaatgaaaatattttgccgacaaggaacagggcatctatgattgtaaagaaaaatgaaaaccatatgatagaagaattatggttaagaaagatctaa

SEQ ID NO: 248756 - DNA, 344 bp, Unknown
  Bacterial polypeptide expressing nucleotide sequence isolated from the Sargasso Sea
tttgcaaccgcccatacataatgaaaattattttgaacctgttatttctgatttctttgatttttcaatctatttagatgcggacgagccggtaattagaaaatggtatattgagaggtttttaaatttgagacaaaaagccttttcagatgaaaattctttctttaatagatttgctgatatagatgatcaagaggctattaatttggctacacaaatttgggaaacaattaatttaaaaaatttagatgaatatattttgccgacaagaaacagggcatctatgattgtaaagaaggatgaagatcataagatagacgaattatggttaagaaagatataat

SEQ ID NO: 248757 - DNA, 631 bp, Unknown
  Bacterial polypeptide expressing nucleotide sequence isolated from the Sargasso Sea
ttgtattctaatttattactagaagtatggaaccataactatcgtggaaccataaaagatattgatccagaagaaattaaatcattcatgagtgccaatctagaaattactctttctgagataaaaaaatttaacggtatagttgcggcaattgatgattgtttatatttaagtgtgccacgcatttctggtaaattccctaacccccttattatcggtattgctggttctgtatctgttggtaagtcgactttcgctaaaatatttcaacttttaatttcaagaaattttgaatctgacaatgttgaattagttactaccgatagttttctttacccgaattcaattcttgagaaaaaagggttaatgcaaagaaaaggttttccagaaagttataatacaaaactgctatatgattttttatccaatattcaatctggcatcaaaaatgtagagatcccaaaatattctcatttagtttacgacattattgaagatgaaaatataattctaaattctccatctattttaattgtcgaaggtataaatgttttgcaaactcctatcgctatagatgataattataaacaagagatttctcatttttttgatttttcaatctacttagatg

SEQ ID NO: 248758 - DNA, 331 bp, Unknown
  Bacterial polypeptide expressing nucleotide sequence isolated from the Sargasso Sea
catacataaagaaaattattttgaacctgttatttctgatttttttgatttttcaatctatttagatgcggacgagccggtatttagaaaatggtatattgagaggtttttaaatttgagacaaaaagccttttcagatgaaaattctttctttaatagatttgctgatatagatgatcaagaggctattaatttggctacacaaatttgggaaacaattaatttaaaaaatttagatgaatatattttgccgacaagaaacagggcatctatgattgtaaagaagaatgaagatcataagatagacgaattatggttaagaaagatataa

SEQ ID NO: 248759 - DNA, 889 bp, Unknown
  Bacterial polypeptide expressing nucleotide sequence isolated from the Sargasso Sea
tttgtcaccagaaaaatggaaaaatcttaaaactataaaagatattgatattgatattgatccagaagaaattaaatcattaatgagcggcaatctagaaattactctttctgagataaaaaaatttaaagatattgttgaactaattatgtcttatgtttctaaaagtgtgtcccgcactaattgtaaattccctacccccttaattattggcattgctggttctgtatctgttggtaaatcaactttctccaaaatatttcaacttttactttcaagaatttataaatctgagaatgttgaactagttacctccgatagttttttatacccgaattcaattcttgagaaaaaaggtttgatgcaaagaaaaggttttccagaaagctataatacaaaactactttatgattttttatccaatattcaatctggtatcaaaagtgtagagatcccaaaatattctcatttagtttacgacattattgaagatgaaaatataattgtaagttctccatctattttaattgtcgaaggtataaatgttttgcaaacacctatcggtatagatgataattatgaacaagatatttctcatttttttgatttttcaatctacttagatgcagatgaaccaataattagaaaatggtatattgagaggtttctagacttgagaaaagaagctttttcagatgaaagctctttctttaataggtttacctctataaacgatgatgaggctgttgatctggccacaacaatctgggaaacaattaacctaagaaatttgaatgaaaatattttgccgacaaggaacagggcatctatgattgtaaagaaaaatgaaaaccatatgatggaagaattatggttaagaaaggtctaa

SEQ ID NO: 248760 - DNA, 433 bp, Unknown
  Bacterial polypeptide expressing nucleotide sequence isolated from the Sargasso Sea
taaatattctcatttagtttatgacatccttgaagacgaaaatataaccataaattctccatctattttaattcttgagggcataaatgttttgcaaccgcccatacctaaagaaaattattttgaacctgttatttctgatttctttgatttttcaatctatttagatgcggacgagccggtaattagaaaatggtatattgagaggtttttaaatttgagacaaaaagccatttcagataaaaattctttctttaatagatttgctgatatagatgatcaagaggctatcaatttggccacacaaatttgggaaacaattaatctaaaaaatttagatgaatatattttgccgacaagaaacagggcatctatgattgtaaagaagaatgaagatcataagatagacgaattatggttaagaaagatataa

SEQ ID NO: 248761 - DNA, 640 bp, Unknown
  Bacterial polypeptide expressing nucleotide sequence isolated from the Sargasso Sea
acgcctgttgaagcagcttctcgcccgctggccgtccagccccaaggtcgatctcgtcaccaccgacggctttctctaccccaatgcggttctggagatggaagggctgatgcggcgcaagggctttcccgaaagcttcgacaccgccgcgatcctgcgcttcctttcggcgatcaaggccggcatgccgaatgtaaaggcgccgctttattcgcatctgagctatgacgtgctgcccgacggcttcgtcaccgtcgatcgtcccgatatcctgatcttcgagggcatcaacgtgctgcaggcccgcgatctgccggccggcggccggatggtgccgatggtctcggatttcttcgacttctcgatctatatcgacgccagcaccgacctgatccaccactggtatgtcgagcgcttcctgaaactgcgccagaccgccttccgcgacccggcctcctatttccatcgctatgcacggctgaccgaggaggacgcgctgtcgacggcggaggacctctggaacaatatcaacatgaagaacctgatcgaaaacatcctgccgacccgcccgcgcgccgacctgatcctgcgcaagggccgcgatcacctggtggaaacggtcgcgctgagaaaactctga

SEQ ID NO: 248762 - DNA, 730 bp, Unknown
  Bacterial polypeptide expressing nucleotide sequence isolated from the Sargasso Sea
atgcctcaatcaaaaaatctaaattcaccttatataattttttcaaaagaagaatgggctgatttgggttttggcgccactttaaatctaactgaaaatgaaataatagagcttaggggcttaaatgaacctatgtcaatagatgaggtaagagatgtgtatttaccaatttctcgactcttaaatttatatatatctggtacggaaaaattatttgaagcaactaatttatttttaggaaaaaaaaattttaaagtaccatttatcattggtattggaggctctgttgctgttggaaaaagcacaacgtcaagaattcttcaagcattattatctaaatggtcagataatataactgtatcacttgtcaatacagatggttttttgatgagtaataacaatcttgaaaagagatctttaatggagcgtaagggatttcctgagagctacaacctaacactattacttgattttttaaattcggttaaatccggaaaatcaaatgttaaagcacctgtttattcgcatttgctctatgataatgttcccggtgaatttattaacgtaaataaacccgatatacttattatcgagggcttaaatgtgctccaaccagctccgctaccaagagatggcaacgccattccatatgtatccgatttttttgatttttcaatatttgttgatgcagatgaaaagaatataaaaaattggtacattcagagatttt

SEQ ID NO: 248763 - DNA, 745 bp, Unknown
  Bacterial polypeptide expressing nucleotide sequence isolated from the Sargasso Sea
cctgcgacgtcaggcagtgctggagcaatttttaggcacgaatggcgagcgtattccttatattattagtattgctggcagcgttgccgtcggtaaaagtacgacagcgcgtgttttgcaggccttgctcagtcgctggccagagcatcgtaaggttgaattgattactaccgatggctttctccaccctaaccaggtattgaaagatcgtggactaatgaagaagaaaggcttcccccagtcctatgatatgcatcgcttggttaaattcgtttccgatctgaaatcaggcgtacctaacgtcacggcgccggtctattcccatctcatctatgatgtgatccctgatggcgacaaaaccgttgcccagcccgacatattaatactcgaagggttaaatgtattacaaagcgggatggactatcctcacgatccacatcatgtatttgtttctgactttgtcgacttttctatttatgttgatgcgccagaagaattactccagacgtggtatatcaaccgctttctgaaattccgtgaaggggcgtttaccaacccggactcttatttccataactatgcaaaattatcagaagatgaggctatcaatactgccacatcgctatggaaagaaattaactggctgaatttaaagcaaaacattttaccaacgcgtgaaagagccagcttaattatgactaaaagcgccaatcatgccgttgagcaagtcaggctacgtaaataa

SEQ ID NO: 248764 - DNA, 868 bp, Unknown
  Bacterial polypeptide expressing nucleotide sequence isolated from the Sargasso Sea
catgcatcaatcaaaaaatcaaaattcaccttacataattttttcaaaaaaagaatgggctgatttgggttttggcgctactttaaatctaactgaaaatgaaatagtagagctaaggggcttaaatgaacctatgtcaatagatgaggtaagagatgtatatttaccaatctctcgtctcttaaatttatatatatctggcacggaaaaattatttgaagcaactaatttatttttaggaaaaaaaaattttaaagtaccattcatcattggtatcggaggttctgttgcagttggaaaaagcacaacatcaagaattcttcaagctttgttatctaaatggtcagataatataacggtatcacttgtcaatacagatggttttttgatgagtaataacaatcttgaaaagagatctttgatggagcgtaagggatttcctgagagctacaacctaacactattacttgattttttaaattccgttaaatccggaaaatcaaatgttaaagcgcctgtttattcgcatttgctctatgataatgttcccggtgaatttattcacgtaaataaacccgatatactaattatcgagggcttaaatgtgcttcaaccggccccactcccaagagatggcaacgcaattccgtacgtatctgatttttttgatttttcaatatttgttgatgcagatgaaaagaatataaaaaattggtacattcagagatttttaaaactgaaggcgactgcctttaaagaggaaaaatcgtattttaataaatattcatatttatcagacgaagacgcagtaaatgttgcaacgtcgctttgggaaaaaataaatcacgttaatttgatagaaaatatt

SEQ ID NO: 248765 - DNA, 952 bp, Unknown
  Bacterial polypeptide expressing nucleotide sequence isolated from the Sargasso Sea
aatgacgtcaaaaaatccaattcaaaaagcactctatcttgcctttgagcgcgcacaatggtctgttttaagggacgcagtgccaatgacgctgagtgaacaagacttggagaatcttcggggtatcaatgagaaggtttcgctctcagaagtcactgatatttatttgcctctgagcaggttgcttaacttaattgtaaaagccaaacaacaacgtggtttagtccttgatgagtttctcgggcaaaagccctcaagtagtccttatatcatcagcattgccggtagtgttgccgtgggtaaaagtaccactgcgcgtattttacaggcgttactaagccagtggcccgagcatcctaaagtcgatttagttacgaccgatggttttctatatcctctggcagatttgaagcgtaaagggctattgcaacgcaaaggctttcctgaaagttacgatatgaagatgttggtcgaatttatttcggcggtaaaatccgggcaagcccatgtaaatgcgcctatctattcccacgtgacttacgatcgtattcgcggccagcatcaaaccgtttcgcagcccgatattttgatcctcgaaggactgaatgttttacaaacaggtttagattcgccagtcgatatacgtaggccctttgtctccgactttgtcgatttttcgatttatgtcgatgccgaagagcatttattgaagcaatggtatcaagagcgctttttgcaatttcgcaaaggggcatttagtgatgaaaagtcctatttccatcactatgctagcctgacggatgatgaagcctatactatagcggcgaaaatatgggacacaatcaacggtcccaatttgcagctcaatattcagcccacaagggaacgagcgcatctgatcctacaaaaaggacaggatcatttgatgtcacacgttttactgcgtaaataa

SEQ ID NO: 248766 - DNA, 768 bp, Unknown
  Bacterial polypeptide expressing nucleotide sequence isolated from the Sargasso Sea
catgacgacagagcataacccctatctgcaattcacccgcgaacaatgggcgttattgcgcgactcggtccctttgaccctgaccgagcacgatctgcagaccctgcgcgggatcaatgaaaaggtgtcattgcaggaggtggaagagatctacctgcccctctcccgcctgctcaacctctacgtcaaggccaagcagcgccgcagccgggtactggaacagtttctcggtcagtcccgcggcaagggtacctacatcatcagcatcgccggcagcgtggcggggggcaagagcaccacggcgcgcatcatgcaggcattgctggagcgctggccggaacacccgcgggtggagctggtcaccaccgacggctttctctatcccaacaaggtgctggaagagcgcggcttgatgcgccgcaagggcttcccggaatcctacgacatccgtcatctggtggaatttgtcgccaacatccgcgccggccacgaaaaggtcgaagcgcctgtctactcccaccttatctacgacatcatccctgacgagaagaaggtggtggagcagccggacatcctgatcctcgaagggctcaatgtactgcagagcggcatggattacccgcaggagcctcaccgggtcttcgtctccgatttcgtcgacttctccatctatgtggatgccgaggccgaactgctacgcacctggtatatcgagcgcttcctcaagtttcgcagcggtgccttctcggatccggactcctattccac

SEQ ID NO: 248767 - DNA, 952 bp, Unknown
  Bacterial polypeptide expressing nucleotide sequence isolated from the Sargasso Sea
atgacgtcaaaaaatccaattcaaaaagcactctatcttgcctttgagcgcgcgcaatggtctgttttacgggacgcagtgccgatgacactgagtgaacaagacttggaaaatttgcgtggtattaatgagaaggtctccctctcagaagtgaccgacatttacttgcctctcagtaggttactcaatctcatcgtaaaatcgaagcaacaacgtggcttagttttggatgagtttctcggccaaaaaccctcaagtagcccttatatcattagtatcgccggcagcgttgccgtaggcaaaagtaccacagcgcgtattttgcaagccttgctgcgccactggcctgagcatcctaaggtcgatttagtcactaccgatggttttctgtatcctttggctgatttaaaacgcaagggcctgttgcagcgtaaaggctttcccgaaagctacgacatgaagatgttggtcgaatttatttcagcggtaaaatcggggcaagcccatgtgaatgcgcctatctattcccacgtgacttacgatcgtattcgcggccaacatcaaacggtttctcagcccgatattttgatcttagaagggctcaatgtactgcaaaccggtttagattcaccggttgatatacgtcgccccttcgtctccgactttgtcgacttctccatttacgtcgatgctgaagagcacttattaaagcagtggtatcaggagcgctttttgcagttccgcaaaggtgccttcagtgacgaaaaatcgtatttccatcactacgccagcctaacggatgatgaggcgaatgccattgcagcgaagatttgggacacgatcaacggccccaatctacaactcaatattcaaccaacaagagagcgagcacatctgatcctgcaaaaaggtcaggatcacttgatgtcccacgtattgttacgcaaatagc

SEQ ID NO: 248768 - DNA, 955 bp, Unknown
  Bacterial polypeptide expressing nucleotide sequence isolated from the Sargasso Sea
atggatgtaaaaaaaacagctcatcctttaggtggtttatataataaattctcaccaaaaaaacggaataaatctaatagtgatgaagatattgatattaatcaagaaaaagtaaactcattgcttggcttggatacagagctagatgctaaggaaataaaagagctttatttaccaatgaccgaactaattatgcttagtattcataatagatattccttaaataataagataaatgaatttcttaatacagaaacaaatacaccttatattatcggagttgcaggctcagtcgctgttggtaaatcaactttttcaaaaatattacaacttttattctctgaaatatataaatccaaaaacattgaattagttacgaccgatggttttctttatccgaattcagttcttgaggagaaagggctaatggaaagaaaaggatttccagaaagctataatacaaaactgttatatgattttttatttaatattaaatctggcattaaaagcgttgaggtccctaaatattctcatttagtttatgacatccttgaggacgaaaatataaccataaattctccatctattttaattcttgagggcataaatgttttgcaaccgcccatacataaagaaaattattttgaacctgttatttctgatttctttgatttttcaatctatttagatgcggacgagccggtaattagaaaatggtatattgagaggtttttaaatttgagacaaaaagccttttcagatgaaaattctttctttaatagatttgctgatatagatgatcaagaggctattaatttggctacacaaatttgggaaacaattaatttaaaaaatttagatgaatatattttgccgacaagaaacagggcatctatgattgtaaagaaggatgaagatcataagatagacgaattatggttaagaaagatataat

SEQ ID NO: 248769 - DNA, 916 bp, Unknown
  Bacterial polypeptide expressing nucleotide sequence isolated from the Sargasso Sea
ttgtatactaaatcaccaccaaaagaaacgggaagatttaaaaactatgagggtatcgattttcgtctagaaggtattaactcagaaatttgcaccgacttagaaattagtaattttgaaataagaaaattttacatagatattgcggaactaattctacctaattatgcaaaaatttggcatttgaagaataaacagagtttttttactccaaaaactactaccccttttattataggtattgctggatctgtagctgttggtaaatctactttttccaaaatacttcaacgattactttcaataatttatagaattcaaaatgttgaattaattaccactgatggttttttatacccaaactcagaacttgagaaaaaaggtctgatggagagaaaaggttttccagaaagctataatgcagaacaactttatgattttttgtccaaaattaaatcgggtgttaaaagtgttgaggtccctaaatattctcatttggtttatgacattcttgaggatgaaaatataaccgtaaattctccatctattttaattcttgaaggtataaatgttttgcaatcgcctatcggtatgaatgataatcatgaacaagatatttctcatttttttgatttttcaatctacttagatgcagatgaaccagtaattagaagatggtatattgagaggtttcttgatttgcgaaaagaagctttttcagatgaaaactctttctttaataggtttacctcgataaatgatgatgaggctgttgatctagccacaacaatttgggagacgattaacctaaaaaatttgaatgaaaatattttgccgacaaggaacagagcatctatgattgtaaagaaaaatgaaaaccatatgatagaagaattatggttaagaaagatctaat

SEQ ID NO: 248770 - DNA, 748 bp, Unknown
  Bacterial polypeptide expressing nucleotide sequence isolated from the Sargasso Sea
ttgagcgccacgacaattgttgacgtgcacgtgtccctaggactcggaggtccacgggtgtttagacgtcccctgggtggtcgtgcgacatcgaggtcgctccttccccatcgtctacgacacccatcgtccacgaaaaccagcgttgctgttgcgtcagcaacctgctctggagacgggtcacagatgaacgtctcgtcgagcaccgggcgtgctcttacaatacaatcgcacgtggtgtccgggtatgtcggtaataagtgtgcggtgttccccctccaactccacggcttcgacgtggacccgatcctctcggtgcagttctccaaccataccgggtacggctgttggaaaggcgaggtcatgaccggggagcagctccagagtctggtggagggcctggagcagaacggcctgcttgagggatatacgcatctactcacgggatacatcgggtcagcttccatgctcaggacggtcgccaggctggtgcggaagctgcgtacgtacaaccccaacctcgtgtacgtctgtgacccggtgctgggcgacaacgggcggctgtacgtcccggcagagctgaccaccatatacagggaggagatcgtgccgctcgccacgctgctgactcccaatcagtttgaagcggagctgttgacgggcatgaccatcgggagcgaagaagatgcgctggccgcttgcgcatctctccatcaagtgggaccgccgagcgtggtgctacaagcct

SEQ ID NO: 248771 - DNA, 868 bp, Unknown
  Bacterial polypeptide expressing nucleotide sequence isolated from the Sargasso Sea
atgaagcgagttctctccatccagtcccacgtggtgttcggctgcgccggcaacagcgccgccgtgtttcccatgcgtcgcatggggctggaggtgtggcccgtcaacacggtgcaattttccaaccatacccagtacagcgcaggctggcaggggatggtgatgccaaacggtcatatccgccagctgatggcggggctggccgacatcggcgtactggggcagtgcgatgcgatcctgagcggttatctcggctcggccgagcagggggaggagatcctggcggcggtggctcacctcaaggcgctcaatccgaacgcccgctatttttgcgaccccgtgatggggcatcccgacaaggggtgcatagtcgcgcccggcgtcgccgactttctgaaaaaccgggcgctggcctgcgccgacctgctggcccccaatctgctggagctggagcagctgaccggccgcgagatctgcaatctgagcgaggcactggcggcttgccagcaactgcgtgaagggggagtggagctggtgatggtcaagcatctgggccgcgccggcttgagcctggaccggttcgagatgctgctggtgtgcgaagagggggcgtttcatatctcgcgccccctctatgagtttcagcgtcagcccatcggagtgggggatctgctgagcgccaccatgctggccaacctgctggcgggctttacgccggtggcggcgttcgagcgcaccaatgccagcgtggatgcggtgctggcccagacctggctggcgggcgcctacgagctgcagctggtggccgcccagcaggcgatggtcgagcccgagatccgcacctgtgcccgccggctgccggcctgat

SEQ ID NO: 248772 - DNA, 906 bp, Unknown
  Bacterial polypeptide expressing nucleotide sequence isolated from the Sargasso Sea
gcagtgcatcctttttggagagcatgcggtagtcttcggccatcctgctgtagccgtggccattgagcagggagtaagagttagtgtgaaaggctccaatgaatggcttctcgagggtcagccattcgagccctccaggcacccgcatatttcgcatataatccagaatatcttccagtacaacggccaacctctggatattgatgtacaaagctcacttttctcaacagctgggatgggctcttccgctgctctatcaaatgccttcggcgctgcactgcactcacatctgaaccccagcacccccctcgatccgattagattggcgaaaatggctcactctgcggaagcaacagcccagaagggcagggccagtccgacagatacagcgaccagcgcccttgggggatgtgtagtggtttcaggacaacatgtaacaggtactaggcacgttttcgatactagcttagagactcctgaaggatcgcggagctgggcgattaatgtcgtcgacctacctgcagatattgatgacgcatggctagtagtgggatactctggcactggctctccaactggaaggatggtggccaaagtagcgaatctaatatctgagtccccacagaggatggaggaaatggaggcaattgcgaatattacgagagcgggattgacggcactctctgctggaaatctggagggcttgggaatagcaatggatgcttgtcacgaaagtctcaggaagttggaagtcagtaccaataagttggatcgcatggtcagtgcagcaaggccccattctctaggtgcaaaacttactggtgccggcggaggggggtgcatggtggcactcacccaggatcctgctagagtttctgaggctatcgagattgccgggggcaggcc

SEQ ID NO: 248773 - DNA, 940 bp, Unknown
  Bacterial polypeptide expressing nucleotide sequence isolated from the Sargasso Sea
atgcccagcgcattcgcaccaggcaagtgcatccttttcggagagcatgcggtagtcttcggccatcctgccgtagccgtggccattgagcagggagtaagagttagcgtgaaagactccaatgaatggcttctcgagggtcagacattcgagccctccagacacccgcatatttcgcatataatccagaatatcttccagtacaaaggccaacctctggatattgatgtacaaagctcacttttctcagcagctgggatgggctcttccgctgctctatcaaatgccttcggcgctgcaatgcactcacatctgaaccccagcacccccctcgatccgattagattggcgaaaatggctcactctgcggaagcaacagcccagaagggcagggccagtccgacagatacagcgaccagcgctcttggggggtgtgtagtggtttcaggagagcatgttacaggcactaggcacgttttcgatactagcttggagactcctgaaggatcgcggaactgggcgattaatgtcgtcgacctacctgcagatattggtgacgcctggctagtagtgggatactctggtaccggctctccaactggtaggatggtggccaaagtagcgaatctaatctctgagtccccacagaggatggaggaaatggaggcgattgcgaatattacgagagcgggattgacagcactctctgctggaaatctggagggattgggaatagcaatggatgcttgtcacgaaagccttaggaagttggaagtcagtaccaataagttggatcgtatggtcagtgcagcaaggccccattctctaggtgcaaaacttactggtgccggtggaggggggtgcatggtggcactcacccaggatcctgctagagtttctgaggctatcgagattgccgggggcaggccactacagacaa

SEQ ID NO: 248774 - DNA, 193 bp, Unknown
  Bacterial polypeptide expressing nucleotide sequence isolated from the Sargasso Sea
accaataagttggatcgcatggtcagtgcagcaagaccccattctctaggtgcaaaacttactggtgccggcggaggggggtgcatggtggcactcactcaggatcctgctagagtttctgaggctatcgagattgccgggggcaggcccctacagacaaaattaggctcaaaaggagtaagtattctgtagt

SEQ ID NO: 248775 - DNA, 748 bp, Unknown
  Bacterial polypeptide expressing nucleotide sequence isolated from the Sargasso Sea
tattattagattaaaaaaaatagcaaaagctaataagctttacttaattgaagatgctgcacatgcttattctgcaaaatttaaatctaattatttaggcacactaggtgatatcggtgtatatagttttcacgaaaccaaaaatattgttagtggccaaggtggctgcatatcaataaataatcctagtttaatcaaaagagccaattttattttagataaaggcacaaatagaattgaatttataaacaattataaaaaaaaaattatcttaagtaataataaaaaattttatagttgggtagatattggatcagagtacagagctcctgaactttcttgtgcattgttgtactcacaattaaaaaaattgaataaaatacaaagaagcagaaaaaaaatatggcaatggtttaaaaaagaaattgataaaataaattcaaatgaattttatattattaaaccattaaaaaattcaataagctcatatcatctttttgtgattgtttttaataaaaaaaatattgcaagaaaatttatgaactatatgcaaaaaaataaaatagctgctacatttcattatgtccctttacatatgtcgaaaatggcaatgaaaatcaaaaaacaaaaactaaaaacttctgaaagtatttattcaagaattgttagactcccactttttcctggaatgaatcaaaaaatgctaaataaaatagtatttaatataaaaaggtttttagatgaataa

SEQ ID NO: 248776 - DNA, 934 bp, Unknown
  Bacterial polypeptide expressing nucleotide sequence isolated from the Sargasso Sea
acgcggggcgcgcccggcgccacgccccgcgtatgccgcacccgaagtgctcagaggcgacgcgttcgacgcctctgccgacctctggagtctcggcgtgatcctctacctcctgttgacgggcacgcacccttttgatgctaggaatgatgccgacgatgcggaggttacgcgacgcgtgttggctggtgccgatgccgctggcgcgtttaaaggtgccgcgtgggcgcgcgtgccgtccgcggcgcggccgctcgtcaaacgattattagctgatagaccatccgaccgaccggccgcggcagaagttttagcacatgcgtggctccaggatcccacaaggggcgagggctttagggacaaagctgccgcgaaggcggcgtctgacgctctccgggagttccaccttggcaggaggcgcttcaaggccatgttactggctgtgatggtcggctacgcggaccaagctttggctagagagcggggcgcgggcacggcgcaacttgggagcagaagggctgcgatggacgtgtttgactcggacaataacgggtacgtgacgacggaggacataaaacgcgtcgctagactgttgggagatgaattggatgaagcggatacgcggcagatgctgcggtcggtggcgaggccgggtgacgacgtcctcaaggtgcccaaagagagattgaggcacatgctgcctcccttatatccggcccactcgttacgacgaggtgacttggtcttctcagcaggcgagacggatccggccttttacatactgttagatggtgatgtcctcatttcgcactcgtttctgctgagacctagatcgggcttcgcttctaagagcgggagggagctctcgttaggattgcatcggctaaggactggtgaaagtttcggcgagactgaattgctcgaaggtgtgaga

SEQ ID NO: 248777 - DNA, 559 bp, Unknown
  Bacterial polypeptide expressing nucleotide sequence isolated from the Sargasso Sea
gaagatttagagataagaggtgctggtgaaatacttggtgttaagcaatctggccacattgatactattggaatgtcactatatatgtctatgcttaaaactgcattaaacaatgaccaaatagaagttagtccatcatgtgaaataaaagttgctgtaacaagtcttataccagaatattatttaccctcccctgtagagagacttaaaatatacaaaaaactttcaggtgctgactctagaactttaagagaaatcaaagatgatttattagatagatgcggaaaacaccctgttgaattagaaaatttatttaaaatcactgaaattagcattaaggctaaatatttggaaattacaaaaattgttcaatcatctaaatatcttaaatttaaattcagcgagactttaaaagataaaacattatcaaaaatattgagcattaccaatgaaaatcctgaaatgtatggaatcaaaaaaaatggtgaactttggataaattttaatggtcaagatgtgttaaatttactagataatgcaattcaaaaatttacataaa

SEQ ID NO: 248778 - DNA, 505 bp, Unknown
  Bacterial polypeptide expressing nucleotide sequence isolated from the Sargasso Sea
gatgaaggtgggacgcgcgagcgacatttggagtctcgggtgcatcctgtaccaaatggtgtatgggcataccccgttcagcaagatcacggggacgattcaaaagctccacgccatcaccgatccgaggcataagatcgtgttctcgcctctaccgaacgagaatcacgcgctcatcgatctgatgtctcgatgcctcgagcgagacccgagaaatcgcatctccgtcaaggaaatcctcgcgcacaaattcttgcgccccttcgccgagaccgcatcttcatcctcttcttcggaggcgtccggattatcgatgacgcaacttcaagatttattggcgcagattcaaaaacacggcgctgaggtcgacgtcaacgccgtcaccgccgaagtctttcgacaaatttcctctggcgagcccgtcaccctctcgccgatcgttcgcaagcactccaaatcttccaccaggctctacggcgacgaaaacgtcgctccgatggaatga

SEQ ID NO: 248779 - DNA, 349 bp, Unknown
  Bacterial polypeptide expressing nucleotide sequence isolated from the Sargasso Sea
aatggtaaagaattcagatatttttaataataaaactttgttaattactggtggtactggttcttttggtaatgctgttgcaaagaaattcttagactcaagtattagagagataagaattttaagcagagatgaaaagaagcaagatgacatgcgtaaaaagtataaaaataataaattaaagttttatatcggcgatgtaagagattacagttctgtcaataatgcaatgagcggagtggattatttctttcattcagctgcactaaaacaagttccgtcatgtgaatttcttccaatggaagctgtaaaaactaatatattcggcacagataatgttcttgtggca

SEQ ID NO: 248780 - DNA, 616 bp, Unknown
  Bacterial polypeptide expressing nucleotide sequence isolated from the Sargasso Sea
atgcttcatttccctcaaaggaataacgcgactcctcaactgtatgcggatgacactgatacgccgctgccagagacactgaacccgaaaattcgctacgcgtatttttcgaccatagccaaaggcgggaaatctctgattcagtcatgccgtgatttatacctggggcgaactgtatgttacaaaacgctaaagcctgagtttcaaaaagacccaaccgaaaacctgcgtctactccgcgaagcgcgtatctccgcgatgcttcagcatccaaatacgatgcctacttatgagatcgggcgagacaatcgtgggcagtactttttcacgatgaaattggtccacgggtatacgctcagagagttgtttaactatcgacagcgttacgatttttcacagctcatgaatgtaatcgttcaggtcggtaatgcgttaggttacgcccactctgctggagtggtgcaccgtgacatcaaacctgacaatgtattgatcggaccctacggtgagatcctattgctggactgggggctcgcaaaggtctggcacagagagggtgcctccgcatccaccgagggcaacttacctgacctcgatatcggcgtagcgatgacca

SEQ ID NO: 248781 - DNA, 703 bp, Unknown
  Bacterial polypeptide expressing nucleotide sequence isolated from the Sargasso Sea
ttgaccgagcaagtagagcagaagtcgtggcagaagaatagaggctggatttcttgcccgccgcatccccacgtggtgaccctgctgttgtcggccaacgcaaatgtcttcatttccccttacattgaaggggtgtcgggtgacttgattgcaagtattctcgacgcagctcttctaaatgcaaatcagaagagagtcattatcattaagatcggtttgcatgtggcctgggcggtcgagcacatgcacgaccaaggcatatggcatttagacctcaaaccaagcaatttgctgatcacgatagatgactctgaccctgacaagccgcggttttggcagcaaattcacgtcagggtatgtgactacagccgctgctcagcgcgcgcatgctcaaacatgtcgcgaagaggcacagtggggtattggtctcctgagcaagtgcacgatcggacaaatcctgggactgatccggatgcgagtctctactggggtctcaagaaaagcgatgacccgccaccagcttcgcaggcagacatgacctccagatcagattgttggggctgggcaacgatgatgcttggattgatggggcgccttgaagaaatgcgcaagacaggctatcagaagtttttacaaaatctcttgaacaagggcttcgtagtggatctctccgcaatatttctgtacgaacagcaagcattca

SEQ ID NO: 248782 - DNA, 628 bp, Unknown
  Bacterial polypeptide expressing nucleotide sequence isolated from the Sargasso Sea
ttgaagcttgccgatcaaatgttagagcggtgcgaagccctgcatggccgacatctcatacatagggacgtgaagccggcgaacttcacgatgggcgacgcttcttcctcgccgctagtttattgtattgactttgggctgtcgaagcgttttaggaatcctcatactttgcaacacattccccatcgcgtggggaaaagtctcactggaacacctagatacgcctccatttccaatcatttgggcatcgaacagagtcgcagggacgacatggaggcggttggatatgtactagtttatttcgcgaaaggacgactcccgtggcagggcctcaaagccaagtcggcccacaagaagtacaagttgattctggacaaaaaacaagaaatctcgatagcgcaattgtgccacggctgcccggcgcagttcgcagagtacctgtcgtactgtagaagcttgaaatttgacgcgtcgccgaacgtcgcgtatctcagaagactcttccgcgacctctactcgacgagcggccacgacgtcgcgcagatcgcggcgaacgactgggactggatggcgaacgctgatgtgagagtggatgccactaccgcgcaagcgtatggcgctagaccag

SEQ ID NO: 248783 - DNA, 556 bp, Unknown
  Bacterial polypeptide expressing nucleotide sequence isolated from the Sargasso Sea
ctagttatgcaatacatagagggtaacagcctgaaccaagagatgagggcgatggtgaatgcggggctccagatgccgttcgacagaatttcgacaatattacttcagttatgcgaggccctagagtacctgggggacatggatccccctgtattccacagggacgtcaagccccacaacatcatgatgacgccttacggaggggctgtcctgatagacttcggccttgccaagggggtcgacgccggaaaggggacctctttgtcaggtggcaaccacacccctggttgggcgcctcccgagagggagaacggagtaacaggtccgaccaccgacgtctacagcctaggtcagcttctttggcacatgctaaccaaccagcggccgggagtaatctccgaggaggcccgtctcgagaagatggacgagatggggcatcccgaatggctaggtgagctggtaaattattctacagtcccccattcgcctgatgagaggatacagtccgttgccgagttcagagtgaggctagagaatcagggtgagctaccttgag

SEQ ID NO: 248784 - DNA, 382 bp, Unknown
  Bacterial polypeptide expressing nucleotide sequence isolated from the Sargasso Sea
atgcccaatccaaggtcaggccattgccaagtcacggccaagccatggccatggccaagccatggccagtccatagccaggccacggcacggctccaagccccacgccaataattcggaacaaaatatcgatatcaagggtagggttggggcgcgacagatccgtgcgcccgaggttgtaatgggactcaaatggactaccgtcgctgacctctggagcttgggttgcacccttgcagcattatatactggcactcgtcttttccaagttcatgatgacatggagcatctggccgtgattgagcatcttctcggctcggcaattcctgcctcgatgagttcttgctgctctgagcgcatccttgagaaaggcgaagtctgag

SEQ ID NO: 248785 - DNA, 856 bp, Unknown
  Bacterial polypeptide expressing nucleotide sequence isolated from the Sargasso Sea
catgaagagcgacatcgatgagcagcaaattcaaatagggcacatgctcaagcgcggcgcattcggaacgctctatcacggagtttatccctccacgacttgcgaagggcggaaaatgaacactccagtcgccatgaagtacttgacggtgactcgagaaacgcgagagagcgtggagttggattttttccaggaagtaaacatgctcaagcaactcgagcatcccaacattattggatacatcgggtcaatcgtcgacggcaagcacttttgcctcgtgacgcaattcgccacggagggttcacttcgcgaaatcttacaggagcgcggcgtgatgcctaatccggacgtacgaacgattcttttaggcatcgctcgcggtatgtgctatctgcacgaagaaaagtccgtcatgcatcgagatttgaagactgcgaacatcttgatggcgaatacgctcgaggcgaaaatttcaaacctcagtctcgctcgtgagtttactggcgacgcacccagcgcatacacggcagagactggtagttaccgatggatggctccggaagtcatcacccacatgaagtataactcgaagcttgacgtgtactctttcgcgattatgctgtgggaaatagtcaccggaggacagacaccattcgaggagttgaatcccattcaagccgccgtcgccgtggtgcagcgaggcgttcggcctcagatcccgcagaaatgtgatcctctttttgctgacctcttaaaacgctgctggaagacggatccggaaatgcgacctcgcttccgagaaatcgtcaccctactcgaggcgcgaaacgtcgacgaggacaacgtgcaaagcgag

SEQ ID NO: 248786 - DNA, 449 bp, Unknown
  Bacterial polypeptide expressing nucleotide sequence isolated from the Sargasso Sea
attgaaatcaatattgttactgacagtgagattgttaaaaattctaaaggagattcactcactagatataattcaccaagacataaagcccgacaactttgctgtaggtagaggtaaattgaagaaaaatatttatatctttgactttggattatcaaaatttaaggaatcaacttatagacctcaagacaaaacaagtagtttacttggaacaataagatatgcgagtattacagcccatcaaggatacccattatcatatagagacgattttgagtcattaatgtatatgattatttacttgtataatcgtaagttaccatggcaaggagtacaaggtaatagtaggaatgagaaaaatagaaaagttttaaatataaaaagaaatatagacctctctcaactttgttataagctcccaattgagtatcaaaaaataatttactatt

SEQ ID NO: 248787 - DNA, 261 bp, Unknown
  Bacterial polypeptide expressing nucleotide sequence isolated from the Sargasso Sea
ttacaaattataaaaacgcaaattaatcaatttaaaccaaaaagaagggcaattgattctctctctgcattagccagaggtgtaagtttgaatgcatttagacagttggtaattgccgttaccggttatacaaaacaagaggaaatagcaggcttttttactaatactgcagaagaatttatgggaagtcattctataactgattctcatatctcaactattacggacaccatattgttgcttcaaaatgtagaaataaaa

SEQ ID NO: 248788 - DNA, 881 bp, Unknown
  Bacterial polypeptide expressing nucleotide sequence isolated from the Sargasso Sea
tgatgatgtaaaaattgcagaaccattaacaaaatatagcgcaagtattactgatggaaatagaattcgtgaatttgtagataaagcttatttaatagcaacaaatggttacccgggagcagttcacttaagtatccctgtggatataatgttttcatcttttcctgaaaatgcaggattagaggaaagacctttttctcaatcaaaaaaaataaaaaatattgcttggccagatcctaatcaaatgagtgaagttttaaaattagcatcgaattctaaaaaaccaatgcttattggtggccatggtgtctggtggtcaggttctgagaagaaattagaatctgcaggtcaaaatttaaatattccaatttttaatgttccataccatcaaaaacttttaggggaggaagctaaatcttacatgggattggcagatatacaccaataccccccttcaaaatttgcgtttgatgaatcagacctaattttaatggttggaacaagacttgacaatcagatgaattttgggaatcctccactatttcctaaatctacaaaaattgtttgtataaatggatctcatgaagaaatcgaattaaatagagcagcagatattaatatgctgtgtgatccaggggtatttttggatactttaagtaaattaaaagtaaataataaatggaatttagacaataaatggattgagcaaaacatattagaaaaaaagaaatggattgataaatctttaaaagatcttgaaaaagaaacaataaaagcaaaaaaaaacggtggtaaaattcatcctctccaattagctttagatgttcaagatgcaatgaaggataatgattggttggtgatagatggtggaaatacccatt

SEQ ID NO: 248789 - DNA, 761 bp, Unknown
  Bacterial polypeptide expressing nucleotide sequence isolated from the Sargasso Sea
aatgagtttaaaaaacaaatcaattttaataacaggtggcacaggatcttttggaagatcttttgtttctaaattattagaaaaaaataacaaaattaaaagattagtaatttttagtagagatgaacttaaacaagatcaaatgagatccgaattcccggaaaataaatataaaaatttacgatattttttaggtgatgtaagagattaccaaagactgcttagagctttagacggaatagatattataattcatgctgcagctcttaaacaagttccggccgcagagtataatcctattgaatttattaaaacgaacgttttaggagctcaaaatataattgaggcttctatcgaaaaaaggataaaaaaagtaatagcactttcgtctgacaaagcttgtgcgccaattaatctttatggtgccacaaaactttgcagtgataaactatttgttgcagctaatagctacgcaggaagatatggaacttttgcagttgttagatatggaaacgtaatgggatcaagaggctcaattattccaaagtttttaaatgaagctaaaaaaggtgtattaaatgttactgatccaaatatgactcgttttaatataactttgaccgagtcagtcaaaatggttttgtttgctctagaaaacatgaaaggttccgaaatattagttcctaaaattccatcttatagaattatagatttagctaaatccataggaccttcatgtaaaattaaaaatattggagttc

SEQ ID NO: 248790 - DNA, 916 bp, Unknown
  Bacterial polypeptide expressing nucleotide sequence isolated from the Sargasso Sea
cgattacattagtcttgatagaaagctgattacttatgaccgcatagcgatggcacttggcgagtatcagcgctcgcaggttgcactggattatccgttctcgcgttatgttgacggtgacattaatgcgatttctgaagaggcaaaagaaggtgcgctactcttctttggcgagggtaaatgtttcggctgtcatgcaggtgctaagttttccgatgagcaattttatcccttggcaacgccacagatagggcgtggtaaaaatgtcttttctcaggactttggtcgctataacacggtaccggatgtatcagataaattcgctttccgtactcccagtttgattaatgccgagctcacattcccctatatgcatgccggctctatcgcgacactggaagaggccatacgttggcatttcgatccggtagcgcaacttgaagggtatgattatagccttgatcatcttgcccagtttgctggcctcaatattaatacaagcggccaccaggctcaggttccggcaatttctgcggcttatcagcaatggcgctccaataagtcacgtagatacaatcgtgtacccagtgtcgtctcgagcgagaaagtctcacagtatgcggcctttattcggagcttgactgcagattgtttgaaaagcagcgtttgcgtcgaacaatggatgccagattacacatcggtcgaccccgatgggttccggcttgaaccagagttctccttcttcgataacactgctgtttttgacgtatttcctcctgctccaggagaatcagttgccccagtctttcctgatctttctgagatagagccagctaatatatcgtcctgtgtggcaatggatgtggatagtcgcccggaaattgatctttctgttggcttcagaaaagtagtcctt

SEQ ID NO: 248791 - DNA, 433 bp, Unknown
  Bacterial polypeptide expressing nucleotide sequence isolated from the Sargasso Sea
cacatatcaatagcactacttgctttcttttttaatgtagttaatgcgtctttacagtcttattggattattttctttggtaactatgaagaaacaaatattattttttattcaggattgttaattttctttacgggaatgtatatcaatattaaatcagacaatatattaatgaacttaagaacaaaaaaggaagaatatgtagtccctactggtttcttatttaaaaagataacttctccaaattattttggagagacaatagaatggttaggttgggcattattaacatttaattttgcaggttttgtattttttatttggaccatatttaacttactacctagggcaatctctactcataaatggtatcaatcaaagtttaaagactacccaaagaatagaaaaatatttatcccctacatattctaat

SEQ ID NO: 248792 - DNA, 388 bp, Unknown
  Bacterial polypeptide expressing nucleotide sequence isolated from the Sargasso Sea
catggaaaacggcaatcctttaacgggaaattgtgggacttctctagttgcgacagcgcccgaagtgtatagggcaattgcatacgatagtgccgttgacagttgggcgttgggtgtgctactgtatgagtttgtcactggactcttcccctttcgcggcagagggcgtcgtctgcgcgaagaaattgctcgggcgtcggtcaaattcgacgactttttcccaggatctcctgattcacgaaatctcattctgtctctgattagagctaatccgcgagaccgtttcaccctatctgaagcactgaggcacggctggttccggtcacccgtcacaggcgatcttggactggcaaaggtttttctgggtgaagaggggcggcaaaactaa

SEQ ID NO: 248793 - DNA, 310 bp, Unknown
  Bacterial polypeptide expressing nucleotide sequence isolated from the Sargasso Sea
atgtttaaaaattctacaattcttgtaactggaggaacgggttcttttggtagagcatttacttctatgacttttgcaagatacaaccccaagaaagtaattattttttccagagatgagatgaagcagtgggatatgcaacaggattatttagaaaacgatagaatacgttttctgcttggagatgtaagagacaaggagcgggtttatagagccatgaaagacgttgattatgttattcatgcagctgcgaataaaattgtacctctagcagagaaagatccttttgaatgtattaaaacaaatgttg

SEQ ID NO: 248794 - DNA, 646 bp, Unknown
  Bacterial polypeptide expressing nucleotide sequence isolated from the Sargasso Sea
ttggacagcttcgaatctgcgcagcaggtctcgtcgcagagctatgaggtcgagggcatcctgggcgagggcaactactcgcaggtgtacaaggcgacgctcaactcgacgcagcagcccgtcgccctcaagatcatcgacaaggccaaggtgaagcgctacaagaagacggacgaggtcctcgtcgagaggtgggtcctctcgaagctgcgacacccgtcgatcgccaagctgtaccacgcgttccaggaggagtcggcgctctacctctccctcgagctcgtcgagggcggcgagctgtgggccgtcacgcacaaggtcggattgccgatgagcatctcgaccttctacggggcgcagatgctcgaggtgctccagttcctgcacgagcgcgacgtggtccaccgcgacgtcaagccggagaatgtgctgatcacggcggtcggtcatatcaaggtcatcgacttcggcaccgcgaagctgcttcgccaccccatcaagctcggcgccgatgacggcgacgacggcggccgctccgaccgccgaacccgcttcaaggagtttgtgggcacgcccgagtacatgtcgcccgaggcgatcaacaacaagttcgcggaccagcgggccgacctgggagctacggtgc

SEQ ID NO: 248795 - DNA, 358 bp, Unknown
  Bacterial polypeptide expressing nucleotide sequence isolated from the Sargasso Sea
ttgaaaaccagaaggaatgcgaccctaggcctagcaacatcacaaggtgaccttgctgacctcttccgcaatcgttctcgctccaatactcactttgccgagcctgagatttgggcagtctttgtccaagcatgcgacgcactttgccatatgcacaaacgtcgcatgatgcatagagacgtaaagcctgcgaacatcttcctttgcgccaagggtgtcgtgaaactgggggacttggggcttggccgctacttcagttcaaacacctacagggcctattccgtggtagggactcccttctatatgtctccagaagtcatcgcgagtgagggctacagcttcaagtccgacgtttgga

SEQ ID NO: 248796 - DNA, 769 bp, Unknown
  Bacterial polypeptide expressing nucleotide sequence isolated from the Sargasso Sea
tatgagcttagaagatttctataatttgtttcttgcactatgggctcttacggctattgggacctttattggacttttttttaaagttgctccctatggtagatatcttgattcagtaacttcagtaactctcccttcacgtgttggttggatattaatggaatctccaacggtcattggtatctttatttttcttcttgtgtttcaaaaatctattggttatgtcgagatatgcttaagctctatttggttactgcactacatccatagaactttgatgtggccttttcgagcaaagttagagaataaacgaatgactttaacagtcatattgatggcgcttttatttaatacagtaaacataacaattcaatgtttatggatatttattcttggtgaatatgtcgatgaatggttattctcaccttttttcttaattggtttatctctcttccttataggcatgttaataaatataaagtcagataatatcttaatgaatttaagaaccaaccatggagaaggttatcatgtcccgaatggctttttatatcgatatataacttgtcctaattatctaggtgaactaatagagtggtttggttggtttgtattaaccatgagcccagcagcgctaacattttttgtttggacatttgccaatttggttccaagagcaaaatccaatcacgaatggtctaaattgaatattaaaattatccgtccaatagaaaggctatcttggcttttgtctattgatagaatctaa

SEQ ID NO: 248797 - DNA, 508 bp, Unknown
  Bacterial polypeptide expressing nucleotide sequence isolated from the Sargasso Sea
tgctgatcacggcatgaagccaaagcatgacattaacagaaatccagtggtgatctacatccaagatattttggatgagtggctcggcaagtctgaagcacgtgtcattctaccgatcacagacccttacgtggtgcaccacggcgcacttggctcatttgccaccgtctatctccctacaagatccaatgcaaatgagattgtcaatctgctcaaagatattgagggcattagccttgctatcagaaatgatgaagcagttcgacgattcgaactgccaactgataggattggtgacattgtcattatttcggatgaaaatatgactataggaacatccatggatcgccacaaccttgccgcattgaaggaacctttgcgaagccatggcggactgacagaacagaggattccatttatagttaatcgcaagattgatttaccattctaccctgagttacgtaatttcgatgctttttactatgccgctattgcagcttccctataa

SEQ ID NO: 248798 - DNA, 811 bp, Unknown
  Bacterial polypeptide expressing nucleotide sequence isolated from the Sargasso Sea
taaaaatttctttaaacaccctggagttgatgcaaagggagttttaagagctattaagaataatatttttaatttaataaaatctaatagattagaaggtgcctcaactattacccaacaggttgctaaaaatttcctattatctaacgaagtaagtttagacagaaagattaaagaagcaattttagcttttaggattgaaagagttttatcaaaagaaagaatattagaactttatttgaatcaaatttatttaggagaaggatcctatggtattgcatctgcaagtctgagatattttgataaaccaattggacaattaaattattctgagtcagctttactagctgcattaccaaaagcacctagtaagtataatccatataaaaataaagaattagcaacttatagaagaaatttagtaatcaaaaatctttatgaaaacacttatatctctaaagaaaagtacgatgagttaattaattctgaaattattttaaaaaagagaaaaagaattttcctagaagatacaagatactttttagaggatataagaaaaaaagtaattcaggaatatggctatgataaagttcataaacagggatttaatataaagacccctcttaatttagaacttcaaaatttagcttctgcatcattaagaaaaggattaatagattatgacaaaagaaagggttggcgtggacctttagataatatgaatggaaaagattggaccaagaatttggataagttcaatttagaaaaaaccagttggttgggacatagcaattgtaaaagaatagacaaa

SEQ ID NO: 248799 - DNA, 899 bp, Unknown
  Bacterial polypeptide expressing nucleotide sequence isolated from the Sargasso Sea
aataaaaaaaataaggtatatatacatatggctaaataacaaaactctcttaataactggtgggactggttcttttggtagaagatttacagaaattcttctaaaaaaattcaatttaaaaaaaataataatctttagcagagacgaactaaaacagcatgaaatgcaaaaagctttattatggaataaaaaaactgaaatgaggtattttataggagatgtaagagatctatctcgtttagaaagagctatgaaaaatgttgactttgtagttcacgctgctgcgttgaaacatgttccaattgcagaatacaatccatttgaggcaattaaaacaaatgtaattggtgctcaaaatgttattcagtcatgtctatcatcaaatgttaaaaaagtaattgctttaagtacagataaggcagctgcaccaataaacttatatggagcgaccaaattagcatcagataaattatttatatcagctaataattataaaggatcaagagacataaaattttctgttgttagatatggaaatgtaatgggtagccggggttctgtaataccacatttttatgagacgagtaaaaaaaaacatataaatttaactcataaagatatgaccagatttaacattactttagaagaaggtattaattttgtaattcattccttaaaaaatatgtggggcggtgaacttttcgtaccaaaaattccttcttttaaaatttacgatcttgcaaaagcaattgctccaaaagtcaaacccaaaataattggaattagaccaggagaaaaacttcatgaagaaatgattacagaaacagattctttaaatgcagcagaatttaaaaattattatgtaattttgccagattcaaaatatatagtttggaata

SEQ ID NO: 248800 - DNA, 616 bp, Unknown
  Bacterial polypeptide expressing nucleotide sequence isolated from the Sargasso Sea
gatggcgcagccgccgccagcgcgctccgtggccggcgactttcggtgggggcgcaagctcgggcagggctcgttcggcgtggtgtacgaggtccaccgcaaggcctgcggccgccgcttcgtcgtgaagcagtgccacatcggccgcatgagccgcgccgagcaggaggaggccatcacggaggtccacctgctcgcgagcctgaagcacgagtacatcgtgcagtaccacgacagcttcatcggggcggggcagctcaacatcgtcatggagcactgcccgggcggcgacctggccagcaagctggcagagctgcgcaagcgcggccagcggctgcccgaggcgtcggtctggcgctacctgctgcaggtggcgtcggcgctgcggttcgtgcacaaggagaagatcctgcaccgcgacctgaagagccagaacgtcttcctcggcgccaacggcgacgtgcgcctcggcgatttcggtgtctccaagctgctggaatccacgtccgacctggcacgcaccaaggtcgggactccgtactttatgagccccgagctgtgcgagagccgtccatactcgagcaagagcgacgtgtgggcgctcgggtgcctgctc

SEQ ID NO: 248801 - DNA, 304 bp, Unknown
  Bacterial polypeptide expressing nucleotide sequence isolated from the Sargasso Sea
catgctcagtaccgaactcaagtcccagattcagggcgcctactcgcgcttcctcgaggccaagtcactcaagcctcgctacggtcagcgcctgatgatcgccgaaatcgccaaggtgctcggcaccatcaggagcgacgacgagggcaagcgcctgggcgatcccgccgtggtcgcggtggaggcgggtacgggcaccggcaagacggtggcctacagcctggcgaccattcccacggccaaggcggcgggcaagcgcctggtcatcgccaccgccaccgtggcgctgcaggagcagatcgtg

SEQ ID NO: 248802 - DNA, 577 bp, Unknown
  Bacterial polypeptide expressing nucleotide sequence isolated from the Sargasso Sea
attgaaacatacttagatctggaaggaatacccataataatttcagatacagcggggattagagaatccagcgacgagattgaaaaaaaaggcgtaaaattggcaataaataaggctgaagatgcagatttgataatcatcttattagatcccaaaaaccttgattttagagggttttttaatgaaaaaataaaggataaatcaattattgtaataaacaagtcagatttaggaaccgctaacctaaaaaattttgatttaaaaattacacctcaaattatttctattaaaaaagataaaaatataaataaattaatagaaaaaataaaatctaaacttaaaaaagattttttaaaaagtgataatattctaataacaagaacaagacatagattacaccttaaggaatgctataatcatttaatagattttatagaaaagaaagataatgaggaatttgatttagcatctgaggatttacgattatcaattcgacatctaggaactatcgttgggaaagttgacgttgaagaaatattaggatctatctttgagaatttttgcattggtaaataag

SEQ ID NO: 248803 - DNA, 406 bp, Unknown
  Bacterial polypeptide expressing nucleotide sequence isolated from the Sargasso Sea
atgactgaaactcttatccccggtttgaaacatcaaatcctgcttaccgttgaaaaacatcacactgcggatgcgtatggtaatcccggggttgaagtctttgccactccagccctcatcacacttttccaaaacgtctgtggagaatgcatcagaccttttctcagcgaagatggcttcagtgttggaacaaaggtgaacatcagacaccttggagcaactcctttaggatttgaagtcagtgcacaatctgagttgatcgaagtggaccggcggcgtgtcgtatttcgtgtcgaagcccatgacggagttgaaaaaattggagaaggaacccatgaacgatttatcatggataatctggatttatttcttcaaaagacccaggagaaattccagcagggataat

SEQ ID NO: 248804 - DNA, 181 bp, Unknown
  Bacterial polypeptide expressing nucleotide sequence isolated from the Sargasso Sea
atgtccacgcggatcgggaaggcggttcgccgcgccgcgacgccgtccaaggcgcgcgtgtacgccgaggcgaacgacgaaaagccgcgcgagtactgggactacgaggcgctcagcgtgcagtggggcgagcaggacgattacgaggtggtgagaaagctcggtaggggcaagtacagcg

SEQ ID NO: 248805 - DNA, 640 bp, Unknown
  Bacterial polypeptide expressing nucleotide sequence isolated from the Sargasso Sea
tgtctaggactacaatatattcatactaaatttattttttatgatttaaaacccgagaatattatggttaatttaaatattaaaaatgtgaaaattattgactttggttcttcattagataaatataaacataggtcttctttttatcaccaatcgcgttattatagatcgcctgaattaatttttcatcttcaatttaatgaaaaaatagatatatggagtttaggttgtataattggtgaattaatatgtaataatccacttttcaaagggaaaaatgaaagagatttattatttaaaatgactgaaaaattagattttccaaaagattatatttacataaattcaattaattttaatacttattttactaaattaaaagaagattttggagaaaaaaaagaagaggaagaagaatatgaatattttagaattaaagaaggtttgactttaaataggaaatataaaccaatgaattattgtttaaaagaacatttaaataaatatttacaatttttcaggggtgaagaacataataaagaaaatttaatagatttgatatctaaattattagtttataattatcataatagattatctgctgaagaatgtttattacacccgttatttttattttagt

SEQ ID NO: 248806 - DNA, 160 bp, Unknown
  Bacterial polypeptide expressing nucleotide sequence isolated from the Sargasso Sea
tatgaatgataagaaatttggcaaatcaaataaaatgcaagtacaaaaattaccaactgggatagaaggttttgatgatgtttgtagaggtgggttgcctgtatctcgaagtacactcgttagtggtacctcaggaactggcaaaactgttttttctctt

SEQ ID NO: 248807 - DNA, 282 bp, Unknown
  Bacterial polypeptide expressing nucleotide sequence isolated from the Sargasso Sea
aatgctatctaaaaattcaactattttaattacaggcggaactggttcattcggaagagccttcctcaataaattaatcgattcagatgtaaaagagatcaggatttttagtagagatgaaaaaaagcaagatgatatgagaaaggagttcaataatgagaaacttaattttgtaattggagatgtaagagatactgatagttgtatggtagcaacaaaaggagcggactatatttttcatgctgcagcattaaaacaagttccttcatgtgaattctatcc

SEQ ID NO: 248808 - DNA, 467 bp, Unknown
  Bacterial polypeptide expressing nucleotide sequence isolated from the Sargasso Sea
catgtataattatggtgtaacacttagggactttttaaaaaaacacgttgagggcggtgcccatacccttaagatcgcaacggacattttatgcggattacaggaattgaatgagaggttctgtgtgtgccaccttgacttgaaacccacgaatgttctttattcttctacagatgatacattcaggttatgtgatttcggagaagcccaacatgttcctctgtcatctcacagtgtcaattcaaaaacgggaacaattggataccgaggaggtgagtttgctgatattgatagtgtcaataatgatgattatttcaaagtagatatgtggtctctcggttgtatattatttgaggtgatatggggtcaaccgttgtggcgttggtatttatctgggtacccacctggggaaccacttcctaaagatatcagtgacactggacatccagatagatatcaaagggtaa

SEQ ID NO: 248809 - DNA, 385 bp, Unknown
  Bacterial polypeptide expressing nucleotide sequence isolated from the Sargasso Sea
tggtacttattttggtagtattcaggaatattctgctgaattcatgtcaaattggaattttattgtaggtgtattcttatttgtcgttggtgcatacatcaatattaaatcagacaatattttattatcattacgaactaaatcaggtgaatacaaaattcctgaaggctttatgtttaaatacgtctcatttccaaactatttaggagaaattcttgaatggatggcttttgccttaatgacttggtctctagcagggctatcatttatgatttggaccatggccaatcttgttccaagggcaattaaaggacatcaatggtatcataaaaagtttgattcttatccaaagaacagaaaagcaatttttccatttattatttaa

SEQ ID NO: 248810 - DNA, 466 bp, Unknown
  Bacterial polypeptide expressing nucleotide sequence isolated from the Sargasso Sea
taatatattaaaacactctaataaaattactatacagataaaagatttgcgagtacttgatttgtattctggcactggttcttttggtcttgaatgtttgtctagaggggcgtcttacgcactgtttgttgaaaatgacaaagatgctttaaaaaatttaaacaaaaatattaaaaatttatcttttgaaaaaaaaacaactatttctaatcaggatatttatcttttttttaaaaaatctagttttgataaaaaatttgatttaattttttttgaccctccttatatagacaaaaaatacattgaaattataaaagaaattaaaataaaaaatattatcaataaagatcatgttgtaatactacatagagaaaaaaactcttataataatttaagcaattatattaatattatagaaagtagaacgtatggtcgttcagagatattttttggaaaacttttttga

SEQ ID NO: 248811 - DNA, 109 bp, Unknown
  Bacterial polypeptide expressing nucleotide sequence isolated from the Sargasso Sea
gctgcaagttttggttgggatttactagaattaattgaccaaaataaactttttattttggatgcttctcctgatccagatggtcaggatgttgcgggtaattttgtct

SEQ ID NO: 248812 - DNA, 646 bp, Unknown
  Bacterial polypeptide expressing nucleotide sequence isolated from the Sargasso Sea
aaaggcagacaattatcgtgcatactaatgccgctagttgatggagacaaatttaagaaaagagaaatggtcaattatactgacgaagaaaaaataaaatttgtaaaagatcttttaaatatttataaaacacttacggagaacggggtacttcatggcgatataaaatttgaaaatatgttaatcgaagagcatgaaggcaaacaaaaattaaaattaattgatttcggattcgctaaggatcttactgaaaaaattacagatcatagaagatatgtagtttgtggtacacctaactatctaccacacactcgtagaactcgagacccgtctttagatagatatgctatttgtgtaatgattcttgaaatttttcatttagacgaagtagaaagcgtacgaaatgaagaactaaaatcaccccaacatcaaatgtgcatggatattgaagtttacactgaaaattgcaaaaaaggttttataaatttattacgtcaagataaagaggctagtacaacgcaaggcatgaaacgacctcttaataaaataagcgaagctgttagagataagttacttcaaataatcagtacagcccaaattggtagtccaaaagaatttattgagttagctaaattatttaattaaa

SEQ ID NO: 248813 - DNA, 263 bp, Unknown
  Bacterial polypeptide expressing nucleotide sequence isolated from the Sargasso Sea
agaatgcatcagaccttttctcagcgaaaatggcttcagtgttggaaccagggtggacatcagacaccttggagcaactcctttagaatttgaagtcagtgtacaatgtaaggtgatcgaagtggaccggcggcgtgtagaattttgtgtcgaagcccatgacggagttgaaaaaattggagaaggaactcatgaacgatttatcatggacaaccttgatttgtttattcaaaagacccgggagaaattccagcagggataat

SEQ ID NO: 248814 - DNA, 879 bp, Unknown
  Bacterial polypeptide expressing nucleotide sequence isolated from the Sargasso Sea
accgcaggagcgcgaggagcaggcccgccgtgcctacgtgcagcggcaggcggagcggctccttgacgtgacgcaaggcgatttcacgcccgtggccaaaatctgctccctcttcggggacgcttcacagttgtatctggtcaagagggtcgaccaggactccgaacagcggttcactctccgcacgtactcgaaggagagtatcgctaagcagaacctcaagaagcttgtgatggacgaggtccagctgctcggctcaattcctcagtgtccgttcatccccgccctcctctccactttctccagcaaaaatggccttttctctgtctacggcgcgctgatggctgccgatctgtcagtggtgctaggcgaccggcaactcgcccaggatggagaagagggggagacaactgcgagatttctgctctccggtatcctgagcgccgccatccatctgcacgccgaagagattgtctgccgcatgatctaccgtgactcgatcgtactggattggaggggctacccgatgctcgcagacctgaccctcgcgaaatcattgcgcgattgcggcggggcgacgtatacgctctgcggcacacccgagtacaacgcgccggagcagatcaccaaagccggctatggcaccgagccggattactgggcaatcggtgtgctcatgtatgaactcttcacggctaccactccgtggcccgcgctcgtcgcgaaaaagaaggggaagtcggtcgcagaagcgggcgagccatcgccggtcgatatcttggaggcgatcggaaattacaagccggtcggcggcaatgagcttccgtatccagagaagctaacgaaggcttcaattgacatcatggacgacctcatcga

SEQ ID NO: 248815 - DNA, 535 bp, Unknown
  Bacterial polypeptide expressing nucleotide sequence isolated from the Sargasso Sea
tacttcccgaaaaatataaaaactagaccgttaaaggacagtgtgagagaaaatattttcaatattttaagccattcaaatagtattgctgtagatataaaaaaatctgaagttctagatctatatgctggcacgggttcttttggacttgaatgtgtttctagagaggcagctaaagttatttttgtcgaaaataatgtatatgctttaaaaaatttaaaaaaaaacataataaatttaaattcacataacgaaacagctttgatcaatcaagatgtcttgaaattcttttatatgaatgatgttgagttatttaaggaaaaatttaacataatttttttagatcctccatatcatgataaaaagtgtgttgaaattattaaaataataaaaaaaaaagttttactaaataaaaaacatataattataattcatagggaaattaaatctgaggacaatataaacaaacatttaaatataatcgaaaatagagtttatggacgctcagaaatcttttttggaagatttttttaaa

SEQ ID NO: 248816 - DNA, 382 bp, Unknown
  Bacterial polypeptide expressing nucleotide sequence isolated from the Sargasso Sea
tttgaaacatcaaatcctgctaaccgtagaaaaacatcacactgccgatgtgtatggcaatcctggggttgaagtttttgccaccccagccttgatcactcttttcgaaaacgtctgtggagaatgcatcagaccttttctcagcgtagatggcttcagtgttggaaccagggtggacatcagacaccttggagcaactcctttaggatttgaagtcagtgcacaatgtgagttgatcgaagtggaccggcggcgtgtcgtatttcgtgtcgaagcccatgacggagttgaaaaaattggagaaggaactcatgaacgatttatcatggacaacctggatttgtttcttcaaaagacccgggagaaattccagcagggataa

SEQ ID NO: 248817 - DNA, 640 bp, Unknown
  Bacterial polypeptide expressing nucleotide sequence isolated from the Sargasso Sea
atgagaaattataagtcatttatagttttcatttttttattcaatagttatttattttctcaaaagccatatcggggagcagagtatcgtacaattaacgaattcttacatggtcgttttgaagtaaaaatgaaaacagctacaggctctggagtcgtctcttcattttttactattgatgattattgggcagaggggcaaagcagtactgaaaattggagagaaatcgattttgaggcactcgggaatattagtaatgcaatccaaacaaatattataactgcttatgaaacacaccatgaagaaataatttatactccattttatccttatagtgattttcacgtttatgcatttgaatggacaccgcagagtataaaattttttgttgatgatcagctagttcgagaaaattatgatgactatatttctacgcttaataccggtcaaaaaattatgatgaacatttggcaaccaatttgggaaagttgggttggtgaatttgatcaatcaatcttgcctgtatatgcatattatgattgggtaaaatattattcttataccccgggagaaggtgcttatggtagttttaataatttctcttatgagtgggaagataattttgattctttaatgatca

SEQ ID NO: 248818 - DNA, 408 bp, Unknown
  Bacterial polypeptide expressing nucleotide sequence isolated from the Sargasso Sea
attggaggaagtcatcgggaaggggtcgtacggcgtcgtgtgcgcggcgatcgatcgacagacggggaagcgggtggcgataaaaaaggtgaaaaatgcgttcgatcacgcgagcgatgcgacgaggatcttgcgagaggtgacgctgttgagacacctgaagcacccggatatcgtcgaggtgttgaatattctgctgccgccgaacccgagggattttaacgacgtgttcatcgtgttcgaggtcatggagacggacttgcatcaggtgatcaaggcgaacgatgacttgacggacgagcactatcagttttttctctatcagttgttgcgagggctcaagtatatgcacagcgccaaggtgtttcatcgagacttgaaaccgaagaatatcctggcgaacagcga

SEQ ID NO: 248819 - DNA, 418 bp, Unknown
  Bacterial polypeptide expressing nucleotide sequence isolated from the Sargasso Sea
atgcgcacgatcgggagttcgctcagcatagtgtacctgtacgactcgttcgaggataacgacgcggtgcatctgttgatggatctctgcgagggcggggagctgctcggcgccatccgcaagggcgcgacgtacacggaggcggacgccgccgagctcgtccggagcgtcatccgcaccgccgcgcagtgccatagccgcgggatcatcttccgcgacatcaagccggataacttcctgttcgagcgggacgagcccgggagtccgctgaaggcgacggactttggcctggcggggctcatcacgcccggcgagcggttgcagcggcgctgcgggacgccgtcgtacatggcgccggaggtgatcaaccggaactacggagaggaggcggacgtgtggtcgtgcggggtggtggcgt

SEQ ID NO: 248820 - DNA, 800 bp, Unknown
  Bacterial polypeptide expressing nucleotide sequence isolated from the Sargasso Sea
tctgcatgacctcaagctgatttgcaaacttggagctggcggattcggtgtggttaccctggagaagcatgagagaagtgggcagctcttcgcagtcaaagccttgaatcgagccaagctacagaagcaaggcatggagaccaaagcggcgtccgagcgagacgttcttcgaatggttgacacccgctttatcattcgattttacgaagcattcgcggacgacgtcgacatcttcttcgtcctggaaccatgcctgggtggcgaactattcaccgttcttcactcgaagcgcctgttcggcgtggatagatacgcacagttctacgttgcatgtgtgctcgaggcgtacgaccacctgcacgctcggcacatcctcttccgtgatctgaagccggagaacgtgctcctcgacgtgaagggtcagggtaaactctgcgacatgggcctcgcaaagttctgcatcggaaaggcgttcaccctctgcggtacgccggagtacatgggacctgaagtgatcaagggcgcagggtacggtaaagcggcagattggtggatggttggaatatttcttttcgagcttctgacgagcaggacaccgtttgttgcggcagctccgtacgagatctgcaagaatattcgcagaggctacgctgcctacgcgaatgaaaacctaacggagacgcacttgccgcgcgagccattcaagtcactgatcccagcgctcctcgacccgaacccgcttgcgcgtttaccagtcctgccacagaagggcgtcgacggattccgcgagcatgagtact

SEQ ID NO: 248821 - DNA, 382 bp, Unknown
  Bacterial polypeptide expressing nucleotide sequence isolated from the Sargasso Sea
atgccaatttttgacccaaatctacttaaatccataatctttcaaattgttcagggcttaaaatacatgaaaaaccatcatattattcattgtgatatgaagccggagaatgtcatttttacagatgatagctaccaaaaagtcaaaattattgactttggctccagctgcaccgattctaaatctggtttttcatacgtgcaaagtcgctattaccgagctccagaagttgttcttgggctgccgtatagccacggtgttgacatgtggtccctggggtgcatcgtatacgaactcatcacgggtaaaccaattttccctgggcatgacgaaaatgagctccttgaatatatggtcgtaacagtagggagagtcccataaa

SEQ ID NO: 248822 - DNA, 412 bp, Unknown
  Bacterial polypeptide expressing nucleotide sequence isolated from the Sargasso Sea
tatggtcttgctgttagaggccgatccttccactgccagtatcgaagcgtatttggataatgcttggtgttttgccgccaagtataaggatgagattgtggccgtgtgtgtggctaagctaattcgcgataaggttgcggaaatcttcaatatggcggtgtggcctgactatcagcggcagggaattggttctgtgttactgtcatttgttttaactgaattggcgagaaagtcggtggttcgtgtggaattgggtacgggtagctttgggtatcaacttacttattatcagcgacaggggtttagagtcgaggccgtgataaaagatcacttcttaacccattacgacgaacctctgtttgaacagggattacaacataaggatatgcttcgattagcgctggaattataa

SEQ ID NO: 248823 - DNA, 360 bp, Unknown
  Bacterial polypeptide expressing nucleotide sequence isolated from the Sargasso Sea
aattcatctcactaccaagtggaaaattacccatggaatgtgtcatggaccaaagtgaaaatttaaaatttgagattgatttgggatgggctaccgcaggaggtgctgatcctcaaatttggattgaaaaatatacaaataaaataattgcatgccacttaaaagatttttattcgaaggataaagatatgttagatcataccaatcaatctgctgttggtgatggatttattaattggaaagaattaatttataaaattaaaaaaacaaattgtaatttatttataatagaacatgatgacccaacagattataaagattatacaattaaatctcttgaaaatctgagctctatataat

SEQ ID NO: 248824 - DNA, 940 bp, Unknown
  Bacterial polypeptide expressing nucleotide sequence isolated from the Sargasso Sea
ctggtccgcgggcatttccatttcgccctgtgcgagctgaagctgcccagcccgctgcgcctatggcaggccaagcgcctgctgccgctcgccggcgaaagccgcgtctatccggatttcgcgcgcctctatggcgcacagctcaaggccgtggatgactggctgagccagctgggcgtgcgccagcgcccgcgtcgcggcctgggcctggaatttcaccagctgcgcgagtttcgtgatggcgacaccctgcgccagatcgactggaaggccactgcccgcaagcgcacacccatcgcccgcgaataccaggacgaacgcgaccagcagatcgtcttcctgctcgactgcggccgccgtatgcgcagccaggacgacgagctgtcgcacttcgaccacgccctcaacgcctgcctgctgctcagctacgtcgcgctgcgccagggcgatgccgtcggcctggcgaccttcgccggtaaccagtcgcgttacctcgcgccggtcaagggccctgcgcaattgaacgtgctgctcaacgccgtctatgacctcgacaccagccagcaaccggccgacttcagcgccgctgccgacttgctgctggcgcgtcagcgccgccgctcgctagtggtactggtgaccaacctgcgcgacgaggacgatcaggacctgctcgctgccgtgcgtcgcctctcgcgccagcatcgcgtgctgatcgccagcctgcgcgaggaagcgctcgatcgtctgcgccagacgccggtggagcaattcgatcaggccctggcctactgcggcacgctggactacctcaatgcccgcgccgacctgcacgaacgtctggccgcccatgaagtaccggtgctcgacgcccgccctggcgaactgggcccggaactggtgagcagttatctggcctggaagaaagctggcgcgctta

SEQ ID NO: 248825 - DNA, 406 bp, Unknown
  Bacterial polypeptide expressing nucleotide sequence isolated from the Sargasso Sea
atgactgaaacccttatccccggtttgaaaaatcaaatcctgctaaccgttgaaaaacatcacactgcggatgcgtatggcaatcccggggttgaagtctttgctactccagctctgatcacacttttcgaaaacgtctgtggcgaatgcatcagaccttttctcagcgaagatggcttcagtgttggatccagggtggacatcagacaccttggagcaactcttttaggatttgaagtcagtgcacaatgtgaggtgatcgaagtggaccggcggcgtgtcgtatttcgtgtcgaagcccatgacggagttgaaaaaattggagaaggaacccatgaacgatttatcatggacaaccttgatttgtttcttcaaaagacccgggacaaatttcagcagggataat

SEQ ID NO: 248826 - DNA, 697 bp, Unknown
  Bacterial polypeptide expressing nucleotide sequence isolated from the Sargasso Sea
tgcagcggttgaacacccgaatgtcctaccgctcctcggcgtgacggtctcgccttctggcaccgtcgccgtccttaccgcgtacatgccgcgtggatccgtctttgggatgctccacccgcgcaatggccgcggcacgccgctaccgcgtgtcctcgcgatgcggatgctcgccgactgcgcgcgtggcgtcggctacctccatggatgctcgccgcccatcatccatcgcgacctcaaatcgcaaaacctcctcgtcggcgccgattatagcgttaaggtcgccgactttggcctctcacgcgagtgccttcagccgggcgcgatgacgcgcgttgggtcggtccaatgggccgcgccagaggttctgctcggtaagagctattcgcacaagtgcgacctctggtcgtttggggtcgtctgctgggaggtgcttaccgcacgtgtacccttcgatggcatggcgccgacgacggtcgcgacaaaggttgcgatggagggcctccggctgccagtgccgccgcaggctccgatgcggctgctccgcctcattgcgcgctgctggtcggaggacccggagcagcggccgtcgtttgaggcggtcgtcacggagctgggcgccatcgaagtcgcattgacggcggaggcgcctcgctcgagcgacgcgccgacgaggccagcctcttccacgcagtaa

SEQ ID NO: 248827 - DNA, 472 bp, Unknown
  Bacterial polypeptide expressing nucleotide sequence isolated from the Sargasso Sea
tcctggtgctgtaggtagagcttcaagtaggtacagcttcaagcacagcttcaagtacagttcaccgtgcggtaggtacagcttcctggtgctcgagctctgcgccgaggacctgctgcaagtcctgcagcgcgaaggccgcctcgcggagcccgccgccgcgttctacaccgcgcagctcctcgcggggctggcgcacgtccaccggcagggctgggtccaccgggacgtgaagccccggaacctcctgctgacgagcctcctccagctcaaggtcgcggacttcgggcaggccacggaccagcccgacaccagcttcggcggcgacgcccggtaccccgtcgcgcatagagaggacgcacacaagctaaaacaaccgcccgggtctctgggcgtggattttcctgctccgcgaagcccggatcttttttggaactcttttttgctcttgcggacagatttggtggcgctt

SEQ ID NO: 248828 - DNA, 346 bp, Unknown
  Bacterial polypeptide expressing nucleotide sequence isolated from the Sargasso Sea
ctgaacggcacagcgcgtaaagtagcatgcggtgcagcagaaacattgccattagttcaagtaaccaatcttgcgcgtacgttacgtgaaattaaagatgctggcgtttgggttgtcggcactgccggtgaaacagatactgagttatttgatgcaaacctaacagggccaatggctgttgttatgggtgctgaaggggatggtatgcgccgccttactcgtgagcattgtgatttattagttaaaatcccaatggctggttcggtatctagtttaaatgtgtcagttgcgaccggtatttgtttatttgaagtgttacgtcagcgtaatgcaacgcaaatctaac

SEQ ID NO: 248829 - DNA, 901 bp, Unknown
  Bacterial polypeptide expressing nucleotide sequence isolated from the Sargasso Sea
cctggactccgacgacgatgagactgttgccgcgcccactcccaagaccgcggtcaaggctcccgtcagggtcaaaaccgagcacgacgtggaggctgtcacccaggccatcgccgccgtggccatcaagacggaaccggtggtcaagtcgcagttccccgagtttgtcaaggcagagcctgtcgagggagaggtcaaggtggagattaagcaggaggaggacgagatatcacctttggccgcactgcttcgcgagtgcgggcagagcgagagggacgtccttcccatggaggaggtcatctcgaggttcaccgccgccggggttctcaagattggcgagggtacgtacggagaggcgtttaagtgcggcggaaatgtgctcaagatcgtgcccatgggcggcgacgtgctcatcaatggcgagccccagatgggtcccggccaaatccgcgccgaggctgccatcgccaagaggctcaccaggctgcgaccggactaccaggcggcggaggctgcagagttcaaggcgatgacgggcgtgaagtgtgagctcccgctgaactccacggagggcttcatcaacacagctgcggtgaccgtgtgccgtggtccgtacgccccaccgcttctcaacgcctggaagaagtacgacaaggagagggagtccgagaacgagaacccggaggggttccccgaggaccagctgtacatcgtcttcgcgtgcgccgacggaggcgtggacctggagcacatccagctcaacaacgctgcggaggcgactgcgatgctgctgcaggtgacagtcgcgctcgccgtcgcggaggaggccatgaagttcgagcaccgcgacttgcactggggtaacgtgctgctgcagagatgcggggtggacgagacgagg

SEQ ID NO: 248830 - DNA, 243 bp, Unknown
  Bacterial polypeptide expressing nucleotide sequence isolated from the Sargasso Sea
cagcgaaaatggcttcagttgttggaaccagggttgacatcagacaccttggagcaactcctttaggatttgaagtcagtgcacaatgtgaggtgatcgaagtggaccggcggcgtgtcgtatttcgtgtcgaagcccatgacggagttgaaaaaattggagaaggaacccatgaacgatttatcatggacaaccttgatttgtttcttcaaaagacccgggagaaattccagcagggataat

SEQ ID NO: 248831 - DNA, 772 bp, Unknown
  Bacterial polypeptide expressing nucleotide sequence isolated from the Sargasso Sea
atggagttgtgtgagcgtggtgaccttgctggacgcatcaagaagtgccaacgtatgcgcaggcgtgtcgacgaacgaacaatctgggcgaatatggttgaaatggcggaaggcattgcttatcttcattccaaaaatatctatcacagagatattaaacctgccaatgtgttcttagctgcggatggaacagcgaagctaggggatctaaatgtatcaaaattgacgaaaggggacgatctcatgcaaacaaaaattgggacgccatattacatggccccagaagtatgggacggccgaaagtacgacggtgcctgtgatgtgtggtctatcgggactgtcgtgtacgagttggctgcgctggaacctccgtttcaagctaactctattatgcagctcaagcgtgttgtcaaagctggccgttttcccccaatcccgtcgatttacagctcggaactttcgagaattatcaatatgatgattgtcaccgatccatcaaagcgcccttctgctcaaacaattgtcgaccacgaactggtgcgcaaacgaagggcatcgcatctcctctcccatccggctgcggctccggaggaaggtgatgacactgagttactggcaacgatcaagccaccaaagaaaggtagtcgcaatgatcttaaaatacttgccagccagttaagccaaatgtcagggcaagtcgcaacatcgcgttctgaatcgaaaagtgatctcgcgcctccgcgaggaggccttcgaagcaatctggagcgct

SEQ ID NO: 248832 - DNA, 402 bp, Unknown
  Bacterial polypeptide expressing nucleotide sequence isolated from the Sargasso Sea
catttaatgagtgtattgatatatggagtgctggatgtgtaatctatgagatattttttgatgatgttcttaattatgctagacaagattcagattatctgctttttatacaagaagtattaggtgtacctccaaaaaactacatagatagccataataatatttcaaggtattataaaaattatgaacctttatatctccaggactctaggtatagatatagatacccattaaataatgatatttttaacatcaaaaatgaatacaatgaagatgattatgaaatcaatatctttccattacttaaatttataaaaacattccttaactgggattataacaaaagaataacaccaagacaggctttagaatttgtaggtcctttaatagaaattttataag

SEQ ID NO: 248833 - DNA, 625 bp, Unknown
  Bacterial polypeptide expressing nucleotide sequence isolated from the Sargasso Sea
atggaaaaaacaattttaaaaaaaaatctaattatttttactccttactttaatccagaaccttttccaattaatacttttgtcagtgaactttctaaaaaggaagaaatacaaagtataaaagttatcacatcactgcctaattatagaaaatatggtttttataatgggtactctatattagggccttattcagaaaagaaggataaagtatccatagcgaggttattaataattcctcgcttttctaattcaatatttgcaatttttcttttttatttatcttttttcttttcatcatttgtttatttgttatttttttcaattttaaacagaaataaataccaacatattttaactttttgtggatctcccgtttatgttggatatcttggtttttttgcctcaaaattgttaaatacaaaatcatcacaatggattcaggatatatggcctgaggctatacaaactacagttggtttacgtatgaactttttggctcgaataatacgtctcttacaagataaaatgtggaattactgcgatattttgtttgcagagtctgagtcacttaaaaaatatttatcagatatttttccaaaaaaaaaagtcataacactttata

SEQ ID NO: 248834 - DNA, 148 bp, Unknown
  Bacterial polypeptide expressing nucleotide sequence isolated from the Sargasso Sea
tatgaatgataagaaatttggcaaatcaaataaaatgcaagtacaaaaattaccaacaggaatagaaggttttgatgatgtttgtaggggtggattgcctgtatctcgaagtacacttgttagcggtacgtcaggaactggtaaaact

SEQ ID NO: 248835 - DNA, 238 bp, Unknown
  Bacterial polypeptide expressing nucleotide sequence isolated from the Sargasso Sea
atgctcgctgccttggcctattgccacgccagcggtgtcattcacagagacgtgaaaccagaaaactttctctttgagtccgaagagggcgctgaagagggtactgcaattttgaagttggtggacttcggaatcgcgacgcgcttacgcgcggaggaaacaagacctgaaatcatgcttcgatttgactccgagatgacgaccactaatagtgtactgttattgttccccgattgaa

SEQ ID NO: 248836 - DNA, 899 bp, Unknown
  Bacterial polypeptide expressing nucleotide sequence isolated from the Sargasso Sea
gttactgcacggcttgcatttctgtcacaataataacattcttcatcgtgacatcaagggaagcaacttgctcatcagcaacaaaggggtgttgaagttgggggactttgggttggcgaagtcaatcacgaacgagcaagcggcccctttgacgaatcgcgtcatcactctgtggtatcgcccgcccgagcttttactcggtgcgacctcatacggtccgtccgttgatatgtggagcgttggatgtattttcgcggagttggtgcacggcagaccgattttgccgggaaagaccgaattggagcaactcgacctcattttcaagctatgcggaactcccacgccagagaactggccggacgccgaaaagcttccgcacgcgaagcacttcaagcaaaagaagcactacccgagacgattgcgcgaggtcttcaatcgtttctctccgtgcgagaaggatttgctcgagagattcttaactttggatccgacgaagcgcatctccgcaagagaggctctcgactctgattggttttgggaagatcccttggcgtgtgatccggatgatttaccgcgttacgaaccgtctcacgagttccaaacgaagaagcgacgtcaagaggcgaagagaatgggtgagcagaacaagaagcagcgtacggaagaacgcgcaccgccgccaccaccgcaagaaatgaagcggggtccgagtggtccgaatcatggtcctcgcggctcgcagggcggtcggcctcaccacggccatcgtcccggcgggcagggctcatctggtggccgttacggcgctggatctgctgcttcgggatggtccgccggcggtggcaaaaaaaatcttactcgcgcggaggaagttccttgggcggttacggaagcgtagg

SEQ ID NO: 248837 - DNA, 673 bp, Unknown
  Bacterial polypeptide expressing nucleotide sequence isolated from the Sargasso Sea
atgtttaataataaaactatattagtaaccggcgggacaggctcattcggtatagcatttattgaaggcatttactcaaaatacaaaccaaaaaaattaattgtttattctagagatgaacacaaacagcatatgttgtctaaaatatttaagaaacctaaatacaaaggtatcagattttttattggcgatgtaagagatacaagaagactctcatcagctttaaaaaatgttgattttgtaatacacgcagctgctttaaaacatgttccaattgcagaatataatcctcaagaatgtattaaaacaaatattttaggaactcaaaatttaattgattgttgtattgaaaataacgtaaaaaaggttattgctttatccaccgataaagcggctaatccaattaatttatatggagctacaaaattggtcgcagataaattatttgtctcttcgaattctttatcagctcacacagatacaattttttcagttgtacgatatggaaatgttttgaactctagaggttcagtcattccattttttaaagacttagctaaaaaaaaacaacctttaccattaacagatatcaaaatgaccagattcttcatttcaatagaagacgctgttaaatttattattcactgtttttcaaagatgcatggtggtgaaa

SEQ ID NO: 248838 - DNA, 379 bp, Unknown
  Bacterial polypeptide expressing nucleotide sequence isolated from the Sargasso Sea
atgaaaaccatcggaaaattagcaaagtcattaaacttaaacgtagaaactattcgcttttatgagcgagaaggacttattacacaacctataaaaccaatatctggttatagacaatatgacgaatcaataaccggacaacttaggttcatcacaaaagccaaagcgctcggttttacgttaagggaaatcaaattgctaatgtctatggacaacaattgctctcaagtagagctattaagccgacaaaaactagcaatcattcgagacaaaattaatgaccttcagcgtttagaaaaagtaattttggatatgacaaatacctgtatgcaaaacgaagatccaacacattgccccataattgattcattaaaatgat

SEQ ID NO: 248839 - DNA, 613 bp, Unknown
  Bacterial polypeptide expressing nucleotide sequence isolated from the Sargasso Sea
ttgcaaagtttcgtaaataactcacatttaggtgcaggttttaatattgcgcatgaagatttagagataagaggtgctggtgaaatacttggtgttaagcaatctggtcacattgatactattggaatgtcactatatatgtctatgctcaaaactgccttaaacaatgaccaaatagaagttagtccaacatgtgaaataaaagttgctgtaacaagtcttataccggaatattatttaccctcccctgtagagagacttaaaatatacaaaaaactttcgggtgctgactctagaactttaagagaaatcaaggatgacttattagatagatgcggaaaacatcctgttgaattagaaaatttatttaaaatcactgaaattagcattaaggctaaatttttggaaattacaaaaatcgttcaatcatctaaatatcttaaatttaaattcagcaagactttaaaagataaaacattatcaaaaatattgagcactaccaatgaaagtcctgaaatgtatgaaatcaaaaaaaatggtgaactttggataaagtttaatggtcaagatgtgttaaatttactagataatgcaattcaaaaatttacataaa

SEQ ID NO: 248840 - DNA, 628 bp, Unknown
  Bacterial polypeptide expressing nucleotide sequence isolated from the Sargasso Sea
tatgtttaaaatttcaaataaagtaagaagactaacaaatcaagaaaaggacaaatatctcaaagatgggtatttgactggtttaccagtctttgatgacgaagcaaaggatgatttaaatgatttgtttgtttctttgagttctcgattgagtaatgacattgatataaatcaaactaatatgtggcataaagcaagtttaaaattttataatttatgtagaactcctgcaatccttgattatgtagaagatttattgggcccaaacttttttcaatggggaggtcaattttttcttaaagaaccaaaggatggttcagtagttccttggcatcaagatgctcaatattggcctttgtcgccagctaaatcagtaacagtttggttggcattatatgatactgatgaagaaaatgctgctatgaaagttgttaaaggcagtcacaaacaaggaatgtttaagcatcatactaataaggctagcaatcttgttctagatcaagaggtttctaatgatcaaatcaaacaagatgacataatttcattgaatttaaaggcaggtgaaatttctttacatgatgatggcttacttcacggttcagaagcaaatcattcaaatagaagacgc

SEQ ID NO: 248841 - DNA, 352 bp, Unknown
  Bacterial polypeptide expressing nucleotide sequence isolated from the Sargasso Sea
atgagaattatatcaggagatctcaaaggaaaaaaattattagctccattagataaatcgacaaggcctctaaaagacatggtaagagagtctattttcaatattttagatcactcaaataaagtatctacaaaaatacgtaattcaaaagtattggatttattctctggcactggatcatttggtatcgaatgtttatctagaggagcctcgaatgtaattttttttgaaaattatcaaaattcattaaaaattcttagaaaaaatattattgatcttaagttagaaaataaaagtactgtttacaataatagtgcttataatcttcgaaaatttcatcttaaagagggaa

SEQ ID NO: 248842 - DNA, 775 bp, Unknown
  Bacterial polypeptide expressing nucleotide sequence isolated from the Sargasso Sea
gctgcagcggctctcggcggaccgcctcttcagtggccgcgacgcgcgccaggtctgggacgcgtacgaaaagctgggcgtcctcgggacgggctcctttggcaccgtctaccgcgcgaaggaccggcagggtagcggcatcgtggttgcgatcaagcaggttggcaaggagcaggcggcggcgacgggggccgagaagggcgccttcgaggagtttgcgatgtgcgtccgcatctcccacccgcacgtgctgcgcgtcttctcgtactttgacacgccgcactcgctgtacatcgtctccgagatcgcggcgggcggcgagctgcacgagtacctgtgctcccacccggagctcaacgacgaggcggggatcgcccggctggtctcgcaggggctggccgcgatcgtgcacctccaccacgagggcatgacgcaccacgacgtcaagccgcccaacctgctggtcaccggccacgcgtgggcgggcgacgcgagcggcgcgacgccactcgtcgtgctcgccgactttggcacggccaagctgatgcagaaggcggcccaccgcgtgcgccgcgtctcgatcgtcgagggcgagggctcgaagaaggaggtgaaggcggtcgaggtgctcggcacacccgagtactgcggccccgagtgcttctcgaccctcggggccgcacacgacgcggggcggcactccgacgtctacgcgctcggcgtcacaatcttcgagctgctcgtcggcgagaaacccttccagatcgagtggggc

SEQ ID NO: 248843 - DNA, 822 bp, Unknown
  Bacterial polypeptide expressing nucleotide sequence isolated from the Sargasso Sea
gctgtacactgtggactttgaacagctctgtttcaagcagcggccgaccggcgagaacgtggtgctcggggagggatcgtttgcgaccgtgtatatggggaccctcgccgacacgtgcgaaccggttgcaatcaagaagctccgacccgagtttgctggcagggtcggcgcggtggccatgttctctaacgaggccaagatcctccgggagtgccagcacgagaacattattgggttcctcggggcagccgaggacccaggcacctcgccgatcaacaagtacttgctgctcgaactggtggtgggcggctcattcgcgaatttgcttgggctatacggtccgctattcaaccctgatttccccgccgaatcgtgcaccgcgatctcggcgtacatcgggcaggttctcgacgcgcttgagtatctgcacggaaagggctacactcaccgcgacattaagcccgagaacattctggtcgaccacctcggcctaatcaagctggttgacttcgggacgcttgttgacctcgccgggctcgatacttcgacccgagagcttgccggctcggtggcgtttgccgaccggagcgtgctgcttggcaacgagtatggacaggaggccgatatctactcgctcggcgcaaccgtgtggaacctggcgtccgggatccacccgttccacgacgtcgccacgacacaggacgagctgctccgcgcccgacgggagcgtgagcttgcggtcgtgtgcgatccttcctggccggatccgttgcgagactttgttgccgtttgcacacaaccgactgaccggccgtcggctgc

SEQ ID NO: 248844 - DNA, 259 bp, Unknown
  Bacterial polypeptide expressing nucleotide sequence isolated from the Sargasso Sea
aagacattctgcggaactccagctttcatgtcacccgaaatttgcaataatagaggctatttgggtcctgctgctgataactgggcagccggcgttgtcctctacacgatcatgtttggcatggagcccttcaagggccactctgaagtcgatctgttcaaaaagatcaatgctggcaagttgaatttcccaaccagtagccacccagattttagcaagtcaaataatgttccaacaagagacaattctgtgaggtaga

SEQ ID NO: 248845 - DNA, 682 bp, Unknown
  Bacterial polypeptide expressing nucleotide sequence isolated from the Sargasso Sea
aatgaagctgaaaattgcagttcacaaacgttgcaagaacaaacagaatcctgacaaagtatccaaaggctggtcgaatatctatgaagatctagagtggctaattggatgggtggagcatggctatggatggtgcgctacacattttaataacaggcatcgcaaggctgataacgccaatggtagtaacttaatcgtcattgactttgatggtgatactactcttgaaaaattttgggagtgtgacactgctaagcaatggtgtgcagctacttacacttcatccagccatactgaacaggagcaccgatttagagcaatcttccctttagagattgagctatcctctgtaggccagcataagggtgcatactggcttgttgttaaccgtttacttgctgagctagagcttgaaaagcttgccgacaattgtggacaaaagcctgaacgactttggtatggaaatacaaatactttgatccaaagaaatgatggtgccttagtgcctgagtttcttctcaaagatattgattttgaagaaaggcctactaacttcacaacgtctgatttatcagatcaagacattgagagatgcaagtggcttctagaaaactatctaaagcctactgaggatggtgagtatgaatcctactatgtgcctgtcatggctgcatgtgctggc

SEQ ID NO: 248846 - DNA, 513 bp, Unknown
  Bacterial polypeptide expressing nucleotide sequence isolated from the Sargasso Sea
catggaacttgccgacggtggtgacctgctgcaagccatcgagaagcgcaagaagacgcaagtcaagttcaccgaagaagaggtctggcacttcttcgtgcagattgccagaggactcaaagctctccacgatctgaaaattgtgcacagagacatcaagtgtgctaatctgttcctgaccaaggatggtgctgttaaactcggtgatttgaacgtttcaaaggtcgccaagatgggtctgctgtcgacgcagaccggtacaccatactacgcaagccccgaggtctggaaagacaggccttatgaccaccgctccgatatctggtcgctcggctgtgtcctctacgagatgatcacacttctaccaccattccgcgcgagcagcatggcaggactcgccaagaaagtgactcagggccaatacgagaaggtcccggcaaagttttccgttgaccttgctcaaatggtcaggagcctcctacaggtcgagccgcgcaatcggcctacgatcga

SEQ ID NO: 248847 - DNA, 1276 bp, Unknown
  Bacterial polypeptide expressing nucleotide sequence isolated from the Sargasso Sea
catgaatatagtggccctagtagattgtaattcattttatgcctcatgtgagactatctttaaacctgatttaagtaaaaaatctgtcgtagttctatcaaacaatgatggatgtgtcatagctagaagttctgaagctaagaaattaggaattaaaatgggagtgcctttctttgagataaagcaaataataaaaaaatatccagtgcatgtattttcatcaaattacagtttatatggaaatatctcatctagggtaatgggagtattaaaagaacattgtgatagattggaagtttattctatagatgaagctttcttaatattaaataaatattcagagagaagttttgtttcaagagcagaaggaataaaaaaaataataaggaagtggataggcatacctgtaagtataggaatagctaataataaaaccttatcaaaagtagcaaaccatctagctaaaaaagatgaattaggatcacaagtagtagaaattataaatcaaaaacaaatagaaatatccctaaaggtattaggggtgggtgatatttggggaataggagctaggatagagaaatttcttcaaaaaaatagtatctacactgcatacgatctatacaaaacagacccaaggtgggttaggcaacacttaggagtagtgggagagagaacctatagagaactacatggtgaaatatgtataccaatagtagagagatctgaaccaaaaaaacaatgtcgagtgtcaagatctttcgaaaattatgtaactagttttcatgatttagagaaaagaataatatcttatgcaactagagcctcagaaaagattagatctgatggtttgcaggcaaaaaaaattactacatttattcgttcaaataaatttaacaacaataataaacaataccatgcagctcggacttatgattttatatctccatcaaatgacttatttgagacgattaaatttgccataaaggcgctaaaatctatttatcgaccagaaattaaatataaaaaagcaggtgttttactctcagacttaactccagagggagaatacaatagagatttattttttcatcaatcagaagagagtattttaaaaaagattagggtaaataaggtatttgataatctaaataacagatacggaagcgggactatttgtgttgccaaagaaaactacgaaaagttttacataactagacgacaaaacttaagtcccgcatacacatcaaattttgatgatctacctaatgtaaattaa

SEQ ID NO: 248848 - DNA, 751 bp, Unknown
  Bacterial polypeptide expressing nucleotide sequence isolated from the Sargasso Sea
atggaaacatataataatatcctctttgtttggctaggcatttcaataattgcctttataactctgctttttaaaagcgctccttatggaagacattcagtctcttcatggggcccgtcaatatcttcgagattagggtggatcttaatggaatcacctacagtttatttaatgattcttttcatgattctctttaatagctcattgggagttgttgaggctgtatttatcctaatttggatggtgcattatgttcatagaagttttatatggccccttagagcaaaattagaaggaaaaacaatgtcagtagtaattattctgctggccatattatttaattttgtgaatgtttatattcaaggatcatggatacttatatttggaagttattcaattgaatggctttggtctccgttttttatcattggtctttcaatattttgcataggactttttatcaatattaagtcagataatattttgatcgaacttagagaaaaacatgggagtggttatcatattcctgaaggctttttgtttaataaaattagtagtccaaattattttggagagattttagaatggttgggttggtttattatgactcttagtcctgcaggattagtcttctttatctggactatggcaaatttaattcctagagctaaatcaaatcatgagtggtctttaaagaatatagaaggttatccaacagatagaaaaaaagtaatccctttcttgtattgat

SEQ ID NO: 248849 - DNA, 847 bp, Unknown
  Bacterial polypeptide expressing nucleotide sequence isolated from the Sargasso Sea
actggacactgaaagcccatttaaacgtaagttacgcatcattatttttggtaccgatacacccgcaggccgctattttgatcttggtctgatcatttgtattgtactgagtgtggcgttggtgtttcttgacacagtggaagcgtttcatcgggattatggacacattattcgggtgttagagtgggtgtttacgctgatttttaccgttgaatacggtttgaggctttattgcgcgacccatccagtactgtatgcccgcagtttttatgggttagtggatttattatcggtactgcccagttatctcgcgctctttattcctggagcaaatttcaccttagtgattcgtgtgctgcgactttttcggatttttagggtgcttaaattactgcgctacttaagcgagggtaatttgctgcttaaggcgatgatgcaatctagtcgtaaagtgttcctatttttcttttcggtgagtttaatcatcatggtattaagtgccgtgatgtatgtcgttgaggggcctgagaatggctttagctctattcctaagtcagtatattggactattgtgaccatcacgacggtagggtacggagatatcacgccgaaaaccgaactaggccaagcgattgccgcatttaccatgttgctgggttactccattattgcgatccctacgggcattttaaccgcagaaatttcccaagaagcgggacggcatagggatctgcgtacttgtaatcaatgccataaaatgggtcatgatttagatgcaacctactgtaatcgctgtggttgtgagcttgataacctcgagatccctcaagggaagggggataaatag

SEQ ID NO: 248850 - DNA, 2770 bp, Unknown
  Bacterial polypeptide expressing nucleotide sequence isolated from the Sargasso Sea
tatgcctgatgcaaaaaataaatttatttgtgaaaaagagcttttatcaaatatagcagatgacactaaatttctagaaaatgaagtcatttctcaaaatgcacaaaaaataattgagctttgtcgtaaaaataaaacagatagaactaaactagatgcatttttaagtgagtatggtcttgataacaaggagggtgtagccttgatgtgtcttgctgagtctgtattaagaattccagataaaaataccagagacctcataatttctgaaaaattatctgaaggtagatggatagatcatctgaacaaagctgatagtctctttgtaaatgcctctacttggggtctattgcttgcgggcaaagtagtatcgactccatcaaaatggtcaaaagatcctaataattttattacagaattaatttcaaaatctggagagatgccaattagaacggctgtattagcagcaatggggatattgagtcaggaatttgtgattggaaaagattttaaagatattgaaaacataaaaggtttagaaaatgaatcttattcttttgacatgcttggagaggcagcaagaacatcaagtcaagcagaaaaatattttgaatcctattttaatgcaattgatgaggttggaagattgaatttgactaaagatttatctaatggtgtttcaattaaaatttcagcccttcatccaagatatgaaatgagaaaattagatgaactagaatctaaactctttccaaagctagctgagcttattaattatgctcattcaaaagatgttgagattactattgatgctgaagaacaagatagactaagtctaagctttcatattattaaaaaattagcatttgagaaaaaaattaaggattggtcaggatttggaattgctcttcaggcatatggcaaaagagctttgagagcagtagattggttaaataaaattgtagaaaaaagagctgggatgcatttaaggttggttaaaggagcttactgggattatgaaattaaacattcacaagtttatggatacgagggataccctgtgttctcaaaaaaatccatcacagatattttctatctcgcatgtgcaaaagaaatattaagaaataaaaaactttttgctaaatttgcaacacataatgctcatacaatctcttcaattcaatatttaggtgaaggttctgattatgaatttcaaaggttatatggaatgggagagcttttataccaaagtgcatcagaaactttagaactcagttcaaaaccatctatttatgcgcctattggaagtcataaggatttacttccatatcttgtgagaaggcttcttgaaaatggagcaaatagttcttttattaataggcttcttgatcctgaaactgattctgcttggttggcagaaaatccatatgaaagattgaaaaaagaaacaaaagatattccagttccaaaaaaaatattttttgatagagaaaattctagtggtaaagacatctcagaaatagaaaacctagaagatcttaaatcaaagattgataactttagtggattaaaagttgatgcagagtccatctatgcaggaagactcgatgcaaataatacagaagaaaaagctttttcaataagcaatagatgtgaaattggaacaataactctggatgatccaattcaaattaaaaaggctcttgaaaaagatacattaaatgaatggaaagaaattgaagttaatgaaagagcaaaaattttgaatcttattgcagacgatttagagaataatccctatgaacttatttatttcttaattaatgaagcaggaaagactattcagaatgcgatagatgagattagagaagctgtagattttcttagatactattctagtcaatctattgaattgtttaataatacagaattgaatggtccaaccggtgaggataatcaaatgagtttcacaccaaaaggaacattcttatgtattagtccttggaatttcccagtagcaatattaattggtcaaatatctgctgcactttcatgtgggaacagggttattgtaaagccatcagaatactcttctattttggggtatttggttgtaaaaaaatttcacgatcatggagttccaataagtgctttaagcttaatattaggtgatggtttatatggggattttttaacaaagataaggcctcttcatggcgttgcatttacagggtcgcttccaacagcaaaaaaaattcaagctaatattattgataaccaaaatcaaattatccctctaatagctgaaaccggcggagtaaatacaatgatagtggattcaagcgctcttctagaacaagtcactgatgatgttgttagatcagcatttgatagtgccggtcaaagatgttctgcattaagagtgctctgtgtgcaagaagaaatatatgatgatcttaaaagtatgatcattggcaatatgcaaattcaaactgttggtgaccctaattttttcgacacagatataggaccaataattaatgataaggcatataaaaaacttactagttatatatcgctctgctctgaaaagggctataaaattcatcagcttaatcagaaagtttctgatatgcatattgcaccaactcttattgagattaattcaatttcaaatataacagaggagcaatttggtccaattttacacatcctcaaatactcatcaaatgagatagatgaactaattaaccaaattaatagaaagtga

SEQ ID NO: 248851 - DNA, 2155 bp, Unknown
  Bacterial polypeptide expressing nucleotide sequence isolated from the Sargasso Sea
ttgaaaggcacagttttatatgatgttaaagaaggaatagcaatacttacagttgataacccacctgtaaatccattaagtgacggcgtaagaacaggtttgttcgaatctctcgtaaaagctgaagaagactctagtgtctcgggtgttgttttaactggaaatggaagagcttttattgctggtgcggatatttctgaatttggtggaaatgtagaaggagttagccttaatgaggtattcaataaattagaatattgttcgaagcctgtggtagcagctataaatggaattgcattgggaggtggcttggaaactgcgctatgctgtaactatagaatagctgataaaaacgcttttgttggtcttcctgaagttaatttaggacttttgccaggaggtggcggaactcaaaggcttccgagactagttggccctggtgaagcactgaaaatgatgctttcaggcggtcatgtccctgcaaccaaggcattacatatgggcattgtcgataaaatatctgaaaatgttgttgaagatgctatggcatttatcaaagaagtatctgaaagtgttgagaatcatccaaaagtaagagataagaatgaaaaaatgatcgaggcaagaggcgatgataaagttatgcttgaagctcaagcattggctgcaaaaacaagaaaaggacaatttgctcctggacagattattaaatgtgttgaatctgctataaatcttgatgattttgacgagggtttgaagaaagaaggtgaatactttctggagtgtctgcttcatcctcaaagagaagcaatgattcacatgttctttggtgaacgtgcagcatcaaaaatatcagatgtccctaaagataccaaggtcatggatattaaaaaagctgggattattggatctggaacaatgggtggcggaatagctatgtgctttgccaatgctggcatccctgttcacataattgatcaagatcaagacaacctggcaaggggtatttcagtaattgaaaagaattatgattttatggtcggtagaggaaaattaacacaagatcaaaaggatgctgtttttggtctcgtatcctctagtcttgattataaggatgtatcggattgcgatattgttattgaagcagtgtatgaaaacctagaattaaaacatgaaatctttaagtcattagatgagcatgtcaaggatgatgcaatacttgctagtaacacatccggtttagatatagattctatagcatcagtaactaaaaggcctgaaaaagtagtgggtactcacttttttagtccagcaaacatcatgaggttgttagaggtggtgagaggtgatcagacttcaaacgaaacattagctacaataatggcaataggcaagaagctgaaaaaagctgcagtagtatctttgaatgcacctggttttattggaaatagaatgttatttggttatacagctcaagcaaatatgcttttattagaaggcgcccttccccatcaaattgaccaagctctagagtcatttggactaaacatgggaccatttagaatgatggatcttgttggattagatttggggtggagagcaagaaaacttggaggcaaagactccccattacacgcaaagattggtgatgaattatgtgagcaaaatagatatgggcaaaaaaatggagctggttactataactactctgaaggatctagggcaccaaatccagctccagaaaatgaggccacctatgaaaagatatcagctgagaatggtttcaccagaagagatatttctgatgaagaaatcgtcgatagatgtattcttgccttaataaatgagggtgcagatattttatctgaaggtgttgctcaaagagcagcagatattgatgttgtatacattaacggatatggattccccatatggagaggaggaccaatgcatcatgctaatgctatgggtttagatgtagtgatagaaaaactaaataaatacagagaaattactggtaatgatgtatataagccaagcgaaatgctattaaaactagctgaaagtggcgaaagattaggtgaagcacccgcaaaagaagatagaaaagaaaaattagactttgaaatgtcttcagttgcaaataatttctaat

SEQ ID NO: 248852 - DNA, 1165 bp, Unknown
  Bacterial polypeptide expressing nucleotide sequence isolated from the Sargasso Sea
tatggaaactaagaatattggattgagaaacataccaattgcagatacaaaaatatcgttaattgatggagaaaaaggcaagctcatttatcgaggatttgatgttttagatttaacaaaaaattcaaattttgaggaatgctgtttcctgcttttacatgatcatttaccaaataagatagaattcaatgaatttaccacaaagctgaaagaagccagagcaattcctgaacaaatgcagaaaaatatgaaaaactggaggaaaaatgctcaccctatggatgtactgcaagcatttgttgcagcacttgcaggatattacgatgaacaaggtacagaaaaagaaattagccaacaaagagcaatcaatctaatttcaaaagttccaaccatcattgcaagttgggagagagttagaaatgacaaagagccaattcaaccagatccagaattgagtcatgcatcaaattttctatacatgttgacaggaaacaagccagataaagaaatggaaagagtgtttgatgtttgcctaattttgcatgcagaccacacatttaatgcgtcaacttttgctgcgagagaagttgcatctactcgtgcacacatgtattcagcagtaagtgctgcagtaggcgcacttagtggagaattacatggaggagcaaattatgaagttatgaaaatgttactagacattaaagatgaaaataatgccacaaattgggttaaatccagaattgaaaaaggagacagaattatgggcatgggacatgcagtttacaaaacagttgatcctcgttcaatggttctaaaagaattatcaaaaaaattatcagcaaaaacaggattgccgtggtataacattacaaaaaaagttgaagaaactacttcagagattatgaaaaatagaaaagagcgagatatttttccaaatgttgatctttacagtgcatcagtttactatatgctaaacattcctatggatttgaacacaccaatttttgcaatatcaagagtttcagggtgggcagcccatgttattgaagagaaatttgcggaggccgcaccaaaaccaatgttgtacagacctaaagcaacctatgttggaaaatacgaaggaccgcaaggatgtaattacataccaatagaagaacgaaaataa

SEQ ID NO: 248853 - DNA, 2746 bp, Unknown
  Bacterial polypeptide expressing nucleotide sequence isolated from the Sargasso Sea
tatgaaagatccgaggggttcagtgtggcgcaagtgggatttgcatattcacacaccgttctcgttccactggaacgaaggggccaatatcaagaagctaccgccggaggagcgcgaaaagattctcgatcaactgatagaaaaaatcgtcgaaagcgatgtcgcggccttcgggatcatggattactggacgttcgacggctacttggccattagggagcgcttggcggcgcgcaaacttgaaatttccaaggcaatatttccgggcatggaattgcgcattgaagcccccgtcgattttcgcctcaacatccatgtgctcctctctgatgcgctcaccacgcagaacctcaacgacttcaagtcggcgctccaaatccgttcgagtaacaattacgcccgcgcactttccaatgaggcattaattgaatacgcgcgcagcctcgacccgagcaaggcgaagattcatggattccaagatactgatctcaaggatgaggagaagctgcttcggcttgggagcatgacagcattggtgacgcgggaatcgctgcgcgatgctatcaaacggattccgccggatacttgcctagtgattatgccctacgatacctcagatgggctgtcggaacttgattgggaaaagcaccctcacgacgacaattacttcatgcggtcggcggatatctttgagacacgcaacccagacaatgtcgacctcttccttggacgcgaaaccgacaagaatcgcaagttcctggccaatttcgtcaagacgatgggaggcaagcccaagccggcaatttcgggcagcgacgcccacaagattgctgactatggcgtattcccgagcaaccgcatcacctggatcaaagccgatccgacgttcgagggcttgcgacaaacaatctatgagccgattagtcgcgtgcaaatttcagccgaaaagcccatagagcctctgttcgcgatacgtaacgttgtgctgaattttccggctgatgccaagctcgtgagcaacatcgtgtctgcgagtcaacccgaccccttctgctttcgcgggagaaccgagattgtcttcagtgcctatctcacctgcctcatcggaggtcgaggctcgggcaagagcacgctacttaatctgttacatgagaagctcgatccgggccgcaccaggtttttcgtggacaacagcctgacgccgacgaagacgactgacatcgcaagctgcgtcaccatcgacggcgatgcggaacagaagatcgttgagttccttcagcaaaacgagatagagcaatttgctgtcgctccccatggcttcaccgaggcgatattcaagcgcttgtcaaagcgcgacactgacgggaagcttgctaccatcgatgaggccattcaatcagccattgatgagactgaggcgcagagccagcgattggcagagcatcacacgctggccatcacgctagccagcgccgaaaaggaactggcgacggctaggactctcatcgtttccttccaaaatcctgaatacactcaactcaacgcagacctcggagcctccaacaaggagttgcaagggctgaggacctggcgctcgcggctggagtcactcctcaaagagctaagggctgtatgccaaaagcaaaaacttcccccctccgagacacctaatctttacgagactgagttttttgcaattcaaaaggccattgacgagcttcttgtcccagtcgaggcccgtgccaacttagccgatgcctccgcgcgcgagacggccttgacgcacgaagtagccgcgctcacccagaaactcgaggactttctcagaggccgcggcctctcgcaggaaaacctgcttgacgtaggaaaagccaatgagcgcatcgctcagatcgagcaagagcttcccgcgcaaaaagcgaaggcatccgaacttgagaagcagatcgctgcgttcaagaaccaacgcgagctcatcgatgagcgtgttggtgttgtgacagagcttcttatgccgctcaatgacacgctgtcacgcctaggaaaggaggtcaaacctatcgaactgcgctatgagttcgacgatgcgcagtttaagcaggtaatggtcgaacgcatacaggagcgctttgaagcgggcgacgggccagcgccgcgtatcgatcacctccacactatgctgtcaagtgtcgacttcaagagccttaccacatcggcggacttcctctcaaaactacctggggaaaggagcactgccaagctattgcgtgatcacttttccaacgagccgaattttgagctgctgaaggtcgaggcagagaagttgttaatggatcatcgggcgttcggcaggattcgcgtctcatacgacggcaagcccgtcgagagttcatcatttggccaacgatgtacgaccgtcatcgttatcttgctgttgttggggaacactcccatcgttatcgacgagccggaggcgcacttggatagcgcgcttatagccaattacttggtcgaacttgtaaagaaggcgaagcttaacaggcaaatcatcttcgctacacacaacgctaactttgtagtcaatggtgacgctgagctgattcatgtattggaaatgggggcggacaagtccacgaaggtcgtaagcgtcacaatcgagaatcttgagcaccgggggaagctgcttacgcttgagggtggctccgaggcattcttgaaacgggagtcccgctacggcatcgcgtaa

SEQ ID NO: 248854 - DNA, 614 bp, Unknown
  Bacterial polypeptide expressing nucleotide sequence isolated from the Sargasso Sea
tatgagcttagaagacttctataatttgtttcttgcactatgggctcttacggctattgggacctttattggacttttttttaaagttgctccctatggtagatatcttgattcagtaacttcagtaactctcccctcacgtattggatggatattaatggaatctccaacggtcgttggtattcttatatttcttcttatgtttcaagaatctattggttatgtcgagatatgcttaagctctatttggttactgcactacatccatagaactttcatgtggccttttcgagcaaagttagagaataaacgaatgactttaacagtcatattgatggctcttttatttaatacagtaaacataacaattcaatgtttatggatatttattcttggtgaatatgtcgatgaatggttattctcaccttttttcttaattggtttatctctcttccttataggcatgttaataaatataaagtcagataatatcttaatgaatttaagaaccaaccatggagaaggctatcatgtcccgaatggctttttatatcgatatataacttgtcctaattatctaggtgaactaatagagtggtttggttggtttgtat

SEQ ID NO: 248855 - DNA, 514 bp, Unknown
  Bacterial polypeptide expressing nucleotide sequence isolated from the Sargasso Sea
atggaagataaaaaaattgtcctatttgaccttgatgggacacttattgatactgctcctgatatgtatttagcattaaacatccttcttgatgaagaaaatgtaaaaaccgtatcctatgatgaggtcagaaatcaggtatcaaacggtgtattaggcatattttcagtcgcattctctgacgattctgaaattgagggcgaaagatatgaacgatatcttgatatttatgagtcagtcttaggtcaagaatgtaaactttttgataatgtatatgagctcttagatagcttagactcaagagaaattgattatggtgtcgttaccaacaaatcaagtcgttttactattccattattaagtcaatttgatctccttagaagaatgaaaactttagtatgcggtgatgaagttaacaatagaaaaccagaccctgaaccactgattaaggcgttagataaaacggagaattcatataatacaagccaatgtgtattatgttggcgatgctgaa

SEQ ID NO: 248856 - DNA, 871 bp, Unknown
  Bacterial polypeptide expressing nucleotide sequence isolated from the Sargasso Sea
tatgtcagatctgtcgcctgaaaaaccagacaccgaaagcccattaaaacatcagctacgcaccattatttttggcactgatacgcccgcaggacgctacttcgatatcggcttaatggtctgtattgtgctcagtgtggcgttggtgttcctcgatacggtcgaagcggttcatcaagattatgggcacatcattcgcgttttagagtgggtatttacgctgatttttaccatcgaatacggcttaaggttgtattgcgcgacccatcctgtgttgtatgcccgcagcttttacggtttagtggatttattgtcggtattgccgagttatttggcgctgtttattccaggggcgaatttcaccttagtgatcagggtgctgcgcctctttaggatctttcgggtactgaaattactgcgctatttaagcgaaggtaatctactgctcaaggccatgctgcagtcgagccgcaaggtgtttttgtttttcttctcggtgagtttgatcatcatggtgttaagtgccgtgatgtatgtggtcgaaggccctgagaatggctttagctctatccccaaatccgtatactggaccattgtgacaatcacgactgtgggttacggcgatatcacgccaaaaaccgaattaggccaagcgattgcggcttttactatgttgctgggttattcgattattgcgatcccaacggggattttaaccgctgaaatctcccaagaagtgggccgacacagggatctgcgttcctgcaaccaatgccataagatgggccacgacctcgatgccacttattgtaatcgttgcggttgtgagctggataagctcgaagcgccccaagcgaaaggagataagtag

SEQ ID NO: 248857 - DNA, 1006 bp, Unknown
  Bacterial polypeptide expressing nucleotide sequence isolated from the Sargasso Sea
tatgttgtcaaaaaactctacaattttaattactggtggaactggttcatttggacgagctttcttaaataaattgattgattccaaagtcaaagagattcgaatttttagcagagatgaaaagaaacaagatgatatgcgaaaagagtataaaaatgataagttaaattttgtaattggtgatgtgagagatcccaacagttgcaatcaagtcaccaagggagttgactatatttttcatgctgctgctttaaaacaagttccttcatgtgagttctatcctatagaagcagtaaaaacaaatgttttaggaacagaaaatattcttaactcagcaattacaaacaaagtaaaaaaaataatatgcttaagtactgataaagctgtttatccaataaatgccatgggcgtatctaaggcgcttatggagaaaatagttatagcaaaagcaagaatgtattcagattccaataccactatttgtttaacaaggtatggtaatgttatgggttcacgcggttcagtaatacctttattcgttcaacaaattgagcaacaaaatccgctcacagtcacagacccaaatatgacaagatttttgatgactttagatgatgcggtagatttagttttattcgcgtttgaaaatgggataaatggagatatttttgttcagaaatctcctgcatcagatatacaaactttagttaatgcagtaaaaaaatatttaaatgttgaaaatcaccccgttgaaactattggaacaaggcatggtgaaaagttgcacgaaactcttctcagtagagaagagttcgcaattgcagaagatctaaacgatttttataagatatcgcctgatttaagaaatttaaattacgaaaagttctacgaatcaggagtgcgaattgattcaaatgaggattacaattcatctaatacgcgtcaattaacagaaaaagaaatcattagcttgcttgaaaaaattaatattaattctatagagtag

SEQ ID NO: 248858 - DNA, 826 bp, Unknown
  Bacterial polypeptide expressing nucleotide sequence isolated from the Sargasso Sea
catggtggaggcgagcgcgggggcgcggcgggcgaacgcgagcggggcgacgaagacggcgtcgacggtgagcgagacggagacgaagacgaagacgacgaagagagagacggcgccggtgggggacatgttcggggaggattcggacgaggacgcgttgtttttgaatccggcggacgacgcgggaggaatggcgaaacccgcgggggcggtggacatgtcgagaggtttggctgataactgggacgacgccgaggggtattactgcgcgcgcatcggagaggtgctcgacgatcggtacacgatcacggcgcacctcgggaagggagtcttctcgagcgtgttgcgcgcggtcgataagacgaaggacgatggagagagtgaagtcgcgattaaagtcattcgatgcaacgagacgatgcgcaaggcggcgcagttggaaatcgatatattacaaaaactcagtggaagcgatcccgagaataagcgacattgcgtgcgatttctacgacactttgagtatcgtgatcacgtcttcatcgtgttcgagtcgttggcgaggaacctgcgcgaggtgattaaaaagtttggacgcaacgtcggcatcaacatcaaggcggtacaggcgtacgcgacgcagttgttcatagcgttgagacatcttcaaaactgcggcgtggtgcacgcagatatcaaaccggataacattctcgtcaacgaaaatcacaacgtgctgaaactgtgcgatttcggaagcgccatgttcgatggcgacaacgagttgacgccgtacctggtgtctcgcttctaccgagcgccggaagtc

SEQ ID NO: 248859 - DNA, 922 bp, Unknown
  Bacterial polypeptide expressing nucleotide sequence isolated from the Sargasso Sea
tatgaataaaaaatcaattgttttaattacgggtggaacaggatcttttggaagagctatgtctgaacgattaattaaagataaagttaaagagataagaatattcagtagagacgaaaaaaaacaagatgatatgagaagagagtttaatgactccagaattaaattttatattggagatattagagatgaaaaaagtgtagagaatgttgttcaaggggtagacttcatatttcatgctgcagccttaaaacaagttccttcatgtgaattttatccaatggaggctgtcaaaacaaacatcctgggagttgaaaatcttcttgataaggcaattagagcaaaagtaaaaaaaataatttgcttaagcacggataaagcagtttacccaattaatgctatgggagtatcaaagtcaatgatggaaaaagtaataacagctaaatcaagaaattcaaaaaatactaatatttgtataactagatatggaaatgttatgtataccaggggatcagttttacctttatttgtaaatcaaattatgcataaaaattatattacagttactgatttatcaatgacaagatttatgatgtctatgaatgatgcaattaaccttgtactctttgcatttaagaatggaaagaatggagaaatatttgtaaagaaatctccagcagcaactatagacactattgtaaaatcattaaataaaatatttaaaaaaaaaccaaaagtaaaaataataggttccagacatggtgaaaagtttcatgaaactttattaactaaagaggaatttaagaaaactattaattttaaaaatttttacaagattgtttctgacaatagagatctcaattatgacaagtatttttccaaaggttcaaaaaagaatatatcagacgattatacatcagaa

SEQ ID NO: 248860 - DNA, 340 bp, Unknown
  Bacterial polypeptide expressing nucleotide sequence isolated from the Sargasso Sea
attaacctagttttttatttaggtttattaatcttctttatgggaatgtttatcaatataaaatctgacaatattctcataaatttaagaacagcaaatgaagattattctattcctactggcttcttatttaacaagataacttccccaaattattttggtgaaacaatagaatggttaggttgggcactacttacctttaattttgcaggttttgttttctttatttggaccttattcaacttgctacccagagcaatatcaactcataaatggtatctatcagagtttaaagattatccaaaaaatagaaaaatatttataccttacatattctaat

SEQ ID NO: 248861 - DNA, 907 bp, Unknown
  Bacterial polypeptide expressing nucleotide sequence isolated from the Sargasso Sea
attttggaatcataaaaatataatatccttatctttgctcccactaagcttagtcgtccaattagttatttttctaaaaaaaaaatttacaaaaactgttaattttaaaatacctattgtttgcataggaaatgtttatgttggtggaactggaaaaacaccattgtctattttagtttcaaaagaattatcaaagataggaaaaaaaccagtaattataagaaagtattataaagagcataaggatgagcatgctttaattaaagaaaatttgaataatttgattttgaatttaaataggactgacgcaattcaagaagctcagaataagaatttcgacacagctatattagatgatgggtttcaagattttaaaattaaaaaggaccttagtattatttgtttcaattcaaactttgagggaaatggctttgtaattcctgcaggtccacttagagaaaacctgaattcaataaaaaatgctcaaattatagttataaatggatataaaaatttaaagtttgaaaagaaaattttggaaataaataataatattgatatttactactcaaaatacaaagcagttaattttgagaaattcaatcaaaaggagctacttgtaattactggaattggaaatccggaaaattttttaaatttattaaataatcacaacctaaaaatagcaaaaaaatatattttccctgaccattatacttttagtaaagaggagctttacaattttatacgtgaggctaaaaaaaatggttatcaaataatttgtactgaaaaagattatcatagaattaaagagtacagtattgaagaaatagactttttaagagtagaattagttttagagaaaaaagaaacactaataaaaaaaattcaggatatttatgattaa

SEQ ID NO: 248862 - DNA, 1978 bp, Unknown
  Bacterial polypeptide expressing nucleotide sequence isolated from the Sargasso Sea
catggacaggaaattcgactacccgggattgctgatcgcggcgggcttcttcgtgctgttcgccgcgcagttgctgatgctgcatccgacgtcggcgccgattgcgtacagcgatttccaccagctcgtcgccgcacggctcgtcgacgatctcgaagtcggccccgtatcgatctcgggcacgttgaagatgccgcaggcgggcacgatgctgccggcgtccgaagccgcggccgtgcgggaggccggtgcgccgtggcgcttcacgaccagtcgcgtggccgacgagcacctgaccgacgcgctgaccgccgccggcatccgctatcacggtgcgcccgacacgagctggatcgcatcgcttgcgtcgtggctgctgccgctcgtgctgttcgtgttcatctggaacatgatgctgcgcaggcgcggcgggctgcaggatttcaccgggatgggcaagagccgcgcgcgggtgtacgtgcagcaggaaaccggcatcacgttcgacgatatcgccggcatcgacgaagcgaaggccgaacttcagcaactcgtcgcattcctgcgcaatccggaacgctaccagcggctcggcggcaagatcccgaagggcgtgctggtggtcggcgcaccgggcacgggcaagacgctgctcgcgcgcgcggtggccggcgaggcggccgtgccgttcttctcgatcagcggctcggcgttcgtcgagatgttcgtcggcgtgggcgcggcgcgcgtgcgcgacctgttcgagcaggcgcagcagaaggcgccgtgcatcgtgttcgtcgacgagctcgatgcgctcggcaaggtgcgcggcgtcggcccgatgtcgggcaacgacgaacgcgagcagacgctcaatcagttgctcgtcgagatggacggcttccaggccggctccggcgtgatcatcatggccgcgacgaaccggcccgagatcctcgatcccgcgctgatgcggccgggacggttcgaccgtcacatcgcgatcgaccgccccgacgtgaatggccgaaggcagatcctcggcgtgcacgtgaagcgcgtgaaactcgcggccgacgtcgatctcggcgaacttgcatcgcgcacgccgggcttcgtcggcgcggatctcgcgaacgtcgtcaacgaggcggcgctgcatgcggccgaactcggcaagccggcaatcggcatggccgatttcgacgaggcgatcgaccgcgcgttgacgggcctcgagcgcaagagccgcgtgatgaacgcacaggagaagctgaccatcgcgtatcacgaggccggccatgcgctcgtcgcggaaagccgcacgcattgcgatccggtgaagaaagtgtcgatcattccgcgcggtgtcgcggcgctcggctatacgcagcaggtaccgaccgaggatcgctacgtgctgcgccgaagcgaactgctcgaccggatcgatgccctgctcggcgggcgcgttgccgaggagctcgtgttcggcgacgtgtcgacgggcgcgcagaacgatctcgaacgcgcgaccgcgatggcgcgccacatggtcatgcagtacgggatgagcgagaagatcgggctcgcgacgttcgacgacggcgatgcgcgccagggcatgccgggcgcgtggcatgggggcgacgggcgctgcagcgagcacaccgcgcggatgatcgacgacgaggtgcgcacgctgctggccgacgcccatgcaagagtcgcgacgacgctcggcgaacgccgcgatgtgctcgaacgcatcgcgcgccggctgctgcaatgcgaggtgctcgaacgcgacgcgctgcaggcgctgatcgacgggcgcgtcgaaccgccatccgccagcacgatggcgccggacgacgcagccggcgcacgcgacggcacggtcgagacggagcaggcgtccgcggtcgagcgcgatttcgtcgcgtacgggccgccacgcgaacccgagcgctga

SEQ ID NO: 248863 - DNA, 406 bp, Unknown
  Bacterial polypeptide expressing nucleotide sequence isolated from the Sargasso Sea
tatgactgcagcccttgccctcggtttgaaacatcaaatcctgctaaccgttgaaaaaaatcacactgcggatgcgtatggtaatcccggggttgaagtctttgccactccagccctgatcacacttttcgaaaacgtctgtggagaatgcatcagaccttttctcagcgaagatggattcagtgttggaacaagggtggacatcagacaccttggagcaactcctttaggatttgaagtcagtgcacaatgtgaggtgatcgaagttgaccggcggcgtgtagtatttcgagtcgaagcccatgacggagttgaaaaaattggagaaggaacccatgaacgatttatcatggacaaccttgatttgtttcttcaaaagacccgggacaaattccagcagagataa

SEQ ID NO: 248864 - DNA, 1612 bp, Unknown
  Bacterial polypeptide expressing nucleotide sequence isolated from the Sargasso Sea
catgtatctagaattccgaactgaaaccgataacgagttcagtgctggtacctgggtcgaagctcctggttttaatatccccattaaaattgataagactacaatgccgcatgcattgacaatcaattctgatggaagttttagttttgctccttggccacactgggaagatagattagttggtgacgaggttactaacccaacaccacactttatctccacaactggtggtattaacagatacattaaagacatctttgtctaccgtaaccgtctaggtttcttgactgaagactacgtaagcttgagtaaagctggtgagttcttcaacttcttcgctaaatccgctgtcgcttcaggtaacgatgaccctattgatatttctgtttctgacaatgatagtcctagccttaactatgtgagtaaggagactgctggtttgctgttgtacggtaaaactggtcaatacttgctggcaactgactctgacattctctctccaaccactgctaaaattaacaaagtggctggctacgaggctgatatggataacccagctatcagccttggttctacaactgcgtttatctctaagacagcaagtacaactaagatgtttgagctgctaaaagttaacgctcttgaacctcctcaaagtattgaacagacacggacagttccagaactggtacctactgatgtagactctattgtaggatctcctgacgttggtttggtgtcgtttggtaaggttggtacaaaagacctttatcactttaactatctcagagctgctgatcaagaaattggtagtgcctggtatagatggaaactacctggtaacctagagcatcaattctttgacggtaactcctaccacactattctccgtaccgataacaatgagcacgttgttgtatcttttgacgtggctcaaagttctactgacggtgtgttgagtttggagagtggtaagaagactgaccttcaccttgatgtattccaaaacaacccattcactacttacacagaagtggctgctggtagctatgtcaacaagacaaaggtttacctacctactaataaagtcacaggccttaaattggttgttgtgatgtactcaaaccggtcacaggtgttcgatgaggacaatgtgacatacacaacagggagtgactcgtatggcgattatgtcgaagtttccggtgattggcgaggctctgatgtatttattggttataagtttgatatgtcggtagagttaccgaggatgtattacaagaaatcagagaaccagcaagtcagttctgatattgatgctgacctgatccttcaccgtctacgtgtgaagactggtttgactggtccagttgattataagattaaaattatcggtatcccagtgcgaactagcactgtatcggtcacacctcctgagcagtatctactgaacagtactaacatgaccgagagtgctgtgcatgacgttcctgtctatcagcgcaacaacaacactactattactattcaaagtaatacagcattccctacaactattgaatctatcaactgggaagggcgctattcgactaattattataggaggagttaa

SEQ ID NO: 248865 - DNA, 988 bp, Unknown
  Bacterial polypeptide expressing nucleotide sequence isolated from the Sargasso Sea
atgtttaatgataaaacaatcttaataacaggtggaacaggttctttcggcagaaagtataccgaaattattctcgaaagatattcaccaaagaagttgataatcttctctagggatgagcttaaacagtatgagatggagcaagaattcaatgatggttgcatgcgttatttcatcggtgatgttagggatgaagcaaggctcgatcaggcaatgattgatgttgattatgttatacatgcagcagcaatgaagcatgttacagcagctgaatataatccaatggaatgcattaaaacaaacatcaatggggcacagaatgtaatttctgctgcattgaataataatgtagagaaaattatcgcactatccacggacaaggcagcaaaccccatcaacttatatggtgctacaaagctagcttcagacaaattatttgttgctgcaaacaatattggaggaaaacaaaatacacgcttttcagttgttaggtatggaaatgtaattggttctagaggatcagtggttccatattttaaaaagctcataaaaaatggcgaaacccatcttccaatcacagatgagtctatgactagattttggattacacttgagtctggcgttgattttgttctaaagaatttcgaaagaatgagaggcggagagatatttgttccaaaaatcccatccgcaaacataatggatgtagcaaaagcaattgcacctgaaatgccaacgaagattattgggataagacctggggagaaattagatgaagttatgtgcccttctgatgactctcatcacaccattgaatttgatgatcactacgtaatagcacccagcgtagttttttttacgtcagacaataatttttcttcaaatgctctgaatgaaaacggaaaacctgtcgataggggatttgaatatcaatcaggaaccaaccctcactttttgagcgtagaagaaattaaacaacttctctaaa

SEQ ID NO: 248866 - DNA, 1372 bp, Unknown
  Bacterial polypeptide expressing nucleotide sequence isolated from the Sargasso Sea
atggagatccaggaggcggagagcgtcgacgtcacggtgcaccaggggagaaactttggcgatttttcagccaagaagatatacgatgaattcgacgttcaagagctcataggtcgaggtatttacggctctgttcgtcgagcgaaggatcgcctgacgggcgacgtcgtcgcggtaaaatctattttgcgctctcgcatggtggcaagcgccatcacggacgagtgcgacgtgttgcaagtattgtgcgggcatcatccgaactttccggcaaagtttatgatttacgaggatcacccaaaattgaagagcgaagtgacgcacatcgtcaccgacttatacagcggagggacgatgattcaggcgatatcttcgcgcggtttgtttgatgaaggcgattggtgcgtcttcgcgaatcaacttctcggagcggtgtctttcatgcactcgctgggcgtggcgcatcgagatttgaaaccagacaatatcatgctcaaagaaccgtggtcgcccacgccgggaagcataccgacgctgaagatcatcgatttcggtagcgcgacattttgcctgtccaacgaaacaatgcgaggccacgtcgggaccaagtttttcagcgctcccgagtgtcttcggaggaagccgtacacgaagaaatgcgacgtgtggtccgtgggagtgcttctcatggtgctgctcaagggtttcccgtccggtctggaagtcgaggagcagtggcgttcgctgcagcgaggcgaggaaccgtcgtttccatcgagcattccgaagcatttcatcaagctcatcaaagccgctctcgtcatggatcccgcacgacggccgagttgcggaagcattctgaaagccgcagacgaatggctcggtacttcgttcacgcacaacagagtcttcacgagtcccaagaagagccgtcccgctcgaccgttatcgttgccgaaagatttcaaggcggcgtacgatctgcacgtcgaaaacgtcaaggcgacgagcgtcgtacgagatcaacaggaggaccatgaagaggaagacatttcggtgtacaaaggcaacagctggcaattagatttacgcttagaaaaaggtgtggtgcgaagcccctctggacgtgcgctcgacgtcgtggaaagtttgagcacgcataacaacgtgctgatatatcagagacacgtcacggacatgttgagcgtcgtcgcgactccgattgaagttcgaggcgtgatgaaaaacatcaactcgaaactccaggggcgataccagaggacagggcgaaacgaacacacgtggtgtcccgcgctgatgttggaagaagccgcgaatgataccggcgccgtcgacgtctggcgcaactcaa

SEQ ID NO: 248867 - DNA, 536 bp, Unknown
  Bacterial polypeptide expressing nucleotide sequence isolated from the Sargasso Sea
tcctacaagtattatttttatatcttgttgggtattacattattttaatagaagtattatttatccactcagacaaaacaatcctgcaaaaatgcctttactaattgcattgcttgctttcttgtttaatatagtaaatggatatatcaatggaacatatttaggctccatacaagaatattcaattgattatatgtctaattggaactttatacttggattatgtttatttattcttggagcatatataaatataaaatcagataatattttactttcattaagatcaaagtctggagaatataaaattcctgaaggatttatgtttaaatacgtttcatttccaaattatttaggtgaaatacttgaatggatggccttcgcacttatgacgtggtcgttggcaggattatcttttatgatttggacaatggcaaaccttgttccaagagcaattaaaggacatcaatggtatcatagtaaatttgattcttatcccaaaaatagaaaagctatttttccttatattatttaaa

SEQ ID NO: 248868 - DNA, 1081 bp, Unknown
  Bacterial polypeptide expressing nucleotide sequence isolated from the Sargasso Sea
aatgtcagaaaaaaaagtaagaggtgggtctctaattgcaagagctttaagggataaaggcatagagaatgttttcactttatcaggtggtttctgtaatcctgctttagaaggattaatggaatgtcaaatagatgtaataaattgtccacatgaacagattgcaggacaccttgctgatggacacacaagaattacaagaaaacctactgtatgtttagtcgggccagagggatttgcaaatgctgtgccatctatgatggaagcgtggggagaaagatctccagtgatttttatcactggatcaagtagtttaagaagacaaggagcaggaggatttaaagaaattgatgatgtaaaaattgctgaaccattaacaaaatatagcgcaagtattactgatggaaatagaattcgtgaatttgtagataaagcttatttaatagcaacaaacggttacccgggagcagttcacttaagtgtcccggttgatatcatgttttcatcttttcctgaaaatgcaggattagaggaaagacctttttctcaatcaaaaaaaataaaaaatattgcttggccagaccccaatcaaatgagtgaagttttaaaattagcgtcgaattctaaaaaaccaatgcttattggtggccatggtgtctggtggtcaggttctgagaagaaattagaagctgcaggtcaaaatttaaatattccaatttttaatgttccataccatcaaaaacttttaggggaggaagctaaatcgtacatgggattggcagatatacaccaatatcccccttcaaaatttgcgtttgatgaatcagacttaattttaatggttggaacaagacttgacaatcagatgaattttgggaatcccccactatttcctaaatctacaaaaattgtttgtataaatggatctcatgaagaaatcgaattaaatagagctgcagatattaatatgctgtgtgatccaggggtatttttggacactttaagtaaattaaaagtaaataataaatggaatttagacagtaaatggattgagcaaaacatattagaaaaaaagaaatgg

SEQ ID NO: 248869 - DNA, 1052 bp, Unknown
  Bacterial polypeptide expressing nucleotide sequence isolated from the Sargasso Sea
aatgtcagaaaaaaaaataagaggtggatctctaattgcaagagctttaagggataaaggtatagaaaatgtttttactttatcaggaggtttttgtaatcctgcattagaaggactaatggaatgtcagatagatgtaataaattgcccgcatgaacagattgcaggacaccttgctgatggacatacaagaattactagaaaacctactgtatgtcttgttgggccagaaggatttgcaaatgccgttccatctatgatggaggcgtggggagaaagatctccagtgatttttatcactggatcaagtagtttaagaagacagggagcaggaggatttaaagaaattgatgatgtcaagattgctgaaccattaacaaaatatagcgcaagcattactgatggaaatagaattcgtgagtttgtagataaagcttatttaatagcaacaaacggttacccgggagcagttcacttaagtgtcccagtcgatatcatgttttcatctttttctgaaaatgcaggattagaggaaagacctttttctcaatcaaaaaaaataaaaaatattgcttggccagatcccaatcaaatgagtgaagttttaaaattagctacgaattctaaaaaaccaatgcttatcggtggccatggtgtctggtggtcaggttctgagaaaaaattagaagctgcaggtcaaaatttaaatattccaatttttaatgttccatatcatcaaaaacttttaggagaagaagccaaatcgtacatgggattagcggacatacaccaatatcccccttcaaaatttgcttttgatgaatcagacttaattttaatggttggaacaagacttgacaatcagatgaattttgggaatcccccactatttcctaaatctacaaaaattgtttgtataaatggatctcatgaagaaatcgaattaaatagagctgcagatattaatatgctgtgtgatcctggagtatttttggatactttaaataaattaaaagtaaataataaatggaatttagacaataagtggattg

SEQ ID NO: 248870 - DNA, 1024 bp, Unknown
  Bacterial polypeptide expressing nucleotide sequence isolated from the Sargasso Sea
tctgacgtcggagtatagaatcgtatcgctcttgggagagggtacgttcggtcgagtgttcgagtgctgggactttgtcaccgagagtacgtgcgccgtcaaggtgattcgcaacgtcaaaaagtatagggacgcgtccatggtcgagatcgaagtcttgaagacgctcgtggccggcgccgagttgggtgacgttgaaaaacatcactgcatcagattgaaacgcgcgttcgattatcagggacacgtgtgcatggtgtttgacaagtacggaccgagtctctacgatttcatgcgccaacactcgtacaggccgtatcaccccaaggcggtgcaacgcatcacgctcaagattcttgaggctgtgcgatacgtgcactcactcgggatggtgcacactgatttgaagccagaaaatgtgttactagtctccgacgcgttcgtacacagtgatgagtactccattccgcaagactgctccgttcgtctgattgatttcggaagcacgacattcatcaatagacaccacagcgccgtcgtgtctactcggcactatcgcgcaccggagatcatcctaggactgggatggtcgtattcgtgcgatatgtggtcgatcggctgcttgatcatcgaactgctgacgggggaggctctgttccaaacacacgacaacgtcgaacatctcaagatgatggaacgcgcgcttcgtcgtaacagttttcctccgaacatgatcatgggcatggaaaaagacgttcgcacctttttctttgacaaacactgttctgtgaaatggccgaacataatgacggatattgaatcgcgcgccgcgctcggcaagactggcatcatcgaccacatggtgcgcgaacgcatccccgccgtcaaaccgagaaacgcctttctcagcttgttgtctcagctgatgaacatggaccccaagtaccgaatccgcgcagaggcggcaatttaccatcgattcttcctggaagacgtcgatccaccggcgaagcccaagaagtaa

SEQ ID NO: 248871 - DNA, 1102 bp, Unknown
  Bacterial polypeptide expressing nucleotide sequence isolated from the Sargasso Sea
gccggcggaccggtgggtggctatgaactgacaaagtacatttcccatgggaagtccgccgtcattatgcaggcgcgacgggggggcgaagacgtagccatcaaggtattccatcccgagttgatcgagcagtatggtcgtgaggcgcaactggtcagaatcaaccgggaacgcgaacttatcgacaaaacccacccgaacctcatccgcatcctggatgcgggatgttgcgaagctaccgcacatttgtttgtcgcgatgaaattcgcacccggggaaccgctgtccaaagctttggcaaaaataccccgcgccaatatcccgcttctcatcgagcagttggcaagcgcagctatgcaactcgagaattggggcctaacgcatcgcgacataaagccagataacattcacatcagcgaagatctgaaatcattgacgttgttagacttcggtgtattgaagccgcacggcgacgacaccgcgacaagcctgcaagtgtccaagggtttcgtcggcacgcaccagtacagcccgcccgagatgattcacgggcgagaagagaatacactggatggctggcgcgcaatcacgttctaccagattggtgcagtcttgcacgatttgatcgctcgcaaacctatcttcgctaccgcaacgaagagacacgccgatttggtggcggcgattgatcaccaactcgtcaatgtgacatctgacgatgccgatccgcacctctgcaatctggcgacccgttgccttctgaagctccctcgtgacaggctgaatgtggtgcaatgggatgatttcatgttttcggcgcgtgacgcgaacaaaccttcacttgacgctcggagagaagcgcttcgacggcagatgctcgcgggtgctgtgcttcgtcggattgatccgttggaaaacgccgaggctcgacgattgaaggaggccaagttctcgggggttgtccagtcggccaaagcgcagttcgatgaggcactctccgcgatgggcacaatgatgccttcgaggaccaccaccctcaatggacagtcgcatccgctccccgcgatcacgtatacttttgccgctgcgccgaagttgggcc

SEQ ID NO: 248872 - DNA, 970 bp, Unknown
  Bacterial polypeptide expressing nucleotide sequence isolated from the Sargasso Sea
tcaacaaatgcaggaggaataaatgttcttagatatggaatgccaagagacttagttttaggaatagaagttgtcttagcagatggtacaatatggaataatctaacaagtttaagaaaagataaccgtggatatgatcttaaacaattatttattggaagcgaaggaacattaggaataataacttctgctgtactaaaactatttccctctccaaaaaatattgaaacagcattatttgctataccgaattcagaagcagcgatagaactttttggactagctcgcagtgccagtgctgatcttctcaatgcttatgaactagtaagtagaatcggtatggagatggtattaaaaaatattcctggtgctaaagaacctatgagtaataagtataagtggtatgtactattagaattttcctcttcttctacaaataatatgagaaaacaaatggaaaatttatttgaagtagcgataaataaaaatatagttctagatggagtcattgctgaaagcactcaacaaagaaaagatttatggctcctgagagatggtttaaatgaagcacaaaaacctgaaggtggttccataaaacatgatatttcaataccaataaataatgtaagtacatttattaatgatgctacttacagcgtagaaaaatttatacctaattccagagtagttgcgtttggacacataggggatggcaatatacatttcaatattagtcaaccaataaaaagtaacaaagaagatttccttaagaaatgggaaagtgtaaataagattgtttttgacatagttaacgacttagatggtagtttttcagctgaacatggtataggaaaacttaaaagagaagaactaaaattttataaccctgaaattgagataaatttaatgaaatcaataaaaaatacttttgacccaaataatattttaaaccctggcaaagtgctataaa

SEQ ID NO: 248873 - DNA, 1462 bp, Unknown
  Bacterial polypeptide expressing nucleotide sequence isolated from the Sargasso Sea
ggcaaaggcggcatgagcagtgtgtacctcgccgaacacacaagcatgcatctcccggtagccattaaagttctgcctgtcaaaagggtaggtgaaaaatcatacctggaacgattcaaaagagaggcaaaagcctcttttaagctccgtcatgataatattgccggcgccacaaacttcgaccataatggcgatctctggtatatcgtacttgactatattgagggcgaagaccttcaccaaaaggtcaagcgtgccgggcctctcccgatacgagatgctgttgaatatattcgccaggcagcatgtggtcttcaatacgctcacgaagaaggccttgttcaccgtgacattaagcctgccaatttgatgttggataccaagggtacagtcaaaattcttgacctgggtcttgcgcttgacggagatgatgatgaagagggtgggctcacaaaggcccacgacgaaaaggtgctgggcacggccgactatcttgctcctgagcaatccaaaaacagccactcggctgaccctcgttcagatatctatgcactcggttgcacgctctactacctcattgttggcagagcaccgttcgcccgaggaagcgtcattgaacggatcaaggcacattggaatgagccggcacccaaccctcttgaagaacttgagaaaccgccggcagatctcgattcagcacttattgatctctatttcaggatgatggaaaaacatcctgatgcccgcccacaaactgctggagaagtctcagaacagctcgacgcgtggctgaatcagcaccagcaagatcggccccagccagcgggattacggcgacacaccactgaaagtcctgaaggcagtagtggttcactcccaacatctcatttttcgagtattaccgggctgcgacgccagccgtcaaagaaaacccaaaagtcaaatatcggaagctcgggaaaccttcgccgcacgcctggcggtaagaatcccgaatcctcagacgattttgaacatcctgatgatgacgatgactttcttgatagtgctgacacagatggggaaactgaagaggaagaagaggatgactttcttttcgctggttccggaagcaattcgccagcgacgtcttctggcgatcaatcaggaagcaatgaggatgatgatttccttgccatgacaggcggtatctcaggctccggagtttcgcctcaaactcagttacaagccgatgacatttctgtcgacgaatggtggagcacgacttttatgcgactctccctacgggcctggttctggattggaattgggctttttttcacgttcgtactcacagtagtcaccaatgaggtcatgaaggcatatgaggctggcccctataagacagaggccgatgctgatccaaatgagaactcaaagcctccgcctcccgccacaacgaagcccaatgcgaactcaaagc

SEQ ID NO: 248874 - DNA, 457 bp, Unknown
  Bacterial polypeptide expressing nucleotide sequence isolated from the Sargasso Sea
tccgctccatggtgtcggcgtcgtcaactgttggacagcgttggatccgattccgatggaaacagctttgcggttttgggcgggttcgcaccgggaagcctgtctttatcaggcagccaatttcgctggcgattccgactaccgacacgtgcgctcagatcggccaattattccggatatcgacagtgatgcgagtgcgcgtattcttgcggtagaactcgagcccggagatatgctggtatgggattcgtataccttccacagcgcacccggcaacaccttggaccgacgtcgagccgctttttcaatcaattgggcgtcggatgcgatccgctttcatgatgttccctgcctcgcaagttatcgggcccccgagttgactgaaggatcggtgatgacgtgtgacaagttcccgttggtacgaacccgggcgcaagccgcaggtgaaagttcatag

SEQ ID NO: 248875 - DNA, 1120 bp, Unknown
  Bacterial polypeptide expressing nucleotide sequence isolated from the Sargasso Sea
tcagggaaaacacctttattcaagaaatggagatggcagagctgccctagctccaatgcttagagaatatttaataagcgaagcaatgtatcacttaggtattccaactacgagaagtttagcggtcgtaaaaactggagaaactgtggtccgagagaaacctttgactggcgctatattaacgagggttgctgaaagtcatattcgagttggaacttttcaatatgcaagtatttctaaagatgaagataatttgaaaacattattaaattattcaatcgaaagacattatccacatattaaaaattctgaaaatcctgcaattgaaatattagatatagtaattgaaaaacaaataaaacttgtgacagagtggatgcgtgttggatttattcatggagttatgaatacagacaacgtaactatttctggtgagactattgattatgggccatgtgcatttatggatatttataatcctgaaacagtttttagctctatcgatcatcaaggtagatatgcttattttaatcaaccgctaattacaaaatggaatttagcaagatttgcagagtctttaattcctctaattaataaaaataaagaaaaagcaatttcaatagcaactgaaaaaataaataatttcgataataaatataaaacgtattggtttaaaatgatgagaaaaaaactagggttatttggcgataaacctaacgatgaaaagatcattgaaaatttattgaaatggatgtttgttaataaggcagattatacgaatactttttgttttttaatgaaagaaaatattaaagataacgaagtttataaaaatgaaaccttcttagaatggcaaaaagagtggcatcaaaggttaaagcataataccaaaaactttgatgagtctttaaaaatgatgaaagaaatgaatccacttgttattcctagaaatgaaaaggttgaagaagcattaacttcagctagtaataatgaatttaataaatttaataaactacttaaaatacttggcacaccttatgaaaaccaaaatggtattgaagattaccaggaaccttcaaaagatattgatggaaaatatcaaactttctgtggaacttga

SEQ ID NO: 248876 - DNA, 964 bp, Unknown
  Bacterial polypeptide expressing nucleotide sequence isolated from the Sargasso Sea
ttggatgtggaacaaaaagtattaattacaggatttaatggtgagcttggaagcaaaatcgttaaaaaactagtagaacataataaaaaagtgattgctattgatattaatgattctcaagaaaaaattaattctgtgacctatataaaggacactatcctcaactatgatttaattaattccatttttaaaaaaaattatatttctgaagtatatcattttgcagcactattaagtcaaactgcatctaaaaaccctaaacttgcaattcaagttaatgaagatgcttccagaaatttgattgattgtgcttttcaaaatgctgttgataataattatatcactaaatttttcttccctagttcaatagctgtatatggtcctagaaaaattaagtttgcatcagagcaggatataataaaaccaaatactatttatgggaataataaacttgcaattgagcaatacggaagtagagtgcatgaaaaaagtaatttaaaagtttgcggtttagacttcagatcaatcagatttcctggggtaattagttatgacactgttccatccggaggaaccacagattatgcatcacagatgattcatgcggctttaaaaggacaacattttgattgtaatttattacctgaaacctctcttccttttattagcattaataaaactatttcttcaataatgaagcttatgagctttaaaaatattaattctattattagagcatttaatgttgaagaagtaaatttttcagttaaagaattaagtgatatgctaatacaaaagtttcctacttttactgtttcatttaatgaagagaaaaaatttcaatcagttgcagatacatggccctctagtttaaattgtgacaactcaaaaaaatattggaagttttcaagtaacatgcaattagaagattttttagataatataattgataaggcaaaatgaa

SEQ ID NO: 248877 - DNA, 831 bp, Unknown
  Bacterial polypeptide expressing nucleotide sequence isolated from the Sargasso Sea
acggagacgacggagacgatgtcgatcggtacgacggtatcgtgaaatgtctcggtttcgggtttcacgacgcgtcgaacgtcgccttcatacgactggagatgatgaccacggggtcgctcgaggacgtcgtacgccggggtgttcgattcgaatcgtccccccgcgccgccctgtgcgtcgttcggtgtctcgcgaacgcgttggcgtttcttcacgacgtcgcgcgcgtcgtccatcgcgacgtcaaaccgagcaacgtcttgttcgacgaaacgggggcgtgtaaactctgcgatttcggattgtgcgcccccgcggacgcggcttcgtcgccgacgcggcgtctcgacggtaccgtcgtctacatgtcccctgagcgcctcgcctcgagcgacccgcgatgcggacccgaatccgacgtctggggcgtcggcgtcaccgtcctcgagtccgtcctcggtcgtcctccctttgacattcaggacggtggtccgctcggattggtgatgcaaatcgtcgacaccgtcatcgacgtcgacgcgtgcgtccccggcgattccgtcgacgctctcgtcttacgtcgcgttttgacggcgtgtctcgtcaaagaccaccgccgccgcgtctccgttcgcgaattacgcgatccaaacgacgagagatgggatttatccgcgtacactcgcgccgacgtgcgcgccttcgtcgactccctccccgaggcgccctcgagaccgggttcgcccgcgctctcctccgcctccgcctccgcctccgcctccgacgacgagcaccgcgcctccgggttttcccatcgcttcgagtgat

SEQ ID NO: 248878 - DNA, 412 bp, Unknown
  Bacterial polypeptide expressing nucleotide sequence isolated from the Sargasso Sea
atggtcttgctgttagaggccgatccttccactgccagtatcgaagcgtatttggataatgcttggtgttttgccgccaagtataaggatgagattgtggccgtgtgtgtggctaagctaattcgcgataaggttgcggaaatcttcaatatggcggtgtggcctgactatcagcggcagggaattggttctgtgttactgtcatttgttttaactgaattggcgagaaagtcggtggttcgtgtggaattgggtacgggtagctttgggtatcaacttacttattatcagcgacaggggtttagagtcgaggccgtgataaaagatcacttcttaacccattacgacgaacctctgtttgaacagggattacaacataaggatatgcttcgattagcgctggaattataaa

SEQ ID NO: 248879 - DNA, 1362 bp, Unknown
  Bacterial polypeptide expressing nucleotide sequence isolated from the Sargasso Sea
taatgataatgatgggttaattgatgaaaaacgagataatgaagcaactgccatagttggtcctacagaagggattaccgatatcaacgcttttctagatttctataaactgaatatggaagatttgaaagaacactgggacgcagatgaggaccaggattggcaggatggtgatgatgcaaatggagatggtatttatcaaatatccgagaactacggtgatgatattggtattgatggcgtaggaccaggtgaattgaattacaatggcccagatgcagatggaagtgagtgcaaccataagccagactttttagaaggggtaggatgtgaacctaattttaatacaacagatgtatctgagtcagatatggtcggtcttacgtcttttcgaatgttcccaatacctagccacgccccatctaatgaaacaacttggtttaagaatgatgaagcaatgtgggggttgataggtgttgattccctagaagaataccttgataatatttctaaccttgttgaggtgtttgcctctggcccctttcctctttatcaaggaagggtagagagaatttctatgtctgagcttcactcttatgatccactagagggactaagttcagcagagcacacagctccagcactttatgaattaaaaagaatcgtacaagttatctacgaaaaggattacagatttgcccaaccgccggagatgccaacgttaactgcaacggctggtgatagcaaagttatactaacctgggatgatatggcagataccaaaacacgagacccttttgttggaaatataaatgattttgaaggatacaaaatatatagatctacagataaatatatgtcagaccctgaaattataacggatggttacggaactcctatgttcaaaaagcctatttatcaatgtgatttagttgatgatatatatggtttcactgattttggtttggtaaatggagccgggtataaccttggtgcggagacaggaataacccatatttttgttgataatactgtgcagaatggaagaacgtattactacgctgtagttgcatatgattttggtgctccaaatattggtcctgggatagcaccttcagaaaataacgcagttattgaacttgatgaagcagaagaagtacgtactattggtaaaaatgttgcaattgttgtacctcatcaacgtgcagcaggttatgtaccacctcaaatagatctagaagagtctgaattattaggcactggatcggttgaacctataattcgtgctcagggtagtttaaaacaaggtcatcaatatgctttaactttctctgttgatacaattgcatcaattggaagcta

SEQ ID NO: 248880 - DNA, 3124 bp, Unknown
  Bacterial polypeptide expressing nucleotide sequence isolated from the Sargasso Sea
atggatgtaactgatcgtaaatatggggatcataatggcaatcgtatttttaatagattttataattttggaggaattggtgatgctggtggcagtttatctggtatttacccctttggttccggtcattcgtatttttatgaatttactcctgttattgcagcaagtgttattgatacgaacggtaatagagttcatatagtctctgatggtgctgttggtctaaaagataactctcctcaaggatatcaatggggtttcgagcctttaaccggttatgcaaacccaaatcaagagattatggccatgagtgataaggattttacttggccagaaacatggcctaatcgtgatagtgattgggatggtttttggaatggtcaatatggaaagtatgttcgagcagatcaagaatcctattttgtaatggatgattattataatgatgaattttctcattttccagattctacagattttgatgtagttcctaaaagaagatctggaattggagttgaacttgagtgtcgtatatatcaatggaatcatcctgcggcggaagatataattatcgttacttattggattacaaatgttggtacttctcgattagatagtgtgatttttggaatgtatggtgatgcagatataggtagtacaaatggtgattatacggatgatgatgcatggtttgatgttgaaaatgatattgtatatcaatgggatcatgatggttggagtaatgcagatggtggattcaaaccagtgtattttgggtggagcttccttgagtctcccggtaatccacatgatggtattgataatgatgatgatggtatgattgatgaaagccagtttgatggaattgataatgatggagattggttggcagaaagagatgatattggctcagatggtcttggcgcatatcattatgattataatggtccagacccagatgggacagaaggaaatggaatccctgatttaggggagccaaattttgaaattactgataatgatgaatctgatcagataggcttaactagcttttattcttcgccttatccaagtatatatccatcaaatgatgaaattatgtggagtcaattgcaacctggctttttcgatgtaccaacacaaaatattgatcaaacatttttatatggttcaggttttattggcttagatccaggtgagaaaaagaaattttctgtagcgatggtctttggaaatgatatggatgatattttgagaaatactgtgactatgcaaaatatatatgataatgattataattttgctaagcctcctttaaagccaaacttaactgttgttcctggagataaacaggttaccttattttgggataagctatccgaaaattctctggatgctatttatggttcagattttgaaggatataggatataccgtagtacagatcctggttttattgatccctacgttattactgatgcatatggtaataatacatttaataaaccaatagcacagtttgatttaattgatagtttaaaaggccctcacccaataggatttaacggtatccaatatgatatgggtacggattcaggtcttgaacatatgtttattgatagcaataatgtatacaatggtatgacatactattatgcagtagtggcatatgataaagggtatgatatagacttttatgaattaggttttagtgaacaggataatttattgcccatagcaccttctgaatgctcaataatagtagatttggatcgtaaaggaaatgtaatcaatatgagtgagaatgcaggcatggctgttccaaatgcaaccgtagcagggtatatgggtcccaatacagcaactctcggtcaagaatttgttgtgcatgattcaggatatgctacgggtaggattgaagtaataacagttgatccaactgctgttcctgaagacgcaacatactctttaacttttgatcgagaatttggcagtccaataatttattattctgttttagatgaacagataaaaatggaaacatttgttatagctggtggatatggtgcattagaacataaaaatattgattcatcttctgtcatcgttacggatgaaactggcaatatggtttatgttttaggtgttgattattctatggattatgaaaatggtatgattattgctttagaaaatggtggcttagttgaaatgggcacatttgtagctagctttaaatattaccctattatgaatagcagttcgacagcaggtgaaacaaataacccaatttttgatggaatgaaggtgtttatctataatgaacctatcgctgtagattttgattcatctggatggcttggttctaattctcctcattgctatcgaatttttgatcaaagaattcacccagcagattttgagattatttgggatggagatcttggtgattctataacatctgattattcaaatcttccatctccatttagagtaagaaatattacagaagatattgatgttacattccgtatttatgatattagtaataatgggagatgggaaccggaagaaccaatattattaatgccatatcccggtatgcaaacaccgtatatgtttgttcaattttttcctgattcaataatatgtccatataatgaaaatgattttctatatgatactacatctactatagttaagggtgaccgttttagaatagctactaaacgtccattttccagtcaagacaaatatcatttcacaacaaagaaatcttgggtagataatgaactagctaaagttgaaatgaatgatattgccgttgtacctaacccttatgtggtaactgcccgctgggaaccaaaacatatttatgtttctggacgtggacctcgtaagcttgattttattaatttacctcaagaatgtactattaagatttttactctatctggatacctagtggatgaaattcatcatgcaagtcagtacgaatatggtacatattcatgggatatgttatccaaagatggattagagattgcttatggtctatatatttatcatgtagatgcgcctaatgtcggtgaaaaaactggaaaatttgcggtaattaaatgat

SEQ ID NO: 248881 - DNA, 853 bp, Unknown
  Bacterial polypeptide expressing nucleotide sequence isolated from the Sargasso Sea
ctgaacattcacgcgtctacgtcgggatcgagcgatcgagagagtcgagggacggacggcgggtcgacgagcgagccttcggggacgtcgagcggaactcccacgggggtgcttccgacgaagcacacgtcaaagatgacgacgaaagaagtgaaactcggtgctcgtagctttgattccttgaatgagtacattttgatcaaggatctggggcgtggatcgcactcaaaggtgaaattagcgatgaatcaacaggacaatcggctctacgcggtcaagtggacccactccaaagtggggtgtttgaaggcggtgcggaaagagattgccgttctgaaaaagttgaatcatcccaatattcgtacgttacacgaagtgatcgacgatgagtcgaagaaggagctcatcttggtcttagagtactgtcaacgcgggtcgatattcacacggttcaacacggttcccatacaggaacgcatattactgcgttacgctcgggacatagtcctcggtttggattaccttcattcgttgcacattgctcatatggatcttaaaccggagaatatgcttttatgcgcagatggtgaagtgaagttggcggactttggggtgagtttcatccacgacttggtggcttcggatggagtcgagaaacgtctcgtcggaacacctgctttcgtagccccagattgcttggatgaatcaggttacgatcctttcaaagcagacatatggtcacttggcgtgtgtttttactcgatggccacggcgagggtaccattcacaggtaagtgtgtgcatcagattgtcgccaacaagcgcagtcaagacgtcgatttcccagatactc

SEQ ID NO: 248882 - DNA, 904 bp, Unknown
  Bacterial polypeptide expressing nucleotide sequence isolated from the Sargasso Sea
acctttgacccacaaagtggtgagtcgctcagaccaccaacaacaaactggcactcgactccgccaagcacttcaacaaccccttcggcgatagacaacttcgctatcaagggcttaattggccgcggtggaatgggacacgtttaccggggttttgacaacaaactcgatcgcgacattgctattaaggtcatgcatccgagccgagctgaagacgaagtttcgaaaaagcgattccttcatgaaagcaaaactgccgcatcaattaatcacccatcaatcgtgacgatctatcagatcggcgaacacaacaagcttccgtacattgctatgcaatatattgatggacccaatctttctgaatatcgaacacaactcggtggactgatcccgattcccgaggctatacgaattgggcgagaaatctgcgaaggacttgctgcagcccatgaaaaagatcttgtccaccgcgacattaagccggacaacattctcctcgaatccccaaatcaacatgtccagattattgacttcggcctagctcacgaagcgggagataaagaagggcgattaactatcgacaatgctgtcatcggcacacccgcctacatgtctcctgagcgtattggcactgacgaagtaaatgcaaaaagcgatctcttcgggctcggggttattctgtatgagatgatttccggcaagcttccgtttgacggaaaatcaatggtctccattcttgcctccatttctcgaggcaaaccaaccaccattcatacacttgttcctgacataccccaagatctcgctgatcttattatgcaactgctctcaagtgaacgagacaagcgccccgccgatgccactgaagttgtcagacggttgcgtgctattgaaaaacaataag

SEQ ID NO: 248883 - DNA, 523 bp, Unknown
  Bacterial polypeptide expressing nucleotide sequence isolated from the Sargasso Sea
atgggtcgagtagttggaacgcaggcaggagaaagcccagggaagcctctagcgcttgaggaagtagtgaacggagagagctcgccggctgctgacaacggcgacggaagcgacggaagcgacgacggcgaggaagatgaagatctcgcggcgctcgcaccgctccccccgccgccgaatccaatgggcctgcgccgcgccttaacgcagcacgtcgtcagtcgctggtacagagcgccggaactcgcgatgtgccagccctacagcggcggcgtcgacgtgtggagcgtgggctgcgttttcttcgagtgcattctctgcctgctcggcccgccggccgacgatttcgggcaaggaacccaaggtagcggcggccacaggccacgcccgcgcccgctttttaaggggaagagttgctacccgttgtcgccgaggggggtggacacctggagcgaatctcacgatcagctctcttgcatctttcgcgtcatcggcacccccgaagagtcggccatcgagtcgg

SEQ ID NO: 248884 - DNA, 679 bp, Unknown
  Bacterial polypeptide expressing nucleotide sequence isolated from the Sargasso Sea
gtcctcgcgcgaacctctgacggagtacgtggcgacgcgatggtaccgcgcgcccgagcttctcctcggctcgacgtcgtacggccacgaggttgaccagtgggcgatcgggtgcatcatgggcgagctcatcgacggccagccgctcttccccggcgagtccgacctcgaccagctgttcatcgcgcagcggagccggggcccgctcaccgacgcgcaaaaaatcgccttcgagcgcaaccccaggttcgagggcgccaggatgccgcgcagcgacgcccggtcgagggaggagcacggcgtcgagcggaagtacgcggggaaggtggataagcgcgggatggactttctcaaggcgctcctagcgatggaccccgacgcgcggccgacgtggcacggcatgctcacgcacccgtggttcgaggggtgcgagggattcgacccaaacgccgagccgggaccaaacgcgttccgccagaggaaacaacaacccatcgaagacgccgcttcgagcggcggcgcgtcgaagaacgcggcgcgaatcgattcgtcctccggggggaacaacaacgtcccgctcgcttcgaattcgggttccgtcgcccaacaccacccccccccgccccccgcgcgcgcgccgccgccgctgacccccgaggaggaggaggagcggcggcgg

SEQ ID NO: 248885 - DNA, 499 bp, Unknown
  Bacterial polypeptide expressing nucleotide sequence isolated from the Sargasso Sea
ttgacgagggggacgcggcgagacgcggcgggcgagacgggggcgagacgaaggggcgatgagacgaaggggaatcgcgccgaggtggtcggtggacgatggacgctgggagaaaagttagggcgagggtcgttcgcgaccgtgtggcgagggacgtgcgcgaagaccggggtggaggtggcggtgaaggagatcgattgcgagcggttgagtaaaaagctcagggagagtctcaagttggaggtggaggtgatgcgaaagatgcgagacgatcacattttgaggttcatcgacatggagacgtcgaaggatacggtttatatcgtgttggagtactgcggagggggggatctgagtcagttcatcaagagacacggacgcgtggacgagagcgcggcgaagcgattcatgctgcaactcgcgagaggattgcgggcgatgcgcaaggcgcagctcgtgcatcgagacctgaaaccgcaaaatttactcttgacgtcga

SEQ ID NO: 248886 - DNA, 481 bp, Unknown
  Bacterial polypeptide expressing nucleotide sequence isolated from the Sargasso Sea
atggatgcggattcttttttcacggagtacggcgaggcgaaccgcttcaccatccacgaggtgatcggcaagggaagctacggcgtggtgtgttcagcgacggatagcaagacgggcgagaaggtggcgatcaagaagatcacggacgtgttcgagcacgtctcggacgcgacgcggatccttcgcgaggtgaagctcctgcgggtgctgaaacatcccgacatcgtcgaggtgaagcacatcgtcctcccccccaacccgcgggacttcaaggacatcttcgtcatcttcgagctcatggagacggacttgcaccaggtcatcaaggccaacgacgacctcacccaggagcaccatcaattcttcctgtaccaactcctgcgcgggctcaagtacgtgcacacggcgaacgtgtaccatcgcgacctgaagcccaagaacatcctcgccaacgcggactgcaagctcaagatctgcgact

SEQ ID NO: 248887 - DNA, 792 bp, Unknown
  Bacterial polypeptide expressing nucleotide sequence isolated from the Sargasso Sea
aagctcgatcaatttgaactgcgtgccgtatgcggttcgggcggcatggccactgtgtaccgtgcgcacgatgaaatcttggggcgtgacgttgcggtgaagctaatgcagcctgaattttccaatgactccaacgccatggctgggtttttccgcgaagcccaatatcaggcatctctgaaccacaccaacatcgtacaggtctacaactacggccatttcaaaggtcacaaatacctcgtcatggaagtcgctgaccgtggagacctcgacgggttgatccagaaaaatggcagagtagatgaactctatgtgctcgatgccggcatcaagatcgctggcgctctggaactcgtccgcaagaaagaaatcatccatctcgacctaaaacccgacaacatcctctacaacatcgatggcgaacccaagctcacagacttcggcatcgctcgcaaagtcaatgaacctcgtgccgccgagggccttgttggcacgcccttttacatcgctccagaacgcgtagctcgcggcgtgcaggatttccggtcagacatgtattctctgggggccaccctctaccacgccctgaccggccaagttcctttcaatggcaactccgtggaggaaaccgtttgggcccatgtgaaaacgcgcatcacgcctccgcgcaaaatcgtccgagatatcagcgcaaacaccgaaggcgccatcctccgcgccatgaataaagatccggaaaaacgctttcgcgattacgacgaaatgatcctcacccttgaggcatcccgcagc

SEQ ID NO: 248888 - DNA, 703 bp, Unknown
  Bacterial polypeptide expressing nucleotide sequence isolated from the Sargasso Sea
tttcgataataattacagcggggaaggatataaattgctaattatgaattttttaggtcctagtttagaggatttatttaatttttgctctagaaattttagcctaaaaaccgtagcaatgataggcatccaattactgaatagattagagcatatacataatttgggtataattcaccgggatattaagcctgaaaattttttaataggtatcgggtctactaaatctaaaatttatattattgattttgggctttctaagtcgtaccgagaaaataataatcatatagaatataggaataacaaaaattttactgggacatatagatacagtagtattcggaatcatagaggagtagagcaaagtcgtagggatgacttagaatctgtaggatatatgttagtttatttttataaaggattactaccatggcagggtcttaagatttcagacaaaaatgaaagaaatagagaaatataccaaaaaaaaaggacaactgatctaggagcaattacaagtaatatgccctcggaatttcaagaatatttacaatattgtcgactattaagatttacacaagatccagattacaaatatcttaaaaatttatttaaaaaagtgttaattgatagtatgtctaaaaatgatcttatttttgattggaatatcgtggctaaaaaaaaaagaagacagcaacgttaa

SEQ ID NO: 248889 - DNA, 748 bp, Unknown
  Bacterial polypeptide expressing nucleotide sequence isolated from the Sargasso Sea
ggcgagggcacttttggcagcgtgcgtgttggaaagcataaggagacaggcattctgagggcgatcaagacgatcccgaagatgcttcttgatgagtcaggtctttggcaagagattgagattatgcgcatggttgaccatccgaacatcatgaggctctttgtaacctttgaagaccagaagaacgtctacatggtgacggaattttgctccggcggtgaattgttcgatgcactcatcaagacccaagcaggcttctcggaagctgtagccgcgaagatagtgaagcagatgctgtctgcggtgtgttacctccataaccagaagatatgccatcgcgatttgaagcccgaaaactttctcctcagcaaccaggatgacatcgagaatgtgaatgtgaagctcattgactttggtacagccaagtgcttccgtgagggtgaggagctgaagaccaagatttgtactctccattatgttgctcctgagattctaagccggaaggagacaccatactcagagaggtgtgatgtttggtcactgggtgtccttatctacctcatgttgtgtggtcagcctcccttctctggggacagcgacatggaaatcctgaagaagatcaagagagggaggtacacgttcgagccagatgaggtctgggatgagatctccaaggaggcgaagaacctcattggcatgcttgttatggaaaataggatgatgttgtttaatgtagccactcagtagt

SEQ ID NO: 248890 - DNA, 436 bp, Unknown
  Bacterial polypeptide expressing nucleotide sequence isolated from the Sargasso Sea
actagatattatagagctccagaagtaataatgggtttagaatatgataataaagttgatatttggtcagttggatgtttattatatgaaatatattttggtgaaatattatttaatccaaataaagataaaaattttacaagagatatgtatcatatgaatatgataaaacatatatctggtaattttccagaagagatgataaaaaaatctccaagaaaaaaagaattttttgataaaaataatcaattgaaaaaattagatgataataatattgataaaataaaaaataattttgaaaaaataaaaaatactaataataattttttaaaattattaaaaggaatgttagaaattgatccaaataaaagattatctataaagaattgtttagaacttttaaacaaaataaaaaatttagaaaaagagatttaaa

SEQ ID NO: 248891 - DNA, 526 bp, Unknown
  Bacterial polypeptide expressing nucleotide sequence isolated from the Sargasso Sea
atgccggatgatttcgacatactcaagctcgtcgggcaaggggcgttcgggaaggtttttcaggtgaggaaaaaggatagcggcggtatctacgccatgaaggtgatgaagaaggatcgcatcatcgagaaggatcaggccgagtacaccaaagccgagcgggacatcttgaccgcagtaacgcatccgttcatcgtcagtctgcgattttcgtttcagacgacgagcaagttgtatctgattttggagttcatcaacggcgggcacttattttttcaattgtatcagcaaggtacgttcggagacgatttaacgagattttacatctcggagatttgtctcgccatcggtcatctgcactcgctgaacatcatgcaccgtgacttgaagccggagaatattctcgtcgacgtcgacggtcacgtgaaaatcacggatttcggcttggcgaagaaaatctccgaggacgagcgcgccaaatcgctcgctggctccatcgattacatggccccggaaattttaaacg

SEQ ID NO: 248892 - DNA, 708 bp, Unknown
  Bacterial polypeptide expressing nucleotide sequence isolated from the Sargasso Sea
gctgcgcgtcctcggctcggggagctttggaaaggcggtgctcttccggcaccgctcgcgcgtcgactttgcggtgatcaagcagacgtggtcgggccgtggcggcggcggggccgacctccgacggcttgagcgcgaggtctccgcgctgatgagcctcaagaatcagcagcacgtcatccgctaccgcacgtgcttcctgcaaaacgagatgctgtgcattgtcaccgattacgccgcgggcggcacgctccaccaccagatcgtcgccgcgcggaagtcggcaaagcacctgcccgtcgccgcgctcctgcggtgggccgcgcagctggcctccgctttgcacgcgatccattcggagaaggtgatgcaccgcgacgtcaagccgtccaacatccttctcacggagaagctcgacatcaagctgggcgactttggcctctcgaggccgcacaactccatcgaccttgcaacgaccgcttgcggcacgccgtactacatgagccctgagctgatcaacgcagagcgctactcgtatccagccgacgtgtgggcatttggttgcgtgctattcgagctgctcactctcaatcgcgccttcaacgccgattcgttcccgcagctcaccaaggcgatacttgggtcggactcggacgcgtccacccaaaaccaatcgacccttctcgcccagtgcaaggcgcgcgaccc

SEQ ID NO: 248893 - DNA, 411 bp, Unknown
  Bacterial polypeptide expressing nucleotide sequence isolated from the Sargasso Sea
catggaattatgtaccgagggaactttgatgaaagtgcacaaaatcagaggcaaattgtcagaaccggattgtagatattttatccggcaaattggtaaaggtttgagctatattcacgagaggggcatcgctcatagggatttaaagttgggcaatattttactgaacgcgggcatggtatgcaaaattgcggattttgggtttgcggtagagcttgcagatggggcagttagttttgataaaaggatcggttctccaagttatactgctccagagattattttgggagtgggccatggattaccagttgatttgtggtcccttggttgtgtattgtttatgttggtcacgggaaagtccgcctttcaaggtggttcaattgaggtaatttatagagaaggtaaacaatc

SEQ ID NO: 248894 - DNA, 786 bp, Unknown
  Bacterial polypeptide expressing nucleotide sequence isolated from the Sargasso Sea
cgtgcaagcttcaccagctcaacccgcagtggagcgagcagaggaaggtgacgtacgtcaagcacgcggcgagggagtgcgagatccacaagcaactgcgccacccgtccgtggtgcagctcatcgacgtgttcgaggtggaccagaactgcttctgcaccgtgctcgagctgtgcaccggggacgacctcgacgctcgactgaaagcgcagggcgcggtgtccgagcgcgaggcgcgcgccatcctggcgcaggtcttcgcgggactggcgtacatgaacagcggcagcagcaccgtgattcactacgatctgaagcccgggaacatactgttcgacgcggcgggacgggtcaagatcaccgactttggcctctcgaagaaacgcgacatgaacggggtgcagactttgtccgcggataccggcatggagctcacgtctcagggcgcgggcacgtactggtacctcccgcccgagtgcttcgagaccggcccgacgccgcccaagatctcttccaaggtggacacgtggtcgtgcggcgtgatactgtaccagatgctgttcaaccgcaggccgttcgggcacgaccagagccaggagcagattttacacgccgggactattcgccacgccaaggaggtggagttcccgcagacgccaaaggtgagcgcggagtgcaaggaattcataaagagatgtctgacgtacaggaaggaggacaggccggacgtgcccaccgcggcgagggatccatacatgacctacgccaagcccgggagcgagtgag

SEQ ID NO: 248895 - DNA, 628 bp, Unknown
  Bacterial polypeptide expressing nucleotide sequence isolated from the Sargasso Sea
ttcatactaaataccattcacgcggatttaaaaccagagaatataatgctaaatcaaaaaactagtaaaattaaaataattgatttgggttcttcaatggataaagataaagtcaaaacccttttttatcatcaatcaagatattatagagcacccgaaattatttttcaattacaatttaatgaaaaaatcgatatttggagtttaggatgtattatttacgaattaataacaaaaaaacctctctttaaaggtagaacaatgagagatttactatttaaaataatagagaaaatagatatgccaaatcaaaaggaatatttggaatcgggaaaatttaatgattatttcacaagttttgaagaagaagaagagataaaagaatattttagaatagaagataaatacactattacacaaaaatataaaattccttcctattatttggatgaagatatatataaacatatacatttttttaaagatgaagaatgtaagaaacaatatataatagatttcatttgtaaaacaataatatatgattttgaaaatagacctagtgcagaagaatgtttgggagacatagtattttcagaaaaaaaaataataaaaaatactattctataaa

SEQ ID NO: 248896 - DNA, 241 bp, Unknown
  Bacterial polypeptide expressing nucleotide sequence isolated from the Sargasso Sea
ctgacggccgagcacgtctcgtgcatgctgtgccagatcctgctgggcgtccaggccctgcacagcgtgggcatcctgcaccgcgacctgaagccgggcaacgtcctggtctcgcgcgactgccgcgtccgcatcacggacttcggcctctcgcggtgcgtcgccggcctcgccgccgacgccgcgcgcgcggacgccgccgacgacgccaagaacccgctgaccgagtacgtcgtcacgc

SEQ ID NO: 248897 - DNA, 783 bp, Unknown
  Bacterial polypeptide expressing nucleotide sequence isolated from the Sargasso Sea
gttggccgcagcggcaccctcgccaccagactcgcctgcaccagcaacaagcgctgctggctcctcagaacaacagcagccctcggcttccaacgccagcacgccgccctcaccctcgccactggtcggacgggcggtagccactactacctcctcctccacctcctccacaccctcttcaccctatggagcacggcgcgcacgtactaacagcagctcaccatcttccccttccatcaaggagctcgacctacgcgcacaggctttgaggcgcgtcgagcgtgaggtgcggatactatcatcactatcccatcctcatattatcaagtacagatcatgctttcatgagggcaataccgtatgcatagtgaccgactatgccgcctcaggcaccttgaggcacgtgatccactcccacgctgccgtacaaggcgccttcatccacagcgaatgcatcgtccgctggctacgacaactctccagcgcgttgagctttgtgcacagccagtcgatccttcaccgagacattaagccagagaacatcttcctcactccagcggctgcggacacgctcaccggcacgtggaagggagaggacgtgagctgcacgaatgtcaagttaggcgactttggtctctcgaccgagctgagccggatgccggagcaggacatcttcgcgtccactacctgcggcacaccctattatatgagccccgagcgcttcgaatgcgtctcctactcgaaggagagcgacttatgggggatcggctgcgtgctgtggga

SEQ ID NO: 248898 - DNA, 499 bp, Unknown
  Bacterial polypeptide expressing nucleotide sequence isolated from the Sargasso Sea
gatggttttctctggagaggatgatgtagaacggccaactctaccaatacacaggatatctgcatatgatgccttgggggaactcgggaaggggcagtttggcattgtatcgcaggctgtccgatgcaagaggggcggtgcaaaagaggttgtggcagttaagatgcttaagtttgactttttgaaagaggggtttccactagaggctttgcgagagatcacattactgtcctccctgcgtcacccaaatattgtacgaatgcacgcagttgcttgcggcagtggtgaggccccgagtgactggcacctggtcatggagccagctggccacgaactgacaacactggtcaagggtgcgcggcaacggcccatgaccgaagcacaagttaagcatcttatgctacagctcctgcgagcgcttgccgcccttcacagtgtgtgggtgatgcaccgggacctcaagacgccaaatgtgctggtggatgatagagggttgttg

SEQ ID NO: 248899 - DNA, 622 bp, Unknown
  Bacterial polypeptide expressing nucleotide sequence isolated from the Sargasso Sea
cgtgcgaggcgccttttccggcagctactacagggtctagagtatctgcaccaccacggcatcatacaccgcgacatcaagccctccaacctcctcgtgacggcagacgaccgtctgaagatcggggacttcggcgcatcaacattttgcgatcgcagcggcggcggtaggcagtctctcgatccgctcggctcgccttcgcggtcgcccaggtcttctaccccagacacgccacgcagcgcgagaagaatgatcaccacacttagcaggggcgcggcgagcgcacggaacatttggctgagaagcgccggcattgcgtcgcctgtctcaaaaaaggcttctagcttcacgtttcctgcgggaactgcgagcgggaacggtggcaccggcgccgatggcgaacacttcagaggaatttcgcggtcatttgtcagaggaacaagggaagcttcaggtcggagggtgccgccaagtagtggcattgcctcatcctccgcagcggctgctgaccttaccgatgactcaacatcgtttgggggccatccgcgcacacggtccatctcgaccgaaggaagatgcccggcaggatcgtccagcctcttatcaccgaagtcggattcgt

SEQ ID NO: 248900 - DNA, 329 bp, Unknown
  Bacterial polypeptide expressing nucleotide sequence isolated from the Sargasso Sea
ctctggagttaaagatcttgatgatatgtgtggtggaggatattttcaagattctattattcttgccactggagcaactggtacgggcaaaacaatgcttgtatcgaaatttgttgaagatgcttataacaataatgaaagagcaatactttttgcatatgaagaatctagggctcaattgcttagaaatgctactagctggggtatagattttgaaaaaatggaaagtgatggattattaaaaattatttgtgcatatcctgaatcaactggtttagaggatcacttacaaattataaaaacgcaaattaatcaatttaaaccaaaaa

SEQ ID NO: 248901 - DNA, 490 bp, Unknown
  Bacterial polypeptide expressing nucleotide sequence isolated from the Sargasso Sea
catggagtattcagacaacggcgacctattccagaaaataactgagtctcagaaaaaacaaatgtacatacaggaagacgaaatctggaaaattttcatacagattgtcagagggcttaaatctctgcatgatgtcaatattttccacagagacctaaaatcggcgaacattttccttcataaggatggtacctccaaactgggcgatatgaatgtctcaaaagttgcgaaaaaaggtcttctctacacccagaccggaaccccctactacgccagccccgaggtgtggcgagaccagccgtatgaccacaaatctgatatctggtcacttgggtgtgtcatctacgaagccgttacgctcaaaccacccttcagagctgaggacatgcagggactctacaagaaggtcttgaaaggcgtgtaccctaagattcctagcatcttttccaatgagctggcgcagataatcaagatgctgattcaggtttag

SEQ ID NO: 248902 - DNA, 813 bp, Unknown
  Bacterial polypeptide expressing nucleotide sequence isolated from the Sargasso Sea
aaagagaaagagacacacacgcttacctacaagaatcagatctacctgcatctattataagaatggagcaatatctaacgatcaataaaacactctatattctctttcctttgtacacgatgaatctctttgatcttatagaaaaaaaaaactttcaaggcctaagtctagagttaacttctaaatttatatcacaattaatagaagctttagttttcttagaagaaaaagggatcatccacgctgatataaaattagagaatattctactaaaacacccaagaagggcagctatatccttagcagactttggattagctctaaaagcaaaagacgcacaaaaaggatatcttctacaaagtaaatattacagatctcctgaaatttgtcaaaaattagactacgataacaaaattgacatatggagtcttggttgtgttttcgtagaactttatacaggatctgtattatttgaaagcacaccagagcaatctcatctagaaaaaataaaagagatcatagattctgattctgattgcgaagaagaagaagaagaagaagaagaagagtatgacaaaagaaaagcaaaaaaaagaaaaatagaagagacacaaactaaattattttatattttaatacaaaacacaaaaaagctagatcacgcacgataccaagaacaattaaaagacgtttatataacgtatgacaagtggctcagcaaagttctagcattaaacccggcaaaaaggccaaatgcagctcaaacagcatctagttttaaacagatttgtgaaaaatttaaaagacaataga

SEQ ID NO: 248903 - DNA, 798 bp, Unknown
  Bacterial polypeptide expressing nucleotide sequence isolated from the Sargasso Sea
tatgccgcatattggaaattatgaattagataaaataataggaagaggacggtttggtcgagtatataaaggtgtccattctaaaacaggagaatttgttgctgttaaattggaggatcgtcgaagtgaatcaaaattattagatgaagcaaatacaataaaaaaaatacgcaaatgttgcaaaggtgtaccagatatttacagaattggtaatagtaataaatggaattatatgattatgtcttatttaggacccaatttagaagagttatttatatattgtaaacgtacattttctcttaaaactactgttttattatctttacaaatattcaatataataaaaggaatacatgaaagtggatttattcatcgcgatataaaaccagataattttgtcataggatttggggaatcacataataaaatatttttaattgattttggactatctatatcttttattgacgataaaacgatgcaacataaagaatatgaacataaacatcaattcactggttcatttcgttattcaagtataaataatcataaaggtattcaacaatccagacgtgatgatttagaatcaatatgttatatgatgctttatttttataaaggtaaacttccatggcaaaacatactagctaaagataaacgagaaaagttaaaaaagacatatgaacgcaaaatggaggtatccatcgacgaattatgtgaaaattgtccaagagaatttaaacaaatagtatcatattgtagaaaattagttataaagaaagaccggattatccttat

SEQ ID NO: 248904 - DNA, 734 bp, Unknown
  Bacterial polypeptide expressing nucleotide sequence isolated from the Sargasso Sea
catgcagcatgccggaaagctgcgtgacttttaccgtatcggtaaaatgctcggatccggcgcctttggcgaggtccgcgtctgcgtgcacagagaaagcggcgcacagagagccgtcaaagtcctgcgcaaggcctccatggacgaagacgagaagaagatgctcttcaacgagatcaacaacctgaaggacctggaccacccgaacatcctcaaaatgtacgagttcttcgaggacgagaagcgctactacatcgtcacggacatctgcaagggcggtgaactgttcgacgagatcgtttcgcgcggcaaattcaccgagaacgatgccgccctgctcatgaagcaagtgctttcctgcatcaactactgccacaagaaccacatcgtccaccgcgatctcaagcccgagaacgttctgcttgagcaaaacaaggagttcgaccagatcaagatcatcgacttcggcacctcgctcgtcttcgacgagaactccgtcctcaatgagaagcttggaacgccttactacatcgcgccggaggtcctcgccaagtcctacggcccgaaatgcgacatctggtcctgcggtgtcatcgtcttcattgtcctctccggcgtcccgcccttcaatggatcctccgaccaggaaatcatgaagaaagtcaagattggtaagttcagctttgcagacccggtctggaactccgtttcggacaacgcgaaggacttcatca

SEQ ID NO: 248905 - DNA, 625 bp, Unknown
  Bacterial polypeptide expressing nucleotide sequence isolated from the Sargasso Sea
ttggcggagcatccgtcgccgccgcgcgcgcttggacgctccgccgcggacgccgcggggactcctgatccatcgcccaaaaaggagaagactgtcaacgtcacgtcgtcgcacagccccacgctcggacagttgcaaagcgccaagacgctcgatgaattcgacgtcgtcgacgtgctcgggcaaggcatggtgggtctcgtcttgcgcgccaagcacaggacgtcgggtaaagtgtgcgccatcaaaaccatgcccaagtcgcaaatcatggagcacggggaggaggaacactgcatggcggaggtgcgcgcgctcaaagagcttcgacacgcgccgttcgtgtgcaattactacgcgtcgtttcaagatccgtgggcgttgtatctcgtcatggaggattgcgtcggcgacatgttcgacttgttcaatcagagcggtctgcccgggatcgggcaaatcaaggtctacaccgcgcaagtgttgctcggcctggagtacattcacaacgccgggtacgtgtatcgcgacatgaaaccggaaaatctcctcttgcgatcggacggatccatcaccatcggcgatttcggttttgcgaaaaaatggaaaagggcgagcgcgcgta

SEQ ID NO: 248906 - DNA, 698 bp, Unknown
  Bacterial polypeptide expressing nucleotide sequence isolated from the Sargasso Sea
catggtgttcgaaaagtgcggcctcagtctgttcgactttctccgcaaaaaccactacaagccgttttcgtcgaacctcgtgcaaaactacggccgccagctcatgcgtgccgtggcgtttctgcacacgctcaagcttgtgcacacggacctgaaacccgaaaacatcttgctgttgtcgagtgcgtatcagcgcgtgcccgtgtcctccgggagtaagttcacgaagcgtgtgccgatggactccaccattcggctcattgactttggcagcgcaacgtttgagaatcaacatcactccactgtcgtgtccacgcggcactatcgcgccccagaagtgattctcggcatgggttggtcgtatccttgcgacatctggagcgtcggatgcattctggtcgaactattgaccggtgacgcgttgtttcagacgcacgaaaatctggagcacctggccatgatggaggtcgttctcggggagatggagcagggagtgatcaaccgtgctaacaagcacgcgcagaagtacttcaaagactttggggggctggcggagaggacgctcctgaactggccggacggggcgcagagcagagagagcatacgcgcagtcggcaaaatgaagcctctgcaagacatcgtgagctctcgtctagatgggttgactgcgaggcacttcacggatttgctgagcaaga

SEQ ID NO: 248907 - DNA, 627 bp, Unknown
  Bacterial polypeptide expressing nucleotide sequence isolated from the Sargasso Sea
gctgaatcatccgaatgtggtgcggttgcacgagacgttttacgaggcgcggagaaagccggcgttgggggtgctcgtgatggatcacgcagccggaccgcggttatcggaggagttgaggagtcgaaaggactgtaggatgagtgaaaacgatgcgagggaggtcatggtgcagttggcggatgtgttgaggggttgcgcggaatccggcatcgtgtgcgggtcgttggatttggactcggtgatgttgagagaaaaggattcggagagattggacgtcgtgctcacgacgatgaggcacgcgtgcatgatcggacagcctctggcgtacgacatggaactcgtggagtacgagatcgaggacgagatgcaggagacggtgacgcgcacgtacgcgcagtgcgcggggagaaacatgcacttcatggcgcccgagctcctgactccgtcgttgagaccgggtctggaaccaaccgtcgacgtgtggtcgttcggagtcatcatgtacacattattagccgggtatcgaccattcgacggcgaggacgagatctcgctcgcggaaaagattcgaagcgggaatttcgtggcgttcacctacgacagcgagacgtgggactccgtcag

SEQ ID NO: 248908 - DNA, 775 bp, Unknown
  Bacterial polypeptide expressing nucleotide sequence isolated from the Sargasso Sea
catgtccattgtactctccaagtactcgcttgccgacgagatagggcgtggcgcgtccggcatcgtctacaaggcgctcaacctgcagacgggtggcatggtcgcgatcaagaaggtcgcgctgcgcggcgagtccaaggaccaactgcagctgctgcagcgtgagatcgacctgctcaagctgctcaagaacccgtacatcgtcgagtaccgcgagtcgttcaacacggccgacacgctctacattgtgatggaatacatcgagaatgggtcgctcgcgacgatcatcaagaaatttggtcggctgaccgagagcctcgtgtcgatctacatcctgcaggtgcttgaaggcctcacctttctgcacgagcagggcgtcgtccaccgagacatcaagggcgcgaacatcctcatctcgactggcggtcaggtcaagctggccgatttcggcgtggcggctaagatggaggccaaggtggacacgcaggcgagcacagtggtgggcacgccgtactggatggcgcccgagatcatccagatgtcgggcttcaccacctccgccgacatctggtcggtgggctgcaccgtccacgagctcatcaccggcgcgccgccccacttcgagcacccgccgatgcccgctctcttccgcatcgtcaacgagcagaagccacccatcccgcccaacgtatccgcgacgctgcacgactttctgagcctctgcttcctcaaggaccccagccagcgtccgcccgcgcgcaagctgcgctcccac

SEQ ID NO: 248909 - DNA, 408 bp, Unknown
  Bacterial polypeptide expressing nucleotide sequence isolated from the Sargasso Sea
catggagtacgcggacaacggcgacgtgttccagaagatctgcacgtaccagaagcgcgagacgtacatcaaggagaagaaaatttggtacatcttcatccagatcgtccgcgggctgaaggccctgcacgaccggaagatcctccaccgggacatgaaggtaagtgagtccatggctaaccgctggcagagcgcgaatatattcctctacagggacatgcaggcgaagctcggcgacctgaacgtctccaagatcgtcaagaaggggctgtcctacacgcagacgggcacgccctactacgccagccccgaggtgtggcgcgacatgccttacgacagcaagtccgacatctggtcgctcggctgcgtcctctacgagatgtgcgccctcgtcccgccgttccgcgc

SEQ ID NO: 248910 - DNA, 445 bp, Unknown
  Bacterial polypeptide expressing nucleotide sequence isolated from the Sargasso Sea
gttgatcggcggtggtagtttcgggtatgtatacaaatgcaaacacgttcaaacaggacaatactatgctattaaatacttcaaaaacaaatttgcaacgatgaaaaaagcattcgatcagagagaaattcaaattttacaaagattcaacaaaattgacaaaaaaggtccaggcaatcattgtccattcgtcatgaaagcagaacgtattgagtacgaaaaccgaaaactcttcatagtttttgagcaaatggatatgagtctaactcaatttatcaaaagaaaagtaaaatctgggcaaaagcttgacgaacagaatgaaataaagatactcatgaagcaaattctgacgggtatgcaatacttaaatgaagagtgtggcattcttcacagagatttgaaaccagataacatcatggtcaatgtcaatcctctcattgcctag

SEQ ID NO: 248911 - DNA, 680 bp, Unknown
  Bacterial polypeptide expressing nucleotide sequence isolated from the Sargasso Sea
gcgcacagggacgtcaaaccctcgaacatcttgatttgccgaaccggcgaaccgaaaataacggacttcgggatcgtcggggaccttcgggggacgaagaaggagctcctggactcgttcaaggggacaatgtgttacatgtcccccgagcggtgcgagaaccgcgcgtacgggcgcgcggcggacgtgtggagcgtcggcatcgcgttgctcgagtgcgccgtcggccggtacccgtacgacgtcggcgacggcggaccggtcgggctcatgatgcagatcgcgaacgacccgacgcccgtgcccgagcggaaagaccccgagtttttccccccgggcctcgagcggttggtgctcgcgtgcacgcggaaagatcccgaggcgcgcccgacggcgcgagagatttcccttgacccgtgggtcgcggagcagatgcgcgttgtgcctccttccgaggtggcggcgtacgtgtgctccgcggtctccgaggacgaacacctccgctcgaacgcggagacgttcttgaaacactaccacgcgctcgtggatgacctcggcgcggacgctcggacgctcgcgtctctgtaccgcgggtcgagctgtctgacgacggcgcagggggatcgcgcgcggggcggggacgccatcggcgcggcgctctcgcggcgggcggcgaaggg

SEQ ID NO: 248912 - DNA, 811 bp, Unknown
  Bacterial polypeptide expressing nucleotide sequence isolated from the Sargasso Sea
gatgcttcatttcccgcaacgtaataactcagctcctcatttatatgcggaagaaacggatgcaccgctccctgagacgctgaacccgaaacttcgctacgcgtacttctccaccatcgccactggcgggaaatctctgattcattcatgccgtgacttatatctggggcgaaccgtatgctacaaaacgctcaagccagaatttcgcaaagaccctatcgaaaacctacgcctacttcgcgaagctcgtatctccgcgatgctacagcatcccaacaccatgccaacttacgagatagggcgagacaatcatggacattactttttcaccatgaaattggtccatgggtatacgcttagagagttgctgaactaccgagagcgatacgacttttcgcagctcataaatgtcatcctgcaagttggcaacgcactgggctatgcccactcggtcggtgtacttcatcgcgacattaaacccgacaatatcttgatcggaccctacggtgaggttctgttgctggattgggggctcgcgaaggtttggcatagcgacgatgccgcggcatctaaacaaaccttcctgcctgatcttgatgtcggggtgtcgatgaccagcgccggtaaattacagggttctgtagtatacatgtcgccagagcaggtcgatcgagaagcagccatcgatttccgatcagatatctacagcctgggtgcagtgatgtacgaggcactcacggggcaaacaccgtttagcggcactctggtgagaaaaatactggaagacgtacgccacaaggtgcccgacggc

SEQ ID NO: 248913 - DNA, 626 bp, Unknown
  Bacterial polypeptide expressing nucleotide sequence isolated from the Sargasso Sea
gatgtatttttttataatttgtgtttcttcagttttatcatcagagaagttttgccttaactatggtagtcaatatattaaaaaaataggttgtggccgatctggagaagtaattgcttataaagatagtactggtttattttttgctagaaaacgtattgagttaaataatgaagacttggggaattgtggtgtgaagtatgaaatagagtgtttaaaaaaattaaagcataagaatattatttcattagttaacttttatgtgactggggatctttcttcatcagttatagtttttattgatatgcctttgatggatatgtcattaagagattatataaataaaattaaaaaatataatattagttatgatagtgagcttaatatattattaacatatcaattattatgtggtgtaaattatatacatagttctcaattaatgcatcgtgatcttaaacctgaaaatattttattaaatagtgactatattcttaaagtagcagattttggcttggctaaagctatagggattcaagatggtaaaggtctatattatacagattatgttattactagatggtatcgtccccctgaagttctattaaattttttttataatcaat

SEQ ID NO: 248914 - DNA, 717 bp, Unknown
  Bacterial polypeptide expressing nucleotide sequence isolated from the Sargasso Sea
gatggcctacgacctcgacgacgtgatccaccagaacaagcgcgggccgctcgtccaccaggacattctgcacgtggctcgcgacgtcgccgcgggactggcacacctccacgcgaatcgcatcatgcaccgcgacctcaagccgagcaacgtgttggtagccgagggcagcggcataattcggtgcaagatcgcggactttggcatcagcaaggagctgacgcacacgctgacgaagatgacgtgcaagcaaggcacctgtgcatatatggctcccgaaatgctctcggacgacgggcgcgtcggcacgagcgccgacgcgtacgcctacggcgtgctcgcgtgggagcttctggcatgcaagaagccgtggaccggcaagtcggagcatcaaatccacaatgcgctcgtccgtggcgagcggcttccccggcccgaagcgcccgtcgtccccgagctggcggactgggccgtcgagtgctttggcgtcgcggcagaacggccgacgatgggtgtgctcgaacaatcgctcgacgaccttctgtgctccgatgagagcgaccttgagatgcttcgagcgggcctcgccgaggcgcttcgcggcgacaaggatgtgtacgaggaagcctgggatatctacgcgcgcgatccgcactgcggcgaaatgctcgacttgtgcgcgctgctcgcgaaacggcacgcggagacgccacggca

SEQ ID NO: 248915 - DNA, 809 bp, Unknown
  Bacterial polypeptide expressing nucleotide sequence isolated from the Sargasso Sea
tatgaagggcctggataacgagcactgtctggcgctctacgatgtggtggtggaggaagacagcggcagcatcttcgtagttatggagctggcccatatggagctcactacgagaatggaggactcggccagcgggcgtctgtccgagggggcagcccgcgaatacctgcgacagctcatggaggggctcacctacctgcacgggaagaacatcatccaccgcgacatcaagtttgaaaacgtgatgctggacaaacgggaccgtgtgaagatcggtgactttggtatgtcaaaggtttcggcgccaggcaagcatttggcaacgcgctgcggcagcacgcgctacatctcgccggagatggcactgatgcagccaggggacacgtacgacgggagggcgatggatgtgtggtccagcggggtactgctattcgccatgatcacaggcacgctgccgtttccacaggaggccttgggtgacatgctcaaggccatcacacgaggagcctacaagataccttcctttgtatcctcagatgcgcacgacctcatatccaagatgctggcgatcaattacaaggaccggtacactttggaccagatcaagcagcacccatggctgcagaccgccaaggcgcccgcgcgcccgcggaagattgagaacatgaggtcgatggatgctgagcaacgcaaggcccagcatgaagcggagctgcggaaagcaaaggagagagagcagcgcaaagcagccgagagaggaggaggcactaggcgccgtggatcgcgtcgcactagcaaccatcgaaacg

SEQ ID NO: 248916 - DNA, 556 bp, Unknown
  Bacterial polypeptide expressing nucleotide sequence isolated from the Sargasso Sea
cctgacatcagccgggctcgcactgatgtatgcacacactcgcggcgtgattcatcgtgatgtaaagcctgaaaatatatgggttggaaattttggtgaggttattttgcttgactggggagtcgcaaaagtctggggacagcgcgacgatactccggagtctgaacgaaatgtggaaagtggacgttttcaagccattacgatgaccggtgatcgtccaggtacgcccctctacatgtcacccgaacagatttccgggaatagacaaaccgttgacgagcgaaccgatatattcagcatgggcgtggcattgtatgaggcaacgtgtttttctgaaccgtttcgtgggcgtgtcattcaggaaacatttgaaaacattcttaacacaacgccgcccctcccatctgaggtacagacacatgagccagtgccgcctgcccttgatgatattatcatgaaggcgatcgctaaaaagccgtcacaacggtttcagacaatgcgtcagatgattgacgcccttcgcacaattcactttgccacgtctgatgagacataa

SEQ ID NO: 248917 - DNA, 676 bp, Unknown
  Bacterial polypeptide expressing nucleotide sequence isolated from the Sargasso Sea
tggcgtcgcgacgcgactcacggacacgacgacgaaacgtagaagcttgataggcacgccctactggatggcgccggaagtgattgagcagtctaggtatgatggcgccgccgacgtttggtccgtgggaattaccgcaattgaattagctacgactaaaccgcctcattcgtcgctgcacccgatgaaggtcctgtttgtggtaccgaaagcggctccacccacgctggaaggggagtttactgatcaattcaaggcgtttgtggcgcgatgcgtcgcgaaggacgcgtcggatcggcctcctgctgatgagttactcagtgatgaatggatcgcttcgggtgatttcgcgggttcatcaaaaccattactggcctcgctagtagccgaggcggccgcatcggcgccgccgccgccgccgccttcatctagatcgccgacgccctctccactcataacgccggcggcatcgccgcacacgccgcgcacgccggcgtcactctcgcagtacgcgcgctctcctgcttctttaccgtccgtgtcggcctcgccgcggcggccgggccggtcgcgggccttccgccaggtcgtcgcgccggcgatcgccgcggccgcgcgccacgcgataagaggaggcgaccggcggcggcccgcggcggcggcgctcgacgacctc

SEQ ID NO: 248918 - DNA, 763 bp, Unknown
  Bacterial polypeptide expressing nucleotide sequence isolated from the Sargasso Sea
tatgaatgaccttctgatagagaataaatataaattaatatctcttataaatactggaacttattcaaaagtatttaaagctcaacatgtaaaaaagggtatatatgttgcaataaaatttgattatgatgaaaaatcaaaaataatattagaaaatgaaattagaatttatataaaattattaaagtataaaatagataatattgttaatattaaatcatttggtgtaatagataaatataattatatagttatgaatataataccaaatacattagaaaattatattgatgatattgtaaatttagacaataaaataattaataatttaatggatcaactgctagttttattaagtaaattacataaagtagatatatatcatagagatttaaaacctgataatattatgatgaataaagagaagatatatttaatcgatctaggattatcaacagacaataaagatattataaataaaagtgttataggtaattggttattttgtagttattcttgtcataaagaaaattataattataaaaaagaagatgatataatatcaatatattatatttttttttatttattatctaataaaaaattaccatggagtagcatatccatagatgatgttaaaataaagaataatgtatattataatttgaaaaaatatacaaattttaataactattataaagattttcctatactaacaaatttgataaaagaatataataaaattatttattatcataaataa

SEQ ID NO: 248919 - DNA, 823 bp, Unknown
  Bacterial polypeptide expressing nucleotide sequence isolated from the Sargasso Sea
gcgcgagatccaggcgttgcggcgtctgagcccgcacgggaacgtgattaagctcctggaggtgctgtacgaccagccgacgggccgcctggcgctggtgttcgagctgatggacatgaacatctacgagctcatccgcgggcgcaggcactacgtcgcggaggagcgcgtgcggacgtacatgtaccagctcgtcaagtccatggaccacatgcaccggaacggcatcttccaccgcgacatcaagcccgagaacatcctcatcaccgacgactccctgaagctcgcggatttcggatcctgccgcggcatctacagcaagcagccgtacacggagtacatctccacgcggtggtaccgcgcgccggagtgcttgctgacggacgggtactacaactacaagatggacatgtggggcgtcgggtgcgtgttcttcgagattgtcgctctgttcccgctcttccccgggacgaacgagctggaccagattcaaaagatccactccgtcgtcggcaccccgagcccggagctcctcgcgaagatgaagcaacgctcgcagcacatggacttcaacttcccgcgcaagacgggctcgggcgtcgagaagctcatcccgcactgcgccccggagtgcgtcgacctcatcaacaagctcctggcgtacaacccggacgagcgcctcagcgcgaggcaggcgctgaggcacccgtacttccgcgagattcgagagatggagaagcgacagcacgccatgctcaaccccaaggcggcacccctcggagggtccgacaaggacccgggcgcgcgccggtccgagcgggag

SEQ ID NO: 248920 - DNA, 454 bp, Unknown
  Bacterial polypeptide expressing nucleotide sequence isolated from the Sargasso Sea
taaaatttcagatcttggtgctgcttatgagttgagtgagcaggaactaaaagaacaaagcgtctatgaaaaaaacgagcaggtaacaagatggtaccgatcaccggaattactcgaaacttcccgccactttttaaaaagcgatctttggtcagtcggttgtatccatgctgagatgttccttcaaagacctcttttcccaggagaaaagagtatgcaattagacacaatcaagagtgtcatgcgaaggcctataaccgatatatttgactcaatggatctcagagaacttgatcttgtccacggaatgctaatccccgatccaaaagcccgactgtcagcagaagcagccggaaaacaccgttttttttacccatcaattaaagaagaacaaacaagaaacgcagagcctgcatcaaaaaaaagaagggtagaaagaaaagactctcagtga

SEQ ID NO: 248921 - DNA, 674 bp, Unknown
  Bacterial polypeptide expressing nucleotide sequence isolated from the Sargasso Sea
cctgggggggcggtacgtgctgatgaacatgctcggccgcggcgggttcagcgaggtgtacaaggcgttcgacgtcgtcgagatgcgcgaggtggcgtgcaagctccaccagctctcgccgcagtggagcgaggcgcgcaagcagacgtacgtgcgccacgcgcagcgcgagtgcatgatccacaagcgcctgagccacccgcacgtcgtggagatgatcgacgtcttcgaggtggaccgcgacagtttctgcaccgtcctcgagctgtgcacgggggacgacctcgacgcgcgactcaaggcgcacggccccgttcccgagcgcgaggcgcgcgcgattctcgcgcaggtgttcgcggggctcgcgtacctcaactccggcccgaagaagatcatccactacgatctgaagcccgggaacatcctcttcgacgccgcggggagggtgaagatcaccgacttcgggctctcgaaggtggacgaccgcgcggcgcagggcggggggggtttgctcggcggcggcggggggtcgctcgtcggggacagcgggatggagctcacgagccagggcgcggggacgtactggtacctgcccccggagtgcttcgagacggggccggcgccgccgaggatctcctccaaggtggacgcgtggtcgtgcggggtgatcctgt

SEQ ID NO: 248922 - DNA, 484 bp, Unknown
  Bacterial polypeptide expressing nucleotide sequence isolated from the Sargasso Sea
ctgcagcagtaagccgaaaaatgattacgatctcaattacgactttaagtcattacaaagctttacccagctcgctccccagcccagcgacgacccactcagtgcccagcgaattcaaaccgaaatcacccagcaattaagtcaaaaaggtttcaccgaaaatgcctcttcccccgattttaaagtcgcctatggtttactaactcaagacaaacccaaagactcaggcctatccataggcttaggcacgggcagttttggccgttctggcggcattggcgtaggtacgagcgtcggcgtgccgcttggcagtgacacggcaaaaatccaaactattcaaattgatattatcgacactaaaactaataagctgatttggcgcggcactgatagtttcgattttgatggcggcggcgataaaaaagctcaagacacagccaaagccgttagccggattttggcgcagtttccaccgcagccataa

SEQ ID NO: 248923 - DNA, 343 bp, Unknown
  Bacterial polypeptide expressing nucleotide sequence isolated from the Sargasso Sea
atgaaccgcggagagaaatcggacccgaacggtggcggcggcgtcggcgtgcctgaacccgaggctctggccatcttcgcctccgccgctcgcgcggtggcggcgatgcacgcggcgtcgccgcccgtgtgccaccgcgacgtcaagcccgagaacctcctgttgggtgcggacggcgcgtggaagctgtgcgatttcggcagcgcctcggtcggggagacgagcctgcggacgccggcggagcgcctcgcggcggagtcggatttcgccaagaacaccaccccggcgtacagggcgccggagatgcacgacgcgcacaggtggccgagcgtcggaccgcccg

SEQ ID NO: 248924 - DNA, 482 bp, Unknown
  Bacterial polypeptide expressing nucleotide sequence isolated from the Sargasso Sea
cctacacaagaaggacaagaagcaggatgttggcatccccaaggtctacctctttgccaaggagggctcctacaatatcatggtcatggagatgctggggaagagtctagaggatctgaaccaaagctgtaaaggcaagttctcactcaagacggtcctgatgctgggggagcagtgcgtggaaagaatcaagtacttccacagccgccacttcttgcatcgcgacatcaagcccgataatttcgtgatgggcgtcgagcgcaagaagcacatcgtctatatcatcgactttggcctctcgaagcggtacatcggcaaggacgggaagcacatcaagtaccgcgaagggaaggacctgaccgggaccgccaggtacgcttcaatcaacacccatgccggggtcgagcaggccaggagggacgatctcgagtcgctgggctatgtgctcctctacttcctcaggggcaagctcccgtggtagg

SEQ ID NO: 248925 - DNA, 628 bp, Unknown
  Bacterial polypeptide expressing nucleotide sequence isolated from the Sargasso Sea
gttgagagcaaactggcactcggctccgccaagcacttcaacaaccccttcgactgtcgacaacttcgccatcaagggcctcattggccgcggcggaatgggacacgtctacaagggttttgacgccaaactcgatcgtgacattgccatcaaaatcctgcacccaagtcgagctcaggacgaagtttccaagaagcgattccttcgtgaaagcaaaacggccgcatcaattaaccacccatcaatagtaacaatctatcaaattggtgaacacgacagacttccgtatattgctatgcaattaattaacggacccaatctctccgaatatagatcgcagcaaggcggactggtccccatccccgaggccgtacgtattggacgagaaataagcgaaggacttgctgcagctcacgagaaggatctcgtccaccgagacatcaagcccgataacattctccttgaagaaccgaatcaacacgttcggatcattgacttcggcctagctcacgaagcgggagataaagaagggcgattgactctcgacaatgctgtcatcggcacacccgcctacatgtctcctgagcgcattggcaccgatgaagtgaacgcaaaaagtgatctcttt

SEQ ID NO: 248926 - DNA, 352 bp, Unknown
  Bacterial polypeptide expressing nucleotide sequence isolated from the Sargasso Sea
catgcagtttcccccaaccagcggctcgactcagatgcaggtgcagaagctccccaccggcatcgagggctttgatgatgtctgccagggcggcctgccgatcgggcgcagcaccctgatcagcggaacctccggcaccggcaagacggtgttctcgctgcacttcctccataacggcatcaagcacttcgatgagccgggcatcttcgtcaccttcgaggagtcgccgctcgacatcctgcgcaatgccgccagcttcggctggaacctgcaggagatggtggaacaggacaagctgttcatccttgacacatcaccggatcccgatggccaggatgtggccggcagtttc

SEQ ID NO: 248927 - DNA, 322 bp, Unknown
  Bacterial polypeptide expressing nucleotide sequence isolated from the Sargasso Sea
cttgtccgggccggcttcacggactttcaccctctgcggcacgcccgagtatctcgcgcccgagatcctcatgaacaagggccacgggctgctctgcgactggtgggcctttggggtcttcctctcggagatgctccacggctatccccccttcgtcgccgaggaccccttcgagatttaccagaagatcctcgcgaacgagccttccttcagcccccagctctgcgacggcgccgtcacagacttgatgcagcggctgctcgtgactgctcagacggcgcggcttggcgcagaaggtggtgcgaaggacgtcttggtgcac

SEQ ID NO: 248928 - DNA, 613 bp, Unknown
  Bacterial polypeptide expressing nucleotide sequence isolated from the Sargasso Sea
atggcgaaagccctcacaaagcagattttagctgctgtgaagtacttgcactccagcctcaacatcgtgcatcgggacttgaagcccgataacattctactccagccagtgaatgaaggcaatgacaggtcttcgggcggtgttccttgcatcaaaatcgcggactttggcttgagcacattctttgaatctacgcgaatgatgaaggagcagtgcggcactccagcgtacacagcccctgaagtgcaatgtggcgctggttactccagagctgtggacctgtgggccgttggggccatgttgtactacatgctcagtctgcgcatgcccttccacatcaccaaagcggaccgccgccacctgagggagaagactgcgacagtggaggaagtgtacccttcctgcctggagtttgggagtatctcgtgccccgtggtgcaggacctcattcgcaggttgctgaggctagagccgttggagcggtacagtgcgattgaggcggcgcagcatgagtggatcacaggggtgcaggtagagcaccgcccaagtgtgatggaaatgttgcgagatcatgactactccttgcttgagtctcaagagtctggagcctgac

SEQ ID NO: 248929 - DNA, 712 bp, Unknown
  Bacterial polypeptide expressing nucleotide sequence isolated from the Sargasso Sea
cttgcccgaggctcgactcaaggactacatgtatcagctgctcaagtcgatggaccatatgcaccggaatggcatcttccaccgcgacatcaagccggagaacatcctcgtttgtgacgacgagctcaagctcgccgactttggctcgtgccgcggcatctattcgaaacagccatacactgagtacatctcgaccaggtggtaccgtgcccccgagtgcctgctgactgatggcttctacaactacaagatggacatgtggggtgtgggctgcgtcttctttgaggtgaagcgcttcctcgcgtcctcaagacgagcgctcttagccttgcgttcccggcgcccagacctccggggtgccaaccccacctcccactgggtgtttatgtccgccggcttttcaaccctcctgcttgctgcttgcccgtcccgcgctaggtgctctccctgtatcccctatttcctggcacgaacgagcttgaccaaattaataagatccacaacgtcatcggcaccccgccccccgagaccctggccaagctcaaaaagcacagcaactcacatatcgacttcaactttccacacaaggagggctcgtcgctgcacaagctcatcccgcacatctcggcggactgtgtcgagctcatcgctaagctgcttgcctacgaccccgatgaccgcatctccgcgcgacaggcggtcaagcacccat

SEQ ID NO: 248930 - DNA, 766 bp, Unknown
  Bacterial polypeptide expressing nucleotide sequence isolated from the Sargasso Sea
tttgtgctccggcggcgagctcttcaaggccgtcgataagagagcaagacccggggtaagaccgcccttcaccgagagtcgttcagcagaactattgagacaaatgctcggcgtcgtgcgctacatgcattcacaaggtgtctgccaccgcgacctcaagctcgagaactggctcttcgactctgccgatccagatacggccactctacggttggtggactttggcctcgcgcgggtcttcggtcctctgcgacccgatctgtcgaagacaagaagcaagacgaacttcgacgagagggtaggctcagcatactattgcgctcccgaggtgctcgaaggtatctatgaccgacggtgcgacctctggtcgctcggcgtcatcgcctacatgctcttctcggggacgccgcccttctggggccgctctgataaagagatccttaaaagagtgcgttcaacagaagtgaaattcccgcccgagctcttccgctcgacgtcgtccgagggtctatcactcgttagaggtttactgcaacgcgacgtggagctacggttgaccgctgatcaagcgctagaacatcccttcttctcgctgtatgctactttggtcagaagtgtttctggcttagtggagggtatcctacccgaccaagaagaggagccgccgctcttagatgctttacgatcatttgccgctctgaatgccttctccaagttggttgtggaggtcgcggcggctcacttggcaccagctaggttagtacaa

SEQ ID NO: 248931 - DNA, 412 bp, Unknown
  Bacterial polypeptide expressing nucleotide sequence isolated from the Sargasso Sea
catgcagctgctgcagggggtggcgcatctgcacagcagggcagtggttcactgcgacatcaagcctagcaacctactgctgacggctgcagggggggtgcaactgtgtgacctgggatgtgcctcaaagctgcttcacggcagcagccgcaccacctactgcggcagccccgcctacatgagtccggagagggtgatggtccaactcctttcattgcagggcgccggctacacccatgaagctgacatctggagctgtggggtggtgctgtttgagatgcttgcaggctgtctgccctttcaagcagacggctcagtgcaggtgcggccgatgctgccacaccgcaggtcacacgtctgcactgtcgcaggagcaacagcaaaggatagtgtttgcatccccccaatttga

SEQ ID NO: 248932 - DNA, 424 bp, Unknown
  Bacterial polypeptide expressing nucleotide sequence isolated from the Sargasso Sea
gacggcgacggcttcttgaaggtgatcgacttcggccttgccaagatgatggaggcgggaagcgtggccacgactgtcgctggcacgccgatgtacatcgcgcccgaggtgctaaacgggtccggccacggaacggccgtcgactggtgggccatcggcatcctcatgtttgagatgctgtttggtgtcacacccttctggtccaaaaatggcttcgacatgcgtaacaagatccagaaggcgcagctaaccttcccgagtcgcgagaagtacacccagttcaagtacaccgacgaggtcaccgagctcatcagcgccttcctcaaccgcgacaagaccaagaggctaggttccacaggcggctacaaggaggtcctggcgcacccctacttcgccgacgtagacgtcgaggcatatctataga

SEQ ID NO: 248933 - DNA, 751 bp, Unknown
  Bacterial polypeptide expressing nucleotide sequence isolated from the Sargasso Sea
tttgccgcaaaaaaagtggcagacctttcaaagaaaagaatttaaagcctttgtaaaatggtggcctgacatctgcggtcagttcctttttgacgaccggtatatttgtgttagtcagttgaacattgagggtggacaggcggatgtcttcaaagcagaagatttggaaacctccacaatctgtgcagttaaggtatttaaacccacatccggatccgatgagggcaaggacaaagaggccttaaaccgagaatggaaggctctggagaaactgcggggtcacaaaaatattttagaactttactcctatggcaaccacgaagtaacggagcgattttttttaattacgccctggaaagacctcactctcgcttcttttatgcgagaaaaccaggccgtaacgaaatggccagaggcatttaatgacatactcctaggaatattggacggcctcatttacgcctttgataatgaaattattcatcgcgatttaaagcccgacaacatatttttagatcacatcggcgataagtccgaaggagggccctatatccccattatcggtgattttggcgtttctaaaattaaagacacaccaccatctgacgtgacttttgtgatgggaggttctgagccttggaccccatggcgggatctacgtgacagttcagatgaactgcaacatcagaatacctatgatgtctattcctggggagccatagcgatcgcgctcataacgggcgcatgccaa

SEQ ID NO: 248934 - DNA, 598 bp, Unknown
  Bacterial polypeptide expressing nucleotide sequence isolated from the Sargasso Sea
atgaagttatacgatataaacttaactaaatttataaaaaaaaatgcaggcaaaatagataaagatgaagttgataagatagaaagtcaaattatagaaggtcttaaatatttgcatggtttaaatataattcatggtgatttgaaaccagataatattctttttactaaagaagggaatattgttttatgtgattatggtttatctgagtattttgtcaagggtaaaaaacatgattttaagactatacaaacactatggtacagagcaccagaaatattgcttaaggattcttatgatgaaatgatagactattggagtttgggttgtattaagtatgaaatggagaaaggtcgggttttgtttaaagtgagtaatgaaacagatctttttattttaatcaatgtttatttaggttgtccatcattttataagacaataaaaaaatataattttctttatgataatttagattcacctatgtttataaaacataacaacgaaatttttgctttcaaggatttagagtttagaaaaagaaatcccaataacttttatttaaattgggatcctaaaaaaagaaaaattaaatattagt

SEQ ID NO: 248935 - DNA, 748 bp, Unknown
  Bacterial polypeptide expressing nucleotide sequence isolated from the Sargasso Sea
attgtcgcggtaaaggtgctggatctcgaggaacacgagcccgaacacttggacgaaatcagacgtgaagcgcagacgatgagcatgctcagtcatccgaatttggtcaaatattactgttctttcgtgcacgagtcctctctttgggtggtgatgccgttcttggctggtggttccacgttgaacttgatgaagtggtcgcaccccggcggcttcgaagaacccgtcatcgcgtgcatagtcaaggcagcgctcaaggcgttagattactttcatcgaaatgggaacattcatcgagacatcaaggctgggaacatcttggtcgacgccgacggcgcggtgaagctcgctgatttcggcgtgagcgcgtcgtgttggggctcgggcggtcgaccgcgaacgaggctcaccttcgtcggtacgccgtgttggatggcgcctcgaggtgatggaacaagagagtgggtacgattttcacgccgatatttggtccctcgggatcacggtgttggaactgtgccacgggcacgcgccgttttcaaagtatccacccatgaaggttttactcatgacgttgcaaaaccccgcgccgacgctcgaggagaagcaagccgacgggagacacttttctcgcgcgcttcgcgagttcgtcactctgtgtctgcaaaaggatccgtccaaacgcccgtccgcgagcaagctgctcgaacacaagtttctcaaggaggcgaaaaaagcggattggctc

SEQ ID NO: 248936 - DNA, 386 bp, Unknown
  Bacterial polypeptide expressing nucleotide sequence isolated from the Sargasso Sea
gctgcaaactcttgaccacccgaacctcttgcatttttacgaacattgcatccacggagatgaaatgtacgttgtcatggaactggccgagggagggcaattagcacaaaggattgaagaaagccggcgatcaaatgtgcgtattgaggagggtttgatatggcgctggctctgtgacgtagccggcgcccttgcctacatgcacacacggcgaattctgcaccgcgatgtgaagccctcgcatatctacattggagccacagggcaggcaaagcttggagactttgggttgtcgaaactctttggcgaagcccaagacgccattgccttttcatgtgttggaacacccttttacatgtccccagagatcgtccgtggcgacggct

SEQ ID NO: 248937 - DNA, 684 bp, Unknown
  Bacterial polypeptide expressing nucleotide sequence isolated from the Sargasso Sea
tgatgctgttgagcagcgcgttcgttcgaccatcgaagaaaaagcggtcgaccagcgatcttgggacaaagctttagcacttgaatgtgttcggaaaaaaatccttacaaaattccaggcccgtgagattcttgcaggacacactcggtttacccttggtcagtatcgtgtgctcagtgagattggtcgaggcggaatggggcaagtgttcaaggccgagcatgtgctgatgaagcgaaccgttgccgtaaaggttctgccgctctcgaaagccaatcctcgtacagaggcagcatttcagagggaaatcgaattgctggccaaactggatcatgacaacattattcgagcccttgatgctggttatgacggaaatgtgtattaccttgtgaccgagtacatgcaaggaattgatttgcgaaagcaagtcacaaagtacggtgctctggagcagaatcaagcagtgacggtgacggttcaagcggctcagggactagcatatgcccattcacgtggatttgttcaccgagatgtcaaaccaagtaatattctcgtgacgcctgacgggagaatcctcatattggatcttgggttagctggcgccatgtttgatccagaatcaatgaatcctgcaagacgattaggaacgccaggatatatgtctcctgagcaaatccgagctcc

SEQ ID NO: 248938 - DNA, 301 bp, Unknown
  Bacterial polypeptide expressing nucleotide sequence isolated from the Sargasso Sea
ctgatcaaagagagaaataaaagagggaggcaaaggagggaacttactcctcacatcatatcgagatggtacagacccccagagatcataatgcttgagaagcaatacgactgttcagttgacatctggagtctggggtgcattctggcagaaatactttattgttcaaataattataagggaaattataaagagaaaggaattggaactttgagaaacaaagacttattcccaggcacctcttgctttccactatcacccaacaaaaacagaaaaggtcaaatccaagacattctttagt

SEQ ID NO: 248939 - DNA, 731 bp, Unknown
  Bacterial polypeptide expressing nucleotide sequence isolated from the Sargasso Sea
cgagctcaaactgatcgattttgggctatctcacctggggaagaagaataaggagattagcgcaaaaggccgggtggggacactatcgtacatggcgccggaggtcttattgcgccaagcgtatgcaaagccgtgcgacatctggtctctgggcgtcgtggcgtttatcctactcgcgggaaggcgccccttccattcgcgcgaccgcgacgagaagattgatctcatcctacacgcggagccaaggtatggagggagtggttggaagggaatctccgacgaggcgaagcaatttgtgcaggcgttgctgcggaaggagcccgatcagcgcttgaccgcgccccaggcgctgcagcacccgtggctcgtgagaatgcgcgcgtcggagccgacgtcaagcccgcagtccgccatcaagcaaaacttggaggtgatgcgctcgttgcaggcgttcagcacgaccggccggcttcataaggtagcgttggagctcctcgcattcgccgcgccgtctcacgaggttgatcagctacggaatgtctttgtggcgattgatgccgacggctcgggcgcgatcagccgggaggagttcaaacaggcgatggccgcgcacccgcagtatggtgacggcgagatccgtagattgttcgaccagatcgatttcagccggaagggtgagctctcatacaacgaattcctcgcagcgacgttgggcgcggcatcgggcgttc

SEQ ID NO: 248940 - DNA, 673 bp, Unknown
  Bacterial polypeptide expressing nucleotide sequence isolated from the Sargasso Sea
attacacaatgttatcatgttcctcaaattatttggcatggtaaaactgataccaatcgaattttagttatggatctatatggttccagtttagaaacactgaaacgaaaagattttgaatttacagttcccatagtatctcgattagctattcaaattcttcaagcattacaacaagttcatgatcggaaggttcttcatcgagacttaaaacccgacaatattttaatcggagccaatcgagatatcaataatttttatctagttgattttggattatcgaaaaattttatccgtaatggaagtcatctagaataccgagaagacaaatcatttgttggaaccttacgctattcaagtgtcaaaagtcatattggaattcaacaatctcgtcgtgacgatttagaatcatttggatatgtcttaatctatttgcttcattcggatttaccttggacaacaggttctagtaaagataaagaagcaaaatataaacatattaaattaacaaaaattgttgcaagtcttcatgatctctgtaaagggattccgattgaattttatcaatatctatgttattgtaaaaacttagattttgaagagactccgaattatgaatatttaattcaattatttgaaaaccttctctcatcctatgattcgacactgtaat

SEQ ID NO: 248941 - DNA, 544 bp, Unknown
  Bacterial polypeptide expressing nucleotide sequence isolated from the Sargasso Sea
ctgggcgccggcacggccggcatcgtgtggaggggcacgtatgcgactacccccgtggcggtcaaagtggtgcaatccgaccgtatttgcgtggagactgtgtgcgagctgcggcaggaggccgcgctctgcatgaacctccgccacccgcacgtcatccagaccctggggttggccagcgacgggcgcgacaagtacgcgctggtcacggagctcatgcattgctccttggcccagctgctcgaccggggcgccgcggctcggctatcgcgccctctcacgtggagcagcccactgctcgacatctgcatcgacattgcgcgcggaatggcatatctgcacgcccggggcatcctccaccgcgacctcaagcccggcaatgtgctatgcggggccggcccacgctaccttgcgaaggtggctgaccttggcgattcaacggcgggctcgccagtgtcccagccggccccgtccgctatgcaccgcccgcccatgggcacgctcatccaggccagagcgcgacgccgtgtgctccgctcttgag

SEQ ID NO: 248942 - DNA, 634 bp, Unknown
  Bacterial polypeptide expressing nucleotide sequence isolated from the Sargasso Sea
gcgtgcttagtcctcgcgctgcagcggctccatagcttaggcattgtctacagagacctcaagcctgagaatgtgctcctaagagaggacggctggccgatgatcgccgactttggcctctcgtcgttccacgtcactgacaagcctctctactcactctgcggcactccagagtttatggcgcctgaggtgatcggtggaactggctcggcaggatacggccccgcggccgattggtggtcgctcggcgtcctcctctgccagtgccttacgctgtgcacgcccttctgcgacgcgcagcagaggccgcgctgcacgtttgataatgtgctgcgcgggcggctcacaatgccgccggagcagcactataagcgagtcgcgtcgcagcacgccgctcagatgatcgagtcgctccttacctcggacgtcggccgccgattaggcagccccgcacgcggcgagatccgcgcgcatccgttcttctggatgctcgattgggagcggcttgagaagcggcagctcgagccgccgcatgtcgattattgcaaggagcgcgcgagggacgcgaagaaggtcttcttccggcagtcgagcccgaagccgatgcggagggagggcttcaacccgatgtaga

SEQ ID NO: 248943 - DNA, 356 bp, Unknown
  Bacterial polypeptide expressing nucleotide sequence isolated from the Sargasso Sea
ccagcaattaagccaaaaaggctttaccgaaaatgcttcttcccccgattttaaagtcgcctatggcttactgacccaagacaagcctaaagactcaggtctatctataggcttaggcacgggcagttttggccgttctggcggcattggcataggcaccagcgttggcgtgcctcttggcagtgacacagcaaaaattcaaaccattcaaattgatattatcgatgctaaaaccaataagctgatttggcgcggtaccgatagtttcgattttgatgcgggcggcgataaaaaagcccaagacaccgctaaggcggtaagccggattttggcgcagtttccaccgcagccataat

SEQ ID NO: 248944 - DNA, 1015 bp, Unknown
  Bacterial polypeptide expressing nucleotide sequence isolated from the Sargasso Sea
atgccaacagaagtagatggtcaaggcccaatttttctttcggcaaccgactatgcgctccctaaagttattcccgagggtgttgataaatataccgggtaccgagagatggctcgaggtggatgcgctatcctgagaacctgctttgatcaaatgacaggtcgaaccgttgtgatgaagtcgttactcacgaagtatcttcttgataagcaagaaaatcagcgactccttcgagaagcacggataacagctcaactccagcacccaaacacggtacctgtctatgacattgggcgggatcaccgccaggggctttattttacgatgaaacgtatttctggggaaaacctgtttacgatactatctcgcgttgctcagaaagatcccgtcacagtggcagagtttgatcttcgccggcgagtagaaattgttatgaccgctggacttgcacttctctatgctcacgccagaggagtcattcatcgagatgtgaagcccgaaaatatctgggtgggtaactttggtgaggtcatattacttgattggggtgtagctaaagtatggggtcagccggatgatggacctggtcgtccacaagtcattcagcaaggggaggcagaccagtccctaaccatggcaggagatcgaccgggtacgccactctatatgtcgcctgaacaagtgaataccaatcgggcaacaatcgatgaacggagtgatattttcagcatgggtgtcgtgctatacgaggcaattgctcttcgggagccatttcggggtcgtgtgattcaagaaacatttgagaatattattcataatgacccatgcccaccatcaacgcttgctcccgaaaaaaacatcccaaaagaacttgatgacattgttatgaaagcgcttgagaaaaaaccggcaaaccgattccaaacaatgcaggagatgcttgatgcagtgcgacttcttgactcagcgtacacacttcaggtgcttcgtaagcttgaaaatcaggaccagtaaa

SEQ ID NO: 248945 - DNA, 994 bp, Unknown
  Bacterial polypeptide expressing nucleotide sequence isolated from the Sargasso Sea
aggaggatttggccaagtttttaaagtatatcataaaattgattcatcgttatatgctataaaaaaaatacctattaaaaattgtgatttaatttctgaaaatggaataaatttagagaaaatattgaatgaagttagatgtattgctaaattaaatcatcaaaatataataagatattataattcatggattgaatatgatataatagattatgatgttaattcaaaaaaatcattagattatgattctgattcagaaaaagaagattcaattacaactgataataatattagtgaaaagtgtaagttaacattgtttattcaaatggaattatgtgatcttaatttaaaagattggataattaaaagggatgaatattctaactttaattataatcattctgttgaaatatttaaacaattagtattaggattaaattatatacataaaaataatgtgatacatagagatattaaaccagctaatatatttctttttcatatttataaagatacatttgtaccagattctgaagttgaaaaattcaattatattataaaaattgctgattttggtttaagtaaagaaaagcttagaaaaagtaaatcatatcaaaataatttgtttcaattagaatttaataacaaaggtttaaaaaaatcactatcatataataattttcaacaatcaagtagtcaaagtgacaccagtaatttgggaactcaatcttatgcttctccagaacaattaaatagttttaattacgaatataaaacagatttatatagtttaggtataattttatttgaactaatgtatgaaaataaaacaatgatggaaagatatatgaatataaaaaacttaagagaacaaaataaattaccaaaagattttctatttgaaaaagaaaaagaattaatactaaagctaacaaatattaatcctatttttagaccagatactggtaatattttaaaagattattttatttag

SEQ ID NO: 248946 - DNA, 1372 bp, Unknown
  Bacterial polypeptide expressing nucleotide sequence isolated from the Sargasso Sea
atggaagagctacaacaactcggcagataccagatccggcgcgtgcttggacgcggcgcgatgggcgtcgtctacgaaggcgtcgacccgaaactgaaccggcctgtcgcgatcaagaccattctgaagagccagctttccgatccggaaatggcggccgaatatcaggtgcgtttcgagcgcgaggcgcaggccgtcgcccggctgaatcatccacatattgtcggcgtattcgatttcggcgaagagaacaacgtcgcctatatcgtgatggagctgattcgcggcgaggagctcaaggcgtacttcgacaagggcacgcaattcgcggtgaaagacgcggtgcgcatgaccggcgaattgctcgacgcgcttggctacgcgcacgagcaaggcatcgtgcatcgcgacgtgaagccggcgaacgtgatgctcgacgcgcagatgcgggtgaagctgaccgacttcggcgtcgcgcgtctgtcggataccggcagcgacggcacccaggccggtacgatggtcggcacgcctagctatatgtcgcccgagcaggcgatgggcaatccggtcggcacgcgctcggacatcttcgcggtcggcatcgtgctgtatcagttgctgaccatgaaacgcccatttgtcggcgacggtcactgggctgtgcagcgtcagatcatccaggacgacccggtgccgccgtcggtgcagaatccggcactcgatcccgtattcgacgcgatcgtgttccgagcgctcgcgaagaatcccgaggaacgttacccgtacgcacgagccttcaaggaagacttgcagcgtgcacttgccggtcaggcgatcgacgaagacgaggcgactatgctcgcggtggccgcggcgcgcgcacgaccgccgggcgaaaccggcgcggcacgcggtacgcgcggcgcgaacgattcgagtgccgtcgagatcgagttctggaagacgatcaaggacagcagcgatccggacgaattcgagctgtatatcgcgaagtttccgaacgggacctatgccgatctcgcacgccgcaagctggcgaagctgcatggcgatgattcggcggcttcgcgctccggagtgcgcggcgagggtgtagcggaagggggcacgcggctcgcgcttgaccggcctgttctgcctggcatgccggcggccctgggcgatggatcgatgcgggttgcgccggtcgggaagaagccggccaggatagcgttgatcgcggtcgcttcggtggcggtgctggccgtgggcggcggtgggtacttcatgctcaggcagagtacgccggtcccgtcgggcggcggtgggccggctgcaagtgtggcgccgccgctcgatgcaaatgggt

SEQ ID NO: 248947 - DNA, 913 bp, Unknown
  Bacterial polypeptide expressing nucleotide sequence isolated from the Sargasso Sea
cttgatagacggtggggaatgggaactcacggagagacagctcgtgttcaacgagaagatcgccagcggcgctttcggtcttttgtatagaggtagttactgcgggcaagaggtggccatcaaggttttgaagagcaacgcgaatgatagcgagtcgaacggcgtgcgttcggagacgattcgcgaattcgcacaagagttgagcattttgcgccgagttcatcacaagaacatcatccagctcatcggcgcgctcacaaagcggaccaccatgtgtctcgtgacggatttcatgcacggaggtaaccttttacaacacgtgcaagaacatccgttgaaacttccagaattgatcaagcactgcttgggcgtggggatgggtctcgattacttgcacaaaatcaacatcatccaccgggacatcaagacggcgaacttacttttggatgaaaatctagtggtgaagattgccgatttcggcgtcgcgcgaacaaagccgacggatggttcttggatgaccgcggaaaccggtacgtacaggtggatggcgccagaagtgatcgctcatcaatattacgacgaaaaggctgacgtgttctcgtacggagtcatggtgtgggagctcgtcagcggaggcgaggtgccgtacccgggatacacgccgcttcaggccgccgtcggcatcgtccagcgcggactacgaccgaccatctccccatccgtccatcctgttatcgcacaagtcatgcagtattgctggaacgtcgatccggccgcgcgaccatccatggaacaaatcatcaccctcctcaggaacatcgacgttcctcgtcagcaggagggtaaacacggcttcctcgatcgacttcgatcggtgagctttaagtctaaaaaatcaactcgctcgcagtga

SEQ ID NO: 248948 - DNA, 794 bp, Unknown
  Bacterial polypeptide expressing nucleotide sequence isolated from the Sargasso Sea
gttggcggagcatccgtcgccgccgcgcgcgcttggacgctccgccgcagacgccgcggggactcctgatccatcgcccaaaaaggagaagactgccaacgtcacgtcgtcgctcagccccgcgcttcgttcgcacagccccacgctcggacagttgcaaagcgccaagacgctcgatgaattcgacgtcgtcgacgtgctcgggcaaggcatggtgggtctcgtcttgcgcgccaagcacaggacgtcgggtaaagtgtgcgccatcaaaaccatgcccaagtcgcaaatcatggagcacggggaggaggaacactgcatggcggaggtgcgcgcgctcaaagagcttcgacacgcgccgttcgtgtgcaattactacgcgtcgtttcaagatccgtgggcgttgtatctcgtcatggaggattgcgtcggcgacatgttcgacttgttcaatcagagcggtctgcccgggatcgggcaaatcaaggtctacaccgcgcaagtgttgctcggcctggagtacattcacaacgccgggtacgtgtatcgcgacatgaaaccagaaaatctcctcttgcgatcggacggatccatcaccatcggcgatttcggttttgcgaaaaaattggaaaagggcgagcgcgcgtacacaatctgcggaacgccggattatctcgccccggagctcatcctccaccaagggtgcacgcgcgcggcggatatatgggcgttcgggatcttggtgttcgagatgattgccggcttccctccgtttcgcgatagaaagagacgcg

SEQ ID NO: 248949 - DNA, 538 bp, Unknown
  Bacterial polypeptide expressing nucleotide sequence isolated from the Sargasso Sea
atgggatacaaaaatatcgccagtctgtttgtcgccttggtcttcgtcagcgcctgcagcagtaagccgaaaaacgattacgatctcaattacgactttaaggcattacagagcttcatccagctcgctccccagcccagcgacgacccactcagcgcccagcgcattcaaaccgaaatcacccagcaattaagccaaaagggctttaccgaaaatgcctcttcccccgattttaaagtcgcctatggtttactaactcaagacaaacccaaagactcaggcttatccataggtttaggcacgggcagttttggccgttctggcggcattggcgtaggtacgagcgtcggcgtgccgcttggcagtgacacggcaaaaatccaaactattcaaattgatattatcgacactaaaaccaataagctgatttggcgcggcacagatagtttcgattttgatggcggcggcgataaaaaagctcaagacacagccaaagccgttagccggattttggcgcagtttccaccgcagccataag

SEQ ID NO: 248950 - DNA, 1130 bp, Unknown
  Bacterial polypeptide expressing nucleotide sequence isolated from the Sargasso Sea
tatgctggataaagtcaccatcgacgactttcgaatcatcaaactgataagtagcggagcgtacagcagagtgtttctcgctcaaaaacgcgcaaccggtgatctgtatgcagtcaaagcgatgcgaaagcatgatcttgcgtataaaaacatgatggaacaagtgattgcagagagggatgcactcatcgccgcggcgaatccattcacgattaaactatactactccttcacatcggcgaggcacgtgtatcttgtcaccgagtacgccaacggaggcgatttgtatagtcttctgacacaacttgggcgcttgagtgaaacgaatgcgcggcagtattgttctgaaatagtgctcgctttggagtacgtgcattcacaaggcatcacacacagagatttgaaacctggaaattgtctgatctcggctgacggacacatcaaacttgccgattttggtctttcacgaattcacagagacgttgacgagacaataggtagcggtagcgattcaccgatgccgtataccacgtctgcagtgtcaccgagtagtcctggctcatcgttccgcatccctggtcgcgagtcgacaattacgaatagcccgatacagagaatgagccttcaggcgagtacgagactcagcccgagccatagtccatctcgtcaagtgcacaaaaggtcggcttcgaggcacggatccggacctaaagggacaccaaactatctggcgcctgagatcttactatgtgagccgtgcggtcaagctggagattggtgggcgctgggcgccatcacctatgaaatgctcgtcggcgtccctcctttcaacgcgtccactcctcttgctattttctcaagaatcatcactggaacggtggaatggccggaggaggagaatagatttagccaggaggcgctgactttcgtcgagtctttgctgaaccataacgtcgaagaacgtctgggaacgatcgccggcgccgacgaagtgaaagctcacagttggttcacgacggttaattgggaacatgtgtacgataagagcgccccgagcgtgttcgtcccgaaacctgaaaatctcggagacacttcatactttgtgccgtcgtcgaacacgaactcaaacg

SEQ ID NO: 248951 - DNA, 1004 bp, Unknown
  Bacterial polypeptide expressing nucleotide sequence isolated from the Sargasso Sea
cgaggtgctggagagaatcggcgcgggcggattcagcacggtggcgcgcgcgagacaccgaagcacgggcgcggaggtggcgataaaggtggtggataagtccaagtacgcgcccaccgatcgatcgttcgatcgggaggtggcggtgctgagcgaggtgagacacgagaacgtggtggagctgtacgcgacgtacgtgacggagcgaaacgtcttcatggtgtgcgagctcgtcgagggcggggaattgctcgacgtggtgagtcgcgccgggtcgttcacggagaaggatgcgatggtgattatacgacaggtactgagtgcggtggcgcacatgcacgcgagaaacatcgtgcacagagatttgaagcttgaaaatattttattgagcgacgacggcgccgcgccgcgcgtcaagttgattgatttcggtctggcgaggttcaagccggagggacagacgttgcgaacgatttgcgggtccccgctgtacatcgcgccggagattttagagctcgagacgagtaagaatgaggatgagttttacacgccggcgtgcgacatgtggagcgtcggcgtcatcctcttcgcgttgttgagcgggtactcacccttcgacgacgaggacgagagcgtgctctaccgaaacatacgaaacggcgtctaccacctcgaacccggggtgtgggatttcatcagtgatcccgcgaaatccctcgtcgccgcgttgttggagacggatccgaaccggcgtctgagcgccgaacaggcgctcgcgcacgagtggcttcgatcggacgacgccgtggattccaccgcgtccacgatgattggccgcgcgacccctcacggcgaccgtccggacgtcgctcgcgccgagagattgaaacgacaggctgaattcattcgcgcggtgcgagaggaggaagcgctcgccttcagacaagccaagcgcgtcgccggcggcgcgtccgaggaggcgttgtttcacatcgacgagtgag

SEQ ID NO: 248952 - DNA, 2749 bp, Unknown
  Bacterial polypeptide expressing nucleotide sequence isolated from the Sargasso Sea
ttggcaggcaagcggcattaccggctcggtgcgttgctcggcgaaggcggcagcggcgtggtgtttcgcgcaacctgcgacgagacggggcaagacgtcgcgatcaagctgatgcgggacgatgtcgcgcggaccgaagccgagcgcgcgcgccagcgcatgcgctttcggcgcgagacgagcctgtgcgaggcactgcggcaccctaacatcgtggcgctgctggacaagggggaagcgcccgacgggcggctgtttgccgtattcgaacgcgtgcagggccggaccctgcgcgaccggctcgcgatggaggggccgctgtcggccatcgatacgggacggctgatgacggaggtgctcgaggcgctcgcggcggcgcatcgccgcggcatcgtgcaccgggatctgaagccgcaaaacatcgtgctcgcgatggccgaagacgggctgcacgcgaagctcctcgatttcgggatcggcgccctgttgccgggcacaaccgatatcgcgccgcaggcggcgacgctggcggccgaggtgctcggctcgccgtcatactgcgcgcccgagcaattgcgcaacgaaccgccgacgccgggaagcgacctgtatgcgtggggcctggtcgtgatcgaatgcctgacgggcgaagtcgtgatgcagggcacaagcgtggccgacattctctatcggcagctcagcccggtggatgtcgcgcttccaccggcgatcgcgtcgcatccgctcggctcggtgctgcggcaagcgttgggcaagcatccggcgcagcgtgccgcctcggccgacgaactcgtcgcgcagtttcgcgcgctcaatttcgccgcgctcgtcggcccgctcgatgccggccgcgcaagccggcgcccgcagccgcacccgttcgcgccgcgcagcgacgcggtcgcaacggcaggcgaataccggcaggtcacctcgctgtgctgttgcgtgacgatcgccggagacggccggcaacgccatgcgggaaccgatcacggcgccctgctcgaccgctacgaggcgcaatggctgacgaagtgcgcggatatcgccgtcggctatggcgcgcaggtcgacgagcggctcggcgacacgctgctgttccatttcggcctgcaaggcgatatcgactggcccgcgcgccgcgcggcgcgtgcggcgctcgacatggtgcgggtggccgcgcgcgcgcggttgccggtgccggccgatgcccgcgatgccgtcggcggcgaaggctggcacgtcgaagtagccgctgcgattcacgtcgggcaggttctcgtgcatgcggcgcagagggcaggcggatcgacgccggtcgtcgcatcacggctgttgcggctggccgggcctgggcagatcctgatcagcgacgatgcgcggctcgcgctcgaacggcatgccgacttccggccgaccgcgttgcggctggcgcgggcgggcctcgcgccgcagccggtgcatgaactgctcggcgagcgccgggccgatacgccgttcgattcgctcgacggcggcatgcgggcgccgatgatcggccgcgcgcgcgaactcgatgcactgctgcgcgcgtggcaggcgacgcgcgtacgccatcgtcgcgcgatgcgcggcgtgccgcggctcgtcgtcggcgatgcaggaatcggcaagtcgcgcctcgtgtacgcgctgtgcgaggccgtgcgcacacagggccacgcgttcgcgcattgcgggtgcctgccggagcgggagaatcatgcgctgtttccgatcctgcggttcatcggcgcgcattggcaactcgacgccgacagcccggccgacatcacgcacgcggcgatcgacgcgatgctcgcggcgctcgaatgcgatcgtgcggcggcccgtgtcgcgctcgcgacctggctggggctgccctgcgatgcgaaggcggcgaggtggccgagtgcgcgcgagccgcacgcactgttcgacgtgctcgagcaattgatcgtgtcgctcgggaacggcgcgccggtgttgctcgtcgtcgaggacgtccagtggatcgaccgctcgaccgaggattttctggcgtacctgcagcgctcgccgcgcgcggcggcgctctgcatcgtgctcacgtcgcggcccgccaggctcgcgcgctggcgtggcgcgaccgaacgcgtggtgctgcgccgcctgccgcgcgacgacgcgcggcgcctgatgtcggcgcacctgggccagggcgcgctcgatccggcctggctcgacccgctcgtccatcgtacggcgggtattccactgttcatcgaggccgttgcacgcgaactgacgatgagcggggcggacggctcgctcgcagggctgcggacgacggacccgtgcccgcttccgctcagtctcggcgggatgctcggtcgcgcgctcgaccggatcgacgacgcgcgcgataccgcgcagctcgccgcgacgatcgggctcgaggtggatgcgcaactgctggccgcggcgtcgccgcatgatcgcgtcacgctcgacgcgcacctgcaactgctgctggaagagcggatcatgtacgcgcaacatcggcgcgatcgtgtgttctattcgttccgtcacgcgttgattcgcgacgcggcgtacgcgtcgatgccgccggacgtgcggggcgccaaccatgcgcgcgtcagccgcgcgctggccgcgcaagccaacggcgtcgacggacacttcgcgcgcgcgtgcatgtgaa

SEQ ID NO: 248953 - DNA, 478 bp, Unknown
  Bacterial polypeptide expressing nucleotide sequence isolated from the Sargasso Sea
ttgtgtgacctgcgtgcgcgcgcgcgcgatgaagactggctcatcgacgtggacgacgcgtgctctttggacgagcggttaggcgagggaacgacggcattagcattctcggctcattggctcggcgcgaaagtcgtcgtgaagaagatcaaggtgatgaaagatgagttatcgcgaagggcgttcgtgcgggagtgctccatcatgtcaagaatgcgacatccgaacgttttagcgttttatggtgcctctctggaggcggatagacacatctctctagtcaccgaagcggcgacgggtggaactttaaaggcgtggctttaccaaagtgaaggcgcgcctttaccacagaacaggtcgctgagcgctcgtctctctatcgctatggatattttacacgcttttgtgtattttgaaacgcgaaagccgattgttttgcatagggacttgaagccgagcaacgtgttcatcatgtctg

SEQ ID NO: 248954 - DNA, 805 bp, Unknown
  Bacterial polypeptide expressing nucleotide sequence isolated from the Sargasso Sea
tatgaaagataagaaatttggcaaatcagataagatgcaagtacaaaaactacctactggcatagaaggttttgatgatgtttgtagaggaggcttacctgtatctcgaagcactctagttagtggaacatctgggactggtaaaactgttttttctcttcaatacttacatcacgggatttgcaattttgatgagcctggcatattcgttacatttgaagaatcgcccttagacataataagaaacgccgcaagctttggatgggatttacaagaattaattgatcaaaataaactatttatattggatgcttctccggatcctgacggtcaagatgtagcaggtaattttgacttgtctggtcttattgaaagaattagttacgcaataagaaaatataaagctaaaagagttgcgatagattcgataactgcagtttttcaacaatatgatgctatttatgttgttagaagagaaatctttagattaatagcaagattaaaagaaataggagttactacagttatgactacagaaagggttgatgattacggccccatagcaagatatggtgtagaagagtttgtttctgataacgttgttttattaagaaacgttcttgagtcagagaaaagaagaagaactttagaagtcttgaagttaagaggtacgacgcatatgaaaggggaatatccatttactatgggtttagatggtattagtgtatttgctctaggagcaatgagacttactcaaagatcttcaaatattaggattagttctggtgtaaaagaccttgacgat

SEQ ID NO: 248955 - DNA, 661 bp, Unknown
  Bacterial polypeptide expressing nucleotide sequence isolated from the Sargasso Sea
gctggaggacttaacaacagggccagtcgatcaggcgcacaaacggcttgaaaagctctgtcttcaaaatgctgatttagcaggacaactccgagaattatttgcaacggtatctgtcaccgatgctgtggcaatggaatctacgatcatcatgcgcagcgatgacgggagaagtggggcagatgagaaagatattaggccatttattggagatgggtttgtaccaggcgtctcttcgctaccagctcaatttggagagtatgagcttctcgaagagataggccgtggaggtatgggtattgtctatcgcgccgtacaaaaaagtctccaaagagttgttgcagtgaagatgctcttgcgccgtgaccttgcaagcccagcagacctcgcgagattccgcagtgaggctgaagcagccgcccaactcgatcatcctggaattgtctccatctttgaagttggagaacataaagggcaccctttttactcgatgcgatatatcgaaggaacgacgctggcaaaacgattacaagctggcccaattccgccaagagagggtgcacagatattactccgtgtggctgaagctgttcaggctgcacattccaggggagttcttcaccgcgatctgaaaccatcgaatattctgatcgatttggcg

SEQ ID NO: 248956 - DNA, 190 bp, Unknown
  Bacterial polypeptide expressing nucleotide sequence isolated from the Sargasso Sea
tgcgtcaccgcagtacattcgccaactcgccgccgcgttgagctactgccattcgaagcacgtcatccatcgggacattaagcctgagaatctgctcctcgacatgcgtggtgagctcaagatcgccgacttcggctggtcagtgcactcgcgcaactcgcgacgcaagacgttgtgcggcagtgcgtag

SEQ ID NO: 248957 - DNA, 313 bp, Unknown
  Bacterial polypeptide expressing nucleotide sequence isolated from the Sargasso Sea
tttgccgcctgagatgatcgagggcaaggaccacgactaccacgttgatgtgtggagcttgggtgtgctcatgtacgagtttctcacgggcagcccaccttttgaggcaaacggccacacggagacgtacaagaagatcgcgcgcgtagccatcacctggccggatcacatctcggctgaggcgcgcgacttgatctcccgtctgctggtcaaggatccggagaagcggatgcagctcaccgacattgagaatcacccatggatccgcaagcacacgtccgacgatgcgccggtgcacgctgcgccgaagctt

SEQ ID NO: 248958 - DNA, 836 bp, Unknown
  Bacterial polypeptide expressing nucleotide sequence isolated from the Sargasso Sea
aatgcctcctggttgggttgattcgagtcgcgatgccgccaggaatgccacccaggcatttcatttaaaggtttatcacaaagcggacaagactggtttcgagcagtcgaaggactttatgattggacaaggtgacgtcatcgtgaatagatatagagtagttgaaggcattggccgtgccgcgttcagtaagactgttcgagcacaggatctccagacgaacacgcccgtgtgtctgaagatattgaacaataataaagattgtgtcgaccaaggtttggacgagatcaaactcttgcgcttgttgaacgaccaggaccccgatgatactcaaggtatcgtgcgaatgattgactttttctactacaaagagcacttgttcatcgttctggagctattgcgagcgaatttatttgagtttcaaaagtatgagatggagacggcgcagacaccgtatttttcgcttgcacgagtacagtgcatcgcaaagcaagtcctcaattctttggctttcatacacggtaaaaatttgattcattgcgacctgaaaccagagaatgtgttgatacaatcttatgctgattgcaaggtcaagatgattgatttcggaagttcgtgtttcacttcggacgtcttgagtagctactgtcagagtcgagcctaccgtgcgcccgaggtcatcatcggtgccaagtactcacagaaagtcgatgtttggtcgctcggctgtatactcgcggaattagtgagtcgacaaatattgtttcggagcaattcggtacctgcgctgctcgcacgtatggtgagtatccgagggccttttgacaagaagttcc

SEQ ID NO: 248959 - DNA, 491 bp, Unknown
  Bacterial polypeptide expressing nucleotide sequence isolated from the Sargasso Sea
gacgtacatcgcatctctggcgcgggcgctgatttattgtcacaagaagcacgtcatccatagagatatcaaaccggaaaacttgctcgtgggcatcaagggcgagttgaagattgccgactttgggtggtcggtgcacgcgccgaacagtcgtcgacagacgctctgcgggacgctggattacttaccgccagagatggtggagggccgagatcacgattacgccgtcgatgtgtggtctctcggcgtgttggcgtacgagttcctggtcgggacgccgccgttcgaggcggaggggcacagcgagacgtacaagcgcatcttgcgcgtcgatttacaatttccttcgtacattagcgaaaacgccaaggatctcattcggagcttgctcgtcaaggaaccggccgcgcgcataccgctcagcaggttgttggaccacccctggatcaaggagaacgcttcgccgaacgggattccgcttccggaatgaa

SEQ ID NO: 248960 - DNA, 938 bp, Unknown
  Bacterial polypeptide expressing nucleotide sequence isolated from the Sargasso Sea
tcggcaaggtgaaggtggcggagcacatcctgacggggcacaaggtggcggtgaagattttaatcgcaagaagatcaaggcgatcgacatggaggagaaggtccggcgcgagatcaagatcttgcgcctcttcatgcacccgcacatcatccgcctgtacgaggtgctcgagaccccgcacgacatctacgtagtcatggagtacgtcaaggcgggcgagctcttcgactacatcgtcgagaagggccgcctcggggagaacgaggcgcgccattttttccaacagatcgtctcgggcgtggagtactgccaccggaacatggtcgtgcaccgcgacctgaagcccgagaatctgctcctggacgccaagagcaacgtcaagatcgcggatttcggcctctcgaacgtcatgcgcgacggccactttctgaagacgtcgtgcggctcccccaactacgccgcgcccgaggtgatctccgggaagctctacagcggccccgaggtggacgtgtggtcgtgcggcgtcatcctctacgcgttactctgcggctccctccctttcgacgacgagagcatcccgaacctgttcaagaagatcaagggcgggatatacaacctcccgagccatctgagccccggggcgagggacttgatcgcgcgcatgctcctggtggatccgctgaagcgggtgaccatcagcgagattcgcgcgcacccgtggttcgtcgtgcacctcccgcggtacctggtcgtcccgccgccggacaccctcgcgcaggcgacgaacgtggacgcggagacgctggacatggtcgtgaacctcgggttcgagcgcgagcacgtcgtcgacgcgttgcggcaccagctgcggaacaaagccacggtggcgtactttttgctcctcgataaccgccgcaacgtcttcggcgggtacctgg

SEQ ID NO: 248961 - DNA, 899 bp, Unknown
  Bacterial polypeptide expressing nucleotide sequence isolated from the Sargasso Sea
gagttgcaatagattcaataactgctgtctttcacagtatgatgctatctacgtagttagaagagaaatatttagattgatagcgagattaaaagaaataggtgtaacaactgttatgactacagaaagggttgatgattacggaccaattgctagatatggagtagaagaatttgtatctgataatgttgtcttattaagaaatgttcttgagtcagaaaagagaagaagaactctagaagttttgaagttaagaggtactgttcatatgaaaggtgaatatccatttactatgggaatggatggaataagtgtgtttgctctaggagcaatgagattaacgcagagatcctcaaatatcaggataagctctggagttaaagatcttgacgatatgtgtggtggagggtatttccaagattccatcattctagctactggagctactggtacaggcaaaacaatgcttgtatcaaaatttgttgaagatgcttataacaataatgaaagagcaatactttttgcatatgaagaatctagggctcaattgcttaggaatgctactagttggggaatagattttgaaaaaatggaaagtgatgggttattgaaaattatttgtgcatatcctgaatcaactggtttagaagatcacttgcaaattataaaaacgcaaattaatcaatttaaaccaaaaagaatggcaattgattctctctctgcattagcccgaggtgtaagtttgaatgcatttagacagtttgtaattgctgttactggttatacaaaacaagaggagatagcgggcttttttactaatactgcagaagaatttatggggagtcactctataactgattctcatatctcaacaattacagatacaatacttttgcttc

SEQ ID NO: 248962 - DNA, 879 bp, Unknown
  Bacterial polypeptide expressing nucleotide sequence isolated from the Sargasso Sea
tgctagatatggagtagaagaatttgtatctgataatgttgtcttattaagaaatgttcttgagtcagaaaagaggagaagaactctagaagttttgaagttaagaggcactgtgcatatgaaaggtgaatatccatttactatgggaatggatggaataagtgtgtttgcacttggagcaatgagattaacgcagagatcttcaaatattaggattagctctggagttgaagatcttgatgatatgtgtggaggaggttattttcaagattccatcattctcgccactggagctactggtacaggtaaaacaatgcttgtatcaaaatttgttgaagatgcttatcaaaataatgaaagagcaatactttttgcatatgaagaatctagggctcaattactaaggaatgcgactagctggggaatagactttgaaaaaatggaaagtgatggattattgaaaattatttgtgcatatcctgaatcaactggtttagaagatcacttacaaattattaaaacgcaaattaatcaatttaaaccaaaaagaatggcaattgactctctctctgcattagccaggggtgtaagtttgaatgcatttagacagtttgtaattgctgtcacaggttataccaaacaagaagagatagcaggcttttttactaatactgcagaagaatttatggggagtcattctataactgattctcatatctcaacaattacggatactatattgttacttcaatatgtagaaataaaaggtgagatggcacgagctttaaatgtttttaaaatgcggggatcatggcatgacaaacgaattagagaatttatcattacgaatagtggcccagaaaataaagattctttttt

SEQ ID NO: 248963 - DNA, 936 bp, Unknown
  Bacterial polypeptide expressing nucleotide sequence isolated from the Sargasso Sea
tttttctctgcaatatttacaccatggaatttgtaattttgatgagcctggaatctttgtaacatttgaggaatcacctttagatattattagaaatgccgcaagttttggttgggatttacaagaattaattgatcaaaataaactttttattttagacgcatctcctgatcctgatggacaggatgttgcgggtaactttgatttgtctggtcttattgagagaattagttatgcaattagaaaatataaagctaaaagagttgcaatagattcaataactgcagtctttcaacagtatgatgctatttacgttgttagaagagaaatatttagattgatagcgagattaaaagaaataggtgtgacgacagttatgacaacagaaagggttgatgattatggaccaattgcgagatatggagtagaagaatttgtatccgataatgttgtcctattaagaaatgttcttgagtcagagaagaggagaagaactttagaagttttgaagttaagaggtactgtacatatgaaaggtgaatacccattcactatgggaatggatggaataagtgtgtttgccctaggagctatgagattaacgcaaagatcctcaaatattaggattagctctggagttaaagatcttgatgatatgtgtggtggaggatactttcaagattccataattctcgccactggagctactggtacaggcaaaacaatgcttgtatcaaaatttgttgaagacgcctataacaataatgaaagagcaatactttttgcatatgaagaatcaagggctcaattgcttaggaatgcgactagttgggggatagattttgaaaaaatggaaagtgatgggttgttaaaaattatttgtgcatatcctgaatcaactggtttagaagatcatttgcaaattataaaaacgca

SEQ ID NO: 248964 - DNA, 842 bp, Unknown
  Bacterial polypeptide expressing nucleotide sequence isolated from the Sargasso Sea
gtccagaaaatacctactggaattgagggttttgatgatgtttgtaggggaggcttacctgctgcgagaagtactcttgtaagtgggacatctggaactggtaaaactgttttttctctacaatatttacatcatgggatttgtaattttgatgagccaggaatttttattacctttgaagaatcacctttagatattattagaaatgcagctagctttggttgggatttacagaaattaattgatcaaaataaactttttattttagacgcttctcctgatccagacggtcaagatgttgctggtaattttgatctttcaggtttgattgaaaggattagttatgcgattagaaaatataaagctaagagagtagcgatagattcaataaccgctgtgtttcagcaatatgatgctatttatgttgttagaagagagatttttagacttattgcgagattaaaagaaataggagttactaccgtaatgactacagaaagggtggacgattatggcccaatagctcgttatggcgttgaggaatttgtatctgataatgtcgtacttcttagaaatgttcttgatgcagagaaaagaagaagaactttagaagttttaaagttgagaggaaccgtacatatgaaaggagaattccctttcacaatgggagatgatggcataattgtttttgccctaggagcgatgagattaacgcaaagatcctctaatataagaataagttcaggagttaaagatcttgatgaaatgtgtgggggtggttattttcaggattcaataattctggcaactggcgcgactggtacaggtaaaactatgctggt

SEQ ID NO: 248965 - DNA, 845 bp, Unknown
  Bacterial polypeptide expressing nucleotide sequence isolated from the Sargasso Sea
gatggtcgccgcccggtggcacgcgcaggcgctcgcgtcgcgcgccaaggacttttgggactacgaggcgctccaggtccaatggggcgaccaggacgactacgaggtcgtgcgcaaggtcggccgcggcaaatattcggaggtgtttgagggcatcaaggtcgcgacgggcaccaaggtgatcatcaagatcctcaagccggtgaagaagaagaagatcaagcgcgagatcaagatcctccagaatctggccggcggcaccaacatcatccagctcctcgacattgtgcgcgacccgcagtcgaagacgccgtgcctcatcttcgagtacgtgaacaacaccgacttcaaggtgctgtacccgacgctgaccgactacgacatccggtactacatgtacgagctgctcaaggcgctcgacttttgccacgcgaatggcatcatgcaccgcgacgtcaagccgcacaatgtgatgattgaccacgagaagaggaagctgcgcctcatcgactgggggctcgccgagttttaccacccggagcgcgagtacaatgtgcgcgtcgcctcgcggtatttcaagggccccgagctcctcgtcgacctccaggattacgactatgccttggacatgtggtcgttgggctgcatgtttgcggggatgatcttccgcaaggagcccttcttccacgggcacgataactacgaccagctcgtcaagattgtcaaggtgctcggcacggacgagctctttgactatctcgacaagtacaacctcgagctagacccccactttgacggcatactcggcaggcacacgcgcaagccgtggagcaagttcctcaacg

SEQ ID NO: 248966 - DNA, 186 bp, Unknown
  Bacterial polypeptide expressing nucleotide sequence isolated from the Sargasso Sea
gtcgacgcgtgtcgatgctcacagggatgcccaaccgcctcatccagtcctgcatgcagcagatttttgcggggctcgctttctgccatgctcagcacgtcctccatcgtgatctcaaaccccaaaatgtattaatagatcgcagcgggcaggtgagacttgcggactttggtctcgcgcggtaag

SEQ ID NO: 248967 - DNA, 426 bp, Unknown
  Bacterial polypeptide expressing nucleotide sequence isolated from the Sargasso Sea
tatgaatgataagaaatttggcaaatcaaataaaatgcaagtacaaaaattaccaactggaatagaaggttttgatgatgtttgtaggggtgggctgcctgtatctcgaagtacactcgttagtggtacctcaggaaccggtaaaactgttttttctctgcaatatctacaccacggaatttgtaattttgatgagcctggaatctttgtaacatttgaagaatcacctctagatattattagaaatgccgcaagttttggttgggatttacaagaattaattgatcaaaataaactttttattttggatgcttcacctgatcctgatggtcaggatgttgcgggtaactttgacttgtctggtcttattgagagaattagttatgcaattagaaaatataaagctaaaagagttgcaatagattc

SEQ ID NO: 248968 - DNA, 613 bp, Unknown
  Bacterial polypeptide expressing nucleotide sequence isolated from the Sargasso Sea
catgacggaagaggtcgaccgccacgtccttcgcaagtacgacatcgtccaaaagctgggcaagggcgcgtacggcatcgtctggaaggccatcgacaagcgctccaacgacaaggtcgcgctcaagaagatcttcgacgcatttcaaaatgcgaccgacgcacagaggaccttccgtgaggtcgtcttcctgcagcagatggacaagcacgagaacatcgtgcagctgcagaacgtcatcaaggccgacaacgaccgcgacctctacctcatcttcgagtacatggacaccgacctgcacgcggtgatccgcgcgaatatcctcgaaccggtccacaagcaatacatcatgtaccagagcttcaaggcgctaatgtacatgcacagcgcgcagctcgtgcaccgcgacatgaagccgtccaacctcctcctcaacggcgagtgcctcatgaaggttgccgactttggcctcgcgcgctcgctcaccaagagcaaccagctcgacgacatcgagcacggcgcacccatcctcaccgactacgttgcgacgcgctggtacagagcgccggagattctgctcggctcgacaaaatacggcaaggcggtcgatctc

SEQ ID NO: 248969 - DNA, 738 bp, Unknown
  Bacterial polypeptide expressing nucleotide sequence isolated from the Sargasso Sea
ggtctggatcaacacctggtggtggactaccgcgacggcgagctgcaggccggcgaccgtttcctgctggtcagcgacggcgtctgggcctgcctcaacgacaaacgcatcggcgagttgctgcaacgagacgatgacgccgaagcgatctgccaggcactggtcgacgaggcgcaccacgccggtagccaggacaacgccagcgccttgctggtgcgcatcgagcaattgcccgaggcggcgctggccgacaccctggcccagctcgagcattggccgctgccaccgcgcctgcgtgaaggccaggagttcgagggctggcaggtcgaaggcctgctcggcgaatcgcgccagtcgctgatctaccgggtgcgcgatgctgacaacctgccctggctgctcaagaccctgccgcccagccgcgccggcgaggagcaggccggcccggcgctgctgcaggaggaatggttcctgcgccgcgtcgccggtcgccactttcccgagctgcatgctctgccgcagcgccagcatctgtattacgtgcagcgcgaatatgccggccagaccctggccgcgcgcctacgccagcacggcccgctgagcctggccgactggcaggacctggcgccgcgcctgatcaaggccctcggcctgttgcaccggcgcaatatcatccaccgcgacatcaagcccgagaacctgctgctcggcgacgacggcgaactgcgcgtgctcgac

SEQ ID NO: 248970 - DNA, 915 bp, Unknown
  Bacterial polypeptide expressing nucleotide sequence isolated from the Sargasso Sea
tgggacttacaaggattaattgatcaaaataagttatttatattggatgcgtctcctgatcctgatggacaggacgttgcgggtaactttgatttgtctggactcattgagagaattagttatgcgattagaaaatataaagctaaaagagtcgcaatagattcaataactgcagtttttcagcaatatgatgctatttatgttgtaagaagagaaatttttagactaatagccagattaaaagaaataggagtgacaacagttatgactactgaaagggttgatgattacggaccaattgcaagatatggagtagaagaatttgtatctgataatgttgttttattaagaaatgttcttgagtcagagaagagaagaagaaccctagaagttttaaagttaagaggtaccgttcatatgaaaggtgaatatccattcactatgggaacggatggtataagtgtgtttgcccttggagcaatgagattaacgcagagatcctcaaatattaggataagctctggagttaaagatcttgatgatatgtgtggtggaggatattttcaagattcaattattctcgctacaggagctacaggtactggcaagacaatgctggtatccaagtttgttgaagatgcatacaacaatagagaaagggcaatactttttgcatatgaagaatcaagagctcaattgcttaggaatgctactagttggggaatagattttgaaaagatggaaagtgatgggttattaaaaattatttgtgcatatcctgagtcaaccggtttagaagatcacttacaaatcataaaaacccaaattaatcaatttaaaccaaaaagaatggctattgactctctctcagcattagctagaggcgtcagtttgaatgcatttagacaatttgtt

SEQ ID NO: 248971 - DNA, 199 bp, Unknown
  Bacterial polypeptide expressing nucleotide sequence isolated from the Sargasso Sea
atggacaacttcgagaaggttgagaagatcggggagggaacgtacggcgtggtgtacaaggccagagatcgcagggacgacgccgtggttgcgctcaagcggatccggctggaccaggaggaggaaggggtcccgtcgacggcgatccgcgagatctccctcctcaaggaactcaaacacgagaatatcgtcaggtgag

SEQ ID NO: 248972 - DNA, 586 bp, Unknown
  Bacterial polypeptide expressing nucleotide sequence isolated from the Sargasso Sea
tctagggctcaattacttaggaatgccacaagttggggaatagattttgaaaagatggaaagtgatgggttattaaaaattatatgtgcatatcctgaatcaactggtttagaagatcacttgcagataataaaaacgcaaattaatcaatttaaaccaaaaagaatggcaattgattctctctctgcattagccagaggtgtaagtttgaatgcatttagacagtttgtaattgcagtgactggttatacaaaacaagaagagatagcaggcttttttactaataccgcagaagaatttatgggtagtcattctataactgattctcacatctcaacaattacggatactatattattgctccaatatgtagaaataaaaggtgagatggctagagctttaaacgtttttaaaatgaggggatcatggcatgacaaaagaataagagaatttataattactaatcgaggtcctgaaataaaagattctttttctaactttgaacagatatttagtggtgctcctcatagaattgttcctgatcaaaatattcaaaatgtttttaaaggattagataataattaga

SEQ ID NO: 248973 - DNA, 667 bp, Unknown
  Bacterial polypeptide expressing nucleotide sequence isolated from the Sargasso Sea
gatgagcacgacggaggacgacgattcgcagtactcggagagctcgtacacggagacgacgacggatgattcgggagaggaggaggagggagcgccgaggcggaggcgaaggcgccgcgcgcgaggagacggtggacgaggaggggtcgaggacggtgtcacgcgcgcggcgagggcgaagagacgcaaggcgcgtcgcgagagagacgcgaggcgagagggtggtcagagacagacggtgacgtcgaagtttgccgtgtgcgggacggtgttcgaggtggacgccaagtacgcgcccatcaaaccgatcgggaaaggggcgtacggcgtcgtgtgtagcgcgagagaggtggagacgaataggaaggtggcgattaagaagattgtgaacgcgttcgagaacgtcgtggacgcgaagaggacgcttcgggagattaagttgttgcgccacttgcggcacgaaaacgtcatcgaaatcatcgattgcgtcaagcccgaggggaggaacgagttcgaggacgtgtatctcatgtacgatctcatggacaccgatctttaccaaatcatacgcagcagccaatcgttgacggatgagcactgtcaatactttgtgtaccaaattttgcgtggactcaagtacattcacagcgccgacgtgcttcaccgc

SEQ ID NO: 248974 - DNA, 685 bp, Unknown
  Bacterial polypeptide expressing nucleotide sequence isolated from the Sargasso Sea
gatgcgtcgcccgatcgacgccgcggcgcagcgcgggggcgagctcgtgatgaaggtcatcgcgaaggactgcatgacgtcgcaccgcagcgtcacgcagctcgcgaaggagatcacggtgctgcgcacgttgcgccacccgtcgctgtgctacatgcacgacgtgctgcactcgcgcgatcacctgctactcgtgatggagcgcggcggcgaggacctcttcgacttcttcgaggcgtacccgcacggcgtcaccgaagccgactcgtcgcgcatcatgcgcggcgtcgtcgcgggcctcgattgcgtgcacgcgcacggcatctgccatcgcgatctcaaacccgagaacgtgctcgtgagcctcgcgcgcggcgaaggcggccgcgacgtcgtcaagatctgcgacttcgggctgtgcgagcgcgtcggcgcgcccggcacgcgcctgtgcgatctgtgcggctcgcccggcttcttcgcgcccgagatgatcacgctcgggcggtacgacggccgacgcgcggacgtgtggtcgctcggctgcatcctgctcgagctcgtgctcggccacgaacagttctacgcggtgtggatgtcggcgtacgaccacgaggtgatacagagcccacaacgattcggcgagcgcatccgcgacgcgacgcgcgcgacgaccgcgctgctc

SEQ ID NO: 248975 - DNA, 616 bp, Unknown
  Bacterial polypeptide expressing nucleotide sequence isolated from the Sargasso Sea
atgatcattctcgcgtttgagtatctgcacagtaaccaaatcatctacagagacttgaagccagagaacgtgttggtcgctagggatggacggtgcaaactcggtgatttcggatactcgagaaaactcgacgtcggcgagaaggcgttcacgttttgcggcacgccggggtacgtggcgccggaaatcgttctctcgaaagggtacggctacgccgtcgactggtgggctttgggcgtgctgacgtttgtcatcatcacgagtcagcaaccgttttgctttaccaaggatcctttgaacaaggaagatcctttggtggtgatgcgtcgcatcgtcgacatgtccttcgccgtcgagtatccgccgtacgcctcagagacggcgtgccactttatctcgcagctcttgcgtcgagaggcatcgaaacgattgggaaacaccgcgggtggcgtgagtgaattgaagaatcatccatggtttgcggatttcgattggtcgctgctcgaaagcggcgagtacaagcctaaaccgttggcgctcacgccgcaattcatggagttgcagcgcgagcgtttggcgtcgttgaagcgagaatcgctcctcgcgacggagatgg

SEQ ID NO: 248976 - DNA, 820 bp, Unknown
  Bacterial polypeptide expressing nucleotide sequence isolated from the Sargasso Sea
cctactcccgccccacccacccagcgctacgagatttcccggcaactggccaaaggcggcatgggagaagtgtatctggccctcgatcaccaactccaacggcacgtggccctcaaggtgatgacgcctgagattgccgccaaccccgatctctccaaccgcttcactcaggaagccctcgtcctcggacgactggatcacccgcatattgtaccaatccacgatctcggtgtggatgcccagggtcgcaattattacgccatgaaatttgtgcgcggcaccaccctcaaggaagtgctgcacggattgcgtcagggccaatcggccaccgtcgaccggtatccgctcgcgcggctgctcgatatctttagcaaaacctgcgatgccgtttcctatgcccattccaaaggcatcattcaccgggacctcaagccggccaacatcatgatcggcgaatttggggaagtattggtcatggattggggcattgccaaaatcctgagccaaccggaaaaagcaccagacagtgatccccccaccggcacaaccgaaggcacccgttacggcacggtcatgggcacgcccagtttcatggcccccgagcaagctgaaggccgactggatgccatcaacgaacgcacggatatttattcactcggcgccattctatacaacatccttgccttgcgaccacccatcaccgggagcagcgcggatgccgaggtcatggaacgcatcaagaccggccgcatcacgccgccgacccagcgcgcccaagattcgcgcgacaccaatgtgctcctgcattgtccggaccatc

SEQ ID NO: 248977 - DNA, 733 bp, Unknown
  Bacterial polypeptide expressing nucleotide sequence isolated from the Sargasso Sea
aatgaattactcacttggaaaaatagacaagtacaccgctttaggtgattataaagttctaaaaaaagctattggtaaaggatctttttcaaaaatctataaaggcttttctgaaaatggcgatcctgtggctataaaaattatcaaaaaaaaaaatgtaaaagatgaaaaatatattttgcgggaaatagaagtaatgaaaagcttaaatcatataaatgttttgggtttattaaatgtattagtttctgataataagtattatttaattttacaatactgttcttttggtgatttaaaagaatacactaaaagaatgatactagatgaagaaaagcttaaattttttatgaaacaaattaaaaatggattatgtgaattatataaaaataatataattcatcgtgacttaaaaccacaaaatattttagtttgtaataaagaaatattgaaaataagcgattttggttttgcaaaagcatattcaagagaattaaatatgcaacaaactatgtgtggaagtcctttatatatggctcctgaaattttacaatataaaccatatacagataaagctgacttatggtcggttggtgtaattatgtatgaattattttttaaaaaaacccccatagaaggaacaacattacataatcttgttagtaatatgaagggttatatatttaaaattaaaaatggtaaattatcagctaattgtgaagatttattgaaa

SEQ ID NO: 248978 - DNA, 544 bp, Unknown
  Bacterial polypeptide expressing nucleotide sequence isolated from the Sargasso Sea
ctgaaccagtacgtcgtgatcaagaacctcggccagggcgcgttcgggaaggtgaagctgtgtctgaacacgcagacgaacaagctgtgcgcgctgaagtgcatcaaccgaaagctcctgcggcgcaagtacgcgggcatggggcgggacaagggctcgcaggcggtggcgacggagatcgcgatcatgaagaagctgcaccaccccaacgtcgtgcgcctgtacgaggtgatcgacgacgccacgggtcagtacatattcatggtgctcgagtacgccgcgggcgggccgatatacgaccccgagcggcacgacggcgcgggcctgggcgaggacctcgcgtggcattactttcgcgaaacctgcgaggcgctcgactttctccaccgcgccggcgtgatacaccgcgacttgaaaccggataacatcctcaaaaccaccgacggcacggtcaagctcaccgacttcggcgtcagcaccctcttcgacgagaacagcaagggcgagctcgtcaccgtcggcgagcgcgcgagcggtcccttcg

SEQ ID NO: 248979 - DNA, 712 bp, Unknown
  Bacterial polypeptide expressing nucleotide sequence isolated from the Sargasso Sea
atcctcgatgcctcaccggatccggacggccaggacgtggccggcagttttgatctctccggtttgatcgagcggatcaactacgccatccgcaaatacaaggccaagcgcgtcgccatcgactcgatcacggcggtgttccagcagtacgacgctgtgttcgtggtgcgccgtgagatctttcggctgattgcaaggctcaaggaaatcggcgtcaccacggtgatgaccaccgaacgaattgacgagtacggcccgattgcccgctatggcgttgaggaattcgtctccgacaacgtggtgattctgcgcaacgtgcttgaaggggagcggcgtcggcgcaccctggagattctcaagctgcggggcaccacccacatgaagggcgagttccccttcaccatgggaacccacggcatcagcatcttcccgctcggggccatgcgcctcacccagcgctcatccaacgttcgggtcagttccggcgtgccgcgcctggacgacatgtgcggcggaggtttcttcaaggactcgatcatcctcgccaccggcgccaccggaacgggcaagacgatgctcgtctccaaattcatcgaagacgcctgccgcaacaaggaacgcgcgatcctgtttgcctatgaggaatcgcgggctcagctgatgcgcaacggcaccagctggggcatcgacttcgagcagatgagcaagacgg

SEQ ID NO: 248980 - DNA, 835 bp, Unknown
  Bacterial polypeptide expressing nucleotide sequence isolated from the Sargasso Sea
tgacttgtccggtttgatagagaggattagttatgcaattagaaaatacaaagctaaaagagttgcaatagattcaataactgctgtttttcaacaatatgatgcaatttacgttgttcgtagagaaattttcagacttattgcccgattaaaagaaataggagtaacaactgtgatgacaacagaaagggtggacgattacgggcctattgctagatatggggtggaagagtttgtttcagataatgttgttctacttagaaatgtgcttgagtcagaaaaaagaagaagaactttagaagttttgaagttaagaggaaccgttcatatgaagggagaattcccttttacaatgggtaaagatggtattagcgtatttgcccttggagctatgagattaactcaaagatcttcaaatgtaagaatcagctcaggagtcaaagatcttgacgatatgtgtggtggtggatattttcaagattcgataatcctagcaacaggtgctactggtacaggtaaaacaatgcttgtatctaaattcattgaagatgcctataacaataatgaaagagcaatattatttgcatatgaagaatcaagagcacagttacttcgaaatgcaacaagttggggaatagattttgaaaaaatggaaagcgatggtcttttaaaaattatctgtgcttatcctgaatcaactggtctggaagatcacttgcaaataatcaagacacaaataaaccaatttaaacctaaaagaatggctattgattctctttctgcattggcaagaggggtgagtttaaactctttcagacagttcgtcataggagtt

SEQ ID NO: 248981 - DNA, 648 bp, Unknown
  Bacterial polypeptide expressing nucleotide sequence isolated from the Sargasso Sea
cttggcatcgggccaccgcgagctcagcagctcctcggcccgtgccggtgccgcgcttgctgacgagacgcggacggccgcggctgcgcgcgcagtggcggagcaccagctgaccgggcacaaggtggcggtcaagatcctcaaccgcaatcgcatccgccagctcgagatggacgagaaggtgcgccgcgagattaagatcctcaagctcttctaccacccgcacattatccggctgtacgaggtgatctacacgccgacggacatctacatggtgatggagttcgtgccgggcggcgagctcttcgacttcatcgtctccaacggccgcctctccgagcagcgcgcgcgcaccatgttccagcagctcgtgtccggcgtcgagtactgccaccagcacatggtcgtccaccgcgacctcaaaccggagaaccttttgctcgacgcggagcagcagctgcgcatcgcggactttgggctgtcgaacgtgatgaaggacggcgacttcttcaagacctcctgcggctcgcccaactacgccgcgcccgaggtcatctccggcaagctctacgcgggaccggaggtggacgtgtggtcgtgcggcgtcatcctgtacgcgctgctgtgcggctcgctgccgtttgacga

SEQ ID NO: 248982 - DNA, 541 bp, Unknown
  Bacterial polypeptide expressing nucleotide sequence isolated from the Sargasso Sea
atgaatgataagaaaattggcaaatcaaataaaatgcaagtacaaaaattaccaactggaatagagggttttgatgatgtttgtaggggtggattgcctgtatctcgaagtactctcgttagtggcacctcaggaactggtaaaactgttttttctctgcaatatttacaccatggaatttgtaattttgatgagcctggaatctttgtaacatttgaggaatcacccttagatattattagaaatgccgcaagttttggttgggatttacaagaattaattgatcaaaataaactttttattttggacgcatctcctgatcctgatggtcaagatgtggctggtaactttgacttatctggtcttattgagagaattagttatgcaattagaaaatataaagctaaaagagttgcaatagattcaataactgctgtctttcaacagtatgatgctatttacgtagttagaagggaaatatttagattgatagcaagattaaaagaaataggtgtgacaacagttagacaacagaaagggg

SEQ ID NO: 248983 - DNA, 821 bp, Unknown
  Bacterial polypeptide expressing nucleotide sequence isolated from the Sargasso Sea
cctgggcgagctcatcgggagcggcgggacctcgcgcgtgcacaaagcggtcgaccagcgcacgggaagcgtctgcgccatcaaagagattccgcttcgggagatgtcgcacgatcagctcgagcgcatcacgagcgaggtggagcttctgtcgaggttggagcacccgaacatcgtcaagtacgagggagcgacgaaggttggggacagtctgtacattttgttggagtacgcggagaacggttcgttggcgcgcgtggtgcatccgagtcgattcggggcgtttcccgagagcctgtgcgcggtgtacgtcgcgcaggtgttgcgtggattggcgtatctgcacagtcagggggtggtgcatcgagacatcaagggggcgaacattttgacgacgaaggagggcgtcgtgaagttggccgactttggcgtcgccaccaagggtggtcgtcacgcgcccggagatggattcggggatctgttcggcgcggatgatgtcgggacgaagggtgcgggcgaggcgtcggaaggggaggagagcggagagggtggggtgatcggcgcgacggagggcgacgaggcggcgatggggacgccgtattggatggcgcccgaggtgatcgagatgcggaacgtgaccgcggcggcggacatttggagcgtcggatgcaccatcatagagttgttgacgagttcgccgccgtatttcgatttagatccgatgcccgcgttgtttaggattgttcgggacgaacatccgccgttgccgcctagaatttcagacgccatgaaggatttcttgttgttgtgtttcaagcgag

SEQ ID NO: 248984 - DNA, 591 bp, Unknown
  Bacterial polypeptide expressing nucleotide sequence isolated from the Sargasso Sea
catggtcgtgaccaaggggacgctcggcgagggcgccttcggcaaggtgcgccggtgcaggctcaaggttggcggggaggtcttcgccctcaagcagatggtcaaggccgacatcgtctcgatgggccaggtggagcacatcatgcaggagacggagctcctcaccgagatctcgcacccattcgtcaccaacaagtacgccggcttcgtcacgccgagcaacctcatcctcatcatggagttttgcccgggcggcgacctcttcgatcagctctacaagcacaagtcgttcaccgtgcccgacacccgcatcttcacctcgcaggtgctcctgccgctcgagtacctgcacgcgatgagcatcgtgcatcgcgacctcaagctagagaacatcctcgtcagccaggacggcgcgctcaagctcaccgacttcggcttcgcgaagcggatcaagtaccgctcgtggaccctctgcggaacgcccgagtacctcgcgcccgagatcatcctcgaaaagggccacggcaaggccgtcgactactgggcgttcggcgtgctcttctacgagatgctcaacggccactcgccctt

SEQ ID NO: 248985 - DNA, 983 bp, Unknown
  Bacterial polypeptide expressing nucleotide sequence isolated from the Sargasso Sea
gagcgcatcatcaacgagggcgacgagggcacccacttctacattatcgtcgagggtgaggtcgccgtcaccaaaaagggtacggacggcgagctcgcgcggcgcaaggccggcgactacttcggcgagctctcgctccgcaccggcgcgccgaccaacgcctccgtcaccgccgcgaccgccgcgaaggtcgtgcgcatggaccgtggcgccttccagcgcctgcttgggccgctcgactcgctcctcgccatgcgcaagtacacgcagggcggcgtggagatgaccggcagcgccgaagacggcgaggccgccgccgccaaggccgctgcggccagcgtgcccaaggaccacgcgttcaacaaggccgacaagacgctgacgctcgccgacatggtcgtgaccaaggggacgctcggcgagggcgccttcggcaaggtgcgccggtgcaggctcaaggttggcggggaggtcttcgccctcaagcagatggtcaaggccgacatcgtctcgatgggccaggtggagcacatcatgcaggagacggagctcctcaccgagatctcgcacccattcgtcaccaacaagtacgccggcttcgtcacgccgagcaacctcatcctcatcatggagttttgcccgggcggcgacctcttcgatcagctctacaagcacaagtcgttcaccgtgcccgacacccgcatcttcacctcgcaggtgctcctgccgctcgagtacctgcacgcgatgagcatcgtgcatcgcgacctcaagctagagaacatcctcgtcagccaggacggcgcgctcaagctcaccgacttcggcttcgcgaagcggatcaagtaccgctcgtggaccctctgcggaacgcccgagtacctcgcgcccgagatcatcctcgaaaagggccacggcaaggccgtcgactactgggcgttcggcgtgctcttctacgagatgctcaacggccactcgccctt

SEQ ID NO: 248986 - DNA, 709 bp, Unknown
  Bacterial polypeptide expressing nucleotide sequence isolated from the Sargasso Sea
tactgcgagaccgacctcgcaaacctcatcaaggacgtggcgaatgagccgctcgacgcggcgcgcatcaagggctatatgctcggcacgctgcgcggccttgccttcatccacgcggcgtggtgcctccaccgcgacttgacgccgggcaacctcttcctcactcccgacggcgtcgtcaagattggcgactttggcctcgcgcgcgtctacggctcgcccgatcgtaggtactcgccaaacaccgtcactaggtggtaccggccgccggagatcctcttcggcgccaaattctacggtacggcggtggacatgtggtcggtcggctgcatctttgccgagctccatagacgagcgccctacttcccgggcaatggcgagatcgatcagctcggcaagatcatctctgcgcgcggcacgccgacagaggagacgtggccgggcgtcacgagcctccccacctacattccgtacaatgaatgcgcggagaagccgctccgcgagaactttgccgccgcgagcgacgacgcgctcgccctcctcggcgctctcctcacgatgtgcccggccaagcgcatctcggcagaggacgctctcgagcacgcctacttcaaagccgagccaaaggccgcgacgttcgccgagttggcgccgagagcgaagcgacaggagagcagcagcggagggcagaaaagaggacgagagtagc

SEQ ID NO: 248987 - DNA, 673 bp, Unknown
  Bacterial polypeptide expressing nucleotide sequence isolated from the Sargasso Sea
cccccccgccctctccgggaaggcgcgctacctcaagggcgccgtcctcggcgagggcacgttcggcgtcgtgaccaaggcggaggacacgctgacgcgcaaggcggtggcgatcaagaagatccgcctcgggaagtacaaggagggggtcaacttcacggcgatccgcgagatcaagctcctgcaggagctccggcacccgcacgtcatcgagctcgtggacgtgttcccgcacaagcgcaacctccacctcgtgttcgagtgctgcgagtccgatctcgaggcggtcgtcaaggacaagttcctccccctgggcgtgcccgagatcaagtcgtacgtgcagatgaccctcaaagccgtcgcgtactgccactcgtgctgggtcctgcaccgagacttgaaaccgaacaacctcctgatcgcgcccaacggcgcgttgaagctcgcggacttcggcctcgcgcgcgtgttcggctccccgaaccgccggttcacgcaccaggtgtttgcgcggtggtaccgcgcccccgagctcctgttggggtcgaaaatctacggccccggggtggacctctgggccgtgggttgcatcttcgccgagctcatgctccgcagaccgttcgtcccggggtcctcggacatcgaccagctcgggcgcatctaccagcagctc

SEQ ID NO: 248988 - DNA, 749 bp, Unknown
  Bacterial polypeptide expressing nucleotide sequence isolated from the Sargasso Sea
gctgtccaaggagtacctcggtcggggggcgtttggggtggtgcgcaaggctcgtagcgtgaggactgggatggtgtgcgcaatcaagcaggtcgtgaaggtgttcgatcagcccggaatgacccgacgggtgctgagggaaatgagggtgctcagcatggtgcagcactccagcctcgttcagctcatcgacctgaagtatcagggagaggcgctatatttcgtcactgagtgctgtgagacagacctgcactccttgatgcacaaagataaaagtcgttactatgagaacagtgtgggtatgtccgctagagtgagtatcatgcaccaagtgctactcgggcttcagcacctgcactcgtttgccatcgcacatagggacatcaagccctccaatatcctacttacgtcagatttgcaagctaagatatgtgattttggcctcgcgaggcaaattacgaccaagagcgccgatatgagtgtactgcacgacgagtctatggtgtttggcaacaacgaccccatgacgccctacgtggttacccggtggtaccgcgccccagaggtggtcattacggaaggtgtataccagttgaaacaagacatttgggcaggagggtgcgtcttcgccgagatgatgtccggcaaggtcctgttccccggcagggacacagtgcatcagatgcacctcatcgtggccggcctgggccgccccaccgccgccgatgtgaacttccctggcgtgagcc

SEQ ID NO: 248989 - DNA, 601 bp, Unknown
  Bacterial polypeptide expressing nucleotide sequence isolated from the Sargasso Sea
atgacagataagaaatttggtaaatcaaataaaatgcaagtacaaaaattacctacgggtatagaaggctttgatgatgtttgtaggggagggctgcctgtagcacgaagtactctcataagtggtacttcaggaactggtaaaactgtgttttctctgcaatatttacaccatggaatttgtaattttgatgaacctgggatctttgtcacatttgaagaatcaccattagatataattagaaatgctgcaagttttggttgggatttacaagaattaattgaccaaaataaactttttattttggatgcttctcctgatccagatggtcaggatgttgcgggtaattttgacttgtctggacttattgagagaattagttacgcaattagaaaatataaagctaaaagagtggcaatagattcaataactgcggtttttcaacaatatgatgctatatatgttgtcaggagagaaatatttagattaatagcgagattaaaagaaataggagtaacaacagttatgacaacagaaagggttgatgattatgggcctattgcaagatatggagtagaagagtttgtttctgataatgtgt

SEQ ID NO: 248990 - DNA, 757 bp, Unknown
  Bacterial polypeptide expressing nucleotide sequence isolated from the Sargasso Sea
cggccagaagctcggcaagggcgcatgtgcgccaaaaacccacccaaactaagtgctgtcccgcaatctcatgcaacactattcccggcagatggcatcgtgtggaaagccacgtgcaaaaaattgaataacgtggtggcggtgaagaagatcttcgacgccttccagaactccaccgacgcccagcgcacctaccgcgagatcatcttcctgcagcagatggacaagcatgagaatatcatcggcctcaagaatgtgatgaccgcggataataacagggacatctatttggtcttcgagtttatggagacggatctgcacgcggcgatccgcgccaacatcctcgaggacgtccacaaaaagtacatcctctaccagtgcttcaaggccctcaagtacatgcacagcgccgagctcgtccaccgcgacatgaagccggccaacctgctgctcaacgccgagtgcctgatgaaggtggccgactttgggctggcgcgatccctcacagactgtttgggaggtaatggggacttcgaacccccaaactgcaccgactacgtcgcgacgcgctggtaccgcgcgcccgagatcctcgtcggaagccagcgctacggcaagcaggtggacatctggtcgatggggtgcatctttgccgagatgctgctgggccggccggtcttcaccggcaagaccacgatgcaccagctcgagatcatcgtggagaatctgggccgaccgacgcagctgagatcgagtc

SEQ ID NO: 248991 - DNA, 880 bp, Unknown
  Bacterial polypeptide expressing nucleotide sequence isolated from the Sargasso Sea
agggcatgccatcgacagcgctgcgtgagatctcgatccttaaagagctcacccacccgaacatcgtggcgtaagtttcctatcctttcggcccgaaaagccgtttgctggtgccaatgccccggacccacggattcgctcaaccccttctcttccgtgcgccccgttgtctccactggcagtctccgggacgttgtgcaagagagtggccgcctttacctcatcttcgagttcctagacaaggacctcaagcggtacctggacgcccactcgggccctctgcccatggagatggtcaaatccttctgcttccagatctgccgcggcctcgccttctgtcacgcccgcggagtcatgcatcgcgacctcaagccccagaaccttctcgtgaccacggatggccgcctcaaacttgcggactttggcctcgcccgtgccttctgtcctccgatccggcccctgacccacgaggtcgtgactctctggtatcgaccgccggagatcctcctcggctctacgacctacgccccgccggtggacgtctgggccgttggcaccatccttgtcgagatggtcacgaagcgccctattttccccggtgactgcgagattgaccaaatctacaagattttccgcgtcctgggcacgccgacagaggagacgtggccgaactgcacggccctgcaggactggaatcccgcgttcccccagtggccacgcattgccctggcgtccgtctgcccgggcctcgaccagcagggtctggagatgctggagcacatgttcttctatgaccccaaggcacgggtctcagcccgcgcggtcatgaatcaccccttcttcgacgacgtcgacaaggaggcccacaacaccatctgaa

SEQ ID NO: 248992 - DNA, 794 bp, Unknown
  Bacterial polypeptide expressing nucleotide sequence isolated from the Sargasso Sea
ggcaatgagattaactcaaagatcctcaaatatcagaataagttcaggagttaaagatcttgatgaaatgtgtggcggtggttattttcaggattcaataattctggcaactggtgctactggtacaggtaaaacaatgcttgtatctaaatttattgaagatgcctataatcataatgaaagagcaatactcttcgcatatgaagaatctagagctcaactacttagaaatgcgacgagttggggaatagattttgaaaaaatggagagtgatggattattaaaaattatttgtgcatatcctgaatcaactggtttagaagatcacttacagattataaaaacgcaaataaatcaatttaagccaaaaagaatggcaattgattctctctcagcacttgccagaggtgttagtttgaatgcttttagacagtttgtcattggagttactggatattcaaaacaagaagagatagcaggttttttcactaatactgctgaagaattcatgggaagtcattcgattaccgactctcatatctcaactatcactgatactattttattacttcaatacgttgaaattaaaggggaaatggccagagccttaaatgtttttaaaatgagaggttcatggcatgataaaagaataagagaatttataattaccagccaaggacctgaaataaaagattcattttctaattttgagcaaatatttagtggcgctcctcatagaattattcctgataataatattcagaatatttttaaaggaattgataaaaattaga

SEQ ID NO: 248993 - DNA, 428 bp, Unknown
  Bacterial polypeptide expressing nucleotide sequence isolated from the Sargasso Sea
gatggactttgcagaggatggcgacattgcaggcaagataacccgtcactacaagaacaatacatgctttgctgagttcgagctctggtcataccttatacagctgttgtcgggactaaaagccctccacgacctcaacattatgcatagggacattaaaccagccaatatactcgtctcgaagtcgggcacggtaaagctggctgattttaacgtctccaaagtcgttaatcgtgctgatggccttcttaacacgcaaactggaacaccatattatgcgtgccccgaggtttggtcaaacaaaccctacaactttaagtcggatatttggtcactcgggtgtgtcatgtacgagatggctgcgctcaggccaccattcaaagctggagatatgtgcggtctccacaagaaggtgacgcaggcgtact

SEQ ID NO: 248994 - DNA, 695 bp, Unknown
  Bacterial polypeptide expressing nucleotide sequence isolated from the Sargasso Sea
cacggaggccgaggtcaagcgcctcatgctcgacctcacgagcgccatcgcctactgccacgaccgctgggtcttccaccgcgacctcaagacgtccaacctgctcatgaacaaccggggcgaggtctccatctgcgacttcggcctcgcgcgctactaccacgagccgcccgccggctactcgccgacggtggtcacgctctggtaccgcgcgccggaggtcctgctctccgacaccggccgcggcatcaagacgacgtacggccccgccatcgacgtgtggtcgctcggctgcatcttcgcggagctcgtgctcacgcagccgctgatgccgggccagggcgagatcgaccagatcaagcgcatcttcgagctgctcggcacgcccaccgaggagtcctggccgggctgcatggacttgcactacctcaagaaggtcaagctgcggccgcagcccttcccccgcctgcgcgacaagttccgccgcacctccttcacctcggcgacggcgctctccgaggcgggcgtcgacctgctcggccagatgctctgcctcaaccccgagaagcgcgtcaccgccgccgaggcgctcaagcacaggtactttgccgaggagcccgcgcccaagccgcactacctcatgcccaccttcccgtcgacgcacaagcagccgccgcgccgcccgggcaaatgag

SEQ ID NO: 248995 - DNA, 732 bp, Unknown
  Bacterial polypeptide expressing nucleotide sequence isolated from the Sargasso Sea
atccggctgctccgctccctgcgccatccgaacgtgctgcacctcaccgacatcatgccgccgccgtcgctgtcggccgacaactggaaggacgtctacctagtgacgcggctcttcgacactaacctccaccgcgtcatctactcgggccagcccctcaccgacccgcacgtccagtacatcctctggcagctcttccgcgcgctccgctacctccacgccgcgcaggtcgtgcatcgcgacatgaagccgaccaacctgctgctcaaccgcgactgcgagctggcgctcgccgacttcgggctcgcgcggtacatgccctcctccgaggaccggcgctcctcgctcgcgaccaacgctgagccgcgcgggaagtccgggcagctaaccaagtatgtcgtgacgcgctggtaccgcgcgccggagctgctcgtgcagaacaagcggtacgactcgaaggtggacatgtggtcggtcgggtgcatactggcggaagttattggcgcgaaggcgctcttcccgggcaaggactcgctgcaccagctccgactcatcgtcgagaagcttggtacgccgacccctgacgagctcgccgtaatcgagaacgagcaagcagtcaactacatcaccggcctgcggcacaaggacagcggctcgcggtcgcagacggcggcggcgcggctgaaggcgctcttcccgaaggcggagccgctgctggtcgacctgctcgcc

SEQ ID NO: 248996 - DNA, 680 bp, Unknown
  Bacterial polypeptide expressing nucleotide sequence isolated from the Sargasso Sea
ccatcagtatcgcatcgcgtatcgcgacctcaaaccagagaacatcctcatcgacgcgcaaggatacatcaaggtcgtcgatttcggctttgcaaaggttgtttatgagggcgagcgcacatggaccttatgcggcacacccgagtatttggctcccgaagtcatccttcgcaagggccacgacgtgagagtcgactggtggtctcttggcatcctgatcgttgagctcttcacaggaggcacgccattctactcggacgatcatttcgacgtctttaagaagatcgtcaagggagagatacccgaaggcacttggaagcggatgtcgccggaggcggcagactgcgtcaaggccttgctcgtaaaggagcctgagaagcgcctcggcgctgtagagaagggcggcccacggatgatacgggagaccaagttcttccagccgctcgattttgtgaagctcgtcaataagcaagtcacgccgccgtggaagcccattgtgagccacgcgaccgacacgcggtacagcccggatgaggacgagattgagctgcccgagccgacggcggcggcgatgaaggcggcggaggagcacgagaatctgtatgacttcttcccggagttccagatcatggacgagccgggtggtgaggagatggaggagtatggcggcggggagtgaa

SEQ ID NO: 248997 - DNA, 736 bp, Unknown
  Bacterial polypeptide expressing nucleotide sequence isolated from the Sargasso Sea
gttgacgtgcgactactgtgaaggcaagacaattggtcagggaacatttggcaaagtgcgtctaggttcccatgtgataactcaagaaaaggtggccatcaaaattctcgagaaggacaaaatcaaggagcaggcagacatcacccgtgtcatgcgcgaaatacaaattctcaagattgtcagacaccccaacatcgtgcaactctatgagataattgaaacgtcgcgccaactcttcttgatcatggagtttgtgccgaatggcgagctctttaatttgattgtgaagaagaagagattgccagatagagaagcttgtaggttcttccaccaaatactggcaggaattgagtaccttcataaaatcaaaatttgccacagagacttgaaaccagaaaacttgctgttagatgaaaatatgaacattaagatagttgactttggtcttagcaacacgtacaagaaaccaacggacacattgaaaacagcatgcggaagtccatgctacgcctcacccgagatgatcgcgggcaaacggtacctgggcctggacaccgacctctggtccctcggtgtgatcacctacgcgatgaccgttggctacttgccgttcgaggaccccgacacgaacaaactctacaaaaaaatcctcgacagctcgtacacgatgcccaactacgtcgaaaagccgtgccgcgagatcatccgcaacttgctgatgacggatccgaccaaa

SEQ ID NO: 248998 - DNA, 859 bp, Unknown
  Bacterial polypeptide expressing nucleotide sequence isolated from the Sargasso Sea
cgcatcctgcaccgcgacctcaagccgcagaacatcctggtgcggcgctcgatcgaccgtcggacgctcaagatctcggacttcggcctctcgcgcgcattcggccgcccgcgcgcgcacacgcgcgaggtggtgacgctgtggtatagagcgccggagatcctgctgggagcggaagactactcgacaccagtagacgtctggagcgtcggttgcatcctggccgagatggccgcgcccctgaccgtgcacggcgcgccgacgccgctcttccccggcgacagcgagatcgaccagctgtacaagatcttccgggtccggggcacgccctccgatcgcgagtggcccggcgtgtcgcggctgccgcactactcgccggtgtttccgaattggcccgcgctgcgcctcgagcgcgtggtgggccgcattgtcgtgcaggatcacgcgggcgtcgtggggggcgtgtcgccggcgctcgccggtccggccacggacttcctggggcgctgccttgcttatgaaccaagctcgcgcatcacggcccgcgaggcgcttgtgcatacctttattgatccctatgccgcggaccgcgccgcggcggcgacggcggccctcgccgcggaccgcgcggcagcggcggaagccgctcgcgctgcggccgaggccctcgtcgacgaggtgaactgcgaccccaccaagttcggcggcttccattcggcgttcacgagccccgcgcgcctgaagcgggcgcggctcgtgacgccgcccaacggcttccccgccaggctggagccatgtggtacgcacgccgtctcaacgcccgggcgcgtgtctcctctccttcaggggatggaagcgc

SEQ ID NO: 248999 - DNA, 647 bp, Unknown
  Bacterial polypeptide expressing nucleotide sequence isolated from the Sargasso Sea
gttgggtgctgctggagaagctcggcgaggggtgcgcccatttttttttcctccgaccatcgagtgctcacctctgcgtgttgcgtgtgcgcacagttcctttggcaaggtcttcaaggcgcgcaacgagcagacgggcgtgctcgcggcggtgaagatcgtgccggtggagcaggacgccggcgaggtcacgcgcgagatcgagacgctcaagcagtgctcctccagcaacatcgtgcagtatttcggctcgacgacaaaggacggcgagctgtggatcctgatggaattctgcccgggctcgtcgctcgcggacatcatggaggcgcgcgggcggtgcctcaacgaggcgcagatcgccgccgccatggccggcacgctcgccggcctctcgtacctgcacggccgcacgccgcagctcatccaccgagacgtcaaggcgggcaacctgctgctcgcagactcgggcgtcgtcaagctcgccgactttggcgtctcggcgcagattggcagcacgctctcgaagcgcggcaccgtcatcggcacgcccttctggatggcgcccgaggtcatctccggcggcccgcaggccggctacaacaccaaagccgacgtctggtcgctcgggatcaccgccattgagctcg

SEQ ID NO: 249000 - DNA, 421 bp, Unknown
  Bacterial polypeptide expressing nucleotide sequence isolated from the Sargasso Sea
tatgaaagataagaaatttggcaaatcaaataaaatgcaagtgcagaaattacctactggtatagaaggctttgatgatgtttgtaggggtggtttgcccgtatctcgaagtacactagttagtggtacatcaggaactggtaaaactgttttttctctacaatatttacaccatggaatttgtaattttgatgagccagggatcttcgttacatttgaagaatcacctttagatataattagaaatgccgcaagttttggctgggatttacaagaattaattgatcaaaataaactttttatcttggatgcttctcctgaccctgatggccaggatgttgcgggtaattttgacttgtctggtcttattgagagaataagttatgcaattagaaaatataaagctaaaagagttgcaata

SEQ ID NO: 249001 - DNA, 550 bp, Unknown
  Bacterial polypeptide expressing nucleotide sequence isolated from the Sargasso Sea
atgcagctccgcgaggtcaagtccctcaagaagctcaaccaccccaacatcgtcaagctcaaggaggtcatccgcgagaacgacgagctcttcttcgtcttcgagttcatggaggccaacctctacgagctcatgaagaagcgcgagcggcacttccccgagtccaagatccgcaacatcatgacctgtcgcacgatgcggcacccacagccaagtcgtcgctcccgcacttccggacccgcccactaccaaatcttccagggcatcgccttcatgcacaagcacggcttcttccaccgcgacatcaagccggagaacatgctcgtcaagggcgacacgtgcaagatcgccgacttcggcctcgcgcgcgagatccgcagccgcccgccgtacaccgattatgttagcacgcgctggtaccgcgcgccggaggtgctgctgcggagtctgcagtacacgagtccgatcgacacggctgtcgcgggcgggggggcgggggagcccaacagcgcctttgcgaggtgcacgcaggcgaggcaaagtcgctgat

SEQ ID NO: 249002 - DNA, 137 bp, Unknown
  Bacterial polypeptide expressing nucleotide sequence isolated from the Sargasso Sea
gctgcgcgcggtggtggtggcgcggcaggtggtgttggggctgccttacaaccaaaaggttgacgtgtggtcgctggggtgcatccttgccgagctcttcacgtccaatgcgcgcgccccatcccccccccccccct

SEQ ID NO: 249003 - DNA, 771 bp, Unknown
  Bacterial polypeptide expressing nucleotide sequence isolated from the Sargasso Sea
aagaggtactgtacatatgattggtgaatatccattcactatgggaatggatggaataagtgtgtttgccctaggagcaatgagattaacgcagagatcctcaaatattaggataagttctggagttaaagatcttgatgatatgtgtggtggaggatattttcaagattccattattctcgccactggagcaactggtacgggtaaaacaatgcttgtatcaaaatttgttgaagatgcttataacaataaagaaagagcaatactttttgcatatgaagaatctagagctcaattgctcaggaatgctactagctggggtatagattttgaaaaaatggaaagtgatggattattaaaaattatttgtgcatatcctgaatcaactggtttagaagatcacttacaaattataaaaacgcaaataaatcaatttaaaccaaaaaggatggcaattgattctctctctgcattagccagaggtgtaagtttgaatgcatttagacagtttgtaatcgctgttaccggttatacaaaacaagaggagatagcaggattttttacaaatactgcagaagaatttatggggagtcattcaataactgattctcatatctcaacaattacggataccatattgttacttcaatatgtagaaataaaaagcgagatggcaagagctttaaatgtttttaaaatgcggggttcatggcatgataaacgtataagaagatttataatcacaaatagtggcccagaaataaaagattc

SEQ ID NO: 249004 - DNA, 853 bp, Unknown
  Bacterial polypeptide expressing nucleotide sequence isolated from the Sargasso Sea
tttacaccatggaatttgtaactttgatgaacctggaatctttgtaacatttgaggaatctcctctagatattattagaaatgccgcgagttttggttgggatttacaagaattaattgatcagaataaactttttattttggatgcttctcctgaccctgatggtcaggatgttgcgggtaactttgacttgtctggtcttattgagagaataagttatgcaattagaaaatataaagctaaaagagttgcaatagattcaataactgcagtctttcaacagtatgatgctatttatgttgttagacgagaaatatttagactcatagcaagattaaaagagataggtgtgacaacagttatgactacagaaagggttgatgattatggcccaattgctagatatggagttgaagaatttgtatctgataatgttgtcttattaagaaatgttcttgagtcggagaagagacgaagaactttagaagttttgaagttaagaggtacgatacatatgaaaggtgaatatccattcactatgggaatggatggaataagtgtgtttgccctaggggcaatgagattaacgcagagatcttcaaatattaggattagctctggagttaaagatcttgatgatatgtgtggtggaggatattttcaagattctatcattctcgccactggagctactggtacgggtaaaacaatgctcgtatcaaaatttgttgaagatgcttataacaataatgaaagagcaatactttttgcatatgaagaatctagggctcaattgcttaggaatgcgactagttggggaatagattttgaagaaatggaaagtgatggttta

SEQ ID NO: 249005 - DNA, 824 bp, Unknown
  Bacterial polypeptide expressing nucleotide sequence isolated from the Sargasso Sea
tatgaaagagaagaaatttggcaaatcaaataaaatgcaagtacaaaaattgcctaccggtatagaaggttttgatgatgtttgtaaaggtggactgcctgtatctaggagtactctgataagtggcacatcaggtactggtaaaactgttttttcgcttcaatacttacaccatggaatttgcaattttgatgaacctgggattttcgttacatttgaagaatcacctttagacataataagaaatgctgccagcttcggatgggatttacaagaattaattgatcaaaatagattatttatattggatgcttctccggatcctgacggtcaagatgtggcaggtaattttgacttatctggtcttattgagagaattagttatgcaattagaaaatataaagctaaaagagttgcaatagattcaattactgcagtttttcaacagtatgatgctatttacgttgttaggagagaaatatttagactaatagcaagattaaaagaaataggtgtgacaacagttatgactacagaaagagttgatgattacggcccaatagctagatatggagtagaagaatttgtatctgataatgttgtcttattgagaaatgttcttgagtcagaaaagagaagaagaactctagaagttttgaagttaagaggtactgtacatatgaaaggtgaatatccattcactatgggtattgatggtataagtgtgttcgcccttggagcgatgagattaacccagaaatcttcaaatattaggattagctctggagttagagatcttgatgaaatgtgtggaggagggtttt

SEQ ID NO: 249006 - DNA, 247 bp, Unknown
  Bacterial polypeptide expressing nucleotide sequence isolated from the Sargasso Sea
cctgagcgcagcccagactgacttccaaccctctccccaatcaggtgagctcttcgaccggattacttcgacgacacattttctggaagtgcatgctgcggagcaggtgcgccaaatcctggaggcggtcaagtacctccacgctaacggcgtcctgcaccgcgacctcaagccagagaatttgctgcttgcgagcaccgcggccgacgcccccagtgcaacccaccgtcaaacccactgtcattga

SEQ ID NO: 249007 - DNA, 691 bp, Unknown
  Bacterial polypeptide expressing nucleotide sequence isolated from the Sargasso Sea
actggtacaggtaaaaccatgtcttgtatcaaaatttgttgaagatgcttataacaataatgaaagagcaatactttttgcatatgaagaatccagggctcaattgcttaggaatgctactagctggggaatagattttgaaaaaatggaaagtgatgggttgttgaaaattatttgtgcgtatcctgaatcaactggtttagaagatcacttacaaatcataaaaacgcaaattaatcaatttaagccaaaaagaatggcaattgattctctctctgccttagccagaggtgtaagtttgaatgcatttagacagtttgtaattgctgtcactggttatacaaaacaagaggagatagcaggcttttttactaatactgcagaagaatttatggggagtcattctataactgattctcatatctcaacaattacagatactattttattgcttcaatatgtagaaataaaaggtgagatggcaagagctttaaatgtatttaaaatgcggggatcatggcatgataaacgaataagagaatttatcattacaaatagtggcccagaaataaaagattctttttctaattttgaacaaatatttagtggtgcacctcatagaattgtacctgatcaaaatgttcaaaatgttcaaaatgtttttaaaggtttagataataataataattag

SEQ ID NO: 249008 - DNA, 611 bp, Unknown
  Bacterial polypeptide expressing nucleotide sequence isolated from the Sargasso Sea
gccgctgcacgaaaacggaccggtggtgacgctgtggtatcgcgcgcccgagttattgctcggcgcgcgtcattacacgcgtgcggtggacatttgggcggcggggtgcatcttcgccgaactcaccacgctcgtcgttccgttcaagggcgttcccaagggtaaggaggatccgaaatcgatgtatcaggcggagcaaatcgaatccatagccgcggcgaaaggcgcgccgaccgaagacgagtggccgctgttcagagagcatccggactacgagcgtgcgaagaaaattttctacccaccgagtcaccccgagggacgtcctatcaacgacaaggcaccgatcaggaaagatcccgagctctccgccgtcttcgacgagctctgcgcgtacgaccccgagaagcggccgaccgcgtacgaggcgctgacgacgctcgattacttcgccacgaccgagcccggaccgaccaagaacatattcgactacgaactcgcccccggcgagcaacgaatcgtgtaccctcaccggaaaattcttcacggcacgggcgactgtaaacctcccgacaacgaggcgccgaaaaagcgtcacaaaacgtcctcgtgag

SEQ ID NO: 249009 - DNA, 803 bp, Unknown
  Bacterial polypeptide expressing nucleotide sequence isolated from the Sargasso Sea
attaattgatcaaaataagttatttatattagatgcgtctccggatcctgacggtcaagatgtcgctggtaattttgacttgtctggtcttattgaaagaattagttacgcgataagaaaatataaagctaaaagagttgcaatagattcaataactgctgtttttcaacaatatgatgctctttacgttgttagaagagaaatattcagactaatagcaagattaaaagaaataggagtaaccacagttatgaccacagaaagggttgatgactacggacctattgctagatatggagtagaagaatttgtttctgataatgttgtcttattaagaaatgttttagagtcagagaagagaagaagaaccttagaagttttgaagttaagaggtactgtacatatgaaaggggaatacccattcactatgggtatagatggtataagtgtgttcgctctcggggcaatgagacttacgcaaagatcctcgaatattaggattagttctggagttaaggatcttgatgatatgtgtggcggaggttattttcaagattccattatccttgctacgggtgctactggtacaggtaagacaatgcttgtatctaaattcgtagaagatgcttataacaatagtgaaagagcaatacttttcgcatacgaagaatctagggcgcaattacttaggaatgccactagttggggaatagactttgaaaagatggaaagtgatgggttattaaaaattatttgtgcatatccagaatcaactggcttggaagatcacttacaaataataa

SEQ ID NO: 249010 - DNA, 469 bp, Unknown
  Bacterial polypeptide expressing nucleotide sequence isolated from the Sargasso Sea
catgcccgcgcagatcgacgaataccagatcttgggcgagatcggccgtggcggcatgggctcggtgttgctcgggcggcggcaggacgaccggttcaagaagcgggtcgcgatcaagatcatgcgccgcgggcttgataccgcggacatgctccagcggttcgagcttgaaaagcaggtcctcggcgccctgaaccaccccaacatcgcgaggctgttcgacgcgggcgcgacgcccgacggccgcccgtacttcgtgatggagtatgtcgagggcgtgccgatcgatgtctattgcgacgagcaaaacctgacgattcaagagcggctgaggctgttcgagaaggtctgttcggcggtgcactacgcgcaccagaacctgatcgtgcaccgggatctgaagcccagcaacatcatcgtgaacaacgcgggcgagccgaagctgctcgacttcggcatcgccaagctg

SEQ ID NO: 249011 - DNA, 845 bp, Unknown
  Bacterial polypeptide expressing nucleotide sequence isolated from the Sargasso Sea
acaaaaattaccaaccggaatagaaggctttgatgatgtttgcaggggtgggctccctgtatctcgaagtacactcgttagcggtacttcaggaactggtaaaactgttttttcattgcaatatttacatcatggaatttgtaactttgatgagcctggaatctttgtaacatttgaagaatcacctttagatattattagaaatgctgcgagttttggttgggatttacaggaattaattgatcaaaataaactttttattttagatgcttctccagaccctgatggtcaggatgttgcgggtaactttgatttgtctggtcttattgagagaattagttatgcaattagaaagtataaagctaaaagagttgcaatagattcaataaccgcagtctttcaacaatatgatgctatttacgttgtaagaagagaaatatttagactgatagcaagattaaaagaaataggtgtgacaactgttatgactacagaaagggttgatgactacggaccaattgctagatatggagtagaagaatttgtatctgataatgttgtcttattaagaaatgtgcttgagtcagaaaagaggagaagaactctagaagttttgaagttaagaggcactgtacatatgaaaggtgaatatccatttactatgggagcggatggaataagtgtgtttgcacttggagccatgagattaacgcagagatcctcaaatattaggattagctctggagttaaagatctagatgatatgtgtggaggaggttattttcaagattccatcattctcgccactggagctactggtactggtaaaacaatgcttgtatcaa

SEQ ID NO: 249012 - DNA, 587 bp, Unknown
  Bacterial polypeptide expressing nucleotide sequence isolated from the Sargasso Sea
tatgaaaaaaaagaaaaagttaggagaaggagcctacggagtagtatatgaagcagaaatagagaacgacggaggggttgaaaaggtagccgttaaaagaaattatggcgatgtggaaaatcaaggaatttcttgtatcagggagttaaatttccttgctactttaaaccatccatgcattactaaactaaaatcagtttctttaggggatccatttccaaaagagtgtcctatgacaccaagacctcaaagaaacgagatgagagaagatactcatcattttattctagaattttcacaacattgtttggaagattattatttagagtgtgaagatttttacgaacttaagattattatgacacaaattttattaggattagaatacatacatcacagaaaaattttacatagagatttaaaaccagggaacgttttagtctcaaaagaaaaaaatttaccatatgctaaaatttgtgattttggcttgtcttgctttcctagtaattatagaccatcaacgccgggagcggtgacatcatggtatagagctccagagatttgttgtgaatatgattcttattctt

SEQ ID NO: 249013 - DNA, 727 bp, Unknown
  Bacterial polypeptide expressing nucleotide sequence isolated from the Sargasso Sea
catgctgatggactacgtgccgggcggcgagctcttcacagtgctccgcgcgcagcaccgcttcctcgagcccgtcgccgctttctacgctggcatcgtagtgctcgtcttcgagtacctccacgaccgcaagatcgtctaccgcgacctcaagccggagaacctgctcttcgacgcgcagggttacctcaagctcgtcgactttggcttcgccaaggaggtgatcaccaagacctggacgctgtgcggcacgcccgagtacctcgcccccgagatcatcctgaacaaggggcacgactgcgcggccgactggtgggcgctcggcatcctcatctacgagatgctgacgggcgcgccgccgttcaccgacgaccacgaccccatgcagatctaccagaaggtgctcaaggggagcgtgcccgagcccaaggggcagcggccgctgccgccggactcgaaggcgtgcgtgacgcggctgctcgcgcgcgattcctcagagcggctcggctgccagaagctcggcacggaggaggtgaagcgtgccgccttcttcagcaagctcaactggcaccggctcgagaagaagctcatccagccgccctacgtgcccgagatcgcggacccctacgacgtctctaacttcgactgcgagggcctgattacaccccgaaatgaacacaagacctccgccaatgccggcaacgcacatctgtttgaggacttttga

SEQ ID NO: 249014 - DNA, 1531 bp, Unknown
  Bacterial polypeptide expressing nucleotide sequence isolated from the Sargasso Sea
atgaatgataagaaatttggtaaatcaaataaaatgcaagtacaaaaattaccaactggaatagagggttttgatgatgtttgtaggggtgggttgcctgtatctcgaagtacactcgttagtggcacctcaggaactggtaaaactgttttttctctgcaatacttacaccatggaatttgtaattttgatgagcctggaatctttgtaacatttgaggaatcacctttagatattattagaaatgccgcaagttttggttgggatttacaagaattaattgatcaaaataaactttttattttggacgcatctcctgatcctgatggtcaggatgtggctggtaactttgacttgtctggtcttattgagagaattagttatgcaattagaaaatataaagctaaaagagttgcaatagattcaataactgctgtctttcaacagtatgatgctatttacgttgttagaagggaaatatttagattgatagcaagattaaaagaaataggtgtgacaacagttatgactacagaaagggttgatgattacggaccaattgctagatatggtgtagaagaatttgtatctgataatgttgtcttattaagaaatgttcttgagtcagagaagagaagaagaactctagaagttcttaagttaagaggtactgtacatatgaaaggtgaatatccattcactatgggaatggatggaataagtgtgtttgccttaggagcaatgagattaacgcagagatcttcaaatattaggattagctctggagttaaagatcttgatgatatgtgtggtggaggatattttcaagattccattattctcgccactggagcaactggtacgggcaaaacaatgcttgtatcgaaatttgttgaagatgcttataacaataatgaaagagcaatactttttgcatatgaagaatctagggctcaattgcttagaaatgctactagctggggtatagattttgaaaaaatggaaagtgatggattattaaaaattatttgtgcatatcctgaatcaactggtttagaagatcacttacaaattataaaaacgcaaattaatcaatttaaaccaaaaagaatggcaattgattctctctctgcattagccagaggtgtaagtttgaatgcatttagacagtttgtaattgctgttaccggttatacaaaacaagaggaaatagcaggcttttttactaatactgcagaagaatttatgggaagtcattctataactgattctcatatctcaacaattacagacaccatattgttgcttcaatatgtagaaataaaaggtgagatggcacgagctttaaatgtttttaaaatgcggggatcatggcatgataaacgaataagagaatttattattacaaatagtggcccagaaataagggattctttttctaattttgaacaaatatttagtggtgcgcctcacagagttgtgcctgatcaaaatgttcaaaatgtttttaaaggattagataataattaga

SEQ ID NO: 249015 - DNA, 862 bp, Unknown
  Bacterial polypeptide expressing nucleotide sequence isolated from the Sargasso Sea
catgcagttccctccgaccagcggtcagcctcagatgcaggttcaaaagctcccgacagggatcgagggctttgatgatgtctgccagggcggcctgccgatcggccgcagcacgctgatcagcggcacgtccggcaccggcaagacggtgttttcgctgcacttcctccacaacggcatcaaggatttcgacgaacccggcatcttcgtcaccttcgaggagtcgcccctcgacatcctgcgcaatgccgccagcttcggctggaacctgcaggagatggtcgagcaggacaaacttttcatccttgatgcctcaccggatcccgatggccaggatgtggccggaagttttgatctctcgggtctgatcgagcggattaactacgccatccgtaagtacaaagccaagcgtgttgctattgattcgatcacggcggtgttccagcaatacgacgcagtctttgtggtgcgccgtgagatttttcgcttgatcgcccggctcaaggaaattggcgtcaccacggtgatgaccaccgagcgcatcgacgagtacggccctatcgcccgctatggcgttgaggaattcgtctccgacaatgtggtgatcctccgcaacgtgcttgagggagagcggcgccggcgcactgttgaaattctcaagctgcgtggcacgacccacatgaagggtgagttccccttcaccatgggaacccacggcatcagcatcttcccgcttggggccatgcgcctcacccaacggtcgtcgaatgttcgggtgagttctgggtgtgctcgcctcgacgacatgtgcggtggaggcttcttcaaggattcgatcattttgggcacggtgccacgggca

SEQ ID NO: 249016 - DNA, 1009 bp, Unknown
  Bacterial polypeptide expressing nucleotide sequence isolated from the Sargasso Sea
atgaaagataagaaatttggcaaatcaaataaaatgcaagtacaaaaattacctaccggtatagaaggttttgatgatgtttgtagaggtgggttgcctgtgtctcgaagtacattaattagtggtacatcagggactggtaagactgttttctctcttcaatacttacaccatggaatttgcaattttgatgagcctgggatcttcgttacatttgaagagtcacctttggacataataagaaacgctgctagcttcggatgggatttgcaagaattaattgatcaaaataagttatttatattagatgcttctccggatcctgatggtcaagatgtcgcgggtaactttgacttgtctggtcttattgagagaattagctacgcaataagaaaatataaagctaaaagagttgcaatagattcaataacagcggtttttcaacaatatgacgctatttatgttgtaagaagagaaatatttagactcatagcaagattaaaagaaataggagtaacaacagttatgactacagaaagggttgatgattacggccctattgctagatatggagtggaagaatttgtttctgacaacgttgtcttattaagaaatgttctagagtcagagaagagaagaagaactctagaagttttgaagttaagaggtactgtacatatgaaaggggaatacccattcactatgggaatagatggtataagtgtgtttgctcttggagcaatgagacttactcaaagatcttcaaatataaggattagttcaggagttaaagatcttgatgatatgtgtggaggaggttattttcaagattctattattcttgcgacaggagctactggtacaggtaagacaatgcttgtatcaaaattcgtagaagatgcttataacaataatgaaagagcaatacttttcgcctatgaagagtctagggctcaattgcttagaaatgccactagttggggaatagactttgaaaagatggaaagcg

SEQ ID NO: 249017 - DNA, 1534 bp, Unknown
  Bacterial polypeptide expressing nucleotide sequence isolated from the Sargasso Sea
atgaatgataagaaatttggcaaatcaaataaaatgcaagtacaaaaattaccaactggaatagaaggttttgatgatgtttgtaggggtgggttgcctgtatctagaagtaccctcgttagtggcacctcaggaactggtaaaactgttttttcactgcaatatctacatcatggaatttgtaattttgatgagccaggaatctttgtaacatttgaggaatcacctttagatattattagaaacgcagcgagttttgggtgggatttacaggaattaatcgatcaaaataaactttttattttggatgcttctcctgaccctgacggtcaggatgttgctggtaactttgatttgtctggtctcattgagagaattagttatgcaattagaaaatataaagctaaaagagttgcaatagattcaataactgcggtctttcaacagtatgatgctatttatgttgtgagacgagaaatatttagactcattgcaagattaaaagaaataggtgtgacgacagttatgactacagaaaggattgatgattatggaccaattgctagatatggagtagaagaatttgtatctgataatgttgtcttactaagaaatgttcttgagtcagagaagagaagaagaactttagaagttttgaagttaagaggtactgtacatatgaaaggtgagtatccattcactatggggaatgatggaataagtgtgtttgccctaggagcaatgagattaacgcaaagatcctcaaacattagaattagctctggagtcaaggatcttgatgatatgtgtggtggaggttattttcaagattccatcattctcgccactggagctactggtacaggtaaaaccatgcttgtatcaaaatttgttgaagatgcttataacaataatgaaagagcaatactttttgcatatgaagaatctagggctcaattgcttaggaatgctactagctggggaatagattttgaaaaaatggaaagtgatgggttgttgaaaattatttgtgcgtatcctgaatcaactggtttagaagatcacttacaaatcataaaaacgcaaattaatcaatttaagccaaaaagaatggcaattgattctctctctgccttagcaagaggtgtaagtttaaatgcatttagacagtttgtaattgctgtcactggttatacaaaacaagaggagatagcaggcttttttactaatactgcagaagaatttatggggagtcattctataactgattctcatatctcaacaattacagatactattttattgcttcaatatgtagaaataaaaggtgagatggcaagagctataaatgtatttaaaatgcggggatcatggcatgataaacgaataagagaatttatcattacaaatagtggcccagaaataaaagattctttttctaattttgaacaaatatttagtggtgcacctcatagagttgtacctgatcaaaatgttcaaaatgtttttaaaggtttagataataataattaga

SEQ ID NO: 249018 - DNA, 1540 bp, Unknown
  Bacterial polypeptide expressing nucleotide sequence isolated from the Sargasso Sea
atgcagtttcccccagccagcggctcgactcagatgcaggtgcagaagctccccaccggcatcgagggctttgatgatgtctgtcagggcggcctgccgatcggtcgcagcaccctgatcagcggaacctccggcaccggtaagacggtgttctccttgcatttcctacataacggcatcaagcatttcgatgagccggggatcttcgtcacctttgaggaatcaccgctcgacatcctgcgcaatgccgccagcttcggttggaacctgcaggagatggtggagcaggacaagctgttcatcctcgatgcgtcccctgatcccgatggccaggacgtggccggcagtttcgatctctccggtctgatcgagaggatcaactacgccattcgcaagtacaaggccaagcgggtcgcgatcgactcgatcacggcggtgttccagcagtacgacgcagtgttcgtggtgcgccgggagatcttccggcttatcgctcggctgaaggagatcggcgtcaccacggtgatgacgacggaacgcatcgatgagtacggaccgattgcgcgctacggcgtggaggagttcgtttccgacaacgtggtgatcctgcgcaacgtgttggagggtgagcgccgtcgccgcacggtggagatcctcaaattgcggggcaccacccacatgaagggggaattccccttcaccatgggcacccacggcatcagcatcttcccgctgggggccatgcgtctgacccagcgctcctcgaacgtgcgggtcagttccggtgtgccgcggctggacgagatgtgcggtggtgggttcttcaaggattcgatcatcctggccaccggtgccaccggtaccggcaagaccctgctggtgtccaaattcatcgaagacgcctgccgcaacaaggagcgggcaatcctgtttgcctacgaagagtcccgcgctcagctgctgcgcaacggcaccagctggggcatcgacttcgagcagatggagcaggacggtctgctcaagatcatctgcgcttaccccgaatccaccgggctggaggatcacctgcagatcatcaaaacggagatcggtcagttcaagccatcccggatggccatcgactccctctcggccctggctcggggtgtcagccacaacgccttccggcagttcgtgatcggcgtgaccggctatgccaaacaggaggagatcgccggcttcttcacgaacacctctgaggagttcatgggcagccactcgatcaccgactcccacatctccaccatcaccgacacgatcctgatgctgcagtacgtggagattcgcggtgagatggcccgggcgctgaatgtgttcaagatgcgcggctcctggcacgacaagggcatccgcgaattcgtgatcaccggcaacggcccgcagatcaaggattccttctccaacttcgagcggatcatctccggcgttccccatcgggtcaccaccgacgaacgcagcgagttgtcccgcatcgcccgcggcgtctccagcgaggactaag

SEQ ID NO: 249019 - DNA, 805 bp, Unknown
  Bacterial polypeptide expressing nucleotide sequence isolated from the Sargasso Sea
gctggggcggtttgaactcaagaagcagctgggccggggcgcccaggccaccgtgtggctggcgctggacccgcgcctgcagcgcgaggtggccatcaagctgatgcgccccatgcaggaccaggacccttccgtgctggagcagtggctgcgtgaggcccgccacgtggggcgtctggcccacccctacatcgtgcaggtgttcgaggccgatgtgcagggcgcgcagccctacatcgtgtttgagtacgtgcccggaagcacgctggccgagcacctggcccagcaagggcgctgcacgccccacgatgccgtggcgctcatggtggatgtgctggatggcttgcacgccgcccaccaggcgggcatcgtgcaccgcgatctcaagccgtccaatatcatgatcgacgcgcaccggcacgcccgggtgatggactttggcatggcggcccctgtccaggccgcgccggatgcgcaactggcgagcggcacgcctgcctacatggcgccggaggctgcggcgggcgccgcgcccacccccgcgatggacgtgtattccgctggcttggtgctcatcgagatgctgaccgggcgccccctcatccaccaaaaggacacctggcaagcgctgtaccgcattgccaacgaaaacctggccctgcccgccgacctgggccccggcgtggacgatggcctgcgcgccattctgcaaagggccatggcgcacgaaccggcgcagcgctatgccacggcggcggactttcgggatgcgttgcgcgcctgggcagcgcgggccagtgcgcca

SEQ ID NO: 249020 - DNA, 1084 bp, Unknown
  Bacterial polypeptide expressing nucleotide sequence isolated from the Sargasso Sea
actgtcaaggcagacaaccgactttggcctaggaaacgaagagactgtcacagagcactctgattctctcattggccatacgtttggcgatgtcgttattgagtcgcttctcgcatcaggtggtatgggccgtgtctatcaaggacgacagcgatcacctgacagaaaagtagcaatcaaagtcatacgtccaggtcatcgatcaccacgtgcattccaacgatttcagcgtgagactgaactcttaggacgactgagccatccggggatcgcccaaatttatactgctggttctatcacaaggaatggagaagattcaccatactttgtgatggaactgatccaagatgcaatgccattggtgaagtccgcaaatcaccgaaacttgtcgaatcaagaacgcctgactcttttttcattactctgtaaagctgttgcatacggccacttacactctgttattcatcgtgacctcaagccaagtaacatactcgttgatgccgcagggcacccgaaggtcattgacttcggtattgctcgaatagaacaagacaatgatgcaactgaaacaggtacatttcttgggacacgccaatacagcagccctgaacaatgtgccggaaagaaagtagatgcccgtagtgatgtctattcactcggcgttctcctctatgaattactcacagggaaactgccctatgaagtaaaaaacacttcttttcttgaaacagcccgcatcattcacgagcaacaaccaaacaagctacggataccagaaaataaattacgttctggcgttgaattaattgcagaaaaatgccttgaaaaaaaccctgcggatcggtacttaaatgctgaaaaactgagtcttgatatcgatgcacttctttctggacagccacttgctgcaaagccacaaaccgttcttaaaagaagtctcgattacttgaaaagccattcgtcgcctgctgcaacaattgggacacttctattgattgcgattgtgtttttcttttcaggtacgttttcttcaccagaaaaaaatatttctaaaacgacagacaggtcattagagaatatcaaa

SEQ ID NO: 249021 - DNA, 952 bp, Unknown
  Bacterial polypeptide expressing nucleotide sequence isolated from the Sargasso Sea
catggtggcagcttgtagatcagttgacgaattcgaaagactcaacaaaatcgacgaaggaacttacggggttgttttcaaagctcgtgataagagaacgaatgagatcgctgcacttaagagggtgaagatagacgaaggcggtgacggatttccgttgactgcattgagagaggttaacattctcctctctttgaaccatccaagtatcgtaaatgtcaatgaggtggttatcggatggaaattaaactctgtgttcatggtgatggaatacgttgaaaatgatctcaaaggagtaatggatcagatggctgaatcgacgaacccgaagttcacaatcccagaagtgaaagctttaatgttgcagcttctaagcggaatttcgtatttgcacgaaaactggatcatgcatagagatctaaaaatgtccaatattctggtgacaaactctggcgagttgaaaatttgtgactttggactggcacgccagttcggtggtccagggaagtacactcaactcgtggttacactgtggtatcgagctccagagctcttgctcggtgcaactgtttacggagctgctgttgatgtctggagtcttggttgcatatttggtgaacttctcgcaggagctcctttgtttaacggacgaactgaaattgatcaactgcagaagattttcaaactcctcggtacacccaatgagagaatatggccagactttccttcacttccgagtacacagaaagtgacttttgtcgaacaaccttacaacaagttgcgtcagaagtttccgtgtgacacgactggtttatctgacaaaggtttcgagctactgaaccgtatgctcacctatgacccactgaggcgatttgattccgctgaagctctccatcatcccttttttgacgagtccccatgtcctcgacgaccacttttttcgcttgagtga

SEQ ID NO: 249022 - DNA, 1057 bp, Unknown
  Bacterial polypeptide expressing nucleotide sequence isolated from the Sargasso Sea
agaaatatttagattaatagcaagattaaaagaaataggtgtgacgacagttatgactacagaaagggtggatgattacggaccaattgcaagatatggtgtagaagaatttgtatctgataatgttgttttattaagaaatgttcttgagtcagaaaagagaagaagaactctagaagttctgaagttaaggggtactgtacacatgaaaggtgaatatccatttactatgggaatggatggaataagtgtgtttgccttaggagcaatgagattaacgcagagatcctcaaatattaggattagctctggagttaaagatcttgatgatatgtgtggtggaggatattttcaagattccattattctcgccaccggagcaactggtaccggcaaaacaatgcttgtatcaaaatttgttgaagatgcttataacaataatgaaagagcaatactttttgcgtatgaagaatctagggctcaattgcttaggaatgctaccagctggggcatagattttgaaaaaatggaaagtgatgggttattaaaaattatttgtgcatatcctgaatcaactggtttagaggatcacttacaaattataaaaacgcaaattaatcaatttaaacctaaaagaatggcaatagattctctctctgcattagcaagaggtgtaagtttgaatgcttttagacagtttgtaattgctgtgactggttatacaaaacaagaggaaatagcaggattttttactaatactgcagaagaatttatgggaagccattctataactgattctcatatctcaacaattacagataccatattgttgcttcaatatgtagaaataaaaggagagatggcacgagctttaaatgtttttaaaatgcggggttcatggcatgataaacgaataagagaatttatcattacgaatagtggcccagaaataagggattctttttctaattttgaacaaatatttagtggtgcccctcatagagtaatgcctgatcaaaatgttcaaaatgtttttagaggaatagataataattag

SEQ ID NO: 249023 - DNA, 1020 bp, Unknown
  Bacterial polypeptide expressing nucleotide sequence isolated from the Sargasso Sea
cggcggcggcggcggcgaagattcggccgccggcgccgcggcccgaggcggcggcggagcatcgagcgacgtcgacggtggcgccggcggaggcccgggctcggattccgccctcgacaatagcgtcgccaccggcgggcggctcaagattggcgatttcggcctcgcgtgccgcgtcgagagcgacaacgaacgcaagacgacgatttgcggaactcccaactacatcgcccccgaggttctcgccggctccaagggtggcgggcactcgtacgaggtcgacgtgtggtccatcggcgtcatcatctacaccctattggtgggcatcccgccgttccaaaccagcgacgtgcacgccacgtacaagcggatacgggccaacgcgtacgagtttcccgaatgcgtcgtgaacgaaggcgctcgagagctcatccgccggtgcctcgcgcccaagcccggggaccgaccgaagattgccgaaatcgccgcgcacccgctgctgaacgcggggtggcgcggcgcgacgccatggtccatgccgacgccgcgcgtggacgcggagaagatggagaggtcgacgaggtccggcggcgccggcggaggcgacgcggccaaaaagccgagagcgccgcccgcgttgtccgcgggcggtcggagccgccgcgcgccgctatcgccgctcaccgtcgcggacccgagcgcaccgcgcaccgccccacggaacgtaaacgacgcgacgccgccgcccgcgacgcccgcgcccttcgacgtcctcgactcggacgtggtcggatccgcgcacctcgcgcgaacgccggatgcgtatccggaggtctccgccgccgccggaccgccgcggcgagccaccgaggagggcgcggcggcggcgacggcgtcgctggagtcgcgcgtggcgtccatgcggctgacgacggaggctcccgcggaggaggatcgtctcgcggcggcggaggcgggtcgacttggcgaaaacggaggcaaaaacgtcgacgcgaagac

SEQ ID NO: 249024 - DNA, 1093 bp, Unknown
  Bacterial polypeptide expressing nucleotide sequence isolated from the Sargasso Sea
ttcccaacaatatgacgctatttacgttgttagaagagaaatatttagactaatagcaagatggaaagaaataggagttacaacagtgatgactacagaacgggttgatgattacggacctattgctagatatggggtagaagagtttgtatctgataatgttgttcttttaagaaatgttctggagtcagagaagagacgaagaactttagaagttttgaagttaagaggcactgttcatatgaaaggggaatatccattcactatgggaatagatggtataagtgtgtttgccctcggtgcaatgagacttacgcaaagatcttctaatattagaattagttcaggggttaaagacctggacgaaatgtgtggaggaggttactttcaagattcaattatcctcgccacaggtgctactggtacaggtaagactatgcttgtatcaaaatttgtagaagacgcttataacaatagtgaaagagcaatccttttcgcgtatgaggaatctagggctcaattgcttagaaacgctactagttggggaatagattttgaaaaaatggaaagtgatggcttattaaaaattatttgtgcatatcctgaatcaactggtttggaagatcatttacaaatcataaaaactcaaattaatcaatttaaaccgaagagaatggcaatagattctctctcagcactagcccgaggtgtaagtttgaatgcatttagacagtttgtaattgcagttactggctatactaaacaagaggaaatagcaggcttttttactaatactgcagaagaattcatgggtagccattctattactgattctcacatctcaacgatcacggatacgatattgttgctccaatatgttgaaataaaaggagaaatggctagagctttaaatgtttttaaaatgcggggctcatggcatgataaaagaataagagaatttattatcactaataatggtcctgaaataaaagattctttttctaactttgagcaaatatttagtggtgccccacatagagttgttcctgatcaaaatgttcaaaatatatttaagggcctagaaactaattag

SEQ ID NO: 249025 - DNA, 834 bp, Unknown
  Bacterial polypeptide expressing nucleotide sequence isolated from the Sargasso Sea
gatggagaactacgagaaggttttaaagattggtgagggaacgtacggggtggtgtacaaggcgagaagccttcgcgacgatagtatggtggcgctgaaacgcatacggctggaccaagacgacgagggcgtgccgagcacggcgattcgcgaaatctcgctcctcaaagagctgagacacgaaaacgttgtgtcgttgctcgaggtgattcacgaggagacgaaactgtatttggtgtttgaatatttggatttagatttgaaaaagcacatggactcgactccgcacgtgttgaacgatcgaatgatggtgaagggctacgtctatcagatgtgcgcgggaatagctttttgtcactcgcatcgtgtccttcacagagacctcaagccacagaatttgttgatcgacacgaccaacaatgtactaaaattagcagatttcggtctcgcgcgcgctttcgggataccggtgcgcgcgtacacgcacgaggtcgtgactctttggtatagatcgccagaaattttgctcggcgttcgacgatattcgactcccgtcgacgtgtggagcatcgggtgcatcttcgctgaaatgatcaatcagtcgccgttgtttcccggggattcggagatcgacgagcttttcaaaatcttcaagaagctgggaacgccgaacgatgagttgtggcccgaggcgagggaccttccggattttcaagagggctttccgcgatggcaaccgaagccgtgggaagcgctatgtccagcgttggacgaggacggcgtggatttattgcgacaattgctccagtacgcaccggaaaagcgaatcagcgc

SEQ ID NO: 249026 - DNA, 797 bp, Unknown
  Bacterial polypeptide expressing nucleotide sequence isolated from the Sargasso Sea
catgtgtcacacatcgctcgctccctcgaaaccgcgtcgatggacaaagggcgacaacttgggagaagggtcgtacgggagcgtttggctcgccctcaacggagacacgggcgaactcttcgctctgaaagaagttcgcgtggggagttccgataagcaccgcgatgaatcgatcgagcaactagagcaagaggtggaagtgttgtcgcggttggtgcatccgaacatcgtgcgatacatcggaatcacgcgcgaggagacggcgctgtacattttcttggagtacgtacccggaggatccatcgcgtcgttggtgcagagattcggcaagtttgaggaaaacgtcattcgcgtgtacactcgtcaaattctcatcggattggcgtacttgcactctcaacgcgtcgtgcaccgcgatattaagggtgcaaacattctcgtggaaaagagcggtcgaatcaagctcgccgatttcggcatggccaaggtgctcgagagcgtctccatcggaaaatcattcaagggtagcgcgtgttggatggctcccgaagtcattcggcagcaaaacgtgggattcgagtcggacatttggagcgtcggatgcacggtgtacgaaatggccaccggcgcgccgccttggagcgactgcagcacgcaagtgcaaatcatcttcaaaatcgcatcctcgagcgagatcccgacgattccggagcatctttcctccgaggggcagagtttcttacgcctctgcctgcaaagagacgccgggcggcgtccggaggcggtcgcgcttttgg

SEQ ID NO: 249027 - DNA, 1372 bp, Unknown
  Bacterial polypeptide expressing nucleotide sequence isolated from the Sargasso Sea
gctggacgtgaaagaggtgttcgatttcggcgatgagctcggtcgcgggcaattcggcgccgtgttcgcggtgacggagaagtcctcgggacgatcgctcgcgtgtaagtcgatatccaagcgcgacttgaagaacgaaaaggcgaggaacgtggtgcgaaacgaggtgagaatcatgcatcacctctcgggagacgacagggtggtcgaactcatcggtgcgtacgaggacgcgacgcacgtgcacctggtgatggagagattggacggaatggaactgtttgacgccatgtcggagcacttcgacgaggcgccgtacggcgagcgagacgcggcggagatgatgcgcacgatcgtctccgcggtggactattttcatcagatggacgtcatacatcgagatttgaaaccggagaatttcgtgttgaagaccaaggcgaaggatgcgccgatatgcgccatcgatttcgggttgtcgacgttttatcacgaaaatcagacgtttacggaattcgtgggaagtccgtattacatggcgcccgaggtgttggggtacaggtactcgcttgaagcggacgtgtggtcgtgcggagtgattttatacatcttactctccggcgtaccgccgttttggggtcagacggagaaggcgacgttcgacgccatcaagcggtacaagaagggcgtcgaaccgctggatttcgacagcgcgccgtggccgagcgtgagcgacgaggcgaaagaactcattcgagggatgctcgagctcgatccgaagaaacgtctgacggcaaaacaagtcttgacgcacccgtggatcgccgatccaaaatgtccgccagcgtcggcgctcgacgccgtcgtctttgagcgtttcaaacaattcgccggtatgaccaagtttaaaaagatgggtctgaaagcaatggcgtccaatctcagcgcggatgaagtcgcgggcctgaaggaactctttaaggatttcgacaaggatggctccggaacgatctctctcgatgaacttcgcgagggattgaagctcaacgcgtccgaagccgcgtccgccgagctcgacgcaatcatggctgctatcgatttggacggtagtggcgaactcgattacgaagagttcatcgccgccacgctcgcgagatcgaagcgacagtccgaggtggccgtccacgccgcgtttgattatttcgacaaggacggcgacgggtccatcacggcggaggagttcgaggaggcgttttcgaaaatgtcgccggtcgaacgcgccaatctcggcgatgtcgacgaactcatcgcggcggcggacgccgacggcgacggacgcatcgatttcgatgagttcatggccatgatgaattga

SEQ ID NO: 249028 - DNA, 859 bp, Unknown
  Bacterial polypeptide expressing nucleotide sequence isolated from the Sargasso Sea
tgaaggtgaatatccatttactatgggaatggatggaataagtgtgtttgcccttggagcaatgagattaacgcagagatcttcaaatattagaattagttctggagttaaagatcttgatgatatgtgtggtggaggatattttcaagattcgatcattctcgctactggagctactgggacgggtaaaacaatgcttgtatcaaaatttgttgaagatgcttacaataataatgaaagagcaatactttttgcatacgaagaatctagggctcaattgcttagaaatgcgaccagctggggaatagattttgaaaaaatggaaagtgatgggttattgaaaattatttgtgcatatcctgaatcaactggtttagaagatcacttacaaattataaaaacgcaaattaatcaatttaagccaaaaagaatggcaattgattctctctctgcacttgccagaggtgtaagtttaaatgcatttagacagtttgtaattgctgttacgggttatacaaaacaagaagagatagcaggtttctttactaatactgcagaggaatttatggggagtcattcaataactgattctcatatctcaacaattacagatactatattgctgcttcaatatgtagaaataaaaggtgaaatggcacgagctttaaatgtttttaaaatgcggggatcatggcatgataaacgaataagagaatttatcattacaaatagtggcccagaaataaaagattctttttctaattttgaacaaatatttagtggtgcacctcacagagttgtacctgatcaaaatgttcaaaatgttcaaaatgtttttaaaggattagataataattag

SEQ ID NO: 249029 - DNA, 1012 bp, Unknown
  Bacterial polypeptide expressing nucleotide sequence isolated from the Sargasso Sea
ctggataactatgaaaaaatggatcgaatcggtgagggaacgtacggggtggtgtacaaggcgagatgtaaaacgacgaacgcgctcgtggcgatgaagcgcgtgcgcatggatcaagagcgagacggcatgccgttgacgtcgctgcgagagatcaagctgctgcagcgattgcggcacgaaaacgtcgtgcggttgctccgagtgattcagggcaacaacccggagaacgtgtttctcgtctttgagtattgcgaacacgacgtcgggagattgatcgatcacatgcacacgacgttcacgacgagtgaggtgaaatcgttgatgacgcagacgctgcgagcggtggagtacctgcacgagcgatgcatttttcatagggatttgaagctgagtaatctgttgctcaaccaacgcggcgagttgaagctgtgcgatttcggtttggcgcggccgtacgaaccgatagaacgagggagttatacgccaaaagtggtgacgttatggtacagggcgccagagttgttgttcgggtgcgacacgtacacgagcgcgatcgacatgtgggcggttggatgcatattcgccgaattcttgaaacatcagcccctctttccggggtcgacggagatcgaacaagtgcagatcatttgcatgctattggggagtcccaacgcccagatctggcccggttgggacagtctgccgaacgtgaaaaattttaaacttcccgaccaaccgtacaattttttagaggtgaattttccaaaactttcgccggcgggggtcaatctcctcgacgtgttgttgacgtatgatcccgagcaaagagtgacggcaaaagaggcgttggcgcacgaatattttcgcgagtcccctcctccgaaacctccggcggagatgccgacgtttccgagcacgcactccgctttaccggcgggtccgagaaggaacgaaccaaagcgtcaacgcgtcggcgtcctggacgaccgcatcgcctcagtgttctagc

SEQ ID NO: 249030 - DNA, 1355 bp, Unknown
  Bacterial polypeptide expressing nucleotide sequence isolated from the Sargasso Sea
cgaggtgcgggagattgcgatacagttaatcgatgcgttgcattatttgcacagtaatcgggtgattcatcgcgatttgaagccagaaaatattttaataggcgcggatcggtgcgtaaaggtttgcgatttcgggttggcgagatcgatgagtcaacagtccttggtgatgacttcgatcaaaggcacgcctctgtacatggctcccgagctcgtgcaagagcaaccatacgatcacaccgtagatctgtggtctttgggagtcattctgtacgaactattcgtcggcactactccgttttacacgacgtccatgtacacattgatgcaacgaatcgtgaaggatgtcgttccgtggccgaactcgatgtcgccgtcgttcaaatcgtttttgcaaggattgttgaacaaaaagccgcaacagcgattgaattggccatccgtgctcgatcatcccttcgtgcgcaaggacaaggacgacgctggcgaaggactctcgaacggcaactcggacgtaaacgtagaaaatgaagcagccttcaggaaaattgagaggcgacgccaaagcgtcgtcggcggtgggcgtaaaggaattcatgaaagcgatggcgcctcgactctgggccccaccctgggcgacgtgagtgaagatttgcaaaagctcgagctcgaagcgcacaaatctgtcaaagccgccgccggccttcgcagagatagagccgcgctttccaagcttcttgagacgcttcagccgcagaacacacatcgcagcaaatttttaccgagctacatttcgaatagaacgctcgcgtcgaagaaaatagagttaaaatctacgaaaatggcagacattgcgtcagcgttgcgaacgttgctcgccatgttgaaggttccgaggaagattttgatgagcgtcggtggcgggtcggtggcgcttacgaaagatctcccggcggctgttatcgccgcttgcacgacggcggcgaatgcgaatgatccccctcagcccgagttgttagctttagccatacaagtggtgtccaccgtggcgtttcccgacgggtcgacgccttggtgcggtctcgggttgaacggttatctgatgtttcttgggaaattattggggtacacgagtcgcgatatcggtgaaattgtcgccactacggcttcaaaggctatcgcggacacgatcgaagccgctaaagagcgtggaatcagttcagagctcgcggcgactcgcggcgctctcgggccggccaactcaaagggtgggggtgtcaccgacgccttgtgccagacgttagcgagatccacgaagcaagcgacggcgacacaggtatgtcgcgctctgtttg

SEQ ID NO: 249031 - DNA, 610 bp, Unknown
  Bacterial polypeptide expressing nucleotide sequence isolated from the Sargasso Sea
ctgatcctcgagtatgccgcacgcggtgagctgtacaaggagctccagaagtgcaagcggttcagcgagaagcgctcagcgacgtacattgcgtcgctggccaaggctctgctgtactgccaccagaagcacgtgatccaccgcgacatcaagcccgaaaacttgctcgtcggcatcaagggcgagctgaagatcgcggacttcggttggtccgtgcacgcgccgaacagccggcgccagacgctgtgcgggacgctcgactacctcccgccggagatggtggaggggcgcgaccacgactccgccgtggacgtgtggtcactgggcgtgctggcgtacgagtttctgtgcggcgtccccccgttcgaggcggaggggcacagcgagacgtacaagaggatcctgcgcgtggacctcaacttcccgagccacgtcagcaggagcgcgcgagacatgatcagcgccctgctcgtcaaggagccgaggcacaggctgccccttagaaagctcctggagcacccctggattgtggaaaatgccagcccgaacggcatcccggacgatctcaacctccagccgaacaagaacggcgcccccgcggcggagtgag

SEQ ID NO: 249032 - DNA, 871 bp, Unknown
  Bacterial polypeptide expressing nucleotide sequence isolated from the Sargasso Sea
ttaagaggcactgttcatatgaaaggagaattcccattcacaatgggacatgatggtataagcgtttttgccttaggggctatgagattaactcaaagatcctcaaatatcagaataagttcaggagttaaagatcttgatgatatgtgtggaggtggctattttcaggattcaataattctggcaactggagccactggtactggcaaaacaatgcttgtttctaaatttattgaagatgcttataaccatagtgaaagagcaatactctttgcatatgaagaatctagagctcaactactcagaaatgcaacgagctggggaatagatttcgaaaaaatggaaagtgatggattattaaaaattatttgtgcatatcctgaatcaactggtttggaagatcacttacaaatcataaaaacgcaaataaatcaatttaagccaaaaagaatggcaattgattctctctcagcccttgccagaggtgtgagtttgaatgctttcagacaatttgtaattggagttactggttattcaaaacaagaagagatagcaggttttttcactaatacggctgaagaattcatgggaagtcattcgattactgactctcatatctcaactatcactgatactattttattacttcaatacgttgaaattaaaggagaaatggccagagccttaaatgtttttaaaatgagaggttcatggcatgataaaagaataagagaatttataataacgagccaaggccctgaaataaaagattcattttctaattttgaacaaatatttagtggtgcgcctcatagaattattcctgatcagaatattcagaatgtttttaaaggggttgataaaaattaga

SEQ ID NO: 249033 - DNA, 550 bp, Unknown
  Bacterial polypeptide expressing nucleotide sequence isolated from the Sargasso Sea
ttgggattagttttgtttggtttaggagaaggtcttttagttttatcaacaactggtaattcaccgtggtcagtatttgctgaaggaatatccaaaaaaacggacatatcgattggtgcagctacatttattgttagtgtgagtgtcttatttttgtggatttttctaaaacaaaagccaggaataggaacagttatgaatattatcattattgctggaatgatcgatgtaactttatatttgtttgatccaccaacaaattttttttctaaatatttattatcagttgtttcagtattgttagttggattaggtagtggaatatatttagttgctaacttaggaccaggaccaagagacggtttgatgactggattgacaaaaattatgaatttaccaattgcttttgtgagagcttgtctagaaatttcagttgtcttaattggatggtatttaggtggaactgttgggattggaacattaatatttgcatttgggattggccctgcagttgcctttggtttattttttgtaaataaaattagttagc

SEQ ID NO: 249034 - DNA, 565 bp, Unknown
  Bacterial polypeptide expressing nucleotide sequence isolated from the Sargasso Sea
ttttttttttctttgtttgggattagttttgtttggtttaggagaaggtcttttagttttatcaacaactggtaattcaccgtggtcagtatttgctgaaggaatatccaagaaaacggacatatcgattggtgcagctacatttattgttagtgtgagtgtcttatttttgtggatttttttaaaacaaaagccaggaataggaacagttatgaatattattattattgctggaatgatcgatataactttatatttgtttgatccaccaacaaattttttttctaaatatttattatcagttgtttcagtattgttagttggattaggtagtggaatatatttagttgctaacttaggaccaggaccgagagacggcttaatgacgggattaacaaaaattatgaatttaccaattgcttttgtgagagcttgtctagaaatttcagttgtattaattggatggtatttaggcggaactgttggtgttggtacattaatatttgcatttgggataggccctgcggttgcctttggtttattttttgttaataaaattagttag

SEQ ID NO: 249035 - DNA, 489 bp, Unknown
  Bacterial polypeptide expressing nucleotide sequence isolated from the Sargasso Sea
acttaggtggtatgacgttaatgacaggtagcgatgcgccggtcacgctgtcgttgcccttaaacgacgaatggtactatgccgtttgttattcaggcattagcgtatcaacggcggctgctcgcgatatcttgcctaaacaggtggaaatggcgacggcactaacctttggtcgacagctaggtgtgtttgtacacgccttacatgtaggtaactttgatttggcagcatcggtaatgaacgatgttatagccgaaccttacagaaaatcgctactgcctggctttgatgaggctcgtgcatttagtgagcaagcgggcgccctcgcttttggtatttctggctcgggacctacggtttttgccgtgtgtccaagtaaagcgcaggcggaaaaagtcgccgcctatctaacagagaactacattcaaaatgaagatggctttagccatgtgtgccaaataccaagccaaggcaccattgtttcttaag

SEQ ID NO: 249036 - DNA, 754 bp, Unknown
  Bacterial polypeptide expressing nucleotide sequence isolated from the Sargasso Sea
gcattggcgggcgaagggcatcgcttgccccgtccctgtacgggcgcgagacggtgaggtgctgcataaactgagcaatcggcaggcggccatcgtcacattcctggcgggcatgtggcctcggcgcattcagccttaccactgtggcgaactgggccgggctttggcacgaatgcatttggccgggaacgacttcgccttgcggcgctccaatgacctgtccgttcaatcctggcggtccctgttatgccggagcgccgaccgcgccgacgaggtacagcagggcctggccgaggatttggaaacggagcttgccgccttggagttgaactggcctgataccctgccgtgcggcatcatccacgcggacctgtttcccgacaacgtgttttttcgtggccctgaactgacgggcctgatcgacttctatttcgcctgcacggatatgtttgcctacgatatcgctatatgtatgaacgcctggtgttttgaggcggacggcagctttaacgtgaccaaggcaaagcgtcttttaacggcttatggccgggttcgggatttttctgacgacgagttggctgcgctgcctgttctggcgcgaggcgccgccatgcggttcttgctgacccgtctctacgactggctttacacgccggccgatgcgctggtcaccaagaaagatccgcttgagcactggaagaggcttcagttccatcagcgggtcacgggaccacaggattacgggctggtatga

SEQ ID NO: 249037 - DNA, 595 bp, Unknown
  Bacterial polypeptide expressing nucleotide sequence isolated from the Sargasso Sea
cttgccggatatcctctacctaaagaaaaactattagaacttgctatagatatagaaggacatccagataatgttgttccctcgttaattggagggctttgtgtaactgctaaaactgcaaatgaccgatggcgtgtagttcgttgcgattgggatcaatcaataaaagcagtagtcgcaataccatctattcggcttagcacaagcgaagcaagacgtgtcatgccagagaatatcccaataaatgatgcggtgatcaacttgggcgcacttactcttctgcttcaagggctaaaaactggaaatgaggatctaattgcagatggcatgcatgacaagcttcatgagccttatagatggggtttaattaaaggtggtcttgaggttagagaagctgcaaaggctgccggagctttaggatgtgcaattagtggagcagggccaagcattcttgccttatgcaaagcgactagaggccgagaagtcagcgtcgcaatggtcaaagcttgggaagctgctggtgtagcaagtcgtgctcctttaatgagcctccaactcagaggaagcgaatgcatttcaaacactattgggtagt

SEQ ID NO: 249038 - DNA, 586 bp, Unknown
  Bacterial polypeptide expressing nucleotide sequence isolated from the Sargasso Sea
catcaagcgggaatggatttcgatcagacgcgcgacaacgacctttcgatcgagggctggcgcgacctctatgcagcaattgagccccgcgccgacgaagtcctcgatggactgcacgcggaactcaaggccgcgttaatcgagcttgagaagaactggccgcaggggctgcccgctggagtcatccatgccgatctattcccggataatgtcttctaccttggcaatcggttgtccgggctcatcgacttctacttcgcttgcaatgactccttcgcctatgacattgcgatctgcctcaatgcttggtgttttgaagccgatggttcgttcaacgtgaccaaagcgcgccagcttctatccggctacaaccgggtccgcacgctcggttcggatgaactgtcggcaatgcccgtgttggctcagggcgcggctctgcggtttctcctcacccgcctctacgatctcctcaatcacgtcgaaggggccttggtgcagccaaaggaccccctcgagtatctccagagattgcgtttccatcgtggggtcaggtcgcccgctgaatacggattgggcgcaccttgaa

SEQ ID NO: 249039 - DNA, 759 bp, Unknown
  Bacterial polypeptide expressing nucleotide sequence isolated from the Sargasso Sea
aaaatgttgctggtgttgttgctttagctatgctgaaagagtatccagttgattttggtattgaaataaccatgaacaaaggtttttctcctggaagtggtttaggtagtagtgctgcaagttctgctggagctgcttttggagtaaatcaattacttaataaaccttttagtaatttggagctaactaaatttgccatgcttggagaaaaaatagcttgtggaactcctatagctgataatgttgctgcagtgatttttggaggatttattctaatcagaagctatgaacctttagatgttataaaacttcctgttcctaaagatttaaggttggttgcgattcatcctcaaattgaaattaaaacaaaagatgcaagggaagttttacctgatcaaattcctttaagtatagccgttaaacaatgggctaatgttggcggtctaatcagtggtttatatactaaagactataaattgatatcgaattcgcttattgatgaaatagtcgaaccaaaaagaaaacattttattccatattttgatcttgtaaaagaggaagctataaatgctggagctcttggggctggtatttctgggtctggtccaacaattttttcactttgtgaaggagactcagtagttgaaaatgtttataaatcaataaaaaaagcttacaaaaataaaaatgtagacttcagactcttttcatcaaaaattaatacagaaggcattaaaatattagaagccaaaacttaat

SEQ ID NO: 249040 - DNA, 704 bp, Unknown
  Bacterial polypeptide expressing nucleotide sequence isolated from the Sargasso Sea
catggcggtttacacgacagttgatgactcggcgctgaatgaatttttgatcgcctatgatattggcgagatacttagctttgctggcattgttgaaggtgttgaaaattcaaattatttattgcgaacaaccaaagcgcattttatcttaacgctatatgaaaaacgagtagatactgttgacctgccattttttattgaattgatgacacatttatctgccgctggtatgaattgtccagtaccggtggcggcgcgtgacggccaagttttgcatcaactcgccgggcggacttgtgcgatattttcgtttctcgatggtacattttcacgctttccgaatcttttgaaatgccgtgcccttggagctagtctagcggagcttcatatcaaatcacaaggcgtatcgcgtcatcgagccaatgcccttggcccggcgtcatggacgccgctacttcacagcattggcgccgacgccgatattctagctaaaggtatgcatgacaccatcacagcacgtcttcaacaaatcctgatggactggccgaccgatctaccacatgggatcattcatgctgatttatttccaaacaatgttctttttgtcggcgacaaattaaccgggcttattgatttttatttcgcctgtgaggacatactggcctatgatatcggcatttgcctcaattcttggtgttttgagg

SEQ ID NO: 249041 - DNA, 646 bp, Unknown
  Bacterial polypeptide expressing nucleotide sequence isolated from the Sargasso Sea
atgtttttaactatcaaaaaaatcccttcaaaaacttggagctcagaaaaacctctaaattttaaacccaaattttcaacatttttttttctttgtttaggattggcgctatttggtttaggtgaaggtcttttagttttatctacaactggtaactctccgtggtcggtatttgctgaaggtatctcaaaaaaaacagatatatcgattggtacagctacctttttagtaagcgtatgtgttttatttttatggatttttctaaaacaaaagccgggaattggaacagttatgaatattatcattattgctggaatgatcgatgtaactttatatttgtttgatccaccaacaaattttttttctaaatatttattatcttttgtttcagtattattagttggtttaggtagtggaatatatttagttgctaacttaggaccaggaccgagagatggtttaatgacaggattaaccgaaattacaaatttaccaattgcttttgtaagagcttgtttagagatctcggttgttttaattgggtggtatttaggtggaactgttggaattggaactttaatatttgcttttgggataggccctgcagttgcctttggtttattctttgttaataaaattagttagc

SEQ ID NO: 249042 - DNA, 349 bp, Unknown
  Bacterial polypeptide expressing nucleotide sequence isolated from the Sargasso Sea
gatggaaaaaattagagtcttttgtccagcaagtgtagcaaatgtttcttgtgggtttgatgttcttggcttttgtttaaatgaagtaggggatgaaataataatcagaaaatcaaaacaaaaacgtatcaaaattattagtaaagaaggatacagattgccttctgatccaaaaaaaaatgttgcaggaatcgcaattaattcctttttaaataaatatccatcaaattttggttttgaaattgaaataattaaaaggattaaacctggaagcggtattggaagcagtgccgctagttcagcgggagcagtttttggtgtaaataaaattttaggagatcctgctact

SEQ ID NO: 249043 - DNA, 620 bp, Unknown
  Bacterial polypeptide expressing nucleotide sequence isolated from the Sargasso Sea
tgctggattaattggagcaaatgcaataatgaactctccattgtccaaagaaaaactccttgaactagccattgatatagaaggtcatcctgataatgtagttccctctcttctgggtgggctttgcttgacagccaggtcttcttcccaaagatggagaatcattagatgtgattggcacgattcaattaaaactgttgtagcaattcctgcaattcgccttagcacaagtgaagcaagaaaggttatgcccaagaatgtacccatatctgatgcagttacaaatatgggggcacttactttgttactaaacggcttaaaagcaggtaatgcggaacttataaaagagggaatgtttgacaagttacatgaaccctacagatggaaacttattaagggtggattagaagtcaaagatgccgcactaaatgcaggcgctctaggatgcgcaattagtggagctgggccaagtatcttagctttgtgtaaaaaagaaaatggtaaaaacgtcagtcaagccatggtgaaagcatgggagaagtcgggtgtagctagcagagcaccgttcttaaacgttcaaactacaggcagccaatttagcactatcgctggtaagtagt

SEQ ID NO: 249044 - DNA, 661 bp, Unknown
  Bacterial polypeptide expressing nucleotide sequence isolated from the Sargasso Sea
aatggctgtttatacacatctctcacatgaagaaatcaataagtttttagaggaatataaaatcggccatttattgaatttttccgagattgctgaaggtgttgaaaattccaattttctcattactactagtattgataagtatattctcactctctatgaaaaacgtgttaatcctaatgacctgccatttttccttaatctcctgacccatttgtcaagtgctggtctttcttgcccccttccagttgaaggcatagatggcaatgctttacggactcttggtggtcgacccgccgcaatcgtcacgtttctagaaggaacatggcctaggcattctaatacgcatcattgcaaagccttgggttcagcgatggctatgatgcatgaatttggccaaacctttaaacaaactcgtacaaatgcgctcacacttccttcctggcggcctcttttagaatcttgccgtcttccagaacgtgaaatttatataaatctatttaacgaattgaaccaagagttaaattggttagagaataactggcctaaaaatctgccctcagggataatacatgctgatctctttccggataatgtatttttcaccaaaagcgatctgtctggaattatagacttttacttcgcgtgcaatgactttttt

SEQ ID NO: 249045 - DNA, 234 bp, Unknown
  Bacterial polypeptide expressing nucleotide sequence isolated from the Sargasso Sea
gatgcagatgcggtctcacttaggacgcgtgcgcggcctcggatcgtcgaataatggtgtgcagcattggtggatgcagcgcttgtccggtattgcgctggtaccgctttccctatggtttgtcttctccgtcatcggtctgcttatcaacgctgatttagcaactgtgactaattgggtcggtcaacattacaatccagttttgctgatccttttcgtgatctgtatgttcca

SEQ ID NO: 249046 - DNA, 718 bp, Unknown
  Bacterial polypeptide expressing nucleotide sequence isolated from the Sargasso Sea
atacaagataaaaaaggaaattattcgaactcaattcaaaataagaaagctgtaatcacatcgttcttaaaaggtaggtcaatagatcaaattaaaccaatacactgtgcgtctttaggctccactatcgcaagaatgcataaagaatcagctagacttgaaatgactagaaaaaatgagcttggatttgtaaacctcaacagcttaattcaaactttaaaaaatgttgacgataatattaacgcgcaggtaatcgacgtgatcaatgaagaatatactttcctatctggaaaccttggtcatagtttaccttcaggtataattcatgcagatctttttccagataatattttttttgaaggtaatgaggttacaggtataatagatttttattttgcatgcaccgattattatgcttacgaaattgccatctgtctaaatgcatggtgttttgagccaaataataacgaattcaatccaacaaaagcaaaacatttattgggcagttacaatcagttgcgagaattttcagaggaagaaaagaaagctttacctcttcttacaagagcatcatctctaaggtatctactaactcgtttaatcgactactattcgcatgatgataatgaactgatccttaaaaaggaccctaatgagtatctcactaaactccaatttcaccaatccgttaaaaaagtaggcgaatatggcctctaaa

SEQ ID NO: 249047 - DNA, 391 bp, Unknown
  Bacterial polypeptide expressing nucleotide sequence isolated from the Sargasso Sea
atttttctaaaacaaaagccaggaataggaacagttatgaatattatcattattgctggaatgatcgatgtaactttatatttgtttgatccaccaacaaattttttttctaaatatttattatcagttgtttcagtattgttagttggattaggtagtggaatatatttagttgctaacttaggaccaggaccgagagacggtttaatgacgggattaacaaaaattatgaatttaccaattgcttttgtgagagcttgtctagaaatttcagttgtattaattggatggtatttaggtggaacggttggtgttggaacattaatatttgcatttgggataggtcctgcagttgcctttggtttattttttgtaaataaaattagttagc

SEQ ID NO: 249048 - DNA, 534 bp, Unknown
  Bacterial polypeptide expressing nucleotide sequence isolated from the Sargasso Sea
tgggcgagggcttgttaattgtttctttgagtggggcctcaccttggagtgttcttgctcaaggtatctcattaaatgtaaattactcaattggattaatcacttttataattagtgtagttgtattaattatgtggatacctttaaaacaaaaaccaggcataggtactattttaaatgcattaattattgctggaatgattgatttatgtatcaattttgtaccttcccctgaaaactttatttctcagataagtttagcaatagttgctgttctaacagttggtttaggtggaggaatatatttagttgcaaatttaggaccaggtgcgagggatggcctcatgattgggttacagagagtaacaaatttaccaatagcatctgtaagagcctttattgaaattagcgttgtctccattggatggtatttaggaggcacagttgggattggcactttattatttgcttttggaataggaccttgtgttgctctaggattatatttagttgataagatatttaataattaaa

SEQ ID NO: 249049 - DNA, 937 bp, Unknown
  Bacterial polypeptide expressing nucleotide sequence isolated from the Sargasso Sea
atggctgtgtatacaaaggtgaattttgctgaagcgcatcagtttctggaaaaatactactcaatagaggatcttgaagaactaattgaaatcccacaaggtgttgaaaacactaattacataataaaaacaaaaaataaaaaatttatactaaccctctatgagagtagagtctcgcatagtgatttacctttctttatcaacctactagtggcactgaatgataaaaatattgaatgtccaaatcctataaaaatgaaaaatggaagttacacaaaattattgaataataaacatgctgcaatttttagtttcttacctggcaaatcaactacatccattaaaaatgagcactgcttcctagttggtcagacgcttgcaaatattcatctaaaaacaaaagatttgagtttacacagagaaaatacattatcactaaagtatttgacagatcttttaagcttgatcaatcaaacacccggaaatcctctcaataaattgtatatggacatatcaaatgaatacgattttctcatgaataattggccaactgatcttccaaagggaattatccacggcgatctttttcctgataatattttcttccaaaataacaagctaacgggcgtaattgacttctatttcgcatgcaatgaattttatatatttgatatagcaatctgtattaacgcttggtgttttgagagtgactactcatttaatattacaaaagcttcatacttactaaagggatatagatcactgaaaaaattaactgaagatgaggttcaattcctacctattatgtgtcgtggtagcgctttgagattcttaataacacgccttgttgattggaataaaagagatgaaaacgttcttgtaacaccaaaagatccgagtgaatattataataaactacaatttcatcaatcagtaa

SEQ ID NO: 249050 - DNA, 964 bp, Unknown
  Bacterial polypeptide expressing nucleotide sequence isolated from the Sargasso Sea
atggcagtctatacgcacatatctagagaagaactggatctttttactgatcactatagtattgaaaatgttcttgaattttcaggtataaaaggtggaacttctaattcaaattatttactaaagactctagaaaaaaattacatacttactatttttgaagaaagaacaaatcaggataatcttcaattcttttttgatctaatgaatcatttgaataaaaacaatgtaaagtgccctgaggtaatacaagataaaaaaggaaattattcaaactcaattcaaaataagaaagctgtaatcacatcgttcttaaaaggtaggtcaatagatcaaattaaaccaatacactgtgcgtctttaggctccactatcgcaagaatgcataaagaatcagctagacttgaaatgactagagaaaatgagcttggatttgtaaacctcaagagcttaattcaaactttaaaaaattttgacgataatatagacgcgcaggtaatcgacttaatcaatgaagaatatactttcctatctggaaaccttggtcatagtttaccttcaggtataattcatgcagatctttttccagataatattttttttgaaggtaatgaggttacaggtataatagatttttattttgcatgcaccgattattatgcttacgaaattgctatctgtctaaatgcatggtgttttgagccaaataataacgaattcaatccaacaaaagcaaaacatttattgggcagttacaatcagttgcgagaattttcagaggaagaaaagaaagctttacctcttcttacaagagcatcatctctaaggtatctactcactcgtttaatcgactactattcgcatgatgataatgaactgatccttaaaaaggaccctaatgagtatctcactaaactccaatttcaccaatccgttaaaaaagtaggcgaatatggcctctaaa

SEQ ID NO: 249051 - DNA, 673 bp, Unknown
  Bacterial polypeptide expressing nucleotide sequence isolated from the Sargasso Sea
atggctgtttatactagtatatctcaggatgatttgaatcaatttctttcgctctacaacatggaagatgtgaattcttttgaagggattcgaaatggagtttccaattcaaactatctactatttggaaaaaataataaatacattcttacaatatttgaagaaatgacaaacgatagagatcttccttattttttccaattgatgaatcatttgaatagtaagaatattatgtgtccaagaattattaaagataagactaataatttttcaaatattattaagggcaaacaagctgccatttctagttttcttgaaggacaatcaatagaacatataaaaccctctcactgtgctgaacttggtactatggttgcaaaatttcataatgcttcaaatgaacttgaaatctatagagaaaatgatctaggtataaacaaattggaggctatcataggctcaattgataaaatatctgaaagattaagtccgtcagttatcgacgtaatacatagtgaaaatgactatttaaaaaatatttcattcgatattccttcgggaataattcacgcagatttgtttcctgataatattttttttaatgaaaataagctatcaggtattattgatttttactttgcttgtaatgatttctatgcatacgaaatagcaa

SEQ ID NO: 249052 - DNA, 922 bp, Unknown
  Bacterial polypeptide expressing nucleotide sequence isolated from the Sargasso Sea
atgcttgaagaaaaaaaaattactatagaagtccctgcaagcacaggaaatgttggccctgggtttgactgtattggtcttgctgttgatatctggaacaaagtcactatagaaaaaagcgatggggtttttgagatattgaatcaagggataaataaagaaaaatatgactcaataccaattaaagaaaatcttataactaaaggaatattgcttgcatgcccagaaatagatttaaataaatttaaaataattagtgagaacaatattccattcgctggaggattaggtagcagcgcagcatcaatttcggcagggcttattattggaaatcatctatctggcaataaattgaataatgatgacttaatgcaaatggctatagcaatggagggccaccctgataatgcaactccctgcattcacggaggactaaccatttccttttatgatgaaaacaaatctaggtggatttataggaaaattgagacaattggtgacttaaatatcatgacttttgttccaaattttatttcagaaacaaaccagagcagaaaaaaaattccttcagaaattttacttaaagacgttgtgaacaatatgtctagagttgctttgctgattgattcatttaaatctggagattattcttttctaaataatgcaacccaagatttcatacatcagaatattaggctagaaagttttccacagataaagtttttaatgagtgccgctattgaagctggtgctttaggagctattttatctggatctgggccaacattaatggtattcactaaaggcaaggaatttacagtagattatgaacttaaagaagcagctagaaaacacaatctcgagggcaaaattacactaaccaaaatttctaataaaggcataagtataattgatggataat

SEQ ID NO: 249053 - DNA, 1168 bp, Unknown
  Bacterial polypeptide expressing nucleotide sequence isolated from the Sargasso Sea
aaacaaattgatgacaatgaaatagaaatcgagcggcttggtgaatcgcttgtgccagaaaaccttcgggaaacagctgatgcagttgtcgaacttgtgtcagagattgcggctgctgttgacgagatgtcacttattcaagcccgtgcacgtgttgaggcaatcacaattgagcccgaaagaattgatccagatattgcatttgaggtagcccgagcaaatcgcttggactggatgaataatcgtgcagcattagtcgatcagtggcggctgattcaatttaacgccatgtcattattagctggactcgatcttgaaatagatggaaacgtttccacaacaggaacaaacccggctcgtttccgtgctccaaccggtgttatggggggtcgacttcgtttcgatgcaccactcacacgattacgagagcgtaataatttcagacaatcaattttggattaccagcaggtgcgacgtcagcaaattcgctatgaagatcgaatcaaactttctatccggcagttattacgacagctagaacttgatgagcgaaatcttgagactcagcgtcgagctgtgattatcgcgattcgtagagtcgatcagacacgattaagcttgagtcagccggctcctccacctccaccgccaagtgcagatggatcaatcccaattattgacgcggcagctgggcagcttgcaccaactgcaacactcaatctgatctatgcatttaatgatctacggagttctcaggacgctctcacaagtatatggatcaattactatgcaactcgggcatcccttgcgtaccaactcggtgtcatgaatcttgatgagaatggggtatgggttgatatgccatttacagattgcagtcgcatgagtgctgaagagactgttctcccgccgccagtgcctcaagagtggcttgattatcttgaggaaattgatccaccaccaccgatgcctgaagatgcaggaattgaagctctggatacaccaggaattctcccgagtatcatggctcgagcaatgccatccgtgacagaagatgcagaatcagagccaactgatgaaacaaatagtaaggtcgtgcttcctgcgtccgcagaagtcaaggaggatcagccttgggcagatttgataccgtcctttttgaggtgat

SEQ ID NO: 249054 - DNA, 878 bp, Unknown
  Bacterial polypeptide expressing nucleotide sequence isolated from the Sargasso Sea
ctacagtaaatgtggttctggatttgattgcataggtcttgctatagatgtttggaattcgttatcaatatcatttaacagcgacaaattgattattaaaaatagtggagtcaataataatgcttatgaatctatcaaaattaaggacaacctaatcatcactggaattcaagctgtatgtccagaattcgatatttcaaaaataaaaattttaagtgaaaacgaaattcctttttctaatggattgggtagcagtgctgctgcactatgcacaggactcttaattggaaactatttaattggtaataaattttcattagaagatttaaatgaaaaagcaataaaaatagaaggtcatccagataacgtaactccttgtctctttggagggttaaccatatctgtatttaacgataaaaaagataaatggataataaggaaaatagatgtctctagtgaattaaacataatggtatttaccccaaattttatttcaaatacaaataatagtagaaaaaagctttcaaaatctgtgactaggtcggcagcagtttataatatcagtagggttgcattactaatagattctttaaataaaaaagactttacttttttaaatgaagcaaccaaagattcgttgcatcaagacacaagacttgaaggctttccggagatgagatcaataatgaatgctgctattgatggaggtgctttgggagcaatagtttctggatcaggcccttcagtaatgatttttactaaaggaaatgaatttacaatagactatgaaataaaagaggttgcaagaaagcataatttacatggaagcatcattctcacaaagccttcaaatcagggaataatattatctaaataaa

SEQ ID NO: 249055 - DNA, 1576 bp, Unknown
  Bacterial polypeptide expressing nucleotide sequence isolated from the Sargasso Sea
atgaagaaattatctattttacttatatcctttttgctgattagttgtacaaataatgaaaaagcaaaagtagaattatttactgaaggagcaaaaatttcaggtgtaaatgggatacattttggtccggacggttatttgtatgcaacttctgtaataggttcagatatttctgttgttgatactgataataaaacaatagttaagagatatggaccaaaagaaggagtttttggtcctgatgatgttgcgtttaacgacaagggagaattttattggactaccatactaacaggtgaagttgctggttttaatattcagggagagaaagttattgctgcaaatctaggcccaggtgttaatcctattactttttcagatgatggaaggttattcgtagcgcagtgcttttttggtgatggattatatgaagtagaccccttaggtataaaagaacctagaagcataaaaaaagatttaggcccaaattgtggactcaatggaatggactggggtcctgatggaagactatatggacctaggtggtttaaaaacgaagtagttagtcttaatgttgatacaggagaaatgaatgttgtagtaaagggcctaaatgtacctgctgcagttaaatttgattctaaaggtgtattgcatgttttagacacagctgatggacaagttttaaaagtcatagatggtcaattagaagttgttgcttctttacttactggtctagataattttgatttcaatagtaaagatgaaatctttgtttcaagctatgctgatggatcaatattaaaagttacagataatgagattatagaaatacttccgggcggcatttcacatcctggaggtctcgcagtctcacaaaacagtcttgttgttgcagatattcaatcagtaagggcttttaatttgggtacaaaagaagaagattgggtcttaagaaatatttttaggtcctctccattgggagcaagtacatctgctgctagtttggataataatatcatacttacgagttggttagataataccgttaaaattttagacccttcaaatggtcaaataattaagagctttgaaggcctaaatattccaatctctactgctaaatttgatggtcattatgcagttgcattgcatggcaatacctctatatctcttttaaaagaagatggaagtttaaagattttatccgatgaatttgattctcctacgcatgtagtaaattacaaagaaggattattggtatctgatagaaatagaggagaattaatcacggtttctgctgaaggcgatactaatactttaatttctggtttagattctccagaaggtattgcaatattaggggatactatatttgtctacgagggaaatactggagaaattaagtctatttctgaaaataaaatatcgataattgctaaattgagtgccggaagtcctgcagcttctcctatgcagccaccttcaatggtgtttaatggcttagttgcatacgaagggtcagtttatgcaacagacgaaatgaagagagctatctttaaaattacaccctaaa

SEQ ID NO: 249056 - DNA, 700 bp, Unknown
  Bacterial polypeptide expressing nucleotide sequence isolated from the Sargasso Sea
gaaaaccaaggcgtggcattaaccctagaaaaaaacttgcccgtcggcagtggcttaggctcgagcgccagttctgtggttgctgctctttacgcgttaaatgagcatttcgaacgaccgtacgataaacaagcgctactcgaactcatgggcgagtttgagggcaagatcagcggaagcgtgcattacgacaacgtcgcgccttgttatttgggcggcatgcagctaatgctcaatgtgccaggcgctatctgtgagccgattcccagttttaaagaatggtattgggtggtggcgtatcctgggatttcactctcaacggccatgatgcgtaaactcatgccagaacaatacgataagtccgtggccatcgattttgggcgttatttgagtgcctttgtgcacgcctcttatcagcaaaacgccaagcttgcgattcaagtcttgaaggatgtgttggccgaaccttaccgcgcggcggcgataccgggttatgacaacgccagagcggcgctcgccgaattaggcatgttaaccactggcatctcgggcagtgggccaacgctgttttctgtgactgacgatctcgcgaccgctaacgccgccaaggcgtggttagaggctcattatctgagcgaagcggggggctttgcccatgtctgccgcctcgatgagcaaggtacgcgtcgagtcgattaat

SEQ ID NO: 249057 - DNA, 610 bp, Unknown
  Bacterial polypeptide expressing nucleotide sequence isolated from the Sargasso Sea
atgtctattcctgaagtaggtaaaaaaataagagtatcagtaccttccacaactgctaatttagggcctgggtttgattgtcttggcgcagcattagatttatataatgaatttattttcacaagaattgaaggtggtggagatagattcgatttaataatggaaagtacagatggtaatcacttaagaggaggacctgaaaacttagtttttagagctgctcagaaagtttggaatagcgcaaatatagatccttttgcacttgaagcaagagttaagttggcagttcctcctgctcgcggacttggaagcagtgccacagcaatagttgctggactaataggagcgaatgcaataatgaattccccattgcccaaagaaaaactccttgaacttgcgattgatatagagggtcatcctgataacgtagtaccctctctcctaggtgggctttgtttgacagctaggtcttcttctcaaagatggagaatcattagatgtgattggcacgattcaattaaagctgttgtagcaatacctgcaattcgtttaagcacaagtgaagcaagaaaggttatgcctaagaatattcctatatctgatgcagtga

SEQ ID NO: 249058 - DNA, 744 bp, Unknown
  Bacterial polypeptide expressing nucleotide sequence isolated from the Sargasso Sea
tatgtcttctccagaagtaggaaaaaaaattatagtaacagttccttctacaactgctaatttaggtcctggattcgactgtctaggcgcagcgttagatttatataacgaatttatatttacaagaatagatggaggcggggatcgatttgatttgataatggagagtactgatggtaatcatttaagaggaggcccagaaaatttagtttttagggctgcacagaaagtatgggaaagtgcaaatatcaaaccttttgcccttgaagctagagtgaaattagcagttccccccgctcgcggactagggagtagtgccacagcaatagttgcgggactaatcggagcaaatgcgattatgaactcccctttacctaaagaaaaacttttagaacttgcaattgatattgaaggtcatcctgataatgtagttccttctcttttggggggtctttgtttaactgccaggtcatcttctcagagatggagaattattagatgtgactggcacgattccattaaaactgtagttgcgatacctgctatacgtcttagtactagtgaagcaaggagagtaatgccgaagaatgtacctatttctgatgctgtaacaaatatgggagcacttacgttattactaaacggcttaaaaacaggtaatgatgaattaataaaagagggaatgtttgacaaattacatgaaccataccgatggaagcttattaaaggtggattggaagttaa

SEQ ID NO: 249059 - DNA, 913 bp, Unknown
  Bacterial polypeptide expressing nucleotide sequence isolated from the Sargasso Sea
ggattcgattgctttggattcgccgtggacgtgcgaaacgagttgatcgtggagcgaggtgagttcgagatcgacatcgtgggcgaagggaaggatgaattgccgagagatgagacgaacgccatctacgacgcggtggtgacgggtttcgaggcggcgcgaccgggatgcgcgttgccgaaaaatttgcgattcacgagcgtgaaccgcattccgccggcgagaggcttgggaagtagcagtgccgctctcgtgagcggtctggcgtgcggtttggcgttgggcggcatggaagtcgacgcgccgcgcaccaagcaaattttattaaacttggcgagcgacatcgagggtcatccagacaacgtcgcgccggccatctacggtggattccaaatcagcatcaacgacgacaaccagtggatcacgcagcgcgtcaactgtccgaccgacgtgcagtcggtgttgttcattcccaagtttcagtcgctcaccgccgagacgcgcgcgcagttgtcgccgacgctctccgtgcaaggcgccgtgcacaacatcgcgcgcgccggtttgctcgtgaacgcgttcgcgaccggtaacttggagttgttaccatacgcgacgcaggacgtgatccaccaacccatccgagggaagcccttcggtttggacagcttgatcgatgccgcgctcaaggcgggcgcgcaggggtgcttcatgagcggcgccggaccgacagtgttagccatcgtcggcggtcacggtggttcggtcgaaaacgacaccgcgggcacgttcaaggcgtccaaggttgccgacgccatgttacaggcctcgcgcgcgaacaatgtcgatggtgaggtcgtcatcgcgtctccgactgagaatggcgtcactgcgtgggtcgaactcgcgtgag

SEQ ID NO: 249060 - DNA, 868 bp, Unknown
  Bacterial polypeptide expressing nucleotide sequence isolated from the Sargasso Sea
ctaggtgcagcgttagatttatataacgaatttatctttacaagaatagatggaggcggagatagatttgatttgataatggagagtactgatggtaatcatttaagaggaggcccagaaaatttagtttttagggctgcgcagaaagtatgggaaagtgccaatatcaaacctttcgcccttgaagccagagtgaaattagcagttcccccagctcgcggtctagggagtagtgccacagcaatagttgcaggactaatcggagctaatgcgattatgaactcccctttacctaaagaaaaactgttagaacttgcaattgatattgaaggtcatcctgataatgtagttccttcgcttttgggggggctatgtttaactgccaggtcatcttctcagagatggagaattattagatgtgactggcacgattccattaaaactgtagttgcaatacctgctatacgtctaagtacaagtgaagcaaggagagtaatgccgaagaatgtacctatttctgatgctgtaacaaatatgggggcacttactttattactaaacggcttaaaaacaggtaatgatgaattaataaaagagggaatgtttgacaaattacatgaaccataccgatggaagcttattaaaggtggattggaagttaaagatgccgcactacaagctggtgctttgggctgtgcaattagtggagcagggccaagtatattagctttgtgtaaaaaggataatggtagagaagtcagtcaagctatggtaaaagcctgggaaaactcaggcgtggcaagtagagcaccatatttgaacgtccaaacaacaggcagtcaattcagggacatctctggtaagtagt

SEQ ID NO: 249061 - DNA, 767 bp, Unknown
  Bacterial polypeptide expressing nucleotide sequence isolated from the Sargasso Sea
aatgtctattcctgaagtaggtaaaaaaataagagtaacagtaccttccacaactgctaatttagggcctggattcgattgtcttggtgcagcattagatttatataacgaatttactttcacaagaattgaaggtggtggagatagatttgatttaataatggaaagtacagatggtaatcatttgagaggaggaccagaaaacttagtttttagagcggctcagaaagtatgggaaagcgcaaatatggatccttttgcacttgaagcgagagtaaagttggcagtgccacctgcacgcgggctaggaagtagtgctacagcaatagttgctggactaatcggagcaaatgcaataatgaactctccattatccaaagaaaaactccttgaacttgccattgatatagaaggacatcctgataatgtagtgccctctcttctgggtgggctttgtttgacggcaaggtcttcttctcagagatggagaatcattagatgtgattggcacgattcaattaaagctgttgtagcaatacccgcaattcgtctaagtacaagtgaagcaagaaaggttatgcccaagaatgtacctatatcagatgcagtgacaaatatgggggcgcttactttgttaattaacggcttaaaagcagggaatgcggaacttataaaagaaggaatgtttgataagctgcatgaaccctacagatggaaacttattaagggtggattagaagttaaagatgccgcactaaatgcaggtg

SEQ ID NO: 249062 - DNA, 742 bp, Unknown
  Bacterial polypeptide expressing nucleotide sequence isolated from the Sargasso Sea
gtttttagggcagctcagaaagtattgggaaagcgcaaatatggatccttttgcactagaagcaagagttaagttggctgtgccacctgcacgcggacttggaagcagtgctacagcaatagttgccggactaataggagcaaatgcaataatgaactctccattgcccaaagaaaaactccttgaacttgccattgatatagaaggtcatcctgataatgtagttccctctctcttaggaggactttgtttgacagccaggtcttcttcccaaagatggagaatcattagatgtgattggcacgattcaattaaagctgttgtagctatacctgctatgcgtctaagtacaagtgaggcaagaaaggttatgccaaagaatatacctatatctgatgcagtgacaaatatgggggcacttactttgttactaaatggattaaaagcaggaaatgaggaacttataaaagagggaatgtttgataagctacacgaaccctacagatggaaacttattaaaggtggactagaagttaaagattctgcactaaatgcaggtgctttaggatgtgcaatcagtggggctgggccaagtatcttagccttgtgtaaaaaagaaaacggtaaaaacgttagtcaagcgatggtaaaagcatgggaaaagtcaggtgtagctagtagagcaccattcttaaacgttcaaacgacaggcagtcaatttagcactatctccggtaagtag

SEQ ID NO: 249063 - DNA, 901 bp, Unknown
  Bacterial polypeptide expressing nucleotide sequence isolated from the Sargasso Sea
atggcgttcacgatacgactccctggatccacggcgaacctgggtccaggatacgacgtactgggtctcgcactcggcattcacaaccgagtcaccgttcgtgaatccgaatcgggccgtcacgtcgcacggaacagcggaaacggaaccgaggaactgccgacagacgggacgaacctgttcttccaggcagccgagaccctcgccgaccgtgtcggcaagacgcttccgcctatcgaggcagagtctacgatcgatgtcccgctggctcgtggactcgggagcagttcgacggctattgtggctggtgtcgtcgcggcgaatcacctgctttgtgatgagttggacaggcaggcgctcctcaacgtcgccaccgaaatcgaaggacatccggacaacgtatccccgtgcctgtatggcgggttcacagtgtccactgtcgcagacggccacgttacctgtgttcgtgcggagcctccgaaggattttcaggcggtcgtcgtggtccctgacttccagttgaagacgaaggacgcgaggaactccctccctgcagagatatcgcacgaagatgccaccttcaacgtgggtagagcctgcgtggtgactgccgccatgctgcagggcgatctggacgcactagccgcggcgatggaagaccgtctccatcagcccttccggacttccctgatccctcactacgagggtgtcaccggggctgccctggatgccggcgctctcggcgtggccttgagcggagccggaccaacgatcttcgcgttcgcccgcgagaatgctcaggccatcggagatgcgatggccgccgtatggacggagaacggcatcgacgcaatcccgtacgctttgcccgtcgacctcgatggaactgtaatcgaatgaa

SEQ ID NO: 249064 - DNA, 565 bp, Unknown
  Bacterial polypeptide expressing nucleotide sequence isolated from the Sargasso Sea
gttgggtcgccaaatttcctgctgccatacagtgcggtattgcccctacgataaacaagcgctactcgaactcatgggcgagtttgagggcaagatcagcggaagcgtgcattacgacaacgtcgcgccctgttatttgggcggcatgcagctaatgctcaatgtgcccggcgctatctgtgaggcgattcccagttttaaacaatggtattgggtggtggcgtatcctggaatttcactctcaacggcaatgatgcgtaaactcatgccagcacaatacgataagtcggtggccatcgattttgggcgttatttgagtgcctttgtacacgcctcttatcagcaaaacgccaagcttgcgattcaagtattaaaggatgtattggctgagccttaccgcgcggcggcgattccgggttatgacaatgccagagcagcgctcgccgaattaggcatgttaactactggcatctcgggcagtgggccaaccctgttttctgtgactgacgatctcgccacagctaatgctgccaaagcttggttagaggctcattatcttgactga

SEQ ID NO: 249065 - DNA, 784 bp, Unknown
  Bacterial polypeptide expressing nucleotide sequence isolated from the Sargasso Sea
ctttttgaaaaaagagttcaaaaaaaagacttacctttctttatgaacttaatggacaagttaagcaaacataaaattaattgtccaaaacctcaaagaaataaaaaaggaagtttcttaataaaaattaaaaataaaactggctctattgtttcctttgttgaaggaaaagataagttaaaattaaacctgaaaaactgttatgaaataggaaaaaatatagctaaatttcatagagcatctaaaaaaataaaactttatagaaaaaactctttatctttaaaagatttgccaaaattattaaataaaattggaaataaatccaaaattataaaccctaatttaagtagtttaatgaaaaatagttttttagaaataaaaaataaatggccaaaaaatttaccttttggaattattcatgctgatttatttattgataatatcttttttaagaaaaacaaatttcatggatatatagacttctatttcgcgtgtaatgattttttaatgtacgaaattgctatttgtataaatgcgttatgttttgataaaaaaaataataaatttatatttaataagaaaaaatcaaaaaatcttattaaaggttattcaaaaataagaaaattctctgaaaaagaaaaaaaatctttaaacgtcttgtgtaaaggcgctgctcttagatatttattaacaagaacttacgattacttaaatactccaaaaagtgctattattaagataaagaatccaagagaatatattcaaaaacttaaagtacataatc

SEQ ID NO: 249066 - DNA, 571 bp, Unknown
  Bacterial polypeptide expressing nucleotide sequence isolated from the Sargasso Sea
aatgtctattcctgaagtaggtaaaaaaataagggtaacagtgccttccacaactgccaatttagggcctggattcgattgtcttggagcagcattagatttgtataatgagtttatttttacaagaattgaaggtggtggaaatagatttgatttaataatggaaagtacagatggtaatcacctaagaggaggacctgaaaacttagtttttagagcagctcagaaagtatgggagagcgcaaaaatggatccttttgcacttgaagcaagagttaaattggcagtgccgcctgcacgcgggctaggaagtagtgctacagcaatagttgctggactaataggagcaaatgcaataatgaactctccattatccaaggaaaaactccttgaacttgccattgatatagaaggtcatcctgataatgtagtgccctctcttctgggtgggctttgtttgacagcaaggtcttcttctaagagatggagaatcattagatgtgattggcatgattcaattaaagctgttgtagcaataccggcaattcgtctaagtacaagcgaagcaaga

SEQ ID NO: 249067 - DNA, 532 bp, Unknown
  Bacterial polypeptide expressing nucleotide sequence isolated from the Sargasso Sea
atgtctattcctgaagtaggtaaaaaaataagggtaacagtgccttccacaactgccaatttagggcctggattcgattgtcttggagcagcattagatttgtataatgagtttatttttacaagaattgaaggtggtggaaatagatttgatttaataatggaaagtacagatggtaatcacctaagaggaggacctgaaaacttagtttttagagcagctcagaaagtatgggagagcgcaaaaatggatccttttgcacttgaagcaagagttaaattggcagtgccgcctgcacgcgggctaggaagtagtgctacagcaatagttgctggactaataggagcaaatgcaataatgaactctccattatccaaggaaaaactccttgaacttgccattgatatagaaggtcatcctgataatgtagtgccctctcttctgggtgggctttgtttgacagcaaggtcttcttctaagagatggagaatcattagatgtgattggcatgattcaattaaagctgtgtagc

SEQ ID NO: 249068 - DNA, 376 bp, Unknown
  Bacterial polypeptide expressing nucleotide sequence isolated from the Sargasso Sea
aatgtctattcctgaaataggtaaaaaaataagagtaacagtaccttccacaactgctaatttagggcctggattcgattgtcttggcgcagcattagatttatataatgaatttatattcacaagaattgaaggtggtggagatagatttgatctgataatggaaagtacagatggtaatcacttaagaggaggacctgaaaacttggtttttagagcggctcagaaagtatgggagagcgcaaacatgaatactttcgcacttgaagcaagagttaagttagcagtaccaccagcacgagggctgggaagcagtgcaaccgcaatagttgcgggactaatcggagctaatgcaataatgggctctccgttgccc

SEQ ID NO: 249069 - DNA, 349 bp, Unknown
  Bacterial polypeptide expressing nucleotide sequence isolated from the Sargasso Sea
tatgtcttctccagaagtaggaaaaaaaattatagtaacagttccttctacaactgctaatttaggtcctggattcgactgtctaggcgcagcgttagatttatataacgaatttatatttacaagaatagatggaggcggggatcgatttgatttgataatggagagtactgatggtaatcatttaagaggaggcccagaaaatttagtttttagggctgcacagaaagtatgggaaagtgcaaatatcaaaccttttgcccttgaagctagagtgaaattagcagttccccccgctcgcggactagggagtagtgccacagcaatagttgcgggactaatcggagca

SEQ ID NO: 249070 - DNA, 670 bp, Unknown
  Bacterial polypeptide expressing nucleotide sequence isolated from the Sargasso Sea
gttggcagtgcctcctgcacgtggacttggcagcagtgctacggcaattgttgctggattaattggagcaaatgcgataatgaactccccattgtccaaagaaaaactacttgaacttgccattgatatagaaggtcatcctgataatgtagttccctctctcttaggtgggctttgtttgaccgcccgatcttcttctcaaagatggagaatcataagatgtgattggcacgattccattaaagctgttgtagcaatacctgcgattcgtcttagtacaagtgaagcaagaaaggttatgccaaagaatatacctatatctgatgcagttacaaatatgggggcacttactttattactaaatggcttaaaagcaggaaatgatgaactcataaaagagggaatgtttgataggttacatgagccctatagatggaaacttattaaaggtggactagaagtcaaggatgcagcattacaagcaggtgctttaggatgcgcaataagtggagctggaccaagtatcttagctttgtgtaaaaaagaaaatggtaaacttgttagtaaagcaatggtaaaagcctgggaaaaggcaggtgtagcaagtagagcaccattcttaaacgttcaaacaaaaggcagtcaatttagcactatctctagtaagtag

SEQ ID NO: 249071 - DNA, 946 bp, Unknown
  Bacterial polypeptide expressing nucleotide sequence isolated from the Sargasso Sea
gatgggaaaaccggagattggcaccaccgtggtggtggatgtccccgctacgactgccaatctcgggccaggatttgattgcctcggtgcagcccttgatctgaacaaccagtttcagctcaaagttctcgagggcggcgccgaacgcttcgaactgatcattgaaagcaaggagggatcccacctacgtggcggcccagacaaccttgtctaccgagcagctcagcgggtctggcgagaagtggggatgcagcccatcgccctagaagctcgcgtccagctagccgtgccaccagcgcgcggcatgggcagcagtgctaccgcaatcgtggctggcttgatgggtgccaatgccttagctggtgaggccctgggcaaagagaagttgttggaactggcgatcgatatcgaagggcaccccgacaacgtggtgccttccttgctgggcgggctctgcctcacagcgcaggccgcctcacgccgctggcgcgtggtgcgctgtgagtggcacgagaacgtgcaagccgtggtggccatccccagcattcgcctctcgaccgcagatgcccggcgagcgatgccaaaacagatcgtggtccctgatgcagtgtccaatttgggttcgctcaccctgctgttgcagggattgcgcagtggcaatggcgacctgatcaccgatggcatgcatgaccggctgcatgagccctaccgctggcccctgatccaagggggcagcgccgttcgtaaggcggccatggacgctggagcctggggttgcgtgatcagtggcgctggaccaagcctgctagcgctttgcctccctgagagagggcaagcggtggccgaagcgatggaaaggcagtgggagcaagagggggtcaacacccgtgcactaccgctgaagctgcaaagcggaggcagccgctggaggcccaaagacacctga

SEQ ID NO: 249072 - DNA, 899 bp, Unknown
  Bacterial polypeptide expressing nucleotide sequence isolated from the Sargasso Sea
tacagccaatattggtccaggatttgattgccttggtgcagcattagatctttccaatcagttcactattaaaaggattgagggtaatgctgaaaggtttgaattaataatggaaagtactgaaggtaatcatttaagaggcggccctgagaatcttttttatcgagccgcgcaaagagtttggagaactgcaggtgtagagcctgtcgctcttgaagcaagagtaaaattagctgtgcctcctgcaagagggcttggaagcagtgctacagcaattgtggcaggattagttggagcaaatgcacttgctggatatcctttgcctaaggaaaaattattagagctggcaatagatatagaaggtcatccagacaatgttgttccgtcgttaataggaggtctttgcgtaacagctaaaactgcaaacgacagatggcgcgtagtccgctgtgattgggatcaatcaataaaagcagtagttgcaatcccatctattcgccttagcaccagcgaagcaaggcgtgtcatgccagaaaacattccagtaaatgatgcagtaatcaatttaggagccctcacgcttctgcttcaaggactaaggactggaaatgaggatctaattgcagatggcatgcatgacaagcttcatgaaccatacagatggggattgatcaaaggtggattagaagtaagagaagcagcaaaggctgccggagctttaggatgtgcaattagtggagcaggtccaagcattcttgccttgtgcaaagcgactaaaggccgagaagtcagtgtcgcaatggtcaaagcctgggaagctgctggtgtagcaagtcgtgctcctttaatgagcctccaactcagagggagcgaatgtatttcaaacacctttgggtagt

SEQ ID NO: 249073 - DNA, 907 bp, Unknown
  Bacterial polypeptide expressing nucleotide sequence isolated from the Sargasso Sea
atgaatagtgtaaatgtgaaagctcctgcgacgactgcgaatttaggtcccggatatgattgcttagggatggctctggatttatggaatgagttagaaattaggttgttggagtcagaagacttaagtatttttgtcaaaggtttcggtgaaggaactgttccattaaataacgataatctcatttataaagcgatacagtttttatattcggaactagaaattcctgtacctggtatggtcataaattgcactaataatattcctttaaacagggggcttggaagtagctcagctgccattgtttctggtttggtagcagctaatgaattgtgtggtaatccgtatcaaattaacgagattctggagatggcagtggagatagaaggccatccagacaatgtgactccgtgcatctatggtggatgcaggttaattgccgtagaagaaaaaaatatttacacagtgcctatccctatacctgctgatttggatgccattgttttcattccagatgttgaaattagtactgaagaggctagaaacattttgcctgacacgttaagttacaaagatgcggtatacaatatgtctagggttgggctgttggtagctggcttattttctaataatccagattatttcaatgtggccactcaggatagattgcatcagccttataggcaagaaatattcaggcctatgaaagtgattttcaaaggtgctttggacgggggggctactggcgtttttttatctgggagcggctcaactgttatagctttctctaaagatagacaaatgacagttgggtatgaaatggcagaggctgctcgtcagtgtggattggaagggacattaaaggtccttaaaacttccaatataggatgtcatgttacaaaatgat

SEQ ID NO: 249074 - DNA, 940 bp, Unknown
  Bacterial polypeptide expressing nucleotide sequence isolated from the Sargasso Sea
atgagtttgaccgtttacgctcccgcctctatgggtaatgtgggggtgggctttgatttattgggcgcggcacttgcccccatcgatggcagtttactcggcgatagagtcacgattgcggcggcggatgcgggggtgagcctcactcaagtgggagcttgggcgcataagttacccagcaatcccgaggaaaatatcgtccatcaatgcgcggtgtttttcttaaaagctcttgggaaagaaaaccaaggcgtggcattaaccctagaaaaaaacttgcccgtcggcagtggcttaggctcgagcgccagttctgtggttgcagcgctttatgcgctgaacgagcattttgagcgcccctacgataaacaagcgctactcgaactcatgggcgagtttgagggcaagatcagcggaagcgtgcattacgacaacgtcgcgccctgttatttgggcggcatgcagctaatgctcaatgtgcccggcgctatctgtgaggcgattcccagttttaaacaatggtattgggtggtggcgtatcctggaatttcactctcaacggcaatgatgcgtaaactcatgccagcacaatacgataagtcggtggccatcgattttgggcgttatttgagtgcctttgtacacgcctcttatcagcaaaacgccaagcttgcgattcaagtattaaaggatgtattggctgagccttaccgcgcggcggcgattccgggttatgacaatgccagagcagcgctcgccgaattaggcatgttaactactggcatctcgggcagtgggccaaccctgttttctgtgactgacgatctcgccacagctaatgctgccaaagcttggttagaggctcattatctgactgaagcggggggctttgcccatgtgtgccgcctcgatgagcaaggcacgcgccgagtcgattaat

SEQ ID NO: 249075 - DNA, 940 bp, Unknown
  Bacterial polypeptide expressing nucleotide sequence isolated from the Sargasso Sea
atgagtttgaccgtttacgctcccgcttctatgggtaatgtgggtgtgggctttgatttattgggcgcagcattggcgcccatcgatggcagtttactaggcgatagagtcactattgcggcggcggacgcgggggtgagcctcactcaagtcggagcttgggcgcataagttacctagcaatcccgaggagaatatcgttcatcaatgcgcggtgtttttcttaaaagcccttgggaaagaaaaccaaggcgtggcattaaccctagaaaaaaacttgcccgtcggcagtggcttaggctcgagcgccagctctgtggttgctgctctttacgcgcttaacgagcattttgagcgcccatacgataagcaagcgctactcgaactcatgggcgagtttgagggcaagatcagcggaagcgtgcattacgacaacgtcgcgccctgttatttgggcggcatgcagctgatgctcaatgtgtccggtgcaatctgcgaggcgatccccagttttaaagaatggtattgggtggtggcgtatcctgggatttcactctcaacggccatgatgcgtaaactcatgccagaacaatacgataagtccgttgccatcgattttgggcgttatttgagtgcctttgtacacgcctcttatcagcaaaacgccaagcttgcgattcaagtcttgaaggatgtgttggccgaaccttaccgcgcggcggcaataccgggttatgacaacgccagagcagcgctcgccgaattaggcatgttaactactggcatctcgggcagtgggccaacgctgttttcggtgactgacgatctcacgaccgctaacgccgccaaggcgtggttagaggctcattatctgaccgaagcggggggctttgcccatgtgtgccgcctcgatgagcaaggtacgcgccgagtcgattaat

SEQ ID NO: 249076 - DNA, 505 bp, Unknown
  Bacterial polypeptide expressing nucleotide sequence isolated from the Sargasso Sea
gatggcgcagccgcgcatcggtcagaaagtggttgtggatgttccggcaaccaccgccaacctcggaccgggcttcgactgccttggtgccgccctcgatctcaacaaccgctttgccatgcggcggatcgaaggcagcggtgagcgattcgaactgattatcgagggcaccgaaggcagtcatctgcgcggtgggcccgacaacctcgtctaccgggcagctcaacgggtctggaaagccgcgaacatggaacctgtggccctggaagcaagggtccgtctggcagtgccgccagcgagggggctgggcagcagtgccaccgccatcgtcgccggactgatgggagccaatgcgctcgtcggtgaacccctcagcaaggaaaaactgctggagctggccatcgacatcgaggggcatcccgacaacgtcgtgccctctttgcttggagggctctgcatgaccgccaaggctgcctctcagcggtggagggtggtgcgttgtgaa

SEQ ID NO: 249077 - DNA, 490 bp, Unknown
  Bacterial polypeptide expressing nucleotide sequence isolated from the Sargasso Sea
gatggtcaaagtatatgccccggcttccagtgccaatatgagcgtcgggtttgatgtgctgggcgcggcggtaacgccggtcgatggcaccctgctgggggacaacgtttcggtcgaggcggcggacagcttcagcctgcaaaacgttggccgctttgccagcaagctgccctccgtgccgcaggagaacattgtttaccagtgctgggagcgtttctgccaggagatcggcaaaaaagttccggtgtcgatggtgctggaaaaaaatatgccgattggttccgggctcggttccagcgcctgctctgtcgtcgccgcgctggtggcgatgaatgaattctgcggtaagccgctgaatgagatgcgtatgctggcgctgatgggggagatggaagggcgtatttccggcagtatccactatgacaacgttgcgccctgctacctgggcggcatgcagctgatgattgaagagaatggcatcatcagccag

SEQ ID NO: 249078 - DNA, 949 bp, Unknown
  Bacterial polypeptide expressing nucleotide sequence isolated from the Sargasso Sea
atggcgcagccgcgcatcggtcagaaagtggtcgtggacgtcccggcaaccaccgccaatctcggccccggatttgactgcctcggtgcagccctcgacctgaacaaccgattcgcgatgcggcggatcgaagggggcggtgaacggtttgagctgattattgagggatcggaggggagccacctccggggtggtcctgaaaacctcgtgtaccgcgcggcccaacgggtgtggaaagcggctggcctggaacccgttgctcttgaagcacgggtgcgtcttgccgtgccaccggcacgggggctgggcagcagtgccacggccatcgtggcgggattgatgggagccaatgccctcgtcggtgagcccctatccaaggaaaagctgctcgagctggccatcgacatcgaagggcatcccgacaatgttgtcccctcccttctggggggcctctgcatgaccgcaaaagccgcatctcagcgctggcgcgtggtgcgttgcgaatgggcgccaagcgtgaaggtcgtcgtggcgattccatcgattcgcctgagcaccagcgaagcccgccgggccatgcccaagacggttcccattggcgatgctgtggtcaacctgggtgccttaacgcttctgctgcaggggctgcgcaccggcaacggtgatctgatctccgacggcatgcacgatcgtttgcacgagccttaccgctggcggctgatcaaaggcggtgaccaggtcaaacaggcagccatggaggcgggcgcctggggctgcgccatcagcggagccggaccgagcgtcctggctctgtgcgaggaagacaaaggccctgccgtgagtcgcgccatggtcaaggcctgggaagcggcaggggttgccagccgcgcgccggtgctgaatttgcagacctcaggcagccactggcaaccggccgaggatgagtaga

SEQ ID NO: 249079 - DNA, 928 bp, Unknown
  Bacterial polypeptide expressing nucleotide sequence isolated from the Sargasso Sea
atgtcgcagccgcgcatcggtcagaaagtggtggtggatgttccggcgaccactgccaacctcggaccgggcttcgactgccttggtgccgccctggatctcaacaaccgctttgccatgcggcggatcgaaggcagcggtgagcgattcgaactgattattgagggcaccgatggtagtcacttacgcggcgggcccgacaacctcgtctaccgcgcggctcaacgggtctggaaagccgcaaacatggaacctgtggcgctggaagccagggtccgtctggcagtgccgccagcgagggggctgggcagcagcgccaccgccatcgtcgccggactgatgggagccaatgcgctcgtcggtgaacccctcagcaaggagaaactgctggagctggccatcgacatcgaggggcatcccgacaacgtcgtgccctctttgcttggagggctctgcatgaccgccaaggctgcctctcagcggtggagggtggtgcgttgtgaatggatcagcagcgtcaaggccgttgtggccattccatcgattcgcctgagcacgagcgaagcccgtcgagccatgccgaaggcgatccccgtcagcgatgccgtggtcaacctgggagcgctcaccctgttactgcagggtcttcgcaccggtaatggtgatctgattgcggatggcatgcacgaccgcctgcatgagccctatcgctggcgcctgatcaaaggcggggatgacgtcaaagccgcggccctggaggcgggagcctggggatgcgccatcagtggggctgggccgagcatcatcgccctttgcgccgaagacaagggccaggccgtgagcagggccatggtcaaggcctgggaagctgccggcgtggccagccgggctcctgtgctgaatttgcagacctccggaagccacggca

SEQ ID NO: 249080 - DNA, 949 bp, Unknown
  Bacterial polypeptide expressing nucleotide sequence isolated from the Sargasso Sea
aatgtctattcctgaagtaggtaaaaaaataagggtaacagtgccttcaacaactgccaatttagggcctggattcgattgtcttggagcagcattagatttgtataatgagtttatttttacgagaattgaaggtggtggagatagatttgacttaataatggaaagtacagatggtaatcacttaagaggaggacctgaaaacttagtttttagagcagcgcagaaagtatgggagagcgcaaaaatggatccttttgcacttgaagcaagagttaaattggcagtgccgcctgctcgcgggctaggaagtagtgctacagcaatagttgctggacttatcggagcaaatgcaataatgaactctccattatccaaagaaaaactccttgaacttgccattgatatagaaggtcatcctgataatgtagtgccctctcttctgggtgggctttgtttgacagcaaggtcttcttctcagagatggagaatcattagatgtgattggcacgattcaattaaagctgttgtagcaatacctgcaattcgtctaagtacaagtgaagcaagaaaggttatgcccaagaatgtacctatatcagatgcagtgacaaatatgggggcgcttactttgttacttaacggcttaaaagcagggaatgcggaacttataaaagaaggaatgtttgataagctacatgaaccctacagatggaaacttattaagggtggattagaagttaaagatgccgcactaaatgcaggtgctctaggatgcgcaattagtggggctgggccaagtatcttagctttgtgtaaaaaagaaaatggtaaaaacgtcagtcaagccatggtgaaagcatgggagaagtcaggtgtagctagcagagcgccattcttaaacgttcaaacaaccggcagccaatttagcactatctctggtaagtag

SEQ ID NO: 249081 - DNA, 949 bp, Unknown
  Bacterial polypeptide expressing nucleotide sequence isolated from the Sargasso Sea
aatgtctattcctgaagtaggtaaaaaaataagggtaacagtcccttcaacaactgccaatttagggcctggattcgattgtcttggagcagcattagatttgtataatgagtttatatttacaagaattgaaggtggtggagatagatttgatttaataatggaaagtacagatggtaatcatttaagaggaggacccgaaaatttagtttttagagcagctcagaaagtatgggagagcgcaaatatggatccttttgcacttgaagcaagagttaagttagcagtgccgcctgcacgcgggcttggaagtagtgctacagcaatagttgctggattaatcggagcaaatgcaataatgaactctccattgcccaaagaaaaactccttgaacttgccattgacatagaaggtcatcctgataatgtagttccctctcttctgggtggactttgcttgacagccaggtcttcttctcaaagatggagaatcattagatgtgattggcacgattcaattaaagctgttgtagcaatacctgcaattcgtctaagcacaagtgaagcaagaaaggttatgcccaaaaatgtacccatatctgatgcagttacaaatatgggggcacttactttgttactaaacggcttaaaagcaggtaatgcggaacttataaaagagggaatgtttgataagttacatgaaccctacagatggaaacttattaagggtggattagaagttaaagatgccgcactaaatgcaggcgctctaggatgtgcaattagtggggctgggccaagtatcttagctttgtgcaaaaaagaaaatggtaaaaacgtcagtcaagctatggtaaaagcatgggagaagtcaggtgtagctagcagagcaccattcttaaacgttcaaacaaagggcagccaatttagcactatctctggtaagtag

SEQ ID NO: 249082 - DNA, 949 bp, Unknown
  Bacterial polypeptide expressing nucleotide sequence isolated from the Sargasso Sea
aatgtctattcctgaagtgggtaaaaaaataagagtaacagtaccttccacaacagctaatttggggcctggcttcgactgccttggcgcagcattagatttatataatgaatttattttcacaagaattgaaggtggtggagatagatttgatttaataatggaaagtacagatggtaatcatttaagaggggggcctgaaaacttagtttatagagcggctcagaaagtatgggagagcgcaaatatggcttcttttgcccttgaagcaagagttaagctggccgtacctcctgcacgcgggcttggaagtagtgctacagcaatagttgctggactaatcggagcaaatgcaataatggactcccccctgagcaaagaaaaacttctggaacttgcgattgatattgaaggtcatcctgataatgtggttccatctctattgggggggctttgtttgacagccaggtcatcttctcaaagatggagaattataagatgtgattggcacgattccattaaagctgttgtagcaatacctgctattcgattaagcacaagtgaagcaaggaaagtaatgcctaagaatgtaccaatatctgatgcagtgacaaatatgggggcacttactttattacttaacggcttaaaaacaggaaataatgaattaataaaagagggcatgtttgataagctacatgaaccatacagatggaaacttattaaaggcggactggaagtcaaagatgcggcacaaaaagcaggtgctttagggtgcgcaattagtggggcaggaccaagtatcttagctttgtgtaaaaaggaaaatggcaaaagcgtcagtcaagcgatggtaaaagcttgggagcaattaggtgtggcaagtagggcaccatttttaaaccttcaaacaacaggcagtcaatttagtactatctctagtaagtag

SEQ ID NO: 249083 - DNA, 949 bp, Unknown
  Bacterial polypeptide expressing nucleotide sequence isolated from the Sargasso Sea
aatgtctattcctgaagtaggtaaaaaaataagggtaacagtgccttccacaactgccaatttagggcctggatttgattgccttggagcagcattagatttgtataatgagtttatttttacaagaattgaaggcggtggagatagatttgatttaataatggaaagtacagatggaaatcatttaagaggaggacctgaaaacttagtctttagagcagctcagaaagtatgggagagcgcaaatatggatccttttgcacttgaagcaagagttaagttggcagtgccaccggcacgagggcttggaagtagcgctacagcaatagttgctggactaatcggagcaaatgcaataatgaactctccattgtccaaagaaaaactccttgaacttgcaattgatatagaaggtcatcctgataatgtagttccttctcttctgggtgggctttgcttgacagctaggtcttcttctcagagatggagaatcattagatgtgattggcacgattcaattaaagctgtagtagccataccggcaattcgtctaagcacaagtgaagcaagaaaggttatgcccaagaacgtacctatatatgatgcagtgacaaatatgggggcacttactttgttactaaacggcttaaaagcaggtaatgcggaacttataaaagagggaatgtttgataagctacatgaaccatacagatggaaacttattaagggtggattagaggttaaagatgcagcactaaatgcaggtgctttaggatgcgcaattagtggggctgggcccagtatcttagctttgtgtaaaaaagaagatggtaaaaacgtcagtcaagccatggtgaaagcatgggagaagtcaggtgtagctagcagagcaccattcttaaacgttcaaaaaactggcagccaatttagcactatctctgctaagtag

SEQ ID NO: 249084 - DNA, 970 bp, Unknown
  Bacterial polypeptide expressing nucleotide sequence isolated from the Sargasso Sea
atgactgaaggcggcagcgtggtggcctatgcccccgcctccagcgccaacctgagcgtgggattcgatgtattgggggcggcgctcgcccccgtggatggctctctgctcggggatcgcgttcaggtcaaggcagctgatgtgccgtttgccctctcctccgtgggccgttacgcccacaagttgccggctgacccgaaaaagaacatcctccatgactgctggctcgcctatggcgaggtgctggagaagcggggccttggtctcaagccgctcgaaatggtgctggagaagaatctgccggtgggctcgggcctgggttccagcgcctgcagcgtggtggcggcactggaagggctcaacgcctttcacggcgcccccctcaatgaacacgacctgctgctgctgatgggggagatggaaggcaagatctccggctccgtccactacgacaacgtcgccccctgttatctgggcggcatgcagctggtgctggaagagcacggcgtcatcagccagggcattccggtgtttgaacagtggtactgggtggtctgctacccgggcactgtggtttcgaccgctgccgcccgcgccattctgccggcccagtatcgccggcaggattgcctcacctatggccgtcggctggccgccttcgtgcacgccagctacaccgggcaggaggggctggcggcgagtgtactcaaagacgtgattgccgagccctaccgcgcggcgctcattgaaggttttgccgaggtgcgggcccaggccgcccagaacggggcgctggccaccggcatctcgggctccggccccagcgtgttcgtggtgatgaaggatctggcccaggccgagcggatgaaagattggatggatgcacattttgtgcagaacgaagatggatttgcccgggtttgcaaactcgacatggccggggcacgggtaacaggaagcgagctatgaa

SEQ ID NO: 249085 - DNA, 772 bp, Unknown
  Bacterial polypeptide expressing nucleotide sequence isolated from the Sargasso Sea
atgattgaagtatatgcgcctgcatctattggtaattttgcagttggatttgatgcgctaggtgctgctcttgcgccaattgatggtagtttattgggggatgtagcacttgttagcgcagccccttgtgatgagtttgtttgttcaggcgaatatgctcataaattaccaagcgatgcgaaagaaaacttagcttatcagtgtctagtgcactttagagctcatgtcgcaccagatatgccaacggtaaagctagagcttaaaaaaaacctgccaattggttctggattaggatcgagtgcttgttcggtggttgctacatttgcagcgcttgataagtttgcaaaaacacagttaagtcaagtacagctaattgagttgatggcagattttgaagccgttgtaagtggcggacgccattacgataatattacgccgtgttatttaggcggtttgcagctaactggcgatttaattcctaataaatctatagaactacctgttgatgaaaactggtattacgttgcggcgtttccaggcttttcgcttaatacagcaaaagcgcgttctgttttgccaaaagatcttagtatgcatgcaagcgttgagtttgcgcagcgtttatcatcttttagtagcttgttattaacagcacgttttgacgatgcattaagcataatgaaagacgaaatagcagaaccttaccgtgcaccgcttattactggttttagcgaggcgaaaagcagtttacccgcattggagctgaggtagt

SEQ ID NO: 249086 - DNA, 949 bp, Unknown
  Bacterial polypeptide expressing nucleotide sequence isolated from the Sargasso Sea
gatggcgcagccgcgcatcggtcagaaagtggtggtggatgtgccagcgaccaccgcaaacctcggaccgggcttcgactgcctgggtgccgccctggatctcaacaaccgctttgcgatgcggcggatcgaaggaagcggcgagagattcgaattgatcatcgaaggcacggagggcagtcacttgcgcggcgggcctgacaacctcgtctatcgggctgctcaacgggtctggaaggccgcgaacatggagcccgtcgccttggaagcacgggtccgtctggcggtgccgccagcgagggggctcggcagcagcgccaccgccatcgtcgccggactgatgggagccaatgccctcgtgggtgaacccctcagcaaggagaaactgctggagctggccatcgacatcgagggccaccccgacaacgttgtgccctcgttgctgggagggctgtgcatgacggccaaggcggcctctcagcgatggagggtggtgcgctgcgaatggatcaacagcgtcaaggccgtggtggccattccatcgattcgcctcagcaccagtgaagcccgtcgggcgatgccgaaggccatcccggtcagcgatgccgtggtcaatctgggggcactcaccctgttgctgcagggacttcgaaccggcaacggtgatctgatcgccgatggcatgcacgaccgcctacatgagccgtaccgctggcgcctgatcaagggcggagacgaggtcaaagccgcagcactggaggcaggggcctggggatgcgccatcagcggagcggggccgagcatcattgccctgtgcacagaagacaaaggcctggccgtgagtcgggccatggtcaaggcctgggaaagtgccggtgtggccagccgggctcccgtgctgaatttgcagacctcaggaagtcactggcagcccgccgaacctgggtag

SEQ ID NO: 249087 - DNA, 949 bp, Unknown
  Bacterial polypeptide expressing nucleotide sequence isolated from the Sargasso Sea
aatgtctattcctgaagtaggtaaaaaaataagagtaacagtaccttccacaactgctaatttagggcctgggttcgattgtcttggtgcagcattagatttatataatgaatttattttcacaagaattgaaggtggtggagatagatttgatttaataatggaaagtacagatggtaatcacttaagaggggggccagaaaacttagtttttagagcggctcagaaagtatgggagagcgcaaatatggatccttttgcactagaagcaagagttaagttggcagtgcctcctgctcgcggacttggaagtagtgccacagcaatagttgctggactaataggagcaaatgcaataatgaattgcccattgtccaaggaaaagctgcttgaacttgccattgatattgaggggcatcctgataatgttgttccttctctactaggtggactttgtttgacagctaagtcttcttctcaaagatggagaatcattagatgtgattggcacgattcaattaaagcagttgtagcaatacctgcgattcgtctaagcacaagtgaagcaagaaaggttatgcctaaaaatgttcctatatctgatgctgtgacaaatatgggggcaattactctgttactaaatggcttaaaagcaggaaatgaagaactaataaaagagggcatgtttgataagctacatgaaccctacagatggaaacttattaaaggtggactagaagtcaaagatgccgcactaaatgcaggtgctttaggatgcgcaattagtggggctggacctagtatcttagctttatgtaaaaaagaaaatggtaaaaacgttagtcaagccatggtaaaagcatgggaaaagtcaggtgtagcaagtagagcaccatttttaagcgttcaaacaacaggaagtcaatttagtaccatctctagtaagtag

SEQ ID NO: 249088 - DNA, 958 bp, Unknown
  Bacterial polypeptide expressing nucleotide sequence isolated from the Sargasso Sea
atgcagcagtggagtagcaaggtgacgaatcgtgtgtgggtaatgggggatgcggtggtggacttgatcccggaaggggagaggcactacctccagtgtccgggtggtgcgcctgccaatgtggcggtcggtgtggctcggcttggtggcgatgcggcctttatcggccgggtcggcggtgatccgtttggccgcttcatggccgacaccctgagcggggagggggtggatatcgccgcgctgcggctcgatcctgaccatcgcacctctaccgtgctggtggcactggatgaagagggggagcgcagcttcaccttcatggtgcgtcccagcgccgaccagttcctcaccccgaatgagttgccccgcttcgacgccggtcagtggctgctgacctgctccattgcgctcgccaacgaaccggtgcgcggcagttgcctgcaggccatggcggccatcaaggcggccgggggacgggtctgcttcgaccccaacctgcgccccgaggtatggggcaacccggccgagatgctgccgctggtgcgcgaagccatcgcgcaggcagatgtggtcaagctgtcggtggaggagctgcagctgctgagtggtctggatgatctggcggcggggctcgccaccatggcggggccggcgctggtgctggtgacccggggggcggccggtgtggtggcccgtttggatggcgagttgctggagtgggtggggcccaaagtgacgcccatcgacaccacgggggcgggggatgccttcgtcgccggtctgctggcggccctggccgggcgttcgtcgctgccgacgctggccgagctgcctgccatcctggtacaggcccacggctgcggggcgctcgccaccaccgccaagggggcgatgacggcgctgccgactcgtaccgaactggatgaatttttgcgatcaggcacaagtggctgttgat

SEQ ID NO: 249089 - DNA, 883 bp, Unknown
  Bacterial polypeptide expressing nucleotide sequence isolated from the Sargasso Sea
atgaaagcaaaagtttgggttctgggcgacgcagtggtggacctgctaccggagagtgaagggcgcttgctacagtgccctggaggcgcgccggctaacgtggcggtaggggttgcccgccttggcggcaacagcggatttatcggccgcgtcggcggtgacccgtttggccgctacatgcgtcataccctgcaacaggagcaggtcgacgtcagccatatgtatcttgacgatcatcaccgcacgtccactgtggtggtcgaccttgatgaccaaggtgaacgcacctttacctttatggtacgccccagcgctgacctgttcctggctgaagaagacctgccacagtttgccgccggacagtggttgcacgtctgctccatcgcgctcagcgccgagcccagccgcagtgctaccttcgcggctatggagaacatcaagtctgtcggcggtcggatcagctttgaccctaatattcgtcctgatctctggcaggatcaggctttgctgcaagcctgcctcgatcgcgctttgtccatggcaaacgtggtaaagctatcggaagaggagctggtcttcatcagcggcagtaaagatttagcatacggaatcgccagcgtaacagagcgctatcagccggaattgctactggtgacgcggggcaaagcgggggtgcttgccgcttttcagcagaagtttacccatttcagcgctaaaccggttgtcagcgtggataccaccggtgcgggcgatgcgtttgtcgccggactgcttgccagccttgctgccaacgggatgccggcggatatcaatgccctggagccaacgctcgctctggcgcaacctgcggtgccctggcaaccctggcgaaaggcgcgatgac

SEQ ID NO: 249090 - DNA, 910 bp, Unknown
  Bacterial polypeptide expressing nucleotide sequence isolated from the Sargasso Sea
ttgaataaaaacaaaacaaaaatcattgcaacagtaggtccaaattgttcggatcaaaaatatctcattgacatggtagccaaaggagtaagctgctttagaatcaatttatctcatggaagccaaaaagaaaaaaaagactattttagtttaattaattctctgaaaatcaatggtagtgaaataagacctcctatactagctgatttagctggcccgaaggttagagttcgaagacttgagaagtctattgtattagatgaaggtgatagtattattatcagcagtgggaaacgtggtgatggtataataccagtatccaaaggtttggtttttgattctgtagagtctggttcaaaagttatgattaatgatggtaaagtatgtctaaaagttataaagaaattatctagtgaagcttttgagtgtaaaactctagtaggaggtaagataaaaggaaaaaagggagtcaatttcattggaattacccttaatgtcccaagtcttacagagcaagatgaattagatttagagttagctcttaaaaatggtgcggactggatagctttatcttttactcgatccaaagatgatttttctttgataagatctaaaataaaagagctcggatatgacgttccaataatggcaaaaatcgagaagtgggaagcggtaagtaatttggatgatataatccaaacctttgatggtgtcatggttgcaagaggtgatcttggagtagaaataccacttgagcgtgttcctgtagttcaaaaagagattattaaaaaggccgcgctttttggcaagccagtgattattgctactcaaatacttgattctatgataaaaatgcctgttccaactagagcagaagttagtgatattgcaaattcaatattagatggtg

SEQ ID NO: 249091 - DNA, 379 bp, Unknown
  Bacterial polypeptide expressing nucleotide sequence isolated from the Sargasso Sea
ttggaatattcaatacaaaaatttattaagaaaaggcctaaaacaaagatagtatgcactataggacctgcttcaagtgagctaaaaactttaaaaaaaatgatttctgaaggaatgtctgttgcgagactaaatttatctcacggcacaattaatcaacataaattgtatgttgaaaatgcaaagcaagctgccctcgaattagatgccccattaggaatattaattgatatcccgggacctaaatatagagttggaaaaattattggagactccgttgatataaaaaaggggcaaaaaataattcttggaaatgaaactatactagatggaaaaattttaaaattgaaagtttggcccccacggtatttcaaaagaa

SEQ ID NO: 249092 - DNA, 841 bp, Unknown
  Bacterial polypeptide expressing nucleotide sequence isolated from the Sargasso Sea
ttgtcctttgttagaaatgcttctgatataaatgatttaaaaaaggttcttaaaaacaaagctaaaaaagtaaaaattatttcaaagattgaagacagagaagggttatcgaatattgaagaaatttgtgaagtttctgactccgtcatggtggctcgaggagacttaggcattgaaacagatcttgcaaatttaccaaatattcaaagaaagataatgtctaactgtgcaaaatacggagtgaggtctattgtagctactcaccttcttgaatcaatgattgataatcctacacccacaagagcagaagttactgatgttgcaaatgcaatttatgaaggagctgatgcagttatgctttcaggtgagaccactatcggaaaatatccaattgagtctgttaaattcatctcaagaattgcaaagcaaacagaaaaatatagaactcttggctatgaaagccaactaatatcaaaaacagactggcagcatcttggagtggcagcaaaggatattgctgaatctattaaggctgatgggattattgcaatcactcgatcaggtcaaactgctgaaattgtagctaatgctaaaccttttatgatccctatatttgcattcagcaataataaaaaaactattaaacaattatctttaactggttcagttcatgcatataaatcatctatgtactcagatcacgaaaagaaccttcaatcaattatgaaaattttaaaaaaagaactttcacctacaagagagttaaaatttgttgtgatttcaggaattctttcagaaaattctgctgatgcgatagaagtaagatcattgaatatgtaac

SEQ ID NO: 249093 - DNA, 184 bp, Unknown
  Bacterial polypeptide expressing nucleotide sequence isolated from the Sargasso Sea
tatccaaagaaatattattaaaattgcctcttcgaaaggtaaaaaatcaattgttgcaactcaattactagaatcaatgattgatagtccccatccatcgagagcagaagtctcagatgtggcaaatgctgtttatgagggcacagatgcattaatgctttcaggcgaaacaagtattggcaaa

SEQ ID NO: 249094 - DNA, 725 bp, Unknown
  Bacterial polypeptide expressing nucleotide sequence isolated from the Sargasso Sea
attggcgaataaagtagcaccaaaagctgacgagcaattaagaaaaaccaagatcatttgcaccataggaccggccacagccagtttccagaaaataaaggctttaaggaacgcgggcatggatttagttcggttgaacatgtcgcattcctcccacgcagaggcgaaaaaagttattgattgggtaaataagcttaaccaaactggggagtcgccggtttcagttttattggatacacaaggcccggagattcgcacgggagagctaaagaacccgataaaattaaaaactggacagattgtttcgctaacggtcagagatgctgatttggttgaaacccagtcgattcttgtgaactacgaggagatagtcgatgtcgttgacgttggttcgctgattaccttggataatggtcttcttaatttcgaggtattagagaaaaaaggaggacagctggtatgccgagttttggatggcggaaccctaggaagccgcaagcacgtaaatcttccggggataagagtcaatctgccggcgattacagaaaaagacaaaagagatatccagttcgctaagaatcatggggttgacttcatagcgctttccttcgtcagggaagcctccgacatcgaggagttgcgtcgaattcttggtgccaaggaagaaacgatcaaaataattgccaagatagaagatcgaagtggcgtagagaatatccactcca

SEQ ID NO: 249095 - DNA, 721 bp, Unknown
  Bacterial polypeptide expressing nucleotide sequence isolated from the Sargasso Sea
atggtggcggtcatcggcggcgtcccgaaggaggtggtgatcaccaaggaggcggcgtccagccacgtcgtgcccagtttccacgtcaccgtcgcccccggggtgtacgagacgtcgcgggtggtggagaacgagcacgccaaggccaacgccgtgcgcaccgtgagcctccgcgcgaccgccatctccctcgacgaggtcttctcgcccgaggcgcccgtgcggaagacgaagatcgtgtgcacgatgggccccaagtgctgggacgaggaggagctcggccagctcatcgacgcggggatgggcgtggcgcggtttaacttttcgcacggcgaccacgaggcgcagcagaaggtgctggaccgcgcgaggaaggtggcggcggagaaggggtcgttcctggcgtacctgctggacaccaagggccccgagatccgcaccgcgatgctcagggaccacgagccgatcgagctcgaggcgaaccaggagatcttcatcgaggcggtcggggacaaatacgtcgagttcgaggggtacaagacccccgaggagacccggatcggcctgtcgtacgccaagctgtgccagtcggtgaagcccgggaacaacatcctcatcgccgacggctcggtcgtgatcaaggtgacggagatcatctccgacaccgtgctgaaggggacggtgatgaacagcaagaagctcggcgagcgcaagaactgca

SEQ ID NO: 249096 - DNA, 850 bp, Unknown
  Bacterial polypeptide expressing nucleotide sequence isolated from the Sargasso Sea
atggtgggagaattaaggtcaaatcaaggggtcgctttcccagattctaatttatcagtttcaactttaacgaaaaaagatattgaagacttagagttcggcaatcaacttggggttgattttgttgctgtttcttttgttcgaaacgcagaagatattatgaatgtcaagaaatacattgatgatgatataaaagtaatagcaaaaatcgaacttaagtctgcagtaaaaaatctaaaatcaattattcaagagtcagatggagtaatggtagccaggggtgatttaggtgtacaacttcctcttgagagaattccgctcgttcaaaaagagatattaaatgaaacaaatttacagggaaaaattacaattacagctactgaaatgttaacttctatgatttcttctcatcggcctacaagagcagaggtttcggatattacaaatgcaatactcgacggaactgatgctgtaatgttgtcagctgaaacctcaatcggtgaaaacccaattgaagttgtcagtgccatggccaagatttgtagtgaggtagatagtgtatctggtacaaaaataacttcatctaaagacatattgacttctgatgaactaacaaattctctttcaaaagctgcagtacaagtagcaaatgattctaatgcaaaggcaatcgtagcttttactgaaactggtaaaacagcattgttgatttcaaatcatcgaccagacgctccaatttttacatttacaactgttgaaaagacttttaatcaacttaatttgatatggggagtagaacagataaagatagagagattggaaactactgatgagatgtttgcgattgcaa

SEQ ID NO: 249097 - DNA, 665 bp, Unknown
  Bacterial polypeptide expressing nucleotide sequence isolated from the Sargasso Sea
agttcctaaaatacaactatctttaataaaaaaatgtaataggttttcaaaatcagttatcgtagcaacacagatgttagaaagtatgatagagaattttacaccaactagagccgaaattaacgatatcgctactgcaattttccaaggagcagatacggtgatgttgtctgcagaaactgctgtgggtaggtatccaatacaatctgttaagacaatgttcaaaactattatttcaacagaaaaatataagagagatcacattgaggactttaaaaattctgttgaaacaaaaacagatcctattaaatccatagtcttatctgtaaaggatttggcatataatccatcagtaaaagctataatagcattttcaagttctggtaaaactgcaaaattagtttcggcagttagacctagtgtaaaaataataacgatatctccaaatataaatataagcaggcaaatgtctttattgtggggtgttcaatctataaaaagtaaagatgctaggggatggaaagatatgatgaatatatctcggcaaataataagaaaagataaatctataaaaaaaaatgattttgtaattatcactgcgggtttgccttttggcaatgcagctatgactaacatgataagactctatagagttggttcataat

SEQ ID NO: 249098 - DNA, 163 bp, Unknown
  Bacterial polypeptide expressing nucleotide sequence isolated from the Sargasso Sea
tatgtcgaatattgatttaaaaagaagaacaaaaatagtagcaactattggccctgcaactcaatctgaagagataattacaaatttaattaaagctggagttacaacattcagattaaatttctcacatggagatcataaagatcatgctgagagaataaaa

SEQ ID NO: 249099 - DNA, 832 bp, Unknown
  Bacterial polypeptide expressing nucleotide sequence isolated from the Sargasso Sea
ggaatattaaaaagcaaaaaaggaataaatttacttgaaacaattttaaaggattctgcattaacctctgcagataagagaaatgtcaaaaaaggtatggaacttggtgtcgattggattgctctgtcatttattcaatcaccggaagacataaaagacctaagaaaaatctgcaaaaaaaatgtttctataatggcaaagattgaaaaacccactgcgttaaatcacattaataaaattactgaattagctgatggccttatgatagctagaggagatcttggtgttgagttacccatccaagatgttcctagttggcaaaaaagaattattagagaggcaagaatgcagggaaagcctgttgttgtatcaacacaaatgcttgagtctatgataacttctaaaactccaacacgcgctgaggtttctgatgttgccactgcagtttttgagggatcggatgcagttatgttgtctgctgaatctgcgataggtgacaaccctgaattagccgtaaaaatgatgaataaaatcgctcatagtgtcgaaaaaaatccaaattactcttcaattctattagcgcaacttgaagaaactccggatagcacacctgatgcaattgcaacggcctcaagaactttagcaaccgagttaaattctcctgtaattgtttgctatacagaatctggctcaacaggcattaaagtttctagagtgaggccaaaacaaatgatattaactgttacaccaataatagaaacagctcgaaagttaactttggtttggggagtaaaatgtattgttcaaaaagacgcaaataatctgaagaaat

SEQ ID NO: 249100 - DNA, 803 bp, Unknown
  Bacterial polypeptide expressing nucleotide sequence isolated from the Sargasso Sea
catgacaatttcatctcaatttaatgtggattggtcagattgtaatcttacaggagttgtgcttagatacatctcattagaaggagctaatctatcaggtgctgatttatcaggtgctgatttgacagggtctaatttgacaggggctgatttgacaaatgcaaaattatttggagttgatttaagacaagctgatttgtatcaagctaatttagaaaatgcagttttggatggagcagatttaagagatacaattatggaagatgtgaatctaaattatgcatcattaagacatgcatatatctacaagacaattcttgcagagacagagttcacaaacgtagatgcatcatattcaaacttttgtggacaggatttaacagaaaaaattttccataatgcaaatctaagtggttcaaatttagcccacacaaagatgcaatatacatacttaggaaatgcaatattgtataaaacaaattttgaagaatcaaatttagtaggaagtaatttttcagaaaattctctcaaagaggtcaattttagaggaagtaatttgtattcagttaatttggaaaatgccgatttaacaaatgcgaatttggaaaatgccgatttaacaaatgcgaatttggaaaatgccgatttaacaaatgcgaatatttttggtgtaaatttctcaaaaactgttaccgaaggaattgatttgagtaaagcaatagatagacagattatcaaagatgaagaaaaatcagatttagaaattttacataaatattcaaatttatcagagatgaattttt

SEQ ID NO: 249101 - DNA, 703 bp, Unknown
  Bacterial polypeptide expressing nucleotide sequence isolated from the Sargasso Sea
aatgaaactcaataaaaccaagattattgctacgttgggccccgccagttcatccaaaacaatgcttagcaagctaattgtgtcgggggtggatgtattcagggtcaatttttcacatgcagaccacaaagatgttgaaagaattgtaagtgatataaaggcgctaagaataaagcataataagcatgtttctattttaggggatcttcaagggccaaaaataagactaggaaatgttgtcccagaaacatttttaaaaaaaggcgaaaccatccttttttctacaaagaggattaaaaatggggactctaacagggtaacaattaattatacttcattccctaaagatgtaaaaaaaggagaaactgtacttgttgacgatgggaaaattattttacaagttgaaaaaaccgatagagaaacaagcgttaatcttattgttattcaaggtggattactaagctcaaataaaggagttaacctgcctagcactaaaatatctttgccagctttaaccccaaaggatataaaagacgccaaatttgctgcaaaacttgggcttgactgggttgccctatcctttgtaaggtcaaaaaatgatgtattacagcttagagaaattcttgataaatcatcaaatgaacttatccctattatatcaaaaatagaaaaacctcaagcaataaacaacatggatcaaata

SEQ ID NO: 249102 - DNA, 778 bp, Unknown
  Bacterial polypeptide expressing nucleotide sequence isolated from the Sargasso Sea
atgttaaaaaattatagaaaaactaaaattcttgcaacaataggtccttcatctgaaaaaataaataaaatcgagaagctagtgcataatggtgttgatgctttcaggattaattgttcacatacaaatgttcatcagctaagcaattatgtaaagaatattagagccgtagagaaaaaaataaaaaaaccaataggaatcttaattgacctacaaggacctaaattaagagtaggagaaatagaaaacgactctatggttttaaaaaaaggtcaaatagtagtcataaaaaattcctcaaaaagctcaaacaaaactgaaattccaatacctgaagaaaaagttttcaaaagtataaaagtaaatcatccaatatttattgatgatggtaaaataaaattaaaagttttaaaggtttcaaaaaatattatccaggcaagagtcgttttagaagggaaattaagaagtaagaaaggaataaatttaccagaaacaattttaaaaaattctgcattaactgcatcagataaaaaaaatgtaagagcaggagttaaacttggtgttgattggattgctctatcatttatacaatcaccagctgatatcaaagatttaaaaaaaatatgtcataaaaatatatcaataatggcaaaaatcgaaaaaccatcagcattaaaccacatagataaaattgcagaattagcagatggattaatgattgcaagaggagatcttggggttgaactccctatcgaggatgtaccgggtggcaaaaaag

SEQ ID NO: 249103 - DNA, 577 bp, Unknown
  Bacterial polypeptide expressing nucleotide sequence isolated from the Sargasso Sea
atggtagcaagaggagacttaggagttcaactaccacttgaacaagtgccctttgttcaaaagcaaattttagatgctgccaacaaacgaggaaaaatatctataactgcaactgaaatgcttcagtcaatgaaaacttcatatagacccactagagcagaggttacagatattactaatgcaatacttgaaggttcagatgcagtaatgctgtcggcagaaacagccattggtgacaatccaaacagagtagttgaagtaatgtctctaatttgtgcagaaacagattctagaaatgatacttcttcactcctatctaaagaagattcaaaggaagattcaataactactactttagctagggctgcagttcaagtggccaatgaaatagacgctacttcgataattgctttcacagaaacaggtagaactcctttgctaatttctaactttaggccaaaagcagaaattattaccttcacaactaagaaaaaaactttgaatcaaatgaatttactttggggtgtagaccaatttcttattcaaagagaggaacatttttcagagaatgttgaaa

SEQ ID NO: 249104 - DNA, 904 bp, Unknown
  Bacterial polypeptide expressing nucleotide sequence isolated from the Sargasso Sea
atgttcactagaacaaagattatttgcaccattggcccagctacatgtgagttaagcaagatgcagaaaatgtatgctgctggcatgaatgtcgttcgcattaatatgtcacatgcatctcatgacgaggcattaaatgtaattaacaatgttaaattaataaataaagatcttgatattaaaatggggccaatttctattttaatagatactcaaggtcctgaaataagaacaggggacagggatacatctcttgacttgaaactcggtgacaaagtaaatctaactgtaagagatgaagtagatgttgaaacatcttctattaaaattaactacagaggcttaattaacagtgttaaaaaaggctctaagatttctgttgataatggcctagtaaattttaaagttttagagaaacacgatgataagcttttatgcaaagtcattgatggaggaaaaattggcagtaaaagaagcgttaatctgccaggagtaagaattgacctaccttcaataaccaaaaaagataagaaggatataaattttgctatcgaacacgatgtagattacatagccctttcttttgttcgaacaacagcagatgttcacagcctaagaaagattcttaaaagaaagaaatcacatataaaaattgtttctaaaattgaagataacgaaggactttccaatattcactccattactcaagaatcagatgctgttatggttgctcgaggagatcttggaattgaaacaagcttggctgaccttcctaatgttcaaaggcgcattatgtatgcttgttcaaaatggggagtaagatctatcgtagctactcatttattagaatcaatgattgagaaaccaacacctacaagagctgaagtaaccgatggttgctaat

SEQ ID NO: 249105 - DNA, 484 bp, Unknown
  Bacterial polypeptide expressing nucleotide sequence isolated from the Sargasso Sea
ttggccaacggcggggacgccgccgccgcgcgcgcggagagcgaggggaagtttcgggagaaggatacgcagaggatcgggttcaaatcgaagatcatctgtacgctcgggccggtgtcgagaacggtggagattttggaacagatgttgcgcgccggcatgtccatcgcgcgattcaacttttcgcacgggtcgcacgagtaccaccaagagacgttggataaccttcgcacggcgtgcgcgaacacgggcattcagtgcggtgtcttgctcgacaccaagggtccggagattcgcacgggtatgctcgcgtgcggcggtccggtgatgctcgaggctggcaacgaagtcatcttgaccaccgattacgagttcaagggaagcgcggaaaagattgccgtgtcctacccggatttggccaaggacgttgagccgggctctaagattctatgcgccgacggttcggttaccttcaccgtgctcg

SEQ ID NO: 249106 - DNA, 641 bp, Unknown
  Bacterial polypeptide expressing nucleotide sequence isolated from the Sargasso Sea
tatgacattcaccagatctaaaatcatatgtactattgggcctgcaagcagctcaccgaaaattttaaaaaaacttcatactgctgggatgaatgttgcaagaattaatatgtctcatgctactcacagtagtgctaaacaaattattgaaaatataaataaaatcaataaagagaaaaatgataaattatctgagattggaattcttctagatacacaaggaccagaaattagaactggagatacttcacttccaattgatttaaaagttggcgataaagttacattgacagttcgcgatgaagttgatgttgaaacatcttcaataaaagttaactataaaggattgattcacagtgttgatgttggttcaaaaatatcagtagataacggattgataagctttaaagttctttcaaaacaatcagaaaatttaatatgtaaagttgtacatggtggtaaagttggctcaaaaagacatgtcaatctacctggagtaaggttagatgtgccatcaataacctcaaaagacataacagatattaatttcggaattaaaaataatgtgaattttattgctgcttcgtttgtaagaaataaaaaagatttagaagtcctccacgaaatactttctaaaaaaa

SEQ ID NO: 249107 - DNA, 715 bp, Unknown
  Bacterial polypeptide expressing nucleotide sequence isolated from the Sargasso Sea
aatgaaacgtaacagaaaagctaaaattttagctacactaggtcctgcatcatcaaataaaaaaataatagaagacttatttgtggctggatgtgatgtttttagattaaatttttcacatggtgatttagaaactcatagaaaaaattatgaaaatatcagatctcttgaagaaaaatataatcactccacttgtatcctagctgatctgcagggaccaaaattaagagtaggtctatttaaaaataataaacagaatttagcaaaaggagaaaaattcatattagatctttcgacagagaagggggatagtgaaagagtaaattttcctcatccagaaatttatagttttcttacacctaattcgatacttcttattgacgatggaagaattagattgcaagttattgaacaaagtaaagattatttagttacagaaattttaaatgatgctgaaatttctaacaacaaaggtgttaatataccagatatcatacttccaattgatgctttaacaaagaaagataaatccgatttaatgaaagctcttgatatgggagttgattgggttgccttatcatttgttcaacaagccgaggatataattaaactgaaaaaaattatttcagataaagctttggtgatggcaaaaatagaaaaaccttcagctgtaaaaaatattgatgaaataataaacgtagcagatggaataatg

SEQ ID NO: 249108 - DNA, 607 bp, Unknown
  Bacterial polypeptide expressing nucleotide sequence isolated from the Sargasso Sea
aagccagttataattgctacacaaatgcttgaatcaatgataaccaatcaagttccaactagagcagaagtaagcgatattgctaattcaatttttgatagcgttgatgcattaatggtaaccggagagactgcaattggaaattatcctattgaagttgtaaagactttaaaagaggttatacgtttaactgaaaaatcattagtccaagaaaaagttttcaaccctgacgaaataaataaaactagtgacgcaataagccatgctgtatgtcaaataactaaagatttgaatattaatattatcatgacaatgacgcatagtggtagtactgctagaatgatatcaaaatatagacctccttcaaatgttattgctctcaccccatttaattctatcatcagacagcttagattaatttggggtatcactcctataaaagtagataaatatgatgatattgacttaataccagatctttgtaaaaacgtaattcatgctaacaaattattaaaaaggggtgaaaaatttattataactggtggtgttccaatgggcgtttctggaacaacgaattatctatcagttcaaacaaatgataattgag

SEQ ID NO: 249109 - DNA, 889 bp, Unknown
  Bacterial polypeptide expressing nucleotide sequence isolated from the Sargasso Sea
taacccaagaccaactagggccgaagttagtgatgttgcaaatgcaattctggatggtacagatgctgtaatgctttcaaacgaaactgcagttggcgattatcctgtagaggcagttgaaacgatggcaaccatagcaagaagaatagaaagggattatccacttaaggctattgaaagccacttacccagtacaatcccaaatgctattagtgcagcagtaagtaatatagctagacaacttgatgcaggagctataatccctttaactaaatcaggttctaccgctcgaaatgtaagtaagttcagaccaccaacacctatcttggcaactactacagagagaagtgtagcgagaagattacaacttgtttggggagttactccaatagtagttaaaaatgatcaaagaacagcaaaaacttttagtttagctatgcaaattgctcaggagatggggatcctaaatcaaggagatttagtagttcaaaccgcaggtacattaactggaattagcggctctacagatttaataaaagtcggtttagtaagaaaaattgtatcaagaggaatttcaataggggagatcggtgttacaggtaaagccagaattattaaaaataatcttgatatatccttaatttgtccaggagaaatattatttgttccaaaggaattaatggaaaatattccgctgagtaaaaatattgccggcattgttacgaaccaaaatgtaaatgatgtttatgctttattcaacaaaaataataaaaagatttctacaatttgtaatttagaaaatatcgataatcatcaaatcagtaatggcgatcttattacactccagcttaatgaaggtgttatatacatgggacaaattgaagatgat

SEQ ID NO: 249110 - DNA, 463 bp, Unknown
  Bacterial polypeptide expressing nucleotide sequence isolated from the Sargasso Sea
atgttaagtacaaaaattatttgcaccattggcccagcaagtgattctcctaaaatcttagaaaaactagcagaagcaggaatgaatatcgctcggttgaatttctctcatgggacacataattctcataagaaaattatcaagcaaattcatgaattgaaccgaagcaggcaatttcccattgcaattatgcttgatacacaggggccagaaatcagaacaggcaatgaaacaagtgatcttatgtcaaaagaaatagttactgttagttgcccgccctttaaagagaatgaaggtaatattcatataaattacgcagctctaaaaagtgatctgaaaccaggaaactatatttccatagacagtggattggtaaaattaaaagttttaggcaaacacataaaaggacttaagtgtgaggtgatagacggtggtatagtaaatggacatagacatgtcaatt

SEQ ID NO: 249111 - DNA, 682 bp, Unknown
  Bacterial polypeptide expressing nucleotide sequence isolated from the Sargasso Sea
ttagaaataccaactgaggaggttcctctaaatcagaaaataatggtcgaattggctaaaaaagctcgaaaacctgtaatagtagccactcaaatgatggaatcaatgattgataatttgacgccatctagagcagaggtcaatgatgttgcaaattctgttatggatggtgctgactgcatcatgctttcaggggaaacatcgatcggtaaatacccgtgtgaagttgtgagaaagattggtaaaatcatttctagtgttgaaaacacagaatatggattaatacaagctggcaatgtaaatatcaacaaagaaagactaataacaaattctgtatgctatcatgcctcattattagcagacagtattaaggcgtctgcaatttgtactttaacaaacagcgggtatacagggtgggaaatatcttcatataggcctaaatcattggttcttgtatttacatcaaatactagaattttatctcagcttaacctactttggggtgtgaagtgtatcttttacaacaaacttgagagcacagacaaaaccgttgaagaagttaatgagcttgctctccaaaaaagatatatcaaaaaaggtgactttgttataaatttagcagcaatgccaataaaacaaaaaggacaagtcaatactttgagaattaccaagatagaatagg

SEQ ID NO: 249112 - DNA, 697 bp, Unknown
  Bacterial polypeptide expressing nucleotide sequence isolated from the Sargasso Sea
gatttagctattggatatagaggcacaggcgaggtaccaaaagttcaattaagtttaataaaaaaatgttctcaattttcaaaatctgtgattgttgctacacaaatgcttgaaagtatgattcaaaataatactgctacaagagctgaaattaatgatatcgccactgcgatttttcaaggtgctgacacggtaatgttatcagctgaagcagctattggtaaatttccaacacaagctgtttcaacgatgactcaaactattctttcaactgaaaaatataaaaggcaacacattgaagattttaaaaattcaataatttcaaatagagatcctgttaaatctattctactctcagtaaaagatattgcttataatccaaatgtgaaagctattatcgtattttcaaattcaggaaaatcagcgaaacttgtttctgcaatgaggccagctgcaaaaattgtaacaatttctccaaatgtgaatgtgtctagacaagtttctttactttggggcgttcaatcaataaatagtcgcgatgctaatggatggaaagatatgatgtctatttcaaaagaaatcataaaaaaactcaaatttattaaaaaagatgattttgtcgtaataactgctggtttaccttttggaaaagctggcatgactaatatgataagactttataaagttgggtcataat

SEQ ID NO: 249113 - DNA, 895 bp, Unknown
  Bacterial polypeptide expressing nucleotide sequence isolated from the Sargasso Sea
gatgacttagatcttaggcttgcgctagataagggcgccgactggattgcattatcttttgttcgaagtgcggatgatattgttaatgtgcacaatatcatggatgagtgcaacaaacgtcttcctgttatggcaaagattgaaaaatgggaggctctcgacgatttacaaaatatcactgaggcgtttgatggcattatggtagctcgtggagatctaggtgttgaaataccatcaggaaaggttccagctgctcaaaaagagattattgagcttgcaggggtaaatggtaaacctgttgtaatagcaacgcagcttttggaatcaatggttgaaaatcatactccaactagagcagaagtaagcgatatcgcaaatgctatttttgatggggttgattgcctaatggtaacaggtgaaaccgcaatgggtaattacccggtagaagtaataaaaaccttacaacaagtcatacttgaaacagagggctcatctgatatttctaaaaacccgctacctgaagtaattaccaaaactgctgatgcaattagtcatgcggtttgtcagattgctgaagatctcgaagtaaaagttatcatgtcaatgacacatagcggaagcacagcaaggatgatttcacgttaccgcccaaattcatcaatctatgcattgacaccattcaatcacattattagacaattgcaattagtttggggagttcgtccaataagagtagataattacgataatgttgaaaagataccagccctttgcaatgatattataaaagagattgatgtcctgcagcctggagagcagtttgtgataactggcggagttccaatgggaatagcaggtaccacaaactatctttcaatccaagttcataactaat

SEQ ID NO: 249114 - DNA, 778 bp, Unknown
  Bacterial polypeptide expressing nucleotide sequence isolated from the Sargasso Sea
aggggtcgctttcccagattctaatttatcagtttcaactttaacgaaaaaagatattgaagatttagagttcggcaatcaactcggagttgattttgttgctgtttcttttgttcgaaacgcagaagatattataaatgtcaagaaatacattgatgatgatacaaaagtaatagcaaaaattgaacttaagtctgcagtaaaaaatttaaaatcaattattcaagagtcagatggagttatggtagcaaggggtgatttaggtgtacaacttcctcttgagagaattccgctcgttcaaaaagaaatattaaatgaaacaaatttacagggaaaaattacaattacagctactgaaatgttaacttctatgatttcttctcatcggcctacaagagcagaggtttcggatattactaatgcaatactcgatggaactgatgctgtaatgttatcagcggaaacctcaatcggtgaaaacccaattgaagttgtcagtgccatggcaaaaatttgtaatgaggtagatagtgtttctggtacaaaaataatttcatctaaagacatattgacttctgatgaactaacaaattctctttcaaaagctgcagtacaagtagcaaatgattctaatgcaaaggcaatcgtagcttttactgaaactggtaaaacagcattgttgatttcaaatcatagaccagacgctccaatttttacatttacaactgttgaaaagacttttaatcaacttaatttgatatggggtgtagaacagata

SEQ ID NO: 249115 - DNA, 861 bp, Unknown
  Bacterial polypeptide expressing nucleotide sequence isolated from the Sargasso Sea
tgcgaagaaactaaaaaagcccgtcgccatcctagtcgacttaaagggcaataagattagaattggtgactttaagaatcatatgattgagttggagcatgactcagatatcaatgtcatatttactcaagagaaaaagactgacaatcatgagatttttattgatgctgaatattgttttccccaaattgaagttggagataggatcttactagatgatggcttaatccaattaactgttaaaagtataaatcaaaagaatatggcacttaaatgtttggtcgagaagggcggtttactgagaagcaataaaggatttgaggttgagaataagatcatacatcgttcagggcttggggaagaagataagaaagatataaagagattggctgaattagatattgactggattgcactttcttttgtcaatgaagcgagcgatgtcactcaagcgagagaggttttaacacaaattggtagccgaattaatttaattgcaaagattgaaaggcttgtggcactgaatcagctcttttggattattaaagcaagcgatggagtcatggtcgctaggggagatcttgctctagagtctggaccaggtgagctgacaggactccaaaaagatatcattaaacaaactgttaagggaaaaaggatcgcaataacagctactcagatgatggagtcaatgatcacaaatccaactccgacaagagcagaaatgacagatgtttctaatgccgtcttagatggaacagatgccgttatgctctcagcagaaacagcaattggaaaccaccctgtagagacggtaaaagccatgcatgaggtttgcatgggtgcggagacatacaaaga

SEQ ID NO: 249116 - DNA, 430 bp, Unknown
  Bacterial polypeptide expressing nucleotide sequence isolated from the Sargasso Sea
atgcgacgcaaacaccaaacaaagatcgttgccacacttggcccggcttcagagcaaccagagatcattcgggctttgtttcaggctggggttgatgtattccgtctaaatttcagccatgggacgcatgcggacaaaaaatcaaacattgaaatcattcgggatgttgagaaggaaactggtcgtcctattgcgataatgatggatctacaggggccaaaacttcgcatcggtcagttttctgagggcgctgtagaactcaatgtaggtgatgcttttaggctcgaattagaagacaacccgggaagtgagaagcgggtaacacttccacacgctgaaatttttgctgctctcaatgcaacaacggaccttcttcttgatgacagtaaaatccgtctaaaggtaaaagacagcgggccggattttgccg

SEQ ID NO: 249117 - DNA, 756 bp, Unknown
  Bacterial polypeptide expressing nucleotide sequence isolated from the Sargasso Sea
atgcattaaaaaatatgtttaaaataattaaagctactgactctttgatgatagctcgtggcgatttagcaatagatataggtcatagcgaagttccaaaagtacaattgagtttaatcaaaaaatgttcacaattttcaaaatctgtaattgttgccactcagatgctagagagtatgattgaaaacaatactgctacaagagctgaaataaacgatatagctacagcaatctttcaaggcgcggatacagttatgctatccgcagaggctgctattggaaaatttccctctcaggcggtgtcaacaatgactaaaacaattttatctacggaaaaatataaaaggcagcatattgaggattttaaaaattcaattcaatcaaataaagaccctgtcaaatcaattttgctttctgtaaaagatattgcttataatcctgatgtaaaagcaataattgttttttctaattcaggaaaatctgcaaaattagtttctgcaatgagaccggctgcaaaaattgtaactatttcacctaacataaatgtttgtcgccaggtttcccttctttggggcgtacagtcaatcaatagtcgtgatgctaatggctggaaagatatgatgtcaatttctcaagaaattattagaaagcttaaatttatcaaaaaaaatgattttgttgttattacagctggtcttccgtttgggaaagcaggtatgactaatatgataagactttataaagttggtacttgat

SEQ ID NO: 249118 - DNA, 88 bp, Unknown
  Bacterial polypeptide expressing nucleotide sequence isolated from the Sargasso Sea
atgaaaaagacgaaaattgtttgcaccatcggtccgaaaaccgaatccgaagagatgttaaccaaaatgctggacgcgggcatgaacg

SEQ ID NO: 249119 - DNA, 748 bp, Unknown
  Bacterial polypeptide expressing nucleotide sequence isolated from the Sargasso Sea
ttggcgaataaagtagcacgacaagctgacgagcaattaagaaaaaccaagatcatctgcaccataggaccggccacagccagtttccagaaaataaaggctttaaggaatgcgggcatggatttagttcggttgaacatgtcgcattcctcccacgcagaggcgaaaaaagttatcgactgggtaaataagcttaaccaaactgggggctcgccggtttcagttttattggatacacaaggcccggagattcgcacgggagagctcaagagcccgatgaaattaaaaactggacagattgtttcgctaacggtcagagatgctggtttggtcgagacccagtcgattcttgtgaactacgaggagatagtcgatgtcgttgacgtcggttcgctgattaccttggataatggccttcttaacttcgaggtattagagaaaaaaggggggcagctggtgtgccgagttttggatggcggaactctaggaagccgcaagcacgtaaatcttccggggataagagtcaatctgccggcgattacagaaaaagacaaaagagatattcaattcgctaagaatcacggggttgacttcatagcgctttccttcgtcagggaagcctccgacatcgaggaattgcgtcgagttcttggtgccaagggagaaacgatcaaaataattgccaagatagaagatcgaagtggcgtagagaacatccactccattgtgggtgctgcagatggggtta

SEQ ID NO: 249120 - DNA, 166 bp, Unknown
  Bacterial polypeptide expressing nucleotide sequence isolated from the Sargasso Sea
tatgtcgaatattgatttaaaaagaagaacaaaaatagtagcaactattggacctgcaactcaatctgaagagataattacaaatttaattaaggcaggagtaacaacattcagattaaatttctcacatggagatcataaagatcatgctgaaagaataaaaaca

SEQ ID NO: 249121 - DNA, 300 bp, Unknown
  Bacterial polypeptide expressing nucleotide sequence isolated from the Sargasso Sea
tatgaaatcactaaaaattttaagagcaactaaaatagtctcaaccttaggaccctcgacatcagattacaaaactattaagtcgttaatgattgccggtgttaatgtgtttagattaaattttagtcatggtagtcatgaagatcataaaaaatcagtagaaattattaggcgattagaaatggagttagactttcagatagcaattctagcagacttacaaggtccaaaatttagaataggttatgttcaagaaaaaataatattaaaaaaaggaaataaatttgtcttcgatcaaaa

SEQ ID NO: 249122 - DNA, 834 bp, Unknown
  Bacterial polypeptide expressing nucleotide sequence isolated from the Sargasso Sea
tatgactttaaaacgaactaagataatctgcacgattggtcctgcaactgagagttattcaagccttatgagattgtataaggcaggaatgaatatcgctcgtctgaatatgtcacattcagaccataaaagtgctaaaaaaattatagagcgtattaataaaatcaataagaaagtttcaaatccaataggtattttgcttgatacccagggaccagaaattagaacgggcgacacttcatccgttgttcatcttgaaccaggagaaaaggtttcatttactatcagagacgaaatagatgtagaaacaacctccattagagttcattacgatgagttaataaatagcgttaaagttggaagcttaattacattagataatggcttgttaaactttaaagtactggcaaaaacaaaaaatgagcttgaatgtattgtccttgacggtggaaaattgggaagtaaaaggcatgttaatttacctggcatcagaatcaatctcccttcagtcacagaaaaagataaaaaagatattgcatttggtcttaaagaaaatgttgattttatagccttatcatttgtcagagatgcatctgatattgatgaccttaaagtggttttaaaaaacaaatcttctcaagtcaaggttatttcaaaaattgaagacagagaaggcctgtctaatatcgaagaaatttgtaaggtctcggatgccgtgatggtagctagaggcgacttgggaatcgaaactgacctttccaaatcttccaatatacaaaggaaaatcatgtcaaactgtgcgaaacacggcgttagatcaatagtcgctactca

SEQ ID NO: 249123 - DNA, 718 bp, Unknown
  Bacterial polypeptide expressing nucleotide sequence isolated from the Sargasso Sea
ctaaagggaaataagatcagaattggtgattttaagaatcatatgattgagctggaacatgcttcagacgtcgatatcatattcaccaaagagaaaaagacaaacaagcatgagatcttcattgatgccgactattgttttccaaacattgaagttggcgacaagattttacttgatgacggtttaatccaattaactgttaaaagtatcaatcaaaagaatatggcccttaaatgtcaggtcgagaaggggggtttacttagaagcaataaaggatttgaggttgagaataagattattcaccgctcaggactcggggaagaagataaaaaagatataaagaggttggcggaattaggtattgactggattgccctatcttttgtcaatgaagcaagcgatgtaacacaagcaagagaagttttaactcaaattggtagccgaataaatttaattgctaagattgaaagacttgaggcgctaaaacagctcttttggattatcaaagcaagcgatggagtcatggttgcaagaggcgatttagctctagagtctggaccaggcgagctgacagggcttcaaaaagatatcatcaaacaaaccgttaagggaaaaaggattgcaataacagctactcaaatgatggagtcaatgatttcaaatccaacccctacaagagcagaaatgactgatgtttctaatgccgttttagatggaa

SEQ ID NO: 249124 - DNA, 790 bp, Unknown
  Bacterial polypeptide expressing nucleotide sequence isolated from the Sargasso Sea
gcgctgtcctttgtcagaagccccgatgacgtcgtcgaattacagcagtttttaggatccaagcgacagtccacaaagatcgttgcaaaaatcgaagaccaagaaggcgtcaataatatccatcaaatcgtggctgtcgcggacggtgtgatggtagcccggggcgatttaggcatcgaaaccgatatcgcggacttgcccaatgtacagcgccgtatagtgcacgcatgtgctcgtcagggtaagcgctgcatcgtggcaacccacctgctggagtcgatgatcgacaatccgattcccacccgtgctgaagtgaccgatgttgcgaacgctatctatgagggcgtcgatgcggtgatgctatccggggaaaccagcgtgggtcagtaccccagccgctgtgttgagcaactgtcaaatatcgctgaccgaaccgagcgctttcccggtttagggtacgaaaaggccctcgaaattgagggcgacaaacagcatgttgccgtgcatgccgtggccctcgcagagtcagttgaagcagcgggaatcattgttatcacacgtcgcggcatcgttgccgactatgtcactgccgcgcgaccccagcatgtccctatttttgcgttcacaaataacagccagacacgtcgacgtctggcgatgaatcgttcggtgtacgcccatcgcatcgccttcagcagcgaccccgaaaaaacgctacgcagagcattcgacgtgctgaaaaaagagggcgttgctgtggatgccaaacttgtcctgatctcggatgttt

SEQ ID NO: 249125 - DNA, 921 bp, Unknown
  Bacterial polypeptide expressing nucleotide sequence isolated from the Sargasso Sea
gaatgttgttcgaattaatatgtcacatgcgtcttatgatgaggctttaaatgttataaataatgtaaaattaattaataaaaacccagatattaaaatgggaccaatttccattttaatagacacacaaggccctgaaattagaacaggagacagggatacatctctcgatttaaaacttggtgataaagtaaaccttaccgtaagagatgaagtcgatgttgagacatcatctatcaagattaactataggggattaattaatagtgttaaaaaaggttcaaagatttctgtagataatggcctggtaaattttaaagttttagaaaaacatgacgataaacttttgtgcagagttattgatggaggaaaaattggaagcaagagaagtgttaatctccctggggttaggattgaccttccttcaataacaaaaaaagataaagcagatataaattttgctattaagcatgatgtagattacatagctctttcctttgttagaaaaatagaggatattcatagcttaagaaaggtcttaaagagaaagaaatcacaaataaaagttgtttcaaagattgaagataatgaaggtctttctaatattcatgctattacacaagaatcagatgctgtcatggttgccagaggtgatctcggaattgaaacaagcttggcagatctaccaaatgtacaaagacgaataatgtatgcatgttcaaaatggggaagaagatctatcgtagctactcatttgttggaatcaatgatagagaagccaacacctaccagagctgaagtaactgatgttgccaacactatttatgagggtgcagatgcaatcatgctgtctggtgagacaagcattgggaaatatccaattgaatgcataaaatttcttaaatctatagctgatagatc

SEQ ID NO: 249126 - DNA, 388 bp, Unknown
  Bacterial polypeptide expressing nucleotide sequence isolated from the Sargasso Sea
gatgttaagtacaaaaattatttgcaccattggtccagcaagtgattctcctgaaatcttagaaaaactagctgaagcaggaatgaatatcgctcggttgaatttctctcatgggacacatacttctcataagaaaattataaagcaaattcatgaattgaaccgaagcaggcaattccctattgcaattatgcttgatacacaggggccagaaataagaactggcaataaaacaagtgatcttatgtcaaaagaaatagttactgttagttgcccaccatttaaagagaatgaaggtgatattcatgtaaattacgcagctctgaaaggtgatctgaaaccagggaactatatttccatagacagtggattggtaaaattaaaagtt

SEQ ID NO: 249127 - DNA, 739 bp, Unknown
  Bacterial polypeptide expressing nucleotide sequence isolated from the Sargasso Sea
atgaaacgtaacagaaaagctaaaattttagctacattggggccatcttcatcaacttcagatttaataaagaacctttttttagaaggatgcgatgtatttagattaaatttttctcatggagatattgaaagtcatagaaataaccttgaaattattcgtaaattagaagatgaatataatcattcgacttgtgttctagcggatcttcaagggcctaaattaagattaggattatttaaaaatgatgaagaaaatctaactaaagggcaaaatttccaattagatttaaataatgaactaggaaatagtaaacgagttaattttcctcatcctgaaatttatgacaatttgactccaaatactattatgttggttaatgatggaaagattagattgcaagttattgaacaaacgaaagaagttattaaaacagaaatattaaatgatggaataatttcaaataataaaggtgttaatattccagatatagttttgccaattgaatctcttactaataaagacaagtctgatttgatgaaagctctagatatgggcgttgattgggtggctttatcatttgttcagcaagcaagtgatataattaaattaaaaaaattaattaataataaagcacaggttatggcaaaaattgaaaaaccatcggctgtaaagaatatagatgaaataaaacaaaatgcagatggtattatgattgcaagaggagatttgggtgtcg

SEQ ID NO: 249128 - DNA, 394 bp, Unknown
  Bacterial polypeptide expressing nucleotide sequence isolated from the Sargasso Sea
caggaaggtgttgaaagacttgaagaaattgttgaagaagctgatggagtcatggttgcgcgcggagatttgggtatcgaggttgacttggaagaggttccgcaaattcaaagaaggatagcttttttgtgcgcaaaatttggaaagcgtctaattgttgctacacatatgctggagtcaatgattgaacatccagtgccaacaagagcggaagttacagatgttgcaaatgcagtattcgaacagtcagattcaataatgctttgtgcagaaacttccattggtaagtatccggttcgctcagtggaaactttgaaacgtatagcaaaacgtacagaaaattttcgtggtgtaaatttttcgaaaaatttgatacaaaaagacaaaaggacaa

SEQ ID NO: 249129 - DNA, 175 bp, Unknown
  Bacterial polypeptide expressing nucleotide sequence isolated from the Sargasso Sea
tatgtcgaatattgatttaaaaagaagaacaaaaatagtagcaactattggccctgcaactcaatctgaagcgataattacaaatttaattaaagctggagtaacaacattcagattaaatttctcacatggagatcataaagatcatgctgagagaataaaaaccattagggaa

SEQ ID NO: 249130 - DNA, 778 bp, Unknown
  Bacterial polypeptide expressing nucleotide sequence isolated from the Sargasso Sea
cactagaacaaaaattatttgcactattggtccagctacatctgaattaatcacaatgcaaaagatgtattcagctggaatgaatgtcgttcgaattaatatgtcacatgcatcacatgatgaagcattgaatgtaattaaaaatgttaaattaattaataagaatccagatattaaaaagggcccaatttccattttaatagatactcaaggcccagaaataagaacaggcgtcagggacacatctcttgatttaaaacttggtgataaagtaaatcttactgtaagagatgaagtcgatgttgagacatcatctatcaaaattaactatagaggattaattaacagtgtaaaaaaaggttctaagatttctgtagataatggcctagtaaatttcaaagttttagagaaacatgatgataagcttttatgtagggttattgatggaggaagaattggtagtaaaagaagtgttaatctgccaggagttaggattgaccttccctcaataactaaaaaagataaagctgacataaattttgctatcaaacatgatgtagattatatagcgctttcctttgttagaaagatagaagatattcatagtttaagaaaaattcttaagagaaagaaatcacaaataaaaattgtttcaaagattgaagataatgaaggcctttctaatattcatgctattactcaagaatcagatgctgtcatggttgcccgaggtgatcttggaattgaaacaagcttagctgatcttccaaatgtacaa

SEQ ID NO: 249131 - DNA, 262 bp, Unknown
  Bacterial polypeptide expressing nucleotide sequence isolated from the Sargasso Sea
atgaaacgtaacagaaaagctaaaattttagctactttaggaccagcaagttcctcacctaaaataattgaagatttgtttgttgctggttgtgacatatttcgtttaaatttctctcatggatctattgaaactcatagatcaaacgtagaaattattagaaaattagaaaaaaaatatgatcatgcaacctgtattttagctgacttacagggtccaaaactcagagttggtagttttataaataatgaggtagagtaaa

SEQ ID NO: 249132 - DNA, 566 bp, Unknown
  Bacterial polypeptide expressing nucleotide sequence isolated from the Sargasso Sea
gatgttaagcacaaaaattatttgcaccattggcccagcaagtgattctcctaaaatcttagaaaaactagctgaagctggaatgaatatcgctcggttgaatttctctcatgggacacatacttctcataagaaaattatcaagcaaattcatgaattgaaccgaagcaggcaattccctattggaattatgcttgatacacaggggcccgaaatcagaactgggaatgaaacaagtgatcttatgtcaaaagaaatagttactgttagttgcccgccatttaaagagaatgaaggtaatattcatgtaaattatgcagctctaaaaagtgatctgaaaccgggaaactatatttccttagacagtggattggtaaaattaaaagttttaggcaaacacaaaaaaggacttaaatgtgaggttatagacggtggtatagtaaatggacatagacatgtgaatttaccaggtactgtagttaaacttccgggtataactgaagccgataagagagatatactatttggcatgaagcaaaaagttatttttattgcactttcttttg

SEQ ID NO: 249133 - DNA, 937 bp, Unknown
  Bacterial polypeptide expressing nucleotide sequence isolated from the Sargasso Sea
gggagaagaagataaaaaagatataaaaagattggctgaattagatattgactggattgccctatcttttgtcaatgaagccagtgatgtaactcaggcaagagaggttttaactcaaattggtagccgaattaatttaatagcaaagattgaaaggcttgaggcgctcaatcagctcttttggattatcaaagcaagtgatggagtaatggtcgctagaggcgatcttgctctagagtctggtccaggtgagttgacaggacttcaaaaagatatcattaagcaaactgttaagggaaaaagaatcgcaataacagctactcagatgatggagtcaatgatcacaaatccaactccgacaagagcagaaatgactgatgtttctaatgcagttttagatggaacagatgccgttatgctctcagcagaaacagcaattggaaaccaccctgtagagacggtaaaagccatgcatgaggtttgcatgggtgcggagacatatcaagaatcaatcacaaagaatgaagagtataaattttctgaaatcaataacattgatgaagccattgctattagctcaatgagtatcgctagaaatatggaaataaaagccattgttgccctcacagagtcaggctcaactgcattgatgctatcaagatatagaacgaatatacctatttatgcatttacaaggaatcaggatacccaaaggagagtaagcctctacaggggtgtcatatcctaccaatacccgtttttagttgatagcatggcagacgtaatagaagatgtaaggaaggagcttgttgactcttcaatacttaaatccggagatctaatcgtccttacctctggttctccactgagagtaagcggaggaacaaattctcttcgcctgattaatattttgaaaaaacccgaaagaccttttaga

SEQ ID NO: 249134 - DNA, 908 bp, Unknown
  Bacterial polypeptide expressing nucleotide sequence isolated from the Sargasso Sea
tatgaaacacaaacgtaccaagatcatctgtactgtcgggcctactaccgcgaccttctccagcatcaagaaattacatgaggcaggaatgaatgttgctagattaaatatgtcgcattcagatcataaaaatgcaaaaaagattattgatcgaataaagaaacttaataaaacaatcgataatccagtaggcattttactagatacccaaggtccagaaataagaacaggagatacttctcaaattgtcaatcttgagccaggtcaattagtttctttcacgattcgagatgaggttgatgtggaaactacttcaattagagttcattacgatgaacttattcaaagtgttaatgtagggacattcattagcttagacaatggtctactcaattttaaagtactgaaaaaatcagaaaatgaacttgaatgtaaggtattagatggtgggaaattaggcagcaaaagacatgttaatttacctggtatacgtattaatttgccttcagttacagaaaaggataaaagagacatcgcttttggtttaaaagaggatgtagatttcattgccttatcttttgttagaaatgcttcagatatagatgatttaaaaaagtttcttaagaataaaactaaaaaagtaaaaatcatttctaagattgaagatagagaaggtttatctaatattgaagaaatttgtgaaatttctgactccgtcatggtagcacgaggagatttaggcattgaaactgatcttgcaaatttaccgaatattcaaagaaagataatgtctaactgtgcaaaatacggagtgagatctattgtcgctactcaccttctagaatctatgattgataatcccactcccacaagagcagaagttaccgatgtttgcaaatgcatttatg

SEQ ID NO: 249135 - DNA, 652 bp, Unknown
  Bacterial polypeptide expressing nucleotide sequence isolated from the Sargasso Sea
tttggtaaacctgtggttgtagccactcaaatgttagaaagtatggtttcaaaccatacaccaacaagagctgaagcatctgatgtagcaaatgctatatatgatggaactgatgcagttatgctatctgcagagtccgcaataggattgtttcctgaagaatcagttacaattatgaatagaataattaaaagtgttgaaacagatagtaataattttaatcttgagattacgaatcaagaaagttcatctacaaataaaaaaatcagtacaactgatgcaattacaagtgcagcttacacaatagcaaaaaatgcagaggctaaagctatagtaactttttctgtaagtggaatcacaactatgagaatgtctcgggaaagagctcctgtattaattattggtctttctccaatactagaaacagctagaaaacttcaaatttcttggggggtttattccattcatgccaaacaagatgctcaaaatgcaacagaaatggtaagtatagcctgtaaagctctaaaaaataaacgtttagctgaagctggtaattcaatagttatcaccgcaggagttccttttggaagtgcaggatcaacaaatcttcttaggatagcagagattattgacgataaagatcttacttaag

SEQ ID NO: 249136 - DNA, 832 bp, Unknown
  Bacterial polypeptide expressing nucleotide sequence isolated from the Sargasso Sea
atggaaaagggtgtcaatttcccagagattgcactagatgtaccggttttaacagaccaagacgaaaaggacctcttgctttctcttcaaaaagaggcagactggatagcgttatcttttgtcaggtccccatctgattattctcttataagttcaaagattaaagaagctggatacaagacacccgtcatggcaaaaatagaaaagtgggaagcagtgcaaaacttaaacagtattatagaatccttcgatgctgtcatggttgcaaggggggacttgggagttgagctccccgttgcaaaggtgcctttagttcaaatggatgttgttgaaaaagcacaccagcttggtaagcccgttgttatcgcaacacagatactcgattctatgaccgatcgtccagtcccgacccgagctgaggtcagtgatattgcgaattcaattcttgatggagcagatgctttgatggttactggtgaaactgcaattgggaaccaccccaaaaaggttataaaggtattaaagggagtaataaaagaaacagaatctgcgatcaattatcagagaaatattgagatgccaacaagcaaaacaagcaacactgcaatggcaataagccaagcagcatgttcggttgcgactcatcaaaatattaatgttttggtaaccatgacccacagtggcagcacagctcgaatggctgcacgatacaggtcgactgctaggattgtagccatgacgccctctaaaaaaatatgtcgccaactatcaattgtatggggtgttagtcctatattggttgacgaatatgaatcagctgacgagattcccg

SEQ ID NO: 249137 - DNA, 880 bp, Unknown
  Bacterial polypeptide expressing nucleotide sequence isolated from the Sargasso Sea
atggtgaaaatactgcttcttgttggaaattatttacccggttttaagtctggaggagcattgcgttctaccgtgaacatggttgaaagactcggagatgaatttgagttttggattattacatcagatcgtgatatcggggatacgtctggatattccagagtcaataaaaataaatggaatattgttggaaaagcaaaagtattctatttatctccagcagacagcacaatatggaatatatcaaaaataattaataataccgaacatgacattttatatttgaatagtttttttaatcctgtttttacaatatatccactaattgcaagaagattaaataaacttcctaacaaaccagtcattgttgcgacaaggggtgagtttgcaaagggtgctttaagtattaaaaaatggaaaaaaataatttacataatgttttctaatgccttacgactttataaaaaagttttttggcaggcatcaagtgaatttgaagcaattgacatacgaagagttatgaaaagctattcacctcaagttcatgttgcgccgaacatacctaaatatttaaatttaaatcatttatcttctgatattagggttaaaaaaaatgagaacctattaaagatttgctttttaggaaggattgcacctgttaaaaatttagattatgcccttagagttctttctaagttagatttgccaataaattttgatatttatggacctaaagaagataagaaatattgggatttatgcacagaaattatagatttattgcccaaatcaattgatgttaattatatgggccctatagaaaatgaaggtgtaaatgatatgttttgtaaatatgatctgttttttttaccaacaaaag

SEQ ID NO: 249138 - DNA, 598 bp, Unknown
  Bacterial polypeptide expressing nucleotide sequence isolated from the Sargasso Sea
catgattacaaatttttcacctacaagagctgaagcttcagacgtagcaaatgctatatacgatggtaccgatgcagtaatgctttctggagaatctgctgtaggaaaatatccaattgaaacggttaaagtaatgaatagtattattgaaagtgttgaaaatgacaaagataactttgatttagtgattgacgaaatgcgcatagctaaaaaagtagacaatacagatgcaatcacgaacgcagcttactatattgctaagaatgctgaagctaaagcaataattactttttcagtaagtggtaaaactacaataagaatggctaaagaaagagcgccagtacaaattattggtctatctcctaacttatctactgcaagatacttacaactagtttggggagttaattcttgccatggtgaagatgctcaaagtgctagtgaaatggtgaaaattgcatgttctatagcaaaagaaaaaaaattggttgaaaaagatgataatgttataattaccgcaggtgttcccttcggaaatgcaggttcaacaaaccttcttagaattgcaaaaataattgaagataaaaatcttacgtga

SEQ ID NO: 249139 - DNA, 669 bp, Unknown
  Bacterial polypeptide expressing nucleotide sequence isolated from the Sargasso Sea
aaagattaaagaagctggatacaatacacccgttatggcaaaaatagaaaagtgggaagcagtgcaaaacttaaacagtattatagaatccttcgatgctgtcatggttgcaaggggggacttgggagttgagcttcctgttgcaagggtgcctttagttcaaatggatgttgttgaaaaagcacaccagcttggtaagcccgttgttatcgcaacacagatactcgactctatgaccgatcgtccagtcccgacccgagctgaggttagcgatattgcgaattcaattcttgatggagcagatgctttgatggttactggtgaaactgcaattgggaaccatcccaaaaaggttataagggtattaaagggagtaataaaagaaacagaatctgcgatcaattatcagagaaatattgagatgccaacaagcaaaacaagcaacactgcaatggcaataagccaagcagcatgttcggttgcgactcatcaaaatattaatgttttggtaaccatgacccacagtggcagcacagctcgaatggctgcacgatacaggtcggctgctagaattgtagccatgacgccctctaaaaaaatatgtcgccaactctcaattgtatggggtgttagtcctatattggttgatgaatatgaatcagctgacga

SEQ ID NO: 249140 - DNA, 565 bp, Unknown
  Bacterial polypeptide expressing nucleotide sequence isolated from the Sargasso Sea
aatgaaacgtaacagaaaagctaaaattttagctactttaggacctgcatcatcagataaaaaaataattgaagatttatttgtgggtggttgtgatgtttttagattaaatttttcacatggtaatttagaaacacatagaaaaaattatgaaaccattagatctcttgaagaaaaacataatcatgcatcatgcatattagctgacttacaaggacccaaattaagagtgggtacatttaagaatacaaaagaaaatttagtcaaaggccaaaattttgtattagatctttcaactgctcctggagataataatagagttaactttcctcatgaagaaatttatgattatttaacacctaattctattttattaataaatgatggaaggattagactacaagttattgaacaaaaaaaagatagtttaattacagaagttttaaatgattctgaaatctcaaacaataaaggtgttaatattcctgatgttattcttcctatagatgctcttaccaaaaaagataaatctgatctaatgaaggcattagatatgggagttgat

SEQ ID NO: 249141 - DNA, 184 bp, Unknown
  Bacterial polypeptide expressing nucleotide sequence isolated from the Sargasso Sea
ctgcgccgcacaaaaattgtggcaacggtggggcccgcgagccaaagtcaggacatgattggtcgcctgctgggagcgggcgtcgatgtttttcgcctcaatttcagtcacggggcgcaagccgatcacgcacaggttgcccagcatattcgtcgacaagcgggccatcacgggcgctacgtgg

SEQ ID NO: 249142 - DNA, 676 bp, Unknown
  Bacterial polypeptide expressing nucleotide sequence isolated from the Sargasso Sea
aaatataattagtcgatgcagagattttggtaaacctgtagttgtggctactcaaatgttagaaagtatggtttcaaatcatacaccaacaagagccgaagcatctgatgtagcaaatgctatatatgatggaactgatgcagtaatgctatctgcagagtctgcaataggtttgtttcctgaagaatcagttacgatcatgaatagaataattaaaagcgtagaaacagatagcaataattttaatcttgagattaagaatcaagaaaattcatctatgaataaaaaaatcagtacaactgatgcaattacaagtgcagcttatacaatagcaaaaaatgcagaggctaaagctatagtaactttttctgtaagcggaatcacaactatgagaatgtctcgggaaagagctccggtattaattattggtctttctccaatactagaaacagctagaaaacttcaaatatcatggggggtttattccattcataccaaacaagatgctcaaaatgcgacagaaatggtaagcatagcctgtaaagctctaaaaaataaacgtttagctgaagctggtaattcaatagttatcactgcaggagttccttttggaagtgctggatcaacaaatcttcttaggatagcagagattattgacgataaagatcttacttaa

SEQ ID NO: 249143 - DNA, 758 bp, Unknown
  Bacterial polypeptide expressing nucleotide sequence isolated from the Sargasso Sea
tgaaggaagtctattatgcaaaacaattattcctggaatagttgaaaatagaaaaggggttaattttccaggtgttgctctagatatcccaacattaacagatcaagataaagaagatctaaagctttctttgaaaaatggagcggattggatcgctctttcatttgttagatcggcagaggattttaatattgttagatcaaagataaaaaaattaggctataatgttcctataatggctaaaattgaaaaatgggaagccgtaaaaagcatggaaaaaataattgaaacctttgatgctgttatggttgcgcgaggagaccttggtgttgaggtccctggagaaaaagttcctataattcaaaaaaaaattatcgagaaggcaggacaagccggcaaaccagctgtcattgcaactcaattattagactcaatgattgaaaggcctgttcctactagagcagagataagcgatatagcaaactcaattcttgatggggctgatgcgcttatggtaacaggtgaaacggctattggaaatcatccaataaaggtaattaaagttctaattaaggtaatgaatgagacagagagtagtattgattataaaaactattttatatctaaagatcataaaatactaaatactgcaaaagcaattagtcatgccgcgtgctcggtggcccaagatcaaggtattaatactcttgtaacaatgacacatagcggaagtacagctagaatggttgctcgttata

SEQ ID NO: 249144 - DNA, 577 bp, Unknown
  Bacterial polypeptide expressing nucleotide sequence isolated from the Sargasso Sea
attgaaatattcaataaataattttataaaaaatagacctaaaactaaaattgtctgcaccattggaccttcaactggagaaattgaaatattaaaaaaacttattaaagaaggcatgtctgttgctagattaaatttatctcacggcgaaactaaagaacacattagatatgttgaaaattgcagaaaatcagctgaagaattaaaggttcccctaggcatattaattgatatacctggacctaaatatagagttggaaaacttcctaataattcaatatcgctgaaaaaagggcaaaaaattattttaggttcagtaaatgaaatcgaaaacggaatagctaaaaaaattaaagtatggccagagggcttaaaaaaggatttaaataaaattaaaataatttttctagacgatggtgctataaagttaaatgtacaaaaaaccaaaggaaaggaaatcttttgcacagtcaataatgctgctttactcaaatcaaataaatctgtaacaattcctggtttcatatccaagcttgactattttactgaagaaactgttaaggggcttaaattagca

SEQ ID NO: 249145 - DNA, 697 bp, Unknown
  Bacterial polypeptide expressing nucleotide sequence isolated from the Sargasso Sea
agatgctgtcatggtggcccgaggtgatcttggaattgaaacaagcttagctgatcttccaaatgttcaaaggcgaataatgtatgcatgttcaaaatggggaagaagatctatcgtagctactcacttattagaatcaatgattgagaaaccaacccccaccagagctgaagtaactgatgttgccaacactatttatgagggtgcagatgcaataatgttatcgggcgagacaagtattgggaaatatcctgttgaatgcataaagtttcttaaatctatagctgatcgatcagaaaaatttagaacattaggttatgaggaaaaactgcaattaaatggcgattgggagtacttagctaagacagcaagagacctcgctgagtcaattgatgctgatggcattatcgttattacaagaagtggatatacagcaaaccttgtttccaatgcaaagccattcaacgttccaatttatgctttcacaaatgacaagagagttcatagacagctctcattagttggctctgttttaagtatttatcaaagaagtattgttgataataaaaataatatgtctaaaattgctaatacactcaaaaaagtttttagtaaaaagaaaaaattaaagtttgtacttatttctggaatgttttcagaaaaacactctgatgcaataagggttgtaaacttttaa

SEQ ID NO: 249146 - DNA, 223 bp, Unknown
  Bacterial polypeptide expressing nucleotide sequence isolated from the Sargasso Sea
tatgattagtagaaaaacaaaaatcattgctactataggcccttcttcttctacagttgcaaaattagtaaaaatgatagatgcgggtatgaatgttgctcgggtcaatatgtctcatcatactaacgatgaagaagttgaaaagatagtcgaaaatataaggttggcatcaaaaaaaagtaatgaaactgtatccgttctatttgatatatgcggtcccaaa

SEQ ID NO: 249147 - DNA, 793 bp, Unknown
  Bacterial polypeptide expressing nucleotide sequence isolated from the Sargasso Sea
tatagaattcaacaatattacaaaaggagcaaaaatattaattgatgacggaaaaattcagcttgaggctacgcaaattatctcaaaaaattcaatagaatgtaaaactttaattggtggggaagtactagaaagaaagggtgtaaactttcctggtattttaattgacactccttcacttactcaacaagatatttctgatttaacaatagctttagaagagggtgctgattggattgcactatcatttgttcgatctgaaaaagatatattggctgttcacaaagtaatggatgaaataggaaagcgacttccgataatggcgaagatagaaaagtgggaggcacttgaaaaacttgatttgattgcaaatgcatttgatggaattatggttgcccgtggagatcttggtgttgaaattcctgcggaacaagttccattagcacaaaaacgtataattaatttagctggagcattagggaaaccagttgtgattgccacacaattattagaatctatggttgatagtaaaacaccaacaagagctgaagttagtgatattgccaatgctatctatgatagtgcggatgccttaatggtaacaggcgaaacagctattggaaaaaatcctgtagatgtaatcaaaacattaaaattagtgattatcgaaactgaaagatccgtagactctaatcgactccctttacccgaggatattaataaaattccggatgctattagtcatgctgtttcccaaattgctcgaaacttagatattaatttaattatgact

SEQ ID NO: 249148 - DNA, 799 bp, Unknown
  Bacterial polypeptide expressing nucleotide sequence isolated from the Sargasso Sea
attgcatgatgatacaaaagtaatagctaaaattgaacttaagtctgcagtaaaaaatctaaaatcaattattcaagagtcagatggagtaatggtagcaaggggtgatttaggtgtacaacttcctcttgagagaattccgctcgttcaaaaagagatattaaatgaaacaaatttacagggaaaaataacgattacagctactgaaatgttaacttctatgatttcttctcataggcctacaagagcagaggtttcggatattactaatgcaataatcgatggaactgatgctgtaatgttgtcagcggaaacctcaatcggtgaaaacccaattgaagttgtcagtgctatggcaaagatttgtagtgaggtagatagtgtttctggtacaaaaataacttcatctaaagacatattgacttctgatgaactaacaaattctctttcaaaagctgcagtacaagtagcaaatgattctaatgcaaaggcaatcgtagcttttactgaaactggtaaaacagcattgttgatttcaaatcatcgaccagacgctccaatttttacatttacaactgttgaaaagacttttaatcaacttaatttgatatggggagttgaacagataaagatagagagattggaaactactgatgagatgtttgcgattgcaaatcaatggttaactgaagaaatgaattttttaaaaaatgataaagtagttattgtcgctggtacacctccaaataaagaggcagcaactaaccttattagagtaatgaagattggtgaattttaa

SEQ ID NO: 249149 - DNA, 1344 bp, Unknown
  Bacterial polypeptide expressing nucleotide sequence isolated from the Sargasso Sea
aacttattttatcaggtgttgatgcctttagaattaattgctcgcacacaaatgaaaatcaactcaaaagttatgttcgaaaaataagaaatgcagagagaaaattaaaaaaatccataggaatacttatagatcttcaagggcctaaattaaggctaggagaaataaaaggcgatgaatttttaataactaggggttataaagttttaatagttaataaaaatataagttcaaaaaaaaatgaaattcctataccagaaaaaaaaattttcgaaagcattaaaaccaatcatccaatatttattgatgatggcaaaataaaattaaaagttttaaaaattactaataataatatcgaggcaaaagtaattcagggaggtactctcaaaagtaaaaaaggtattaatcttcccaaaacaatactaaaaagctctgcattaacatcgatagatcgagcaaatgtaaaaaaaggtataaatttaggtattgattgggtcgcattatcatttattcagtctcaagaagatatcaaagaattaagaaaaatatgtaagaataaagtttcaataatggcaaaaattgaaaaaccaaacgcattaaaacatattaaaaaaattacagaatatgctgatggtcttatgattgccagaggggatttgggtgtggagcttcctatccaagatgttccaggttggcaaaaaagaataattagggaagcaagaattcaaggaaagcctgttgttgtttctactcaaatgcttgaatcaatggtatcatcacctactcctactagagcagaagtatctgatgttgctactgcagtttttgaaggcgctgatgctgtaatgttatcagctgaatctgctgtaggtgacaacgcacagttagcagtaaagatgatgaatgatattgctttaagcgcggaacaaaatccaaactatacttctatactatcagcccaactcgaggaaacacctgacagtacaccagatgcgattgcaacagcctcaagaacactagctacagaactaaattcatctttaattgtttgttataccgagtccggatcgacaggaattaaagtttcgagagttcgtccaaaacaaatgattctaactgttacaccagttattcaaaccgcaagaaaactttcactggtttggggtgttaactgcattgttcaaaaagacgctaatgatcttgaagaaatgattaaaattacaaaatcatattctaaaagagaaaaattaacaaagaaaggtgaaaaaattgttgttacagctgggttacctttaaaaaaacttggaacaaccaacttaataagagtgataaaagtcgattaat

SEQ ID NO: 249150 - DNA, 1405 bp, Unknown
  Bacterial polypeptide expressing nucleotide sequence isolated from the Sargasso Sea
atgagacgtacaaaaataatatccacttttgggccatccatttctgaccctaagatcctaaaggaagtttgtaaattctcggatgtgattagaatcaatttagctcatggcacatgggatgagagtgaagaatacaatcataaaaaaaatattcatctcattcaggaaatttcaaaagatttgaataaacctgttgggattcaagttgatcttagaggcaacaagatcagaatcagcgactttaaaaatcattttatcgagttagaaaatgcctccgaaatagatgtcatctttacaaaagagcaaaagacagataatcacgaaatcttcattgatgccgattattgtttttccaagattgaagtgggagataagatcctacttgatgacggtttgattcagttaattgttaacaagattgattctaagaataagaaactaaattgcatcgttgaaaacggcggtttactaaagagcaataaaggttttgaggttgagaataagataatacatcggtcaggactaggagaagaagacaaaagggacattaaaaaattggctgaattaaacatcgattggattgctctttcttttgtgaatgaggcaagtgatgtaacacaggctagagaggttcttgctcagattggtagtccaatcaatctgattgcaaaaatagaacgccttgaagcgctaaaacaactattttggattattaaagcaagcgatggagttatggttgcaagaggtgatcttgcattagaatctggtccaggagagctcactggtcttcaaaaagacatcattaagcaaaccgtcaaaggaaaaagaattgcaataaccgctacccagatgatggagtctatgatttcaaatccaacacctaccagagcggaaatgacagatgtatccaatgccgttttagacggtaccgatgcagttatgctttccgcggagactgcgataggaaagtatcccatagagacagtgaaagcgatgcacgaagtttgtgaaggcgcagagacttatcaagaatccattacaaagaatgaagagtataaattttccgaaatcaacaatattgatgaatccattgctattagctctatgagcattgccagaaatatggaaattaaggccatcgttgctttgacagaatctggttcaacagcattgatgctttcaagatatcgaacaaatattccaatttatgcctttactagaaatgaggatacgcaaagaagagtgagtctttatagaggcgttatttcatatcagtatccatttctagtcgatagcatggctgaagtaattgatgatgtcaggaaagagctggttggttcatcaatactaaaaacaggtgatcttatagtcattacatcgggttcaccattaagagtcagcggag

SEQ ID NO: 249151 - DNA, 1105 bp, Unknown
  Bacterial polypeptide expressing nucleotide sequence isolated from the Sargasso Sea
tatgaatacaaatacaaaaatcattgctacggttggaccttcttgtgataataaagaagtattacaatcgatgattgattcaggagttaatacatttcgattaaatatgtcgcatggggatgaaaaatcaaaaagaaaattatatgatttaataaaatctcttaaaacaaaaactggtaaaagacccgcaattttaacagatctagcaggtcccaagatcagaattgttggacttaaagaagagttagtaataaatgaaaatgaatctattatagtatctaatgagccccattttaaagaagatcatctaaaagtgactggtggtatccatttttccaatatgttaagtggagcagaagttctgattgatgatggacgtattaagctagaggtctctgaagttatttctaaacatacattaaaatgtaaaacagtaatcgggggcgaaataagtaatagaaaaggtgtgaattttccaggaataacgcttgaaaccccatctttaactgaagaagatatcattgatttaaaaatggctttagagcaaggagccgattggattgcactatcctttgttcgttgcgcggatgatgtgcgagctgttcataaagttatggatgaacatcgcaaacgtatgcctgtaatggcaaaaattgaaaaatgggaatcattagaaaaccttgaagaaattactaatgcttttgacggtattatggttgctcgtggtgacttaggagtcgaaacacctgcatcaaaagtccctttagctcaaaaaaagatcgttgatttggccagcaccatgggcaaaccagttgttattgctacacagttacttgaatctatgattgatagcaaaacccctactcgagctgaagtaagtgatattgctaatgcaatttttgatggggtagatgctcttttagttacaggtgaaacagctattggtaaatatccagtagatgtaatcaaaatactcaaacaagtaatttttgagaccgaatctgctacaaaattttctgactatttactttctgaaaaattaaataaaacctctgatgcaataagtcatgccgtctgtgaaatcgctactaatcttaatataagt

SEQ ID NO: 249152 - DNA, 1771 bp, Unknown
  Bacterial polypeptide expressing nucleotide sequence isolated from the Sargasso Sea
atgggttggataaaaaatagagagcatttacatgaagcggccgtttcaacagtgaaagctatatcaaaaaacaaaaaaataacatcaaataaaggtctatcacaaagacctccaatgggtaatcatataattattccatctgcaccaagatctaataaagatataaaacaatggagaggtgaatcagattttcaagctttttggcatctttttcactcaaaaacaaaagaaccacccttaactcttccagcaagaatgatctttaatgagttagaaatctcaagagtagaattattaggctgtttagaatatttaggctctaaagaaaatatatctaactttatcgaagctaaaagtctgagtcttaatgatgaaaaatcgcttaattttttatcttatggtgcaaatttatggttaaaaaatgctgcggaatttaagttaagtgaaacatcaaaaaatattctaaataaatttaatgaaaaatataaattggatagctctttggatcctatcaaagcagatcttttagctaatataaaagatcagaaaaaatttgaaaaaatatctattaaatttcttaagaaattaaagttaattaaggagagtgcggaagaccaagaagatgatagtgaattaaatgaatctcctggttcaaatgatgaattaaatgaacaagatttaaacctagatggagattctagcgaagaacaaaaagcagatctcaaagattttaaaggtgatattgatattgatattcaagatgctattgataaaactgatgacacttcaatagatgaggaaatagaagctttagcatatccaaataaccaatttaacgctcaacataaaaaagattattcaatttatacaacaaattttgatgaaataattgaagccaaagatttaataacaacagatgaatctttaaggctaagaaatcaattagataatttaattaagccacatctgcctactattggaaggctcgcaaatagattacaaagattactgttggctaaacaacatactagctggaattacaacttagatgaaggcatgttggataatgctcgactgcatagagttatagctaacccgggatatcctttaagctttaaacaagaaacagaaaataattttaaagacactgttgttacccttctaattgataattctggttcaatgagaggaagatctattagtttagctgccatttgtacagatatcattggaagtactttagagagatgtcaggttaaaactgagatacttggatttactactaaacactggaaaggtggagattctaagaaattatggcaaattaatggagggagttctaatccaggtcgattgaatgacattaggcacataatatataaaagtgctgacaatagttggagaagatcgagaaaatattttggtgcaatgctaagagaaggattgctaaaagaaaatgtagatggtgaagcgcttgcttggtcgcatgagcggttaaccaaaagaccagaagaaagaaaaatattaattgttatatcagatggagctccagtggatgatagtactttgtcagcaaatagagaggatttcctagacaatcatctaagagaaataatctctaaaatagaaaatgaaagccctattgagttgcaggcaattggtataggacatgatgtaacaaaatactacaaaaatgcactaaccattaatagagctgaagaacttggtgaagtcttgttagatgaattaacaaaacttttcaatgattaac

SEQ ID NO: 249153 - DNA, 976 bp, Unknown
  Bacterial polypeptide expressing nucleotide sequence isolated from the Sargasso Sea
gttgtggggagaactaagatccaatcaaggagttgctttcccagattcttcactttcactcgccactcttacggataaagataaaaacgatattgaatttggtaaccaattagatgttgattttgttgctgtctcgtttgttagagatgttgatgatattcttaatgtcaaaaagttaattaatcctaacacaatggtaattgccaagattgaacttaaatctgctgtcaaaaacctgaaatcaataattgaagaatctgatggtgttatggtagcacgaggagacttgggtgttcaattacctcttgagcgtatacctttcatacaaaaggaaattttgaatgaaagtaacctacagggaaaaatcacgattactgcaactgaaatgcttacatcaatgatcagctcatatcgaccaacaagagcagaggtttctgatataaccaatgcaattttagatggtacagattcagttatgttatctgctgaaacatcaattggagataatccaattctatcagtccaagcaatggcaaatatctgtgaagaggtagatgagacctcaaataaaaactatttgaacaaaaaagatatttcagtttctaacgaaattacaaattcactatctaaagctgcagttcaggtagcaaatgattcaaatgcaaaagcaattgttgcttttactgaaacaggaagaactccactattactatctaatcacagaccagacgctccaatatttacattcactacaatcgacaaaacttataatcagttaaatttgttttggggagtagagcaagtaaaaattaatagactagaaactactgacgaaatgttttctattgctaataagtggttaaaagatgaaatgaattttaagaaaaatgatacagttgtaatcgttgctggtacacctccaaataaagaggcagcaactaatcttattagggtaatgaagattggcgaattttaa

SEQ ID NO: 249154 - DNA, 424 bp, Unknown
  Bacterial polypeptide expressing nucleotide sequence isolated from the Sargasso Sea
aatggcaagaaaaactaaaattattgcaacaattggcccaagcgttaattctaaagaactagttgatgagataattgatgcgggtgccaatgtacttcgacttaatttttctcatggtactcatgaagatcataaaaaagttgttgaatgggcaagatcttcaaataaaaaaattgcaattatgcaagacattcaaggacccaaaataagaacaggtaaattagagcaacctattcacttagagagagataaagaaataaagctatcaaatgacattaaatcaaaagataaagaagccatatcaataaattatgaaaatttgttcaaggacattcacgaaggtgaaagagttttgatcgatgatggacaaatcgtattaagaatttctaagaaaacaaaaactaaatttacttcaattatttga

SEQ ID NO: 249155 - DNA, 1438 bp, Unknown
  Bacterial polypeptide expressing nucleotide sequence isolated from the Sargasso Sea
tatgagacgcacaaaaatcatatcaacttttggaccatcaatcgcagatccaaaaatattacaggatgtttgtgaatatgcagacgttatcaggatcaatttagcccatggtacatgggatgagaatgagaaatataatcataaaagaaatattcaactcattcaggagatagcgaagaaactgaaaaaacccgtagctattttggttgatctaaagggaaataagatcagaattggtgattttaagaatcatatgattgagctggaacatgcttcagatatcaatgtcatatttactcaagagaagaagactgataatcatgagatttttattgatgccgactattgctttcccaaaattgagattggagataggattttgcttgatgacggtttaatccaattaactgttaaaagtatcaatcaaaagaatatggcccttaaatgtcaggtcgagaaggggggtttacttagaagcaataaaggatttgaggttgagaataagattattcaccgctcaggactcggggaagaagataaaaaagatataaagaggttggcggaattaggtattgactggattgccctatcttttgtcaatgaagccagcgatgtaacacaagcaagagaggttttaactcaaattggtagccgaataaatttaattgctaagattgaaaggcttgaggcgctaaaacagctcttttggattatcaaagcaagcgatggagtcatggttgcaagaggcgatttagctctagagtctggaccaggcgagctgacagggcttcaaaaagatatcatcaaacaaaccgttaagggaaaaaggattgcaataacagctactcaaatgatggagtcaatgatttcaaatccaacccctacaagagcagaaatgacagatgtttctaatgcagttttagatggaacagatgccgtgatgctttcggcagaaacagcaatcggaaaacaccccgttgagactgtgaaagccatgcatgaagtttgtatgggtgctgaaacatatcaagaatcaataacaaaaaatgaagagtataaattttctgaaatcaacaatatcgatgaagccattgcgattagctcaatgagtattgctagaaatatggaaatcaaagcgattgttgctcttacagagtcaggctcaacagcattgatgctctcaagatatcgaaccaatataccaatatatgcctttaccagaaatgaagatactcaaagaagagtaagtctttacaggggtgttatttcgtatcaatatccatttttagtcgatagcatggctgatgtaatagaagatgtgagaagtgagcttattggctcttccatacttaaagcaggtgatttgatagttcttacttctgggtctccattgagagtcagtggcgggacaaattcacttcgcctgattaatatatga

SEQ ID NO: 249156 - DNA, 718 bp, Unknown
  Bacterial polypeptide expressing nucleotide sequence isolated from the Sargasso Sea
tatggaggggttaatccgttggtgggtgcgtaatccggttgccgcaaatctccttatgctcattgtcatcaccgcggggtatttgggattgcgtgacattgagaaagaggcgctccccgcagttcagccagatatcgttcaggtagaggtcatttggccgggcgccgctccaaaggaagtagagcaacaagtcgttcaacgagttgagcaggtgttgaaaaacgttcctaacgtttatcgggtgacgtcggatgcccgggatagttatggatcagtcactgtacaaaccttcccaaccgtcgacctaaatagttttcttaatgatgtcaaaaatgccgtcgattcggtaactgcgttcccgcgtgacattgaaaatccttcagtgcgtcgactagagtggagaaagacgatgatgcgggtcgtcgtggcgggcgagatcggcgagagagcgcttactcgccttgggcaacggttgcgcaaccagttagcgaaccttccttacatctcacaggtagacattgccgcctcgcgtcgagaggaagtcactatccagctttcagagcgggatctgcaaaatttcggactaagcttctccgatgtggccaacgcaattcgtcgggattcgatgaatgtctcagttggcgaagtccgcacagaaactggcgatgttcaactcagagcacagaatctagcggacactcaaagcgacttgaacgga

SEQ ID NO: 249157 - DNA, 730 bp, Unknown
  Bacterial polypeptide expressing nucleotide sequence isolated from the Sargasso Sea
aatgaaacgtaacagaaaagctaaaattttagctacattaggacctgcatcatcagataaaaaaataatagaagatttatttgtggctggatgtgatgtttttagattaaatttttcgcatggtgatttagaaactcatagaaaaaattatgaaactattagatctattgaagaaaaacataatcatgcatcatgcatattagctgatttacaagggcccaagttaagagtgggtacatttaaaaatataaaagaaaatttagttaaaggtcaaaattttatactagatctttcaactgaacccggagataataatagggttaactttccccatgaagaaatatatgattttttaacacctaattctactttattactaaatgatggaaggattagattacaagttgttgaacaaaaaaaagatagtttaataacagaagttttaaatgatgctgaaatatcaaataacaaaggtgtaaatattccagatgttattcttccaatagacgctcttaccaaaaaagacaaatctgatcttatgaaggcattagatatgggagttgattgggttgcactttctttcgtgcaacaagaagaggatattatcaaactaaaaaaaataattaataataaagcactcgtgatggcaaaaattgaaaaaccttcagcagtaaaaaatattgatgatattataaatgctgcagatggtattatgatagccagaaggtga

SEQ ID NO: 249158 - DNA, 838 bp, Unknown
  Bacterial polypeptide expressing nucleotide sequence isolated from the Sargasso Sea
aatgattaaaaattatagaaaaactaaaattcttgcaactataggcccctcttccgaaaaaattactaaaattgaaaaacttatttcaagcggagtcgatgcttttaggattaattgttctcatacaacagaatctcaatttgaaagttatatcaaaaatattaggaaagtagaaaaaaaattaaaaaaaccaattggaatattaattgatctacagggccctaaactaagaataggtgaaatagaaaataatatacctcttaaaagaggtcagaagcttttatttataaatagtaaaaaaagttcaaaatcaaatgaagttcctttaccagaggaaaaagttttcaaaagcattaaagtaaatcatccaatatttatagatgatggtaaaataaaattaaaagtattaaaagtttacaaaaatattattgaaacaaaagttcttttagaaggagtattaaaaagtaaaaaaggtataaatttacctgaaacagttttaaaaaattctgcgttaacatcaaaagataaaaaaaatgtcaaaaaaggaatagagcttggtgttgattggattgctctgtcatttatacaatcgccagaagatattaaggacttaagaaaaatctgtaaaaaaaatgtttctataatggcaaaaattgagaaacccactgcgttaaatcatatcaataaaattactgaattagctgatggccttatgatagcaagaggagatcttggagttgaattaccaatccaagatgttcccagttggcaaaaaagaattattagagaggcaagaatgcaaggaaaaacctgttgttgtatccacacaaatgcttga

SEQ ID NO: 249159 - DNA, 1438 bp, Unknown
  Bacterial polypeptide expressing nucleotide sequence isolated from the Sargasso Sea
tatgagacgcacaaaaatcatatcaacttttggaccatcaatctcagatccaaaaatactgaagaatgtttgtcagtatgcagacgttatcaggatcaatttagcccacgggacatgggatgagaatgagaaatataatcataaaaaaaatattcaactcatccaggagactgcgaagaaactgaaaaagcccgtcgccattctggttgacttaaaaggcaataagataagaattggtgactttaaggatcatatgattgagcttgagcatgcttcagacatcgatatcatattcaccaaagagaaaaagacaaacaagcatgagatcttcattgatgctgactattgttttccaaacattgaagttggtgacaagattttacttgatgatggtttgatccaattagtagttgaaaggacaaaccaaaaaaatatgattcttcattgcaaggttgagaagggcggtttacttagaagtaacaaaggatttgaggttgagaataagatcattcaccgctcaggacttggggaagaagataaaaaagatataaagagattggcggaattaggtattgactggattgccttatcttttgtcaatgaagccagcgatgtcactcaagcaagggaagttttaactcagattgggagtccaattaatttaatcgccaagattgaaaggcttgaggcactcaagcaactcttttggattatcaaagctagcgatggggtcatggttgccagaggcgatcttgctttagagtctggaccaggcgagctgacagggcttcaaaaagacatcattaagcaaacagttaaaggaaaaaggattgcaataactgctactcaaatgatggagtcaatgatcacaaatccaactccaacaagagcagaaatgactgacgtttccaatgccgttttagatggaactgatgccgtgatgctttcagcagaaacggcaatcggaaaataccccgttgagactgtgaaagccatgcatgaagtttgcatgggtgctgaaacatatcaagaatcaatcacaaagaacgaagagtataaattttctgaaatcaacaatatcgatgaagccattgctattagttcaatgagtatcgctagaaatatggaaatcaaagccattgttgctctaacagagtccggctcaaccgcattgatgctttcaagatatcgtaccaatatacctatatatgcctttaccagaaatgaggatacgcaaagaagagtaagtctttacaggggtgttatttcatatcaatatccatttttagtcgacagcatggccgatgtaattgaagacgttagaagtgagcttgttggctcttcgatacttaaatcaggagatttgatcgtactcacttctggatctcctttgagagtgagcggcggaacaaattctcttcgcttaatcaatatatga

SEQ ID NO: 249160 - DNA, 772 bp, Unknown
  Bacterial polypeptide expressing nucleotide sequence isolated from the Sargasso Sea
atgacaaaatatatacatgctttctcagatcctataactgatgaaattgatcaatcgttaataggtaataaaggttataatctatgtcttatgcacggaatggatttacctattcctgagggctttataattacctcaaaagctactaaagaattcaaaaaaaagaacaattttggtgatgaatttacaaaggaattgaaaggcaatttaaattggatccaagaaaaggcaaaccttcaagttggtaacccagaaaaacctcttattttatctgttcgttcaggttcagtgatatctatgccaggaatgcttgatacaattttaaatgttggtctaaatcaaaatatagttaaaaaactggcagaaaacaaaagtggtttttttgcttatgatacatggagaagatttatacaaatgtattctcatgtggttcataggattgataattatgattttgatgaaatacttgaaaattatctacttggtgcaaatttaagtaatgttagccaattagatgcagaagacttagaggaaataagcaaaatgtatctgaatctctttaatgagagaataggtgaggattttcctgaagacccatatcagcagataaatgactctataatagcagttttaaattcatgggataatgaaagagcgatttcttaccgaagcattaatgatatacctcaggatataggtttagcggtaactattcaaagaatggtttttgggaatttgaacgatcaaagtgcatcaggtgtaattttttaaa

SEQ ID NO: 249161 - DNA, 143 bp, Unknown
  Bacterial polypeptide expressing nucleotide sequence isolated from the Sargasso Sea
tatgaaattcaaaagaactaaaattatttgcaccataggaccctcaacagagagtttctcaagtattaaaaaacttcatgaagctggtatgaatgtagctagattaaatatgtctcattccaatcataaaaatgcaaagaaga

SEQ ID NO: 249162 - DNA, 472 bp, Unknown
  Bacterial polypeptide expressing nucleotide sequence isolated from the Sargasso Sea
atgcccagaagaactaaaatagtcgccacccttggaccagcaacgaattcacaagccattattgaaaaactgatcctggcgggcgccagcgtatttcggtttaacttttctcatggcagcgccgaagatcataagcagcgcgctgaaatggtgcgtgccgcagcggccaataccggcgctcacgtcgctattctgggtgatttacaaggccctaagatccgcgtatctaccttcaaaaacggctctgtcattttggaagaagaccaacactttgtattagacgctgatttgccaaaaggcgaaggcgatgaaacacaagtgggtatcgactataaagaattacctgctgatgttcagccaggtgatgtgctgttgttagacgacggccgtatccagatgatcgttgagcacgttgtaggtcaacgtattcatactaaggtgtctgtggcaggtaaactcagcaacaacaaag

SEQ ID NO: 249163 - DNA, 700 bp, Unknown
  Bacterial polypeptide expressing nucleotide sequence isolated from the Sargasso Sea
aatgaaacgtaacagaaaagctaaaattttagctactttaggacctgcatcatcagataaaaaaataatagaagatttatttgtggctggatgtgatgttttcagattaaatttttcacacggtgatttagaaactcatagaaaaaattatgaaattattagatctctcgaagaaaaacataatcatgcatcatgcatattagctgacttacaaggacccaagttaagagtgggttcatttaagaatacaaaagaaaatttagttaaaggtcaaaattttatactagatctttcaacggagcctggagataataatagggttaactttccccatgaagaaatatatgattttttaacacctaattctattttattagtaaatgatggaaggattagattacaagttgttgaacaaaaaaaagatagtttaattacagaagttttaaatgatgctgaaatctcaaataacaaaggtgtaaatatacctgatataattcttcctatagacgcccttaccaaaaaagataaatctgatcttatgaaggcattagatatgggagttgattgggttgcactttctttcgtgcaacaagcagaggatatacacaaactaaaaaaaataattaacaataaagcactcgtgatggcaaaaattgaaaagccttcagcagtaaaaaatattgatgatattattaatgct

SEQ ID NO: 249164 - DNA, 1669 bp, Unknown
  Bacterial polypeptide expressing nucleotide sequence isolated from the Sargasso Sea
atgacaaaatatatacacgctttttcagatcctataactgatgaaattgatcaatcattgataggtaataaaggctataatctgtgtttaatgcatggaatggacttacctattcctgaaggatttataattaacgcaaatgccactaaagaatataaaattcaaaataattttagtgataaattttttgatgaattaaaaattaatttagaccttattcaagataagacaaatcttcaaattgggaatccagaaaaaccgctaatcttatcagtgagatcaggctcaatgatatcaatgccaggaatgcttgatacaattttaaatgtaggcctaaatcatgaaatagttaaaactttagcaaaaaataacaatggtttttttgcatatgatacatggagaagatttattcaaatgtattctcatgttgttcatagagtcgatacttatgattttgatgaaatactggaaaattatcttcttggagccaatttaaatgctgttagtcaattagatgctgaagacttagaagaaatatgtaaaatgtatttggatctattcagggaaagagtgggtaaagattttcccgaagatccatatgatcaaataaataaatccataattgctgttttaaattcatgggataatgaaagggcgatttcataccgaaatataaatgatattcctgataatattggtctagcagtaactatacaaagaatggtttttggaaatttaaacgataaaagtgcttctggtgttattttttcaagaaatccagatacaggtgaagataagattaaaggagagtatttaattgagtcacaaggagaagatgttgtttcagggtttgttacaccaaaaaatatttcggaaaaagccaatgatgaagctttcataaatatttttccggatatttattctcaaataaatataatttctaaagatttagaaaggtattttgggtttgttcaggatattgaatttacaattgagtcaaatatattatgggttttgcaatcacgagatgcagagttaaacgctcaagcatcttttaaggttttaagtgattttgttaatgaaaaaataataaatcaaactgaagctttaaaattaatcaaagatgcccatattgaaaaagcttttgttccaattcttgatgattcacaaaagttaaaaagtttaacaaaaggattaccagcatctccaggagtagtatcgggtttagttgcttttgatattgaaggaataaatagaattaaaaatagagatgagaaatctatattaattcttattgaaacaaatactaatgatattaaagccatgcatgcatctgatggtatattaacttctagaggagggcttactagccatgctgcagttgttgcaagaggtttaaataagccttgtattacaggcgccatagaaattgaaataaaccccaaagacaaaaatatttctattaatgataaagttatttctgaatttgatacaattacccttgatggccattcaggagaagtttttgagggtatagcaaaaacaaaacttcaagaaccaacttcagatctaaaagaaatactagattggtgtaaagagatcgtttctgatgaggaaattattgaccctttaaagattattagtaaagccaaattaaagttagagtaaa

SEQ ID NO: 249165 - DNA, 1438 bp, Unknown
  Bacterial polypeptide expressing nucleotide sequence isolated from the Sargasso Sea
atgagacgtacaaaaataatatccacatttgggccatccatttctgaccctaagatattaaaggaagtttgtaaattctcagatgtgattagaatcaatttagctcatggcacatgggatgagggcgaagaatataatcataaaaaaaacattcaactcattcaggaaatctcaaaagatctgaataagcctgttgggattcaagttgatcttagaggtaataagatcagaataggcgattttaaaaatcattttattgagttagagaatgcttccgaaatcgatgttatttttacaaaagagcaaaagacagataatcatgaaatcttcattgatgccgattattgtttttccaagattgaagtgggagataagatcctacttgatgacggtttgattcaattgattgttaacaaggttgattctgcgaatatgaaactaaattgcatagttgagaatggcggtttactcaaggctaataaaggttttgaggttgagaataagataattcatcgatcaggacttggtgaggaagacaagagggatatcgaaagattggctgaactaaatattgattggatagccctttcttttgtgaatgaggctagcgatgtcacgcaggctagagaggttctgacccagataggttgttcaattaatttgattgcaaaaatagaacgtcttgaagcactaaaacaactattttggattattaaagcaagcgatggggttatggttgcaagaggtgatcttgcattagaatcaggacctggagaactcactggtcttcaaaaagacatcattaagcaaactgtcaaaggaaaaagaatcgcaataactgctacccagatgatggaatctatgatttcaaatccaacacctaccagagcggaaatgacagatgtctccaatgccgtcctagacggaacagatgcggttatgctttctgcggagactgcgataggaaaataccccatagagactgtggaagcgatgcatgaagtttgtgagggcgcagagacttatcaagaatcaattacaaagaatgaagagtataaattttcagaaatcaataatattgatgaatccattgctatcagttctatgagcattgcaagaaatatggaaattaaggctatcgtcgctttgacagaatccggttcgacagcattgatgctttcaagatatcgaacaaatattccaatttatgcctttactcgaaatgaggatacgcaaagaagagtgagcctctatagaggggtaatctcatatagctatccttttctagttgatagcatggctgaggtaatcgaggatgtaaggaaagaacttgtgggttcatccatactaaaaacaggtgatcttatagtcattacatcggggtcaccattaagagtcagtggaggaacaaattctcttcgtttaattcatatttaaa

SEQ ID NO: 249166 - DNA, 394 bp, Unknown
  Bacterial polypeptide expressing nucleotide sequence isolated from the Sargasso Sea
atgaaacgtaatagaaaagctaaaattttagctaccttaggtccttcttcttcagataaaaaaactattgaagagctttttagagctggatgtgatgtatttagacttaacttctctcatggtgatattgaagtacatagaaaaaattatgaatttattagatctttagaggataaatataaccatgcaacttgtgtattggcagatttacaaggtccaaaattaagagttggtttatttaaaaatactaaagagaatttagttaaaggagaaaaatttatattagatctatcatcagatcctggagataataaaagagtaaattttcctcatgctgaaatttatgaatttttaaccccaaattctatattgctagtgaatgatggtaggataa

SEQ ID NO: 249167 - DNA, 1132 bp, Unknown
  Bacterial polypeptide expressing nucleotide sequence isolated from the Sargasso Sea
acatctgaattaagcacaatgcaaaagatgtatgcagctggaatgaatgtcgttcgaattaatatgtcacatgcatctcatgatgaagcattgaatgtaattaaaaatgttaaattaattaataagaatccagatattaaaaaggggccaatttcgattttaatagatactcaaggcccagaaatcagaacaggggatagggatacatctcttgatttaaaacttggcgataaagtaaacctaactgtaagagatgaggtcgatgttgaaacatcatctatcaagattaactataggggattgattaacagtgttaaaaaaggttctaagatttctgtagataatggcctagtaaattttaaagttttagaaaaacatgacgataagcttttgtgtagagttattgatggaggaaaaattggaagtaaaagaagtgttaatctcccaggagtgaggattgaccttccttcaataactaaaaaagacaaagccgatataaattttgctatcaagcatgatgtagattacatagctctttcctttgttcgaaaaattgaagatattcatagcttaagaaagatcttaaagagaaagaaatcacaaataaaaattgtttcaaagattgaagataatgaaggcctttctaatattcatgctattacacaagaatcagatgctgttatggttgcccgaggtgatcttggaattgaaactagcttggctgatcttccaaatgttcaaagacgcataatgtatgcatgttcaaaatggggaagaagatctatcgtagctactcacttattagaatcaatgatagagaagccaacacctaccagagctgaagtaactgatgttgctaacactatttatgagggtgcagatgcaatcatgctgtctggcgagactagcattgggaaatatccaactgaatgcataaaatttcttaaatctatagctgatagatcagaaaaatttagaacattagggtatgaagaaaaacttcaattaagtggagattgggaatacttagctaagactgcaagggatcttgctgagtcgattaatgctgatggtattatcgttattacgagaagcgggtatacagcaaacctagtttccaatgcaaagccat

SEQ ID NO: 249168 - DNA, 382 bp, Unknown
  Bacterial polypeptide expressing nucleotide sequence isolated from the Sargasso Sea
atgggattaagccgaggcaacagacacgggtcgtacgtcgacctctccaaggaggcgacgagcggtggacagacgtcgattctcgataacgtgggtgtccgcacggatggatctttcaaatcgaagatcatctgtacgctcgggccggtgtcgagaacggtggagattttggaacagatgttgcgcgccggcatgtccatcgcgcgattcaacttttcgcacgggtcgcacgagtaccatcaagagacgttggataaccttcgcacggcgtgcgcgaacacgggcattcagtgcggtgtcttgctcgacaccaagggtccggagattcgcacgggtatgctcgcgtgcggcggtccggtgatgctcgaggctggcaacgaag

SEQ ID NO: 249169 - DNA, 778 bp, Unknown
  Bacterial polypeptide expressing nucleotide sequence isolated from the Sargasso Sea
tttgattgcaaaaatagaacgtcttgaagcgctaaaacaactattttggattattaaagcaagcgatggagttatggttgcaagaggtgatcttgcattagaatctggtccaggagagctcactggtcttcaaaaagacatcattaagcaaaccgtcaaaggaaaaagaattgcaataactgctacccagatgatggagtctatgatttcaaatccaacacctaccagagcggaaatgacagatgtctccaatgccgttttagacggtaccgatgcagttatgctttccgcggagactgcgataggaaagtatcccatagagacagtggaagcgatgcacgaagtttgtgaaggcgcagagacttatcaagaatcaattacaaagaatgaagagtataaattttctgaaatcaataatattgatgaatccattgctattagctctatgagcattgctagaaatatggaaattaaggctatcgttgctttgacagaatctggttcaacagcattgatgctttcaagatatcgaacaaatattccaatttatgcctttactagaaatgaggatacacaaagaagagtgagtctttatagaggcgttatttcatatcagtatccatttctagtcgatagcatggctgaagtaattgaagatgtcaggaaagagcttgttggttcatcaatactaaaaacaggtgatcttatagtcattacatcgggttcaccattaagagtcagcggaggaacaaattctcttcgtttaattcatatttaa

SEQ ID NO: 249170 - DNA, 985 bp, Unknown
  Bacterial polypeptide expressing nucleotide sequence isolated from the Sargasso Sea
tgatgtagaaattggtggagaattaaggtcaaatcaaggtgtcgctttcccagattctaatttatcagtttcaactttaacgaaaaaagatattgaagatttagagttcggcaatcaacttggggttgattttgttgctgtttcttttgttcgaaacgcagaggatattataaatgtcaaaaaatacattgatgatgatacaaaagtaatagcaaaaattgaacttaagtctgcagtaaaaaatctaaaatcaatcattcaagagtcagatggagtaatggtagcaaggggtgatttaggtgtacaacttcctcttgagagaattccgctcgttcaaaaagagatattaaatgaaacaaatttacagggaaaaattacgattacagctactgaaatgttaacttctatgatttcttctcatcgccctacaagagcagaggtttcggatattacaaatgcaatactcgatggaactgatgctgtaatgttgtcagcggaaacctcaattggtgaaaacccaattgaagttgtcagtgccatggccaagatttgtagtgaggtagatagtgtttctggtacaaaaataacttcatctaaagacatattgacttctgatgaactaacaaattctctttcaaaagctgcagtacaagtagcaaatgattctaatgcaaaggcaatcgtagcttttactgaaactggtaaaacagcattgttgatttctaatcatcgaccggacgctccaatttttacatttacaactgttgaaaagacttttaatcaactcaatttgatatggggagtacagcagataaagatagagagattggaaactactgatgagatgtttgcgattgcaaaccaatggttaactgaagagatgaattttttaaaaaatgataaagtagttattgtcgctggtacacctccaaataaagaggcagcaactaaccttattagagtaatgaagattggtgaattttaa

SEQ ID NO: 249171 - DNA, 1228 bp, Unknown
  Bacterial polypeptide expressing nucleotide sequence isolated from the Sargasso Sea
tatgaatacaaatacaaaaatcattgctactgtgggaccctcttgcgataaaaaagaagtgttgcaatcaatgattaattctggtgttgatacttttcgattaaatatgtctcatggtgatatggcatcaaaaagaaaattatatgatttagtaaagtcgcttaaaccaaaaaatggtgttcggccagcaattttgacagatctagcaggacccaaaataagaattgttggtctaaaagaagaattaattataaatgaaaatgaatcaattataatatctaacgaacctggttttaaagaaaaccatttagaagtatctggtggcatccatttttctagtgtgctaagtggggcagaagtcttgattgatgatggacgtattaagctcgaagtttctgaagttatttccaaacatacattaaaatgtaaaacagtaattggtggtgaaataagcaacaaaaaaggtgtgaacttcccaggggtaacactcaatacgccatccctaactcaagaagatattatagatcttaaaatggctttagatcaaggtgcggattggattgcactgtcatttgtctgcaaagcaaataatatattagatgttcatagtgtcatggatgaacatggtaaaagaatacctgtgatggctaaaatagaaaaatgggaatcattagaaaaccttgaagaaattattaatgcttttgatggtgttatggtcgcgcggggggatttaggtgttgaaacacccgcatcaaaagtacctttagctcaaaaaaagattgttgatttggccagcaccatcgggaaacctgttgttattgccacgcaattgctcgaatctatgattgatagtaaagtccctactcgagctgaagtaagcgatattgctaacgcaatttttgatggagtagatgcgcttttagttacaggtgaaacagcaatcggtaaatacccagtcgatgtaatcaaaatcctgaaacaagtaatttttgaaacagaatctgccacaaaattttctaatgctttacctccaaaaaaattaaataaaactgcggatgcgataagtcatgccgtctgtgaaatttctaccaatcttgatataaatactataatgacaatgacacacagcggtagtacagcaaggatgatttcaaattatcggccaaaggcaacaatttttgccttaactccatttgatgaaattgtacgacaacttcaattaatttag

SEQ ID NO: 249172 - DNA, 832 bp, Unknown
  Bacterial polypeptide expressing nucleotide sequence isolated from the Sargasso Sea
ttttgtgagaaagccggaagatgtcctggaattaaggcgattgttggcacgtaaaaaaagccgtgccgggatcgtcgcaaagattgaggatcaagagggtgttaccaatgtgaataggatcgctgcgctttcagatggtgtgatggtagcgcgcggcgacttgggtatagagactgacattgcagatctccccaatgtacagcgcagaatcgttcacgcttgtgccgagcagggtgttcgttctatcgtggcgacccatcttttggagtcaatgattgacaaccccattcctactagggccgaagtcacggatgttgctaatgccatttatgagggagtggatgcaattatgctttctggtgaaacaagcgtcgggaagtttcctatcaaatgtgtagagcaattaaacaaaattgctcagcggactgaacgctttccggggttgggctatgaacgctctcttaagttagagcatgagaaacagcacgttgcggttcatgctgttgctctggctgaatctcttgaagcaaagggcatagttgtgattacgcgtcatggtttgactgccgatttcgtgacaagtgcaaggccgcataaggtgcctatattcgcttttacaaatcaggagaaaacgcttcgtaaattggccttgaatcgagccgtttccccttaccgaatcccgtttagtgcagattcagaaaaaatgttggctagagcatttaaaatgctagctaacgaagcgcacatggagcttaattctaagttggttgtggtgtcggatgtcctggttaatcagcccaccgaggctattcaggtaaggacctttgcgtga

SEQ ID NO: 249173 - DNA, 1408 bp, Unknown
  Bacterial polypeptide expressing nucleotide sequence isolated from the Sargasso Sea
catgaaccgaacaaaaatcattgcaactgtgggccccgcatgcgcaaacaaaaaaatattgcaaaaactaatttcccatggtgtttcctgttttcgtatcaacctatcacatggttcagcccttgataaggcaagctattttgatttgatcaggtccctagaaatgccttccggattgcggccaactattcttgctgaccttgcaggtcctaaaatacgagtaaaagatttagaagccccaattctggtcaaaaagggggataaaatagagcttagtaatgaaaaaattgaagatgggacaatacccgtatctagtggagtgcgatttcaaaaagtaaacccaggagcacaaatattaattgatgatggtcgggtaagcttaaaggtcctggagtatgtcacagaccagaccctgtcatgtgaagccttagaagatggcactatagaaaatggaaaaggtgtcaatttcccagagattgcactggacgtaccggttttaaccgaccaagacgaaaaggacctcttgctttccctgcaaaaagaggcagactggatagcgttatcttttgttaggtccccatctgattattctcttataagttcaaagattaaagaagctggatacaagacacccgtcatggcaaaaatagaaaagtgggaagcggtgcaaaacttaaacagtattatagaatccttcgatgctgtcatggttgcaaggggggacttgggagttgagctccctgttgcaaaggtgcctttagttcaaatggatgttgttgaaaaagcacaccagcttggtaagcccgttgttatcgcaacacagatactcgattctatgaccgatcgtccagtcccgacccgagctgaggtcagtgatattgcgaattcaattcttgatggagcagatgctctgatggttaccggtgaaactgcaatcgggaaccaccccaaaaaggttataagggtgttaaagggggtaatagaagaaacagaatctgcgatcaattatcagagaaacattgagatgccaacaagtaaaacaaccaatacggcaatggcaataagccaagcagcgtgttcggttgcgactcatcaaaatattgaagttttggtaactatgacccacagtggcagcacagctcgaatggctgcacgacataggtcggttgctagaattgtagctatgactccctctaaaaaaatatgtcgccagctttcaattgtatggggcgttagtcctatattggttgacgaatatgaatcagctgatgagattcctatagtcgcaaataaagttcttaaagacaatggtcttttgaaggagggggaaaagtttgttataactggtggtgttccagtgggggttccagggacaacaaactacctgtcggtgctaaagctaaattag

SEQ ID NO: 249174 - DNA, 315 bp, Unknown
  Bacterial polypeptide expressing nucleotide sequence isolated from the Sargasso Sea
tatggcttttataagaacaaaaataatttgcactattggaccacagagctctaataagacaacattatccagacttcattcagctggtatgaatgttgctaggattaatatgtcccatgcaactcataaaaatgcaaaagagattatagatataattaaaagtattaatgagaccaaaaatagcaagtcatctaacattggaatattgcttgatactcaaggtccagagataagaacaggtgatacctctcttcctattaatctcaaagttggtgataaagttacattaactgtccgtgatgaggttgatgtaga

SEQ ID NO: 249175 - DNA, 979 bp, Unknown
  Bacterial polypeptide expressing nucleotide sequence isolated from the Sargasso Sea
gggaaattaaagccctatcaaggcgtaaataagaagggtggaggactatctttatctggaatcactcagaaggataagacagacctaaaaaaatcgctttcattagaatatgactatgttgcagtgtcattcgtaaaagataataaggatttaaatgacataagaaagattgttaaagataaagatattaaaataatcgctaaaattgaacgtaatgaagcaattaaaaatatcgataaaattacaaaagccgcagacggtctattagttgcgcgtggtgacctaggtgtagaaattggaatagagcagcttcccgctacacaaaagtttttaattagaaaagcaatatcatttgataagatagtgattgtagctacacaaatgatggaatcgatgataactaacagagtccctacacgtgcagaagtttttgatgtagctaatgctgtaacatctggtgtagatgcgattatgttttcggctgaaacagccatcggtaagcacccatctgaagttataagtgaagctagtagaatttgtatagaatcagagggagcatatgtacgaccattatctgtagaccgagtagtgccaaaaacacttcctgttgatcaagtaatagcgttatctgctgtatatagcgctaaactaactaaagttgtggcaatagctgcgttgacagaaacaggttcaacagcattatggatgtccagagttcaatcaaacatacctatttatgctatgacacaaaataataagacaagtagaagaatctgtctttacaaaggcgttcaatcaatcaagcttgataaacttgaggagaatcatgctcaagccaacatgcaagttatttcactgatgagaaagattggtactgtcaaaaaaggtgatttggtaattataactaaaggagacctacttggaacgagtggaggtacgaatgcaatgaaagtcgtcgaagtcggaaatatgatctgag

SEQ ID NO: 249176 - DNA, 1204 bp, Unknown
  Bacterial polypeptide expressing nucleotide sequence isolated from the Sargasso Sea
acagggccctaaattaaggataggtaaaatagaaaataatatgcctcttaaaagaggccagaaacttttactaataaataataaaaaaaattcaaaaccaaatgaagttccattgccagaagaaaaagttttcaaaagcgttaaagtaaatcatccaatatttatagatgatggtaaaataaaattaaaagtattaaaagtttccaaaaatattattgagacaaaggttattttagaaggagtattaaaaagtaaaaaaggtataaatttacctgaaacagttttaaagaattctgcattaacatctgcagataaaaaaaatgtcaaaaaagggattgaacttggtgttgattggattgcgctatcatttatacaatcaccagaagacattaaggaactaagaaaaatctgtaaaaaaaatgtttctataatggcaaagattgagaaacccactgcgttaaaccacattaataaaattactgaattagctgatggccttatgatagctagaggagatcttggggttgagttaccaatccaagatgttcctagctggcaaaaaagaattattagagaggcaagaatgcaggggaagcctgttgttgtatcaacacaaatgcttgagtctatgataacttctaaaacaccaacacgcgctgaggtttctgatgttgctactgcagtttttgaaggagctgatgcagttatgttgtctgctgaatctgcaataggtgacaaccctgaattggccgtaaaaatgatggataaaatcgctcatagtgtcgaaaaaaatccaaattactcttcaattctattagcgcaacttgaagaaactccagatagcacacctgatgcaattgcaacggcctcgagaactttagcaaccgagttaaattctcctataattgtttgctatacagaatctggttcaacaggcattaaagtttctagagtgagaccaaaacaaatgatattaactgttacaccaatagtagaaacagctcgaaagctaactttggtttggggcgttaaatgtattgttcaaaaagacgcaaataatcttgaagaaatgattaaaatgaccaaagcatattcaaaaagagaaaaaattataaaaaaaggtgaaaaaatggtaattactgctggcttgcctttaaaaaagcttggtacaacaaatttaattagagttataaaattagattag

SEQ ID NO: 249177 - DNA, 946 bp, Unknown
  Bacterial polypeptide expressing nucleotide sequence isolated from the Sargasso Sea
gctataaattcaggagtaaatgtctttaggattaatttttctcatggcacactagatgagcacaaacaattcatagattgggcaagatcatctaaaaatcaagtagcaataatgcaagatattcagggtccaaaaattagaaccggccaagttaataaaaatacggtattacaaaaaagccaagagataaacttaaccaacaaagaagtggaatcatctgatgaaataatttttattaattataaaaatttatatgaagatataagtgttaatgacagagtttttattgatgatggtcagataatcctcaaaattactgaaaaacaaaagaataaattgaaagccttaattctaataggaggcgaactcagagataatcagggtgttgcgtttccagattcaaaattatctgtacctgcaatcactgaacaagatattgaacatttaaaatttggaacagaacaagatgtagattttgttgcagtatcttttgttagaaatagcgatgatatacaagctgtaagagaaattattcctaaggatataaagattattgcaaagatagagttaaaaactgctctagaaaatatagatgagattctcaatgttgcagatggagttatggttgcaagaggtgaccttggagtgcaactcccaatagagaaggtaccatttgttcaaaaacaaattttagatgctgcaaataggaaagggaagatttcaataactgctacagaaatgcttcaatctatgaaatcttcatatagacctacaagagcagaagtaacagatattacaaatgcaatactagaaggttcggatgctgtgatgttatctgctgaaacatcaataggcgatcatcctaatagagttatagaagtgatgtctaatatatgtaaagaagtagattctaggaacgacacttcatctttgctttcaaaagaag

SEQ ID NO: 249178 - DNA, 786 bp, Unknown
  Bacterial polypeptide expressing nucleotide sequence isolated from the Sargasso Sea
aatgcgtaggtatcgaaacacaaaaattgttgcaacgcttggtccctcttctcggacgaagcgacagatacgttccatgatcaaagctggagtggatgtgttccggttaaatttcagtcatggaagtcacgaagaccacagatcgcggttcaatgccataagacaattagaaaaagaattagattggcctgtggccatcatggcggatttgcaggggccaaaacttcgaataggcgtatttgaaaatgatgagatagaactcaacgtagggtcttcgtttgttttggatttagaggaggcagctggatcgggtcgacgcgtacaactaccgcatcaggaaatctttgatgcggctgtcgttggtatggaccttcttctcgacgacggaaaaataagacttcgtgtacaaaatgcgacagaaagttcgatagagacaaaggttataaccggaggcaccctatcaaaccgaaaaggagtgaatgttccaggggttacattgggtctttcttcacttagtgaaaaggacagaaaggatttagaatttgccctcagcctcgggtttgattggatagctttatcatttgtacagcgacctaaggatgttgctgaggcaagagaattaattaatgggcgtgcattcgttttgataaaactggagaaacccgcggcaattgaacatttggatgagttagtcaaaatgtcggatgctgttatggtggctcggggagacctaggtgtagaacttcctccagaaaaagttcctggcatacaaaagagaattgttaa

SEQ ID NO: 249179 - DNA, 457 bp, Unknown
  Bacterial polypeptide expressing nucleotide sequence isolated from the Sargasso Sea
tatgtcgaatattgatttaaacagaagaacaaaaatagtagcaactattggcccagcaactcaatctgaagagataatttcaaatttaattaaggctggagtaacaacattcagattaaatttctctcatggagatcataaagatcatgctgagagaattaaaaccataagggaagtatctaaaaaattagatatagatattggaatattgcaagatcttcaaggacctaaaatacgattagggcgctttaaagatgggccagtaaaagttaaaaaaggcgataaattcatactgacatcaaatgaagtcgattgtacaaatactattgcaaatgttacctacgacaaactttctcaagaggttagcgaagggaaaagaatacttttagatgatgggaaaatagaaatgattgtagaaaaagtgatacaaaagctaataatttggagtgcatggtaa

SEQ ID NO: 249180 - DNA, 271 bp, Unknown
  Bacterial polypeptide expressing nucleotide sequence isolated from the Sargasso Sea
aatgtctaaaaacaaagctactaaaatcatcgcaactattggacctgcaagcaatcatgaaaatattttattatcaatggttaaaaaaggagtgaatgcatttaggcttaattttagccatggggacttaagcgcacatttgcattctattgaaattataagagccatcgaaaaaaaactaaagttatctttaccaataattggagacttgcaaggcccaaagtttagaattggcaacttaaccgatgatattgatttaaaaaagaggtga

SEQ ID NO: 249181 - DNA, 253 bp, Unknown
  Bacterial polypeptide expressing nucleotide sequence isolated from the Sargasso Sea
tatgtcgaatattgatttaaaaagaagaacaaaaatagtagcaactattggtcccgcaactcaatctgaagagataattacagatttaattaaagctggagtaacaactttcagattaaatttctcacatggagatcataaagatcacgctgagagaataaaaaccattagggaagtatcaaaaatgttagatatagatattggtatattgcaagatcttcaaggaccaaaaattagactagggcgcttttaa

SEQ ID NO: 249182 - DNA, 888 bp, Unknown
  Bacterial polypeptide expressing nucleotide sequence isolated from the Sargasso Sea
aaatgagtgttgactgggtagctctatcatttgttcaacaacctgaagatattttaaaactaaaaaaaattattgataataaagctctaataatggcgaagatgaaaaaaccttcagctgtgaaaaatatagatgaaattattaaagtttcagatggtattatgattgctagaggagatttaggggttgaaatgcaaactgaaaaagttccgatagtgcaaaaaaatataattaaacgatgtagatattttggaaagccagtagtcgtagctacacaaatgttagaaagtatggttaacaaccttgttccaactagagctgaagcttcagatgtagcaaatgcaatttacgatggaactgatgctgtaatgttgtcaggcgaatctgctgtaggtaaacatccactagaagcagttaaggtaatgaataatataattgaaaatgttgagatggataagaacaattttgatttagatagcaataataatgaatcaaaaagtaaaacagataatacagatgctattacaagtgctgcttattcaatagcaaaaaatgcagatgcaaaagcaattatcacattttctgtaagtggaaaaacaactatgagaatggctaaggaaagagctcccgtacaaataattggattatctccttatttaaaaacatcgagaaaaatgcaattagtatggggtgtgaattcttgtcatagtgatgatgcgcaaagtgcaacagaaatggtaaagatagcatgtgtaattgctaaagataagggtttggttaaaccagatgataatgttataattacagcaggtgttccttttggaaatgcaggttcaacaaatctactcagattagcaaaaataatagcagataaagatcttatttaag

SEQ ID NO: 249183 - DNA, 428 bp, Unknown
  Bacterial polypeptide expressing nucleotide sequence isolated from the Sargasso Sea
gttgaaacgtgctcttaagatcgacgtgatgagaagatttcgaaacggaaagattgtcgcgacattggggccagcgacgtctgacacggctgccattagtgccctattcgaggcaggggcggatgtgttccgcatgaatttctcgcacggtgggcatgaagatcatgcggctcgcattgggatcatccgcgaattggaaacacacttccagcggcccataggtattgtagcggacttacaaggaccaaagctacgggttggtgagtttacggatggtgttgtgcagttagaggcgggagatgcattccgcctggacctggaagaggcactgggcgacgcgcggcgtgcttctcttccgcatccagaagtgttccgagccctgcagcctgggatgcggctcttgatggatgatggtcgtattcactcga

SEQ ID NO: 249184 - DNA, 712 bp, Unknown
  Bacterial polypeptide expressing nucleotide sequence isolated from the Sargasso Sea
atgctaagacgcacaaaaatagtcgctacccttgggcccgctaccgatagagataacaacttagaaaaaattattcgcgcaggcgcaaacgtagtacgtttaaacttctcacacggtgtggctcaagatcataaagaccgtgcacaagcagttcgtgatattgcaaaacgattgaacaaacatattgctattcttgccgaccttcaaggtcctaaaatccgtgtatcaacgtttaaagaaggcaaagtaaccctagaagtgggcgctaagtttattcttgatgcaaaaatggaaaaagggcaaggcgatgtaaacgctgtaggcatcgattataaagagcttccacaagacgtatctcctaacgatttacttcttttaaatgatggtttaattcaacttacagttgataaagtagttgatcatctagttcactgtaccgttacagtgggaggtgttttatcaaataataaagggattaaccgtttgggcggtggattaactgcccctgcgtttactgataaagacaaagaagatttaatcacagcagcagaaatcgatgtagattatattgcggtatcttttccacgtagtggtgatgatatgcgttacgttcgttctttagcagaagcagctggctctaaagcgcaacttcttgcaaaaattgaacgtgctgaagctgtagaaacgcaagaagcgattgacgacattgtac

SEQ ID NO: 249185 - DNA, 508 bp, Unknown
  Bacterial polypeptide expressing nucleotide sequence isolated from the Sargasso Sea
ctgataagttctgtacatgcaggagacaaaattactgttgacaacggtcttataaatcttgaagtattagaaaaacaagaacggattatgcgttgtcgagttcttgatggcggtgtactcaagagcaaaagccatgtaaatcttacgggtgttcgtttaaatctaccggccattactcagaaagaccgtcgtgatatattatttggaatcaaacatgatgttgattttatcgcactttcttttgtatgggaatctgctgaagttttacagttaaaaaagttacttggagacaaagttggtaaaatcgagatcatagccaaaattgaggatcaggaaggagtgaccaatattgaaaaaattatttcagaagcagatggtattatggttgcccgtggagatctaggaatcgaaataccaattaattctgtacctactgttcagcgtaaaatcgtcaggtcatgtttcagaacagggaaaaagagtaattatagccacacatttacttgaa

SEQ ID NO: 249186 - DNA, 715 bp, Unknown
  Bacterial polypeptide expressing nucleotide sequence isolated from the Sargasso Sea
aatgacaatactcgacctagctagaaggaccaaaatcgtagccaccatagggcccgcaactgaaagtgcgagtcaaataactaaattagtagaagctggtgctacaacgttccgtctaaattttagtcatggagaccatgaagaacatgctcaaaggataaaaacaattagaaaagtttctgatgatctaggtattcacatcggtatccttcaagatcttcaagggccaaagataagacttggtagatttaaaaatggcccagttaatgtaaaaaatggagatagatttgttcttacatctaaaaatattgaatgtaatcaagaacaggcaaatgttacatatgacaaacttgctgaggaagtaactgctggaaacaggattttattggacgacggaagagtagaaatgaaagttattgaagtagatctaaaagaacaaaaattaatttgctcaataactgtaggaggagtactttctaacaataaaggggttaattttccagatgtacaattatcaattagggcattaactgagaaagataaaaaagatctagcatttggtttaaaagaaggtgttgattgggttgcacttagttttgtaaggaatccatctgatttaatagaaataaaagatttaattagaaatcacggattcgatacacctgtagttgcaaagattgaaaagtttgaggcaattgatcaaatcgatgctgtt

SEQ ID NO: 249187 - DNA, 799 bp, Unknown
  Bacterial polypeptide expressing nucleotide sequence isolated from the Sargasso Sea
ggtgttgatgcatttagaattaattttagtcataacacaaatgggataaataaaataatttcacggataagaagactagaaaaaaaaaatggaaaaaaattatctctgatagccgacctacaaggtgtaaagctgaggataggtaaagttaaaaatgaaaatcaacaaattaaatttaatcaaaaatttgtcttcgataataaaaaactacctggtgactcacaaagagtaaattttccatatccaaaaattattaaaaagttaaaaaaaggaaataaaattttaatcgatgatggaaagtatttattctctgtaattggaaaaaaaggaaattccgtaataacaaaatgtcagagtcaaaattgtataattaaaagtaataaaagttttcatgttccaaatttagatataactttcaacaaacttactgtaaaagataagagagatataaagaccgcagttaagcttggatgtaattggattgcactttcttatttacaaaatgaaaagttaattcttgagacaagaaaattgattaaaaaagatataggcatcatttctaaaatagaaaataaacatgccttaaaaaatattaaaaagatacttcagtctactgactcaataatgattgctcgaggagatttagcaattgatattggtcatagtgaagtaccaaaagttcaattaagtcttataaaaaaatgttctcaattttccaaatctgtaattgtggctacacaaatgttagaaagtatgattgaaaataataccgctactagagcagagattaatgatattg

SEQ ID NO: 249188 - DNA, 836 bp, Unknown
  Bacterial polypeptide expressing nucleotide sequence isolated from the Sargasso Sea
atcctttgttaatgatgccagcgatgttaatcaagctagagaggttctttcacaggaagatagtgatataaaacttatagcaaaaattgagagactagaggcattaaaacaactgtattggatcattaaggcgagtgatgggattatggttgctagaggagacttagctcttcagtcagggcctggtgaattaacagggttacaaaagaacataattaaacaaactgtaaaaggtaaaaaagttgctattactgccactcaaatgatggagtcaatgattgacaaccccagcccgaccagggcagaaatgacagatgtatctaatgctgtcttagatggatcagacgcagtgatgctttcagccgaaactgctatcggttcatacccagttgaaaccatagaagcaatgcatgaggtttgccttggcgcagagagatatcaacaatcaatttcaaagaaagaagaatttaaatactctgaagttcagaatattgatgaagctatcgcactcagttcaatgagtatagctaaaaatatggatattaaggcaattgttgctttaactgaatcagggtcaactgctcttatgttatcaaggactagatcggatatacccatatatgcatttactagaaataagattacacaacggcgcgtttcactgtttcgaggtgttcttcctttctcatacccattcttagctgaaagcctagaccaagttctagatgatataagaaaagaacttcttggttcagatatgcttaattcaggggatttaatcattgtaacttctaggttcacccttgaaggttccgggaggaacaaactcacttagg

SEQ ID NO: 249189 - DNA, 849 bp, Unknown
  Bacterial polypeptide expressing nucleotide sequence isolated from the Sargasso Sea
tcgctctctcttttgttcagcgtccagatgatgttgcccaagcgcgtaaattgattgcgggacgtgctgccgtgatggcaaagctggaaaagccgatggccctgaatagcctggagaagatcgttagcctatgcgacgccattatggtcgcgcggggggatttgggtgtggagatgcccgcggaagaggtgcctatccaacagaaacggattatctccgcgtgccggtctgccgggaaacctgtgattgtcgcaacccagatgcttgactccatggtccatgcgccaactccaacccgagctgaagcgtctgacgtagcgacggcaatttacgatggcgcggacgcggtaatgttgtcggcggaaacggcggttggcgaatatgcaacggaggctgtcgcgatgatggatcgtatcatcgccagggtggagaaagacccaatctatggacaacaaatggatgcgacccgattgccaccagaggccactgctgctgacgccatcactactgccgcccgacaggtcagtcataccatctcggcggcgatcatcgttactttcacctcgaccggttcgacgactttacgagcatctcgcgaacgaccgctggttcccattcttggtttaaccccgcgcgccgagacggcgaggcgattggttttggcctggggggttcatgctgtggagactgaagatcttcatactttcggtgacatggtgatcacggctattcgtgtcgcaaaaagtgaaaagattgcagatgttggtgatgcgatggcgatcaccgcaggtgttccgttcggcacgccgggggctaccaacatcctacgtatcgcgtgggtggaatagg

SEQ ID NO: 249190 - DNA, 789 bp, Unknown
  Bacterial polypeptide expressing nucleotide sequence isolated from the Sargasso Sea
tttgaggctagctttagaaaaaggagctgactggattgcattatcgtttgttcggttgccgtcagactttgaatgtattataaggattattaaagaaatggggtacacagccccaataattgcaaaaattgaacaatgggaagcagtagaaaacttaaacagcataattgaaatatttgatgctgtaatggtggcgcgtggcgatctaggagtagagatgcctatcgaaaaggttcccttgattcaaaatgaggtggtgcgaatagcaagatcgcttggaaaaccagtaataattgcgacccaaattttagattctatgactacacgtccgattccaacaagagcagaggttagtgacattgcgaattctattttagatggtgctgacgccctaatggtcacgggagaaacagcgataggtaatcacccaaataaagtcataaaagtattaaaaaaagtgattaaggaaacggagaggtcaaggagtagcagtcaaaattataatgaatcagaaaatgaaaaccaaataggcacctcgcaggctattagtcatgcagcgtgttcagttgctcgggatcaaagaattaatgtattagttactatgacgcatactgggagcaccgctaggatggcatctcgctaccgacctactgcaaaaataattgcaatgactccttttaagaagacttgcagacaattattaattgtctggggtgtacacccaatcttagtttcagaatatatgtcttcagatgatattcctaatattgttgataatgaagtttctaa

SEQ ID NO: 249191 - DNA, 814 bp, Unknown
  Bacterial polypeptide expressing nucleotide sequence isolated from the Sargasso Sea
aatgaaacgtaatagaaaagctaaaattttagcaactttaggacctgcatcatcttcaagtgatataattgaaaacctttttaaggaaggatgtgatgtttttagattaaatttttcacatggctcagtagagactcatcgcaaaaatttagaatatataagaaatttagaagagaaatatgatcatgccacttgtattttagcagatttacaaggacctaaacttcgagttggagaatttaagaaaacagaagaatctctaaaaaaaggtcaaaaatttactttagatacaaattcagctttaggtgatgacaaaagagttaactttcctcattctgagatttatgatcacttaacaccaaatagtactttattgataaatgatggaagaataaggcttcaagtaatagaacagcacaaagatcaattaatcactgaagttttaaatgatgggataatttcaaataataaaggggttaatatacctgatgtaattctacccattgaatcaatgacaaataaggatagatcagatttgcaaaaagcacttgaaatgaatgttgattgggtagcgctttcttttgtacagcaagctgatgatataattaaattaaaaaaaattgttgaaggaaaagctctaataatggctaaaatagaaaaaccttctgctgttaaaaatattgatgaaattataaaggttgctgatggtattatgattgccagaggagatcttggtgtagaaatgccaactgaaaaagttcctatagttcaaaaaatattattaaaagatgccgtcattatggaaaaccagtag

SEQ ID NO: 249192 - DNA, 813 bp, Unknown
  Bacterial polypeptide expressing nucleotide sequence isolated from the Sargasso Sea
ctggaagaaaatgtcgatgtggtggcactttcctttctgagaaaccgggataccgttctggaagtccgggaaatgttccgggaaaggggggaacagatcaaacttatcgcaaagatcgaaaaccaggagggagtcgacaatcttgaagagatcattcaagtaaccgatggcatcatggtagcccggggagatctgggaattgaaatcgacatggaagaactcccgcaaatccaaagaaaaattgcctatctttgtgcgaaatacgggaaacggttgattgttgcaacccagatgctggaatcgatgatggaaaatccggtgccgacccgtgctgaaattaccgacatcgccaatgccgtctttgaacaatcggacgcgatcatgctttccggagaaacgtctaccggcaaataccctgtccgttgtgtagaaaccctggtccggattgcgaggcgaactgaagtccatcctggagtccaattcacagagaacttgatccaggaagatggtccggaagagaaccaggggaaaggccggcaaatgctggctgctgctgcaaccaaaattgcccgccaactgaaggtcccaggaatgctggtgatcactcgaaaaggaagaggtgcgacgaaaatggccaatcttagggtgcggggaattccgatttttgcgtttaccgaatcggaaaagacgatcagtactttgatgttattaagaggggtttacccttacttgcttaaatttgatgaggatcctgagcttaccattcaaaatgctttgaggttactcaagaagaaacaggatatgccttcagga

SEQ ID NO: 249193 - DNA, 697 bp, Unknown
  Bacterial polypeptide expressing nucleotide sequence isolated from the Sargasso Sea
ctgcccgaggaagtgccgccgatccagaagcacatcatcgaaaagacccgcgcgctcggcaagccggtcgtcgtcgccacgcagatgctggaatcgatgatcaccagcccctcgcccacccgcgccgaagtgtcggacgtggccaacgcagtctacgacggcgccgacgcggtcatgctctcggccgagacggcagcgggccagtggccggtcgaggcggtgacgatcatggaccggatcgccgccaaggtcgaaagcgacacgacctaccgcgaacgcatccatctcacccgcaccccgcccgacgcgaccagcgccgacgccctgtcggaagcctgcgcgcagatcgccgatacgctgacgatcgaaggcatcgtggtgttcaccggctcgggcggctccgcccgccgcgtggcccgcgaacgccccgccgcgccgatgctggtgctcaccccctcgcagcccaccgcacgccgcatcgcgctgctgtggggcgcgcacgccgtcgtcacccgcgacatcggcagcttcgaggagatgatcgccaagggcaagcgcatggccctgcgtcacggcttcggcgcggccggatcgcgactggtggctctggcaggcgtgccgttcggcgtgccgggatcgaccaacctactgcatatcgtgacgctgaccggcaacgagctggatacgccgaagtaag

SEQ ID NO: 249194 - DNA, 430 bp, Unknown
  Bacterial polypeptide expressing nucleotide sequence isolated from the Sargasso Sea
atgtcgaatattgatttaaaaagaagaacaaaaattgtagcaactattggtcctgccactcagtcagaagagataattacagatttaataaaggctggagtgacaacattcagattaaatttttcacatggagatcataaagatcatgcagaaagaattaaaactattagagaggtatcaagaaaattagatattgatattggtattctgcaagatcttcaaggtcctaaaattagattaggacgattcaaggatgggccagtaaaagtaaaaaaaggggataaatttacattaacttccaatgatgttgaatgtacaagtactattgcgagtgtaacttacgagaaactttctcaagaagttagtgaagggaaaagaatactattagatgatggtaaaattgaaatgattgttgaaaaagtagatatta

SEQ ID NO: 249195 - DNA, 700 bp, Unknown
  Bacterial polypeptide expressing nucleotide sequence isolated from the Sargasso Sea
gatgattgccaggggagatttaggtgttgagttacctcctcaagaattaccagcaattcaaaaacgaattattttgaaatcaagaaaaataggcaaacctgtaattgttgctacccagatgttagaatcaatgattgaattacccatgccaacaagagccgaagcatcagatgttgctggagctgtttttgagggtgccgatgcaataatgctttctgctgaaactgcaattgggaaaaatcctgtaaagtcagtaaagatgatgtcatcaattgcaaaatctgcagaaaatcatattaaacaatttcctggagatggtccaacaaatcttcaaattgaaaattcaacctatcatgctgttgctcaatctaccgttaatttggctgaaatgattaatgctagtttgataatagcttttactgcttcaggtaatacagctttaagaattgctagagaacgacctcaaatgccaatatacgctatctctccatctacatcagtgaacaggaaacttaaattagtttggggtacagtatcatcctttcaggaagaaattgaatataatcaagcaattgtaaaaactatagacaaagtatttaaagaaaagtttgtcaaaaaaggggataatgtaattattgtctctggattgccttttggattaattggttcaacaaatacaattcgagtggctaaaatttaa

SEQ ID NO: 249196 - DNA, 820 bp, Unknown
  Bacterial polypeptide expressing nucleotide sequence isolated from the Sargasso Sea
acacaaaaagaacaaatctgatttaaataaagctctagaaatgggcgtagattgggtggcattatcttttattcaaagtgctgaagatataaataatttaaaaaaactagttggtaataaagcatctataatggctaaaatagaaaaaccttctgctgttaaaaatattgattcaataattgaagccagtgatggattaatgatagctagaggagatttaggtgttgaaatgcctgctgaacaaatacctgtaattcaaaaaaatataattagtcgatgcagagattttggtaaacctgtagttgtggccactcaaatgttagaaagtatggtttcaaatcatacaccaacaagagccgaagcatctgatgtagcaaatgctatatatgatggaactgatgcagttatgttatctgcagagtcagcaataggtatgtttcctgaagaatcagttacgattatgaatagaataattaaaagtgtggaaacagatagtaataattttaatctcgagattaagaatcaagaaaattcatctacgaataaaagaatcagtacgactgatgcaattacaagtgcagcttacacaatagcaaaaaatgcagaggctagggctatagtaactttttctgtaagcggtatcacaactatgagaatgtctcgagaaagggctccagtattaattattggtctttctccaatactagaaacagctagaaaacttcaaatttcttggggagtttattccattcatgccaaacaagatgctcaaaatgcaacagaaatggtaagcatagcttgtaaagctctaaaaaaataa

SEQ ID NO: 249197 - DNA, 654 bp, Unknown
  Bacterial polypeptide expressing nucleotide sequence isolated from the Sargasso Sea
aaagatgtaggcactttggaaaaccagtcgttgttgcgacacaaatgcttgaaagtatgattgaaaatcttgttccaacgagagctgaagcatctgatgttgctaatgctatatacgacggagcagatgctgtaatgttatctggcgagtcagccgttggggtgcatccaatagaagtagtaataactatgaataaaattatagaaaatgttgaaaatgataaaaataattatgatttacgaattatacaagaaaatgttgatgatgttaataatacagatgcaataacattagcagcttactcaattgcaaaaaaatcagatgcaaaagcaataattacattctctgtaagtggaagaacaacgactagaatggctagagaaagagcacccgttcaaattgttggtttatctccaaatattaatactacaagaaaaatgcaattatactggggtgtaaactcctgccatactcaagaagatgctcaaaatgcacaagatatggttaatattgcatgttcaattgcaaaaaataaaaaattagtaaagccaggagataacgtagttatctcagctggtgttccatttggaagtgctggtactactaatctacttagattagctgaaataattgctgataaagatcttaagtaag

SEQ ID NO: 249198 - DNA, 750 bp, Unknown
  Bacterial polypeptide expressing nucleotide sequence isolated from the Sargasso Sea
tatgggccagttcgatcaggaccgtcggaccaagatcgtggccaccatcggtccagccacggaaagttccgagcgaatcaaggaactggttcaggcaggagccaccacctttcggctgaatttctcccacggcgaccacagcgagcatgcggcgcggatttcgaccatccgccaggtgtcagaagagctggggatcaacatcggcatccttcaggacctgcagggaccaaaaatccgcctgggccgttttgctgagggaccgatcaccctggccaatggcgacagcttctccctgacgtctagaccggtgagttgcaaccaatccatcgccaccgtcacctacgacaagctcgctgacgaagtcacggccggcagccgcatccttctcgacgacggccgcgttgagatgaaagtcgagcaggtgaatcaggccgaacagaccttgcactgcaccgtcaccgttggcggtgttctctccaacaacaaaggggtgaacttccccgatgtgcagctgtccgtccgcgctctgacggacaaggacaaggtggatctggaattcggtctctcccagggggtcgactgggtggccctgagcttcgtacgcaatccctccgacatggaggaaattcgtggcctgatccgtgagcatggccacgagacccccgtcgtcgccaagatcgagaagtttgaggccatcgaccagatcgatgccattcttcctctttgcgatggcgtgatggtcgccagggg

SEQ ID NO: 249199 - DNA, 700 bp, Unknown
  Bacterial polypeptide expressing nucleotide sequence isolated from the Sargasso Sea
aagaggtgatctgggtgttgaaatgcccacagaacaagtcccaactgcacaaaaaaatattattaaaagatgccgacattatggaaaaccagtagttgttgctactcaaatgttagaaagtatgatttctaatttagtgccaacaagggcagaggcatcagatgtcgcaaatgcaatttatgatggtacggatgccgttatgttatctggtgagtcggcaatgggagattatcctatagaatcagtcgcaacaatggacaggattattgagaatgttgaaaaagataaaaacaatttcaatttggaaattgaaaatgaagaaaatataaaaaaaattgataacacagatgcgatcactaatgcagcctattcaattgctaaaaatgctggagcaaaagctattataactttttcagtcagcggtaaaacaacattaagaatggcaagggaaagagcaccggtacagatcattggactttcgccaaatattaaaacttcaagaaaaatgcaaattgtatggggtgttaattcatgtcattcagttgaggatgctgaaaatacaactgaaatggtgaagatagcttgcagagttgcaaaaaataaaaaattagttaatgctgatgataatgtaattattacggctggagtaccttttggtaacgctggatcaacaaaccttcttagaatagcaaaaattatt

SEQ ID NO: 249200 - DNA, 913 bp, Unknown
  Bacterial polypeptide expressing nucleotide sequence isolated from the Sargasso Sea
catgcttcctcatcaagaaatttttgaagtcttaaaagttgggtcagtaattttagttgatgatggtaaaataaaattagaggttattgaggcggctagagatcaaattaatacaaaggttttggttggcggaaaaatttctaataaaaagggagtaaacattcctgacgtgattttgcccttttctgctttatcaactaaagatagaaaagacttagaatatgtgtgtaatctgggggttgattggatagggctgtcgtttattcaaagattcgaagatatactagaggcaaaaaaattaattaaaggacgagcttcaattctggcaaaaatagaaaagccagcagcagttgaaacttttgataaaattcttcaggaagcagatgctataatggttgctaggggtgatttaggagttgagttgccaatttattccttaccaccgatccaaaagaagttaattaaactttgtcggaaagcaggaaaaccagtagttgtggcaacacaaatgcttgaaagtatgatagaatcaccgtctccaactagagcagaagtttcagatgtcgcgcaggctatttatgaaggtgctgatgcagtaatgttatcagcagaatcagctgctggtaagcaccctataaaggcagtagagatgatgaatagcgtggcggttgagattgagaatgatgatagttttaggcaaattatagagacttctagacctattatgggtacggatacttctaacgcaattacggtggctgcaagagaagtttcagaaagaacagatgtaaaagctatctgctgttttacccatagtggaacaacagctatattaacatcccgtgagaggcctaagatacccataattgccttaactccagaactaagtattgctagggaattagctttaaac

SEQ ID NO: 249201 - DNA, 772 bp, Unknown
  Bacterial polypeptide expressing nucleotide sequence isolated from the Sargasso Sea
atgagaagacagcgtaatataaaaattgtagccactttgggcccttcttccagtgattatgacacaatcaaagacttacacttggctggggcggatgtttttagattgaatatgagtcatggaacgcatgatgaaatagccaaaagacataaaataatacggcagatagaggatgaacttagtagcccaatcgcgattttagcagatttgcaaggcccaaaattaagggttggtccgtttaaaaatggaattgaggaattaactgaaaatgaaaagttcaggttagatttgaaagataagctgggaacaaaagaccgtgtccagttaccacatccagaaatttttcaggctctacacgagggagctcatttattaataaatgatggaaaaataaaattaatggttgaaaaatgcggtcctgactttgcggattgtttggttttaaatggtggtgaaatttctgatagaaaaggcgtcaatgttcccgatgttattttgcctttagccgcactttccgaaaaggatcgtgctgatctagatttcatatgtgacttgggtatcgattggttggcgctatcgttcgttcaaagagctgaagatatagttgacgcacgaaatcttatagcgggaagagcatccgttatatcaaaaattgaaaaaccttcagctgttaaaagttttgatgaaatattaaaggtttctgatggagtaatggtggctaggggagatttaggtgtagaattacctgttcaaaatgtcccaccaatacaga

SEQ ID NO: 249202 - DNA, 850 bp, Unknown
  Bacterial polypeptide expressing nucleotide sequence isolated from the Sargasso Sea
aaaataaatggaaaaaaattatctcttatagctgaccttcagggtgtaaaacttagaataggtaaagttaaaaatgagaaccaacaaatcaagtttaatcaacgatttatatttgatagtaaaaaaattcctggtgactcaaaaagagtaaattttcctcatcccaaaataattaaaaaattaaaaaaaggtaataagattttaattgatgatggaaagtatttatttacagttataagtaaaaagggaaatgcaataataacgaaatgtcggagtcaaaattgtattttaaaaagtaataagagttttcatattccaaatttagatgttgcctttaacaaactaacaggaaaagacaaaaaagatataaagaccgcgatcaaacttggctgcaattggattgctttgtcttacttacaaaatgaaaagctgatacttgaaacaaggagattaataaagaaagatatgggtattatttcaaaaattgaaaataaacatgctcttaaaaatataaaaaagattatccaagcgacagattcaataatgattgccaggggggatttggcaattgaaatcggtcatagcgaagttccaaaagttcaattaagtcttataaaaaaaagttctcaattttcaaaatctgtaattgttgctacacaaatgttagaaagcatgattaaaaattctacagcaacacgggcagaaataaacgatattgcaactgcgatatttcaaggtgcagatacattaatgttgtctgcagagacagctattggcaaatttactactcaaactatttccactatgactcaaactattcaatctactgaaaaatataaaagagagcata

SEQ ID NO: 249203 - DNA, 805 bp, Unknown
  Bacterial polypeptide expressing nucleotide sequence isolated from the Sargasso Sea
ttcccacggccaggctgaagatcacatcgagcgtgcaaagcgcgtacgcgaggcagcgaagaacttaggaaagtatgtagcaatattaggtgacctgcagggccctaaaattcgtgttgcacgctttgctgaaggcgctgttcgtttggaggtaggtgcgaagttcattctcgacgctgagctagggcgagacgaaggcgatattaaccaggtaggcatcgactataaagccctacctgatgatgtctctgcgggtgatatcttgcttcttgacgatggtcgcattcaattaagagtaaccggtgttgaaggtcgtaaagtaattaccgaagtaacggtaggtggtaaactttcaaacaataaaggcattaaccgtcaaggcggtggtctttctgccgatgcgcttactgaaaaagataaagaagacattaaaacggccgctaaaattggcgttgactatctagcggtatcgtttccgcgtagcggagcagacctaaactacgcacgggagcttgcagaagctgcaggttgctacgcaaaaatttgtgcaaaggttgaacgtgctgaaaccgtagcttctgacgaagccatggacgatattatcgtagcctctgatgctgtaatggtagctcgcggtgatttgggtgtagaaattggagacgcagaacttgttggcgttcagaaaaaacttatcgcccgttcacgtcagttaaataaagtggttattactgcgacccagatgatggagtcgatgatcgatagccctatgccaacacgtgctgaggtaatggatgtagcaaacgct

SEQ ID NO: 249204 - DNA, 877 bp, Unknown
  Bacterial polypeptide expressing nucleotide sequence isolated from the Sargasso Sea
agttagacttggttgtaattggattgctttgtcatacttgcaaaatgaaaaattaatttaccaaacgagaaaattaatcaaaaaagatattggtattatatctaaaattgaaaacaaacatgcgcttagaaatataaatgaaataataaaagctacagatattgttatgatcgcaagaggagatttggctatagatattggccatagtgaggttccaaaagttcaacttagtttgataaaaaaatgttcacaatcctcaaagtcagttattgtagcaactcaaatgcttgaaagcatgatagaaaatagcaccgcaactcgcgctgaaataaacgacattgcaacagccatatttcagggtgctgacacggtaatgctatcagctgagacagctgtaggtaaatttcctgcccaggctgtatcaacaatgttacgcacaatagtttcaacagaaaaatataaaagagaacatatagaagattttaaaaattccattgttacaaataaagatcctgttaaatcaattttgctttcggttaaagatatggcttataacccaaatgtaaaagctataattgtattttcaaactctggaaaatctgcaaaattagtttctgcaatgagaccagcagcaaacatagttacaatttcaccaaatattaatgtttgtagacaagtttctctactttggggtgtcaggtctgtgaatagtcgagatgctaatggttggaaaaatatgatgtcaatttccaaagaaattatcaaaaaattaaagtttgtaaaaaaaaatgattttgttgttataacagctggtttgccttttggaaaagctgggatgacgaatatgataagactttataaagtagggtcaaaatga

SEQ ID NO: 249205 - DNA, 703 bp, Unknown
  Bacterial polypeptide expressing nucleotide sequence isolated from the Sargasso Sea
ttataaagatttatttaaagatttaaattctggagaacgaatatttattgatgatggacaaatagttataagaataattaaaaaaacaaaatcatcaatgttaggacaaatagaaataggtggagaattaagatcaaatcagggagtagcatttcctgattctaaattatcagtctctgcaattactgaaaaagatattgctgatctaaagtttggcaataaattagatgttgatatcgtagccgtttcttttgtaagagatgcaaatgatattaaaaaagtaagagagattgtagataaaaatataaaaatcattgcaaaaatagaattaaaaaatgctgttaaaaatttagattctataatcgatgaagcagatggagtaatggtagcaagaggagatttaggagttcaacttgatttagaaaaagtaccatttatacagaagcaaatattaaatgaagctaatgccaaaggaaaaataacagttacagcaacagagatgcttcaatcgatgaaagaatctcatcgacccacacgtgctgaggttacagacattactaatgcaatattagaaggtacagattgtgtaatgctatctgcagaaacagcaatcggaaatcatcctgaagtagttgtaagtgcaatgtctgacatatgcaaagaagcagattcaaggaatgacacatctgtattaagggtttaa

SEQ ID NO: 249206 - DNA, 859 bp, Unknown
  Bacterial polypeptide expressing nucleotide sequence isolated from the Sargasso Sea
aatggtgctgattggatagctctatcttttacaagatctcaaaatgattatgatttagtaaaatcaaaaattaataaattaggttttaatactccagttatggccaagattgaaaaatgggaagcagttaaaaacctagattctatcgtccaagcttttgatggcgtaatggttgctagaggtgatttaggagttgagctacctcttgaacaagtccctgtcattcaaaagagtattataaaaaaagcaaaattatatggtaagcctgtagttatagcaactcagatgctcgattctatgatagaaaatccaactcctaccagggctgaggtaagtgatatagctaattctatattagatggcgcagatgctttgatggtaacaggtgagaccgcgatgggtaaataccctacagatgtaattgatgttttatctgatgtaattaaagaaacagagaagagtttgaagttctatagtcgaactattggaaaagatactgtagatagtatttctggtgctattagtcatgctgcctgtacaatcgcaaaagatctcgatttaaaatctattgtaacgatgacacaaagtgggggtacagctagaatggtttctagttttaggccttctgctaatgtgtatgccatgacgaccttaaaatctacttttcgttctttatccatcatatggggagtcattcctgtccttgttaatcagtataattctgctgatgaaatgccagaactagccaaacaaaagctgttagatatgaaagttcttaataaagaagaaaagtttattattactggtggtgtacctgttaacgtaccagggactacaaattatatttctatactataga

SEQ ID NO: 249207 - DNA, 751 bp, Unknown
  Bacterial polypeptide expressing nucleotide sequence isolated from the Sargasso Sea
aatgaaaaaacaacttcatagaaaccgtaaagtaaaaattgtagctactctgggtcctgcctcagacactaaattggaaattagaagaatgtttttagcaggggcagatattttcagattaaatatgtcccatggtgatcattcagctgtggaaagaagacataatatcttaagagatttagagaaagaattttcgagaccaatatgtattctggctgatctacagggtccaaagctgagatgtggtgattttaagggtgcaaagtcaactttagaggcgggacaaaagttttgttttgatctaatagaaaggctgggaaataaagagcgagtttgtctaccgcatcccaagatattccagtcagtaaaaaagggagataagctactgattgatgatggtaaagttgctatgcaagtaagtaaagcatcagaaaagagaatagagtgcactgttttaaatgatggaattatttcaaacaaaaaaggggttaactgcccagatagtattttagacctcgctcctttaacagaaaaagataagcaagacttggagtttgtttgtggtcttggagtagactggataggcttatcttttgtacagagagcgaaagatgtagaaaatgtaaaaaagttattaaggggaagggcaggcattattgcaaaaattgagaaacctgctgcggtaagagtttttgactcgattattgattctgctgatggaattatggtggcacgaggagaccttggtgtt

SEQ ID NO: 249208 - DNA, 783 bp, Unknown
  Bacterial polypeptide expressing nucleotide sequence isolated from the Sargasso Sea
aactcaaattatagcagaagttatccaaggaggtgaagttaaatctaacaagggctttaatctccctaacacaaaaatttctttgtctccactgacagataaagatgtcaaagatgtcatcctagctataaaagagaatgtggactggatagctctttcttttgtaagaaaaagaagtgatattgaaagtttagtaaaaataattaacaaaaaatctgaatatagcattcccgttattgctaaaatagaaaaacctgaagctcttaagaatattgatgaaattataaaggtttcaagtggcttgatggttgcaagaggtgatcttggtgttgaacttcaatcatctgaaatccctttaattcaaaagaaattagttgcaaaggcaaaaaaatcaagaattcctgttataattgctactcaaatgatggaaagtatgatggaaagtgttactccttctagagctgaggtaaatgatgttgcaaattcagtaatggatggagcagatgcggttatgttatcaggagaaacttctgttgggaaattccctacagaagttataaagactatgtcatcaattatcaataaagttgaaaattcaaatctaatttctcttgcaaacaaaagacctaaagatcaaaagtctaaaagatatataacaaagtctatttgctttagcgcagctaaaatggcaaatgatattaaagcgaaggctataagtacattaacaaatagcggttacaccgcatttcaaatatcatcttggagaccttcaacccatgtact

SEQ ID NO: 249209 - DNA, 708 bp, Unknown
  Bacterial polypeptide expressing nucleotide sequence isolated from the Sargasso Sea
aaaagatattaaaactgctgttatactcggttgcaactggattgctttatcatatttgcaaaatgaaaaattaattttagaaaccaggaaattaattagaaaagacattggtatcatttctaaaattgaaaacaaacatgctctaaaaaatataaaaagaattattcaagctacagattcgataatgattgccagaggggatttggctattgatattggccatagtgaagtgccaaaagtacaactaagtctaattaaaaaatgttctcaattttccaaatctgtaatagttgctactcagatgttagaaagcatgattgaaaataataccgctactcgagctgaaataaatgatattgcaacagcaatctttcaaggtgctgatactgtaatgttgtctgctgaagcagcaattggaaaatttcccgctcaagctgtttctacaatgacccaaactattttatcaactgaaaaatacaaaagagaacatatagaagattttaagaattcggttgttgcaaataaagatccagtcaaatctatattgctctctgttaaagatatggcttacaacccaaacgtaaaagctataatagttttttctaattctggtagatctgcaaaactagtttcggctatgcgtccagcagcaaaaatagtaacgatctcacccaacataaatgtaagtagacaagtgtctttactttg

SEQ ID NO: 249210 - DNA, 553 bp, Unknown
  Bacterial polypeptide expressing nucleotide sequence isolated from the Sargasso Sea
atgaccagaagaacgaaaattcttgccaccctaggacctgcaaccgactcacttgaaaagattcaggcacttattgccgcaggcgcaaacactgtgcgcatgaacttttcacacggacaagccgaagatcacattgaacgtgcaaagcgcgttcgtcaggcagcaaagaacctaggtaaatacgtagcgattttgggtgatcttcagggccctaaaatccgtgttgctcgttttgccgaaggtgcagttcgtttagaggtaggcgcaaaattcattctagacgctgaattaggccgcgacgaaggtgatattaatcaagtaggtattgattacaaagcgcttcctgatgatgtatcagcaggcgatattctgcttcttgatgacggtcgtattcagcttcgagtaacaggcgttgaaggccgcaaagtgattactgaagtaacagtaggcggcaagctttcaaacaataaaggcattaaccgtcaaggcggtggtctttctgcagatgcacttaccgaaaaagacaaagaagacattaaaaccgccgcgaaaa

SEQ ID NO: 249211 - DNA, 943 bp, Unknown
  Bacterial polypeptide expressing nucleotide sequence isolated from the Sargasso Sea
tttaatcgatgatggaaagtatctattctctgtaattggaaaaaaaggaaattccgtaacaacaaaatgtcgaagtcaaaattgtataattaaaagtaataaaagttttcatgttccaaatttagatataactttcaacaaacttactataaaagataaaaaagatataaagaccgcagttaaacttggatgtaattggattgccctttcttatttgcaaaatgaaaagttaattcttgagactagaaaattaattaaaaaagatatgggcataatttctaaaatagaaaataagcatgccttaaaaaatattaaaaagattattcagtctactgattcaataatgattgcacgaggagatttggcaattgatattggacatagtgaagtgccaaaagttcaattaagtcttataaaaaaatgttctcaattttccaaatctgtaattgtggctacgcaaatgttagaaagtatgattgaaaataatactgctactagagcagaaataaatgatattgcaaccgcaatatttcaaggagctgatactgtgatgttatccgcagaggcagcgattggtaaatttcctacccaagctgtttcgacaatgactcaaactatcctatcaactgaaaagtataaaagagagcacatagaagattttaaaaattctatcattacaaacaaagatccagtaaaatctattcttctttctgttaaagatatggcttataacccagacgttaaagctataattgttttttctaattctggaaaatctgcgaaacttgtttctgctatgcgtccagcagctaaaatagtaactatttctccaaatataaatgtaagtagacaagtttcattactttggggtgttcaatctataaatagtcgagatgcaaatggatggaaagatatgatgtctatttctaaagaaattataaaa

SEQ ID NO: 249212 - DNA, 739 bp, Unknown
  Bacterial polypeptide expressing nucleotide sequence isolated from the Sargasso Sea
atgtcgaatattgatttaaaaagaagaacaaaaattgtagctactattggccctgcaactcaatctgaagagataattacagatttaattaaggctggagtaacaacattcagattaaatttctcacatggagatcataaagatcatgcagagagaattaaaactattaggaatgtatcaaaaaaattagccatcgatattggtattttacaagatcttcaaggtccaaagattagattggggcgattcaatgatggtccagtcaaagttaaaaaaggtgataaattcacactaacctccaacaaagtcgaatgtacaaatactattgcaaatgtcacctacgaaaaactgtctcaagaagttagtgaaggtaaaagaatattattagatgatggtaaaattgagatgattgtagaaaaagttgatataaaagctaatctcttagaatgtttggttactgtaggcggggttctttcaaataataaaggtgtaaatttcccagatgttcaactatcagtaaaagctttaacagataaagataaagaggatttaaagttcggcttatctcaaggcgttgactggatagccctaagtttcgtaagaaatccatccgatataaatgagataaaagatttaataaacaaaaatgggcattcaactccagtaatcgcaaaaatagaaaaatttgaagcaattgaccaaattgatactgtcttaccattatgtgatggggttatgg

SEQ ID NO: 249213 - DNA, 924 bp, Unknown
  Bacterial polypeptide expressing nucleotide sequence isolated from the Sargasso Sea
cactttgaagggcatgatcgaagcagggatggatgttgcgcgattggtttagcgcacggcaccgttgacgaacagatcgccaagttccagatggttcgcgctgttgccgccgatctaggccgacatgttgggatcgtcgtagatctcccaggccccaaggttcgctgcatgccctttactgacggaggggcagagctcgttgaagatacccaagtttcattgggggtcgaggaaacaaaaagttcctctgaccacataaacgttgactatccgaaccttctgcaagacgttcagttaggcgactcgctctcctttggcgatggacaggtcgtcgtcagtatcgagaatcgcgaaggggagcgtctcaaagcacgggttgtgcacggcggcaagctaaacggtagccctggtcttcatgtgccatcagatcgacttcggatgagctcgccgaccgatcatgacctagaacttcttgacacgtttgtcgaaatgggaaccgacatggtcgctgtttcgttcgttcgctccgcacacgatattcggcgactcggtgttgagcccgctccgcgtggccccatggtgatcgcaaaagtagagacgaaagctgcagtctcaaacttggagggaattatcgaggcatccggcgctgtgatggttgcccgcggcgacttgggatccgaaatggacattgaggagctacctcatttgcaaaaatacatcattcaggagtgcatcgcccttgggcgtccggcaattacggcgacacagatgcttgagtccatggtgtcggcaccaacacccacccgtgcggaagcatcagatatcgctaatgctgtatttgacggcacttcggcattgatgttgagtggcgaaaccgctattggtcgagaccctgtgaatgcggtcaggacaatggcgcggatc

SEQ ID NO: 249214 - DNA, 682 bp, Unknown
  Bacterial polypeptide expressing nucleotide sequence isolated from the Sargasso Sea
atgctacacaccaaaatcatctgtacaataggccctgccagcgatagtcccgaagtccttgaaaaccttgccgatgcagggatgaatgtagcccgcctgaatttctcccatgggactcatgactcccatcgtaacattgtggaaaaaatccggttgctcaatacaaacctagaattcccggtggcaatcctgctggacaccaaagggccggaaatccgtaccggggatcagcatatgaaacttatcactggaacccaggtccgggttgtcagtgatccggaactaaaggatgaaaggcatctatttgtggattaccctcacctgacagaacagttgggccaggggaatcatattttactggatagcgggttggtcaaactggagatattggaaaatcatggtgattcgttggcctgcagggtactcgatggggggaccatcacaccgaaaaggcatgtcaaccttcccgggatttcagtcaaacttccaggaatcaccctttcagaccgtaaagatctcgagtttgctctggaagaaaacgtcgatgtggtggcactttcatttctgagaaaccgtgataccgtcctggaagtccgggaaatgttccgggaaaggggggaacagatcaaacttatcgcaaagatcgaaaaccaggagggggtagacaatcttgaagagatca

SEQ ID NO: 249215 - DNA, 469 bp, Unknown
  Bacterial polypeptide expressing nucleotide sequence isolated from the Sargasso Sea
atgttaagtacaaaaattgtttgcacaattggcccagctagcgattcgcctgaaatattagaaaaactagctaatgcaggaatgaatgtcgctaggttaaatttctctcatgggacacataattctcacaaaaaaattattaagcaaattcatgaattgaaccgaactagaaaattccctatcgcaattatgcttgatacacagggaccagaaatcagaactggcaatgaaaccagtaatcttaagtcaaaagaaatagttactgtctgttgccctccctttaaagagaatgaaggtaatatttatgtaaattacgctgcattaaaaagtgatttgaaaccaggaaattatatttctttagatagtgggttggtaaaattaaaagttattagtaaacacaaaaaaggacttaagtgtgaggttatagacggtggcatcgtaaatggtcacagacatgttaattaccagg

SEQ ID NO: 249216 - DNA, 454 bp, Unknown
  Bacterial polypeptide expressing nucleotide sequence isolated from the Sargasso Sea
atgaaattaacagaaccgagtgacattcgtcgcactaagatagttgccacattgggcccagcaaccagtgagttatcagtattggtgcagattctgcaagcaggcgtcaacgtcgttcgacttaacttttctcatggtgtgcatgccgatcagttaaagcgtattgaaactgtacgtgaggcggcaaaggaggtcggttgtgtagtaggtattttagcagatttgcagggccctaagattcgggtagcaaattttagtgcaggtaagatcacattatcagccggtgatacttttatactagatgctgggcatgatccggaggcgggtgatcagcagcgtgtcgggattgattataaagagttgccgaatgatgttgttaaaggtgatactttgctattagatgatggccgcttagacttaacggtagagaaagtaagcggcagtgagattatct

SEQ ID NO: 249217 - DNA, 650 bp, Unknown
  Bacterial polypeptide expressing nucleotide sequence isolated from the Sargasso Sea
catggcttttacaagaacaaaaataatttgcactattggaccgcagagctctaataatgcaacattatgtagacttcattctgctggtatgaatgttgctagaattaatatgtcccatgcaactcataaaaatgcaaaagagattatagatataattaaaagtattaatgagaccaaaaatagtaagttatctaacattggcatattgcttgatactcaaggtccagaaataagaacaggtgatacctctcttccaatcaatctcaaagtaggtgataaagttacattaactgtccgagatgagatagacgttgaaacctcatctatcaaagtaaattataaaggtctagttcatagtgttgatgttggctcaaggatctctgttgataatggattgattagttttagagttctttcaaaagaatcagataatttagtttgtaaagtaatacatggaggaaaggtaggctcaaaaagacatgtaaatttgcccggcgtaagattagatatgccctcaataacttcaaaagatataaaagatatttcctttggaattaaaaataatgtagattttattgctgcttcatttgtcagaaataaaaaagatcttaggatattagaagaccttctttttaaacaaaaatcagagt

SEQ ID NO: 249218 - DNA, 780 bp, Unknown
  Bacterial polypeptide expressing nucleotide sequence isolated from the Sargasso Sea
tatgagaagacagcgtaatataaaaattgtagccactttgggcccttcttccagtgattatgacacaatcaaagacttacatctagctggggcggatgtttttagattgaatatgagtcatggaacgcatcatgaaatagccaaaagacataaaataatacggcatatagaggatgaacttagtagcccaatcgcgattttagcagatttgcaaggcccaaaattaagggttggttcgtttaaaaatggaattgaggaattaactgaaaataaaaagttcaggttagacttgaaagataagctgggaacaaaagatcgtgtccagttaccacatccagaaatttttcaggctctacacgagggagctcatttattaataaatgatggaaaaataaaattaatggttgaaaaatgcggtcccgactttgcggattgtttggttttaaatggtggtgaaatttctgatagaaaaggcgtcaatgttcccgatgttattttgccattagccgcactttccgaaaaggatcgtgctgatctagatttcatttgtgacttgggtattgattggttggcgctatcgttcgttcaaagagctgaagatatagttgaggcacgcaatctaatagcgggaagagcatctgttatttcaaaaattgaaaagccttcagcagttaaaagttttgatgacatattaaaggtttctgatggagtaatggtggccaggggagatttaggtgtagaattacccgttcaaaatgtcccaccaatccagaaaaggct

SEQ ID NO: 249219 - DNA, 793 bp, Unknown
  Bacterial polypeptide expressing nucleotide sequence isolated from the Sargasso Sea
tttattggatagcgggttggtcaaactcgagatattggaaaatcatggtgattcgttggcctgcagggtacttgatggagggaccatcacaccgaaaaggcatgtcaaccttcccggaatttcagtcaaacttccaggaatcaccctttcagaccgtaaagatctcgagtttgctctggaagaaaatgtcgatgtggtggcactttcatttctgagaaaccgagataccgtcctggaagtccgggaaatgttccgggaaaggggggaacaaatcaaacttatcgctaaaattgaaaaccaggagggggtcgacaatcttgaagagatcattcaggtgaccgatggcatcatggtggcccggggagatctgggaattgaaatcgacatggaagaactcccccaaatccaaagaaaaattgcttatctttgtgcgaaatacgggaagcgattgattgttgcaacccagatgctggaatcgatgatggaaaatccggtgccgacccgcgctgaaattacggacatcgccaatgccgtctttgaacaatcggacgcgatcatgctttcaggggaaacgtcgaccgggaaatatcctgtccgttgtgtagaaaccctggtccggattgcgaggcgaactgaagtccatccaggagtccaattcacagagaacttgatccaggaagatggtccggaagagaatcaggggaaaggccggcaaatgctggctgctgctgcaaccaaaattgcccgccaactaaacatcccagggatgctggtgatcactcgaaaaggaaga

SEQ ID NO: 249220 - DNA, 648 bp, Unknown
  Bacterial polypeptide expressing nucleotide sequence isolated from the Sargasso Sea
aattcaaaaaagagataatacttgcttgtagaattgcaggtaagccggttatagttgccacacagatgttggagtctatgattaacaattcatctcccacacgtgcagaggcatccgatgttgctactgccgtatttgatggagcggatgcagtgatgctttctgcagagactgcaataggaaagttcccaattgaaacagtaaaaattatggataaaattttaaatgctgccgaagttcacattaagacccatccaacagatgctcctatatcactaacagcagaaagtacaatatatcatgcagtttctagatctgctgttaatttggctgaaacagtagatgctaaagctattgttgcttttacagcttctggtaaaactgctttaagaataagtagagaaagaccagaattaatgcttgtggttatgacaccaaaacatttggttagaaggagattatctttgttgtggggcactatttcatttttgagtaaagtccagggttatgaagcagctattcaagaagccagaagaataattaaaaagaacaaattagctgcacagggtgaaaatatcgttgtggtagctgggatgccattcggcatatctggatcaacaaactcaataagggtagtaactatttagt

SEQ ID NO: 249221 - DNA, 733 bp, Unknown
  Bacterial polypeptide expressing nucleotide sequence isolated from the Sargasso Sea
taactctagcggtattaataagatagtttcaaaaattcgcaaagttgaaaaaaagaatggaaaaaaattatctcttatagccgatcttcaaggtgtaaaacttagaataggtgaagttaaaaacgataaccaacaaatcagatataatcaacgatttatatttgatggtaataaaattcctggtgattcaaaaagagtaaatttccctcatcccaagataattaaaaaattaaaaaaaggtaataagattttaattgatgatggaaaatatttgttcacagtaattagtaaaaagggaaatgcagtaactacaaaatgtcagagtcaaaattgtgtattaaaaagtaataagagctttcatgttccaaacctagatattgtttttaataagcttacagggaaggacaaaaaagacatcaagactgcagttaaacttggttgtaattgggttgctttatcttatttacaaaatgaaaagctgatacaagaaacaaggagattaataaagaaagatatgggtattatttcaaaaattgaaaataaacatgctcttaaaaatattaataagattatccaagcgacagattcaataatgattgccagaggagatttggccgttgacattggtcatagtgaggttccaaaagttcaattaagtcttataaagaaaagttctcaattttcaaaatctgtaattgttgctactcaaatgttagagagcatgattaaaaat

SEQ ID NO: 249222 - DNA, 739 bp, Unknown
  Bacterial polypeptide expressing nucleotide sequence isolated from the Sargasso Sea
ggtaaccgatggcatcatggtagcccggggagatctgggaattgaaatcgacatggaagaactcccccaaatccaaagaagaatcgcttatctttgtgcgaaatacgggaagcgattgattgttgcgacccagatgctggaatcgatgatggaaaatccggtaccgacccgtgctgaaattaccgacattgccaatgccgtctttgaacaatcggacgcgatcatgctttccggggaaacgtctaccggaaactatcctgttcgttgtgtagaaaccctggtccggattgcgaggcgaactgaagtccatccaggagtccaatttacagagaacttgatccaggaagatggtccggaagaaaaccaggggaaaggccggcaaatgctggctgctgttgcaaccaaaattgcccgccaactgaaggtccctgggatgctggtgatcactcgaaaaggaagaggcgcgacgaaaatggccaatcttagggttcgtggaatcccgatctttgcgtttaccgaatcggaaaagacgatcagtactctgatgttattaagaggagtttacccttacatgcttgaatttgatgaagatcctgagattaccattcaaaatgctttgaggttactcaagaagaaacaggatatgccttcaggaatatccatcgtcgtcgtcgcagacatcatgaccggggaaggctatgtaaactgccttcaaatcagaacactgcctgaggattaa

SEQ ID NO: 249223 - DNA, 835 bp, Unknown
  Bacterial polypeptide expressing nucleotide sequence isolated from the Sargasso Sea
atgaaacgtaatagaaaagctaagattttagctactttaggcccctcttcctcagataaaaaaattattgaagaacttttcacttctggatgtgatgtatttaggcttaacttttctcatggagatattgaaatacacagaaaaaattatgaatctattagatctttagagaataaatataaacatgcaacttgtgtattagctgacttacaaggtcctaagttaagagtaggtttgtttaaaaatactaaagagaaattaattaaaggagaaaagtttatattagatttatcatcagaacctggagacaataaaagagtgaactttccacattcagaaatttatgagtttttaactccaaattcaatattattagttaatgatggtaggataagactgcaggttattgagcaaaataaagatagtttagttacagaaattttaaataatgcagaaatttcaaataacaaaggagtcaacataccagatgttatacttccaattgatgccctaacaaataaagataaatctgatttaatgaaagcacttgatatgggtgttgactgggtagcattatcttttgtacagcaagctgaggatattaataaattaaaaaaaatgattggtaataaagcattagtaatggctaagattgaaaaaccgtctgctgttaaaaatattgatgagatagtaaatgcagcagatggaataatgatagctagaggagacttaggtgtggaaatgccaactgaacaagtgcctattgctcaaaaaaatattattagaagatgcaggcatttggaaaaccagtcgttgtggcaactcaaatgctaga

SEQ ID NO: 249224 - DNA, 903 bp, Unknown
  Bacterial polypeptide expressing nucleotide sequence isolated from the Sargasso Sea
cagaataagttttccataccctaaaatactaaaaaaattaaaaaaagggaataaaattttaattgatgatggaaaatttacctttgtggtcactggtaaaaaaaatttagctgtaacaacagtttgtaaaagtcaaaattgcttcatgaaaagcaataaaagtattcatattcctaattttgatattgcttttaataaattaacttccaaagataaaaaagatattagaactgctattaaacttggttgcaattgggttgccctttcatatcttcaaaatgaaaagttaatacttgaggcaagaaaattaattaaaaaggacatgggtattatctcaaaaattgaaaataaacatgcgcttaaaaatattgttaaaataatcaaagctacagactcagttatgattgctcgtggtgatttagcaattgatattggtcatagtgaagttccaaaagttcagttgagtcttataaaaaaatgttcccaattttcaaaatctgtaatagtagctactcaaatgttggaaagcatgattgaaaatagtacggctactagagctgaaataaatgacattgctactgctatttttcaaggtgctgatacagtaatgttatcagctgaagctgcagtaggtaaatttccaactcaggctgtttcaacaatgactcaaactattctgtcaactgaaaaatataaaagacaacatattgaagattttaaaaatgcaataatttctaataaagaccctgtaaaatcaattttactttctgtcaaagatattgcttataatcccgatgtaaaagctatcattgtattttctaattcaggaaaatcagctaaattagtatctgcaatgcgtcctgctgcaaaaattttaactatttcacctaacataaacgtttc

SEQ ID NO: 249225 - DNA, 566 bp, Unknown
  Bacterial polypeptide expressing nucleotide sequence isolated from the Sargasso Sea
catgctacataccaaaatcatctgtaccataggccctgccagtgatagtcccgaagtccttgaaaaccttgccgatgcaggaatgaatgtagcacgcctgaatttctcccatgggactcatgactcccatcgtaacattgtggaaaaaatcaggttgctcaataaaaaccgagaattcccggtggcaatcctgctggacaccaaaggtccggaaatccgtaccggggatcagcatatgaaactcatcaccggaacccaggtccgggttgtcagtgatccggagctaaaggatgaaaggcatctatttgtggattaccctcacctgacagaacagttgggtcaggggaatcatattttactggatagcgggttggtcaaactggagatattggaaaatcatggtgattcgttggcctgcagggtactcgatggagggaccatcacaccaaaaaggcatgtcaaccttcccgggatttcagtcaaacttccaggaatcaccctttcagaccgtaaagatctcgagtttgctctggaagaaaatgtcgatgtggtggcactttcatttc

SEQ ID NO: 249226 - DNA, 734 bp, Unknown
  Bacterial polypeptide expressing nucleotide sequence isolated from the Sargasso Sea
tgtaaatctcccaggagtaagagtaaaccttccttcattaactgcaaaagatcttgaagatataaattttggaataaaaaataaagttgattttattgcattatcttttgtaagaaactccgaggatcttgaaaaacttcaagaaattttagataaaaagaaatctcatgcaaagataatagctaaaattgaaaatcaagagggattagataatattcatgatattagcaaggcctcttggggagtgatggttgcaagaggtgatttaggtattgaaacaagtcttacagatttacctaatatccaaagaagaattatgtatgcatgtgcaaagtggggtagaagatcaatagttgctacccatttgcttgagtccatgattaataatccaacccctactagagcagaagttactgatattgccaatgctatatatgagggggctgatgcgattatgctatctggcgaaacaagtgttggtaaatatccatatgagtgtgtaaattttcttaaatcaattgctgaaaaaactgaaaaatttagaacgttaggttatgaaaataattttgtgccaagttctgattggcagtatattggtgtcgcagcaaaaaacttagcagaatctattggtgcagatggcattatagctattactagaactggtaaaactgcaaattatatttctaattctaaaccacacggcattcctgtttttacttttactgaaaataaga

SEQ ID NO: 249227 - DNA, 787 bp, Unknown
  Bacterial polypeptide expressing nucleotide sequence isolated from the Sargasso Sea
tatgggaataatttcaaaaattgaaaacaagtctgcgttaaaaaatataaatgaaataattcaagcaacagatgctataatgattgctcgtggagatttagcgattgatgtaggtcatagcgaagtgccaaaaatacaacttggtttaataaaaaaatgtaaccaattttctaaatcagtaattgtagctacccaaatgcttgaaagtatgattgaaaattacacggcaacaagagctgaaataaatgatatcgcgacagcaatttttcaaggcgctgatacagtgatgttgtctgcagagagtgctgtgggtagatatccattacaagctgtaaagacaatgacaaaaactatcgtgtctacagaaaaatataaaaaagaacacattgaagatttcaaaaacaaaatagatgctaaaaaagatcctattaaatcgattgttctatctgtaaaagatttggcctataacccatctatcaaggccattattgctttttcaaattcaggtaaaacagcaaaactagtttctgcaatgagaccgagggtaaaaataattacaatttcgccaaacataaatataagtagacaaatgtcacttttatggggtgtccaatcattaaatagtcgagatgctaatggttggaaggacatgatgaatatatcaagggaaataataaaaaaagacagctctattaaaaaaaatgattttgttgttataacagcgggactccctttcggaaacgctggtatgactaacatgataagactttataaagttgggacttga

SEQ ID NO: 249228 - DNA, 250 bp, Unknown
  Bacterial polypeptide expressing nucleotide sequence isolated from the Sargasso Sea
catgaccagaagaaccaaaattcttgccacattaggcccctcaaccgattcacttgaaaaaattaaagaacttattgctgccggagcaaacacggttcgcatgaatttttctcacggacaagcagaagaccacattgagcgcgcaaaacgtgttcgtgaagcggcgagaagccttggtaaatatgtggcaatactcggtgatttgcagggacctaaaattcgcgttgcccgattcaagaaggcgccgtaa

SEQ ID NO: 249229 - DNA, 706 bp, Unknown
  Bacterial polypeptide expressing nucleotide sequence isolated from the Sargasso Sea
tatgacattcactagaactaaaataatttgcaccattggaccaaatagctcaaataaagccactttaaaaaaacttcatttagctggaatgaatgttgtaagaattaatatgtctcacgcaactcataaaaatgctaaagagattattaatattattaaaaacataaatagtattaaaaatagtaagttatcaaatataggtatattacttgatacccaaggtccagagataagaacaggtgacacttctcttccaattaatttaaaagtaggtgataaagttacattaactgttcgcgatgaggttgatgtagaaacatcatctatcaaggttaattataaaggtcttgttcatagtgttaatgttggatcaagaatttctgttgataatggattaattagttttagagttctttcaaaagaatctgataatttagtttgtaaagtaattcacggtggaaaagttggctcaaaaaggcatgtaaatttgcctggcgtaagaatagatatgccctctataacatcaaaagatataaaagatattacttttggaattagaaataatgtagattttattgctgcttcatttgttagaaataaaaaagatcttcaaatattagaggagcttctacttaaacataaatcagagtcaaaaattattgctaaaattgaaaatcaagagggattagataatattgatgaaatt

SEQ ID NO: 249230 - DNA, 811 bp, Unknown
  Bacterial polypeptide expressing nucleotide sequence isolated from the Sargasso Sea
atgaagaggataaaaaaaacaaaaatcattgctacactaggtccatcatcatcatctaaagattatattgagatgctaattaaagaaggtgcggatgtattaaggataaatttttcacactctactcataaagaggccaagtcacttatcaatgacataagaaaaattaatgaagagttaaatactaatacttcaatacttgctgatcttcaaggtccaaagcttagaattggtgaaattaaggcagatacgtctctttgtgatggagatgaaattgaaattgagaccggtaaagagttcgttggagacaaaaataaaatttatgttgattataaaagcttgccaagtgatgttaatgtaggagaaaaaatattaattaatgatgggaaaataatacttaaagttattggaactaataagaagaataagatttctgctggagtaattcaaggtggggatttaacttcacgaaagggttttaatctaccaaacacaaatatttctcaaccagcacttacagataaagatataaaagatgctattttttcgattgaacagagtgttgactggattgctctttcatttgtaagacatgaatcggacataaaatcattaattaaccttatagaagagaatacagatcatagaatccctgtgatcgcaaagattgaaaagcctgagggcgttaaaaatattgatgatataatgaaacacgcaagtggaattatggtcgctagaggagatcttggagtagagattaatgctgcagaagtaccattgatccaaaaaaaacttgtggataaggcaaaaa

SEQ ID NO: 249231 - DNA, 792 bp, Unknown
  Bacterial polypeptide expressing nucleotide sequence isolated from the Sargasso Sea
tagtttcattgctttatcttttgtaagatctgctcaagacatatctaatcttagagccatattaaaaagaaacaaatcatccataaaaattatcgcaaagattgaaaatcaagaggggctagataatattcatgaaattacgcaggctgcagatatagttatggttgcaagaggtgatttgggaatcgagaccgatcttgctgatttgcctaatatacaaagaagaattatgtatgcaactgcaaaatgggggagaagatctattgttgcgacgcatttattagagtctatgatttatcatccaactccgacaagagctgaagttactgatgttgcaaatgcaatatatgagggagctgatgctgtaatgctttcaggtgaaacaagtgttggtaaatatcctatacaatgcatcaaaatgctgaagaaaatagctgttagaactgaacattttaggactctaggttatgaaaaatttcttcaagataattcagactggcaaaatattgcacaaggagctcgagatcttgctgaaaggataaatgctgatggaatagttgttattactcggtcaggtcagacagcaaatgtagtttcaaacacaaaaccatttcgaatgcctgtttatgcgtttacaaataatcatgatacatattctcatttaagcataatcggtggaatgaagccgcattttataaaatcaataaccaatcagacaaaaacaatctcacagatcaaatcaactttaatgtctggcaagaagtctaaaaaatctctaaaatttgtatttaa

SEQ ID NO: 249232 - DNA, 756 bp, Unknown
  Bacterial polypeptide expressing nucleotide sequence isolated from the Sargasso Sea
gccggcatgaatgttgcaagaataaatatgtcacatgcaacacatgataatgcaaaagaaattattgactctatcaaacaaataaactcttcagttgctggaagtatttcaaaaattggtattcttcttgatacgcaaggaccagaaattagaactggcgatacttctttaccgattgagcttaaagtcggcgataaagtgactttaactgttcgtgacgaaattgatgttgaaacttcatccatcaaagtgaactataaaggtttaattgaaagcgttagtgtcggatcacaaattactgtagacaatggattaattaatttcaaagttttatcaaaacaatcagaaactttgttatgtaaagtaattcatggtggaaaaattggttcaaaaagacatgtaaatttgcctggtgttagaattaatatgccttcaataactccaaaggatattcaagacattgaatttggtatcaagaataatgttgattttatagctgcttcatttgttagaagtgaaaaagatttgaatatacttgaacaaattttaaacaaaaagaagtctaaagctaaaataatagccaagattgaaaaccaagagggattagaaaatattgaaaatatatcaaaatctgcatggggaatcatggtggctaggggcgatcttggaattgaaactagcttaactgatttaccaaacatacaacgtaaaattatgtattcttgtgcagtgcatggaaaaagatcaattgtagca

SEQ ID NO: 249233 - DNA, 820 bp, Unknown
  Bacterial polypeptide expressing nucleotide sequence isolated from the Sargasso Sea
gatagcggattggtcaaactggagatattggaaaatcatggtgattcattggcctgcagggtactcgatggagggaccatcacaccgaaaaggcatgtcaaccttcccgggatttacgtcaaacttccaggaatcaccctttcagaccgtaaagatctcgagtttgctctggaagaaaatgtcgatgtggtggcactttcatttctgagaaacagggataccgtcctggaagtccgggaaatgttccaggaaaggggagaacagatcaaacttatcgcaaagatcgaaaaccaggagggggtcgacaatcttgaagagatcattcaggtgaccgatggcatcatggtagcccggggagatctgggaattgaaatcgacatggaagaactcccccaaatccaaagaaaaatcgcctatctttgtgcgaagtacgggaaacgattgattgttgcgacccagatgctggaatcaatgatggaaaatcctgtgccgacccgtgctgaaattaccgacattgccaatgccgtctttgaacaatcggatgcgatcatgctttcaggggaaacgtctaccggaaaataccctgtccgttgtgtagaaaccctggtccggattgcgaggcgaactgaagtccatccaggagtccaattcacagagaacttgatccaggaagatggtccggaagaaaatcaggggaaaggccggcaaatgctggctgctgctgcaaccaaaattgcccgccaactgaaggtcccagggatgctggtgatcactcgaaaaggaagaggtgcaacgaaaatggccaatcttagggttcggg

SEQ ID NO: 249234 - DNA, 911 bp, Unknown
  Bacterial polypeptide expressing nucleotide sequence isolated from the Sargasso Sea
gttgaaaaaaaaaatggaaaaaaattatctctgatagctgaccttcaaggtgtaaaacttagaattggtaaaattaaaaatgagaaccaacaaatcagatataatcaacgatttatatttgatggtaaaaaaattcccggtgattcaaaaagagtaaattttcctcatccaaagataattaaaaaattaaaaaaaggtaataagattttaattgatgatggaaagtatttattcacaataattagtaaaaagggaaatgcaataaccacaaaatgtcagagtcaaaattgtatattaaaaagcaataagagttttcatgttccaaatttagatattgttttcaataaactaacaggaaaagataaaaaagatattaagactgcagttaaacttggttgtaattgggttgctctatcttatttacaaaatgaaaagctaatacaagaaactagaagattaataaagaaagatatgggtattatttcaaaaattgaaaataaacatgctcttaaaaatattgaaaaaattatccaagcgacagattcaataatgattgccaggggagatttggcagttgatattggtcatagcgaagttccaaaagttcaattaagtcttataaaaaaaagttctcaattttcaaaatctgtaattgttgctactcaaatgttagaaagtatgattaaaaataccacagcaacaagggcagaaataaatgatatcgcaactgcgatatttcaaggcgcagatacagtaatgttgtcagcggagacagctattggcaaatttactactcaagctgtttccactatgacccaaactattagatctgctgaaaaatataaaagagagcacatagaagattttaaaaattctgttataactaataaagatccagtaaaatctattct

SEQ ID NO: 249235 - DNA, 900 bp, Unknown
  Bacterial polypeptide expressing nucleotide sequence isolated from the Sargasso Sea
attggatacacaaggcccggagattcgcacgggagagctcaagaacccgatgaaattaaaaactggacagattgtttcgctaacggtcagagatgctgagttggtcgagactcagtcgattcttgtgaactacgaggagatcgtcgatgtcgttgacgtgggttcgctgattaccttggataatggtcttcttaatttcgaagtactagagaaaaaaggggggcaactggtgtgccgagttttggatggcggaatcctaggaagccgcaagcacgtaaatcttccggggataagagtcaatctgccggcgattacagaaaaagacaaaagagatattcagttcgctaagaattacggggttgacttcatagcgctttccttcgtcagggaagcctccgacatcgaggagttgcgtcgagttcttggtatcaagggagaaacggtcaaaataattgccaagatagaggatcgaagtggcgtagagaatatccactccatcgtggatgctgcagatggggttatggtggccagaggtgatcttggtatcgaaacgaatatcgctgatctaccaaacatccagaggaggatcgttcattcaagtgcagtaggcggaaagcgctgcatagtcgccacccatcttttggaatcgatgattgaaaacccgataccgacacgcgcggaggtgactgacgtcgccaacgccgtttatgaaggtgctgacgccgtgatgctctcgggtgaaacaagtgtgggaaaatatccgacgagatgtgttgagcagattgttgatattgtaaagcgagcagaaaaatatgctggtttaggttatgaaaaagagttggttgcacttgatgacaagcagcatcttgcggtgcatgcggttgctttggctgagtcgtt

SEQ ID NO: 249236 - DNA, 931 bp, Unknown
  Bacterial polypeptide expressing nucleotide sequence isolated from the Sargasso Sea
attagaagagtgaaaaaaaaatttggcagaccaatctgtatcttagctgacttacaagggccaaaattaagatgtggagaattcaaaaataaagacgcagaattagtacctggtaaatttttcatttttgataaagataggaaactaggagattctagtagagtttatctacctgaatttaaagctttcacaaatttaaaaataggatcaaaagttcttgttaatgatggtaaaattagattagaagtcaaagaagtaaataaaagttctgtcaaaacagaagtattagttggtggggttatttctgataaaaaaggaatcaatgttcctgaccaaattttacctttatctgcactttctaaaaaagacttgagtgatttagaatttgtttgtgatcttgggatagaatggttgggcctttcttttgttcaaagagcaaaagatgtaaaagaagcaaaaaaaatagttcgtggaagagcggcaattttgtcaaaaattgaaaaaccatcagcagttgatgcattcgaagagatcttagaagaaactgacgcagttatggttgcgcgtggggatttaggagttgagcttccaattgagactcttccaccaattcaaaaaaggttagtaagacagtgtagagattctggaaaaccagtaattgtagctactcaaatgatggaaagtatgattaactcacctgtaccaactagggctgaggtctctgatgtagctcaagcaatttatgaaggtgcggacgctgttatgttatctgctgaaagtgcagtaggtaactacccagtagaagcagttaaaacaatgaatagtattgcgactgaagttgaaaaagaaaaaacatatcgtcaagttatagagtcttctagaaatccccttaaaggtgacgtttcagatgcaataactgtagctgcaagag

SEQ ID NO: 249237 - DNA, 787 bp, Unknown
  Bacterial polypeptide expressing nucleotide sequence isolated from the Sargasso Sea
agaattaattttagtcataacactagtggtattaataagatagtttcaaaaattcgaaaagttgaaaaaaaaaatggaaaaaagttatctcttatagccgaccttcaaggtgtaaaacttagaattggcaaaattaaaaatgagaaccaacaaatcagatataatcaacgatttatatttgatgataaaaaaatacctggtgattcaaatagagtaaattttcctcactcaaagataattaaaaaattaaaaaaaggtaataagattttaattgatgatggaaagtatttattcacagtaattagtaaaaagggaaatgcaataactacaaaatgtcagagtcaaaattgtatattaaaaagtaataagagttttcatgttccaaatttagatattgtttttaataaactaacaggaaaagacaaaaaagacattaagactgcagttaaacttggttgtaattgggttgctctatcttatttacaaaatgaaaagctgatacaagaaacaagaagattaattaaaaaagatatgggtattatttcaaaaattgaaaataaacatgctcttaaaaatattgaaaaaattattcaagcgacagattcaataatgattgccaggggagatttggcagttgatattggtcatagcgaagttccaaaagttcaattaagtcttataaaaaaaagttctcaattttcaaaatctgtaattgttgctactcaaatgttagaaagcatgattaaaaatactacagcaacacgggcagaaataaatgatatcgcaa

SEQ ID NO: 249238 - DNA, 820 bp, Unknown
  Bacterial polypeptide expressing nucleotide sequence isolated from the Sargasso Sea
ttcatttcctaaagatgtaaaaaaaggagaaactgtacttgtagatgatgggaaaattattttacaagttgaaaaaaccgatagagacgcaaacgttaatcttattgttattcaagggggtttactctcttcaagcaagggggttaacctgcctagcactaaaatttctttgccagctttaacttcaaaggatataaaagatgccaaatttgctgcaaaacttgggtttgattgggttgccctctcttttgtaaggtcaaaaaatgatgtccttcaattaagagaaattcttgataaatcatcaaatgagcatatccctattatatcaaaaattgaaaaacctcaagcaataaataacatggatcaaatattaaaagtgtccaatggattaatggtggctagaggtgatttaggcatagaaattcctgctgaggaagttcccttgtaccaaaagattttagttaaaaaagctaatgaggcaagaaagcctattatcatagcaactcaaatgatggagtcaatgattgatagcctaactccatctagagcagaggtaaatgacgtagctaattctgttatggatggtgctgattgtattatgctttctggagaaacatctgtagggaaatatccctgtgaggttgtaaaaaaagttggtactattatagccggcgttgaggacagtcagcccgttaaaaacaagtttacattaccaaaacttaaatctaaaagactgatcactaaaactgtttgccgtcatgcttcattaattgcaaatgaaaaaaaggcatcggctgtttgtactttaactcatagcgga

SEQ ID NO: 249239 - DNA, 888 bp, Unknown
  Bacterial polypeptide expressing nucleotide sequence isolated from the Sargasso Sea
gcgtgtcaccgttttagatgtcaaaggtgatgaaatacattgtcaggtgatgaatactgctaagttatctaataacaaaggtataaatagatttggtggtggcttgaatgcgaaggcgctaactgacaaagacaggctggatttgaaatttgctgttgattcggatatggattttattgccttgtcatttccacgatcagaagatgatatacacgaagcacgagccctgatggaaaagcataaaggaaatgccggtattattgcgaagattgaaagagctgaagcagtaacgtgtattaacgaaatagtaaaagcctcggatggcgttatggtcgcaagaggtgatttggcggtcgagataggcgattcagaagtcccgttagtgcaaaaagagattattcagtcagcacgttccttagataagcctgtaattgttgctacacagatgatggagtctatgattaacgaacctgttcccacgcgagcagaagtatctgatgttgcaaatgctgttctagacaacacggatgccgtgatgttgtcagctgagaccgcagcgggtcgctatcctgttgaaagcgttcgcgccatgtcggatgtgtgtgtgcgtgtagaaaagcagccctgctctcaaacatccgggcaccgtttggagtgtgagtttgttcgtgttgatgaagctattgcgatggcaacaatgtatactgcaaaccatatgcctgtggcagctgttgtcgctttgactgagtcgggtggaacaacgctctggatgtctcgtattcgtacaggattgcctatttatggtttaagtcgtttcacgcgaaccttgggtaagatgtctttatatcgtggggtgtatccggtttcgtttgatgtcacgggttgtac

SEQ ID NO: 249240 - DNA, 787 bp, Unknown
  Bacterial polypeptide expressing nucleotide sequence isolated from the Sargasso Sea
agaattccagtaattgcaaaaattgaaaaacctgaaggggttaggaatattgatgaaatcatgaaatatgctagtggtattatggttgctagaggtgatcttggagttgaaattaacgctgcagaagtcccgcttattcaaaaaaaattagttaataaggcaaaaaaagctaggatacctgtaataattgctactcaaatgatggagagcatgatgaaaagcttaaacccaaatagagcagaagtaaatgatgttgcaaactcaattatggatggtgcagatgcagtaatgctttctggagaaacttcggttggagaacatcctgttgaagtaattaaaacaatctctcaaattataggtaaagttgagaattctgatttaatatctttaaaacataaacacccaactgattatgaatcagaaaggtttataacaaaatcagtttgttattatgcagctaaaattgctaacgaaacaaaggcaaaagcaataagcaccttaacaaatagtggttatacagcgtatcaaatctcttcatggagacctaaaacccatgttctagtttttacatcaaataaaagaattttgacccagcttaatttgttatggggggtaaaagccttctattataatggtacagaaagcactgatagaacgattgaagaaattaatgaaattgctgttaaaaacagtcttttgcaaaaggatgataaggttataaaccttacatcaatgccaattgaaaaaaaaggtatggtaaatactgttcgtgtatcaaaaatatagt

SEQ ID NO: 249241 - DNA, 754 bp, Unknown
  Bacterial polypeptide expressing nucleotide sequence isolated from the Sargasso Sea
tatgacattcattagaactaaaataatttgtaccattggaccaaatagctcaaataaagctactttaaaaaaacttcatttatctggaatgaatgttgcaagaataaatatgtctcatgcatctcataaaaatgctaagcagattatagatgtcattaaaactattaacaaaaccaaaaataataagctatcaaacattggcatattacttgatacccaaggtccagaaataagaacaggtgatacttctcttccaattaatctcaaagtcggtgataaagttactttaactgtgcgtgatgaggtcgatgtagaaacttcatctatcaaagttaactataagggtcttgttcatagtgttaatgttggttcaagaatttctgttgataatggattgattagttttagagttctttcaaaagaatcagataatttagtttgtaaagtaattcatggaggaaaggtaggatcaaaaagacatgtaaatttgcctggtgtaagaatagatatgccttccataacttcaaaagatataaaagatattacttttggaattaaaaataatgtagattttattgctgcctcatttgtaagaaataaaaaagatctccaaatattagaggatcttcttcttaagaacaaatcagagtcaaaaatcattgctaaaattgaaaatcaggagggattagataatattgatgaaatttgtgaatctgcatggggtatcatggtagcaagagggggatttaggaat

SEQ ID NO: 249242 - DNA, 661 bp, Unknown
  Bacterial polypeptide expressing nucleotide sequence isolated from the Sargasso Sea
agttcctctacttcagaaggaactggtcaataaatgcttgaaggctgcaaaacctgtaattattgccacccaaatgatggaaagcatgattactagtattagccccactcgagcagaagtaaatgatgtagcgaacgcagtgttagatggggctgatgccctcatgctaagtgctgaaacatctgttggcaaataccctgtgaaagtcataaaggcaatgacgaagattattgatcaaatcgaaaaatctgagttaatttaccatcatgcgtttcctccagaattgaatgaagaccgatttatctctgactctatttgttacaatgcttgccgattgtcgcaaagagttgattcaaaagcaatagttaccatgacacattctggttataccgcagcaaaaatttcaagtttcaggccaaaggcagggatatatgccttcacaggaaatcattctttgctgaatactttaagcctggtttggggcgtcaaagggttttattacgataaatatgtaagcacagatcatacaatttctgacattaaattcattttgaaaaagaaaaatctagttaaagaaaaagacttgattatcaatatagcgagcatgcctatcaatgaaaagggtcaatcaaatatggttaaattgagttatgttgaataa

SEQ ID NO: 249243 - DNA, 759 bp, Unknown
  Bacterial polypeptide expressing nucleotide sequence isolated from the Sargasso Sea
tggtaaatttttaaatgttaaagaacaattaaagaaaaaccaaatattcacatttgatcaaaataagaaagatggtgatagatctcgtgtttacttacctcacaaagaaatttttaaatctatctcaattggacaaaggcttttagtgaatgatggtaaagtaaggttaaaagtaaaatctaaatcttcatctgcaataaagtgtgttgttaccgacggtggcgaaatttcaaataataaaggtttaaatataccagatacaaaacttgatttaaaaattattacaccaaaagataaaaaagatcttgaacttgcaattaagcttgatgttgattggattgctctttcatttattcaaaccactaaagacttagcttcagcaaaaaaactcattcctgcaaaatttaaagtcatggttaaagtagaaaaaccatctgctatggaagaaatcgagtcgataactgagaattgtgatggaataatggtagctagaggagacttaggtgtggaaacaaatcctgaagatgttcctattcaccaaagaacaatggttgcggcttgtagaaaatttggaaagccatgtattgttgcaactcaaatgctagaaagtatgattgactcaccaactccaacgcgagctgaagcctctgatgttgcaactgcggtattccaaggtgtcgatgctgtcatgttgtctgcagagtcagcagcaggtaattatccaaaagagtcagtagaaatgatggataaaattattaa

SEQ ID NO: 249244 - DNA, 736 bp, Unknown
  Bacterial polypeptide expressing nucleotide sequence isolated from the Sargasso Sea
attatctgtaccataggaccggccacagccagtttccagaaaataaaggctttaaggaacgcgggcatggatttagttcggttgaacatgtcgcattcctcccacgcagaggcgaaaaaagttattgattgggtaaataagcttaaccaaaatggggactcgccggtttcagttttattggatacacaaggcccggagattcgcacgggagagctcaagaacccgatgaaattaaaaactggacagattgtttcgctaacggtcagagatgctgagttggtcgagacccagtcgatcgttgtgaactacgaggagatcgtcgatgttgttgacgtcggttctctgattaccttggataatggccttcttaatttcgaggtattagagaaaaaaggggggcagctggtttgtcgagttttggatggcggaactttaggtacgcgcaagcacgtaaatttgccaggagtaagggttaatctgcctgctatcacagagaaggatcgccaagatatcaacttcgctttggagcacggtgttgactatatagcgctttcattcgtaagagaggcacaagatattttagagttgagacatattttgcaagccaaaaataaggcaacaaaaataatcgccaagatagaggatcaaagcggtgtagagaatattcattcgatagtgggtgttgcggatggtgttatggtagcgaggggcgacctcggtattgagacgaatatcg

SEQ ID NO: 249245 - DNA, 829 bp, Unknown
  Bacterial polypeptide expressing nucleotide sequence isolated from the Sargasso Sea
tttaagaaaaaaaatcaaattattagaaaaaaccagctttttacttttgatttaaaaaacgaacttggaagtaaagatagagtaacactaccttatccaaaattaataaaaaatattaaaaaaaaccatattatccttgttgatgatggaaaatacgcttttaaagttatcaaaaataatcctttatccattattacaaagaatttaagtcaagacttcgaaataagtgacatgaaaagtgttcatgttaagaatttatcaatcccatttaataattttacaaaaaaagataaattagatattaaacttgcaaagaaactgggttgtgaatgggttgccttatcttatgttgaaaatgctaagttaatttataaggcaaaaaaattattaggaaaaaatattggtataatatcaaaaattgaaaataaagtagcagtaaaaaatattgatgagattataaaagcatctgatgcaattatgatagctaggggggatttagctttagacgttgggcatagtgaagttccaaaaatacaattagatttaataaaaaaatgtaatcgtaactctaaagcagtcattgtagccacacagatgcttgaaagtatgattaataattttacagcgaccagggcagaaataaacgatattgctactgcaatattccaaggcgcagataccgtaatgttatctgctgaaacagctgtagggaattatccagttcaagcagtaaaaacaatgtttaaaacaattatttcaacagaaaaatataaaaaagaacacattgaagattttaaaaattctattgaagttaaaacagatccaataa

SEQ ID NO: 249246 - DNA, 603 bp, Unknown
  Bacterial polypeptide expressing nucleotide sequence isolated from the Sargasso Sea
catcttcatctgttgaagtaattaaggagatgtacgataaggggttaaatgtttgtcgtttaaacttttcccatggagatcacagtattcatgaagaaaatattaaacgagttcaggaggttaacaacgaaattaattcaaacatagctattttagcggatcttcaagggccaaaactacgtgttggtgtaatggagaatgaaggctgtgaaataaaaaatggcgataaaattattttcaccaatcaagaatgtgttggtacagcaaaaaaggtttatatgacctacaaaaattttgctaaagacgtaaatccgggtgagttaattcttattgatgacggtaaactagccgtaaaagttgagtcttcaaatggtgttgatgaagttattgcggttgttgaacatggtggtatattaaagagcaaaaaaggagttaatcttcccaatacaaaaatttccttaccttttttaacgaaaaaagatagagaagatttagactatatccttacccaggatgttgagtgggtagccttatcttttgtgcgttcagctcaagacattattgaacttagaaagttaattcaagagtctggtaaaaattgaa

SEQ ID NO: 249247 - DNA, 857 bp, Unknown
  Bacterial polypeptide expressing nucleotide sequence isolated from the Sargasso Sea
agatcattccaatgttgttaaatggataagagagttagaaaaatcagttgcaattatgcaagacattcaaggtccaaaaattagaactggagaagcaaaagaatcaacacaatttaaacaatcacatgaaataaagataacaaataaagaaactatttcagatgacaacttaatttatataaattataaagatttatttaaagatttaaattctggagaacgaatatttattgatgatggacaaatagttataagaataattaaaaaaacaaaatcatcaatgttaggacaaatagaaataggtggagaattaagatcaaatcagggagtagcatttcctgattctaaattatcagtctctgcaattactgaaaaagatattgctgatctaaagtttggcaataaattagatgttgatatcgtagccgtttcttttgtaagagatgcaaatgatattaaaaaagtaagagagattgtagataaaaatataaaaatcattgcaaaaatagaattaaaaaatgctgttaaaaatttagattctataatcgatgaagcagatggagtaatggtagcaagaggagatttaggagttcagcttgatttagaaaaagtaccatttatacagaagcaaatattaaatgaagctaatgccaaaggaaaaataacagtcacagcaacagagatgcttcaatcgatgaaagaatctcatcgacccacacgtgctgaggttacagacattactaatgcaatattagaaggtacagattgtgtaatgctatctgcagaaacagcaatcggaaatcatcctgaagtagttgtaagtgcaatgtctgacatatgtaaagaagcagattcaa

SEQ ID NO: 249248 - DNA, 503 bp, Unknown
  Bacterial polypeptide expressing nucleotide sequence isolated from the Sargasso Sea
ttaattgatgatggaaagttatgtttaaagataataaaagctgaatcacaaattgcggaggctgaggttgttactgggggttctatttccgaccataaaggcgtgaatataccaaatgcggttttgcctatttccccactaggggaaaaagaccgggaggatttaaattttgcactcgaactaggagcagatctaattggcctcagttttgttcaacgccccgatgatgttttagaggcaagcgaattaattggcggacgggcaagtatcctctctaaactagaaaaacccagcgctatcgatcagctagatcaaatcataaaagtttctgatgccattatgattgctcggggcgacctgggtgttgaactcccgccagaagatctaccaagccttcagaaacagatcatacgaaaatgccgacaacaaggtaagccagtggtggtggcaactcaaatgttagagtccatgatagaagccccaaaaccgaccagggcggaagc

SEQ ID NO: 249249 - DNA, 331 bp, Unknown
  Bacterial polypeptide expressing nucleotide sequence isolated from the Sargasso Sea
tatgtcgaacattgatttaaaaagaagaacaaaaattgttgcaacaattggtccgtcaacacaatctgaagaaataattgaagatttaataaaagctggagttactacttttaggctaaatttttcacatggagatcacaaggatcatgccgaacgaattaaaactatacgagaagtatcatctaaattagatattgatattggaattttacaagatcttcagggaccaaaaatcagattaggaagatttaaagatggaccagtaaagatctataaaagggataaattttcattaacatctaaagaaattgaatgtacagatacgatgcta

SEQ ID NO: 249250 - DNA, 754 bp, Unknown
  Bacterial polypeptide expressing nucleotide sequence isolated from the Sargasso Sea
actaaatgtttaagtcaaaattgctatctttcaagtaacaaaagtttacatgtatctaatatttctcttccatttaataatctgacttctaaagacaaaaaagacattaaaattgcaaaaaagattgggtgtaattgggttgcactatcatatctacagaatgcgaagttaatttaccaaactagaaaacttatatcaaaagatatgggaataatttcaaagattgaaaataaatcagcattaaaaaatataaatgaaattattcatgcaacagatgctgtgatgattgctcgtggagatttagcgattgacgttggtcatagtgaggtaccaaaaatacaacttggtttaataaaaaaatgtaaccaattctctaaatcggtaattgtggctacacaaatgctggaaagcatgattgaaaattatacagcaacaagagctgaaataaatgacatcgctacagcaatttttcaaggtgcggatactgtaatgttatctgcagaaagtgccgtaggaaaatatccattacaggcagttaaaacaatgacaaaaactatcgtctccacggaaaaatataaaaaagaacatattgaggactttaaaaattcaattgatgcaaagaaagaccctattaaatcaattgttctatcagttaaagatttggcttacaatccatctatcaaagctattatcgctttttctaactctggtaatactgcgaaacttgtgtcagctgttagaccaagagtaaaaa

SEQ ID NO: 249251 - DNA, 797 bp, Unknown
  Bacterial polypeptide expressing nucleotide sequence isolated from the Sargasso Sea
tatgaataaaacaaaaattatagctacgattggcccatcctgcagtgataaagaattattgcaggaaatggtcaacagcggggttgggacctttcgaattaacatgtcgcacggagatacacaatcaaaaaaacatctttttgagctagtgaaatctgtttcgcacccagaaggtggtcatccggcaattcttgctgatttatgtggaccaaaaattcgtatagtcgatatttcttgtagcttcaaactccaggatggagatactgtagtaatctcaaacaaggaagatattggggatatctttgttacgagttcaatatcactttcaaatgtaaaaactggttcaaaaatattgattaatgatggtaaggttcaattagatgttagtgaggtgatagatgaaaatactttgcgctgtaagactcttattggtggggaaatacaaaaaggtaagggtgtaaactttcccggtgtatcacttggggtccctgcactaacgagtcaagacaaagaagatctaaagcttgccctaaaggaaggttcagattggattgccctttcatttgtaagaaatgcctctgacattgatgaggttcataaaattatggatgattctaatatacgtcttccagttatggcaaagattgaaaagtgggaagctcttgaagatttagcaaatataacagatacattcgacggtgtgatggtggcacgaggtgatcttggtgttgaaatcccatcaggaaaagtacccgctgcacaaaaggagattatcagcttggcaagtgcaaatggaa

SEQ ID NO: 249252 - DNA, 871 bp, Unknown
  Bacterial polypeptide expressing nucleotide sequence isolated from the Sargasso Sea
attattaatcaaattcatgagttgaaccgaagcagacaatcacctattgcaattatgcttgatactcagggaccagaaatcaggactggcgatgaaacaagtgaacttaagtcaaaagaaatagttactgtcagttgcccaccctttgaagataatgaaggtaatattcatgtaaattacgctgctttgaaaagtgatctgaaaccaggaaactatatttccatagacagtgggttggtaaaattaaaagttcttagcaaacacaaaaaaggacttaggtgtgaagttatagatggtggtatagtaaatggacatagacatgtgaatttaccaggcactttagttaaactgccgggtataactgaagcagacaagaaagatataatttttggcataaagcaaaaagttaattttattgcactttcttttgttcgaagtgctgaaacaattcgagaggtaagaaagcttttggataaacatgcttcacacacagaaattattgctaaagttgaaaaccaggaaggtgtcgatagactcgaagaaattgttcaagaagcagatggagtcatggttgcaaggggagatttaggaatcgaagttgaattggaagaagttccacagattcaaagaagaatagcttttttatgtgcaaaatatggaaaacgttcaattgttgcgacgcatatgctggaatcaatgattgaacatccagtaccaacaagagcagaagtcactgatgtcgcaaatgcagtatttgaacagtcagatgcaataatgctatccggagaaacttccataggaaattatcctgttcgttcagtagaaactttgaaacgtatagcaaaacgcacagagatatttccaggcgtaa

SEQ ID NO: 249253 - DNA, 892 bp, Unknown
  Bacterial polypeptide expressing nucleotide sequence isolated from the Sargasso Sea
atgaagaagataaaaaaaacaaaaataattgctactcttggtccttcaacatcgtcaattgaaagtattgaaaatcttatcaaagaaggagttgatgttttaagaattaatttttcacatataactcataaagaagcagaaaaagtaattaagcagataagaagaattaatgaatcactagctacaaatactgcaattcttgctgatcttcagggccctaagcttaggataggagtagttgtcgaaaatactgagcttatagatggagataatataaatattaagaccggtaaagaatttaaggggaataacaagaaattatatcttaattacaataatcttgcaaaggatattaagaagggtgagaagattcttattgatgatggtaaaattattcttaaggttattgaaatagataaaaaaaatgaaataatagctgaagtagttcagggtggaatgctttcttctaataaaggatttaatctacctaataccaatatttcccaacctgcattaactaataaagatattgaggatgcaattttttctgcaaaacaaaatgtagattggattgcactttcatttgtaaggaatggatctgatatagagtcattaataaaattattagataaaaataccaattacagaattccagtaattgccaaaattgaaaaacctgaaggggttagaaatattgatgaaatcatgaaatatgctagtggtattatggttgctagaggtgatcttggagttgaaataaatgctgcagaagtcccgctaattcaaaaaaaattagttaataaggcaaaaaaagctaggatacctgtaattattgctactcaaatgatggagagcatgatgaagagtttaaacccaaataagagcagaagta

SEQ ID NO: 249254 - DNA, 820 bp, Unknown
  Bacterial polypeptide expressing nucleotide sequence isolated from the Sargasso Sea
aactcagtaattaccaaatgccgtagtcaaaattgtgaactaaagagtaataaaagcttccatgttcctaagttggatataacttttaataaacttactgaaaaagataaaaaagatattaaaactgctattaaactcggttgcaactggattgctttatcttatttacaaaatgaaaaattaattttggaaaccaggaaattaattaaaaaagacatcggtatcatttctaaaattgaaaacaaacatgctctaaaaaatataaaaagaattattcaagctacagattcgataatgattgctagaggagacttggctatcgatattggccacagtgaagtgccaaaagtacaactaagtctaattaaaaaatgttctcaattttccaaatctgtaatagttgctactcagatgttagaaagcatgattgaaaataataccgctactcgagctgaaataaatgatattgcaacagcaatctttcaaggtgctgacactgtaatgttgtctgctgaagcagcaattggaaaatttccaactcaagctgtttctacaatgacccaaactattttatctactgaaaaatacaaaagagaacatatagaagattttaaaaattcagttgttacaaacaaagatccggtcaaatctatattgctctctgttaaagatatagcttacaacccgaacgtaaaagctataatagttttttctaattctggtagatctgcaaaactggtttcagctatgcgtccagcagcaaaaatagtgacgatctcacctaatataaatgtaagtagaccaagtatcattactttgg

SEQ ID NO: 249255 - DNA, 653 bp, Unknown
  Bacterial polypeptide expressing nucleotide sequence isolated from the Sargasso Sea
tatgtcgaatattgatttaaaaagaagaacaaaaatagtagcaactattggccctgcaactcaatctgaagagataattacaaatttaattaaagctggagttacaacattcagattaaatttctcacatggagatcataaagatcatgctgagagaataaaaaccataagggaagtatcaaaaaagttagatatagatattggaatattgcaagatcttcaaggacctaaaatacgattagggcgctttaaagatgggccagtaaaagttaaaaaaggcgataaattcacactgacatcaaatgaagtcgaatgtactaatactattgcaaatgtaacctatgacaaactttctcaagaagttaacgaagggaaaagaatacttttagatgatggaaaaatagaaatgattgtagaaaaagttgatacaaaagctaataatttggagtgcatggtaactgtaggaggggttctttcaaacaataaaggtgttaattttccagatgttcaattatcagtaaaagcattaacagaaaaagataaagaggatttaaaattcggtctatctgaaggagttgattggatagcactaagtttcgttagaaatccatccgatataaatgagataaaagatttaataaacaaaaatgggc

SEQ ID NO: 249256 - DNA, 522 bp, Unknown
  Bacterial polypeptide expressing nucleotide sequence isolated from the Sargasso Sea
tatgtcgaatattgatttaaaaagaagaacaaaaatagtagcaactattggccctgcaactcaatctgaagaaataattacaaatttaattaaagctggagtaacaacattcagattaaatttctcacatggagatcataaagatcatgcagagagaataaaaaccataagggaagtatcaaaaaagttagatatagatattggaatattgcaagatcttcaaggacctaaaatacgattagggcgctttaaagatgggccagtaaaagttaaaaaaggcgataaattcacactgacatcaaatgaagtcgaatgtacaaatactattgcaaatgttacctacgacaaactttctcaagaagttagcgaagggaaaagaatacttttagatgatggaaaaatagaaatgattgtagaaaaagtagatatagaagctaatcttttggagtgtctagtaactgtaggaggggttctttcaaataataaaggtgttaattttccagatgttcaattatcagtaaa

SEQ ID NO: 249257 - DNA, 1339 bp, Unknown
  Bacterial polypeptide expressing nucleotide sequence isolated from the Sargasso Sea
tagtttaggcgtagatgcttttagaattaattttagtcatgatttaacaaatattaaaaagattattcagcaaataagaagcttagaaaagaaaacatcaaaaaaagtatctattataggtgatttgcaaggagtaaaaatccgtattggaagatttaagaaaaaaaatcaagttattaaaaaaaatcaattttttactttcgatttaaaaaataaacttggtgataaaaacagagtaacattgccttatccaaaattacttaaaaagataaaaaaaaaccatattatcctagttgatgatggaaaatatgcttttaaggttataaaaagaaattctttatcagttataacaaaaaatttaagtcaggactttactataagtgatatgaaaagtgttcatattaaaaatctatcaataccttttaataattttactaaaaaagataaattagatattaaacttgctaaaaaacttggttgtgaatgggttgctttatcttatgttgaaaacgcaaaattaatttacaaggcgaaaaaattattgggaaaaaatattggtataatttcaaaaattgaaaataaattagcagtaaaaaatattgacgaaattattacagcttcggatgcgattatggtagcaaggggagatttggccttagatgtaggccatagtgaagttccaaaaatacagttgggtataataaaaaaatgtaataacaattctaaaccagtcatagtggcaacacagatgcttgaaagtatgataaataattttacagcaaccagggcagaaataaatgatattgctactgcaatatttcagggtgctgatacagtaatgctgtctgctgaaacagcagtaggtaaatatccagtgcaagcagtaaaaacaatgtttaaaacgattgtttcaacggaaacatataaaaaagaacacattgaagattttaagagttctattgaagttaagagagaccctataaaatcaattgtattatctgtaaaagatcttgcttacaacccatccgtaaaagcaataattgctttttctaattctggtactaccgcaaaattagtatcagcagtaaggcctagagttaagattataactatatctccaaatataatagtaagtagacaaatgtctttattgtggggtgttcaatctataaaaagtaaagatgctagtggttggaaagatatgataaatatatcccggcaaataattaaaaaagataaatctattaaaaaaaatgattttgtgattattactgcgggtttaccttttggtaatgcgactatgactaatatgataagactctataaggttgggtcataa

SEQ ID NO: 249258 - DNA, 1165 bp, Unknown
  Bacterial polypeptide expressing nucleotide sequence isolated from the Sargasso Sea
ggtacaactggtcaacggccagagcctgcgcctggatctggacgcctcgcccggcgacgccagccgggtcaacctgccccacccggaaatcatcgaagccctgcagccgggcatgagcctgctgctggacgacggccgcctacgcctgaaagtgaccggcaagcaggccgatgcggtagacacctgcgtgatcgccggtggcgagctgtccgaccgcaagggcgtcaacgtgcccgaggcggtgctgcaactgtcgccgctgaccgaaaaggatcgtcgcgacctggccttcggcctggagctgggcgtggactgggtggcgctgtccttcgtacagcgccccgaggacatcgtcgaagcccgtgagctgattggcggcaaggccttcctgatggccaagatcgagaagccctcggcggtgcagcatctcgaagaaatcgccaagctgtgcgacgccatcatggtggcgcgcggcgatctgggcgtggaagtgccggccgagaacgtgccgcgcattcagaaggacatcgtgcgcacctgccgccaactgggccgcccggtagtggtcgccacacagatgctcgaatccatgcgcttctccccggcgccgacccgcgccgaagtcaccgacgtggccaacgccgtggccgaaggcgccgatgcggtgatgctgtcggccgagaccgcctccggcgactacccgctggaaaccgtgcagatgatgagcaagatcatccgccaggtggagaacggcccggactaccagagccagctcgatgtcggtcgcccacaggccgaggccaccgccagcgacgccatcagctgcgccatccgccgcatcagctcgatcctgccggtggcggcgttggtcaactacacggaatccggcagctccagcctgcgcgcctcgcgtgagcggcccaaggcgccgatcttgagcctgacgccgagcctgaccactgcccgccgcctgaccgtggcctggggcatctactcggtggtcaacgagcgcctgcgtcgggtcgaggaagtcaccagcaccgcgctggagattgcccaggcccagggcatggccaagcgtggtgaaaccgtggtgatcaccgccggcgaacccttcggccagcccggcagcaccaacagcctgaggatcgaaacgctgcattga

SEQ ID NO: 249259 - DNA, 1101 bp, Unknown
  Bacterial polypeptide expressing nucleotide sequence isolated from the Sargasso Sea
aatgacaagaaaaactaaaataatcgcaactgttggtccaagtattcactctaaagaggccataaatgaaattattgatgcaggagctaatgttttaaggttaaatttttcacatggttctaatgatgaatataaacaaatagtagattgggctagatcatcaaataaaaagattgcaataatgcaagatattcaaggtccaaaaataagaacaggctttttggaacaatcatttgatctatctcaaggagctgaaattgaaatattcaataaagattccaagaaaaataatgaaaatatcgttataaattatgagcagttatttgaagatgtgagtgaaggtgaacgaatattaattgatgatggaaaattgtccttaagagttacaaaaaaagaaaaaaataaagttcttgctgatgtagagattggtggagaattaaggtcaaatcaaggggtcgctttcccagattctaatttatcagtttcaactttaacaaaaaaagatattgaagatttagagttcggcaatcaacttggggttgattttgttgctgtttcttttgttcgaaacgcagaagatattataaatgtcaagaaatacattgatgatgatacaaaagtaatagcaaaaattgaacttaagtctgcagtaaaaaatctaaaatcaattattcaagagtcagatggagtaatggtagcaaggggtgatttaggtgtacaacttcctcttgagagaattccgctcgttcaaaaagagatattaaatgaaacaaatttacagggaaaaattacaataacagctactgaaatgttaacttctatgatttcttctcatcggcctacaagagcagaggtttcggatattacaaatgcaatactcgatggaactgatgctgtaatgttgtcagcggaaacctcaatcggtgaaaacccaattgaagttgtcagtgccatggcaaagatttgtagtgaggtagatagtgtttctggtacaaaaataacttcatctaaagacatattgacttctgatgaactaacaaattctctttcaaaagctgcagtacaagtagcaaatgattctaatgcaaaggcaatcgtagc

SEQ ID NO: 249260 - DNA, 1282 bp, Unknown
  Bacterial polypeptide expressing nucleotide sequence isolated from the Sargasso Sea
atgagaagaacaaaaattattgccacattaggtccagcaacagataaaccggatatattagaaaagttaattaatgctggcgttgatgtatttcgcctcaactactctcatcaaacacatgaacatcatgaaaacagaatgaaggaaattcgccgcctttcatcaaaacataaacatgctgtggctataattgctgatttgcaaggaccaaaaattagaatagaaaattttaaaaatggagaaatagaattagtagaaggtgaaaattttaaaattgacacgactatatcaaaaaatgatggggatcaatcacgagtaggaacaagttataaaaaattaccggatgatataaaagtaaaagatactctaatgattgatgacggaagaattgttttgaatgttttatcaaaaaataaaaatgttattgattgtaaggttataacgggtggcacactaagtaatggcaagggaatcaatatccaaggtggtggattatctgctaaatctataacagaaaaagatattgaggatatgcaacatgccgctaaaattaaagttgattatatagcaatatccttccccagaaatggaagtgacataaaaaaagctcgcaaaatgatgaaggattgtaattgcaatgcacatgtaattgcgaagatagaacgtgctgatgctcttattaatattgatgaaatcattgaagaatctgatgcaattatgattgcacgtggtgatttaggtgtagaaattggcgatgcggcactgcctccaattcaaaaaagtcttatcaaaaaggcaagacaaatggaccgtgttgctattaccgctactcaaatgatggaatcaatgattgaaaataaaatcccgacgcgagctgaagtatttgatgttgcaaacgcggtgatcgacggaactgatgctgttatgttatctggtgagacgagtataggtaattatccagacgaagctgttaaatcaatgtctagaatttgcgaagaagctgaaaaacaacgcagtgttcgtgtttcagatcaccgcactaatctaagttttgacaatattccgatggcaattgctatgtcaagtatgtactcggccaaccatattggagcaaaagctatatgctcattaactgaaacaggaggcacttgtttatggatgtctcgaataagttcaggtataccaatctttgcatttacaagacatacttcgacgcgtcggcgtgttgcattatttcgtggggtgttccccatgaaatttgatatcacacacaccgatccgt

SEQ ID NO: 249261 - DNA, 1411 bp, Unknown
  Bacterial polypeptide expressing nucleotide sequence isolated from the Sargasso Sea
catgttcactagaacaaagattatttgcactattggtccagctacatctgaattaagcacaatgcaaaagatgtatttagctggaatgaacgtcgttcgaattaatatgtcacatgcatctcatgatgaagcattgaatgtaattaataatgttaaattgattaataagaatccagatattaaaaaggggccaatttccattttaatagatactcaaggcccagaaattagaacaggagacagggatacatctcttgatttaaaactcggtgataaagtaaatcttactgtaagagatgaagtcgatgttgagacatcatctatcaaaattaactatagaggattaattaacagtgtaaaaaaaggttctaagatttctgtagataatggcctagtaaatttcaaagttttagaaaaacatgatgataagcttttatgtagagttattgatggaggaaaaattggtagtaagagaagcgttaatctgcccggagtcaggattgaccttccttcaataactaaaaaagataaagccgatataaattttgctatcaaacatgatgtagattacatagctctttcctttgttagaaaaattgaagatattcattgcttaagaaagatcttaaagagaaagaaatcacaaataaaaattgtttcaaagattgaagataatgaaggcctttctaatattcatgctattacacaagaatcagatgctgttatggttgcccgaggtgatcttggaattgaaactagcttggctgatcttccaaatgtacaaagacgcataatgtatgcatgctcaaaatggggcagaagatctatcgtagctactcacttgttagaatcaatgatagaaaaaccaacacctaccagagctgaagtaactgatgttgctaacactatttatgagggtgcagatgcaatcatgctctctggcgagactagcattgggaaatatccaattgaatgcataaaatttcttaaatctatagctgatagatcagaaaaatttagaacattaggctatgaagaaaaacttgaattaagtggcgattgggaatacttagctaagactgcaagggatcttgctgagtcgattaatgctgatggtattatcgttattacgagaagcgggtatacagcaaacctagtttccaatgcaaagccatttaacgttccaatatatgctttcaccaatgataaaagagttcatagacagctttcattagttggctctgttttaagtatttatcaaaaaagtattgttgataataagaataatatgtctaaaattgctagtacactaaaaaaggtttttagtaaaaagaaaaaattaaagtttgttcttatctctggaatgttttctgagaaacattctgatgcaataagggttgtaaacttttaa

SEQ ID NO: 249262 - DNA, 1213 bp, Unknown
  Bacterial polypeptide expressing nucleotide sequence isolated from the Sargasso Sea
aaggaaatacgaaaaattaatgattcactatctacaaatactgcaattcttgctgatcttcagggtcctaagctaagaataggagaagtttcagaaaatacagagcttaaagatggagacaatataattattaagactggtaaagaatttaaaggggatagtaaaacattataccttaattataataatcttgcaaaggatattaagaaaggtgaaaagattcttattgatgatggtaaaattattcttaaggttattgacatagacaaaaaaaatcaaataacagctgaagtaattcaaggcggaatactttcttctaataaaggatttaatctacctaatactaatatttcccagcctgcattaactgaaaaagatattgaggatgctattttttctgcaaaacaaaatgtagattggattgcactttcatttgtaaggcatggatctgatatagaatcattaataaaattattagatcaaaataccaatcacagaatcccagtaattgccaaaattgaaaaacctgaaggagttaggaatatcgatgaaattatgaaatttgctagtggtattatggttgctagaggtgatcttggagttgaaattaacgcagcagaagtcccactgattcaaaaaaaattagttaataaggctaaaaaagctagaatacctgtaataattgctactcaaatgatggagagcatgatgaagagcttaaacccaaatagagcagaagtaaatgatgttgcaaattcaataatggatggtgcagatgcagtaatgctttcaggagaaacttcagttggagaacatcctgttgaagtaattagaacaatttctcaaattattggtaaagttgaaaactcagatttaatttcgttaaaacataaacacccaactgattatgattcagaaaggttcataacaaaatcagtttgttattatgcagctaaaattgctaatgatactaaggcaaaagcaattagcactttaacaaatagtggttacacagcatatcagatttcttcatggagacctaaaactcatgttctagtttttacatcaaatatgagaatattgacccagcttaatttattatggggagtaaaagctttctattatgatggcacagaaagtactgatagaacaattgaagaaattaataaaattgctgttgaaaacaatcttttgcaaaaagatataaagttat

SEQ ID NO: 249263 - DNA, 1411 bp, Unknown
  Bacterial polypeptide expressing nucleotide sequence isolated from the Sargasso Sea
aatgaaatttaaaagaacaaaaataatttgtactattggtccggctactgaatcgtattcaagtctaaagaagttatattctgcaggtatgaatgtggctcgcttgaatatgtctcattccgaccacaagaatgcaaaaaaaataattgacaggattaaaaaacttaataaaaaagttaaaaaccctataggcattcttttggacactcaaggcccagaaattagaactggcgatacttctgaagttgtcaatctagaacccggagaacttgtttcttttacaataagagacgaagtagatgtcgaaactacttcgataagagttcattacgatgagcttattcagagtgttgatgtgggaaccttaataagtcttgataatggtctattaaattttaaggtacttaataaaactaaaaatcaactggaatgccaggtcttggacggaggtaagcttggcagcaagcgccatgtgaatttgccaggtatacgcattaatttaccttcagttactgaaaaagataaaaaagatatagcatttggtttgaaggaaaatgtagatttcattgcattatcttttgttcgtgacgcttctgatattggtgacctaaaaaaggtcctaaaaactcaaagtaagaaagtcaaaataatatccaaaatagaagatagagaaggtttatcaaatatagaagatatttgtatagtttctgatgcagtaatggttgcaagaggtgacttgggcatagagacagatctatcaaatcttccaaatattcaaagaaagataatgtctaactgcgcaaaatatggtgttagatcaatagttgcgacacatttactcgaatctatgatagaaaatccaacgccaactagagcagaggtgactgacgttgctaacgccatctatgaaggcgcagatgctgtcatgctatccggagaaactactattggtaagtatcctgaagaagcggttaatttcatttcaagaatagctaatcaaacagagagatacagaaccttgggttacgaagaaaagctaatttctaatacagattggcaacatttgggaattgcagctaaaaatcttgcgcaatcaattgatgcagatgggattatagccatcactagatcgggacaaacagctgaaatagtttcaaatgcaaaaccttttatgaagcctgtctacgcattcagcaataataaaaagacggtaagtcaattatctctggctggctctgttcaagcgtttttatctcctatgtatacagatcacgaaaagaatataaattctataatgaaaattttaagaaaggagctttctccaactgaagacttaaaatttgttgttatttctgggattttatctgaaagctcagcggatgctattgaactaagatctttaaatctttaa

SEQ ID NO: 249264 - DNA, 1411 bp, Unknown
  Bacterial polypeptide expressing nucleotide sequence isolated from the Sargasso Sea
tatgaaactcaagcgcactaaaatcatctgtactatcggaccaactaccgaaactttctccagcatcaaaaaattacaccaagcaggaatgaatgtcgcaagactgaatatgtcgcattcagatcataagaatgcaaaaaaaattattgatcgaataaagaaacttaataagacaattgaaaacccagtaggaattttattagatacccaaggtccagaaattagaacaggcgatacgtctcaagttgtaaatctagaacctggtcaattagtttctttcactattcgtgatgaggttgatgtagagacgacatcaatcagagttcattatgatgagcttattcaaagcgtgaatgttggaacgctgattagcttagataatggtctactaaattttaaagtactaaaaaaatctaaaaatgaacttgagtgtaaggttttagatggcggaaagcttggtagcaaaagacatgtcaatttgccaggtattcgtatcaatttaccttcagtaactgagaaggataagagagacattgcttttggtttgaaagaggatgtggattttatcgccttatcttttgttagaaatgcttcagatattgatgatttaaaagaggttcttaaaaataatattaaaaaagtaaaaattatttcaaagattgaagacagggaagggctttcgaatattgaagaaatttgccaagtttctgactccgtcatggttgcacgaggagacttaggcattgaaactgatcttgcaaatttaccaaatattcaaagaaggataatgtctaactgtgcaaaatatggagttaggtctattgttgctactcaccttctagaatcaatgattgataaccccacaccaacaagagcagaagttaccgatgttgcaaatgcaatttatgaaggagccgatgcagttatgctatctggtgagaccactataggaaaatatccaattgagtctgttaaatttatctcaagaattgcaaagcaaactgaaaaatatagaactcttggttatgaaagccaattaatatcaaaaacagactggcaacaccttggcgtagcagctaaagatattgctgaatctatccaggctgatgggattattgcaataactcgatcaggccaaactgctgaaattgtagctaatgctaaaccctttatgatccctatatttgcattcagtaataataaaaaaaccattaaacagttgtctttaactggatcagttcatgcctacaaatcatctatgcattcagatcacgaaaagaatttagaatatattatgaggattttgaaaagagaactttcacctaaaagagatttaaaatttgttgtaatttctggaattctttcagaaaattctgctgatgcaatagaagtgagatcattgaatacttaa

SEQ ID NO: 249265 - DNA, 1216 bp, Unknown
  Bacterial polypeptide expressing nucleotide sequence isolated from the Sargasso Sea
aatgaaatctaaaagaacaaaaataatttgtactattggtccggctactgaatcgtattcaagtataaagaagttatattctgcaggcatgaatgtggcgcgcttaaatatgtctcattctgaccataagactgctaaaaaaataattgatagaattaaaaaacttaatacaaaagttaaaaatcctgtaggcattcttttagatacccaaggcccagaaattagaactggtgatacttctgaagttgtaaatctagaacctggagaacttgtttcttttacaataagagacgaagtagatgtcgaaactacttcgataagagttcattacgatgagcttatccaaagtgttgatgttggaaccttaataagtctagataatggtctattaaattttaaggtacttaataaaagtaaaaatcaactggaatgccaggtcttggatggcggtaaacttggcagtaagcgccatgtaaatttaccgggtattcgcattaatttaccttcagttactgaaaaagataaaaaagatatagcatttggcttgaaggaaaatgtagatttcattgctttgtcttttgttcgagacgcttctgatattgatgaccttaaaaaggtcctaaaaactcaaagtaggaaagtcaaaataatatccaaaatagaagatagagaaggtttatcaaatattgaaaatatttgtcaggtttctgatgcagtaatggttgcaagaggtgacttgggcatagaaacagatctatcaaatctcccaaatattcaaagaaagataatgtctaactgcgcaaaatatggtgttagatcaatagttgcgacgcatttacttgaatctatgatagaaaatccaacgcctactagagcagaagtgactgacgtagctaatgctatctatgaaggtgcagacgctgtaatgttatccggagaaactactgttggtaagtatcctgtagaggcagttaatttcatttcaagaatagctaatcaaacagaaagatacaggaccttgggttatgaagaaaaactaatttcaaatactgattggcaacatctgggaattgctgctaaaaatcttgcgcaatctattgatgcggatggaataatagcaattactagatccgggcaaacagctgacatagtctcaaatgcaaaaccttttatgatacccgtctatgcattcagtaataacaaaaagacagtaagt

SEQ ID NO: 249266 - DNA, 1020 bp, Unknown
  Bacterial polypeptide expressing nucleotide sequence isolated from the Sargasso Sea
tatggaaagaagaacaaaaataatctcaacagttggaccaaaaacaaatacagaatcctttatttcaaaattatgtgtggcgggaactaatgtcatcagaattaatatgtctcatgccagccatgccgaattagagaaaattattacaattgtaaaaaaaatcaacaaatccaaaatctgctctgttggcataatgattgatacccaaggtcctgaaataagaacagctcctattacgaagagcattcaactgataaaaggtgaagttgttcacttgactccaaaagcactcaagggcactaagtacattgttgttgataatttgaaacaagttaaagggctgaaaaaaggaggtaaagtttcctttgataacggagctattgatctaaaaattaaaaatatagataaagataaaaatgtgaaatgtgaagttttagattctggtgaaataggaagcagaaagcacgtaaattttcctggagcaaaagtaactcttccatccctcacagacaaagacaaaaaagatatcaaatacgcaatttctaaaggggttgattttattgccttatctttttgcaggtcaaaaaaagatttaaacgaattaaagaaatttttgggaaagaaggtttctgatgtagaaatttttgtcaaaatagaggatcaagaaggcctatcaaatcttgaagaggtgattgaaaactcagatggtgtcatggttgcaaggggagatttaggcattgaaacagacattacaaacttgccttatatccaaagaaatattattaaaattgcctcttcgaaaggtaaaaaatcaattgttgctactcaattactagaatcaatgattgatagtcctcatccttcaagagcagaagtctcagatgtggcaaatgctgtttatgagggcacagatgcattaatgctttcaggtgaaacaagtattggtaaatatccagtagagtgtgtgaaatatattgatcaggttgcgagaaatgctgaacgttcagaaacattgcactt

SEQ ID NO: 249267 - DNA, 1411 bp, Unknown
  Bacterial polypeptide expressing nucleotide sequence isolated from the Sargasso Sea
tatggcttttataagaacaaaaataatttgtaccgttggaccaaacagctcagataaagctactttaaaaaaacttcatttagctggaatgaatgttgtaagaatgaatatgtctcacgcaactcataaaaatgctaaagagattattaacatcattaaagacataaataaaaccaaaaatagtaagttatcaaacataggcatattacttgatacccaaggtccagagataagaacaggcgacacttctcttccaattaatctcaaagtgggtgataaggttacgttaactgtgcgtgatgaggttgatgtagaaacctcatctatcaaggttaactataaaggtcttattcatagtgttaatgttggttcaagaatttctgttgataatggattaattagttttagagttctttcaaaagaatcagataatttaatttgcaaagtaattcatggtggaaaagttggctcaaaaagacatgtaaatttgcccggcgtaagaatagatatgccctctataacttcaaaagatataaaagatattacttttggaattaaaaataatgtagattttattgctgcctcatttgtcagaaataaaaaagatcttcaaatattagaagaccttcttcttaaacaaaaatcagagtcaaaaattattgctaaaattgaaaatcaagagggattagataatattgatgaaatttgtgaatctgcttggggcatcatggtagcaagaggtgatttaggaatcgaaactagccttacagacttaccaaatatacaaagaaaaataatgcattcttgtgcaaaatggggcaaaagatccattgttgctactcacttgcttgaatcaatgatagaaaatccaacaccaacaagagcagaggttactgatgttgcaaatgcagtttatgaaggtgctgacgccatcatgttatctggagaaactagtattgggaaatatccagttgaatgtgtgaaatttttaaaatctatatctaaaagaacagaaaaatttaaaactttagaatatgaaaaagaactcataacaaattcagattgggaatcaattgctgtcgctgcaagagacttaagtgagtcgataaatgcagatggaataattgctgtaacaagaactgggtcgactgcaggttacatatcaaacgcaaaaccaaaagatattccaatttatacatttaccaacaatataaatacctttaatcaattgtctttagtgggttcagcaataccattttatttgaaaagattaaataatcataaaaaaacccttgagcatgtaagagacgtattaaaacctctgcataaaaagaagaaattaaaattcgttatggtttctggcatattctctgaaaaacactcagaagcaattcaaataattaatttttag

SEQ ID NO: 249268 - DNA, 866 bp, Unknown
  Bacterial polypeptide expressing nucleotide sequence isolated from the Sargasso Sea
tgctataaagaataatgtaagcttcattgctttatcatttgttaggtctgctcaagatatattgaatcttagatctatattaaaaagaaaaaaatcatccataaaaattattgcaaaaattgaaaatcaagaaggcctagacaatattcatgaaattacgcaggctgcagatacggtgatggtcgctagaggcgatttaggtatagagactgatcttgctgatttgcctaatatacaaagaagaataatgtatgcaactgcaaaatggggtagaagatcgattgttgcaacgcacttacttgagtctatgatacataacccaactcctacaagagctgaagttactgatgttgcaaatgcaatatatgaaggagctgatgctgtaatgctttcgggtgagaccagcgtcggtaagtatcccatccaatgtattaaaatgttgaagaaaatagctattaaaactgagcattttagaacccttggctatgaaaaatttctgcaagataattcagactggcaaaacattgcacagggcgctcgtgatcttgctgcaaggatcaaggcagacggaattgtaattattaccagatcaggccaaacagcaaatgtagtttcaaataccaaaccttttcgaatgccagtttatgcatttactaacaatcatgatacttattttcatctaagcttgattggtggaataaagccgcactttataaagtcaatcactaatcaaactaatacaatcttaaagattaaatcgattttaacctctgttaagaagtcaaaaaaatcacaaaaatttgtattaatagcgggagtatattctgcatctcatactgactctatccagataataaccacctaga

SEQ ID NO: 249269 - DNA, 1402 bp, Unknown
  Bacterial polypeptide expressing nucleotide sequence isolated from the Sargasso Sea
tatgtttactcgcactaaaattatttgcactattggaccatccactgatagttattcttcattagaaaacttagttttatcaggaatggatgtagctagaattaatatgtcacatgctactcataaaaatgcttctaatataattgaattcattcataaaattaataaaaaaaataaaaccaatgtatcggttcttctagatacacaaggtcctgaaattaggactggcgacacaaaacttcctattgatttaaaatctggcgatatagtttctctaaccgttagagatgaagttgatgtagaaacttcttcaattaaaatcaattacaaaggcctcatccaaagtgtcaaaaaagggtcaaaaatctctgttgacaatggattaatcaattttgaagtaatttccaaggattatgagaccttagagtgcaaagtaattgacggaggtaaaattggttcaaaaaggcatgtcaatttacctggcgtaagaattaatttaccttcaatcactactaaagacattgaagatataaaatttggtattaagagcggagttgattttattgcactctcgtttgtaagaagtgctgatgatattactgaattacagaaactaataaataaaaataaatcttctgtaaaaattatttctaaaatagaaaatcaagaaggtcttgataatattgaggatatttgtaaatcaagttggggcgtaatggttgcgagaggtgatttaggaattgaaacaagtttaaccaatcttcctaacattcaaagaaaaataatgttgtcatgcgcaactcatggaaagagatctattgttgcaactcatttattggaatctatgattaataatcccactccaacaagagctgaagttactgatattgcaaatgcagtatatgagggtgcagatgccgtaatgctatctggagaaactagtattggtaaataccctgaggaatgtataaagtttatgaaatctatagttgctgaaactgaaaaatttaaaacactcggctatgaaaataatctacaaaaaaattctgattgggaatatataggtcaagctgcaaaaaatttagctgagtcaattaaagcagatggaattattgcaattacaagaactggtgatacagcaacatatattgcaaatgcaaaacctcatggagttcccattttttcatttacaaataacgaagttactctcagacagctcagtttagtaggttcgactgtttcatttctaattaaagatatttcaaatcatgataaaacaatcaaacaatgcagtaatatcttgaaaaaatatttctctaaaaagaaaaaactgaaatttataatggtttctggaatattctcagaaaaacattcagatgctatacaaataataaatttttag

SEQ ID NO: 249270 - DNA, 1417 bp, Unknown
  Bacterial polypeptide expressing nucleotide sequence isolated from the Sargasso Sea
atgattaaaaattatagaaaaactaaaattcttgcaacaataggtccctcttccgaaaaaattaataaaattgaaaaacttgttttaagcggagttgatgcttttaggattaattgctctcatacaacaggttttcagtttaaaaattatatcgaaaatattaggaaagttgagaaaaaattaaagataccaattggtatattaattgatttacagggccctaaattaagaataggtgaaatagaaaataatatggctcttaaaagaggtcagaaacttttacttataaataataaaaaaaatttaaaacctaacgaagttccattaccagaggaaaaagttttcaaaagcgttaaagtaaaccatccaatatttatagatgatggtaaaataaaactaaaagtattaaaagtttccaaaaatattattgaaacaaaggttattttagaaggagtattaaaaagtaaaaaaggtataaatttacctgaaacagttttaaagaattctgcattaacatctgcagataaaaaaaatgtcaaaaaagcgatggaacttggtgttgattggattgctctatcatttatacaatcaccagaagatgttaaggaattaagaaaaatctgtaaaaaaaatgtttctataatggcaaagattgaaaaacctaatgcgttaaaccacatcaataaaattactgaattagctgatggccttatgatagctagaggagatcttggggttgaattaccaatacaggatgtccctagttggcaaaaaagaattattagagaagcaagaatgcaaggaaagcctgttgttgtatcaacgcaaatgcttgagtctatgataacttctaaaactccaacacgtgctgaagtttctgatgttgctactgcagtttttgagggatcggatgcagttatgttgtctgctgagtctgcaataggtgataaccctcaattagctgtaaaaatgatggataaaatcgctcatagtgtcgaaaaaaatccaaattactcttcaattttattagcacaacttgaggaaacgccggatagcacacctgatgcaatcgcaactgcctcaagaactttagcaactgagctaaattctcctgtgattgtttgctatacagaatctggttctacaggaattaaagtttctagagttagaccaaagcaaatgatattaactgttacaccaataatagaaacagctcgaaaactaactttagtttggggagtaaaatgtattgttcaaaaggatgcaaataatcttgaagaaatgattaaaatgacaaaagcatattcgaaaagagagaaaattataaaaaaaggtgagaaaatggtgattactgccggtttacctttaaaaaagcttggcacaacaaacttaattagagtaataaaattagattagt

SEQ ID NO: 249271 - DNA, 922 bp, Unknown
  Bacterial polypeptide expressing nucleotide sequence isolated from the Sargasso Sea
cccggcgtaagattagatatgccttcaataacttcaaaagatatgaaagacattacctttggaattaaaaatgatgtagattttattgctgcttcatttgttagaaataaaaaagaccttaagatattagaagaccttcttcttaaacaaaaatcagagtcaaaaatcatagctaaaattgaaaatcaagagggattagataatattgatgaaatttgtgaatctgcttggggcattatggtagcaagaggtgatttaggaattgaaactagccttacagacttaccaaatattcaaagaaaaataatgcattcttgtgcaaaatggggcaaaagatccattgttgctactcatttgcttgaatcaatgatacaaaatccaacaccaacaagagcagaggttactgatgttgcaaatgctgtatatgaaggtgctgacgccataatgttatctggagaaactagtattggtaagtatccagttgaatgtgtgaaatatttaaaatcaatatctaaaagaacagaaaaatttcaaactttagaatatgaaaaagaactcataacaaactcagattgggagtcaattgctgttgctgctagagacttaactgagtctataaaggccgatggaataattgctgttacaagaactggatcaactgctggttatatatcaaacgcaaaaccaaaaaatattccaatctacacatttaccaacaatataaacactttaaatcaattatctttagtgggttcagttattcctttctatttaaagagattaaataatcataaaaagactcttgagcatgttagggatgtactaaaaccattacatagaaaaaagaaattaaaatttgtcatggtctctggcatattctctgaaaaacactcagaagcaattcaaattattaatttttaga

SEQ ID NO: 249272 - DNA, 649 bp, Unknown
  Bacterial polypeptide expressing nucleotide sequence isolated from the Sargasso Sea
atgaaaatactcgacctagccagaaggaccaagattgtagctacgataggacccgcaactgagagtgcgagtcaaataagcaagttagtagaggccggtgcgactactttccgtctaaattttagtcatggtgatcatgaagaacatgctcaaagaataaaaacaattagaaaagtttctgatgatctaggcattcacataggaatccttcaggatcttcaggggcctaagattagacttggtagatttaaaaatggcccagttaatgtcaaaaatggcgataaatttattcttacatcgaaaaatattgactgtaatcaggaccaagcaaatgtcacttacgacaagctagctgaagaagtaaatgttggaaatcgaatactgttggatgatggaagggtagagatgaaagttgaagacgtagatataaaagaacaaagtttaatttgttcaataactgtaggtggggttctatctaataacaaaggagttaatttccctgatgttcaactctccatcagggctttaacagacaaagataaaaaagatctagcatttggtttaaaacaaggtgttgattgggtagcacttagttttgtaagaaatccttctgatttaatagaaataaaagatttaattagaaatcatg

SEQ ID NO: 249273 - DNA, 475 bp, Unknown
  Bacterial polypeptide expressing nucleotide sequence isolated from the Sargasso Sea
tatgggccagttcgatcagaaccgtcggaccaagatcgtggccaccatcggtccagccacggaaagttccgaacgcatcaaggaactggttcaggctggtgccaccacctttcggctgaatttttcccacggcgatcacagcgagcatgcggctcgcatcgcgaccattcgccaggtgtccgaagagctgggcatcaacatcggcatccttcaggacctgcagggcccgaaaatccgactgggtcgcttcgctgatggtccgatcaccctcgccaatcgagaccgtttctccctgacctccaggccggtgagttgcaaccagaccatcgccacggtcacctacgacaagctggccgatgaggtcaccgccggcagccggatcctgctggacgacggccgcgtggaaatgaaggttgagcaggttgatcaggcggagcagaccctgcactgcagcgtcaccgtcggtggcgtgctg

SEQ ID NO: 249274 - DNA, 1438 bp, Unknown
  Bacterial polypeptide expressing nucleotide sequence isolated from the Sargasso Sea
aatgaaaaaaagaacaaaaataattgcaactattggaccagcatcttgctcttcttctatgatcaataaaatgattgttggaggtacagatgtatttagaataaatttatctcatgcaacaatagatgatgcaaaaaaaattctggatatactcaaaaatgaatcaataaaagctaaaagaccagtggcatcattgctagatttacaaggtcaaaaaattagaataggttcctttgctaacaaaaaaaacatccatcttaagtcatctacaaaatttacgttaaatggctcgttgcctttggataaaggaacatctaaagaggttggtatttcctataaatcactagcaaaacatgtaaaagtcggtgatgagctactgttgagtgatgcattaatcaaactcgcaatagttaaaataaatggtaacaaaattttaactaacgttataagaggtggcgtattaaaaccaaatcaaggtgtaaacaaaaaaggcggaggattgccattaagaggtttgaccgataaagacctatctaaccttaaacaagcactatctttggatattgactatattgctgtttcatttgtaaaagatgaaaaagatattatgaaagtcaggaagatattaaagaagaaaaatattggaataattgctaaaattgaaagggcagaggctcttaaaaaaattgatcaaattgccaaagcgagcgatggaatcctagtcgccagaggggatttaggagtagagattggcattgagcaattaccagctgttcaagacgaaatcatcagaaaaagtatttcactagacaagatagtaattgttgcaacccagatgatggaatctatgataaataacagggttcctactagagcagaggtattcgatgttgctaatgcagtcacatctggagctgatgccataatgttatcagcagaaactgctataggtaaatatccaagtgatgttgttcatgaggctacaaggatatgccacatagctgaaaaaacaaataccaaaatcataaaacttgatcgtagagcagagaatatagatgcagttgaccaaatcatagcactgtctgctgctcacgctgccgcgagtagtcaaattaaagctattgcatgtttaacagaaaccggatccactcctatgtggatgtctagagttcaatcaagcatacccatatatgcaatgactcaaaatgattatactagtcgaagaatctgtctttacaaaggggtatattctatcaagctgaatacaatagaatacgatcacgctagagctaataaacaagtgatagatttaatggttgaatggggagctgttaaaaagggtgattttgttataatcacaaagggagatttaatgggcacaagtggtggtacaaatgccatgaaaattgtagaggtaggaaatttagttgaagtttag

SEQ ID NO: 249275 - DNA, 980 bp, Unknown
  Bacterial polypeptide expressing nucleotide sequence isolated from the Sargasso Sea
gaaaaggcatgtcaaccttcccgggatttcagtcaaacttccaggaatcaccctttcagaccgtaatgatctggagtttgctctggaagaaaatgtcgatgtggtggcactttcatttctgagaaacagggatactgtcctggaagtccgggaaatgttccgggaaaggggggaacagatcaaacttatcgcaaagattgaaaaccaggagggagtcgacaatcttgaagagatcattcaagtaaccgatggtatcatggtagcccggggagatctcggaattgaaatcgacatggaagaactcccccaaatccaaagaaaaatcgcctatctttgtgcgaagtacgggaagcgattgattgttgcgacccagatgctggaatcaatgatggaaaatccagtaccgacccgtgctgaaattaccgacatcgccaatgccgtctttgaacaatcggacgcgatcatgctttcaggggaaacgtctaccggaaaataccctgtccgttgtgtagaaaccctggtccggattgcgaagcgaactgaagtccatccaggagtccaattcacagagaacttaatccaggaagatggtccggaagaaaaccaggggaaaggccggcaaatgctggctgctgctgcaaccaaaattgcccgccaactgaaggtcccagggatgctggtgatcactcgaaaaggaagaggcgcgacgaaaatagccaatcttagggttcggggaatcccgatctttgcgtttaccgaatcggaaaagacgatcagtactctgatgttattaagaggggtttacccttattttcttaaatttgttgaggatcctgagctcaccattcaaaatgctttgaggttactcaagaagaaacaggatatgccttcagggatatccatcgttgtggtcgcagacatcatgaccggggaaggctatgtaaactgccttcaggtcaggacactgcctgaggattaag

SEQ ID NO: 249276 - DNA, 682 bp, Unknown
  Bacterial polypeptide expressing nucleotide sequence isolated from the Sargasso Sea
tctgcaataccaaaagccggtgatagtagcgacgcagatgctggatagcatgcaatattcacgacgcccgacgcgtgctgagacgaccgatgttgctaatgccattcttgatggtgcagatgcatgcatgctctcgggagaaacagccatcggtgatcatccgcgacgtgttgtagaaatgatgcgtcgtatagcacaatcaactgagcggcagtatctgaattcacgacgacaatacctcgatgagttgttaggaaaaagtagagtcggtgctgctgggaatgcttacctaccaaagcctcaacggcttgtacacggactccatccaatcactcaggcagttgttgaaggggcgagccgcatcgcagcagagctagatgcacggctttttgttgttgccagtaagagtggagttacggcgatcgctcggtcaaaacaccgtggtgccgttcctacaatcgggttgactgatgacccggcaacactcaggcagatgacgttgtactggggtgtgactccggttgctgttcctgagggagctgacgtgaatcagttgctgagccatgtaagtgaatgggggttgcagaatggtcgacttgagcgaggagaccgtatcgttcttgttgctggaatagggtttggagcaggcggtcacaatatggcgatggtgcacgaagtgtga

SEQ ID NO: 249277 - DNA, 1096 bp, Unknown
  Bacterial polypeptide expressing nucleotide sequence isolated from the Sargasso Sea
tatagctacggttggtcctggttgcgatgacaagtctgttctgcaggaccttgtcagtaaaggagtaagttgctttaggatcaatttatcacatgggacggaagatcagaagagacattatttcaatctggtaaaatctttgaaaacgccatcaggattaagaccttctatccttgcggatattgcaggtccaaagattagagttaagggtttaaatgaaaaaataaagattacaaaaggagatccagtcttattaagcaatgataaaaacaaccagagttctatttcaatttccgaaggggtccattttgaaaaagtaaaccctggagcaaagatacttatcgatgatggaagactttatttggaggtgaaagaacttgtttcaaaccaaacgattgactgtgttgcgatcaacgatgggtttattgaaaatggcaaaggagtgaactttccaggaattgctttaaatgttccgactttaacgaaacaagacgagatagatctaagtctttcactgtcagaagaagccgactggctggcgctatcttttgttcgcacaccatctgactatgggtatgttaaagacaaagtcaaaagcgcaggattcgacactcctataatagcaaagattgaaaaatgggaggccgttcaaaacctggaagacattattcgctcttttgatgcagtcatggttgccaggggagaccttggtgtggaaatgcctattgagcaggttccattaattcaaaaggaggttatagaaaaagcaaacagtaaggggaagccggttattattgctacacagatccttgattcaatggtagacaggcctgtaccaacaagagcagaggtgagtgatattgcaaatgcaatactagatggagctgactcattaatggtgacaggagaaacggccataggcaaacaccccaaaaaagtaattaaagtcttgtctaaggtaataaacaagacggaattatctattaactatggacagtattcaaagtggtcaaccaacaaagaaataaataccgcaaatgcaattagccacgctgcttgtgctgtatcaagatctcagaggataggtgttttagcc

SEQ ID NO: 249278 - DNA, 1312 bp, Unknown
  Bacterial polypeptide expressing nucleotide sequence isolated from the Sargasso Sea
tatgaggaaaaccaagattgttgtaactatcggaccggctactgattcgcccgaggttattgatcaactggtggaaaatggcatggattgtgccagattgaatttttctcacggtacttttgaaagccatgccaaaatcataaagtccgtacgagaggcagcccaaaaacacaaccgaagagtagcaatccttcaggacttaggcggaattaaaatgagacttggtacgattgatggccaagtccaacttaaccatggagatagagtatctgttgtccctgcagactcatcggatgatcctaaaattattccattcccacaagcagaaatacttaagaatctcaccaaagataacttaatatacatatctgatgggactatatgcttagaaattctgtctaacgacaacggagtggttaattgtagggttagaaatggtggaatgatttcatcttataaagggctgaatttgccaggagctaaaatagatcttccagtgcttactgaagctgataaagaagctatcaaatttggtgttgaacaaggtgtggattgggtagcagtttcgtttgttaggtctttagaagacgtgaggtacgctaaagcatatatgaaagaagtcggagctaccgctcctatgatggccaagctagaacgagcagaagctgttgtgaatgtagacgaaatattgtcagaagttgatggagtaatggttgcccgaggggacttaggtgttgagatcgacatggtagatgtccctgtgattcaaaagaatatagtttctcaggcaaagcaagccgctaaagtatctgtgatagctacacaaatgctgcgttcgatggtggtttcgcctactccgacaagagcggaagtgtctgatattagtaatgctgttttagacggatgtgacgcgatcttgctatcagatgagaccgcggttgggcaattccctgttgaagctttaaccgttgcagctcgtacaattttaaaggctgaagagatttatccgtattatcaagatttgagtgaagatactagaacccaagcaatcgcttcgggagcggcccgattagtaaaaagcctaggagcaaagccggttgtagttaccaattctggagcttctgccagacaagtatccagatttagacctgacagtgaaatagcagtaataacgcacgataaagctatgttagataggcttgcactgctttggggttgtacagcagtgggagtagtccctgcggaaagagattctagtaaattagtcagcagtattgttgaaactttgatcaattcagagaccattagtgat

SEQ ID NO: 249279 - DNA, 901 bp, Unknown
  Bacterial polypeptide expressing nucleotide sequence isolated from the Sargasso Sea
aaaagataaaaaagatattaaaactgcaagaaaaattggatgcaactggatagctttgtcttatttacaagatgcaaaattgattcatcaaacgaggaaactgatatcaaaagatatgggaattatctcaaaaattgaaaataaaatggcgctaaaaaatattgatgaaattattaaatcgacggactctgtgatgatagctcgtggtgacttagctattgatgttggtcacagtgaggttccgaaaattcaacttggtttaataaaaaaatgcaatcagtattccaaatcagttattgttgccactcaaatgcttgaaagtatgattgaaaattatactgcgaccagggctgaaataaatgatattgcaactgcaatatttcaaggtgctgatacagtgatgctctctgcagagagtgcggtaggaagatatcctttgcaagcggtcaaaacaatgactaaaacaattatttcgacagagagatataaaaaagatcacattgaggattttaagaataaaattgatgccaaaaaagaccctgtaaaatcgattgtattgtctgtaaaagatttagcttacaacccatcagtaaaagctataattgctttttctaattcaggtaaaacggcaaagatagtctcggcgatgcgaccaagagtaaaaataataaccatttctccgaatataaacgtaagtcgtcaaatgtctttattgtggggtgtgcaatcgctcaatagtcgagatgcaaacggttggagagatatgatgaatatatcaagagaaataattaaaaaagatagcgaaattaaaaaaaatgattttgttgttataactgctggacttccattcggtaacgctggtatgactaatatgataagactttacaaagtcgggacttaa

SEQ ID NO: 249280 - DNA, 1408 bp, Unknown
  Bacterial polypeptide expressing nucleotide sequence isolated from the Sargasso Sea
atggaaaaaaaagcaaaaattatagctactttgggaccagctatttattcagaaaaaaaacttaaaaaaataattagtttaggtgtagatgccttcagaattaactttagccacgatataaaagaagttaagcaaataatttctcaaataagaaagcttgagaataagttaaataaaagaattgctattattgctgatctgcagggggtaaagttaagaattggaaaaacatcaagtgaaaaattaagaattaaacgcaatcagaaatttacttttgatacaaataaaaaagttggcaacaacctaagagtttgttttccctacccatttattattaacaaaataaaaataggtaataaaattttattagatgatggaaaatttacttttaaagtaattaaaaaaaataaaaaatcgttagtaacaagatgtttaagtactaattgtatattaagtagcaataaaagtgttcatataccaaatattatgattccgctaaaacgtctaacaaaaaaagataaaaaggatatctcaactgcaaaaagtatgggttgcaactggattgcactttcatacatacaaaattctagccttataaaagaaacaagaaaactgattaattctgatattggaataatttcaaaaattgaaaataaaattgcaattaaaaatataaaagaaataattaatgcaagtgatgcgataatgatcgcaagaggagatcttgctattgatatagggcttagtgaagttcctagttttcaattagaacttataaaaaaatgtgctgctctttctaagcctgttatcgtagcaacgcaaatgttagagagtatgattgaaaacccttcaccgactagagctgaaataaatgatattgccaccgccatatttcaaggcgcagatgctgtgatgctttcagcagagtcagctataggtaaaaacccaactcaaagtgtaaaaacaatgtcaaaaactattctttcttcagaaaaatataaaaaacaacatattagtgaatttaaaagttcgattgatgctaaaaaaaatattatgaaatcagtagtattgtcagtcaaggatcttgcttataatcctagagttaaaggtattattgccttttctaattctggaaaaactgctaaatttgtttcttctatgcgaccttcggttagcataattaccatatcaccgaatgtaaatgtaagtcgaggattatcattattgtggggagtcaaatcaattaagagtagagatgcaagaaattggaatgatatgatagaaatttctaaagaaattattgcaaaagaaaaatctataaagaaaaaagattatgttattattactgctggccttccttttggtaaagcaaaaatgacaaacatgattagactttacgaggtttaaa

SEQ ID NO: 249281 - DNA, 544 bp, Unknown
  Bacterial polypeptide expressing nucleotide sequence isolated from the Sargasso Sea
tatgtcgaatattgatttaaaaagaagaacaaaaatagttgcaacaattggccctgcaacccagtctgaagaaataattacagatttaattaaggctggagtaacaacattcagattaaatttctcccatggagatcataaagatcatgctgagaggataaaaaccataagagaagtatcaaaaaagttagatatagatattggaatattacaagatcttcaaggaccaaaaataagattaggtcgctttaaagatggtccagtaaaagtcaaaaaaggtgataaatttacactcacatcaaatgaggttgaatgttcaaaaactattgccaatgttacctacgaaaaactttctaaagaagttagcgaagggaaaagaatacttttggatgatggcaaaattgaaatgattgtagaaaaagtagatataaaagctaatctttttagaatgtctggtaactgttggaggggtactttcaaatataaagggtgtaaatttcccagatgttcaattatccgtaaaagcattaacagaaaaagataa

SEQ ID NO: 249282 - DNA, 409 bp, Unknown
  Bacterial polypeptide expressing nucleotide sequence isolated from the Sargasso Sea
atgctacacaccaaaatcatctgtaccataggccctgccagcgatagtcctgaagtccttgaaaaccttgccgatgcagggatgaatgtagcccgcctgaatttctcccatgggactcatgactcccatcgtaacattgtggaaaaaatccggttgctcaatacaaaccgagaattcccggtggcaatcctgctggacaccaaagggccggaaatccgtaccggggatcagcatatgaaacttatcactggaacccaggtccgggttgtcagtgatccggaactaaaggatgaaaggcatctatttgtggattaccctcacctgacagaacagttgggccaggggaatcatattttactggatagcgggttggtcaaactcgagatattggaaaatcatggtgattcgt

SEQ ID NO: 249283 - DNA, 865 bp, Unknown
  Bacterial polypeptide expressing nucleotide sequence isolated from the Sargasso Sea
ggaataaaacataatgttgattttatagcagctttttttgttagaaacaaaaatgatcttgaaaaacttgatgaaattctaaagaaatttaaatcttcagcaaagataattgcaaaaattgaaaatcaagatggcttggataatatagatgagatttgtcaatcatcatggggagtcatggttgcaaggggtgacttaggaattgaaaccagtctgacagatttaccaaacatacaaagaaatattatgtatgcttgtgcaaaatggggtaaaagatcaatagttgcaacacacttgctagaatctatgataaataatcccacaccaacaagagctgaggtcactgatatcgcaaatgcaatatacgagggggctgatgcaattatgttatcaggagaaaccgggataggtaagtatccagtagattgtgtaaattttttaaaatccatttcatttaaaacagaaaaatttaaaacccttggatatgaaaaaaatcttattactaaatcagattgggaatacatcgctgttgctgcaaaaaatcttgctgaatctatagaagctgatggaataattgctgtaaccaggacaggagcgacagcaagttatatatccaacgcaaaaccaaacggaattccaatttttacatttacaaacaataaatcaacactaaagcaattgtcacttgttggctccactttatctttttacatatcaagactaaatgaccatgataaaactctcaaagaagctgaaaaagtattaaaagaatattataagaagaagacaaatttaaaatttattatggtttcgggtattttttcagaagatcattcagaagcaatacaaataattaatttttaaa

SEQ ID NO: 249284 - DNA, 1426 bp, Unknown
  Bacterial polypeptide expressing nucleotide sequence isolated from the Sargasso Sea
aatgaaactcaataaaaccaagattattgctacgttgggccccgctagttcatccaaaacgatgcttagcaagctaattatgtcgggggtggatgtattcagggtcaatttttcacatgcagaccacaaagatgttgaaagaattgtaggtgatataaaagcgctaagaataaagcataataagcatgtttctgttttaggggatcttcaagggccaaaaataagactaggaaatgttgtcccagaaacatttttaaaaaaaggcgatagcatccttttttctacaaagaagattaaaaatgggggctctaatagggtaacaattaattatacttcattccctaaagatgtaaaaaaaggagaaactgtacttgttgatgatgggaaaattattttacaagttgaaaaaaccgatagagacacaagcgttaatcttattgttattcaaggtggattactaagctcgaataaaggggttaatctgcctagcactaaaatatctttgcctgctttaaccccaaaggatataaaagacgccaaatttgccgcaaaacttgggcttgattggattgccctatcctttgtaaggtcaaaaaatgatgtgctacagcttagagaaattcttgataaatcatcaaaagagcttatacctattatatcaaaaattgaaaaacctcaagcaataagcaatatggatcaaatacttaaagtgtccaatggattaatggtggctagaggagacttaggtatagaaattcctgctgaagaagttcccctgtatcaaaagattttagttaaaaaagctaatgaggcaagaaagcctattattatagcaactcaaatgatggagtcgatgattgatagcctaactccgtctagagcagaggtaaatgacgtagctaattctgttatggatggtgctgattgcattatgctttctgcagaaacatctgtagggaaatacccttgtgaagttgtaaaaaaagttggtactattatagccggtgttgaggatagtcaacccgttaaaaacaagtttacattaccaaaacttaaatctaaaagactgatcactaaaactgtttgccgtcatgctgcattaattgcaaatgaaataaaagcatctgctgtttgtactttaacacatagcggatacactgggtggcaaatttcgtcttggaggcccaattgtttagttttagtttttacatcgaataaacgtattctctcacaattaaacatgctttggggtgttaaatgtatttactataataagtttcaaagcactgataaaacagttgaagacgttaatgctcttgcaataaaaaacaggtatgttagaaaaggtgatacagttgtaaacttggcctcaatgccaattaaagacaaagggcaggtaaacacactaagaatcaccaaactttaa

SEQ ID NO: 249285 - DNA, 832 bp, Unknown
  Bacterial polypeptide expressing nucleotide sequence isolated from the Sargasso Sea
aatgaaaaccaatacaaaaatcattgctacaattggaccatcgtgtgacacattagaatcattgcaatctatggttcaggaaggcgtggggacttttcgtattaatatgtcccatggggatgctgaatcaaaaaagcgtctctttgatttagttaaatcgataaatattgatcaaggggaacgtcctgcaatcattgcagatttatgtggtccaaaaattcgaataacggatgcacctgaaaactttcacccaaatgaaggtaattctgtggtgctgtgtaatcaaaaagggctaggagaaatctgtgtaacggatagtatttcattttcggatgtttcgattggatcaaaaattttaatcaatgatggtaaagtacaattggaagtcaaggagctagcttccgctgaatcgctgaactgtgaagtaataattggtggggaaatcctaattggtaaaggggtcaattttcctggaattacccttggggtgccagcccttaccgatcaagataaagacgacttaaagctggcgctaaatgaaggggctgattgggttgcgctttcttttgttagaaacgcaaaagatattcaacctgtgcacgcaattatgaaggactacaattcgcatcttcctgtaatggctaaaatagaaaagtgggaagccttggaggatttgcaaaacataacggaggcattcgatggaattatggtagccagaggtgatctaggcgtggaaattccatcgggacaagtccctgtggctcaaaaagaaattatcgaacttgcgggtgccaatgggaaaccaggttgtcattgcaacgcaataacttga

SEQ ID NO: 249286 - DNA, 1183 bp, Unknown
  Bacterial polypeptide expressing nucleotide sequence isolated from the Sargasso Sea
agaatttaaagatggagaaatagaattagcctctggcgataattttagcctcgatttgaaagaaaaactggggtccaaaagccgtgtccagcttccgcatacggaaatttttgatgcggcggaagcgggtatggatctccttttggatgatggaagaattaggttgcgggtgcagaaagtaagtgaatctgtgattaatacaaaagtcgttacgggagggcggctatctgctagaaaaggcgttaatgtacctggtgttacactcggattatctgccctaagcgaaaaagataaatcagatcttgagtttgccttgggtttgggttgtgattggatagctttatcatttgttcaacggccgagtgatgttaaagaggcgaggaaattaatcgagaatcgtgcagcagttctgataaaattagaaaaacctgcggctattgatcacttagaggaattaatgaccttgacagatgcggttatggtggcccgtggcgaccttggtgttgaattacctcctgaaaaagtaccaggcttgcagaaaaagattgttaagctctgcagaaaatgggggaaacctgttgtagttgccacacaaatgttggactcaatggttcattctccggcccctacacgagccgaagcttctgacgtcgcaacggctgtgtacgactcggccgatgccgttatgctttctgccgagacggccgctggagagtatcccatagagtctgttgatatgatgaaccgaataatcttagaggcggagggagatgaagcttatcaagcctcgataacttctaaacagaatgttgttgaaccaactgtatccgatgcaatcacattagccgcaaggcaagttgctgaaactgtgaatgcgaattgtattgtcacctacaccacatcagggtcaaccactcttagagctgcaagagaacgtcccacggttccaattttatgcgtaacctcgagccttttgacagcacgacgaatggcaattgcttgggggatacattcggtacatattgatcaagaagaacggttttccaccgttgtgaagcgtgctgttgacatagctgagactcaaggctttgcaagttcaggggatcatattgtaattacagctggtgtgccgatgggaaagtcaggatcgacaaacgttttgcgtatagagagaatcccatag

SEQ ID NO: 249287 - DNA, 1414 bp, Unknown
  Bacterial polypeptide expressing nucleotide sequence isolated from the Sargasso Sea
aatggaaaaaaaagcaaaaattatagctactttaggcccagcaatatatactgaaaataagttaaaaaagcttgtagatctcggtgtagacgcatttaggattaattttagtcataatactaatggtattaataaaatagtttcaaaaattcgtaaagttgaaaaaataaatggaaaaaaattatctcttatagctgaccttcagggtgtaaaacttagaataggtaaagttaaaaatgagcaccaacaaatcaagtttaatcaacgatttatatttgatagtaaaaaaattcctggtgattcaaaaagagtaaattttcctcatcccaaaataattaaaaagttaaaaaaaggtaataagattttaattgatgatggaaagtatttatttacagtaattagtaaaaagggaaatgcagtaactacaaaatgtcgtagtcgaaattgtatattaaaaagcaacaagagttttcatgtaccaaatttagatattacttttaataaactaacaggcaaagacaaaaaagatatcaaaaccgcgattaaacttggttgtaattggattgctttgtcttatttacaaaatgaaaagctgatactcgaaacaaggagattaataaagaaagatatgggtattatttcaaaaattgaaaataaacatgctcttaaaaatattaaaaagattatccaagcgacagattcaataatgattgcccgaggagatttggcagttgaaatcggtcatagcgaagttccaaaagttcaattaagtcttataaaaaaaagttctcaattttcaaaatctgtaattgttgctactcaaatgttagaaagtatgattaaaaatactacagctacacgggcagaaataaatgatattgcaactgcgatatttcaaggtgcagatacattaatgttgtctgcagagacagctatcggcaaatttactactcaaactgtttctattatgactcaaactattcaatctactgaaaaatacaaaagagagcatatagaagatttcaaaaattctattattacaaataaagatccagttaaatctattcttcgctctgttaaggatattgcttacaacccaaatgttaaagctataatagtgttttctaattctggtaagtctgcaaaacttgtttcatcaatgcgtccagctgcgaaaatagtaacgatttcacctaatataaatgtaagcagacaagtatcattgctttggggagtgcaatctataaatagtagagatgcaaatggatggaaagatatgatgtctatttctaaggaaattataaaaaaacttaaatttattaaaaagaatgactttgttattataacagcaggtttgccttttggtaaagcaggcatgactaacatggttaggttatataaagttggttcttaa

SEQ ID NO: 249288 - DNA, 1045 bp, Unknown
  Bacterial polypeptide expressing nucleotide sequence isolated from the Sargasso Sea
atggaaagaagaacaaaaataatctcaacagttggaccaaaaacaaatacagaattctttatttcaaaattatgtgtggcgggaactaatgtcatcagaattaatatgtctcatgccagccatggcgaattagagaaaattattagaattgtaaaaagaatcaataaatccaaaatctgctctgttggcataatgattgatacccaaggccctgaaataagaacagctcctattacgaagagcattcaacttataaaaggtgaagttgttcacttgactccaaaagcacttaaaggggctaagtacattattgttgataacttgaaacaagttaaagggctgaaaaaaggaggtaaagtatcttttgataacggagctattgatctaaaaattagaaatatagataaagataaaaatgtgaaatgtgaagttttagattctggtgaaataggaagcagaaagcacgtaaattttcctggagcgaaagtaactcttccatctcttacagataaagataaaaaagatattaaatatgcaatttctaaaggggttgattttattgccttatctttttgtagatcaaagaaagatttaaatgaattaaagaaatttttggggaagaaagtttctgatgtagaaatttttgtcaaaatagaggaccaagaaggcctttcaaatcttgaagaagtgattgaaaactcagatggtgtcatggtggcaaggggagatttaggcattgaaacagacattacaaacttgccttatatccaaagaaatattattaaaattgcctcttcgaaaggtaaaaaatcaattgttgcaactcaattactagaatcaatgattgatagccctcatccttcaagagcagaggtctcagatgtggcaaatgctgtttatgagggcacagatgcattaatgctttcaggagaaacaagtattggcaaatatccagtagagtgtgtgaaatacattgatcaggttgcaaggaatgctgaacgttcagaaacattgcactttgaaaataattcaaacaacaaaccga

SEQ ID NO: 249289 - DNA, 733 bp, Unknown
  Bacterial polypeptide expressing nucleotide sequence isolated from the Sargasso Sea
aggcctttcaaatcttgaagaagtgattgaaaactcagatggtgttatggtggcaaggggagatttaggcattgaaacagacattacaaacttgccttatatccaaagaaatattattaaaattgcctcttcgaaaggtaaaaaatcaattgttgcaactcaattactagaatcaatgattgatagccctcatccttcaagagcagaagtctcagatgtggcaaatgctgtttatgagggcacagatgcattaatgctttcaggagaaacaagcattggcaaatatccagtagaatgtgtgaaatatattgatcaggttgcgagaaatgctgaacgttcagaaacattgcactttgaaaataatttcaaacaacaaactgattggcataaactggcggcaacctcagtaaaactggcaagtaaaattgatgcagatgcaattgttgttttaacaagaagtggctttacagcaaatttaatctcccgagctaaacctactgtgcctgtttttgcctttagtaatcgtcttgaaactcaatcaaaactttcaatatcatcctctactcaaaatttgtttttaaagtttactaaagaccatgaaaaaacaatcaatttagcttttgaagttctaaaaaaacattacaaaatgaagggaagaaaaaagtttgtggtaatttcaggtgtattttctgatatatatgctgatgctatacaaatacgatcatttggataa

SEQ ID NO: 249290 - DNA, 1325 bp, Unknown
  Bacterial polypeptide expressing nucleotide sequence isolated from the Sargasso Sea
tatgaagagaacaaagataatttgcactattggccctgctactgagagtttttctagtttgaaaaaactctataaagctggaatgaatgtggctagattaaatatgtctcattccgatcacaaatcagcaaagaaaattatagatcgattaaaaaagttaaataaacaagtaaaaattcctgttggaataatgcttgatactcaaggacctgaaattagaactggtaattcagcctcagtcgtagatttagttccagggcaaataatttcttttactgtaagggataatgttgatgttgagacaacatcaattagagttaattacgacgaactaattgaaagtgtaaaagtgggtacacttatatcattagataatggtttgttaaattttaaagttttaaagaagtttgaaaatgaacttgaatgtcgagttattgatggaggaaagctaggtagtaaaaggcatgttaatttgcctggaataagaataaacctaccagcagtaactgaaaaagataaagaagatataacctttggtctagaagagggtgtagattttattgctttatcctttgttagatcagccaatgatattgatgatttaagaaaatttctagggaagcgccaaaaaggggtaaaaataatttctaaaatagaagacagggagggtttaacaaatattgaccaaatatgtgaagcttcagatggcgttatggtagcaagaggagacttaggaatagaaacggacttattcaacttaccaaatattcaaaggaaaattatgtctaaatgtgctgagaatggagttagatccatagtggcaactcaccttttagaatcaatgattgataatcctactcctactagagctgaagtaacagatattgcaaatgcaatatatgaaggtgcagacgcagtaatgctttcgggagagacttcaatagggaaatatccagttgattgtgttgcttatatttcaaaaatctcaaagcagaccgaaaaatatagaactttaggatacgaatctaaattagttgccgatacggattggcaatatctaggaatagcagctaaatcaatggctgaatcaatccaagctgatggtattattgctataactcgatcgggtcaaactgcagaaatagtttctaatgcaaaacctttcatgattcctgtttatgcatttagtaataatagaaaaactttaaatcaattatctttagctggttcagttaattctttttattctaggatgtattctgatcatgaaaaaaacgtagactctgctttaaaggttctgcaaaaagagctgaatcccaataaat

SEQ ID NO: 249291 - DNA, 526 bp, Unknown
  Bacterial polypeptide expressing nucleotide sequence isolated from the Sargasso Sea
actggagtctttcatgccaagacgtacaaagattgtaaccacactcggtccggccaccgatcgcgaagggatcctcgaggggatcatccgtgccggtgccgacatggtgcggatgaacttctcccacggcactgctgaagaccacatcctgcgcgccaaccaggtgcgtgacatcgccgccaagctgggtcgtcacgtcgccatcatgggcgacctgcagggccccaagatccgcgtttccaccttcaaggacggcaagatctatctggccgtcggcgacaagttcatcctcgatgccgccctcggcaagggtgaaggctgtcaggaacaggtcggcatcgactacaagagcctgccgggtgacgtgatcgccggcgacatcctgctgctggacgacggtcgcgtgcagctgaaggtggagcaggtcgaaggcacccgcatccacacctcggtcaccgtggccggtccgctctccaacacaagggcatcaacaagaagggtggcggtctctccgccccggccctga

SEQ ID NO: 249292 - DNA, 1100 bp, Unknown
  Bacterial polypeptide expressing nucleotide sequence isolated from the Sargasso Sea
tatgtttactcgcactaagattatttgcactataggaccagctaccaatagttattcttcattagaagaactagttttatcaggaatggatgtagctagaattaatatgtcacatgcaactcatgaaaatgcttctaatataattgaattcattcataaaattaataaaaaacataaaaccaacatatcggttcttctcgatacacaaggtcctgaaataaggactggtgatacaaaacttcctattgatttaaaatctggagatatagtttctctaaccgttagagatgaagttgatgtagaaacttcttcaattaaaatcaattacaaaggtcttatacagagtgtaacaaaaggttcaaaaatatctgttgataatggattaattaattttgaggtaatttcaaaagattatgaaaccttagagtgcaaagtaattgacggaggtaaaattggttccaaaagacatgtaaatttacctggcgtaagaattaatttaccttcaatcactactaaagacattgaagatataaaatttggtattaaaagtggagttgattttatcgcactgtcatttgtaagaagcgctgatgatattactgaattacaaaaacttataagtaaaaataaatcttctgtaaaaattatttctaaaatagaaaatcaagagggtcttgataatattgaggatatttgtcaatcaagttggggtgttatggttgcgaggggtgatttaggaattgaaacaagtttaactaatcttcctaatatacaaagaaaaattatgttgtcatgtgcaactcatggaaagagatctattgttgcaactcatttgttggaatctatgattaataatcccactccaacaagagctgaagttactgatattgctaatgcagtatatgagggtgcagatgcagtaatgttatctggagaaactagtattggtaaatatcctgaggaatgtataaagtttatgaaatctatagttgctgaaactgaaaaatttaaaacactcggctatgaaaataatctacaaaaaaattctgattgggaatatattgggcaagctgcaaaaaatttagccgagtcaatgaagc

SEQ ID NO: 249293 - DNA, 865 bp, Unknown
  Bacterial polypeptide expressing nucleotide sequence isolated from the Sargasso Sea
gatattgatatcgtagccgtttcttttgtaagagatgcaaatgatattaaaaaggtaagagagataatagataaaaatataaaaataattgcaaaaatagaattaaaaaatgctgtaaaaaatttagattcaataatcgatgaagcagatggagtaatggtagcaagaggagatttaggagtgcaactcgatttagaaaaagtaccgtttatacagaagcagatattaaatgaagctaatgccaaaggaaaaataacagttacagcaacagaaatgctccaatcgatgaaagaatctcatagaccaacacgtgctgaggttacagacattactaatgcaatcttagaaggtacagattgtgtaatgctgtctgcagaaacagcaataggaaatcatcctgaagtagtcgtaagtgcaatgtctgacatatgcaaagaagcagattcaaggaatgacacatctgcactaaggtttaaagaaacttctacagttgatacattaacaacatcacttgcaaaagcagctgttcaagtagctaatgaaattgaagcaaaagctattgttgcatttacagagacaggtagaacgcctcttttaatttcaaattacaggccagaagcaccaatatttactatgactactattgataaaacatacaaccaaatgaatcttctatggggagtgcaacaaataaagattgatagattagaaacaacacctgaaatgtttgaaattgctgatacttggttacaaaacaacaaaaattttaaaaaaaatgataaagttgtaattgttgctggaacacctccaaataaagaggctgcaacaaatctaattagagtaatgaagataggtgaattttaat

SEQ ID NO: 249294 - DNA, 732 bp, Unknown
  Bacterial polypeptide expressing nucleotide sequence isolated from the Sargasso Sea
tatgggccagttcgacctgaaccgacggaccaagatcgtggccaccatcggccctgccacagagagcccggagcggatcaaggagctggtgaaggctggtgccaccactttcaggctgaacttttcccacggggaccacagcgaacacgccgctcgcattgccacgattcgtcaggtgtctgaggaattggggcagaccatcggcatcctccaggaccttcagggcccgaagattcggctcgggcggtttgctgaggggccgatcaccctggctaacggtgatccgttcacgctcacctcaaggccggtgagctgcgacaagacgatcgcaacggtcacctacgacaagctggcggacgaagtcaccgcaggaagccggatcctgctcgacgacggccgcgttgaaatgaaggtcgacaccgtcgacaaagcgcagcagaccctgcattgcaccgtcaccgtgggcggtgttctctccaacaacaagggcgtcaacttcccggacgttcagttgtccgttcgcgctctcacggacaaggacaagaccgacttggccttcggacttagccaaggcgtggactgggtggccctcagcttcgtgcgcaatccctccgatatggaggagatccgcggactgatccgcgaacagggccatgagacccctgtggtggcgaagatcgaaaagtttgaggccatcgatcagatcgattcgatcctgccgctctgtgacgg

SEQ ID NO: 249295 - DNA, 442 bp, Unknown
  Bacterial polypeptide expressing nucleotide sequence isolated from the Sargasso Sea
atgggccagttcgatcagaaccgtcggaccaagatcgtggccaccatcggtccagccacggaaagttccgagcgaatcaaggaactggttcaggctggagccaccacctttcggttgaatttctcccacggcgaccacagcgagcatgcggcgcggatttcgaccatccgccaggtgtctgaagagctcgggatcaacatcggcatccttcaagacctgcagggaccaaaaatccgcctgggccgttttgctgagggaccgatcacccttgccaatggcgacagcttctccctgacgtccaggccggtgagttgcaaccaatccatcgccaccgtcacctacgacaaactcgctgacgaagtcaccgcaggaagccgcatccttctcgacgacggccgcgttgagatgaaagtcgagcaggtggatcaggcgaacagaccct

SEQ ID NO: 249296 - DNA, 1408 bp, Unknown
  Bacterial polypeptide expressing nucleotide sequence isolated from the Sargasso Sea
atgaatcgaacaaaaatcattgcaaccattggtccggcatgtgctaacgtgaaaatgttgcaaaagttgattgaccacggtgtggtttgttttcgaatcaacctatcacacggatctgataaggaaaaagaagaatacttcgacctggttcgatccttacaaacccagcatggtctaagacccacgatccttgcagacctttctggaccaaagattcgtgtcagcaacctagaaaatccgatcaacctttcaaagggtcataaaataaagattagcaatgaagaagtagcaacgggggtgatacccgtatctaaagaggtgcggtttaaaaaagtgaatcctggtgcccagatattaatagatgatggtcgaacaagcttaaaggttgttgaacacgtctctgatcaaacattattatgtgttgcccttgaagatgggatagttgaaaacagaaaaggagtgaattttcccgagattgatttaaacgttcctgcactaacacagcaagatgaaaaagaccttttgttatctttggaaaaaggagctgactggatagcgctttcgtttgtgcgctctccatctgattacactctaattagcacaaaaataaagaaggctggttatcagactcccgttattgctaaaatagaaaaatgggaagcggttcaaaatcttcaggaaataattcaatcttttgatgctgtgatggttgcaagaggtgatcttggagtagagattccaattgcaaaagttcccctggttcaaatggacgtcattgaaaaagcccatcaagctggtaaaccagttatagttgccactcaaatactcgactcaatggtagagcgccctgttccgactagagcagaagttagcgatatagcaaactcaatacttgatggagcagacgcattgatggttaccggtgaaacggcaattggtaagcatcctaaaaaagtaataaaagtactggggggtgttattagagagacagagtctgccatcaagtatcatagtaaattcgaaatatcagaggacaatacgactaacacagcccgcgccattagtcatgctgcttgttctgtttccagtgaccaaggcattaacatattggtgaccatgacacacagtggaagcactgctagaatggccgctagatatagaccatctgcaagaattgttgccatgacgccctttaaagcaatatgtcgtcaactggaaatagtatggggcgtaagccctatactagtagaagaatatgaatctgctgatgagattcctgagattgcaagtttagctttgaaggaaaaaggactactaaatgttggcgagaagtttgttataactggtggtgttccggtaggaattccggggacaacaaattatttgtcagtgttaaaaataagctaaa

SEQ ID NO: 249297 - DNA, 776 bp, Unknown
  Bacterial polypeptide expressing nucleotide sequence isolated from the Sargasso Sea
gctgataattgttgagatccatgggaacgttcgggtggtagcttccgcaacgcttcaggcccggtccatgcccctgcccgatcatcagcgacgcacgaaaatcgtcgccaccatcgggccggccacagaatcaccagacagcattcggcagctgattctggccggtgccaccaccttccgactgaacttctcccacggagatcacgaggagcacgcccagcgcgccgccaccatccgacaggtggcccatgaactgggagttcacgtcggaatcctgcaagaccttcaaggacccaagatccgtctcggccgttttgccgatggaccgatcaccgtgggcaaaggggattccttcgccctgactgcacgcgatgtgccctgcactcaaacgatcgccacagtcacctacgacaagctggccagcgaagtggagcccggcagccgcatccttctcgatgacggcaaggtggagatgaaggtcgattggatcgaccaagccgaacaaaccctgcactgcaaggtgaccgttggcggcaagctctccaacaacaaaggcgtcaacttccccgactgcctgctctcggtccgcgctctgacggccaaagaccgcaatgacctggcctttggtttgcaactcggcgtcgactgggtggcgctcagctttgtgcgcaacccctctgacatgcaggagatcaaggagctgatcagctccttgggccatgccacacccgtggtggccaagatcgaaaaatttgaggcgatcgatcagatcgacg

SEQ ID NO: 249298 - DNA, 1093 bp, Unknown
  Bacterial polypeptide expressing nucleotide sequence isolated from the Sargasso Sea
gttgccgcacaaagagatttttgacgcggcaaaagctggcatggaccttctcttggatgatgggagaattcgattgcgcgtccagaaggtcagtaaccatgtgattgatacaaaagttgttacgggaggacggctttctaatagaaaaggcgtaaatgtgccaggcgttactctcgggttatctgcattgagcgaaaaagataaaaccgacctggagtttgctttgggactaggctgcgattggatagcgttgtcatttgttcagcggccaagcgatgttaaagaggcaagaaaattaatcgcagaccgtgccgcggttcttataaaattagaaaaaccagcggctattgatcatttagaagaattaatgacgctgactgatgccgttatggtcgcgcgaggcgatctaggtgttgaattacctcccgaaaaagtgcccggcttgcagaaaaaaattgttaagctctgcagaaaatgggggaaacctgttgtggtagcaacacaaatgctagattcaatggtccactccccggccccgacccgggcggaagcatcagatgttgctacggccgtgtatgactcggcggatgctgttatgctttctgcggaaactgctgctggagagtatccaatcgagtctgttgatatgatgaaccgaataatattagaggcagaggaagatgaagcctatcaaagctcaatagcttcaaatcagaatgttgttgagccaactgtgtccgacgcaattaccctagccgcaagacaagtagctgaaacggtaagcgctaattgtattgttacttatactacgtcagggtctaccacacttagagctgcaagagagcgtcctactgttccgattttatgtgtgacatcaagtcttgcgacagcaaggcgcttggccattgcttggggtattcattctgttcatattgagcaagaggagcggttttctgcagttgttaagcgggctgtagacatatctgagacacaagggtttgcaagttcaggggatcatattgtaatcaccgccggtgtaccgatgggaacgccagggtctacaaatgtgctgcgtatagaaagaattccatag

SEQ ID NO: 249299 - DNA, 1399 bp, Unknown
  Bacterial polypeptide expressing nucleotide sequence isolated from the Sargasso Sea
atgacaagaaaaacaaaaataattgcaaccgtcggaccaagtgtaaattctaaagacggcataaaaaaattagtcgaagctggagcggatgtcttaagattaaatttttcacacggcacggaagaagatcattccaatgttgttaaatggataagagagttagaaaaatcagttgcaattatgcaagacattcaaggtccaaaaattagaactggagaagcaaaagaatcgacacaatttaaacaatcacatgaaataaagataacaaataaagaaactatttcagatgacaatgtaatttatataaattataaagatttatttaaagatttaaattctggagaacgaatatttattgatgatggacaaatagttataagaataattaaaaaaacaaaatcatcaatgttaggacaaatagaaataggtggagaattaagatcaaatcagggagtagcatttcctgattctaaattatcagtctctgcaattactgaaaaagatattgctgatctaaagtttggcaataaattagatgttgatatcgtagccgtttcttttgtaagagatgcaaatgatattaaaaaagtaagagagattgtagataaaaatataaaaatcattgcaaaaatagaattaaaaaatgctgttaaaaatttagattctataatcgatgaagcagatggagtaatggtagcaagaggagatttaggagttcaacttgatttagaaaaagtaccatttatacagaagcaaatattaaatgaagctaatgccaaaggaaaaataacagttacagcaacagagatgcttcaatcgatgaaagaatctcatcgacccacacgtgctgaggttacagacattactaatgcaatattagaaggtacagattgtgtaatgctatctgcagaaacagcaatcggaaatcatcctgaagtagttgtaagtgcaatgtctgacatatgcaaagaagcagattcaaggaatgacacatctgtattaaggtttaaagaaacttctacagttgacacattaacaacatcacttgcaaaagcagctgttcaagtagctaatgaaatagaagcaaaagctattgtggcttttacagaaactggcagaacacctcttttaatttcaaattacaggcctgaagcaccaatatttactatgacaactattgataaaacatacaaccaaatgaatattctatggggagttcaacaaataaagattgataggttagaaaccacacctgaaatgtttgaaatcgctgatacttggttgcaaaacaacaaaaagtttaaaaaaaatgataaagttgtaattgttgctggaacacctcctaacaaagaggctgcaacaaatctaattagagttatgaagataggtgaattttaat

SEQ ID NO: 249300 - DNA, 901 bp, Unknown
  Bacterial polypeptide expressing nucleotide sequence isolated from the Sargasso Sea
cacgccactcatgatgaagtagaaaggattgttgacgatgtaaatgacttaagaaaagagctgggctcaaatgtaaccctgcttggagatttacaaggtcctaaaatcagaattggtgaacttgaaaacaatattgaattaaaaaagaatcagtctttatcaatttgctcaaatctttcagaaagcaatggtgttgacaagatttttataagctacccctcttttgctaaagatgttaagcctggtgagaatatactggtagacgatggaaaattaatatttaaagttgtgtcaactaataaaaaagacactgttgatataaaggttgttcaagaaggtgtattgaagcccagaaaaggtgtgaatcttccaaacactaagatttctcagcctgctttaactgaaaaagatattgatgatgcaaaatttgctgtaaaaaaatcatttgattggattgcgctctcttttgtgagatcaaaaaaggatgttttacaactaagagaactaattgagtctcaatgtgattaccacatccctattatttcaaaaattgaaaaacctcaagcaatagaaaaaattgatagcattataaaagcttctaatggagttatggttgcaagaggtgatcttggaattgaaattcctgccgaagaagttcctttaaatcaaaagaaaattgttgctaaatgtaaaaaaagaggtatccctgtcattatagctacccaaatgatggaatcaatgatcgatagtttaactccatcaagagctgaggtaaatgatgttgccaattcagtaatggatggtgctgacgcaataatgttgtccggcgaaacttcaatgggaaaatatccttgcgaggtagtaaaaaaaataggagatattatttttggtgtcgaagatt

SEQ ID NO: 249301 - DNA, 841 bp, Unknown
  Bacterial polypeptide expressing nucleotide sequence isolated from the Sargasso Sea
catggaggagatccgcggcctgatccgtgagcagggccacgaaacccccgtcgtcgccaagatcgagaagttcgaggccatcgatcagatcgacgccatccttcccctctgcgacggcgtgatggtggcccggggtgacctcggtgtggagatgccggcggaggaggttcctctgttgcagaaggaactgatccagaaggccaactccctgggaatcccgatcatcacagccacccagatgctggattcgatggcctccagcccccgccccaccagggccgaggtcagcgacgtggccaacgccattcttgatggcaccgatgccgtgatgctgtcgaacgaaacggccgttggcgattttccggtggaggccgttcagacgatggccaccatcgcctgccggattgaaaaggactacccggagcgttccgtcgacagccacttggccagcacggtgccgaatgccctcagcggtgcggtgagcacgatcgccagccaactcaatgcctcggcgattcttcccctcaccaagactggggccacggccaagaacgtcagtaagttccgtcctgcagcaacgattctggccatcacaccggatccaaccgtggcctgccgtctgcagctggtgtggggtgtgaagccgcttgtgattcctcagcatgaacgcaccacccacaccttcctggcggccatgaccaaggccaagaccctgggattgctcaaggaaggcgatcttgtggttcagaccgctggcacccatacgggcgtttcgggatccaccgatctggtcaaggtggggatcgtcagttccgaggaatcacccgtcaacatgatctga

SEQ ID NO: 249302 - DNA, 1051 bp, Unknown
  Bacterial polypeptide expressing nucleotide sequence isolated from the Sargasso Sea
agttgattggatagcactaagtttcgtaagaaatccatccgatataaatgaaataaaaaatttaataaacaaaaatgggcattcaactcctgtagtcgcaaaaatagaaaaatttgaagcaattgatcagattgatacagtattacccttatgtgatggggttatggttgcaagaggtgatttgggagtagaaatgcctgctgaagaagttcctcttttacaaaaggagttaataagaaaagctaattcattaggtatcccaataattactgcgactcaaatgcttgattctatggcttctaacccaagaccaactagggccgaagttagtgatgttgcgaatgcaattctggatggtacagatgctgtaatgctttcaaacgaaacagcagttggcgattatcctgtagaagcagttgaaacgatggcaaccatagcaagaagaattgaaagggattatccacttaaggctattgaaagtcacttgcctagtacgatcccaaatgctattagcgcagcagtaagtaatatagctagacaacttgatgcaggagctataatccctttaactaaatcaggttctaccgctcgaaatgtaagtaagttcagaccaccaacacctatcttggcaactaccacagaaagaagtgtagcgagaagattacaacttgtttggggagttactccaatagtagttaaaaatgatgaaagaacagcaaaaacttttagtttagctatgcaaattgctcaagagatggggatcctaaatcaaggagatttagtagttcaaaccgcgggtacattaactggaattagcggctctacagatttaataaaagtcggtttagtaagaaagattgtatcaagaggaatttcaataggggaaatcggtgttacaggtaaagcaagaataattaaaaataatcttgatatatccttaatttgcccaggagaaatattatttgttccgaaggaattaatgaaatatattccactgagtaaaaatattgccggcattgttacgaaccaaaatgtaaatgatgtttatgct

SEQ ID NO: 249303 - DNA, 854 bp, Unknown
  Bacterial polypeptide expressing nucleotide sequence isolated from the Sargasso Sea
tttatctcataaagagatttataattgtgttaaaaaagatactttgattttaattgatgatggaaaaatcaaacttgaagttataaaaaaaactggtacccagatagtcactcaaattatagatggtggaactcttacaagtaacaaaggtcttaacctacctaatgcaatcttagaaactgactcattaacccttaaggataaaaaagatttaaaatttattttgaaaaataatatagaatggatagctatatcttttgttcaaaaattatctgatgttttaaaagtaaaaaaaattgttaatagtaaagcagcaataatttcaaaaattgaaaaaccctcagctttgaatgagttaaatgaaataattctagcttcagatgcgataatggttgcaagaggtgatttaggtgtcgaactaccccctgaaagagtaccaggaatacaaaaagatattattctagcatgtaggacgaatggaaaacccgtcattgttgccacacaaatgctagaatctatgattttatctcctgccccaacacgggcagaagcttcagatgttgcaacagctgttttcgatggtgctgatgcagtaatgttatctgctgaaacagctgtcggaagatatccaatagaaactgtaaaaattatggatagaattattaaagcatctgaacatcatattaaaactcaccgaaaagaaaccaataaaaaattaatggttgataattcaatttactatgccgtatctagatcagcagttgacttagctgaaactgtcaatgcaagagcaatagttgcatttacagcatctggaaaaactgctttaagaattagtagagaaagaccagatt

SEQ ID NO: 249304 - DNA, 839 bp, Unknown
  Bacterial polypeptide expressing nucleotide sequence isolated from the Sargasso Sea
tatgaaaaaaaaaatattggtaaataaaacaaaaattattgctacaataggtccttcctcttacaaaaaaagtgttttggaagatatgattatttcaggcgttgacgctgttagattaaatttttctcatggtgaatttgataagcacaaaaaggtaatagaaaatactaggaaaattagtgataaattaaatattcctatagccattattcaagatcttcaaggccctaaaattcgaattggaaaaataaaaaatgataaaatcaaattaaatgacggacaaaatcttgatattcaattaagtgatgtacttggtacaaataaaattatttcaatttcaaataaaaatctttttcaagatattaatccagatgaacatattttaattgatgatggaaagataaaactaaaagttttaaaaaaaactagggaattaatttctacaatagttgagagtggaggtgaattaaaatctaataaaggagtgaacttgcctgacacggatatattattatcttcattgaccgaaaaagataaaaaggatttagattttggtttagaaaatggtgttgattggattgcactttcatttgttagatcttcaaaagatgtaaatgaacttagaaaaataattaattctaaaaaattaaaaactaagataattgctaaaattgaaaaacctcaagctttaaaaaatcttgataagataattgaatcttctgatgccttaatggttgctagaggagatttgggagttgaaattcctatggaatcagttccaatatatcaaaaaagaatagtaaataaatgtaacaaacaatttaaacctgtaattattg

SEQ ID NO: 249305 - DNA, 913 bp, Unknown
  Bacterial polypeptide expressing nucleotide sequence isolated from the Sargasso Sea
aagagggtaacttttccccatgccgaaatttatgatcatctcactcccaatacaaccttactaattaatgatggcagaatcagacttcaagttctcgaacaaaatcaaaactctttaattactgaagttctcaatgatggagtaatctcaaataataaaggtgtcaatatacctgatgttatactaccaattgactcacttacttcaaaagataaagctgatcttcaaaaagcacttgagatgaatgtggattgggtcgccctttcatttgttcaacaagctgaagatataaacaagcttaaaaaaattgtcgatggtaaggctttagtaatggcaaaaattgaaaaaccctcagcaatgaaaaatattgatgaaattatccaagcagctgatggaattatgattgctagaggtgatcttggcgttgaaatgcctacagaaaaagtcccaattgcacaaaaaaatattattaaaagatgtcgacattatgggaaaccagttgttgttgctacacaaatgttagaaagtatgatttctaatttagtaccaacaagagcagaagcgtcagatgtagcaaatgcaatttacgatggcacggatgctgtcatgttatctggtgagtcggcaatgggaaattatcctgtagagtctgtctcaacaatggatagaattattgagaatgttgaaaaggataaaaataatttcaatttggaaatcgaagatgaagaaaatataaaaaaaattgataatactgatgctattacaaatgcagcctattcaattgctaaaaatgctgacgcaaaagcaattatcactttttcagttagtggtaaaacaacattaagaatggcaagagaaagagcacctgtacaaatcattgggctttcaccaaacattgaaacttcaagaaaaa

SEQ ID NO: 249306 - DNA, 340 bp, Unknown
  Bacterial polypeptide expressing nucleotide sequence isolated from the Sargasso Sea
gatggcattcgttgccactaagatcatctgcactatcggaccggtgacccagtccgaggacatgctcgaaaagctcatggacgcaggcatgaacgtggcgcgtatgaacttcagtcacgggacgcacgaataccatgctcagactatcgccaatattcgcgccgtgtgcgagcgtaccggcaaaagctgcgctatcatgctagacacaaaagggccggagatccgcactatcaagctggctggtggcaagaacgtcgacttggaagcgggccaaaagttcacattcctgaccgacacagccgtcgtggcgacagcacccaggtcgcggtcacctacgcag

SEQ ID NO: 249307 - DNA, 913 bp, Unknown
  Bacterial polypeptide expressing nucleotide sequence isolated from the Sargasso Sea
aagaagaacaaaaatagtagcaactattggacctgcaactcaatctgaagagataattacaaatttaattaaagctggagtaacaacattcagattaaatttctcacatggagatcataaagatcatgctgagagaataaaaactataagggaagtatcaaaaaagttagatatagatattggaatattgcaagatcttcaaggaccaaaaatacgattagggcgctttaaagatgggccagtaaaagttaaaaaaggcgataaattcacactgacatcaaatgaagtcaaatgtacaaatactattgcaaatgtaacttacgacaaactttctcaagaagttagcgaagggaaaagaatactgttagatgatggaaaaatagaaatgattgtagaaaaagttgataaaaaagctaataatttggagtgcattgtaactgtaggaggggttctttcaaacaataaaggtgttaattttccagatgttcaattatcagtaaaagcattaacagaaaaagataaagaggatttaaaatttggtttatctgaaggagttgattgggtagcactaagtttcgtaagaaatccatccgatataaatgagataaaagatttaataaacaaaaatgggcattcaactcctgtagtcgcaaaaatagaaaaatttgaagcaattgatcagatcgattcagtattacccttatgtgatggggttatggttgcaagaggtgatttgggagtagaaatgcctgctgaagaagttcctcttttacaaaaggaattaataagaaaagcaaattcattaggtatcccaataattacagcgactcaaatgcttgactctatggcttctaacccaagaccaactagggccgaagttagtgatgttgcaaatgcaattctggatggtaca

SEQ ID NO: 249308 - DNA, 829 bp, Unknown
  Bacterial polypeptide expressing nucleotide sequence isolated from the Sargasso Sea
atgaaagaactttttacagcaggttgtgatgtatttagactaaatttttctcatggagatattgagacacatagaaagaattttgaatatattagatctttagaagaaaaatataatcatgccacatgtgtattagctgatttacaaggcccaaaattaagggttgggtcgtttaaaaataataaagaaaatctgattaaaggggaaaaatttattttagatctttcatctgaacctggtagtaataaaagagtaaattttccgcatgcagagatttatgagtatttaactccaaattcaatactattagttaatgatggaagaattagattacaagttattgagcaaagtgctgacaagttaataacagaaattttaaatgatgcagagatttcaaataataaaggagtaaatattccagatgttatacttccaattgatgctttaacaaagaaagataaatcagatttaataaaagcattggatatgggtgttgattgggtagcactatcttttgttcaacaagctgaggatataattaagttaaaaaaaataattggcaacaaagcactagtaatggccaaaattgaaaaaccttcagcagtcaaaaatattgatgatatagtaaatgttgctgatggaataatgattgcaagaggagatcttggtgtagaaatgcctactgagcaagttcctatcgctcaaaagaatattattaggagatgtagacattttggaaaacctgttgttgtagcaactcagatgcttgaaagtatgattaataatttagtccctacaagagctgaggcatcagatgtggcaaacgcaa

SEQ ID NO: 249309 - DNA, 731 bp, Unknown
  Bacterial polypeptide expressing nucleotide sequence isolated from the Sargasso Sea
gaactgcaacctgcccggggtcaaggtggacatccccgtgctcacggcgaaggacatcaacgacgtgcagaacttttgctgcaagaacaagatggactttgtcgccgcgtcgttcgtgcagacgggcgaggacgtgcagctcatccgcaaaaccctggacgacgccggcgggcagaacgtgcagatcatctgcaagatcgagaacgaagcgggcatggagaatttcgacgagatcctcaagtacaccgacggcgtcatggtggcgcgcggcgacctcggcatggagatcccctcggagaaggtggcgctcgcgcagaagatgatgatcaccaagtgcaacatcgcggggaagttcgtcatctgcgcgacgcagatgctcgagtcgatgtgcgataacccgcttccaacgcgcgccgagatgctcgacgtggcgaacgcggtgttcgacggcgcggacgcgacgatgctgtcgggggagacggcgaacggcgcgttcccggcgaaggcggtggcgacgatgtcggccatcgcgcagaacgcggaggagggcctggagggcgacatgacgtaccagaacatctggaacaacacgcccaagcccgtgagcccgctcgaggcgacggcgtcgagcgcggtgaaggcgtgcctcgacatgggcgcggtggcgctcgtggtgttcgcggacatgatgctccccgcgacgctcctgagcaagtacaagccccccgtgc

SEQ ID NO: 249310 - DNA, 676 bp, Unknown
  Bacterial polypeptide expressing nucleotide sequence isolated from the Sargasso Sea
gaagtcgttatcggcggcgagatttctaaccacaaaggcgtcaacgttccaggcgtcgtgctgccgctttcttcgctgaccgacaaggaccgtaaggacatgcagttcggcctcgatcacggcgtggattgggtggcgctttcctttattcaacgtcccgaggatctggccgaagcacggcgcctaatcggcggccgtgcaccgatcctgaccaaactggagaagcccgccgctatcgaccgcctcgacgaaatcatcgagctcagcgacgccgtcatggtcgcccgcggcgatcttggcgtggagatgccaccagaagatgtgcccgtactgcagcgccgtatcctgcgggcctgccggcagacaggaaaaccggttatcgtcgcaacacagatgctcgaatcgatgatcgattcgccgcaaccaacccgcgccgaagcctcggacgtggcgaccgcggtctacgacggctcggatgcgatcatgctatctgccgagacggcggccgggaaataccccgtcgaatcggtggaaatgatgaaccgtattgtcaagcgtgttgagcgggattccgtctggcgcagcaccatggacgccaatcatccggaaccggaagcgacctcggccgatgccattagcgccgccgcgcgccagatcgcgcatacgctgtccgccg

SEQ ID NO: 249311 - DNA, 625 bp, Unknown
  Bacterial polypeptide expressing nucleotide sequence isolated from the Sargasso Sea
atgctcgaccactgctcgaagtttgacatctactcgaacccggccgcccagcgccagacgggcatcatctgcacgatcggcccgaagacgcaggcgcccgacaagctgacgatgctccgcatggcgggcctcaacatcgtgcgtatgaacttctcgcacggttcgtacgagtaccacgcggagacgatcgccaacgcccgcgcggccgtcgccgagtcgccgctcgacggccgcctcgtcggcatcgccctcgacacgaagggccccgagatccgcaccggcgcgctcaagccggatctcggctcgacagtgatgctcgagaagggcgcgaagctgacggtgacgaccgatgcggcgttcaaggactcgtgcgacgcgtcgacgctgtacatggactacgtcaacctgccaaaggtgatgacggccggtcagtcgattatggtcgacgacggtctgatcgagctgaaggtggaggcggtcgacgaggccgctggcaccctcgcgtgcgaggttgtgaacgctggcgcgctcggcggcaagaagggttgcaacctgccggaggtcgatgtcgatctgccggcgctctccgagaaggacaaggccgacctcgcgttcgccgtctcgc

SEQ ID NO: 249312 - DNA, 889 bp, Unknown
  Bacterial polypeptide expressing nucleotide sequence isolated from the Sargasso Sea
ttaataactgaggttttaaatgatggaattatttctaataacaaaggagttaatattcctgacgtaattctaccgatagattcccttactaataaagataggtcagatttacaaaaagcactagaaatgaatgttgattggattgcactttcatttgttcagcaagctgatgatattattaagttaaaaaaaattattgatggaaaagctctcataatggctaaaatagaaaaaccatctgcagttaaaaatattgatgaaatcattaaagtagctgatggaataatgattgcaagaggtgatcttggagttgaaatgcctacagaaaaagttccaatagttcaaaaaaatattattaaaaggtgtcgtcattttggaaaaccagtagtagttgctacacaaatgctagagagtatgatttcaaatttagttccaacaagagctgaagcttctgacgttgcaaatgccatttatgatggaacagatgcagtaatgttatcaggtgaatctgcagtaggtgattatccaatagaatcagtatcaacaatgaataatattattgagaatgttgaaaaagataaaaataattttaatttatcaattgataatttagtttctgatagtaaagttgacaacactgatgcaataactaatgcagcttattcaattgcaaataatgcaggagcaaaggcaataataactttttctgttagtggaatgacaacaatgagaatggcaagggaaagagcgcctgttcaaataataggcctttctccaaatattaaaactgcaagaaaaatgcaaattatatggggtgttaattcttgttattctactaaggatgcagctaatacaactgaaatggttaatattgcatgtggtgtggtaa

SEQ ID NO: 249313 - DNA, 745 bp, Unknown
  Bacterial polypeptide expressing nucleotide sequence isolated from the Sargasso Sea
atgaaactaagaaatcgtaaagccaaaattgttgctactttaggacctgcctgtgagactgaaaaagatattgaaaaattatttttatctggtgctgacgtatttcgtctaaattttagtcatggcgatcatggtgatcacaaaaaaaaagttaaaattattcgaaatttagaaaaaaaacatgaccgttatatttgtattttaggagacttacagggtcctaaatttagagttggtagatttctaaacgtcaaagaacaactaaaaaaaaaccaaatatttacttttgatcaaaataaaaaagagggtgatagttccagggtctacttacctcacaaagaaattttcaaatctatagcaattgggcaaagattattagtaaatgatggtaaggtaaggttaaaagtaaaatcaaaatctacttcagcgattaaatgcgttgttacagatggaggagaaatttctaataacaaagggctaaatattccagatacaaaacttgatttaaaaataattactccaaaagataaaaaagatttagagttagctattaaacttgacgttgattggattgctctttcattcattcaaactacaaaagatttattaacagcaaaaaaacttatacctgcaaaatttaaagtaatggttaaagtagaaaaaccgtctgcaatggaagaaatagagtcgataactgaaaattctgatggaattatggttgctagaggagatttaggtgtagaaa

SEQ ID NO: 249314 - DNA, 781 bp, Unknown
  Bacterial polypeptide expressing nucleotide sequence isolated from the Sargasso Sea
tcccgaagtccttgaaaaccttgccgatgcagggatgaatgtagcccgactgaatttctcccatgggactcatgactcccatcgtaacattgtggaaaaaatccggttgctcaatacaaaccgagaattcccggtggcaatcctgctggacaccaaagggccggaaatccgcaccggggatcagcatatgaaactcatcaccggaacccaggtccgggttgtcagtgatccggaactaaaggatgaaaggcatctatttgtggattaccctcacctgacagaacagttgggtcagggaaatcatattttactggatagcgggttggtcaaactggagatattggaaaatcattctgattcgttggcatgcagggtactcgatggagggaccatcacaccgaaaaggcatgtcaaccttcccgggatttcagtcaaacttccaggaattaccctttcagaccgtaaagatctcgagtttgctctggaagaaaatgtcgatgtggtggcactttcatttctaagaaaccgtgataccgtcctggaagtccgggaaatgtttcgggaaaggggggaacagatcaaacttatcgcaaagatcgaaaaccaggagggggtcgacaatcttgaagagatcattcaggtgaccgatggcatcatggtagcccggggagatctgggaattgaaatcgacatggaggaactcccccaaatccaaagaaaaatcgccctatctttgtgcgaaatacgggaaacgattgattgttgcaacccagatgctgga

SEQ ID NO: 249315 - DNA, 829 bp, Unknown
  Bacterial polypeptide expressing nucleotide sequence isolated from the Sargasso Sea
tcttctccacttaaaatacattctctatttcaagctggagcagacatatttagattaaattttagtcacggtactcatgaagatcatagaaaaagagtttttcacatcagacaatatgaaaaaagattaggaagacccattgcaattcttggagaccttcagggcccaaaaataagaattggtttatttaaaaaaacatctacagttcttaataataatcaaagattcgttttagatttgaatcccaaggaaggtgaccaaaatagagtatttcttcctcacaaagagatttttaaatctgtaaaaaaaaataacaaaattttaattgatgatggaaaaattattttgaatatcaacaaagttttatctgatcaaataataacagaggttttagttggaggaaaaatttccaatagaaaaggtgtaaacgttcctgaagcttttatcaaaatgtcttctctaacagaaaaagatgtaaaagatttaaagttttgccttgatttaagtcttgattatattgcgctttcctttgtacaaaaagcaaaagatttaaatgatttaaaaaagtatgttggaaaccatacaggaataatggctaaatttgaaaaacctttagctatcaaaaatatgaacgaaatattacaatattgtgatgctgcaatggtagctagaggtgatttaggtgttgaaatgcctccagaggaagttcctattatacaaaaaagaatagtgcaatcatgcagagattatgggatcccagtcgtagttgctactcagatgcttgattcaatggtagagtcaccctcacccactcgtgcggaggcatcag

SEQ ID NO: 249316 - DNA, 919 bp, Unknown
  Bacterial polypeptide expressing nucleotide sequence isolated from the Sargasso Sea
tatgtcgaatattgatttaaaaagaagaacaaaaattgtagcaactattggtcctgctactcaatctgaagaaataattactgatttaattaaagctggagtaacaacattcagattaaatttctcacatggagatcataaagatcatgctgagagaataaaaacaataagagaggtatcaaataaattagatatagatattggaatattacaagatctgcaaggaccaaaaataagattagggcgctttaaagatggtccagtaaaagttaaaaaaggtgataaatttacactgacatcgaatgaagttgaatgtacaaataaaattgcaaatgtaacctacgacaaactttccaaagaagttagagaaggaaaaagaattctattagatgatggcaaaatagaaatgattgtagaaaaagtagatataacagctaatcttttggagtgtctagtaactgtagggggtgttctttcaaataataaaggggttaatttcccagatgttcaattatcagtaaaagcattaacagaaaaagataaagaggatttaaaatttggtttatctgaaggagttgattggatagcccttagtttcgtaagaaatccatccgatataaacgagataaaagatttaataaacaaaaatgggcattcgactcctgtagtagcaaaaatagaaaaatttgaagcaattgatcaaattgataccgtattacccttatgtgacggagtaatggttgcaagaggtgatttgggagtagagatgcctgcagaagaagttcctcttttacaaaaggaattaataagaaaagctaattcgctaggtatcccaataattacagcgactcaaatgcttgattatatggcttctaacccgagaccaactagggcagaagttagtgatgtgcaaatgcaa

SEQ ID NO: 249317 - DNA, 829 bp, Unknown
  Bacterial polypeptide expressing nucleotide sequence isolated from the Sargasso Sea
agcagaagcgttaacagaaaaagacaagcaagatataaaaacggcagcgcaaattggcgtagactaccttgctgtgtcgttcccacgcagcggcgccgaccttaattacgctcgcgagcttgctgaagcagccggctgctacgcaaaaatttgcgccaaggtagagcgcgcagagactgttgcgactgacgacgccattaccgatattatcagtgcctctgacgctgtcatggttgcccgtggcgatttgggtgttgaaattggtgatgcagaacttgttggggttcagaagaaacttatcgctcgctcacgtcagcttaataaagtggttattacagccactcaaatgatggagtctatgattgatagccctatgcccactcgtgcagaggttatggatgtggctaacgccgtattagatggcacagatgcagttatgctgtctgctgaaacagcggcgggaagtttccctattgaaactgttcaagctatggcacgtgtttgcgaaggcgctgaaactcaccctagcgtaaaaatttccaagcatcgcatggaccagcagttttcatctaccagtgaatctatagcgctatctgcggtttatgccgcgaatcacctaccaagcgtaaaagcaattgtaggattgacagaaagcggaaccacgccgaaattaatgtctcgaattacaacatcactgccaattatcgccatgtctcgtcacgagggcacgctcaacgcaatggccctttatcgcggtgttaagccagtatttttcgactcgtctaacagcgagcccggcaaacttaagcacgacgttgtggcctgttaa

SEQ ID NO: 249318 - DNA, 853 bp, Unknown
  Bacterial polypeptide expressing nucleotide sequence isolated from the Sargasso Sea
atggatgatggaaagctacaatttaaagttaaagatatatctaaagatgaaataaaaactgaagttgtagtaggaggacctattaaaagtaataaaggtttaaacctgccagatgttgtgctaaatacaagtcccttaaccgccaaagatattgaggatctcaaatttatcttaaatcaagaaattgattggatagctctttcttttgttcagaaattaaatgatgtagaagaagtaaaaaaatatattggtgataaagcaggcgtaattgcaaaaatagaaaagccatctgctttaaaagaattaaatgaaataattgaagcctgcgatagtataatggtcgcaagaggtgatttaggggttgagttagcacctgaagaagttccaggcatacaaaaggaaattatccttaaatgtagacaagcaggaaagccagttattgtcgctacacaaatgctagaatctatgattgaaacaccgtcgccaacacgggcggaagcctctgatgttgctactgctgtttttgatggtgcagatgcagttatgctatctgcagaaacagctgttggttcttatcctcttgagacagtaaacattatggatagaataataacatcagctgaaaaccatattaaaatgaatccaggcgacggaccacaaaatttaagaagagaaaactttatttataatgcagtatcacgttctgctgtaagcttagctgagtcagtaaatgcaaaagctgtagttgcttttacagcgtctggaaatacagcttatagaatgtccagagaacgttcaaatttattgttagtagttatgacacctgaaattaatgtaaaaagaaagctttcac

SEQ ID NO: 249319 - DNA, 760 bp, Unknown
  Bacterial polypeptide expressing nucleotide sequence isolated from the Sargasso Sea
aaaaggagataaattcacattgacatcaaatgaagtcgaatgtacaaatactattgcaaatgtaacctacgacaaactttctaacgaagttagtgaaggaaaaagaatacttttagatgatggaaaaatagaaatgattgttgaaaaagttgatataaaagctaatacattggagtgcatggtaactgtaggaggtgttctttcaaacaataaaggtgttaattttccagatgttcaattatcagtaaaagcattaacagaaaaagataaagaggatttaaaattcggtttatctgaaggagttgattggatagcactaagcttcgttagaaatccatccgatataaatgagataaaagatttaattaacaaaaatgggcattcaacacctgtagtcgcaaaaatagaaaaatttgaagcaattgatcagatcgatacagtattacccttatgtgatggggttatggttgcaagaggtgatttgggagtagaaatgcctgctgaagaagttcctcttttacaaaaagaattaataagaaaagctaattcattaggtatcccaataattacagcaacccaaatgcttgattctatggcttctaacccaagaccaactagggccgaagttagcgatgttgcaaatgcaattcttgatggtacagatgctgtaatgctttcaaacgaaactgcagttggtgattatcctgtggaggcagttgaaacgatggcaactatagccagaagaattgaaagggattat

SEQ ID NO: 249320 - DNA, 679 bp, Unknown
  Bacterial polypeptide expressing nucleotide sequence isolated from the Sargasso Sea
ccgatagctcaaaaaaatattattagaagatgcagacattttggaaaaccagtgattgtagcaactcagatgcttgaaagtatgattgataatttagtgccaacaagagccgaggcatcagatgttgcaaatgcaatttatgatggaacagatgctgtaatgctatcaggtgagtcagctgttggaactcatccaattgaggctgtaaaaactatgaataaaattattgaaactgttgaaaatgataaaaataattatgatttgcgaattgaggacgataatattgaagatgtagataacacagatgcaattacattagctgcatactcaatcgcgaaaaaatcaaacgctaaagctattataactttttcagtaagtggaagaacaactagacgaatggcgagagagagagcacctgttcaaatagttggattatctccaaaaattgatacaactagaagaatgcaattatactggggtgtaaactcttgtcattcaaatgaagatgctcaaaacgcacaagaaatggtaaaaattgcatgtacacttgttaaaactaaaaaattagttaatccaggtgatagtgttgttatttctgcaggtgtaccatttggcagtgctggaactacaaatttactaagattagctgaaattatcgcagataaagatcttacttaag

SEQ ID NO: 249321 - DNA, 679 bp, Unknown
  Bacterial polypeptide expressing nucleotide sequence isolated from the Sargasso Sea
agatgctcgagtcctgaccggcgcgccccgccccacccgcgccgaggccaccgacgtcgccaacgccgtcctcgacggcaccgactgcgtcatgctctccggcgagaccgccgcgggttcctaccccgtcgaggccgtctccatcatggctgatatctgccgcgagtccgaggcttacgtcgacaactacgccgtgttcaagaacctcatggaccaccagtccctccccatgaaccccctcgagtccctcgcctcctccgcggtcaggtccgcgcacaaggttggcgcggagctcatcgtctgcctcgccaagtccggccgcaccgcgcagctcctcgccaagtaccgccccaacgcgacgatcctcgccgtgtgcgtggaggaccccaacgaccaatcacacgacgccgcgtccgccgcccgccgtctgctgctctcccgcgggatccgtcccgtcgtggcgcccgtgtcgtggcgcgcgtccgccgaggagaccgccgcggacgcggacgcgggatccaagcaccacgccgtggtcaacgtcaccgaaaccaagaacctcatgcaaaacgccgtggattacgccaaggaacacggcatggtcaacccgggggcgatggtcgtgggcgtgcaccgcgtcgtgggcgacctcatcctcaagatcgtccagtgtcactga

SEQ ID NO: 249322 - DNA, 856 bp, Unknown
  Bacterial polypeptide expressing nucleotide sequence isolated from the Sargasso Sea
gcggatgtttttagattgaatatgagccatggaacgcatgatgagatagccaaaagacataaaataatacggcagatagaggatgaacttagtagcccgatagcgattttagcagatttgcaaggcccaaaattaagggttggtccatttaaaaatggagttgaggaactcaatgaaaatgaaaaattcaggttagacttgaaagatgaattaggaacaaaagatcgtgtccaattaccacactcagaaatttttcaggctctacatgagggagctcacttattaataaatgatggaaaaataaaattagtggttgaaaagtgcggtccagactttgcggattgcttggttttaagtggtggcgaaatttctgatagaaaaggcgtcaatgttcctgatgttattttgccattagccgcactttccgaaaaggatcgtgctgatttagattttatatgtgacttgggtatcgattggttggcgctatcgttcgttcaaagagctgaagatatagttgaggcacgcaatcttatagctggaagagcctccgttatatcaaaaattgaaaaaccttcagcagtcaaaagttttgatgaaatattaaaagtttctgacggagtaatggtggcacggggagatttaggtgtagaattacctgttcaaaatgtcccaccaatccaaaaaaggctggtccgaaaatgtagagctgcagcgaagccagtaattgtagctactcagatgttagaaagtatgattgaaagtccgatgcctactcgtgctgaagtttctgatgttgcaacggctatttacgaaggctcagacgctataatgctttcagctgagtctgcggccgggc

SEQ ID NO: 249323 - DNA, 884 bp, Unknown
  Bacterial polypeptide expressing nucleotide sequence isolated from the Sargasso Sea
ctccctgggcttctcgacaccggtggtggccaagatcgagaaatttgaggccattgatcagatcgacatgatcctgcccctctgcgatggggtgatggtggcccgcggcgaccttggggtcgagatggctgccgaggaggtgccgctgctgcagaaagagttgatccgcaaggccaactccatgggcatcccgatcatcaccgccacccagatgctggacagcatggtgagcaacgcccgcccgacgcgcgctgaggtgagcgatgtagccaacgccattctcgatggcaccgatgccgtgatgctctccaatgaaaccgctgttggcgactacgccatcgaggcggtcgagaccatggcccgcatcgccaggcgcatcgagcaggactatcccaaccgccagcccgacacccagctgaccagcaccatccccaatgccatcagcatggctgtcagcaccattgccacccagctggatgcagcagcgatcctgccgttgaccaaaagcggtgccacagcccgcaacgtcagcaaattccgtcctgcaacgccaatccttgccatcaccagtgatgtgaaggtggcccgtcagctgcaactggtttggggcgtgaatccactggtgatcgccaaccagtcctcaaccagccgcaccttcagcatggcgatgggggtcgcccaggaacaaagcctgctccaagaaggtgatctggtgatccagaccgccggaaccctggccggggtgagcggctccacggacttggtcaaggtcggcatcgtctcagcagtcctgggccggggcagtggctacggcagccagtccgtcagcggtcaggtacgcgtcgccaacagccctgcggaagcggcacgcatcgagagcggcg

SEQ ID NO: 249324 - DNA, 899 bp, Unknown
  Bacterial polypeptide expressing nucleotide sequence isolated from the Sargasso Sea
gtttccgcacggttttccggccccgatatggcccagttcgaaaagaaccgacggaccaagatcgtggccaccatcggcccggcgactgagagtgctgagcgcatccgcgagctggttcaggcaggtgccaccaccttccgtctgaatttctcgcatggagatcacagcgagcacgcagcacgcatcgccaccatccgaaaggtgtcctctgaacttggacagcacatcggaatccttcaggacctgcagggccccaagatcaggcttggacgattcgcggaaggtccgatcacgctcggcaagggtgatcgctttgccctcacctcacgccaggtgagctgcaatcagacgatcgcaactgtgacctacgacaagcttgctgaggaggtgacagctgggagtcgaatccttctcgacgacggtcgtgtcgaaatgaaggtggaggagattgatcagagcgaacagaccctgcactgcagtgtcacggtcggcggggttctgtccaacaacaaaggggtgaatttccccgatgttcaactctccgttcgggcactcacggacaaggatcgcgaggatctggccttcgggctacagcaaggggtggactgggttgccctgagctttgtgcgcaatccgtcggacatgcaggagatccgtgagctgatccggagccacggattcagcactcccgtggtcgccaagatcgagaaattcgaagccatcgatcagatcgacacgatcatgcccctctgcgatggcgtgatggtggcccggggtgacctgggcgttgaaatgccagcagaggaggttccactgctgcagaaagaactgatccgcagggccaacagcctcgggattccgatcatcacggccacccagatgttggattccatggcctc

SEQ ID NO: 249325 - DNA, 874 bp, Unknown
  Bacterial polypeptide expressing nucleotide sequence isolated from the Sargasso Sea
aaaaatagaaaaatttgaagcgatagaccaaattgatactgtattacctttatgtgatggggttatggttgcgagaggagatttaggagtagaaatgcctgctgaagaagttccacttttacaaaaggaattaattagaaaagcaaacacattaggaataccaattataaccgcaactcaaatgcttgactcaatggcatctaatcctagacccacaagggctgaagtcagcgatgttgctaatgcaatacttgatggaacagatgctgtaatgctttcaaacgaaactgccgttggtgattatccagtagaggcagtacaaacaatggcgactatagcgcgaagaattgaaagggattatccacttaaagctattgagagtcacttgcctagcacaattccaaatgcaataagtgcagcggtaagtaacatcgctaggcaacttgatgcaggagctataattcctttaacgaaatcaggctctactgcaagaaatgttagtaaatttagacccccaactccaattttggctactactacagagaggagtgtagccaggcgacttcaactagtttggggagttactccgatagtagttaaaaatgatgaaagaactgcaaaaacatttagtttagctatgcaaattgcgcaggaaatgggcatcttgaatcaaggggatttagttgttcaaacagctggtacgcttactggtataagtggttccactgatttaataaaagtcggattagttagaaagattgtttcaagaggaacatcaataggtgaaataggggttacaggcaaagcaagaaaaataaacactaaccttgatttatcattaatttgtccaggagaaatattattgtccaaaaga

SEQ ID NO: 249326 - DNA, 895 bp, Unknown
  Bacterial polypeptide expressing nucleotide sequence isolated from the Sargasso Sea
tgtccagttaccacatccagaaatttttcaggctctacacgagggagcgcatttattaataaatgatgggaaaataaaattaatggttgaaaaatgcggtcccgactttgcggattgtttggttttaaatggtggtgaaatttctgatagaaaaggcgtcaatgttcccgatgttattttgcctttagccgcactttccggcaaggatcgtgctgatctagatttcatatgtgacttgggtatcgattggttggcgctctcatttgttcaaagagctgaagatatagttgaggcacgcgatcttatagcgggaagagcatccgttatatcaaaaatcgaaaaaccttcagcagttaaaagttttgatgagatattaaaggtttctgatggagtaatggtggccagaggagatttaggtgtagaattacctgttcaaaatgtcccaccaatccagaaaaggctagttcgaaaatgtagagctgcagcgaagccagtaattgtagctactcagatgttagaaagtatgattgaaagtccgatgcctactcgtgctgaagtttctgatgttgcaacggctatttacgaaggctcagacgctataatgctttcagccgagtctgcggctgggcaatttccaattcaagctgttgaaactatgaataacgttgccatcgaagttgaaagtgatccaacttatacagaagtaatggaggcctctagaagagctaagagaaactcggtcgcagacggaattgtttctgctgctagagaaatagctgaaactactgatataaaagctatttgttgttttactcaaacgggcactacagctttgttaacagcaagagagcgtcctcgggtgcctataatagctctttcctctgaaatagagacc

SEQ ID NO: 249327 - DNA, 965 bp, Unknown
  Bacterial polypeptide expressing nucleotide sequence isolated from the Sargasso Sea
ctactagatgacggcaaaatagaaatgattgtagaaaaagtatatataaaagctaatcatttagagtgcctggtaactgtagggggagttctttcaaataataaaggtgttaatttccctgatgttcaattatcagtaaaagcattgacggaaaaagataaagaggatttaaaattcggattatctgaaggagttgattggatagctctaagtttcgtaagaaatccatccgatataaacgaaataaaagatttaataaacaaaaatggtcattcaactcctgttgtcgccaaaatagagaaatttgaagcaattgatcaaattgatacagtattacccttatgtgatggggttatggttgcaaggggtgatttaggagtagaaatgcctgctgaagaagttcctcttttacaaaaggaattaataagaaaagctaattcattaggtatcccaataattacagcgactcaaatgcttgattctatggcttcgaatccaagaccaacaagggccgaagttagtgatgttgcaaatgcaattcttgatggaacagatgcagtaatgctttcaaatgaaactgcagttggcgattatcctgtagaggcagtagaaacgatggcaaccatagcaagaagaattgaaagggattatccacttaaagctattgaaagccacttacctagtacgatcccaaatgctattagtgcagcagttagcaatatagctagacaacttgatgcaggagctataatccctttgacaaaatcaggatctactgctcgaaatgtaagtaagttcagaccaccaacacctatcttggcaactactacagagagaagtgtagcgagaagattacaacttgtttggggagttactcccatagtagttaaaaatgatgatagaacagcaaagacctttagtttagctatgcaaattgctcaagagatggggatcttaaatcaagg

SEQ ID NO: 249328 - DNA, 952 bp, Unknown
  Bacterial polypeptide expressing nucleotide sequence isolated from the Sargasso Sea
aacaaactttctcaagaagttagtgaagaaaaaagaatattgttagatgatggcaaaatagaaatgattgtagaaaaagtagacataaaagctaatcttttagagtgcctggtaactgtagggggagttctttcaaataataaaggtgttaatttcccagatgttcaattatcagtaaaagcattaacagaaaaagataaaaaggatttaaaattcggtttatctgaaggagtcgattggatagcactaagtttcgtaagaaatccatccgatataaacgaaataaaagatttaataaacaaaaatgggcattcaactcctgtagtcgcaaaaattgaaaaatttgaagctattgatcaaattgatactgtattacccctatgtgatggggttatggttgcaagaggtgatttgggagtagaaatgcctgctgaggaggtacctctattacaaaaagaattaataagaaaagctaatacattaggtatcccaataattacagcgacccaaatgctggattctatggcttcgaatccaagaccaaccagggcagaagttagcgatgttgccaatgcaattctggatggaacagatgcagtaatgctttcaaatgaaactgcagttggcgattatcctgtagaggcagtagaaactatggcaaccatagcaagaagaattgaaagggattatccacttaaagctatagagagccacttacctagtacgataccgaatgctattagtgcagcagttagtaatatagccagacaacttgatgcaggagctataatacctttaacgaaatcaggctctactgctcgtaatgtaagtaaattcagaccaccaacacctattttagcaactactacagagaggagtgtagcgagaagattgcaacttgtttggggagttactcctatagtagttaaaaatgatgaaagaactgcaaaga

SEQ ID NO: 249329 - DNA, 864 bp, Unknown
  Bacterial polypeptide expressing nucleotide sequence isolated from the Sargasso Sea
tatgagaagacagcgtaatataaaaattgtagccactttgggcccttcttccagtgattacgatacaatcaaagagttacacctagctggggcggatgtttttagattgaatatgagtcatggaacgcatgatgagatagctaaaagacataaaataatacggcaggtagaggatgaacttagtagcccaatagcgattttagcagatttgcaaggcccaaaattaagggttggtcagtttaaaaacggagttgaggaattaactgaaaatgaaaagtttagtttagacttgaaagatgaactaggcacaaaagatcgtgtccagttaccacacccagaaatttttcaggctctgcatgaggggtctaatttattaataaatgatggaaaaataaaattaatggttgaaaagtgtggtccagattttgcggattgtgtgattttaaatggtggtgaaatttctgatagaaaaggcgttaatgttcccgacgttattttgccattagccgcactttccgaaaaggatcgtactgatctagatttcatatgtgacttgggtatcgattggttggcgctatcgttcgttcaaagagctgaagatatagttgacgcacgaaatcttatagcgggaagagcatccgttatgtcaaaaattgaaaaaccttcagcagttaaaagttttgatgacatattaaaggtttctgatggagtaatggtggccaggggagatttaggtgtagaattacccgttcaaaatgtaccaccaatccagaaaaggctagtgcgaaaatgtagagctgcagcgaagccagtaattgtagctactcagatgttagaaagtatgattgaaagtcccattcctac

SEQ ID NO: 249330 - DNA, 866 bp, Unknown
  Bacterial polypeptide expressing nucleotide sequence isolated from the Sargasso Sea
aatgaaacgtaatagaaaagctaagattttagctactttaggcccttcttcttcaaataaaaaaattattgaagacctttttgcagctggatgtgatgtatttagacttaatttttcgcacggtgatattgaagtacacagaaaaaattatcaaactattagactcttagaagataaatataaacacgcatcttgtgtattagctgacttacaaggtccaaagttaagagtaggtttatttaaaaatactaaagaaagtttaattaaaggagagaaattcacactagatctatcaccagagcttggagataataaaagggtaaattttcctcatgctgaaatttatgaatttttaactccaaatacgatactattagtaaacgatggtaggataagactacagattattgaacaacacaatgatagcttggtaacagaaattttaaatgattcagaaatttctaataataaaggagttaatataccagatgttattcttccgattgactctctaacaaacaaagacaagtctgacttgattaaagcactggatatgggtgtagattgggtagcattatcttttgttcaacaagctgatgatattaataagataaaaaaaatgattggtaacaaagcattagtaatggctaaaattgaaaaaccctctgcagttaaaaatattgatgagataattaatgctgcagatggaataatgatagcaagaggagatttaggtgtagaaatgccgacagaacaagttccgattgctcaaaagaatattattagaagatgtagacattttggaaaaccagttgtcgtggcaactcaaatgcttgaaagtatgattgataatttagttcctacta

SEQ ID NO: 249331 - DNA, 748 bp, Unknown
  Bacterial polypeptide expressing nucleotide sequence isolated from the Sargasso Sea
aggagttgattggatagcattaagtttcgtaagaaatccatccgatataaatgagataaaagatttaataaacaaaaatggacattcaactcctgtagtcgcaaaaatagaaaaatttgaagcaattgatcagatcgatacagtattacccctatgtgatggggttatggttgcaagaggtgatttgggagtagaaatgcctgctgaagaagttcctcttttacaaaaggaattaataagaaaagctaatacattaggtatcccaataattactgcgactcaaatgcttgattctatggcttctaatccaagaccaactagggccgaagttagtgatgttgcaaatgcaattctggatggtacagatgcggtaatgctttcaaacgaaactgctgttggcgattatcctgtagaggcagttgaaacgatggcaaccatagcaagaagaattgaaagggattatccacttaaggctattgaaagccacttacccagtacaatcccaaacgcgattagtgcagcagtaagtaatatagctagacaacttgatgcgggagctataatacctctaactaaatcaggttctaccgctcgaaatgtaagtaagttcagaccaccaacacctatcttggcaactactacagagagaaatgtagcaagaagattacaacttgtttggggagttactccaatagtagttaaaaatgatgaaagaacagcaaaaacttttagtttagccatgcaaatt

SEQ ID NO: 249332 - DNA, 838 bp, Unknown
  Bacterial polypeptide expressing nucleotide sequence isolated from the Sargasso Sea
gtaattaagctaaaaaagataataaataataaagcattagtaatggctaaaattgaaaaaccttctgcagttaaaaatcttgatgcaattattgaaaattcagatggtataatgatcgcacgaggtgatttaggggttgaaatgcccacagagaaagtgcctatcgttcaaaaaaatataatcaaaagatgtaggcattttggtaaaccagtagttgttgcaactcaaatgttggaaagcatgatcaataacattactccaacaagagctgaagcttcagatgttgctaatgcaatatatgatggaagtgatgctgtaatgctatcaggcgaatcagctgttggcaacaatccagttgaaacaataaatgtaatgaacagcattattgaaagtgtagagcacgacaaagataactttgatttggacatggaagaaataaatataaaaagaaaagtagacaatacagatgcaattacaaatgcggcttattatattgcaagaaatgcaggagctaaggcaataataactttttctgttagtggtaaaactactattagaatggcaaaagaacgtgcacccgtgcaaattataggtatgtcacctaatttatctactgcaagaaatttacaattagtatggggtgttaattcttgtcatggtgaagatgcacaaagtgctactgaaatggtaaaaattgcttgcgcaatagcaaaagaaaaggaattagtaaaacctgatgatagtgtgataattactgcaggcgtaccttttggcaacgctggaactactaatttactaagaatagcaaaaataatagcagataaagatcttacttgag

SEQ ID NO: 249333 - DNA, 794 bp, Unknown
  Bacterial polypeptide expressing nucleotide sequence isolated from the Sargasso Sea
gtttcgtaagaatccatccgatataaatgagataaaagatttaataaacaaaaatgggcattcaactcctgtagtcgcaaaaatagaaaaatttgaagctattgatcagatcgatacagtattacctctatgtgatggggttatggttgctagaggtgatttgggagtagaaatgcctgctgaagaagtccctcttttacaaaaagaattaataagaaaagctaattcattaggaatcccaataattacagcgacccaaatgcttgattctatggcttctaacccaagaccaactagggccgaagttagtgatgttgcaaatgcaattctggatggtacagatgctgtaatgctttcaaacgaaactgcagttggcgattatcctgtagaggcagttgaaacgatggcaaccatagcaagaagaattgaaagggattatccacttaaggctattgaaagccacttacccagtacgataccaaatgctattagtgcagcagtaagtaatatagctagacaacttgatgcaggagcaataatccctttaacaaaatcaggttctaccgctcgaaatgtaagtaagttcagaccaccaacacctatcttggcaactactacagagagaagcgtagctagaagattgcaacttgtttggggagttactccaatagtagttaaaaatgatgaaagaacagcaaaaacttttagtttagctatgcaaatcgctcaggagatggggatcctaaatcaaggagatttagtagttcaaaccgccggtacattaactggaatta

SEQ ID NO: 249334 - DNA, 897 bp, Unknown
  Bacterial polypeptide expressing nucleotide sequence isolated from the Sargasso Sea
gttggcagatggtcttattagattacaggtgattgaagtttctggaatcaaaggaagtactgtgatgtgtaatgtaatcgacggaggcccagtatcttcacgtaaaggaattaatgttccaggtacacttgtagacttacctgcaatcggcccaaaagatcacgctgcactagcacatgctctgaaatcgggtgctgattgggtagcggtatcttacgtcagaactgcagaggacattcgtcctgcaagagaagccatcaaagccgcaggcttccatactccaatcattgctaaaattgaacatccttccgcacttagcaacctaaattcgatactcgatgctgctgatgcagtaatggttgcaagaggcgaccttggtgtagaaataccactcgaacaggttccattagcccaacaaagaattattgattcggcattgatgcgtggaatggtagttattgtcgctactcaaatgctagaatcgatgacctacagtccaagaccaactagagcagaagttagtgatgtgtccaccgctataagacatggaggaaccgcagtcatgctttctggtgaaactgcatcaggagattatccgataaaagccgttgaaacaatggtcaaaatcgcacaagcaactgaggatgggcttacttcaacaggtggaactcctggtgcactgaccaaattccgctccactagagctgttgcacatgcaggtgtagaattagcgaggttagcagaagccaggcatatccttgttgctacacaacatggaaatgctcctcgtctcgttggtggatatcgtccaaatgcaaatattactgcagttacaaatcagatacgtgcagctagacgcatgtgtttacttcctggtgtgagtagtgtgatggtcga

SEQ ID NO: 249335 - DNA, 862 bp, Unknown
  Bacterial polypeptide expressing nucleotide sequence isolated from the Sargasso Sea
gagtcgtcagggagtcaatcttccgggagttaatctatcagtagcagccatgagccaagatgattggcatcatgcggaatgggccgcagccgctggtgctgatttcgtgagcctatcgtttgttcgaagtccggtagaagtcaaactcctcaaagaattactgcgaacacgaggttctcaggctcgagttattgccaaaattgaaaagcgggaagcaatagaaaacctggagtccattgttcaggccgcagaagccgttatggtggcacgcggtgatctaggagtcgagaccgatgttgccagcatgcctatggtgcagaagcaaattattcgcatctgtcagcggtatcagaagccagtaattgtggcaactcaaatgcttgacagcatgcatcactctaaacgacctactcgggcagagacgacggatgtggcaaatgcgattcttgatggctgtgatgcgtgcatgctttctggagaaacggcaatcggtgagcatccgtgccttgttgttgacatgatgcgaagaattgcgagtgaaacagaaaaacaataccttgcagaccggtggcactacatgggtggtcgttttcttggagaaaagaagaatattggtgttccagtgcaggagtttcttccgtcaccagagttcctcattgatggcctccatccaattacgcaagctgttgtcgatggagcaagccgaattgcaggtgaagttggagcaaagcttttcgttgttgccagtcgaagtggcctgacggctattgctcgttccaaacgccgaggtgccgttcctacaatcggtctgtctgacaacgcgtcgacactgaggcaaatgtcgctgtactggggggtaaca

SEQ ID NO: 249336 - DNA, 884 bp, Unknown
  Bacterial polypeptide expressing nucleotide sequence isolated from the Sargasso Sea
gatatttcttccccatcgatgactgaaaaagataaaaaagaccttgagtttattttggataatgatattgattgggtagcactttcttttgttcgttctgctcatgatattattgatttaaagcacatcatttcattaaaaaattcaagtgcaaaagtgattgctaaaattgaaaaacctgaggcaatagaagatattgatgatattattcagcaaagtgacggtttgatggttgccagaggtgatctaggggttgaaattccatttcaggaagttccattaattcaaaagagacttattcaaaagtgtagacaaaatgcaaagcctgttattgttgctactcaaatgatggaaagtatgatgaccaatttaactccaaccagagcagaggttaatgatgtggcaaatgctgttttagatggaactgatgcagttatgttatctggagagacttctgttggtaaatatcctgtaaaggttattcaagtcattaataacatcattaatgagatggaaaaggatgatgagatttatcacaaagaagaagcgccaatgactgatcatgatcgctttatcactgattcaatttgttttaacgcttgtagacttgctttaagagttaacgcaaatgcaattattaccatgtctttttctggatatactgcttataaaatttcatcgcaaagaccaaaggcatctgtttatgtatttaccagtaataaaaaaataatgtctcaattgaatttggtttggggtgttcatgctttttattatgataaaagaattagtacagaccatactattgccgatataaaatacatactgaagaaaaaatcaattttaaaatctggtgatatggtgattaatattgcctctattccctt

SEQ ID NO: 249337 - DNA, 810 bp, Unknown
  Bacterial polypeptide expressing nucleotide sequence isolated from the Sargasso Sea
ctggtctctggaacgaacgttcgcgcgacagtcgtggttggtggcgatctgtcctcgaacaagggtatcaacctgccgggtgtccaggtcagtgcatccaccttcaccgaaaaggatcgggaagacctcaggtttgggattgagaatgaagtggactacgtggcaatgtcatttgttcgcgcagctgccgacatcgggcttgtgaaacgagaagcacgaaactggggtgcggagatacccgtgatagccaagctggagcggtctgaagccgtggatgcgttggacgagatccttgaggtcgccgatggggtgatggtcgctcggggcgatctgggcgtcgagatggcgcccgaacaggttcccgtcctccagaaacggattatcgcgagcgcaaatgaagcgggtgttttcgttattacggcaacccagatgctcgaatcgatgacagagaacccacgcccaacaagggcagaggcctctgacgtggccaacgcgatttacgacgggaccgacgccgtgatgctttcgggtgagactgcggtaggacatttcccggtggaaacggtccagatgatggccaggatcatctccgaggcggaggcgggtgttcgtgtgctcgactcacacgaacgccgtagtggaggcactggaacgtttcctgacgcgataggacacgctgcgacaatggctgccgaagacgtcggggcccgcgcgatcgttgctttcacacagtcgggttcgacagcgaggttgatctctaaacggaggccttttaccccgattgttgcgttcacgccggatgcaaggatc

SEQ ID NO: 249338 - DNA, 892 bp, Unknown
  Bacterial polypeptide expressing nucleotide sequence isolated from the Sargasso Sea
gatggaagctttattgagacggcgacgccgagttaagatagcagctacactaggtccagcatcaaatagtagagaagttatcaaggaattatttttgtctggggcagatgtttttaggttgaaccttagccatggtacccacgctgatatcaaggctcgttttgatataatcagagatattgaaactgagttcggtaggcctatttgtgtaatggctgatttgcaaggacctaaattaaggtgtggtcgattcaaggatggatcagcgaatttggaagagggaaacaaattttgttttgatttagatgaagctttaggagattctacgcgtgtgtgccttccgcatagggagatttttcaagctttaaaagttggatcaattttattgattgatgatggaaagatccggttgcaggtggtaacttgtaagaatgattttgcagttttgactgttttagtgggtggagtcatatctgataataaaggagtaaatctaccagatgtaatcttacctgtagcagcgctttccgaaaaagatctcatcgacctcgagtttgtttgcaatcttggagtggactggcttgcgttatcatttgttcaaagagctcaagatgttgaagaagctcgaaaattggtaaaaggaagagctgaaattttatcaaaaattgaaaaaccggcagctgttgaagcttttgacagtattttagaagtgtcagatggaataatggttgcaaggggagatttaggcgtagaactgccagttgaagcagtacctccaattcaaaaaagattagttagagcatgccgagctaagggaaagccagtcatcgtggccactcagatgatggaaagcatgattaattcgcctgtaccgactagagcagaagtctct

SEQ ID NO: 249339 - DNA, 922 bp, Unknown
  Bacterial polypeptide expressing nucleotide sequence isolated from the Sargasso Sea
tgcaaagatcttcaaggacctaaaatacgattagggcgctttaaagatgggccagtaaaagttaaaaaaggcgataaattcacactgacatcaaatgaagtcgaatgtacaaatactattgcaaatgttacctacgacaaactttctcaagaagttagcgaagggaaaagaatacttttagatgatggaaaaatagaaatgattgtagaaaaagtagatatagaagctaatcttttggagtgtctagtaactgtaggaggggttctttcaaataataaaggtgttaattttccagatgttcaattatcagtaaaagcattaacagaaaaagataaagaggatttaaaatttggtttatctgaaggagttgattggatagcactaagtttcgtaagaaatccatctgatataaatgagataaaagatttaataaataaaaatgggcattcaactcctgtagtcgcaaaaatagaaaaatttgaagcaattgatcagatcgatacagtattacctttatgtgatggggttatggttgcaagaggtgatttgggagttgaaatgcctgctgaagaagttcctcttttacaaaaggagttaataagaaaagctaatacattaggtatcccaataattacagcgacccaaatgctagattctatggcttctaacccaagaccaacaagggccgaagttagtgatgttgcaaatgcaattcttgatggtacagatgctgtaatgctttcaaacgaaactgcagttggcgattatcctgtagaggcagttgaaacgatggcaaccatagcaagaagaattgagagggattatccacttaaggctattgaaagccacttacccagtacgataccaaatgctattagtgcagcagtaagtaatatagctagacaacttgatgcaggagcta

SEQ ID NO: 249340 - DNA, 928 bp, Unknown
  Bacterial polypeptide expressing nucleotide sequence isolated from the Sargasso Sea
cccccttcgtcgtaccaaaattgtcgcgaccctcggccccgccagcgaccgtgaaggcgtgctggaagccatgttgaaggcgggggtggatgtggtccgcttgaacttttcccacggcacggccgacgaccatcgtcgccgccttgcccgtgtgcgtgaaatcgccgctcagctaggccgcagcgtggccgcgctaggtgatttgcaaggccccaaaattcgcgttgcccgctttaaagagggggcggtttatttagaagagggccagccgtttgtactggatatggccatggatagtgacgctggtgatatccacggcgtcggctgcgattacaaaaccctggcggatgatgtaactgcgggcgaccgcctgctgctggatgatggccgcgtggtgcttgatgttacccgtgtagagggcaagcaggtacacaccgaggtggtggtgggcggcaagctctctaaccataaaggcattaacaagcagggcggcgggctatctgcccccgcgctgacagaaaaagatagagccgatctgaaaaccgccgtcgagattggtgttgattatttagctatttcctttccccgttcagcggaggatatgcaggaagcccgccgcttgctgggtgaagagggcaaggaaattggcctcgttgccaaagtggagcgtgccgaggccgtggccgatgacgccacgctggatggcattatcgaagcctccgaagcggtgatggtggctcgtggcgacctcggcgtggaaattggcgatgccaaactggtcggcgtgcaaaagcgcatgattaaacgcgcccgttcgcttaaccgcgcggtgattaccgccacccaaatgatggagagcatgatctccgcgccgctacccacccgcgctgaagttttcgatgtggcgaacgcggtgctggatggcagc

SEQ ID NO: 249341 - DNA, 826 bp, Unknown
  Bacterial polypeptide expressing nucleotide sequence isolated from the Sargasso Sea
cgaactggcccgcgaagctggctccaacgccaagatcgtggccaaggtcgagcgcgccgagaccgtcgccagcgacgaggcgatggaagacatcatccttggctccgatgccgtcatggtggcccgtggtgacctgggtgtcgaaatcggcgaccccgaactggtgggtgtgcagaagaagctcattcgccactcccgccgcctgaatcgtgtggtcatcaccgcgacccagatgatggagtccatgatcaacgcgccgctcccgacccgtgccgaagtcatggacgtggccaacgccgtgctggacggtaccgatgcggtgatgctctccgccgagaccgccgccggccagttccccatcgagaccgtgacctccatggccagcgtctgtgtgggcgccgagaagcacccgagcctgaacgtctccaaccaccgcatgagctacaccttcacctcggtggaagaggcggtggctatgtccaccatgtatgcggccaaccacctggaaggggtcaaggcgatcgtggcgctgaccgagtcgggcaccaccccgctgctgatgtcccgcatcagctccggcctgcccatcttcgccatgtctcctcacaacaagaccctggcctgggccaacctctaccgcggcgtcacccccgtgctgtttgatggcgacgagaccaagccggtctacgaggtgtgccgcgacgcgctggacgtgctcaaggccaagggactgctgcaaagcggcgacatggtattgctcacccacggcgacaagatggaaaccgtcggcagcaccaacacctgcaaggtgatgatggtcgagtaa

SEQ ID NO: 249342 - DNA, 827 bp, Unknown
  Bacterial polypeptide expressing nucleotide sequence isolated from the Sargasso Sea
ccgcgaactggccgaagcagccggctgtaaagcgaaaatctgcgccaaggtagaacgcgctgaagccgttgctactgatgaagccattgatgacattatcagcgcatcagacgcagtaatggttgcccgtggcgatttgggtgtggaaattggtgatgccgagctggttggtgttcagaaaaaactgatcgcccgctctcgccagttaaataaggtggttatcacggcaactcagatgatggagtcgatgattgaaagcccaatgcctacccgtgcagaagtaatggacgtggctaacgccgtactggacggtaccgatgcggttatgctgtcagcagaaactgcagcaggtagctatccggttgaaacggtaaaagccatggcccgtgtttgtgaaggcgcagaaacccacccaagtgtaaaaatctccaagcaccgcatggacgaactatttggttcagtgcacgagactatcgctttatcagcggtttatgctgctaaccacttaccgggtgtaaaggctattgtaggcttaactgaaagtggcagcacgccgcgtctgatgtcgcgtatcaccactaccctgcctattgttgctatgtcacgtcacgaagaaacgcttaatctgatggcgttatatcgtggcgtaaaaccggttttctttgactctcgcgacagcgcacctggtgagctgcgtaaagatgttgtagctctgctgaaagagaaaaacctggtggaagacggtgatatcgtgatcctgacccacggtgaccgcatggaaactatcggtgctactgacgcaattaaaattatcgtcgtagaatagt

SEQ ID NO: 249343 - DNA, 742 bp, Unknown
  Bacterial polypeptide expressing nucleotide sequence isolated from the Sargasso Sea
cggcgatcacagcgaacatgccgcacggatcgcgaccatccggcaggtatctgacgaactgggcatcaacatcggcatccttcaggacctgcagggaccgaaaatccgtctgggccgcttcgctgatggaccgatcaccctgaccaacggcgacagcttctccctcacctcgagatcggtgagctgcaaccagaccattgccaccgtcacctacgacaagctggcggatgaggtgaccgcaggcagccgcatccttcttgacgatggacgcgttgaaatgaaggtcgagcaggtcgatcagtccgagcagaccctgcactgcagcgtcaccgtcggcggggtgctgtccaacaacaagggcgtgaacttccccgatgtgcagctatccgtccgggcactgacggacaaggacaaggtggatctggaattcggtctctcccagggggtggactgggtggctctcagtttcgtgcgcaatccctccgacatggaggagatccgtgacctgatccgccagcacggacatgccacacccgtggtggccaagatcgagaagttcgaagcgatcgatcagatcgacgcgatcctgccgctctgtgatggcgtgatggtcgcccgcggcgatctgggcgttgaaatgccggcggaggaggtgcctctgctgcagaaggaactgatcagcaaggccaacagcctcggcatcccgatcatcacggccacccagatgctggattcgatggcc

SEQ ID NO: 249344 - DNA, 859 bp, Unknown
  Bacterial polypeptide expressing nucleotide sequence isolated from the Sargasso Sea
cggtgtcgactgggtggcgctgtccttcgtgcagcgcgcgcgcgacgtgatcgaagccaaggcggcgatcgacggccgtgccgcgctgatgtcaaagatcgagaagcctgccgcgctcgccgaactgtcagatatcgtcaccgcgtcggacggtgtgatggtggcgcgcggcgatctcggtgtcgagttgccgccggaagatgtgccgggctggcagaagcggattgtcgccgagtgccggatggtcggcaagcccgtggtcgtcgcaacccagatgctggaatcaatgatcaccaacccgaccccgacaagggcggaggcctcggacgtcgccggcgcggtgttcgacggtgcggatgcggtgatgctgtccggcgagacggcggtcggcaaatatcctgtcgagacggtgcaaatgatggggcgcatcatcgctgccgccgaggggcacatcatcgctaacccggaaaatgcgccaccgaagctgccgaccgagccgagcctgtatcacgccgtcgcacttgccaccgtgtcgcttgcagaaacggtcggtgccgaagtcatcgtggccttctcgacctcgggcaacacggcggtgcgcatcgcgcgcgaacggcctagaatccccttccttgtgctctctccctttgtcgaagtgcggcgcaggctggccattctgtggggaacgcagacagctggaagcacaatcaccgaggatttcgaagctgccattgccgagggcgtggcagagatcggcaaccgcggtattgccgcttccggtgcgcacgtggtgattgtcgccggcatgccgttcggcattgccggcaccacgaattcgatccgggtcgcgacgatctag

SEQ ID NO: 249345 - DNA, 857 bp, Unknown
  Bacterial polypeptide expressing nucleotide sequence isolated from the Sargasso Sea
tatgtcgaatattgatttaaaaagaagaacaaaaattgtagcaactattggccctgcaactcaatctgaagagataattacagatttaataaaggctggagtaacaacattcagattaaatttctcacatggagaccataaagatcatgctgagagaataaaaaccataagagaagtatcaaaaaagttagatatagatattggtatattgcaagatcttcaaggacctaaaatacgattaggtcgctttaaagatggaccagtaaaagttaaaaaaggtgataaatttacactgacatcaaaagaagtcgaatgtacaaatactattgcaaatgttacttacgacaaactttctcaagaagttagcgaagggaaaagaatacttttagatgatggaaaaatagaaatgattgtagaaaaagttgatacaaatgctaataatttggagtgcatggtaactgttggaggcgttctttcaaacaataaaggtgttaatttcccagatgttcaattgtcagtaaaagcattaacagaaaaagataaagaggatttaaagttcggtttatctgaaggagttgattggatagcactaagttttgtaagaaatccatccgatataaatgagataaaagatttaattaacaaaaatgggcattcaactcctgtagtcgcaaaaattgaaaaatttgaagcaatagaccaaattgatacagtattacctttatgtgatggagttatggttgcaagaggtgatttgggagtagaaatgcctgctgaggaagtacctcttttacaaaaagaattaataagaaaagctaattcattaggtatcccaataatcacagcgactcagatgc

SEQ ID NO: 249346 - DNA, 900 bp, Unknown
  Bacterial polypeptide expressing nucleotide sequence isolated from the Sargasso Sea
ccctcggtccagcatcatcatctccctctaaaattagctccttatttcaagctggggccgatatttttagactaaattttagtcacgggactcatgaagaccatagaaaaagagtctttcacataagacaatatgaaaagaggcttggcagaccaattgcaattcttggagatttacaagggcctaaattgagaattggttattttaaaaattcttttgaagttttaaaaaactcacaaaaattttcatttgatttaaatccagcacctggaaataaatctagggtttttcttccacatcctgaaattttcaaatcaattaaaaaaaaaaataatatattaattgatgacggaaaaattattttaagtgttctaaaagtatcatcagaaaaaatagaaacggaagtaattaatggaggtagaatatcaaatatgaaaggtgttaatgttccagaaaccttcctaaaattatcttcacttactaagaaagatttaaaagatttagagttatgtctagatttaagtttagattatgttgcgttgtcattcgttcaaaaagctcaagatttgatagatcttaaaaagtatgtaggagaaaatacaggcattatggcaaaatttgaaaagcccctagcaataaaaagaatggatgaaattcttaaactttgtgatgcagcaatggttgctagaggagatttaggtgttgaaatgcctgcagaagaagttccaataatgcagaaaagaattgttcaagcatgtagagattttggaaaacccgtggtagttgctacacagatgcttgattcaatgatcaatgcaccaactcccactagagctgaggcttccgatgttgctacagcagtttttgatgcagcaagattgtttaatgttatctgctgaa

SEQ ID NO: 249347 - DNA, 900 bp, Unknown
  Bacterial polypeptide expressing nucleotide sequence isolated from the Sargasso Sea
tctgtctttattaatgatggaaaaataaaagggattatcaaatccattcatgccgataacgccgtctgtcagattacatccggaggatttatctctgatcacaaaggcgtcaatttgccatttacaaatctaagtatgtctgcgtttacaaaaaaagatgaaatagatgcggtaacagcgatagaaattgggtgtgattatgttgcattgtcgtttatttctagcgcgtatgatatcttgtcatttcggtcttttttagagaagcataatggtcaacatataaaggtaatcgcaaaaattgaacgtcaacttgctgttgataatttgttagaaattatgacggtgtctgacgctgtaatggttgcaagaggcgatttgggagttgaaataggcattgaacgtgtgcctaaagttcaaaagcaaattatacaaacagcaaatcgttatataaagccagttatcgtcgctacgcagatgttagagagtatgattgatgcaagtgttgcaacgcgagccgaagtctccgatgtagcaaatgcaatttacgatcattgtgatgcggtgatgttgtctgcggaaacggcagtgggtatcaatcctgttaatgtgattcgtgttatggcggaaatttgttctgaagccgacaaacatctaaaggaaatgcgtgaagagtcacaggtgattgagaaaaagatttttgaatcagactcaacagcaacctctgtttgtcgagcggcagatcaaattgctgaaaaaaataatgcaaaagccatcatggcctttacgtcatctggaaacacccctttgattgcgtctaagctaaattccttgtttcctattattgcaccaacagattctatagatgtttgttatcggtccagcttgtatcgaggtgtacga

SEQ ID NO: 249348 - DNA, 887 bp, Unknown
  Bacterial polypeptide expressing nucleotide sequence isolated from the Sargasso Sea
aagatatttagaaaaaaaatatgatcatacgacatgtatattagcagatttacaggggccaaaacttagaattggccagtttgataacaaagaaaaaaaaataaaaaaaggtcagcaatttagtttagatctggattcttcacctggaaatgacaaaagagtaaattttcctcataaggaaatttatgaaatcttaacgccaaattctgttattttgattgatgatggaaaattaaggttacaaatcattaaacaagaaaaagattgtcttactacagaagctttaaatgatggcataatatctgataataaaggtgttaatatacccgatattattttacctatttcttcacttacatctaaggatgaatctgatttaaataaagcccttgaaatgggagttgactggatagcattatcttttgttcaaacacacaaagatatagaagaattaagaaagttagttggaaataaagtatcaattatggctaaaatagaaaaaccatctgcagttaaaaatgtcgataaaattattgatgctagtgatggtttaatgattgcaagaggtgatttaggtgtggaattaccaactgaacaagttccagtaattcaaaaagacattataaatagatgtagagagtatggtaaacctgtagttgttgccactcaaatgttagaaagcatgatttctaataatgttcctacaagagcagaagcatcagatgtggctaatgcaatttatgatggcacagatgctgtaatgttatctgctgaatcagccataggatcttaccctgttgagtctgtaactattatgaacaaaatcatacaaagtgttgaaaatgacaaaaataattttaaattggaagattttcatcaaaaataat

SEQ ID NO: 249349 - DNA, 835 bp, Unknown
  Bacterial polypeptide expressing nucleotide sequence isolated from the Sargasso Sea
gaaagttccgagcgaatcaaggaactggttgagcctggagccaccacctttcgcctgaatttctcccacggcgaccacagcgagcatgcggcgcggattgcgaccatccgccaggcgtctgaagagctggggatcaacatcggcatccttcaggatctgcagggacccaaaatccgcctgggccgttttgccgagggtccgatcaccttggccaatggcgacagcttctccctgacgtccaggccggtgagttgcaaccaatccatcgccaccgtcacctacgacaagctcgctgacgaagtcaccgccggcagccgcatccttctcgatgacggccgcgttgagatgaaggttgagcaggtggatcaggccgaacagaccctgcactgcaccgtcaccgttggcggtgttctctccaataacaaaggggtgaatttccctgatgtgcagctgtccgtccgcgctctgacggacaaggacaaggtggatctggaattcggtctctcccagggggtcgactgggtggccctgagcttcgtacgcaacccctcagacatggaagaaatccgtggcctgatccgtgagcatggccacgagacccccgtcgtcgccaagatcgagaagtttgaggccatcgaccagatcgatgccatccttcccctctgcgatggcgtgatggtcgccaggggtgacctgggggttgagatgcccgctgaggaggttcctcttctgcagaaggaattgatccggaaagccaacagcctgggcattccgatcatcacggccacccagatgctggattcgatggcctcaagcccgcggcccacccgcgccg

SEQ ID NO: 249350 - DNA, 1438 bp, Unknown
  Bacterial polypeptide expressing nucleotide sequence isolated from the Sargasso Sea
cgcaagtagtggtaaggcgggtattcagtcgcttatcgaaggcggcgttgatgttttccgattaaatatggcgcatggttctattcatgagcatacagagaccctcaacacgatacggcacgtctccgatgaagtcgggcgacctgttggtgttcttgttgacctggcaggtccaaaaatacggcttggtgagattgctagtggcagtgttgagtgcgttgagggaagcgatgttttttttatacgaggtccagcgactgaccggcctcaccattttgtgacaacctatccgacccttgttgatgagttggcagtaggagactcgatcatgctggccgatggcacaattagtctggttgtgtcagagaagacaagcgaccaggcacgctgtcgggttgtacaaggtggagttgtccggagccgtcagggcgttaatttaccgggggtcgatctgtcggttgccgcgatgagtgcagatgactggaagcatgcagaatgggcgtcttctgtcggtgctgactttgtgagcctctccttcgtgagatcttctgttgaggtcaaccttctcaaggaattactacgtacccggcaatcatcagctcgcgttgttgccaagattgaaaagcgggaggcccttgagaaccttgagtccattattgatggagcagatgtggtgatggtggctcgtggtgatcttggggtcgaaattgatgtcgcaagtatgccgatggtacagaagcggattatccgagtctgtcagcaatatcaaaagccggtaatcgtagcgacacagatgttggatagtatgcagcattcgcggcgtccaacccgcgctgaaacaacagatgtagccaacgccattcttgatggtgccgatgcgtgtatgctctctggagagacggccattggtgaccatccccgacgggtcgtagaaatgatgcggcgtatcgcacaatcaaccgaacgacaatacctgcagtctcgacggcaatacctcgaagagttgctaggcaaaagtaggcttggtgctgttggaaatgacttcttgcctcggcctcagcgactcgtgcatggacttcacccaatcactcaggcagttgttgaaggggcaagccgcatcgcggcagagcttgatgcccgactttttgtcgtcgccagtaagagtggggtaacagctatcgcgcgatcgaagcaccgaggcgccgttcctacaatcggactgactgatgatctagccactctcaggcagatgacgttgtactggggcgtgacgccagtcgcagttccggagggggctgacgtgaatcagctgctgagtcatgtctgtgactgggggttgcaagatggacggcttgagcgaggagaccgaatcgtgctcgttgccggaatagggtttggagcgggcggccacaatatggccatggtgcacgaagtatga

SEQ ID NO: 249351 - DNA, 751 bp, Unknown
  Bacterial polypeptide expressing nucleotide sequence isolated from the Sargasso Sea
aattattaatgtagcagacggtataatgatagcaagaggtgatttaggtgttgaaatgccaactgagcaagttccaattgcacaaaaaaatataataagtagatgcagacattttggtaagcctgttgttgtcgcaactcaaatgcttgagagtatgattgataatttagtacctacaagagctgaggcatctgatgttgcaaatgccatatatgatggaacagatgctgttatgctatctggagagtctgctgtaggcaatcaccccattcaagtagtcaaaaccatgagtaacataatcgaaaaagttgaggaagatgaaaataattataacttaagaattgaagaagaaaatattgatgatgttgataatacagatgcaataactctagctgcgtattctattgcaaaaaaatctaatgcaaaagccataataacattttctgttagtggcagaacaacgagcagaatggctagagaaagagctcctgttcaaattgtgggcttatctccaaatattaatactacgagaagaatgcaattgttttggggagtaaattcatgtcacaccacagaagatgcagataatgctcaagaaatggtaaatatagcttgtagaatagttaaagaaaaaaaattagttaatcctggagataatgtagtaatttcagctggagttccttttggaagtgctggaactactaatttaattagaatagctgaaattattgcaaataaagatcttacttaa

SEQ ID NO: 249352 - DNA, 1441 bp, Unknown
  Bacterial polypeptide expressing nucleotide sequence isolated from the Sargasso Sea
tatgttccgcagaaccaaaatcgtcaccactctgggccccgccactgaccgtgacgataacttacgccgtattatcgcggcaggtgcaaacgttgttcgtctaaacttctcccacggctcccccgaagatcatctcaaacgcgcgactcaagctcgtgaaattgcaaaagaattaggtgtccatgttgctattttaggtgacttacaaggtcctaagatccgtgtatctacctttaaagacaacaaaaaagttcaactgaacttaggtcaagcctacattctggatgccgagttaggtaaaggcgaaggcgacgagaatcaagtcggtatcgactacaagcaattgccagacgatgtgaatgttggcgatatcctgatgctcgacgacggccgtgtgcaactgcgtgttgagcgcgttgaaggtcgtaaagtacacacgactgttaccgttgcaggccctctatcaaacaataaggggatcaacaaacaaggtggtggcctatcggctgcggcactgactgaaaaagacaaggcagacattctgactgcggcgatgatccaagtggattacttagccgtgtctttcccacgtagcggcgccgatctggaatatgcccgttctttagcgcaacaagctggcagtaatgcactgatcgtagcgaaagttgaacgtgctgaagccgttgctagcgaagaagcgatggatgatgtgattttagcctctgacgtcgtcatggttgcccgtggtgacttaggggttgagattggtgacgcagcactggttgcagtgcagaagaagctaatcgctcgctctcgtcaactaaataaaatcgtaatcactgcgactcaaatgatggagtcaatgatttcgagcccaatgccaactcgcgcagaagtcatggacgtggccaacgccgtgctcgatggtactgacgctgtgatgctgtctgccgaaactgcagcaggtgacttcccagaagaaactgtgaaggcgatggcgaacgtgtgtatcggtgccgaatctcaccctagcgtgaaagtgtctaagcacagattagatgcacgtttcacttcagttgaagaaacgattgcactctccactatgtatgccgctaaccacttagaaggcgttaaagcaattatcgccttaactgagtctggcgcaacacctaagctgatgtctcgtatcagttcatctttaccaatcctaggtttatcacgtcatgagacaactctggcgaagatggcactgtaccgtggtgtgttaccgatttacttcgattcaaccatttatcctgccgatgagttagcgcaaaaagcgctggaatcattaacaactgcgggttatctacagagtggcgacttggtattaatgaccaagggcgatgcgatggaaactatcggcggcactaacacttgtaaagtgttgatcgttgcttaa

SEQ ID NO: 249353 - DNA, 812 bp, Unknown
  Bacterial polypeptide expressing nucleotide sequence isolated from the Sargasso Sea
tctggtaactgttggaggggtactttcaaatataaagggtgtaaatttcccagatgttcaattatccgtaaaagcattaacagaaaaagataaagaggatttaaaattcggtttatctgaaggagttgactggatagccctaagtttcgttagaaatccttccgatataaacgagataaaagatttaataaacaaaaatggtcattcaactcctgtagtcgcaaaaatagaaaaatttgaggcaattgatcaaattgatactgttttacccttatgtgatggtgttatggtcgcaagaggtgatttaggagttgaaatgcctgctgaagaagttccccttttacaaaaggaattaataagaaaagctaattcattaggtataccaataattacagctactcaaatgcttgattctatggcttcgaatccaagaccaacaagggccgaagttagtgatgttgctaatgcaatattggatggaacagatgcggtaatgctctcaaacgaaactgcagttggtgattatcctgtagaggctgtacaaacgatggcaactatagcaagaagaattgaaagggactatccgcttaaagctattgagagccacttaccaagtacgattccaaatgctattagtgcagcagtaagtaatatagctagacaacttgaagctggagccataatcccattaactaaatcaggctctactgctcgaaatgtaagtaaatttagaccacctacacctatcttggcaacaactacagagaggagtgtagcgagaagattacaacttgtttggggagttactccca

SEQ ID NO: 249354 - DNA, 1441 bp, Unknown
  Bacterial polypeptide expressing nucleotide sequence isolated from the Sargasso Sea
atgttccgcagaaccaaaatcgtcaccaccctgggccccgccactgaccgtgacgataacttacgccgcattatcgcggcaggtgcaaacgttgttcgtcttaacttctcccacggctcccccgaagatcatctcaaacgcgcgactcaagctcgcgaaattgcaaaagaattaggtgtacatgtagcgattttaggtgacctacaaggtcctaaaatccgtgtttctacctttaaagacaacaagaaagtccaactgaaattaggccaagcttatattcttgatgctgaactccccaaaggtgaaggcgatgagaatcaagtcggtatcgactataagcaattacctgatgatgtgaatgttggcgacatcctgatgctcgatgacggccgtgtccaactacgtgttgagcgcgtcgaaggtcgtaaagtccatacgacggtaacggttgctggtcctttatcaaacaataaagggatcaacaagcaaggtggtggtttgtccgctgcggcactgaccgaaaaagacaaggctgacattctcaccgcagcgatgatccaagtggattatctagccgtttccttcccacgtagcggtgccgatttagaatacgcacgttctttagcacagcaggctggtagcaatgcactgatcgtcgcgaaagttgaacgtgcagaagcggttgctagcgatgaagcaatggatgatgtgattttagcctctgacgttgtcatggttgcccgtggagatttaggggttgagattggtgatgctgcactagtggcagtacaaaagaaactcatcgcccgttcacgtcagctcaataaaatcgtcatcactgcgactcaaatgatggagtcaatgatctcaagcccaatgccaacccgtgcagaagtgatggacgtggcaaacgccgtgcttgatggtaccgacgccgtgatgttatcagccgaaaccgctgccggtgacttccctgaagaaacggttaaagcaatggcgaatgtgtgtgttggtgcagaatctcacccaagtgtgaaagtctctaaacacagattggatgcacgtttcacctcagttgaagaaaccatcgccctatcgactatgtatgcggcaaaccacctagaaggtgttaaagcgattattgctttaacagaatcaggtgcaacacctaaactgatgtcgcgtatcagttcatctttaccaatccttggcctatctcgccatgacacaacactggcgaagatggctctgtaccgtggtgtattaccgatttacttcgactcaacgatctatccagccgatgagctcgcgcaaaaagcattggaatcattaaccaaagcgggttacttacacagcggtgacttagtgttaatgaccaaaggtgatgcgatggaaaccatcggtggcactaacacttgtaaagtgctaatcgtcgcttaat

SEQ ID NO: 249355 - DNA, 1438 bp, Unknown
  Bacterial polypeptide expressing nucleotide sequence isolated from the Sargasso Sea
aatgaaacgtaacagaaaagcaaaaattttagcaacattaggcccttcttcatcctctagagaaattattgaagaaatgtttattgctggttgtgatgtttttagattaaatttttctcatgataccatagaaaatcatcgtaataatttagaaattattagagatttagaaaagaaatataatcattcaacttgtatattagcagatttacagggacctaaattaagaattggtgaatttaaaaataaagaagaaaaattaaaaaagggtgatcattttcagttagatttaaaaaatgaattaggtagtgaaaaaagagtaaattttcctcatgaaaatttatatgagtttcttactcctaatacaaatcttttaattgatgatggaaaaataaaattacaaattattgatcaaaaaaaagattctttaattacagaagttataaatgaaggtcttatctctaataataaaggtgtaaatattcctgatatagttttacctatagaatcattaacaaataaagataaatctgatttgcaaaaggttttagaaatgcaagtagattgggtagccctttcttttgtgcaacaagctgaagatgtaattaaattaaaagagataataaaaaacaaagcattagtaatggctaaaattgaaaagccttctgcagttaaaaatcttgatgaaattattaaaaattcagatggcataatgattgcaagaggtgatttgggagttgaaatgccaactgagaaagttcctattgttcaaaaaaatataattaaaagatgtagacattttggcaagccagtggttgttgctactcaaatgttggaaagtatgattactaacctaactccaacaagagctgaggcttcagatgtggctaacgcaatctatgatggaaccgatgctgtaatgctatcaggcgaatcagcagttggtaataatccaattgaaacaataaatgtaatgaatagtattattgaaagtgtagaacaagacaaggataactttgatttagatattgatgagataaatataaaaagaaaagtagacaatacagatgcaataacaaatgcagcttattatattgcaagaaatgcaggtgctaaggcaataattactttttctgttagtggtaaaacaactatgagaatggcaaaagaacgtgctcctgtgcaaattataggtatgtcacctaatttatctactgcaagaaatttacaattagtatggggtgttaattcctgtcatggggaagatgcacaaagtgctactgaaatggtaaaaattgcttgtgcaactgcaaaagaaaaggaattagtaaaacctgacgataatgtaataattactgcaggcgtgccatttggcaacgctggaacaaccaatctacttagaatagcaaaagtaatagcaaataaagatcttacttaa

SEQ ID NO: 249356 - DNA, 1113 bp, Unknown
  Bacterial polypeptide expressing nucleotide sequence isolated from the Sargasso Sea
tttcctctgaagaaatttatgattttttaacacctaattctattttgttaataaatgatggaaggattagattacaggttattgaacaaaaaaaagacagcttaattacagaagttttaaatgatgctgaaatctcaaataacaaaggtgtaaatattccagatattattcttccaatagacgctcttaccaaaaaagataaatctgatcttatgaaggcattagatatgggagttgactgggttgcactttctttcgtgcaacaagcagaggatatacacaaattaaaaaaaattattaacaacaaagcactcgtgatggcaaaaattgaaaaaccttcagcggtaaaaaatattgatgatattataaatgctgcagatggtattatgatagctagaggtgatttgggtgttgaaatgccaacagaacaagttcctatagttcaaaaaaatattattaaaagatgtagacactttggtaagccagttgttgttgctacacaaatgcttgaaagtatgattgaaaatcttgttccaactagagctgaagcatctgatgttgctaatgctatttacgacggagcagatgctgtaatgttatctggtgagtctgctgttggagcacatccaatagaagtagtaagaactatgaataaaataatagaaaatgttgagaatgataaaaataattatgatttacaaattattcaagaaaatattgatgatgttgataatacagatgcaataactttagcagcttactcaattgcaaaaaaatcagatgcaaaagcaataattacattttctgtaagtggaagaacaacgactagaatggctagagaaagagcaccagttcaaattgttggtttatctccaaatattaatactacaagaaaaatgcaattatactggggtgtaaactcctgtcatactcaagaagatgctcaaaatgcacaagatatggttaatattgcatgttcaattgcaaaaaataaaaaattagtaaaaccaggagataacgtagttatctcggctggtgttccatttggaagtgctggtactactaatctgcttagattagctgaaataattgctgataaagatcttaagtaag

SEQ ID NO: 249357 - DNA, 1426 bp, Unknown
  Bacterial polypeptide expressing nucleotide sequence isolated from the Sargasso Sea
atggatttacaaaaaaccaaaattgtttgtactataggtccttcttctgactcaattgacacgcttatagacctaattaaatcaggtatgaatgtagcaagaattaatctttcgcatggtagtgaagaagatcatattaagatgatttcaaatatcagaaaagcttctgataaaatggattcttcaataccaattcttgccgatttacctggtccaaaatacagagtaggaacaatagatagtgacttcttagaattaaaagtaaatgaagaaatatcatttgaatgtagtgaacaaaatgataatgaaaatctaataatttggcctcctggaattcacaatgatgttaaggttggagcgatcttacttattgatgatggagcagttgaattagaagttattgaaataaaaaatagcctaataaggaccaaagtaaatctctcaggaaaaataagcagtaataaagctgttgtagctagagggtttccctcaatgctcgattattttaccgaagaaactataagtgcactaaattttgttatatcaaatgacatagattatattggtttatcatacgtaagaaatgctgaagatatagtgaaagtcaagaagcaattaaaaaatagacaactaaaaataatatctaaaattgaacttcaaactgctttagataacttagatgaaataattcataactcagattctattatggttgctagaggagatttaggtgttcatttacctatatctcaggtacctgctgctcaaaaatttataatttcttcttgtaacaaaaaaggtaaagaagtaataacagctacacaaatgttagaatctatgacagaaaatcctcaaccaacaagagctgaatcaactgatgttcataatgcagttttagatggatctgacgctataatgctttctggagaaacttcaatcggaaagtatccaaatagagccgtagagtttatgagagaaatatcttcaattgcagaaaatgatattgaccatattgatcttagaagtaaaagggtatcttatttagattctaaaaattctaatcaaattgacgaactaatagcccatggtgctgccaatatagctgaacaacttgatgcaaaattaattttggcatttactgaatcaggatctactgcagctagagttgctgcatacagaccttctcagccagtcattgcgatttctcctgataaacatgctgggataaatttaggattaaggtggggagtaaacactattagtgtagatagctttgatcatattgaaaaaatgttttcatactctgaacaattagtacaaaaagaaaatttagcttcttctggtgacacaattgtagtagtcgcagggcttcctatagggtttaaaggaaatacaaacttaattagagttataacaataaactaaa

SEQ ID NO: 249358 - DNA, 1267 bp, Unknown
  Bacterial polypeptide expressing nucleotide sequence isolated from the Sargasso Sea
tatgtcgaatattgatttaaaaagaagaacaaaaattgtagctactataggtcctgcaactcagtctcaagagataattacagatttaataaaagctggagttacaacattcagattaaatttctcacatggagatcataaagatcatgcagagagaattaaaactattagggaagtatcaaaaaaattagccatagatattggtattttacaagatcttcaaggtcctaaaattagattagggcgattcaatgatggtccagtcaaagttcaaaaaggagctaaattcacactaacctccaacgaagtcgaatgtacaaatactattgcgaatgtcacctacgaaaaactttctcaagaagttagtgtagggaaaagaatattattagatgatggtaaaattgaaatggttgtagaaaaagtagacataaaaaataatcttttagaatgtttggtgactgtaggcggggttctttcaaataataaaggtgtaaatttcccagatgttcaattatcagtaaaagctttaacagacaaagataaagaggatttaaagttcggcttatctcaaggtgttgactggatagctctaagtttcgtaagaaatccatccgatataaatgagataaaagatttaataaacaaaaatggtcattcaactccagtaatcgcaaaaatagaaaaatttgaagcaattgaccaaattgatactgtattaccattatgtgatggtgttatggttgccagaggagatttgggtgtagaaatgccagctgaagaggttcctcttttacaaaaggaattaataagaaaagctaactcattaggcataccaataatcacagcgactcaaatgctggattctatggcttcaaatccaagaccaactagggcagaagtaagcgatgtagccaatgcaatacttgatggaaccgatgccgtaatgctttcaaacgagactgcagttggtgattacccggtagaagcagtacaaacgatggcaactatagctataagaattgaaagggattatccacttaaagcaatagagagtcacttacctagtactatcccaaatgctattagtgctgctgttagtaatatagctagacaactagatgcaggagcaataattcctttaacaaaatcaggttctactgctagaaatgtaagcaaattcagaccaccaacacctattttagcgactactacagagaggagtgtggcgagaagattgcaactagtgtggggtgttactcccatagta

SEQ ID NO: 249359 - DNA, 1876 bp, Unknown
  Bacterial polypeptide expressing nucleotide sequence isolated from the Sargasso Sea
gctgttctggaatcgcgggcttaacgtggcgacgcgctccccctcggcgaagtctgcaaaagcgcgcggcggcaagccgcgcaataccgcagcagcaacggcaggggagcgcgaagcgcgctccgccgccccggcagcggtgaccacccagcaggaagaatccgggtcgcccctcgcgctcgcggagttgaccactgccggcgaggcagcggagttgtccaccggacaatccgctcactcagcggcagaactcccggacgcagaggtcgcacccgcacccccaccggcaccccccgtgctggtgtcgaacaccgcttcaccccataaagcgacgctggtttcaaccggcgcgcagccccccgtagcacccttcggtgcgcagcctccgcatccgactcgcagcgctcattccagcgatcccatccagacgaggagactcatgcatcgcgctaccaagattgtcgctaccatcggaccggcttccagtacgccggaaatcctgctgcaaatgattcgggcagggttggacgtggtgcggctcaatttctcgcacggcaccgccgacgaccaccgccagcgcgccgaattcgtgcgcgaggcggcccgccaggccggccgtgaagttgccatcatggctgacctgcaaggcccgaagattcgggtcggcaaattcgaaaacggcaagaccacgctcgttcccggcaactcgttcatcctcgacgccgagtgcgaactcggcaacgacgagcgcgtcggtctcgactacaaggatctgccgcgcgatctgaaaccgggcgacgtgctgttgctgaacgacggtctgatcgtgctcgacgtcgtgcgcgtgctcggcagcgagatccacactaccgtgaaggtcggcggcgatctgtcgaacaacaagggcatcaaccgccagggcggcggcctgacggcaccggccctgacggccaaagatatggaagacatccgcacggcgatgtcgctcggcgtggattatgtcgcggtgtcgttccccaagaacgccaccgacatggaaatggcccgtcagctcgcgaacatcgcgggcgcgccctacggcatcaagccgaagatgatcgcgaagatcgagcgcgcggaagcgattccggcgctgcaaggcatcctcgacgcatcggacggcatcatggtggcgcgcggcgacttggccgtggaagtggggaatgccgcagttcccgcgctgcaaaagcgcatgattcgtatggcgcgtgaatcgaacaagttcgtgatcaccgcgacccagatgatggaatcgatgatctacgcgccggtgccgacccgcgcggaagtgtcggacgttgccaacgcggtgctcgacggcaccgacgcggtaatgctgtcggccgaatccgccgcgggcaagtacccggtgcagactatcgagacgatggcggcgatctgcctcgaagccgagaagtcggagcagtcggagctggacaaggatttcctcgaccgcacgttcacgcggatcgaccagtcgatcgccatgggcgcgctgttcacggcgttccatctcggtgcgaaggcgattgtcgcgttgaccgagtcgggatcgaccgcgctgtggatgtcgcgtcactggacgcatgtgccgattttcgcgctcacgccgcgtgtcggcagcgagcgggcaatggcgatttatcgcaatgtcacgtcgctgcatctggacaccagcaccgatcgcgacacggccttgcagcaggcgctggaaaccgtggtcagcaagggctacgcgtcgcgcggcgatatggtggtgctgaccgtcggcgagccgatgggtcaggcgggcggcacgaatacgctgaagatcgtgcgcgtcggcgagccgtattga

SEQ ID NO: 249360 - DNA, 1441 bp, Unknown
  Bacterial polypeptide expressing nucleotide sequence isolated from the Sargasso Sea
aatgaaacgtaatagaaaagctaaaattttagcaactttgggccctgcatcatcctctagtgatataattgaaaacatttttaaagcaggatgtgatgtatttagacttaatttctctcatggatctgttgaaactcatcgtcaaaatctagaaagtataagaaatttagaagaaaaatatgatcatgccacatgtgttttagctgatttacaaggccctaaactgcgagttggtgattttaaaaatacacaagaagagcttaaaaaaggacaaaaatttatcttagatacaaatgcagcattaggggatgacaaaagagttaattttcctcattcagaaatctatgaacacttaacacctaatagtattttattaataaatgatggaaggataagacttcaagttttagaacaacataaagatcaattaattactgaagttttaaatgatggaattatttctaataataaaggggtaaatattcctgatgtgatactacctatagattctcttactaataaagacagagcagatttacaaaaagctcttgaaatgaatgttgattgggttgctctttcatttgttcaacaagctgatgatattattaagttaaaaaaaattattgatggaaaagctctcataatggccaaaatagaaaaaccatcttctgttaaaaatattgatgaaattattaaagtagctgatggaattatgattgcaagaggtgatcttggtgtggagatgccaactgaaaaagttccaatagttcaaaaaaatattatcaaaagatgtcgtcattttggaaaaccagtagtggttgcaacacaaatgttagagagtatgatctcaaatttagttccaacaagagctgaagcttctgatgttgccaatgccatatatgacggaactgatgcggtgatgttatcaggtgaatcagcagtgggagattttccaatagaatcagtatctacaatgaataatattattgaaaatgtagaaaatgataaaaataattttaatttaacagttgagaatatagtttctgatagaaaagttgataacacggatgcaattacgaatgcagcttattcaattgctaataacgcaggtgcaaaagcaataataactttttctgttagtggaaaaactacaatgagaatggctagggaaagagcgcctgttcaaatcataggactttctccaaatattaacactgcaagaaaaatgcaaatcatatggggtgttaattcttgctattcaactaaagatgcagctaatacaactgaaatggtaaatattgcatgtagtttagttaaaaataaaaacttagttaaggcagatgataatgtaattattactgcaggtgttccatttggaaatgctggttcaacaaatttattaagaatagctagaataattgatgataaagatcttacttaa

SEQ ID NO: 249361 - DNA, 1438 bp, Unknown
  Bacterial polypeptide expressing nucleotide sequence isolated from the Sargasso Sea
aatgaaattaagaaatcgaaaagctaaaattgttgctactttaggacctgcttgtgaaactgaaaaaggaatcgaagaattatttttatcaggtgctgatgtatttcgtctaaattttagtcatggcgatcatgaggatcataaaaaaaaagttaagattattcgtgatttagaaaaaaaacatgaccgctatatttgtatattaggagatcttcagggtcctaaattcagagttggtaggtttttaaatgttaaagaacaattaaagaaaaaccaaatattcacatttgatcaaaataaaaaagatggtgatagttctcgtgtttacttacctcataaagaaatttttaaatctatttctattggacaaaggcttttagttaatgacggtaaagtaagattaaaagtaaaatcaaaatcttcatctgcaataaagtgtgttgttaccgacggtggcgaaatttcaaataataaaggtttaaatataccagatacaaaacttgatttaaaaattattacaccaaaagataaaaaagatcttgagcttgcaattaagcttgatgttgattggattgctctttcatttattcaaactactaaagacttagttacagcaaaaaaactcattcctgcaaaatttaaagtcatggttaaagtagaaaaaccatctgctatggaagaaattgagtcgataactgagaattgtgatggaataatggtagctagaggagacttaggtgtggaaacaaatcctgaagatgttcctattcaccaaagaacaatggttgcggcttgtagaaaatttggaaagccatgtattgttgcaactcaaatgctagaaagtatgattgactcaccaacaccaacgcgagctgaagcctctgatgttgcaacagcggtattccaaggtgtcgatgctgtcatgttgtctgcagagtctgcagcaggtaattatccaaaagagtcagtagaaatgatggataaaattataaagcgagttgagagtgatcctaaatatttagctaatattcaaaactacaatttaaatgtagtaaagacatctactgaggctatagcaacagctgcacttgaagtggcaaatatagctgaatgcaattgtattgctaccttctctcaaacaggaagatctgttttaagagttgctagaatgagacctgatgtaactttaataggattgacaactaacagaaaagtagctcgtcaaaatatcttgacttggggtacttttatggacgtagttgatgagatttcatcatcctcagaaatggtagatcgcgcttgtaaaatagcaaaagtaagaaaaatattaaaacatggagataaaataatcatcaccgcgggtgttccttttggaaaagttggcacaactaatactctaagaatagcaaaaataatttctgagagtaaattaacttaa

SEQ ID NO: 249362 - DNA, 1174 bp, Unknown
  Bacterial polypeptide expressing nucleotide sequence isolated from the Sargasso Sea
aaaaggagatgtttttattcttgatctagataacgaagcaggttcaaaaaagagagtaaattttccccatccagaaatatatgaacatttaacaccaaatactataattcttataaatgatggaagaattcgattacaaatcattgaacaaaaaaatgactatttaaaaacagaagtattaaataatggaattatttctaataacaaaggtgttaatattcctgatgtaattttacctattgattcaataacaacaaaagataagtctgatttaatgaaagctctcgaaatgaacgtcgattggatagcactttcttttgttcaacaactagatgacgtaattaaactaaaaaaactagttaataataaagcattaataatggcaaagattgaaaaaccatctgcagtaaaaaatattgatcaaattattgaagcatcagatgggattatgattgcaagaggggatttaggtgttgagatgcatgcagaaaagatacctattgttcaaaaaaatattattaaaagatgtaggaattttggaaaaccagtagttgtagcaactcaaatgttagaaagcatgataaacaatttagttccttcaagggcagaggcttctgatgttgcaaatgctatttatgatggaactgacgctgtaatgttatcaggagagtcagctataggaaattatcctattcaatcaattactactatgaacaatattattgaaaatgttgaaaaagataaaaataattttgatcttgaatttgaagacaaagatttaaaccataaaattgataacactgatgcaataacaaatgctgcatattcaatagcaaagaatgctggtgcaaaagcaattattactttttcagttagtggaaaaacaactatacgtatggctaaagaaagagctccagttcaaataattggtctttctccaaatattaaaacagcaagaaaaatgcagatactttggggggtaaattcctgtcattctgaagattcagcaaatgcaaccgaaatggttaacattgcatgtactactgcaaaaaataaagaactagttggtgcagatgataaagttatcattacagcaggagtgccttttgggaatgctggatcaacaaatctacttcgaatagcaaaaataatttctaaagaaaaccttaactaa

SEQ ID NO: 249363 - DNA, 1438 bp, Unknown
  Bacterial polypeptide expressing nucleotide sequence isolated from the Sargasso Sea
atgaaacgtaacagaaaagctaaaattttagctacgctaggtcctgcatcatcagataaaaaaataatagaagacttatttattgctggatgtgatgtttttagattaaatttttcacatggcgatttagaaactcatagaaaaaattatgaaaatattagatctcttgaagaaaaacataatcatgcgtcatgcatattagctgacttacaaggacccaaattaagagtaggcacatttaagaatacaaaagaaaatttagtcaaaggtcaaagttttgtattagatctttctaatgagcctggagataataatagggttaactttcctcatgaagaaatttatgattttttaacacctaattctattttattagtaaatgatggaagaataagattacaaattgttgaacaaaaaaaagatagtttaattacagaagttttaaatgatgctgaaatctcaaataacaaaggtgtaaatatacctgatgtaattcttcctatagacgcccttaccaaaaaagataaatctgatcttatgaaggcattagatatgggagttgattgggttgcactttctttcgtacaacaagcagaggatatacacaaactaaaaaaaataattaacaataaagcactcgtgatggcaaaaattgaaaagccttcagcagtaaaaaatattgatgatattataaatgctgcagatggaattatgatagctagaggtgatttgggtgttgaaatgccaacagaacaagttccgatagttcaaaaaaatattattaaaagatgtaggcactttggtaagccagttgttgttgctacacaaatgcttgaaagtatgattgaaaatcttgtgccaacgagagctgaagcatctgatgttgctaatgctatttacgacggaacagatgctgtaatgttatctggtgagtctgctgttggagcacatccaatagaagtagtaagaactatgaataaaataatagaaaatgttgagaatgataaaaataattatgatttacaaattactaaagaaaatattgatgatgttgataatacagatgcaataactttagcagcttactcaattgcaaaaaaatcagatgcaaaagcaataattacattttctgtaagtggaagaacaacgactagaatggctagggaaagagcaccagttcaaattgttggtttatctccaaatattaatactacaagaaaaatgcaattatactggggtgtaaactcctgtcatactcaagaagatgctcaaaatgcacaagatatggttaatatcgcttgttcgattgcaaaaaataaaaaattagtacagccaggagataatgtggttatttcggctggtgttccgtttggaagcgctggaactactaatctacttagattagctgaaataattgctgataaagatcttaagtaag

SEQ ID NO: 249364 - DNA, 1426 bp, Unknown
  Bacterial polypeptide expressing nucleotide sequence isolated from the Sargasso Sea
aatgaaactcaataaaaccaagattattgcaacgctggggccttcttgctcatcaaaaacaatgttaaataaacttattgtttctggagtagacgtctttaggattaatttttcacatgcagaccataaagaagttgaaagaattgttaacgatattaaagcgttaaggataaaacggaatgaacatgtttctattttaggagatcttcaggggccaaaaataagacttggtaatgttgttcctgaaacaattttacaaaaaggtgataacatagttttcacaacaaggaaaattaaaaatggtaactccaacagggtaacaattaactatgcttcattcccaaaagacgtaaagagaggtgagactgtacttgtggatgatggaaaaattattttaaaggttgaaaaaaccgatagagatactagtgtaaatcttattgttattcagggcgggctgttaagttccaataaaggcgttaatctgcccagcaccaaaatatctctgcctgccctaactccaaaggatattaaagatgcgaaatttgcggcaaagcttggttttgactgggttgctctttcttttgttagatcaaaaaatgatgtgcttcaactaagagaaattcttgacaaatcttctaaagaacttataccaattatatctaaaattgaaaaaccacaggcaattaagaaaatggatcaaatattaaaagtgtctaatggattaatggtggccaggggtgatttggggatagaaattcctgccgaagaagttccattatatcaaaagattttagttaaaaaagctaatgaggcacgaaaacctattataatagcaactcaaatgatggaatcaatgattgacaacttaactccatctagagcagaggtaaatgatgtggctaactcagtaatggatggtgctgattgcataatgttgtctggagaaacgtctataggtaaatatccttgtgaggttgtaaaaaaagttggaactattatctcgagtgttgaagacacgcaaccagttaaaaataagtttacattacccaagttaaaatcaaacagattaattactaaaactatctgtcgtcatgctgcattaattgcaaatgaaattaaagcttctgctgtttgtactttaactcacagcggatacactggctggcagatttcatcctggagacctaattgtttagtgctggtttttacgtcaaataagcaaattctttctcaattaaacttgctttggggggttaaatgtatttactataataagtttcaaagcactgataaaacagttgaagatgttaatactcttgcaataaaaaacagatatgtgagaagaggcgatgttgttgtaaacttagcttcaatgccaattaaagataaagggcaggtaaacacgttaagaattaccaaactttaa

SEQ ID NO: 249365 - DNA, 973 bp, Unknown
  Bacterial polypeptide expressing nucleotide sequence isolated from the Sargasso Sea
aatgaaactcaataaaaccaagattatcgctacactgggaccagcttgttcctccaaaacaatgttaagtaagctgattgtttcaggtgtagatgtgtttagaataaacttttcacatgcagaccacaaagaggtagaaagaattgtaagtgatattaaagatttaagaacaaagcataacaaacatgtttcagttttgggtgatcttcaagggcctaaaataagacttggcaatgttcttcccgaaacgtatttaaaaaaaggagataatatcactttttctacagctaaaattaagaatggtaactccgataatgtaacaattaattatgcctcattcccaaaagacgtaaaaagaggtgaaactatccttgtggacgatggaaaaattattttaaaagttgaaaaaactgacagagtttcaaccgttgatcttattgttgtacaaggtggtttgctaagctcgaacaaaggtgttaaccttcctagtaccaagatatctttaccagctttaacgccaaaggatataaaggatgctaaatttgctgcaaggctggggcttgactgggttgccctctcttttgtaagatcaaaaaatgatgtgcttcaattaagagaaattcttgataaatcatcaaaagaggttataccaattatatcaaaaatcgaaaaacctcaagcaataaataaaatggatcagatactaaaagtatccgatgggttgatggtggccagaggtgatttagggatagaaattcctgcagaagaagttcctttgtatcaaaagattttagttaaaaaagctaatgaagcaagaaagcctattattatagcaactcaaatgatggaatcaatgattgacaacttaactccatccagagcggaagttaatgatgttgctaattcggtaatggatggtgctgattgcataatgctttccggagaaacatctgtaggcaaacacccttgcgaa

SEQ ID NO: 249366 - DNA, 1021 bp, Unknown
  Bacterial polypeptide expressing nucleotide sequence isolated from the Sargasso Sea
catgacgcttcccccccacgcccccatccatgaccccattcgccgcaccaagatcgtcgccaccctgggcccggccagcgaccgcgagggcgtgctggaggccatgatcgcggccggcgtcgacgtggtgcgcctcaacttctcccacggctcccccgacgaccaccgccagcgcctgacccgggtgcgcgagatcgccgatcgcctgggccgcagcgtcgccgccctcggcgacctccaggggcccaagatccgcatcgcccgcttcgccgagggcgccgtcgagctcgccgagggtgcccccttcgtgctcgacatggccctcgacggcaacgccggcgatgcgactcgggtcggctgcgactaccagcagctgatcgacgatgtcgccccgggcgaccgcttgctgctcgacgacggccgggtggtgctcgacgtcaccgccgtcgaggggcgcgaggtccacaccaccgtggtggtaggcggcaggctctccaacaacaagggcatcaacaagcagggcggcggcctctcggctccggccctcaccgacaaggaccgcgccgacctcgccaccgccgtggcgatcggcgtcgactacctggcggtgtcgtttccgcgcagcgccgccgacatggccgaggcccgggcgctgctcggcgaggccgggcgcgagatcggcctggtggccaagctggagcgcgccgaggccgtggcctgtgaggcgaccctggacggcatcatcgaggcctctgaagcggtgatggtggcccgcggcgatctcggcgtggagatcggcgacgcccagctgatcggcatgcagaagcgcatcatcaagcgcgcccgcaccctcaatcgggcggtgatcaccgccacccagatgatggagtcgatgatcgaagcgccgctgcccacccgggccgaggtgttcgacgtggccaacgctgtgctcgacggcaccgacgcggtgatgctctccgccgagaccgccgccgggcgcttcccggtgagaccatcgagg

SEQ ID NO: 249367 - DNA, 1408 bp, Unknown
  Bacterial polypeptide expressing nucleotide sequence isolated from the Sargasso Sea
tatgttaagtacaaaaattgtttgcaccataggtccagcaagtgattcccctgaaatattagaaaagctagctgacgcaggaatgaatgtcgctcgattaaatttctcccatggtacacataattctcacaaaaaaattattaagctaatacatgaattgaaccgaaacagaaaattccctattgcaattatgcttgatacacagggtccagaaatcaggacaggcaatgaaaccagtgttcttaagtcaaaagagatagttaccgttagctgcccaccctttaaagagaatgaaggtaatattcatgtaaattatgctgctttaaaaagtgatctaaaaccaggcaactatatttctttagacagtggtttggtaaaattaaaggttattggaaaacataaaaaaggcctaaagtgtaaggttatagacggaggcatagtaaatggtcatagacatgtgaatttaccaggtactgtagtaaaacttccaggtataactgaaagtgacaagaaagatatactttttggtataaagcataaagttaattttattgccctttcttttgttcgtaatgctgaaacaattaaggaagtaagagaactattgggtaaaaatgcagagcatacagaaattatagccaaagttgagaatctggaaggtgtcgaaagacttgaagaaatagttaaagaagctgatggagtcatggttgcacgaggtgatttaggaatagaaatagagttagaagaagttccgcagattcaaagaagaatcgcatttttgtgtgccaaatatggaaagcgttcaattgttgcaacacatatgctggaatcaatgatcgaacatcctgtaccaacaagagcagaggttacagatgtcgcaaatgcaatatttgaagactcagatgcaattatgctgtctggagaaacttctattggagattatcctgttcgttctgtagaaactttgaaacgtatagcaaaacgtacagaaatatttccaggtgtaaatttttctaaaaatttgattatggaaaagaatgggcaacatcttgctgcatctgcaatccaaattgcttcagatttaaaaattagagcagctgttgtaatcactcgcaatggtcgaggtgcaagatatctttcaaatcttagaccacacggaattattatttactcatttactgaaaatactgatgttctaacttcaaatgtaatgtatagaggggtttatccttttcttctaaagctaaagaagaaccctgaagatactattcaagatgcactgaagatgctaaataatatcggaaatttttctgataatgagcaagtaattgttctggccaacattctaacaggtgaaggctttaatacttctctgcaagttcgaacgataccttctgatgacctatag

SEQ ID NO: 249368 - DNA, 1081 bp, Unknown
  Bacterial polypeptide expressing nucleotide sequence isolated from the Sargasso Sea
catgcgaaagaccaaaatcatcgccaccctgggcccggccagctcatccgccaccatggtggagcagttgatccaggcgggaaccaatgtattcaggctgaacttctcccacggcagtccggagcaacacctggccctggcggccaagatccgggcctgcgccgtccgcctcgatcgcgagataggcatcctcgccgacctgcagggccccaagatccgcatcgccagctttgccgacggcagcatccggctgcaaccgggcgaccccttcaccatcgatgccggcctggacagccacctgggcgatcaatcgcgggtcggtaccgactatccggcgctggccggcgaactgcagacgggaaacatcgtgctgctggatgacggccgcatccagctctgtgtggaacaggtgatcgacgagcgcatcgaaacccgggtgctggtcggcggtaccctgtccagccgcaagggcatcaacgtgctgggcggcggtctgagcgcgccggccctgaccgacaaggacaaggccgacatcctgacggcccgcctgctcgaggccgactatatcgccgtctcgtttccgcgcagcgccgccgatctcgaagaagccagaaccctcattcgtgccagcggtagccgggcggccatcgtggccaaggtggaacgggcggaggtggtggcgtcagtggccgccatggatgagctgattcacgccgccgacctcatcatggtggcgcgtggggatctgggggtcgagattggcgatgccagactgcccggcgtgcagaagaggttgatccggcgctgccgggcgctcggccgcccggtcatcaccgctacccagatgatggagtccatgattgccagccccatgcccacccgggccgaggtcatggatgtggccaacgccgtcatggatggcagcgatgcggtgatgctgtcggccgagtcggcaaccggccgctatccggtggaagcggtcgccgccatggcccgcatcgcgctggccgccgaacaggagatggaaccggcagggcatggcctcgcggccagccacggggagctggccaggttggcctga

SEQ ID NO: 249369 - DNA, 1708 bp, Unknown
  Bacterial polypeptide expressing nucleotide sequence isolated from the Sargasso Sea
tttaattaaagctggagtaacaacattcagattaaatttctcacatggagatcataaagatcatgctgagagaataaaaaccataagggaagtatcaaaaaagttagatattgatattggaatattgcaagatcttcaaggacctaaaatacgattagggcgatttaaagatgggccagtaaaagttaaaaaaggtgataaattcacactaacatcagatgaagtcgaatgtacaaatactattgcgaatgtaacctacgacaaactttctcaagaagttagcgaagggaaaagaatacttttagatgatggaaaaatagaaatgattgtagaaaaagtagatacaaaagctaataatttggagtgcatggtaactgtaggaggggttctttcaaacaataaaggtgttaattttccagatgttcaattatcagtaaaagcattaacagaaaaagataaaaaggatttaaaatttggtttatcagaaggagttgattggatagcactaagttttgtaagaaatccttccgacataaatgagataaaagatttaataaacaaaaatggatattcaacccctgtagttgcaaaaattgaaaaatttgaagcaattgatcagatcgatacagtattacccttatgtgatggagttatggttgctagaggtgatttgggagtagaaatgcctgctgaagaagttccgcttttacaaaaagagttaataagaaaagctaattcattaggtataccaataattacagcgactcaaatgctagattctatggcctctaacccaagacctactagagccgaagttagtgatgttgcaaatgcaattctcgatggtacagatgcagtaatgctttcaaacgaaactgcagttggcgattatcctgtagaggcagttgaaacgatggcaaccatagcaagaagaattgaaagggattatccacttaaggctattgaaagccacttacccagtacgatcccaaatgctattagcgcagcagtaagtaatatagctagacaacttgatgcaggagctataattcctttaactaaatcaggttctaccgctcgaaatgtaagtaagttcagacctccaacgcctatcttggcaactactacagaaagaagtgtagcgagaagattgcaactcgtttggggagttactccaatagtagttaaaaatgatgaaagaacagcaaaaacttttagtttagctatgcaaattgctcaagagatggggatcctgaatcaaggagatttagtcgttcaaaccgcaggtacattaactggaattagtggctctacagatttaataaaagtcggtttagtaagaaagatcgtatcaagaggaatttcaataggggaaatcggtgttacaggtaaagcaagaataattaaaaataatcttgatatatctttaatttgcccaggagaaatattatttgtaccgaaggaattaatgaaaaatattccactgagtaaaaatattgccggcattgttacgaaccaaaatgtaaatgatgtttatgccttttttaacaaaaataataaaaagatttctacaatttgtaatttagaaaatatggatagtcatcaaatcagtaatggcgatcttattacactccagcttaatgaaggtgttatatacatgggacaaattgaagatgatgatgcaatagataaatataaatatgtctag

SEQ ID NO: 249370 - DNA, 1273 bp, Unknown
  Bacterial polypeptide expressing nucleotide sequence isolated from the Sargasso Sea
tagattagctgctagaaacaaaaaaatttatttacctattcttgcagatctacctggtcctaaatatagagttggagaaatatcaaatggttcaatggaagttgaaatagatcaagaaatcatttttgattgtaatagtgaaaatacatcacagaagagtatcaatatatggcctaatggattgtcaaatgacattgaggaaggtgcaatattaatgattgatgatggagctgtagaattagaggttatcaatatatcagaaactataatcgaaacaaaagttagattatcagggaaaattagcagtaataaagcagttgttgcaagaggatttccatcaatgttagactactttacagaagaaactgaaagtgcactaagttttgtagatacaaatgatattgattatattggactatcttacgtaagaaattctgaagatataaagagtgtaaaaaagaagctctcaaataaaaaactaagaattatttctaaaattgaattacagaaagctctggataatttagatgaaattattgataattctgatgttgtaatggtggcaagaggagatttgggggtccacttacctatttcacaagttccatctgctcagaaatttattattgatttggctaacaaaaagggtaaggaagttattactgcaacccaaatgttagaatcaatgacagaaaaccctcaacctacaagagctgaatctactgatgttcataatgcagttttagatggcacagatgcgataatgctttcaggtgaaacatctgtgggaaattacccaattagagccgtagaatttatgagagaaatttctgatatagctgaaaaagaaatagatcatttagatataagaaatactagattggaaaatgttaattcatcaagttcgagaattatagatgaattaatagctcatggagctgcatcaatagcagaacaattagatgctaaattaatagtagcttttacagaatctggttcaactgctgctagagtagcttcatataggccatctcaatctgtaatcgctttatcgcctgatattagtgcagaaattaatttgggtttaagatggggggttaaaacagtcaaagttaagagttttaatgaaatagaagtaatgttcgattatgctaatgacgttgtaaaagaaatgagtcttgcatcaactggtgactcaattgtagttgtagcgggtcttccaattggagttaagggtaatacaaacttaattagagttattactatttcttaa

SEQ ID NO: 249371 - DNA, 783 bp, Unknown
  Bacterial polypeptide expressing nucleotide sequence isolated from the Sargasso Sea
aagtagaacgcgctgaagctgtagctgatgacgaaaccctggacgatattatccgcgcctctgatgccgtcatggttgcacgtggcgatttaggtgtcgaaattggcgatgctgaattagtaggccagcaaaaacgtattattgcccgatcacgtcagttaaatcgtgtggtgatcactgcgactcagatgatggagtcgatgattgaaagccctatgccaacccgtgctgaagtgatggacgtggccaacgctgtgcttgatggtacagatgcggtgatgttatccggtgaaactgccgctggtaaatatccagtggacacagtaaaagccatggcccgtgtttgtgatggtgccgagaagcacccacgtgtacaaatctctaaacaccgtatggatgtggcttttactgaaatcagtgaaactattgcgttatccgctatgtatgccgcgaaccacttaaccgggattaaagccattatctcgttaactgaatcgggctacacagccaaactgatgtcacgtattacctcgtctcagccaatttatgcattatcacgtcaccagaaaaccttaaacaaaatggctctgtaccgtggtgtgtatcctgtgttttttgacagcactcaaaatctgggtcaacaaaaagtatcagctgctgctattgaagcagtacaagaaattgctcacttaaaaagtggtgatttagtgatactgacttatggcgatatgatggaaactgttggcgcatcaaacacctgtaagatagtacaaatcaactaag

SEQ ID NO: 249372 - DNA, 1414 bp, Unknown
  Bacterial polypeptide expressing nucleotide sequence isolated from the Sargasso Sea
catgaaaaagaccaaaatcgtctgcaccatcggtcccaagaccgaatccaaagaaatgctggccaagatgctggacgccggcatgaacgtcatgcgcctgaacttctcccacggcgactacgccgagcacggtggtcgcatcagcaacctgcgcgctgtcatggccgaaaccggcaagcacgcagccattctgctggacaccaagggtccggaaatccgtaccatcaagctggaaggcggcaacgacgttgccctggtcgctggccagaccttcaccttcaccaccgaccagaccgtggttggcaacaaagacaaagtggccgtgacctatgccggtttcgccaacgacctgcgcgtcggcaaccgcatcctggttgacgatggcctgatcggtctggatgtcatcgagatcaccgagcgcgaagtcatctgtaaagtactgaacaacggcgatctgggcgagaacaagggcatcaacctgccgggcgtctccatcaagctgccggccctggccgagaaagacaagcgcgacctgatcttcggttgcgagcaaggcgttgatttcgttgccgcctccttcattcgcaagaaagaagacgtgctggaaatccgtgagcacctgaaagcccacggtggcgagaacatccagatcatctccaagatcgaaaaccaggaaggcctggacaacttcgacgagatcctggcggtctccgacggcatcatggttgcccgcggcgacatgggtgtcgaaattccggttgaagaagttatcttcgcccagaagatgatcatcgagaagtgcaacaaagctcgcaaagtggtcatcaccgccacccagatgctggactccatgatcaagaacccgcgtccgacccgcgccgaagccggcgacgtggccaacgccatcctggacggtaccgacgcagtcatgctgtccggtgagtccgccaagggcaaatacccgctggaagccgtgaccatcatggccaccatctgcgagcgtaccgatgccgtgatgccgtccaacctgtctgctgccaacgacagcaacaagctgcgcatcaccgaagcggtctgcaaaggcgcggtagagacctccgagaagctggacgccccgctgatcgtggttgccaccgaaggcggcaagtctgccaaggccatccgcaagtacttcccgaaagcctggatcctggccatcaccaccaacaagaagaccgcagcccagctggtactgaccaagggtgtggttgctcacgtggttgacagcatcgcctccaccgacgatttctatcgcatcggcaaagaagcggcgctggccagcggcatgggtctgaagggtgacgtggttgtcatggtctccggtgccctggtaccgagcggcaccaccaacaccgcttctgttcacgttctttaa

SEQ ID NO: 249373 - DNA, 1018 bp, Unknown
  Bacterial polypeptide expressing nucleotide sequence isolated from the Sargasso Sea
tgataagttagtgacagaagttttaaatgatgcagaaatttccaacaacaaaggggtaaatattccagatgttatacttccaattgatgctttaacaaataaagataaatcagatttaatgaaagctttagatatgggtgttgattgggtggcactatctttcgtgcagcaagctgaagatattcataaattaaaaaagatgattggaaacaaagcattaataatggccaaaatcgaaaaaccttctgcagttaaaaatattgatgccatagtaaatgcagctgatggcataatgattgctagaggagatcttggtgtagagatgcctactgaacaagttccgatagctcaaaaaaatattattagaagatgcagacattttggcaaaccagtgattgtcgcaactcagatgcttgaaagtatgattgataatttagtgccaacaagagccgaagcatcagatgttgcaaatgcaatttatgatggaacagatgctgtaatgctatcaggtgagtcagctgtaggagctcatccaattgaggctgtaaaaactatgaataaaattattgaaactgttgaaaatgataaaaataattatgatttgcgaattgaggacgataatattgatgatgtagataacacagatgcaataacattagctgcatactcaatcgcaaaaaaatcaaacgctaaagctattataactttttctgtaagtggaagaacaactagacgaatggcaagagagagagcacctgttcaaatagttggattatctccaaaaattgatacaactagaagaatgcaattatactggggtgtaaactcttgtcattcaaatgaagacgctcaaaacgcacaagaaatggtaaaaattgcatgcacagttgttaagaataaaaaattagttgatccaggtgatagtgttgttatttctgcaggtgtaccatttggcagtgctggaactacaaatttactaagattagccgagattattgcagataaagatcttacttaa

SEQ ID NO: 249374 - DNA, 1450 bp, Unknown
  Bacterial polypeptide expressing nucleotide sequence isolated from the Sargasso Sea
aatgaaacgtaatagaaaagctaaaatattagctaccctaggtccagcttcttcatctgaagaaataattgataaactttttgttgcaggatgcgatgtatttcgcttaaatttttctcatggatcaattgaggaccatagaaataactataaatatataagatctcttgaaaaaaaatatgatcatgcaacttgtatattagcagatttgcaaggtccaaagctaagaattggaacgtttgtccaagataaaatagaattaaaaaaaggtcaaagttttatacttgatttaaactcttctcctggaaataaagatagagttaattttcctcatgaagaaatttatgaaactatgacccctaatagtgaaattttaattgatgacggtaggattaaattacaaatcattaaacaagaaaaaaaatcacttacaactgaggtgctaaataatggtattatttcaaataataaaggtgttaatattcctggagtagttttaccaatttcatcattaacgcaaaaagataaatctgatctaaataaagctctagaaatgggtgtagattgggtagcattatcttttattcaaagcgctgaagatataaataatttaaaaaaactagttggtaataaagcatctataatggctaagatagaaaaaccctctgcagttaaaaatattgattcaatcattgaagccagtgatggattaatgatagctagaggagatttaggtgttgaaatgcctgctgaacaaatacctgtaattcaaaaaaatataattagtcgatgcagagattttggtaaacctgtagttgtggccactcaaatgttagaaagtatggtttcaaaccatacaccaacaagagctgaagcatctgatgtagcaaatgctatatatgatggaactgatgcagttatgctatctgcagagtccgcaataggtttgtttcctgaagaatcagttacaattatgaatagaataattaaaagtgtggaaacagatagcaataattttaatcttgagattaagaatcaagaaagttcatctacgaataaaaaaatcagtacaactgatgcaattacaagtgcagcttacacaatagcaaaaaacgcagaggctaaagctatagtaactttttctgtaagcggaatcacaactatgagaatgtctcgggaaagagctccggtattaattattggtctttctccaatactagaaacagctagaaaacttcaaatatcatggggggtttattccattcataccaaacaagatgctcaaaatgcaacagaaatggtaagcatagcctgtaaagctctaaaaaataaacgtttagctgaagctggtaattcaatagttatcaccgcaggagttccttttggaagtgctggatcaacaaatcttcttaggatagcagagattattgacgataaagatcttacttaa

SEQ ID NO: 249375 - DNA, 976 bp, Unknown
  Bacterial polypeptide expressing nucleotide sequence isolated from the Sargasso Sea
atgacattcactagaactaaaataatttgtaccattgggccaaatagctcagatagagctactttaaaaaaacttcatttagctggaatgaatgttgtaagaattaatatgtctcacgcaactcataaaaatgctaaagagattattaacatcattaaaaacttaaacaaaaccaaaaatagtaagttatcaaacataggcatattacttgatactcaaggtccagagataagaacaggtgatacttctcttccaattaatctcaaagtgggtgataaagttacgttaactgtgcgtgatgaggttgatgtagaaacctcatctatcaaggttaactataaaggtcttgtccatagtgttaatgttggttcaagaatttctgttgataatggattaattagttttagagttctttcaaaagaatcagataatttagtttgcaaagtaattcatggtggaaaagttggctcaaaaagacatgtaaatttgcctggcgtaagaatagatatgccctctataacttcaaaagatataaaagatatttcttttggaattaaaaataatgtagattttattgctgcttcatttgttagaaataaaaaagatctccaaatattagaggatcttcttcttaaacataaatcagagtcaaaaattattgctaaaattgaaaatcaagaaggattagataatattgatgaaatttgtgaatccgcttggggcatcatggtagcaagaggtgatttaggaattgaaaccagccttactgacctaccaaatattcaaagaaaaattatgaatacatgtgcaaaattaggcaaaagatctattgttgctactcatttgcttgaatcaatgatagaaaatccaacaccaacaagagcagaggtgactgatgtggcaaatgctgtatatgaaggtgctgatgccataatgttatctggagaaaccaagtattgggaaatatccagttgaa

SEQ ID NO: 249376 - DNA, 975 bp, Unknown
  Bacterial polypeptide expressing nucleotide sequence isolated from the Sargasso Sea
gatgttaagtacaaaaattatatgcaccattggcccagcaagtgattctcctaaaatcttagaaaaactagctgaagcaggaatgaatatcgctcggttgaatttctctcatgggacacatacttctcataagaaaattatcaagcaaattcatgaattgaaccgaagcaggcaattccctattgcaattatgcttgatacacagggaccagaaatcagaactggcaatgaaacaagtaatcttatgtcaaaagaaatagttactgttagttgcccgccctctaaagagaatgaagggaatattcatgtaaattactcagatctaaaaattaaccttaaacccgggaactatatttccatagacagtggattggtaaaattaaaagttttaggcaaacacaaaaaaggacttaagtgtgaggttatagacggtggtatagttaatggacatagacatgtgaatttaccaggtactgtagttaaacttccgggtataactgaagccgataagagagatatactatttggcatgaagcaaaaagttaattttattgcactttcttttgttagaagtcctgaaacaattcgagaggtaaggaagcttcttggaaaacatgcttcacatacagaaattattgctaaagttgaaaatcaggaaggtgtagatcgacttgaagaaattgttcaagaagctgatggagtcatggttgcacggggtgatttaggaatcgaagttgagttagaagaagttcctcagattcaaagacgaatagcttttttgtgtgcaaaatatgggaaacgctcaattgttgctacgcatatgctggaatcaatgattgagcatccagtaccaacaagagcagaggtcacagatgtcgcaaatgcagtatttgaggaatcagatgcaataatgctttccggagaaacttccattgggaaatatcctgttcgttcagtagaaactttgaaacgtat

SEQ ID NO: 249377 - DNA, 1792 bp, Unknown
  Bacterial polypeptide expressing nucleotide sequence isolated from the Sargasso Sea
tatgtcgaatattgatttaaaaagaagaacaaaaatagtagctactattggccctgcaactcaatctgaagagataattaaaaatttaattaaagctggagtaacaacattcagattaaatttctcacatggagatcataaagatcatgctgagagaataaaaaccataagggaagtatcaaaaaaattagaaatagatattggaatattgcaagatcttcaaggaccaaaaatacgattagggcgctttaaagatgggccagtaaaagttaaaaaaggcgataaattcacactgacatcaaatgaagtcgaatgtacaaatactattgctaatgtaacctatgacaaactttctcaagaagttagccatgggaaaagaatacttttagatgatggcaaaatagaaatgattgtagaaaaagttgataaaaaagctaataatttggagtgcattgtaactgtagggggggttctttcaaataataaaggtgttaattttccagatgttcaattatcagtaaaagcattaacagaaaaagataaagaggatttaaaattcggtttatctgaaggagttgattggatagcactaagtttcgtaagaaatccatccgatataaatgagataaaagatttaataaacaaaaatgggcattcaactcctgtagtcgcaaaaatagaaaaatttgaagcaattgatcagattgattcaatattacccttatgtgatggggttatggttgcaaggggtgatttgggagtagaaatgcctgctgaagaagttcctcttttacaaaaggaattaataagaaaagctaatacattaggtatcccaataattacagcgactcaaatgcttgattctatggcttctaacccaagaccaactagggccgaagttagtgatgttgcaaatgcaattctggatggtacagatgctgtaatgctttcaaacgaaactgcagttggcgattatcctgtagaggcagtagaaacgatggcaaccatagcaagaaggattgaaagggattatccacttaaggctattgaaagccacttaccaagtacgatcccaaatgctattagtgcagcagtaagtaatatagctagacaacttgatgcaggagctataatccctttaactaaatcaggttctaccgctcgaaatgtaagtaaattcagaccaccaacacctatcttggcaactactacagagagaagtgtagcgagaagattgcaacttgtttggggagttactccaatagtagtaaaaaatgatcaaagaacagcaaaaacttttagtttagctatgcaaattgctcaggagatggggatcctaaatcaaggagatttagtagtccaaactgcaggtacattaactggaattagcggctctacagatttaataaaagtcggtttagtaagaaagattgtatccagaggaatttcaataggggaagtcggtgttacaggtaaagccagaataattaaaaataatcttgatatgtccttaatttgcccaggagaaatattatttgttccgaaggaattaatgcaatatattccattgagtaaaaatattgccggcattgttacgaaccaaaatgtaaatgatgtttatgctttgttcaacaaaaataataaaaagatttctacaatttgtaatttagaaaatatcgataatcatcaaatcagtaatggcgaccttattacactccagcttaatgaaggtgttatatacatgggacaaattgaggatgatgatgctacagataaatataaatatgtctag

SEQ ID NO: 249378 - DNA, 766 bp, Unknown
  Bacterial polypeptide expressing nucleotide sequence isolated from the Sargasso Sea
gatgacatattaaaggcctctgatggagtaatggtggcaaggggagatttaggtgtagaattgcctgttcaaaatgtaccaccaatccagaaaaggctagtccgaaaatgtagagctgcagcgaagccagtaattgtagctactcagatgctagaaagtatgattgaaagtcctatgcctacccgcgcagaagtttctgatgttgcaacggctatttacgaaggctcagacgctataatgctttcagctgagtctgcggccgggcaatttccaattcaagctgttgaaacaatgaataacgttgccatcgaagttgagagtgatccaacatatacagaggtaatggaggcctctagaagagctaagagaaactcggtagcagacggaattgtttctgctgcgagggaaatagctgaaactaccgatataaaagctatctgttgctttactcaaacgggtactacagctttgttaacagcaagagagcgtccacgagtacctataattgctttatcttctgaaatagagacagccagacgactcgctttaacttggggtacaaattgtgttctctcaggaaacaagacccgttttaaggaagccgtagtaagtgctgttagagcagcgctggcagaaggcctggctaatgaaactgaccaagttgtaatcactgcaggtgttccatttaatataactggaacaactaacattctgagggttgccccttgtaacgaacgcatgatttatgcaatggatcccgagtagt

SEQ ID NO: 249379 - DNA, 683 bp, Unknown
  Bacterial polypeptide expressing nucleotide sequence isolated from the Sargasso Sea
caatgccgatgagcccgcagtgaaatcagtcgatctttctatagcgcagggagaggtcctggcgatcgttggtggatcgggcagtgggaaaacaacgacgctgaagatgatcaacagactcatcgagccaacgtccggctcagtaaaggtgatgggggaagatgtcacaaatgtcgatccggtgaatctaaggcggtcaattgggtacgcctttcagggtgttgggttgttccctcatatgactgtcggccaaaacgtcagtgtcacgctccagttacggggatggaccaaagagacgattggtgaacgtgtgaacgagttgctcgcaatggttgatctgcctgctgatgaatataaaggacgccttccatcagaactttccggtgggcagcagcaacgagtgggatttgcaagagcactcgcgtcgaatccacaagcgattttgatggacgaaccatttggtgcactcgatccaattacacgcgatgccttgcagcaagagttccgagcactccagaaaaaactcgagctgagcgtggtcctggtgacacacgatgtgtccgaggcggtgcttcttgccgatcgtattgcagtgatgcacaaaggtgaacttgcacaagttgcaactcccggggtgctgttaacctctcccgtcaataagtatgtagccctaactgattgat

SEQ ID NO: 249380 - DNA, 637 bp, Unknown
  Bacterial polypeptide expressing nucleotide sequence isolated from the Sargasso Sea
atgagttcaacttccattttaattggtatagcaggtggaactggttcaggtaaaacttccattgcaaataaattattaggagaatatgataaaggtgatattgtagtaatagagcaagatacatactatcgtgacatttcccatatatccttagaagatcggcatctacataattttgatcacccggatgctattgatattgaattatttaatcaacaactaattagtcttcttaaaggacaaatagttgaaataccaatttatgatttttctactcactcaagattaaaggatacaaaaaccgttaatccccatcgcgttatcatcgttgaaggaattttaacactacattatcatgcccttagagagttgatggatataaaaatttttgttgatactcctgatgatattcgatttattcgccgaatatcacgagatatagaaaatagaaataggaccgtggaatcagtaattgaacaatatttaaaaactgttcgcccaatgcaccagcaatttgttgaaccatcaaaatattttgctgatattattataccagaaggtagtaaaaacaaagttgctattgaccttatcaggacaaaaataaattctatcttatctaatcaaatagatcaataat

SEQ ID NO: 249381 - DNA, 913 bp, Unknown
  Bacterial polypeptide expressing nucleotide sequence isolated from the Sargasso Sea
  misc_feature (11)..(11): n is a, c, g, or t
acctaaattcntggaaaaaaaaaaaagtcttctagctctttttttattacccttttcatttatttatcaaattcttttttttataaaaaaaaaactaacgtcagtaaattcttttgaaattcctgtaatttgtgtaggaaatatatatcttggaggtactggtaaaactcctttgagtatttttttagcaaatgagttaactttacacaagaaacatccagcaataataaaaaagtactataaagatcaatcagatgagcaagactttataaaagataaatttaattctctttttttacataaaaatagaattgcagctataaaatctgcgttaaaaaaggatcacaaattaataattcttgacgatggatttcaagatttctcaattaaaaaaaatctaagtattttatgttttaatagcgaacaacttataggaaatgaaatgaccttgccatctggaccgctaagagaaaaattagactcaatcaatagagctcaaataatcatgattaacggtcgaaaaaatgttgatttcgaaaataaaatcagaacaatttcaaaaaatattaaaatctactattcaaattataatcctacaaacattgaagagtttaaaaataaaaaagtacttgcttttgctggaataggaaatccatcaaatttttttaaattattaagagataataatattaatttacaaaaagaaattgagtttccagatcattacgaatttaatagatctgaattacaaaaaatagtagacatctcaaaagaagatagtttacaaattattacaacagaaaaagattattttagaataaaaaaatataattttgagaatataaaatttttaaagttaaatttagaaatcaataataagaaagattttattaatcaattatcaaaactataa

SEQ ID NO: 249382 - DNA, 628 bp, Unknown
  Bacterial polypeptide expressing nucleotide sequence isolated from the Sargasso Sea
aatgagtttatcaccaattttaattggcatcgcaggaggaactggctcagggaaaacttccattgcaaaaaaattgttagaagaatatggaaatggtgatgttgttgttatagaacaggatgcatattatcgcgatatttctaatattactatggaagatcggcatcttcaaaactttgatcacccagatgcaattgatattgaattattcaatcaacaattaattagccttattaaaggacaaatagtcgaagtaccaatttatgatttttctactcattcaagattaaaagatacaaaaacagttcaccctcatcgtgttataatagttgaaggaattttaacattacattatacaattcttagagaattaatggatataaaagtttttgtagatacgccgaatgacatacgttttatacgtcgtatatcgagagatattgataaaaggaatagaactgtagaatcagtaattgatcaatatttgaaaactgttcgaccaatgcatgaacaatttgttgaaccttcaaaatactttgctgatattataatacctgaaggtagtaagaacaaagttgcaattgaccttattcgaacaaaaataaattctattttaaataataaatga

SEQ ID NO: 249383 - DNA, 625 bp, Unknown
  Bacterial polypeptide expressing nucleotide sequence isolated from the Sargasso Sea
atgcaatcgccactaattattgccatttctggagcttccggctctgggaagtctctttttacaaaaaatttgtttaacggcttcagtgctcaaggccgccctgttcaagtgctgcgtgaagatcactattaccgcgcacaagatcatcttcccatggagcagcgtgagaagaataactacgatcatcccaatgcgtttgaacatgagttattaaaagcacacttgcaagcattgcgtgacggtcaacccatcgactacccgcactactgctataaaacgcacactcgtttaccggaaacggagcgcctaaaccccgccccagtcatcattcttgaaggcattatgttgcttgctcgaacagacttgttacccttgtacgacgtgaaaattttcatcgacactcctcttgatatttgtttgatgcgcagaatgatgcgcgacctaaaagaacgcggtcgtagtattgaatctgtggcaaaacagtacgaagaaactgttaagcctatgtatcatcaatttatcgaacctagccgcttcactgccgacgtagtagtgacgcaaggtggcaaaaaccaaattgcattagatgtgatcaaatcacacattcagcaagcgcttctttaag

SEQ ID NO: 249384 - DNA, 640 bp, Unknown
  Bacterial polypeptide expressing nucleotide sequence isolated from the Sargasso Sea
atgaattctcagcagtgtgtcattattgcaattgctggcgcgtcagcatcgggcaagagtttaattgccaagacgatttttgacgaacttcgccgcgatttaggcacagatcagattggggtaattaacgaagacgcgtactaccgcgatcagagtcatttatccatggatgaacgtgtgttaaccaactacgaccatcccaaggcgttagaccatcagctgctatgcacgcacttgcagttgctcaagtctggcgaagctgttgatattccttgctatagctataccgaacatacgcgtatggccgaaaccgtgaaaatgacaccgaaaaaagtgatcattttagaaggcattctgctgttaacagaccctaaattacgtgaattgatggatgcgagcgtgtttatggatacgccgctggacatttgcttcctgcgccgtttaacccgcgacgtggccgagcgtggccgtacgatggaatcggtgatttcacagtacaagaagacagtgcgtcctatgttcctacaatttattgaaccttcaaaacaatacgctgatattatcgtgcctcgcggcggtaaaaaccgtatcgcgaccgatattttgaagactcgtattcaacatctactggcaaaataac

SEQ ID NO: 249385 - DNA, 646 bp, Unknown
  Bacterial polypeptide expressing nucleotide sequence isolated from the Sargasso Sea
atgtctgatactcaacattcgtgtgtgatcatcggtattgctggtgcatccgcttccggcaagagtcttatagcccaaaccatctatgaagagctggtggccgagctgggagccggtcagattggcgtgatcaccgaagattgctactaccgcgatcagacccacctgaccatggaagagcgggtcaaaaccaactatgaccaccccaacgcgctggatcacgatctgctggtccagcatctgagccagctggtgcaaggtgatgcggtcaacattccccagtactcctacaccgaacatacccgcatgagtgaagtgaccccgttcgcaccgcgtcgggtgatcattctggaagggatcctgctgctgactgacagtcgcttgcgggatctgatggatgcctccatcttcatggatacgccgctcgacatctgcctgctgcgccgcctggtgcgtgacgtgcaggagcgtggccggaccatggattcggtgctcaagcagtaccagaagacggtacgccccatgttcctgcagtttatcgagccttccaagcagtacgcggacgtgatcgtcccccgtggtggcaagaaccgcatcgcaatcgacatgctcaaggcgcgtattcgccacatgttgattggttgag

SEQ ID NO: 249386 - DNA, 640 bp, Unknown
  Bacterial polypeptide expressing nucleotide sequence isolated from the Sargasso Sea
tatgaattctcagcagtgtgtcattattgcaattgctggcgcgtcagcatcgggcaagagtttaattgccaagacgatttttgacgaacttcgccgcgatttaggcacagatcagattggggtaattaacgaagacgcgtactaccgcgatcagagtcatttatccatggatgagcgtgtgttaactaactacgaccatcccaaggcgttagaccatcagctgctatgcacacacttgcagttgctaaagtctggcgaagctgttgatatcccttgctatagctataccgaacatacgcgtatggccgaaaccgttaaaatgaccccgaaaaaagtgatcattttagagggcattctgctgttaacagaccctaaattacgtgaattgatggatgcgagcgtgtttatggatacgccgctagatatttgcttcctgcgccgtttaacccgcgatgtggccgagcgtggccgtacgatggagtcagtgatttcacagtacaagaagacagtgcgtcctatgttcctgcaatttattgaaccttctaaacaatacgctgatattatcgtgcctcgcggcggtaaaaaccgtatcgcgaccgatattttgaagactcgtattcaacatttactggcaaaataa

SEQ ID NO: 249387 - DNA, 911 bp, Unknown
  Bacterial polypeptide expressing nucleotide sequence isolated from the Sargasso Sea
cggtcagcttgtttgggactttgtcggtctttggagtggagttttagatggtttacgaattgctgctgatcagcatcgcagcacaattcaaagtattggggttgatacttggggggtcgatttttcattcgtaacaaagaatgatgcactcttatcagagcctgtgtgttatcgagattctcgtacaagaggtcttattgaagccgcacaagcgatactttctaaagaagaaacatttaacgcgacaggcctgcagttcatagaaatcaatacgctctatcagcttcttgccgtaaagagagatcgccccgaacttttcgaagcggctgatcagttgctgatgatcccagatcttgtgcactggttactttcaggacagcgttccaatgagcgaacaattgcctcgacgactcagtgctttaatcctcaaagtggccagtgggccaacgaccttttgacccagtttggaattcccacagagttatttcggcctgtttctgaaccggggcatgacattggcagtattcgatcagatattgcatctgataccgggctgggagatgtccgagtggtgctccctggttcccacgacactgcgagcgcggttgctgcagtcccggcactcgaacccccttcatcacgaccagactggtgctacatcagccttggtacatgggcgctggttggtgctgaattggaccggcctttggtgacccctgagtgtcttgctcataattttacgaacgagggtggtgtgggggggacgacaaggttgctgaaaaatctttgtggactgtggctcgtgcagcaatgccgagcgagttggcaaagatccggaaataactggaactgggatcaattgactgctttggctgctgaatctgcgccactgcaaacaataatcgattctg

SEQ ID NO: 249388 - DNA, 966 bp, Unknown
  Bacterial polypeptide expressing nucleotide sequence isolated from the Sargasso Sea
tactggttgactggaaataaatcctgtgaatatacgcatgttacgacgcaacagctttacaatccgaacaagcaggattgggattttgaaaccatggaaaccctcggaattcccgataaaattttcccggaggtcttgaagcctggaacaaaaatcgggaattaccaaaagattcccgtaatcctttctgcctgtcatgacacggctagtgcagtagtttcggtaccatcgaacacacgggattctgcattcctctcaagcggaacctggagtttgcttgggattgaattggatgaattaattctcaatgatcaggctcttgaagcgaatctcaccaacgagggaggttacggagggaccaatcgtttcctgcaaaacatcgctggattgtggcttgtgcagcaatcggtaagaacctgggccgaagagggaaactcagtgagttacgaccaaaccgttttcatggcggaatcggcatcccctttcaaagccttcattgatcctgaccttccagagtttcatcccccgggagatatgcctttgaggataagagaattctgccgtcaatcaggacaatatgttccggaaagtagggaagaaatacttcgtgtcatttatgagagtctggctctgaaataccgctattttcttgaaattttgatcaaggtctccggggtggaagtaaaaaccctgcatgtgctcggaggcggatcaaagaaccgtttgctcaatcagttctgctccaatgccatgcagatcccagttgtcgcaggtcctgccgaggcgacctccatcggtaatgccatggtccaactgatggctcttggcgaaataggaaatcacgagcaagcgaggaggatcatcgcagaatcagcggaactggaatactttgagccaactcatggaggaatctggaatgaacaatttgaaaaatataacgaggtgatcattggaacgatgaaaacg

SEQ ID NO: 249389 - DNA, 914 bp, Unknown
  Bacterial polypeptide expressing nucleotide sequence isolated from the Sargasso Sea
agatattttttacgaaaattggtatgctaatcacgtcagaaaaattgacatagactctttagcttcttgggggtttaatgcaattcgtcttcctatgcactacaacctgttcacattatccattcaagacgagcccattttgggtgaaaatacatggctaacaaaaggctttgaaatgaccgacagccttgtttcatggtgtaagcaaaataacatgtacgttattttagatttgcatgccgccccaggtggtcaaggtggaaattcaggaataagtgactacaatcctaattttccttctctatgggaagatgtcaacaatcaaaacaaaacgttctctttatggaaaaaaattgctgaacattatgtcaatgaacccaccatagctggatacgatttcttaaatgaaaccaactggaacttgggtaataatgtgttgagaaatttttacattgagttaaccgatagtgtacgatctgttgataataatcatattatttttattgaagggaattggtacgcaaatgattttagtggccttacccccccctgggatccaaatatggtctacagcccgcataaatactggtcaaaaaactttcaagcagatatccaatgggcattagatattcgcaacacatggaatgttcccatatggtttggtgaatctggtgaaaattcaaatacatggtttagaaatgccattaggttaattgaagattttgatgttggttgggcttggtggccaatgaaaaaaattgaatctatttcttgccctatgtcaataaccaaaactaccgattaccaaaatctattaaactattggagtaacggcaccaatcaacctacttcagctagtgctataaatacattatatcaattaactgaagatttaaaacttgaaaattgccgtt

SEQ ID NO: 249390 - DNA, 535 bp, Unknown
  Bacterial polypeptide expressing nucleotide sequence isolated from the Sargasso Sea
aaagctttaatggaattatatgaatggggatggattaaaaaaattccaagaattgcagtaattaatgcaaatggtgcaaatacactttatcaactctataatggaatctttgaagaagaaaaactaagatggaatgaaggtacaccaaattttggattaattgagagattttacaataaaatgaatcaagatgaaactctgaaaccaaaaacaaaggctactgcaattcaaattggaaaaccatccaacattgcaaaaggattacgtgcactagagtttacagatggcatagtagaagaagtatcagataaagaaatgttagatgggatgtccgtagtaggattaaatggatttgattgtgaaatggcatctggggcatcagtagctggaataaaaaaattaagagataaagaaattattaaaaaagacgacaaggtaataggaattctaacaggaaggcaaaaagaaccgttattaccaattgactatcataatgatccagcaaatagatttgcaagaccacctaaaatctagg

SEQ ID NO: 249391 - DNA, 893 bp, Unknown
  Bacterial polypeptide expressing nucleotide sequence isolated from the Sargasso Sea
aaaaataatttgtgcatcaactggaaatacatctgcatctgcaggtatgtttgctgctaatgaaaacatggaatgtgatgtttacattccacatggacaaattgctcctggaaaattaagtcaagcatatcaatttggaacacaaatggttcaagttgatggtaattttgatgatgcatttacaaaatcattagaagctgcaaaagagccaggaagttatacagtaaattctgtaaatccatttagaattgaaggtcaaaaaacaattccttatagagcactcgaagcattagattgggatgttccagattggttagtttatcctggtggagcattaggaaacatttccagttgtggaaaaagcttaatggaattatatgaatggggatggattaagaaaattccacgaattgcagttattaacgcaaatggtgcaaatactctctatcaactatacaatggaatatttgatgaagaaaaattacgatggaatgatggtgttccaaattttgaattaattgagagattttataagaaaatgaataaagacgagactcttaaaccaaagactaaagcgactgctatacaaattggtaaaccatcaaacatcgcaaaaggtttgcgtgcattagattttacagatggaattgttgaggaggtaactgataaagagatgttagacggaatgtcggtagtagggctaaatggatttgattgtgaaatggcatcaggagcttctgtagcaggaattaaaaaattaagagataaagaaatcatcaaaaaggatgacaaagtcataggaattctaactggcaggcagaaagaaccattattaccaattgactaccataatgattctacaaataaatttgcaagaccgccaaaaaactagg

SEQ ID NO: 249392 - DNA, 889 bp, Unknown
  Bacterial polypeptide expressing nucleotide sequence isolated from the Sargasso Sea
tgcaaagaaaattatctgtgcatctacgggcaatacttctgcatctgcaggaatgtttgcagcgaatgaaaatatggaatgtgatgtgtacattcctgatggacaaatagcaccaggtaagttaagtcaagcatatcaatttggaacacaaatggtaaaagttaatggaaattttgacgatgcatttgcaaaatcattacaggcagccgaagaacctggcagttatactgttaattcagtaaatccattcagaatagaaggtcaaaaaacaattccatttagaacattggagacattagaatgggaagttcctgattggttgatatatccaggaggagctttaggcaacacatctagttgtggaaaaagtctgatggaattatatgaatggggatggattaaaaaaattccaagaattgcagtaattaatgcaagtggagcaaatacactttatcaactatacaacggaatttttgatgaagagaaactaagatggaatgatggtactccaaattttgaattaattgaaagattttacaaaaaaatgaatgaagataaaaatcttaaaccaaaaacaaaggctactgcaattcaaattggaaaaccctctaatattgcaaaaggattacgtgcactagattttacagatggtattgtagaggaagtgtcagataaagaaatgttagatgggatgtcagtagtaggattaaatggatttgattgtgaaatggcatctggagcttcagtggcaggaataaaaaaattaagggataaagaaattatcaaaaaagatgacaaagtggtaggaattctaactggaaggcaaaaagaaccattattaccaattgattatcacaacgatcctgcaaataaattgcaagaccaccta

SEQ ID NO: 249393 - DNA, 1215 bp, Unknown
  Bacterial polypeptide expressing nucleotide sequence isolated from the Sargasso Sea
catgcattatctcgcatgcgatttgggtgccgaaagcggccggctaatgctgggctcgctgaaagacggccgattgtcgctggaggaactgcatcggtttccgaatgtgcccatcgaggataccgtcggccggcactggaatgttgaagctttgtttgccgagctgcagaccggcctagcgctcgccggccaacgcggcctacccatcgccagcattagcgtggatgcgtgggggcttgattattttctgctcgatgaaaccggcgcggtgatggagccgaccttttgttatcgggacagccgcaaccaacgcggcattgaccggacgctagacaccctgccgtgggagactttgtacgaggagaccggcatccagttcatgcagatcaattcgctctttcaaatggccaccgaatcccccgagcgcattgagcgcatgcgcacgtttctgcctttgggcgacggcttcaattatcttctcagcggcgtggccaaggcagagatttcgctggccagcaccacgcaactctacaacccgcgcacacgcaattggtccgacaaactactagatgccttcgactggccgcgctcaaagtttcccgaactcatccccagcggtacgcgtttgggcacactaaaacccgaattggccgccgccagcgggctgggcgagatcgaagtcttggccacgtgcagtcacgacaccggcgccgccgtcgcggccgtccccgccgatggagatcaatgggcctacctcagctccggcacatggagcctgatcggcgtggagctacctgaacccatcatcaacgatgccgcacgagatctaaacttcaccaacgaaattggccacggcaataccgtacgcctcttgcgcaatatcattggcttgtggctcgtgcaggaatgccgacgggaatggtccgaggacggcaaggaatatgattactccacgcttacgcaactggctacagaagcaattccgtttgcggcactgatcgatcccagtgacgaacggtttttcaagcctcaaagtatgtcaggtgcgattgctgaattttgccatgaaaccgaccaaacaccaccgtcaacgcccggcggctttattcgttgtgccttagaaagcctcgcactgctctaccatcgccgtctcaatgaggtttgcgaactcaccaatcgaaaagtgaagcagctgcatatcgtcggcggtggcag

SEQ ID NO: 249394 - DNA, 1345 bp, Unknown
  Bacterial polypeptide expressing nucleotide sequence isolated from the Sargasso Sea
catgcaacaaaaagccaaacttgtatgtattaaccctgattgtggaaagacattttcgattagatcactagccataaaatgtgatgcatgtaattttttacttgatgtcaagtatgaaaataagccaagttcaaacctaaaagatgtgttttatgaaagaagaaatcctcaaggaagtatttacaacgaaagtggcgtctggagatttagagagttactgaatttttgtgaaattgaaacagaagatattgagcaatgttcaaagtatctagtatctttagatggtgcagaaggaagacaatcaaaaccatatcatatgagtaaagttgcagaatttgttggattagataatgagaacgtggtatttcaaccagaaggatacaatccaagtggatcattcaaagataatggaatgtctgcagcagtaactcatggaaaaatgatgggcgcaaaaaaaattatttgtgcatccacaggaaatacatctgcatcagcaggtatgtttgctgcaaatgaaaatatggaatgtgatgtttatattccagatggtcagatagcaccaggaaaactaagccaagcatatcaatttggaacacaaatggtaaaagttaatggaaattttgacgatgcatttacaaaatcattacaagccgcagaagaaccaggaagttatacagtaaattcagtaaatccatttagaatagaaggtcagaagacaatcccgtatagagcgctagaatatcttaattgggaagttcctgactggctcgtttatccaggcggagcattaggaaatacatcgagttgtggaaaaagtttaatggaattatacgaatggggatggattaaaaaaattccacgaatcgcagtaattaatgcaagtggtgcaaatacactttatcaattatttaatggaatatttgatgaagagaaattaagatggaataacggcgctcctaactttgaattaattcaaagattttatgatcaaatgaataaagatgaaaatctaaaaccaaaaaccaaggcaactgccatacaaattggtaaaccatcaaacattgcaaaaggattacgtgcactagagtttacagatggaattgtagaagaagttacggataaagaaatgcttgacggaatgtctgtggtgggattaaacggatttgattgtgagatggcctcaggtgcatctgttgcaggcataaaaaaattacgcgataaaggaataatcaaaaaagatgacaaagtggtaggaattttaacaggaagacaaaaagagcctctactcccaattgactatcacaatgatccatcaaatagatttgcaagaccaccaaaaatttag

SEQ ID NO: 249395 - DNA, 1135 bp, Unknown
  Bacterial polypeptide expressing nucleotide sequence isolated from the Sargasso Sea
gttagaatcatgcaacaaaaagccaaacttgtatgtattaatccaaattgtggaaaaaaatattctataaaatcactagccataaagtgtgattcatgtaatttcttacttgatgtgaaatatgaaaataaaccaagttcaaacttgaaagatgtattttatgaaagaagaaacccacaaggaagtatttacaatgaaagtggggtctggagatttagagagttattgaatttttgtgaaattgaaacagaagatattgaacaatgttcaaagtatctagtgtcattagacggagcagaaggaagacaatcaaaaccatatcacatgagtaaagttgcagaatttgttggacttgataatgaaaacgtagtatttcaaccagaaggctacaatccaagtggctcattcaaagataatgggatgtctgcagcagttactcatggaaaaatgatgggtgcaaaaaaaattatttgtgcatctacaggcaatacctctgcatcagcagggatgtttgcagcaaatgaaaacatggaatgtgatgtttacattcccgatgggcaaatagctccaggaaaattaagtcaagcatatcaatttggaacacaaatggtaaaagttaatggaaactttgatgatgcatttacaaaatcattacaagcagcagaagaacctggaagctatacagtaaattcagtaaatccatttagaattgaaggtcaaaaaacaattccatatagagcgctcgaatatcttaattgggaggtacctgattggttggtttacccaggaggagcgttaggaaatacatcaagttgtggaaaaagtttaatggaattatacgaatggggatggattaaaaaaattccacgtatagcagtaattaatgcaagtggagccaatacactctatcaattatttaatggagtttttgatgaagaaaaattacgatggaatgagggtgcactaaattttcaattaattgaaaggttttatgatgaaatgaataaagatgaaaatctcaaaccaaagaccaaagcaacagcaatacaaattggcaaaccatcaaacattgcaaaaggattacgtgccttagaatttaccaatggaattgtggaagaagttacagataaagaaa

SEQ ID NO: 249396 - DNA, 302 bp, Unknown
  Bacterial polypeptide expressing nucleotide sequence isolated from the Sargasso Sea
tggtgcagcatttagtcaactgcacattgtcggtggcggctgccagaacgccttactgaaccagttgtgcgcggatgcctgcggtattcgcgtgatgtccgggccaattgaggcctccacgctcggcaatattggcatccagctgatgacgctggacgagctgaacaacgttgatgatttccgtcaggtggtgcgcgctaactacgaactgaccaccttcattcccaatcctgaaagtgaaattgcccgctatcaggcgcagtttcaatcactacgacagacaaaggagctttgcgcatgac

SEQ ID NO: 249397 - DNA, 1486 bp, Unknown
  Bacterial polypeptide expressing nucleotide sequence isolated from the Sargasso Sea
atgtcagtcaatattgcagcagtggatttaggtgcctccagcgggcgggtaatatgggccagctatgatccggtcaatgaaaatatcaccatgcaggagatgcatcgctttaccaatggcatggtgcatagcaatgggcatgattgctgggaaccggagcggctcttttccaatatattgctcgggctggaaaaaatcgatgacgccggcattgtgctcgatgcggtgggtatcgactcctggggggtcgattttgtcctgctggatgcggcgggccagatgctcggtgatgctgtggcctatcgcgatgcccgtaccgacggcgtgccggagcgggtctggcagcaattgtcccgcgatgagatctatcgtcgcagtggtatccagttcctcaagttcaacagcctctatcagatccgggccctgctcgatgaaaaaccggcctggctggacaaggtcacccgcctgctgctgatccccgattacctgcactatcggctgaccggccagttcagctgtgaatttaccaatgcctccaccagccagctggtcaatgcccgcagcagggattgggatcccgaactgatcgcgttgatcggcgaagggggcaagtggctgcagccgatcgccgcccccggcacccggctgggtcactggatcagcccctccggtcgtcaggtcagtgtcatcttgcctgccacccacgacaccggctcggccatagtcgccaccccgctgagcggacgcggcgctgcctatatcagctcgggcacctggtcgctggtcggggtcgagcgcaaggctccgctgaccgatgctgccgccctggctgccaacctcaccaatgaagggggggtggagggaacctggcgcctgctcaagaacgtcatggggttgtggctggtgcaggggctgcaggtgctgtggccgcagttgggcttcgcagagctggtggcgcaggcggaacaggccgagccctttgcttacctcatccaccccaacgacgaacgttttctcaatcccgcctgcatgcgcagcgccatccagcacttctgtcaggagacgggacagggcacgccgcagaccccgggcgaactggtgcgctgcgtgctggacagcctggcgctgtgctacgaccaggtgctcagggagctggaaaacgtcaccggcgagtccatcaccaggctgcatatcgtcggcggtggttcccagaaccggttgctcaaccagctttgcgccgacatctgccaatgcacagtgctcaccgggcctgtggaggcttcggcgctcggcaacatcggttggcagctcaaggggctgggccttttacaggatctgacggacgtgcgccgcctgatccgccacaacacccgcatcgacaccctgcatccgcatgaggtcccgcagctggactattaccggacgcgctttgccgcgctctgcgcgcacacccattcagacacgttaatcgaggaagttgtatgaa

SEQ ID NO: 249398 - DNA, 609 bp, Unknown
  Bacterial polypeptide expressing nucleotide sequence isolated from the Sargasso Sea
catgagctttcgtcattgtgtagccgttgatttaggcgcctccagcgggcgggtgatgcttgccagctatgaatgcgggccgcgtacgctaacgctgcgcgaaatacaccgctttaccaatagcctgcaaaaggtggatggctacgactgctgggatgtcgaccgtctggaaggcgaaattcgccgcgggctggtgaaggtctgcgagcagggtatcctcatcgacagtatcggtattgatacctggggcgtggattatgtcctgctggataagcacggcgaacgcgtgggcctgccggtctcctatcgtgactcacgtacccatggcctgatgcaccatgccgaagagcagataggccgcgccgagatctaccgccgtagcggcattcagtttatgtccttcaataccctttaccagctccgcgcgctggttgaacagcagccggagctggtcagccaggtttcgcatgcgctgctgatccctgactatttcagctttcgcctcaccggcaatctgaactgggaatacaccaacgccaccaccacccagttgatcaatattaacagcgatagctgggatgaagagctgttgaactggagcggagcgcc

SEQ ID NO: 249399 - DNA, 628 bp, Unknown
  Bacterial polypeptide expressing nucleotide sequence isolated from the Sargasso Sea
caccaacgaaggcggcgcggaagggcgctaccgtgtcctgaaaaatattatggggctgtggctgctccagcgcgtattaaaagagcgccagatttccgacctgccaacgcttatcagccaaacgcaagcgctgccggcctgtcaattcctgataaacccgaacgacgaccgctttatcaaccccgacgatatgagtgcagaaattcaggcagcatgccgtgaatcaggccaacccgtacccctgcaaaacgccgaactggcgcgctgtatcttcgacagcctggcgttgctgtacgccgacatcctgcaagagctggcacaactgcgtggtgcagcatttagccaactgcacattgtcggtggcggctgccagaacaccttactgaaccagttgtgtgcagatgcctgcggtattcgcgtggtatccgggccaattgaggcctccacgctcggcaatattggcatccagctgatgacgctggacgagctgaacaacgttgatgatttccgtcaggtggtgcgcgctaactacgaactgaccaccttcattcccaatcctgaaagtgaaattgcccgctaccaggcgcagtttcaatcactacgacagacaaaggagctttgcgcatga

SEQ ID NO: 249400 - DNA, 657 bp, Unknown
  Bacterial polypeptide expressing nucleotide sequence isolated from the Sargasso Sea
atgaacttaaagaaatagctgctatatcgtcttgtcttgttaataatattggaacgttagacgataattggaggcctagctttttagaggcttctaaatattatgttgaacaagaaaaaccaatcatattagaccctgtgggttcaggtgcgagtaagttaagaactcaaacttctcttgacattattaaaagctctaaaaacttaattatcagaggaaacgcatctgaaattcaatcactagtagatcaaaataaaatatcttcaaagggagttgactcatcaattgaaagtcacgcagctattgagtctggaaaaattttatctaacgagaataattgcgttgtatttataagcggtagagacgacttcattatttatgaagataatgtcactaaaatttcaaatggatcaagtgtaatgacgaaggttacagctatcggttgctctttatcgtgcatagtaggagcatttgctgctgtaggtgaaagtttatacaaatctgcgataagctcagcggctattttttcaatcgcaggagaactcgcagcatcaaaatcagaagggccaggagattttcaagtaaatttcttgaacaaattaaataatattacagaaaaagaaattttagataatttaaaaattactagtgtttaaa

SEQ ID NO: 249401 - DNA, 826 bp, Unknown
  Bacterial polypeptide expressing nucleotide sequence isolated from the Sargasso Sea
ttgggattgatggatcctattcatatacaattttcacgatttgtagttaatgcatctaaaggtgaatttggaatttcatatcagttaagaagacctgtttcagacctaatagtagaaaggttgccagcaacaattgaattagttgttatttctgctctcattgccttaatttctggtactttattgggggtatatacaggtataaacagaaaaggttttttgagtgatataattctagcaatttctttattaggcgtttcattaccaacttttgtaattggtattttatttatttatttatttgcagtaattttagggatacttccatcttttggaagaggagaagttgttgacctggggttttggacaacaggttttttaacaatctctggattaaaagcaattatattgccttcaataacattaagcctttttcaaatgacttatatcataagacttgtaagggcagaaatgatggagattttacaaactgattatattaaatttgctcgagcgagaggaattagtgagaagagtataaactataaacatgcattaaaaaatggcctaataccagtaattactattgctggtataaacattggaacacttattgcattttcaattattactgaaacagtttttcaatggcctggaatgggatttttatttattcaagctgtacagtttgttgatattccaattatgtcagcttacttggtttttatagcttttgtctttgtaatgattaatttcatagttgatattctttactactttatagatccaagaataagattaaaaggagattcagttagtggataat

SEQ ID NO: 249402 - DNA, 577 bp, Unknown
  Bacterial polypeptide expressing nucleotide sequence isolated from the Sargasso Sea
tttttagaggcttctaaatattacgttgaacaagaaaaaccaatcatattagaccctgttggctcaggtgcgagtaaattaagaacacaaacttctcttgacattattaaaagctctaaaaaattaattattagaggaaacgcatctgaaattcaatcactagtagatcaaaataaaatatcttcaaagggagttgactcatcaattgaaagccacgcagctattgagtctggaaaaattttatctaacgagaataattgtgttgtatttataagcggtagtgatgactttattatctatgaagataatgtcactaaaatttcaaatggatcgagtgtaatgacaaaagttacagctattggctgttcattatcatgtattgttggagcatttgccgctgttggagaaagtttatataaatcagccataagttctgcagctattttttcaattgcaggagaactcgcagcatcaaaatctgagggcccaggtgattttcaagtaaatttcttaaacaaattaaataatattactgaaaaagagattttagataatttaaaaattagcagtgtttaaa

SEQ ID NO: 249403 - DNA, 307 bp, Unknown
  Bacterial polypeptide expressing nucleotide sequence isolated from the Sargasso Sea
gctggctcgtcagattgggactattgtcgtggttaccggcgaagtggattacgtcaccgatggtcagcgtaccgttggcgtggacggcggcgacccgttaatgactcgcgtggtgggcaccggatgcgcgctatcagcggttgttgcagccagttgtgccttgcgtggtgaccgacttgataacgtcgcctccgcttgtagctggatgaaacaggccgggcaaatcgccaccgagcaatcaaacggaccgggcagctttgtcccggcatttctcgacgccctctataacctgaacgcccaggagtaa

SEQ ID NO: 249404 - DNA, 367 bp, Unknown
  Bacterial polypeptide expressing nucleotide sequence isolated from the Sargasso Sea
atgcagcctgacctgcacagccgcgcgctcgcggctcacactttgcaccaatttagaaccctatccccgctcacacactgtatgaccaatgaggtcgtgcaaagctttactgccaatacactactggcgctgggcgcatcgccggcgatggtgatcgaacctgaagaagccagccaattcgccgctattgccagtgcattgctggttaatgtcggtaccttaactcaggagcgggccacggcgatgcgcgccgccgttgagcgggcttatcatgctaaaaccccgtggacgctcgatcccgttgccgtaggcgcgcttgagtttcgccgccgcttttgtctggatttactgtcgctacagcctgctg

SEQ ID NO: 249405 - DNA, 740 bp, Unknown
  Bacterial polypeptide expressing nucleotide sequence isolated from the Sargasso Sea
cgcactgggccttagcttgcagcaaatcgctttatttggtcagcaagccgaaaatgaatttatggactgccagtgtggcattatggaccagttgatttcggcgaagggacagcaaggccatgccctgctgattgactgtagcgatctgcaaactactgcggtcccgctgccggaagacataaagctggtgattatcaattcaaattatccgcgaaaactggtggacagtgaatataatcagcgacgcctggattgcgagcaagccgcacaaaaaatgggcgtacgcactcttcgccatgccactcttgagctgctcaacgatacagcacctaagctaagcgataccgagtttcgacgggcacgtcatgtgattactgaaaatagcagagtactggcgacacaaaaggccttgattgctaatgacatgctcactctgagcgagctgatgcgagcctctcacttgtctctgcaaaatgattttgaagtcacagtacctccggtggatggcctggtagagatttgccatcaactgtttaaatatcaaattgcagtgcgaatgacaggaggtgggtttggtggcgccatcttatgcctgtgccgtgaagagcatattgagcctttacggcaggccgtcctggcgcaatacactaaaaaatttggtctgactgcagatttttatctttgtcatgctggcagtggcttacagattgagttgttcaatcaacagaataactgctgaa

SEQ ID NO: 249406 - DNA, 439 bp, Unknown
  Bacterial polypeptide expressing nucleotide sequence isolated from the Sargasso Sea
catgtcgaaccctgcgcagcgcgccactaagttatttgtccaaacctttggcactaaagccgatgatttataccaagccccaggtcgggttaatttgatcggtgaatatacggattacaacgacggcttcgtgttgcccgccgccattaattttcatactgtaattgctgttaagcgccgagaggacaataagtttcgcgccgttgccgacgcctttccgggacaaatcaaggaatggagtttcggtaaagacaccgaaatcaatcccgaagatggttgggtcaattatctcaaaggcctaacggtggccatggccaacactgggcttatcgccaaagggttagacttagcggttgtcggcgatgtgccattagccgcaggtctgtcttcctccggcgccttagtcgtcgcctttggcaccgccatcagcgacagcagc

SEQ ID NO: 249407 - DNA, 836 bp, Unknown
  Bacterial polypeptide expressing nucleotide sequence isolated from the Sargasso Sea
tatcgagtcggcatcggcagacgtggctgagctatcgggtcaagccgctcgctggcaggcggcggctccgggtcgagtcaatctgatcggcgaacacacggactataaccagggctgggtgctccccatggcgattgaccgctacatcgcgatggccgccgcaccgggcgtacccggccagatccgggtgcggagttcggcgatggatgaggagcgcagtctgtcactcgatcagttacacacgccgcatggagacccctggatgcgctacgttcagggcgtcatcgcccaatacgatcagcatggtgtgcgctgccccgggctcgacgtggctgtcgtatctagtgtcccgccgggaggcgggttatccagcagtgccgcgctcgagttggcgacggcgcaccttttggaggcggtaaccgggcagaccttgacccccgccgagcggattcaggtcagcgtgcaggccgagcgcgagatggccggtgtcccctgcggaatcatggatcagaccgtggtggagttggcagcgtccgggcaggcgctgctcctcgattgcctggatcagaccgctcggtcagtaccttttgaatcgcatgcgccggtactgctggtgattcactccggcgtttctcattcactcgccgagggggcttacgcccagagacgcgccgaatgcgagcgagccagcgcgttgctgggagtgaactcgctccgcgaggtgagccccgaccaactggcgcggttgaaagatgaggtggtgttgcatcagagggtcacccacgtggtgacggaaaacgaacgggttcgcgacgccgtgacggcgatcgagcagg

SEQ ID NO: 249408 - DNA, 802 bp, Unknown
  Bacterial polypeptide expressing nucleotide sequence isolated from the Sargasso Sea
aatgaaaaatattaaagaatttaattataaaattctaattgaatctcctgggagggtaaatctgattggtgaacacatagattataatggaggaaatgtattacccgcctctatagataaaaaaatatttttgtactttaagaaaaatttaaaaaactctatctgtaaagtaaattcaacacattataatgagattataacatttgaattaaatgaagaaaagaaagaattaaattcaaattggaaaaactatatttttggtgtaatccattacttaaaaaaattaaaaggtgaccaattaaatggttttgaatgtataattgattcaaaccttcctttaggttcaggtataagttcttcatctgcattaatttgtggattaattaaaggattaaatgacctatttaaacttaaaatttcaaatcatgaaatgataaatatttcacaaaaagttgaacacaattttataggagtaaaaggaggaattatggatcagttcgctattttttatggaaaaaaagataaaattattcttttaaattgtgatactttaaatttaaaaatgatagatagtaaattttcaccttataagtttttactattaaatacaaatgttaatcacaacctatcatctagtgattataatacgagagttaaggagtgtgaaagtgcattaaaaaaaataaaaattgaaaataagaaattatcatgtctagctaatgcacctgaggattatattataaaaaatgaaccattatttactaaaaatgaatttaaaagagccttatatgtatctcaagaa

SEQ ID NO: 249409 - DNA, 724 bp, Unknown
  Bacterial polypeptide expressing nucleotide sequence isolated from the Sargasso Sea
cctatgccccagctggccaccatcggtcagctggcagagaatcgatttgtcggcgtcaactgcggtatcatggatcagtttgtgagcgcgaatgggcgagccggacacgctctgttcctggactgcagggatctttcgttcgaactcgttccgatcggggacgagggtgtccggatcgtgatctgcaactcaggcgtaaagagaggcctgactgactcgttgtacaacgaacgacgaaatgcgtgtgaggagggtgtacggcgactggctttggcatcggggcattccttcggtgctctgagagatgtgacgatggagcacctagaagactacaagggtgccttgagcgatgagattttcgcgcggtgtcatcacgtgatcacggagattgagcgtacaacgagtgctgccgacgctcttaaacatggcgatctaggggctcttggtgagttgatgggagcgtctcacgcgagtcttcgtgacgactatgaggtcagtggcagcgaactggatcagctcgtcgaaatcgctgactctgtgaagggcgtgatcggagcccgaatgacgggggccggtttcggtggatgtatcgtctgtctgaccgaagaaaacgccgtcgaagtgctagtcgaaaccgtcgaaaagcgatataccgcaaactcacagtatagggcagaagtttatacctgctctgctgtcaatggagtcgagcggataggatagg

SEQ ID NO: 249410 - DNA, 541 bp, Unknown
  Bacterial polypeptide expressing nucleotide sequence isolated from the Sargasso Sea
atgtcgaaccctgcgcagcgcgccactaagttatttgtccaaacctttggcactaaagccgatgatttataccaagcccctggtcgggtgaatttgatcggtgaatatacggattacaacgacggcttcgtgttgcccgccgccattaattttcatacggttattgcagtaaaacgccgagaggacaataagtttcgcgccgttgccgacgcctttccgggacagctcaaggaatggagcttcggtaaagacaccgaaatcaatcccgaagatggttgggtcaattatctcaaggggctgacggtggccatggccaatactggccttatcgccaaagggttagacttagcggtcgtgggcgatgtgccattagccgcgggtctatcttcctccggcgccttagtcgtcgcttttggtaccgctatcagcgatagcagccaactgcatctgtctcctatggcggtggcacagctcgctcagcgcggtgaatatcgctatgtctcatcggcttgcagcaataggaccatatggtctgcgccat

SEQ ID NO: 249411 - DNA, 788 bp, Unknown
  Bacterial polypeptide expressing nucleotide sequence isolated from the Sargasso Sea
gaaaaaagaggtgaattgggcagattttattattggctcatgtttattttttggaaagaaatattcaatagtaatcaaaaaactatcttttaatataaaaagcctccttccactaggaattggcctctcgtcctcagctgccataacagttagcactttaaaggctctaggcaattattataaaaaagatatatctgatgatgaacttatcaatctagcatacgacatcgaaaataattttgtcggagttggtggtggtattatggatcaatttgtatctgtattaggcaatcaaaatcaagcattattcctaaatactctaaatagatcttatgaattaattgatatatttgaagattataattttctaattatagacagcaatacaaaaagaattttatcgaatagtgagtttaatcaaaaaaaagagttgtgccttagtgcctcgaagaaaatgaatttaaataacctatgtgaaaaagaaattataagcaaagaagatattgaaatattatctgatgaagaatttaaagtgtgtaagcacgtagtcgaagaaaacgtaagagtaaaaaaagctgttcaattcctaaaagatgataaccctgatgaatttggaaaactgatgacagaaagtcacctgtctctctcgaaatattatggtgtttcaactaatgaattgaataaattagtaagtctgtctaattcttttggagcattaggatcaaagttgacaggagctggttttggaggggctgttgtaactctagtaaaaaatgataaagtagaaa

SEQ ID NO: 249412 - DNA, 661 bp, Unknown
  Bacterial polypeptide expressing nucleotide sequence isolated from the Sargasso Sea
actgagtacgcagaaaaacatattgcaatcttagcgcaaaaagttgaacgtgattatataggtgttgcaggagggatcatggatcaaatggtttcctcaattggcattcatagaaaagctttcttcttagattgtttaagtttgaagtttgaattaatagatcttccagataattgggtgttttgcttagttgactctgcggttcaaagaaatcttagagatagcgcatataatgaaagatatagccaacttaagaaagctgaagaatatcttggtacagaatatctaggttcaattaaaccagagcaatttgatgaaaataaaataaatgatgaattaattttaaaaagggcaagacatgttattactgaaaatgctagggtcctagaagcaaagaaatgtatattaaataaagatattaaatcatttggaaagttaatgaatgaaagccaccaatcatatgctaaagattttgaagcctcaactgaagatgttgattcgattgttgaaagatcaaaaatatctggagcagaaggagcaagattaactggtggaggatttggaggatttacagtgtcactaatacataaaaacaactatgatgaatggcaaaaaaatatgcacaaatattatgataataaaaatatatttgaggtttgat

SEQ ID NO: 249413 - DNA, 622 bp, Unknown
  Bacterial polypeptide expressing nucleotide sequence isolated from the Sargasso Sea
aaagttgaacgtgattatataggtgtttcaggtgggatcatggatcaaatggtttcctcaattggcattcatagaaaagctttcttcttagattgtttgagtttgaaatttgaattgatagaccttccagataattgggttttttgcttagttgactctgcggtacaaagaaatcttagagatagtgcatataatgaaagatatagccaactgaagaaagctgaagaatatcttggtacagaatatctaggttcaattaaaccaaagcaatttgatgaaaataaaataaatgatgaattaattttaaaaagagcaagacatgttattaccgaaaatgctagggtcctagaagcaaagaaatatatattaaataaagatattaaatcatttggaaaattaatgaatgaaagccatcaatcatatgctaaagattttgaagcctcaactgaagatgttgattcgattgttgaaagatcaaaaatatctggagcagagggagcaagattaacaggtggaggatttggaggatttacagtgtcactaatacataaaaacaactatgatgaatggcaaaaaaatatgatcaaatattatgataataaaaatatatttgaggtttgat

SEQ ID NO: 249414 - DNA, 568 bp, Unknown
  Bacterial polypeptide expressing nucleotide sequence isolated from the Sargasso Sea
tatgtcaaaccctgctcaacgcgcaactaaattatttgttcaaacatttggtaccaagcctgacgagttatatcaagcaccaggccgagtgaacattatgggtgaacatactgattataatgaagggcttgcgctaccagcggcaatcaattttaaaacggtcattgccgttaaacatcgcgacgacaatttattccgggcggtgagcactgcgtttccgggtaaaattgagcaatggcgttttggtgaagaaggcactattgctgctggcgatgattggacacattacttaaaatgcgtcaccgcagccatgaatcagtctggcctgctggctaaagggctagacttagccattgtaggcgatgtaccacttggtgcaggattatcttcgtctgcggcgctagaagttgcctttggcacagcaattagctatgccagccaattgcatttatcgccattggctattgcccaattagctcagcgcggcgaaagccaatttatgtgcctggactgcggcatgatggatcagatgatcagcgccatggctgaacctagaccacgccttact

SEQ ID NO: 249415 - DNA, 760 bp, Unknown
  Bacterial polypeptide expressing nucleotide sequence isolated from the Sargasso Sea
gttgcgcaagcgtgtggaagatgaatatcgatccagattcggtcgcgtgccatctgtcgtggctgcggctcccggccgtgtcaatctgattggcgagcacatcgactacaacaatggctttgttcttccgatggcaatcgagcgatatgtgataattgcggcggctccatgttctgatccatcacaagagcatgcgattttctacagtagccatatgcaggaaagcactgacattccaatcggtatgtctttcgggccgacgtgttctggatggggacgttacgttgagggtgttattgccggttttgtgtcaaggggttgcgatgtcccgccattggaagcggtaatcggttccagtgttccaagcggtggtggattgtctagcagtgcagctttggaagtggcgacggcgaccatgctcgagggcatcacggatcaccagatagagccattggaaaaagcgattctttgtcagcatgccgagcatacgtttgctggcatgccctgcggaatcatggatcagttttctagtgtcttcggtatgcctggtgaactcatgctgctggattgcatgagtcaggaaatacaagcggttccgtttcgagaggaagaggtctcggttctgatcaccaacagcaacgtgaagcatgagctgacagacggtgagtacgcagaacgaagacgtcagtgcgagtcggcgttagaaaaactagatttgttgtcttggcgggacgtcaggttggcggacctcgaagcggca

SEQ ID NO: 249416 - DNA, 1087 bp, Unknown
  Bacterial polypeptide expressing nucleotide sequence isolated from the Sargasso Sea
atgaatagtttaaaattattccaaactaactttcaatgttcacctgtctcttcagcacaagcgcatggtagagtaaatttaattggagaacatactgattataactacggttttgtgcttcctactttaattgatcaaaaaatcgaagttagtattggcccacgatcagactcacaaattgttggaatttccgatgaatttggaaaaaaatcttctctttttgactctaaaacagatggatcttggatagattttgtgagaggagctttgttttatttaggtaaggagggacatcatatgtcaggtcttaacttgtctgtgacatctgatattcctgctggttctggcttgtcctcatccgcagcgcttgagatcgcattgataaaggctttatgtaaaatggtgaagctagaattaccactaactaaaattgctcagataggacaattgattgaacataattttattggaacctattgtgggataatggatcaaatgtcttcagcgatagctaaatttggtcaggcactattcttggattgtgaaaatttgagcacagaaataatacctatctttagcgagtacacttttgtcgtaattcattccggaagtacacgtaaactttcagaaggtttgtataatgaaagaaaaagagagacagaagcagctgcaaaatttcttaatattccttcattacgtcatgctgaaattactaacttaagtttaatcaaagatcctaaaattttaaaaagagctaggcatgtcatctcagaaaattttcgagtaaaaaaagctgttcaatttttaaaaaataataatgcacaggcatttggagaattaatgaatgagagtcattcctctatggataaagattatgaaatttctagtcctgaattaaattatgtagttaaaaaagcccagtcacatggtgctcttggggctagacttacaggagccggatttggtggttgcacagtaattttaacatctaatattcaaagagaagatataacagaaaaaattttaaatgattgtccaaaatcatatttgattactaatatatcgcaaaataatataattaattaag

SEQ ID NO: 249417 - DNA, 1084 bp, Unknown
  Bacterial polypeptide expressing nucleotide sequence isolated from the Sargasso Sea
ttgattaattcatcaaaagaattatttgaaaagaattttagtcaatcacctattgctacggcttttgctccaggaagagttaatttaattggagaccatacagactataactttggtctggttatgccaacaccattatctttagggattgaagttagtattataccgtcaaatactttattaattgagggtaaaactgaactttttaaagaaagtgtaagaccaataagtgctcctgtagatggatcatggttggactttgtaactggtgcaataaacgttttctatgaagagtttcctaattcttcaaaaattttaaaaaatggtataaagttagcaatttcttctaatcttcctgcgaattcaggtgtctcttcatctgcagctttagaaatttcacttttacgcgcgattaacaaaatagaaaatcaggttcttgataattacaaacttgcaaaattagctcaaaaaattgagcacaattttattgggactatgtgtggtcttatggatcaaatggtaatatcctcaggtgtaactgaaaaagctatgttttttgatacgaaaaatggaaatatagaaaatgtatctctttttaaaaatcataaatttttaataatacattctggtagtacccgtacactttcaaaaagtctttacaatttaagatgccaagaatgccaggacgcctcaaaaaagttaaatatccagaatttaagtgaagcgaacagggatatggttgatagtttagaaggtatttcctttaaaagggctaaccatgttatatcagaaaacaaacgtgtggaaatttgcttgaatgcactaaaaaataatgatcctgaaacatttggtgaaaaaatgtatgagagccattttagcttatcacaaaattatgaagtttcatctgaattgctggataatataattgaaaagtctcagtcgctaaatatacttggaggacgtttaaccggagcaggctttggtggttgctgtattttcttaataaaccaaaatgacaccgagcagatttttgacactctaagctctcatttttcagatattaaatttgtagatgtgatttagt

SEQ ID NO: 249418 - DNA, 976 bp, Unknown
  Bacterial polypeptide expressing nucleotide sequence isolated from the Sargasso Sea
catgggttttaaagatatatttcatactgatttttcagttgttaacagcgcgcatgcaagagtaaatttaattggtgaacatactgattatacaggagggtatgttttaccatctcttctgaatttcaaaacaactattcaaatttcgaaaaatgagaataaaaaatatcaagtttattctgagcattttaatgaacaaatgaattttactgactttattaagtcaaaaaataatgaatgggttgactatgtaaaaggttgtttatttgtattttacgatgaaaataaacatatacctaatactcatttaaatatttttatatcctcaactattccaatgggtcgcggtatttcatcctcatcagctctttgcgttgctgttttaaaagcattaaataatttttttaaaactgaatacgcagaaaaacatattgcaatcttagcgcaaaaagttgaacgtgattatataggtgtttcaggagggatcatggatcaaatggtttcctcaattggcattcatagaaaagctttcttcttagattgtttaagtttgaaatttgaattgatagaccttccagataattgggttttttgcttagttgactctgcggttcaaagaaatcttagagatagcgcatataatgaaagatatagccaacttaagaaagctgaagaatatcttggtgcagaatatctaggttcaattaaaccagagcaatttaatgaaaataaaataaatgatgaattaattttaaaaagagcaagacatgtgattactgaaaatgctagggtcctagaagcaaagaaatatatattaaataaagatattaaatcatttggaaagttaatgaatgaaagccaccaatcatatgctaaagattttgaagcctcaactgaagatgttgatttgattgttgaaagatcaaaaatatctggagcagagggagcaagattaaccggtggaggattggaggat

SEQ ID NO: 249419 - DNA, 835 bp, Unknown
  Bacterial polypeptide expressing nucleotide sequence isolated from the Sargasso Sea
atgagagtaaccgcatctgttccggctagaatcaacataatcggtgaacatacggatcactttggggggctatccctgacgttttccagccaacatcgcctcgaactcacagcatcaccgagagatgataggagcagaggggatcaaacggtaaccagtctctgggaggctgcgggcggttggagcgcagacctagacgtagattcgaacatcccgataggggcgggcctgtcatcatccgcagccctctgcgtcgcaatcgtcatgtgctctcagaacactgttgacccaatggagatatctctagaggctcagaggattgagaaccatgtgcttcgctcgaactgcggtctcatggatcagatatccgtaactcactccaaggaagggctagcaacattgctggacttttctaaaatgagcatagagagcttcagaatgcctgacgattggagattcaaactggtagatactggaatcagaaggagcctcagcgagaccaactacagtagctccgaaatcaaaatagaaacaagacggatacacgccaaggaggagagcgcaagggtcagaaccgcactgaccagcgatgcaaggatactgggaactatcctaaacgaatcccatgcatcgataagcgacaatattcgtgccagcacaccggaaatagacaacatggtcaaggagattcaaagcactgcaggagtattgggggctaggctgatgggaggtggattcggaggcatgatactcgcactagtcgaggaagaagacgcgcttccgggggagcttctggtttcgtcagcccccgccttccttcaggaaactctctagc

SEQ ID NO: 249420 - DNA, 1147 bp, Unknown
  Bacterial polypeptide expressing nucleotide sequence isolated from the Sargasso Sea
catgtcgaaccctgcgcagcgcgccaccaagttatttgtccaaacctttggcactaaagccgatgatttatatcaagccccaggtcgagtaaatctgatcggtgaatacacggattacaacgacggctttgttttgcctgccgccattaattttcatacggtgattgccgttaaacgccgtgaagacaacaagtttcgcgccgttgctgatgcctttcccgggcaaattaaagaatggaccttcggcaaagaaaccgaaatccatcccgaggacggttgggtaaattatttaaaagggttcaccgcggcgatggccaacacagggctcattgccaagggcttagatttggccgtggtaggcgatgtaccgctcgcagcaggattatcttcctctggcgccttggtcgtcgcctttggcacagcgattagtgacagcagccaattgcatctctcaccgatggcagtggcacaattagcgcaacgtggcgaatatcgatatgtcgcatcggcttgcagcattatggatcacatggtttgcgcgatgggtgagccggatcatgccctgctcatcgactgccttgaccttgatagcgaaccgattgcaatccctgagaatctcagcctgatcatcattgatgcgcatattgagaaacaacgattagcggcgattagccagcagcgacgtgaggaatgcgctcaagctgccgaattttttggtttagacgctctgcgccatcttgaactgcgtcagcttgaaagtgccaaggataaattggatgaaaccctttatcgccgcgccaaacacgtagtcaccgagaataaacgcactcagagtgctgctcgggcactcgagcaaaataatatttctaaattcagcctattaatggctcaatctcatcaatcactgcgagatgattttgaggtaacactgcctgaatttgacactttggtggatattgttagccaagtgattggcgaacgcggtggcatacgcatgaccgatggctgcgtggtcgcgctcgtcgaccatgagcttaccgatgcggtagtttctgcggtcgaacagacatttttcgagcaaacagggatagatgcaaccgtttatctctgttcagcaagtgctggcgcgggccgtatcgacagttaa

SEQ ID NO: 249421 - DNA, 1069 bp, Unknown
  Bacterial polypeptide expressing nucleotide sequence isolated from the Sargasso Sea
catgggttttaaagaactatttaaagtagatttttcagcttctagtagtgcgcatgcaagagtcaatttaataggtgagcacaccgattatactggtggatttgtattgccctctctattaaaatttcagacaactattcaaatttctaaaaatgatacaaaagagtatcaagtatattctgaaaattttaacgaaataaaaaaatttaatgattttataaaatcaaaaaataatgattggattgattatataaaaggatgtctttttgttttttacgatgagaataaacacataccaaatgctcatttaaacgtttacatatcttcaactattccaatgggaagaggtatttcttcatcttcagctctttgtgttagttttttaaaatcattaaatagtttttttaatacaaattattctgacaaacatatcgccattctagctcaaaaagttgaacgaaattacataggtgtttccggtggaataatggatcaaatggtatcttcaataggtatacatcgtaaagctttttttttagattgcttaagtttaaaatttgaattgatagctcttccccctgattgggttttttgcttagtagactcagcagtgcagcgcaatctaagagaaagtgcgtataacgagagatacagtcaacttaaaaaagctgaagaataccttggggcagaatatttgggttcaattaaacctgagcaatttgatgaaaataaaattaatgatgaattaatcttaaaaagagcaagacatgttattaccgaaaatgctagggtgcttgaagcaaaagaatgcataataaatggtgatattaaatcgtttggaaatttaatgaatgagagtcatcaatcatatgcaaaagattttgaagcatcaactgaagatgttgatttaatagttgcaaaatcaataacatctggagcggaaggagctagattgactggtggaggttttggaggttttacagtatcactaatacataaaaataaatttgatgaatggaaaaaaaatatgaaaaaattttataatgaaaaaaatatatttgaaatgtaa

SEQ ID NO: 249422 - DNA, 1147 bp, Unknown
  Bacterial polypeptide expressing nucleotide sequence isolated from the Sargasso Sea
catgtcgaaccctgcgcagcgcgccactaagttatttgtccaaacctttggcactaaagccgatgatttataccaagccccaggtcgggttaatttgatcggtgaatatacggattacaacgacggcttcgtgttgcccgccgccattaattttcatactgtaattgctgttaagcgccgagaggacaataagtttcgcgccgttgccgacgcctttccgggacaaatcaaggaatggagtttcggtaaagacaccgaaatcaatcccgaagatggttgggtcaattatctcaaaggcctaacggtggccatggccaacactgggcttatcgccaaagggttagacttagcggttgtcggcgatgtgccattagccgcaggtctgtcttcctccggcgccttagtcgtcgcctttggcaccgccatcagcgacagcagccaactgcatttatctcctatggcggtagcacaactcgcacagcgcggtgaatatcgttatgtctcatcggcttgcagcattatggaccatatgatctgcgccatgggcgaaccggatcatgccctgctcatcgattgtctggatttggatagcgagcctattgcgatccctgaaaacctcagccttatcattatcgatgcccatatcgagaaacaacgtctggcggcaataaatcaacaacgccgcgaagaatgcgcacaggctgccgacttttttggtctcgatgccctgcgccacctcgacctgcgccagctcgaaagtgctaaagatcaattggatgacaccctgtatcgccgtgccaaacacgtcgtcaccgaaaacaaacgcactcagagtgctgctcgggcgctagagcaaaataatctatctaaattcagtttgttaatggcacagtcccatcaatctctgcgggatgattttgaggtgacactgcccgaatttgacactttggtggacatagtcggccaagtgattggagagcgtggcggcattcgcatgaccgacggttgtgttgtcgccctagtggatcacgaactcaccgatgccgtagtctcggcggtcgagcatgcattttatgagcagactggaatcgatgccactgtgtatctctgctcggcgagtgcgggcgcggggcgcatcgacagctag

SEQ ID NO: 249423 - DNA, 1072 bp, Unknown
  Bacterial polypeptide expressing nucleotide sequence isolated from the Sargasso Sea
tatgaagagttttaaagatatatttcatactgatttttcagttgttaacagtgcgcatgcaagagtaaatttaataggtgagcatactgattatacaggagggtatgttttgccatctcttttaaattttaaaacaactattcaaatttcaaaaaatgaaaacaaaaaatatcaagtttattctgaacattttaaagagcaaataaattttactgactttattaagtcaaaaaataataaatgggttgattatgtaaaaggttctttatttgtattttatgatgaaaacaaaaacatacctaatactcatttaaatatttatatatcctcaactattccaataggtcgtggcatttcttcatcatcagctctttgcgttgccgttttaaagtcactaaatagtttttttaatactgaatacacagaaaaacatattgcaattttagctcaaaaagttgaacgtaattatataggtgtttcaggagggatcatggatcaaatggtttcctcaattggcattcacagaaaagctttttttttagattgtttaagtttaaaatttgaattgatagacctaccagataattgggttttttgtttagtagactctgccgtacaaagaaatcttagagatagtgcatataatgaaaggtataaccaacttaaaaaggctgaagagtatcttggcacagaatatttaggttcaattaaaccagagcaatttgatcaaaataaaataaaagatgaattaatattaaaaagagcaagacacgttattacggaaaatgctagggtcctcgaagcaaaggggtatatattaaataaagatattaaatcatttggaaaattaatgaatgaaagccatcaatcatattcaaaagattttgaagcttcaactgaagatgttgatttgattgttgaaagatcaaatacatctggagcagagggtgcaagattaaccggaggaggatttggaggattcacagtgtcactaatacacaaaaacaactattatgagtggaaaacaaatatgagcaaatattatgataataaaaatatatttgaggtttga

SEQ ID NO: 249424 - DNA, 880 bp, Unknown
  Bacterial polypeptide expressing nucleotide sequence isolated from the Sargasso Sea
gttgcccgccgctgatcagttcatggagttgcgccagcgtgtggaaaatgaataccaatctagattcggtcgcgtgccatctgtcgtggctgcggctcccggccgtgttaatctgattggcgagcacatcgactacaacaatggcttcgttcttccgatggcaattgagcgatatgtgataattgcggcggctccatgttctgatccatcgcacgagcatgcgattttctacagtagcgatctgcaggaaagcactgacattccaatcggtgcgtctttcgggccgacgtgttctggatggggacgttacgttgagggtgttgttgccggttttgtgtcaaggggttgcgatgtcccgccattggaagcggtaatcggttccagtgttccaagcggtggtggattgtctagcagtgcagctttggaagtggcgacggcgaccatgctcgagggcatcacggatcaccagatagagccattggaaaaagcgattctttgtcagcatgccgagcatgcttttgctggcatgccttgcggaatcatggatcagttttccagtgtcttcggtatgcctggtgagctcatgctgctcgattgcatgagtcaggaaatacaagcggttccgtttcgagaggaagacgtctcggttctgatcaccaacagcaacatcaagcatgagttgacaggcggtgagtacgcggaacgaagacgacagtgcgagtcggcgttagaaaaactggatttgttgtcttggcgggacgtcaggttggcggacctcgaagcggcacgtgatcggctgaatgatgacgaactagcatgcggacgccacgtcgtaaccgaaatagccagaactttagatgcagcaaaagccttttcaaac

SEQ ID NO: 249425 - DNA, 298 bp, Unknown
  Bacterial polypeptide expressing nucleotide sequence isolated from the Sargasso Sea
atgagaccacagtcaaatccccgcgagcgggtgattgaggaattcaaaaatttatttcacaccgatccatccttccttgtacgtgccccgggccgtgtcaacctgatcggtgaacacactgactacaacgacggttttgttctgccgatggcactcagtcagtctatctggatcgctctttcctcccaaacaaatctggaagttgaactgcactcactggattttgaggaatccgtaaaagttcctctggaagaaaactatgagaaatcacgaggatggcaggaattcctcaaagggg

SEQ ID NO: 249426 - DNA, 271 bp, Unknown
  Bacterial polypeptide expressing nucleotide sequence isolated from the Sargasso Sea
atgacccccaaccaacgtgtcagcaccgtttttgccgagcaatttgccaaagcgcccgatctgctggtgcgcgcccccggccgcgtcaacctcatcggtgaacataccgactacaacgacggcttcgtgctgccctgcgccatcgactacgagacctgcgttgccatcggcctgcgcgatgaccggcaagtacaggtgatcgccgccgactacgacaatcagcgcgaccagttcgacctcgaccagcccatcgagcaccaccccagccagc

SEQ ID NO: 249427 - DNA, 177 bp, Unknown
  Bacterial polypeptide expressing nucleotide sequence isolated from the Sargasso Sea
tatgacccccaaccaacgtgtcagcaccgtttttgccgagcaatttgccaaagcgcccgatctgctggtgcgcgcccccggccgcgtcaacctcatcggtgaacataccgactacaacgacggcttcgtgctgccctgcgccatcgactacgagacctgcgttgccatcggcctgcg

SEQ ID NO: 249428 - DNA, 822 bp, Unknown
  Bacterial polypeptide expressing nucleotide sequence isolated from the Sargasso Sea
ccggatggaaaggggtggccacaggaaatgtcccgatcggcgctggactttcctcgtctgccgcatttgaactcgctattgctagggctttcaccagcgttggcaactgggaatggcaacccttggaaatggcaagactctgccagcgggctgaaaacgattgggtcggaatgaactgcggcatcatggatcaaaccatctccgctctcggacaagacaggaatgccctctttctggattgccgaagcctggaaacccggcaggtgagaatacctgacaacctccaaatcgctgtcatggataccggaacccgacacgaactggtcgactcggcttacaatgaacgccgtcttcaatgcgagaaggcagcagctttttttaaagtcaaggcactccgagatctttctctggaaaaacttctttcatccgagaaagaactggatccggtggtttttcgcagagcacggcatgtcgtgacagaaaaccagagagtccttagtttcatcaaagcccttgaaagcggaaatcctgaaaaagcaggggaactgatgaatgaaagccatcatagcctgagggatgattttgaggtttcctctgaagccctggatctcatcagcgaatgtgctcaagaatctcccggatgttatggcgcacgcatgacaggaggagggtttgccggatgtggggtggcgttagtggatcagtcacgatcccaagaattttcgaaagaattggaaagaaaatataaaactgttacgggtaggacagctaagaattatctctgttctccctctgagggagcagaatctttcaaaatctgaa

SEQ ID NO: 249429 - DNA, 802 bp, Unknown
  Bacterial polypeptide expressing nucleotide sequence isolated from the Sargasso Sea
cctgctcaaggtattgctgcagcacctgggcgtgtaaacctaattggcgaatttaccgattacaacgacggctttgtatttccgtgctcgttagagtttcgtactcaagttatgtttaaagagcgcgacgacaacatcattaccgtgcattcgttaaattacccaggcgaaaaagacagctttagtgttgatgaagacatcagcgaagggcaatcgcaatggggtaactatatccgtgccgtgtcatttgttttaaagcgcgcgggccatactttacgcggcgccgatttacttattgacagtaacttaccgcaaggcagtggtttatcgtcatcggcggcattagaagtggccattggtggtatgtttaaccatattgcacagcttggcttaagcgaagaaaaaattgccttactaggccaagaagccgaaaacgactttatgcattgccaatcgggcattatggatcagcttatttcggcaaaaggcgaaaacggccatgcgcttttaattgactgtgaaaacctagcgactgaatcagtaaaagtacccgatgatttaaacattgttattgttaactctaactacccacgtaaattggtagatagcgagtacaaccaacgtcgtgttgactgtgagcaagcagctgcaaaaatgaatgtagccacgcttcgtaaagccaccatggacacgcttgaagcaactaaagatgcactaagcgaaaacgaatacaaacgtgcacaccatgtaattagcgaaaacgagcgtgtaattgcagcaactaaagcgctgcaaaataacg

SEQ ID NO: 249430 - DNA, 318 bp, Unknown
  Bacterial polypeptide expressing nucleotide sequence isolated from the Sargasso Sea
catgataccgcagtcaaatccccgtgagcgggtgattgaggaattcaaaaatttatttcacaccgatccatccttccttgttcgtgccccgggccgtgtcaacctgatcggcgaacacaccgactacaacgacggttttgttctgccgatggcactcagtcagtcgatctggatcgctctttcctcccagccaaatccggaagttgaactgcactccctggattttgaggaatccgtaaacgttcctctggaagaaaactatgagaaatcacgaggatggcaggaatttctcaaaggggtactcgacgttctgaaaca

SEQ ID NO: 249431 - DNA, 725 bp, Unknown
  Bacterial polypeptide expressing nucleotide sequence isolated from the Sargasso Sea
catgagaccacagtcaaatctccgcgagcgggtgattgaggaattcaaaaatttatatcacaccgatccctcccatcttgtacgtgccccgggccgtgtcaacctgatcggcgaacacaccgactacaacgaaggttttgttctgccgatggcactcagtcagtcgatctggatcgctctttcctcccagccaaatccggaagttgaactgcactccctggattttgaggaatccgtaaacgttcctctggaagaaaactatgagaaatcacgaggatggcaggaattcctcaaaggggttctcgacattctgaaacaggagggctattcactctccggatggaaaggggtggccgcaggagatgtcccgatcggggctgggctttcctcttcggctgcatttgaactcgcgattgctagggcattcaccagcgttggaaactgggaatggcaacccttggaaatggcaggattctgtcagcgggctgaaaacgaatgggtcggaatgaattgcgggatcatggatcaaaccatctccgctctcggacaagccgggaatgccctctttctggattgccgaagcctggagaccctgcaggtgagaatgcctgacaacctccaaatcgcagtgatggatacaggaacccgacacgaactggtcgattccgcttacaatcaacgccgtcttcaatgcgagaaggcagcggctttttttgaagtcaagg

SEQ ID NO: 249432 - DNA, 628 bp, Unknown
  Bacterial polypeptide expressing nucleotide sequence isolated from the Sargasso Sea
atgataccgcagtcaaatccccgtgagcgggtgattaaggaattcaaaaatttatttcacaccgatccatcattccttgtacgtgccccgggccgtgtcaacctgatcggcgaacacactgactacaacgacggttttgttctgccgatggcactcagtcaatcgatctggatcgctctttcctcccagccaattccggaagttgaactgcacaccctggattttgaggaatccgtaaaagttcctctggaagaaaactatgagaaatcacgaggatggcaggaattcctcaaaggggttctcgacgtgctgaaacaggagggatattcactctctggatggaaaggggtagccgccggagatgtcccgatcggggcaggactttcctcgtcggccgcatttgaactcgcgattgctagggctttcaccaccgttggcaactgggaatggcaacccttggaaatggcaagattctgtcagcgggctgaaaacgaatgggtcggaatgaactgcggcatcatggatcaaacgatctccgctctcggacaaaccgggaatgccctctttcttgattgccgaagcctggaaacccggcaggtgagaatgcctgacaacctccaaatcgccg

SEQ ID NO: 249433 - DNA, 448 bp, Unknown
  Bacterial polypeptide expressing nucleotide sequence isolated from the Sargasso Sea
catgagtctgacagtcgctgagttacatcagctattttcatcacatttttcggcgactgccgattaccattttcgcgccccaggtcgagttaacctgattggtgagcataccgactataacgatgggtttgtgctgccctgcgcaatcaactttgatacccatgtgctggcgcgtaagaacggcctaaacattatccgtgtcgtggcggcagattatgctaaccaggtggatgaaatcccgctagatcaggtgattgcgcatcatcttgactatcaatgggctaactatgtccgcggggtagtgcagagtttacaacgtcagggcattagcttagtgggctgtgatctttctatcagcggcaatgtaccgcagggtgctgggctcagttcatcggcggcgttggaagtggccttgggactgactttcaccacgctggctgggcacgcg

SEQ ID NO: 249434 - DNA, 1141 bp, Unknown
  Bacterial polypeptide expressing nucleotide sequence isolated from the Sargasso Sea
aatggataatcaagtactttcttctaattttgaaacgcattacggcgaggcgccagcgttaatcgcacatgcgccgggtcgagtgaacattattggtgagcataccgattataacgaagggttcgtatttccggctgcaatcaactttggaacgtgggttgcggcaacaaagcgcgcagataatgacatcgtggttaccgcgatggattacgaaaatcagcaaaaccagttttcgttgtcagacattaactatgacgaagaacaagggtgggcaaactatgttcgcggcgtagtgaaagtacttaaagaggccatgccagattttggcggcgctaacttattggttacgggcaatgtgccacaaggtgctgggttaagctcttcggcatcttttgaagtggctatactaaaagcgttaagcgcgctgtatgagttgcccctcgatggcgtacaggctgcactgttaggccagaaagcagagaatacgttcgtaggctgctcatgcggaattatggatcagttaatctctgctatgggtaatgaaggcatggcaatgctgcttgattgccagtcgctagccattgagcattcaccactaccagactcgcatcaaatcgttatcatcaattcgaatgttaaacgtggtttggttgacagtgaatacaacttgcgtcgtcagcagtgtgaacaaggcgcgtcgttattgggtgtgtcatcgttacgcgaagcaactatggaaatgttagaaggcgctaaagcacatatgccagaggtggtttatcgccgcgcgaagcatattgttaccgaaaacgctagaacactggcagcaagccaagcattaaaagctggcgacatcgaaacggttagtgaagccatggcgcaatctcacatctccatgcgtgatgactttgaaattaccgttcgcccaatcgattacttggttgagatcattggtgaagtgctgggtaaatcgggtggtgttcgcatgactggcggtggattcggcggctgcgtagtggcccttgtacctaccgacaaagttgaagcggtgaagcaagtcgtggccgacaagtactctgatgaaacaggatacagtgctgacatttatgtgtgtacggctacacagggcgcgttcgcctaa

SEQ ID NO: 249435 - DNA, 1142 bp, Unknown
  Bacterial polypeptide expressing nucleotide sequence isolated from the Sargasso Sea
tatgaccccgagccagcgcgtcagcgccgtgtttgccgagcagtttgagcaacaacccgacctgctggtgcgagcccccggccgcgtcaacctcatcggcgagcacaccgactacaacgacggcttcgtgctgccctgcgccatcgactacgagacctgcgtcgccatcggcctgcgcgatgacagcctggtacacgtgatcgccgccgactacggcaaccagcgcgacctgttcgatctcgaccagcccatcggccaccatgccgaccagcgctggagcgattacatccgcggcgtggtgaagtacctgcaggagcgaggctatccgctgcgcggcctcaatctggtggtctccggcaacgtgccgcagggggccggcctctcctcttccgcctcgctggaggtggccatcggccaggccttcaaggaggcgctggggctcgccatcacgcaagccgaaattgccctcaacggccagcaggcggagaaccagttcgtcggctgcaactgcggcatcatggaccagatgatctccgccagcggcaaacaggatcacgccctgctgctcgactgccgctcgctggaaacccggctcatccccatgcccaccgatctggcggtgctgatcgtcaactccaacgtgcgccgcggcctggtggacagcgaatacaacacccgccgccagcagtgcgaagccgccgcccgtcactacggggtcaaggcgctgcgcgatctggatctggcggcgctggaagcgggcaaggccgggctggatgaggtctgttaccgccgtgcccgtcacgtggtgggcgacaacagccgcaccctggccgccgccgacgcgctggcgcaaggggatctggtgcgcctcggcgagctgatggccgactcccacgccgccatgcgcgatgacttcgaaattaccgtgcccgccatcgacggtctggtggagatcatcaaggccaggatcggcaccgagggcggcgtgcggatgaccggcggcggcttcggtggctgcgtggtctccctgctgcaccccgacaaggtggccgaggtgatcgccgcggtcgatgccgagtacccggcccgcttcggcctcaaggccgacagctacgtctgccgcgccagcgcaggggccggaa

SEQ ID NO: 249436 - DNA, 856 bp, Unknown
  Bacterial polypeptide expressing nucleotide sequence isolated from the Sargasso Sea
cgtggtgaaacacctgcagaagcgcaataaccattttggcggcgccgatctggtgatcagcggtaacgtaccgcagggggcgggtttaagctcttccgcttcgctggaagtggccgtcggaaccgtgttccagcagctgtaccatctgccgctggacggggcgcaaattgcccttaatggccaggaagcggagaaccagttcgtcggctgtaactgcggcatcatggaccagcttatctcagcgctgggtaagaaagatcacgcgctgctgcttgactgccgcacattaggaaccaaggccgtctccatgccaaaaggcgtcgcggtggtgatcatcaacagtaattttaaacgtactctggtcggcagcgagtacaacacccgtcgcgaacagtgcgagaccggcgcacgtttcttccaacagcctgcgctgcgcgatgtcaaaatcgccgagttcaatgccgttgcccatgagctggatccggtggttgcgaaacgcgtccgccatgtcctgaccgaaaatgcgcgtaccctcgaagccgccaccgcgctggaaaaaggcgacctgaagcgtatgggtgaactgatggcggaatcccatgcctcgatgcgcgatgattttgaaattaccgttccgcaaattgacacgctggtggagatcgtcaaagccaccatcggcgataaaggcggcgtacgcatgaccggcggcggatttggcggctgcgtcgtggcgctggtgccggaagagtgcgtagatcccgttaagcaagccgtcgcgcagcagtatgaagcgaaaaccggcattaaagagaccttctacgtttgcaaaccgtcacagggggccggccagtgctaa

SEQ ID NO: 249437 - DNA, 1173 bp, Unknown
  Bacterial polypeptide expressing nucleotide sequence isolated from the Sargasso Sea
cggctttcattttcctcatgagaccacagtcaaattcccgcgagcgggtgattgaggaattcaaaaatttatatcacaccgatccatccttccttgttcgtgcccccggccgtgtcaacctgatcggtgaacacaccgactacaatgacggttttgttctgccgatggcactcagtcagtcgatctggatcgctctttcctcccaaccaaatcccgaagttgaactgcattccctggattttgaggaatccgtaagagttcctctggaagaaaactatgagaaatcacgaggatggcaggaattcctcaaaggtgttctcgacgagctgaaactcgagggttattcactctctggatggaaaggggtggtcaccggaaatgtcccgatcggggctgggctttcctcttcggccgcttttgaactcgcaattgcgagggctttcaccagcgttggcaactgggagtggcaacccttggaaatggcaagactctgtcagcgggctgaaaacgaatgggtcggaatgaactgcggcattatggatcaaaccatctccgctctcggacaatccgggaatgccctctttcttgattgccgaagcctggaaacccggcaggtggcaatgcctgacaacctccaaatcgccgttatggataccggaacccgacacgaactggtcgactccgcttataatgaacgccgtcttcaatgcgagaaggcagcggcttttttcgaagtcaaagcactccgagatctttctctggaaaaacttctttcatctgagaaagaaatggatccgttggtttttcgcagagcacggcatgtggtgactgaaaaccagagagtccttagtttcatcaaagcccttgaaagcggaactcctgaaaaagcagggcaactgatgaatgaaagccatcagagcttgagggatgattttgaggtttcctcagaagccctggatctcatcagcgaatgtgctcgaaaatctcccggatgttatggcgcacgcatgaccggaggaggatttgccgggtgtggagtggcattggtagatcaattacgatcagctgaattttctagagaattggaaagaaaatataaaactattgcgggtagggcagctaagatttatctctgttctccttctgagggagcagaatccttcaaaatctgaa

SEQ ID NO: 249438 - DNA, 1156 bp, Unknown
  Bacterial polypeptide expressing nucleotide sequence isolated from the Sargasso Sea
gatggaattagtgcaacaagtacagcaggcatttgccgaacattatcaacatcagggcgaatttgcgttcagagcgccgggccgggttaatctgattggcgaacacacggattacaacgatggttatgtattgccatgcgctattaattacgacactgtggttgtggcaacaccacgtaatgacaagaaggtgcgggtgctggcgctggattatcagcagcaagtggatgagtttgaactgacctttccgctggctaaacatccagagtaccaatgggccaactatgtgcgtggtgtggccaacagcctgatgcaaaaaggttttaacctggtcggttgtgacttagccatcagcggcaatgtgccgcagggtgtaggtttaagctcttcagcctccttagaagtcgctctgggcctgacctacagcactttggctggtgttgaactctccagccgtgacaatgcactgaatggtcagcatgcagaaaaccactttgtcggttgcaactgcggcattatggaccagctgatttctgctcagggcaaagtcgctcatgccttattgatcgactgccgcagcctcgacagtacgcctgtatctgtgcccacagatatggctgtgatgattatcaactccaatgtaaaacgtggcctggtcgacagcgaatacaatacccgtcgtcgtcagtgtgaagaagcggccgctatttttgctgtcaaagccttacgtgatgtcagctgggatacttttgtcgccaggcaggatcaactggatccggttgtggctaaacgcgcccgtcatgtgatctctgaaaacgatcgtactgagctggccgctaaagctttagccgctcatgacattaagctgttaagccgcttaatggcggaatctcatttgtcgatgaaaaacgactttgaaatcactgtgcctgctatagatgcgctggtcgaaatgattggtaacaggctgggtgatacaggtggtgtccgtatgacagggggtggttttggtggttgtgtcgtggctttagtgccgcaaggccgggtggatgagattcgtgctttggtggagcgtgagtacccggcacaaacgggtttaactgctggtatttttgtttgcacagccagccagggcgcagagcagattttggcatga

SEQ ID NO: 249439 - DNA, 624 bp, Unknown
  Bacterial polypeptide expressing nucleotide sequence isolated from the Sargasso Sea
gatgatgataaaaatggatttatgactgctattaatggcatggatacaagcaaggggcttgatctattgatccatactcccggtggggaaattgcagctcttgaatcattgggtcaataccttagggctaaatttggtactaacatacgagcttttgtaccgatgatagcaatgtctgctggaaccatgcttgcttgttgcgccaacgaaattttcatgggtaagcaatcgaatatcggccctttcgatcctcagatggggggtatacctgcacatggtattttggaagaggtggagaaggcgaaacaggagattctcgctaatccaggtactgtggcattttggcaattcaatttgcaaaaattgcatccaacctttattggtgattgcgagaaggctatccaatgggcttctgaaatagtctctgattggttgatttcaggtatgtttgcgggtgaagttgatgctgaggataaagccaattcaatttgtcgccagttgaacaatcactccacaacttatgctcattctcgtcatatacatatggataaagcacgagatattggtctgaaaatatcctctctcgaagatgaccaagtacttcaagatcttgtgttgactatt

SEQ ID NO: 249440 - DNA, 825 bp, Unknown
  Bacterial polypeptide expressing nucleotide sequence isolated from the Sargasso Sea
tgatgaagagacaactcatacaagggataaggttcatgaattgttgatgcataacagattgatttctactgattttgaaaatattagaattttaaaaaaggaaaaaattgaaatatctgctataattaaattagatcctttttcattaggagaatctgtattagcagagatttattataaagttgataaattattaaatccagaaattattttttatgattatgatcagatgatcgagttaggttatacagagattgaaattttttctggagttgaaactaaacttggatttattgattcaaaaagtctaacacagaaaacaaattctatatattttggagagatcaaagagttgattgatgggatcacaggggtaagcgaaatagaagaaattagaatttttaaaaatggagtacaaatttttgatgacttaattacatttagtgaaaattcatatccttccttaaaaaaaactattttaaattataatgaggaacaagagaaaatagttttccaaagaaatgattcagtatatggtattgattcagttattttatctcaattatatgattctttaactaccgattcaaagtctacttataagaaaactaaaaatcaatttttaaaagatagtactgcaagatttgaaaaaagtgaaattgaaaattattattcaattcaaaatgaacttccatcaatttatgggttaaaaaaaaatgagctaccaaaaaatgcaaaaaaaaagagggtagctcaggtaaaacaattaaggggtttcttatacttttttgagcaattgatggcaaattatttatcccagcttgc

SEQ ID NO: 249441 - DNA, 511 bp, Unknown
  Bacterial polypeptide expressing nucleotide sequence isolated from the Sargasso Sea
atgggcacatacaaaaagacggtgagcgtcaagggggggcgcaggcgaggccgcgggcgtgggcggggcaagcacgagctagcagacgaggctgctgcccaggatggtggcatcgaatccaagaaggaggaggaggagaaggcagcagaggaacagcagccgcagcaacagcagcaacagcagcagcagcagcagcagcagcagcagtcgcgaagcgcgcgggcggagtcggtgcttcaggcggaggacccgacaaccggcaaaacctactactacaacaagttcacgatgaagaccggttgggacgcagagagcgtgtcccgtagagcaattgaccacaagagcaaaggcaacaaggagaaggagaggccagtggcaaaggaggacagctggtcagccattaccaagacaagaaaagaatcacagttcgattttgcgaacccactccggggcgggagcgtgcggggagatggtgctggtggtgatgcagagactgaggccgccctctgac

SEQ ID NO: 249442 - DNA, 826 bp, Unknown
  Bacterial polypeptide expressing nucleotide sequence isolated from the Sargasso Sea
attaaactattcattaaataataaacccatgcaggtaacgggtgtctcgcttccgggagcgccggcgattgtagtaggcacaaataacaacgttgcatgggggtttaccaacgggtatttagataccgccgattggattgcgcttaatagcgatagcaaaatgtggcaagtagatgagcctattgcattacccagtggcaaagtagaaagttactctcttacgctcagtgaatacggtccggtaaaatacattaatgaaaagccttatgcactgagctgggctgcacatcaaccatacgccgttaatatgcagctattacagcttgagcaagcacagagtgttgatgatgcgcttgatattgcaagtgacgtaggcattcctgtgcaaaacctgctggtggtcgatgaccaaggaaatgcagcatggaaaaatatgggcggcatacctgcgcgaacaacacctagtgaattagccgtaaaagaagaagattactccgcgctttggcagcaaaacgaaatcgatcgaccttttattaaaaatcctgaaaacgggcgattgtggacaggtaattctcgagtggtatctgctgatgataacgtccgttttggtaatggcggctatgcgcttggagcacgtgcaacgcaaattcgcgataggttatttgaaaaacaacgctttaatgaaagtgatttttatcagttgcagttagataaccaagcacgatttttaatgccttggcatgccttattgcttgagcagttaaaaaagcagcccacgcgctataaagatcatataaatgccctcgaaaactggcagcaatgcgct

SEQ ID NO: 249443 - DNA, 747 bp, Unknown
  Bacterial polypeptide expressing nucleotide sequence isolated from the Sargasso Sea
gctggatcgccgcaccttccttccgaagatttacgggtgttactcgatcaagattgaccaattcggccctccgaggtacttcttcgtcatggagaacgtcttcccggccggcgagacgtttcccaagcaggcgacgaaggacgtgtcgcaggtcgtggacgaaagctacgacctgaagggctcttacatcgcgcgcaatgccgactccctgaagccggggtcgtcgaggaagtgcatgtactgcaacgaagacatgaagatcggcgtgccgcaggtgtgcgactcgggcgtctacaccaactgtgcgccagcgcggctgctaaaggactccgacctgcgcatgaaggcgatcctcagcaaggaggatgacgacacctttcggaagggcgccaacgcggacatcgcgtggctccagagtcaggagatcaccgactactcgctcctgctcggtgtgcagcgtcggcgcgttcgaagcgacacggccatggataggaagtactcggggggaaagtcggagttcagcatgctcgacggaggagcgggctccgaagagtcctcgttcgcctccttcgacggtttcaacgttcctgtgttcgaggggccggcggtgtactacgtgggcatcatcgacgttttgcagcaatggacgttctggaagagggccgaaaggttctacaaggtgtacatccagatgttggatcccgacggagtctcctgcatgaggccgggaggattatgcgcaccgct

SEQ ID NO: 249444 - DNA, 219 bp, Unknown
  Bacterial polypeptide expressing nucleotide sequence isolated from the Sargasso Sea
aatgagatcaaaaaaaatacaacaaaaatctttcactaaagaattaatagcaagtttttctaagaggaacaaaattattccctctaaattccattacgacttaaaaggaagtagatattttgaaaaaatcacaaaaacaaaagaatattatgtaacaagggtagaaaaggaaattcttaataagatatccgaccaaataaatgaaatttttggaaataa

SEQ ID NO: 249445 - DNA, 1396 bp, Unknown
  Bacterial polypeptide expressing nucleotide sequence isolated from the Sargasso Sea
gcttttatactgtgccttttattagtaatcttaaatggatgtaataatgattcaaaacctaacataatttggatcacaattgaagatcaatctcaatatttactaccatttaatggtaatcaagatgtatcactcccaaatcttgaaaaaattgcaaaagaaggtttaatatttcaaaatatgtatgctccctatccagtatgtgctccagctaggagctccataattactggaatgtatccaaactcaattggaactcacaacatgagagccttaagttatggaacttataaaaagacaggtgagtttggggaacgtaatgagagtgaaaaagttttaggtattccaaggtattcatctaaaattgctgaatcaataaaaactttcccaacaattttaagagaaaacggatattttacatttaacaaagctaaaggtgattataactttataataagcgattcaacttggtctgaatatggaactagaaaaaaatttaataaatcagatactcctttttttgcagtatataattataatataactcatgaaagtagtatgtggcagagagataaagaaccattgatggtagatccaaacaaactcaatgttcccccaatatttcctgacgattcaattgtcagacattctctagctgttaattattcaaacttaattgaaatggataaacaagtagggaaattagttgatgatttaaaaaaggagggtttatatgatgattcgtatatatttttttatagtgatcatggaggcccctttcccagacacaaaagagcgatttatgaaacaggaacaaaagttccattttttgtaaaatttccaaaaggtaaatatgaaagtatagataaaaatcagtttttaagctttgtagattttgccccaacaacactctcaattgcaggaattgaaccacctggtttcttacaagggaaagcttttcttggtaaatataaagatgagtctcaaagagaacatttatttactgcaagtgatcgttttgatgaaaaccctgacagaattagagctgtcagagatgaaaagtttaaatatattagaaattatttcccagaaaactctcacgctctaaatgtagcttatagaagacaaatggttctaatgagacatttgactactttacatttaacgggaaaattatctgaggaacaagatttatggttcagggttcctaagcttaaagaggaattatatgatttagaaaatgatccattcgaattaaataatctatctgataatccagaatattctaataaattgaagaatttaagtgatgtacttgataattggataaaagaaatagatgatttaggaagaatccctgagaaacaactatacaaaatgatttctagtgattagt

SEQ ID NO: 249446 - DNA, 3007 bp, Unknown
  Bacterial polypeptide expressing nucleotide sequence isolated from the Sargasso Sea
attgattacggctcttcaagcacagacagaacctgtaaaggatattcatagaaacgatcctcgtgtctgggccttaagccatgctatggtacacacagagcctggagattctattaaagatgctaccatcattgtaagggacggaaagatagaaaaagtaggtcgatatattcagattccccttgacgcgtatgagatcgatatggaaggagctcatatatatgcaggattcatagatggctggcttcaaattaaaaaagatgaaaaaacaaaaagtcctgatgatcattggaatgaaaagatcagagccgagtatagggcaaaggatgacctaaagctcaagaaaaaagagctaaaggcacttcattcaataggaatcacagcagcgcatgttgttcctgaaaaaggcatttttaaagggaaatctgatcttgtagttctaaatgatgacatggtgtctattgcaaaggatgtgtctcaagtattagagttcaagacaacaggatggtcggacagaggatatcctaattctttattaggtgtcatcgcagtaatgaggcagacctttatggatgcagattggtatcttagatcacttgagatctttaataaatatcccgaggagaatgaggtccttcctcttaacccctctctttcagaattaggcagatatcacgccaacagattaccaatacttttcatgacaaaagaagagcatggtgcattgcgatcactaaagatcgctgaagagttcaaccttaatccgtggcttcttggtagtggatatgaatatcgcagattgaaagagatcgctcaattcaatccattcattatttttccacttgattttccaaacaaaccaaaagttaccgacccacatatcgccttgcagttctcaaatgagcaactaaaacattgggatatggctccagataacataaaaaaagcctttgatgctgacctacgttttagtcttacatctggaacgcttaagaacaaaaaagatttcagaaagaatcttcaaaagatcattgatcgtggactatcacaggatgttgcactagcggcgcttaccacatacccagctgaagcaatgggagcggaaaagatactaggcaagatccaacctggttatatggcaaacttagttgtaacagatggtaattattttgatacaagatctagggtcacatcgatctggcttgcaggaaaagaaaaatatattactgatcgccataaacctatcatcgcaggaaaatgggagctagagatagataaaaacacctacgatctagagttctcagttccaagtacatataaaaagaccagcgatctaagacagaaagcattggcgaccaataaactggaaggcaaggtcaaaataggtgatgaaaccttgaacttggtggacctaagaatttcaaataaagtaattgaattcaaagtaaaggggactttacttggtgtagatgcaatgcttgcattcaaaggccagataaagaaagatcaattcaaggggaaggtaaacgatggaacgaaaaagggtcttactttcaaagcaaaacgaactgttgatattaagcccattatcaggcaaaaagatatagcaagtgatctagaactatatcatcctgaaggggcatatgggttagataaggatctgttatctccaaatgctattctaattgataatgctaccatatggacctgtggcccgaaagggattgttgaggaatgggatattctttttgtaaatggcaaggtcgataaggtagcacccgacattagtgttcctatgggtagcgctcttttaattgatggcacaggtaaatatgtgaccccaggacttattgattgtcatagccattcagcagcatcttccattaatgaaggggctcaagctgtaactgcggaagtgaggataaaagacgtattatttgctgatgatgttaatatttatagacagctagggggaggattgaccacagccaatgtgttgcatggttcagcaaatcctattggcggtcaaaatgcagtcataaaactaaagtggggctcaaccccagaggatctaatttttaaaaatgccccagaaggaatcaaatttgctctaggagaaaatgttaagcaagccaattgggctgggacagggcggtacccccagacccggatgggtgttgagcaagttataagggatgctttccgtgctgctcaggattatagacatagacataaaacatatgacaggaattcaaaagcccaaagaaagatcataccaccaagaagagacctagagcttgaagccttggctgaaatattagaagggactcggcttttacactgccattcatatcggcaagatgaaatatggatgttgacgcggatcgctgaagattttggatttaagatcgctacgttccaacacgttcttgaaggctataaagtagctgagcgtctggccgagcatggcgcaggggcatccactttttcagattggtggcagtataaatatgaggtgatcgatgcgattccctataatggaactctaatggcaaataatgatgttctcgtttcatttaactcagatgactctgaattagctaggaggatgaatacagaagctatgaaagcagtaaaatatggtgatctatctgaggaagaggcattacacttcgtaactatcaaccccgcaaaacaattaaaaatagataaatgggtagggtcattagaagaaggaaaacatgcagattttgtgatttgggatggcccgccattgtctatatactctaaagtacaggagacctggatcgaaggtactaggtactggtcggttgatgagaatgctcaattagaagatagggataaaacagagagaagaaatctgattcaaaaaatattgagctccaggacctcttcttttggcaaagatatgaagccaaatagtggtacgcctcaacatcataattgtctaatggatgatgatgatctagtggaatcagagttttga

SEQ ID NO: 249447 - DNA, 574 bp, Unknown
  Bacterial polypeptide expressing nucleotide sequence isolated from the Sargasso Sea
atgaacataattatatttggaccaccaggcgctggtaaaggaactcagtcagattatatagtgaaaaaatataatctatttcaagtttcaacgggaaaaatattaagagaagaaataaaaaataaaactgatttgggtcaaaaaatttcttctttaataagctcaggctcactggttgaagataaaattgtaaataaattaattgaagaaatagtttctgacaaaaaatatgaaaatagatttatatttgatggctatccaagaaatttagatcaggcatcaaatttagataatttattacacgagaataaacaaaaaattgatatagttttaaaactttctgtaagtttagaaacaataaaaaaaagaatttcagaaagaagatctattgaaaaaagaccagacgataatgaagaagtagctattaaaagatacaaaacttatgaaaaatcaacagaaccaataattcattattataaaaaattgaatttattaaaagttatcaatggtgagaggtcaattgatcaaataaataaagaaattagcggtattattgatatcctccaggcttgac

SEQ ID NO: 249448 - DNA, 861 bp, Unknown
  Bacterial polypeptide expressing nucleotide sequence isolated from the Sargasso Sea
tcatcgcggtcatattgttattgtccctaatgttcaggtatgcgcccgcttccacgagcacattcaccatctccgcggcgtgcctgcccccaaactgtgcggcgagtatcagcgcggtcttattgttactgtccctactgttcagttgtacggcgtccgctttcacgagcacactcaccatctccgcggccccaaaccgtgcggcaagcatcagcgcggtcgatccgccattattgtccttcgcgttgaggtccgcgcccgcttccacgagcacactcaccatctccgcggcctgcctgcccccaaaccgtgcggcaagcatcagcgcggtcgatccgccaatgtccttcgcgtcgaggttcgcgcccgcttccacgagcacactcaccatctccgcggcgtgctcgcccccaaactgtgcggcaagcatcagcgcggtcgatccgccaatgtccttcgcgtcgaggttcgcgtccgcttccacgagcacactcaccatctccgcggcgtgctcgcccccaaactgtgcggcaagcatcagcgcggtcttattgttaatgtccttcgcgtcgaggttcgcgcccgcttccacgagcacactcaccatatccgcggcgtgctcgcccctaaactgtgcggcaagcatcagcgcggtcttattgttaatgtccttcgcgttgaggtccgcgcccgcttccacgagcacactcaccatatccgcggcgtgctcgcccctaaactgtgcggcaagcatcagcgcggtcttattgttaatgtccttcgcgttgaggtccgcgtccgctttcacgagcacacgcatctcctcaggggttccctttttaacaacctcaaagatatgaa

SEQ ID NO: 249449 - DNA, 744 bp, Unknown
  Bacterial polypeptide expressing nucleotide sequence isolated from the Sargasso Sea
aaaaggttgatggagcattacaagacagtgttccagaaggctttgagatgctttatgacaacttttcttcaggtattcttggacttggaacagctgttgtagcttatttcggtctttcaccaattttgacagcattttctgacggattaggaaattttgcttcaggattagttgatagtggtttagtaccattagcagacattcctatcgaagtggcaaaagtgctgtttttaaataatgctgtaaaccacggtgtcttgacaccattaggtgcagctgaatctgctgaaatgggtaagtcaatctttttcatgttggaagctaaccctggtcctggactaggattgctacttgcatattggtttgctggtagtggtatgtggaaagcttccgcaccaggaatgataattatccatttcttcggtggaattcacgaggtctactttccatacgttctagcacatccaattatgattattgcgatgtgggctggtggaatctcagcagacctttggttcgtagctactgatgcgggactagttggtcctgcctcaccaggaagtatatttgctttcttggctatgacaccgcgaggtggcacaggtgctgtattaggtggtattgcaataggagcagtcgcttctgctgttgttggtactttactgcttagagtacgaccaataaaagaaactgatgctggagtagaagatgcaattgattcttcaattccaggacttggttaag

SEQ ID NO: 249450 - DNA, 665 bp, Unknown
  Bacterial polypeptide expressing nucleotide sequence isolated from the Sargasso Sea
gttggatacttgcagtagtagtttacagagggctttcaccaatttacaagccattacagatggtttaggaaattttgctgcaagcatggtagacaatggtttagttccattagcagatatacctattgaggtagctaaagttctattccttaacaatgcagttaaccagggagtcttgactccattaggtgtagccgatgctgctgaatcaggaaaatctatatttttcttgcttgaaaccaatccaggacccggtcttggattattgcttgcttattgggtagcaggaactggtatgtggaaacaatcagcacccggctcaataatcattcatttctttggtggtattcatgaaatctatttcccatatgtcttgggtcatccaattatgattcttgcaatgtgggctggtggaatatcagctgacatttggttccaaataactaacgcaggattagttggtcctccgtcacctggtagtatttttgcatacttagcaatgcttccaagagatggtgcagccaatgttctgattggtgtagctataggtgctgttgcagcagcagttgttggaacaattctgttaagagttcgaccaattaaagaaactgatgcaggagtagatgaagctattgatacttcaattccaggagttgatgtataag

SEQ ID NO: 249451 - DNA, 790 bp, Unknown
  Bacterial polypeptide expressing nucleotide sequence isolated from the Sargasso Sea
gatggtccatggtcacagaggtggcgtaatgggtgtagttgtaacacagcaaatgtgggttgggtctggtggaatggacggtcccccacaatttttaggagctatgatggtaggacctgcttctgcttgggtacaaaagaaagttgacggggtattgcaaccagcaacacctgaaggctttgagatgttagtagataacttctcattaggtattctagggacaggactttccatacttggagtaacacaggtaggtaaagtacttactggagtcactgaagcacttggcagtatggctaagggaatagttgatgctggtttagtgcctcttgctgatattccaattgaagtagctaaagtactatttttaaacaatgcaatcaaccacggtgtattaggacctcttggagcagaagaagctgctgagactggtcaatccatctggttcttgcttgaaacaaatccaggaccaggtcttggtttgttgcttgcatattggtttgcaggtactggaatgtggaagcaatcagctccaggttccattatcattcatttctttggaggaattcatgaaatttacttcccatatgtattaggacatccaattatgattctaagtatgtgggcaggtggaatttgtgctgacctttggtttatggttatgaacgctggtttggtggcaacaccttcaccaggaagtatttttgcatacttacttgttacacctaagggtggacatttagctgtattaggtggtgtattgataggtgcagtagcatctgcagtcgta

SEQ ID NO: 249452 - DNA, 697 bp, Unknown
  Bacterial polypeptide expressing nucleotide sequence isolated from the Sargasso Sea
gctttatgacaacttttctttaggtattttaggacttggtacaagtattgtaaccaatctaggtctatcacctattttggtagcaatctctgacggattaggaaatgctgctggtagcttagtcgaaaatggactagttccacttgcagatattcctattgaagttgccaaagtattgtttttaaacaatgctgttaaccatggtgtattaacaccgcttggtgcagcagaatcagctgaagtgggtaaatcaatttatttcatgcttgaagcaaaccctggtcctggattaggattgcttcttgcttattggtttgcaggttctggtatgtggaaagcttccgcaccaggatcaatcataatccatttctttggtggaattcatgaggtttacttcccatatgtattagcacatccaattatgattgttgctatgtgggctggtggaatctctgcagacctttggttccaagcaactgatgctggattagtaggtcctgcatcgcctggaagtatatttgctttcttgtcgatgacaccaagaggtggagcagtaggtgtattaggtggtgttgcgatcggtgcagttgcttcggcagttgtaggtacattactacttagagcacgaccaattcaagaaactgatgctggagtagaagacgaaataagtacttcaattccaggagttgatgtataa

SEQ ID NO: 249453 - DNA, 811 bp, Unknown
  Bacterial polypeptide expressing nucleotide sequence isolated from the Sargasso Sea
tattgttgcaacttcttcacctcagttcctaggcgctatggtcatgggaccagcagcagcttgggtaatgaaacaagttgacgacagattacaagacagtattcctgaagggtttgagatgttatatgataacttctcacttggtattttaggttggggtctttctgtcatagcttataacgttataagtccagtacttgacgctatcacacaagctttaggagacggtgcagcagcacttgttgatagtggattagttccactagcagacattcctattgaggtagctaaagtattgttcttgaataatgctgttaaccaaggtgttctaacacctctaggtgcagctgagtcagcagaagctggtcaatcaatttatttcttgttagaaactaacccaggtcctggacttggattgcttctagcttattggtttgctggaactggtatgtggaaagaatccgcacctggctcaatcattattcatttctttggaggaatccatgaaatctacttcccatatgtccttggtcatccaattatgatcatagctatgtgggctggtggaatttcagctgacctctggttcgtagcaactggagctggtttagttggacctccttcaccaggaagtatttttgcatatattgctatgcttcctagaggtggggcgttcccagtgttagctggtgtagcgatagcaacagcagcatcagcagtagttggtgttatcttgctaagagcacgtcctattaaagaaacagatgcaggtgtagatacagtaatcgagagtaatatacctggtgtctaa

SEQ ID NO: 249454 - DNA, 1069 bp, Unknown
  Bacterial polypeptide expressing nucleotide sequence isolated from the Sargasso Sea
atgaaagaattcatacaacgcgttggtggtgctgcgtcaggaatggttattcctaacattggtgccttcatcgcttggggattaattacatccctgtacattggacctggctgggcaccaaatgaagatttgagctcaatggtcggaccaatgattgtaaaccttctcccattattaatcggttataccggtggaaaaatgatatatggccacagaggtggagttatcggcgcagttgtcacaatggcagctattgtcggaacagacagtccacaattcttgggtgctatgttagttggacctggagcagcaaaagttcttaaagaacttgatgcaagactccgtgataatgtaccggaaggttttgagatgttatatgacaacttctcatcaggtatccttggttggggacttgcagtatttgtttattcatttcttgcaaacattctccaagcagttgcagacggcttaggaaactttgctgctggtatcgttgatgctggtctagttcctttagctgacatacctattgaagttgcaaaagtgttgttcttaaacaatgctgtgaaccacggtgtgttgacacctcttggagctgcacaagctgcagaagaaggaaagtcaatatattatatgcttgaatcaaatcctggaccaggtctaggtttgcttattgcatactacattgcaggaactggaatgtggaaacaatcagcaccaggttctataattattcatttcttcggtggaattcatgaaatttacttcccatatgtattaggtcatccaattatgatcgttgcaatgtgggctggtggaatttctgccgatctatggtgggtagccacagacgctggtcttgttggacctccatcaccgggtagtatttttgcatacttagcaatgttacctagaagtggtggtgcgaatgttctgattggtgttgctattggagctgttgcagctgcagtagttggaacgatcttattgagagttcgaccaattcaagaaacagacgctggagtcgacgatgctatcgatacttcaattccaggagttgatgtataag

SEQ ID NO: 249455 - DNA, 1063 bp, Unknown
  Bacterial polypeptide expressing nucleotide sequence isolated from the Sargasso Sea
aatgaaagaatccatacaacgcgttgggggcgcgatggcaggaatggttattcctaacatcggagctttcattgcttggggtttgattacagctctctttataccaacaggatgggtacctaacgaaggtctatctgaaatggttggtcctatgatcgtgagcttgttaccaattcttattggttatacaggtggaaaaatggttcatggacacagaggtggtgtaattggtgcagttgtaacaacagctattgttgttggttcaactactcctcaattcttaggagctatggccatgggtcctttggcagcatgggtacaaaagaaagtagacggagctttgcaacctgcaactcctgaaggctttgagatgttagttgataacttctcattaggtatccttggaacaattcttgcggttgtaagcaagaacgttatcggtccaattctgcaaggaataaccgatttcttaggaaatgcagctggtgcattagtagacgcaggtctagtaccattagcagacattcctattgaagtagccaaagtactatttttaaacaatgcaatcaaccacggtgtattaggaccacttggagcagctgaagctgctgaaactggtcaatccatctggttcttgcttgaaacaaatcctggaccaggtctagggttgttgcttgcatattggtttgcaggtactggaatgtggaagcaatctgctccaggttccataatcattcacttctttggaggaattcacgaaatttacttcccatatgttttaggacatccaattatgatcctaagtatgtgggcaggtggaatttctgctgacctctggttccagattactggagctggtttggtggcaacaccttcaccaggaagtatatttgcatacttagctgttacacctaagggtggacactttgctgtgctaggtggtgtattgattggagcagttgctgctgcagtcgttggtacaatcatcttaagagcaagaccaataacagaaactgatgctggagttgaagacacaatcgacgtcaacgttccaactgcttaa

SEQ ID NO: 249456 - DNA, 1432 bp, Unknown
  Bacterial polypeptide expressing nucleotide sequence isolated from the Sargasso Sea
catgttaaaaaatgctttctctaatctgcaaaaggtcggtaaggcgctgatgctgccagtatcggtcttgcccgttgcaggtattctgctgggggtgggtgctgcccacttcagctggttgccggaaattgtctcccaattgatggagcaggccggtggttccgtatttggtcagatggccctgctgttcgcagtgggtgtggccctcggctttaccaataacgacggtgtatccggtctgtcagccatcgtcggctacggcatcatggttgccaccctgaaggtcatggcgcctgtgatgggcgttgagaccatcgaaaccggcgtcctgggcggtatcctcgccggtggcgtggccgcatgggcgttcaaccgcttctacaagatccagttgcccgagtatctgggcttcttcgccggcaaacgcgccgtgcccatcatcaccggtttcgtctccatcggcctgggcgtgatcctgtccgtcatttggccgccggtgggcgctgccatcggagccttctccgactgggctgccaaccagaacccggtactggccttcggtatctatggcgtggttgagcgctccctgatcccgttcggtctgcaccacatctggaacgtacctttcttctatcaggcgggtacctgtgtcaacgctgccggtgaaaccgtacacggcatcatgacctgcttcctgactgctgacgacgcttcccgcgctgccggcaacggcttcggtcagctggccggtggctacctgttcaagatgttcggtctgcctgccgccgcgtttgccatcgcgcactccgccaagccggaaaaccgcgccaagatcgtaggtatcatggcctctgccgccctgacctctttcctgaccggtatcaccgagccgatcgaattctccttcctgttcatcgccccggtactgtacgccatccacgctgtgctggctggtctggcctacgtgctgaccaactccctgggcgtggttcacggtcacaccttctccaacggcttcatcgacttcgtggtgcaatccccgcgtgccgatcacatgctgctgctggtgggtctgggtctggtctatgccgtcatctactacgtggtcttcaccgtggtcatccgtgccatgaacctgaaaaccccgggtcgtgaagacgaagcggccgaagagagcgttggtcagagcaaggacgagatgtctgccgcactggtctctgccttcggtggcaaagagaacatcgcttcgctggacgcctgcatcacccgtctgcgggtcggtgtgaaagacgtggccaaggttgaccaggctggtctgaagaaactgggcgctgccggtgtggtagtggcaggttccggcgtacaagccatcttcggtaccaagtccgacaacctgaaaaccgacatggacatctggatgaagagcaactaa

SEQ ID NO: 249457 - DNA, 1112 bp, Unknown
  Bacterial polypeptide expressing nucleotide sequence isolated from the Sargasso Sea
catgttatcaccggataccaaagtcaagatacagaattttggacgcttcctgtccaatatggtcatgcccaacataggcgccttcatcgcctggggctttattaccgccctcttcatccccaccggctggctgccgagcgaaaccttggccaagctggtcggccccatgatcacctacctgctgccgctgctgattggctataccggcggcaagctgatgggcggtgagcgcggcggcgtggtcggtgccatcactaccatgggcgtcatcgtggggaccgacattcccatgttcatgggcgccatgatggtcggcccgctcggtggctgggccatcaagcgtttcgacaaggcgatggaaggtcgcgtcaagagcggcttcgagatgctggtcaacaacttctccgccggcctcatcggcatgctgctggcgatcctcgccttcttcgtgatcggccccttcgtcaaggtgctctccggcgtactggccggtggcgttggcttcctggtggacaacaacctgctgccgctcacctccatcttcgttgagccggccaagatcctgttcctcaacaacgccatcaaccacggcatcttctcgccgctggggatccagcaggccaccgagcatggccgctccatcttcttcctgatcgaagcgaacccgggcccgggcatgggcgtgctgctggcctacatggtattcggtcgcggcgccgccaagcagtccgctgccggtgcctccatcattcacttcttcggcggcatccacgagatctacttcccgtacgtgctgatgaacccgcgcctcatcctggcggtgatcgccggcggcatgaccggggtgttcaccctgaccctgttcaacgcaggtctggtctcccccgcctcaccgggttccatcttcgccgtgctgttgatgacaccgaaagcctccctcatcggggtgctgctctccatcgtcgcctccaccaccgtctccttcctggtcgccgccgtgttcgtgcgtgcccagcagccggaagccgacgaggccgatgccctcggtgaagccacccgcaagatgaaagccatgaagggtgccaagcccgagaccgcagcggccaagaagc

SEQ ID NO: 249458 - DNA, 492 bp, Unknown
  Bacterial polypeptide expressing nucleotide sequence isolated from the Sargasso Sea
tatgagattatttatcattgggccaatggcttcaggaaagtctttactaggaagaaaattatctgaatatttagaccttccttatgtagatacagataaagaaatagaattaagagctggggctgaaatctcctggatctttgaaaaagaaggagaagaaggatttagagatagagaatcagctgttttaaaagaaagctcagaattagaaagtttcattatatcgacaggaggaggagcaattcttaggaataaaaatagagaattaatgagatcaagaggaaaagtaatttatttagagacacccattgaaattcagttatctagaactttaaatgacaaaacaagacctctaatagaaaatgtagacaagaaggaggtttttagtgcattaagcaaagaaagaatacctatctatgaagagttatcagatattaaagtgccttttaaagatcgaagtaaagatgaacttcttaatacagttctaaaatt

SEQ ID NO: 249459 - DNA, 505 bp, Unknown
  Bacterial polypeptide expressing nucleotide sequence isolated from the Sargasso Sea
tatgaatatatttattgttggtccaatgggttccggtaaatctaccgttggtaaaattatatctgatgaattgtttttaaacttttttgatacagatgatgaaattgaagcaagaacaggagcatcaatagattggatttttgatttagaaggtgaagacggcttccgtaaaagagagagcgaaatgcttgatgagatggttaaaaaaaattcaattgttctgtccactggtggtggaataatattatcaaaatcaaatagagaattattgtcatcaaggggaactgtattttatttgtctactccaattacaacacaagtagagagaacttcaaaagacaaggatcggcctttattaaaaaatggaaatccaagtgaaatactcgccaaacttcatgatgagagagaaggattctataaggaagtatctgaccacataattaatacagaaaataaatcaagccaagaagtggcatcggaaataatacaggttattaagatatag

SEQ ID NO: 249460 - DNA, 193 bp, Unknown
  Bacterial polypeptide expressing nucleotide sequence isolated from the Sargasso Sea
aatgaggctaataattatcggctctatggcttccgggaagtctaccgtaggcagaaaactttctaaaaggttaggtcttgatttttttgatatagataatgaaattgagaaaaaagccggagctaaaatatcttggatttttgatgttgaaggtgaagaaaaatttagagacagggagtatgaagctttttag

SEQ ID NO: 249461 - DNA, 517 bp, Unknown
  Bacterial polypeptide expressing nucleotide sequence isolated from the Sargasso Sea
catggctaatcaatcagacaatatcatcctcattggtccaatgggctctggaaagacatctacaggaagaattcttgctaaagaaacgggctttgatttcatagacaccgatgaagcgattgtagaaagcacaggcgtttctatagcctacatttttgatgttgagggtgaggctggctttagaaaaagagaacataaagaactgatgaaattcttagacaatgacaaaatcgtgattgcaactggaggaggaatcataacgcataataaaagtagagcgattcttcaagaccacaaaagagttgtctatttgaaaacaagcattgaaaaacaaattgaaagggcaacggtttctgacaagaggccgctgttaattgacacagatcctgcatctaaacttcaggagttaatgttgacaagagagcccctctatgaagaaataagcgatatcaagatcgatacgaatgagagaagaccaagtgaaattgctcttgagattatcgatagattgagatga

SEQ ID NO: 249462 - DNA, 267 bp, Unknown
  Bacterial polypeptide expressing nucleotide sequence isolated from the Sargasso Sea
tatgaatatttatattgttgggcctatgggatcaggtaaatctactgttggtaaaatagtagctcgctcgctttttttagatttcttggactctgacgaagagatagaaaaaacaacaggtgctagtattgattggatttttgatcttgaaggagaggaaggatttagaataagagagacggctgagcttgaaaagatagtgcaactaaactctcatgttgtcgctactggtggtggaatattttatctgatcacaatagaaatctt

SEQ ID NO: 249463 - DNA, 511 bp, Unknown
  Bacterial polypeptide expressing nucleotide sequence isolated from the Sargasso Sea
ttgaaaaaaaaccttgtattgattggaatgatggcggtaggaaagtctactattggacgactattatcaaaaaaattaggcatggagtttgctgatctagataatacgatagaaaggagagagtccttaaccatcaaagaaatttttgataggaaaggagaggcatattttagaaaaattgaagaaaacgaaggtctcaatattataaaaaatggagcaaaaattattgcattaggtgggggtaccttcataaacgataaagtaagagaggaagttaaaaagacatgtttttctgtttggctagatctctcttcaactgagatatttaaaagagtggaaaaaagtaagtctagacctttattgcttaaagcaaaatccgttggggatattgaaaatatttactcaagtagaaaaaaaatatattcattagcaaattatagattagattgtgcctcaaaaaacacagaaagtattgttaatgaaataatagaaatttatgaaaatatctaaa

SEQ ID NO: 249464 - DNA, 349 bp, Unknown
  Bacterial polypeptide expressing nucleotide sequence isolated from the Sargasso Sea
aatggctggtaacgccgcgaatctgcggctatttatgattgggcccatgggctcgggcaaatcgacggttggcaggcatctggcggatctgctggaatgtccctttatcgactccgatgccgagatcgaatcccgggcgggtgccgatataccctggatctttgatgtagaaggcgaggcgggttttcgccgccgtgagaccacggtgctgaaggatcttgtcgagcatccggcagcggttatcgccaccggcggcggtgcaatcctggcggcggaaaaccgtgaaatgatggcgcgcgcaggcgtggttgttttcctcaacgtgtctgtagcgcaacagctgaaaagg

SEQ ID NO: 249465 - DNA, 362 bp, Unknown
  Bacterial polypeptide expressing nucleotide sequence isolated from the Sargasso Sea
tatgaatatttttattgttggtccaatgggttccggtaaatctaccgttggcaaaattatatctgatgaattatttttaaattttttcgatacagatgacgaaatcgaagcaagaacaggtgcatcaatcgattggatatttgatttagaaggcgaagatggtttccgtaaacgagaaagtgaaatgcttgaagaaatggttaaaaaaaattcaatagttttgtctactggtggtggaataatattatcaaaattaaatagggagctattatcatcaaggggaacagtcttttatctatctactcctatttcaacacaggtagagagaacctctaaagataaggatcggccattgttaaaaa

SEQ ID NO: 249466 - DNA, 520 bp, Unknown
  Bacterial polypeptide expressing nucleotide sequence isolated from the Sargasso Sea
ctgaaaaacaacattattttgattggcccaatgggctcgggcaagacctcgattggcaaaaaactgtctaaaatgatgaaatttgatttcatagatacggatcatctaattgaaaacagaactggggttgatatttctacaatatttgcacatgaaggtgaagaaggttttagaaaaagagaaagtaatattttaaaagaattatctaatattaaaaatacagttctaggaactggtggaggaataataatctctcatgaaaatagagaagtcataaaaaatttaggcttcgttgtgtatctaactgccagcattaaagaacttacttatagaacagaacaagataaaagtagacccttgattaatagcgccaatactcaagaagtcattgctaacctaataaaagaaaggcaagaatactatgaaaaaacatctaatatcaaaataagtactgataattatgatacagtaaaaatatcaaaaattattattaaagattatgaaaaaaataatagttaaa

SEQ ID NO: 249467 - DNA, 493 bp, Unknown
  Bacterial polypeptide expressing nucleotide sequence isolated from the Sargasso Sea
atgaggctaataattatcggctctatggcttctgggaagtctaccgtaggcagaaaactttctaaaaagttaggtctagatttttttgatatagataatgaaattgagaaaaaagccggagctaaaatatcttggatttttgatgttgaaggtgaagaaaaatttagagacagggagcatgaagcttttagctctcttactactaatgaaagttgtgtgatatcaacaggcggcggtatagttttaagagaggaaaatagagaattattgaataaaggtacagtaatatacttggaaataagtattcaaactcaattagaaagaactattaatgatcaagataggcctcttctttatggggttgataaagaaaagacactcagaaaaattgctgagatacgcaatccaatatatgaaacttatagcgatataactataaaagaaacaaatgatccaaatgaagcggtagatctgatcgttacaaagttataaa

SEQ ID NO: 249468 - DNA, 475 bp, Unknown
  Bacterial polypeptide expressing nucleotide sequence isolated from the Sargasso Sea
catgactaatcaatcagacaatatcattctcattgggcctatgggctctggaaagacatctacaggaagaattcttgctaaagaaatgggctttgatttcttagatacagatgaagagattgtggaaaggactggcgtttctatagcttatattttcgatgttgagggcgagactggctttagacaaagagaatatcaagctctgatgaaattcttagataatgacaatgttgtgattgcaactggtggaggaatcataacgcatgatgaaagtagagcaattatccagagtcataagagggttgtctatctgaaaacaagaatcgagaaacaaattgaaagggcaacagtttctgacaagaggccattgttaatcggcacagaccctgcatctaaacttcaggagttaatgttgacaagagagcctctctatgaagaaataagtgatatcaagatcgataccgacgagagaaaa

SEQ ID NO: 249469 - DNA, 496 bp, Unknown
  Bacterial polypeptide expressing nucleotide sequence isolated from the Sargasso Sea
ttgattggaatgatggctgtggggaaatccactataggtagacttttatccaaaaaactgaatttgccatttgaggacttggacgagaaaattaaaaacaaggaatcattatcaattaaagacatttttagttttaaaggtgaggattattttagaaaaattgaagagattgagtgtttaaagataattcaagatactggtaaaattatagcttttggaggaggcacttttatgaatgaaaccgtcaggaacaaaatgaaaaatacatgttttaccatttggcttgacctctctcctaaaaaaatttttgacagaattaaatctaacaaagatagacccttattatctaatgttaagacaattgaggaggttgatgatatatacttaagaagaaaaaaaatatattcattagcaaattataaaatagattgttcgtctaaaactaaagaaattataattagtgaaattgaaaatatctatgaaaatatcaaaaatt

SEQ ID NO: 249470 - DNA, 395 bp, Unknown
  Bacterial polypeptide expressing nucleotide sequence isolated from the Sargasso Sea
aacaggtgctagtattgattggatttttgatcttgaaggagaggaaggatttagaaaaagagagacggctgagcttgaaaaaatagtgcaactaaattctcatgttgttgctactggcggtggtattattttgtctgatcataatagaaatcttcttagtgctagaggagttgtaatttacttagaaactcctataaaaacccaggttgagagaacaagtaaagataaagataggcctttattaaaagatggtgatccagaaacaatacttacaaaacttagtagtgagcgagagcacttatatagagaggtatctgactatgcaattcaaacgagtgataaatccagtcaagaagttgcagatcaaataataaatattattaagaataaataat

SEQ ID NO: 249471 - DNA, 511 bp, Unknown
  Bacterial polypeptide expressing nucleotide sequence isolated from the Sargasso Sea
ttgattcttgtagggccgatgggggctggaaaaagcaccatcggccgtttgctggccaaagagctgcgcctgccgttcaaagattccgacaaggaaattgaattgcgcacgggtgccaatatcccatggatcttcgataaagaaggcgagctgggctttcgtgaccgcgagcaggcgatgattgccgagctgtgcggctgcgatggcgtggtattggcgaccggcggtggcgccgtcatgcgcgatgaaaaccgtcgggcgctgcatgccggtggtcgggtggtgtatctgcacgcgtcggtcgaacagcaggtgggccgtaccgcccgtgatcgcaatcgcccgttgctgcgcaccgccgacccggcgaaaaccctgcgggacctgctggcgctgcgcgatccgctgtatcgggaaatcgccgatctggtggtggaaaccgatgagcggccacctcggatggtcgtacttgacatccttgagcgcctgcaacgattgccaccccgttaaa

SEQ ID NO: 249472 - DNA, 1075 bp, Unknown
  Bacterial polypeptide expressing nucleotide sequence isolated from the Sargasso Sea
atggcaaagactaataaaattttatgcggtgacacagttgaggagttgagaaatttacccgacaattgtatagatctaatctttgctgaccctccttacaacttgcaattggatcaagagttgcttcgacctaataactccaaagtttcagctgttgacgatgaatgggatcagttcgaaagttttgaagagtacgataatttttctgatctttggctcaaagaagctaaaagagtgcttaaaccaacaggaagtatatgggtgataggctcatatcataatatatttagaattggttacataatgcaaaatttaggtttttggattttaaatgatgttatttggcaaaaggcaaatccaatgccaaattttagaggaaaaagatttactaatgctcatgaaactatgatttgggcaagtaaagataaaaactcaaaaaaatatacatttaattacgaagcgatgaagtcactaaatgaaaacatgcagatgcgctcagactggttcttacctatttgcagtggccatgaaagattaaaaaacaaatcaggaaagaaagtacatcccacgcaaaaacctgagggattattacatagaataattgtttcatcttcaaatcaaggtgaacttgtacttgatcctttctttggaacaggaacaactggcgctgtagcaaaaaggctaggaagaaaatacattggtattgaaaaagataaaaattatataaaagaagccaagaatagaattgaaaaagtgagtatttatgaaaataatgcactaacgttaactcaatctaaaaaatctgaaccaagaataccttttggttggttaattgaacgaaaactgatcgagcctggaacaattttatatgatcaaaaaagaaaatactctgcaaaagttagagcagatggttctgttgttagtgagaaaaactctggatcaattcatcaaattggcgcagaagttcagtctgcaaacgcgtgtaatggttggactttttggcactttgacgttgaaggcgaactcaaaccgattgatatattaagacaaaaaatcagatctgaattaaattgag

SEQ ID NO: 249473 - DNA, 505 bp, Unknown
  Bacterial polypeptide expressing nucleotide sequence isolated from the Sargasso Sea
tatgaatatttttattgttggtccaatgggttccggtaaatctaccgttggcaaaattatatctgatgaattatttttaaattttttcgatacagacgacgaaatcgaagcaagaacaggtgcatcaatcgattggatatttgatttagagggcgaagatggtttccgtaaacgagaaagtgaaatgcttgaagaaatggttaaaaaaaattcaatagttttgtctactggtgggggaataatattatcaaaattaaatagggaactattatcatcaaggggaacagtcttttatctatctacccctatttcaacacaggtagagagaacctctaaagataaggaccggccattgttaaaaaatggagatccaggcgaaatacttacaaagcttcataatgaaagaaaggacttctataaagcagtatcggatcatgtaattgatacagaaaataaatcaagtcaagaagttgcatctgaaataattaaggtagttaaaatttaa

SEQ ID NO: 249474 - DNA, 499 bp, Unknown
  Bacterial polypeptide expressing nucleotide sequence isolated from the Sargasso Sea
aatgaggctaataattatcggctctatggcttcaggaaagtctactgtaggcagaaaactttctaaaaagttaggcctagaattttttgatacagatgatgaaattgagaacaaggctggagcaaaaatatcttggatttttgatgtcgaaggtgaggagaaatttagagacagagagtacgagacttttagtaatctaactaataaagaaaattgtgttatttcaaccggcggcggtatagttttaagagaagaaaatagagaattattaaataaaggtacagtaatatacttggaaataagtattcaaactcaattagagagaactattaatgatcaagataggccacttctttaccgggctaacaaagaaaagacactaagaaaaattgcagagatacgaaatccaatctacgaagcttgcagtgatataactataaaagaaacaaatgacccaaatgaaacggtagatctaattgttttaaagttaacaaaatga

SEQ ID NO: 249475 - DNA, 405 bp, Unknown
  Bacterial polypeptide expressing nucleotide sequence isolated from the Sargasso Sea
aaatagaattaaggactggcgcttctatagattggatttttgatctagagggtgaggaaggctttagaaaaagagaaagcgatattcttttagaaatggttcaaaaaaattctattgtcctttcaactggtggaggaataattttatcagacaataatagagagcttttgtcttcaagaggaactgtattttttttatcaactccaatttacattcaagttgaaagaacttctaaagacaaagatagacctcttctaaaaaaaggagatccaacaaaaattcttacaaaacttcataaaaaaagagaaggtttatatcagagcgttgcggattacatggtagatactgagaataaatcaagtcaggaagttgcttccgaaatagttaatttggtcaaggcataaa

SEQ ID NO: 249476 - DNA, 511 bp, Unknown
  Bacterial polypeptide expressing nucleotide sequence isolated from the Sargasso Sea
tatgaatatttttattgttgggccaatgggatcagggaaaactactgtcggaaagatagtggctgacgaattatttctcgattttcatgatactgatgcaaaaattgaattgaatacaggagtaacgattgattggatttttgatatagaaggagaagaaggcttccgaaagagagaaaccgctatattaaaagaaatggtggctttaaattcaattgtactagcaaccggtggaggcataataattgaagaggaaaatagagagcttcttgcatcaagaggaatagtgttctatcttcacactccactcaatacacaaattgaaagaacagctaaagataaagatagacctctgttaaaagacaaagatcctaagaaagtactaactgaacttcaaaaatcaaggcaatctttatatgaagaagtatctgatcatataattgataccgataataaaagtggttcagatgttgcgaatgaaatagtaaaacttgttaaaaattatggctaa

SEQ ID NO: 249477 - DNA, 505 bp, Unknown
  Bacterial polypeptide expressing nucleotide sequence isolated from the Sargasso Sea
atgaatatttttattgttggtcccatgggatctggaaaatctactgttggtaaaataatatctgatgaactatttttagacttttatgatacagatgaagaaattgaggagagaactggagcatctatagattggatatttgatcttgaaggtgaggatggttttcgaaagagagagtcagtgatgcttgaagaaatggttgaaaaaaattcaattgttttgtcaaccggtggtggaataatattatcagcttttaatagagaattgttgtcatcaagaggtacagtattttatttatcaactcccatatcagttcaaatagaaagaactacaaaagataaagacaggccattattaaaaggtggtgatcctagagatatcctaacaaaacttgatgttgaaagaaaagatttctatgaatctgtttcagatcatgtggtcaaaactgaggataagaccagtcaagaagtagctaaagaaattattaacttagttaaaacttaac

SEQ ID NO: 249478 - DNA, 517 bp, Unknown
  Bacterial polypeptide expressing nucleotide sequence isolated from the Sargasso Sea
catggctaatcaatcagacaatatcatactcatcggtccaatgggctctggaaaaacatcgacaggaagaattcttgcaaaagagatgggctttgatttcatagacacagatgaaaagattgtagaaagcacaggcgtttctatagcatacatttttgatgttgagggtgagtctggctttagaaaaagagaacataaagaactgatgaaattcttaggcaaggacaatatggtaattgcaactggaggaggaatcataacgcatgataaaagtagaatgattcttcaaggccagaagaaagttgtatatctgaaaacaagcattgaaaaacaaattgaaagggcaacagtttctgacaatagaccgttattaattgatacagatcctgcatctaaacttcaggagttaatgttgacaagagaacctctctatgaagaaataagcgatatcaagatcgatacaaatgagagaagaccaagtgaaattgctcttgagattatcgatagattgagatga

SEQ ID NO: 249479 - DNA, 371 bp, Unknown
  Bacterial polypeptide expressing nucleotide sequence isolated from the Sargasso Sea
ctacatttttgatgttgagggtgaggctggctttagaaaaagagaacataaagaactgatgaaattcttagacaatgacaatatggtaattgcaactggaggaggaattataacgcatgataaaagtagagtgattcttcaagaccagaagaaagttgtatatctgaaaacaagcattgaaaaacaaattgaaagggcaacagtttctgacaataggccgctgttaattgacacagaccctgaatctaaacttcaggagttaatgttgacaagagagcctctctatgaagaaataagcgatatcaagatcgatacaaatgagagaaaaccaagtgaaattgctcttgagattatcgatagattgagatgag

SEQ ID NO: 249480 - DNA, 423 bp, Unknown
  Bacterial polypeptide expressing nucleotide sequence isolated from the Sargasso Sea
tctttgatacagatgaagaaattgaaaatagaactggcgcttccattgactggatattcgaccttgagggtgaagaaggttttagaaaaagagaaagcgtggttctagaagaaatggttcagaaaaattccgttgttctttcaacaggcggggggataatattatctgaaaataatagagaattattatcatcaaggggaacagtattttatttggcaacccctatatcagtacaactcgaaagaactgcaaaagacaaagatagacctttattaaaaaatggcgatcctggtcaaatacttcaagaattgcatgaaaaaagaaaaaatttatatgaatcagtgtctgatcatattattgaaacagaagataagtctagccaagaagttgcatcagaaataatcaatctagttaaaggttagt

SEQ ID NO: 249481 - DNA, 505 bp, Unknown
  Bacterial polypeptide expressing nucleotide sequence isolated from the Sargasso Sea
atgaatatttttattgttggtcccatgggatctggaaagtctaccgttggtaaaataatatctgatgaattatttttagacttttatgatacagatgaagaaattgaagaaagaacaggagcatctattgattggatatttgatttagaaggtgaggatggttttcgaaaaagagagtctgaaatgcttgaagaaatggttcaaaaaaattcaattgttctgtcaacgggtggtggcatcatattggcattatctaatcgtgaattattgtcatcgagaggtactgtcttttatttatcaactcctatctctgttcaaattgatagaacatcaaaagataaagatagaccgcttcttaaaaatggtgatcctggcaaaatcttaaaaaaacttgataatcagagaaaagaattatacaaatctgtttctgatcatgtggtagagacagaaaacaaaactagtcaggaagtagctgctgaaattataaaattagtaaaaacataga

SEQ ID NO: 249482 - DNA, 505 bp, Unknown
  Bacterial polypeptide expressing nucleotide sequence isolated from the Sargasso Sea
atgaatatatttattgtaggtccgatgggttcaggtaagtctaccgttggaaaaattatatctgatgaattattttttaatttctttgatacagatgaagaaattgagacaagaactggagcttctattgactggatctttgatttagagggtgaagaagggtttagaaaaagagaaagtgaaatcctcatagagatggtggacaaaaactcaattgtcttatcaacaggtggaggaataatactttctgaaagcaatagagagttattatcttcgaggggtactgttttttatttatctactcctattagtgttcaggttgaacgaacagccaaagacaaagatagaccattactaaaaaatggtgatcccaaagaaattctctcaagacttcatagtgaaagagaaaatctatatgaagcagtttcagactatattgtgaagactgaaaacaaatctagtcatgatgttgcatcagaaataataaatttggttaaaggataaa

SEQ ID NO: 249483 - DNA, 304 bp, Unknown
  Bacterial polypeptide expressing nucleotide sequence isolated from the Sargasso Sea
tatgaatatttatattgttgggcctatgggatcaggtaagtctactgttggtaagatagtagctcgctctctttttttagatttcttagattctgacgaagagatagaaaaaacaacaggtgccagtattgattggatttttgaccttgaaggagaagaaggatttagaaaaagagagacggctgaactagaaaaaatagtgcaactaaattctcatgttgttgctactggcggtggaattattttatctgatcacaatagaaatcttcttagtgccagagggtgttgttatttacttagaaac

SEQ ID NO: 249484 - DNA, 491 bp, Unknown
  Bacterial polypeptide expressing nucleotide sequence isolated from the Sargasso Sea
gttgcgtaacgtttttctaattggcccgatgggagctggaaagagcaccatcgggcgtttgcttgccaaagagctaaaatttcctttcaaggattctgatcgcgagattgaggtccgtacgggggctgatatcccctggatttttgatgtcgagggggaggagggtttccggcagcgagaggaggcgatgatcgctgaactggttcaggagcgcggtatcgtgcttgcgaccggcggtggtgtcgtgatgcgcccggcgaatcgggccgctctggcggcaaacggtcttgttgtttatctgtgtaccagtgtggagcagcagctgcagcgtaccgcaaaggatcgccagcggcctctcctgcaaaccgctgaccctgaagcggtgcttcgtgatctgatggcacgacgtgacccgctatatcgtgaaatcgccgaccttattatcgagaccgatcagcgcggccccaaggtcgtggtgaataccattctcg

SEQ ID NO: 249485 - DNA, 505 bp, Unknown
  Bacterial polypeptide expressing nucleotide sequence isolated from the Sargasso Sea
atgaacatttttattgtaggtccaatgggttccggaaagtccaccgtcggtaaaattatatctgatgagttatttatgaacttttttgatactgatgaagaaatagaaacaagaacaggtgcatctattgattggatctttgatcttgaaggagaagaaggtttcaggaaaagagaaagtgctatattggcagagatggtagaaaaaaactctattgttttgtctacagggggtggcatcatactatcagaagaaaatagagaacttttatcatcaagaggaaccgttttttatcttgctacgcctatatatgttcaaatagaaagaacagctaaggataaagatagacctttattaaaagatggggatcccgaagaaattctaactaaacttcataataatagacaaaacatatatgaatcagttgcagatcatgttgttgataccgagaataaatcaagtcaagaagtcgcatcagaaattgttaagttaattaagagctaga

SEQ ID NO: 249486 - DNA, 505 bp, Unknown
  Bacterial polypeptide expressing nucleotide sequence isolated from the Sargasso Sea
atgaatatatttattgtaggtcctatgggttccggtaagtctaccgttggaaaaattatatctgatgaattattttttaatttctttgatacagatgaagaaattgagacaagaactggagcttctattgactggatctttgatttagaaggtgaagagggatttagaaaaagagaaagtgaaatcctcaatgagatggtggacaaaaactcgattgtcttatcaactgggggaggaataatactttctgaaaataaccgagagttattatcttcaaggggtactgttttttatttatctactcctattagtgttcagtttgaacgaacagccaaagacaaagatagaccgttactaaaaaatggtgatcccaaagaaattctctcaagacttcatgatgaaagagaaaatctatatgaagcagtttctgactatattgtgaagactgaaaacaagtctagtcatgatgtagcatcagaaataataaatttagttaaaggataaa

SEQ ID NO: 249487 - DNA, 454 bp, Unknown
  Bacterial polypeptide expressing nucleotide sequence isolated from the Sargasso Sea
tatgaatatttacattgttgggcctatgggatcaggtaaatccacagttggaaagatagttgctcgttctctatttttagactttctagattcagatgaggagatagaaaaaactacaggagcaagcatagattggatatttgaccttgaaggagaagagggttttagaaaaagggagacagcggaactagaaaaaatagtccaactaaactctcatgtcgttgctactgggggtggaattattctatctgatcacaacagaaaccttcttagtgcaagaggtgttgttatttacttagaaactcctattaaaactcaagttgaaagaacaagtaaggataaagataggcccctgttaaaagatggtgatccagaatcaatacttacaaaacttaatagtgagagagagcacctatataaagaagtatcagatcatgcaattcaaacgagtgat

SEQ ID NO: 249488 - DNA, 454 bp, Unknown
  Bacterial polypeptide expressing nucleotide sequence isolated from the Sargasso Sea
aatgggtgaaaaaggtaacatatttttaatcgggcttatgggtgttggaaagagcactatagggcgagttttggccaacattatgaatttacggttttttgattcagatcaagaaattgagttgaatacaggtgcggacattccttggatttttgatgttgagggagagagcggttttcgagaaagagaaaggaaagtgataaggcagctttgtaagcgacaagatattgttttggcaactgggggaggcgtaatcctcgccaagcaaaatagagaaatgctttgctctaatggcacggttgtttatctgacagctccaataaaaaaacttgttgatagaactaggaaagataaaaatcgaccactcttacaagctaatgatcccgagcgaaagatcaccgaactttttaacgctcgaaatcatttatataaagatactgcagatattgtaatt

SEQ ID NO: 249489 - DNA, 505 bp, Unknown
  Bacterial polypeptide expressing nucleotide sequence isolated from the Sargasso Sea
atgaatatttttattgtaggtccaatgggttccggtaaatcgaccgtaggtaaaattatatctgatgaactgtttttaaatttttttgatactgatgaggaaattgaatctagaacaggtgcgtctattgattggatttttgatcttgaaggtgaagaaggttttcgaaaaagagagagttcaattcttcaagaaatggtcgagaaaaattctgtagtgctttcgactggaggcgggataatattatcaagccctaacagagaacttttatcatcaagaggaactgttttttatctatcaactccaatatcgattcaggttgaaagaacatctaaagataaaaatagacctttgcttaaaaatggagatcctgcagaaattctttcaaaacttcatgaggaaagaaagactttatatgaatcagtctccgatcatgttattgaaacagaaaataaatcaagtcaagaagttgcagctgaaataattaatcttgttaagagttagc

SEQ ID NO: 249490 - DNA, 466 bp, Unknown
  Bacterial polypeptide expressing nucleotide sequence isolated from the Sargasso Sea
atgaatatttttattataggtccaatgggttctggtaaatcaacagtaggaaagattttgtctgatgagttgtttttaaatttttttgatactgatgagcaaatagaattaagaaccggtgcaactattgactggatttttgatttagagggtgaagaaggattcagaaaaagagaaagtgatattcttgatgaaatggttcaaaaaaattctattgttctttcaactggtggaggaattgttttatctgacaagaatagagagcttttgtcgtcaagaggaacagtattttttttatcaactccgatatacattcaagttgaaagaacttctaaagataaagatagacctcttcttaaaaatggagatccaacaaaaattcttacaaaacttcataaagaaagggaagccttatatcaaaatgttgcagactttgttgtagatactgaaaataaatctagccagg

SEQ ID NO: 249491 - DNA, 259 bp, Unknown
  Bacterial polypeptide expressing nucleotide sequence isolated from the Sargasso Sea
atgaatatttttattgtaggtccaatgggttccggtaaatcaaccgtaggtaagattatatctgatgagttgtttttaaatttttttgatactgatgaggagattgagtcaaggacaggagcatctattgattggatttttgaccttgaaggtgaagaaggttttagaaaaagagaaagtttgatcctcgaagaattggctgaaaagaactcaatagtgctttcgacccggaggtggaataatattatcaagccttaat

SEQ ID NO: 249492 - DNA, 508 bp, Unknown
  Bacterial polypeptide expressing nucleotide sequence isolated from the Sargasso Sea
tatgaatatttatattgttgggcctatgggatcaggtaaatctactgttggtaaaatagtagctcgctcgctttttttagatttcttggactctgacgaagagatagaaaaaacaacaggtgctagtattgattggatttttgatcttgagggagaggaaggatttagaaaaagagagacggctgagcttgaaaagatagtgcaactaaattctcatgttgttgctactggcggtggtattattttgtctgatcataatagaaatcttcttagtgccagaggagttgttatttacttagaaactcctataaaaatccaagttgagagaacaagcaaagataaagataggcctctattaaaaaatggtgatccagaaacaatacttacaaaacttaatagtgagcgagagcacttatataaagaggtatctgactatgcaatccaaacgagtgataaatccagtcaagaagttgcagatcaaataataaatattattaagaataaataa

SEQ ID NO: 249493 - DNA, 505 bp, Unknown
  Bacterial polypeptide expressing nucleotide sequence isolated from the Sargasso Sea
tatgaacatatttattgttggtccaatgggttctggtaagtcaaccgttggaaaaatcatatctgatgagctatttcttaatttctttgatacagatgaagaaattgaaaatagaactggcgcttcgattgactggatattcgaccttgagggtgaagaaggttttagaaaaagagaaagcggggttctagaagaaatggttcagaaaaattccgttgttctttcaacaggcggggggataatattatctgaaaataacagagaattattatcatcaaggggaacagtattttatttagcaacccctatatcagtacaactcgaaagaactgcaaaagacaaagatagacctttattaaaaaatggtgatcctggtcaaatacttcaagaattgcatgaaaaaagaaaaaatttatataaatcagtgtctgatcatattattgaaacagaagataagtctagccaagaagttgcatcagaaataatcaatctagttaaaggttag

SEQ ID NO: 249494 - DNA, 508 bp, Unknown
  Bacterial polypeptide expressing nucleotide sequence isolated from the Sargasso Sea
tatgaatatttatattgttgggcctatggggtcaggtaaatctactgttggtaaaatagtagctcgctcgctttttttagatttcttagactccgacgaagagatagaaaaaacaacaggtgctagtattgattggatttttgaccttgaaggagaagaaggatttagaaaaagagagacagctgagctagaaaaaatagtgcaactaaattctcatgttgttgctacaggcggtggaattattttatctgatcacaatagaaatcttcttagtgctagaggtgttgttatttacttagaaactcccataaaaatccaagttgagagaacaagtaaagataaagatagacccttgttaaaagatggtgatccagaatcaatacttacaaaacttaatgctgaacgagagcacctatataaagaagtatctgactatgcaattcaaacgagtgataaatctagtcaagaagttgcagatcaaataataaatattattaaaaataaataa

SEQ ID NO: 249495 - DNA, 511 bp, Unknown
  Bacterial polypeptide expressing nucleotide sequence isolated from the Sargasso Sea
tatgaatatatttatagttggtccaatgggctctggtaagtcaaccgttggaaagataatatctagtgaactttttttgacttttcttgacactgacgaagagatagaaacaagaacaggtgcatccatagattggatttttgatcttgagggtgaagaaggttttagaaaacgagaaagtaaaatccttgatgaaatggtcaaaaaaaattcaatagtactgtctacaggtggtgggataatattgtcagaacataatagagagttgctttcctctagaggaagtgttttttacctagaaactcctattgaaattcaacttgaaagaacttctaaagataaagatagacctctattaaaggagggagatcctggaaaaattttaaaaaaacttcatgaagaaaggcaagcgctttatgaaaacgtatctgatcacattgttaaaactgaaaataaatcaagccaagaagttgcatctgaaattataaaattaataaaaaattatgcctaa

SEQ ID NO: 249496 - DNA, 508 bp, Unknown
  Bacterial polypeptide expressing nucleotide sequence isolated from the Sargasso Sea
tatgaatatttatattgttggacctatgggatcaggtaaatctaccgttggtaaaatagtagctcgctcgctttttttagatttcttggactctgacgaagagatagaaaaaacaacaggtgctagtattgattggatttttgatcttgaaggagaggaaggttttagaaaaagagagacagctgagcttgaaaagatagtgcaactaaattctcatgttgttgctactggtggtggaattattttatctgatcacaatagaaatcttcttagtgccagaggtgttgttatttacttagaaactcctataaaaatccaagttgagagaacaagtaaagataaagataggcccctattaaaagatggtgatccggaatcaatacttacaaaactaaatactgagcgagagcatttgtacaaagaagtatctgactatgcaattcaaacgagtgataaatccagtcaagaagttgcagaccaaataataaatattattaagaataaataa

SEQ ID NO: 249497 - DNA, 253 bp, Unknown
  Bacterial polypeptide expressing nucleotide sequence isolated from the Sargasso Sea
tatgaatatttttattataggtccaatgggttctggtaagtcaacagtgggaaaaattttgtctgatgaattgtttttaaatttttttgatactgatgaacaaatagaattaagaaccggtgcatctattgactggatttttgatttagaaggtgaagaaggattcagaaaaagagaaagtgatattcttgatgaaatagttcaaaaaaattctattgttctttcaactgggtggaggaatagttttatctga

SEQ ID NO: 249498 - DNA, 223 bp, Unknown
  Bacterial polypeptide expressing nucleotide sequence isolated from the Sargasso Sea
tatgaatatatttattgttggcccaatgggttctggtaagtcaaccgttggaaaaatcatatctgatgagctatttcttaatttctttgatacagatgaagaaattgaaaatagaactggcgcttcgattgactggatattcgaccttgagggtgaagaaggttttagaaaaagagaaagtggagttctagaagaaatggtcagaaaaattccgttgttcttc

SEQ ID NO: 249499 - DNA, 514 bp, Unknown
  Bacterial polypeptide expressing nucleotide sequence isolated from the Sargasso Sea
atgaatatttatattgttgggcccatgggttcaggaaaatcaactgttgggaggattgttgctagctcactatttttagattttttggattctgatgaggaaattgaaaagaaaacaggtgctagcattgattggattttcgatctcgagggagaggaaggtttccgtaaaagagaaacgaaagtgttagaagacattgtgaaactaaattctcatgttgttgctaccggaggtggaataatattgtcgcagcataatcgtgatttgcttggagcaaggggtattgtgatatatctagaaactcccatagaggttcaggtagaaaggacaaataaagatgatgatcgccctcttttgcaaaatggagatcccaaagagattcttactagactccatgaagaaagagaaaacctctataaggaagtatctgatcatataattcctactaaaaataaatctagccaaagtgttgcagatgaaattattaatgtagtcaaaaaaaaaatgtataaaa

SEQ ID NO: 249500 - DNA, 505 bp, Unknown
  Bacterial polypeptide expressing nucleotide sequence isolated from the Sargasso Sea
tatgaatatttttattgtaggtccaatgggttccggtaaatcaaccgtaggtaaaattatatctgatgaattgtttttaaatttctttgatactgatgaagaaattgaattaagaacaggtgcatctattgattggatttttgatcttgaaggtgaagaaggttttagaaaaagagaaagtttgattcttgaagaaatggctgaaaaaaactcaatagtgctatcgactggaggtggaataatattatcaagtcctaatagagagcttttgtcatcaagaggaactgttttctatctctcaactccaatatctattcaagttgaaagaacatccaaagataaaaatagacctttgctcaaaaatggagatccttcagaaatcctttcaaagcttcatgaagaaaggaaaagtttatatgaagtagtttctgatcatattattgaaactgaaaataaatcaagccaagaagttgcagctgaagtaataaacttagtcaaggggtag

SEQ ID NO: 249501 - DNA, 499 bp, Unknown
  Bacterial polypeptide expressing nucleotide sequence isolated from the Sargasso Sea
ttatattgttgggcctatgggatcaggtaaatctaccgttggtaaaatagtagctcgctcgctttttttagatttcttggactctgacgaagagatagagaaaacaacaggtgccagtattgattggatttttgatcttgaaggagaggaaggatttagaaaaagagagacagctgagcttgaaaagatagtacaactaaattctcatgttgttgctactggtggtggaattattttatctgatcacaatagaaatcttcttagtgctagaggtgttgttatttatttagaaactcctataaaaatccaagttgagagaacaagtaaagataaagataggcccttattaaaagatggtgatccggaaacaatactcacaaaacttaatactgagcgagagcatttgtacaaagaagtatctgactatgcaattcaaacgagtgataaatccagtcaagaagttgcagaccaaataataaatattattaagaataaataa

SEQ ID NO: 249502 - DNA, 516 bp, Unknown
  Bacterial polypeptide expressing nucleotide sequence isolated from the Sargasso Sea
aatttaaaactatgaatatttttattgtaggtccaatgggttctgggaagtccacagtagggaaaattctatctgatgaactatttctcaatttttatgatactgatgaagagattgagctaagaactggtgcgtccatagactggatttttgacttggagggagaagaaggttttagaaaaagagaaagtaaagttctatttgaaatggtgcaaaagaattctattgtgttatcaacgggtggtggaataatcttatcagataaaaatagagagcttctatcatcaagaggaacagtgttttacttagctactcctatttatgtgcaagttgaaagaacttctaaagataaagataggccccttcttaaaaaaggagatccaactgagattcttacaaagcttgataaagaaagaaaagatttatatgagaatgtagcggattattcaattaaaactgaaaataaatctagtcaagaagttgcatctgaaatcataagtttagttaagggttaaa

SEQ ID NO: 249503 - DNA, 349 bp, Unknown
  Bacterial polypeptide expressing nucleotide sequence isolated from the Sargasso Sea
aatggctgaaaaacgtaatatttttctggtaggcccaatgggcgcaggtaaaagcacaattggtcgccatctggcgcaaatgctgcatttagaattccacgattcagatcaagagattgagcaacgcacaggcgctgatattgcttgggtgtttgacgttgaaggcgaagaaggtttccgtcgtcgcgaagctcaggttattgctgatctgtctgaaaaacaaggtattgtccttgccactggtggtggttcagttcagagcaaagatatccgtaatcatttatctgctcgcggtatcgtggtgtatctcgaaaccactatcgacaaaccaggttgcgcgcactcaaag

SEQ ID NO: 249504 - DNA, 517 bp, Unknown
  Bacterial polypeptide expressing nucleotide sequence isolated from the Sargasso Sea
atggctgaaaaacgtaatatttttctggtaggcccaatgggcgcaggtaaaagcacaattggtcgccatctggcgcaaatgctgcatttagaattccacgattcagatcaagagattgagcaacgcacaggcgctgatattgcttgggtgtttgacgttgaaggcgaagaaggtttccgtcgtcgcgaagctcaggttattgctgatctgtctgaaaaacaaggtattgtccttgccactggtggtggttcagttcagagcaaagatatccgtaatcatttatctgctcgcggtatcgtggtgtatctcgaaaccactatcgacaaacaggttgcgcgtactcaaagagacaagcgtcgcccattactgcaagtagatgatccgcgagaagtattagaaaacctcgcagaaatccgtaaccctttgtacgaagaaattgcagatgtgatcgttaagaccgacgatcaaagtgcaaaggttgttgcgaatcaaatcattgagcaattaggtttctagg

SEQ ID NO: 249505 - DNA, 523 bp, Unknown
  Bacterial polypeptide expressing nucleotide sequence isolated from the Sargasso Sea
aatggcagagaaacgcaatatctttctggttgggcctatgggtgccggaaaaagcactattgggcgccagttagctcaacaactcaatatggaattttacgattctgatcaagagattgagaaacgaaccggagctgatgtgggctgggtcttcgatgtagaaggtgaagacggcttccgtgatcgcgaagaaaaagtcatcaacgagttgacggaaaaacagggtattgtgctggcaactggcggtggctctgtaaaatcacgtgaaacacgtaaccgtctttccgcgcgtggcgtcgtggtctatcttgaaacgacaattgaaaaacaacttgcgcgtactcaacgtgacaagaaacgcccgctgctgcaggtagaatcaccgcctcgtgaagttctggaagcgttggctgacgaacgcaatcctctgtacgaagagattgctgacgtgaccattcgcaccgacgatcagagcgcaaaagtcgtagcaaaccagattattcatatgttggaaagcaactaa

SEQ ID NO: 249506 - DNA, 517 bp, Unknown
  Bacterial polypeptide expressing nucleotide sequence isolated from the Sargasso Sea
tatggctgaaaaacgtaatatctttttagttggcccaatgggtgctggcaaaagtaccatcggtagacatctggcagacgaacttcacctagacttttttgattcggatcaggaaattgagcgccgcacgggtgcagacattgcctggatcttcgaccttgaaggcgaagacggtttccgtaaacgcgaagaaaacgtcattaacgatttgacagataagcaaggtattgtacttgctactggcggcggttctattgtaactaaagctgtgcgtaatcgtttatctgcccgcggcatcgttgtttacctacaaacgacaatcgataagcaagttgcccgtacacaacgtgacaaacgtcgtcctttgctacaaaacgaagatccagaacaagtacttcgcgatcttgcagaaatgcgcaacccgctttacgaagaagttgctgattacattgttgatacagacgaccaaagtgcgcgtgctgtagcgaatcagattatcagtaaaattggtttataa

SEQ ID NO: 249507 - DNA, 520 bp, Unknown
  Bacterial polypeptide expressing nucleotide sequence isolated from the Sargasso Sea
atggctgagaaacgcaatattttcctgataggtcccatgggtgcgggcaagagcaccataggtagacatctggcagaacaactgcatatggagtttttcgactcagatcatgagattgagcgccgcagtggtgccgatatcggctgggtgttcgatgttgaaggcgaagagggtttccggatccgcgaagagaaggtcatcggtgacctttccgaacagcagggtatcgtgctggcgacgggtggcggtgccatcaagagccgtgaaacacgcaacaagctctctgctcgtggcatcgtggtgtacctcgaaaccaccattgagaagcaactggcacgtacgcaaagagacaagcgtcgccccttgctgcaaaccgaagagccgccgcgcgaagtactcgagcgtctggcacaagaacgcaacgccctgtatgaagaagtggctgactttgtcatccagactgatgaccagagcgctaaagttgttgccaatcaaattgttaagttgatcggcatgtaat

SEQ ID NO: 249508 - DNA, 248 bp, Unknown
  Bacterial polypeptide expressing nucleotide sequence isolated from the Sargasso Sea
aatggctgaaaaacgtaatatttttctggtaggcccaatgggcgcaggtaaaagcacaattggtcgccatctggcgcaaatgctgcatttagaattccacgattcagatcaagagattgagcaacgcactggcgctgatattgcttgggtgtttgatgtagaaggcgaagaaggtttccgccgtcgtgaggctcaggttattgctgatctgtctgaaaaaccagggtattgtccttgccactggtggt

SEQ ID NO: 249509 - DNA, 547 bp, Unknown
  Bacterial polypeptide expressing nucleotide sequence isolated from the Sargasso Sea
tatgtcaataaataaatcaaaaacaattgttattaaaattggttcatcattattaattgatgaaaataatcaaattagaagaaaatggttgtctgcatttgctttagatataaaagaattaattaaacaaaaaaaagatatcattattgttagctctggtgcaatagcgcttggatgcaaaaagttaaaacttaaaaaatctaatttaaaaattgataaaagccaagccgttgcatctataggacaaattgagttaatgaatctacttaataaaattttcagtattaaaaaagttaatctttcccaaatgctattaactcttgaagatacagagcaaagaagaagagctataaatgcaaaaagaacttttcaaaatttatttcagcttggatttgtgcctgtagtaaatgaaaatgatagtatagcaacttctgaaataaaatatggtgataatgataggttggcttctagggttgctcaaatatctagtgcagattgcttaatacttctttcagatgttaatggtttgtacacaaaaaatcctaaa

SEQ ID NO: 249510 - DNA, 812 bp, Unknown
  Bacterial polypeptide expressing nucleotide sequence isolated from the Sargasso Sea
tatgtatcttaaaaaatctaaaactattgtaataaaaattggatctacaattttaattgatgaaaaaagaacaattagaaaaaaatggttagcagaatttgcaaaagatataaaagacttattagatcaaaaaaaaaatataattctggtgagctctggtgcaatagctttgggttgtaaaaaattaaatttaaacaaaaaaaatttaaaaattgataaaagtcaagctgtagcttctgtgggtcaaattgagttaatgaatctttttaataaaatatttagttcaaaaaaaattaatctttcccagattttacttacactagaagatactgaacaaagaagaagagcaataaatgcaaaaagaacttttgaaaatttatttgaattaggttttattcctgtagtaaatgaaaacgatagtattgcaacaactgaaataaaatatggagataatgataggctagcttctagagttgcacaaatttcgggagctgattgtttagttctactttcagatgttgatggattgtatactcaaaatccaaaattatttaaaaactcaaaactaattaaagaaattaaaaatatagatgctgatatagaaaagatcgctacaaaaagtataagtgaacatggaactggaggaatgaaaactaagattgaagctgcaaaaatttgtcagctatctggctgtatgatggttatagcaaatggtcttttggaaagacctattaaaaaaattatagacaaaaataaatgtacttggttttttcctaaagtctcaaaactagatgctagaaaaaaatggatta

SEQ ID NO: 249511 - DNA, 531 bp, Unknown
  Bacterial polypeptide expressing nucleotide sequence isolated from the Sargasso Sea
tatgtatcttaaaaaatctaaaactattgtaataaaaattggatctacaattttaattgatgaaaaaagaataattagaaaaaaatggttagcagaatttgcaaaagatataaaagacttattaaatcaaaaaaaaaatataattctggtaagctctggcgcaatagctttgggttgtaaaaaattaaatttaaacaaaaaaaatttaaaaatcgataaaagtcaagctatagcttctgtgggtcaaattgagttaatgaatctttttaataagatatttagttcaaaaaaaattaatctttcccagattttacttacactagaagatactgaacaaagaagaagagcaataaatgcaaaaagaacttttgaaaatttatttgaattaggttttattcctgtcgtaaatgaaaacgatagcattgcaacaactgaaataaaatatggggataatgatagactagcctcacgagtggcacagatttcgggagctgattgcttggttctactttcggatgttgatggattgta

SEQ ID NO: 249512 - DNA, 262 bp, Unknown
  Bacterial polypeptide expressing nucleotide sequence isolated from the Sargasso Sea
gctgcccgcaccgctcgtcgcgcgcggcgtgcagtgcgtcgggcgtctcgaccaggacacgacgggcctggtgctgctgtctgacgacggccagttcgtgcacgcgtacacgtcgccgaaacgcaaggcgccgaagacctacgtggcaaccgtgcgtcacccgctcgacgacacccagttgaatgcgctgcgcgccggcgtgcagctccacggcgagccgaagccgatcgcggcggtcgccgccgacgcgcgcgacccgcaa

SEQ ID NO: 249513 - DNA, 619 bp, Unknown
  Bacterial polypeptide expressing nucleotide sequence isolated from the Sargasso Sea
gcccgcagagtggcttctcgataacgctaacgttaacgggacttggtcacttattcattgcactcaaatgacagaaaaggaaaccagggatctagcttcgacaaacgccgtagtggggctttgccccatcaccgagtcaagcctaggtgatgggatctttaatggaacggattttcacgaagccggcgggcagtttggtattggatcggatagcaatatccatattgccctttgggaagaactggcaacgcttgagtattcacaacgtctgcgcaatcgaagccgagccgccatggcaacaccagatcgctcaactggtcgtaatctattcgaagcagcgacgcatgcaggggcacaagcggctggccgccaatcgggttccataagtgagggccaatttgccgacctcatcgctatttcaaccgacaatgaatttttgtgcaatcgctcgggtgacaagcttctggatagtctcatattttctggacgggggcgtacttgtatcagcgatgtgtggagcgccggacgtcatatggtgcaagatgggttacatgttgagcacgaacgcatcactaaacaatttgtcagagtatctaaacaactcggacaagagatatga

SEQ ID NO: 249514 - DNA, 514 bp, Unknown
  Bacterial polypeptide expressing nucleotide sequence isolated from the Sargasso Sea
atggaatttgataaaattttaccgttagatggcccctctattgatgatgctaaagaatttttagctaaatataaagatgaatttatagttattaagattggtggatctgttttaaatgataaaagtttattcaaaaatttaatacaggatatttgtattttaaaaaaaattaaatttaatcccatattaattcacggaggaggtaaagaattaactaataaacttaaagatcaaaactataaaagtgaatttataaatggtttaagagttacagatggtaaaataataaaaatagttgaagaagtttttattaattttaataaacttttaattgaagagataaataataattccttaaaagcaagaactattaatagtaaagaaaacaattgtgtaattgttgataagattaacgaaaaacttggatttgtaggtaagccaatagatattaaagacgaaatgatattaaaaataataaaatcaggtgaaatccccagtaattgctcccattagg

SEQ ID NO: 249515 - DNA, 923 bp, Unknown
  Bacterial polypeptide expressing nucleotide sequence isolated from the Sargasso Sea
tatgtatcttaattctgcaaaaactattgttatcaaaattggttcatctctcttgattgatgaaaatatgaaaataaaaacagagtggcttgacaattttgtcaaagatatgaatttacttaaaagcttaaataagaatttaattattgtgagctctggagcaattgcattaggttgtaaaaggcttaagcttaaaaagaaagatctcaaactagataaaagccaagctgttgcatctgtaggtcaaattgaattaatgaacctatttaaaaaaaaatttgataaaaaaaaaattgagttgtcgcaaatcttaattacattagaagacactgaacaaaggagaagagcactaaatgcaaagagaacccttgaaaatctatttaaaatgggaatagttccagttgttaatgaaaatgacagtatagctacagaagagataaaatatggagataatgatagattagcatcacgtgttgctcaaatttcaagtgctgattgtttagttttattatcagatgttgatggtttgttttcaaaagatcctaaaatttattctgatgcaaaattaataaaagaaataaaaaatattgatgaaaaaataaaaaatgttgcttcaaaaaatactagtatatttggatctggtggaatggctactaaaattgatgctgctaaaatatgtcaaaactctgggtgttacatggctatagcaagtggtttagtaaagagaccaatcaataggataatgaaaaaaaatatatgtacttggtttttgccgaaaatttcaaaattagctgcgagaaaaaaatggataattagctccgtttctccaaaaggtgaattaattgttgatgatggtgcaatagctgcacttaaaaatggtaagagtttacttgcagctggaataaaaaaagttaatggtaaat

SEQ ID NO: 249516 - DNA, 1114 bp, Unknown
  Bacterial polypeptide expressing nucleotide sequence isolated from the Sargasso Sea
atgtattttgataaattaaacacaatagttattaaaattggatcatcattaataattgatgagaaaaaaaagattagaagtaaatggctagatagttttgtaaaggatatccagggtttcaaaaaagcaggtaaaagaattataattgtaagttcaggagcgatagctttaggatgtaaaaaacttaatcttgataaaaaaaatcttaaaattgataagagccaagccgtcgcatcaataggtcaaatagaattaatgaatctattgaaaaaaaacttctctaaaaagaaaatggatatatctcaaatattaattactcttgaggacactgaagtaagaagaagagccataaatgcaagaagaacattagacaatctttttgatattggttttataccggtggtaaacgaaaatgatagtatcgctacatcagaaataaaatatggtgataatgacagacttgcttcaagagttgcccaaatatctaacgctgattgtcttattctactttcagatgttggggggctttataataaaaatcctaaagttcataaagatgcaaaattaattaaagaggtgaaaaaaattgatgagaatgtatttaaaattgcaaataaaacaactggtgaatacggatcaggaggtatgttaactaaaattgaagcagcaaagatatgtggtttagcaggatgtaaaatggtgatttcaagtggtttaatattaaacccattaaaacatattaatttatccaaagagtgcacatggtttttgccagaaatttcaaaattagatgcaagaaagaagtggatagcaagctctgtctcaccaaaaggtgagttgatgatagacaatggagctattatagctcttaaaaaaggaaaaagtcttcttgcagctggaattaaaaatataaaaggtaactttgataaaggggatcatataaaaattgtagatgagaaaaattttgaattaggaagaggtttaagctctttctcatctgaagagataagtaagattaaagggcaacattctgacaagattaataaaatattagggtataaaactaagtctgaagtagttcataaagatgatatggtgggatttagtaaatgaa

SEQ ID NO: 249517 - DNA, 706 bp, Unknown
  Bacterial polypeptide expressing nucleotide sequence isolated from the Sargasso Sea
atgtatcttaaaaactcgaaaattattgttattaaaattggttcatctttattagttgataaaaataaaaaaattagaaaaaaatggctttcaagctttgctaaggacatcaaaaaactaaaagataaaaatcaaaaaatcgtcattgttagttcaggtgctatagctcttggatgtaaaaaaatgaattttaacaaaaaaaatatcaagttagacaaaagtcaagcaattgcctctattggccaaattgaactaatgaatttattctctcagactttttcaaagtacaaattaaatatctcacaaattttgttaactctagaagatacagaggagagaagaagatccttaaacgctaaaagaacatttgaaaatttgtttgaacttggattcatcccagttgttaatgagaatgacacaattgcaacaactgagataaaatatggagataatgatagattggcatctagagtaactcaaattacaaacgctgatacgttaattttactttcagatgtagatggtcttttcacaaaaaatccaaaaataaataaagacgccaaactgataaaaatagtaaatgatattaacaaagatttaaaagaaattaatatcaaaggtattaatgaatatggaagtggaggaatgcaaactaaaattgaagctgctaaaatttgtcagttagctggcagtagtatgattatgc

SEQ ID NO: 249518 - DNA, 1108 bp, Unknown
  Bacterial polypeptide expressing nucleotide sequence isolated from the Sargasso Sea
atgtatcttaataaatctaaaacaattgtaataaaaatagggtcgtcaataataattgataaaaataagaaaattagaaataaatggctaactgagtttgcaaaagatattaaagatttattaaaacaaaaaaaaaatgtaattctagtcagttcaggtgcgatagctttagggtgtaaaaaattaaatttaagtaaacaaaatattaaaattgataaaagtcaagctgtggcttccataggacaaattgaattaatgaatctttttaataaaacctttagttcaaaaaaaattaatctttcacaaattttacttactttagaagatactgagcaaagaagaagggctataaatgcgaaaagaacttttgaaaatttatttaaattaggatttgttccggtcgttaatgaaaatgacagtattgctacaacagaaataaaatatggtgataatgatagactagcatcacgtgttgctcaaatatcaagtgctgattgtttagttcttctttcagatgtagatgggttgtatacgcaaaatccaaaattatttaaaaactctaaattaatcaaagaaattaaaaaagtagatttggatgtagaaaaaatagcaactaaaagtattagtgagcacggaactggtggaatgaaaactaaaattgaagctgctaaaatttgtcaactatcaggctgtgtgatggttatagcaaatggcctcttgaaacgaccaattaaaaaaattatagaaaaaaataaatgcacttggtttttgccgaaagtttcgaagctagatgctagaaaaaaatggattattagctcagtagcaccaaagggagagctggttatagatgatggagctattaatgcacttaaaaaaggtaaaagtcttttggcagcaggaattaaaaaagttatcggaaagtttaacaaaggtgatcatataaaaattttagataagaatttaaatgaatatgcacgaggtttaagttctttttcatcagaagaaactattaaaattcaaggacaacattctaataaaatttatgaacttttgggatatatttctaaatcagaagtagttcataaagatgatatggtcgaggtataaa

SEQ ID NO: 249519 - DNA, 658 bp, Unknown
  Bacterial polypeptide expressing nucleotide sequence isolated from the Sargasso Sea
atatggagataatgataccctctctgctttagttgccttggctataaatgctaacaagcttattttattaaccgatattgaaaatctatactcaaaagatccacggaataataaagatgcgcaacctattaaagaagtacataatagtgaattaaaggaaattaaagataaaaatattcaaaactcaaataatgaatggggaacaggaggaatttctacaaaattaatttctgcagaaatagcaacaaaaggaggagtcgaagtccaactagttgatggaactaataaaaaaaacttaattgaaatatttaatgataataaaattggaactttattttatccagtagaaaaacctattggaaacaaaaaaagttggctttctcatgcaattcaaacagtagggaaaattactttagatgatggcgcttcttttgcaattaaaaaaaaaggtgcctcacttttagcggttggtgtaaagaatgtagaaggaaactttacgattaatcaggcagttaaaatcgtaaatacaaatgataaagaagttgcaaaaggtttagtatcaataagtagcgacaaattaagaagtatcttaaataataaagaaaataacaattcctcgataattgtcgtacatagagatgttcttgctctctcttag

SEQ ID NO: 249520 - DNA, 796 bp, Unknown
  Bacterial polypeptide expressing nucleotide sequence isolated from the Sargasso Sea
atgaaaacatgggtcgtaaaaattggtactagtattctcagaggaaatgaggatcaatctacagaacaagtaatagaaagtttatgtaaatctctaacaagttttattttaaaaggcaataaagtcattctcgtaacaagtggcgcggttggattaggatgtaaaaaattaaatttgaatacaagaccaaaagaactcagtacacttcaagctgtagctgcagttggacaagttaatttaatgactttatatgaaaagacaatgaaaaagctaggtcataatatagctcaaatactaataacaaaaactgattttgattcacgagaatccttcaataatgcttcaaaaacatttcaaaagttaattgatctgaatgtcatacctatagtcaacgagaatgattctattgccaatgaagagcttaaatatggagacaatgatactctttctgctttagttgctttagccataaatgccaataagctgattttattaactgatatagaaaatttatattcaaaagacccaagaaataatgaagatgctcatccaataaaagaagttaatagtaatcaattgaaaattataaaagataaaaacatccaaaattataataacgagtgggggacaggtggtattacaacaaaattaattgctgctgaaatagcaacaaaaggaggtgttgaaagttcattagccgatggcagaaatgagaataatttaataaatattttcaatgaaaaaaaaataggtacaatatttcatcctgttgataaaccagtaggtaataaaaaaa

SEQ ID NO: 249521 - DNA, 475 bp, Unknown
  Bacterial polypeptide expressing nucleotide sequence isolated from the Sargasso Sea
atgtcaaaaccaacaaatgaagaattaaatgtagctacatggaaaataccaaatgctttaggcataattggatcttcagcaaataatgaatttaacggcatgacagctagttggataacgcaagtcagtatggagccattattgattgctgtaggaattgataataaaagtattacccatggactaatgtcagctagtgaatattttagcttaaacttattttcagaaaattatacaaaggtgtttgtaaaattctctaagccagctgaatataaagaaggctttttaaatgaagaaccaattacattaacagaaaacaatatgccaatatttgataatgccatagtctggtttgaaatgagaaagaaagacacatatgatcttggaactcacactctttatattggtgaagttactgattgcaagactataaaacagaagaaagggttgcatatatgggggatacaagaatgaa

SEQ ID NO: 249522 - DNA, 626 bp, Unknown
  Bacterial polypeptide expressing nucleotide sequence isolated from the Sargasso Sea
gaaacaggccgcttcatttttgaagactcctgtaaataaactgaatctgatcaccattcatttgggaaatggcgccagtatttccgccatcaaaaaagggatttgtgttgataccacgatggggatgacaccgcttgaaggattagtgatgggtacccgccccggagatctggatcctggaattttaacgctactggcaagcaaaggatggaatcaggaagcccttgaaacgatgctgaatcaggattctggaatgaaagggctctgtggaaccaatgattttcgggaaatactccaaaacaaggaagaaggaaatgaggaggctgaaatggccctggaactttactgttatcgtgtccgtaaaaccatcggttcgtttagtacagtcatcggaccggtcgatgctctggtctttaccggaggagtcggagaaaatgttccatgggtccgtgagcgttcagttagagcaatggagtggatgaatattcaactggaccccgacatgaatgatcaggcggaagcaccctgcgcgattcactctaaaaacagtcaaacaaaaatcctggtgcttcccagtgatgaggaatgggaaatggccagccaggcagcagaactgattctttaat

SEQ ID NO: 249523 - DNA, 487 bp, Unknown
  Bacterial polypeptide expressing nucleotide sequence isolated from the Sargasso Sea
tatgagcggatcatcatctattaaagatagaatttttcttttaaaaaattgttatcgtataattttcaatagtaattggtctaaaaaaagatttcttgaaaaaatgagttctgatgcaattaatagtgaaaaattaattgttatacatcaatctgcttcaaaaaataaaattaatatcaaaaaaaaacaaaatattattacttttgtcggcaagctaaatagatcgaaaggttacgatttatttggtaaagctgtaattgatattttaaaaaaatataataactggaaagtttatatagctggcgatgaaccaagagataaaattgattttaatcatgatagattaattaaattaggttttagaaatcataaggaaattatcaatctttataaattaacaagtatagcagtagtttgctcaagatgggaagagccgtttggtagaacaagtttagaggcatcagcaaatggatgtgctgtgattatt

SEQ ID NO: 249524 - DNA, 508 bp, Unknown
  Bacterial polypeptide expressing nucleotide sequence isolated from the Sargasso Sea
atgccgaatccaacaaacgaagaactaaatgtagctacatggaaaataccaaatgctttaggcataataggatcttcagcaaataatgaatttaacgggatgacagctagctggataacgcaagtcagtatggagccattattgattgctgtagggattgataataaaagtattacccatgggctaatgtcagcaagtgaatatttcagcttaaatttatttgcagaaaattacaccaaagtgtttgtaaaattttcaaagccagctgagtataaagaaggctttctaaatgaagaaccaattacgttaacagaaaacaatatgccaatatttgataatgccatagtttggtttgaaatgagaaaaaaagacacatatgatcttggaacccacacgctatatatcggtgaagttactgattgtaagactattgaaacggaagaaagggttgcatacatgggagatacaagaatgaaatatggtggcgttccaagaggtggacattaat

SEQ ID NO: 249525 - DNA, 469 bp, Unknown
  Bacterial polypeptide expressing nucleotide sequence isolated from the Sargasso Sea
atgcctaatccaacaaacgaagaattaaatgtagccacatggaaaataccaaatgctttaggcataattggatcttcagcaaataacgaatttaatgggatgacagctagttggataacgcaagtaagtatggagccgttactcattgctgtaggaattgataataaaagtattacccatggactaatgtcagcaagtgaatattttagcttaaatttattttcagaaaattatactaaagtgtttgtaaaattttcaaaaccagctgaatataaagaaggctttctaaatgaagaaccaattacattaacagaaaatgatataccaatatttgataatgccattgtctggtttgaaatgagaaaaaaagaaacgcataatcttggaactcacaccctttatataggtgaagttagtgactgtaagactattgaaacagaagaaaaggttgcatatatgggacatacga

SEQ ID NO: 249526 - DNA, 962 bp, Unknown
  Bacterial polypeptide expressing nucleotide sequence isolated from the Sargasso Sea
tatagaaaaactttaattggttcgattgtagatgatctaaggccagaagttttaactaagcttgacgatactgtcttaggagaagttgtaaggcaattaggagttgaaaaaatagctttagctttaggtgaccttgagaccgatgaggttgtagaggtcattgatgacttagatccgaagtttaggaatgatgttttgcaaaaaatggaaatttctaatcgtgcaggaattgaagagtctttatcctatcctgaacaatctgcagggcgtttaatgcagagagaacatatggcaattccaatattttggaatgttggtcaagttatagatcacttgagagaaactgttgaacttcctgatgagttttatgaattacaagttgttgatgagaaatatcatccagttggaattgtacctttaaatactttgttgagatctaaaagaccagaagctattaaaaatattatgatttcagatataaagttagttcctgttgatattgatcaagaggaagtagcctatcttttccaacaatatgatttagtttcagcgtcagtaattaatgaagatggaaggttaattggcgttataatgtacgatgatataatagacgtcattaaagaagaagctgaagatgatattttacgtttaggtagggttggagatgctggtataaatgattctatttttactattacaagagatagatttatatggctaatggtaaatttaatgacagctgcattggcttcattagttatttttctttttgatgcaacaattgaagaattggttgctttggcagtattaatgccaatagttgcatctatgggaggtaatgctgggactcaaacattgacggttaccgtaagagcattggctagtagagatataacttctgctaatgctgcaagatatataaacaaagagttaattgtatctcttttaaatggatgtttatt

SEQ ID NO: 249527 - DNA, 718 bp, Unknown
  Bacterial polypeptide expressing nucleotide sequence isolated from the Sargasso Sea
aattttcactatagttggtgtctaccaattcttattagaaattttattttaattttactgtggtttggatttttgcatcttagactttatgtaaaaaaatcacaaagtaatttatacaaatataatgcaaattatggcgaaggttcaaaagaaaagtttttatttaagaatcaaatatacgacaatatgtttttgtctttagtaagtggttcgatatttatttctttttatgagattttagctttatggtgttattccaataattatttttcaaatgtaaattggaatgataattttatatattgttttattctaattttattattgccattatataaagatgctcatttttatactgggcatagattccttcatagttcagttctttataaatatgcccattatgtgcatcataaaaatgttaatcctggtccatggtcagggttagctatgcatccaattgagcattttatatatttttctttttttattattttttttattgttccttctcaccctttccatttttattttttatatggtatttttcttttcgctccagcagttcatggacattcaggttacgaaaaattaatggttaataaaaaaagtggagttggaacaggggggcatgcgcattatttacatcataagtactttgaatgtaattatggtgatggaaatcttccactagacagatggtttggcactcttcatg

SEQ ID NO: 249528 - DNA, 508 bp, Unknown
  Bacterial polypeptide expressing nucleotide sequence isolated from the Sargasso Sea
atgtcaaaaccaacaaacgaagaactaaatgtagctacatggaaaataccaaatgctttaggcataataggatcttcagcaaataatgaatttaacgggatgacagctagctggataacgcaagtcagtatggagccattattgattgctgtagggattgataataaaagtattacccatgggctaatgtcagcaagtgaatatttcagcttaaatttattttcagaaaattacaccaaagtgtttgtaaaattttcaaagccagctgagtataaagaaggctttctaaatgaagaaccaattacgttaacagaaaacaatatgccaatatttgataatgccatagtttggtttgaaatgagaaaaaaagacacatatgatcttggaacccacacgctatatatcggtgaagttactgattgtaagactattgaaacagaagaaagggttgcatacatgggagatacaagaatgaaatatggtggcgttccaagaggtggacattaat

SEQ ID NO: 249529 - DNA, 817 bp, Unknown
  Bacterial polypeptide expressing nucleotide sequence isolated from the Sargasso Sea
ttcgactatatcggcgccgcctatgccgggtttacggccggcataggtgaatccgatcgtggcccatgtcagttacccaatgcgttgggtgactccgtaactggcatcacggcggcgatggccgtcgctttcgcactgctgcatcgcgaaaagacgggggaggggcagcacatcgaggcctctctagtcgacagctactttcagacccaggaagtaaacgtcccgaaaatcgccatgtcggggaaaaaagctgttacacaacgatccggatctcatcatccagacggcggaccaaccggtaattttcgcgctggcgacggaacgtatatcgcgatcatggtgatgccctaccaatggccacaaattgtgcgggcgctggggcagccggaattaacggaggacccacggtttaagtcaccgcgcgaccggcgagctaataaagaagctttgggtggtatcattgaaacatggatgtcagagttgggtacgcgtgacgcggccctggatgcccttcgagcggaacgtgtgccctgtgcgcccgtgctctctttagctgaggccatagtgcaccctcatctcgttgaaaggggcaccgttcgtgccgtgaatgatccgctgttaggcgatttcgctgtgcccggtatgccagctaagttttcggcctatgcagcgccgtccgacccgaaggcgccgctgttagggcaggacaacgacgaggttctgtccggtatccttgggatggacgaggcagaaattaccgcgctgtatgacgcgggaacaatcctccaagatcggctgatcggcgcaaaaaaatagg

SEQ ID NO: 249530 - DNA, 508 bp, Unknown
  Bacterial polypeptide expressing nucleotide sequence isolated from the Sargasso Sea
tatgcctaatccaacaaatgaagaattaaatgtagctacatggaaaataccaaatgctttaggcataattggatcttcagcaaataatgaatttaacgggatgacagctagttggataacgcaagtcagcatggagccattattgattgctgtaggaattgataataaaagtattacccatggactaatgtcagcaagtgaatattttagcttaaatttattttcagaaaactatactaaagtgtttgttaaattctcaaagccagctgaatataaagaaggctttctaaatgaagaaccaattacattaacagaaaatgatataccaatatttgataatgccattgtctggtttgaaatgagaaaaaaagaaacgtataatcttggaactcacaccctttatatcggtgaagttactaactgtaagactattgaaacagaagaaagggttgcatatatgggagatacaagaatgaaatatggtggtgtcccaagaggtggccattaa

SEQ ID NO: 249531 - DNA, 784 bp, Unknown
  Bacterial polypeptide expressing nucleotide sequence isolated from the Sargasso Sea
ttgcttcgtgatggacgtgcccggccgcgaggatgccttgatcatcaccgacgcggccgtgaacatctcaccgacactcgacgagaaacgcgatatcgtgcagaacgccatcgacctcgcgcacgccttgcgttttccggccgcgagagtggcgatcctctccgccatggaaaccgtcaactccaaagtgccgtccacgctcgacgccgccgcgctgtgcaaaatggccgaccgcaagcagattacgggagggattctggacggcccgctcgcgctcgacaacgcgatcagcgaagaggccgcgaaaatcaagggcatctcgtcgcctgttgccggtcatgccaacgtgctggtcgtaccggatctcgaagccggcaatctgctcgccaaaagcctgtcgtttctcgccggtgcggatgccgccggcatcgtgctgggcgcgaaggtgccgatcatcctgaccagtcgcgccgattcggtgatgacgcggctcgcgtcgtgcgcggtcgcctcgctcgtcgcgctcgcgcggcgcgagaagccttccgcggccatcgtctaaacgcgatcgtcttcacggcggggatcggcgaatatgcggcgcccgtgcgcaaacgggtgtgccgcgcggccgcgtggctgggcgtctcgctcgatgcgcaggcgaatgcgcagcacgggccgcgcatcagcgatccgcaaagcgccgtcgacgtgtgggtcattccgaccaacaaagaaccgacgatcgcccggcacgcctggcaccggctggagtcatgaa

SEQ ID NO: 249532 - DNA, 409 bp, Unknown
  Bacterial polypeptide expressing nucleotide sequence isolated from the Sargasso Sea
tatgcctaatccaacaaacgaagaattaaacgtagctacatggaaaataccaaatgctttaggaataattggatcttcggcaaataatgaatttaatggaatgacagctagttggataactcaagtaagcatggagccgctattgatagctgtaggaattgataataaaagtattacccatggactaatgtcagcaagtgaatattttagcttaaatttattttcagaaaattatactaaggtgttcgtaaaattctctaagccagccgaatataaagaaggctttttaaatgaggaaccaattacgttaacagaaaacaatatgccaatatttgataacgccattgtttggtttgaaatgagaaaaaaagagacatacgatctggaacacacaccctttatatcggga

SEQ ID NO: 249533 - DNA, 574 bp, Unknown
  Bacterial polypeptide expressing nucleotide sequence isolated from the Sargasso Sea
tagtggttcgatatttatttctttttatgagattttagctttatggtgttattccaataattatttttcaaatgttaattggaatgataattttatatattgtttaattctaattttattattgccattatataaagatgctcatttttatactgggcatagattccttcatagttcagtcctttataaatatgcccattatgtgcatcataaaaatgtcaatcctggtccatggtcagggttagctatgcatccaattgagcattttatatatttttctttttttattattttttttattgttccttctcaccctttccatttttattttttatatggtatttttcttttcgctccagcagttcatggacattcaggttacgaaaaattaatggttaataaaaaaagtggagttggaacaggggggcatgcgcattatttacatcataagtactttgaatgtaattatggtgatggaaatcttccactagacagatggtttggcactcttcatgatggatctgacgaagcacaagaacgtatgattaaaagaatgaaagaaagaagaggttaa

SEQ ID NO: 249534 - DNA, 394 bp, Unknown
  Bacterial polypeptide expressing nucleotide sequence isolated from the Sargasso Sea
cctttataaatatgcccattatgttcatcataaaaatgtcaatcctggtccatggtcagggttagctatgcatccaattgagcattttatttatttttctttttttattattttttttatttttccttctcacccttttcatttttattttttatatggtatatttcttttcgctccagcagttcatggacattcaggctacgaaaaattaatggttaataaaaaaagtggagttggaacaggaggacatgcacattatttacatcataagtactttgaatgtaattatggtgatggaaatcttccactagacagatggtttggcactcttcatgatggatctgatgaagcacaagaacgtatgattaaaagaatgaaagaaagaagaggttag

SEQ ID NO: 249535 - DNA, 1003 bp, Unknown
  Bacterial polypeptide expressing nucleotide sequence isolated from the Sargasso Sea
gatgggtcgtcctgtcacattatttacaggccaatgggccgacatgccgctggaaaaccttgctcgaaaagctcgtgagtttggctatcaaggactcgagttggcgtgctggggagatcattttgaagttgacaaggcaatcgctgatgacagctattgcgcaacgaagcgagacctgcttgaacagcacgacctgatggttcacgcaatttcttgtcatctcgttggtcaagccgtttgcgaccgagtggacgaacgtcacaaaactatcctgccgccgtacatctggggtgatggtgaaccggaaggcgtaagtcaacgggccgccgaggaagttaagcaaactgccagggccgcgaaaaagcttggtgtgtcagttgtcaatggctttaccggatcaagtatttggcatctcctgtactctttcccgccggtccctgaatcaatgattgaggctggctttcaagattttgctgatcggtggaaccctatcttggatgtttttgctgaatcaggtgtgcgtttcgcactcgaggtacacccaactgaaatagcttttgatattattaccgcccaacgagcacttgaagcagttgggcaccgagaagaattcggttttaactttgacccgagtcaccttcactggcaaggcgtggatccagtagaatttatccgaacattcccagaccgcatttaccatgttcatatcaaggatgctgtcgtactcctgaatggcaaggggggcattcttgctagccacctcaatttcggtgatccacgacgcggatgggacttccgttctcctggtaggggaggtgtcgacttcgaagagatcattcgggctcttaatgagattggctacagcggtccgttgtctgttgaatgggaagattgcggaatggatcgtgagcatggcgcaaccgaggcatgcgaatttgttcaaaatattgactttgctcccagtaatcggcagttcgatgctgctttcgacaaagaggactaa

SEQ ID NO: 249536 - DNA, 862 bp, Unknown
  Bacterial polypeptide expressing nucleotide sequence isolated from the Sargasso Sea
atggcatttccaacgcatgcggattatttaattattggagcaggtatacatggcctctcaactgcctggcgtttggcagaacgtttgagttccaaaggtgaagctgtcgaaggacgtataattgttttagataagtcaggaattgcttctggagcttctgggattgcctgtggtgttgttcgtaacaattactaccagccagcaatgcgtcggttgatggctcactccgtaaatatctgggaaagtgatcctgaaggtctcagctatcacccagtaggttacatgcagatttcgtgtgaatctatgcgcgaggatgtggcctcaatttatgagcagcagaaggccattgggtatgaaagtgtttttatagaaggtgcaagcgcctcagatgcatatatgaaagatatgttcagcgattggcaggcccaaaacataacgtctgttctacatgaaaaaagaggcggttactctaacaacactaaatcgatgtatgggttggctaaaaaagtcgaagaccgaggcgtgcgcatcatttctggtgtcgaagtgaaaggcctgaatactgaaaatggttcgtcaagcataaaggcagttgatacttcgcatggagtggtatcgtgtgacaaactcgtagttgctcctggtccgtgggcgcgtgacttttgggaaatgttaggcatgccgaaaaagatcagtcttaaggatctatctggtgaattgcatcatgatatcgatatgtggcgattctggcaacttgaagagggtgttcttcaattgcctccagaagttttgcagacgaatgatggcaaaaccccgccagtggtgcacgtagatacagacgcaccattacattcttgtgttg

SEQ ID NO: 249537 - DNA, 1376 bp, Unknown
  Bacterial polypeptide expressing nucleotide sequence isolated from the Sargasso Sea
attgcgacaacttgtttgtgttgcctgtgctttggttatggtcggcacgtgcctcaaagctgaagatacctttgagccgtatgcatctgatgttcccgagtctgcggttgcgctttgggaagactacgatccacgacatgagccactcaatattgaggttgttcaggagtgggaaaatgacggtgtggtcacacggtatgtgacgtttactgtaggcacgtttaaaggcaaagaatcacggattgcgggatattattgtttgcctgccgggaaagcgaagcttccagcttttgtgtgggcacacggcggtggccagcgggcagaccgtcgacgtggagagtactttgcacgacaggggtatgcatctattgatatcaactggctcgggcgtccacttgaggacggaattgatatcaatacggattggggtaacgtcgacccaacgcagggtccccgtttttatggcaaggctcttcggcagggatggaagcgaagccttttgcctgacgagtacacgatcgacacggtttcaagtccacgcaactcgaattggtttctgctcgcggtggctgcgcgacgtggcattacttttcttgagcagcagccggaagtcaacgctgaccggattggtctatcagggttttcaatgggaggcatgattactgccttggcggctattgactcacgcttaaaggcggttgtgccgttcgttggaggaacaggttttaaatacgttgattttccaggccgaattgaagggagttcgcttcagggccactttcagaatcttgaactttataaggcaaccattgacgccagtgcgtactggccgtttgttcgctgcccggtttgcttcattagttcgacgaatgacttccattccgtgtttgatcggatctatcagtcgatggccctcgtgccgcattcagactggcgggtgagtacgaacctacatcaaaaccatgggcctgggcctgagcaatgggtcatgctgaatctttggttcgatcagtatctcaaggaaattgatcagcacattcctgtgacaccaccatcaaccttttctgtgtcagatggcatagcatccttttctgtcacgccagatgatcaagatcgacttgttgcgacagaaatctatttcagctacgaccccaatccgcgaacacgattctgggagcgggctcaagcccggcaggacgggaagacattgtcagtcacagtgccggtgttcgaggatctgccactgtatgtctttgcactctgtcggtacaaaattgggcatgttcaaacgttggagcgtggtgaaacgtcaacatatactttgaactcggtcgagcattcgttcgtgccagaaaaagtgagccttgagtcccttt

SEQ ID NO: 249538 - DNA, 402 bp, Unknown
  Bacterial polypeptide expressing nucleotide sequence isolated from the Sargasso Sea
tatgccaacacccgctcctaagtcacaacatgttttagtattaaactgtggtagctcaagtttaaagtttgccattattgatgcaaacaccggccatgaaattatatcgggcttagcagagcgactaggtgcagcaactccgtcggtaaagtataaatacaaaggtgataaaacacttattgatttagcaccagagcaagctcacgctgaggctattaatacgctagtaacgttaataaaagatcataagctagatgaacagctaattgctgttggtcatcgtgttgttcacggtggcgagcactttaccaaatcagtattaattaatgatcaagttattgaaagcataacccaggctgcaacacttgcaccgcttcatggtcatgccaacttgctgggtat

SEQ ID NO: 249539 - DNA, 505 bp, Unknown
  Bacterial polypeptide expressing nucleotide sequence isolated from the Sargasso Sea
atgaagaaagaagttatagttttaaattgcggcagttcgtccgtaaagttcgcgataattgacgctgacactggagaggctggactgtctggtattgctgaagcactaggtaatagtgatgctagtttgtcttacaagttaaacggcaaaaaagaaaaacgtgcactacctgaaaaagctggccataccgaagcgttaagcgcaatttcagaagttatcgctagtacgggcgttaagcctatcgcaatagggcatcgtgttgttcatggtggtgaaaagtttaagcaggctgcacttgtcgatgatagcgtactcgaagcaattgaagattatgcaagcatggctccgcttcataatatggcgaacctaaaggggatcgtcacggcgcaagaggcttaccctgacctgcctcacgtagtcgtttttgacacgtctttcttccaaacattaccaaaaaaagcctttatctatgcgttgcctatgtcgctttatcgtgagcacggca

SEQ ID NO: 249540 - DNA, 816 bp, Unknown
  Bacterial polypeptide expressing nucleotide sequence isolated from the Sargasso Sea
tttgggctcttcttttttcttaggttcatctttcttcttttcccatggacgttttggcttttcttcagctggtttatctccaggcttcttcttccatgcaggctgcttcttttcctgtttgggttcatcaggagttttctcccatggttttttaggtttagagggagcctttttctcctcaggtttaggcttctcctcggttttgggagcttcctcgggcttggctgcaggggctggagcactgtccttaggagcatctttaggagcagcgggtttgctttcggcaggtttcttagcaacaggcgctttctctactgcttcctttatgtcctcttcgacacttggaacagagtcagctggctcatctggaatttcctctgattctaagagttgtggctcagctggagcactgtccttaggagcatctttaggagcagcgggtttgctttcggcaggtttcttagcaacaggtgctttctctactgcttcctttatgtcctcttcgacacttggaacagagtcagatggctcatctggaatatcctctgattctaagagttgtggctcaactggagcactgtccttaggagcatctttaggagcagcaggtttgtcttcagttggtttcttagcaacaggtgctttctccactgcttcctttatatcctctgtgacacttggaagagagtcaactggctcatcgggaatatcctccgattctaagagctgtgcttcagctggcttggttggtttagaaggttcttcagcttttggttgcttggctgcgggctttgattcctcaggcttggctactgg

SEQ ID NO: 249541 - DNA, 804 bp, Unknown
  Bacterial polypeptide expressing nucleotide sequence isolated from the Sargasso Sea
cctgtattgaggaaatctcagaacatttcccggaaatccctcagtccgtggtctttgacacctcattccatcaaacccttccggaatatgcctggcgttatgccttgcccagaaaaatatctgtccaatatgcgatacgccgctatggttttcacggcatttcccatcaatcagtggtgaaacaggccgcttcatttttgaagactcctgtaaaaaaactgaatctgatcaccattcatttgggaaatggcgccagtatttccgccatcaaaaaagggatttgtgttgataccacgatggggatgacaccgcttgaaggattagtgatgggtacccgccccggagatctggatcctggaattttaacgctactggcaagcaaaggatggaatcaggaagcccttgaaacgatgctgaatcaggattctggaatgaaggggctctgtggaaccaatgattttcgggaaatactccaaaacaaggaagaaggaaatgaggaggctgaaatggccctggaactttactgttatcgtgtccgtaaaacgatcggttcgtttagtacagtcatcggaccggtcgatgctctggtctttaccggaggagtcggagaaaatgttccatgggtccgcgagcgttcagttagatcaatggagtggatgaatattcaactggaccccgacatgaatgatcaggcggaagcaccctgcgcgattcactctaaaaacagtcaaacaaaaatcctggtgcttcccagtgatgaggaatgggaaatggccagccaggcagcagaactgattctttaat

SEQ ID NO: 249542 - DNA, 598 bp, Unknown
  Bacterial polypeptide expressing nucleotide sequence isolated from the Sargasso Sea
gccttgcccagaaaaatctctgaccaatatgcgatacgccgctatggttttcacggcatttcccaccaatcggtggtgaaacaggccgtttcatttttaaagactcctgtaaataaactgaatctgatcaccattcatttgggaaatggcgccagtatttccgccatcaaaaaagggatttgtgttgataccacgatggggatgacaccgcttgaaggattagtgatgggtacccgccccggagatctggattctggaattttaacgctactggcaggcgaaggatggaatcaggaagcccttgaaacgatgctgaatcaggattctggaatgaaggggctctgtggaaccaatgattttcgagaaatactccaaaacaaggaagaaggaaatgaagaggctgaaatggccctggaactttactgttatcgtgtccgtaaaaccatcggttcgtttagtgcagtcatcggaccggtcgatgctctggtctttaccggaggagtcggagaaaatgtgtcctgggtccgcgagcgttcagtgagaggaatggagtggatgaatattcaactggaccccgacatgaatgatcacgcggaag

SEQ ID NO: 249543 - DNA, 389 bp, Unknown
  Bacterial polypeptide expressing nucleotide sequence isolated from the Sargasso Sea
aatgtctgcacgcaacattctggtgatcaactgcggcagctcgtcgatcaagttcgcgttggtcaacgaaacgcaggaaaccttcatgctcagcggcctggccgagcgtcttggtagccccgaggcggtgctgcactggcaacaaggcgaacaaaaggacagcctggtcctgccgggcgctgaccaccgcctggccctgtctcatcttctccctgtggtacagcaggccgcagccggtgagctgcacggcatcggccaccgcgtggtgcatggcggcgagcacttctccggcgcctctcgtctggacgccaccagcctgcaagcgatccgccaggtcgcgccgctggccccgctgcataacccggccaatctgcagggtatcgaggcgg

SEQ ID NO: 249544 - DNA, 859 bp, Unknown
  Bacterial polypeptide expressing nucleotide sequence isolated from the Sargasso Sea
cctggtggattccaccggggctttcctctggcacagcggacgcagcatcgctgcggatgagcctctcgaggatgtgctccacaattggctggaacccgacctggatccccatcggcaacaggtcggactgatcggccatcgcgtcgttcatggtggtgaacgcttcacggcacccacgcaaatcacggaggaggtgttggcgacgctggagcttctgactcccaatgcaccgctgcacaatccaccagccctcaaagggatggcatgggccacgacctgggccccctcattgcctcaatgggcttgttttgatacggcttttcacagcagcatgccggctgctgcatacacctacgcgatccctgctgaattcagaacgaagggattccgccgttttggcttccatggcatcaaccaccagcacatcgcagaaacggtggccgatcgatggcgcagccagaacaaagacccctcaacactgcgactggtgagcgcgcatcttggagcaggagcctccctggcagcgattcacggcggccgttgcatcgacaccaccatgggattcacccctcttgagggactcgtgatggcaacccgctccggcaatcttgacccaggcctgatgctgggcctgatgcgggagggatacagcgcggatcagatgtcggccattcttcagaaggaatcaggcctcaaagggctttcgggtttcagtggcgacatgcgggagatccgagaagcggccgccgcaggacacatcggcgccatcgcagctctcgacgtgttccgacaccgtctgcttcagctgctgggctccatggccgccagcctcggcggcgtggacgtgcttgcactcact

SEQ ID NO: 249545 - DNA, 661 bp, Unknown
  Bacterial polypeptide expressing nucleotide sequence isolated from the Sargasso Sea
atgctgatccaggttttcaacgccggtagttcttccataaaatttgcgctttaccagcatcaatcgaagctggaacttcttaaaggaaaccttgagaaaatcggggaggcatcttccatattgagttatcagacatcatcatctccatcacaaaaaaatgaactacctgatggctgcaagaaccacaaagaagggatccagaaaattctggatatttttgatcaggaaaaaaacaatcccggttcggtggatctcattgtccaccgtgtggtccatggcggaacaaaataccgtcatgcgtcacttcttgatctggaagtgaaacaattcatcagggacatgatccctctggccagaacacatcaccctgccagcctggcctgcattgaggaaatcacagaacatttcccggaaatccctcaagccgtggtctttgacacctcattccatcagacccttccggaatacgcctggcgttatgccttgcccagaaaaatctctgaccgatacgcgatacgccgctatggttttcacggcatttcccaccaatctgtggtgaaacaggccgcttcatttttgaagattcctgtaaataaactgaatctgatcaccattcatttaggaaatggagccagtatttccgccatcaaaaaagggattt

SEQ ID NO: 249546 - DNA, 835 bp, Unknown
  Bacterial polypeptide expressing nucleotide sequence isolated from the Sargasso Sea
actgcgagaacatctggaacgtcggtcccctcaacgtcgacatcacctgcgatgtccgctgatgagcgatctgtcgctggtcatcaacctcggcagttccagcctcaaggcggccctggtggattccaccggggccacgccctggtacagcagccgcagtgtggctgcggatgaatccctcgaaacagtgctgaacagctggctagccccggctcttgaaccccatcgtcagcaggtatccctgattggtcatcgcgtggtgcatggcggcgagcgcttcactgcccccacccggatcacaccggaggtggaagccaccctggcggagctgatacctctggcgccgctgcacaatccaccggcgttggagggattggcctgggcccgtcactgggccccggagctgccgcagtgggcttgtttcgacaccgccttccacagcagcctcccggctgctgcttatacctatgccataccaagcgagttcaggaacaagggcttccgtcgcttcggtttccacgggatcaaccatcagcacgtctcggaaacagtcgctgctcaatgtcgtaaacagggcaagaatccatcacagctgcggctgatcagcgctcacctcggagcagggggctcgctggcagcggtcaaagaggggcgttgcatcgacaccaccatgggatttaccccccctggaagggctggtgatggccacccgatccggcaacgtcgaccccggactcctgctcgaactgatgcgggagggctacagcgaagaccagatcgccacgatcctgcaaaaggaatcaggcctaaagggactgtccggcctcagcggtga

SEQ ID NO: 249547 - DNA, 139 bp, Unknown
  Bacterial polypeptide expressing nucleotide sequence isolated from the Sargasso Sea
catgtctcacaaaataatggccattaatgcaggtagttcctcgcttaagtttcaactactggcgatgccgcagggtgaaatgatctgccaggggttgatagaacgtatcggtttgtctgatgcacaggtcaccctaaaa

SEQ ID NO: 249548 - DNA, 709 bp, Unknown
  Bacterial polypeptide expressing nucleotide sequence isolated from the Sargasso Sea
atgaatgagtttccggtagtactggttattaactgtggttcgtcttccattaaattctcagtgctggatgcagctaactgtgaagttttaatggcgggaatcgcggacggtattaactctgaaaatgcgttcatagcaattaatggaggagagccagctaagctggctcaccacagctacgaagacgcattaaaagcaattgccgttgaactagagaaacgtaatttaatggacagcgtggccttaattggccaccgcattgcccacggcggaaatatctttaccgaatcagcaattattactgacgaagttatcgataatatccgccgggtatcgccgctagcaccgttacataattatgcgaacctgagtgggatcgaatctgctcagcaccttttccctggccgacagcaggttgcggtatttgatacaagcttccaccagacgatggcccctgaagcctatttgtacggtttaccgtggaaatatttcgaagagttgggcgttcgtcgttacggcttccatggtacgtcgcatcgctatgtttctcagcaagcgcatgaccttctcgacctgcagagtgatgactcgggtctggttgtggctcacctggggaacggcgcgtcaatctgtgcggtgcgtaacggccagagcgttgatacctcaatgggcatgacgccgctggaagggttgatgatggggacacgca

SEQ ID NO: 249549 - DNA, 924 bp, Unknown
  Bacterial polypeptide expressing nucleotide sequence isolated from the Sargasso Sea
ccgtggcccatcgggtggtgcatggcggcgccaagtacttcgcgccggtacgcgtgaacgcggaggtgctttccgatctgcgcagctacattccactggcaccgttgcatcaaccgtttgcactggaagccatcgaggcgcttctgttgggcttgtccgatgtgccacaagtcgcatgcttcgataccgcgttccaccgcacgctgccacaggtcgagacgatgctgccgctgccttacatggcatgggagcgtggcctgcggcgttatggctttcatgggttgtcgtacgagtacatgtcgatcgccttgcccgaacggcatggcgatatcgcccgcgggcgaaccatcgtcgcgcatctcggcagcggcgcgagcctgtgtgcaatgatcgaactgaagagcgtggccacaacgatggggttttccgcgctcgatggcctgatgatggggacgcgatgcggctcgctcgatccgggggcggtgctctacatgatggagacggagcatctgtccccggcacaggtcgggcacgtgctgtatcacgaatcgggtctgcttggcgtgtcagggctgtcttccgacccgcgcgacctgattccgcgcgaggccgacaacccacgtgtgcaggcagcgcttgcgctctacgtgcgccggatcgtccgcgagatcggcgcactggtggcggtacttggcggcctggattttctggtgttcacggccgggattggcgaacacaacgcggtactgcgcgaacgcgttgtggggggacttggttatctgggcgccaacctggatggcgaggccaaccaagcgcatgccgcgatcatttccagttcagcgagccggattcgcgtggcggtggagcctactaatgaggagtgggtggcagctcggcatgcggttcaatgcaatttgcagtgac

SEQ ID NO: 249550 - DNA, 871 bp, Unknown
  Bacterial polypeptide expressing nucleotide sequence isolated from the Sargasso Sea
aaaggtatgaaagagtgttcttcactggcacggctgcataaccctgcgcaccttatcggcattcgcgccgccattgcgtctttccctaaactgccccaagtggcagtgttcgatactgcgttccaccaaagcatgccagagcgcgctttcatctacgccctgccatacaaattgtaccgtgagcacggtatccgccgttatggcatgcacggcactagccacctgtttgtcagccgtgaagccgctaaagtgttgaacaagcctttagaagaaaccaatgtgatctgcgcgcacttaggtaacggtgcctctgtgacagcggttaaaggcggtaagagcgttgatacctcaatgggactgacgccgcttgaaggcttagtcatgggcacacgctgtggcgatctcgacccatcgatcatctaccacttagtgcaccaactcggttacacgctggaagaagtcaacaacctgatgaacaagcaaagtggtctgctggggatttctgaactgactaacgactgccgtggcatcgaagaaggttatgccgatggccataaaggtgcaaccttagcactggagattttctgctaccgtctagcgaaatacattgcttcttatactgttccacttggtcgtttagatgccgtagtctttactggcggtatcggcgaaaactccgacatcatccgcgagaaagtactcaacatgctgcaaatatttaatttccatgttgatagcgagcgcaacaaagcggcacgcttcggtaagaaaggcattatcaccgccgacaacagtactgtcgccatggtcatcccaaccaacgaagagtgggttatcgccgaagattcaattaaactcattagtaaataat

SEQ ID NO: 249551 - DNA, 587 bp, Unknown
  Bacterial polypeptide expressing nucleotide sequence isolated from the Sargasso Sea
gatggacgtggttctggttgtcaacgccggttcatccagtctgaagttccagtccttcggccttgtggatggcggattgcagcgtcgcgtgcgcggccagatcgacgggatcggactcaggccacggctgcggatcgtcgatgccgcgggagccgtgctgatcgaccgtagccatgacgtggacgaggtccgcgacctgccggcagccatcggcgtgctgagggactggttgcagacccgtcagggcatcacgctgcgcgccatcggccaccgggtcgtgcatggcgggccggatttcgatcgcgccgtgctgatcgacgaggatatcctgaaccggctgtcgcgctatcaggcgcttgcgcccttgcaccagcccaacaatctggcgccgatccgcgttgccatggcaatcgcgcccgacgcaccgcaagtcgcctgtttcgataccgcctttcaccgtcatcacgccgaacatgtcaactgctatgccctgccgcgcggcttgtacgacgaaagcatccgccgctacggctttcatggcctcagctacgaatacatcgcgcaggcccttgcccgaaaccgcgccc

SEQ ID NO: 249552 - DNA, 468 bp, Unknown
  Bacterial polypeptide expressing nucleotide sequence isolated from the Sargasso Sea
tcgatccggccatcatcttcttcctgcacgacaagctgggcatgagcgtggccgacatcaacaccatgctgaccaaagagtccggcctgcagggtctgaccgaagtgacttccgactgccgtttcgttgaagacaactacgacagcaaagaagaagccaagcgtgccatggacgtttactgctatcgcctggccaagtacatcggcgcctacgccgccgccatggacggtcgtctggacgccgtggtcttcaccggtggtatcggtgaaaactccgccccgatccgtgaaatcaccctgaacaagctgggtctgctgggcttcgacgtcgatcacgacgccaacctgaaggctcgtttcggcaagggtggcgagatcaccaaggctggttccaccaaagccctggttatcccgaccaatgaagagtgggtcattgcccacgacgcgctggaactggttggcgcataat

SEQ ID NO: 249553 - DNA, 880 bp, Unknown
  Bacterial polypeptide expressing nucleotide sequence isolated from the Sargasso Sea
taccgcacatcgtgaagccgttgaatttatcgttaataaaatactcgccacccagccacaattagccgctcaaattaaagccattgggcacagaattgtacacggcggtgaaaagtttacccgctctgttgttatcactccagaagtcattcaaggcattgaagactgtgcctcactcgcaccattacataacccggctcacttaattggtatccgtgccgcgattgcatcgtttccagatttaccacaagttgcggtatttgatacagcattccaccaatctatgccagaaaaagcctatgtttatgccctgccatacaaattgtatcgtgagcatggtattcgccgttacggtatgcacggcactagccacctctttgtgagcagagaagctgcaaaagtgttaggtaaagacataaaagacactaatgtcatttgtgctcatttaggtaatggtgcatctgtaacggccataaaaggtggtaaaagcgttgatacctcaatgggtttaaccccacttgaaggcctagtcatgggcacgcgttgtggcgatttagacccatcaattatttttcatttggttaagcaattgggctacaccctcgatgaagtcaataacctactgaataaacaaagtggcttactcggtatttcagagctcaccaatgactgtcgcggcattgaagaaggttatcaagacggccataaaggcgccacattagcactcgatatcttctgctaccgtttagcgaagtacattgcctcatacacagtaccattggggcgtttagacgcgattatttttactggtggtattggtgagaactcagatcttattcgtgaaaaagtactgaacttacttgaaatatttaactttaac

SEQ ID NO: 249554 - DNA, 997 bp, Unknown
  Bacterial polypeptide expressing nucleotide sequence isolated from the Sargasso Sea
gtcaccctaaaaacaccagcgcagaaatggcaggagactttgcccgtagcagatcaccgtgaagccgtaacgttgcttctggaaaaactgctcaaccaccacattatcagcagtctggaagagatcgacggcgtgggccaccgcgtcgcacacggcggggaatcctttaaagactccgcgctggtaactgatgaaacgctggcagaaatcgagcgactcgcggaactggctcctctgcataacccagtaaatgcgttggggatcgcggtattccgccagctattgcccaaaacgccagccgttgcggtgttcgacaccgcgtttcatcaaacacttgatgagccttctttcatctatcccctgccctggcgctactatgtcgagttgggtattcgtcgttacggttttcatggtaccagccacaaatacgttagctcacagcttgctgaaaaactgggtgtgccactcagcgccctgcgcgttgtttgttgtcatctgggcaacggcagcagcatctgcgcgatcaaaggcggacaatcggtgaatacgtcaatgggctttacaccacagtctggcgtgatgatgggcacgcgaagtggcgatattgatccatccattttgccctggatagccctgcgagaaggcaaaacaccccagcagctcaaccaattgctcaacaatgagtccggattgctcggtgtttctggcatctcacctgactaccgcgacgttgaacatgccgcagatacgggcaatcaccaggctgcgctggcgttgacgctttttgctgagcgcattcgtgccaccattggtagctatattatgcagatgggcggtctggatgccctggtttttaccggtggtattggcgaaaactccgcacgggcgcgcgctgcgatttgtcgtaacctgaatttcctgggtctggccgttgatgaggaaaaaaatcagcataatgccaccttcattcaaacggaaaatgcgatggtaaaagtag

SEQ ID NO: 249555 - DNA, 1201 bp, Unknown
  Bacterial polypeptide expressing nucleotide sequence isolated from the Sargasso Sea
catgtctaataaactggttttagtactcaattgcggtagctcttcactcaaatttgccgtcattgacgcgcaaacaggtgacgatcagatctctggcctagccgagtgttttggcttagaagactcgcgcattaaatggaaaatcaacggtgaaaagcatgagtcctctttaggtgcatttaccgctcaccgcgaagccgttgaatttatcgtcaataaaatccttgctggtcaacctgaattagccgcgcaaattcaagccgtgggtcaccgtatcgtacacggcggagagaagttcacccgctctgtgatcatcgacgagcatgtgatcaaaggtattgaagaatgttcttcactggcaccattacataacccagcccaccttatcggtattcgcgcggccattgcgtctttccctaaactgccacaagtggcggtgttcgatactgcattccaccaaagcatgcctgagcgcgctttcatctacgctctaccatacaagctgtaccgtgagcacggtatccgtcgctatggtatgcacggcactagccacctgtttgtgagtcgtgaagccgctaaagtgttgaacaaacctttagaagaaaccaatgtgatctgcgcacacttaggcaacggagcctctgtgactgcggttaaaggcggtaagagcgtcgatacctcaatgggactgacgccacttgaaggtttagtgatgggcactcgctgtggcgatctcgacccctctatcatctaccacttagtgcaccaactgggttacacactggaagaagtcaacaacctgatgaacaagcaaagtggtctgctagggatttctgaactgactaacgattgccgtggcatcgaagaaggttatgccgatggtcacaaaggcgcaaccttagcactggaaatcttctgctaccgtctggcgaaatatattgcctcttacactgtgccgctcggtcgtttagatgccgtagtctttaccggtggtatcggcgaaaactccgacatcatccgcgaaaaagtgctcaacatgctgcaaatcttcaatttccatgtggatggcgagcgtaacaaagcggcccgcttcggcaagaaaggcatcatcaccactgacaacagtaccgttgccatggtcatcccgaccaacgaagagtgggttatcgccgaagattcgattaaactcattacaaaataa

SEQ ID NO: 249556 - DNA, 1183 bp, Unknown
  Bacterial polypeptide expressing nucleotide sequence isolated from the Sargasso Sea
atgaagaaagaagttatagttttaaattgcggcagttcgtccgtaaagttcgcgataattgacgctgacactggagaggctggactgtctggtattgctgaagcactaggtaatagtgatgctagtttgtcttacaagttaaacggcaaaaaagaaaaacgcgcactacctgaaaaagctggccataccgaagcgttaagcgcaatttcagaagttatcgctagtacgggcgttaagcctatcgcaatagggcatcgtgttgttcatggtggtgaaaagtttaagcaggctgcacttgtcgatgatagcgtactaaaagcaattgaagattatgcaagcatggctccgcttcataatatggcgaacctaaaggggatcgtcacggcgcaagaggcttaccctgacctgcctcacgtagtcgtatttgatacttctttctttcaaaccttaccccaaaaagcctttatttatgctttacccatgtcgctttatcgcgagcacggcataagacgctacggattccatggaaccagtcacaagttcatacttgatagcatggcaaaaattcttgagaagccggtttcagataccagcattatcagtgcccacctaggcaatggctgcagtgtgtcggctatagaaaaaggtgtggcggtagacacaagcctgggctttattcctcttgaaggcttagttatgggcactcgctgtggcgacttagatccgagtctaccgggaacgctgcagaagaagcttggcaaaaccgcagatgagataagtgatttactgaacaaacagtctggattacttggtatctcagagctgagtaacgactgtcgaacccttgaagatgcggcgcttgaaggtcacgaaggtgcattattggccattgaaattttttgctatcgcttagctaaatacatcgcgggttatatggtagccgtgcccacgttagacgctattgtatttacaggcggaataggggagaactcatcgcttattcgtgagacaactatggggtatttcgcccactttggaattagcttagatgagcaaagaaatgccgacgcgcgatttggtcaaggtggaaagattaccgctgataccgcatcaacggcagtttatgttgtgcctacaaatgaagaatgggtgatagccgcagaagctgcaaccttcgcgtaaa

SEQ ID NO: 249557 - DNA, 1201 bp, Unknown
  Bacterial polypeptide expressing nucleotide sequence isolated from the Sargasso Sea
atgcgtacgctcgcgctgctcgtcgtcaatgccggttcgtcgagcgtgaagttcgcggtcttcgcgtatccgccgcacggggatcccgcgcggcggccgctgcacgagggtgaagcgagcgaaaccggcaacggcgtgtcgctccgcttcgacgctgccccgggcggcacgctgccgctgcgcatggcagatccataccgtgcggtgcttgcgcaggtcgcgatgtggatccgcgtgcaactgccgcatatcgcgctgggcgccatcgcacatcgtgtcgtgcatggcggtgcccggtacgtcgacccggtcgtcgtcgacgacgcggtgctcgacgcgcttcgcacgctgacgccgctcgcgccgttgcatcaaccgcacagcctcgatgcgatcgacgcgctgcgcgacgcgtttcccgacgtgccgcaggtcgccgtgttcgataccgcgtttcatcgcacactgccgcgcgccgagcaattgctgccgctgccgcatgcgtggttcgaccagggcgtgcgccgctacgggttccacggtctgtcgtacgaatacctggccgccgcgctcgacgagcggttcggcgcacgtgcgcacggccgcgtgatcgccgcccatctcggcagcggcgccagcctgtgcgcgatgcgcgactgccgcagcgtcgcgacgacgatgggcttctcggcgctcgacgggctgatgatgagcacgcgctgcggcaccctcgatcccggcgtggtgctgcacctgctcgaggccggcaagctgtccaccgccgcattgggccacatgctctatcacgagtcgggcctcaagggcgtgtcgggcgcttccggcgatccgcgtgtgctgctggcgtgcgaagccgccggcgatgctttcgcccgcgatgcactgacgctctacgtccaccgcatcgtgcgcgaaaccggtgcgctcgtcgcgctgctcggcggcctcgacatgctggtcttcacggccggcatcggcgagcactcggccgtgttgcgcgagcggatctgcgcggcgctcgcctggctcggcatcgacatcgacgtaggcgcgaacgcggaccatgcgtcggtcgtgtcgtccgcgtcgagcgcggtcacggttgtcgtcgagccgaccaacgaagcgtggatcgccgcgcgcgccgcgctcggggtgctgcgcgccaaccgcgacgcttgat

SEQ ID NO: 249558 - DNA, 1201 bp, Unknown
  Bacterial polypeptide expressing nucleotide sequence isolated from the Sargasso Sea
catgagcaagttggtattgatccttaactgcggtagctcttccctgaaatttgccgtaatggacgccgaaacaggtgaggacatgctgtccggcctggccgaatgcttcaatctggatgatgcacgtatcaaatggaaactccacggggtcaagggcgaagccatgctgggcgcgggtgccgcgcatcaggaggccctcgaccacatcgtgggtcacatcctgccgcaggatccgaccctggccgagcagctggtggccatcggtcaccgcatcgtgcacggtggcgagcagttctcctgttccgttcgcatcgatgacggcgtgattgccggcatcgaagccgccattccgttcgcccccctgcacaacccggcgcacctgatcggcatccgtgccgcactcaaggtgttcccggcgctggcagagaagaacgtggccgtgttcgacaccgccttccaccagaccctgcctgaggaagcctacctctacgcgctgccctacaagctctacaaagagaacggcatccgtcgttacggcgcccatggcacctcccaccgcttcatcgcggaagagaccgccaaggcgctgggcaagccgctctccgagctcaacatcatcaactgccacctgggtaacggcgcctccgtctgtgccatccgtggcggtgaatccgtcgacacctccatgggcctgaccccgctggaagggctggcgatgggtacccgctccggcgacatagaccccgctgtagtcttcttcatgcacgaccagctcggttacagcgtggagcagatcaaccacaccctgactcgcgagtccggcctgctgggcatgaccgaggcgagcagcgactgccgctacgtcaccaccaactacgccaccgacgccggtgccaagcgcgcgctggacgtgttcacctaccgggtggccaagtatgtcggcgcctacgctgccgccatggatggtcgtctggacgccctggtgttcaccggtggtatcggtgaaaacgccgccatggtgcgcgagatggtgctggcccgtctggccctgttcggcttcaagatcgacaaggaagccaacaatgccgcggtgctgggcggtgaaggccccatcacggccgaaggcagccgcctggcgctggtgatgcccaccaacgaagagctggtcatcgcccgcgatgccctgagcctggtcggctaa

SEQ ID NO: 249559 - DNA, 1201 bp, Unknown
  Bacterial polypeptide expressing nucleotide sequence isolated from the Sargasso Sea
atgtctaataaactggttttagtactcaattgcggtagctcttcactcaaatttgccgtcattgacgcgcaaacaggtgacgatcagatctctggcctagccgagtgttttggcttagaagactcgcgcattaaatggaaaatcaacggtgaaaaacatgagtcctctttaggtgcattcaccgctcaccgtgaagccgttgaatttatcgtcaataaaatcctcgcgggtcaacctgaattagccgcacaaattcaagccgtaggtcaccgtatcgtacacggtggagaaaagttcacccgctctgtgatcatcgacgagcatgtgatcaaaggtattgaagagtgttcttcactggcaccgctgcataaccctgcgcaccttatcggcattcgcgccgccattgcgtctttccctaaactgccccaagtggcagtgttcgatactgcgttccaccaaagcatgccagagcgcgctttcatctacgccctgccatacaaattgtaccgtgagcacggtatccgccgttatggcatgcacggcactagccacctgtttgtcagccgtgaagccgctaaagtgttgaacaagcctttagaagaaaccaatgtgatctgcgcgcacttaggtaacggtgcctctgtgacagcggttaaaggcggtaagagcgttgatacctcaatgggactgacgccgcttgaaggcttagtcatgggcacacgctgtggcgatctcgacccatcgatcatctaccacttagtgcaccaactcggttacacgctggaagaagtcaacaacctgatgaacaagcaaagtggtctgctggggatttctgaactgactaacgactgccgtggcatcgaagaaggttatgccgatggccataaaggtgcaaccttagcactggagattttctgctaccgtctagcgaaatacattgcttcttatactgttccacttggtcgtttagatgccgtagtctttactggcggtatcggcgaaaactccgacatcatccgcgagaaagtactcaacatgctgcaaatatttaatttccatgttgatagcgagcgcaacaaagcggcacgcttcggtaagaaaggcattatcaccgccgacaacagtactgtcgccatggtcatcccaaccaacgaagagtgggttatcgccgaagattcaattaaactcattagtaaataat

SEQ ID NO: 249560 - DNA, 268 bp, Unknown
  Bacterial polypeptide expressing nucleotide sequence isolated from the Sargasso Sea
catgtcgagtaagttagtactggttctgaactgcggtagctcctcactgaaatttgctatccttgatgccgtaaacggtgacgaatatctgtctggtttggccgaatgtttccatctgcctgaagcacgtattaagtggaaaatggacggcagcaaacacgaagcagatttaggcgctggcgccgctcacagtgaagcgcttaactttatcgttaacactattctggcacaaaaaccagaactgtctgctcagctgaccgcaatcggg

SEQ ID NO: 249561 - DNA, 1180 bp, Unknown
  Bacterial polypeptide expressing nucleotide sequence isolated from the Sargasso Sea
atggcagacgtgattctggtgttgaatgccggctcttcgagcatcaagttttccgcattcgacgtgcagggcgacacgctcgggctgatcgtgcacggccaggtcgatgggctttacacggccaccgtgcacttcagcgccgtcgaccatcacgcggaacgtcacgagcagcaatgggccggcggcgacacgttcggccatcaggaagggctcgagcagatcgccgcgttcctggaggctcaccaggaagggcatcgtcttgcggcggtgggccatcgcgtcgtgcatggcgggcaacgcttcagcggcccggtgcgcgtcacgcccgagatcgtggccgagctggaaaagctcacgccgctcgcgccgttgcatcagcctcacaacctgacgccgatccgcatcctcgaagcggtgcagcccggtatcgagcaggtggcctgcttcgacacggcattccactgcacgcagcccgcggtgacccaggcgttcgcgctgcccgagtcgatcaccagccggggcgtgcgccgctacggctttcatgggctctcgtacgagtacatcgcaagcgtgctgcctgacgtcgcgccacaggcagcgcgcgggcgcacggtcgtcgcccacctcggcaacggcgcgagcatgtgcgcgctcgtggcgggcaagagtgtcgcgagcacgatggggttcaccgccgtcgacgggctgccgatgggcacgcgctgcggcaacctggacccgggtgtcgtgctgttcctgatggatgaactcgggatggacgtgcgcgccgtcgaggatctgatctatcggcgttccgggttgctcggggtgtccggcctgtcgagcgacatgcgcacgctgctcgcgagcgacgatccgcacgcgcgcttcgcgatcgagctgtacatctatcgcatcgcgcgcgaacttgggtcactcgccgccgcgatggaaggcatcgacgccatcgtcttcacggcggggatcggcgagcacgcagcggcgattcgcgaaggggtgatgcgccgtgcggcgtggctcggcgtcgagatcgacgtcgacgccaacaactctggcgggccgctggtcacgacggcgtcgagtcgtgtaccggtgtgggtgatcccgaccaacgaggaatggatgatcgcgcaacatacgcgccggctgatccggtgac

SEQ ID NO: 249562 - DNA, 944 bp, Unknown
  Bacterial polypeptide expressing nucleotide sequence isolated from the Sargasso Sea
tcttgatgatgttaaaaatagaggttttcttaaatgtggtgtaacaactggtctagctggttttgctgctcctgatgatagcggtgaatgggctggtcttgatgcagatatgtgtcgtgcagttgctgtagcagtttttggagatcgttctaaagtagaatttatcactacaactggtaaatctcgtttccctacattggcttctggtgaagttgatatgttagcgagaaatactacttggacaatcagccgtgatgttaatcttggttttgagttcgtaggtgttaacttctatgatggtcaaggtttcatggttccttccgctcttggagtatcaagtgcgaaagaactagatggtgctactgtatgtatccaaactggtactactacagagcttaaccttgctgacttcttcagattaaatggaattagctacgaagctcttccaattgaaactaacgatgaaggaaaagaaaacttattcgctggaagatgtgatgtatacactactgatgcatctggtctttcttcaactagagctgcagctgcagaccctggtaagtgggtagttttacctgaaatcatctctaaagaacctctaggtccactagtaagacacggagatcaccaatggggtgacgtagttcgttggtctctaaatgcaatgattattgctgaagaactaggtgttacatctgaaaacgttgatgctcaaaaaagctcaaatgttcctgaagtactaagacttcttggtgtggaaggttcatatggtgaaatgcttgaactagctcctgattgggcttaccaaattatcaaacaaattggtaactattcagagtcatacgaagctaacgttggtccagatactccgcttgagattgcaagaggtcttaatgcactttggactcaaggtggtattttatacgcacctccgttcagataaa

SEQ ID NO: 249563 - DNA, 721 bp, Unknown
  Bacterial polypeptide expressing nucleotide sequence isolated from the Sargasso Sea
atgaaaccccaaagactggtgttgaaaatcggcaccaatgttcttcagcggcccaacggtaagctggattacaaccagatcagcgaattcacccaactggttgcagaaattcgctctcaaaaacatgaagtgctgatcatcagttccggtgcggttggagcaggacgcgaactttgtcaatttgattcagcagaaaatcccctgatccaaaaacaaatcctggcctcagtcgggcaggcgaggctgatgcagatctacaccgattttctgcgggaacatcatctcaccattgcccaggttctactcacacgggcagatttcggaaatcgggcctcctaccttaacatccgaaacaccctgacccacttgcttgaatcagggattgtcccgatcatcaacgaaaatgacgtggtggcaacagaagaactgactctgaattttggcgataacgactggcttgccgtatacgtcgcgggtttggtggatgcgaaccgtttgttttacctcaccatagccccgggattattgaagttatctgataaaaatggaacaggggaaatcatcccagaaattcgagaattgaatcaagaggtgctggatcattgttttcctaaccagagtgtcggaggacggggaggaatggagagcaaagcacgggcagccggccttgcaatgaatttcggaatcgattgccacatcctggatgggaaggagcctactt

SEQ ID NO: 249564 - DNA, 634 bp, Unknown
  Bacterial polypeptide expressing nucleotide sequence isolated from the Sargasso Sea
atgcatcttaaagactctaaaacagttgtaattaaaataggctcctctttgcttattgacgataataaaataatcagagaaaagtggttatcagaatttgcaaaagatataaaaaatcttcaaaatttaaaaaaaaatttaattatagtaagttcaggagctatagctttaggttgtaagaaattaaaattgaataaaaaaaatttaaaacttgataaaagtcaagcagtggcttctataggtcagatagagttgatgaatctttttaaaaaaatatttagtccaaaaaaaataaatctttcccaaattttacttactcttgaggatacagagcaaagaagaagggctattaatgcaaaaagaacttttgaaaatctttttagccttggttttgtcccgatagttaacgaaaatgatagtatagctacatcagaaataaaatatggtgataacgatagattagcatctagggttgctcaaatatcaaatgcagattgtttgatattgttgtcggatgttaatggtgtctattctaaggatccaaagttagacaaaaaagctgaactaatacgtgaagtaaaaaatattgacaataaaattgaaacaatagctacaagaagtattggtgaacatg

SEQ ID NO: 249565 - DNA, 567 bp, Unknown
  Bacterial polypeptide expressing nucleotide sequence isolated from the Sargasso Sea
gatggaaaataaacctaaaaaaagtttgagccaaaattttttaattgataaaaatatcattaatttaattgttgatttaggaaaaataaatgaaaatgacactgtattagaagtaggaccaggcacaggaaatctaactaaagcaattttactaaaaaagccaaaaaaactaattctaattgaaaaagataaagatttagcagcaaacttaaaaaaaaaatttaaaaaaaatactacaataataaatgaggatatattaaaagttaacgaaaatgatatagcaagcgagcctctaactatatatggtaatttaccttacaatatttcaagccaaattcttgtaaaatggattaaaaataatgattttaataacacaattaaaaaattaattttaatgtttcaaaaagaagttgctgatcgaattattgctgaaactaataaaaaaacttatggaagattatctattttatcttgttggaagacaaaaataaaaaaaattttagacattgatccaaaatgtttctacccctctccaaaagtaaaaagtactgttttatattttgagcc

SEQ ID NO: 249566 - DNA, 685 bp, Unknown
  Bacterial polypeptide expressing nucleotide sequence isolated from the Sargasso Sea
atgtatattaaaaattccaaaatagttgttattaaaataggatcttctcttttgatagataaccatatgaaaataagacaaaaatggctttcagagtttgctaaagatattaaagaattaataaaaaaaaataaaaaaataattatcgtaagttctggggctattgcactgggatgtagaaaactaaaattaaataagaaaaaacttaaattagataaaagtcaagccattgcatcaattggccaaatagagctaatgaacttatttaaaaaaacattcaatgaaaaaaaaataaatttgtctcaaattttactaaccttagaagatactgagcaaagaagaagagcaattaatgcgaaaagaactattaacaatttatttgaacttaatttcgtaccaattgtaaatgaaaacgacagtatagctacatcagaaattaaatatggtgataacgatagattggcatctagagttgctcaaatttcaggtgctgattgtttaattcttttatcagatgtaaacggtctttatacaaaaaatcctaaaatatttaatgatggaatactaataaaaacaataaaaaatattaataaaaaaattgaaaatatagcaaataaaagtacagggttttatgggtcaggtggtatgaaaactaagattgatgctgcaaaaatttgtcaactat

SEQ ID NO: 249567 - DNA, 742 bp, Unknown
  Bacterial polypeptide expressing nucleotide sequence isolated from the Sargasso Sea
tggggagccatcgctcttgggctctattaaaatgaatttaaataaaaaaaatcttaaactagataaaagtcaggctatggcctcaattggacaaatagagttaatgaatttattttcagatactttctcaaaatataatttgaacatatctcaaattttactcactctagaggatactgaagaaagaagaagatctttaaatgccaaaaggacatttgaaaacttatttaatttaaattttatacccatagttaatgaaaatgatactattgcaacttctgagataaaatatggtgataatgacagactcgcatctagagttgctcaaataactaatgcagatactttaattcttttatctgatgttggtggtctctatacaaaaaatccaaaaaaatttaagaacgcaaaattaataaaaagagttgaaaactttaataaagatttaaaagatattaattatagaggaatgaacgagtttggtagtggaggaatgaatacaaagattgaggctgctaaaatttgccaattatctggatgtgatatgattatttctaatggattgcattcaaatcctattgataaaattttaaaaaaaaatgactacaccatatttgtatcaaaaatttcgaaattagatgcaagaaaaaaatggataattagttcaatttctcctaaaggagatttaattattgatgatggggctaaaaaagctctgagaaatagaaaaagtttattagct

SEQ ID NO: 249568 - DNA, 830 bp, Unknown
  Bacterial polypeptide expressing nucleotide sequence isolated from the Sargasso Sea
catcaaaccacctgggtgcgccgataagacgatcgagttcatccgggcaaacgagggaaggccctggttcttcagcttcaactgctttgacccgcatcatcccttcgacccgcccgccgaatacctggagcgtttccccgtcgaggagatgccccttccctcggttcatcccgccgaagcgcagcgtcagaccactttccagaaactggatcgggagtgggcccacgataacccgggggaattccataccggagccatgacggacgacgaccgcaggcaggtttacgccgcctacatggccatggtatccctcatcgacgatcaggtagggagaatcctcgaggctcttagggagaccgggcaggaccgcgacaccctggtcgtcttcatgtccgaccatggggagatgctgggtgatcacgggatctacttcaagggtccccatttctacgattgccagatgcgcgtgcctctcgtgatccgttggccgggtggctcggtgaatgagggccggcggatcgaaggtctggtcgagttggtcgacctggcccccacgcttctcgatgcgggggagctggagatcccgcaaaggatgcagggcaagagcctgctccccatgctgcggggggaggcggagaccgagttcgttcacgagcaagtctttgccgaatactacaacgcctggacccatgaggatgcgtacgggagcatgctgcgtacgcagaaggagaaaatcgtggtctatcacgggaccggccagggcgagttctacgacctggaaaacgacccgcaggagttcctcaacctttgggaagagcccttggtccggg

SEQ ID NO: 249569 - DNA, 809 bp, Unknown
  Bacterial polypeptide expressing nucleotide sequence isolated from the Sargasso Sea
ttctcaaattttacttacccttgacgataccgaggaaagaagaagatcaattaatgcaaaaagaacttttgaaaacttattcgatcttgatttcatccctattgttaatgagaatgatactattgctacatctgaaattaaatatggagataatgatagacttgcttctagagtagctcaaattacaaatgcagatacattaatattactctcggatgtggatggtttatacacaaaaaacccaaaaaaattcaaagatgctcagttaattaagaaagtgatcgatttagacaaagttattaagagtataaatatcaaaggtatgacagaattaggaagcggtggcatgaatacaaaaatcgaagctgctaaaatttgtaatttggctggttgcaatatggtaatagcaaatgggttaaatcttaatcctatcgatcgtatccagagtgaaaataattgcacttggtttatttctaaaatatctaaaatgcatgcaagaaaaaagtggattataagctcgatttctcctaagggtgaacttataattgatgatggggcgaaaaaggctcttcatagtggaaaaagtttattagcggctggaattaaaaaagtggtcggtagattcagtaagggagatcatattaaaattttagataataaaaaaaaagagtttgctcgtggacttagctctttttcatccaaagaaataaatttaattatgggctgtcattcgaatgaaatacaaaaaattttaggatacgtatcaaaatctgaggtagtgcataaagatgatatggtagaaatctaat

SEQ ID NO: 249570 - DNA, 925 bp, Unknown
  Bacterial polypeptide expressing nucleotide sequence isolated from the Sargasso Sea
gataaaaaaactataagacagaaatggctatttgaattcactaaagatataaaagaattattaaatagtaaaaaaaatgtaatattagtaagttctggagctatagccctaggatgtaaaaaattaaacttaaacaaaaaaaatcttaagttagacaaaagtcaagctgttgcttctataggtcaaatagagctaatgaatttatttaaaaagacatttaatacaaaaaaaattaatctttcacaaattctacttacattagaggacacagagcagagaagacgtgcaataaatgcaaagagaacttttgataatttgtttaaattaggatttgtgccaattgttaatgaaaatgacagtatagctacatctgaaattaaatatggagataatgatcggttagcatctagagtagctcaaatatcaagtgcagattgcctaatactactatcagatgtagatggtttatacacaaaaaatccaaaaatatataaagaagcaaaattaattaaagaaataaaaaatatagatttgaacattgagcaagttgctaaaaaaagtattggagaatatggaacaggtggaatgaaaactaaaattgatgcagctaaagtttgccaaatatcaggatgcgttatggcgattgctaatggactatcagtaagaccaataaaaaaaatttttcaaaaaaataattgtacatggttcttgcctaaactttcaaagttagacgcaagaaaaaaatggataatcagttccattgctccaaaaggcgaattaataattgacgaaggtgcaattaatgcattaaaaaaaggtaaaagtttattagctgcaggaataaaacaagttaatggaaaatttaataaaggagatcatataaaaatattagataaaaatatgatgaacatgctagaggacttag

SEQ ID NO: 249571 - DNA, 457 bp, Unknown
  Bacterial polypeptide expressing nucleotide sequence isolated from the Sargasso Sea
atgtatcttaaaaattctaaaataattgttgtgaaaatcggttcttcactaattgtagataaaaataaaaaaattagaaagaaatggctatcaagttttgcaaaagatatcaaaaaattaagggatagaaatcaaaaagttgtaattgtgagttcaggtgcaatagctcttggttgtaaaaaaatgaattataataaaaaaaatattaaattagatcaaagtcaagctattgcatctataggtcaaattgagttaatgaatttattttcacaaacatttgctagatttaaacttaacatttctcaaatacttcttactcttgaagatacagaggaaagaagaagatctttaaatgccaaaaggacttttgaaaatttgtttgacttagggtttatcccaatagtaaatgaaaatgatactatagctacaacagaaataaagtatggagataacgaca

SEQ ID NO: 249572 - DNA, 708 bp, Unknown
  Bacterial polypeptide expressing nucleotide sequence isolated from the Sargasso Sea
tgatgctaaaggaaaatttaaaaaaaagtgggtaatgtcactaataaaggacatacaaaagtatggctcaggaaaaaaatttgtcattgtatcctcgggtgctattgctctaggtcaaaaatatttaaaaattaaaaaaaaaaagattaaacttgaaatgagccaagcaattgcagctataggtcaaattcatttagctggtgaattccaaaaactatttgataaatttaaaattaaatctggtcaaattttaattagccctgatgatactgagcagcggaaaagagctcttaatgttagaagcacttttgagaatctttttaaattaaatgctataccaatagtaaacgaaaacgatactacagcaacttctgagataaagtatggagataatgataggcttgctgcaagagttgctcaaattataggtgcagatacattggtaattttgtcggatgtagatgggctttatgataaatccaaaaatatagttaaagtagtaaataaaattgatgaaaaaataaattctttagttgaaacaagcaaaaacaaatatggatcaggtggtatttcaacgaaactagatgcagcaaaaatttgtatgaattcaggttgtcacatgtttttatctagtggcaataaagaaaatcctttaaaagtaatggtaaaaaataaaatttttacccactttttgccaaaaatttcaag

SEQ ID NO: 249573 - DNA, 335 bp, Unknown
  Bacterial polypeptide expressing nucleotide sequence isolated from the Sargasso Sea
gagaatttctaaacttgatgcaagaaaacaatggataattggatcagtggctcccaagggtgaagtgattattgatcaaggagcaataaaagccataaacaatggaaaaagtttattacctgcgggagtaaaaaaaattaatggatcttttgaaaaaggagatcatattttagtaaaagatttgagcgataatgaatgtgctagaggtttaacttcattttcttcaatcgaaattgaaaaaataaaaggttcacatagcagtaaaataaaaaatatattaggatattctagtagggaagaaattattcataaagatgacttggtgaaagtataaa

SEQ ID NO: 249574 - DNA, 437 bp, Unknown
  Bacterial polypeptide expressing nucleotide sequence isolated from the Sargasso Sea
catgacggatagaggtagtcttcgcaacaaggagagaattgtcgttaagataggctcatcccttcttactgaaggtggatctggtcaattacgctgggattggcttcgggatcttgtcatagatgtcattgaactaaagaaagcgggctgcgatgtactattggtttcctctggggcggtagcactgggccagggtcatctaggcattcgacgaagtgtcttaaaactagaggagaaacaggcgtctgctgctgtagggcaaattcttttggccaacgcttacacggaactatttggctcgcatcatttgacggtcgctcaactacttctaactcttggtgataccgaagaccggcgtcagtatctcaatgcaagaaacacaatggagacacttcttcgcctcggtgcaatcccattgataaatgagaatgatacgg

SEQ ID NO: 249575 - DNA, 805 bp, Unknown
  Bacterial polypeptide expressing nucleotide sequence isolated from the Sargasso Sea
atgtatataagtaatgctaaaattgttgtgataaaaattggttcttccaatcttgttgatagcaggggaaaattaaaggaaaagtggcttaaaagttttgtgcaagatataaaaaagtttaagcaaaaagggaaagattttgtcattgtatcttctggggctattgcgttaggtcaaaattatctaaaagttaagaaaaaaaaattaaagattgagatgagtcaggccttagcttctatcggtcaaattcacttaacaaatatatacagaaaaatgtttgaaaaaaataaaatcaaaattggtcaaattttaatttctccagatgataccgagcaaagaagaagggcaattaatataaaaagaactttcgaaaatttatttaaattgggggccatacccattgtcaatgagaatgatacaaccgctacttctgaaattaaatatggagacaatgaccgactcgcagcaagagtatctcaaataattagtgcaaatgttttggttaatttttctgacgtggatggtctgtacgaatcttctaaaaacaaaaaaattattaaagaagttaaaaatataaatgaaaaaatttattcttttgtagaaaataaaaggagctcttatggttctggaggtatgtctactaaattagaggctgcaaaaatttgtatgagttccggctgctatatggctatagcaaatggaaaacatttaaacccttttgataaattaataaaaaaaaatatttgcacctggtttttaccaaaagtttcaagcctagatgcaagaaaaaaatggattgttagct

SEQ ID NO: 249576 - DNA, 253 bp, Unknown
  Bacterial polypeptide expressing nucleotide sequence isolated from the Sargasso Sea
tatgagcagcggcacgcacctgacaacctcccgccgggtaatcatcaagatcgggtcggcgctcctggtcgatcaggagtcgggcgccgtggatcgaagatggctggcggcgctggccgacgacgtggcgcagtttcgcgcccgcggccaggaggtggtgattgtttcatccggcgccatcgctgttggccgccggcatctgggcctcggcgcgggacagcttcgtcttgaggaaagccaggcggcggcagcc

SEQ ID NO: 249577 - DNA, 732 bp, Unknown
  Bacterial polypeptide expressing nucleotide sequence isolated from the Sargasso Sea
aatgcatatagaaaaagctaatacaattgtttttaaaatagggtcctcaaatattgttgatggaaaaggaaaacttaaagaaaagtggttaattagtttagcaaaagatttaaaagctttattaaagaaaaataagaatatagtcatagtttcctcgggtgcaatagctctaggtcaaagctatcttaagattggtaaaaaaaaaattaaactagaaatgagccaagcagttgcttccattggccaaatacatctgacaaatgtatacagaaaaatttttgagaaaaataaaatgaaaatcggtcaaattttaatttctttagatgatactgagcaaagaagaagagctatcaatgcaaaaagaacatttgaaaacctatttaaacttaaagcgattccaatagttaatgagaatgataccaccgcaacctctgaaataaagtatggtgataatgatcgtctggctgcaagagttgctcaaataattagtgctgatgtactgataaatttatctaatgtagatggtctttataaccccgttgaaagaaaaaaaataattaaagaggtaaataatattgatgaaaaaatatattcacttgttgaaaataaaaaaaataactatggttctggcggtatgatgactaaactacaagcggcaaaaatctgtatgaactctggatgctatatggcaatcgccaatggaaatacacttagacctataaatgagctttt

SEQ ID NO: 249578 - DNA, 424 bp, Unknown
  Bacterial polypeptide expressing nucleotide sequence isolated from the Sargasso Sea
tatgaaaagtaaaaaaaatatagttttaaaaattggaacaacttcaattattaaagatggagagttaaacaaagacttaattaattctcttgcgtcttctataagagaacacaaacaaaatggattcaattttattattgttacatctggtgccgtacaattaggtgcaaatgagttgaatttagaacaaagaccgacggctttaaaatctctacaggttgcctcttcagttggacaaattactttagttaactcttttaaggaaatatttaaaactgaagacttaagaatagctcaagtattaatgtctaaaaatgttcttgaagatcgaaatcaatttataaatacatcagatgcactaaatgaattaatagcacaagatataatcccagtaattaatgaaaatgacattgttgcaactgaa

SEQ ID NO: 249579 - DNA, 379 bp, Unknown
  Bacterial polypeptide expressing nucleotide sequence isolated from the Sargasso Sea
ctttaagcgattggaagatggcgcaaattgttcatggtttttgccgtcaagtaaccctcagacatccagaaaattgtggatagcggggtctctgcaatcttgtggctctataaaagttgatgcaggggcaacagctgctttaaaagatggaagcagtttgcttccagctggcgtacttgaggtaagtggatcatttcaacgcggtgatgcgataacaattttggacgaaaaagggattgaaataggacgaggccttagcgcctactcttatgcagatgcctcaaaaattaagggtcacaaaacagatgaaattgcaagtttgctaggcttcatcggtaggcttgaaatgattcatagagacgatttagttattttttga

SEQ ID NO: 249580 - DNA, 661 bp, Unknown
  Bacterial polypeptide expressing nucleotide sequence isolated from the Sargasso Sea
tgataatgacaggttggcttcacgtgttgctcaagttttttggtcagattgtttaatattattatcagatgtggatggtttatttgataagaatccaaaattaaataaaaatgcaaaattaatcaacaatgttgaggaaataaataaaaatattgagaagtatatttcaaaaaatattagtgagcatggaactggtggaatgaaaacaaagattgaagccgcaaaaatctgccaaatatctggttgttatatggctattgcaaatgggttaataaatagacctataaaaaatataattgaaaataataattgtacttggtttttgccaaaagtttcgaaattagatgctagaaaaaaatggataattagttcaatttcaccaaaaggagaattgattatcgatgagggagctattcaagctttaaaaaaaggaaaaagtcttcttgcagcaggaattaaaagtataaatggaaaatttaataaaggagaccatgttaaaattttagataagaatatgaatgaacatgcaagaggacttagttcatttaactctgatgaaattctaagaataaaaggtcaccactctagcaaaataagtgaaattttaggatatatatctaaatctgaagttattcataaagatgatatggtggaagtgtaa

SEQ ID NO: 249581 - DNA, 560 bp, Unknown
  Bacterial polypeptide expressing nucleotide sequence isolated from the Sargasso Sea
tatgctagttaaaaattctaaaaaaattgttcttaagttaggctcatcaactgtagtagataataacggaaaatttaagaaacaatgggttacatctttaataaaagatattaaaaagtacagtagaggaaaaagttttgtaattgtttcctctggagctatcgctttaggacaaaaatatttgaaaataaaaaaaaggaaaatcaaactagaaatgagtcaggctatagcagcggttggtcaaattcatttggcaggtgaatttcaaaaactttttgataaatttaaagttaaatctggacaaatattaattagtccagatgatacggaacagagaagaagagctttaaatgtaagaaatacttttgaaaatctttttaaacttaaagctataccgattgtaaatgaaaatgatactacagctacttcagaaataaaatacggtgataatgatagactcgctgctagagttgctcaaataatcggagctgatactctattaatattttcagatgtagatggtttatacgatagatcaaaaaaaataataaaaaatataa

SEQ ID NO: 249582 - DNA, 874 bp, Unknown
  Bacterial polypeptide expressing nucleotide sequence isolated from the Sargasso Sea
ctgaggttaataaaattatgtatcttaaaaattcaaaaaattgtagctgtaaaaattggatcatctttattaattgataacaatatgaagataaggacaaaatggttaatcgaattctctaaagatattaaaaaattagtagatcaaggaaaaaaagttataattattacctctggtgccattgctctaggatgtaaaaaattaaatttaaaaaaaacaaatttaaagctggataaaagccaggcagttgcatcgattggacaaatagaattaatgaatctttttaaaaaaaacttcaataaggtaaaattaaatctttctcagatactcctaactcttgaggatactgagcaaagaaggagggcaatcaatgcaaaaagaacaataaataatttatttcaacttggttttgtgcctatagttaatgaaaatgatagcattgctacatctgaaatcaaatatggtgataatgatagattggcctctagagtagctcaaatttcaagcgcggattgtttagttttactttcagatgttaatggtctctacacaaaaaatcctaaattatttaaagatgcaactttaattaaagaaattaataaaattgatgaaagaattgaaagaattgcaagtaatgaaagcggtatatatggaaccggtggaatgaagacaaaaattgatgccgcaaaagtttgtcaaaaatctgggtgccaaatggcaattgcaaatggactaattttaagacctttagaccaaatccaaaaaaaaaataattgcacctggtttatcactgaagtgtctaaacttgatgcgagaaaaaaatggataataagctcaatttctcctaaaggtgaattaattattgatgatggtg

SEQ ID NO: 249583 - DNA, 751 bp, Unknown
  Bacterial polypeptide expressing nucleotide sequence isolated from the Sargasso Sea
taaaagaaccttaagtaatttatttagtttaggatatgtaccaatagttaatgaaaatgatagtattgctacatcagaaataaaatatggagataacgatagattagcttctagagttgctcaaatctctgatgcagactgtcttatactattgtcagatgtaaacggtctttatacaaaaaatccaaaaatacacaaaaatacacaattaattaaaaaaattaccaaaattaatgatgaaatagaaaagattgcaaccaaaagtataagccaacatgggacgggtggaatgaaaactaaaatagatgctgcaaaaatcgcacaactatctggttgctatatggcaatagcaaatggtttagttctgaaccctattaatgagattaaaaagaataataattgtacatggtttctgcctaaagtgtcaaaattacatgctagaaaaaagtggatcatcagttctatttctcctaaaggtgaattaataattgatgatggagcaatcaatgcattaaaacaaggtaaaagtttattagcagcgggtattaaaaaagtaaatggcaaattttacaaaggagatcatattaaaatacttaataaatcactcaaagaatatgcaagaggattaagctcatttaattcagatgaaatattaaaaataaaaggtcatcattctaacaaaataaaagagatattagggtatatagcaaaatctgaggtggttcataaagatgatatggttgggttataa

SEQ ID NO: 249584 - DNA, 862 bp, Unknown
  Bacterial polypeptide expressing nucleotide sequence isolated from the Sargasso Sea
aataattctaaaataattattatcaaaattggatcttctttacttgttgataaaaatcaaaaggttagaaaaaaatggctatccagctttgcaaaagatatccaaaaattaaaagataaaaatcaaaaaattgttattgttagttctggtgcaattgctcttgggtgtaaaaaaatgaactttaataaaaaaaatattaaattagacaaaagtcaagctatagcatctataggtcaaatagaactaatgaatttattttctaaaacatttgctaaatataaattaaatatctctcaaattctgcttacactagaagatactgaagaaagaagaagatcattaaatgcaaaaagaacttttgaaaatctatttaatctaggttttattccaattgtaaacgaaaatgatacaatagctacaagtgagattaaatatggcgacaacgatagattggcatctagagtagcacaaataactgatgcagatacattaatacttctttctgatgttgatgggctttatacaaaaaatccaaagatatttaaagattctaaattaattaaaaaaataaatgatataaaaaaagatctaaagaaaatcaatattaaaggtgtaaatgaatatggaagtggtggtatgcaaactaaaattcaagcagcaaaaatctgtcagttagctggttgcagcatggttattgcaaacggtctatactcaaatcctatttctaaaattatagaaaaaaataattgtacttggtttactcctaaagtatctaaactcgatgctagaaaaaaatggattataagttcaatagctccaaaaggttctattattattgatgaaggtgcaaaaaaagctttaa

SEQ ID NO: 249585 - DNA, 329 bp, Unknown
  Bacterial polypeptide expressing nucleotide sequence isolated from the Sargasso Sea
tatgtatcttaaaaactccaaaataattgttgtcaaaattggatcatctctcctagttgatgaaaacaaaaaaattaggaaacaatggttatctagttttgcaaaagatattaaaaaattaagagataaaaatcaaaaaatagttattgttagttctggtgctatagctttgggctgcaagaaaatgaattataataaaaaaaatatcaaattagataagagtcaagcgattgcttctattggtcaaatagaacttatgaatttattttcacaaactttcgcaaaatataaattaaatatttctcagattctacttacattagaagata

SEQ ID NO: 249586 - DNA, 802 bp, Unknown
  Bacterial polypeptide expressing nucleotide sequence isolated from the Sargasso Sea
agcgatagcattgggatgtaaaaaattaggactcaataaaaaaaacttaaagttggataaaagccaggctgttgcttcaattggacaaatagagttgatgaatttatttaaaaaaaattttaattcaaaaaaaattaatttatctcaaattctactaactcttgaagatacagaacaaagaagaagagcaataaatgcaaaaagaacattggataatttatttgaattaggttttgttccgatcgttaatgaaaatgatagtattgcaacaagtgagattaaatatggtgataatgatagactggcatctagagttgctcaaatttcaagtgctgattgcttaatacttttatctgatgtagacggattatatacaaaaaatccaaaaattcacaaagatgtaaaattaattaaagaaattaaaaatatagactataaaattgaacaagtcgcaagtaaaagtgtaggtatgtatggaactgggggaatgaaaacaaaaattgatgctgcaaaaatttgtcaactatctggatgttatatggcaattgctaacggtttatcaatgagaccaattaaaaatatatatgaaaaaaatagctgtacatggtttttgcctaaaatttccaaattagacgcacgaaaaaaatggattattagttcaatatctccaaaaggaaaattaattgttgatgaaggagcaataaacgctcttaaaaaaggtaaaagtttattagccgctggaataataaatgtagaaggaaaatttaataaaggagatcatgttaaaataattgataaaaat

SEQ ID NO: 249587 - DNA, 733 bp, Unknown
  Bacterial polypeptide expressing nucleotide sequence isolated from the Sargasso Sea
aatgaagaaatataagcagagatgggtaattaaagcaggtagtagtcttattgcttcaagtaaaagaggattagatgactcttttatttcctctttagttaaagtagtaaaagagcttaaagatagagatatagaaattgttgtggtttcttcaggtgctgtagctcaaggaatgtatgatctggatctgaatactagaccagagtctttgcctttactgcaggctagtgctgccgtaggtcagttaggtcttattaatctttatcagaatgaatttaagaaattctctattcaatctgctcaagttttaattagtcattcagacatagctaatagaggaagatacctcaatgctaggcatagtcttaatacactcctgagtttaaacgttgtacctatagttaatgaaaatgatagtgttgctaccgatgaaatatcatttggagacaatgattctcttgcaggagctatagcaggtctgatcaatgctagtaagttaattatcttgactgatcaagagggtgtttatacttctgatcctaataaagacacttcagcaaagttaataaaggaaataaatttagatgaagaaagttttagtctttcccaaataaatcttgaaggctcaggggtgctaggaagagggggaatgataactaaaatagaagcagcaaaaaaagcttcaactactggatgtgtaacttggattctcaaaggcgataagattgacgag

SEQ ID NO: 249588 - DNA, 925 bp, Unknown
  Bacterial polypeptide expressing nucleotide sequence isolated from the Sargasso Sea
aaaagaattaattaaacaaaaaaaagatatcattattgttagctctggtgcaatagcgcttggatgcaaaaagttaaaacttaaaaaatctaatttaaaaattgataaaagccaagccgttgcatctataggacaaattgagttaatgaatctacttaataaaattttcagtattaaaaaagttaatctttcccaaatgctattaactcttgaagatacagagcaaagaagaagagctataaatgcaaaaagaacttttcaaaatttatttcagcttggatttgtgcctgtagtaaatgaaaatgatagtatagcaacttctgaaataaaatatggtgataatgataggttggcttctagggttgctcaaatatctagtgcagattgcttaatacttctttcagatgttaatggtttgtacacaaaaaatcctaaattatttaaagattcaaaactaatcaaagagataaaaaatatagatagcaacatagataaaattgctaaaaaaagtttaagtaattatggaacaggagggatgagaactaaaattgaagcagcaaaaatctgccaattatcgggttgctcaatggcaatagctaatggtcttattgaaagaccaattaagaatattttagaaaaaaataattgcacttggtttttgcctaaaatttcaaaattagatgctagaaaaaaatggattataagctctgtatcaccaaaaggagatttaattatagatgaaggtgcaattaatgctcttaaaaatggaaaaagtttattagccgctggaataaaaaaagttaatggaatatttaaaaaaggtgatcatataagaattttagataaaaattttagtgaatatgctagaggattaagttctttctcttcaaatgaaatattaaaattcaagggccacactcaaaaa

SEQ ID NO: 249589 - DNA, 565 bp, Unknown
  Bacterial polypeptide expressing nucleotide sequence isolated from the Sargasso Sea
gtcattaagattggttctgccgtgcttgccgactctgatggaagggtcaatcacactattctttcctcaatcagcgaagatgtagcatggctgataaaaaatggtaaagaagttttaattgtatcttcaggcgcgattgcgcttggaagaaaaaaaattaaattttctgaaaatttaacccttcctgaatcacaggctttggctgcgcatggtcagatcgaattaatgtctgcatggaagaaacacctaaataaattttctatacctattagtcaaattcttttaactccaagagatacagagctaaaactttcatctaaaaatgcccaacaaactgtcaataagttattggaagtaggatgtctaccaatcatcaatgaaaatgacactacggcaactgatgaaattaagtttggtgacaacgatcttctagcatcaaaggtagcaaaacttataggcgcagatttgctaattatcttatctactgttgatggactttataattctgaaaaagacatgcaaacccgaaagcgtggttcgcttattaaggaggttggtaaaatta

SEQ ID NO: 249590 - DNA, 763 bp, Unknown
  Bacterial polypeptide expressing nucleotide sequence isolated from the Sargasso Sea
tgtcttatgtatcttaaaaactctaaaataattgttgtcaaaattggatcatctctcctagttgatcaaaataaaaaaattaggagacaatggttatctagttttgcaaaagatattaaaaaattaagagataaaaatcaaaaagtagttattgttagctctggtgctatagctttgggctgcaagaaaatgaattataacaaaaaaaatatcaaaatagataaaagtcaagctattgcttctattggtcaaatagagctgatgaatttattttcacaaacttttgcaaaatataaattaaatatttctcaaattctgcttacattagaagatactgaggaaagaagaaggtctcttaatgcaaaacgaacttttgataatctttttgaacttggttttattcctgtagtcaatgaaaatgatactattgcaacaagtgaaataaaatatggagataatgatagattggcatctagagttgcacaaattacaaacgcagatgccttaatattattgtctgatgttgatggtttgtatacaaaaaatcctaaaatttttaaggatgctaaactaataaagaaaattgatgatctaaaaaaagatctaaaaaaaatttatattaaaggtgtaaatgaatatggaagtggtggtatgcatacaaaaattgaggcagcaaaaatatgtcagcttgctggtactaatatggttattgcgaatggactatattcaaatcctatttcaaaaataattgaaaaagaataac

SEQ ID NO: 249591 - DNA, 789 bp, Unknown
  Bacterial polypeptide expressing nucleotide sequence isolated from the Sargasso Sea
tttaaagaattaatagatcaaaaaaaaaatattattatagtaagttctggagccatagcattgggatgtaagaagttaaatttaaataaaaaaaatttaaaattagataaaagtcaagcagttgcatctataggacaaatagaattaatgaatttgtttaaaaaaaatttgtcttctaaaaaaataaatttatcacaaattttaataactttagaggatactgagaaaagaagaagagcgattaatgcaaaaagaacttttgaaaatttatttagtctaggattcgttcctattgtaaatgaaaacgatagtactgctacatctgagataaaatatggtgataatgacagattggcttcacgtgttgctcaaatttcaggtgctgattgtttaatattattatcagatgttgatggactttattcaaagaatcccagattaaataaaaacgtaaaactaataaaagaaatcaaaaatatcgacagtaatattgaaaaaattgcaacaaagagcacagggcaatatggtacgggaggaatgaaaacaaaaatcgatgctgcaaaaatttgtcaattttctggatgttatatgtgcatagcaaatggtctaaatttaagaccaattaaagaaattataaagaagaatttttgtacttggtttttacccagattatcaaaacttgatgcaagaaaaaaatggattatcagttcaatatctcctaaaggcgaattgattatagaccaaggggcaattagtgctctaaaaaaaggcaagagtctattagcagca

SEQ ID NO: 249592 - DNA, 514 bp, Unknown
  Bacterial polypeptide expressing nucleotide sequence isolated from the Sargasso Sea
tatgcatcttaaaaattcaaaaataattgttataaaaattggatcttctttattagttgatgatcaaaaaaaaattagaaaaaagtggttatctagttttgcgaaagatattcaaatactaaaatctaaaaataaaaaaataataattgtcagttcaggcgcgatagctcttggttgtaaaaaaatgaattataataaaacaaatctaaaacttgataaaagccaggcaatagcttctataggtcaaattgaattaatgaatttattttcacagacatttttaaaattcaaattaaatatttctcagattttattaactttggatgataccgaagaaagaaggagatcaataaatgcaaaaaggacttttgaaaatttatttcagcttaattatataccgatagtgaatgaaaatgataccattgctacatcagaaataaaatatggagataatgatagacttgcttctagagttgctcagataacaaatgccgatactttaattttattatct

SEQ ID NO: 249593 - DNA, 478 bp, Unknown
  Bacterial polypeptide expressing nucleotide sequence isolated from the Sargasso Sea
tatgtatcttaaaaactctaaaataattgttgtcaaaattggatcatctctcctagttgatcaaaataaaaaaattaggaaacaatggttatctagttttgcaaaagatattaaaaaattaaaagataaaaatcaaaaagtagttattgttagctctggtgctatagctttgggttgcaagaaaatgaattataataaaaaaaatatcaaattagataagagtcaagctattgcttctattggtcaaatagagctgatgaatttattttcacaaactttcgcaaaatataaattaaatatttctcaaattttgcttacattagaagatactgaggaaagaagaagatctctcaatgcaaaacgaacttttgataatctttttgaacttggttttattcctgtagtcaatgaaaatgacactattgctacgagtgaaataaaatatggagataatgatagattggcatctagggttgcg

SEQ ID NO: 249594 - DNA, 352 bp, Unknown
  Bacterial polypeptide expressing nucleotide sequence isolated from the Sargasso Sea
attttttatcccttaacttctacaaactcatccaaaaagaaatggttattaaatcatttaaagccatcaggatcgattattattgattcaggagctaaaaatgcaattttgaaaaataaaagtcttcttcctgcaggtgtaatagatatcaaaggaagattcaaaagaggcgatgtaatttctatattagtcaaaaatggtcagaagatagctataggcatatcagcgtatgactttaatgatgcaaaaaaaattattggaaagaaaagtgaagaaatttacaaagttttaggttttgaaggaagagatgaagtggtacataaagataatttagttaggctttctgcatgag

SEQ ID NO: 249595 - DNA, 328 bp, Unknown
  Bacterial polypeptide expressing nucleotide sequence isolated from the Sargasso Sea
ttctaagctcgatgctagaaaacagtggattattggatcaatagcacccaagggtgaagtcattattgatgaaggggcaataaaagcaataaataatggaaaaagtttattgccagccggtgtaaaaaaaattaatggtacttttgaaaaaggcgaccatattttgattaaagatcaaaatgataatgagtgtgctagaggattaacatccttctcttctatcgaaattcaaaaaataaaaggttcacatagtagtaaaataaaaaatatattaggctactctagtagagatgaagttattcataaagatgacttggtaaaggtataa

SEQ ID NO: 249596 - DNA, 733 bp, Unknown
  Bacterial polypeptide expressing nucleotide sequence isolated from the Sargasso Sea
agcctctataggtcaaatacatcttgcggaggaatttcaaaatatatttgaaaggaataactttagagtaggacaaatattaatttctcctgatgatactgagcaaagaaaaagagctctaaacgtcaaaagaacatttgataatttatttaaactgaaagcaataccaattgtaaatgaaaacgatactacagcaacttctgagataaaatacggagataatgataggttagcagccagagttgctcaaattataggtgcggatacattaattatattttcagatgtggacggtttgtatggaagagagaaaaaaagaaaattaataaaagaggtaaaatatctcacgaatgaaacttataaattagctgatgctaagattaatagttatggttctggtggtatgattacaaaattagaggcagctaagatatgtatgaatgctggttgccatatgtttatagccaatggaaataaaataaatcctataaaacatatgattaataaaaaaatttatactaaatttattccaaagatttctaccttagcagcaagaaaaaaatggatagtaagctctttaagttcctctggagctatatatgttgataaaggtgcatccatagctcttaaaaatggaaaaagtttattggctgcaggaattaaaatgattagagggaaatttaataagggtgaaaatgttcttgtaatggacgagcaaaataataaattagcc

SEQ ID NO: 249597 - DNA, 265 bp, Unknown
  Bacterial polypeptide expressing nucleotide sequence isolated from the Sargasso Sea
atgtatcttaaaaactctaaaataattgttgtcaaaattggatcatctctcctagttgatcaaaataaaaaaattaggaaacaatggttatctagttttgcaaaagatattaaaaaattaagaaataaaaatcaaaaagtagttattgttagctctggtgctatagctttgggttgcaagaaaatgaattataacaaaaaaaatatcaaattagataagagtcaagctattgcttctattggtcaaatagagctgatgaattatt

SEQ ID NO: 249598 - DNA, 811 bp, Unknown
  Bacterial polypeptide expressing nucleotide sequence isolated from the Sargasso Sea
tatgtatcttaaaaattcaaaaattgtagctgtaaaaattggatcatctttattaattgataacaatatgaaaataaggacaaaatggttaatcgaattctctaaagatattaaaaaattagtagatcaaggaaaaaaagttataattattacctctggtgccattgctctaggatgtaaaaaattaaatttaaaaaaaaaaaatttaaagctggataaaagccaggcagttgcatcgattggacaaatagaattaatgaatctttttaaaaaaaacttcaataaggtaaaattaaatctttctcagatactcctaactcttgaggatactgagcaaagaaggagggcaatcaatgcaaaaagaacaataaataatttatttcaacttggttttgtgcctatagttaatgaaaatgatagcattgctacatctgaaatcaaatatggtgataatgatagattggcctctagagtagctcaaatttcaagcgcggattgtttagttttactttcagatgttaatggtctctacacaaaaaatcctaaattatttaaagatgcaactttaattaaagaaattaataaaattgacgaaagaattgaaagaattgcaagtaatgaaagcggtatatatggaaccggtggaatgaagacaaaaattgatgccgcaaaagtttgtcaaaaatctgggtgccaaatggcaattgcaaatggactaattttaagacctctagaccaaatccaaaaaaaaaataattgcacatggtttatcactgaagtatctaaacttgatgcgagaaaaaatggataa

SEQ ID NO: 249599 - DNA, 478 bp, Unknown
  Bacterial polypeptide expressing nucleotide sequence isolated from the Sargasso Sea
tatgtctcttaaaaattcaaaaataattgtaattaaaataggttcttcactattagtcgataaaaacaaaaaaatacgaaaaaaatggctttcaaattttgctaaagatattcgaaagcttaaaaacaaaaataaaaaaattgtaattgtaagttcaggagcaatcgctcttggtagtattaaattaaattatagtaaaaaaaaccttaagttggataaaagtcaagctatggcatctatcggtcaaatagagttaatgaatttgttttcaaatatcttttcaaaatatggtttaaatatttctcaaattttacttactcttgaagataccgaagaaagaagaagatctttaaacgcaaaaagaacctttgaaaatttatttaatttagatttcataccaatagtaaatgaaaacgacaccattgctacttctgaaatcaaatatggtgataatgacagacttgcttcacgtgttgca

SEQ ID NO: 249600 - DNA, 487 bp, Unknown
  Bacterial polypeptide expressing nucleotide sequence isolated from the Sargasso Sea
gaaaactaaacttgaggctgcaagagttgctgtatcatctggttgtcatatggtcatagctagcggaacaattaataatccactttccaacctccgaaaaggtggtctttctacatggtttgtttcttccggagatccaattaaagcaagaaagcaatggatttttaatactaagccaaatggaaaaatttatgtggacgcaggagcagaaaaagccttacttagggggaaatctttattaccagctggagtagttgcttgtgatggacaatttaggagaggtgatactgtttcaattctctcagcggagggtaggcctttagctaatggtctaattggatatagcaagaaggaagtcgacttgattagaggttttcattccaaccaaatagcttctattttgggtcatccaggaagagcggtcttggtgcataggaatgatatggctattaatgaattttttagagacagggaagtattaccgtga

SEQ ID NO: 249601 - DNA, 349 bp, Unknown
  Bacterial polypeptide expressing nucleotide sequence isolated from the Sargasso Sea
acctcttggtccacttgtaagacacggtgatcaccaatggggtgatgtagtacgttggtctctaaacgcaatgattattgctgaggaactaggtgttacttctgaaaacgtggatgcacaaaaaagctctaatgtacctgaggtacttagacttttaggtgttgaaggttcatatggtgaaatgcttgaattagctcctgattgggcttaccaaattattaaacaaattggtaactattcagaatcttatgaagctaacgtaggtccagatacacctcttgaaattgcaagaggacttaatgctctttggactcaaggtggtattttatacgcaccaccgttcagataa

SEQ ID NO: 249602 - DNA, 388 bp, Unknown
  Bacterial polypeptide expressing nucleotide sequence isolated from the Sargasso Sea
gatgattaaaaaatttaaaaaaatagtaattaagataggttctaactcgatagtagatcctaaaacaaaacaaatcaaatctaagtggttagatacattatgcaaagatattgcacagattcacaaaataagtaaaattattatagtttgttcaggcgctattgctcttgggtcaaaaagtatatctaagtcagtgttaagaaaacttgaagataaacaagctgctgcatcaattggtcaaattgaattagcttatcaatggagaacgaaattaaagaagtttaaaataaatgtttctcagatactcttaacattagaagatagtgaaacaagacgccgttatttaaatgcaagaaatacaatttcttcccttcaaaataaaaacata

SEQ ID NO: 249603 - DNA, 637 bp, Unknown
  Bacterial polypeptide expressing nucleotide sequence isolated from the Sargasso Sea
tatgaaaatagaattaaagaagtctaataaaatagttatcaaaataggtagctctatcatcaataatgacgatggaaaggattatttgtctgatatttgtgatgaaataagcaagttcgtaaatgaagggaaagaaattatcatagtcacatcaggtgcaatcagtcagggtatgtctattcttagtatcactgacagaccgagagatatcaaaaagctacaagctctagctgccattggacaacaaaagctaatgttaggatacgaaagaatattttcacaaaacaataatcatatagctcagttactaatcactcataatgacataaatgatcgtgttagatatttaaatatcaaaggtaccatagaagaactactatctaacaaaataataccaattatcaatgaaaatgatgtcgtatctacagaagaaattaaacttggtgataatgataatttatcatctatgattgcaaatcttataggtgctgacttacttcttattcttacagatcagcaaggaatgtatgataaaaatcctgattgtttcaaagatgcaaaacttattaatttcataaatgtttctgacctaaaaaatatgatgctgactttagcacacaaagtaatattggtactg

SEQ ID NO: 249604 - DNA, 492 bp, Unknown
  Bacterial polypeptide expressing nucleotide sequence isolated from the Sargasso Sea
aatgttagtaaataattcaaaaaaaattgtaattaaattaggctcaactacagttatagataaaaagggcaaatttaaaaaatcttgggtgaatagtttaataaaagatattaaaaaatataaaaaaaagaaagatattgtaatcgtttcttcaggagctatagctctagggcaaaattatttaaaaattaggaaaaaaaaaattaaacttgatatgagtcaagctatagcctctattggacaaatccatttagctgaggaatttcaaaaaatatttaaaagaaataattttagagttggtcaaattttaatttcacctgatgatactgaacagagaaggagagctttgaatgttagaagaacatttgataacctctttaaattgaaagctataccaattgtaaatgaaaatgatacaactgcgacatcagaaataaaatatggtgacaatgatagattggcagcaagagttgcccagattattggagctga

SEQ ID NO: 249605 - DNA, 561 bp, Unknown
  Bacterial polypeptide expressing nucleotide sequence isolated from the Sargasso Sea
aaaatattaatactaaattaattaaaactgtgaaaaaaatagatgaaaatataaaaaaatacgcaactaaaacagaaagcatatttggttcgggcgggatgaaaacgaaaattgaagcagctaaaatttgtcagctatctggttgttttatgcttatagcaaatggaaatcaaaataatccaataaaaaaaataattaatactcaaaaatgtacttggtttttaccaaaagtttcaaaactagacgcaaggaaacaatggataatcgggtctgttgccccaaaaggtgaagtaattattgatagtggtgcattgaaagcaataaataatggaaaaagtttgctacctgctggtgttaaaaaaatcaaaggaaattttgaaaaaggtgaccatatcttagtaaaagatcaaagtaattatgaacacgctagaggtttgtcttcattctcctcaatcgaaatagaaaaaattaaaggctaccatagcagcaaaatcaaaaatatattaggatattctgacagagaagaagttattcataaggacgatttggttaaagtgtgat

SEQ ID NO: 249606 - DNA, 848 bp, Unknown
  Bacterial polypeptide expressing nucleotide sequence isolated from the Sargasso Sea
tcaaatccatttagcaggtgaattccaaaaactttttgaaaaatttaaagttaaatcaggtcaaattctgattagccctgatgatacagaacaaagaaaaagagctttaaatgttagaagtacttttgataatctttttaaattaaaagctattccgattgtcaatgaaaacgatacaactgcaacttcagaaataaaatatggtgataatgatcgacttgcagctagagtagctcaaattattggagctgatacacttataatattatctgatgttaatggtctttatgataaatcaaaaaaaatagtaaaaaaagtaaacaggattgatgaaaaaatatactctttaatggaaaatacaaaaaacttgtatggatcaggtggcatctcaactaaattggatgctgcaaaaatttgcatgaactctggttgtcatatgtttattgctaatggtaaaaaaaataatcctcttaataatatgataaaaaatagaatctatactcacttcatgcctaaaatatctagattagacgcaagaaaaaaatggattataagttctttaagttcctcaggtataatttatattgatcaaggtgctgctcaggcactttctaacggtaaaagtttattggcggctggaataactaaaattataggatcatttgataaaggtgagaatgtattaattatggatgaaaatgaaaatcaattagctagaggtttagcttcttttaattctaaagaaattgaaaaaattaaaggaaaacaaagtaaagaaattgaaagaattttaggatatttaagtaaatcagagatcattcacaaagatgatatggtaaaattataaa

SEQ ID NO: 249607 - DNA, 664 bp, Unknown
  Bacterial polypeptide expressing nucleotide sequence isolated from the Sargasso Sea
tatgctaattaaaactgcaaataaaatagtattaaaacttggatctgcgactgtagtagacagtaaaggtatttttaaagaaaagtgggtaacttctcttataaaagatattaaaaaatacggaaaaggaaaaaattttgtaattgtttcttcaggcgcaattgctcttggccaaaaatatttaaagattaaaaaaagaaaaattaaattagaaatgagtcaggctattgcatcaattggacaaattcatttagcaggagaatttcaaaaaatatttgataaatataaaattaaaactggtcaaattttaattagtccagatgatactgagcaaagaagaagagctattaatgttagaaggacatttgataatttgtttaaacttaaagctatccctgtagtgaatgaaaatgattcaacggcaactagtgaaataaaatatggggataacgatagactagctgcaagagtagctcaaattattggtgcagatatgctgattttattgtctgatgttgatggactatatgataaatcgaaagggaaaaaaattgtaagacaagtaacttcaattaatgaaaaaataatgtctttgatggataacaagaaaaacaaatttggttcaggaggaattgctacaaagttggatgccgctaaaaaattt

SEQ ID NO: 249608 - DNA, 793 bp, Unknown
  Bacterial polypeptide expressing nucleotide sequence isolated from the Sargasso Sea
gctttgggttgtaaaaaattaaaattgaataaaaaaaatttaaaacttgataaaagtcaagctgtcgcttcaataggtcaaatagaattgatgaacctttttaagaaaatttttaattctaaaaaaataaatctttcacaaattttactaactttagaagatacagagcaaagaagaagagctattaacgcaaaaagaacttttgaaaatctttttagtttaagctttgttccaatagttaatgaaaatgatagtattgcaacttcagagataaaatatggtgataatgacagattagcttcaagagttgcacaaatatcaaatgcagattgtctaatattattatcagatgttaatggtgtttattctaaagatccaaaattatttaaaaaagctgaattaattcgtgaaataaaaaatattgataataaaattgaaagaatatccactagaagtattggagaacatggaactggtggaatgaaaacaaaaattgaggctgcaaaaatttgtcaactttcaggttgttatatggcaatttcaaacggattaattaataggccaatacaaaaaattttaaaagataatttgtgtacctggtttttgccaaaaatttctaaattagatgcaagaaaaaaatggattataagctcagtatctcctaaaggtcttttaattattgatgcgggagctttaaatgcactaaaaaatggtaaaagtttactagctgctggaattaaggaagttaaaggaatatttaataaaggcgatcatgttagaattttagatgaaa

SEQ ID NO: 249609 - DNA, 424 bp, Unknown
  Bacterial polypeptide expressing nucleotide sequence isolated from the Sargasso Sea
aatggaaattcttcacgcaagcgatttgcaagcaggcgttaagcaggctgttaaagagggaaatgacgaagctgtaaattcatggatggtgcaagcccgtgaagtagggctggctgctagtctatcttctgaagatatggattatcttaattcagaaactgcgaaagactacgtagtattcaatgctaagcgtcagttgtacaacgaagcgtttgaagcgcgttattatgcattggaagaggtagaaacgcttaaagagcagtatccggaagccaaagacttgtttgctcgcactgatgcgttgattgaaaaacgcgatgacattattcagcaaattgccgtagctatttcaggaagcgaagagcctgacgaagcagctcttgaagaagcgcgtaaacagtggttagcgcaggcggccaattag

SEQ ID NO: 249610 - DNA, 424 bp, Unknown
  Bacterial polypeptide expressing nucleotide sequence isolated from the Sargasso Sea
catggaaattcttcacgctagtgatttgcaggaaggcgttaagcaggctgtgaaagatgggaatatcgaaatagtagattcttggatggtacaagcccgtgaagtagggcaggctgccaacctgtcatctgaagatatggattatcttaattcagaaactgcgaaagactacgtcgtattcaatgctaagcgccagctgtacaacgaagcgtttgaagcgcgttattatgcgttggaagaggtagaaacgcttaaagagcagtatccggaagccaaggacttatttgctcgtactgatgcgctgattgaaaagcgtgacgctatcattcaacaaattgctgtcgctatttcaggaagcgagcagcctgatgaagccgcgcttaaagaagcacgcaagcagtggttagcgcaggcggccaattag

SEQ ID NO: 249611 - DNA, 1099 bp, Unknown
  Bacterial polypeptide expressing nucleotide sequence isolated from the Sargasso Sea
atgtacataaaaaatgcaaaagtaattgtcctaaaaataggatcctcaaatatagttgatagcagaggaaaattaagagaaaaatggctaaaaagccttgtcaaagacataaaaaaattagtcaacaaagataaaaaaattgtcattgtttcttcaggtgcaattgcccttggtcagagttatttaaaaattaaacaaaaaaaaatgaaattagaaatgagtcaagctttagcttctattggtcaaatacatttgactaatgtctacagaaaaatgtttgaaagaggtaaaattaaaattggacaaatactgatatcgcttgatgatactgagcaaagaagaagagctatcaatgcaaaaagaacttttgaaaatctttttaaattaaatgctatacctattgttaatgaaaacgacactacagctacttcagaaattaaatatggtgataatgatagattagcagcaagagtagcccaaataataggagctaatgtacttataaatttatctgatgtggatggcctgtacaaatcttcagaacagaaaacaattattaaagaagtaagtaatattgatgaaaaaatttattcttttgtaaataaaaagaagaacacatatggatctggtggaatggaaacaaagttacaagctgcaaaaatttgtatgaacacaggatgttatatggctatagcaaatggaaatcatataaatccaataagcaaacttgttaaagacaacttttgtacatggtttttaccaaaagtatcaagacttcatgccagagaaaaatggatagtaagttcaattggtaatagtggaaaaatatatattgatgatggggccgtaaaagcactaaaaaacgagaagagtcttttaccggccggaataaccaaggtcgaaggtaaatttttaaaaggagataatatattaattgtagatagtaatggaaaagattgtgctaggggtcttacttctttttcggcagatgaaattgataaagttaaaggactaaagagtgatcaaattgaaaaagttttgggttattctagtaaatcagaaattgttcataaagatgatatggtgaaattattatgaa

SEQ ID NO: 249612 - DNA, 853 bp, Unknown
  Bacterial polypeptide expressing nucleotide sequence isolated from the Sargasso Sea
aatgaacctttttaaaaaaaacttcaataaagtaaaattaaatctttcgcagatactcctaactcttgaggacaccgagcaaagaagaagagcaatcaacgcaaaaaggacaataaataatttatttcaacttggttttgtgcccatagttaatgaaaatgatagcattgctacatctgaaatcaaatatggtgataatgatagattggcctctagagtagctcaaatttcaagcgcggattgtttagttttactttcagatgttaatggtctctacacaaaaaatcctaaattatttaaagatgcaactttaattaaagaaattaataaaattgacgaaagaattgaaagaactgcaagtaatgaaagtggtatatatggtaccggtggaatgaagaccaaaattgatgccgcaaaagtttgtcaaaaatctgggtgtcaaatggcaattgcaaatggacttattttaagacctctagaccaaattcaaaaaaaaaataattgcacttggtttatcacggaagtgtctaaacttgatgcgagaaaaaaatggataataagctcaatttctcctaaaggtgaattaattattgatgatggagcaattaaagctttaaaaaaaggtaaaagtttgctcgcagctggtattaaaaaagtaaatggaaaattcaataaaggtgaccatattaaaattctcaataaaaatatgattgaatatgcaagaggtttaagttcttttacctctgaagaaattataaaaataaaaggtcaacattcaaataaaatacaagaattattaggatatactgcaaaatctgaggttgtccataaagatgatatggttgctatatga

SEQ ID NO: 249613 - DNA, 936 bp, Unknown
  Bacterial polypeptide expressing nucleotide sequence isolated from the Sargasso Sea
tatgtatcttaaagattcaaaaaccgttgtaattaaaataggatcttctttaattataaatgaaagtaaaagtataagggaaaaatggctatcagattttgcactagatatacaaaatcttcaaaaattaaaaaaaaatgtaataattgttagttctggagcaatagcattaggttgtaaaaaacttaagttaaataaaaaaaatttaaaattagacaaaagtcaagcagtagcttcaattggtcaaattgaattaatgaatttgtttataaaaaaatttaattcaaaaaaaattaacctttcacagattttattaacactagaagatactgaacaaagaagaagggcgattaatgcaaaaagaacttttgaaaatctttttaaattaaaatttgtacctatcgttaatgaaaatgatagtatagctacttctgagataaaatatggagataatgatagattggcatcgagagttgcacaaatttctggtgctgactgtctaattttactgtctgatgtaaacggtttttattcaaaaaatccaaaaatagataaaaatgcaaagttaataaaagagataacaaacattgatgaaaaaattgaaaaaatagctacaaaaagtatcggagaacatggaacaggtggaatgaaaacaaaaattgacgctgcaaaagtttgtcaattagcaggatgtcatatggctatttctaacggtttaattaataggccgataaaaaatatgttggaaaaaaacatatgtacatggtttttaccaaagatttccaaactagatgctagaaaaaaatggataataagttccatatctccaaaaggagatcttattatagatgatggggcattaaatgcattaaaaataggaaaaagtttgttagccccaggtattaaggaagttagaggaaaatttaacaaaggaga

SEQ ID NO: 249614 - DNA, 894 bp, Unknown
  Bacterial polypeptide expressing nucleotide sequence isolated from the Sargasso Sea
ataaaagtcaagcggtagcttccataggacaaattgaattaatgaatctttttaacgaaatatttaaaaaacgaaaacttaatctctctcaaattcttctaacacttgaagatactgaaatcagaagaagggctataaatgcaaaacggacatttgataatctttttcatcttggatttattcctttggtaaatgaaaatgatagtattgctacttcagaaataaaatatggtgataatgatagattagcctcaagggttgctcagatatctggatcagactgtttaatattactatctgatgtcgatggactatttgataaaaacccaaaagtaaataaaaacgcaaaattaattagcaatgtaaaggagataaataatagcattgaaaaatatatatctaaaaatattagtgaacatggaaccggtggcatgaaaacaaagattgaagcagcaaaaatctgtcagatttctgggtgttatatggctatcgcaaatggtttaataaatagacctattaaaagtataattaacaacaataattgtacttggtttttaccaaaggtttcaaaattagatgctagaaaaaaatggataattagctctatagccccaaaaggtgaattgataattgatgaaggtgctgtgcaagccttaaaaatgggtaaaagtttactcgcggctggaattagaaatgtaaatggcaagtttaataaaggagatcatattaaaattgtggataaaaatatgagagaacatgctagaggattaagttcttttaattccgatgaaatatttagaataaaaggtcaacactcaagcaaaataaatgaaattttgggttatgtatccaaatctgaagttgtacataaagatgatatggtagaaatataat

SEQ ID NO: 249615 - DNA, 1011 bp, Unknown
  Bacterial polypeptide expressing nucleotide sequence isolated from the Sargasso Sea
aatgtatatagataaagctaaaaaaattgttttaaaaataggatcatcaaatttagttgataaacagggtaagcttaaagaaaaatggcttaagagtttagtcgcagacattgaaaaacttagaaaaaagggaaaagaatttgttattgtttcttctggagcaattgctttaggtcaaaatcatttaaaagtgaaaaaaaagaggctgaaaattgaaatgagccaagctctagcctctgttggacaaattcatctaacaaatatctataaagaaatttttaaaaagaaaaaaattaacattggccaaattttaatatcacctgatgatactgagcagagaagaagggcaataaacataaaaagaacttttgaaaatctttttaaacttaaagctatacctgtagtaaatgaaaatgatacgactgcaacatcagaaattaaatatggagataatgatcgtttagctgcaagagttgcacaaataataagtgctgacgttttaattaatttttcagatgtaaatggtttatatgagtcttcaaaaactaaaaaaataattaatgaggtaaaaaatataaataatgaaatatatgcgcttgctgacagtaaaaagagtgtctatggttcaggcgggatggtcacaaaattagatgctgcgaaaatttgtatgaattctggttgctatatggctatagctaacggaaaacaaataaatcctttagataaactattaaaaacaaatatttgtacctggtttttaccaaaagtatctagtcttgatgcaagaaagaaatggattgtgagttcgattggatcaaatggaaaaatatatattgatggtggtgccgttaaagctttaaaaaacggaaaaagtttactgccagcaggaataataaaaattgatggaaaattttttaaaggagacaatatactaattgttgacttaaacggtaatgactgtgctagaggtataacatctttttcttctgatgaaattaataaagtaaaagg

SEQ ID NO: 249616 - DNA, 1006 bp, Unknown
  Bacterial polypeptide expressing nucleotide sequence isolated from the Sargasso Sea
atgaaaaaactattatcaattcttgcagtgacagcatttgcttttacagctaatgctggaactctagatgatgttaaaaatagaggttttctaaaatgtggagtgacaactggtcttgctggttttgctgctccagatgatagcggtgagtgggctggacttgatgcagatatgtgtcgtgcagttgcagttgctgtttttggagatcgttcaaaagtagaatttataacaactactggtaaatctcgtttccctacattagcttcaggtgaagttgatatgttagcgagaaatactacttggacaattagccgtgatgttaatcttggttttgagttcgttggtgtaaatttctacgatggtcaaggtttcatggttccttctgctcttggtgtttcaagcgcaactgaacttgatggtgctactgtttgtattcaaactggtactactactgagttaaaccttgctgacttctttagattaaatggaatctcttacgaagcacttccaattgaaactaatgatgaaggtaaagaaaacttatttgctggtagatgtgatgtatacactacagatgcttcaggtctttcttctacaagagctgctgcagctaatccaaataaatgggttgttttaccagaaattatttcaaaagaacctcttggcccactagtaagacacggtgatcaccaatggggtgatgtagtacgttggtctctaaacgcaatgattattgctgaagaactaggtgttacttctgaaaacgtggatgcacaaaaaagctctaatgtacctgaagtacttagacttctaggtgttgaaggttcatatggtgaaatgcttgaattagctcctgattgggcttaccaaattattaaacaaattggtaactattcagaatcttacgaagctaacgttggtccagatacacctcttgaaatagcaagaggacttaacgctctttggactcaaggtggtattttatacgcaccgccgttcagataaa

SEQ ID NO: 249617 - DNA, 934 bp, Unknown
  Bacterial polypeptide expressing nucleotide sequence isolated from the Sargasso Sea
ggggctattgcccttggacaaaaatatctaaaaataaaaaaaaagaagattaagctagaaatgagtcaggcaatagcagctatcggtcaaattcatttggcgggcgaattccaaaaactctttgataaattcagaattaaatccggacagattttaattagccctgatgacacggaacaaaggagacgagctttaaatgtaagaagtacttttgaaaatctttttcaattaaaagcaattccaattgtaaatgaaaacgacacaacagcaactgcagaaataaaatatggggataatgacagacttgcagcgagagtagcacagattgttggcgctgatactctaatcatattatcagatgttgatggtctttacgataaatcaaaaaagattgtaaaaactgttaccaaaattgacgaaaaagtttattcattagttaatactagtaaaaatttatatggctctgggggaatttctacaaaattagatgcagctaaaatttgtattaactctggttgtcatatgtttattgctaatggtaaaaaagaaaatcctcttaaaaaattattaaaaaataaaatttgcacacattttatacctaagatttcaagtttagatgctagaaaaaaatggataataagttctttgaattcatctggtgttatttatgtcgatgatggagcagcgaaagcattattagatgggaaaagtttgttagcggctggaattataaaaattaaaggatctttcgacaaaggggcaaacgtcctaattgttgaccaaaatgataaacagttagcgaggggattagcttcttttaattcagtagaaattgagaagattaagggtaaacacagtaatgaaatagaaataatcttaggctatttaagtaaatctgagattattcataaagatgatatggtaaaattataaa

SEQ ID NO: 249618 - DNA, 1087 bp, Unknown
  Bacterial polypeptide expressing nucleotide sequence isolated from the Sargasso Sea
tatgctaattagtaattctaaaaaaattgtgattaaattgggctcaacaaccgtagtcgattctaaaggaaagtttaaaaagaaatgggttacatctctaatcaaagatattaaaaaacttggatcaggaaaagattttgttattgtttcctctggcgcaatagcattaggacagaaatatttaaaaattcaaaaaaaaaaaattaagttggaaatgagtcaggcaatagctgctattgggcaaattcatctagcaggagagtttcagaaactatttgaaaaatttaagttaaaaactggtcaaattttaattagtccagatgacacagaacaaagaaaaagagcgttaaatgtaagaggtacttttgataacctctttaaattaaaagctataccaattgtaaatgaaaacgataccactgcaacttctgaaataaaatatggagataatgacagacttgctgctagagttgcccaaattattggggcagatactttaattatattatcagatgtaaatggtctttacgataaatctaaaaatatagttaaaactgtaaataggctcgatgaaaaaatatattctctagtcgaaaatagtaaaaactcatatggttcgggtggaattttaactaaactagatgctgcgaaaatatgtatgaactctggttgtcatatgtttttggcgaatggtagtaaagaatatcctttaaaaagaatggttaaagaaaaaacttttacacattttacaccgaaaatatctagtttagatgcaagaaagaaatggataattggttctttaagttcttcagctgttatttctgttgatgctggagcagctaaagcattgttaaatggtaaaagtttattagcagccgggataataaaggttaaaggctcatttgataaaggagaaaatgtattaatagttgatcaaaatgaaaagcagctagcaagaggtcttgcttcgtttaattctgaagagattgacaaaataaaaggcaaacaaagtaaagaaattgaaaaaattttaggttatttaagtaaatctgaaattattcataaagatgatatgggtaaattataa

SEQ ID NO: 249619 - DNA, 1060 bp, Unknown
  Bacterial polypeptide expressing nucleotide sequence isolated from the Sargasso Sea
tatgagtaacaaattaattgttttaaaaattggaacaaatacattgttcgataatgctgaaattaattttgatatgttggatactcttgcgagctcaattaaaaagtatagaaaacaaaatattaactttgtgattgttacgtcaggtgctgttcaatctggtgctaatgaattgaacttatcagaaagaccaaaaaatttaaaagaattacaagttgcatcagcagtaggacaagtaagtctaataaatacttataaagagatatttaataaacacgatataaacattgctcaaatacttatatcaaaaaatgttttggaagatagaagtcaatttataaacaccacggaagcacttaatggcttaatttctaaaaatatattgccgataattaatgaaaatgatgtcgttgcaactgaagaattaaagtttggtgacaacgataggctttcagcaatagtttctatcatattaaaagcagataagttagttttaattacagataaagagggtttatatgattcggatccagaaataagtgaagaagctcagaaaatagaaaatattgagtataactctgaagaactcaatgaattgatccctaaatctgtttcaggaaaaggcataggaggattttccacaaaaattatggctgcacaaatggctggattttcaggaattgaaacccaaataatttcctggtctccaaattgtgtagatgatgtaattgatgatgtaaaaattggaacaattattaaaccttcaaataagaatattaaacttaaaaaaatctggattggatttggaatgacaattgatggtgaaattattattgatgaaggcgcagaggatgcactagtaaaagacgcttccctcctttcaaaaggcgtattaaaggttaatcaaacttttgaagaaaataccggtgtagagataaaaaacacaaaaaacactctaattggtaggggagttgtaaatttatcaagtaaagaaattgaagattcaaaaaatagtgaaaacactgttgtaattcataaagacaacttattaattctttaa

SEQ ID NO: 249620 - DNA, 1111 bp, Unknown
  Bacterial polypeptide expressing nucleotide sequence isolated from the Sargasso Sea
atgaaattagaacaaacaaatagaattattatcaaaattggatctgcacttctattcaatgaaacttcgggaagtcttaataaagaatggcttaatagtcttgctgaagatgttaaatatttaagagaaaatgataaagaggttataattgtttcttctggagcaattgcgatgggcgcaaaagatttagatcttgatatgaaaaatatgaagatggatatgaatcaagctgtatctgctgtgggccaaatacatttgatgggctcatttaagagtgcctttgaaaaaaatgaaattaaaatttcccaaattcttcttaccttagatgatactgaacaaagaagaagatcaataaatgccagaagaacaatagatacattattaaaattgggtattgttccagtcgttaatgaaaatgatacaattgcgacaagtgaaataagatatggggacaatgatagacttgcatcaagagtggctcaaataacaagtgcagattgtcttattttattatctaatattaatggcctttattctgctgatcctagtactgatgaggatgtaaaattgataaacaaggtaagtgaaattgataaagatattgaaaaaatgattgggcaatcaatttcggattacggaaaaggtggaatgaagacaaaaattcaagccgcaaagacagctatgctatcaggctgtcacttagcaattactaatggttctataatgagacctgtaaagtccttatttgagggacgtccatgtacatggtttgaaccaactaagacccccttggcagcacgcaagcaatggattgcgggaacaatgaagcccgtaggtaaaataataattgatgatggagctgttgatgcacttaaaaaaggaagcagtctcttaccagctggtgtaaagtcagtagagggaaactttgagagaggagatgttattgaagtattgtcgtctgaccaaaataaaataggtatagggttagcaggttacgctgcagaagaaagtattaaaattatgggacacaaaagtgatgaaatagctaacattctaagttactcttacagagaagaaatgatacataaggacgatttagttttgatatgag

SEQ ID NO: 249621 - DNA, 807 bp, Unknown
  Bacterial polypeptide expressing nucleotide sequence isolated from the Sargasso Sea
acaaattttacttactctctgaagatactgaagagagaagaaggtctctaaatgcaaaaagaacttttgaaaatttatttgaacttggctttattccaattgttaatgaaaatgataccatagctacaagtgaaataaaatatggtgataatgatagattggcatcaagagtagcacaaattacaaatgctgatacacttatattgctttcagatgtagatggtctttacacaaaaaatccaaaaatatttaaagaagctaaattaataaaaaaagtagatgacttaaaaaaagatttaagacaaattaatattaagggtgttaacgaatatggtagtggtggtatgcaaactaaaatagaggcagcaaaaatatgccaactgtctggttgtaatatggtaattgctaatggattatatttgaatccaatttctaaaattattgaagaaaataattgtacttggtttaaatcaaaagtttcaaaactagatgctagaaaaaaatggattataagttctatcgctccaaaaggagccattataattgatgatggggcaaaaaaagcattaaggtcaggaaaaagtttattagcagctggaattaaaaaaattactggaaaattcaacaaaggcgatcacattaaaattttagataaaaaaaataatgaatgtgcaagaggtttaagttcatttacatctgaggaaataattaaaattatgggtcatcattccaatgaaatagaaaaattattaggctatgtttcaaaatcagaagtaattcataaagatgacatggtagaggtttaaa

SEQ ID NO: 249622 - DNA, 906 bp, Unknown
  Bacterial polypeptide expressing nucleotide sequence isolated from the Sargasso Sea
tgaaaaaaaagaggcttaaaattgaaatgagccaagctcttgcctcggtaggacaaattcatttaacaaatatctataaagaaatttttaaaaagaaaaaaattaatataggtcaaattttgatatcacctgatgatactgaacaaagaagaagggcaataaatataaaaagaacttttgaaaatctttttaaactcaaagctatacctgtggtaaatgaaaatgatacgacagcaacaagtgagattaagtatggagataacgaccgtttagcagcgagagttgcacaaataataagtgctgacgttttaattaatttttcagatgtaaatggtttgtataaatcttcaaagactaaacaagtaattagcgaggttaaaaatataaatgatgaaatatatgcacttgctgacagtaaaaagagtgtctatggttcaggtggaatggtcacaaagcttgatgctgcaaagatttgtatgaactctggttgttatatggctatcgcaaatggaaaacaaataaatcctttagataaattattaaaaacaaatatttgtacttggtttttaccaaaagtgtctagtcttgatgcaagaaagaaatggattgttagttctattggatcaaatggaaaaatatatattgatagtggtgccgtaaaagctttaaaaaatggtaaaagtttacttccagcaggaattataaaaattgatggagaattttttaaaggagataatatacttatagttgaccagaatggtaatgactgcgctaggggtatagtatcattttcttctgatgaaattaataaagttaaaggtttaaaaagtgatcaactagaaagtattttgggttatccaactaaatcagaaataattcatagagatgatatggttaaattataat

SEQ ID NO: 249623 - DNA, 1093 bp, Unknown
  Bacterial polypeptide expressing nucleotide sequence isolated from the Sargasso Sea
atgttaataaataattcaaaaaaaatagtaataaaattaggttcaacaacagtgatagataaagaaggcaactttaaaaaagcttgggtgaatagtctaataaaagatatcaagaaatataaaaaaaagagggaaattgtaattgtgtcatcaggtgcaattgcactaggacaaagttatttaaagataaaaaaaaagaaaattaaacttgagatgagtcaagctatagcttccattggccaaatacatttggcagaagaatttcaaaaaatatttgaaaaaaatagttttaaagttggacaaattttaatttcacctgatgatactgaacaaagaagaagggctctaaatgtcagaagaacatttgataatttgtttaaattaaaagcaataccaattgtaaatgaaaatgataccacagctacttcagaaattaaatacggggacaacgacagattggcagcaagagttgctcaaattatcggtgccgataccctaataattttttcggatgtagatggtctttacgacaaaggaaataaaaagaaaataattaatgttgttaaaaatttaaataataatatctataaattagccgactcaaaaattaatagctatggttccggggggatgataacgaaacttgaggccgctagtatttgtatgaatgctggatgtcatatgtttattggaaacggaaataaaaaaaatccaattaagaggatggtagaaaaaggaatatttacgaaatttataccaaaaatatcgactttagctgctagaaaaaaatggattgtgagctcactgagctcgcatggtacaattttaatagataaaggtgcagctaatgctttaaaaaacggtaaaagtttattagcagcaggtataaaaacaattagcggcaaattcaataagggagaaaatgttttaataatagatgaatacaataacaaactcgcaagggggctagcatctttttcatcagttgaaattagtaagattaaaggtaggcaaagtgccgaaatagaaaaaattcttggttatattagtaaaacggaagttgttcataaagatgatatggtaaaactataat

SEQ ID NO: 249624 - DNA, 631 bp, Unknown
  Bacterial polypeptide expressing nucleotide sequence isolated from the Sargasso Sea
aatgtatcttgaaaattctaaaactattattgttaaaataggatcatcattaattattgatgacaaaaaaattataagaaaaaaatggttattggagtttgcaaaagatattaaagatttaagaaaaaaaaataaaaatattattatagtaagttcaggtgcaattgctcttggttgtaagaaattaaatatagtaaagaaaaaacttaaaatagatcagagtcaagccgtagcatctgtaggacaaatcgagttaatgaatttatttaaggaagttttcgctattcaaaaaattaatatttcccaaatattgcttacactagaagatactgaaattagaaggagggctataaatgctaaaaggacgattgaaaatttatttaatctaaattttataccgatagttaatgaaaacgatactattgctacttccgaaataaaatatggagataatgatagactagcctcaagagttgctcaaatttctgatgcagattgtcttgtgttattatcagatgtggatggactttatacaaaaaatccaaaaattcataagcatgctaaattaataaataagattgaaaaaatagaccaaaatataattaaattggcttctgggaaaactagtgag

SEQ ID NO: 249625 - DNA, 591 bp, Unknown
  Bacterial polypeptide expressing nucleotide sequence isolated from the Sargasso Sea
tggtgcaactggtttgtattcaaacaggaacaactactgagttaaacttagctgatttctttagattaaatggaatttcttacgaagcacttccaattgaaactaatgatgaaggtaaagaaaacttatttgctggaagatgtgatgtatatacaactgatgcatctggtttatcttctactagagcagctgcagctaatccaaataagtggttagttttgccagaaatcatttctaaagaacctcttggtccacttgtaagacatggtgaccatcaatggggtgacgtagttcgttggtctcttaatgcaatgattattgctgaagaacttggcgtatcttctgagaatgttgatgcacaattaagctctaatgttcctgaagttctaagacttcttggtgttgagggttcttatggtgaaatgttagaattagctcctgattgggcataccaaattattaaacaaattggtaactactcagagtcttatgaagctaacgtaggtccagatacacctcttgaaattgcaagaggtttaaatgctttatggactcaaggtggtattttatacgcacctccatttagataaa

SEQ ID NO: 249626 - DNA, 1111 bp, Unknown
  Bacterial polypeptide expressing nucleotide sequence isolated from the Sargasso Sea
catgtatcttaaagactctaaaactgttgtaattaaaataggatcatctttgataattgataataataaattaatcagagaaaagtggctatcagaatttgctaaagatataaaaaatctacaaaattttaaaaaaaatataattatagtaagttcaggagctatagctttaggttgtaaaaaattaaaattgaataaaaaaaatttaaaacttgataaaagtcaagcagtagcttctataggtcagatagagttgatgaatctttttaaaaaagtttttagtccaaaaaaaataaatctttcacaaattttacttactctcgaggatacagaacaaagaagaagagctattaatgcaaaaagaacttttgaaaatctttttagtcttggttttgtcccaatagttaacgaaaatgatagtatagctacatcagaaataaagtatggtgataatgatagattggcatctagggtagctcaaatatcaaatgcagattgtttgatattgttgtcagatgttaatggtgtctattcaaaggatcctaagttagacaaaaaagctgaattaatacgtgaagtaaaaaatattgataataaaattgaaataatagctacaagaagtattggagaacatggaactggtgggatgaaaacaaaaattgatgctgcaaaaatttgtcaactttctggttgtcatatggcaattgcaaacggattaattaatagaccaattaaaaatattttaaaaaataatttatgtacatggtttttgccaaaagtttctaaattagatgcacgaaaaaaatggataattagctctatatctcctaaaggccaattaattattgattcaggagctttaacggctttaaaaagtggaaaaagtttattggccgcaggaataaaagaagtgaaaggcaaatttattaaaggagatcatattagaatattagacgaagatatgattgagtttgcaagaggtttaagcagttttacttctgatgaaatatctaaaattaaaggaatacattcaaataaaattagcaatctattaggatatatttcaaagtcagaagttattcacaaagatgatatggtaaaggtagaatga

SEQ ID NO: 249627 - DNA, 1063 bp, Unknown
  Bacterial polypeptide expressing nucleotide sequence isolated from the Sargasso Sea
tctcttactgcggatagcggagaagtgaatttagctgctctatctaaacttgtttcccaagtggtaagcgctcgtgaaggtgaacacgagatcataatcgttacgtcaggcgctataacggctggggttcagcgtcttgggataacacgacccgacgaacctgaaattctccaagcaatctctgccgttgggcaaattgatcttatgcgcgcctatcgcgacgagttcgatgcgcacaaggtggcaaccggacaagtcctgctagctccgcacgactttagagacaggaatcagtatctccacgccgaagccacgttcacacatctgttgcgtttgagcgtggtgcccatagttaatgaaaatgatgccgtggccgatgacgcgattcgatacggcgacaacgaccgcatagctgcactagtcgcaaatctgatgcgggctgacctattagttcttctgacggacacaccaggtttactcactgccgacccgcgccttgagcccgaagccactcttatcgaagagatagccgcaatcgatgaatcgctccaagaagtcgcagggagtgccgggttaagaggcagtggtggtatggcttcgaagcttgccgctgcgagaatggcatcatggagtggcgtacgcactgtgatagcggccgctgacagagacaacgttctcgctgatgcgatggcgggtatttcgggtatcggaacagctgtgcccgcccgcaagataagggtgtcagcgcgtaagctctggatcggattcgcagtcgccgccaatggtcgaatcactgtggacgacggcgcggcgaaagccctcaggcaaagcggtggctcgctattgaccgcaggaatcgtaaatgtcgaaaacacttttggtgttggagaagcagtcgagatagtcaatttgtcgggcgaagttttcgctaagggtctgtcggcgttcgatagcgccaccgctaaccggtggaaaggaagtagaacagaggaacttccagtgggtacctctccagttgctattcatcgtgacgatctcgttgtgcttgacgaccccgaataaa

SEQ ID NO: 249628 - DNA, 322 bp, Unknown
  Bacterial polypeptide expressing nucleotide sequence isolated from the Sargasso Sea
agttggatttctggaagcatacggccttcagaaataataaatattgatgatggagcaaacctggcactcagaaatgggaaaagcctattatccgcaggtgttatcaatattgatggtgaatttgataaaggtgatacagttataattaaatctcaagatgttgaaatagcaagaggcttaactaattttaattcttcagatttattcaaaataattgggaaaaaatctgaagaaattgaagaaattttaggttatcttgataaaacagaggtgatacatagagataatttattttactctggtgatatggataaaaattgat

SEQ ID NO: 249629 - DNA, 253 bp, Unknown
  Bacterial polypeptide expressing nucleotide sequence isolated from the Sargasso Sea
tatgagctctttaacaaataaaaagattttactgggaattactggaggaatagctgcttataaatcagctgaaattgccagaggtcttaaaaaagtaggtgctgaggttagagttatcatgactgaatcatctaaagaatttataaccccattaactatgcaagcactttcaggaaatcctgtttctacagatttattagatacagagactgaagctgcaatggggcatatagaaatttcaaaatgggctgat

SEQ ID NO: 249630 - DNA, 901 bp, Unknown
  Bacterial polypeptide expressing nucleotide sequence isolated from the Sargasso Sea
tttacaagcttgcgccgctgttggacaacgaggactcatacagatatatcaaagtgaatttgataaatacaatcataaaactgctcaggtattgatatctcacgatgatattacaaatagagttaggtacttaaatgcaaaaaatgctattgaagcgttgttaaatctcgacgttattcctatcgtaaatgaaaatgattgcgtagcaattgaagagatatcatttggagataatgacagattaggagcagctctagtgggattaattagggccgattactttgtcatgttaaccgatcaagaaggcatcttttcagatgacccaaataaaaatatccaagctcagttaattcaaagcatagatttagacgataaacaattagatttatcgaaattattgaacgcttcagctggtgtacatggaagaggtgggatgaagacaaaactagaagctgctagaacttcagtaaactcaggagctaaaacgtgggtagctgatggcagaagatcagatacccttattaatctttatgaaggcaagaatgaaggtacatttctttatagtaataaggatagactgcaatctagaaaattatggttatcttctttcggatcttcacgcggaactttgactttagacgagggagctgctgaggccataacgaagaaagggaaaagcattcttcctgtgggtatcacaaaagttgaaggtaaattccatcgaggcgatctaataatttgtaataattcgaattcagaggagcttgcaaggggtataagtaactttagttcagaggaattaaaaaaaataataggtttgaattctaaggatttatacggagttctaggatacgcttctgaagaggaagctattcacagaaataatctggtaatatcttaa

SEQ ID NO: 249631 - DNA, 280 bp, Unknown
  Bacterial polypeptide expressing nucleotide sequence isolated from the Sargasso Sea
atgattattgcagaagaactaggtgtttcatctgagaacgttgatgctcaaaaaagctcaaatgttcctgaagtactaagacttcttggtgttgaaggttcatatggtgaaatgcttgaactagctcctgattgggcttaccaaattatcaaacaaattggtaactattcagagtcttacgaagctaacgtaggtccagatacacctcttgaaattgcaagaggtcttaatgctctttggactcaaggtggtattttatacgcacctccgttcagataaa

SEQ ID NO: 249632 - DNA, 1096 bp, Unknown
  Bacterial polypeptide expressing nucleotide sequence isolated from the Sargasso Sea
aatgtatatagataaagctaaaaaaattgttttaaaaataggatcatcaaatttagttgataataaaggtaagttaaaagaaagatggcttaaaagtttagttgtagacattgaaaaactgagaaaaaaaggtaaggaatttgttattgtttcttctggggccattgctttaggacaaagctatttaaaagtgaaaaaaaaaagacttaaaattgaaatgagccaagctcttgcctctgttgggcaaattcatctaactaatatatataaggaaatgtttaaaaagaaaaaaattaatataggtcaaattttaatatcgcctgacgataccgaacagagaagaagagcaataaatgtaaaaagaacttttgaaaatctttttaaactcaaagctatacctgtagtaaatgaaaatgatacaacggcaacaactgaaattaaatacggagataatgaccgtttggcagcaagagtagcacaaataataagtgctgacgttttaattaatttttcagatgtaaatggtttgtataagtcttcaaaaaataagcaaataatcaaagaagtaaaaaatataaatgatgaaacatatgcccttgctgatagtaaaaagagtgtttatggttcaggcgggatggtcacaaaactagatgctgcaaaaatttgtatgaattctggttgctatatggctatagctaatggaaagcaaataaatcctttagataaactattaaaaacaaatatttgtacctggtttttaccaaaagtatctagccttgatgcaagaaagaaatggattgtgagttcgattggatcaaatggaaaaatatatattgatggcggtgccgttaaagctttaaaaaacggaaaaagtttactgccagcaggaataataaaaattgatggaaaattttttaaaggagacaacatactaattgttgacttagacggtaatgactgtgctagaggtataacatcgttttcttctgatgaaattaataaagtaaaaggcttaaaaagtgatcaactagaaagtatcttgggttatccaactaaatcggaaataattcatagagatgatatggttaaattataa

SEQ ID NO: 249633 - DNA, 481 bp, Unknown
  Bacterial polypeptide expressing nucleotide sequence isolated from the Sargasso Sea
atgtatcttaaaaactcaaaaaaaattgttatcaaaatcggatcttcacttttagttgaccaagaaaagaaaataagaaaaaaatggctctctagctttgcgaaagatataaaaaaattaagatcgaataatcaaaaaattataattgtttcttcaggcgcaatagcccttggatgtaaaaaaatgaattataataaaaaaaatcttaagctagataaaagtcaagcaattgcatctataggacaaattgaattgatgaatttgttcttagaaacgttttcaaaatataaattaaatatttctcaaattttacttactcttgatgacaccgaggaaagaagaagatcaattaatgcaaaaagaacttttgaaaacttattcgatcttgatttcatccctattgttaatgaaaatgatactattgcaacatctgaaattaaatatggagataatgatagacttgcttctagagtagctcaaa

SEQ ID NO: 249634 - DNA, 948 bp, Unknown
  Bacterial polypeptide expressing nucleotide sequence isolated from the Sargasso Sea
caattgctttaggctgtaaaaaattagaattaaataaaaaaaaccttaaattggataaaagtcaggctatagcatccattggacaaatagagttaatgaacttatttaaaaaaacatttaatttaatgaaaattaatttatctcaaattttattgacattagaagatactgaacaaagaagaagagcgattaatgcaaaaagaacttttgaaaacttatttaaattaggatttgtcccaattgtaaatgaaaatgatagtattgctacttcggaaattaaatatggtgataatgatagacttgcatcacgtgtggctcaaatatcaggagcagattgtttagttttgctatcagatgttgacggactatatacaaaaaatcctaaaatttataaagatgcaagaatgataaaagagataaataatattgattttcaaatagagaaagttgctacaaaaagtgtaggtgagtatggaacaggcggcatgaaaacaaaaattgatgctgcaaaaatttgtcaacactcaggttgtgtaatggcaattgcaaatggattgaccttgaatccaattaagaaaataataaaaaaaaattcatgtacatggtttttaccaaaaatatctaaattagatgcgagaaaaaaatggataattagctcagtttctcctaaaggagaattagttatagatgacggagctataaaagcacttacaaaaggtaaaagcctacttgcagcaggcattaaaaagatcaatggaaaatttaacaaaggagatcatataaaaattcttgataaaaatatgaatgaatatgcaagaggtttaagttctttttcttcagacgaaatatcaaaaataagaggtcaacattcaaataaaataaatgatttattaggatatataactaagtccgaagtagttcataaagatgatatggtggaaatttaat

SEQ ID NO: 249635 - DNA, 597 bp, Unknown
  Bacterial polypeptide expressing nucleotide sequence isolated from the Sargasso Sea
aatgtatataaataaggctaaaaaaatagttttaaaaataggttcatctaatttagttgataaaaaaggcaagttaaaagagaaatggcttagaagcctagtaaaagatatagataaacttagaaaaaagggtaaagaatttgtaatagtttcttcaggtgcaattgctctaggtcaaaattacacaaaagttaaaaaaaagagaattaaaattgaaatgagtcaagcacttgcttcgattggtcaaatatatttggctaatatttacagagaaatttttcaaaagaaaaaaattaaaattggtcaaatattaatatcgcctgatgatactgaacaaagaagaagggctataaatgttaaaagaactttcgaaaatctttttaaattgaaggcaatccctatagttaatgaaaatgatactacagctactacagaaataaaatatggtgataatgatagactcgcagcaagagtagcacaaataatcagcgcagatattctgataaatttttcagatgttgatggtttatatgagtcgtcaaagaataaaagggttattaaagaggtaaaaaatatagatgaaaaaatatattcttt

SEQ ID NO: 249636 - DNA, 840 bp, Unknown
  Bacterial polypeptide expressing nucleotide sequence isolated from the Sargasso Sea
ttctcaactttttcaaattaaagattaatatttcacaaattttgttaactttacatgatactgaagagagaagaagatcaataaatgctaaaagaacatttgagaacttatttaaattagattacatacccatcgttaatgaaaacgatacaattgcaacgtcagaaataaaatatggtgataatgatagacttgcctctcgtgttgcacagattactaatgccgatactttaatattattatctgatgtagacggacttttcacaaaaaatccaaaattatttaaagacgcaaaattaataaaaaaagtgaataatctagacaaagatatgaaaaaaatttacataaaagggttaacagagtttggtaagggtggaatgaataccaaaattgaagctgctaagatttgtaatttggcaggatgtaatatgattattgcaaacggattatatttaaatccaatacaacaaatcgaaaaaaagaatatttgtactttatttgaatcaaaaatatctaaattacatgcacgaaaaaaatggataataagctctgtttcaccaaaagggactcttgtcatagacgatggtgccaaaaaagcactagtaagtggtaaaagtttattggcagcagggattattaatttatcagggaaattttacaaaggtgatcatataaaaattctagatactaaaaataaagaatttgcaagaggtttaagctctttttcctctgaggaaataaataagataatgggttgtcactcaaatgaaattgagaaaaaacttggatacataacaaaatccgaagtcgttcataaagatgatatggtcgaggtttaat

SEQ ID NO: 249637 - DNA, 841 bp, Unknown
  Bacterial polypeptide expressing nucleotide sequence isolated from the Sargasso Sea
tatgtatcttaagaattataaaactatagtaattaaggttggttcatctcttttaattgatgctaagaaaaaagtaagaagaacatggttagaaaaatttgctttagatatcaaagatttaaaaaataaaaaaaaaaatgtcataattgtaagttctggagccattgctttaggatgcgaaaaactaaaaataaacaaaaaaagtataaagcttgataagagccaggctgttgcctcaattggtcagattgaattaatgaatttatataaaaacatatttaataaatataaaataaatttatcacagattttaattaccctagaagacactgaaaaaagacgtagagcaataaatgcaaaaagaacttttgaaaatctttttgaccttaattacgtcccaatagtgaatgaaaacgacagtattgctacttccgaaataaaatatggggataatgatagactagcgtcaagagtagctcaaatattgggggctgattgtttaatcttactttcagatgtagatggactgtattcttcaaacccaaaaattaataaaaatgcaaaattaattaataagattaataacattgatacgaacatcgaaaaaattgcaaccaaaagtattggtgaacatggcacaggaggtatgacaactaagattgaagctgctaaaatttgccaaaactcaggatgcaatatggtaatagcaaatggtttaatgaataggccaattttaaatattgataaaacaaacaaaggcacctggtttttacaaaagtttcaaagttgcatgcaaggaaaaagtggattattagctcaatttcacctaaaggagatttaa

SEQ ID NO: 249638 - DNA, 661 bp, Unknown
  Bacterial polypeptide expressing nucleotide sequence isolated from the Sargasso Sea
aatcaaatatggagataacgatcgcttagcagctagagtagctcaaataattagtgctgatattttaataaatttttccgacgtaaatggtctttacgaatcttcaaaaaataaaaaaattatcaaagaagtcaaaaatattaatgatgaaacatattcttttgttgaaaataaaaaaaactcttatggttctgggggtatgagcacaaagttagatgctgcaaaaatttgtatgaattctggttgtcacatggctatagcaaatggaaagcatataaatcctcttgatatattggtaaaaaaaaatatttgcacttggtttctgccaaaagtatcaagtcttgatgcaagaaaaaaatggattgtaagctcaataggttcaaatggaaaaatatatatcgatgatggagcttcaaaagctctcagaaatgggaaaagtcttttgcctgcaggaattattaaagttgaaggtaattttttaaagggagataatatcttgattgtagatgagagtggaaaagattgtgcaagaggcatcacatcatttacatctgaagaaataaataaagtaaaaggtattaaaagtgatcaaatagaaaacatcttaggatattctagtaaatcagaaataatccatagagatgatatggttaaattataa

SEQ ID NO: 249639 - DNA, 706 bp, Unknown
  Bacterial polypeptide expressing nucleotide sequence isolated from the Sargasso Sea
tcaatagcactgggatgcaaaaaattaaatttaaataaaaaaaaattaaaacttgataaaagtcaagctgtagcatctatagggcaaatagaattgatgaatttataccaaaatgtatttaaaaaatttaaaatagaaatatctcaaattcttttaactttagatgatactgaacaaagaagaagatcaattaatgcaagaagaactattgataatttattaacaatgggcattgtgccaattgttaatgaaaatgatactactgccacaactgaaataaagtatggagataatgatagactggcagcgagagtttcacaaataattggtgctgattgtttaattttattatctgatgttgatggactttacaccgacaatccaaaaaaaaataaaaaaacaaaattaattaagattgtagaaaaaatagatgaaaatattaaaaaatatgcatctagagcagaaaatatttacgggtctggtggcatgaaaacaaaaattgatgcagcaaaaatttgccaactatctggatgctatatggtaatcgcaaatggagttaataaaaacccaataaaaaaaataaatgagagtcaaaaatgtacttggtttttaccaagaatttctaaacttgatgcgagaaaacagtggataattggatcggttgctcctagaggcgaagtaattatcgattatggagcaacaaaag

SEQ ID NO: 249640 - DNA, 760 bp, Unknown
  Bacterial polypeptide expressing nucleotide sequence isolated from the Sargasso Sea
tatgtatcttaaaaactccaaaataattgttgtcaaaattggatcatctcttctagttgatcaaaataaaaaaattaggaaacaatggttatctagttttgcaaaagatattataagattaagaaataaaaatcaaaaagtagttattgttagttctggtgctatagccttaggttgtaagaaaatgaattataacaaaaaaaatattaaattagataagagtcaagctattgcttctattggtcaaatagagctgatgaatttattttcacaaacttttgcaaaatataaattaaatatttctcagattttgcttacattagaagatactgaggaaagaagaagatctctcaatgcaaaacgaacttttgataatctttttgaacttggttttattcctgtggtcaatgaaaatgacactattgcaacgagtgaaataaaatatggagataatgatagattggcatctagagttgcgcaaattacaaacgcagataccttaattttattatctgatgttgatggtttgtatacaaaaaatcctaaaatttttaaggatgctaaactattaaagaaaattgatgacctaaaaaaagatctaaaaaaaatttatattaaaggtgtaaatgaatatggaagtggtggtatgcatacaaaaattgaagcagcaaaaatatgtcagcttgctggtactagtatggttattgcaaatggactatattcaaatcctatctcaaaaataattgaaaaaaataactgc

SEQ ID NO: 249641 - DNA, 693 bp, Unknown
  Bacterial polypeptide expressing nucleotide sequence isolated from the Sargasso Sea
gatgaataaaaaatttttagaattagctaaaaaatcaaaagttattgtcattaaagttggctcaaatattttagttaatgaaaagcatgtgctgaggaaaaaatggctaagctccctaattgcagacgtgaaagaacttcaaaagagaggttctaagataatcattgtttcatctggtgcaatcgctttaggtaggaatatactctcaaaaaaaaagttgactaatttgcatgaaaagcaggctgctgcatcaataggtcaaatacaactctcgcaacaatggcaaaaagcttttgcaaaattaaatattcaaagttctcagattttaataacagctgaagatttaaacgaaagaagaaaatatttgaacatcagaaatacaatttactctctaatggatttaaatgttgttccaataattaatgaaaatgatactacctcgacagaagaaattcgttttggagataatgataaactttctgctatgatcgcaaatgccctgtcagctgagttattaattttattatctgatgtgaatggtctgtatactgcaaatcctaaaaaatcattgcaagctaaactgattacatctgttgaagaggttgatcaacaaatagaaaaatatattgataaagatttaagtgagtttggttctggtgggatgttggcaaaaatcaatgctgcaaaactgtg

SEQ ID NO: 249642 - DNA, 489 bp, Unknown
  Bacterial polypeptide expressing nucleotide sequence isolated from the Sargasso Sea
aatgattaaaaaatataaaaaagtagttgtaaaaattggttcgaattcaattgttgattcgaaaacaaaaaaaatcaaatctaaatggttagataatttatgtaaagatattgcggaattgaataaaacaaaaaaaattgtgattgtttgttctggcgctattgcattaggtgcaaaaagtatttcaaatacaaagttaagaaaattagaagataaacaggcagcagcttcagttggtcaaattgaattagcccatcaatggcgaaataaactaggaaaatacaagataggtgtttctcaaattctattaacattagaagatagtgaagaaaggcgacgatatttaaatgctagaaatacaatatcatcattacaaagcaaaaacataatcccaatcattaatgaaaatgacactgttgctactgaagaaattcgctattttgataatgataaacttgcagcacgagtagcacaaatgattgaagctga

SEQ ID NO: 249643 - DNA, 526 bp, Unknown
  Bacterial polypeptide expressing nucleotide sequence isolated from the Sargasso Sea
atgtatcttaaaaattccaaaaaaattgtaattaaaattggatcttccttacttatagataataagaaaaatattagaagtaaatggttatttgagttttctaaggatattaaaaatttattaaaacaaaataaaaaagttattattgtaacatctggtgctatagcaataggatgtaaaaaattaaatcttagtaaaaaaaatcttaaattagaaaaaagtcaagctgttgcatcaattggtcaaattgaattgatgaacttatttaataaaagtttcaataaaaataaaattaatatttctcaagtgcttttgactttagatgatactgaacaaagaagaagagcgttaaatgcaaaaagaacatttgataacctgtttgatttaggttttgtaccaattgttaatgaaaacgatactacagcaacaacagaaattaagtatggagacaatgataggcttgcctcgagagttgcacaaatatcaagtgcaaatatattgatactgttgtcagatgtcgatggac

SEQ ID NO: 249644 - DNA, 796 bp, Unknown
  Bacterial polypeptide expressing nucleotide sequence isolated from the Sargasso Sea
atttaattctcatcaattaaatattgctcaggttctcatctcaaaaaatgtactagaagacagaaaccagttcattaacactacagaggctttgaatggtctcatatcaaaggatattattccagtgattaatgaaaatgatgtagttgcaactgaagagttaaaatttggagataacgataggctttcagcaattgtctcaattttacttaaagctgacaaattggtagtaattacagataaagaaggcttatttgattctgatcctgaaaagattgaggaagcaaaaaaaatagaaaatattgaatataactctgaggaattaaatgatcttattcctaaatcctcgtctggaaaaggtatggggggtttttcaacaaaaattatggcagcacagatggcaggtttttctggaatcgaaacacagattatttcatggtctccgaattgtattaatgaggttgtaaaagattcaaaaattggcacaatcattaagccatcaaagaaaaatattaaattaagaaaactttggattgcctttggtatgacaattgatggcgagattgtaatagatgatggtgctattgaagcacttaaagctgatgcatcacttctttcaaaaggtgtaataaatgtaaataaaagttttgatgaaaactctggtgttgaagtgaaaagttcagaaaatgaattaattgcgaggggagtggtcaatttttcaagtaaagaaattcaagacttaaaagagactgaaaacactgtagtaattcataaagacaatctattaattctttaa

SEQ ID NO: 249645 - DNA, 545 bp, Unknown
  Bacterial polypeptide expressing nucleotide sequence isolated from the Sargasso Sea
ggccaatgcgggcgatcctgcgctggaagccatggcaggtggggctgggtccagtatcggcaagggcggcatgattaccaagatcctggctgccaagcgtgcagccggttccggtgcatccactgtgattgcgtgggggcgagagccggatgtgctggtgcgattggtggatggccaggcactgggcaccttgctgatcgcgcaaacgcagaaaaagcaggcgcgcaagcaatggatggccgatcacctgcagttgcgtggtgctgtgactgttgatgccggtgctgccgccaaactgagggaagagggcaaaagcctgctgccgatcggaatgactgcggtcgaaggagatttctcgcggggcgacgtcattgcagtgcgtgacgaagccggagcggagattgcccgtgggttggccaactatgctgctgcggaggcgcgcctgctatgtcgcaagccttcgtctgagtttgcaaagctgctcggctacacggctgaaaccgagatggttcacagggacaacttggtgttgtcggttgcttaaa

SEQ ID NO: 249646 - DNA, 628 bp, Unknown
  Bacterial polypeptide expressing nucleotide sequence isolated from the Sargasso Sea
attgaagctgatttattaattttattaagtgatattgatggactatatcaaggtaatcctaaaaaagacaagaatgcaaaaaaaatatcggagatatttaaaattgataaaaaaattgaacaactagccaattatcaatcctctgaattaggaagcggaggaatggctacaaaaattttagcagcaaaaatatgctctgtaaatggatgtactacaattattactaatagtgataaaaacaagccaattagcaatattaataaaaaaaattcaacaattttttatccattaacttctaccaactcatctaaaaaaaaatggttaataagtcatttaaaaccttcaggatctattattattgataagggagctaagaacgcaattttgaaaaacaagagtctacttccagcaggaataatagaaatcaatggtaggttcaaaatgggtgatgtaatatctattttagacgaaaatgatcaaaaagtagcaataggtatttcagcttatgatataagtgatgcaaaaaaaattattggaaagaaaagcaaagaaatttataaagttttaggtttcgaaggaagagatgaagtggtacataaagataatttagttaagctttctacatgag

SEQ ID NO: 249647 - DNA, 772 bp, Unknown
  Bacterial polypeptide expressing nucleotide sequence isolated from the Sargasso Sea
atgttagttaaaaactctaaaaaaattgttataaaacttggttcgtctactgttgtagataataagggaaaatttaaaaaaaaatgggtaacgagtttaattaaagatgtgaaaaaatacataggaaaatatgatttagtaattgtttcatctggagcaatagccatgggccaaaattatttgaaaattaaaaagaaaaaaataaaattagaaatgagtcaagccatagccgctattggacagattcatttagcgggagaatttcaaaagttatttgataattatagaataaaaactgggcaaatattaataagtccagacgatactgagcaacgcaaaagatcattaaatgtaagaagaacatttgataatttattcaagttaaatgctgtaccaatcgtcaatgagaatgataccacagctacctctgaaataaagtatggggataatgataggttagcagcaagagttgctcaaatcataggagcagatactttgattattctatcagatgttgatggactttatgacaagtctaagaaaaaaaaaatcatcaaaacagttactaaaattgatgcaaatattaactctttgattgataataagaaaaatttttatggctctggtggaattagtacaaaattagatgcagctaaaatttgtataaacgctggctgtcatatgtttattggaaatggaaaaaaaaataatccaattaaaaatatgattaaaactaagttatatactcactttattccaaaaaatttctagc

SEQ ID NO: 249648 - DNA, 385 bp, Unknown
  Bacterial polypeptide expressing nucleotide sequence isolated from the Sargasso Sea
tatgcatcttaaaaattcaaaaataattgttattaaaattggttcagctttattagttgattcaaataaaaagattagaaataaatggttttctatttttgcaaaagatattaagaaattaaaatcaaaaaataaaaagataatcatagttagttctggtgcaatagctttaggttgcaaaaaaatgaaatttaataaatcacgacttaaacttgataagagtcaagcaatagcttctataggtcaaatagagctgatgaatttgttcacaaaaacattctctaaatataaattaaatatttctcaaattttattaactttagacgacacagaagaaaggagaagatctataaatgcaaaaagaacttttgaaaatttatttcaa

SEQ ID NO: 249649 - DNA, 679 bp, Unknown
  Bacterial polypeptide expressing nucleotide sequence isolated from the Sargasso Sea
aataaaagtgggtgataacgataacctatctgccttggtggctatattagctaatgcagacaaattactattacttaccgatcaagacggcttgtttaccagcgatccgcgcaccaatgccgatgcaaagcttattgacgaagtaactcacataaacgatgaactgcgtcaacttgctggtggcagcggtacaagcttaggcactggcggtatggcaacaaagcttcaagcggctgatatagcaaggcgtgcaggcgttgaagttattattgccaaaggcgctggcagcaacgttattttaaaatgcatgagcgagcaattaccgggtactcgctttttaaagttaactgcgcctaaagatggtcgcaaaaaatggttattggccgggcctaaaagtaatgggcaaatagtaatagacacaggcgctattagtgcgctgcaaaataatggggcaagtttattggccaaaggagtcacttgtgcctttggggattttgagcgtggtgatttaatagatttgattgatacaaataaccaagtaattgcgcgtggtttaacccgctttagtcgctcggaggttaataaaattaaaggcgcacattcaaaaaatattgcacagttacttagttatgacgcaggggcagaagtattgcatagggatgatttggtactactttaa

SEQ ID NO: 249650 - DNA, 784 bp, Unknown
  Bacterial polypeptide expressing nucleotide sequence isolated from the Sargasso Sea
ttgggacaaaattatcttaaagtaagaaaaaaaagaataaaaattgaaatgagtcaagctcttgcttctattggacaaatctatttaacgaatatttataggaaaatgttcgaaaaaaataatataaagattggtcaaattttaatttcacctgatgatactgaacaaagaagaagggcaattaatattaagagaacttttgaaaatttatttaaattaggagctattcctattgtaaatgaaaacgatactacagcaacatcagaaataaaatatggagataatgaccgtttggccgcaagagttgcacaaataataggtgctgatgtccttattaatttatcagatgttgatggtttatatgaattaaaaaacaataaaaaaattttaaaagaagtgaataatatagatgaaaaaatttactctttggtcgacaacaagaaaaattcatatggttctggtggtatgtcgacaaaattagaggctgcaaaaatttgcatgaattcaggttgcttcatggcaattgctaatggaaaacacgcacaacctttaagtaaattaattaaaacaaatatttgtacctggttcatcccaaaagtctctagattagatgctagaaaaaaatggattgtaagttcaattgagtctaatgggaaaatatacattgataatggtgcatgtaaagctcttgaaaatggtaagagcctattgcctgcaggaattaccaaagttgatggagaatttataaaaggcgacaatgtattggttgtagatacaaatggta

SEQ ID NO: 249651 - DNA, 849 bp, Unknown
  Bacterial polypeptide expressing nucleotide sequence isolated from the Sargasso Sea
ggtaaattaaaggaaaaatggcttaaaagttttgtaaaagatataaaaaaatttaaaaaaaatggaaaaaactttgtaatagtatcttctggggcgatagctctaggtcaaaattatctgaaagtgaagaaaaaaaaattaaaaatagaaatgagtcaagctttagcatcaattggtcaaatacacctaacaaatatatacagggaaatgtttgaaaaaaataaaattaaaattggtcaaattttaatttctccagatgatactgagcaaagaagaagagcgattaatataaaaagaacatttgaaaatttatttaaactaggagctatacctattgttaatgaaaatgatacaactgctacatcagaaataaaatatggagataatgatcgcttggctgctagagtagctcaaataatcagtgctgatatattagtcaatttttcagatgtagatggattatatgaatcatctaaaaataaaaaaattataaaagaagtgagaaaaataaatgaaaaaatttattcttttgttgaaaataaaaaaaattcatatgggtctggtggaatgtccactaaattagaagctgcaaaaatttgtatgaactcaggttgttacatggcaatagcaaatggaaaacatttaaatccacttgaaaaattaattaaagaaaatcattgtacttggtttataccaaaagtttccagccttgatgcaagaaaaaagtggatagttagctccattggatctaacggtaaaatatatattgatttgggtgcatcgaaagcccttgaaaatggaaaaagtttactgcctgctggaattactaaagttgaaggtgatttttta

SEQ ID NO: 249652 - DNA, 736 bp, Unknown
  Bacterial polypeptide expressing nucleotide sequence isolated from the Sargasso Sea
aatgaaaagaattgtaataaaaattgggtctcaaattatattggacgatgaagaaaaagagggttctgatttaaacaatatattgagtgaaattgtactccttaggtcaaaaggttatttatttactatcgtttcttcaggtgctgttgcgttagcgaaaaaaaatatttcactaaccaatgggcaagaaggaacaacttcaagaaaacaagctttatcatctattggtcaagtatatttgatgaataagtataaatctttttttaattcgcacaatatagaatgtgctcaagttcttgcaggaagagataattttaattcaagattagcataccttaatatcagaagtgcccttgaagaactttattcttacaatgtaattccaataatcaatgaaaatgatgtagtttctactatggaaattgaaggaaagttctatggagataatgatagattagcagctattgtctccaatgcaattgatgctgaccaattaattttatttggcaagactaaaggtttatatacttctgacccaaataaaaatacaaattcaaaaataattaaaaaggtagaaaaaatagacggagaaattatttcttatgcttcttcaccagtcgacaatattggatcaggtggaatgaaaagtaaaatcgaagctgctaaaatttgcatggagtctgggattaattgctctatttcaagtgtagattttgataatactatctttagaata

SEQ ID NO: 249653 - DNA, 639 bp, Unknown
  Bacterial polypeptide expressing nucleotide sequence isolated from the Sargasso Sea
atcaatgcgaaaagaacatttgagaacttgtttaagcttaaagcggttccaatagttaatgaaaatgatactaccgcaacctccgaaataaaatatggcgataatgatcgtttggcagcaagagtagcccaaataattagtgctgatgtactgataaatctatctgatgtagatggtctttataatcctgctgaaagaaaaaaaataattaaagaagttaataatattgatgaaaaaatatattcacttgttgagaataaaaaaaataactacggctctggtggtatgatgaccaaattacaagcagcaaaaatttgcataaattctggatgctatatggcaatcgcaaatggaaatatacttaggcctatacatgaacttttaaaaaacaataaatgcacatggtttattccaaaagtatctactctacacgcaagagaaaaatggattgtaagttctataggaagtgacggaaaaatttttattgacgatggggctgttaatgcactcaaaaatggaaagagtcttctgccagcaggcattattaaaattgaaggcaaatttgtaaagggagacaatgttttgatagtagataaaaatggcagagattgtgctagaggtttaaatcttttacatcag

SEQ ID NO: 249654 - DNA, 847 bp, Unknown
  Bacterial polypeptide expressing nucleotide sequence isolated from the Sargasso Sea
gtttttaaaaaaatttttagtaagaataatattaatatttcacaaatattattaacattggaagatacagagcaaagaagaagagcaataaatgcgaaaagaacatttgataatttatttaaacttggttatgtgccgatagttaatgaaaatgacagtatagctacttctgaaattaagtatggtgataatgatagattagcttcaagagttgcacaaatttctagtgccgattgtcttattttattatcagacgtagatggattatattctaaagatccaaaaatttttaaaactgcaaaattaataaatgaaataaaaagcatcaataatgatgtagaaaaatacgcaactagaaattctggaaaatacggaactggtggaatgaaaactaaactagaggcagcaaaaatttgtcaaaattcaggatgtgtaatggcaatagctaatggttttaaaaaacgacctttaaaaaacattgataaaaaatataattgtacatggtttttaccaaaaatttcaaaattacatgcgaggaaaaaatggatagtgagttctatatcaccaaaagggaatcttattattgatgatggggctgtatctgcactaaagaaaggtaaaagtttgttggcagctggaattaaaaaagtcagcggtgaattttataaaggagatcatgtaaaaattttggataaaaatttaaaagaatttgcaagaggtttaagttcttttagcgcggaggaaattagaaaaattcaaggagaacattcaaataaaattaaagatattttaggatatatatcaaaatcagaggtagtgcataaagatgatatggtagaggtataaa

SEQ ID NO: 249655 - DNA, 604 bp, Unknown
  Bacterial polypeptide expressing nucleotide sequence isolated from the Sargasso Sea
aatgaatagttataaaaaagtagtcataaaaattggtagtgcgttgataaatgataaacaaacggatagtgatgaagtaatcaatagtttatgttcacaaatttcaacgggtactgatagtggaattaaatttgcagttgtctcgtcaggtgctatcagtcaaggattgagctatttggaaatgagtgaaagaccagataaattagatcaacttcaggctttagcagcaattggacaacagcaactaatgcaaatgtatgagaaatgctttgcaagagataataaaaagattgcccaagtccttttaacacatgatgatatgaataatacgacaagatatcttaatgcaaaagcaacgttcgataatcttctcagtcttaatgtcatacctatcataaatgaaaatgatgtagttgctactgaagaaataaggttcggtgataacgacactcttgctgctatggtcacaaatatgattgaggcagatcttatgatcatacttacaaatcaagatgggtattttgataaaaatccagaccagcatccaaatgcaaaaattataaaaaaatgtaacattagtgaagttgatgaagatagttttagt

SEQ ID NO: 249656 - DNA, 865 bp, Unknown
  Bacterial polypeptide expressing nucleotide sequence isolated from the Sargasso Sea
taaaaatagaaaagtaattattgttagttctggcgctatagcccttggttgtaaaagaatgaattataaaaaaaacaatcttaaaatagacaaaagtcaagcaatagcttctattggacaaatagagttaatgaatttattttcacaaacattctcaaaatttagattaaatatttctcaaattttattaactttggatgatactgaggaaagaagaagatcaataaatgcgaaaaggacttttgaaaatttatttcaacttgattatataccaattgtaaatgagaatgatactattgctacttcagaaataaagtatggtgataatgatagattggccgctcgagtagcacaaattacaaatgctgacactcttatattattatctgatgtagacggtcttttcacaaaaaatccaaaagtatttaaagatgctaaattaataaaaaaaataaataatttagaaaaagagattaaaaatattaacttaaaaggtactactgaatttgggaaaggtggaatgaacactaaaattgaagcagcaaaaatttgcaacttatccggttgtaatatgataatagctaatggattacatctaaatcctatcaaccaaatagaaaaaaaaggtaattgtactttgtttgtatcaaaaattccaaaattacatgctagaaaaaaatggataataagttctatttcaccgaaaggtgaactaattatagatgagggtgctaaaaaagcacttttaaatggaaaaagtttattggcggcgggtatcaaaaaggtatcaggaaaatttagtaaaggtgatcatataaaaattttagacactaaacgtaaagaatttgctagaggtttgagctct

SEQ ID NO: 249657 - DNA, 526 bp, Unknown
  Bacterial polypeptide expressing nucleotide sequence isolated from the Sargasso Sea
aatgggtaagaaacgaattttattaaaaataggaagtaatactttaaccaaagaaaccaatcatatttcgcggggaaagattgaagatcttggcgtacagattgctgctttaaacgacgaatatgaatttatcatagtaagttcaggagcaatcgcagcagcaaagcaatttgtaaagctggataatcaggataaagatgtttttgtgaaacaggctttagcttcaatcggacaaccacatttaatgcggatttacaatgagaatttcaaagatttaggtttgaatacatcgcagtgtttactttcttattctgatttcgaaaaagaacaaaccaaaaagaatattgtaaatacgattaatgtattagttaaaaacaattacattccgattatcaatgaaaatgataccgttgcgacagatgagattcggtttggagatatgacaattagcggctttaacggcggttcttttaatgttgatattctgattttatgcactaataccaacggaatttatacaaagatt

SEQ ID NO: 249658 - DNA, 415 bp, Unknown
  Bacterial polypeptide expressing nucleotide sequence isolated from the Sargasso Sea
attgataaaaaaacgtaaaatcccaatactaacaaccacacgtcgcttagtagtgaagataggatccgccctgctcgtcgacgagcgtacaggtgagatcagacatgaatggttgaataagctagcggacgacatagcgtacctaaaaaatgcaggcaaagaagtgctaatagtgtcatccggggcaatcgctgttgggagccaacatttaggaattaatcagcaaattttaaaactagaagaaaaacaggcggcggcagcgactggacaaatcagattggcgcacgcttacgaaacagcattagcccagcactcaattactgtcgctcaaatactattatcaccaggtgacacagaggaaagaagacgtcatttaaatgctagagctacattaacgacgctcttaaagtttggt

SEQ ID NO: 249659 - DNA, 601 bp, Unknown
  Bacterial polypeptide expressing nucleotide sequence isolated from the Sargasso Sea
aatgaaaagaattgtaataaaaattggttcacaaattatattagatgatgaggaaagtaattcaaattatcttagtaatattctgaatgaaattgtaagccttaagtcaaaaggcttttcattcaccattgtttcgtctggtgctgttgcccttgcaaaaaaacatatcactataaaaaagagtcaagaagggacaacttcaagtaagcaagctctttcatctattggacaaatttatttaatgaataaatataaatcattttttaatttgcacaacatagagtgtgctcaagtattggcaggaagagataattttaattcaagattagcttacctaaatattaggagcgcgcttgaagaactatattcatacaatataataccaattataaatgaaaatgatgttgtttctacaatggaaattgaaggaaaattttatggagacaatgatagattagccgctattgtcgcaaatgctattgatgctgatcaattaattttgtttggcaaaactaagggcctttatacatctgacccaagcagaaatacaaattcaaaaattagtaaaaaagttgaaaaaatagatgatgaaattacttca

SEQ ID NO: 249660 - DNA, 885 bp, Unknown
  Bacterial polypeptide expressing nucleotide sequence isolated from the Sargasso Sea
taatagacaataaaggtaaacttaaggaagaatggcttaaaagttttgtaaaagatataaaaaaagttaaaagaaaaggtaagaagtttgtaattgtctcttctggtgctattgcattgggacaaagttatttaaaaataaaaaaaaaaaaactaaaaattgaaatgagccaggcccttgcatcaataggacaaattcatttaacaaatatttacagaaaaatatttgaaaagaataaaatcaaaattggacaaattttgatttcgccagatgatacagaacaaagaaggagagccattaatataaaaagaacttttgagaatttatttaagctagatgctattccgattgtgaatgagaatgatactactgcaacatctgaaataaagtatggtgataatgatcgtctagcagcaagagtggctcaaataataagcgcaaatgttttaattaacttttctgacgttaacggactatatgattcttctactaaaaccaaaattgtaaaagaggttaaaaatatagataaaaatatatactcttacgtaaataataagaaaaactcatatggttcaggaggaatgttgacaaaattagaagcagcaaaaatttgtatgaactctggatgtttaatggccatagcaaatggaaaatataaaaatcctttgctaaaactaataaaaacaaatatttgcacttggtttttaccaaaagtttcaagtttagatgcaagaaaaaaatggattgtaagttctattggatctaatggtaaaatatatatagacaatggggcctctaaagctctagagaatggcaaaagcctccttcctgcaggtataacaaaagttgatggaaaattttcaaaaggagatataatattttaat

SEQ ID NO: 249661 - DNA, 768 bp, Unknown
  Bacterial polypeptide expressing nucleotide sequence isolated from the Sargasso Sea
tatgtatcttaaaaactcaaaagtaatagtaattaaaatcggttcatcactattatttgataaaaacaattggataagaaaaaaatggttgtctagttttgctaaagatatcaaaagattaagatcaaagaataaaaaaattatcgttgtaagttctggtgcaatagcacttggttgcaaaaaaatgaattataacaaaaaaaaacttaagattgataaaagtcaagcagtagcctctatagggcaaattgaattaatgaatttattctctaaaatattttctaaattcagattgaatatttcgcaaattttacttactttagatgatactgaggaaagaagaaggtcaattaatgcaaaaagaacttttgaaaacttattcgatctaaattatataccgatagttaatgaaaatgatacgattgcaacttcagaaattaaatatggtgataatgatagattagcttcaagagttgctcagataactaatgcagatactttaattttattgtccgatgttgacggattattcacaaaaaatcctaaaaaatttagagatgcaaaattaattaaaaaagttgataatattgttaaagatattcaaaatataaatgtaagaggtatgacagaattgggtagtggcggtatgaatacaaaaattgaagcagctaaaatttgtaatttggctggatgcaatatggttatagcaaatggactacaccttaaccctctgagtcaaattgaaaagaaagataattgtacttggtt

SEQ ID NO: 249662 - DNA, 682 bp, Unknown
  Bacterial polypeptide expressing nucleotide sequence isolated from the Sargasso Sea
atgtatcttaaaaactccaaaataattgttgtcaaaattggatcatctctcctagttgatcaaaataaaaaaattaggaaacaatggttatctagttttgcaaaagatatcaaaaaattaagagataaaaatcaaaaagtagttgttgttagctctggtgctatagctttgggttgtaagaaaatgaattataataaaaaaaatatcaaattagataagagtcaagctattgcttctattggtcaaatagaactgatgaatttattttcacaaactttcgcaaaatataaattaaatatttctcagattttgcttacattagaagatactgaggaaagaagaagatctctcaatgcaaaacgaacatttgataatctttttgaacttggttttattcccgtagtcaatgaaaatgacactattgcaacaagtgaaataaaatatggagataatgatagattggcatctagggttgcgcaaattacaaacgcggacaccttaattttattatctgatgttgatggtttgtatacaaaaaatcctaaaatttttaaggatgctaaactaataaaaaagattgatgatctaaaaaaagatctaaataatatttatattaaaggtgtaaatgaatatggaagtggtggtatgcataccaaaatgaagcagcaaaaatatgtcagct

SEQ ID NO: 249663 - DNA, 691 bp, Unknown
  Bacterial polypeptide expressing nucleotide sequence isolated from the Sargasso Sea
tatgtatcttaaaaactccaaaataattgttgtcaaaattggatcatctctcctagttgatcaaaataaaaaaattaggaaacaatggttatctagttttgcaaaagatattaaaaaattaagagataaaaatcaaaaagtagttattgttagttctggtgctatagctttgggctgcaagaaaatgaattataacaaaaaaaatatcaaattagataagagtcaagctattgcttctattggtcaaatagagctgatgaatttattttcgcaaacttttgcaaaatataaattaaatatttctcagattctgcttacattagaagatactgaggaaagaagaagatctcttaatgcaaaacgaacatttgataatctttttgaacttggttttattcctgtagtcaatgaaaatgacactattgcaactagtgaaattaaatacggagataatgatagattggcatctagggttgcacaaattacaaacgcagatacattaattttactatcagatgttgatggtttatatacaaaaaatcctaaaatttttaaagatgctaaactaataaagaaaattgacgatctaaaaaaagatctaaaaaaaatttatatcaaaggtgtaaatgaatatgggagtggtggtatgcatacaaaaattgaagcagcaaaaatatgtcagcttgctggt

SEQ ID NO: 249664 - DNA, 814 bp, Unknown
  Bacterial polypeptide expressing nucleotide sequence isolated from the Sargasso Sea
aggtaaaaatattgtaatagtttcgtccggagctattgcacttggccgaagttacttaaaaattaaacaaaaaaaattaaaattagaaatgagtcaagctctagcatctattgggcaaatacatttaactaatgtttatagaaaaatgtttgaaaaaaataaaataaaaataggacaaattttaatatctctagatgatactgagcaaagaagaagagctataaatgccagaagaacttttgaaaatctttttaaattaagagcaataccaatagttaatgagaatgatacaactgctacttctgaaattaaatatggtgacaatgaccgtttagcagcaagagtagctcaaataataggagcaaatgtacttattaatctttcagatgtagatggtttatataaagattctaaagaaaaaaaaattgttgaagaagtgagtaatattgatgaagaaatttattcctttgtaaataagaaaaaaaatacctatggttctggtggaatgaaaactaaattagaagctgcaaagatctgtatgaactcaggttgttacatggctatagctaatggaaatcacttaaatcctataagcaaacttgttaaaaataatatttgtacttggtttttgccaaaagtatcaagactacatgcaagagaaaaatggattgtaagctctattggaaataatggtaaaatatatattgatgatggtgctgtaaaagctcttgaaaatggaaaaagccttttacctgcaggtattataaaaattgagggaaaatttttaaaaggtgaaaacatatttaattgttga

SEQ ID NO: 249665 - DNA, 925 bp, Unknown
  Bacterial polypeptide expressing nucleotide sequence isolated from the Sargasso Sea
catgcctaacatcggctccaaagaaggcgttcggcaacgttgggtaataaaactcggcagtgccctgttatcgcatgcgacagagggtctcaatcagcctttgattgcctctctcgctgacgcgtgcgttcagctgcgagagcagggtatcgaccccattttggtctcatcgggagcgatttctcagggaatggttcgactcgaatggaaaacccgccctcacgaactgcatcagctccaggtcgctgcagcggtggggcagatggggctgatccgggcctaccagtcggcattcgaggactatggtgttgagacggcgcaagtcctgctgaccagtgccgatttgaacaatcggaaccgctatctcaacgcaagaagcgcattaaggtctatgttggagatgggcattgttccggtggttaatgaaaacgacacggtcgtcacggaagagatccaatttggagataatgattcgcttggagcgcttgtcggaaacctcatcgaggcggattacctagtcatcctgacggaccaggaaggcctatacgaagcagacccgcgtcatgatccaaaagcccagttggtccgcgaagccagcgcgggagaccctttgctggagcagtacgcgggtcccagcggcgcgttgggccgtggcgggatgctgacaaaactccaggcagctgccaaggcggctcgctcaggggcctcaacaattatttgttccggaagaaatccgcaggtactcctgggtatcccgcgaggggatgtgccgggaacgtttctcaaagcggcgtctggtcgaatggcagcgcgcaaactgtggctggctggcagaatgcaatccctcgggcgggtctacatcgacgcgggagcgtgcaatgtcctggtgggctcaggccaggagtcttttgcctgttggcgtgac

SEQ ID NO: 249666 - DNA, 775 bp, Unknown
  Bacterial polypeptide expressing nucleotide sequence isolated from the Sargasso Sea
aatagtaataaaaattggtagtaatttaattactgagaatgaaaatatactcaatgattccgttatagagaatttatgcaatcaaatatctgaagttcaggacaatggtaatgaaattatcattgtttcttcgggcgctgttgctgcaggtaggcaatatttaagtacctttaacaaagaaattaaaatcaatgattcataccttgtgcataaacaagttctagcttcaattggtcaaccaatgcttatgaaagcttatgagaattttttttctaaaaacaacaaggggatttctcaggcattaatttccagagaagattttgaaaaccgttcaggttacttgaatgttagaaatacattgaatgagcttttagcaattcagataattcctattatcaacgaaaatgatgttgtttcaacggatgaacttgagaataaagcttacggagataatgatagattatcagctatggttgccaatgccgtagatgcggatatattaatattattaggtacaattgatggactttatacatctgatcctaatttagataatagtgcagaaaaaataaactttgttgaaaaaatttcagatgatcacataaattatgcttcagggccatcagacaatactggctctggaggaatggtttcaaaaattcaagctgctaatatttcagttaactcaggaactgatatgtttatagcttcaggcttagagaaaaatgtaattaagagaattgtttcaggagagagtattggtacaaaattttta

SEQ ID NO: 249667 - DNA, 715 bp, Unknown
  Bacterial polypeptide expressing nucleotide sequence isolated from the Sargasso Sea
tatcttaaaataaaaaaaaatggtttaaaagtcgacaaaagtcaagctgtagcttcgattggtcaaatagagttaatggatttttataaaaaaacttttgataaaaataaaattaaaatttctcaaatattattaactttggatgatacagaacaaagaagaagatcgataaatgccaaacgtacaatagataatttattatctatgggaattataccagtagttaatgaaaacgatacaacagctactacagaaataaaatatggtgataatgacagacttgctgctagagtttcacaaataattggtgctgattgtttaattttattgtctgatgttgatggactttatactgataatccaaaaaaaaataaggaaacaaaattaattaaaactgttaaagaaataaatgaaagtataaaaaaatatgcaaccaaacaacaaaatctttatggatcaggtggcatgaaaacaaaaattgaagccgcaaaaatttgtcaattatcaggttgttatatggtaatagctaatggaataaataaaaatccaataaaaagaattatagaaggccaaagatgtacttggtttttaccaagagtttctaaacttgatgctaggaaacaatggataattggatcagtgtcacctaagggtgaagtaataattgatctaggagcaaaaaaagcaataaataatggtaaaagcttactgcccg

SEQ ID NO: 249668 - DNA, 739 bp, Unknown
  Bacterial polypeptide expressing nucleotide sequence isolated from the Sargasso Sea
tatgtatcttaaaaactctaaaataattgttgtcaaaattggatcatctctcctagttgatcaaaataaaaaaattaggaaacaatggttatctagttttgcaaaagatattaaaaaattaaaagataaaaatcaaaaagtagttattgttagctctggtgctatagctttgggttgcaagaaaatgaattataacaaaaaaaatatcaaattagataagagtcaagctattgcttctattggtcaaatagagctgatgaatttattttctcaaactttcgcaaaatacaaattaaatatttctcagattttgcttacattagaagatactgaggaaagaagaagatctctcaatgcaaaacgaacttttgataatctttttgaacttggttttattcctgtggtaaatgaaaatgatactattgcaacgagtgaaataaaatatggagataatgatagattggcatctagggttgcgcaaattacaaacgcagataccttaattttattatctgatgttgatggtttgtatacaaaaaatcctaaaatttttaagaatgctaaactaataaagaaaattgatgacctaaataaagatctaaaaaaaatttatattaaaggcgtaaatgaatatggaagtggtggtatgcatacaaaaattgaagcagcaaaaatatgtcagcttgctggtactagtatggttattgcaaatggactatattcaaatcctatctcaaaa

SEQ ID NO: 249669 - DNA, 559 bp, Unknown
  Bacterial polypeptide expressing nucleotide sequence isolated from the Sargasso Sea
tctaatgcaaagcatattagtttagttgaaaatgagatcacagagcgaatttttgcgatggctgggtcagaaattagttcagatggatctgggggcatggttacaaaattggaggctgggcgaatagccatgtctgcgggcacacatatgattatcagtgacgggattaggaactccccaatttcacgaatagaggctggcgccttgtgcacttggtttgttccgcatgccaatccaaaaacagcccgcaaaagctggatatcaagttctcttaatcctgcgggggtggttatagttgataaaggggcactcatagctcttggaaaaggcaaaagtcttctgcctgctggagttataagcgtcaatggaagatttgagcgaggggatctcataatagttaaatcgccagatggcttagaggtggctagaggccttgtcgcctactcttctgaggatgcccaaaaaattatagggcataaaactaatgaaattggagtgatattaggttaccgtggtagggatgagcttatacatagagatgatctagttttaagttagg

SEQ ID NO: 249670 - DNA, 748 bp, Unknown
  Bacterial polypeptide expressing nucleotide sequence isolated from the Sargasso Sea
atgtacattgaaaattgtaaaacaattgtaataaaaatcggttcctctttattaataaataatcaaagagaaataagaaaaaaatggttatctgaatttgcaaaagatattaaagaacttatagacaagaaaaaaaatgtaattattgttagttcaggagctatagccttaggttgtaaaaaattaaatttaaataaaaaaactttaaaactagacaaaagccaggcagtagcgtcaataggtcaaatagagttgatgaatttattgaagaaaaattttaattcgaaaaatgtaaatctttcacaaattttgctaacattggaagatactgaaaaaagaagaagagctattaatgcgaaaagaacttttgaaaatttgtttaaattaaattttgttccaattgtaaatgaaaatgacagtattgccacttctgaaattaaatatggagataacgatcgcttagcatttagagttgcacaaatttctggtgctgattgtctggttcttctatctgatgtagagggtttatttactaaaaatccaaagatatttaaagatgcaaaacttattcatgaaattaaaaatatagataataatattgaaaagtttgctgaaaagagtattggagagcacggcacaggaggcatgaaaacaaaaattgatgctgcaaaggtctgtcaattatcagggtgcttgatggcaatatcaaatggtctttctttaagaccaataaaaaaattgtatgaaa

SEQ ID NO: 249671 - DNA, 539 bp, Unknown
  Bacterial polypeptide expressing nucleotide sequence isolated from the Sargasso Sea
tatgcatcttaaaaattcaaaaataatagtaataaaaattggatcatcattactagttaataacgaaagggaaattagaaaaaaatggttatcaagttttgcgaaagatataaaaaaactaaagactaagaggaaaaaaattattattgtaagttctggcgcaatagctctcggttgcaaaaaaatgaattataaaaaaaccaatctgaaattggatcaaagtcaagctatagcatctgttggccaaatagaattgatgaatttattcactcaaacattctcaaaatttaaattaaatatttctcaaattttattaactttagaagatactgaagaaagaagaagatcaataaatgcaaaaaggacttttgaaaatttatttgaactcgattatatacctatcgtaaatgaaaatgacactatagctacctcagaaataaaatatggtgataatgacagattggcatctcgagtcgcacaaataaccaatgctgatactttaattttgctatccgatgttgatggattattcactaaaa

SEQ ID NO: 249672 - DNA, 807 bp, Unknown
  Bacterial polypeptide expressing nucleotide sequence isolated from the Sargasso Sea
tgggtttatcagcgagtgcaggcaacaaggggttgaagtggtattggtctcttcaggtagtgtggctgcaggccgcgctgctattccctttgcccatcaccccttacccattaacgttaaacaagctatggctgctgtaggccaaacccgcatgatgcaaagctggcgtaacttgctcgactttgactgcgcgcaaattctactgacgcatgatgatttacaacaccgtaaccgttatttaaatatccacaatacgctgcgtactttgctcgatcacggcgtactgcctatcgtcaatgaaaacgatactgtggcgacagctgaactcaaagtgggtgataacgacaatctggccgctttggtcgcgactgttgtcgatgccgatgccttaattatttgctctgatgtcgacggtttatataccgccaatccacgtgctgacagcaatgcgctgcttattcctgaagtgcatcaaatcacaccggagatttatgccatggccggcggtagtcatcatgccattggcacagggggcatgaccaccaagttgcaggcggccagtaaagccacgtcacaaggcattgataccttaattattaacggccagaaagctgacagcttcgcagcactcttggctggtaaagcttgtggcacgctgtttcataaacagcaagagcgtttaagtgcaaaaaaacactggttattacacagtttaaaaacccggggtgagctgcagctcgacagcggtgctgtgcaggctttattgcataaaggcgcctctttgctgccaaaaggcatcagcagtat

SEQ ID NO: 249673 - DNA, 809 bp, Unknown
  Bacterial polypeptide expressing nucleotide sequence isolated from the Sargasso Sea
ataacaaatgaagacggcgagatttcacgggagtcagttgcaaagatttgcagtgaggtggcagaacttaaaagtttcggaaatgatgtcgtaatagtaacttctggagctatagctgccgggcttccttttttaggcctaacggggggaaatagaccacatgacccctcaactctgcaagcgatttccgctataggccaaggttctttaataggtatctatcgcgaagagttagctagtcatcaattattagcagggcaagtcttattagctcctttagattttttcgtacgatcacagtatttacatgcacgtaataccttgataaaacttattgacctaggtgttattcccgtagtcaatgaaaatgatgctattgccgatgacgaaattcgttttggtgataacgaccgaatcgctgctttagtcgcccatctagtcgaagctgatttactagttttacttactgatacttcaggcttgtttacggctgacccgagaatggattcggaagcttctttaatagaagaaataatagagattgatcaggaaatggagagatatgcaggaggaactacttcagaccgaggaagcggaggaatggcttcaaagctagctgcagcaaaaatagctagctggtcaggtgttagaactgtaatagctgatgcttcgcggtctgaaattctaaaagatgcctgtaatgaagttcacggaattggaactgttgtacatccccgagatataaggttgaatgcacggaaactttggatcgcttttgctgtaggttctgctggacaaataatggtaga

SEQ ID NO: 249674 - DNA, 772 bp, Unknown
  Bacterial polypeptide expressing nucleotide sequence isolated from the Sargasso Sea
aattttacaaaaaaattttttgataaaagtaaaataaaaatttcacagatattattaactttagacgacactgaacaaagaagaaggtctataaatgcgagacgtacaattgataatttgttaaaaatgggaattatcccaattgttaatgaaaatgatactacagctactactgaaataaaatatggtgataatgacagattggcttcgcgagtatcacaaataatcggtgctgattgtttattattgctttctgatgtagatggcctttacactgataatccaaaaaaaaacaaaaatacaaaattaataaaaattgttaaaaatatagatgaaaatattaaaagatatgcaacaaaaaaagaaaatctttatggctctggtggtatgaaaactaaaattgatgctgcaaaaatctgccaattggctggttgttacatggccattgcaaatggtaactatacaaatccaataaaaaaaataattaataataaaaattgtacttggtttttgccaaaaatttctaaacttgatgcaagaaaacagtggattataggatctatagatccgaagggagatatagtaattgacgatggagctttgaaagcaattagtaatggaaaaagtttactcccagcgggtgttataaaaataaatggaaattttgataaaggagatcatattgtagtaaaaaacaaaaataatattgaatgtggaagaggtttagcttctttttcttcattagaaataaaaaaaataaaaggatttcata

SEQ ID NO: 249675 - DNA, 664 bp, Unknown
  Bacterial polypeptide expressing nucleotide sequence isolated from the Sargasso Sea
tgataatgatagacttgcagcccgagtagcacaaatgattgaagctgatttattaattttattaagtgatgttgatggtttatatcaaggtaatccaaaaaaagataaggatgtcaaaaaaatttcagaggtatttaaaattgataaaaaaattgaagaacttggtaattatcaatcttctgaactaggcagtggaggaatggccacaaaaattttagcagcaaagatatgtgcgggaaacggttgtgctacaataatcactaatagtgataaaaacagaccaatcagtaatattaataaaaataattcaacaattttttatcccttaacttctacaaattcgtccaaaaagaaatggttattaaatcatttaaaaccatcaggatcgattattattgatacaggggctaaaaatgcaattttaaaaaacaaaagtcttcttcctgctggcgtaatagatatcaagggaaggttcaaaagaggtgatgtaatatctatcttagttgagaatggtcagaaggtagcaataggcatatctgcttatgattttaatgatgcaaaaaaaattattggaaagaaaagtaaagaaatttataaagttttaggtttcgaaggaagagatgaagtggtacataaagataatttagtaaagctttctacatga

SEQ ID NO: 249676 - DNA, 802 bp, Unknown
  Bacterial polypeptide expressing nucleotide sequence isolated from the Sargasso Sea
tatgcatcttaaaaattcaaaaattattgtaataaaaattggatcatctttattagttgataacaataaaaagataagaaaaaaatggttaacaagttttgcaaaagatataaaaaaattaaattcaaaaaatagaaaagttataattgtaagctctggagcaattgcactgggctgtaaaaaaatgaattacaaaaacaaaaatcttaaactagacaaaagtcaagctattgcttccatagggcagatagaattaatgaatttattttctgaaactttttccaaatttaaattaaatatttcccaaattttgttgactttagatgatactgaggaaagaagaagatcaataaatgcaaaaaggacttttgaaaatttatttagtctaaattatatcccaatagtaaatgaaaatgacactattgctacttcagaaattaagtatggtgacaatgataggttggcttcaagagttgctcaaataactaatgctgatactttaatattattatctgatgttgatggactttttacaaaaaatccgaaaatatttaaagatgcaaaattaattcagaaggttaataatttagataaagacataaaagatattaatattaagggcatgacaaaatatggtaagggaggaatgactacaaaaattgaagctgcaaaaatttgcaacttggcggggtgtaatatgataatagccaatggattatatttaaaccctctcaatcgaatagagaaaacagataattgtacttggtttatatccaaaatatcaaaattacatgcccagaaa

SEQ ID NO: 249677 - DNA, 686 bp, Unknown
  Bacterial polypeptide expressing nucleotide sequence isolated from the Sargasso Sea
gacaaaagaaattcgtttcggggataatgacagacttggagcgcgtgttgctcaaatgattagcgccgatacgcttatacttttatctgacgttgacggtttatatgagcgggatcccaaaaaagatccaagcgcaaaacatatagaaaatgtagaacgtatctccccagaaattatcgcaatggctgatgtcgctggaacagactatgcgtccggcggcatgatcaccaagcttgaagctgccaaaatagcaaccagtgcagggtgcagaatggcaattgttgctggaaaaataatgaatccgcttgctgctttggagaatggcgctcgctgcacgtggtttcaagcttcgtcgacaccgcggggtgccagaaagagctggattgcaagtgctataaaccctaacggcgcaatttttctagatgaaggggcgatgaaagccttatatagtggacgaagtatcttgcctgcaggtatattaaaagtaacaggatcttttaaaagaggggatttagtgactgttcatagcccaaatggagatgagttggcaaagggtctagtggcttattcagcgagcgatgcaattatgattaagggtcacaagtcaagggaaatcgaaagtatcttgggttaccgaggccgcgatgaattaatacatcgagacgatctagtcttaaatgaataga

SEQ ID NO: 249678 - DNA, 703 bp, Unknown
  Bacterial polypeptide expressing nucleotide sequence isolated from the Sargasso Sea
gttgataaaacaggtaagccaaaaaaaatttggttggaagattttgccaaagatattaaatttttaataggaaagaaaaaacaagttgtaattgtatcttctggtgcaatagcgatgggatgtgagtatttaaaaattaataaaaaaaatttaaaggttgatgaaagtcaagctgttgcttctataggtcaaattaaattaatggacttttacaaaaaaatttttgataaaaacaaaataaaaatttctcaaattttactcacattagatgacacagaacaaagaagaagatctataaatgcaagaagaactgttgataatttgttgaaaatgggaattgtaccaatagttaatgaaaacgacactactgctacaactgaaataaaatatggagataatgataggcttgctgcaagagtctctcaaattataagtgcagattgtttaattttactatcagacgttgatggactttacactgataatccaaaaaaaaataaaaaaacaaagtttattaaaattgttaatgaaatagatgaaaatattaaaagatacgcaactaaaacagaaaacttctatggatcgggaggcatgaaaacgaaaattgatgccgcaaaaatttgtcaattgtctggctgtcatatgataatagctaatggaaatgtaaaaaaaccaattagtaaaattattaataataaaaaat

SEQ ID NO: 249679 - DNA, 391 bp, Unknown
  Bacterial polypeptide expressing nucleotide sequence isolated from the Sargasso Sea
gcacaacagtttggcagctattgataaaggcatacgttgcacttggttcctatcaacagaaaaccacgccaccgcccgtaagcgctggattgcaagcgccctagcacctaatggcaaggtgataattgatgatggtgcggaaaaagcgttaggtaaaggcaaaagccttttacccgccggtgtattatctgtatcggggactttcaaccgcggcgacgcggttataattgaaaacgcctcaaatgttagattgggttgtggtcttattgcatattctgcagatgacgccaatttgatcgccggacataaaaccggtgaaatcgaggctttactcggttaccgtggtagggatgaaatgatccacagggatgatttggtgattgacgggtag

SEQ ID NO: 249680 - DNA, 312 bp, Unknown
  Bacterial polypeptide expressing nucleotide sequence isolated from the Sargasso Sea
gcagttaaaaaagcaagggcagcagcgggtcaaaccgaaatgattgccacgtgggacagactgtttgattttccgtctgctcagaagctgttaacgcatgctgatttgcgagacagagagcgttacgtaagtatccgtgaaacgatattcagtttattggacaacaatatcctgcctattgttaacgaaaacgacaccgttaccactgacaaattgaaagtaggtgataacgataatttatcggccatggtggcgtcggcagctgaagcagatgcacttatcatctgttcagacattgatgggttgtacgat

SEQ ID NO: 249681 - DNA, 640 bp, Unknown
  Bacterial polypeptide expressing nucleotide sequence isolated from the Sargasso Sea
tatgtatcttaaaaattcaaaaataatcgttattaaaattggatcatctatattagttgataataatagaaaaataagaagcaaatggttatcaagttttgcaaaagatattaaaaaattaaaatctaataataaaaaagtagtgattgttagctctggagctatagcccttggatgtaaaaaaatgaattataacaaagcaaatctcaaacttgacaaaagtcaagctatagcttctataggccaaattgaattaatgaatttattttcacaaacattttctaaatataaattaaatatatcacaaattcttctaacattagaagatactgaagaaagaagaagatcaataaatgcaaagagaacttttgaaaatttatttcaacttgattatgttccaattgtaaatgaaaatgatacaattgctacgtctgagataaaatatggtgataatgatagacttgcttctcgtgtagctcaaattactaatgcagatacattaattttattatctgatgttgatggtctttttacaaaaaatccaaaaaaatttaaagatgcaaaactaattaggaatatttctaatttcaataaagatataaaaaatataaatatgagaggtattacagagtttggaagt

SEQ ID NO: 249682 - DNA, 659 bp, Unknown
  Bacterial polypeptide expressing nucleotide sequence isolated from the Sargasso Sea
catgtatcttaaaaattcagaaattatagttataaaaataggttcatccttactaatcgatgataaaatgaatattagaaataaatggcttacagagttttctaaagatgtaaaagaactaattaaacaaaataaaaaagtaattttggtcagctccggagcaatcgctctgggttgcaaaaagctaaatttaaccatgagaaacttaaaacttgataaaagccaagctatcgcatcagtgggccaaattgagttgatgaatttatttaagaaaattttcaataaaatgaaaataaatttctctcagatacttttaactctagaggatactgagcaacgaaggagagctattaatgcaaaaagaactattgataatttgttacaaatgagttttgtaccaattgtaaatgagaatgatagtatagccacctcagaaataaaatatggggataatgatagacttgcatcaagagttgctcaaatttcaaatgctgattctttaatacttttatcagatgtagatggacttcatgataaaaatcctaaattatttaaagatgcaaaattaataaaggaaattcaggatattgattataaaatagaaaattttgccaccaaaactgttaacatttatggtaagggtggcatgaaaactaaaa

SEQ ID NO: 249683 - DNA, 757 bp, Unknown
  Bacterial polypeptide expressing nucleotide sequence isolated from the Sargasso Sea
ggacaaattgaattaatgaacctctttaaaaaaactttcagtaaaaggaaaattaatttgtctcaaattctaatcactttagaagatactgaacaaagaagaagagctattaatgcaaaaagaacttttgaaaatttatttgatcttggttatgtgcccatagtaaatgaaaatgatagtatagcaacctccgaaataaaatatggagataatgatcgactagcctcaagagtcgcacaaatatcaggagcagattgtttaatattattatctgacgtggacggtctctactctaagaacccaaagctatataaagaagcaaaattaattagtgaaattaaaaatttagataatgatattcaaaaaattgctacgaaaagtattagcgaatatggtactggtggtatgagaacaaaaattgaggctgctagaatctgtcaaaattctggttgtgttatggtaattgctaatggtttaaaaaatcgtccaattcaaaatattctaaaaaaaaataagtgtacttggtttttgccaaaagtttcaaagctccatgcaagaaaaaaatggattataagctcagtgtctccaaaaggggatattataattgatgatggtgcaattgcggctttacggaaaggaaaaagtcttctggctgctggaataaaaaaagtaaatggtaaattttataagggagatcatattaaaatactaagtaaagacaaaatagaatttgcaagaggtttgagttcttttagct

SEQ ID NO: 249684 - DNA, 649 bp, Unknown
  Bacterial polypeptide expressing nucleotide sequence isolated from the Sargasso Sea
actggcagcaagagtttcacaaataattggtgctgattgtttgattttattgtctgatgttgatggactttacactgataatccaaaaaaaaataagaaaacaaaattaattaagattgtgaaaaaaatagatgaaaatattaaaaaatatgcatctagaggagaaaatatttatggatctggaggcatgaaaacaaaaattgatgcagcaaaaatttgccaattatctggatgctatatggtaatcgcaaatggtgttaacaaaaatccaataaaaaaaataaataaaagtgaaaaatgtacttggtttttacccaaaatttctaaacttgatgcaagaaaacagtggataattggatcagttgctcctaaaggtgaagtaattattgattatggagcaacaaaagcgatcagaaatggaaaaagtttattaccagcaggagtgaaaaaaattaatggaaacttcgagaaaggagatcacattctcgttaaagatcaggacaatgttgaatgtgctaggggtttaacgtcgttctcatcaatcgaaatagaaaaaataaaaggttcacatagtagcaaaataaaaaatatattaggatattctagtagagaagaaattatacataaggatgacttagtaaaagtttag

SEQ ID NO: 249685 - DNA, 805 bp, Unknown
  Bacterial polypeptide expressing nucleotide sequence isolated from the Sargasso Sea
tatgaaaagaattgtcataaaaattggctcacaaataattctaaatgacgctcaagataataactataatcatctaaatgaattgttaagtgaaattgttaatttaagatcaaaaggttttgaatttactatagttacgtctggcgcagtcgctctagcaaaacatcacttactaataaaaggtttagaaaattctaatcaaacttcatcaaaacaagctatggcttcgataggtcaaacatttttaatggagaaatatagtaaattttttgaatctcataatatttattgtgctcaagtattggcgggtcgtgataatttcaattctaggattgcatatttaaacataaaaaatactttagaaaaactttacgaattaaatgtaattccaataatcaacgaaaatgatgttgtttctactaaagaaattgaggggcgattttatggagataatgacaggttgtcatctgtagttgcaaatgcaattgatgccgatttgctcattctattcggaagaatggatgggttgtatacagaaaatcctgacatcaatggtaaaggagtattaattaaaaaagttgatgtgattgacgaaactataatgtcttacgcaaaagactcagaagacaaagtgggttctggaggaatgaaaagtaaattagaagcagcaaaaatatgcatggggtctggaattaagtgtgtaataacaagccctcaaaacaatgtaataaataaaatcattgaagggaatagcataggaactcaatttgtgcctaattcttccaatctagaaagtaaaaagaga

SEQ ID NO: 249686 - DNA, 788 bp, Unknown
  Bacterial polypeptide expressing nucleotide sequence isolated from the Sargasso Sea
agatgatacagagcagagaagaaggtccataaatgcaagaagaactattgataatttgttagcaatgggaatcattcctatcgttaacgaaaatgatactactgctactactgaaataaaatatggagacaacgacagacttgcagcaagagtttcacaaataattagtgctgattgcttaattttgctatctgatgttgatggtctttatactgataacccaaaaaaaaataaagaaacaaaatttattaatattgttaacaaaatagatgaaaatataaaaaaatatgcaaccaaagcagaaaatttatatggatcaggaggaatgaaaactaaaattgatgctgcaaaaatttgccaattatcaggatgttatatggttattgcaaatggaaataataaaaatccaataaaaaaaatacttgaaaataaaaaatgtacttggtttttaccaaaaatttctaaacttgatgctaggaaacagtggataattggatctatagcgccaaaaggtgaagtaattattgatgaaggtgcattaaaagcaataaacaacggaaaaagtttattacctgctggtattaaaaaagttaatggcttttttaaaaaaggagatcatattttagtaaaagatcaaaacaacaatgaatgcgctagaggcttagcttcattttcttcagaagaaattgagaaaataaaaggttcacatagcagcaaaataaaaaatatattaggatattccagtagagaagaaattatccacaaggatgacttggtgaaagtataac

SEQ ID NO: 249687 - DNA, 805 bp, Unknown
  Bacterial polypeptide expressing nucleotide sequence isolated from the Sargasso Sea
tatgtatcttaaaaactccaaaataattgttgtcaaaattggatcatctcttctagttgatcaaaacaaaaaaattaggaaacaatggttatctagttttgcaaaagatattaaaaaattaagagataaaaatcaaaaagtagttattgttagttctggtgctatagctttgggctgcaagaaaatgaattataacaaaaaaaatatcaaattagataagagtcaagctattgcttctattggtcaaatagagctgatgaatttattttcacaaactttcacaaaatataaattaaatatttctcagattctgcttacattagaagatactgaagaaagaagaagatctctcaatgcaaaacgaacttttgataatctttttgaacttggttttattcctgtggtcaatgaaaatgatactattgcaacgagtgaaataaaatatggagataatgatagattggcatctagggttgcgcaaattacaaacgcagatatcttaattttattatcggatgttgatggtttgtatacaaaaaatcctaaagtttttaaggatgctaaactaataaagaaaattgatgacctaaataaagatataaaaaaaatttatattaaaggcgtaaatgaatatggaagtggtggtatgcatacaaaaattgaagcagcaaaaatatgtcagcttgctggtactagtatggttattgcaaatggactatattcaaatcctatctcaaaaataattgaaaaaaataactgcacctggtttagtccaaaaatttcaaagttagatgctagaaaaaaa

SEQ ID NO: 249688 - DNA, 610 bp, Unknown
  Bacterial polypeptide expressing nucleotide sequence isolated from the Sargasso Sea
atgcatcttaaaaactcaaaaattatagtaattaaaattggctcatcactgattgtagatagtaaaaaaaagataagaaaaaaatggctatctacatttgctaaagatgtacaaaaactaaaatctaaaaataaaaagattataattgttagctcaggagcaattgcacttggatgtaaaaaaatgaattataataagtcaaatttaaagcttgataaaagccaagcgatagcctctgtgggccaaatcgaacttatgaatttattttctcaaactttttcaaaattaaagattaatatttctcaaattttgctaactttggatgatacagaggagagaagaagatcaataaatgctaagaggacattcgataatttatttaaactagattacatacctatagttaatgaaaatgatacaattgcaacttcagaaataaaatatggcgataatgacagacttgcttcacgtgttgcacagataactaatgccgatactttaatattattatctgatgtggatggtcttttcacaaaaaatccaaaattatttaaagacgcaaaattagtaaaaaaagtaaataatctagataaagatataaaaaaaatta

SEQ ID NO: 249689 - DNA, 832 bp, Unknown
  Bacterial polypeptide expressing nucleotide sequence isolated from the Sargasso Sea
atgcttcttaaaaattctaaaataattgtaatcaaaattggatcatctttgttagtagataagaatagagagatacgaaatagatggttatcgagttttgcacaggatattaagaaattaaaatcaaacaacaaaaaggtcataatagttagttctggagctattgctttagggtgcaaaaaaatgaattataataagacaaatcttaagctagataaaagccaagctatagcatctataggtcagattgaattaatgaatttattttcacaaactttttctaaatataagattaatatatcacaaatccttttgactttagaagatacagaagagagaagaagatcaataaatgcaaaaagaacttttgaaaatttatttcaacttgattatattcctatagttaatgaaaatgatacaattgctacgaccgagattaaatatggtgacaatgatagacttgcatctcgtgtagctcaaatcaccaatgcagatttattaattttgttatctgatgttgatggtctttttacaaaaaatccaaaaatatttaaagatgcaaaattaataaaaaaaatttccaactttgacaaagatataaagaatatttacatcaaaggtaaaacagaatttggaagtggaggcatggatacaaaaattgaggcagcaaaaatttgcaatttagctggcagtaatatggtgattgccaatggattacatttaaatcctattgatcggatagataaaaaaaataattgtacttggtttgtatcaaaagtaacaaaattagatgctagaaagaaatggataataagttctattctcctaaggg

SEQ ID NO: 249690 - DNA, 793 bp, Unknown
  Bacterial polypeptide expressing nucleotide sequence isolated from the Sargasso Sea
acaaaatggattcaattttattattgttacatctggtgccgtacaattaggtgcaaatgagttgaatttagaacaaagaccgacggctttaaaatctctacaggttgcctcttcagttggacaaattactttagttaactcttttaaggaaatatttaaaactgaagacttaagaatagctcaagtattaatgtctaaaaatgttcttgaagatcgaaatcaatttataaatacatcagatgcactaaatgaattaatagcacaagatataatcccagtaattaatgaaaatgacattgttgcaactgaagaattaaaatttggagataatgatagactttctgcaatagtggcaattgttgttaaagctgaaaaattagtcttaataactaatcaggaaggattatttgattctgatcctgagaaatcaaataatgcagaaaaaataaattatattgagtacgactcagaagagttagctgaattgattccactatcagcaacaggagaaggtgtgggaggtttttcaacaaaaattatggcttcacagatggctgggttttcaggtattccaacacaaattattacttggtctgatgactgtattaagaaagtagtgaatagtgaagacattggaactttagtaagaccttcttcaaagaaagtaaaacttaagaaactatggattgcttatggcatgccagtaatcggtaaaatcatcatagatgatggagcaaaaaatgctttaacaaaggacgcttctttattatctataggaattaaagaaataaaa

SEQ ID NO: 249691 - DNA, 1030 bp, Unknown
  Bacterial polypeptide expressing nucleotide sequence isolated from the Sargasso Sea
atgcttcttaaaaattcaaaaataattgtaataaaaattggatcatcattattagttgatgaaaaaaaaaaaattagaaaaaaatggctatctagttttgcaaaagatatccaaaaacttaaatcaaaaaataaaaaaattattatagttagttcaggagcaattgctctcggttgcaaaaaaatgaattataataaaacaaatttaaagcttgataaaagtcaagcaatagcctctgtgggacaaattgaattaatgaatttattttcacaaactttttcaaaactaaaaataaatatttcacaaattttattaactttagatgatactgaagaaagaagaagatcaataaacgctaaaaggacttttgaaaatttattccaacttgattacataccgatcgttaatgaaaatgacacaattgcgacttcagagataaaatatggtgataatgatagactcgcgtctcgtgttgcacaaataactaatgctgatactttaatattattatccgatgtagatggtcttttcaccaaaaacccaaaaatatttaaagacgcaaagttaataaaaaaagtaaataaccttgatagagatattaaagatatttacattaaaggtgtaacagaatttggtagaggtggaatgaataccaaaattgaagctgctaaaatttgtaatttagctggatgtaatatgattattgcaaatggattatatttaaatccaatacatcacatagaaaaaaaaaataattgtactttattcgtttctaaaatatctaaattacatgccagaaaaaaatggataattagttctgtatcaccgaaaggagaacttattattgatgatggtgccaaaaaggcacttgttagtggaaaaagtctattagctgctggcataataaatatttcgggaaaatttaataaaggcgatcatattaaaatcctagatgccaaacataaagaatttgctagaggtttaagctctttttcatcagaagaaatttataaaataatggggttgtcat

SEQ ID NO: 249692 - DNA, 1108 bp, Unknown
  Bacterial polypeptide expressing nucleotide sequence isolated from the Sargasso Sea
atgtatcttaataattcaaaaataattgtcattaaaattggatcatctttgctgattaacaatgaaaaaaaaattagaaataagtggttatttgaattttctagagacataaaaaatttattaaataaaaacaaaaaaattataattgtaagttccggagccattgcaatgggttgtaagaaattaaatttgagtaaaaaaaatcttaaactggaaaaaagccaagcagttgcatctgttggccaaattgaattaatgaatttattcaataaaaattttttaaaaagtaaaattaatatatctcaaattctattaactttagaagatactgaacaaagaagaagagcattaaatgcaaaaagaacttttgaaaatttatttgagcttggatttgttcctattgtaaatgaaaatgatagtacagccactactgaaattaaatatggagataacgatcgacttgcttcaagagtcgctcaaatatctggggctgatgtattggtgttattgtcagatgttgacggtctttacacaagcaatccaaagctaaataaaaatgtagaactaataaaagaaattaaaaatatagacaaaaatattgaaaatatagccacaaaaagtattggcgaacatggcactggtggcatgaaaacaaaaattgatgctgcaaaagtttgtcagttatcaggctgtaaaatggtcatagctaatggattgccattaagacctattagggaaattattaatgaaaataattgtacttggtttttaccaaaaatatctaaattagctgcacgaaaaaagtggatcataagttcaatttcacccaagggagaattagttattgatgaaggggcaaaacaagctttaaaaaaaggtaagagtttattagcagcaggtataaaaaaagttattggaaaatttaataaaggtgatcatataaaaattattgataaaaattctaaagaatatgcaagaggtcttagttcattttcttcctttgaaattacaaaaattatgggccatcattctaatgaaattgagaaattacttggatatatttcaaaatctgaagtggttcataaagatgatatggtagagttataaa

SEQ ID NO: 249693 - DNA, 1108 bp, Unknown
  Bacterial polypeptide expressing nucleotide sequence isolated from the Sargasso Sea
tatgtatcttaaaaattctaaaataattgttgttaaaattggttcctcacttcttgtagatgaaaataaaaaaattagaaagaaatggttgtctagttttgcaaaagatatcaaaaaattaagggatagaaatcaaaaagttgtaattgtgagttcaggagcaatagctcttggttgtaaaaaaatgaattataataaaaaaaatattaaactagataaaagtcaagctattgcatctataggtcaaatggaattaatgaacttgttttcacaaacatttgctagatttaaacttaatatttctcaaatacttcttactctggaagatacagaggaaagaaggagatcattaaatgcaaaaagaacttttgaaaatttatttgaattaggattcattccaatagttaatgagaacgataccatagctacaacagaaataaaatatggggacaacgataggttggcatctagagttacacaaattactaacgctgataccttaattcttctttccgatgttgatggactttacacaaagaatccaaagatttttaaggacgcaaaattaattaagatagttaaagatttaaaaaaagatttaagcaatgtaaatattaaaggtatgaatgaatttggaagcggcggtatgcaaactaaaattgaggctgcaaaaatttgtcaactagcaggtagtagtatggtcattgcaaatgggctaaatagtaaccctatcacaaaaataattgagcaaaataattgtacttggtttagtcctaaggtctcgaaacttgatgcgagaaaaaaatggataataagttcagtagcaccaaaaggagaaattattatcgatgatggagcaaaaaaagcactaagatcaggtaaaagtttactagctgctgggattaaaaatatttcaggaaaatttaataaaggggatcacataaaaattttagataaaaaaaatattgaatgcgcaagaggattaagttcattcacctctgatgagataatcaaaattatgggtcatcattcaaatcaaattgaaaaattattagggtatgtttcaaaatctgaagtaattcacaaagatgatatggtggaagtttaa

SEQ ID NO: 249694 - DNA, 817 bp, Unknown
  Bacterial polypeptide expressing nucleotide sequence isolated from the Sargasso Sea
agttaactcttttaaggaaatatttaaaactaaagacttaagaatagctcaagtattaatgtctaaaaatgttcttgaagatagaaatcaatttataaatacatcagatgcactaaatgaattaatagcacaagagataatcccagtaattaatgaaaatgacattgttgcaactgaagaattaaaatttggagataatgatagactctctgcaatagtggcaattgttgttaaagctgaaaaattagtcttaataactaaccaggaaggattatttgattctgatcctgagaaatcaaataatgcagaaaaaataaattatattgagtacgactcagaagagttagcagaattgattccgctatcagcaacgggagaaggtgtgggaggtttttcaacaaaaattatggcttcgcagatggctgggttttcaggtattccaacacaaattattacttggtctgatgactgtattaagaaagtagtgaatagtgaagacattggaactttagtaagaccttcttcaaagaaagtaaaacttaagaaactatggattgcttacgggatgccaataatcggtaaaataatcatagatgatggagcaaaaaatgctttaacaaaggacgcctctttattatctataggaattaaagaaataaaagtaccatttgaaataaatgatggagttgaaatttttgatggcaatgatttattgatagctaaaggaatatcgaaaatatctagtaaagagtttagtttaggcaaagaagctgaaggtaaagtggttattcataaagataatttattaatcttataa

SEQ ID NO: 249695 - DNA, 1060 bp, Unknown
  Bacterial polypeptide expressing nucleotide sequence isolated from the Sargasso Sea
tatgagtaacaaaactatagtaataaaaattggcacaaacaccttgtttaaagaagacgttcttcgagatgatgttattgattcactagctgtttcagtaaatgaattgagaaaagaaggtatcaattttgctattgttacatcaggtgcagtacagtctggcgcaaatgagttaaatctatcagaacgaccaaaaaacctaaaggagttacaggtagcatctgcagttggtcaagtcagtcttattaacaaatacaaggaaatatttaattctcatcaattaaatattgctcaggttctcatctcaaaaaatgtactggaagacagaaaccagttcattaacaccacagaagctttgaatggtctcatatcaaaaaatattattccagtgattaatgaaaatgatgtagttgcaacagaagaattaaaatttggagataacgataggctttcagcaatcgtatcaattttacttaaagctgacaaattggtagtaattacagataaagaaggcttatttgattctgatcctgaaaagattgaggaagcaaaaaaaatagaaaatattgaatacaattctgaggaattaaatgatcttattcctaaatcctcatctggaaaaggtatgggcggtttttcaacaaaaattatggcagcacaaatggcaggtttttctggaatcgaaacacagattatttcatggtctccgaattgtattaatgaggttgtaaaagattcaaaaattggcacaatcattaagccatcaaagaaaaatattaaattaagaaaactctggattgcctttggtatgacaattgatggcgagattgtaatagatgatggtgctattgaagcacttaaagctgatgcatcacttctttcaaaaggtgtaataaatgtaaataaaagttttgatgaaaactctggtgttgaagtgaaaagttcagaaaatgaattaattgcgaggggagtggtcaatttttcaagtaaagaaattcaagacttaaaagagactgaaaacactgtagtaattcacaaagataatctattaattctttaa

SEQ ID NO: 249696 - DNA, 1108 bp, Unknown
  Bacterial polypeptide expressing nucleotide sequence isolated from the Sargasso Sea
tatgtctcttaaaaattcaaaaataattgtagttaaaattggatcctctttgatagttaataataacaaaaaaataagaaaaaaatggttactaagttttgccaaagatataaaaactttgaaatctaaaaatcgacaggttgtaatagtaagttcaggagctattgctcttggttgtaaaaaaatgaattatagtaaatcaggtttaaagctagataaaagtcaagcaatagcctctataggacaaatagaattgatgaatttattttcagaaactttttcaaaatataaattaaatatttctcaaattctacttacattagaggatactgaagaacgaagaagatcaataaatgcgaaaaggacttttgaaaatttattccaacttgattatatacctatcgtaaatgaaaatgatactattgccacatcagaaataaagtttggggataatgacagattggcatctcgagtggctcaaattactaatgcagatacgttaattttattatcggatgtagacggtctttatacaaaaaatcctaaaaattttagagatgcgaagttaattagaaatatttctaacatcaaaaaggatttaaaaaatgttgatattaaaggaagaacagaatttggaagtggaggtatggatactaaaatcgaagctgcaagaatatgtaatttagctggttgtaatatggtaatagcaaatggattatatttaaatccaattaatcaaatagaaaagaaaaaaagttcaacatggttcatctctaaagttccgaaattagatgctagaaaaaaatggattattagctccgtttcaccaaaaggagagttaattattgatgatggtgccaagaaagcattaattaatggaaaaagtctattggcagctggtatcaagaaggttaatggtgattttaaaaaaggtgatcatataaaaattttagataataaacgtaaagaatttgctagaggcttgagttcattctcatcaaatgagataaataaaattttaggatgccactctaatgagataaaaaagattcttggctacgtttcaaaatctgaagtggtccataaagacgatatggtaaaaatatga

SEQ ID NO: 249697 - DNA, 508 bp, Unknown
  Bacterial polypeptide expressing nucleotide sequence isolated from the Sargasso Sea
tatgagtagtaaaactatagttataaaaattggcacaaacaccttgtttgaagaaaatgttcttcgagatgatgttattgattcactggctgtttcaataaatgaattgagaaaagaaggtatcaattttgctattgtcacatcaggtgcagtacagtctggcgcaaatgagttaaatctatcagaacgaccaaaaaacctcaaagagttacaggtagcatctgcagttggtcaagtcagtcttattaacaaatacaaggaaatatttaattctcgtcaattaaatattgctcaagttctaatctcaaaaaatgtactggaagacagaaaccagttcattaacactacagaggctttgaatggtctcatatcaaagaatattattccagtgattaatgaaaatgatgtagttgcaactgaagagttaaaatttggagataacgataggctttcagcaattgtctcaattttacttaaagctgacaaattgggtagtaattacagataa

SEQ ID NO: 249698 - DNA, 778 bp, Unknown
  Bacterial polypeptide expressing nucleotide sequence isolated from the Sargasso Sea
gatgaataaaaaattcacagaattagccaaaaaatcaaaagttattgtcatcaaagttggctctaatattttagttaatgaaaagcatgtgctgagaaaaaaatggctcacctctctaattgaggatgttcagaaactccaaaaaaaaggatctaaaattattatcgtctcctctggtgctatcgctcttgggagaaatattctctccaaaaaaaagttaactaatttgcatgaaaagcaagctgctgcatctataggtcaaatacaactctcacagcaatggcaaaaagcttttgctaaattcaatattcaaagttcacagatattaattacagctgaagatttaaatgaaagaagaaaatatctcaacatacgaaatacaatttactctttaatggatttaaatgttgttccaattattaatgagaacgacactacctcaacagaagaaattcgatttggtgacaatgataaactttcagcaatgattgcgaatgcactatctgctgaattattaattttattatctgatgtgaatgggctttatacagccaatccaaaaaaatcaacagatgctaagttgattacatctgttgaagaagtggatcaagaaatagaaaaatatatagataaagatttgagtgaatttggttctggtggaatgttagcaaaagtaaatgctgctaagctttgtattcagtctggatccacaatgataatatcaaatggactagtcaataatccactaggtaacattcatccaacatcctcaacatgg

SEQ ID NO: 249699 - DNA, 911 bp, Unknown
  Bacterial polypeptide expressing nucleotide sequence isolated from the Sargasso Sea
taattgtacttcgggtgctgtaggcttaggggcggcaaaattaaattataaaagtagaccaaaatctttaaagaggttacaggttgcatctgctgttggtcaaatcgaattgattaaccaatatgaaaaaatatttaaagaaaaaaatttacatattgcacaagttttaattacaaaaaatttgatagatgatagagagcaatttgttaatacaacgcaagcattaaatgaattgttgtcacaaggaattattccagtaattaatgaaaatgatgttgtagctacagaagagcttaagtttggtgataatgacagattaagcgcaattgtatccataattgtaaatgcagtaaaacttataattattacaaataaagagggattatataatttcaaccctgatcaaaataaagatgcaaaaaaaatcgattatatagaatatgactctaatcaacttaacgatttgatacccttatcatcagctggagatggtatgggtggattttcaacaaaaattatggcttctcagatctctggtttttcaggtataccaacgcatataatttcttggtcaaaatctaatttatcaaaagcaattttgaatgcaaaggtaggaacctacattaccgcatcaaatgaaaaaatcagattaagaaagttatggattgcatatggaatggcttcagtttcaaatgtatttattgatgagggagcagctagtgcacttcaaaaaaatgcttcactcctatcaaaaggagttattagttttgacaactcttttaaaattggtgagggattatcaatagtttcagataaaaaaattgtagcaaaaggcatcgcaaaaattaacagtaattcaattgatgagagtagtttattagttcataaagacgatttaattattctataaa

SEQ ID NO: 249700 - DNA, 509 bp, Unknown
  Bacterial polypeptide expressing nucleotide sequence isolated from the Sargasso Sea
tatgaaactagaagatacaaaaagaattgtaataaaaattggttcagccattttatttgatcccatatctggaagtttaaataaagactggctcaacagtcttgctgaggatgtaaaatttctacgagaaagagaaaaagaagtcattattgtttcttctggtgcaatagcaatgggcgcaaaagacttaaatcttgatatgaaaaatatgaaattagatatgaaccaagccgtatcgtccgtaggtcaaatacatttgatgagctcatttaaaaatgcttttgaacaaaatgaaataaaaatttctcaaatcttacttactcttgatgatacagaacaaagaagaaggtcaattaatgcaagaagaactattgatacgctacttaaacttggaatagttccaattgttaacgaaaacgatacaatagcaacgacagaaataagatatggcgataatgatcggttggcctctagagtcgctcaaatatcaagctctgattgttttattc

SEQ ID NO: 249701 - DNA, 1087 bp, Unknown
  Bacterial polypeptide expressing nucleotide sequence isolated from the Sargasso Sea
aatgtatatagaaaatgctaaaacaattgttataaaaattggttcttcaaatattgttgataacagaggaaaactaaaagaaaaatggcttaatagccttgttaaagatcttaaggaacttgcaaataagaaaaagaatattgtaattgtttcatcgggagcaatagctttgggtttaagttatttaaaaataaataaaaaaaaaattaaacttgaaatgagtcaagcgatcgcatcaattggtcaaatacatttaacaaatgtttacagaaagatttttgaaaaaaataaaattaagattggtcaaattttgatttctttggatgacacagagcaaaggagacgagctataaatgcaaaaagaacttttgaaaatttatttaaactaaaagcagttcctgtagtaaatgaaaatgatactaccgcaacatcagaaattaagtatggagataatgatcgtctggctgctagagttgcacaaataattagtgctgatgtgcttataaatttatcaaatgtagatgggttatatagtaattcatctaacaaaaaaaacataatttcagaagtgaagaatatagatgataaaatttatgcatttgttgaaaataaaaagaataattatggatcaggtggtatgttgacgaaattacaagctgcaaaaatttgtataaattctggttgctacatggcgattgctaatggttctaaaaataatccaataaaaacacttttaaaaaataataaatgcacatggtttatcccaaaagtttctagtttgcatgctagagaaaaatggattgtaagctctataggtagtgatggaaaaatttttattgatgatggtgctataaaagcacttaaaaacggtaaaagtcttttgccagcgggtataatcaaaattcaaggtaattttgtaaagggagataatattcttgttgttgataaaaatggaaacgattgtgccagagggttaacatctttttcatcaattgaaattaacaaaattaaaggattgaagacagaccaaatagaaaaagttcttggatatgcgagtaaatcggaaattattcatagagatgatatg

SEQ ID NO: 249702 - DNA, 691 bp, Unknown
  Bacterial polypeptide expressing nucleotide sequence isolated from the Sargasso Sea
gttgctactgaagaaataagatatggggataatgacaggctagcagcaagagttgctcaaatggctgatgcggatttgttaatacttttaagcgatgttgacggactttatgatgacaatccatttaaaaataataatgcaaaaaaaataaaagttgtaactaagatagataaaaagattgaacaaatagcaaataatcaaacttcaaatttaggaagcggtggtatggcaacaaaaatattagctgcaaaaatatgtatgaataatggatgtacaacaattataactaatagttcaaaaaaaaatccaattattggaacctcttcaaataattcaacaatatttaaatctaaaatcactccatcatcctcaagaaaacaatggttgttaaaccacctgcacccaactggaactataaaaattgatgaaggtgcatacaaagcaattataaataataaaagccttttaccagctggaataattcatgttggtggtaattttgataggggagatatcataacaattctaacatcaaaaaatattaaaattgctataggaataagtgcttatgatgtaagtgatgcaaaaaaaataattggaaaaaatagtaaagaaataaaaaatattttaggttatgaaggaagagatgaaatcgtacataaagatgatttagtaaaagttgcattatgaa

SEQ ID NO: 249703 - DNA, 798 bp, Unknown
  Bacterial polypeptide expressing nucleotide sequence isolated from the Sargasso Sea
gatgaataaaaaatttttagaattagcaaaaaaatcaaaagttattgtcattaaagttggctcaaatattctggttaacgaaaagcatgtgctgaggagaaaatggctaaactccctcattgaagatgttaaagaactccaaaagagaggttctaagataatcattgtctcatctggtgcaatcgctttaggtaggaatatactctcaaaaaaaaagttgactaatttgcatgaaaagcaggctgctgcatcaataggtcaaatacaactctctcaacaatggcaaaaagcttttgcaaaattaaatattcaaagttctcagattttaataacagctgaagatttaaacgaaagaagaaaatatttgaacatcagaaatacaatttactctctcatggatttaaatgttgttccaataattaatgaaaatgatactacctcgacagaagaaattcgttttggagataatgataaactttctgctatgatcgcaaatgccctctcagctgagttattaattttattgtctgatgtgaatggtctgtatactgcaaatcctaaaaagtcattacaagctaaactgattacatctgttgaagaggttgatcaacaaatagagaaatatattgataaagatttaagtgagtttggttctggtgggatgttggcaaaaatcaatgctgcaaaactctgtattcaatccggatccaccatgatcatatcaaatggtttggtgaataatcctttgagtaagattgatcctcaatcttcaacatggtttcacccttccaaaaatat

SEQ ID NO: 249704 - DNA, 1141 bp, Unknown
  Bacterial polypeptide expressing nucleotide sequence isolated from the Sargasso Sea
atggcaacaaaaaataaattaagaatagtaattaaaattggaagcaatttaatcacagaaaatgaaaacattttgaattatgaagtaatcaaaaacttatgtaatcagattgctactattcaaaaagatcataatcaagtaattattgtttcttcaggtgcagtagctgccggttctcaatacctttctaaatttgaaaaagaaataaaaataaataataattctattgtccaaaagcaattacttgcttcaatcggtcaaccaatactaatgaatgcttatgaaaaatatttttctcaaagctcaatcatgatttctcaggctctgttatcacgagaagattttgagaatagattaggttacttaaatataagaaatactcttagcgaattactatctcttaatgttattcctataattaatgagaatgatgtagtgtcaactgaagagttaatagatagagcttatggtgataacgatagattatcagcgatggtttcaaatgcaatagatgctgacttattgattttactaggcaccattgatggtctatatacttctgaccctaatatagacaaaaaagcaacaaaaattggtattgttgaaaatattaccgatgaaatcataaattatgctcaaggttcaattgatggaattggatctggtggaatggcttcaaaaattcaagctgcaaatatttccattaattctggcacagaaatgtatatagcttcagggctagaaaatgatgtaataaaaagaatcatttccggtgaaattataggaactaaatttttatccaaacagtctttgaatgaatcaagaaaaagatggttaatgactggctattcttcatctaaaggtgatatcagtttagatgatggggcaataagagcaataaaaaataggagtagtattttgccaccaggaataataaatactacaggtgattttgatagaggagatattataggaataagaaactcaaatgataaaataattggttggggtatttcaaattattcatctaaagaaattagtaaaataaaaggaataaacagctcaaaaattattgaagtagttgaaaaaaattatggttcagaggttattcataggaataatttagtacttaccctttaga

SEQ ID NO: 249705 - DNA, 475 bp, Unknown
  Bacterial polypeptide expressing nucleotide sequence isolated from the Sargasso Sea
atgattaataagtataaaaaaattgtaattaaaattggttcatcatcaattattaatgaaagtaataaaaaaataaaaactagttggttaaattcaatttgtaaggatattgcttttttacatcgtacaaaaaaaattattgttgtttgttcaggtgcaatagccttgggttctaaaattataaataataaaaagtttcttcaacgcctagaggataaacaagcggctgcagcaattgggcaaatagaattagccaatcattggcagcaaactctaaaaaaaaataagataaactcagctcaaatactacttacgcttaatgatagtgaggttcgtagacattatcttaatgtaaagaaaactattaatgctcttcacaaaaaaaatattattccaattattaatgagaacgatactgtggctactgaagaaataagatatggcgataatgatagactagcatcacgagttgctc

SEQ ID NO: 249706 - DNA, 1108 bp, Unknown
  Bacterial polypeptide expressing nucleotide sequence isolated from the Sargasso Sea
atgtatcttaaaaattctaaaataattgttgtgaaaatcggttcttcactaattgtagataaaaataaaaaaattagaaagaaatggctatcaagttttgcaaaagatatcaaaaaattaaaggatagaaatcgaaaagtagtaattgtgagttcaggtgcaatagctcttggttgtaaaaaaatgaattataataaaaaaaatattaaactagatcaaagtcaagctattgcatctataggtcaaattgagttaatgaatttattttcaaaaacatttgcaagatttaaactttacatttctcaaatacttcttactcttgaagatacagaggaaagaaggagatctttaaatgccaaaaggacttttgaaaatttatttgacttaggatttatcccaatagtaaatgaaaatgatactatagctacaacagaaataaagtatggagataacgataggttggcatctagagttacgcaaattactaacgccgataccttaattcttctttctgatgttgatggactttacacaaaaaaccccaaaatttttaaagacgcaaaattacttaagatagttaaagatttaaaaaaagatttaagcaatgtaaatattaaaggtatgaatgaatttggtagtggaggtatgcaaactaagattgaggccgcgaaaatttgtcaactagcaggtagtagtatggtcattgcaaatggtctacataataacccaatcacaaaaataattgagcgaaatgagtgcacatggtttagtcctaaggtctcaaaacttgacgcgagaaaaaaatggataataagctcgatagcaccaaaaggagaaattattattgatgatggagcaaaaaaagcgctacgatcaggcaaaagtttactagctgctggaataaaaaaaatttcaggaaaatttaataaaggtgatcatataaagattttagataagcagaatgttgaatgtgcgagaggattaagttcattcacttctgatgaaataattaaaattatgggtcatcattcaaatcaaattgaaaaattattaggttatgtttctaaatctgaagtaattcataaagatgatatggtggaagtttaaa

SEQ ID NO: 249707 - DNA, 631 bp, Unknown
  Bacterial polypeptide expressing nucleotide sequence isolated from the Sargasso Sea
atgattgatgctgatttacttatcctactaagtgatgttgatggattatacgataaaaatcctaacaaaaataaagatgcaaaaaaaattaatgaggtttttaaaataaataaaacaatagaacaaatggccaatgcccaaacatctagtttgggtagtggaggaatggtaacgaagattgcagcagcaaagatatgtatgaataatggatgtgataccatcataacgcatagtgaaaaaacttatcctttatcttctatttcacaaaataattcttcaatattttttgcaaacaaaaacccttcttcctctagaaaacaatggttattaaatcacttgcattcttcaggttttattagaattgatgaaggcgctttaaaagctgtaaaaaataataagagtcttttaccagcagggattatagaagttggtggaaattttaatagaggagatgtgattagtgtctactttactaagaaggagaaaattgccattggcatatctgcttatgatattaatgaagccaaaaaaattataggcaaaaaaagtaaagaaattcctaatatattagggtatgaaggaagagatgaaatcatccataaagatgatttggtgaaaattattttatgaa

SEQ ID NO: 249708 - DNA, 943 bp, Unknown
  Bacterial polypeptide expressing nucleotide sequence isolated from the Sargasso Sea
tatgcctcttaaaaattctaaaattgtagttataaaaattggctcatctctattagttgatagaaataaaaaaatacgaaaaaaatggttatcagcatttgcaaaagatgttcaaaaattaaactctagtaaaaaaaaagtgatcattgttagctcaggtgccatagcattgggttgtataaaaatgaattataataaaaagagtttgaaattagataaaagtcaagcagtagcatctattggtcagatagaattaatgaatctattctctaaaattttcttaaaacacaaactaaatatttctcaaatattattaacactagaagatactgaggaaaggagaagatctctaaatgcaaaaagaactattgaaaatctttttgatcttaattttattccaattgttaacgaaaatgacacaatagcaactactgagattaaatatggagataatgacagacttgcatcaagagtagctcaaattacaaatgctgatactttagtattattatctgatgttgatggtctatatgataaaaatcctaagttatttaaaagtgcaaaactaattaaaaaagtagaaaacttaaatcaagatttaagaaatataaactttaaaggaaataatgaatttggtagtggtggaatgaatacaaaaatagaagcagctaaaatttgtcaattatcaggatgtaatatgataattgctaatggcttatattcaaatccaatagataaaattcttaaaaatcaaaattatacattgttcatatctaaaacatctaaattagatgcaagaaaaaaatggataataagttcaatatcaccaaaaggagaacttataattgatgatggagcaaaaaaagctttagctaatggtaaaagtttattagcagcaggtattaaaaacgtaataggaaaatttaaaaaagggaccatataa

SEQ ID NO: 249709 - DNA, 1108 bp, Unknown
  Bacterial polypeptide expressing nucleotide sequence isolated from the Sargasso Sea
atgcatcttaaaaattcaaaaattatagtaataaaaattggatcatcactgattgtagatagtaaaaaaaagataagaaaaaaatggctatcttcttttgctaaagatattcaaaaactaaaatctaaaaataaaaagattatcattgtaagttctggagcaattgcacttggatgtaaaaagatgaattacaataaatcaaatttaaagcttgataaaagtcaagcaatagcctctgtaggtcaaattgaactaatgaatttattttctcaaactttttcaaaattaaagattaatatttcacaaattttgctaactttggatgataccgaggagagaagaaggtcaataaatgctaaaaggacatttgagaacttatttaagttggattacatacccatcgttaatgaaaatgatacaattgcaacgtcagaaataaaatatggtgataatgatagacttgcatctcgtgttgcacagataactaatgccgatactttaatattattatccgatgtagatggtcttttcacaaaaaatccaaaattatttaaagacgcaaaattaataaaaaaagtgaataatctagacaaagatatgaaaaaaatttacataaaaggggtaacagagtttggtaagggtggaatgaataccaaaattgaagctgctaagatttgtaatttggcaggatgtaatatgattattgcaaacggattatatttaaatcctatacaacaaattgaaaaaaagaatatttgtactttatttgagtcaagaatatctaaattacatgcacgaaaaaaatggataataagttctgtttcaccaaaagggacacttgtcatagatgatggtgctaaaaaagcactagttggtggtaaaagtttattagcagcagggattattaatttatcagggaaatttaataaaggtgatcatataaagattctagatactaaaaacaaagaatttgcgagaggtctaagctctttttcctctgaagaaataaataagataatgggttgtcactcaaatgagattgaaaaaaaacttggatatataacaaaatctgaagttgttcataaagatgatatggttgaggtttaat

SEQ ID NO: 249710 - DNA, 394 bp, Unknown
  Bacterial polypeptide expressing nucleotide sequence isolated from the Sargasso Sea
caaaggagacgtacccaatccgataacagagcttgagagcggagcaaattgcacttggtttaagccgaatgtagatccacaaaccgccagaaaaagatggatatcatcacagaagtctgttggtaaattgatcattgatcagggcgctgtgacggccttaatagatggaaagagccttctccctattggcgtaaccagtattgatggtaatttttcaagaggtgatgtagttagtatttattcaactaatggacgtgaattggcgaaaggtatatgcgcatatcctgcagtagaagcgaaattaattattggccaaaatagtaatgaaatagaaaccattcttggttatgctggtagggctgcagtcattcaccgagacgatttagcaatttaa

SEQ ID NO: 249711 - DNA, 790 bp, Unknown
  Bacterial polypeptide expressing nucleotide sequence isolated from the Sargasso Sea
atgaaaaataataattcatttaatattagcaaaagattagtagtcaaaattggctcgtcacttctaacaaatcaaaaaggtggagtaaataaatctgtcttaaaaaatgttgtatctgacattgtttggctaattgataaaaataaagaggttattgttgtttcatctggagctattgcccttggaagaggacagttaaaacttcaacaagaattaacgcttaatgaatcacaagcagttgctgcaaggggtcaaatagaactaattactgcttggaagaatgaatttagaaaacataaattacaagttgctcaaattttattaactccctctgatactgaaaataagaaaacgtctgataatgcagtagccactattgaaaatctaataagttttaaatgtattcccataattaatgagaacgatacaacatcaactgatgaaataaagtttggagataatgacattcttgcatctaagatatctaaactcattaaagcagatcatctaatcctattatcaaatgttgatggtttatataaagaaccaccgagaaataaaaaaaatggtgtgctcatatctgaaataaaatctattactaagtctattagggatatggctggaactgcatcaaggcttggtataggcggaatgatttcaaaaattaaagctgcagaaatatgtatgaaatcaaaatgttcacttatcataacttctggtttaaagaaggaccctattaaaagtctagcaagaaaaacttctaaatcaacgagatttatatctacataat

SEQ ID NO: 249712 - DNA, 1108 bp, Unknown
  Bacterial polypeptide expressing nucleotide sequence isolated from the Sargasso Sea
atgtatataagtagagctaaaacaattgtaattaaaattggctcttctttgttaataaatgacaaaggagtgattcgtaaaaaatggttatctgaatttggtaaagatattaaagaattaatagatcaaaaaaaaaatgttattgtagtaagttctggagctattgcattgggatgtaagaagttaaatttaaataaaaaaaatttgaaattagataaaagtcaagcggttgcatctataggacaaatagaattaatgaatttgtttaaaaaaaatttgtcttctaaaaaaataaatttatcacaaattttaataactttagaagatactgaaaaaagaagaagagcgattaatgcaaaaagaacttttgaaaatttatttagtctaggattcgttcctattgtaaatgaaaacgatagtatcgctacatctgagattaaatatggtgataatgacagattagcttcacgtgttgctcaaatttcaggtgctgattgtttaatattgttatcagatgttgatggactttattctaagaatcccaaattgaataaaaacgtaaaactaataagagagatcaaaaatatcgacaataatattgaaaaaattgcgacaaaaagtacagggcaatacggtacgggaggaatgaaaacaaaaatcgatgctgcaaaaatttgtcaattttctggatgttatatgtgtatagcaaatggtctaaatttaagaccaattaaagaaattataaagaagaatttttgtacttggttcttacctagattgtcaaaacttgatgcaagaaaaaaatggattatcagttcaatatctcctaaaggcgaattgattatagaccaaggggcaattagtgctctaaaaaaaggcaagagtctattagcagcaggagtaaaaaaagttaatggtaaattcagcaaaggtgatcatattaagatattggataaaaatatgaaagaatatgcaagaggtcttagttctttcacatctgaagaaatttctaaaatacaaggacaacattcaaacaaaattagtgagttgttgggatatatttcaaagtctgaagttattcataaagatgatatggtaatattataaa

SEQ ID NO: 249713 - DNA, 712 bp, Unknown
  Bacterial polypeptide expressing nucleotide sequence isolated from the Sargasso Sea
tatgaaaagtaaaaaaaatatagttttaaaaattggaacaacttcaattattaaagatggagagttaaacaaagatttaattaattctcttgcgtcttctataaaagaacacaaacaaaatggattcaattttattattgttacatctggtgccgtacaattaggtgcaaatgagttgaatttagaacaaagaccaacggctttaaaatctctacaggttgcctcttcagttggacaaattactttagttaactcttttaaggaaatatttaaaactaaagacttaagaatagctcaagtattaatgtctaaaaatgttcttgaagatcgaaatcaatttataaatacatcagatgcactaaatgaattaatagcacaagatataatcccagtaattaatgaaaatgacattgttgcaactgaagaattaaaatttggagataatgatagactttctgcaatagtggcaattgttgttaaagctgaaaaattagtcttaataactaatcaggaaggattatttgattctgatcctgagaaatcaaataatgcagaaaaaataaattatattgagtatgactcagaagagttagctgaattgattccactatcagcaacaggagaaggtgtgggaggtttttcaacaaaaattatggcttcacagatggctgggttttcaggtattccaacgacaaattattacttggtctga

SEQ ID NO: 249714 - DNA, 782 bp, Unknown
  Bacterial polypeptide expressing nucleotide sequence isolated from the Sargasso Sea
catgtatcttaaaaattttaaaactatagttgttaaaattggttcttcattattgatagatgataaaaatattgtaagaaagaaatggttatctgaatttacaaaagatattaaacaattattaaaagaaaaaaaaaatgtaattatagtaagttctggggccatagctcttggatgtaaaaaactaggacttaacaaaaaaaatttaaaattagataaaagtcaagctgttgcatcaatcggtcaaattgaattaatgaacttatttaaaaaaaattttggctctaaaaaaattaacttatctcaaattttacttactcttgaagatactgaacaacgaagaagagctattaacgctaaaagaacatttgataatttatttgaattaaattttgttccaatcgttaatgaaaatgacagtatagcaacaagtgagattaaatatggtgataatgatagattagcatctagagtagctcaaatttcaaatgcagactgtttaatacttttgtctgatgtaagtggattatatacaaaaaatccaaaaatttataaagatggaaaattaattaaagaagtaaaaaatataaattcaaaaatcgaacaagtggcaagcaaaagtattggagtgtatggtactggtggcatgaaaacaaaaattgatgctgcaaagatttgtcaattatctggttgttatatggtgattgcaaatggtttatcaaatagaccaattaagaatatctatgaaaaaaatatttgcacttggtttttaccaaaaattt

SEQ ID NO: 249715 - DNA, 1108 bp, Unknown
  Bacterial polypeptide expressing nucleotide sequence isolated from the Sargasso Sea
tatgacagactctccccgtaaacgtattgtcgtcaaagtggggagcgccttaatcgcgccccacaagcaaggttgcagtagccattatctcttgggtatcgcccagtttattacttactgccgtgtccaaggtatccaagtggtactggtttcatccggctcggttgccgctggttggcatcattttgagggccaagctcagccgagtgtcacggtgaaaaaggccatggcggccgcgggtcaggcggatatgatggcgacgtggaataagctatttgattttcccaccgcccaactgctactgacccatggcgacttacgtaatcgcgagcgttatatcagtattcgagacacaatttttagcctgctcgaccacggtttaatgccgatcatcaatgagaatgatgccgtgaccgccgacaaacttaaggttggcgataacgataatctctcggccatggtggcagctgcggccgatgccgacaccttgatcatttgctcggatgtggatggactctatgatcaaaatccccatgagcatcccaatgccaaattgatcaagcaagtgactgaaatcaatgcagagatctatgcgatggcgggaggcgccagcagcgatgttggcaccggaggaatgcgcactaagatccaagccgccgaaaaagccatctcccatggcattgaaacctttattatcaatggctttaatgccgactcctttagccaactgctaaaggggcaaaatccgggcacccttttcactccctatgaaaaaccgatgcaggagcatttgcattggatgacccacacctcgcaagcgcagggcgaagtgatcgtcgaggatgattttgacctcgcgctcgatcagcacagcgagcaattaaccagcgatgatgtggttgaagtcaaaggggatttctcagtgggcgacactattctagtgcgtaaaggcgatggcactaagttagcaaaagccaaatctaactacagcagttgcctactgagttttattaccgagcaggatgatcaggcgtttgccagtgaattccagcaaaaaaccggccccatcatttccgataagaatatcgccattcttaaatccatttga

SEQ ID NO: 249716 - DNA, 1108 bp, Unknown
  Bacterial polypeptide expressing nucleotide sequence isolated from the Sargasso Sea
atgacagactctccccgtaaacgtatcgtcgtcaaagtggggagcgccttaatcgcgccccacaagcaaggttgcagtagccattatctcttaggtatcgcgcagtttattacttactgccgcgtccaaggtatccaagtggtactggtttcgtccggctcggttgccgctggttggcatcattttgagggccaagctcagccgagtgtaacggtgaaaaaggccatggcggctgcgggtcaggcggatatgatggcgacgtggaataagctatttgattttcccaccgcccaactgctgctgacccatggcgacttacgtaatcgcgagcgttatatcagtattcgagacacgatttttagcctgctcgaacacggtttaatgccgattatcaatgagaatgacgccgtgaccgccgacaaactcaaggttggcgataacgataatctctcggccatggtggcagctgcggccgatgccgacaccttagtgatttgctcggatgtggatgggctctacgatcaaaatccccacgaatatcccaatgccaatttgataaagcaagtcactgaaatcaatgccgatatctatgcgatggcggggggcgcctgcagtgatgttggcaccggaggcatgcgcactaagatccaagccgccgagaaagccatctcccacggcattgagacctttattatcaatggctttaatgccgattcctttagccaactgctaaaggggcaaaatccgggtactctctttaccccctacgaaaaaccgatgcaggagcatttgcattggatgactcacacctcgcaagcacagggcgaagtgatcgtcgaggatgattttgacctcgcactcgatcagcacagcgagcaattaaccagcgatgatgtggttgaagtcaaaggggatttctcagtgggcgacaccattctggtgcgtaaaggcgatggcactaagttggcgaaagccaaatctaactacagcagttgcctactgagctttattaccgagcaggatgatcaggcgtttgccagtgaattccagcaaaaaaccggccccatcatttccgataagaatatcgccattcttaaatccatttgag

SEQ ID NO: 249717 - DNA, 832 bp, Unknown
  Bacterial polypeptide expressing nucleotide sequence isolated from the Sargasso Sea
tataggaaaatattcgagaaaaataaaattaatattggacaaatattaatctcacctgatgacaccgagcaaagaagaagagcaattaatattaaaagaacttttgaaaatttatttaaattagatgcgatacctattgttaatgaaaatgatacaactgcaacctctgaaataaagtatggagataatgatcgtttagctgcaagggtagctcagattattagtgcgaatgttttaattaatttttctgatgttgatggcttatatgagtcttcaaaatataaagaggtaattaaaaatgtgaatgatattaatgaaaaaattttttcttttgtggataataaaaaaactgcttatggatctgggggcatgtcaacgaaattggaggctgcaaaaatttgtatgagtgcaggctgtcatatggctatagccaatggaaaacacttcaacccactcgaaagattgattaaaaaaaatcaatgcacgtggtttatcccaaaagtttcaagtttagatgcaagaaaaaaatggatagccagctcaataggatcaaatggaaaaatatttattgataccggagctcataaagccctagaaaatggtaaaagtttactaccggcaggaattataaaagtagaaggtaaattttcaaaaggtgataacgtgctgatcttagatgatggtgggaaagcactggcaagaggcctcacctcattttcatcaatcgaaattgataaaatcaaaggactaaaaacagatcaaatagaaagtattttaggatactttagtaagtctgaaattattcacagagatgatatggtgaagttatgat

SEQ ID NO: 249718 - DNA, 674 bp, Unknown
  Bacterial polypeptide expressing nucleotide sequence isolated from the Sargasso Sea
aatgattaaaaaatataaaaaagtagttttaaaaattggttcaaattcaattgttgattcgaaaacaaaaaagatcaaatctaagtggttagataatttatgtaaagacattgcagaattgaataaaacaaaaaaaattgtgattgtgtgttctggcgctattgctttaggtgcgaaaagtatttcaaatacaaagttaagaaaattagaagataaacaggcagcagcttcagttggtcaaattgaattagcccatcaatggcgaaataaactaggaaaatacaagataggtgtttctcaaattttattaacattagaagatagcgaagaaaggcgacgatatttaaatgctagaaatacaatatcatcattacaaagtaaaaacataatcccaatcattaatgaaaatgacactgttgctactgaggaaattcgctatggtgataatgatagacttgcagcccgagtagcacaaatgattgaagcggatttattaattttattaagtgatgttgatggtttatatcaaggtaatccaaaaaaagataaagatgtcaaaaaaatttcagaggtatttaaaattgataaaaaaattgaagaacttggtaattatcaatcttctgagctaggtagtggagggatggccacaaaaattttagcagcaaagatatgtg

SEQ ID NO: 249719 - DNA, 874 bp, Unknown
  Bacterial polypeptide expressing nucleotide sequence isolated from the Sargasso Sea
ccggccccatggtcagacggtggcccaggtgctcctgacccgcagtgatctggcatcccgccgccgtttcctgcaggccagccgcaccctgcaacagctgctgctctggggggtggtcccgatcgtcaacgaaaacgacacccttgccaccgaagagctccgctttggagacaacgacacgctctcagcccttgtggccgtcgccatcaaggccgatgagctgatcctgctcaccgatgtcgatcggctctactccgctgatccgcgcagccatgccgatgccaggccgatcagcgtggtacgcagcctgaatgaacttgaagccctcagcaagggtgccggcgatggcggccgctgggggaccggcggcatgacgacaaaacttgcagcagcacgcattgccacagccagtggcatcgcggtccgcctggccgacggccgtgaccctggcctgatcgaacaactgctgcagggcgcgagccacggcacccgcttcctgcctagtcctgagccgatctccgatcgcaagggctggctggcccatgcgttggttccccaaggtcaggtgcaggtggatgccggcgccgaacgtgccctgctggagcaaggggcctcgctgcttgcggttggtgtgcgctcgattgagggcgacttcgacactcaggctccactgcgcattcttggcagcggcggccaggagctagcgcgggggctgagcagctgcagctccagcacgctgcaacgcatcctcggcctgcgttcagggacgatcagccgaacggtggattccgaactcaatggggtggtggtgcaccgtgaccaattggtcatcaccgctccgccggggggacctacgatcccgccgcccctttaa

SEQ ID NO: 249720 - DNA, 613 bp, Unknown
  Bacterial polypeptide expressing nucleotide sequence isolated from the Sargasso Sea
atgaaaacttgggttataaaaattggtactagtattttaagaggaacagaggagacatctacagaagaagttatcgaaaacctttctagatcctttacaagttttctttcaaaaggaaataaattaattttagttactagtggagccgttggattaggttgccagaagttaaatattaaaacaagaccaaatgatttaagtacccttcaagctactgctgcagtaggtcaagttaatttaatgtccttatacgataaagtatttaataaattaggtcataatattgctcaaattttaataactaaagctgatttcaattcaagagaatcctttaataacgcttctaaaactttaaaaaaattaatcgatttaaatgttattccaatagtaaatgaaaatgataccgtggcaaatgaagagcttaaatatggagataatgataccctctctgctttagttgccttggctataaatgctaacaagcttattttattaaccgatattgaaaatctatactcaaaagatccacgtaataataaagatgcgcaacctattaaagaagttcataatagtgaattaaaggaaattaaagataaaaatattcaaaactcaa

SEQ ID NO: 249721 - DNA, 910 bp, Unknown
  Bacterial polypeptide expressing nucleotide sequence isolated from the Sargasso Sea
atgagtaaaaaaaataaatcgatatggatagtaaaaattggtagcgcaataattacaaggaaaaatcctgggctaaatagaaatttaataaaaaatctcgctgagcaagttgctaaattaaataaaaaaaatataaagtttatatttgtttcatcagggtctattgccgaaggaatgaaaaaacttaagttgtcaaaaaggccaaaaagtattacttatcttcaagtactcgcttcaataggtcaaatgagcttagtacaggcttatgaaactgagtttaaaaagcataaaatctttacagcacaagttttacttacacacgacgacttaaattttagagaaagatatttaagcataagatcaaccgttaatgatcttattgatagaaaaataataccggtaatcaatgaaaatgatgtaacatcttctcaagaaattaagtttggagacaatgatacacttgcagcattagtagcaaacttagttgcagctgataagcttattatacttacagaccaaaaaggattgtacgaagatgatcctaagcttaataaaaatgcaaaattaattaaaaatatcgatttaaatgataaaaaaattcaggaatatgcaaaatcaagttcaagtattttaggtagaggaggaatgattacaaaaattgaagctgctaaaaaagcctctaaatctggaactgaaacaattatcgccaatggtaaaactaaagatattttatttaaaatatttgaggataaaaattatggcacattaataaaaaataactccaataagattaataataggaagctttggataattaactctgctgctgcaaaaggcaagatatacattgacgatggagcaaaagaggtactctttagcaaaggtaaaagtcttttaccaattggaataa

SEQ ID NO: 249722 - DNA, 951 bp, Unknown
  Bacterial polypeptide expressing nucleotide sequence isolated from the Sargasso Sea
tattgttgtttgttcaggtgcaatagctttgggttctaaaattataaataataaaaagtttcttcaacgcctagaggataaacaagcagctgcagcaattgggcaaatagaattagccaatcattggcagcaaactctaaaaaaaaataagataaactctgctcaaatactacttacgcttaatgatagtgaggttcgtagacattatcttaatgtaagaaaaactattaatgctctacacaaaaaaaatattattccaattattaatgagaacgatactgtggctactgaagaaataagatatggcgataatgatagactggcatcacgagttgctcaaatgattgatgcagacttattaatattattaagtgatgttgatgggctgtacacagagaatcctttaaaaaataaaaaagctaaaaaaattcaaaatatatataatatcgattcaagcattgaaaaaatggcaagtaaaaattactcattaataggaagtggtggaatggaaacaaaaattttggctgccaaaatttgtatgaatgcaggttgctctacaattattacaaatagtgataaaaaaagtcctcttaaaaatattaataaaaataattctaccttatttcatgctagcaaatcaccaaaatctaataggaagcaatggatcctcaatcaccttcatccatctggaagtataattttagataatggagcaatacgagctattaaaaacaataaaagcttattacctgcaggtgtaacagagatcaaaggccgatttaatagaggagatgttataagtatagtaaataatcaaaataaaaaatttggcataggagtaattgcatatagttcatctgatgctaaaaaaattattggcaaaaatagtaaagaaataaaaagaatattaggatatgaaggaagagatgaactaatacataaagatgattt

SEQ ID NO: 249723 - DNA, 579 bp, Unknown
  Bacterial polypeptide expressing nucleotide sequence isolated from the Sargasso Sea
cctggtggtcaaggtgggcaccagcctgctgagggctggtgatgagtttctgcaagcgctggcggccaatctcagcgcagagcgtcagcgtggcactcgcttgttgctggtgaccagtggtgctgttggcttgggctgcaacgaactgggattaagccaacggcctcagctggtggaggaattgcaggcggcagcagccatcggccaaggacaactgatggctcgctatgacgccgtctttcggccccatggccagaccgtggctcaggtgttgctgacccgtagtgatctgtcctcacgccggcgcttcatcaaggccagtcgcacgctgctgcaactactgagctgggacgtgctgccgatcatcaacgaaaacgacaccctcgccaccgaagagctccgctttggtgacaacgacaccctgtccgctctggtggccgttgccatcggcgctgatgaactgctgttgctcaccgatgtcgatcggctctattcagctgatcccaaagcgaatgcggatgccagacccattcggggagtccgtgatctcgatgagctcaatgccctcgatgccgccgc

SEQ ID NO: 249724 - DNA, 754 bp, Unknown
  Bacterial polypeptide expressing nucleotide sequence isolated from the Sargasso Sea
agaaatacaatatcatcattacaaagcaaaaacataatcccaatcattaatgaaaatgacactgttgctactgaggaaattcgctatggtgataatgatagacttgcagcacgagtagcacagatgattgaagctgatttattaattttattaagtgatattgatggattatatcaaggtaatccaaaaaaagataaagatgtcaaaaaaatttcagaggtatttaaaattgataaaaaaattgaagaacttggaaattatcaatcttctgagctaggtagtggaggaatggccacaaaaattttagcggcaaagataagtgctgaaaacggttgtgctacgataatcaccaatagtgataaaaacaaaccaatcagtgatattaataaaaaaaattcaacaattttttatcccttaacttctacaaactcgtccaaaaagaaatggttattaaatcatttaaaaccatcaggatccattattattgattcaggagctaaaaatgcaattttaaaaaataaaagtcttcttcctgcaggtgtaatagatatcaagggaaggttcaaaagaggcgatgtaatatctatcttagttgagaatggtcaaaaggtagcaataggcatatctgcttatgattttaatgatgcaaaaaaaattattggaaagaaaagtaaagaaatttataaagttttgggtttcgaaggaagagatgaagtggtacataaagataatttagttaagctttctacatgag

SEQ ID NO: 249725 - DNA, 807 bp, Unknown
  Bacterial polypeptide expressing nucleotide sequence isolated from the Sargasso Sea
aattattattaacacttgatgatagtgaaattagaagaagatatctcaatgctcgtaaaactattacatcactacataaaaaaaatgttattcctgtaattaatgaaaacgatactgtagcaacagaagaaattcgctatggagataatgaccgtctagcagcaagagtggctcaaatgatagacgcagatctgcttgtgttattaagtgatgttgacggattatatgactcaaacccgatcaccaacaaaaaagcaaaaaaaatatatgaagtatttaaaatagataaaaaaatagaagatatgggcaacacacaaagctcggatcttggaagtggagggatgtctacaaagatatgggcagctaaaatttgcatgagtaatggttgtacaacaataattactaataataatagatctaaaccaataactggaatttctatcaaaaattcaaccatatttcatgctaaaaatactcctacttcttcaagaaaaaaatggcttttaaatcatctacatccttcaggttctatatttgttgataacggagccgaaaaagcaatcatgtcaaacaaaagtcttcttccagctggtgtaactgatattaagggaaaatttaatagaggagatataattacagttttatcattaaaaaataataaaattgcaattggcgtctctgcgtatgatgtaaatgatgcaaaaaaattaattggaaaaaatactaaagatattaaaaaaattttaggttatgaaggtcgtgaagagattattcataaggatgatctggtaaaattaataaaatgaa

SEQ ID NO: 249726 - DNA, 535 bp, Unknown
  Bacterial polypeptide expressing nucleotide sequence isolated from the Sargasso Sea
catggaatatttaaatggtgcggcgagggtggtcgtaaaaatcggatcgtctctgttagtggatgataaaacaggctccataagatctgattggctacagtcactgtctgaagatattagagatatgcaatctaaaggtctagaagtggtaatagtatcttctggttctattgctcttggtcgaaaagtgctcagctggtcggagaaatcactgtcgttggaacaatcacaagcttctgctgcggttggtcaaattcagcttgcgcaagcctatcaggaggcacttgcgcaatatggtattaggacggctcagatacttgttacacttgaagatagcaaagataggcggcgttatttaaattctcaggccactgtagaaacgcttttagaaatgggtgttgtcccaatcgtaaatgaaaacgatactgtggctacagatgaaataaagtatggtgacaacgatcgtttggcggctcaggtctcagtaactattggagctgatctgcttatactcctgtcagatgtagatggattt

SEQ ID NO: 249727 - DNA, 817 bp, Unknown
  Bacterial polypeptide expressing nucleotide sequence isolated from the Sargasso Sea
aaatattgctcaagttctaattacgcttgaagatagtgaagtgagaagaagatatttaaatgcaagaaaaacaatcaacactctacttaacaataaagttattccggtggttaatgaaaacgatacagttgccactgaagaaattagatatggagataatgacagattagctgcaagagtagcacaaatgattgatgctgatttattaatacttctaagtgatgttgatggattgtatgataaaaatcctaaaaaaaataaagatgcaaaaaagattaatgaaattagtgtcataaacaaaactattgaaaaaatggctaattctcaaacctcaataataggtagtggaggcatgactactaaaattgctgctgcaaaaatatgcatgaataatggttgtgacacactgattactgatagtgaaaaaaataaacctctatcttcaattactaaagataattcttccatatttttagcaaatagaaatccatcatcatcacgtaaacagtgggtattaaatcacttacatccatctggttttattagaattgatgatggtgccaaccaagctattaaaaataataaaagtcttttgccagctggggtaattgaggttggaggaaattttaatagaggagatgtaataagcgtatattttcctaaaaaagaaaagattgctgtgggaatttcagcctatgacattaatgaggtcaaaaaaattattggtaaaaaaagtaaagaaattccaagtatcttaggatatgaaggaagagatgaaatcattcacaaagatgatttagtaaaaataatttcatga

SEQ ID NO: 249728 - DNA, 708 bp, Unknown
  Bacterial polypeptide expressing nucleotide sequence isolated from the Sargasso Sea
catggccctgcattcgctgatcgccgatgcgcgccgccttgtcgtcaaggtcggttccagcctggttaccaacgacggccgtggcctcgaccaggccgccattgcccgctgggctgcgcagatcgcggcgctacgggcggcgggcaaggaagttgtgctggtcagctccggtgccatcgccgagggcatgcagcgcttgggctgggccaagcgtccgaaagaaattcatgagttgcaggccgccgccgccgtcgggcagatggggctggcacaggtgtacgaatccgagttcgcgcgacacggcatccgcacggcgcaggtgctgctcacgcatggcgacctggctgatcgcgagcgctatctcaatgcacgttccacactgctcacgctgctgagcctcggtgtcgtgccgatcatcaacgagaacgacaccgtcgtcaccgatgaaatcaagttcggcgacaacgacacgctgggagcactcgtcaccaacctgatcgagggcgacgcgctgatcatcctgacggaccaacgtggcctgtacaccgccgacccgcgcaaggagccgggcgcccgctttgtcgacgaggcgcaagccggcacgccggaccttgagcagatggccggcggtgccggttcgagcatcggcaagggcggcatgctgacgaaattctggcggccaagcgtgctgcaaaatcgggcgcgcac

SEQ ID NO: 249729 - DNA, 698 bp, Unknown
  Bacterial polypeptide expressing nucleotide sequence isolated from the Sargasso Sea
tgatacagtacccacaagtgaaataaaatttggtgataatgataggctcgcagctagagttgcgcaaatgtcatcatcagatttactaatcttattatctgatatcgatggactttatgatcaaaacccacatcactctaaaacagctaaacatattcctttagttacagaaataaatgaagaaattatgaatatggctggatcatcccattatgaatacgcttcaggtggtatggtaacaaaacttgaggctgctaaaatttcaagtttatcagggtgtaatttgatcatttgcaatggtgagagcgagcacccaattttagagttatctaaaggaaaaaagcatactattttcaaagccaatgaaacgccattaacagcacgaaaaaaatggattgcagctggacttaatattttaggtaaattaatagtagataatggtgcatcaactgcacttaaaaatggcagttctttattacctgctggagttataaaggtagagggtttatttgaaaaaggtgacttggttgaaatactagatcaagacagaagaaatataggttcaggtctatcatcatataactctaaagaaattgaaattatttctggaaagaaaactcgtgatataaaaagttatctagggtatgaaggtcgagatgaactcatacatagagatgatttagttttgaaaaaataat

SEQ ID NO: 249730 - DNA, 555 bp, Unknown
  Bacterial polypeptide expressing nucleotide sequence isolated from the Sargasso Sea
tatgattatttctgaccaaaccggccttgttaacaaatcacaaagattaataattaaaattggctctgctcttttagtagatagcgatactggagaaatacgctatgactggctcgagaaaatggccgatgatattgccaatttgagatcaagaaacaaggaagttattattgtctcttcaggagctgtagcatttggaagtcgtcatctaggcattcatgctaaagctctaaaattacaggaaaaacaagcagcagccgctacgggacaaattagacttgcgcatgcttacgaaaatgccctgaataaacatggggtgactatagcacaaattctcttgtcacctgatgacacggaacagcgccgccgtcaccttaatgcaagagctaccatttccacgcttttgtcactgaacgttgtgcccataatcaatgaaaacgatacggttacaactaaagagcttagattcggtgataatgaccgtctaggtgcaagagtggcacaaatggtaagcgctgatactcttatacttttatcagatgtagacggcttata

SEQ ID NO: 249731 - DNA, 934 bp, Unknown
  Bacterial polypeptide expressing nucleotide sequence isolated from the Sargasso Sea
taaaatttcatgctttgtgcgctggtgttggcaaccggggccagtcctgctaaaacgttcgtttgatatcattttccccaattttgaatggcagagaatcatgagtgacagccagacgctggtggtaaaacttggcaccagtgtgttaacgggcggatcccgccgcctgaaccgcgcccacatcgtagaactggttcgccagtgcgcgcagctccatgccgcagggcatcgtattgttattgttacctcaggcgcgattgccgccggacgtgagcatcttggttaccctgaactcccggcaacgatagcctcgaaacagctgttggcagcggtagggcagagccgactgattcaactatgggaacagcttttctcgatttacggtattcatatcgggcagatgctgctgacgcgtgcggatatggaagacagagagcgcttcctcaatgcccgcgatacgctgcgtgcgctgctggataacaacatcgttccggtcattaatgagaacgatgcggtggcgaccgctgaaattaaagtgggtgataacgacaacctctcagcgctggcggcaattctggctggagccgataagctgctgctgttgaccgatcagcaggggctgttcaccgccgatccgcgcactaatccgcaggcggagctgatcaaagacgtgcacggtattgatgatgcgctgcgcgccattgccggagacagcgtctcgggtctgggaaccggcggtatggggactaaactgcaggccgccgatgtcgcgtgccgcgccgggatcgacaccataattgccgcaggcagcaaaccgggcgtcattggcgacgtgatggaaggcgtttccgttgggacgcgttttcatgcacaggcatctccactggagaaccgtaaacgctggatcttcggcgcgccgcctgccggagaaatt

SEQ ID NO: 249732 - DNA, 820 bp, Unknown
  Bacterial polypeptide expressing nucleotide sequence isolated from the Sargasso Sea
catgagggacaggggcagcattcgaaacaacgagagaattgtcgtaaagataggttcatcccttcttactgaagtcggatctggtcaattgcgttgggattggcttcgcgatctggttgtagatgtcgttgaattaaggaaaaacggttgtgatgtgttgctggtttcctcaggggcgatagcattgggccagggccatctaggcattaagagaagtatcttaaagttagaagagaagcaggcatccgccgctgtcgggcaaattctcttggctaacgcctacacagaagtttttcgtgcacatcatttgactgttgcccaattacttttaactcttggagatacagaggagcggcgccagtatctcaacgcgagaaatacaatggagacacttcttcacctcagtgcaatcccattaataaatgagaatgatacggttgccactcaggaaatcagatttggtgataatgatcgattggctgcccgagtcgcggaaatggcaaacgctgacctgttgatattgctgagtgatattgacggtttgtatacgaatgatccccggcttggcgctagccccgagcacatacccctggtcgaggagatttctgcagaaattgaatctatggcaggtccaagtaggtcagatattggctcagggggtatgagaacaaaaattgaggcggcaaaaattgcgaccgctgctgggtgcagtgtcataattgcttcgggaggttcaggtcgaattctttcggagctggacgacccgagtgttcggtgcacctggtttgcagcgcagcaatccccggtggcggcgcgaaaa

SEQ ID NO: 249733 - DNA, 871 bp, Unknown
  Bacterial polypeptide expressing nucleotide sequence isolated from the Sargasso Sea
aatgaatacctgggttataaaaattggtactagtattttaagagggacagaggaaacatctacagaagaagttattgaaaacctttctacatcctttacaaattttctttcaaaaggaaacaaattaatcttagtaactagtggagccgttggattaggttgccaaaaactgaattttaaaacgagaccaaaagatttaagtacccttcaagctactgctgcagtaggtcaagttaatttaatggccttgtacgataaagtatttaataaattagattataatattgctcaaattttaataactaaagctgattttaattcacgagaatcattcaaaaacgcttctaaaactttgaaaaaattaatagatttaaatgtcattccaatagtaaatgaaaatgataccgtagctaatgaagagcttaaatatggagacaatgataccctctctgctttagtagccctagctataaatgctaacaagcttattttattaaccgatattgaaaatctatactcaaaagatccacgtaataataaagatgcgcaacctattaaagaagttcataatagtgaattaaaagaaattaaagataaaaatattcaaaactcaaataatgaatgggggacaggcggaatttccacaaaattaatttctgccgaaatagccacaaaaggaggagttgaagtccaactagttgatggaactaataaaaaaaacttaattgaaatatttaatgataataagattggaactttattttatccagtagaaaaacctatagggaacaaaaaaagttggctttcacatgcaattcaaacagtaggtaagatcactttggatgatggtgcttcatttgcaataaaaaaa

SEQ ID NO: 249734 - DNA, 546 bp, Unknown
  Bacterial polypeptide expressing nucleotide sequence isolated from the Sargasso Sea
gatgataaacaattataaaaaaattgttataaagataggctcatcatcaattataaattccaaaacaaaaaaaataaattctaaatggatgaaaaaactttgtgaagatataaacaattatcacagagataaaaaaattattattgtttgctcaggagcaatagctcttggttcaatgttaataactaaaaataaagttttaagaaagctagaagataaacaggctgctgcatcagttggtcaaattgaattagctcatcaatggagaagacatttaaaggaacataaaattaatgtagcacaagtattaataacacttgaagatagtgaagtgagaagaagatacttgaatgcaagaaaaacaataaatacacttttagacaacaaagttatgcctgtagttaacgaaaatgatacagttgctacagaagaaattaaatacggggataatgacagattagcagcaagggtagcacagatgatagatgctgatttattaatactgctgagcgatattgatggattatatgataaaaatcctaaaaa

SEQ ID NO: 249735 - DNA, 691 bp, Unknown
  Bacterial polypeptide expressing nucleotide sequence isolated from the Sargasso Sea
aatgaaaacctgggttattaaaataggtactagtattttaagagggacagagggaagatctactgaagaagttattgaaacactttgtaaatcctttacaagttttattttaaaagggaacaaattggttgtagtaactagtggagcagttggattaggttgcaaaaaattaaatattaaaacaagaccaagtgatttaagtaccctgcaggctactgctgcagtaggtcaagttaatttaatgtctttgtacgataaaatatttaataaattaggtcataatattgctcaaattttaataacgaaagctgactttaattcgagagaatctttcaataacgcatctaaaactttaaaaagattaatcgatttgaatgttatcccaatagtaaatgagaatgataccgtagctaatgaagagcttaaatatggagataatgacaccctttcggccttagtggccttagccatcaatgccaataagcttattttattaaccgacattgaaaatctttattcaaaagatccaagaaagaataaagatgcgcatccaattaaagaggttcataataatgaattaaaagaaattaaagataaaaacaaacaaaataaaaataatgaatggggaacagggggaatttctacaaaactaatatctgcagaaatagcacaaaggggggggggttggaag

SEQ ID NO: 249736 - DNA, 748 bp, Unknown
  Bacterial polypeptide expressing nucleotide sequence isolated from the Sargasso Sea
atataagataggtgtttctcaaattctattaacattagaagatagtgaagaaaggcgaagatatttaaatgctagaaatacaatatcttcattacaaagcaaaaacataatcccaatcattaatgaaaatgacactgttgctaccgaagaaattcgctatggtgataatgatagacttgcagcacgagtagcacaaatgattgaagctgatttattaattttattaagtgacattgatggtttataccaaggtaatccaaaaaaagacagggaagttaaaaaaatttcagaggtatttaaaattgataaaaaaattgaagaacttggtaattatcaatcttctgagcttggtagtggcggaatggccacaaaaattttagcagcaaagatatgtgctggaaacggttgtgctacaataataactaatagtgataaaaacaaaccaatcagtaatattaataagaaaaattcaacaattttttatcccttaacttctacaaattcgtccaaaaagaaatggttattaaatcatttaaaaccaacaggatcgattattattgatacaggagctcaaaatgcaattttgaaaaataaaagtcttcttcctgcaggagtaatagatataaaaggtagattcaaaagaggtgatgtaatatctatcttagtagagaatggccagaaggtagcagtaggtatatctgcttatgattttaatgatgcaaaaaaaattattggaaaaaaaaagtaa

SEQ ID NO: 249737 - DNA, 749 bp, Unknown
  Bacterial polypeptide expressing nucleotide sequence isolated from the Sargasso Sea
aatgattaaaaaatataaaaaaatagttgtaaaaattgggtcgaattcaattgttgattctaagacaaaaaaaataaagtctaaatggctaaataatttatgtaaagacattgcggaattgaataaaacaaaaaaaattgtgattgtgtgttctggtgctattgcattaggtgcaaaaagtatttcaaatacaaagttaagaaaattagaagataaacaggcagcagcttcagttggtcaaattgaattagcccatcaatggcgaaataaactaggaaaatacaagataagtgtttctcaaattctattaacattagaagatagcgaagaaagacgacgatatttaaatgctagaaatacaataacatcattacaaagcaaaaacataatcccaattattaatgaaaatgacactgtagctactgaagaaattcgctatggtgataatgatagacttgccgcacgagtagcacaaatgattgaagctgatttattaattttattaagtgatattgatgggctatatcaaggtaatccaaaaaaagacaaagatatcaaaaaaatttcagaggtatttaaaattgataaaaaaattgaaaaacttggtaattatcaatcttctgagctaggtaggggcggaatggccacaaaaattttagcagcaaagatatgtgctggaaatggatgtgctacaataatcactaatagtgataaaaacaaaccaatcagcaatattaataagaaaaatt

SEQ ID NO: 249738 - DNA, 735 bp, Unknown
  Bacterial polypeptide expressing nucleotide sequence isolated from the Sargasso Sea
tttgcttacattagatgacaccgagcaaagaagaagagcattaaatgctagaagaacaattgaaaatttgttgtctatgggtgtagttcctattgtaaatgaaaatgatactaccgctacaacagaaattaaatatggagataacgatagattagcatctagagtagcacaaataataggcgctgattgtttaattttattatcagatgtagacggcctttatacagacaatccaaaaaaaaataaagcaacaagaataataaaaacgattaaaacaattgatgaaaaaataaacaaatatacttttaaaaataaaaatttatatggttcaggaggaatgaaaacaaaaatagaagcagcaaaaatttgtcaattagctggatgccacatggtaattgctaacggtaatcatataaatccaattaaaaaaatttctagcgatcatgattgcacgtggtttctccctaaaatttctaaactagacgcaagaaaaaaatggataataggttctgttgccccaaaaggtgaaattattattgatttgggtgcggtgaaagcaataaaaaatggaaaaagtttattgcctgctggcgtgaaaaagattaacggaaattttgaaaaaggcgatcatgtattaataaaagatcaaaaaaatattgatagagctagaggattatcttctttttcatctggtgaaattgaaaaaataaaaggattacatagcaaggaaattaa

SEQ ID NO: 249739 - DNA, 864 bp, Unknown
  Bacterial polypeptide expressing nucleotide sequence isolated from the Sargasso Sea
catgtcaacgattgaaaaaccggaaataaagagatcctcgctatcgaccgcaaagcgaatcgtcattaaagttggcagttctctcttaacggatctcgaacttggcttgaaccgaggtcgaataactgactattcttctcagattgttgaactcatagacgacgatcgcgaggtcgtcctcgtatcttctggggctatcgctgagggatgtgttcgtttgggctggtcagaaagacctgaggagatagcgaagcttcaggcagcagccgctgttgggcagatgggactcacgcaagcgtatgaaacggctctgggccaaatggatcgcaaatcggccatagtcatgctcacccacgaagacatagccgatcggcagagatatttgaacgcaaaatctactctcgtcgagctgatgtctctgggcgtgataccagtcattaatgagaatgattcggtagcgacagaagagataaggtttggagacaatgacactttggctgcgatggtgtcgagtttgatagaggctgatttgctcgttctgttgactgatgtagatgggttgttcgagtcagatccgaaattgggagcagcagctgagctgatcgacagtgcctttgctgctgacgcgcagttagataatttgcccagcaaatcgaaaaacgcaatgggcagggggggcatggtttctaaaatcaaagcggctcgaatagctgctgcaggtggtgcacacaccataattgcctctggaagagctaaagattcaatcaggaatattcttcacggacagcaagtcggggaccctactcgcggctacaaccgacccgttaaccgccagaaaaagatggatcgcgaatcagggtcact

SEQ ID NO: 249740 - DNA, 709 bp, Unknown
  Bacterial polypeptide expressing nucleotide sequence isolated from the Sargasso Sea
aatgaactcactacttgcaaataaaataattccagtaattaatgaaaatgatactgtggctacagaagaaattaaatatggtgataacgatagactagctgcaagagtatctcaaatgatagatgctgatttattgatactattaagtgatattgatggactgtatgatcaaaacccaatcaaaaacaaaagtgcaaaaaaaattaacgaggtatttaaaataaataaagcgattgaatctatggccaattctcaaacttcaagtcttggcagcggtggaatggtaactaaaatttgggctgctaaaatatgcatgaacaacggatgtaatacaataattacaaatagtaataaaccaaatccactcatttctatttctaataaaaactctactatttttcatgcaataaaaaatcgatcatcttctcgaaaaaaatggctactaaatcatttacatgaatctggatttattaaaattgatgagggtgctcataaagcaattcttaataataagagtttgctacctgctggtataataggagttggaggaaaatttaacaaaggtgatataatcagtgtttattatgaaaaaaaaggaaaagttgcgattggtatttcagcttatgatataaatgaggtaaaaaaaattataggaaaaaaaagtaaggaaatttcaataatcttaggttatgaaggtagagatgagctt

SEQ ID NO: 249741 - DNA, 484 bp, Unknown
  Bacterial polypeptide expressing nucleotide sequence isolated from the Sargasso Sea
aatgattaaaaaatataaaaaagtagttgtaaaaattggttcaaattcaattgttgattcgaaaacaaaaaagatcaaatctaagtggttagataatttatgtaaagacattgccgaattgaataaaacaaaaaaaatagtaattgtgtgttctggcgctattgctttaggtgcgaaaagtatttcaaatacaaagttaagaaaattagaagataaacaggcagcagcttcagttggtcaaattgaattagcccatcaatggcgaaataaactaggaaaatacaggataggtgtttctcaaattctattaacattagacgatagcgaagaaagacgacgatatttaaatgctagaaatacaatatcatcattacaaagcaaaaatataatcccaattattaatgaaaatgacacagttgctactgaagaaattcgctatggcgataatgatagacttgcagcacgagtagcacaaatgattgaa

SEQ ID NO: 249742 - DNA, 809 bp, Unknown
  Bacterial polypeptide expressing nucleotide sequence isolated from the Sargasso Sea
tctttgcaaagatattgctttattacaatcaagtggaaagaaaattattcttgtttcttctgggtccattgctattggacgggaaatccttaatcttaaattcaaatctataaaacttgaagaaaagcaagcagcggctgctgtgggacaaggacagcttatgcacctttgggctcattatctagcacaacatcaaataactgccgcacaaattttactcgcaccagaagatacagaaacaagaagacgtcacttaaatgccagagcaacaataaagacactcttaaacctcgatgttattcctgttgtaaatgaaaatgatactgtaacaacatatgaaataagatttggtgataatgataggctagcagctcgagtagcagggatgatttctgcagatctactaattttattatctgatattgatgggttatatactgctgacccctcacgtaatgtaaatgccaaacacgtcccagaaatcaatgaaattacggaagatattttagctatgggaggtagtacaaattcgacttttgcctctggtggaatgataacaaaattattagcaggccagattgcaacaaaagccggcgctgacatgattatttgcgatggtcgacctaaaaaccccctcaatcgcttgctaaatggcgaccgtgcaagtttgttttattcaaggatagaaccacatacagctcgtgaaaaatggattgctggaagccttaaagtgtcgggtagtgtaacgattgataaaggtgccttaaaagcaataagtgacggaaaatctttattaccagtgggtataa

SEQ ID NO: 249743 - DNA, 689 bp, Unknown
  Bacterial polypeptide expressing nucleotide sequence isolated from the Sargasso Sea
agttgcaacagagaaaattagatatggagataatgatagattggcagcaagagtagcacaaatgatagacgccgatttattaatacttcttagtgatgtagatggtttgtatgataaaaatccaaaaaagaataaagatgcaaaaaaaattaatgaaatttttaaaataaataaatttatagaaaaaatggctaattctaaaacatcccttcttggaagtggtggtatggcaactaaaatttctgctgcaaaaatatgtatgaataatggatgcaatactattattactaatagtgaaaaaagtaatcctctatcatcaattactaaaaataattcttctttatttattgctaataaaaatcctacttcatcacgaaaacaatggttgttaaatcatttgcatccttctggctttataactattgatgagggagcaaaaaatgctgttaataataacaaaagtcttttaccagcaggtgttactgaagtgggaggtaattttagtagaggtgatgtaattagtgtgtatctaacaaaaaaagaaaagattgctgttggtgtatctgcttatgatatgaatgaggcaaagaaaattattggtaaaaaaagtaaggaaattccaaatatattaggatatgagggaagggatgaaatcatacataaagatgatttagtaaaaattatttaat

SEQ ID NO: 249744 - DNA, 731 bp, Unknown
  Bacterial polypeptide expressing nucleotide sequence isolated from the Sargasso Sea
gaggctcggcgccgtaccactgatcaacgagaacgacacaatcgccaccgacgagatccgttttggcgacaacgaccgcctggccagtcgcgtcgcggtaatggtcagcgccgatgccttggtccttttatcacacgtagatggcctgtacgacaaagatccaatagagaacagcgacgccaatcacatttccgaagtccgtggcgaaatcagtgcagccgttcagaaaatggcgggaaaatccatgagttacgacggctccgggggcatggtgacaaagctggaggctgcccggatcgccatggccgctggcactcgcatggccatcgccgatggcaccgaacttaacccactgacacgcatagaggatggcgcccggtgcacttggttcctgcccgatgcgaacccgaagaccgcccggaagcgctggatcgctagcgccctgaaaccagccggcaccattgtcgtcgacaacggcgccataggcgcgcttaacggcggcaaaagccttttacccgccggggtcacaggcatacaagggcagtttgaacgcggagacgccgtcctggtggctgctcaggacgggcgtgaaatcgctcgcggcattacagcctactcggcaatcgatgcactccgaattatgggtaacaaaaccagtgaaatcgaggacatactcggctaccgtggacgcgacgaaatgatacaccgcgacgatctagtcctgagctgag

SEQ ID NO: 249745 - DNA, 766 bp, Unknown
  Bacterial polypeptide expressing nucleotide sequence isolated from the Sargasso Sea
tttgaactcaaaagatacactacttactttgatcaaatatgatgttattccaattattaatgagaatgatacggttgcgacagaagagttgagatatggtgataacgacaggctggcagcgagagtagcgcaaatgacatctgcagatttattgattctgctctctgatgttgatggaatgtatacctcaaaccctaaaaccaatcagacagcaaaacatataccggtcatcgacaatttaaatgaagaaatattctcaatggcagacataacagactcaaattatggcagtggaggcatgataactaagttaaaagctgcaaaaattgctacctcagctggatgtgcgacaattgtaactgatggatcgaaaaaaacccctttaacatctctaattgaaggaggaaaatgtacatattttccggctagatcaaattctaaaagctccagaaaacagtggctttcaggttaccttgatacttctgggagctttaagattgatgatggtgcaaaggtggcacttgagaaaggtggaagccttcttccggtaggattgactgagatagagggtgtttttgagaggggtgatgttgtcactataattgacgccaataataaagagctaggtaaagggatgacggcatattcttcagtagaggccaaacaaattattggttgtcagtcagattctataaaagataagctaggatacaaaaattcatctgaaatcgtacatagggatgatatggctcttaatgaagtctaa

SEQ ID NO: 249746 - DNA, 574 bp, Unknown
  Bacterial polypeptide expressing nucleotide sequence isolated from the Sargasso Sea
atgataaataaatataaaaaaattgttataaagattggttcctcttccattataaattctaaaacaaaaaaaataaattctatatggatgaataagctttgtaaggatattgagaaataccacaaagaaaaaaaaattattgtagtttgttcaggagcgatagcgcttggatcaactataataagaaacaataaagttttacgaaaactggaagataagcaagcagccgcttcagttggtcaaattgaattagctcatcaatggagaacccatttaaaaaaacataaaattaacatagctcaggtcctcattacgcttgaagatagtgaagtaagaagaagatatttaaatgcaagaaaaactataaatactctattagataataaggttattccagttgttaatgaaaatgatacagttgcaacagaagaaattagatatggggataatgacagattagctgcaagagtagctcaaatgattgatgctgatttattaatactactaagtgatgttgatggattatataataaaaatcctaaaaaaaacaagcaagcaaaaaaaattaatgaaa

SEQ ID NO: 249747 - DNA, 756 bp, Unknown
  Bacterial polypeptide expressing nucleotide sequence isolated from the Sargasso Sea
gagcaacattagaaaaattgttacatcttaaagtaattcctgtaataaacgaaaatgacactgtttctactcaagaaattaaatatggagataatgatagattagcagcaagagtagcacaaatgtgtaatgcagatcttttaatccttttttctgatattgatgggctatatacttcagacccttcaaaaaataaagactccgagttcataaatataattgataatataactaatgaaatagagctcatggcaggcccctcaaacacacttctttctagtggaggtatgataacaaaaattgaagctgcaaaaatagcaacaaatgctggatgcaacgttattatttcaaatggaacattagaagaaccattgtcttatctttgctcacaaattggtaaaggaagttggtttaaagcaaaaaaaaatccaaaaaattcaagaaaacaatggatttcagcagcattgcaagttaagggaaaaatttttattgacgaaggtgctgaaaaagccatatcaaacggtaattcagttttaccagctggaattataaaaacagaaggtagttacgacaaaggtgatttagtaagcattgttaataaagaaggtaatttgctaggaaaaggtttatcccattataataatattgaggttaatttagtaaaaggattaaagagtgaaaaaattgaaaaaactttaggctatagaggaaaagatgaaatcattcataaagatgattttgttttagaagaataat

SEQ ID NO: 249748 - DNA, 841 bp, Unknown
  Bacterial polypeptide expressing nucleotide sequence isolated from the Sargasso Sea
caaacctctaaaaaaaaataagataaactcagctcaaatactacttacttttaatgatagtgaggttcgtagacattatctaaatgtaagaaaaactattaatgctctacacaaaaaaaatattattccgattattaatgaaaatgatactgtggctactgaagaaataagatatggcgataatgatagactggcatcacgagttgctcaaatgattgatgcagacttgttaatattattaagtgatgttgatggattatacacagataatcctctaaaaaataaaaaggctaaaaaaatccaaaatatatataatattgattcaagaattgaaaaaatggcaagtaaaaactattctttaataggaagtggcggaatggaaacaaaaattttggctgccaaaatttgtatgaatgcaggttgctctacaattattacaaatagtaataaaaaaaatcctcttaaaaatattaataaaaataattctacattatttcatgcaagcaaatcaccaaaatctaataggaagcaatggatcctaaaccatcttcacccatctggaagtataattttagataatggagctatacgtgctataaaaaataataaaagtttattacctgcaggtgttactgaaatcaaaggccgatttaatagaggagatgttataagtattgttaatactcaaaataaaaaatttggcataggggtaattgcatatagttcatctgatgctaagaaaattattggcaaaaatagcaaagaaataaaaagaatattaggatatgaaggaagagatgaactaatacataaggatgatttggtaaaaattaatttatga

SEQ ID NO: 249749 - DNA, 724 bp, Unknown
  Bacterial polypeptide expressing nucleotide sequence isolated from the Sargasso Sea
ttgccaaaagttaaatattaaaacaagaccaaatgatttaagtacccttcaagctactgctgcagtgggtcaagttaatttaatgtccttatacgataaagtatttaataaattaggtcataatattgctcaaattttaataactaaagctgatttcaattcacgagaatcctttaataacgcttctaaaactttaaaaagattaatcgatttgaatgttattccaatagtaaatgaaaatgataccgtagcaaatgaagaacttaaatatggagataatgataccctttctgctttagttgctttggctataaatgctaacaagcttattttattaaccgatattgaaaatctatactcaaaagatccacgtaataataaagatgcgcaacctattaaagaagttcataatagtgaattaaaggaaattaaagataaaaatattcaaaactcaaataatgaatggggaacaggagggatttcaacaaaattaatttctgcagaaatagcaacaaagggaggagtcgaagtccaactagttgatggaactaataaaaaaaacttaattgaaatttttaatgataataaaattggaactttattttatccagtagagaatcctattggaaacaaaaaaagttggctttcacatgcaattcaaacagtagggaaaattactttagatgatggcgcttcttttgcaattaaaaaaaagggtgcctca

SEQ ID NO: 249750 - DNA, 874 bp, Unknown
  Bacterial polypeptide expressing nucleotide sequence isolated from the Sargasso Sea
tcaaataagccttgcttacgcttggaaagacattatggggaagtatgggttaaatattgctcaaattttattggctcctgacgatactgaaactagacgaaaacacttaaacgcaagagctactctactaaaacttctcgagcttaatgtaatacctgtaattaatgaaaatgatacagtttctactgaagagataagatttggagataatgatagactagcagcaagagtagcacaaatgtgtagcgcagatcttcttattttactttctgatattaatggtctttattcttctgatccaaatattaataaaaattcagtttttattgatgaaattacagaaattactaaagaaattgaatttatggctgggcctactcacactagcttttcttcagggggtatggttacaaaaatagaagctgctaaaattgcaactaaagctggatgtaatatgattatttgtgatggacgccctataagtccattgttaaagttaaaacagcaagaagctaagtttagttggtttaaagctaacgaaaaaccgctaaattcaagaaaacaatggatatctggagctcttcaagtaaaaggaaaaattactatagatcaaggcgcatcagaagccattaaaaaaggtttttctattttatcagcaggcattattaaaactgaaggtaattatgaaaaaggcgacttaattcaaataattgatgaaaatgaaacctttgttggaaaaggtttaactcacttcaataattctgaggttgaattaattaaaggttataagagtaataatattgaaactatattaggttatagaggtaaagatgaagtcgttcatagagatgatctagtatttgaaaaaaaataa

SEQ ID NO: 249751 - DNA, 529 bp, Unknown
  Bacterial polypeptide expressing nucleotide sequence isolated from the Sargasso Sea
atgaaaaaagaaaatttaattaaagactcaaaaagaattgtaattaaaattggctcatcactattgatagataaaagtaaaggtaatcttaaaagtgaatggttagtgtccttagcacaagatataaataaacttattaagcaaaaaaaagaaattataatcgtttcctcaggatctatcgcacttggtcaaaaacagttgaaacttgaaggtaatttgtctttagatgaaaaacaagccgcagcggcaactggtcaggtaagcttggctcatgcatggaaagaagttatggaaaaatttggtcttaatatagcacaaattttacttgcacctgatgatactgaaaaaagaagaaagcatcttaatgcaagagctacattattaaaacttattgaattacaagtaattcctgtaattaatgaaaacgatacagtctctacagaagagattaaatttggagataatgacagattagcagcaagagttgcacaaatgtctagtgcagatttactcatattactgtctgaca

SEQ ID NO: 249752 - DNA, 724 bp, Unknown
  Bacterial polypeptide expressing nucleotide sequence isolated from the Sargasso Sea
ttaatcgatttgaatgttattccaatagtaaatgaaaatgataccgtagcaaatgaagaacttaaatatggagataatgataccctttctgctttagttgctttggctataaatgctaacaagcttattttattaaccgatattgaaaatctatactcaaaagatccacgtaataataaagatgcgcaacctattaaagaagttcataatagtgaattaaaggaaattaaagataaaaatattcaaaactcaaataatgaatggggaacaggagggatttcaacaaaattaatttctgcagaaatagcaacaaagggaggagtagaagtccaactagttgatggaactaataaaaaaaacttaattgaaatttttaatgataataaaattggaactttattttatccagtagagaatcctattggaaacaaaaaaagttggctttcacatgcaattcaaacagtagggaaaattactttagatgatggcgcttcttttgcaattaaaaaaaagggtgcctcacttttagcggttggtgttaagaatgtagaaggaaactttactattaatcaggcagttaaaatcgtaaataaaaatgataaagaagttgcaaaaggtttagtatcaataagtagcgacaaattaagaagtattttaaataataaagaaaatattaactcctcgataattgtcgtacacagagatgttcttgctctctcttaaa

SEQ ID NO: 249753 - DNA, 955 bp, Unknown
  Bacterial polypeptide expressing nucleotide sequence isolated from the Sargasso Sea
acaagttgtactcgtgtcttctggttctgtcgcatcgggtgcgcacctgtttccagagcaagaaaagtcagatattgcagttaaaaaagcaatggcagcagcgggtcaaaccgaaatgattgccacatgggacagactgtttgattttccgtctgctcagatgcttctaacgcatgctgatttacgagacagagagcgttacgtaagtatccgtgaaacgatatttagtttattggacaacaatattctacctatcgtgaacgaaaacgacaccgttaccactgacaaattgaaagtgggtgataacgataatttatcggccatggtggcgtcggcagctgaagcagatgcacttatcatctgttcagacattgatgggttgtacgataagaacccgcatgaacacgacgacgcacaattgcttaaatcagttaataccattgatcaaagcatttatgacatggctggcggtgcggtaaaaggcggtgtaggcaccggcggtatgcgcactaaaattgaagcggccgaaaaagccgtttcgcatggtatagatacatatattattaacggctttactgaactgtcgtttaatatgctgctagcaggtgaaaacccaggcacgcatttcaaacctcacgccacgccaatgcaagagaatgtgcattggatgcgccatacgtcaaacgcgcagggtgaggtgatagtagaaggggactttgacgcctctttagctggcgacgcagagcaactgacaagtagtgaaattattgacgtgaaaggtgagttctcggtaggcgacaccattctagtacgtaaagaagacggtactaaactggtaaaagccaagtcgaattacagtagctgtttattgaatttcattgcgaatcaggaaaacgaagaattcgcccatgagtttgaggaaagactgggcccattatttctgatcagcacatag

SEQ ID NO: 249754 - DNA, 889 bp, Unknown
  Bacterial polypeptide expressing nucleotide sequence isolated from the Sargasso Sea
aaacaagctgcagcatcagttggacagattgagttagctaaagaatatcaacaacatttcaaaaaaaataaactaatcagctctcaagtactgatgaccttagatgatactacagacagaaggcgatatttaaattgtcggtctacattgaatacacttattaatttgggagtggtccctatagtaaatgagaatgacacggtagctacagatgaaatcagatatggtgataacgacagattagcagctcaggtcgcatctatttgtgattgtgacttgttagttttattgtcagatatagacggattttatacaaagtctccaaaaaaacataaggatgctgagcatatacctttgataaccgaaataactaaagatttagagttaatggctgaagatgctgaaagtgaatactcaaatggaggtatgaagactaaattagaggcaggcaaaatagcgatttctgtaggatgcaatatggtgatcacgagtggattgcgcaacaatccaataggtgaaatgaacttgaggaagagcacttggtttattgcctctaagagcgtaaaggtggccagaaaaaaatggatattaaacatgaagtctacaggagaaatagagatagacgaaaatgcaaaaaaagctcttcaggcgggcaactctcttctccctgttggtacaatatcttgcaaaggaaactttaacaggggtgacgtagttattattaaatcaaaagacagtagtgtcttagccaaaggactagtttcgtataatcatttagagacggagcagataataggtttaaagagtgtagacatagctaagaccctgcggtacaacggaaggtctgtttttggtcatagagacgatatggctttctacaaggaatagc

SEQ ID NO: 249755 - DNA, 754 bp, Unknown
  Bacterial polypeptide expressing nucleotide sequence isolated from the Sargasso Sea
ggctacgcccgctgcttcgcaggggccatggaccgcggtgaccaggtggtgctggtcaccagtggtgccgtcggcctgggctgccagaagttggccctcaccaaccgacccgacacggtggtagccctgcaggcggctgcagccatcggccagggcgcgctgatggcgctgtacgaacgggccatggaacgtcatggtcgttccgtggcgcaggtgctgttgacccgctccgacctggccgaccgccgtcggtatcagaacgcttcgggcaccttgcggcagctgctgagctggggggtgctgccagtgatcaatgagaacgatgccctttcgccggcggagttgcgcttcggcgacaacgacaccctctcggcgttggtggccgccgccgttgaagcccagcaactgatcctgctcacggatgttgatcgcctctattcctcggatccgcgggtggatgccaacgccgaaccgatctcggatgttcgccaccctcgggagctggaatccttggaacagggggccggcgacggggggcgctggggcaccggcggcatgaccacgaagttgtcggcagcccgcatcgccaccgccagtggcatcaccgttcagctcgccgatggccgcgaccccgcgcgtctcgaggctttgctgttgggcgaacgggggggaacggtgttccatccccaccccgaacccctgggcaaccgacgcagttggctggcccacgtgctgcggcctgagggtgaactgc

SEQ ID NO: 249756 - DNA, 656 bp, Unknown
  Bacterial polypeptide expressing nucleotide sequence isolated from the Sargasso Sea
catgcaaatcgataaatttaaaaagattgtaataaaaataggttcttctattttaatagacgaagaaggaaaaccaaaaagaaaatggcttaaagaatttgctcaagatattaaaaacctaataagaaaaaaaaaacaagtagtaattgtttcttcaggagctattgccatgggctgtgagtatcttaaaattagaaaaaatggtttaaaagttgacaaaagtcaagctgttgcatcgataggtcaaatcgaattaatggatttttataaaaaaacttttgacaaaaatagaataaaaatttcacaaatattgctcacattagatgacactgaacaaagaagaagatctataaatgctagacgaactattgataatttacttgcaatgagcatagtcccaatcgtaaatgaaaatgatacaaccgctaccactgaaataaaatatggagataatgatagacttgctgcaagagtatcgcaaataattagtgctgactgtttaattttattatcagatgttgatggcctatatactgataatccaaaaaaaaataaacaaacaaaattaattaaaactgttaaaaatatagatgaaaatataaaaaaatatgcaacaaaaacagaaaatatttatggctcaggtggcatgaaaacaa

SEQ ID NO: 249757 - DNA, 793 bp, Unknown
  Bacterial polypeptide expressing nucleotide sequence isolated from the Sargasso Sea
ttgataaaagaacgtaaaacgccaatattaacaggcacaagccgtatagtagtgaagataggatccgccttactcgtcgacgagcgtacaggtgaaatccgacataaatggttgaataagctagcggacgacatagcgcacctcaaaaataaagacaaagaagtactaatagtgtcatccggagcaatcgcggttgggagccaacatctaggaattaaccaaaaaattttaaaactagaagagaaacaggcggcggcggctacggggcaaatcagattagcgcacgcctacgaaacagcattagccaggcactcaattactgtcgctcaaatactattatcaccaggtgacacagaggaaagaagacgtcatttaaatgctagagcgacattaacgacgctcttaaagcttggtgtgatcccagtaatcaacgagaacgatactgtaacgaccaaagaaattcgtttcggggataatgacagacttggagcgcgtgttgctcaaatgattagtgccgatacgcttatacttttatctgacgttgacggtttatatgagcaggatcccaaaaaagacccaagcgcaaaacatatagagaatgtagaacgtataaccccagagattatcgcaatggctggcgtcgccggaacaggctatgcatctggcggcatgatcaccaagcttgaagctgccaaaatagcaaccagtgcaggttgtcaaatggcaattgtcgcgggaaaaataatgaacccgcttgctgctctggagaatggtgctcgttgcacgtggttca

SEQ ID NO: 249758 - DNA, 815 bp, Unknown
  Bacterial polypeptide expressing nucleotide sequence isolated from the Sargasso Sea
tcaaattttattggcacctgacgatactgaaactagacgaaaacacttaacgcaaagagctactctactaaaacttcttgagcttagtgtaatacctgtaattaatgaaaatgacacagtttctactgaagagataagatttggagataacgatagactggcagcaagagtagcgcaaatgtgtagcgcagatcttcttattttactttctgatattaatggtctttattcttctgacccaaatatcaataaaaattcagtttttattgatgaaattacagaaattactaaagaaattgaatttatggccgggcctactcatactagcttttcttcaggaggcatggttacaaagatagaagctgctaaaatttcaacgaaagccggatgtaatatgattatttgtgatggacgtcctatgagtccattgttaaagttaaatcagcaaaaggctaagtttagttggtttaaagctaacgaaaaacctttaaattcaaggaaacaatggatatctggagctcttcaagtaaaaggaaaaattaccatagatcaaggcgcatcagaagccattaaaaaaggtttttctattttatcagcgggcattattaaaactgaaggtaattatgaaaaaggtgacttaattcagataattgatgaaaataaaacctttgttggaaaaggtttaactcacttcaataattctgaggttgaattaattaaaggttctaagagtaataacattgaaactatattaggttatagaggtaaagatgaagtcgttcatagagatgatctagtacttgaaaaaaaataag

SEQ ID NO: 249759 - DNA, 857 bp, Unknown
  Bacterial polypeptide expressing nucleotide sequence isolated from the Sargasso Sea
cgacacgacaaaccgactgaagacgtcgaaacggttggtcatcaagatcggatcagcgttgctcgttgatgaacagaccggtcggattcgaaccggctggctggaccgccttggccaggatatcgcagacatccgcgcacgggggacccgcgtgatcattgtgtcgtccggcgccattgccgtgggaaggacccatctgaaacttcccgcgggcgatctccccttggagcaaaaacaggcggctgctgctaccggccagatccgactggcccatgcctggcaggaagcactggcggcgcaggatgtcacggtagcgcaaatcctgttgaccctttccgacacggaagagcgtcggcggcacctgaacgcccgggccaccatcgagacactgctgaaccttagagccgttccggtaatcaacgaaaatgacaccgtggcgactgaagaaatccggtatggtgacaatgaccgcctcgccgcccgggtcgcgcagatgattagcgcggatacgctggtgctgttgtccgatgttgacggtctgtacacagccgatccacggaccgatccatccgccgaacttctcaaagaagtcagcgaactgacgcccgagatagaagctatggcgggcgcggccccaacgggatactcctccggcggcatggtgaccaagcttgaggccgccaaaatcgccgtagcggcaggatgtgcaatggcgatcacagatggcaagccatccgatgccctgtcgcggttggaaaacggcgcggcctgcacctggtttctagctaaatcagaaccactgacggtgcggaaacgatggattgcgggcgccgtggtgtcttccggcgcgatcgtca

SEQ ID NO: 249760 - DNA, 874 bp, Unknown
  Bacterial polypeptide expressing nucleotide sequence isolated from the Sargasso Sea
ctgacatcgggcagtaaaaagcttgataaagcacacatggtggagttagcaaggcaaatggctacgctaatgcgtgcaggggttgaagtggtattgtgtacttcaggtgctattgccgccggacgtgagcatctacaataccccgtttttccagatacgatggcaaataagcaattgttggccgcggtgggtcaaagccagttaattttagcctggtcacaattattcagtatttatgggttgcatgttggccaattattattaactcgcgctgatttgcaagatcgtgaacgctaccttaacgcccgtgatacgttaaacgcactattggcaaacaacattgtaccaatcattaatgaaaatgatgcagtggcaacaaatgagattaaagttggcgacaacgataatttatctgctcgagccgcgttgttatgtgatgctgatttactgattttattaaccgatcagaaaggattgtttgatgccgatccgcgcactaatcccgacgcgcagttgattaagcaagtggccaatatcgatgacagtttacgcttacttgccggcgggtctgtgtcgggcttaggtaccggcgggatggcaactaaattagaggctgctgatattgctcgccgtgcaggtattgaagtagtgatagcctcaggtcatcatcctgatgtgattgcaaaggttgccgatcgtgaatcggtaggaacccattttagcgcgattgaaaatccgctagaaagccgtaaacagtggatacttgccggccctgcggctcaaggtaagttaattgttgatgctggtgcgtcaagcgcggtggtggcaaatggtcgtagtttgttatctaaaggaattattgcagtagaaggta

SEQ ID NO: 249761 - DNA, 752 bp, Unknown
  Bacterial polypeptide expressing nucleotide sequence isolated from the Sargasso Sea
ttttataaaaaaaccattcgataaaagtaaaataaaaatttcacaaatattacttacactagatgatacagaacagagaagaaggtctataaatgcaagaagaactattgataatttactaaaaatgggaattattccaattgttaacgagaatgatactactgcaactactgaaataaaatatggagataacgatagactcgctgcaagagtttcacaaataattagtgctgattgcttaatattattatccgatgttgatggtctttatactgataacccaaaaaaaaataaaaaaacaaagtttattaatactgttaaggaaatagatgaaaatataaaaaaatatgctaccagagcagaaaatttatatggatcaggaggaatgaaaactaaaattgatgccgccaaaatttgccaattatcaggatgttatatggttattgcaaatggaagtaataaaaatccaataaaaaaaataattaaaaataataaatgtacttggtttttgccaaaaatttcaaaacttgatgctagaaagcaatggataattggatctatagctccaaagggagaagtaattattgatgaaggggcagcaaaggcaataaataacgggaaaagtttattacctgctggtgtaaaaaaagttaatggattgtttaaaaaaggagatcatattttagtaaaagatcaaaacaataatgaatatgctaggggcttagcttcattttcttctaatgaaattgaaa

SEQ ID NO: 249762 - DNA, 805 bp, Unknown
  Bacterial polypeptide expressing nucleotide sequence isolated from the Sargasso Sea
gctatcgcggttggccggcgacatctcggccttggcacaggacagcttcgtttggaggaaagccaggcggcggcggccacggggatggtccgtctggcgcatgcctaccaagaggttctagcagaatacgatttaaccctggcacaggtcctcatcaccttggacgatagcgaaaaccggcggcgctacatcaacgcgcgaaacaccttggagacacttttgaagctgggcgccgtgcccctaatcaacgaaaacgacacggtcgccaccgacgagatccgctttggcgacaacgaccgcttagccagccgggtcgcagtcatggtcagcgccgacgtcttagtcctgctatcccacgtcgacggactctacgacaaagacccaacggagaacgacgacgctaatcacattgcagaggtccacggtgaaatcagcgccaccgtccagagcatggcgggaacatcaatgagctacgacggctctggaggcatgttgaccaagctggaggccgctcgtatagccatgagcgccggcactcgcatggccatcgcagacggcaccgagatgaaccctctgagactcatggaggaaggtgccgtgtgtacctggttcctacccgaagcaaatccaaagaccgcgcggaagcgttggattgccagcgccctgaagccaaccggcaccatcgtcatcgacgagggcgccctaggcgcgcttaacggggggaaaagcctcttgcccgccggggttaccgatattcaaggagaatttgaacgcggcgacgccgtcgtcgtcgccgcccaggacg

SEQ ID NO: 249763 - DNA, 892 bp, Unknown
  Bacterial polypeptide expressing nucleotide sequence isolated from the Sargasso Sea
gtacattaataaatttaaaaaaattgtaattaaagtaggttcttcaaccatagtggatgaaaaaggtatacctaaaaaaatatggctacaagaatttgctaaagatattaaaaacctattaagtaaaaaaaaacaaattgtaattgtttcttcaggagccatagctttgggctgcgaatatctagaaattaaaaaaaatggtttaaaggttgataaaagtcaagcagttgcctcaataggacaaattgaattaatggatttttataaaaaaacttttgataagagtaaaataaaaatttctcaaatattactcactttagatgatactgagcagagaagaagatcaataaatgcaaaaagaactattgataatttgcttaaaatgcaaattgtgccgatcgttaatgaaaatgatactaccgctacaactgaaataaaatatggagataatgatagactggctgcaagagtatcacaaataattggtgcagattgcctaattttgttatctgatgttgatggactttatacaggcaacccaaaaaaaaataaaaaaactaggttaattaaaacagtcaaagaaatagatgagaatataaaaagatatgcatctaaaactgaaaatttttatggatcgggtggtatgaaaacaaaaattgaagccgcaaaaatttgccaactttctggatgttatatggttatagcaaatggaaaatataaaaaccctataaaggaaatatataaaaataaaaaatgtacttggtttttaccaaagatttctaaacttgatgcaagaaaacaatggataattggatcgatagcacccaaaggtgaagtaattattgatcagggtgccgcaaatgcaataaataatggaaaaagcttattgcca

SEQ ID NO: 249764 - DNA, 829 bp, Unknown
  Bacterial polypeptide expressing nucleotide sequence isolated from the Sargasso Sea
atggccgttcaaaacctcaatgctgagcgccttgcgcaggcacgacgtctcgtcgtcaaaatcggctcgacgttgtttgtagaccagaagacaggcaacctacagcgcgcatggctccaggcgctttgcgccgatgtggcagcgatgcgcgccagtgggcaggaggttgtcatcgtatcctctggggctattgcgctaggggcgcagcagctgggagtcgacccggtgcgagcgcgactggaagagagccaggcggctgcggcggtggggcagatacagctggcccacgcgtaccaggagattcttggtgctcacggtctcgcggcagctcaggttcttctcacgctggacgacagtgaaagccggcgccgttatcttaacgcggcgaatacgttgttcaccttacttaagcgcggggctgtccccgtggtgaacgagaacgatacggtcgcgacccacgagatccgttacggcgataacgatcggctcgcggctcgagtggctcagatggtgagtgctgattgcctggttttgctctccgacgttgacggcctctacacagctgatcccagcgtcgacccgcaggccaagcacatctccgagcttaccgagttgcaggaggaacactgggagatggctggcgggccgggatccgatcacggctccggcggtatgcgcaccaagcttgatgctgcacgcatcgcaatgggcgctgggtgtcgaatgctaatcacttcagggcatacagaacgaccgatcaaggcccttcaggctggggccgtggcaacctggttcatgccgggttccacaccgagggccgcccggaagc

SEQ ID NO: 249765 - DNA, 820 bp, Unknown
  Bacterial polypeptide expressing nucleotide sequence isolated from the Sargasso Sea
aatgaaaacttgggttataaaaattggaactagtattttaagaggaacagagagaaaatctactgaagaagttattgaaaccctctgtagatcctttacaaattttctttcaaaaggaaacaaattaattttagtaactagtggagcagtaggattaggttgccataaattaaatataaaaacgaggccaaatgatttaagtacccttcaagccaccgctgctgtaggtcaagttaacttaatgagtttatacgatagagtatttagtaagctaggtcacaatattgctcaaattttaatcacaaagtctgatttcaattctagagaatccttcaataacgcttctagaactttaaaaaaattaatcgatttgaatgtaattccaatagtaaatgagaacgatacagtagcaaatgaagagcttaaatatggagataatgataccctctctgcattagttgcattagctataaatgctaataagcttattttgttaaccgatattgagaacctatattcaaaagatccacgaaataacaaagatgcacatcctattaaagaggttcataacagtcaattacaagaaattaaaaataaaaatattcaaaacttaaataatgaatggggtacaggaggaatttccacaaaactaatttctgcagaaatagcaacaaaaggaggtgttgaagtccaactagttgatggaactaataacaaaaacttaattgaaatttttaatgataataaaattggaactctattttatccagtagaaaaacctataggaaacaaaaaaagttggctttcatatgctattaaa

SEQ ID NO: 249766 - DNA, 610 bp, Unknown
  Bacterial polypeptide expressing nucleotide sequence isolated from the Sargasso Sea
aatgaaaacttgggttataaaaattggtactagtatattaagaggaacagaggaaacatctacagaagaagttattgaaaacctttctagatcctttacaagtttcctttcaaaaggaaacaaattaattttagtaactagtggagccgttggattaggttgccaaaagttaaatattaaaacaagaccaaatgatttaagtacccttcaagctactgctgcagtaggtcaagttaatttaatgtccatatacgataaagtatttaataaattaggtcttaatattgctcaaattttaataactaaagctgatttcaattcacgagaatcctttaaaaacgcttctaaaactttaaaaagattaatcgagttgaatgttattccaatagtaaatgaaaatgataccgtagcaaatgaagagcttaaatatggagataatgataccctctctgctttagttgccttggctacaaatgctaacaagcttattttattaaccgatattgagaatctatactcaaaagatccacgtaataataaagatgcgcaacctattaaagaagttcataatagtgaattaaaggaaattaaagataaaaatattcaaaac

SEQ ID NO: 249767 - DNA, 485 bp, Unknown
  Bacterial polypeptide expressing nucleotide sequence isolated from the Sargasso Sea
gatgagcgggcgttcgcttgcccattatcgccgcatcgtgatcaagatcggctccgcgctgctggtggatggccggacgggcctgaagcgcggctggcttgaaaaattgtccgccgatatcgccggcctcaaggcggccggcgtcgaggtgctcgtggtgtcctccggcgcgatcgcgctcgggcgcaccgtgcttggcgcgccatcgggtgcgctgaagctggaagaggcgcaggccgcggccgccgtcggccagatcggccttgccggcgcatggacggaaagccttaaaacgcatggcatcatcgccgggcagatcctgctgacgctgcagaataccgaggagcgcaggcaatatctcaacgcccgcgcaacgctgcggcagttgctgaaggtcggcgccgtgccgatcatcaacgagaacgacacgatcgccaccagcgaaatccgctacggcgacaatgaccggctggcggcccgcgtcg

SEQ ID NO: 249768 - DNA, 741 bp, Unknown
  Bacterial polypeptide expressing nucleotide sequence isolated from the Sargasso Sea
ccttgctagatcttggcgctgtacctgtggtcaatgaaaatgacacggtggcaacagccgaaatccgctttggtgataatgaccgtttggcagcacgggtggcggcgatgattggagctgatctgctgattcttttatcggatgtagatggcctctatacaggaaatccaaaccaaaataacggcgccgcacacctgcctaggattgatcatattaccgatagcatcatggccatggctggcgccgcaaatgcgcaatatgcctctggtggcatgatcaccaagctcgaagcaggacgtattagcaccgcagcaggctgtcatatgattatctgtgatggccgtgaccctgaaccacttttgcggctggaaaatggcgcacggtgcacctgttttatcgcaacagaaacaccgcatgcggcccgcaaacaatggatcgccggggcgttgacgccgcgcggcacaataggcgtcgatgccggcgctgccgaggctttgcgtaagggcaaatcacttctgccagccggagttgtggctattgacggacagtttgatcgcggtgaccttgtcgctgttgaagaccaatcaggcaaggttatcggtcatggattatccagttacggcgccgccgacgccgccaaaatcaaaggttacaaaagccgtgaaattgagaccatgctggggtatcgtggtcgggatgaaatcatccacgcagataacttagtggtgaccgatatttagg

SEQ ID NO: 249769 - DNA, 565 bp, Unknown
  Bacterial polypeptide expressing nucleotide sequence isolated from the Sargasso Sea
aatgggcctcattaaccaatctaaacggctagtaatcaaaattggatcagctcttttggtcgatgagaaaagtgggcatatacgctacgggtggttagaacaactagccgatgatatagctagtctgcgatctagaaataaagaagtgataatcgtttcttcgggtgctgtagctttcggaagcagacaccttggaattcatggcaaagctctcaaactacaagaaaaacaagctgctgcagccactggtcaaattcgactggcgcatgcatacgaaaacgccttaactaggcacgacataacaattgcacaaattctcctatcacctgatgatacggaacagcgtcgtcgtcatctcaatgcaagagcaaccatttctactcttttatcacttaacgttgtacctatcattaacgaaaatgataccgtcacaaccaaagaacttagatttggggataatgaccgcctgggagcaagagttgcccatatgatgagcgctgataatcttatacttttgtctgatgtcgacgggttgtataatcgggacccaagactggacaaaaca

SEQ ID NO: 249770 - DNA, 684 bp, Unknown
  Bacterial polypeptide expressing nucleotide sequence isolated from the Sargasso Sea
gtccgaccgcaagcgctacctcaacgcccgcagcactttgcgcgcgctggtggagctcaaggtcatcccggtcatcaacgagaacgacaccgtggtcaccgacgaaatccgcttcggtgacaacgacaccctggccgccctggtggccaatctggtagaggccgacctgctggtgatcctcaccgaccgcgatggcatgttcgacgccgacccgcgcaacaaccccgatgcccagcttatctatgaagcccgcgccgacgacccggcgctggatgcggtcgccggcagtgtcggtggtgccctgggccgtggcggcatgcagaccaaactgcgcgccgcacgcctggcggcgcgttcgggggcccacaccatcatcgtcggcgggcgcctggagcgcgtgcttgatcgcctcaagaccggtgagcgcatcggcacgctgctgtcgccggagcgcggcatgctggcggcgcgcaagcaatggctggccggtcacctgcaaacccgtggcacgctggtgctggacgcgggggccgtatcggccttgtcccaaggcaacaagagcttgctgccggtgggtgtgaagttggtgcagggcagcttccgccgtggcgagatggtggtgtgcgttgcgccagacggtcgcgagattgcgcgcggcctggccaattacagcgccctggaagc

SEQ ID NO: 249771 - DNA, 736 bp, Unknown
  Bacterial polypeptide expressing nucleotide sequence isolated from the Sargasso Sea
cttcacaaaaataatattattcctataattaatgaaaacgatacagtggctacagaagaaattagatatggtgacaatgatcgactggctgcaagagttgcacaaatgatggatgctgatcttcttgtaatgctaagcgatattgatggtctctatacttcaaatcctaatattaatagacaagcaaagaaaatgaataatattaaaataattgatcttactatcgaaaatatggcaggaaaaaaacactcagcaatcagctctggaggtatgaaaacaaaaatttgggcagcaaaaatttgtttaaattcaggttgctcaactgtgattgcgaatggacataagctcaatccattaaagatgatatctaaatcaaattcatcttggtttattgccacaagatccccaagaacagcaagaaagcagtggttattaaatcatttgcatccttcaggaactgcaattattgataatggagcagtaaaagcattaaataacaataaaagccttttgcctgcaggagtaattgaaattaaaggtaggtttaatagaggagatgtaataactgttaataataaactgaataaaagagtagcaataggagttgttgcctatgattctaatgatgctaaaaaaattgtagggaaaaaaagtaaagaaatattttcaatactcagttatgaaactagaagtgaattaattcataaagatgatttagtaaaagtaaaattatgac

SEQ ID NO: 249772 - DNA, 594 bp, Unknown
  Bacterial polypeptide expressing nucleotide sequence isolated from the Sargasso Sea
tatgattatttctgaccaaaccggccttgttaataaatcacaaagattaataattaaaattggctctgcccttttagtagatagcgagactggagaaatacgctataactggctcgagaaaatggccgatgatatcgccaatttgagatccagaaacaaggaagttattattgtttcctcaggagctgtagcatttggaagtcgtcatctaggcattcatgctaaagctctaaaattacaagaaaaacaagcagcagccgctacagggcaaatcagacttgcacatgcttacgaaaatgccttgaataaacatggagtgactgtagcacaaattctcttgtcacctgatgacacggaacagcgtcgccgtcacctgaatgcaagagctaccatatccacgcttttgtcactgaatgtcgtgcccataatcaatgaaaacgatacggttacaactaaagagctcagattcggtgacaatgaccgtctaggtgcaagagtagcacaaatggtaagcgctgatactcttatacttttgtcagatgtagacggcttgtataatcgagatccacgactggacaaaacggcataccatat

SEQ ID NO: 249773 - DNA, 770 bp, Unknown
  Bacterial polypeptide expressing nucleotide sequence isolated from the Sargasso Sea
catgacgctgtgggttgtcaagctggggacaagtttgctgcgtggtgacaccgctgctgcgattcagggatacgcagattgcattgcctcttcaatcgtgcgtggcgaccgcgttgttttggtctccagtggcgctgtcggcctcggttgccagaaattgcaattggatcgacgaccggattctgtggtcgcattgcaggcggctgcggcaattgggcaggggcatttgatgaccttgtacaaccagagcctgcatcgtcatggcatctcagtggctcaggtgttgctgacccgttctgacttgattgatcgtcgtcggtacaacagtgcctccaacaccctgacccagctgctcgattggggggttctgccggtcatcaacgagaacgatgctttatctcccgcagagttgcgattcggggacaacgacacgctttctgcactcgttgcctctgctgtggacgctgatcagttgattcttctgaccgatgtggatcgtctttactctgcagatccccgtgttgatgcagacgcgcaaccgattccggatgtgcgcgatccgcacgaattgcgtgctctccaggcggctgccggcaatggtggtcgctgggggactggagggatgaccacgaagttggcagcggctcgcatcgctacggctagtggcatcacggtgcatctcgccgacggacgcgatccaatgcgcctggatgctttgttgaagggtgggcgcggtggaacggtttttcatccaagtcctcaaccgcttg

SEQ ID NO: 249774 - DNA, 505 bp, Unknown
  Bacterial polypeptide expressing nucleotide sequence isolated from the Sargasso Sea
atgattaaaaagtttaaaaaaatagtaattaaaataggatctaactcaatagtagactcaaaaacaaaaaaaattaaatctaaatggttggataaattatgcaaagatatatcagagcttcacaaaactaaaaaaattattatagtatgctcaggtgcaattgcacttggttcatcaagtatctctaaatcggtaataagaaaactagaagataaacaagcagctgcatctattggtcaaattgaattagcccatcaatggagaaataaattaaaaaaatttaaaataaatgtttcacaaatattactaacattagaggatagcgaggtaagacgtcgctatttaaatgcaagaaatactatctcctctcttcaaaataaaaatgttattccaataatcaatgaaaacgatacagttgcaaccgaagaaataagatttggagacaatgataaactcgcagcacaagttgctcaaatgatgaagcggatttacttgttttactaag

SEQ ID NO: 249775 - DNA, 592 bp, Unknown
  Bacterial polypeptide expressing nucleotide sequence isolated from the Sargasso Sea
aatggagcccaatttaaaaaaacatagtcctgacagagaaaaaatatatcagcaatcaaagtcaattgtaataaaagtcggctcatctttattagttgaagataaacttggtgcaatcaaaaaagaatggtttgcgtcttttatcgaggatgttattgatttacgcaaaaaaggaaaaacagtaatcattgtttcttcgggcgctataaatttgggaagaaaaattcttaatcttaaagaaagcgaattaactttggaacagaaacaagcagccgcgtcggttggtcagattgaactctcaaaggaatatcaagagcactttaaattaaagggcctcatatgttcacaggtactaattaccttagacgatttcacaaatcgtagaagatatttaaattgtaaatcaacattaaagactttgttaaaatttggtgttatacccatcgttaatgagaatgataccgttgcgactgatgaaatacgatatggagataacgatagattggctgcccaagttgcatctatatgtgactcagacctattaatattgctttctgatattgatggtctctacacagagtctccaaaaaag

SEQ ID NO: 249776 - DNA, 792 bp, Unknown
  Bacterial polypeptide expressing nucleotide sequence isolated from the Sargasso Sea
aatgattaaaaattttaaaaaaattgttataaaaattggttcatcttctattattaatgaaaaaaccaaaaaaataaaaaaacagtggttaaaaataatttgtaaagatgtaaaagagttacatcagaattcaaaaattattatagtatgttcaggagcaatagcactaggttcaaaatatataagtaataaaaaaataaataaactagaagacaaacaagctgctgcagctataggtcaaatagaattagcaaattattggcaaaatagccttaataaattaaaaattaatagcgcacaattattattaacattagaagatagtgaagtaagaagaagatatttaaacgtacgtaaaactattcaagcattacacaaaaaaaatgttataccaataatcaatgaaaacgatacagtagcaacagaagaaattaaatttggcgataacgatagattagctgcgagagtagctcaaatgattgatgctgatttattaattttattaagcgatgtggatggattatacactgagagtccaataaaaaataaaaaggctgtaaaaattaaaaatatatttaaaatagattctaaaatagaaaaaatggctgataataaattatctgctttgggcaaaggaggaatgaccacaaaaatatgggctgcaaaaatttgtatcaattcaggctgctcaacaattataaccaaaaatgaaaaatttagacctttgctagatattaataaaaataattctacttggtttcacgcttccaaaactccacaatcttctagaaa

SEQ ID NO: 249777 - DNA, 511 bp, Unknown
  Bacterial polypeptide expressing nucleotide sequence isolated from the Sargasso Sea
catggtcgccataaccgcacgcagcgccctgccaaaggcccgccgaatcgtcatcaaggttggatcagccctgcttgttgatgaaacaaaaaacaccatcaatacagcctggttggccggtatagcgcaggatatttcgcggttaaaagctgccggaaaagatgtggtggtagtatcaagtggggccattgcgttgggcagccggctgttgaaaattcataataaaacgctcagcctgcaggaaaaacaggcggcagcggcgaccggacaggtgactctggcgcatgcttggatggatgcgctcggcgcctataatgttcagacagcgcaaattctgctatcgccagatgacaccgaaactcgccgcaaacatctgaatgcacgggcaacaatggcggcgttgctaaatcttggggcggtgccggtggtgaatgagaatgataccgttgccaccgccgaaatacgctttggcgataatgaccggctggcagcacgcgtggcggctatggtt

SEQ ID NO: 249778 - DNA, 1120 bp, Unknown
  Bacterial polypeptide expressing nucleotide sequence isolated from the Sargasso Sea
aatgcgttcagtcatcgcagattcacggcgattggtagtgaaagtcggctcgagcctcgtcaccaatgacgggcgcggcctcgatcatgctgcaatcggccgctgggccgctcagattgccgcactgcgcgcgcagggcaaggaagtggtgctagtcagttcgggcgccattgcggaaggcatgcagcgccttggctggaccaaacggccgcgcgaaatcgacgaattgcaggcggctgccgctgtcggccaaatgggccttgcgcaagtctacgaaagccgctttgccgagcattcgatccaaactgcgcaaatcctgctgacccacgccgatctggccgatcgcgaacgttatctgaacgcccgatccacgttgctgacgttgctgcgcttgggcgttgtgccgatcatcaacgagaacgacacggtcgttaccgacgaaatcaagttcggcgacaacgacaccttgggcgcactggttgcgaacctgatcgaaggcgatgcgctcgtcatcctcaccgatcagcaagggctttttactgccgacccgcgtaaggatccgcacgcgacgctcgttcagcaagccgatgccggtgcgccggagctcgaagcaatggcgggcggcgcgggttcgagcctgggccgcggcggcatgctgaccaagattcttgccgccaaacgcgcggcgcacagcggcgccaatacggtgatcgcgagcggtcgcgaagctgacgtgttgtcacggctggcttctggcgaggcgatcggcacgcagttgatcgcgcgcaccgcacgcatggcagcgcgcaagcaatggatggccgatcacttgcaagtgcgcggccacgtagtgatcgacgacggtgccgtcgaaaagctgatcgaaggcggcaagagcttgctgccgatcggcatcgtcggcgtgcagggcgcgtttgcgcgtggcgaggtgatcgcctgtctgagcgcggccggacgtgaagtcgcgcggggcctgaccaactacagtagtacggaaaccaagctgatccagcggcgtccgagcggcgagattgaatcggtgctcggctatatgctggagcctgaggtgatccaccgcgacaatcttgtgctggtctga

SEQ ID NO: 249779 - DNA, 724 bp, Unknown
  Bacterial polypeptide expressing nucleotide sequence isolated from the Sargasso Sea
atggaatccaatagattaatttctagtaataaaaattactcacaaattttaaatgcaaaaactatagtcattaaaattggttcatcaattttaatcgatccaaaaaaaaatatacttaaaaataaatggttaaattcattattggatgaaattgcatttttaaaaaaaaatggtaaaaaaattattattgtttcatcaggttctattgctttaggtaaatctgttttaaacttatcttcaaagaaacttaaactagatgaaagtcaggcttcagctgctatcggacaaattaaattggctcaagcttatgatttaatactaaaaaaatataatatttatacagcacaaatattattaacatctgatgatagtcaaaatagaagacggtatttaaatattagatcaacttttaaatctttattaaagatgggtgtaatccctattgttaatgaaaatgatacaatagctacagaagaaataaaatttggggataatgatagacttgcagcgcaagtagcactgattacagaggctaatcttttaatcttattatcagatatagacggattatatgataaagacccaaatattaatccagatgctaaacatttagcattaatcaaagaagttacaagaaagatgttaaatatggctagtcaaactacctctgaaaattcaaaaggtgggatggttactaaattagaggctgcaaaaatgcaatgaa

SEQ ID NO: 249780 - DNA, 1120 bp, Unknown
  Bacterial polypeptide expressing nucleotide sequence isolated from the Sargasso Sea
gatgcgttcgatcatcgcggattcgaagcgattggtggtgaaggtgggctccagcctcgtgaccaacgacggcaaggggctcgatcatgcggcaatcggccgttgggcggctcagatcgccgcactgcgcgcccagggcaaggaagtcgtgctcgtcagttcgggcgcgattgccgaagggatgcagcggctcggctggagcaagcgaccgcgggaaatcgatgagttgcaggctgcagccgcagtcggccagatggggctcgcgcaggtctatgaaagccgcttcaccgagcacgacatccgcaccgcgcagatcctgctgacgcatgccgacctggcggaccgcgagcgttacctgaatgcgcgttcgacgatgctgacgctgttgcgacttggcgtcgtgccgatcatcaacgagaacgacacggtcgtcaccgacgaaatcaagttcggcgacaacgacacgctcggcgcgctcgttgcaaacctgatcgaaggcgatgccctgatcatcctgaccgaccagtcggggctgttcacggccgatccgcgcaaggacccgaacgcgacgctcgttgcggaagccaacgcaggcgcgccggaactcgaggcgatggccggcggcgcgggctcgagcctcggccgtggcgggatgttgacgaagatcctcgcggcgaaacgcgccgcgcacagcggcgcgaacaccgtgatcgcgagcggccgggaggccgacgtgctcgtgcgcctggcggccggtgaggcgatcggcacgcaactgatcgcacgtaccgcgcggatggcggcgcgcaagcagtggatggccgaccatcttcaggtgcgcggccatgtcgtgatcgatgcgggcgcggtcgagaagctgacggccggcggcaagagcctgctcccgatcggcgtgatcgacgtgcagggcgcgttcgcgcgcggcgaagtcatcgcatgtgtcggccccgacgggcgcgaagtggcgcgcgggctcacgaactacagcagtgcggagacgaagctgattcaccgcaagccgagtggtgagatcgaatccgtgctcggttacatgctggagccggaattgatccatcgcgacaacctggtgctggtgtga

SEQ ID NO: 249781 - DNA, 778 bp, Unknown
  Bacterial polypeptide expressing nucleotide sequence isolated from the Sargasso Sea
aatgaataactacagaaaagtaataatcaagattggaagtgcgcttataaatgatgactcgtcgcataatgagaatagcattgaaaatatatgtgctcaaatatctaagggtcactcggaaggtattaagtttgctgtagtatcctcgggcgcaattagtcaaggaattagctatttagatatgagtgagaaacctagtaagcttgaggaattacaagccttagctgctgttggccaacaacaattaatgaagatgtatgaaagttacttttctaaatatgataaaaagattgctcaagttttgttgactcatgatgatatgaataaccctgagaggtatttaaatgctaaagcaacatttgataatcttcttagcttggatgtcataccagttataaatgaaaatgatgtcgttgccactgaggaaattagatttggtgataacgatacattagcagcgatggtttcaaatatgatggaggctgatctgatggttattcttactaaccaggatggttactttgataaaaatccagataaacatccagatgctaaaattataaaaaaatgtaacacaaagaatctgaatgaagatgattttaatttagatgagaaaagctcagttggaactggtggttttaaaactaagataaggtccgttaagatggctacaactaggaattgtccctcaataattgcttctggttatcgtaaagatgttattaagcaaattctcagtaaaaaaataataggcacatttttctattcagaagaataa

SEQ ID NO: 249782 - DNA, 1108 bp, Unknown
  Bacterial polypeptide expressing nucleotide sequence isolated from the Sargasso Sea
atgattaataagtataaaaaaattgtaattaaaattggttcatcatcaattattaatgaaagtaataaaaaaataaaaactagttggttaaattcaatttgtaaggatattgcttttttacatcgtacaaaaaaaattattgttgtttgttcaggtgcaatagccttgggttctaaaattataaataataaaaagtttcttcaacgcctagaagataaacaagcggctgcagcaattggacaaatagaattagccaatcattggcagcaaactttaaaaaaaaataagataaactcagctcaaatactacttacgcttaatgatagtgaggttcgtagacattatcttaatgtaagaaaaactattaatgctctacacaaaaaaaatattattccaattattaatgagaacgatactgtggctactgaagaaataagatatggcgataatgatagactggcatcacgagttgctcaaatgattgatgcagacttattaatattattaagtgatgttgatggactgtacacagataatcccttaaaaaataaaaaagctaaaaaaattcaaaatatatataatattgactcaaacattgaaaaaatggcaagtaagaactattcattaataggaagtggtggaatggaaacaaaaattttggcagccaaaatttgtatgaacgcaggttgctctacaattattacaaatagtgataaaaaaaatcctcttaaaaacattaataaaaataattctaccttatttcatgcaagcaaatcaccaaaatctaataggaagcaatggattctcaatcaccttcatccatctggaagtataattttagatactggagcaatacgtgctattaaaaacaataaaagtttattgcctgcaggcgttacggagatcaaaggacgatttaatagaggagatgttataagcatagtaaataatcaaaataaaaaatttggcattggagtaattgcatatagttcatctgatgctaaaaaaattattggcaaaaatagtaaagaaataaaaagaatattaggatatgaaggaagagatgaactaatacataaagatgatttggtaaaaattaattcatgag

SEQ ID NO: 249783 - DNA, 934 bp, Unknown
  Bacterial polypeptide expressing nucleotide sequence isolated from the Sargasso Sea
gatgctgtgggtggtgaagctgggcaccagcctgctgcgcggtgacacggctgccgtgatcgagggctatggagccgcgatcgccgctgccatggagcgtggtgatcaggtggtgctggtcaccagcggggcggtcggtctggggtgtcagcgtcagcagctgccccgtcgtcccgacaccgttatggctctgcaggcggccgctgccatcggccagggacatctcatggccctctacgaacgggcgttgtcccgccacgggcggtcggtggcccaggtgctgctgacccgctccgatctggcggatcgccgccgctatcagaacgcctccaacaccctgcggcagctgctcagctggggggttctgcctgtgatcaacgagaacgatgcgatctctccagcggaactgcgcttcggggacaacgacacgctgtcggccctggtggcggccgctgtcgatgccgatcagctgatcctgctcacggatgtggatcgcctttattccgccgatccccgcaccgttgcggatgccaggcccatctccgatgtgcatcacccgcatgagcttcaggccctggaggcgggtgccggcgatggtggtcgctggggccgcggcggcatgaccaccaagctggcggcagcacggatcgccacggccagcggcatcaccgtgcatctggccgatggtcgggatcccagccgtctcgatcagctgctgcagggcgaccggggcggcaccgtgtttcatccccatccggaaccgctcggcaaccggcgcagctggttggcccatgtgctgcaggcgcagggcaccctgcgcctggatccaggggcctgcgaggcgctgctggagcggggagcctcgttgctgcaagtgggaatcaccgcggtggagggggagttcggggccagccaggcgggaacctggtcgacc

SEQ ID NO: 249784 - DNA, 1162 bp, Unknown
  Bacterial polypeptide expressing nucleotide sequence isolated from the Sargasso Sea
aatgaaaaaacaatttacactacctaagtcagacacagagtgcttaaaaaaattttttttaccttataaaagaataatagttaaagtaggtagttcattacttataaataaagactttctaaaaatcagaaatgaatggcttaatgctttatctgaagatatatcatggcttcaaagtttcaaaaaagagatcataattgtttcttctggagcaatagctttaggccgaagttcttttggagcagaaaataaaactttaaacttagaagaaaatcaggcagcagctgcaataggccaaatagaacttgcatactcttggaaagcggcacttgaaaaatttaatttaaaatgtgctcaaatcttactttctcctgatgatactgaaacaagaagaaaacatttaaatgcaagagcgactatagctaaattaattgaagcaaatataattcctgtaataaatgaaaatgatacaattacaacaagcgaaataaaatttggtgataatgacagattagctgctagggtagcgcaaatgtcatcttcagatttgctgatcttgttatcagatattgatggtctctatgataaaaatcctcatttgtcagaaaaggcaaatcatattccaaaagtaaaggaaattaatgatgatatattgaaaatggctggttcatctcattataaattttcctctggaggaatgataactaagcttgaagcagctaaaatttctagtctttccggatgcaaaatgattatttgtaatggagaggaaaaccatgcaattttagaattagctaaaaaacgtaaatatacaatttttgaagtaaaagatactcctttatcagcgcgtaaaaaatggattgctgctggattgaatttctcgggcagagtaactgttgatgaaggtgcatccaaagcgttaaaaaatggaagctctcttttgccagctggcgtaattaaggttgatggaagttttgaaaaaggtgacttaattgagatttttagccataatggaattaaaatagcatctggattaacatcatataactctcaagaaattgttacaattgctggaaaaaaaacttatgatattgaaaccttacttggttacatggggcgtgatgaattaatccatagagatgacttagtgttagggaaataa

SEQ ID NO: 249785 - DNA, 811 bp, Unknown
  Bacterial polypeptide expressing nucleotide sequence isolated from the Sargasso Sea
tatgattttgctgactcatgaagatttctcgaatcgggagcgatatttgaatgctcggtcgaccctaacgcgcttactagatcttggcgtcattcctctgattaatgaaaacgatacagtggctactgacgagatcaggtttggcgacaatgatacgctgtcagcattcgtgacgaatttaattgatgctgatcttcaaattattttgaccgatgtagaagggttgatggataaagatcctaacattgatgacagcgctgaagttatccttaaagcttcagccgatgacaaaagtctcgaaggcctatcaagtgatcgtaccagtgcgcttggtcgcggaggtatgctctccaaagttagggctgcgaggttggctagtcggtcgggtgcggatactgttattgcgtctggaaagattcctggcgtattggcgagaatagtgtctggggaagaaataggaacgcatctattcgtcgataagaagtctctaagatctcgaaaacgttggattgccgatcagttaaagcctgcagggtacgtaatcattgactctggagcatctgaagcactgtcaaaggggggagctagcctgttagctgtgggagttcttggtgtatatggaagttttgatcgaggggatttaatagagtgccgggcagaggataccacggttatcgctcagggattagtcaattattcctctgaagatatttcaaatctaaaaggactcaactctgaaaaatactcagataagatcgagcacgtatacgaaaacgagttggtacattgtgataacctagtgctcgtttga

SEQ ID NO: 249786 - DNA, 1010 bp, Unknown
  Bacterial polypeptide expressing nucleotide sequence isolated from the Sargasso Sea
ttgtaaagatatagaaaaatatcacaaagataaaaaaataattattgtttgttctggtgctatagctcttggctcatctttaatcaaaaaacataagattttaagaaagttagaagacaaacaagccgctgcttctgttggtcagattgaattagcgcatcaatggagactccatttaaagaaacacagaataaatattgctcaagttctaattacgcttgaagatagtgaggtaagaagaagatatttaaatgcaagaaaaacaattaacactctacttaagaataaggttattccagttgttaatgaaaatgatacggttgccactgaagaaattagatatggggataatgacagattagctgcaagagtagcacaaatggttgatgctgatttattaatacttctaagtgatgttgatggattgtatgataaaaatcctaaaaaaaataaagatgcaaaaaagattaataaaattagtgccataaacaaaactattgaaaaaatggctaattcacaaacctcgataataggtagtggaggcatgactactaaaattgctgctgcaaaaatatgtatgaataatggttgtgacacactgattactgatagtgaaaaaaataaacctctatcttcaattactaacgaaaattcttccatatttttagcgaataaaaatccatcatcatcacgtaaacagtggttattaaatcacttacatccatctggttttattagaattgatgatggtgccaaccaagctattaaaaataataaaagccttttaccagctggggtaattgaggttggaggaaattttaatagaggagatgtaataagcgtatattttcctaaaaaagaaaaaattgctgttggaatttcagcctatgacattaatgaggtcaaaaaaattattggtaaaaaaagtaaagaaattcctagtatcttaggatatgaaggaagagatgaaatcattcacaaagatgatttagtaaaaataatttcatgaa

SEQ ID NO: 249787 - DNA, 1048 bp, Unknown
  Bacterial polypeptide expressing nucleotide sequence isolated from the Sargasso Sea
atgacgctgtgggtggtgaagctgggcacgagtctgttgcggggggataccgccgcaacgatcgatggtttcgccgcaggcatcgctgctgcctttgcacggggcgatcgcgttgtcctggtttccagtggtgccgtcggtctcggttgccagcggcttcagcttccccagaggcccgagaccgtggtcgccctgcaggcagcggcggctacgggtcagggtcagctgatggctttgtacgagcgggccttggcgaaccacggcattgctgtggcccagatcctcgtcacccgctcggatctggccgaccgtcgccgctatcagaacgcctctggaaccctgcaacagctgttgcagtggggggtgttgccggtggtcaatgaaaacgatgccatctccccggcggagctccgcttcggagacaacgacaccctgtccgccctcgtggcggcggccgttggtgccgaccagctgatcctgctcaccgacgtggaccgtctctactcagcggatccgcggcttgtcgccgatgcccgcccgatttccgatgtgcatcacccgcgggagctggacgcccttgaagccgtcgccggtgacggcggacgttggggccgcggcggcatgaccaccaagctggcggcggccaggatcgccaccgccagcggcatcaccgtgcacctggcagatggtcgggatccaacgcgccttgatgccctgcttcagggggaacgcggaggcacggtgtttcatccccacccggaaccgctggggaaccgtcgcagctggctggctcatgcgttgcaaccccagggctcgctgacgctggatgccggtgcctgcgatgccttgcatcggcggggggcctccctgttgatggttggaatcactgcggtgcagggagccttcgccgccaatcagccggtccggttgcagggtccggatggccgcgagctgggacgcggcctgtgccagctgtccagcgcagctgttcagcgcgctcttgatgctgcgccggctgccggtccatcgcctgtggtggtgcatcggg

SEQ ID NO: 249788 - DNA, 839 bp, Unknown
  Bacterial polypeptide expressing nucleotide sequence isolated from the Sargasso Sea
aatggtctccataaaatcaattcaattagattctataaataatgcaaaaagaatagttctaaaagtaggttctgcattaattgttaacccaaaaacaggtaatatcaacgaatcatgggttaaaagcctagtccaagatattttattcttattaaaaaataataaagaaatattaatagttagttctggggctatagcacttggtaaatctgaattaaatttgcaaaataagtctctaaaattgtctgaaaagcaagcagctgctgccacaggacaaatattattagcaaaagcttggaaaagtatatttgagaaagtaaatattaaatgtggacaaatactagtgggccatagtgacttagaaactagaagaaatgcaatgaatactagagcaacattaagtacattacttaaattaaaagtgatacctattataaatgaaaatgataccgtagctactcgtgaaataaggtatggagataatgatcaattagcagcgagaattgcacaattagcagaagcagacatattagtacttctatccgatatagatggattatattcagaagatcctaaaacatcatctaaagcagaatttattaaggaaatagaagatatttcatcagaaattgaaaatatggctagaaatacaaaatcaaatatagcctctggtgggatgattaccaaaataaaagctgcaaaaattgcaactgctggaggctgtaatttaattattgctcatggaaaaaataaaaatagcctattaaaacttataaatggtggaaagcactctatatttaaggctaaccttagtcctattaatgctaaaaagaaatgga

SEQ ID NO: 249789 - DNA, 481 bp, Unknown
  Bacterial polypeptide expressing nucleotide sequence isolated from the Sargasso Sea
atgattagagaaaagataaaaaacgctaagcgattggtaataaaagtcggcagctccttggttactaacaatggtttaggtttgcatcatgatagaattttacattgggttgaacagatatcgtgcctgcacgatcagggcaaaaaagtggtacttgtgtcttctggcgcagtagcagagggagtctcccggctcggtttaataaaaagaccagaagaaatgcatttacaacaagcggcagcagccgtgggtcagatggggttggtacaaatttatgagagtttcttcaaaaatcatgatgtacatacggctcaaatcttattaagccatgaagatctaagtgatagaacacgttatcttaatgctcgtacaacttttactacccttctagatatgggggttatcccggttgtaaatgagaacgatactgtcgccaccgcagagttatgctttggtgataacgatacgcttgctgctcttg

SEQ ID NO: 249790 - DNA, 782 bp, Unknown
  Bacterial polypeptide expressing nucleotide sequence isolated from the Sargasso Sea
tagtgatcgaacgcgatacctaaatgctcggacaactttaactacccttttgagtatgggtgtgattccagtcgtaaatgaaaatgatactgttgcaacagcagagttgtgttttggtgataatgatacgcttgcggccctagttgccaatctagtgaatgccgaggctatgattttccttacagaccaagatggtgttttcgatgaagatccgcgtgttaacgctgctagtaatttaattccaaagatctcagcacatgatgaatcattagttcaagtcgcgggcaagggaactactttaggccgaggcgggatggttacaaaaatttcagccgcgagattagcggcgcgctctggtactgacacggtaattgcaaatggtgaaatacctgatgtattagtcaagtttgctgaaggaaaactaattggtagtttgttatatgcggatagtgagccaatagcggcccgaaaacaatggcttgccggtcagttgtccgtaaaaggcaccttacaacttgatcggggggctattagggtgctgaaaaattctggtacaagcttattggcagtaggcattgaatttgttgatggaaaattttttcgcggcgatgtcgtatcttgtgttgattctaaaggtagagaaattgctaggggcctcgtaaactatgatagtaaagaagtggaggtcctacgcggccaaatcagtgaaaagattgaagatcttataggatatgctggggatgaagaaataattcatagagacaatctagttttaatgtaat

SEQ ID NO: 249791 - DNA, 1105 bp, Unknown
  Bacterial polypeptide expressing nucleotide sequence isolated from the Sargasso Sea
atggaaaacagaaccatagtcgtcaaactgggcaccagcgtgctcaccgggggatcttcccagctcaatcgtgcccacatggtcgagctggtcagacagtgtgcagccttgcaccgtcacggccacagggtcgtggtggtcacctcgggggccattgcggccggccgtgagcatctgggccaccctccattggcgccaaccctgcccaacaagcagatgctggcggccgtcggccagacccagctgatccgggtatggcaggatctgttcaacctctatgggctgcacatcggtcagatgctgctgacccgcgccgaccttgaagatcgcgagcgttacctcaatgcccgcgacaccctgcgtaccctgcttgatcatcgcatcatcccggtcatcaacgagaacgacgcagtggcgactgccgaaatcaaggtaggggacaacgacaacctctccgctcgcgccgccatcctggccgatgcggatctgctgatcctgctcaccgaccagaaggggctgtttaccgccgatccccgtaccaacccggatgcccagctcatcgaagaggtgcagaccatcgacgacaccctgcgcaagctggcgggtgacagcatcagcgggctcggtaccggcggcatggccaccaagctgcaggccgccgacgtggcgcgccgcgccggcgtcaacgtggtgatcgccaccggccagatgccggaagtggtcggccgtctcgccaagggtgagcgcatcggcaccctgttcccggcgctggcgtcgccgctggaagggcgcaagagctggatcctggcagggcctcctcctcacggcgaagtgcaggtggatcagggcgccgtggccgccatgcaggagaagggctccagcctgctgcccaagggcatagtggcggtgaagggcgatttcgtgcgtggcgacgtggtgcgcattctcgaccccaagggggccgagctggcgcgcggcatctgccgttacaatcacctggagctggacaagctgcgcggcgtccattcggacaacatcgaacaggtgctgggttacggctatggcgccgtggccatccaccgcgacgacatggtgctgctgtgag

SEQ ID NO: 249792 - DNA, 913 bp, Unknown
  Bacterial polypeptide expressing nucleotide sequence isolated from the Sargasso Sea
ccttcaaaaattaatgagttgcaagcgatagcggcggttggtcagatgaatttaatgcaagcttatgaagaagatattggaaggcttggtcgaactagcgctatgattttgctgactcatgaagatttctcgaaccggcagcgatatttgaatgctcggtctaccctaactcgtttgctagaccttggcgttattcctctgatcaatgagaacgatacagtggctaccgacgaaatcaggtttggggacaacgatactctatcagcattggtaacgaatctaattgacgctgatcttcaaattattttgaccgatgtagaaggtttgatggataaagatccgaatattcatggcagcgctgaagttatcctcaaagcgccagccgatgacaaaagtctcgaaggcctatcgagtgatcgtaccagtgcgcttggtcgcggaggtatgctctccaaggttagggctgcgaggttggctagtcggtcgggagcggatactgttatcgcatccggaaaggtcgccggaatattgaccagaatagtttctggggaagaaataggaacacatctattcgtccataaaaaatctctcagatctcgaaaacgttggattgcagatcagttaaagcctgcaggatatgtagtcatcgactctggagcatctgaagcactttcaaagggaggagctagcctattagctgtgggagttctaggtgtatacggaaattttgagcgaggcgatttaatagagtgccggactgaggatgccacggttgtcgctcagggattggttaattattcctctgtagatatttcaaatctaaaagggctcaactctgaaaagtactcagacaagatcgaacacgtatacgaaaacgagttggtacattgtgataacctagtgctcgtttgag

SEQ ID NO: 249793 - DNA, 1120 bp, Unknown
  Bacterial polypeptide expressing nucleotide sequence isolated from the Sargasso Sea
aatgaacttaagtgagatagcgtatcgccgcgtggtggtgaagttggggacgagtgtgctgacttctggcagtaaacagctagataaagcccatatggttgagcttgctcgtcaaatggccgcactgatgagatcaggggtcgaagtcgtattatgtacttctggggcaattgccgcaggacgcgaacatctccaatacccggtattgcccgatactatggctaacaaacagttattagccgctgtcgggcagagtcagcttattcttgcttgggcgcaactctttagcatctacggtttgcatgtggggcaattgctgctgacccgtgcagacctacacgatagagagcgctatttgaatgcccgcgatacgcttaatgccttgctggcacacaatattatccccatcatcaatgaaaatgatgcggttgcaactaacgaaatcaaagtgggtgacaacgacaacttgtcagcgcgcgcagcattgctgtgtgatgctgatctgttgattttgttgacggatcaaaagggcttattcgatgccgatccacgcaccaatcccaatgccaaactgatttcgcaggttgagaaaattgatgacagtttgcgcctgttagcgggtggttcggtctcggggttaggcaccggggggatgtcgactaagctcgaagcggccgatatagctcgccgcgcgggaattgaagtggtgattgcctcaggtcatcatcctgatgtgattaagaaagttgttgccaaagaatccattggcacccattttagcgccatcgaaaacccattagaaagccgcaaacagtggattttagcggggcctgcggcccaaggttcactggtactcgatgctggggcggttaaagcagtgaccgaaaaaggtcgtagcctgttatctaagggcattattggcgtcaaaggagagtttgaacggggtgcaactctgcaattagttgaccaaaatggcaaaattattgccagaggcataacccgttactgtggtgaggcgctagggttgattgcgggtaaacattccgacgaaatcgagtctgtgctcggttacgattatggtgacgcaattgtccaccgtaacgatatggtcgtcttataa

SEQ ID NO: 249794 - DNA, 475 bp, Unknown
  Bacterial polypeptide expressing nucleotide sequence isolated from the Sargasso Sea
gatgatcaataaatataaaaaaattgttattaaaattggatcatcttcgattgtaaatccaaagtcaaaaaaaattaatacaaaatggatgataaaactttgtaaggatataaaaaaatatcataaagaaaaaaatattattattgtatgttcaggagctattgcacttggttcacccttgattaaaaataaaaatttaagaaagttagaagataaacaagctgctgcttctgtaggtcaaatagaattagctcatcaatggaaacaacatttaaaaactcataaaatagatattgctcaagttcttattacaattgaggatagtgaagttagaagaagataccttaatgctagaaaaacaataaatacgcttttgcaaaacaaagttattcccgtaattaatgaaaatgatactgttgcaactgaagaaataaaatatggagataatgatagattggcagcaaggagtgcccaa

SEQ ID NO: 249795 - DNA, 1120 bp, Unknown
  Bacterial polypeptide expressing nucleotide sequence isolated from the Sargasso Sea
atgaatttaagtgagattgcgtatcgccgcgtggtagtgaagttagggacgagtgtgctgacgtctggcagtaaacagctggataaagcccatatggttgagcttgctcgtcaaatggccgcactgatgagatctggggtcgaagtcgtattatgcacttctggcgcaattgccgccggacgcgaacatctccaatacccggtattgcccgacactatggccaataaacagttattagccgctgtcgggcagagtcagcttattctcgcttgggcgcaactctttagcatctacggtttacatgtggggcaattgctgctgacccgtgctgacctacacgatcgagagcgctatttgaatgcccgcgatacccttaatgccttgttggcaaacaatattatccccatcatcaatgaaaacgatgccgtcgcaactaatgagatcaaagtgggcgacaacgacaacttgtcggcgcgtgcggcgctgctgtgtgatgccgacctgttgattttattgacggatcaaaagggcctattcgatgccgatccgcgcactaaccctaatgctaagctgatttcgcaggtcgagaaaattgatgacagtctgcgcttgttggcgggtggttcggtttctgggttaggaacgggcggaatgtcgactaagctagaagctgcggatattgctcgccgtgcgggcattgaagtggtgatagcttcgggtcatcaccctgatgtgattaaaaaagtcgtcggcaaagagtctgtcggcacccattttagtgccatcgaaaatccgttagagagccgcaaacagtggattttagcgggacctgccgcccaaggttcactggtgctcgatgcgggcgcggtgaaagccgtgaccgaaaaaggtcgcagcttgttatcgaagggcattattggcgttaaaggtgaatttgaacgtggtgcaaccctgcaattggttgaccaaaaaggcaaaatcattgccagaggtatcacccgctactgtggtgatgccttagggttaattgcaggtaaacattccgacgaaatcgagtctgtgctcggttacgattatggtgacgcaatagtgcaccgcaacgacatggtcgtcttataag

SEQ ID NO: 249796 - DNA, 1105 bp, Unknown
  Bacterial polypeptide expressing nucleotide sequence isolated from the Sargasso Sea
atgattaaaaaatataaaaaagtagttgtaaaaattggttcaaattcaattgttgattcgaaaacaaaaaagatcaaatctaagtggttagataatttatgtaaagacattgcggaattgaataaaacaaaaaaaattgtgattgtgtgttctggcgctattgctttaggtgcgaaaagtatttcaaatacaaagttaagaaaattagaagataaacaggcagcagcttcagttggtcaaattgaattagcccatcaatggcgaaataaactaggaaaatacaagataggtgtttctcaaattttattaacattagaagatagcgaagaaaggcgacgatatttaaatgctagaaatacaatatcatcattacaaagtaaaaacataatcccaatcattaatgaaaatgacactgttgctactgaggaaattcgctatggtgataatgatagacttgcagcccgagtagcacaaatgattgaagctgatttattaattttattaagtgatgttgatggtttatatcaaggtaatccaaaaaaagataaggatgtcaaaaaaatttcagaggtatttaaaattgataaaaaaattgaagaacttggtaattatcaatcttctgaactaggcagtggaggaatggccacaaaaattttagcagcaaagatatgtgcgggaaacggttgtgctacaataatcactaatagtgataaaaacagaccaatcagtaatattaataaaaaaaattcaacaattttttatcccttaacttctacaaattcgtccaaaaagaaatggttattaaatcatttaaaaccatcaggatcgattattatagatacaggggctcaaaatgcaattttgaaaaataaaagtcttcttcctgcaggtgtaatagatatcaagggaaggttcaaaagaggtgatgtaatatctatcttagttgagaatggtcagaaggtagcaataggtatatctgcttatgattttaatgatgcaaaaaaaattattggaaagaaaagtaaagaaatttataaagttttaggtttcgaaggaagagaggaagtggtacataaagataatttagttaagctttctacatgag

SEQ ID NO: 249797 - DNA, 1117 bp, Unknown
  Bacterial polypeptide expressing nucleotide sequence isolated from the Sargasso Sea
atgaaaataaaagaaataaatagaatggtggtgaaaattggctcctcacttcttattgataaagataaaggagtgaataataatttcttgaataatattagtgaagatattttgtcattaaaaaaaaggggtatagaaactttagtagtttcttcaggcgctatagaattaggaaaaattgaattagataaaacaaaagagaaatttaatttagcagaaagtcaggccgcttcttcaattggccaaataaaattaataaattcttggaaagaatctttaagtaagtttgatcttaatgctgctcaaatattaataactgctgaagatacagaaaatagaaaaagatttttaaatgctagatcaacaatagaagaattattgcgagaaaaatatattccaataataaatgagaatgatacggtagctacatccgagatcaggtatggagataatgatagactagcagctagaatagctggaatggttgctgcggattgcttaatcctgttatccaatgttgaaggtctctatgagagagatccctctaatgaagaaagcagattagttagtaatgtagaaattatagataagagcgttactgatatggcaggtgaggcaggagaattaggtagaggcggtatgataacaaaaattgaagctgcaaaaatagctactaagagtggctgccaaatgattatttcttcaggtagagtaaaaaaccctatcctatcttcactaaatgatggaattggaactgttttccaatctcaaaataaaaacctgagtgctcttaaaagctggatttctggaagtataaaaccatcgggagaaataaatattgataacggagctaacttagctcttaaaaatggtaaaagtcttctatctgcgggaattattaattttgatggtgaatttgataaaggtgatactgttacaattaaatctcgagataaagaagtagctaggggcttaactaatttcaattcaaatgatttatctaaaataattggtaaaaaatctgaagaaattgaagaaattttaggctatcttactaagacggaagtaattcatagaaataatttattttactctggaaatatggatgaagactaat

SEQ ID NO: 249798 - DNA, 418 bp, Unknown
  Bacterial polypeptide expressing nucleotide sequence isolated from the Sargasso Sea
gagttacggcccattcactggctcttggagaagggggcgattgtgatttgcgctggtggaggggggataccaacagcatacaattctgaaggatcgctggagggtgttgaagtagtaattgacaaggacaaggccagcgccttactcgcaaggcagttgggatcaaggctgctaatcctggctacagacgcagatggagtataccgcgactggggtactgaaagccaggaattgatacagatcgccacacccgaagagatatcgaagatggattttgagcctggatcaatgggaccgaaagtagaggcggcctgtgacttcgtaatgaggactggcgagcgtgcggtaattggcgcattgacggacatcgccgagatggtagatgggaaggcgggcacccaaatcaccattgaatgag

SEQ ID NO: 249799 - DNA, 526 bp, Unknown
  Bacterial polypeptide expressing nucleotide sequence isolated from the Sargasso Sea
gaagagcgggtgaaaaatatgggatgggttgttaaagagcaagatccaggagaatggagaagggttgtaccatctccagaccctgattttgttatgcatggaatcagtataagaactttagttcatgctggaattatagttttagcagcaggtggaggtggtattccagtatatattaatcaagaaggtaaatttgaaggaattgatgcagtaattgataaagatctaactgctgcaaagcttggaagagttattcgagcagatgaatattatatagtaaccgatattgatcaggtttatttggattatggaacagagaatcaatctccaatcaatcaaatgactgatatagatgccaagaaataccaagaagaaggtcattttcaaaaaggaagtatgtggccaaaaattcgttctgcaatatattttttgaaacaccatgggaagaaagtaattattactaacattgatcatttgcaagatgcaattgacggaaaagctggaacaacaattgttaaaggataat

SEQ ID NO: 249800 - DNA, 277 bp, Unknown
  Bacterial polypeptide expressing nucleotide sequence isolated from the Sargasso Sea
gatgaaacagcgaatcgtactggccctgggcggcaatgcgctgggcaacaacctgcccgagcagatgaaggcggtgcagagcacggcgggcaccattgccgacctcattgcccaggggcacgaggtggtggtgacccacggcaatggcccccaggtggggatgatccagcaggcgttcgaggtggcggcccgccacgatcccaaggcgccccatctgcccatgtcggtctgcgtggccctgagtcaggggtacatcggctatgacctgcaaaacgcc

SEQ ID NO: 249801 - DNA, 507 bp, Unknown
  Bacterial polypeptide expressing nucleotide sequence isolated from the Sargasso Sea
aatggctaaatcaattttaattgctcttggaggtaatgctctatcgcctaaagaagaggcgggtactatatatcaacaatttgcccatactcgcgaaagcgttgataatattatgcattttgttcaattgggatataatatttgcctgacccatggaaatggtccacaagttggtgatgagctttatcgcatggagcttacccatgaaacaattccgcctttacccttaggagtatgcgtagctgagacccaaggatcaatcggttatatggttcagcaatctttgcaaaatgtattaaaagaaaagaaaattgatcgcgaagtggttactttaattactcaaaccatagttgataagaatgatccatcaattaatgatcctcaaaaattcattggaaggagatacgaaaaaaccaaggctcaagccctggcaagtcaattcaattggacaattaaagaacaagagcctggcagttggaggcaggtcgttcctagtccattcccaga

SEQ ID NO: 249802 - DNA, 306 bp, Unknown
  Bacterial polypeptide expressing nucleotide sequence isolated from the Sargasso Sea
catggaaaacaaacctactctggttgtggcgttgggcggcaatgcgctgctcaaacgcggcgagccgctggaagctgacatccagcgcaagaacattgagctggcggcaaaaactatcgctcagctcacacagcaatggcgcgtaattctggtgcacggcaatggcccgcaggttggacttttggcgttgcaaaacagtgcgtatgccagcgtcaccccctatccgctagacattctcggcgcggaaagtcagggaatgattggctatatgctgcaacaggcgctgaaaaaccagcttccacagcg

SEQ ID NO: 249803 - DNA, 653 bp, Unknown
  Bacterial polypeptide expressing nucleotide sequence isolated from the Sargasso Sea
tttaaaccaagaaaaaattgacaaggaagtagtgacattggttactcaagtggttgttgatcccaagcatccttcattaaaaaatccaacaaaatttgtaggaaagcgtttttcaaaaaaagaagcagaaaaaagagcaaaaaatatgggatggattgtgaaagaacaagatccaggagaatggagaagagtagtgccatctccagatccagactttgtaatgcatggcataagtatcagaacattagttcatgctggaattgttgtgctcgctgcaggaggtggaggtattccagttttcatagaagataatggaaattttaatggtatagatgctgttattgacaaagatttaacagctgcaaagcttggaagagtcattcgtgctgatgaatactacattgtgactgatattgatcaagtatatctaaactatggaacaaaaaatcaatctccaattgatcaaatgacagatgaagaagcaaaaaaatatcaagaagaaggtcattttcagcaaggaagtatgtggccaaaaattcgttctgctattcactttttaaaacatcatggtaaaaaagttattattaccaatattgataatttacagaatgcaattgatggaaaagctggcacaactatagttaaaggataat

SEQ ID NO: 249804 - DNA, 592 bp, Unknown
  Bacterial polypeptide expressing nucleotide sequence isolated from the Sargasso Sea
ttggaaatttggcgtcgagtggtaccttctccaaagccaattggaattgtggaaattgatattattgagtcctgttatttatctggccatatacctattacagttggtgggggaggtattccggtagtaaaggtccctcctcaaaaaaataaaaatcacgaaacatatgagtgtaattacgatatttcttataaaagatcaattgcaggaggtgaacctcaagctaatatatataaaggaattgaaggcgtagttgataaagacctgtcctccagtttacttgcaaaaatgattttagaacgttcaatttctagaggtaatccaattgaagttgaattagtaattctaactaatgttgattctgttaaacttaattttcaaaaaacaaatgaagagagcctcccaatcctttctcttgatgaagcaacctctctttataaatcatctcaatttcaagaaggcagtatgagtcctaaaattgaatcaatattaaattttctaaatgctgggggtaaaaaagcctacattacaaaagttgatttgcttgaagagactttctctggagatgctggaacaacttttacaaattaga

SEQ ID NO: 249805 - DNA, 802 bp, Unknown
  Bacterial polypeptide expressing nucleotide sequence isolated from the Sargasso Sea
agacgaatgtaatggtagaacaggagtaactccagaatttccaaatgggatatattattatgtagttacggataatttcccttttttcactagatgcttaaaaggtgattttagttctgctggaggaggtggaatcccaagctgtgaggatgtccctcctggaaacccatgctgcggagatggagtttgtggtggaccagaaaccgaagataattgtcctatcgattgtggaacaatcgttactccaccagaattaaatagtattggtttttcagcagatacgataaatactaactccaatgcagttgcagtgatttataatttgacagccacagcttatgataattatctatctagttacactataagactaatcttaaatggtggaccaattaatggaggcgaaatatttgaagattcgggaacatttaatatgggagtttttgaatctactaaaagtgggacatttttatttccaattgggacaacggagggccagtggaacataagggtaatattgatagatgaaaataataatgaaaccaatttgggccctaacgagcttggacaaaataattttcaaaatttcataatcgtggataattcgacaatgcaaatagatggtacccaagtaccattagagttttctttaggtcaaaatttcccaaacccttttaaccctattacctcaataagatatgctatccctaatgattcatttgtcaagataaccatttatgacgttttaggtaatgttattaagaaccttttacaaaagcatcaatcatctggatttaaaacg

SEQ ID NO: 249806 - DNA, 531 bp, Unknown
  Bacterial polypeptide expressing nucleotide sequence isolated from the Sargasso Sea
catgattgcaatgggcggaaacagtatttctccaaaaagcggaactggtagaatagaagaacaatttgaaagaactagggaagcatttgatggtatctctcatttcataaaaagaggatataatctatgcattaaccatggtaatggtcctcaggtgggcaatgaaataatgagaatggagctcacacaagatactgtccctccacttccgctgggagtgtgtgttgcaagcacccaaggatctattggttacatgattcagcaatgtcttcaaaataaactaagagaaatggagattgatcgggaagttgttacccttgtttctcaagtgatcgtagataaaaatgatgattcatttaaagaaccaacaaagtatattggaaagcgatacacaaaacaagaagccgatgaaatgaccacggattttgactggcatttcaaagaacaagaagaaggaaaatatcgtagagtcgtaccctctccaatgccagaatacattatgcacggaaaatcaattaaggcattggttga

SEQ ID NO: 249807 - DNA, 394 bp, Unknown
  Bacterial polypeptide expressing nucleotide sequence isolated from the Sargasso Sea
attagaaaaaggaactgtcgtaatctgtgccggcggaggaggaattcctacctcatacaaagacaatggaaaattagaaggtgttgaggttgtaatcgataaagatagagcgagttctttactagcatttgaattggaagctgatttactaattatggctacggacacagatggagtatatcttgactgggggagtgactcagagaaaatcatctcaaaaacaacacctgaagaaatcagtaaatactcatttgataaaggctctatggggccaaaagttgaggctgcctgttcatttgtcgaacgctcaggtcaaagggcagtaatcggctctttgaaggatattgagaaaatggtttctggtatatcaggaacacaatttttactaaaataa

SEQ ID NO: 249808 - DNA, 731 bp, Unknown
  Bacterial polypeptide expressing nucleotide sequence isolated from the Sargasso Sea
tagtaatccaacaaaatttataggaccaccactctcaaaagatcaagctcaatctcttatgaataagaatcctgattttaccgctaaattttaccagatgcttgaaaattcaaatatttcagatttaggcgctggtaaaaatcaagaagtttggagaagggttgttccttctccaaaacctattggaattgttgaaattgatattatcgaggcttgctttttatcaggaaatattccaattacagtcgggggaggaggtattcctgtattacaggttactccacaaaaaaataaaaatcatgaaacatacatttgtaattatcaaatctcctacaaaagaccaatttcagaaaaaaatcctgtatcaatattcaaaggagttgagggagtagtcgacaaggatttatcatccagtttactgggtaaaatgatactggaacgctctattacaagaggaaatccacttgaagttgaattagtaattttaacaaatgtagattccgtaaaaataaattttcaagaaaaaaatgaaaaaagcctttctcttttatctattgaagaagcaacaactctttttatgtctaataaatttcaagaaggaagtatgagaccaaaaattgaatccatattaaattttctaaatgctggtggtaaaaaagcctacattacaaaagttgaattgctagaaaagactttctgtggagaggccgggaccacttttacgaattaat

SEQ ID NO: 249809 - DNA, 447 bp, Unknown
  Bacterial polypeptide expressing nucleotide sequence isolated from the Sargasso Sea
catgtgcatcccagaggggaggtgttcttatcggttcacgcttggggaatatatcgtgagactagtagtagcactgggtggaaacgctctcctgaagaggggcgaggagcaaacgtccgagaaccagaggaggaacgtcagggaggcgtgcatggagctggcaccactagcgaaggagcaccaactggttatcacccatgggaatggcccacaagtaggactcctggccctacaatccgcatcgtacaaggaagcggaggaataccccctagatgttctgggcgctcagacagaggggatgctgggttacgcaatacaacaggagctgggtaacctcctgccgactgagagttcgttggctactatactaacgatggtggaggtcgatccagataatccggccttcgaaaatcccaccaagccaatggcccgattacagcgagcatg

SEQ ID NO: 249810 - DNA, 232 bp, Unknown
  Bacterial polypeptide expressing nucleotide sequence isolated from the Sargasso Sea
atggcgtccaccatctctgcctcatctgcttgcaacagcctcaagtcctccaacacactccacagttccgccatcggaacgaagtccggttttgaggagcgaggccatggcctcgaaaaactcgaatttgccctcgcatttgctgaaatgcgtggtgaaaccgagcgttgtctcaaattgagagctcagattgccgccctaggtggtaacgcagaggagccaggaacctgat

SEQ ID NO: 249811 - DNA, 547 bp, Unknown
  Bacterial polypeptide expressing nucleotide sequence isolated from the Sargasso Sea
aatgatcgcccttggtggaaatagtctttctccaaaaggtgttgcaggatccattgaacaacaattccgttatacgagagatactatggatgggttatcaatttttattagatctagctacaatatatgtattacacatggaaatgggccgcaggttggagatgcacttcatagaatggacctaactagcgaacaaatcccccctcttcctttgggtgtgtgtgttgctggaactcaaggtcaaatgggttacatgatccaacaatcattacaaaataaactcagagaaatggaaatagatcgtgaggtagtgacaatggttacacaggtcattgtcgataaaaatgatgaaagtttaaaaaacccaacaaaatatattggcccaagatattctaaggatgaaattttaaaattgagtgaaaattttaattggaatataaaggaacaagaaccaggcttttggaggagagtcgtcccctcccctatgccagaatatattatgcatggaaagtcaatcaaggctttggttgatagaggaacaatgtaa

SEQ ID NO: 249812 - DNA, 367 bp, Unknown
  Bacterial polypeptide expressing nucleotide sequence isolated from the Sargasso Sea
gtaccggtggtggaaaaagccgatggctaccacggcattgaagcggtgatcgacaaggatctctccgccgccctactcgcccgccaactccatgccgatgcgttgctgatcctcaccgatgctgatgccgtgtacctcgactggggcaaacctacccagcgcccgctgtcccaggtcaccccggaactgctcggtgaaatgcaattcgacgccggttcaatgggccccaaagtcaccgcctgcgcggaattcgtctctcactgtcgtgggattgctggcatcggttcactggccgacggctcggccattctcgccggcgacaaaggcacgctaattcgtctcgaaaccaccgacgctaacgcgtagg

SEQ ID NO: 249813 - DNA, 268 bp, Unknown
  Bacterial polypeptide expressing nucleotide sequence isolated from the Sargasso Sea
catggaaaaaactgcaatcattgctcttggaggaaacgctctctcagataaaagtcaagctggtactataaatgatcagtttagcaatactcgaaaatcattaactgaaattatcaagtttttaaaagaagactataatatctgtataactcatggaaatggtccgcaagttggagatgagctattaagaatggatttaactcaagatgaagtttctccattgccattaggtgtttgtgtagctggtacaactattgttaaggggtaa

SEQ ID NO: 249814 - DNA, 727 bp, Unknown
  Bacterial polypeptide expressing nucleotide sequence isolated from the Sargasso Sea
aaaacatgcgaaattttagctgattttataaaagaaaatcaaaatttttcttatataattactcatggcaacgggcctcaaattgggaatatattattaagatcagaatattcaagtaaacaccttttccctctgccgcttgacgtctgtggagcagattctcaaggagctcttggatacatgctggcccagctttcaaactcacttagtgtcaggggattgggaataaatactgctgaaataattacacaggtaattgttgatgcagatgatcctgccttccagaatccaatcaaatttataggtcctccattaacaaaagaggaagcaacgcagataatgagtgaaaatcaggactactgcgcaaaattttataagaatgctgacacaccagaattaaactcactcataacattctcaggtaaaacaaaggcccctttggaaatttggcgacgtgtggtaccgtctccaaagccaataggaattgtggaaattgatattattgaagcctgttatttatctggccatatacctattacagttggtggtggaggaattccagtagtaaaagtttctccaaaaaaaaataaaaatcacgaaacatatgaatgcaattacgatatttcatataaaagagaagtctcaaagggcgaatctcaagctcaaatatacaaaggaattgaaggcgtagttgataaagacctttcatccagtttactcgcaaaaa

SEQ ID NO: 249815 - DNA, 661 bp, Unknown
  Bacterial polypeptide expressing nucleotide sequence isolated from the Sargasso Sea
atgagggaaaaagataaacttatcatttttgctttgggaggaaatgaaatatcccctgttgaagtcgaccaaagttctggcaagcttatcaatcaggatttacatgcacaatggagtagaactgcaaacacatgtgaaattttagctgattttataaaagaaaatcaaaattaccattatattatcacacacggcaatgggcctcaaattgggaatatattattaagatctgagtattctagtaagtacctatttaccctgccacttgatgtctgcggagctgattcacaaggagctcttggatatatgctggcccagctctcaaactctcttcatgtcaggggactggaaaaaaataccgcagaaataattacacaggtaattgttgatcaaaatgatcctgccttccagaatccaaataaatttattggtcctcctttaacaaaagaggaagcaacacggctgatgaatgaaaattcggaatactgtgcaaagttttataagaatgctgaaaatcctaaattaaattcacataatagaacatcctctgtgaacagacatgaccctttggaaatttggcgacgcgtagtaccgtctcctaagccaataggaattgtggaaattgatatgattgaggccctgttatttatctggccatata

SEQ ID NO: 249816 - DNA, 733 bp, Unknown
  Bacterial polypeptide expressing nucleotide sequence isolated from the Sargasso Sea
ctggcgctacagaatgcagcatacaaagaatccccagcctggccgctggatattctggtcgcggaaagccagggaatgatcggtttcgctattactcaggaactggcgtcatccgcgggcaactctcccgtcacaatgctgatgacccgggttgaggtggatccgcaggacgaagccttctcagttcccggtaagtatattggccccgtgtatcaaccggatcaacaggcagagctggaagcatgctatggctggcagatgaaaaccgatgggcaatatattcgccgcgtggttccctcaccgactccgctgaaaattatcgatagcgacgccatccgtacgctgatggatgcgggacatacggttatttgctgtggcggtggcggtattccggttattgcacagggtgatggttaccagggaaccgaagcggtcattgataaggatttgaccgctgccgtattggcacaatccatcaacgctgaccatctgctgattctgacggacgccgatgccgtttatgaaaactggggaacaccgcaggcgcgtgcgctacgacatgccaccgtagaggaacttacgccatttgccgcgcctgatggtgcgatggggcctaaagcggcggcggtgatgcaatttgtcaaacagacagggaacgcggcatttatcggcgccctgaaagatgccccgcaaattctggccggagaaaaaggcacctgcgtgacaaagtaaa

SEQ ID NO: 249817 - DNA, 749 bp, Unknown
  Bacterial polypeptide expressing nucleotide sequence isolated from the Sargasso Sea
catggaaaaaactgcaatcatcgcacttggaggaaatgctctctcaaataaaagtcaagctggtaccataaatgatcagtttagcaatactcgaaaatcattaacagaaattatcaagtttttaaaagaagattataatatctgtataactcatggaaatggtccgcaagttggagatgagctattaagaatggatttaactcaagatgaagtttctccattgccattaggtgtttgtgtagctggtacacaaggaactataggttacatgattcagcaaactttccaaaatattttaaatcaagaaaatattgataaagaagtagtaacacttgtaacacaagttgttgtagatccaaaacatccttcacttaaaaatccaacaaaatttgttggacaacgtttttcaaagcaagaggcagaaaaaagagcaaagcgcatgggatggatagttaaagaacaagatcctggggagtggagaagggtagttccatctccagatcctgattttgtaatgcatggtattagtattagaactctagttgaggcaggtattatagttttagcagctggtggtggaggtattccagtttttattggtgaagatgggaagtttgaaggaattgatgcagtcattgataaagatctaacagctgcaaagcttggtagagtaattcgtgccgatgaatattatattgtaacggatattgagcaagtttatttaaactatggaactgataaccaatctt

SEQ ID NO: 249818 - DNA, 809 bp, Unknown
  Bacterial polypeptide expressing nucleotide sequence isolated from the Sargasso Sea
ggaaaaaaatactgcagaaataattacacaggtaattgttgatccaaatgatcctgcattccaaaatccaaacaaatttattggccctcctttaacgaaaaatgaagcaacacgcctgatgaatgaaaatccggaatactgtgcaaagttttataagaatgctgaaaatcctgaattaaactcacatagagcatcctctgtgaacacacatgagtctttggaaatttggcgacgtgtggtaccttctccaaagcctattggaattgtggaaattgatatgattgagtcctgttatttatctggccacataccaataacagttggtggcggtggaattccggtagtacaggtttcaccacaaaaaaataataatcacgaaacatatgagtgcaactacgatatttcttataaaaggtcaatttcaggaggagaatctcaagttaaaatatacaagggcattgaaggagtagttgataaagacttgtcctccagtttacttgcaaaaatgattttggaacgttcattatcaagagggaatccaattgaagttgaattagtaatactaactaacattgattctgttaaacttaattttcaaaaaacaaatgaagagagcatccaaaaattgtctcttgaagaagcaacctctctttataaatcatctcactttcaagagggcagcatgagtcctaaaattgaatctatattgaattttttaaatgcaggggggaaaaaagcctacattacaaaagttgatctgcttgaagaaactttctctggcaatgctggaacaacttttataaattaga

SEQ ID NO: 249819 - DNA, 755 bp, Unknown
  Bacterial polypeptide expressing nucleotide sequence isolated from the Sargasso Sea
cgcgcacgagcgtgaagggctgccgctacccccgctggcaaaatgcgtcgccgatacgcagggcggtatcggttatctgatccaacaggcgctgaacaaccgactggcacgacgcggcgagcaaaaggcagtgacggtggtcacgcaggtggaggtcgacaaaaacgatccgggctttgctaacccgaccaagcctatcggggcgttctttagtgaagtgcagcgtgatgaactgcagcgggtcaatccgggctggcgctttgttgaggattcggggcgcggctaccgtcgggttgtggcttcccctgaaccaaaacgtattgttgaagcagaggcgatcaaaacgctgactcagcaggggttcgtggtgattggtgcgggtggtggtggcatcccggtggtgcgtagcgatcagggggattaccagagcgtggatgcggtgattgataaagatctctccacggcgttgctggcacaggagatccgcgccgacattctggtgatcaccaccggcgtcgagcaggtctgtattcattttggcaaacctaaccagcaggcgctggatacggtggatgtcgccacgatgacccgttacatgcaggagggacatttcccgccgggcagcatgttacccaagattgttgccagcctggcgtttctggagcgtggcggtaaacgagtgatcatcaccacgccggaatgcctgcccgccgcactgcgcggcgaaacgggcacccatattgtccattcctgag

SEQ ID NO: 249820 - DNA, 601 bp, Unknown
  Bacterial polypeptide expressing nucleotide sequence isolated from the Sargasso Sea
atggaaaagaccgcgattattgctttagggggaaatgctctttcaaataagagtcaggctgggactattaatgaccagtttagtaataccagaaaatctttaacagaaattataaagtttttaaaagaagattataacatctgtattactcatggaaatggtcctcaggttggcgatgaattacttagaatggatttgactcaaaatgaagtttctccattgccactaggagtttgtgtagctggtactcagggaactattggttatatgattcaacaaaccttccagaatattttaaaccaagaaaaaattgataaggaagttgtaacattagtcacacaagtagttgtggaccctaaacatccttccttgaaaaatccaacgaaatttgtaggaaagcgtttttcaaaacaagaagcagaaaagagagcaaaaagcatgggatggattgtaaaagaacaagatcctggagaatggagaagggtagtaccatctccagatccagattttgtaatgcatggtataagtattagaacactagttcatgctggaattgttgtgattgctgctggaggtggaggtattcctagtttttattgat

SEQ ID NO: 249821 - DNA, 541 bp, Unknown
  Bacterial polypeptide expressing nucleotide sequence isolated from the Sargasso Sea
atgaatctacagcaaaaagacttgttaatgagcaaggggtggactattcgtgaagaaggagatcgaggttggcgtcgagtggtgccctccccaaccccaaaatcaatagtcgatatttcagctatcgaaactttgattgacgaacgttttgtagtaattgcctgtggaggaggaggtattcctgtttataaggacgaaaaaggaatgatacagggcatcgaagcggttatagacaaagactttgcatctggacttttgtcaagagagctatcagctgaactttttataatagccactgaagttgaacgagtagcaatagacttcggaacaaaaaatcaaagatggttaaataaacttacccgttctgaagccatcaaacatcttgatgaaggccaattccctgaaggtaatatgggcccaaaagtttccgctattatagagttcctcgaagcaggtggatcggccgggattataacaaacccgcctaatctaggccgtgccttagcccaaaaaaatggcacctggattgttccggattaaa

SEQ ID NO: 249822 - DNA, 763 bp, Unknown
  Bacterial polypeptide expressing nucleotide sequence isolated from the Sargasso Sea
atgaataaatctataattattgccctaggcggtaatgcactttcaccaaaagaggaagcgggtacaatatatcagcagtttgcgcatactcgtgaaagcattgacaacattatgcattttgtagatctagaatataatatttgcctaactcatggaaatggccctcaagtaggtgatgaactttatcgcatggagcttacgcatgaaataattcccccattacctttaggggtttgcgttgcagaaactcaaggatccattggatatatgattcagcagtccttgcaaaatgttttgaaacaaaaaaaaattgatcgtgaagtggttaccttaattactcaaacaatcgtggacaaaaacgatcctacaataaacgatcctcaaaaattcataggtcgaagatacgataaggtagaagctcaatccctcgcgcgtcaattcaattggactgtaaaagaacaagagcctggtagctggagacaggttgtgccaagcccaatgcctcaattcattgaacatggaagatctattcaaacactagtggacagcggtacaattgtaatcgcatcggggggtggaggtatacccactttttggaatgacgatcgaaaacttgaaggcttgaacgcagttgttgataaagacttatcagcagctttgcttggaagagtcataaaagctaacgaactatggatcataactgatctagatcaggtgtgtttgaattttggtaagcctaatgaaaaaccgttattgaaatgac

SEQ ID NO: 249823 - DNA, 775 bp, Unknown
  Bacterial polypeptide expressing nucleotide sequence isolated from the Sargasso Sea
cctgagagttcggggtaaggacctcaaaaccgcggaaatcatcactcaggtcattgtcgatcatgatgatcctgccttccaggaacccacaaagttcatcggaccgcccatgaccaaggaggaagcggaagaacaccagaaaaaccagggttacctctgccgattttacaagctcaatgaccagggacaggaggtttggcgcagggtggttccttctcccaaaccaaaggaaatcatcgaaatcgatatcatcgaaagctgcctgcagtcgggcaatattcctatcgcggttggaggcggaggcattccggtggtcgcaatcgaacctcaaaaagcaggggagctggaactatatccatgtagttatgacataacctatcaaaaatctctggatgccccgccggccaaagtctactgcggtgttgaaggagtgatcgacaaagatctttcctccagcctgctggccacttctttacgcgaacgcgcacaccgtcgcggagaagaattggaggtggtgtttgtgatcctgaccgatgtggatggggttaaactcaattaccaacagcctaatcaggaggacgtccgcagcctcaacttggaaaaaaccagggaactccaacagtcaggtattttcccaagtggaagcatggggcccaaagtcgaagccgttatcaatttcctcgaagcaggcggtcagcaggccttcatcaccaacatccaggttcttgaacaaaccttttccggccaggcaggaacctgtttcctgaccaactga

SEQ ID NO: 249824 - DNA, 717 bp, Unknown
  Bacterial polypeptide expressing nucleotide sequence isolated from the Sargasso Sea
aatgaaaaagcgtacggcaatgattgctcttggtggaaatagtctttcgccaaaaggtattggaggatctattaagcaacaatttcgttatacaagagacactatggatgggttatcaatttttattgaatctgactacaatatttgtcttacgcatggaaatggaccgcaggttggagatgccctgcatagaatggacctaactagcgaacaaatccctcctcttcctttaagtatttgtgtagctggaactcaaggtcaaatgggttacatgatccaacaatcattacaaaataaactcagagaattggatattgatcgtgaagtagtgacaatggttacacaggtcattgtcgataggaacgatgaaagtttaaaaaacccaacaaaatatattggcccaagatattctaaaggtgaaattttaaaaataagtgaaaattttaattggaatataaaggaacaagaaccaggattttggaggagagtagtcccctcccctatgccagaatatattatgcatggaaagtcaatcaaaaccttagttgatagaggaacaatagtaattgcatttggtggaggcggcatacctgttttcaacacagataaaaatagaattcaaggattagaagctgtcatagacaaagacttttctgcagcaaaaatgggtagaatcatacgtgcagaggaattatggataattagtgatatagaata

SEQ ID NO: 249825 - DNA, 589 bp, Unknown
  Bacterial polypeptide expressing nucleotide sequence isolated from the Sargasso Sea
aatgatcgcccttggtggaaatagtctttctccaaaaggtgttgcaggatctattggacaacaattccgttatacaagagatactatagaagggttatcaatttttattgaaactagctacaatatttgtattacacatggaaatggacctcaggttggagatgcattacatagaatggacctaactagcgaacaaatcccccctcttcctttgggtgtgtgcgttgctggaactcaaggtcaaatgggttatatgatccaacaatcattacaaaataaactcagagaaatgaaaatagatcgtgaggtagtgacaatggttactcaagtcatcgtcgatagaaatgatgaaagtttgaaaaacccaacaaaatatattggtccaagatattctaaggatgaaattttaaaattgagtaaaaattttaattggaatataaaggaacaagaaacaggtttttggaggagagtagtcccctcccctatgccagaatatatcatgcatggaaagtcaatcaaggctttggtcgatagagggacaattgtaattgcatttggtggaggaggcatacctgttctaagacagagg

SEQ ID NO: 249826 - DNA, 643 bp, Unknown
  Bacterial polypeptide expressing nucleotide sequence isolated from the Sargasso Sea
catcagaaaaaccagggttacctctgccgggttctacaagctcaatgaccagggacaagaggtttggcgcagggtggttccttctcccaaaccaaaggaaatcatcgaaatcgatatcatcgaaagctgcttgcagtctggcaacatccctatcgcggttggaggcggaggcattccggtggtcgcaatcgaacctcaaaaagcaggggagttggaacaatatccatgcagctacgacattacctatcaaaaatctctggatgacccaccggccaaagtctactgcggtgttgaaggagtgatcgacaaggatctttcctccagcctgctggccacttctttacgcgaacgcgcgcaccgtcgcggtgaagaattggaggtggtgtttgtgatcctgaccgatgtggatggggttaaactcaattaccagcagcccaatcaggaggacgtccgcagcctcaacttggaagaaaccaggcagcttcaacagtcaggaattttccccagcggaagcatggggcccaaagtcgaagctgttatcaatttcctcgaagctggtggtcagcaggccttcatcaccaacatccaggttcttgaacaaaccttttccggccaggcaggaacacgattccaatctcattga

SEQ ID NO: 249827 - DNA, 601 bp, Unknown
  Bacterial polypeptide expressing nucleotide sequence isolated from the Sargasso Sea
atgcataaaaaaactataatgattgctctaggtggcaatagtttatcccctaaaggatcttcaggtaaaattggcgagcagtttttatttacaagaagaaccatggagcatctatctgagtttattttacaagactataacatatgtataacccatggtaatgggccccaggtaggaaatgaattacttaggatggatttgacaaatgatgtagtacctcccctaccccttggcatgtgcgttgcaaatactcaagggcagatcggatatatggtccagcaaacactccaaaataaattaagagatctagaagttgatcgagaagttgtgactttagtaacacaagtactggttgataaaaatgataaaagcataaaaaacccaacaaaatttgtaggtgctcgatacacaaaaggggaaattgataaacttgcaaaaaaattaaattggattgttaaagagcaagaacccggctcatggaggagagttgtcccctcccctatgcctgagtacatcatgcatggtaagtcgattaaagcattagtagaccgaggaacaattgtaattgcatttggaggtggtggtatacccagtttttaac

SEQ ID NO: 249828 - DNA, 721 bp, Unknown
  Bacterial polypeptide expressing nucleotide sequence isolated from the Sargasso Sea
cttagtgttagaggaataggaataaatactgcagaaataattacccaggtaattgttgatgcagaagaccctgccttccagaatccaaacaaatttataggtcctcccctaacaaaagaggaagcaacacagataatgaatgaaaatgagggctactgcgcaaagttttacaagaatgctgaaaatccagaatataactcatttataacatcctcaggagacattaaggcccctttggaaatttggcgtcgagtggtaccgtctccaaagccaataggaattgtagaaattgatattattgagtcctgttatttatctggccatatacctattacagttggtggaggaggtattccggtagtaaaagtctttcctcaaaaaaataaaaatcacgaatcatatgagtgtaattacgaaatttcttataaaagatcaattgcagtaggtgaacctcaagctaatatatataaaggaattgaaggcgtagttgataaagacctgtcctccagtttacttgcaaaaatgattttagaacgttcaatttctagaggtaatccaattgaagttgaattagtaattctaactaatgttgattctgttaaacttaattttcaaaaaacaaatgaagagagcatcccaatcctgtctcttgaagaagcaacctctctttataaatcatctcaatttcaagaaggcagcatgagtcctaaaattgagtcca

SEQ ID NO: 249829 - DNA, 562 bp, Unknown
  Bacterial polypeptide expressing nucleotide sequence isolated from the Sargasso Sea
catgcttgtcgttgcagccctcgggggaaatgcccttctgcgccgtggcgaacctctgaccgcggagacccaacgcaccaacgtcgccaccgcggccgcatcgctggcacagatcatcgaggccggccaccaactggttgtcactcatggcaacgggccgcaaatcggcctgttggcacttcagggtgccgcctacaaacccgatgaggtgttcccgctggatgtgctgggggcggaaaccgacggcatgatcggctatctcatagagcaggagctcgagaacgccctgggccatgaccgcccggtcgcgacactgctgacccaggtcgaggtcgaccccaaagaccctgccttcgccagaccgaccaagttcatcggcccggtctatgacaaggccgaagccgaacggcttgcgcaggcgcggagttggagcatcgccgcggatggtgcgcactggcggcgtgtcgtcccctcaccaatgccgatggacattccggatttgcgggtgcttcagctcctgctcgagcaggatgtgacgctgatctgtgcaggtggcggcggc

SEQ ID NO: 249830 - DNA, 778 bp, Unknown
  Bacterial polypeptide expressing nucleotide sequence isolated from the Sargasso Sea
ctgatcaatcagaattttcaagcacgatggagtagaactgcaaaaacatatgaaattgtagctaatattataaaggaaaatcaaaatttttcttatataatcactcatggtaatgggcctcaaattcgaaatatattattaagatcagagtattccagcaatcatctgcataaaattccgcttgatgtctgcggagcagatcctcagggagctcttggatacatgctggcccagctttcaaactccctccatgtcagggggctagaaataaatactgctgaaataattactcaggtgattgttgatgcagaagatcctgcctttcagaatccaagtaaatttattggtcccccgttaacaaaagagcaagcaacgagtttaatgaatgaatatccgaaatactgtgcaaagttttataagaatgctgaaaatcctgaattaaactcacttatagtatcctctgggaatacacatagccctttggaaatttggcgacgtgtggtaccttctccaaagcctattggaattgtggaaattgatattattgagtcctgttatttgtctggccatataccaattacagttggtgggggagggattccagtagtaaaggtttctccacaaaaaaataaaaatctcgaaacctatgagtgtaattacgatatttcttataaaagatttaattcagggggtgagcctcaagctaatatatacaaaggaattgaaggagtagttgataaagacctatcctccagtttacttgcaaaaatgatattgc

SEQ ID NO: 249831 - DNA, 949 bp, Unknown
  Bacterial polypeptide expressing nucleotide sequence isolated from the Sargasso Sea
aatgggaaagctctatctattcgcgttgggaggcaatgaaatttctccggtcatcaccgatccggaaaccgggaagatggtcaaccctgaccttcctgcgcaatggcgacaggcctggaaaacctgtgaaatcctggctcagttcatcgttgaccacccggatagtgcatacatcctgacccatggtaatggtcctcagatcggcaatatcctgctacgttcagaatatgccggtgaaatgatccacaaattgcctatcgatgtttgtggggcggatacccagggagccttgggctacatgttggcgcaactctccaactctctaagagttcggggtaaggacctcaaaaccgcggaaatcatcacccaggtcatcgttaatcatgatgatcctgccttccaggaacccacaaagttcatcggaccgcccatgaccaaggaggaagccgaagaacaccagaaaaaccagggttacctctgcgggttcttcaagctcaatgaacagggaaaggaggtttggcgcagggtggttccttctcccaaaccaaaggaaatcatcgaaatcgatatcatcgaaagctgcttgcagtcgggcaacatccctatcgcggttggaggcggaggcattccggtggtcgcaatcgaacctcaaaaagcaggggagttggaacaatatccatgcagctacgacattacctatcaaaaatctctggatgccccgccggccaaagtctactgcggtgttgaaggagtgatcgacaaggatctttcctccagcctgctggccacttttttacgcgaacgtgcacaccgtcgcggagaagaattggaggtggtgtttgtgatactgaccgatgtggatggggttaaacttaattaccaacagcccaatcaggaggacgtccgcagcctcaacttggaaaaaccagggaaactcagcagtcaggta

SEQ ID NO: 249832 - DNA, 922 bp, Unknown
  Bacterial polypeptide expressing nucleotide sequence isolated from the Sargasso Sea
ctgacccatggtaatggtcctcagatcggcaatatcctgcttcgttcagaatatgccggtgaaatgatccacaaattgcccatcgatgtatgcggggcggatacccagggagccttaggctacatgttggcgcaactctcgaactccctgagagttcggggtaaggacctcaaaactgcggaaatcatcacccaggtcatcgttgatcatgatgatcctgccttccaggaacccacaaagttcatcggcccgcccatgaccaaggaagaagccgaagaacaccagaaaaaccagggttacctctgcggattctacaagctcaatgaccagggacaggaggtttggcgcagggtggttccttctccaaaacctaatgaaatcatcgaaatcgatatcatcgaaagctgcctgcagtcgggcaacatccctattgcagttggaggtggaggcattccggtggtcgcaatcgaacctcaaaaagcaggagagctggaacaatattcatgcagctacgacatcacctatcaaaaatctctggatgccccgccggctaaagtctactgcggtgttgaaggagtgatcgacaaggatctttcctccagcctgctggccacttctttacgcgaacgcgcaaaccgtcgcggagaagaattggaggtagtgtttgtgatcctgaccgatgtggatggggttaaactaaattaccaacagcccaatcaggaggacgtccgcagcctcaacttggaagaaaccagggaactccaacagtcaggaattttcccaagcggaagcatggggcccaaagttgaagccgttatcaatttcctcgaagccggcggtcagcaggccttcatcaccaacatccaggttcttgaacaaaccttttccggccaggcaggaacacgtttccaatctcattgaa

SEQ ID NO: 249833 - DNA, 943 bp, Unknown
  Bacterial polypeptide expressing nucleotide sequence isolated from the Sargasso Sea
gatgaataaatctataattattgctcttggtggtaatgcactttcaccgaaagaggaagcgggtacaatttatcagcagtttgcgcacacacgcgaaagcattgataacataatgcattttgtagatttagaatataatatttgcctaacccatggaaatggccctcaagttggtgatgaactttatcgcatggagctcacgcacgaaacaattccccccttacctttaggggtgtgtgttgctgaaacacaaggagcaattggttacatggttcaacaatccctccaaaatgttctaaaagaaaaaaagatagatcgggaagttgttacattgattactcaaaccattgtagataaagatgatccatccattcatgatccccaaaagttcatcggtagacgttacgaagaagaggaggctaagcgtctagcaaaacagttcggttggaatgtaaaagaacaagagcctggcagctggaggcaggtagtgccaagcccaatgcctcaattcattgagcatggtagatctattcagacgcttgtggataatgggacgatcgttatcgcatctggcgggggaggcataccgactttttggaataataaagatagattagaaggattgaacgcagttgtagataaagatttatcggcagcccttcttggaagagtgattaaagctaacgagctatggattattactgatttggatcaggtgtgtttgaattttggcaaacctgatgaagagccattgctagaaatgacttttgaccaggcaaaaaaatatttaaacgagggccattttcaagcagggagcatgggtcctaaaattcagtcagccctttactttctaaatcatcatggtgaaaaagttgttataacttctattgctggagttttaggagctataagtggttctaccggcactacaattactaagtga

SEQ ID NO: 249834 - DNA, 941 bp, Unknown
  Bacterial polypeptide expressing nucleotide sequence isolated from the Sargasso Sea
ccccgataactcctacatcctgacccacggtaatggtcctcagatcggcaatatcctgctccgtgcagaatatgccggtgaaatgatccacaaattgcccatcgatgtttgcggagcggatacccagggagccttgggctacatgttggcgcaactctccaactccctgagagttcggggtaaggacctcaaaaccgcggaaatcatcacccaggtcatcgtcgatcatgatgatcctgccttccaggaacccacaaagttcatcggcccgcccatgaccaaggaggaagcggaagaacaccaaaaaaaccagggttacctctgccgattctacaagctcaatgaccaggggcaggaggtttggcgcagagtggttccttctcccaaaccaaaggaaatcatcgaaatcgatatcatcgaaagttgcctccagtcaggtaacatcccaattgcggttggaggaggaggcattccggtggtcgcaatcgaacctcaaaaagcaggggagttggaacaatatccatgcagctacgacattacctatcaaaaatctcaggatgccccgccggctaaagtctactgcggtgttgaaggagtgatcgacaaggatctttcctccagcctgctggccacttccttacgcgaacgtgcacaccgtcgcggagaagaattggaggtggtgtttgtgatcctgaccgatgtggatggggttaaactcaattaccagcagcccaatcaggaggacgtccgcagcctcaacttggaagaaaccagggagcttcaacagtcaggaattttcccaagcggaagcatggggcccaaagtcgaagccgttgtcaatttcctcgaagccggcggtcagcaggccttcatcaccaacatccaggttcttgaacaaaccttttccggccaggcaggaacacgattccaatctcattgaa

SEQ ID NO: 249835 - DNA, 958 bp, Unknown
  Bacterial polypeptide expressing nucleotide sequence isolated from the Sargasso Sea
catgcagaagaagaaacttgcagtcgttgctgttggcggcaatgccctgatccgaagcagtgacgaagtatcactcgaccagcaatacgatgcggtagtcgaaacagcacgccatgtggcggacctgattgctgcgggctggcaggtggtgttgacccacggcaatggaccacaggtgggctttatcctgcgccgaagcgagctggccagtgcgcaagtgccgaccgtgccgctcgagtacgccgttggcgatacccagggcgctattggttttatgttccaaaacgccctcggtaacgagttgcggcgccgcggactggcagacaccaaggtcatcacgctggtcacccagaccctgatcgatcgctgcgacccggcctttactcatcccgacaaacccatcggtgcgcacatgagtcagccgatcgccgagcagctagccgcagagcaggggtggcagattgccgaagatgccgggcgcggctggcgacgagtggtcgcctccccagcaccacttggcatcgttgaaactcccaccatacgagtcctactcgagcaggatgcgcttgtcattgcctgtggcggtggcggcattcctgtggttagggaaaaagacggttccctgcaggccgcacaagcggtcatcgacaaagatcgcgcctcagccctgctcgcgatcgagctgcaagccgacatgctgttaattccgaccggtgtcgaacaggtcgccatccatttcgaaacaccagaacaacgctggctcgagaccctgaaccttgcagaggcaactcaactgctagccgacggccacttcggtgccggcagcatgggccccaaagtagaagccatgttgaggtacctcaagggatgtcctgatggagtgggtcttatcactaatccgccttccatgggcaaggctgtgcttggcctcgccggaacccgttttctgggtcactga

SEQ ID NO: 249836 - DNA, 928 bp, Unknown
  Bacterial polypeptide expressing nucleotide sequence isolated from the Sargasso Sea
atgattgctctgggcggtaatagcctttctcgcaatggacaaactgggaccatacagcaacaatttgagtacacaagagatgctttaactggaattagtcattttattgaacaggattataatatttgcatcaatcatggaaatggccctcaagtagggaatgaattaattcggatggaattgacccaagatattgttcctcccctaccgcttggtgtctgtgttgctgggacccaaggtaccattggttatatgatccaacaatccctccaaaataaattacgtgaaatgaataaagatagagaggtagtgagcttaatatcgcaggtaattgtgaatgatgatgatccatcttttaaagaacccacaaaatatgttgggccacgatattcaaaaatagaatcagaaaagatggcgaaaaaatttaattggatctttaaagaacaagaaaaagataaatatcgtagagttgtaccctctcctatgccagaatatattatgcatgggaagtcgataaaagctcttgttgatagaggaacgatagttatagcctctggaggtggtggcattccagtatataataatgatgctggtaaactagagggtctagacgctgtaattgataaagattattcggctgcaaaaatggggcgaatcattcgggctcaagaactttggataattacagatatcgataatatttatttaaattatggtacagatcagcaacaaaaaattgattctataaataggattgatctagaagacctctataataatggtgaatttcaaaaaggaagtattggtccaaaaataaaagctgccattcattttttaaagcaccatggtcataaggtaaaaataacctctataccatgtataaaagacgcaatgaataatcttgcaggaaccgaaataaggaattgat

SEQ ID NO: 249837 - DNA, 806 bp, Unknown
  Bacterial polypeptide expressing nucleotide sequence isolated from the Sargasso Sea
aatgatgattgctttaggcggtaatgccttatctccaaaggatcaaactggatcgataaaagaacaatttgaacgtactagggaaagtcttaatggcattatggagtttattaaattaggatataatatttgtcttacgcatgggaacggaccgcaggttggaaatgaattgttgcgaatggatcttacatatgatcaagtgcctcctctgcctcttggtctgtgtgtcgctggcacacaaggaaccattgggtatatgattcaacagtctttgcaaaataaacttcgaacattagagctagatcgagaagtagtaacattggtaacccaagtacgaatagatgaaaatgatcctgcaatttcgaatccaacaaaatttgttggtaagacctatacgaaggaaactgcagagtcttatgcaaatcagctaggttgggatattgcagagcaaaatcctggtgagtggagacgagttgttcccagtccacttcctcattatgttatgcatggaaaaagcattaaagcacttgtgaatagaggaactatcgtgctggctgcaggtggtggaggtattccggtatacaatgatgcaagctatcgattaaaaggattagatgcggttattgataaagatttaacagctgcaaaattgggacgtgtaatacgagcgcaagaactatggataataaccgatgtagattacgtatatttgcgattcaaaaaagaaggcgaaaaagcaattacatcaatgacaacaatagaagcagagaattatttacttgaaggcgaatttaaaaaaggtagta

SEQ ID NO: 249838 - DNA, 403 bp, Unknown
  Bacterial polypeptide expressing nucleotide sequence isolated from the Sargasso Sea
atgaggatcgtagttgctctcggaggtaatgccctcctcaaaagaggggaaccacttactgcggagaatcagagaagaaatgtcagagtcgcttgcaaagcgttggcgccgctggcagagaagcaccaactcgtgattacacacggaaatggaccccaagtaggtcttctagcccttcaatcggcctcattcgatgaagtcgaaggatatcctctagatgtattgggtgcacagtctgaaggaatgatcggttatatgattgaacaagagttaggaaacctaatgccgactgaaacggcatttgccactatactaaccatggttgaagtggaccccgaagatcctgcgtttcagaacccgactaagccaataggacctgtttatcggcgtgaggatgcaaatg

SEQ ID NO: 249839 - DNA, 721 bp, Unknown
  Bacterial polypeptide expressing nucleotide sequence isolated from the Sargasso Sea
atgaaaaaaccaactgtcgtcgtcgccctggggggcaatgccctgctccgccgcggtgaacctctggaagccgacatccagcgcaagaacatcgccaccgccgccaagaccatcgcccgcatcgccgaggattacaacgtggtgctggtgcacggcaacggcccgcaagtcggcctgctggccctgcagaacagcgcctacaccaaggtctccccctatcccctggatgtgctgggtgccgagtcccagggcatgatcggctacatgctgatccaggagttgaagaacctgatgccgagccgcaacgtcaccgcgctgctgacccaggtgcaggttgatccccaggatccggcgtttgccaacccgaccaagttcatcggccccgtctacgaagaggcggaagcccgcaccctggctgccgagaagcactgggtggtcaaggccgacggcaagttcttccgccgtgtggtgccgtccccgctgccccagcgcatcgtcgaaggcgacgccatcgaaaccctgatcgcccagggtcacctcatcatctgtaccggtggtggtggtatcccggtgacctgggatggccagagcctgaccggcatcgaggccgtcatcgacaaggacatgtctgccgcctacctggccaagcagatcaaggccgacgccctgctgatcctgaccgacgccgatgccgtctatctggattggggcaagccgaccc

SEQ ID NO: 249840 - DNA, 724 bp, Unknown
  Bacterial polypeptide expressing nucleotide sequence isolated from the Sargasso Sea
atgaggaagaaaattgttctcgcactgggtggtaacgcgctgggtgaggatctggccggacagatgcaagccgtcaaaatcaccgcgcaggccattgtggatctcattgcgcagggtcatgaggttatcgtgactcacggtaacgggccgcaggtgggtatgattaaccaggcattcgaagccgcggcaaaaacagaggcgcactcgccaatgctgccgatgtccgtctgcgtggcattgagccagggctatatcggttacgatctgcaaaacgcactacgcgaagaattgctctcacgcgggatgcacaaaccggtcgccacgctggtgacgcaggtagaagtcgatgcccacgatcctgcgttcctgaatcccactaaacccatcggttcattcttcacgcagcaggaagcggaacagctggagaaacaaggttatacactcaaagaagatgctggccgcggttatcgtcgtgtcgtggcttcgcctaagccggtggacatcattgagaaagagaccgtcaacgcgctggttgaggccggacaggtggtcattaccgtgggcggagggggaattcccgtgattcgcgaaggcaaccatctgcgtggcgccagtgcggtgatcgacaaggactgggccagcgctcgcctggcagagatgatcgatgcggatatgcttattatcctgacggcggtcgaaaaagtggccattaacttcggtaaag

SEQ ID NO: 249841 - DNA, 383 bp, Unknown
  Bacterial polypeptide expressing nucleotide sequence isolated from the Sargasso Sea
gggcggcggcggcattccgggcggtggcggctttccgggcggtggcggaatcccgggtgtcggcggaattccgggcggcggtggaatcccgggtggcggcggaattccgggcggcggtggcatcccgggtgtcggcggcatcccgggcatcggcggaatcccggccatcttcagccgtaacgcgccgctgccgccgatcacggcgccggcgctgaggcggccgcttgcaggggcgcggctggcttcgccggtgacccggccgctgccgaccggcgcgttggcgcagtctccggcgctggcgcggccgcaatcgggtgcgctgctgcaggccccgacccggacgacgccgcgcgcccgcacgcagacgcctgggcagacgcctg

SEQ ID NO: 249842 - DNA, 928 bp, Unknown
  Bacterial polypeptide expressing nucleotide sequence isolated from the Sargasso Sea
atgaaaaaaccaactgtcgtcgtcgccctgggtggcaatgctctgctccgtcgtggcgagccgctcgaagctgacatccagcgcaagaacatcgctactgcggccaaaaccatcgccctgatcgctcaggagtacaacgtggtgctggtgcatggcaacggcccgcaagtcggtctgctggccctgcaaaacagtgcctacaccaaggtatccccctatccgctggatgtgctgggtgccgagtctcagggcatgatcggctacatgctgatccaggagctgaaaaacctgatgccgagccgcaacgtcaccgcgctgctgacccaggtgcaggtcgatcccaaggatccggcgtttgccaatccgaccaaatttatcggccccgtctacgaagaagcggaagcccgcaccctggcagaagagaagcactgggtggtcaaggctgacggcaagttcttccgccgcgtagtaccgtccccgctgccccagcgcatcgtcgaaggcgacgccatcgaaaccctgatcgcccagggtcacctcatcatctgtaccggtggtggtggcatcccggtgacctgggatggccaaagcctgaccggcatcgaagccgtcatcgacaaggacatgtctgccgcctacctggccaagcagatcaaggccgacgccctgctgatcctgaccgatgccgatgccgtctatctggactggggcaaaccgacccagcgtccgctgcggatcaccagcccggacgagctggccggggtcaagttcgatgccggctccatggggccgaaagtcgaagcctcctgtgaatttgtcaaagcgaccggcggcatggtcggcatcggttcgctggaagatggcctggccatcctcaagggcgaagccggcaccaatatcgtcgccacccgtaccgtgaatgcgtaat

SEQ ID NO: 249843 - DNA, 961 bp, Unknown
  Bacterial polypeptide expressing nucleotide sequence isolated from the Sargasso Sea
acaaataaaatttttattaaataataatgcaaaaattttaatcctgtcgcatgtaggaagaccaaaaggtaaaactgttgatgaactttcgcttagaccaatatgtgattttattaaaaaaaaaataaatcaagaaattaagctaattacaaaaaatattaaaaaaataaattctaatgaattatttattaataaagctgaaaaaataataatgtttgaaaatattagatttaataaagaagaagaagataatgatattgatttcgcaaaacatatttctaacttaggagatatatatgtaaatgatgcattctcttgttctcatagagcacattcttcaatccataaaataccaaaatttcttccgtcttattctggtttacaattagactcagaactctatgccctaaaaaaattaacatcaacgattaaaaaaccaatcacatgtattattggtggttcaaaaatttctactaaaattaatataattaaaaatttaatttccaaatttaataatattgtaattgttggaggtatggcaaataatatacttaaatataaaggttatgaaattggaaaatctattttagaaaaaaattgtagtgaattaataaaagaaattttctatctttctaaaaaaaaaaaatgtaaaattttttttccagaagatgtagttgttggaaaaaacttggatgattcttccaaggtgaagttattagacagtgtctcttctgatgaaatgattttagatattggccccaacacaataaatacaataaaaaatataataaagactagtaaaactgtactttggaatggacccgcaggttattttgaaaacttaaattttgctcatggcagttatgaaattggaaaggaaattgcaaaaaaaacagagaaagaagaaatttattcggttgttggtggtggtgatacaataaaagttataaatcaaaattaa

SEQ ID NO: 249844 - DNA, 364 bp, Unknown
  Bacterial polypeptide expressing nucleotide sequence isolated from the Sargasso Sea
ggcactaaacatacaaaaaataaagacaatatcgaagaaaatgaaataattctagatattggtccagaaacaattaaaaatataaaaaatacaatagataaatctaaaacagttttgtggaatggaccggccggatattttgaaaataaaaacttttctaaagggactttagaaatcgcaaaaaaaatttctgataacactataaataaatctttaatatcaattcttggtggtggagatactatatcagcaattaatactagtgaggaaaaattcaattttacctacttatcaacagcaggtggtgcttttttggaatttcttgaaggaaaagacttgcctggtctcaatgttttaaaataaa

SEQ ID NO: 249845 - DNA, 274 bp, Unknown
  Bacterial polypeptide expressing nucleotide sequence isolated from the Sargasso Sea
aaagaaaccaaaacaaccatttggaacggacctttgggtgtatttgaattcagctctttcgaagaaggaacaagagcacttgggcatgctgtttcttcaaatgatggtttcacgattgttggagggggtgatactgttgctgtggttgaagaattggggattgctgattcaatgagttatatttccacaggtggaggggcatttttagactttgttcaaaatggcacgcttccaatactagatttacttgaaaagaagagaagcgattcatgat

SEQ ID NO: 249846 - DNA, 199 bp, Unknown
  Bacterial polypeptide expressing nucleotide sequence isolated from the Sargasso Sea
gatgcaaataccaagtatggaaacattggatttgcaaggcaagaggaccatgatccgattggatctcaatgtgccaatcaaagacgggttagtgaccagtgatgccagaatcatggcttctctttcaaccattgaaatggcacttgataaaggcgcaaaagtcatcttactctcacatctggggaagacaagatcctga

SEQ ID NO: 249847 - DNA, 867 bp, Unknown
  Bacterial polypeptide expressing nucleotide sequence isolated from the Sargasso Sea
aatgaaaagtatagaagataagcatttaagtaaaaaaaatattttagtcagggtagatcttaatgttccagtggtaaacagtaagataactgacagatcaaggattaaatctatattaccaactttaaaaaaacttaaagactctaataacaaaatttttttaatctcacattttggaagaccgaaagggattaaaaacaaaaaatattctttaaaatttatatgtagcattcttgaggaagaattgaatattaaaaaaatttactttcttgaagattgtgatgaaaaaaatattcaaaatatgatcaacattattaatccgggagatatttgtcttcttgaaaatattcgattttattcagctgaagaaaagaatgatttagattttgctaaaaatattagtaaaaattttgatgcctttgtcaatgatgccttttcttgctctcacagaaaacatgcatcaatagttggtcttccaacttttttaccctcatatctcggatatagttttttaaaagaaatcaataatcttaattctttattatctaataaagacaaaccaaatttagcaattattggtggctcaaaaatttctactaaaatagaattactttttaatttgtcttattactttgatgcaatagttattggaggagccatggctaatacttttttatatgcaaaaaaaattaatattggaaaatctttaattgaaaaaaactacaatgaagttgttttttcaattataaataaagctaaagaaaataattgtgaaatcattctgccaattgatgttgtatgtgcaaataatttaaatgaaaaagaaactgttaaaagatgtgaaatagacaatgtatctgactctca

SEQ ID NO: 249848 - DNA, 781 bp, Unknown
  Bacterial polypeptide expressing nucleotide sequence isolated from the Sargasso Sea
aatgagaaaactgtcagagacaaatgtcttgaacaagacaattgctctcagagttgatctaaatgttcctgttgaaaatggtaaagtccttgatgatacaaggattcttgcaattattcctaccttagaatatctattagatcaaaatacaaaaataattttaatttctcattttgggaggccaaaatcaggagtattcgattctaaattttctctcttaccggtagctaaaagacttgaggaaattatgaataagcagattaaattattttcatctataaacgaagttaatttctcatcagatatttctttaattgaaaatataagattttttccaggagaacttgagaatgatgaggggcttggaaaaaaactatctaatatagccgatgtttatgtatttgatgcttttggaacatcgcatcgtcctcatgcatcgacttatggagccattaaagcctctgaagtatcatgcgctggactgcttctggaaactgagacagatgcactacaacaagccattagctcaaaaaattctcccatgctttcaattgttggaggatcaaaagtatcttctaaattaaaagtaattaaaaacttatcaaaaatttctgatgatgtcttgacaggtggagggattacaaacaccattttgaaagctcaggggcataatattggactctctctgcatgaagactcaatgctgaatgatgcaaaagaattgcttgatactggcaaaattttattacctgatgaagtggttgtaagcaaagaatattga

SEQ ID NO: 249849 - DNA, 205 bp, Unknown
  Bacterial polypeptide expressing nucleotide sequence isolated from the Sargasso Sea
gccttttcagaaaggcacacatcaattagctaaaactattgcagggtctgaggctttttcacttgctggaggtggagaaactatagctgctataaataaatttattaataaagatgaggtatcatactgttcaacaggtggaggagcttttttagaatatatggaaggcaaattactcccgtcaattgaggctttaggaggctaa

SEQ ID NO: 249850 - DNA, 556 bp, Unknown
  Bacterial polypeptide expressing nucleotide sequence isolated from the Sargasso Sea
atgaaaagtattttaaatgaaaaaaatcttaaaagtaaaaaaatattattaagattagacttaaacgtccctttagaaaatggaaaaataagtgacacaactagaattgataaaatactccctactttaaattttttaatacaacaaaaaactaaaataataattttatcacatgtgggaaggccaaaaggaaaagctgtaaaagagctatctttaaaaccaataggtgaagacttaagaaaaaaacttaatacaagtgtaaaactaatcacagaaaacatttatgaaataaaaaataaagacttctttgaaaaatttgatgaagaaatttttattttagaaaatattaggttttatgctgaggaggaagaaaatgatcttaaatttgcaaaacatcttgcaggatttggggatatttacgtaaatgatgctttttcctgttctcatcgagcacatgcatcaattcaacaaatttctaagtatttaccgtctttctctggactccaactcgatttagaagtgaccgctcttaataaaattacaactgagataacaa

SEQ ID NO: 249851 - DNA, 167 bp, Unknown
  Bacterial polypeptide expressing nucleotide sequence isolated from the Sargasso Sea
tttctctttggctggaggtggcgaaacattatccgcaattaataaatatattaaattagatgatgtatcatactgttcaacaggtggaggagcctttttagaatttatggaaggcaaaattttgccgtcaattaaagcattaaacgcaaaacaaactgggagttaaa

SEQ ID NO: 249852 - DNA, 205 bp, Unknown
  Bacterial polypeptide expressing nucleotide sequence isolated from the Sargasso Sea
atgagattactaaaagaccaaaatcttagtaataagaatgtggttgtgagattagatttaaatgttcctattcaagacaagcaaattatagattcaaccagaatcatttcttcagtacctacaataaaatatctcgtagataaaaattgtaaagtccttttaacatctcatcttggcagacctgaggaaggaaagttgatcaaga

SEQ ID NO: 249853 - DNA, 684 bp, Unknown
  Bacterial polypeptide expressing nucleotide sequence isolated from the Sargasso Sea
aatgaattatataaaagatcaaaaaaatttagatggaaaaatagcgttattaagacttgacctaaatgttccattaaaaaacggtataattactgatgacactagaatagttaaaatattacctactttagaatttttaataagaaataatttaaaaattataattatttcacatattggtagacctaagggagaatggaatgatattttctctatgaaacctgtttgtgaatatattaataaaaaaattaataaacgggcaaaactgattaaaaaaaatatttttcaattaaaaaaagaacaactatttttaaattcagaagatcaagttctttttttagaaaatatcagattttataaaaatgaagaagaaaatgatatgaatttttctaaacatctggctagtctaggagatctatttataaatgatgctttttcttgctctcatagagcgcatgcttcaataagtgaaattactaaatatattccctcttatgctgggattcaatttgaggctgaagtagatgctttagaaaaagttaccaaaaatattaaaaagccaataacatgtataattggaggatctaaaatttcctcaaaaatttcaattataaaaaatttaataccaagatttgacaatattataattgtaggtggaatggcaaataatttgcttaaatataa

SEQ ID NO: 249854 - DNA, 369 bp, Unknown
  Bacterial polypeptide expressing nucleotide sequence isolated from the Sargasso Sea
ataattcaccagcaaaggtttttgacataatgaatattgataaagattatgaaggtatggacgcaggaccaaaatcattattaaaatttaaagaagttgttttaaattcaaaaaccattctatggaacgggcctttaggagtttttgagttttctaacttttcaaaaggtaccaaggagttaggtaaatacatttcagaaagtacacaaaatggtgcattttctttagtaggaggaggagattctgtagcagccgttaagagttttaagatgcagaaaaatatgagctatgtttctactggaggaggagcgatgctagaaagtttggaaggaaaaaatttacctggaattaatgcattactaaaataaa

SEQ ID NO: 249855 - DNA, 199 bp, Unknown
  Bacterial polypeptide expressing nucleotide sequence isolated from the Sargasso Sea
agtcatgagattgctaaagaaattgtaaaaaaaaataaagataactctatctactctgttataggtggtggtgatacaatagctttaattaaccaaataaatttagctgaagaatttaattttgtttcaactgctggtggagcatttttagaatatcttgaaggaaaagaacttcctggtataaaagccttaaattaaa

SEQ ID NO: 249856 - DNA, 541 bp, Unknown
  Bacterial polypeptide expressing nucleotide sequence isolated from the Sargasso Sea
atgagttttgcgaaagaatatgcaaaagaaaatcccgaagagattgctatccaagatgtaaaccaatcgttaacctgggatgaagtagacgatgtgctcagtaggtgtggaagtggtctgcaagcacttgatctcgggcctgacaacagggtagccgtttttgcagaaaattctgttcagacagcgctagcgaatctgggaggtttgataggtggagcatcggttgtgccagtaaattttcatcttactggtgatgaggtgaattatatacttcaagattcgggtgcgagagtgctttttgttgggccagaaacctgggagcgagggatagaagctataaaaaactctagtgtccacaccctggtttcttggaatgtgcctgtaaaagatggaatggtggattggattgactggctctcgaaggcggacccagaaggtttagaccaaactgttcctccaaaaccgaatcttctttacacgtctggtactactggaagaccgaaaggaacagatctgccgcctacaatgttcgctgaggaga

SEQ ID NO: 249857 - DNA, 589 bp, Unknown
  Bacterial polypeptide expressing nucleotide sequence isolated from the Sargasso Sea
aatgaataatcttttagatcaaaacttggtaattaaagataaaaaggtattgctgagagttgatttgaatgttccaatgaaagatggaacaataactgaaacctcaagaatagaaaaaataataccaacaataaaactattaatagaaaaacaagctaaaataataattttatctcatattggcagaccaaaaggtaaaattgttaaaggaatgtctttagagcctatttcaaaaaaattagcatcattattaaataaagaagttttatttaacaaaaatataataaatgaaaatactctttctgaggtaaacaaaattccaaatggttcaataatgatgcttgaaaatattcgttttaatgaaggagaagaatcaaatgaagataaattttcaaaaaaattatcaaatttaggaaatatatatgtgaatgatgctttttcctgctctcacagagctcacgcttctattgaaggaattacaaaacatattccttcatattttggcttgcaaattaacgaagaaatcaatgcattaaaaaaaataacttctgaaataaaaagaccaattactctaatcattggtggtcaa

SEQ ID NO: 249858 - DNA, 262 bp, Unknown
  Bacterial polypeptide expressing nucleotide sequence isolated from the Sargasso Sea
gttgttatggattcaaagacaatattatggaatggtccattaggtgtgtttgagtttccaaatttttctaatggaaccaaaatgctgggagattttatatccaaaagcacaaaagaaggagccttttctcttgttggcggcggcgactcagtagcagctgttaaaaagtttaaaattgaaaataaaatgagctatgtttcaaccggaggaggagcaatgctggaaagtttagaaggaaaagatcttccaggaataaatgcac

SEQ ID NO: 249859 - DNA, 826 bp, Unknown
  Bacterial polypeptide expressing nucleotide sequence isolated from the Sargasso Sea
aatgatagcaagttctcaaaaaaaatatccactcttggggatttatatataaatgatgctttttcttgttcacataggtctcacgcatctgttgagggaattactaaatatatcccttcatattttggtttacaaattaatgaagaaattaatgcattaaaaaagataacatcagaaattaaaaaaccgatatcacttataattgggggttcaaaaatttcgacaaaaattaaaattataaataatttaataaaaaaatttaataatattataattgtaggtggaatggccaacacaatgttaaaacattcgggcataaatgtcggtagttcaatatgtgaatatgagtgtggcccattaattaaagaaattaaagaaaattcaaaaaaatataactgtgaaattactgttcctaaagatgtaattgtatctgaaagtttaaatggaagtggaaaacaaaaaaatataaataatgtagagcaaaatgaaatgatattagatattggatcagaaacaatatctatgatcaaaaaaattatcaataagtctgaaacagttctgtggaatggtccagcaggatattttgaaaacccaaattttcaaaatggaactaaagaaatattagaactaatttcccaaagaacaaagaatgagaaaattttctctgtagctggaggaggtgaaaccgttgcagcaataaataaatttaaaaaatttgattcatttacttttgtttcaactgctggtggagcttttttagaataccttgaaggaaaaactctacctgctataaaagcattaaatcaaaatgtctcaattaaataaa

SEQ ID NO: 249860 - DNA, 316 bp, Unknown
  Bacterial polypeptide expressing nucleotide sequence isolated from the Sargasso Sea
atgataagatctataaaatcttttgaccttaagggacaaacaattctaatgagacttgatttaaatgtgcctcttcacaatgaaaaaattcaagatgattttagaataagatcatgtatcccaacaattaattattgtttagatgagggtgcatcaatagttattatgtctcaccttggaagaccagatagtaagtataataaaaatcagagtctaatccctgtaggggagtcgcttgctgctatgttagagataccaattaaattttctgaggattgtatttcacaagatgctattgatacatctttatcataaa

SEQ ID NO: 249861 - DNA, 391 bp, Unknown
  Bacterial polypeptide expressing nucleotide sequence isolated from the Sargasso Sea
aatgcctgatgtaaaatttttatcaaatgatatttcccttaaaaataaaagagttattttaagattagacctgaacgttccaataagtaattcaaaaattgatgatgatactagaataaaagttataaaaccttttttaaaaaggttaatagaaaaaaaagcaaaagtaattttattatcacatctcggaagacccaggggtaaagttatttcaaaattatctcttaaacctatatttaaatatctaaaaaaaaatcttaattctaatgtttatttttactatgaaaaaattgataaaaaagcaattgatgctacaaaaaaattaaaaggaggtgaagttttactctttgaaaatattcgtttttttgaagaagaagaaatgatgacgaaa

SEQ ID NO: 249862 - DNA, 533 bp, Unknown
  Bacterial polypeptide expressing nucleotide sequence isolated from the Sargasso Sea
aatgaatagtatcaaagatcacaccgatcttaatcagaaaaaaattttattaagattagatttaaatgtaccattaaaaaatggagttataaaagatgaaacaagaattgataagattatgcctatcatagattttttgattaaaaaaaattcaaagattatagtagtatctcatgtcggacgaccaaagggtaaaataaataatgaattctccttaaaaccaatttgcgaaaatatagaaaaaaaaattaacaaaaaaattcgcttagtttatgataatatttttaaattaaaaaaagaagacttatttaaggatcataacgatcaattagtttttttagaaaatattagattttataaagaagaagaaaaaaatgatatttcttttgctaaacatttggctggacttgcagatttgtatgttaatgatgcattttcttgttctcatagatctcatgcatcagtcaataaaattacagaatttttaccatcttttgccggttttacattagagacagaaataaatgcattaa

SEQ ID NO: 249863 - DNA, 124 bp, Unknown
  Bacterial polypeptide expressing nucleotide sequence isolated from the Sargasso Sea
gctataaggcaagctggagtggtagatcaaattgatcatgtttctacaggaggtggagcttctttagaatatttagagggcctttctcttccaggactgcgagctcttgagcgacaaacataaa

SEQ ID NO: 249864 - DNA, 844 bp, Unknown
  Bacterial polypeptide expressing nucleotide sequence isolated from the Sargasso Sea
aatgaaatccattgaaaatatagaaaatattgaaaataaaagagtaattcttagacttgatttaaatgttccaataaaaaatggaaagataacagatactaaccggattgataaggttatgcctacactagaatttctgttaaaaaaaaaagcgaagattataataatttctcatgttggaagaccaaaaggtaaaatagttaaggaactttctctagaattggtatcgttgtatattaaaagtaaaattaaaaaagaggtatcattacttaaaaaaaacatttttaatttaaataaagaagacatttttaagaattcaaatgatgagttagtactacttgaaaatattagattttatcccgaagaggaagccaacgatgataaattttctaaaaaattagcaagcttaggtgaaatatatgtgaatgacgcattttcgtgttcacacagagatcatgcttctgtatcaaaaataacaaagtatattccatcctacagcggaattcaaattaatgcagaggtaaatgctctcaacaagataacttctgaaataaaaaagcctataacatgtataattggtgggtctaaaatatcttcgaaaataaatataataaaaaatttaataccaaaatttaatagtattataatagttggtgctatggcgaacaacatatttaaatacaaaggtttaaaaattggtaattctgtatatgaaaaaaatattgattacataattcaagaaattttcacgtatgctgaaaaaaataaatgtaaaatatattttccgaaagatgttaaaattggaaaaaaattgaaagataaatctcttgaaaaagatttttaa

SEQ ID NO: 249865 - DNA, 510 bp, Unknown
  Bacterial polypeptide expressing nucleotide sequence isolated from the Sargasso Sea
ataacattttaaaatacaaaggttacaatataggagcctcattatttgaaaaaaattctgaaaaaataattgaagaaattttttctgaaatagagagcaatagttgtagaatatatttccctgaggacgttaaagttggaaaaagtcttgaagataattctattcaaaaatcattaaatcaaatagaaaatgatgatatgatacttgatgttggttcaaaaacgatacaaaatataaaaagtgtaatcgatatttcctcaaccatattatggaatgggcctttgggatattttgaaaatcctaatttttcaaaaggtagtatagaaatagcaaaatatataggaaataaacaaggagagatttattctgttattggtggtggagatactgtttctgttgtgaactccatgaaaattaaaaataaatttaattttgtctcaactgctggtggagcatttttagaatatcttgaaggtaaaattcttcctggtataagagcgcttagttaaa

SEQ ID NO: 249866 - DNA, 840 bp, Unknown
  Bacterial polypeptide expressing nucleotide sequence isolated from the Sargasso Sea
ttggatggaagagtgaagacgcttcatccaaaaattcacgcaggtattttgcatgatagatccaataaaaaacacctgggtgaaatgaaaagaaaaagatttccgcctttagacttaatagtagttaatttttatccttttcaaaatattattactagatccaaaaacgagaaaagtataattgagaatatagatattggtggccctactatggttagagcggcagctaaaaattttaaaaatgtactgattataacaaataaaaaagattataatttattaaataaggagttgttaagctataaaggaaaatcatcccttaagtttagagaaattatggcaagtaaagcttttagtctcacagcctactatgactctttaatatcaaattggtttaataaaaagcttaaaataatttttcctgaaaggttaacaatttttggaaggaaatatgagaacctcagatatggtgaaaaccctcatcaaaaaggttcaatttatttaagtgacttcaatgataaaaaaatggatttacaaaaaatatcgggaaagaaactaagctataataattataatgatatgctctcagccatagaaatagtcaggtctttaaaaaaattgccctctgccgttattattaaacatgctaacccttgtggagtgtctagtaataaatctccaattatttcttataaaaatgcctttttttcagatccgttgagcgcattcggtggaatattagcagttaacttcaaagttaataaaaaaattgcaaaagagattaataaaactttttatgaggtcgtcatagctgacaagtttgacaaagatgcgataaaa

SEQ ID NO: 249867 - DNA, 703 bp, Unknown
  Bacterial polypeptide expressing nucleotide sequence isolated from the Sargasso Sea
ggagcaagccatagaaagcattcctcagtatatggagtatcctttttaatggattcctatgcaggagaactcatgcttaaagaattaagtacaattactaaaattaattcaacatcaagcgggaagtctgttttgataattggaggcgcaaaaattgaagataaatctggcatattggtaaatcttattgaaaaagtcgataagataataattggcggaggaatgatagccaactttttaacaaaaaatcttgataaaaagcttaaagaaatataccaaactaataaagaaaaattttacatacctgaagatttacttgtttcaaaaaatttctctgaaaattcagaaaaaaatttaatacatgtttcagattataatgattcacttaaaatagttgatataggatttaaatccattaaatcaatttcagaattattaaaaaatatagagatagcaatatggaatggtagtatgggtgtatttgaatgggaacaatgtagtatgggaactaagagcctgattaatttattaaaagaaaataatataaaaacctatgcaggtggtggttcaactattgaggctataaataaatttgaccataaatcatcttttgagcatgtttcaagtggaggtggcgcctttttagagttactagaaaaagaaactttgccaggaattgagaatttatatgaagcaagataaa

SEQ ID NO: 249868 - DNA, 859 bp, Unknown
  Bacterial polypeptide expressing nucleotide sequence isolated from the Sargasso Sea
ggagaaactttatgcagctggaagaatcccaggtgttttcatgagaagagaaggtcgccctccagaaagagctaccctaattgcaagattgattgataggccaatgaggccacttttcccctcatggatgagagacgaaatacaaatagttgcctcttgcctttctctagacgaaagggttcctgcagatgttttggctgtaactggagcttcactagccactttacttggagagattccattttatgggccaatggctgctgttagagttgggctcataggagatgatttcatcttaaatccaagctatagagagatagaaaaaggagatttagatattgttgttgcaggatcacctgatggcatcgtaatgcttgaggcaggcgcaaaccaattgtcagaacaagatactatcgaagctatagattttggatatgaagccgtttctgaacttattaaatctcaagaagatttattgaaagatttaggaataaagcaaattaagccatcggagcctgaagaagataaaacattgccttcttatttagagaaaaattgcacaaaacctattgaattagttttaaagaaatttgatctttcaaaagaggagagagatcttgaactcgaaaaaataaaagttgagactcaagataaaattgaatctttgaaagatggcaatcaaataaaagttcttcttttagagaatgacaagttattaagttccgactttaaaaaacttacaaagaaattaatgaggtcgcaaatcataaataataacaaaagagtagatggaagagatcttgacgaagttagaaaaatatcagcttctgcaggaattctcccaaaaagagttcatggt

SEQ ID NO: 249869 - DNA, 382 bp, Unknown
  Bacterial polypeptide expressing nucleotide sequence isolated from the Sargasso Sea
aatgaaaacattagaaaattctgaaataattgaaaaaacaattctttttcgtgctgatttaaatgttcctgttgtagatggaaaaattactgattattctagaattgactcaataatcccatcattaaaaaaacttactgaaagaaaaaataaaatattcataatagctcacttcggaagacctaatggtagtgtagttaaaactttatccttaagttttttatgtgaagagctaagaaaaaaattaaatttttctaaaatacattttttaaatacaattaacgataaagcagttaaaatcaaacaatctcaaatggattatggtgagatttgcttattagaaaatattcgtttttataaagaagaagaagaaacatactag

SEQ ID NO: 249870 - DNA, 485 bp, Unknown
  Bacterial polypeptide expressing nucleotide sequence isolated from the Sargasso Sea
aatgaatagtataaaagaccagaaaaatcttaataaaaaaaaagttttgttaagattagatttaaatgttccattaaaaaatgggtcaatcaccgacgaaacaagaataaacaagattattccaatcatagattttttaatcaaagaaaaatcgaagataataataatctctcatgtgggacgaccaaaaggtaaagttaattcagatctttcactgaaaccaatttgtgaaagtttggcaaaaaagataaatataaaaatcagattagttaaagaaagtatttttgagttaaaaaaagaagacttgtttaaagatccaaacgatcaaatagtttttttagagaatattagattttataaggaggaggaaaataatgacgctaattttgcacaacatttagcaaaactggcagatttgtatgtaaacgacgccttttcttgctctcatagagcccacgcatctgtgagtaaaattactaaatttc

SEQ ID NO: 249871 - DNA, 268 bp, Unknown
  Bacterial polypeptide expressing nucleotide sequence isolated from the Sargasso Sea
ctgtagtaccttaatatggaacggacctctcggtgcatttgaagttccaccttttgacaaagcaacaaaagaggtggcagaatttgtagcacagttaacgaaaagcaaaaaaataaaaagtttcgcaggtggtggagatacagtttcagctcttaggtctgctggtgtttttgatgatttcacttacgtctcaaatgcaggaggtgcttttcttgaatggcttgaaggaaaaaaactgcccgggctcaaagcattggaatcgccataa

SEQ ID NO: 249872 - DNA, 820 bp, Unknown
  Bacterial polypeptide expressing nucleotide sequence isolated from the Sargasso Sea
atgaacaatataaaagatcaagaaaatattaatcaaaagataattttattaagattggatttaaatgttccattaaaaaatggagttatcacagatcaaacgagaattgataagatcttgcctgtaattaattttttagtaaagaaaaattgcaagatagttataatttcacacgttgggagacctagaggaaaagtaaacaaagaactttctctgaaaccaatttgtgaaaatttagagggaaaaattaatcaaaaaatcaaactcattaatgaaaatatctttaagattaaaaaagataaattatttaaaaattttgatggccgaataatatttctagagaatatcaggttttatgaagaagaagaaaaaaatgacacaaatttttcaaaacaattggctagtcttgcggatctttatgtaaatgatgctttttcttgctcacacagagctcacgcctcaattagtaaaattactgaatttttaccatcttttgctggtttgcaattagaaactgaaataaatgctcttaagaaagtaacgagcgaaataaaaacacctgttacatgtataattggaggatcaaaaatttcaactaagattaatttaattaaaaatttaataccaaaatttgataacattattgttgttggtggaatggcaaataacattttaagctataaaggaaattcgataggaaaatcaattaaagaagataattgtgaaaatgaaatagaaaacatttttaaaatctctaatgatcactcatgttcaattatttatccaaaggatgtcaaaattggaaaaagccatggatgac

SEQ ID NO: 249873 - DNA, 571 bp, Unknown
  Bacterial polypeptide expressing nucleotide sequence isolated from the Sargasso Sea
gaacttaataaaaagttcagataatcttatagttgttggcgcaatggcaaatcattttgttaaatttcaaaataaaaatgttggaaaatcaattgttgaagctggtatagaaagtattattgaaaaaataaataatttagcaattagaagtaattgtagattaataattccaattgattgtagtacttcaaataatatcaaaggtaattcagtttataaatctttagatgaattaaatgatgatgatataattttagatattggaaaaaatactattaatttaataaataaaactattgatgactctaatactgtattttggaatggtccagccggatattatgaaaataaaaatttttcaacaggaactttagctatagcaaagaaaattagcgaaaatactaaaacaaagtctttaatatcaattgttggtggtggagataccattgcagctatcaaaaacacagggctagaaaatagttttacgcatttatcaacagccggaggtgcgttcttagaatgtcttgaaggaagagaattgcctggtataaaagtattaaaaaaaaactaa

SEQ ID NO: 249874 - DNA, 242 bp, Unknown
  Bacterial polypeptide expressing nucleotide sequence isolated from the Sargasso Sea
tttagggatgaatttttaaataatgccgaccatattatcattggtggtggaatggcttttacatttctcaagtctaggggaaaatcagtgggagggtctttggtagatgaaaagatgttggaaactgccaaaagaataattaataaagctagggtcaagggcgttaaacttagtcttcccattgatgttatatgtggtagctcacctacagaatcagaagcaaggggaacatttttgaatca

SEQ ID NO: 249875 - DNA, 619 bp, Unknown
  Bacterial polypeptide expressing nucleotide sequence isolated from the Sargasso Sea
ggatcaattttgatgttagaaaatattagatttaatgaaggagaagaaacaaataacgctgatttttcaaaaaaaatatctaaattaggagacgtatatgtaaacgatgctttctcttgttcacacagatcgcacgcttctgttgaaggaattaccaaatatattccttcatattttggattacaaattacagaagaaattaatgcattaaaaaaaataacttcagaaattgaaaggcctatttctctaataattggtggttcaaaaatttctacaaaaattaaaattattaataatttaataaaaaaatttaataatataataattgtaggcgggatgggtaatactatgcttaagcacactggttcaaatataggaaaatcaatatgtgaaaacgactgtggttctttaattaaagaaatattagaaaactcaaaaaaatataattgtaaaattactattcctcaagatgctttagtatctaaagacattaacggagagggaaaagaaaaaaaaattaacgaaatagaagaaaatgaaatgatattggatattgggacaaaaacaatattatcaattgaagcaattataaataactctaaaacaatcctgtggaacg

SEQ ID NO: 249876 - DNA, 279 bp, Unknown
  Bacterial polypeptide expressing nucleotide sequence isolated from the Sargasso Sea
aaagtattattgatcaatctaatacagtgttatggaatggtccagctgggtattttgaaaataagaactttttaaatggtaccttagcaatagctaagaagatttctaaaagtacagccagtaaatctcttatatctatactaggtggtggagataccatttctgcaattaataatggtgaggataaatttgtttttacacacttatcaacagcaggtggagcatttttagaatttcttgaaggaaaagacttgcccggcctcaatgttttaaaataaa

SEQ ID NO: 249877 - DNA, 457 bp, Unknown
  Bacterial polypeptide expressing nucleotide sequence isolated from the Sargasso Sea
atgaatagtataaaagaccagaaaaatcttaataaaaaaaaagttttgttaagattagatttaaatgttccattaaaaaatgggtcaattactgatgaaacaagaataaataaaattattccaatcatagactttttaataaaagaacaatctaagattataataatttctcacataggacgaccaaaaggcaaggtagttacccatctctcgcttaaaccaatttgtgaaaatattgaaaaaaaaataaatagaaaaattagattagtaaaagatgatatttttaaattaaaaaaagaagaattatttgaagacgcaaatgatcaaatagttttattagagaatattagattttacaaagaggaagaaaaaaatgacattaactttgcacaacatttggctaaacttgctgatttatatgtaaacgatgctttttcttgctctcatagagctcacg

SEQ ID NO: 249878 - DNA, 451 bp, Unknown
  Bacterial polypeptide expressing nucleotide sequence isolated from the Sargasso Sea
gatattcgcaaatattataaaaaagcagaggaaaataattgtaaaatatttatacctgaagattgcatggtaggaacagactttgaaggtactggtaaaaacaaaaatcttgatgagattcaagaaaatgaaataattttagatattggcttcaatacaatcaaaaaaattcaaaaaaagattaacgagtcaaatactgttatgtggaatgggccagccgggtattttgaaaataagaacttcttaaatggcacactatcgattgcagaaaatatttctaaaaatactattgaaaaatctttaatatctattcttggaggaggagacactctcgcagcaattaataaaagtgacgacaaacttactttctctcacttatcaacagcaggaggagcatttttagagtacttagaaggaaaagacttgcctggtataagtgttttaaaataaa

SEQ ID NO: 249879 - DNA, 373 bp, Unknown
  Bacterial polypeptide expressing nucleotide sequence isolated from the Sargasso Sea
tgaggcagaggctaccatcaagtcaattgatgaagttgctgaggacgatctgattttagacataggacctgagaccaccaaatcatattgcaatatcatcaatgaaaccaaaacaaccatttggaacggacctttgggtgtatttgaattcagctctttcgcagaaggaacaagagcactcggacacgctgtttcttcaaatcaaggtttcacgattgttggagggggtgatactgttgctgtggttgaagaattggggattgctgattcaatgagttatatttcaacaggtggaggggcatttctagactttgttcagaatggtacgcttccaatactagatttacttgaaaagaagaggggcgattcatga

SEQ ID NO: 249880 - DNA, 628 bp, Unknown
  Bacterial polypeptide expressing nucleotide sequence isolated from the Sargasso Sea
atgaaaagtataaaagaccaaaaaaatcttaatcaaaaaaaagttttattaagattggatttgaatgttccgttaaaaaatggatcaattaccgacgaaacaagaataaataagattattccaatcataaattttttaataaaagaacaatcaaagataataataatttctcatgtaggacggccaaaaggtaaagtaattatggatctctcacttaaaccaatttgtgaaaatgtagaaaaaaaaataagaaaaaaaattagcctaattaaagaagatatttttaaattaaaaaaagatgatttgtttaaagattcaaatgatcaaatagtttttttagagaatattagattttacgaagaagaggaacaaaatgacgctaatttcgcaaaacatttagctaaacttgctgatttgtatgtaaacgatgctttttcttgctctcatagagcgcacgcttctgtaagtaaaattactgaatttattccctcttttgctggattacagttggaaactgaaattagtgctttaaagaaagtcacaacagaaatcaaaaaaccaatcacttgtattattgggggatcaaaaatttcaacaaaaattggaataatcaaaaatttaatatcta

SEQ ID NO: 249881 - DNA, 504 bp, Unknown
  Bacterial polypeptide expressing nucleotide sequence isolated from the Sargasso Sea
atgacgggatacatgttggtgcatctttagtagaggatgggatggaaaatcagattgaggaaattttaaattacgcaaaaaagaaaaatggcaaaattattaaacctatcgattttgacacttccttaaacatgaatgggaatgccacttataagtctgttgatgccattggttctaaagatattattttagatattggaaagaaaacagtagaattaatctcgaacgtaattaataactctaatacagttttttggaatggtccggctggatattttgaaaataaaaattttataaaaggatcattggaaatagctaaaaaaattgctgaaaatacaaaatcaaaagatttaatttcgattgtaggtggtggagatacgatagcatccctgaaaaatactaaacttcaaaacagtttcacacatttatcaacagcaggtggtgcgtttttagaatatcttgaaggtagagaactgcctgctataaggtctttaaaaagataag

SEQ ID NO: 249882 - DNA, 195 bp, Unknown
  Bacterial polypeptide expressing nucleotide sequence isolated from the Sargasso Sea
tagcaatagcaaaaaaaatttctgaaaatacagaaaaaaaatctcttatatcagtacttggtggcggagatactattgcagcaattaataaaaataatgataaattttgttttacacacttatcaacagcaggtggagcatttttagaatttcttgaaggaaaagacttgcctggtctcaatgttttaaaataaa

SEQ ID NO: 249883 - DNA, 886 bp, Unknown
  Bacterial polypeptide expressing nucleotide sequence isolated from the Sargasso Sea
tattgacaaaattttacctacattaaattttttagtaaaaaaaaaagctaaaattataataatatctcatgttggaagacctaacggcaaaattgttgaggaactctcactagaaccaatatcattatgtataaaacagaagataaaaaagcaggtttcactattaaaagaaaatgtttttaaattaaataaaagagatatttttaaaagttccaacgatgaagtagtattgctcgagaatattcgtttctatcccgaagaagaagcaaatgatgataaattttcagagaaattagcgagtttgggtgaaatatatgttaatgatgcattctcatgttctcatagagatcacgcttcagtttccaaaataacgaaatatattccttcatactgtggtattcaaatcaacactgaggtaaatgctcttaacaagataacgtcaaaaataaaaaaacctataacatgtataataggtggatctaaaatctcatcaaaaattaatataattaaaaatttaataccaaaatttaacaacattataatagtaggtgctatggctaataatatttttaaatataaaggcttaaaaattggtaaatctatatatgaaaaaaatattgataacataattcatgaaatattttcttacgcaaaaaaaaatggctgtacaatttattttcctgaagatgttaaagttggaaagagattgaatgacaaatctattgaaaaaaattttgaaaatattgaggatgaagatatgatattagatgttggatcaaaaactctaattgaaataaaaaaaattattgataattcgtcgaccatattgtggaacggaccattgggttattttgaaaatacaaatttttcattaggaagctcagaa

SEQ ID NO: 249884 - DNA, 754 bp, Unknown
  Bacterial polypeptide expressing nucleotide sequence isolated from the Sargasso Sea
aatgagaagtattataaaagaaaaaaatcttaataataaaaaaatattattaagattagatttaaatgttcctttagaaagagacaagataacagatacaacaagaattgataaaattcttcctacattaaattttttgattaaagaaaaagctaaaattataattttatcacatgttggaagaccaaaaggtaaaattgttaaagatctctccctaaaaccaatttgtgaagaattacaaaataaattaagaaaaaaagtaaaactaattagcgaaaacattaaagaaataaaaactaaaaatttcttcaataactataatgaagatatttttattttagaaaatattagattttattcagaagaagagcaaaatgacaataagtttgctgaacagttgtcaaatcttggagatatatatgtaaatgacgctttctcttgttcgcacagagctcatgcatcgatttatgaaattccaaaattcttaccctcgttttctgggttacagctagacttagaagtgaatgcgcttaacaaaataacttctgaaattaccagaccaattacttgtattattggggggtctaaaatttcaactaagattaatgttattaaaaatttaattcctaaatttgacaatattataattgttgggggtatggctaataattttatagaatattttggaaatagtattggaaaatccatcaaagaaaaaaattgtgataaaatagttgaagaaatcatctctctt

SEQ ID NO: 249885 - DNA, 475 bp, Unknown
  Bacterial polypeptide expressing nucleotide sequence isolated from the Sargasso Sea
tatgaaatctcttaaaaatttgaactttgaaaaaatccaaaatgtagggattagagtcgatttcaacgtacctatcgataataattttagaattacagacaaaacaagattagataggtctagggagacgatcgattttattaaaaataaacaatgtaatatctttctaatttcacattttggaagaccaaaagaaaattttgatgaggagtattcttttataaaattgattgatcagtttgaggatatattgaagttaaaattaaattttattagttatgatagttttttagatagtggtcttaataaaatagattctgataagccaactataagccttttagagaatattagattttttgagggagaaataaaaaatgatttaaattttagtaagtctattacagataaattagatttatatgttaatgaggctttttctgcctctcatcgatatcactcatcagttaaccaa

SEQ ID NO: 249886 - DNA, 960 bp, Unknown
  Bacterial polypeptide expressing nucleotide sequence isolated from the Sargasso Sea
aaggttgtgccagatttatcattacaaccaatatttgattatttaaaaaaaaaattaaaagggaaaatttatttttataaggacaaaattgataatttagctattcaagcatcaaaaaatttaaaacctggtgaagttctgttagttgagaatattcgtttttttaaggaggaaacagaagatgaagaaatttttgcaaaaaatctgtcaaaacttggtgacatatatgttaatgaagctttttcttgttcccatagaaaacaagcatcaatgcacaagataacagaatttattgatagttatggagggcccctattagaaaaagaaattcaatcaattaacgttttaattaaaaatagaaaaaaacctgttacttgtattataggtggttcaaaagtttctacaaagataaatattttatcaagtcttttagagaaatcagataaccttgtaattgtaggtgctatggcaaataattttctaaaatttaaaggtataaatgtaggcgcatctcttgttgaaaaaaattctgaaaattttgttaaaaaagtcgaaatattagcaaaaaagaataagtgtaatattgttatgcccgttgactgtaacacctcattggattcatctggtcaagctacttataaaactataaaggatataggtgctaaagatatgattttagacataggaaaaaaaacaatcggattaatcaatagaactatagataattctaatactgtattttggaacggtccagctggatattatgaaaacaaaaatttttcaattggtactttgtcaataggaaaaaaaattgcagaaaacacaaaatccaagtctttaatatcaattgtaggtgggggcgacactgttgctgcaattaaaaatacatacttaaaaaacgttttcacacatttatcaacagctggtgggtgcattcttagaatcgctgaaggcaaagac

SEQ ID NO: 249887 - DNA, 744 bp, Unknown
  Bacterial polypeptide expressing nucleotide sequence isolated from the Sargasso Sea
tgtcctttttagagctgattttaatgtcccgtttgtaaatggaaaaataacagatttttcaagaattgaagcagtaaaaaaatcaatacataaattaattaaacaaaaaaataaaatatttataatttctcattttggaagacctaaaggtaaaataaacaaaaaattttcattagaatttttatgccccactctagaaaaaatttttgagataaataaaatatattttttaaaaaacttagaatcagaaaatattttaaataaactaaaagaattggattatggtgaaatttgtcttttggaaaatatccgtttcaatcctagtgaagaaaaaattgatttaaattttgctaatttgctttcaaaacattttgatgtttatgtaaatgatgcattttctgcatctcatcgaaatcatacgtctataacaggtttaccacattatttgccagctgttgcaggatatagttttattgatgaaatgcataatataaatttatttttaaaaaaagcaaaaaagccaaacattgcagtaattggaggagctaaaatttctactaaaattgaattattaaataattttattcaattatttgatacagttgtaatagggggtgcaatggcaaatacttttttattatcaaataatattaatacaggcatttctttagtagaaaaagatttactttctgtggctaaagatattcaagatcaagctaaaaaattcaattgtaatattatttt

SEQ ID NO: 249888 - DNA, 485 bp, Unknown
  Bacterial polypeptide expressing nucleotide sequence isolated from the Sargasso Sea
tatgaaatcgctgaaaaatctaaactttgaaaaaatccgaaatgtaggagttagagtcgatttcaatgtccctattgataaaaattttataatttcagacaaaacaagattagaaagatctaaggaaaccatcgattttattaaaaataaacaatgcaatatttttcttatttcacattttggaagacctaaagaaaatttcgatgagaagtattctttctcaaatttaattgagcagtttgaggatatattggagttaaaactaaattttatcagctatgatagttttttagatagtggtcttaataaattaaatgttaacaagccaactataagccttttagaaaatataaggttttttaagggagaaattaaaaatgatctaaattttagtaagtctattacagataaattagatttatatgtgaatgaggctttttctgcctctcaccgatttcactcctcagttaaccaaatggctaaaa

SEQ ID NO: 249889 - DNA, 157 bp, Unknown
  Bacterial polypeptide expressing nucleotide sequence isolated from the Sargasso Sea
aaatataatgaggatatttttgttttagaaaatattagattttattctgaagaggagcaaaatgataataagtttgcagaacatctatcgggtcttggagatatatatgtaaatgatgctttttcttgttcgcatagagctcatgcctcaatttgtg

SEQ ID NO: 249890 - DNA, 700 bp, Unknown
  Bacterial polypeptide expressing nucleotide sequence isolated from the Sargasso Sea
accaaatgggctaaaaatattttatctaccacctggtttaaattttgaaaaagaaattaaagtaataaatgaaatcaaaaaatctcaaaagaaaaaattagctataattggaggttcaaaaatatcaactaaaataaatacacttttatctttaacatcctcttgttcaaatatttttattggaggggcaatggctaataattttctaaaatataataagtttaatgttagttcttctttaatcgaagagcgtgctgaaactatgattgaaatgatttatagttctacaaaacaaacaggttgtaaaatccatctcccagtcgatgtaatgctcgactcaaataaaagtgtattagtcaatgaactttataaaaactctgaatttaaaattttagatatagccgactcatctcatatagttttggaaaatcttgtgagaaaaagtgatattattttgtggaatggccctatgggaatgattgaagaccacaaattttcgaagggatctattaatctatctcaccttcttgctaaatctcaagctgatgttgtaataggtggtggagatacaattttagcaattaatatggccaaagaaaaatttgaagacttctattttgtctcaactgctgggggtgcttttcttgaggcactagaggataaagaattaccaggaattgaagctcttaagtctgattaa

SEQ ID NO: 249891 - DNA, 187 bp, Unknown
  Bacterial polypeptide expressing nucleotide sequence isolated from the Sargasso Sea
catgaatcacctacaaaatcaaaaatttaacaataagaaagctataattagagtcgacttaaatgttcctttaaatgaaaaaaaagaggttactgattatacgagaattgaggcaataaaggagacggttaattttgttattgataacggagggtcatgtattttgctttctcatcttggaaggcct

SEQ ID NO: 249892 - DNA, 881 bp, Unknown
  Bacterial polypeptide expressing nucleotide sequence isolated from the Sargasso Sea
gtcccattagacaatgattttaagataacagactttacgagaattgaattttctaaaaaaactattgaagagataatcagcagaggagggaaatgcgtattgctatctcatatgggaagacctaatggtagagaattaaaatattccctttctcatattcttgattctgttcaggaaatcctaggagttcctgtaaaattttgcaatgattgcattggggatgatgcaattgaagcggttgactctttgaaagaaggcgaagttatattaatggaaaatgttcgcttttatccagaagagacaaaaggagatattgattttgcaaggcagctttctaaattaggagattattttgtaaatgatgcttttggatctgctcacagagcacatagttcaacaactataattgcagactttttcaaagaaagaaaatttgttggaatgctcttagataaggaagtaaaatctattgatcgagtgttaaaaaatggaaaaaaaccaatcactgcaatcatcggtggagctaaaatttcatcaaaaattactgttatagaaaatttgcttgatagaatcgattatttgattctagggggagggatggtttacactttcattaaagccgaaggaggtgaaataggagattctatttgcgaagatgacttttgtgaatattctaaaaagatcaatgaattagctaaacaaaaaggagttaaattattattacccgaggacgtagtaattggaaatgaattttcttcaaaagcaaaaattaatctttcatctgtatataaaatacctcctggatggcaaggattagatgccggacctgattcaattaagattttttctcaaattattcaaaaaagcaatacaattctttg

SEQ ID NO: 249893 - DNA, 751 bp, Unknown
  Bacterial polypeptide expressing nucleotide sequence isolated from the Sargasso Sea
atgaaagcagtagtcaccgcaggcaacggaggattcgaaaagctacagtaccgcgaagtaaaacgtcccaggcctggtccaagtgaggtgttgctccgggttctggctgccgggatgaacaacactgaaatcaatacccgtgtcggctggtactccgactcggtgaccagagccacctcggttacggcaaaatcagaggtccgggaggcggaggtccgaatcgatggtggctggaacgaaaccaccccgttccctttcattcaggggaccgactgctgcggacgggtggctgaaatcggtccgggtggagacccggagcttcttgggaaacgggtcctcgttcgttcctgcatcaggccggatggatttgaatcgatggaaaacctctggatgggttctgatttcgacggggccttcgcccagtatgtcaaagttccccaagctgaagtttttgttctcgaatgcgactggagtgatgccgaactggccaccattccctgtgcctacggaaccgcggaaaacatgatccagcgctccgggatcacttccggagaacgggtgctgatcacgggtgcttccggtggggttggttcggccgcacttcaactggtgaaatggcgaagggccgaagtgattgccgttgcggcatcttccaaaaagcagcagatgctggaaatcggagccgatcgggtcattggacgggaccaggatttgctcgggaacttggaggaaaaatcggtggacgtgtgat

SEQ ID NO: 249894 - DNA, 576 bp, Unknown
  Bacterial polypeptide expressing nucleotide sequence isolated from the Sargasso Sea
taatcaaagaaaacatatacaatataaaaaataaagatttctttaaaaaatttaatgaagaaattcttattttagaaaatataagattttacccagaagaggaaagaaacgacaacaaatttgcaaagcacctagcaagtttaggtgatatttatgtgaatgatgctttttcttgttctcatcgagcacatgcatcaattcataaaattcctaaatatttaccctcattctcaggactacaacttgatttagaagtaagtgctctaaataaaattaccactgaaataacaaaacccataacctgtataattggaggatctaaaatttcgactaaaataaatattatcaaaaatttaataccaaaacttgataatattataattgttggtggtatggctaataattttattgaatattttggaaataatattggaaaatcgattaaagaaaaaaattgttttcaaattattgaagaaattatttctatttcaaaaaaaaaaggatgtaaaataatttatcctgatgacgtgcttgtatctaaggatataaatggatcctctacaaataaagaataaa

SEQ ID NO: 249895 - DNA, 240 bp, Unknown
  Bacterial polypeptide expressing nucleotide sequence isolated from the Sargasso Sea
tatgaaatctcttaaaaatctcaatttcgaaaaaatccaaaatgttgggatcagagtcgattttaatgtgcccattgataaacattttaagataactgacaaaacaagattagacagggcaaaggacacgatcaattttattaaaaataaacaatgcaacattcttcttctatcgcattttggtagaccaaaagaaaacttcgatgacaagtactctttcacaaaacttattgatcagtt

SEQ ID NO: 249896 - DNA, 259 bp, Unknown
  Bacterial polypeptide expressing nucleotide sequence isolated from the Sargasso Sea
aatgagattactaaaagaccaagatcttagtaataagaatgtggttgtgagattagatttaaatgttcccattcaagacaagcaaattatagattcaaccagaatcatttcttcagtacctacaataaagtatctcgtaaataaaaattgtaaagtccttttaacatcacatcttggaagacctgaggaaggaaagtttgatcaagatttctcaatgtcacctgtcgctaaaaaattatctgaaatcttaaatcatgaa

SEQ ID NO: 249897 - DNA, 861 bp, Unknown
  Bacterial polypeptide expressing nucleotide sequence isolated from the Sargasso Sea
aatgcctaatctagtagattttgaatctataaaaaataagacagttatattaagactagatttaaatgtcccaatagaaaacggaaaaataataaatgattttcgattaagaaaatctttagaaacaattagggctctcagattagttggtaataaattaataattttatcacacttaggtagaccagaagagggtacaattgatgaatctttgagtttagagccaatttatgcctatcttgctaagaatcttgatgaggacattaaatttgagagagagtggttagctaatttacgtgacactataccaacaataacactttgtgaaaatacacgattccttagtggtgaaaaatctaatgacgagggcttgtctaggaaaatatcagaattgggagatattttcgtctttgatgctttcggtgtagctcatagaaaagaggcaagtacttatggggtatcaaactatatcgattattctgccggacctcttttaatatcagaaattaaaaatgctcagaaattgcttaagaattttagcaagccgctctgtacaatagtatctggtgctaaaatttctacaaagttaacactgttaaatacttttcttgaaaaatctgatcacgttatacttggaggtggtattttaaatacttttctagaggctcaaggatacaatataggcacatctctttgcgaaccatctttcttggatgaatcaaaaaaaattttaaactctgaaaattgtaaaaaaattgtttttccagatgatgtagtttgtgcggaagatggtgtattagaaaaccctcaaactaaagatatttctatggtaaaatcagacgataagatactagacgtagg

SEQ ID NO: 249898 - DNA, 617 bp, Unknown
  Bacterial polypeptide expressing nucleotide sequence isolated from the Sargasso Sea
aatgaaaagcatacaaagcaaaggtttagatctaaataataaaaaaattttaatcagattagaccttaatgtaccgttaaatggtgcaaatataatagatacaaacagaattgataaaactattcctacattacaatatttattaaaaaataaagcaaaaataattatactttctcatattggaagacctaaaggaaaaattgtaaatgagctctctttaaaacctgtctgtaatgaattggaaaaaaaattaaatcaaaaaatatcattcataactgagactattaataagataaaaattgaaaatttttttagtgaaagaaataatatagtaatgcttgaaaatttaagattttttaaagaggaagaaagtgatgatgcaatttttgctgaaaatttagcaaatctagctgatatttatgttaatgaggctttttcatgctcacatagaaaacatgcctcggttcattcaattacaaagtttataccctcatactctggtatacaattagaggcagaggtaaattcattaattaaaataacttcaaatattaaaaggccaatatcttgtataattgggggatcaaagatttcaacaaaaataactgttattaaaa

SEQ ID NO: 249899 - DNA, 741 bp, Unknown
  Bacterial polypeptide expressing nucleotide sequence isolated from the Sargasso Sea
aatgagaagtattattaacgaaaaaaatctatacaacaaaaaaatattattaagactagatttaaatgttcctctggaaagaaacaagataatagatacaacaagaatcgataaaattcttcctacattaaactttttaattaaagaaaaagctaaaattataattttatctcatgttgggagaccaaaaggtaaaattgttaaagagctctctctaaaacctatttgtgaagaattgcaaaataaattaagaaaaaaagtaaaacttattaatgaaaatattaaagaaataaaaagtaaaaatttcttcagtgactttaatgaggatatttttattttagaaaatattagattttattctgaagaggagcaaaatgacaataagtttgctgaactactatcaaatcttggagatatgtatgtcaatgacgctttttcttgttctcatagagctcatgcatcaatttatgaaattccaaaattcttaccctctttttctggattacagctagacttagaagtaaatgctcttaataaaataacttctgaaattaccagaccaattacttgtattattggggggtctaaaatttcatcaaagattaatgttatcaaaaatttaattcctaaatttgacactattataattgttgggggtatggcaaataattttatagaatattttggaaatagtgttggaaaatctattaaagaaaaaaattgttataaaatagttgaaga

SEQ ID NO: 249900 - DNA, 817 bp, Unknown
  Bacterial polypeptide expressing nucleotide sequence isolated from the Sargasso Sea
catgaacagcatttcaaataataatttagatcttaaaggaaaaaaagttttattaagagtagatttaaatgttccaatgaaaaatggagcaataaccgaaacatctagaattgaaaaaataataccaaccattaaacttttgttaaaaaaagaggcaaaaattataattatgtcccatataggaaggcctaaaggtaaggcggttaatggaatgtctttaaaacctatatcagaaaaattatctcatctattacagaaaaatgttttttttagtaaagatctaattagtgagaaaacacttttggaaataaacaaaatttcaaatgggtctattttgatgttagaaaatattcgatttaataaaggagaagaaaaaaatgataacgaattttcaaaacaattatcctcattgggagacatatatgtaaatgatgctttctcctgttcgcataggtctcatgcatctgttgagggaattactaaacatatgccttcatattttggtctacaaattaccgaggagattaatgcattaaaaaaaataacctcagaaattgaaaaacctgtttccctaataattggaggttcaaaaatttctacaaaaattaaaattataaacaatttaataaaaaaatttaataatattataattgtaggtggaatgggcaatacaatgctaaaacatactggttcaaatataggaagatcaatatgtgaaaatgagtgtggctctttaattaaagaaatattggaaaactcaaaaaatataattgcgaaattactattcccaaagatgcaattgtatctaccgatctaa

SEQ ID NO: 249901 - DNA, 865 bp, Unknown
  Bacterial polypeptide expressing nucleotide sequence isolated from the Sargasso Sea
ttctgaagatcaaatagtttttttagaaaatattagattctataaagaagaggaagaaaatgatatttttctggcaaaacatttggcttctcttggtgatttatttgttaatgatgctttttcttgctctcacagagcccactcaactataagtaaaatcactgagtttctcccatcttttgctggattgcaattagaaacagaaattaatgccttaaaaaaagttacaactgaaattaaaaaaccaattacttgtattattggtgggtcaaaaatttctacaaaaataggagtaattaaaaatttaatacctaaattcgataacatcataattgttggaggaatggcaaataatattcttaattttaaaggtaatcatattggtaaatcaattaaagaggaaaattgtgaaaagataattaaagaaatttttgaaacttctaaatatcattcatgcaatattatttaccctaaagatgttatggtaggaaaaaatgttgatgataaatcacaagttaaaaaactagataaaatagaaaatgatgaattaatattagacattggacccgatacagtaaatgaaatcaaaaatattattaaaataagtaaaacagttttatggaatggtcctgcaggctattttgaaaatccaaattttgcaaatggcagttacgaaatagcaaaagcaattattaaaaaaaataaagaaagatcaatttattctgttgtgggaggaggtgatactgtagctttaataaatcaaatgaatgctattaaaaattttaactttgtttcaactgctggtggagcatttttagaataccttgaaggaaaagaacttcctggtataaaagctttaaattaa

SEQ ID NO: 249902 - DNA, 610 bp, Unknown
  Bacterial polypeptide expressing nucleotide sequence isolated from the Sargasso Sea
atgaattatataaaagaccaagaaaatcttaacaaaaaaaaaattttattaagattggatttgaatgttccattgaagaatggatcaattaccgatgaaacaagaataaataaaattattccaatcataaattttttaattaaagaaaaatcaaaaattataataatttctcatgtgggaagaccaaatggcaaagtgaataccaatctctcacttaaacctatttgtgaaaatgtagagaaaaaaattaaccaaaaaattagattgattaaagataatatttttaaattaaaaaaagaagatttgtttaaagataagaatgatcaggtagtttttttagagaatattagattttatgaagaagaagaaaaaaatgactctaactttgcacaacatttagctaagcttgctgatttatatgtaaatgatgctttttcttgctctcacagagcccacgcttccgtaagcaaaattaccgaatttctcccctcttttgcaggattacagttagcaacagaaattagtgctttaaaaaaagttacgacagaaataaaaaaaccgatcacttgtattattgggggatcaaaaattcaacaaaaattggaataat

SEQ ID NO: 249903 - DNA, 715 bp, Unknown
  Bacterial polypeptide expressing nucleotide sequence isolated from the Sargasso Sea
atgaaatacataaaagatcaagaaaacttaaatgaaaagataattttattgagactagatttaaatgttcctctcaaaaatggaataatcactgatcaaactagaattgataaaatattaccaataattaatttcttacttaaaaaaaaatctaaaattttaattatatcacacgtaggacggccaaatggcaaagaaaataacctcctgtcccttaaaccaatttgtgaaaatataggaaaaaagattaaccaaaaagttaatttaattaaagataatatttttaagttaaaaaaagaagatttgtttaaaaatacaaaagatcaagtaatttttttagaaaatataagattttataaagaagaagaaaaaaatgataaagatttttcaaaacatttggcaaaacttgcagatgtttttgttaatgatgcattctcctgttcacatagagctcacgcttccataagtaaaattaccggatttttaccatcttatgcagggctacaaatggaaaatgagttggatgcattaaaaaaggttacaactgaaataaaaaaaccaataacttgtattattggtggatcaaaaatttcaactaaaattggtattattaaaaatttaattccaaaatttgataatataataatcgtaggtgggatggctaataatattctttattataaaggcaatttaataggaaaatcaataaaagaaa

SEQ ID NO: 249904 - DNA, 478 bp, Unknown
  Bacterial polypeptide expressing nucleotide sequence isolated from the Sargasso Sea
atggatgaaataaatttttttccggaaaacttaaatattcaaggcaaaaaggttttacttagattagatttaaatgttccaatgcaggacaaaattattcaagacgatacaagaattcgattatgtttacctttcattaaaaagttaatagaaaaaaaagctaaaattattattataactcatttaggaagacctaaaggtgtaaaatcttcagatctatctttaatgccgattttcaaataccttaagaaaaatcttaaaacaaaaatttatttttttactggagaaataaacgaccactctcaagaaaaattttcacatatgaaagaaggtgaaattatactgatagagaatatcagattttttaaagaggaaaccgatgacgacatagaattttcaagaaaattagcttcgttaggtaatgtttttattaatgacgcgttatcttgctcacacagaaaacaggcatcgatccata

SEQ ID NO: 249905 - DNA, 487 bp, Unknown
  Bacterial polypeptide expressing nucleotide sequence isolated from the Sargasso Sea
atgaaatctatagaaaatttagttaatattgttaatagaattgtaattttaagacttgatttaaatgttccaattaagagtggaaaaataacagacaccaaccgtattgataaaattatacctactttaaattttttaataaaaaaaaaagcaaaaatagtaataatatctcatatcggaagacctaatggcaaaatagttaatgaactttcactagaaccagtatcaatatatttaaaaaataaattaaaaaaaaaaatttcattaattaaagaaaatatttttaatttagataaaaaggatatttttaaggattcaaatgacaaattagtactgcttgaaaacattagattttatcctgaggaagaagccaatgatgaaaaattttcacaaaaattagcaagtttgggagaaatatatgttaatgatgcaatttcatgttctcatagaaagcatgcatctgtatcaaaaataactaaatacatac

SEQ ID NO: 249906 - DNA, 865 bp, Unknown
  Bacterial polypeptide expressing nucleotide sequence isolated from the Sargasso Sea
ttgatgaaaaatataaaagaccaagaaaatctcagtcaaaaaaaagttttattaagactagatttaaatgttccgttaagaagtggatttatcactgatgaaactagaattgataaaattattcccattataaagttcttaattaagaaaggatcaaaaattataattatctctcatgttggaaggccaaaaggacagataaataaaattctttcattaaaaccgatttgtaaaagtttagaaaagaaattaaataaaaaaattcatttactagatgaaaatatttttgaacttaaaaaagaagatttatttaaaaattcccaggatgaaatagtcttcttagaaaatataagattttataaagaagaagaaaaaaacgatgcatcttttgcaaaacatttagctagctttgcagaattatatgtgaacgacgcattttcttgctcccatagatcacacgcatctattagcaaaattacagaatttctgccctcatatgctggcttgcaactagaaacagaaatcaacgcgcttaaaaaagttacaacagaaataaaaaaaccaataacttgtatcattggaggatcaaaaattttgacaaaaattgatataattaaaaatttaataccaaaatttgacaatatcataattgttggaggaatggctaataatataataaattataaaggatacaatattggtaagtctgtcaaagaagttaattgtgagaaagcaataaaagaaatttttgaaacttcaaaaaatctttcttgtgatattatttttcctgaagatgttttggttggaaaaagtttaagcgatgattcaaaggaaaaagaattgaaggatattaaagacgaatgac

SEQ ID NO: 249907 - DNA, 187 bp, Unknown
  Bacterial polypeptide expressing nucleotide sequence isolated from the Sargasso Sea
tatgatcaagtctatatccaaatttgatatcaaacacaagagagttctaataagagcagatctaaatgtgccaatcaatagagacaaggttcaagatgatttcagactaaaagcccttttaccaacattgcattattgtttaaagaacaatgctaagatagtttttaatgtctcatctcggcagacc

SEQ ID NO: 249908 - DNA, 661 bp, Unknown
  Bacterial polypeptide expressing nucleotide sequence isolated from the Sargasso Sea
ctttcgatgaaacccatttgtgaaagtttagaaaataagattaataaaaaaattaaaattattatagacgatgtttttaaattaaaaaaacaggatttatttagagatactaaggatcaaattgtttttctagaaaacattagattttacaaggaagaagaaaaaaatgatatttcttttgcaaaacaattggcagggttagctgatttatttgtaaatgatgcattttcatgttcccatagagcgcatgcatcattatgtaaaatcacagaatttttaccatcttttgcagggttacaattagaaaaagaagttaatgctttaaagaaagttacaactgaaattaaaaaaccaattacttgtattataggaggatcgaaaatatcaaccaaaattggaataattaaaaatctaatacctaaatttaataatattatacttgtaggaggaatggctaataacattataaatcacaaaggcagccaaataggtaaatcaatcaaagaggaaaattgtgaaaaaacaattagtcaaatttttgaaattgccaaaaatcattcttgtaaaattatctatccagaggacgttttggttggaaaaaatatggaagatacatcagaaatcagagagctcaataacattgaagatgaagatataattt

SEQ ID NO: 249909 - DNA, 295 bp, Unknown
  Bacterial polypeptide expressing nucleotide sequence isolated from the Sargasso Sea
acaattaatacaataaaaaatacaattaatactagtagaactgtgctttggaacggcccggcgggatactttgaaaattcaaattttgctaatggaagttatgaaatcggcaaggagattgcaaaaaaaacaaaggaaggaaaactttattctgttgttggaggaggagatacgaccacggtaataaacaaaattaatttatttaataaatataatttcgtttcaactgccggtggagcatttctagaatttcttgaaggtaaagatttacctggtataaaagcgctaaattaaa

SEQ ID NO: 249910 - DNA, 708 bp, Unknown
  Bacterial polypeptide expressing nucleotide sequence isolated from the Sargasso Sea
aattcataaagtattttcaaaaaacatgtaaacatttaaaatattgtgaaaatccagttatatctgcaccatctggtctagctcttggcggcggcgaagaggtattattgcaaagcaattatgtggtatctcatactaatatagttatgggtcttgttgaaactattgttggattggttccagcgggaggtggttgtaaagagcttttgtggcgttggacacaaaccaatgagtcaaaaaatgatccagatttcgcatcacttaaagtatttgacattattggctatgcaaaaacagcttcttcacctcaagaagcaaaacctcttttatttttagacaaaaaccacgaagttattattaaccgaaataaccttttcggagtagctagaaaatttatcgaaaaaaataaagattttaacccccctataaaatgtaaatttaaattatcagggaaccaagtgagacaaaaaatgcaaaagaaacttgatgaattatataataataaaaagattttagaccatggtatggtagttggtaaggaattagcatatgtattgagtggtggagatactgaaaaaaataaagaaatttccgaggatcaaatgtataatctagaattaaatagttttatgaaattattagatactaaaagtactcagagtagaatagctcatactttaaaaacaggaaaaccacttataaactaaa

SEQ ID NO: 249911 - DNA, 478 bp, Unknown
  Bacterial polypeptide expressing nucleotide sequence isolated from the Sargasso Sea
atgattaatattaaagatcaagaaaatctaagtcaaaaaaaagttttgcttagactagacttaaatgttccattaaaagatggtctagttgtagatgaaacaagaataaataagattatacctgttattaattttttaattgaaaaaaaatcaaaaattataattatttcccatgttgggagaccaaaaggtaaagtggataaaattctttctcttaaaccaatttgcgaaaatttagaaaaaaagataaaaaaaaaaattaagcttatcagtgaaaatatttttaaattaaaaaaagatgatttatttcaagaccctgatgatcaaatagtctttttagaaaatattagattttacaaagaggaagaggaaaacgacacatcttttgcaaaaaatttggcaaactttgccgacttttatgtaaatgacgcattttcttgttctcatcgagcccatgcatctataagtaaaatcacaa

SEQ ID NO: 249912 - DNA, 316 bp, Unknown
  Bacterial polypeptide expressing nucleotide sequence isolated from the Sargasso Sea
attgggaacaaaaactatttactctattaaagaaataatagataaatcaaactcaatattgtggaatggtccagccggttattttgaaaatgagaattttcaaaacggaacaaaaaaaattttagaaattatttcaaataaaacgttaaatgataaaattttttctattgctggaggaggagaaactgtggctgctatcaataaatttaaaaaatttaactcatttacatttgtttcaactgctggtggagcctttttagaattccttgaaggaaaagatttacctggtataaaagctttaaataaaaatgtctga

SEQ ID NO: 249913 - DNA, 819 bp, Unknown
  Bacterial polypeptide expressing nucleotide sequence isolated from the Sargasso Sea
ttgaaaataatttagatttaaatcaaaaaaaagtaatattgaggcttgatttaaatgtcccattaagtgatggaattattacagatacaacaagaatagataaaattattccaactataaattatttattaaaaaaaaattcaaaaataataattttatcacatataggaagaccgaaaggtaaaatagttaataaactttctttaagacctgtatgcgatgaaattaaaaaaaaaattaatattgatgttaaattaataactaaaagtattagagatattttgccaagcgacttatttgaaaattccgaagaaaaggttctaatgctagagaacataagattttacaaagaagaagaaaatggtgatgaaaactttggaaaacatatttcatgttttggtgatttgtacgttaatgatgcattttcttgttctcatagagctcattcatcaattaatcaaattccaaaatttattcctgcatactcaggcttacaattaaatactgagattaatgctctaaaaaaaataactacagaaattgaaagaccaattacatgtgttattggtggttcaaaaatatcttctaaaataaatgttataaaaaatttggttaataaacttgataacttgataattgttggtggtatggcaaataatattcttgaatataaaggttttgaaataggaaattcaattaaggagcaaaattgtaaaaaaataattgaagaaatatttaatctttcaaaaaaaaaaaaatgtaaaattttttatcctgaagatgtggtggtagctaaaaaattaaatggttctccataaa

SEQ ID NO: 249914 - DNA, 920 bp, Unknown
  Bacterial polypeptide expressing nucleotide sequence isolated from the Sargasso Sea
aatgaaaacctttgagctaacaggaaaaaagattttattacggttagatttaaatgttcctttaaaagataaaagaataacagagttagacagaataaataaaattattcccactataaaatatttgcttaaaaaaaaatcaaaaattataattttgtcacacataggaaggccaaaaggaaaaatagagcctaatttaacacttgaaccagtttccaaaaagttatctgaaattttgagtctaaaagtaaaatttgttaaggatgaaattgatgaaaaacttaattacaaaatagatacaatcaaaaatagttcaattataatgcttgaaaacatacgttttaataaaggagaagaaaaaaatgaccacaattttgcaaaaaagctttctaaacttggagaaatttatgtaaacgatgcattttcttgctgtcatagaccccatgcctctatagatgctataactcaatatatcccttcatattttggaattcagatagttgaagaaatatctgctctaaaaaaaataacttcagaaattaaaaaacccataacctgtattttgggtggatctaaaatttcaacaaaaataaacataatttcaaatttaataaaaaaatttgacaacattgtaatagtaggcgctatggctaatacaattttaaaggaaaaaggtctaaatataggaaaatccataaatgaagaaaattgtaataaagttgtatttaaaatttttgaaaatgcaaaaaaatataaatgtaaagtattatatccttcagacgtaattgtttcaaaaaatctcaattctgcaggtaaaaacaaattaataaacgaaatagaaacagacgatattattttagatataggaaaaaatacaatttcctcaatagaaacaatattatcaaattcaaaaactattt

SEQ ID NO: 249915 - DNA, 739 bp, Unknown
  Bacterial polypeptide expressing nucleotide sequence isolated from the Sargasso Sea
aatgaaatctattgaaaaattagaaaatatagaaaataaaaatgtaatcctaagactcgatttaaatgttccaataaaaaatgataaaattatagatactaaccgtattgacaaaattatacccactttgaattttttggtaaaaaaaaaagcaaaagttataataatatctcatataggaaggcctcatggcaaaatagtcaaagaactttcattaaagccagtttccttatgtataaaagataaaataaaaagagatgtttttttattaaaagaaaatatttttaatttaagcaaaaaagatatttttaagaattctagtgatggagttgtattgcttgaaaatattagattttatcctgaagaagaagctaatgatgacaagttctcagaaaaattagcaagtttaggtgacatatatgttaatgacgcattctcatgctctcatagagatcacgcttctgtaacaaaaattacaaattatataccctcctacagtggtattcaaattaatacagaggtaaatgctcttagaaaaattacaactgaaataaaaaaacctgtgacatgtataattggtgggtcaaaaatttcgtcaaagatcaatataataaaaaatttaatacctaaatttaacaatattattatagttggtgctatggccaataatatatttaaatatcagggcttaaaaattggcaaatctatatgtgaaaataatattggcagaattattcaa

SEQ ID NO: 249916 - DNA, 894 bp, Unknown
  Bacterial polypeptide expressing nucleotide sequence isolated from the Sargasso Sea
gttttattaagagtagatttaaatgttccaatgaaaaatggagcaataactgaaacatctagaattgaaaaaataataccaaccattaaacttttgttaaaaaaagaggcaaaaattataattatgtcccatataggaaggcctaaaggtaaagtagttaatgggatgtctttaaagcctatatcagaaaaattatctcatcttttaaagaaaaatgttttttttagtaaggatctaattagtgataaaactcttttggaaataaataaaattccaaatgggtctattttgatgttagaaaatattcgatttaatgaaggggaagaaaaaaatgatagcgaattttcaaaacaattatcctcattgggagacatatatgtaaatgatgctttctcctgttcgcacaggtctcacgcatctgttgaaggaattaccaaatatattccttcatattttggtctacaaattactgaggagattaacgcattaaaaaaaataacttcagaaattgaaaagcctgtttctctaataattggaggttcaaaaatttctacaaaaattaaaattataaacaatttaataaaaaaatttaacaatattataattgtaggtggaatgggcaatacaatgctaaaacatactggttcaaatataggaaaatcaatatgtgaaaatgagtgtggttctttaattaaagaaatattggaaaattcaaaaaaatataattgcgaaattactattccaaaagatgtaattgtatctaccgatctaaatgggaaaggaaaagaaaaaaaaataaatgaaataaaagaaaacgaaatgatattggatattggatcaaaaacaatatcatcaattgaaacaattataagtaattctagaacaatactttgg

SEQ ID NO: 249917 - DNA, 472 bp, Unknown
  Bacterial polypeptide expressing nucleotide sequence isolated from the Sargasso Sea
gatgagcgatgaacgcagtttttccggcggctgtcagtgcggcgcggtgcggtttcgcgcaagccatctcggtcggccgtcgatctgccactgtcggatgtgccagaaggcgttcgggaatttcttcggcgcgctggtgacggccgatatcgcgcatctcacatggacccgcggcaagccgaagatgtttcgctcctccgcgaaggtgctgcgcggtttctgcgagaactgcggcacgccgctgacctatcagttttcaggtggcgtcgaactcgcgatcggcgcatttgacgagcctcagcatttcgagccgcagatccaggtcaaccacgacagccgcctgccctggatcgacacgctgttcgaaaagcccgggcgcccgcagacgctggaggaaagtgagatcatctcgcgccagcaccccgaccacgacacggaccaatggccgcccgaagacggcgccgaggcataa

SEQ ID NO: 249918 - DNA, 691 bp, Unknown
  Bacterial polypeptide expressing nucleotide sequence isolated from the Sargasso Sea
atgataaaaaaaggaatagtattagctggaggcacgggtactagaatgagtccaattacaaaagctgtgaacaagcaacttttgcctatttatgacaagcctttaatttactatcctctttctgttttaatgttatctggaattagagatatattaattattgtaaataaaggacaattaaatcaatttaaaaaaattttaccaaatggaaacaacttaggtataaaaattacatacgctgaacaaaaatatccaagaggtctacctgatgctttcaatataggaaaaaattttataggaaaaaataatgtagctttaatattaggtgataattttttttatgggcaaagtcttactgaaaaattaaaaaaatgtgtaaatcttaataaaggtgccaaagtaatattacatccagtgaataatcctgcattatatggaattgcttctataaacaaaaaaaataaaattattaaaattgcagaaaaacctaaaaaaactttttcaaagcttgcaattaccggtctctatttttttgataataaggtaatcaaatatactgagaaattaaaaccttcaaaaagaaaagaaattgagatcgtagatttattaaataaatataaaaaaaataattctttatcagctgagtttcttggtagaggtggagcatggctagacgctggatcaattaagg

SEQ ID NO: 249919 - DNA, 532 bp, Unknown
  Bacterial polypeptide expressing nucleotide sequence isolated from the Sargasso Sea
atggagtatataaaaaatcaagagaatctagatggtaaaatagttttactcagattagatttaaatgttccaataaagaatggaattattacggaccaaactagaattgacaagatattacccgttataaaatttttgctagaaaaaaaatctaaaatcttgataatttcacatgttggtagaccaaaaggtaagataaaaaaaaacctctctctaaagccaatatgtgaaaatttagaaaaaaaaattaatcaaaaaatagaattaactaaacaagacatttttaaaataaaaaaagaagatttatttaaaggtccaaatgagaaaattatttttctagaaaatataaggttttacaaagaagaagaaaaaaatgatacaaatttttctaaacatttagcaaaacttgcagatatatttgttaatgatgcattttcttgctcacatagagcccatgcctctataagtaaaattactaaatttttgccttcatatgctggcttacaattagaaactgaaataaatgcttaaa

SEQ ID NO: 249920 - DNA, 820 bp, Unknown
  Bacterial polypeptide expressing nucleotide sequence isolated from the Sargasso Sea
atgataagtattaaagaggttccaaatcttcataaaaaaaaaatattattaagattagatcttaatgttcctctaaaggatggcaaaattatagacacaacaagaattgataaaatccttcccactttaaagttcttaataaaagaaaactcaaaaatcataattttgtcccatgtgggtagacctaatggtaaagttgtagaaggactatctttaaaaccaatagttgacgaattacaaaaaaaattaagtaaaaaagttaaaataattaaaaaaaatattaatgaaatacaaaacaaagatttttttgacacatttgatgaaaaaattatcgttttggaaaatattagattttatcgtgaagaagaaagaaatgatgtcaagtttgcgaaacatttagcaagtttaggagatatttatgttaatgatgcattttcatgttcccaccgagcacacgcatctgtttatgaaattactaaatttttaccatcatattctggtttacaacttgatttagagattaatgctttaaataaaattacttcagaaattataaaacctataacttgtataattggagggtcaaaaatttcaacaaaaattggtttaattaaaaatttaataccaaaatttgataatattataattgttggagcaatggcaaataatataatcgaatatatggggaacaacattggaagatcattaagagaagtcaatgcaattgagattattgaagaaataatttctctctcaaaaaaagaaaattgtaacctaattttcccagaggatattgttgtagcaaaaagtttttatgata

SEQ ID NO: 249921 - DNA, 392 bp, Unknown
  Bacterial polypeptide expressing nucleotide sequence isolated from the Sargasso Sea
gatggctattaaaacactaaatgattataatattgctaataaaaaaatattagtaagggcagatttaaatgttcctttagaaaacggaaaaatatctgatatttcaaggcttattagcgctactcctactattaaaacaattcaatcattagggggaataaccattttgatttctcattttggaagacccaatggatcatataaagaagaacttagtcttaaacaagttgtacccgaattggaaaaacttttaaattgccctataaaattctcatctgaattagttggaaaaaatgtaataaaaaaaattgataatctaattggtggtgaaatactattgctagaaaatacaaggttttttgctgaagaggaaatgaatgacgaaagttttt

SEQ ID NO: 249922 - DNA, 667 bp, Unknown
  Bacterial polypeptide expressing nucleotide sequence isolated from the Sargasso Sea
atgtctgatttaaaatttttttctagcaatactcctgttgatggtaaacgagtaattgttagactagatcttaatgtgccaattagtaattcaaaaatagatgacaatactagaattaaagttgttgaaccctttataaataaattattagaaaataaggccaaagttattttgctaacacacttaggaaggccaaaaggtagagtggtttctgagctctctttaaagccaatatttgattacttgaaaaaagaattaaatggaaaagtttatttttataacaaaaaaatcgatttaaatgcagtggatgctaccaataaattaaaatctggtgaggttttgttgttcgaaaatattcgtttttttaaagaagaagagaatgacgaagaaacttttgcaaaaaacttgtctgaacttggtgatatttttattaatgaggctttttcttgttcacatagaaaacaagcgtcaatacacaatataacaaaatttattgatagttacggaggacctattttggaaaaggaaattaggtcaattgaactaataacaaaaaacaaaaaaaaacctgtcacttgtataattgggggttcaaaagtttcgtctaaaataaatattttaactagtttaactgaaaagtcagacaaccttgttattgttggtgcaa

SEQ ID NO: 249923 - DNA, 811 bp, Unknown
  Bacterial polypeptide expressing nucleotide sequence isolated from the Sargasso Sea
atcaggaagtagcggcctaataggtaaatccttaattaattttttagagtcaaaaaagcatgaaatatttattctcacgagaaatattaaagaaaatagcaaaaattcaattttttgggatccttacaaaaatataattgatttaaataaaattgaaaattttgatgtttttataaatctaaatggaagttctattgcaaaaatcatgatgttaggaagaataaaatttggatcaaaaaaatctatctataatagtagaataatctcaacaaaattccttagaaactgtatagaaaaattatctaccccaccaaaattatatataacagcatcagcatgcggatattatggcgatagaggaaattcacttgttgaggaaagttctaaacctggcttaggatttctttctgatacagctaaaatctgggaaaatattgcaatacctgataaaaaaaatgtaagagttgtaaacttacgattaggtttagttattactaaaaatggcggaataataaaatcatccaaatttatatataaatcttatctaggcggcaagtatggaaatggtaatcaatggtggccatggatatctatgaaagatacaattagagcagtagaacatataatcgaaaataaaagtataaatggaccagtaaatttagtatcccccaagttgataagaaataaagatttcgtaaaaaaattgtcactctattttaataaaccagctgtattaaatttaccaagttacataataaagattttttttggtggaatagcggatgaagctttactaagtagtcaaaaagtt

SEQ ID NO: 249924 - DNA, 658 bp, Unknown
  Bacterial polypeptide expressing nucleotide sequence isolated from the Sargasso Sea
ttagatccaatttcaaaaaaattgtcagatttgttaaataaaaaaattatatttaacaaaaatataataaataaaaacactttttccgaaataaacaatctttcaaatggctcgataatgatgttagaaaatatacgttttaacgaaggagaggaaaccaatgataaagaattttcaaaaaaaatctctggtttaggagatatatttattaatgatgctttttcatgctctcatagagctcatgcatcaatagaaggtattacgaaatatattccttcctattttggtttacaaataacagaagaaattaatgctttgaaaaaaataacttcggaaattaaaaaaccagtttccttaattattggtggttccaaaatttctactaaaattagaattattaataacttaattaaaaaatttaataatataattattgttggtggtatggcaaacacaatgcttaaacatacgggctcaaatgtgggtaaatcaatttgtgaacatgattgtggtcaattaattaaagaaattttagaaaaatcaaaaaaatttggttgcaaaataacatgtccaacagatgtagtcgtagcaagtagccttgagggtctgggtaaaaacaaagagggagataaaattgaagaggatgaaatgatactag

SEQ ID NO: 249925 - DNA, 670 bp, Unknown
  Bacterial polypeptide expressing nucleotide sequence isolated from the Sargasso Sea
aatgaaatccattgaaagtttagaaaatattgaaaacaaatatgtaattttaagacttgatttaaatgttccaataaaaaatggaataataacagataccaatcgtattgataaaattattccaacactaaattttttagtaaaaagaagagctaaaataatcatcatttcccatattggaagacctaatggtaaaatagtaaatgaactttctttggagccattatcattatttattgaaaataaaattaaaaagaaggtatctttaattaaaaaagatatatttaatttaaataaaaaagatatatttaaaaatgcaagtgatgaagtagtaatacttgaaaatataagattttatcctgaggaagaagctaatgatgatagattttcagcaaaattagctagttttggtgaaatatacgttaatgatgctttttcctgttcgcacagaaatcatgcttctgtatctaaaataacagaatatataccttcttatagtggcattcaaattaacaatgaggtagatgctcttaataagataacctctgaaataaaaaaaccagtaacatgtataattggtggatctaaaatttcatcaaaaataaatataataaaaaatataataccgaaatttaatagtattataatagttggtgccatggcaaataat

SEQ ID NO: 249926 - DNA, 382 bp, Unknown
  Bacterial polypeptide expressing nucleotide sequence isolated from the Sargasso Sea
aactataaagattcatctcaaaataaagacattaataaaatagccaaagacgatctaattttagatattggatctaaaactattagaaaaattattaatttaataaaaaattcaaaaaccatattgtggaatgggccggctggttattttgaaaatgacaattttgcaactggaagttttgagttagcaaaagaaatatctgcccaaacaaaatcgggaaatattttttcagtaattggtggtggagacacggtctcagtaataaataaattaaaactttttaacgattttaattttgtttcaactgcaggtggagcatttttagaataccttgaaggaaaagatttacctggtataaaatctttaaattacaatgagtgaa

SEQ ID NO: 249927 - DNA, 589 bp, Unknown
  Bacterial polypeptide expressing nucleotide sequence isolated from the Sargasso Sea
aattaaaattataaacaatttaataaaaaaatttaacaatattataattgtaggcggaatgggcaatacaatgctaaaacatactggttcaaatataggaaaatcaatatgtgaaaatgattgtggttctttaattaaagaaatattggaaaactcaaaaaaatataaatgcgaaattactattcccaaagatgcaattgtatctaccgatctaaatggggaagggaaagaaaaaaaaataaatgaaatagaagaaaacgaaatgatattagatattggatcaaaaacgatatcatctattgaaacaattataagtaactctagaacaatactttggaatggtcctgcgggttattttgaaaatccaaatttccaaaatgggacaaaaaaaatattagagttaatttctcaaaaaacaagtaatgataaaattttttctgtagcaggaggcggtgaaacagttgctgcaataaacaaatttagaaaatttgattcatttacttttgtttcaactgctggtggagcttttttagaatatcttgaaggaaaaactctacctgctataaaagccttaaatcaaaatgtctga

SEQ ID NO: 249928 - DNA, 169 bp, Unknown
  Bacterial polypeptide expressing nucleotide sequence isolated from the Sargasso Sea
gcaagcagggggaacaaaatattttctgttgttggtggaggcgatacagttgcagtaattaattcacttaaattaaataataaatttgattttgtttcaactgcaggtggagcatttttagaatatcttgaaggcaaagttctccctggtataaaagcgttaaattaaa

SEQ ID NO: 249929 - DNA, 355 bp, Unknown
  Bacterial polypeptide expressing nucleotide sequence isolated from the Sargasso Sea
atgcacaagataaaatatcttcattcagatttaaatattgaaaataaaagaattattttaagaacagattttaatgttccaatagaaaaaggcaaaatattagattgcactagaattgacgctgtaattccttttttaaatgaacttatgaaaaaaaaatccaaagtagttcttatatctcacttaggtaggcctagcggaaaaatagagaaaaaattttccctgaaaccggtatttgaatatttaaagaaaaaaatcaaaaatgaagtttttttttcgaattcaaacataattgacgctaaggaaaagagttcaaaacttgagccatctcaaatcttactattagaaaatatta

SEQ ID NO: 249930 - DNA, 379 bp, Unknown
  Bacterial polypeptide expressing nucleotide sequence isolated from the Sargasso Sea
atgttacgaactttaaaagcatttgatttaaaaaataagaaagttttaatgcgagtagactttaatactccattgaaagacagtaaggtatctgataactttagaataaaatctacacttccaagcattaagacttgtattgaaggtggagcagctttgactataatgtctcatgttgggagacctaacggagaatatgataaaaagttaagcttaatgccaatcggtgaggaattagcaagtttgcttcagatgcctataaaattttcaaacgattgtatatcacaagatgcttttgatacttcttttggactaaaaccgggagaaattcacctattagagaatttacgttttcatgattctgaacaattaaatgacc

SEQ ID NO: 249931 - DNA, 478 bp, Unknown
  Bacterial polypeptide expressing nucleotide sequence isolated from the Sargasso Sea
atgaataatattaaagattatggaaatcttaatcaaaaaaaagttttgttaagattagatttaaatgtgccattaagtaatggagttataattgatgaaacaagaatcgataagattttacctgtaattaattttttgatcaaaaaaaattctaaaattatagtattgtcacatattggaagaccaaaaggtaaaataaataatgatttatcacttaaaccaatttgtgaaaacttagaaaaaaaaataaataaaaaaatacgattaattggtgacgatattttaaaattaaaaaaagatgatttatttaaagatctcaatgatcaaatagtttttttagaaaatattagattttatgaaggggaagaaaaaaatgattattctttcgcaaaacatttggctggtcttgctgatttgtatgtaaatgacgcattttcttgttctcatagatttcacgcatccgtcaataaaattacag

SEQ ID NO: 249932 - DNA, 724 bp, Unknown
  Bacterial polypeptide expressing nucleotide sequence isolated from the Sargasso Sea
aaatgtaatgtagttttattggaaaatttaaggttctttgagcaagaagcatctaacgatgatatcttctcaaaaaaattatcctcttttgccgatatttatattaatgagagtttttctacatgccatagaaaacattcttcaattgtgggaattcctaaattcttaccatcttttcctggaatgcttttagaaaaagaagttttaaatcttaaaaaattaattactaatgctaattatagttctgctgtagcagtatttggtggttcaaaagtttcaactaaaataaaggttatagaatattatttaaaaaaatttgataaagttcttataggtggagcaatggctaacacttttttatattcaaaagacattaatattgggtcctcaatttgtgaaaagtcaatgaaaaaaaccgcgaaaagtcttttagactattatggcgataaaatagctctacctgacgacttagttaccattgataaacataaaaaaaatcaattaagatcaattaatgatattaaaaaagatgaaaaaatttttgatattggtcctcaaaccagaatgaaatactttaattctattgaagaatgttcatgtctcctctggaacggtccattaggtttttacgagcaaaaaccatttgacgaaggtacaaattatgtaattaaagcagtaaaaaataataataataaaaatttcttttctgtggctggtggaggtg

SEQ ID NO: 249933 - DNA, 421 bp, Unknown
  Bacterial polypeptide expressing nucleotide sequence isolated from the Sargasso Sea
ttgagagtggactttaatttaagtcgagatggtgctggccaatggattttgaataaaagattgtatggcgtattgccagtcattaaagaattgctggccatgcaatttggtgtgattttagtgtcgcatttaggtaggcctcgttcgggagtttgggaagaacggttttcgttgtcaagtttgtgtgttgagttggaaaaactgttaaacaagacggtgactttcttatcagcatggccgtatcagaaaacttatttggcaggagggactgtggctttggctgaaaatacacggtttctgaaaggagagagagagaatgattctgatttggcaaaaaaaatggtggaaaatgttgatttagtggtgatggaagcttttgcttgctcgcatagaaggcatgcgtcaactgttggtatttaga

SEQ ID NO: 249934 - DNA, 280 bp, Unknown
  Bacterial polypeptide expressing nucleotide sequence isolated from the Sargasso Sea
ctcgacaaggccgccgaacgcaacgtgcaatttctcatccccaccgacaacgtggtggccgagcccaccgagatggacggcaaatttgccttcggcgatcatcgcgtgaatgatgataaaaatatccccgacgacgtggagggcgtggacatcggccccaaatccgccgacaccttcagcgaggtgatcaagggcgcgaagacgattttatggaacggccccatgggcatatttgaagacgaccgctttgccggtggcaccttcgccgtggcccgcgcgg

SEQ ID NO: 249935 - DNA, 142 bp, Unknown
  Bacterial polypeptide expressing nucleotide sequence isolated from the Sargasso Sea
atgctaaaaataaaacagctagataatgatcttaatgtagaaggaaaaagagttttgcttagagtggattttaatgttccattaagtgatggttccatttctgaaacttctcgaattcaaaaagttttaccaactataaaat

SEQ ID NO: 249936 - DNA, 415 bp, Unknown
  Bacterial polypeptide expressing nucleotide sequence isolated from the Sargasso Sea
atagtatttcctgaagacgtatctgtaggaaaaaattttgaagactcttctcaaaataaagatgttaataaaatagcaaaggatgatttaattttagatattggatctaaaactattagaaaaattattaatttaataaaaaattctaaaactattttatggaatgggccagccggctattttgaaaatgataattttgcaactggaagttttgagctggcaaaagaaatatctgctcaaacaaaatcaggaaatattttttctgtaattggtggtggagatacagtctctgtaataaataaattaaaactttttaatgatttcaattttgtttcaactgcaggtggagcatttttagaataccttgaaggaaaagatttacctggtataaaatctttaaattataatgagtgaa

SEQ ID NO: 249937 - DNA, 192 bp, Unknown
  Bacterial polypeptide expressing nucleotide sequence isolated from the Sargasso Sea
ctatagctaattcaattgtagaagctacagaaaatggaactttttcattagttggtggtggggacagcgttgctgcattaaatcaatttaatttgtctaaaaaagtaagccatgtttctactggtggtggagcaatgttaaaatatttagaaggtaaacagcttcctggaataagtgcaattttaagttaaa

SEQ ID NO: 249938 - DNA, 190 bp, Unknown
  Bacterial polypeptide expressing nucleotide sequence isolated from the Sargasso Sea
attggctggaaaaatttccgagaatacggaaaagaaatctttaatttcagtagtgggaggcggtgacacagtatctgctattaataaaagtgaaaaaaaatataattttactcacatatcaacagcgggtggagcttttttggaatttttagagggaaaagacttgcctggcctcaatgttttaaaataa

SEQ ID NO: 249939 - DNA, 272 bp, Unknown
  Bacterial polypeptide expressing nucleotide sequence isolated from the Sargasso Sea
aatgagattactaaaagaccaagatcttagtaataagaatgtggttgtgagattagatttaaatgttcccattcaagacaagcaaattatagattcaaccagaatcatttcttcagtacctacaataaaatatctcgtaaataaaaattgtaaagtccttttaacatcacatcttggtagacctgaggaaggaaagtttgatcaagatttctcaatgtttccggtcgctaaaaaattatctgaaatcttaaattatgaaattgatcttattg

SEQ ID NO: 249940 - DNA, 223 bp, Unknown
  Bacterial polypeptide expressing nucleotide sequence isolated from the Sargasso Sea
atgagattactaaaagaccaagatcttagtaataagaatgtggtcgtgagattagatttaaatgttcccattcaagacaagcaaattatagattcaaccagaatcatttcttcagtacctacaataaaatatctcgtaaacaaaaattgtaaagtccttttaacgtcacatcttggcagacctgaggaaggaaagtttgatcaagagttctccatgtctccgg

SEQ ID NO: 249941 - DNA, 882 bp, Unknown
  Bacterial polypeptide expressing nucleotide sequence isolated from the Sargasso Sea
attaaaaataaaaaatattctttaaaatttatatgcaatattcttgaggaagagataaatattaaaaagatttattttctgaaagacttcgatgaaaaaaatattcagaatatgattaataatattaagccaggagatatttgtctttttgaaaatatccgattttattcagctgaagaaaagaatgatttagattttgctaaaaatattagtaaaaattttgatgcatttgtcaatgatgccttttcttgctctcatagaaaacatgcatcaatagttggtgttccaacttttttaccctcatatctaggatatagttttttaaaagaaatcaataatcttaattctttattatctaataaagacaaaccaaatttagcaattattggcggctcaaaaatttctactaaaatagaattactttttaatttgtcttattactttgatgcaatagttatcggaggagccatggctaatacttttttatatgcaaaaaaaattaatattggaaaatctttaattgaaaaaaactacaatgaagttgttttttcaattataaataaagctaaagaaaataattgtgaaatcattctgccaattgatgttgtctgtgcgaataatttaaatgaaaaagaaactgttagaagatgtgaaatagacaatgtatctgactctcaaatgattttagatattggatccaaaacaactcaaattatctcacaatatattaataaatcaaaattgattttatggaacggacctttaggagcttttgaatatccatcttttgcggagtcttctattaaaattgctaatattataaagtcacgctcaaccaactctgagatcactagtgttgccggaggtggagacacaaactct

SEQ ID NO: 249942 - DNA, 523 bp, Unknown
  Bacterial polypeptide expressing nucleotide sequence isolated from the Sargasso Sea
aatggcaaacaatttttttgtttataaaaactttaaagtcgggaaatctttggtagaaaaagatacaaatgaaatcataaaaaacatatacaaaaaagcaaaagagaatagttgtgatatattaatacccgtagattgtatagtaagtacagattttcagggagagggaaaaaataaaaaccttgatgaaattcaagataatgaaattattttggatattggaattaatacaatagataatattaagaaaaaaattgatgagtcaaatacggttctatggaatggccctgctgggtattttgaaaatattaacttttcaaaaggcactttatccattgcagaaaatatttctaaaaatactattaataaatctttaatttctgtgcttggcgggggagataccctagcagcaattaataaaagtaaaagtaaactttctttttcgcacttatcaacagcaggaggagcatttttagaatacttagaaggaaaagacttgcctggcataagtgttttaaaataa

SEQ ID NO: 249943 - DNA, 718 bp, Unknown
  Bacterial polypeptide expressing nucleotide sequence isolated from the Sargasso Sea
atgaccatacttaccggcggccaagcagctattaaatcacttgaagttgaaaatgttaaacatgtgtttggtttaatcggttcagcaactatggaaatgtttgatgcattatatgactcaaaagaaataaaatttattggagttcatgatgagcgaagtggtgttcatatggcggatggttatgctagatcatctggaaagccaggaattttcttagcaggccaaaatggtcctggtgctactaatctaacgacagggctcgcgcaatcaatggcagcatactctccagtcatttccatagcaggttcactttctactgagcatatttatagagatgcttttcaggaagttgatcagcaatctctatttaaacctataacaaaaaaaacatggactattactcaaactgagagaatacctgaaatttttcgtgaagcttttcgtgtgtctatgtctcctaggcaagggcctgttcaaataaatattccaagggatattctagctaaagaaaccaattttgctaattttcaggaacctgagaattatcgactaaacactcttcctgttgcttcctctaagactattgagaaggcctctaaaatgattgtaagttcaaaaaatcctgtaataattataggtggtggaattaaaaatagcgagggtcattctgagattttaaatttagcagaaaagctaaatatacccataattatgtcac

SEQ ID NO: 249944 - DNA, 826 bp, Unknown
  Bacterial polypeptide expressing nucleotide sequence isolated from the Sargasso Sea
cggcagagtagaagtcattaatatgagtcttggtggcggtgggaataatgcgataatttgcgaagaaattgaaaatttgaagaacagtggaatttttgttgttgcctcagcaggcaatgagggaaactctgcaattagatttccagcgtcatgtgagtactcaatatcagtatcatctacaaaatttgatgaaagaaaatcttctttctcctcttacaacaacttcgtcaatttagcggcccctggaggccaactatcggaggatcttgataataatggtagaggtgacggtattatggcctacacgtttagaaattctagccaaggaggaaatgattacaagggattgcagcagtatcaaggaacatctatggctgctcctcatgtgtctggctatttagcccttattaaaactattgatccagatattactttcgaagaactagatctccttattaaatcgaagaaccttacaaaagatgttggttatcctggaaaagatgaattttacggctatggtttaattgatatggcagtaggcatagaaaatttgattaatggcattcctcctgaacaactgacattttcagaaattagccccgaaaaactttttcttggctatgcgttgaacgaaaaagtcttttcactatcaggaaatgctgaagttgaatcctggaatttagaggattcaacaaattcacttagtcttgagcaaacatcatccgttgacattaatggttatggtgaatggaaagtaaaacttgatcgaactaatcttgctgacggcaattacatgggcttggctataattgcatttaagaatgac

SEQ ID NO: 249945 - DNA, 833 bp, Unknown
  Bacterial polypeptide expressing nucleotide sequence isolated from the Sargasso Sea
tatgaaatctcttaaaaatctcaatttcgaaaaaatccaaaatgttgggatcagagtcgattttaatgtgcccattgataaacattttaagataactgacaaaacaagattagacagagcaaaggacacgatcaattttattaaaaataaacaatgcaacattcttcttctatcgcattttggaagaccaaaagaaaacttcgatgacaagtactctttcacaaaacttattgatcagtttcaggaaatcttaaaattaaaattaaattttataagctatgaaaattttttagaaaatggtcttgatcaattcaattataataggcctaccacaacccttttagagaatataagatttttcgaaggtgaaataaaaaatgatttaagttttagtaaatcaattactgacaatctagatctatatgttaatgaagcattctctgcttcccataggcttcactcatcagtaaaccaaatggctaaaaatattttatctacacctggttttaattttgaaaaagaaattaatgctattaatgatatcaaaaaatctcaaaagaaaaaattagccataattggaggttcaaaaatctctactaaaataaacacacttttgtctttaacgacttcttgctcagatatttttataggaggagcaatggctaataattttctaaaatataataagtttaatgttagctcttctttaattgaagagggtgctgaacgaatgattgaaatgatttatagctctgcaaaacaaacaggctgtgaaatccatctcccagttgatgtaatgctcgattcagatcaaagtgtattagtcaatgaac

SEQ ID NO: 249946 - DNA, 160 bp, Unknown
  Bacterial polypeptide expressing nucleotide sequence isolated from the Sargasso Sea
taaatctctaatttcaattgttggtggtggagatacaatagctgctataaaaaatgcagagtttagaaaagtttttacacatttatcaacagccggtggtgcttttcttgagtctattgaaggaaaggaactccctggtataaaagtactaaaaaaataa

SEQ ID NO: 249947 - DNA, 562 bp, Unknown
  Bacterial polypeptide expressing nucleotide sequence isolated from the Sargasso Sea
tttgataaaaaaaattgataatttgattatcgttggcgccatggcgaacaacttcataaaatttaaaggatataaaattggaaaatctttaattgagcatggttcagaaaagataattaaaaagatttacgattttgctggcaaaaataaatgtgagattattatacctatagattttgcagtttctaaaactacctttggaaattctaattttaaagatctaaataaagtaacagataatgaaataattttagatattgggccacaaactataaataaaattaaaaatattattgatatttcaaaaactattctttggaatggtccagcaggatatttcgagaacaaaaatttctcgaaaggcactatttcaattgcagaaaaaatttctaataacactcattcaaaatctttaatatcaattgtaggtggtggggacactatctcagcaataaaaaatagtactttagatcttaattttactcacttatcaacagcaggaggtgcttttttggaatatatagagggaaaaaacttgcctggaatagaagttttaaaataa

SEQ ID NO: 249948 - DNA, 749 bp, Unknown
  Bacterial polypeptide expressing nucleotide sequence isolated from the Sargasso Sea
cttggttcgttgcgatttcaatgttccagttagagatggtgaaattgtcgatgacatgcgaatccggagcgcagtgcctacagtatcctggctcttggagagagacgcctctgtagtcatttgcacgcatttcggtcgtcctgatggcacatttgatcctcggtactcaatcgaagtacttagacctcgcgtagaggagctaatgccgggagtggagatgcttgaaaacctccgattcgattccggagaggttgataattcagaaaagttttcatcgtttttgaccttaggtgcaggcggctcaccatttgatggttacgtcaatgatgccttcggtgtgtcccatcgcgctcacgcgtccattgtcggaccgccgtcactgctaccgtcggcgtcgggccggcttttggaaaaagaagtaggtgtgctgggaagcatgagagtacagcccaagaggccctttcttgcagtcttaggaggcgcaaagatcagcgacaagctgggcgttatcgagagtcttctcgacgtagtagacaacctggcgataggcggtgggatgtgcttcacctttttgaaagccttaggtcataacattggcgactctctatgtgaagaagagcaggtggcggcttgcgaaaggctgctttcttcaggtgcgagtattcttctaccaagcgatatcactgccctgagcggggatggcgaagttcgacaaatggggcggtcgctgcccgaagggtggagggggt

SEQ ID NO: 249949 - DNA, 427 bp, Unknown
  Bacterial polypeptide expressing nucleotide sequence isolated from the Sargasso Sea
atggattataaattgagaaatataaacaaaaagactgtaaaagatatagatatttataaaaaaacaatcctattaagaaccgactacaatgttccgttagaaaataatggacatatatccgatgatattagaataaaggaatcaattccgactttacaatatttgataaagaataaatgtaaaatattaatatgttctcatttaggcagacctaatggaaaaattataccaaagttaagtttgctgcctatttcaactaggttatcagaactattaaacattccagtaaaacttaaaaacattgaagatatttgtacaccaaaaaaagaaactacccagataactatgcttgaaaatattagatttaataaagaagaagaagaaaacaatcttaaatttgctcaacatctttcatcattgcagatat

SEQ ID NO: 249950 - DNA, 214 bp, Unknown
  Bacterial polypeptide expressing nucleotide sequence isolated from the Sargasso Sea
aatttcgagaatgggagtttgcaaattagtaaaattattgaaaataatacaaaaaataattctctttactctgttgttggtggtggtgatacaattgctgtaattaacaaaataggaagtttaaataattttaattttgtttcaaccgctggtggagcatttttagaatatcttgaaggcaaagagctacctggtataaaagctttaaattaaa

SEQ ID NO: 249951 - DNA, 646 bp, Unknown
  Bacterial polypeptide expressing nucleotide sequence isolated from the Sargasso Sea
ctcgttataaaaaataaaaaaagaccagtcacttgcattataggtggatctaaaatttcaacaaaaattaatgtaattaccagtcttattaaaaaagtgaataaccttattatagttggggcaatggccaacaatttctttctttataaaaatttgaagattggaaaatcgttgattgaggaaaataaaaacaagttaattgaagatatttataaaaaagcagagttaaataattgtgaaattttaataccagaagattgcatggtaggtacagattttggtggaagtggtaaaaataaaaaccttaacgaaatattagataacgaaataattttagatataggtaaaaacaccattaaaaatattcaaaaaaagattaatgagtctaatacagttttgtggaatggtcctgctgggtattttgaaaatgaaaatttctcaaggggcactttttcgattgcagaaaatatctccaaaaatactatagaaaaatcattaatatctgttctcggaggtggtgacactctagctgcattaaataaaattaaaaacaaactttctttctcacacttatcaacagcaggaggtgcatttttggagtacttagaaggaaaagacttgcctggtataagtgttttaaaataaa

SEQ ID NO: 249952 - DNA, 495 bp, Unknown
  Bacterial polypeptide expressing nucleotide sequence isolated from the Sargasso Sea
aatgataaaaaaaattcaagatgccaagttaagaaaacagacggttatccttcgtcttgacctaaatattccttattcaaatggaaagagtagtgatatatcaagaatagagaaaacaaaaaaaacaatacatcatctaatcgaaaacgaaaacagggtagttatactttcacactttggaagaccaaacggaaaagtaaataaagatttaagcttagggaagctactgggatacctaaatgcaacgctaaattttgatataagatttttgccatcactcgaaatagacttatggagcgaagaaattgagaccgctcccttcccctcaatttttttattggagaatgtacgattctccaaattagaagagcttaatgaccctgattttagctccaaacttgcgtcgcttggcgatatttattgcaatgatgccttttcagtctcacatagagctcacgcctctactcaggggataactaactatatccctagttt

SEQ ID NO: 249953 - DNA, 353 bp, Unknown
  Bacterial polypeptide expressing nucleotide sequence isolated from the Sargasso Sea
aaaaaaattatctgaaatgaatgcagggcaagtatgtttatttgaaaatgttcgttttgaagagagagaagaaaaaaatgacttaggtttttcgaaaaatttagctacaaattttgatatttatgtaaacgatgctttttcatcctctcatcgtaaacatgcatcaattgtaggtttgacaaattatttaccatctttagctggattaagttttatagaggaaattaataatttacagtttttcttaaataatacaaaaaaaccaaatatagcaattattggtgggtcaaaaatttcaacaaaaataaaagtaatttttaacctaataaatttatttgactcaattgtaattg

SEQ ID NO: 249954 - DNA, 1195 bp, Unknown
  Bacterial polypeptide expressing nucleotide sequence isolated from the Sargasso Sea
atgtctgatttaaaaatttttcctaaaaaaatttcaatcaatgggaaacgaattattgtaagactagatcttaacgtaccaataaacaatttaaagattgatgacgataccagaattaaagttatcgaacctttcataaacaggttaatagaaaataaagctaaggtggttttggtaactcatcttggaagaccaagaggaaaagtggttccagatctttcacttggaccaatatttaattatttgaaaaaaaaactaaatggaaaaatttacttttataaagacaagattgacaatgctgcaatacaggcttcaaataaattaaaacctggagaagttttgcttattgaaaatattcgtttttttaaacaagaagaagatgacgaggaagtttttgcaaaaaacctatctaagcttggggatatttttattaatgaagcattttcctgctctcacagaaaacaggcttcaattcataaaataacaaaatttattgaaagttacggaggtccagttttagaaaaagagatccaatcaattaatttaataacaaaaaataaaaaagagccagtaacgtgtataattggcggctcaaaaatctcaactaaaataaatattttatctagcctatcagagaaatcggaaaatttagtaattgttggagctatggcgaataactttctaaaatttaaagggataaatattggtgcctctcttattgagaaaggagcagagaataatgtaaaaaatatatattcaacggctgaaaaaaataaatgtaaaattatcattccattagattgcaacacttctactagcttaaatggaaatccattatataaatcactgcaagatataagctccaaagatataattttagatatcggaaagaagactatagatttaatcaacaaaactattgataactcgaacactgtattttggaatggaccagcaggatattatgaaaataaaaatttttcgaaaggctctttatgtattgcaaaaaaaatttctgaaaacactaagtctaagtctttaatatcaattgttggtggtggagataccgttgcttcaattaaaaacacaggtttagaaaacacttttacacatttatcaacagctggcggtgcgttcttggaatctcttgaaggaaaggacctgcctggtataaaagtattaaaaaaaaattaag

SEQ ID NO: 249955 - DNA, 643 bp, Unknown
  Bacterial polypeptide expressing nucleotide sequence isolated from the Sargasso Sea
agtaataaatagcaagaaagagccggttacatgcattatcggtggttcaaagatttcttcaaaaatagatgtaatcataagcctaattgagaaaatcaataatctgataattgtaggtgcgatggcaaacaatttttttatttataaaaaatttaatgtagggaaatctttaattgaaaataataaagaagaaatcattaaacaaatttatgataaggctaaaaaaagtaattgtgaaatagtaattccagaggattgtatggttagtactagtttaaatggtgaaggtaaaaataaaaatttaaagcaaattgaagataacgaaattattttagatgttggaataaacactttaaaaaatattaaaaagataatagatcaatctcacactatattatggaatgggcccgcaggttatttcgagaataaaaattttcttaatggaacaatgtctatagctgaaataatttcagaaaatactcacaaaaaaactttgatttcagttataggtggaggagatactctagctgcaatcaataaaagcaaaaataaactttatttttctcacttatcaacagcaggtggtgcgtttttagagtacttggaaggaaaagacttgcctggcctaagtgttttaaaataa

SEQ ID NO: 249956 - DNA, 832 bp, Unknown
  Bacterial polypeptide expressing nucleotide sequence isolated from the Sargasso Sea
aaatataagattttatcctgaagaagagaaaaatgacgagattttttcagcaaaactcgcaagtttaggtgaaatttacgtcaatgatgcattttcttgttcccacagagatcacgcgtcaatatctaaaattacaaaatatattccttcatattgtggtattcaaattaatactgaaataaatgcactcaataaaattacagaaaagattacaaaacctattacatgtataataggtggatcaaaaatttctaccaagataggaattctaaaaaacttaatcccaaaatttgacaatgttgtaatagtaggtgcaatggcaaacaacgtttttaaataccaaggtctgaaaataggtaagtcaatatatgaagaaaatttggataatttaattcaagaaataatcacctttgcgaaaataaataattgcaaaattcatgttccaatcgatataaaagttggaaagaaactaaatggtttgtctaccgaaaaagattttaaagacattgaagatgacgacattattcttgatattggatcaaggacacttgatgaaattagaaaaataatcgatgattcatcaactatattgtggaatggtccattgggttattttgaaaactctcagttttcgaaaggcagttcagaaatagcaaaatacatagcaaataaaggagataaaattttttcagtcgttggtggaggagatactgttgcggtgattaattctttaaacatcgaaagaaagtttaactttgtttcaactgctggtggagcttttttggaatatcttgaaggaaagattcttcctggtataaaagctctaaattaa

SEQ ID NO: 249957 - DNA, 628 bp, Unknown
  Bacterial polypeptide expressing nucleotide sequence isolated from the Sargasso Sea
atgaaatctattacagatctagaaaatttaaataatcaaattgtacttttaagattagatttaaatgtcccaattttggatggaaaaataacagatacaaatagaatagataaaattattccaacagttaattttctcttatcaaaaaaggcaaaaataataataatttctcatgttggaagacctaaaggaaaatttaaaaatgagctatctcttcaaccaataagagataacttaagtttgcaggttaatgaaaatgtcaaactagagaagacaaatatttttaatttaaaaaaaaatgaattatttaaaagtgctgatgaaaaattaataattttagaaaatattagattttacccagaggaagagaataataatgaaaaattttctgaacatttggcaaaacttggggatatttatgtaaatgatgcattttcatgttcacacagagagcatgcttcagttacaagtattacaaaatttataccatcctacagtggactccagatcaattcagaagttgaggctcttaaaaaaattacaacagaaattaaaaaaccaattacttgtataattggcggatcaaagatatcaacaaaaatagatattataaaaaacctaataccta

SEQ ID NO: 249958 - DNA, 367 bp, Unknown
  Bacterial polypeptide expressing nucleotide sequence isolated from the Sargasso Sea
atgcctaatctagtagattttgaatctataaaaaataagacagttatattacgactagatctaaatgtaccaattgaaaatggtaaaatagcaaatgattttcggttaagaaaatctctagagacaattagagttcttagatcacttgataacaagttgataattttatcacacttaggaagaccagcagagggtaaaaccgatgagtctttgagtttagagccaattcatgcttatcttgcagagaatctagatgagcacattagatttgaaagagagtggctagctaatttacgcaacaatacaccaacaataacactctgtgaaaacacacgtttccttagcggtgaaaaatctaacgatgaag

SEQ ID NO: 249959 - DNA, 679 bp, Unknown
  Bacterial polypeptide expressing nucleotide sequence isolated from the Sargasso Sea
atgagaagtattattaacgaaaaaaatcttaacaataaaaaaatattattaagactagatttgaatgtcccattggaaagagacaagataacagacacaacaagaattgataaaattcttcctacattaaattttttgattaaagaaaaagctaaaattataattttatctcatgttggaagaccaaaaggtaaaattgttaaagcactctccctaaaaccaatttgtgaagaattgcaaaataaactaagaaaaaaagtaaaacttattagtgaaaatattaaagaaataaaaagtaaaaatttcttcaatgactatagtgaagatatttttattttagaaaatattagattttattctgaagaagagcaaaatgacaataagtttgctgaactgctatcaaaccttggagatatatatgtcaatgacgctttctcttgttcacatagagctcatgcctctatttataaaattccaaaattcttaccctcgttttctgggttacagctagacttagaagtgaatgcgcttaataaaataacttctgaaattaccagaccaattacttgtattattggggggtctaagatttcaactaagattaatgttattaaaaatttaattcctaaatttgacaatgttataattgttgggggtatggctaataattttatagaat

SEQ ID NO: 249960 - DNA, 249 bp, Unknown
  Bacterial polypeptide expressing nucleotide sequence isolated from the Sargasso Sea
atggaccggttggtgtttttgaatctagcccttttcataggggtacattgaaaattgctaaatacattgctgaaattactatgaagaataatttacggtcttttgctggaggtggagatacgatttctgcactagacatggcagccgtcaaagaaaaatttacttatgtttctactggcggaggagcgctacttgagttaatagaaggtaagaaattgcctggtttagttgccctaggggttttgtaaa

SEQ ID NO: 249961 - DNA, 511 bp, Unknown
  Bacterial polypeptide expressing nucleotide sequence isolated from the Sargasso Sea
ttggttggcggaggcatagctaatacattcttgaaggcatctggttatgaaattggcaaatctctagttgaagacaatatgcttaatatggcaagtaatatgctgagaacagaaaaaattataatgccagaaaaagtttatgtagcagaatcaatagaatcaaaagatatatctttggtgccagtaagcaacatctcaaaagataagatgatactagacatagaatttaatgataaagaaatgaaagattatttaagtgaaacaatcatatggaatgggcctttaggcatgtttgaaattgatgaattctcaaatgggacaaaatctttaataaattatcttaagcagtcagatagcaaagttattgctggaggaggagaaactatttttgcgattaataaattctctgatactaagcattttcattatgtatcaactgcaggcggtgcttttctagaatatttgggaggttcattgctcccctcgattgaagcgttaaagtcaaaataaa

SEQ ID NO: 249962 - DNA, 538 bp, Unknown
  Bacterial polypeptide expressing nucleotide sequence isolated from the Sargasso Sea
ggaatactttcaaacttagttgataagactcaaagaatactcataggaggtggtatggtttcaagcttcataacaaatgatttcccaaaaacatttaatagaaaaatatatgaaacgaatatagataagttttttgttcccgatgatttagttaagattaaagaattttcacctaaaagcaaaccagaaatagttaatgcaaagctatataataaaagttcatttattatagatattggcccaaaaactattaataaatattcagaaatagtcaaagattctgaaacagttatttggaatgggagcatgggtatttttgaatggaaatctgggtgccaaggcacaaaagggttaattaaatccattgaaaatagtaagtgcaaggcatatgcaggtggaggctcaaccattgaggcaattaattcttttggttcaaaagattcatttgagcatatttctagtggcggcggagcttttcttgaattgcttgaaagtggtagtcttgttggaatagataatctaattaaaaatgaataaa

SEQ ID NO: 249963 - DNA, 382 bp, Unknown
  Bacterial polypeptide expressing nucleotide sequence isolated from the Sargasso Sea
aatttaagagaaggcggagagttttctgaatacagtattgaaaatattcctaatgatggattaattctagatattggtaaaaaaagtatagctataatagataaagaaatctctaaaactaaagaagttttatggtgcggccccttaggattatttgaacaaagcccttttcatgttggaacagcatcagtagcaaaaactctgtcaaagatgacaaaaaatggtaaaattatatcagttgctggtggaggagatacggtagctgccataagccaatcaaactacgttaatgattttacatatatatccactgctggtggagcttttttagaaatgatagcgggtcaaaaattacctgggattgaagcgttaagaaaataag

SEQ ID NO: 249964 - DNA, 292 bp, Unknown
  Bacterial polypeptide expressing nucleotide sequence isolated from the Sargasso Sea
aatagattctattagaaaaataattaatgaatcaaatactgtgttatggaatggtccagctggatattttgaaaatcccaactttcaaaatggtactaaacaaatcttagaaataatcgaacaaaaaacaataaaagataatattttttctgttgctggaggaggagaaactgtagctgcaataaataaatttaataaattaaattcctttacgtttgtttcaactgctggtggagcttttcttgaatttcttgaaggaaaagatttacctggtataaatgcgctaacataa

SEQ ID NO: 249965 - DNA, 1093 bp, Unknown
  Bacterial polypeptide expressing nucleotide sequence isolated from the Sargasso Sea
aatgtatgtagcggtcaaaggaggagaaaaagctataaatagttcaattgagcttcttgatcaaaaacgaaaacatatctcttctaatcaagatattaatattagccagttaatagaacagcttagttttgcagttgaccgtgtggtctcagagggatctttgtatgataagaacttatctgccctatccattaagcaagcccaaggagatttggtagaagcgatctttattttaagagcttatagaacaacattggagagattttcttacagtgttccgattgataccagttcaatgactctaaaaaggaggatatccgcaacatataaggatattcccggaggtcagatattaggaccgacatttgattatacacatagactcctcgatttttcgctgcttaacggaaaagaaacatccaacaaaaaaaatactccaacgagtaacgataatgttttttttccaagagtaatggaattcttgaacaatgagggattgatggaaaaagaaatagaaaaattaaagtctaagccttttgatattacccgagagcctatgaaatttcctgcatctagagatcagtggcttcaaatcttgtccagaagtgatgagggatttttgttagggttatcgtattctgcaatcagaggatttggcagcaaaggaactcatccttttgtaggtgaaatacgatacggttttgttgaagtcaaaatatatcctgaagaactagggtttgaaatttgtgttggtgaaattgaggtatcagaatgcgaaatggtcgatcaatttgagggaagtaaaaaaatagccccacaatttactcgaggttacggccttacttttggttataacgaaagaaaagccatgtctatttctattattgacagagcacttaagagtgaggaatatggagaagaaattaaatttcccattcaagatcaagaatttgtgctttatcactctgataatgtggaggcccaaggatttgtctcacacctcaaactcccccattacgtagattttcaaggagagctaaatcttatcagagaattaagaaaaaaaattttgaaagagaacaaagatgattga

SEQ ID NO: 249966 - DNA, 718 bp, Unknown
  Bacterial polypeptide expressing nucleotide sequence isolated from the Sargasso Sea
tatgagtttattagcagccacaataagagagtcaaaaactaagggtgaagtaaaatcgcttagaagtaaaggtatggttccaggaattatttatggaggagaagagccaaatcaaaaaatctctgtctctgttaaagaagtaaaaaatttattaaataaagaaaatattttatcaaatataatttcaattaatattgatggaaaagaacaaaaagttttaccaagagtaattgattttgatacggttacagatgagcctatacatttagattttttaagaattgttaagggtgcaaaagtaattttagaaattccagttaaatttataaaccacgaattgtcaccaggattaaaaagaggtggagttttgaatatagtaagacgaaaagttgaattaagatgtcctacagaaaacataccaacagagttagttgtggatttaaataacttagatattggagcaagtattaaaatatcttttataaatttacctgaaaatgtaacacctacaattcaaggaagagactttgtaatcgcaactgtagcagcaccaacggttgttaaagagcctgaaaaaccagcagaagctgagggagaaggtggagaagctgcggaggcagctgcggatggagatgctaaatctgaagaaggtgcagaaaaagctgcagatggtgataaaggaaaagaagaaggaaaagctccagcagagaaaaaataa

SEQ ID NO: 249967 - DNA, 616 bp, Unknown
  Bacterial polypeptide expressing nucleotide sequence isolated from the Sargasso Sea
atgtctgatttaaaaattttttccagtgatatttctattaatgataaacgtgttattgtcagattagatctaaatgttccaattaaaaacacaaaagttgaagacgatacaagacttaaagttatcaaaccttttataaataagctaatacaaaataaagctaaggttattttaataacacatctaggaagaccaaaaggaaagagagttcctgaattgagtctaaaaccaatatttaattatttagaaaaagaattgaacggaaaagtttatttttataaagaaaatattgatgacaaaacagttggtgttactaataaattaaaacccggcgaagttttgcttattgaaaatattcgttttttttcagaggaagaaaatgatgaagaagtttttgcaaaaaaactgtcaaaacttggtgatatttatataaacgaagctttttcttgttctcatagaaaacaagcatctatacataagataactaaatttattgatagttacggaggtcctactttagataaagagattaagtcaatcaatttaataaaaaataatagaaagaaaccagtcacatgcataattggtggttctaaggtatcgactaaaataaata

SEQ ID NO: 249968 - DNA, 493 bp, Unknown
  Bacterial polypeptide expressing nucleotide sequence isolated from the Sargasso Sea
aatttaaataatttaaataaaaaaaatatttttagtaataatgatgaaaaagttttattacttgaaaatataagattttatcctgaagaagaaaaggatgatattgaatttgcaaaaaaactagcgagtttgggggacatatatgttaatgaagcattttcttgttcacatagagctcacgcatcagtttctaagataacaaaatttataccatcatatggaggactacatttaagtaatgaaatagatgcattatatcaaataactcataatattaaaaagccagtaagttgtattattggtggatctaagatttctacaaaaattaaagtaattacaaacttagcaacaaagtatgacaatattatcgttgttggagcaatggcaaataattttataaaatataataatcataatattggaaaatcagtttttgaaaaaaattcagaattaatagtcaaagaaatttatgagtctgcaaagtctaaatgat

SEQ ID NO: 249969 - DNA, 1177 bp, Unknown
  Bacterial polypeptide expressing nucleotide sequence isolated from the Sargasso Sea
atggtaagaattaagagtatagttggtaataatttttcaggtaaaacttgtatcttaagattggatttaaatattcctttgtcagaagatggagaaattttagatgatactaggatcctcgagagtatcccaacgatagattatctaataaaccaatcagcaaaagttattataatttctcatatagggaggccaaaaggaaagtttaataaaaattactcatttaagcctcttattcaggatattagtaaaagaataaatagagaaattttttttattgaacacaagaatcaatctaaaatttcaactattttagattctcagccaagtgggactttattcttattagataatgttagatttaatgatggtgaagaaaatagtaatcctgattttatcgactttctttcttcattttctgatgtatttataaatgatggatttggaacaattcatcgtaaccattcatccataactggaattacaaacaaactgccatcattcggtggaatactcctagaaaaagaaattataaatattactgagtgcatcagtgctaaatcatcaaactctacagctatacttggaggctcaaaaattagtgataaaattccaataatagagaatctttcaaataactttgaaaaagtaatcataacggggggtatgattagaccttttttaattgcaagagacaaattaaaacaaaaaaacatttcagaaataaaggaagaaatattctacgctgaaaaaatattacaaaaacattctcaaatatatgttccagaacaacttgtatgttctgaaaatataaacgaagagccaataattttgcattcaagccagataaatgattcagatctaatctttgatatagggcctaattcgattgatgatattggtaagatgattttagaatcagacaaaataatttggaatgggcctccaggtgtttatgaaaataaaaattttagtaatggaaccaaaaaactaatcaactttatagtaaactctaaatcaaaactcaaagttgcaggaggaggttcaactgttgcttctataaactactacaaagcatcagattatttctcacatatttcaactggaggaggagcattcctaagattactagaagggaaatttttagaagggattgaggttctcaaggatgagtaaa

SEQ ID NO: 249970 - DNA, 333 bp, Unknown
  Bacterial polypeptide expressing nucleotide sequence isolated from the Sargasso Sea
aaatatgcccagatgacattatttatgacgttagtattagatcagttaaaaacttaaataaaatcatatcaagctgtaaaactatattatggaatggccctttaggtttttttgaaagagaagaattttcaaaaggtacattgcatcttgccaaggttatttctgaatcagacgcatattctgtgattggtggaggagagactttaactgcctttaatcaatcaaacttattagataaagtaggatatgcctcaactgctggaggcgcctttttggaatatattgagaaaggatcattaccctctctagatgcattaaaggagaaaatatgaa

SEQ ID NO: 249971 - DNA, 1021 bp, Unknown
  Bacterial polypeptide expressing nucleotide sequence isolated from the Sargasso Sea
atgtcccgcgtccgtcgattagaggacgcgcgagacctcgtcgacaaaatagtcctcgttcgcgtcgatcacaactgcgtgaaacgcggcgtggtcaaggatgtgcaccgaatcgagagctcgttgcccacgctgtataacatcgtcgagcgcggtggacgcccaatcctgatgacgcacgtcaacagaccgcgaactgcgagcggtgacatcgttcgtgacgacgagaacgacggcgtcggggcgatcgtggacgtgttgagggccaagttgggggtgacgttcgcggcgccgagttttcagcgcgacggcgcgcgcggcattcgaagcgtggacacgtcgattaatttcttattggacgatttacgcgcgcgacgaatcggtggaatatatcttccgaacacgcgttggttcgagggtgaggagtcgacgccgggttcggacgcgtacgaggcgttcacgagacagctcgcgggtctggcggatgtcttcgtgaacgacgcctttgggtcgtggcaaccgcacgcgtcgacggtcggtatcacgaaatatcttccgtgttacgccggattgttgatgcaaaaggaacttcgcgcggtgcaggcggtgttgaacccggagcgaccgttcgtggcgatcgtggcgggggctaaggtggacacgaaactcgggacgctgcgcacggtggcgtctcgatgcgattcgttaatcttgggcggggtggtgtataacgcctatctgtgcgcgaaatacggcgtcaagatcgagggagtgagcgaatcggacgtcgagcacgccaagacgctcctcgatccgacggtgcaggcgaaaatcgtggaattacccgtcgtcgttgagtcgacgtcgctggccggatgcggatgcgtgcctcgagagggcgagtgcgcggcgccgaagcaggatttaggacgcacgcgcgcgattcgggtgtgcgatttacaaccaggcgcgaaccacgcgtactttttagacgtcgccgcgagttcgttcgaggatgaac

SEQ ID NO: 249972 - DNA, 1471 bp, Unknown
  Bacterial polypeptide expressing nucleotide sequence isolated from the Sargasso Sea
gtacaggtacatcagcaagattttattatcccacggggtatcactacagacggtacatatgtctatgttggtgacttttccaatcacaagatccgcaagattgtaatttcaacaggagtagttactacttttgcaggaaacaactctgcgggttcaacggacgccacaggcacatcagccacatttaatgggcccatgggtttaacatatgaaggatcaaacatttatgtggcggattattccaatcacaaaatccgaaaaatttcaacaagaggaactgtaactgcagatgttaaactgcataaccttgatgacgacacagatgcaacagttaatcttgcaagcagcgatacaacagagggaacagtcagtcctgcaaccttaaccttcaaagagagtaactggaacactgcacagactgtcacagtaactggagttaatgatactgacagggacaggaataagtcttataagatcagactcacttctgaagaccagaagactgatagtccagaagtatctacatttgcaggttctccttcaggatctacaagctctggttctacaaacgccacaggaacatcagcaaggtttgcttatccagcttttatcacaagtgacggaacaaacctctatgtgaccgatggcagtaatcacactatccggaagatagtgatagcaactggtgcagtaacgactcttgcaggatctcccggatcctctggttccacaaacgccacgggaacctcagcaagattcaaacatccacgtggaataatcacagacggaacaaacctctatgttgctgatatgggaaatcacacgatccgcaagatacagattgcaacaggagcagtaacaacctttgcaggctctcccggatccactggttcaacaaacgccacaggcacctcagcaagattttataatccttatgcgatcgccacagacggaacaaacatctatgttgcggattcttctaataatatgatccggaagatagtaatatcaactggagcagtaacgacccttgccggaagcacctcaagtggttcaacagacgccacaggtacatcagcaagatttaattctccgcaaggaataaccacagacggtacaaacctttatgttgcagataataataatcacaggattcgcaagatagtaattgcaacaggtgcagtaacaactcttgcaggttcatctcagggttctgcagacggcaccggaacatcagcaagatttaatgggcccattggtattgtgatagatggttcaaacctatatgttgcagaatttaagagtcacatgatccgcaagatagcgattgcaacaggagcagtaacaaccatcgcaggttctggatctaacggttctatcgattcttccggtacatggtcaacatttaatgggcccatgggtattgggatagatggtacaaacctttatgttgcagattataataaccata

SEQ ID NO: 249973 - DNA, 157 bp, Unknown
  Bacterial polypeptide expressing nucleotide sequence isolated from the Sargasso Sea
tgctctaggaggaggaggagatacacttgctgcaataaaaaaagctaaagccaatgatgcgtttaaatatttatctacagctgggggtgcatttttagagtggcttgagggaaataaatcaccaggatttatagcattaagagaaaacaatttttaa

SEQ ID NO: 249974 - DNA, 490 bp, Unknown
  Bacterial polypeptide expressing nucleotide sequence isolated from the Sargasso Sea
aaatcaatatgtgaaaatgagtgtggttctttaattaaaaaaatattagaaaactcaaaaaaacacaattgtgaaattactattcccaaagatgcaattgtatctactgacctaaatggagaaggaaaagaaaaaaatataaatgaaataaaagataatgaaatgatattagatattggatcaaaaacaatatcatctattgaaacaattataagcaactctagaacaatactttggaatggtcctgcaggttattttgaaaatccaaattttcaaaatgggacaaaaaaaatattagagttaatttctcaaaaaacaaataatgataaaattttttctgtagcgggaggtggtgaaacagtggctgcaataaacaagtttaaaaagtttgattcatttacttttgtttcaactgctggtggagcttttttggaatatcttgaaggaaaaactctacctgctataaaagcgttaaatcaaaatgtctgaa

SEQ ID NO: 249975 - DNA, 442 bp, Unknown
  Bacterial polypeptide expressing nucleotide sequence isolated from the Sargasso Sea
aatgcaatataaaagtctttatgaggtagacttaagcaacaaaactgttttattaagatcagatcttaacactcccattgagaatggtttagttgttaataatgaacggattctaagatcactgccaaccctaaattttattattgatgctggtgctagattagtaatcatgagtcatttaggcagaccagaagagaatgacatatttcaagaggaattttctctattaccggtcgtgaacgaaatggagaacttattaaataaaaaaattatgttgtataacttaggtgagtttgaaaaattagataaaatcccaaaaatttctgttattgaaaatacgcgattttgtattggtgagaagtctaatgatattgatttatcaaagagattggccggattaggagatttaattgtaatggatgcatttgccactcacatagag

SEQ ID NO: 249976 - DNA, 1066 bp, Unknown
  Bacterial polypeptide expressing nucleotide sequence isolated from the Sargasso Sea
atgaaagcagtagtcaccgcaggcaacggaggattcgaaaagctacagtaccgcgaagtaaaacgtcccaggcctggtccaagtgaggtgttgctccgggttctggctgccgggatgaacaacactgaaatcaatacccgtgtcggctggtactccgactcggtgaccagagccacctcggatacggcaacatcagaggtccgggaggcggaggtccgaatcgatggtggctggaacgaaaccacaccgttcccttttattcaggggaccgactgctgcggacgggtggctgaaatcggtccgggcggagacccggagcttcttgggaaacgggtccttgtccgttcctgcatcaggccggagggatttgaatcgatggaaaacctctggatgggttccgattttgacggcgccttcgcccagtatgtcaaagtcccccaagctgaagtttttgttctcgagtgcgactggagtgatgccgaactggccaccattccttgtgcctacggaaccgcggaaaacatgatccaacgctccgggatcacttccggagaacgggtgctgattacgggtgcttccggaggggtgggttcagccgcacttcaactggtgaaatggcgaagggccgaagtgattgctgtcgcggcatcttctaaaaagcagcagatgctggaaatcggagccgatcgggtcatcggacgggatcaggatttgctcgggattctggaggaaaaatcggtggacgttgtgatcgatctcgtcgcgggttctccctttcctaaattactcaaactcctaaaaaggggcggacgctatgtctctgccggtgccatcgggggcccgctcgtttccttcgatacccggaccttctacctcaaggacctccaactgatcggctgcactgcctgggatgaacccgtttttccaacccttgtctcgtgtatcgagcaaaaccgaatccgtcccctgctcgcccaaaccttccttcttgaagacatcgcagaagcccagaaagaattccttcgcaaacagttcgtcgggaattttgtgctcattcctccttaac

SEQ ID NO: 249977 - DNA, 187 bp, Unknown
  Bacterial polypeptide expressing nucleotide sequence isolated from the Sargasso Sea
tatttctcaaaaaacaaaaaacgataaaattttttctgtagcgggtggtggcgaaacagtggctgcaataaataaatttaaaaaatttgaaacatttacttttgtttcaactgctggtggagcttttttagaatatcttgaaggaaaaactctacctgctataaaagcattaaatcaaaatgtctga

SEQ ID NO: 249978 - DNA, 322 bp, Unknown
  Bacterial polypeptide expressing nucleotide sequence isolated from the Sargasso Sea
atgattttagatgtaggtgaaaaaactgtggaattaatatctaatggcattattaacagtaaaactcttttatggaatggaccactaggtgtttttgaaattcctccatttgatgaaagtacatcttcttgtgctttaacagctgcaatgatgactagggctggaggattggttagtgtagcaggtggaggagatacggttgccgcactaaataatgcaggtgcatcaggcggcttttcttatatatctgttgctggcggagcatttttggaatggatagaaggaaaagttttacctggaatacaagttttgaatgattaaa

SEQ ID NO: 249979 - DNA, 158 bp, Unknown
  Bacterial polypeptide expressing nucleotide sequence isolated from the Sargasso Sea
aatgaaaaatttaaataattttaaaattaagaacaaaaaagttctttttagagctgatcttaatgttccttattttaatggtttagtgacagataaatcaagaattttttcaattaaaaaatcaatcaaaaaacttttatctcaaaaaaataaaattt

SEQ ID NO: 249980 - DNA, 661 bp, Unknown
  Bacterial polypeptide expressing nucleotide sequence isolated from the Sargasso Sea
tcaattaatttaataataaaaaataaaaaaaaaccagtgacttgtataattggtggttcaaaagtttccactaaaataaatattttatcacgcttgttagaaaatgcagacaatcttgtaattgtgggagctatggcaaataactttcttaaatttaaaggtgtaaatgttggcgcttctcttgttgagaaaggatcagaaaatataataaaaagtataaatatgttggcagaaaaaaataaatgtaaagttattattcctatagactgcaatacctcctctgacgtcaatggaaattcggtctataaatctttggaagatataggttcgaaggatatgattttagatgttggtaaaaatacggtcgatcttattaataaaaccatagacagctccaatacagtattttggaatggaccagctggatattatgaaaataaaaattttttaatcggatctctgtcaatcgccaaaaaaattgcccgaaatacaaattcaaagtctctaatatcaattgttggtggtggagataccgttgcagcaattaaaaatactggattagaaaacagttttacgcatttatcaacagctggtggagctttcttggaatctcttgaaggaaaagaactccctggtataaaagtattaaaaaagaactaag

SEQ ID NO: 249981 - DNA, 319 bp, Unknown
  Bacterial polypeptide expressing nucleotide sequence isolated from the Sargasso Sea
tatcggagaaaaaactatcaatctgatttccaatgaaataataaaatgtcgttctgttttgtggaacggcccactaggtgcttttgaatttaggccatttgataaaagttctttagaaatagccaatcaaataaaaaaaagttttaaagaatttaatattgagtcattagcaggtggtggagacactttatcagctattaatttagctaatgcgagagatggatttaattatttatctaatgcaggtggagcttttttagaatggttagaaggtgagaaatctcctggttataatgcacttgaaaataataaaatttaa

SEQ ID NO: 249982 - DNA, 232 bp, Unknown
  Bacterial polypeptide expressing nucleotide sequence isolated from the Sargasso Sea
aatagtccatttgataaaagtacaaattcagttgcaaatattataaaaaattattcaagtaaatctcaattagatgctctagcaggtggaggagatacacttgcagcaataaaaaaagctaaagctaatgatgcatttaaatatttatctacagctggaggtgcatttttagagtggcttgagggaaataaatcaccaggatttatagcattaagagaaaacaatttttaac

SEQ ID NO: 249983 - DNA, 498 bp, Unknown
  Bacterial polypeptide expressing nucleotide sequence isolated from the Sargasso Sea
atgtcggcaaatctatatgtgaaagagatagtggtgatttagtcaaacaaatttttgaaaattcaaaaaaatatgattgtgaaattatcattcctaatgatgtgatagtatctaaaagtttagatggcacaggaaaagaaaaagatattaatgatgtaatggatgatgaaatgatattagatataggatcaaaaacaatattaactatagaaaaaattattaataaatctaaaacagttttatggaatggcccggcaggatattttgaaaatcctaattttcaaaatggaacaaaaaaaatcctagaattaatttcatcaagaaccgaacatgaaaatattttctctgttgctggaggcggggaaacggtggcggcaattaataaatttgaaaaatcaaactcctttacttttatttcaactgctggtggagcgtttttagaatatcttgaaggaaaaactttacctggtataaaagcactaaatcaaaatgtctgaa

SEQ ID NO: 249984 - DNA, 634 bp, Unknown
  Bacterial polypeptide expressing nucleotide sequence isolated from the Sargasso Sea
atgttaaatgttaaagctctaaaaacatttgatcagaaaaataaaaccgtacttattcgctttgacctaaatattccgctcaataaagaagtctctacaattagcgatcggattacgagaattaaaaatcctatacaaaaccttctcaataagaataataaagttgtaattctgtctcatctaggaagaccaaaaggaaaaagaaatgatgagctttcacttaatcaaataatcagctcattagaaaacgtattgcaaaaaaagataatatttctttcaaattgtataggcgatgagattgaaaaaaaaataaattctctaagccaggactcaattattcttcttgaaaattgccgttttcatgaaggcgaagagcaaaacgataaattttttgcatccgagctgtcaaaattagcagacgtttatattaatgatgcttttgcgtgctctcatcgagctcacgcctcaattgaagcaatcacaaacttcataccatcttattgtggagaattattacatgaagaaatattaaacttaaatgatgtagttaataaccctaaaactcctgcattaactatcattggtggctcaaaaatctctacaaaaattacagttataaaaaatctcctgcaaa

SEQ ID NO: 249985 - DNA, 190 bp, Unknown
  Bacterial polypeptide expressing nucleotide sequence isolated from the Sargasso Sea
taattatgcctctgaaaggacaaaaaacggtgatttaatatccgtggcgggaggtggagatactgtagcagctcttaataaagccggagtaacagagtcgttctcctatgtttcaacggcaggtggcgcatttttagaatggttagagggtaaagagttacctggagttgcctgcctcacaaaaaattaa

SEQ ID NO: 249986 - DNA, 498 bp, Unknown
  Bacterial polypeptide expressing nucleotide sequence isolated from the Sargasso Sea
catggatctgcgtaataaacgagtgctaattcgagaagactttaacgtgccgttgaaagacggaaaaattcaggatgccgcgcgattggagcgggcactgcccacaattcagacaatgttagaatcgggcgccgctgttttgctgtgttcgcatttggggaggcctatagaggggaagtttgataaagcgctttctttagctcctgtggcagagtggttatctgattgtttggctattcctgttcggttagagaaaaattatttggatggcgttgatattaatcccggtgaggtggttttgtgtgaaaacgtgcgatttaatacgggtgaaagtcaaaatgatgatcaattatctagaaaatatgcagcattatgcgatgtatttgtgatggatgcttttgcaacagcgcatcgagctcaagcgtcaacggttggtgttgtaaagcatgttaagcaagcagcttttgggcctttgatgctgcaagagttagaggcttt

SEQ ID NO: 249987 - DNA, 502 bp, Unknown
  Bacterial polypeptide expressing nucleotide sequence isolated from the Sargasso Sea
ttttttggaaataatgttggaaaatctatcaaagaaaaaaattgtaatcttatagtagaggaaattaatactctttctaaaaaagaaaaatgtaaaataatttatccagaagatgtaattgtatctaataatttaaacggatctcctcaaaaaaaaaatctgaatgaaatttcaccagatgaaatgatattggatataggtccaaaaacaattaataaaataattaatattattgataatagtaaaactattctttggaatggacctgcgggatattttgaaaatccaaattttgccaatggaagtattcaaatagctaaaaaaataattgaagataataaattaaaaaagattttttcagttgttggtggtggagacacagtttctttattaaataatatgaacgccgtagatagttttaattttgtttcaactgcaggtggagcttttttagaacatcttgaaggtaaaaaccttcctggtataaccgctttaaattaaa

SEQ ID NO: 249988 - DNA, 908 bp, Unknown
  Bacterial polypeptide expressing nucleotide sequence isolated from the Sargasso Sea
aatggttgggatcagagtcgattttaatgtgccccttgataaacattttaagataactgacaaaacaagattagacagggcaaaggacacgatcaattttattaaaaataaacagtgcaacattcttcttctttcacattttggaagaccaaaagaaaacttcgatgacaagtactctttcaaaaaacttattgatcagtttcaggaaatcttaaaattaaaattaaattttataagctatgaaaattttttagaaaacggtcttgatcaattcaatattaataggcctaccacaactcttttagagaatataagatttttcgaaggtgaaataaaaaatgatttaagttttagtaaatcaattactgacaatctagatctatacgtaaatgaagcattctctgtttcccataggcttcactcatcagtaaaccaaatgcctaaaaatattttatctacacctggttttaattttgaaaaagaaattaaggcaattaatgatatcaaaaaatctcaaaagaaaaaattagctataattggaggttcaaaaatctcaactaaaataaacacacttttgtctttaacgacttcttgctcagatatttttataggaggagcaatggctaataattttctaaaatttaataagtttaatgttagttcttctttaattgaagagggtgctgaacgaatgattgaaatgatttatagctctgcaaaacaaacaggctgtgaaatccatctcccagttgatgtaatgctcgattcagatcaaagtgtattagtcaatgaacttgataaaaacactgaaattaaaattttagatatatccgactcttctcatattgttttagaaaatcttgttaaaaaaagtgatattatttttgtggaatgcccccatgggaaat

SEQ ID NO: 249989 - DNA, 523 bp, Unknown
  Bacterial polypeptide expressing nucleotide sequence isolated from the Sargasso Sea
tatggctaataattttattgaatattttggaaataatatcggaaaatcgattaaagagaaaaattgctatcaaatagttaaagaaattatttcactttcagaaaaaaacgaatgtaaaataatttatcctgatgacgtacttgtatctaaaaatttaaatggtacctctaaaaataaagaactagatcaaattttatctgatgaaatgattttagatataggcccaaaaacaatagataaaataattcatataattaataatagtaaaacaatattgtggaatggaccagctggatattttgaaaatccaaattttgctaatggaagtataaatattgcaaagaagatagttgaaaataacaaatctaataaagttttttcagtggtgggtggtggtgatactgtttccctgttaaatagcttaaagataacagataattttaattttgtttcaactgcaggtggagcttttttagaatatcttgaaggcaaaaagcttcctggtataaccgcattaaattaa

SEQ ID NO: 249990 - DNA, 543 bp, Unknown
  Bacterial polypeptide expressing nucleotide sequence isolated from the Sargasso Sea
tagctcatttaaactcaatagcagatttcattattgttggtggcgggattgctaatacctttttgaaatctcaaggcttcaatgtcggggagtctttggtagaaaatgacatgattgaaattgctaaagagctttttaattccggcaaaataattttacccaataaagtcattgttgctgattcaattgatagcaactcctcaactatcaaaagtatagattctgttagtaactcggataagatttttgatattaacttaagaagtaatatgtcgaaaatccttaagaactcaaaaactattttatggaatggaccaataggagtttttgaaaaagagccttttcaacaaggcacacatcaattagctaaagctattgcagagtctgaggctttttcacttgctggaggcggagaaactatagctgccataaacaaatttattaataaagatgaggtatcatactgttcaacaggtggaggagcttttttagaatatatggaaggcaaattgctcccatcaattgaggctttaggaggctaaa

SEQ ID NO: 249991 - DNA, 250 bp, Unknown
  Bacterial polypeptide expressing nucleotide sequence isolated from the Sargasso Sea
tgtggaatggtcccgcaggttatttttgagaacccaaattttgccttgggtagttacgagattgcaaaaaaaattgttgaaaaaaacaaaaataattcaatttattctatagcaggaggtggagatacaattgcagttttaaatcaactcaatgcaattgataattttaactttgtttcaactgctggtggagcatttttagaatatcttgaaggtaaagaacttcctggtataaaagctttaaactaat

SEQ ID NO: 249992 - DNA, 765 bp, Unknown
  Bacterial polypeptide expressing nucleotide sequence isolated from the Sargasso Sea
ttttatacaaaatttattgaaaagagaggcaaaattattattaatttctcacctaggaagacccagaggagacaaagataaaaatttatctttgaaacctgtatttaaatatttagaaaaaaaaatcaaaaataagatatattttttttcagaaaaaattacaaataaaactaaagacaaagttcattttataaataatggtgaaatgatttttttcgaaaatattaggcttaacgaaggcgaaattaaaaatgatgaaaattttgcaaaaaatctatcatctttgggtgaggtttatattaacgatgctttttcttgtgctcatagaaaacagacatctatacataaaattaccaaacacataaaaaattcttacgctggaccattatttatgaaagaaattaattcaattgatatggttttaaaaaataaaaaaagaccaacgacttgtattattggtggatccaaagtctcaactaaacttggagttatcacctccttaataaaaaaagttgacaacttaattatagtaggtgcaatggcaaacaattttgttaagtttaaaggaaacaaagtaggaaaatcattagtagagactggttcagaaaaaataatcgaagaaatttacaataaaagtaataatagtaattgtgaaattataacaccctttgattttgcaatttcagatactgcggatggagaggcaaagtttaaggatttaaattcaatcagcgataatgagataattttggatataggtccaca

SEQ ID NO: 249993 - DNA, 679 bp, Unknown
  Bacterial polypeptide expressing nucleotide sequence isolated from the Sargasso Sea
aatgttaaatgttaaagctctaaaaacatttgatcagaaaaataaaaccgtacttattcgctttgacctaaatattccgctcaacaaagaggcctctacaataagcgatcggattacgagaattaaaaatccaatacaaaaccttcttaataagaataataaagttgtaattctgtctcatctaggaagaccaaaaggaaaaagaaatgatgagctttcactcaatcaaataatcggctcgttagaaagtgtattgcaaaaaaaaataatatttctctcaaattgtataggcgatgagattgaaaaaaaaataaattctttaagccaggattcaattattcttcttgaaaattgccgttttcatgaaggtgaagaacaaaatgataaattttttgcatccgagctatcaaaattagcagacgtttatatcaatgatgcttttgcatgttctcatagagctcacgcttcaattgaagcaatcacaaacttcataccatcttattgtggcgaactattacatgaagaaatattaaatttaaatgatgcagttaataaccctaaaactcctgcattaactatcattggtggctcaaaaatctctacaaaaattacagttataaaaaatctcctgcaaaaaatggacacaattgtcattgctggtgggatggctaataatttt

SEQ ID NO: 249994 - DNA, 739 bp, Unknown
  Bacterial polypeptide expressing nucleotide sequence isolated from the Sargasso Sea
gatggttattaaaacactaaatgattataatattgctaataaaaaaatattagttagggcagatttaaatgttcctatagaaaatggaaaaatatctgatacttcaagacttattagcgctattccaactattaaaacaattcaatctttaggcggaataaccattctcatttctcattttggaagacctgatggatcatataaggaagaacttagccttaaacaagttgttccagaattggagaaacttttaaattttcctgtgaaattctcttctgaattagttggaaaaaatgtaataaagaaaattgataatctaattggtggtgaaatactgttgttagaaaatacaaggttttttgctgaagaggaaatgaatgatggaagtttttcaaaagaactatctaaattaggtgatattttctgtaatgatgcattttcttcttctcacagagctcatgcttcaaccgtaggtgtttctaaattactacctaattgcgctggcaacttaatgaaaaaagaaattgatacattagaaaatgttttaaaaaaaccacaaaaaccattaacagcagttgttggcggagccaaaatttcaacaaaattaaatttacttcataatttaataaaaaaagttgattatttagtaattggtggagggatggctaatacttttctttttgcaaaaggactacagattggaaaatctctatgcgaaaaaaatttaaaggaaacttcc

SEQ ID NO: 249995 - DNA, 613 bp, Unknown
  Bacterial polypeptide expressing nucleotide sequence isolated from the Sargasso Sea
atgaaaacaatagatgatcataatataaataataaaaaaattttatttagagccgatcttaatgttcctgtcgttgatggaaaaataacagattattctagaattaatgccatattaccatcattaaacaagcttagaaaaaatcaaaataagatttttataatatctcattttggtagaccaaatggtgaattaaatgaaaaattttctttaagatttttatgtgacgaattaagaaaaaaactagaagtaccaaaaatacattttttaaaaaattatataaattccaatatttcacaaatgttatctgaaatgcaggagggagaaatttgtttattggaaaatattcgttttcataaaggcgagatatctaatgatataaatttttctaaaaatctttcatcaagttttgatttttatgtaaatgatgctttttccgcctcacatagaaaccattcatctattgttggattacccaaattgttaccatcattagcaggccaaagttttaaaaaagaagtacataatttaaatttatttttaaacaacacacaaaaaccaaatatagcaattattggaggttcaaaaatttcaacaaaaataaaagtaatat

SEQ ID NO: 249996 - DNA, 388 bp, Unknown
  Bacterial polypeptide expressing nucleotide sequence isolated from the Sargasso Sea
atgaatctcttacaaaatcaaaaacttaacaataagaaagctataattagagtcgacttaaatgttcctttaaatgaaaaaaaagaggttactgattataccagaattgaggcaataaaggaaacagtcaattttgttattgataatggaggttcatgtattctactttctcatcttggaaggcctaaaggaaaagatgagaacttgtcacttaaaaatattttaggccctgtttcaaagactttagataaacctgttattttttttcaagactgtattggagaagaagctgaacaagcaacaaaaaaactacaacaaggagaaattatattgatggaaaacgtacgattttacaaagaagagacaggggagataagtgttgcagaaa

SEQ ID NO: 249997 - DNA, 481 bp, Unknown
  Bacterial polypeptide expressing nucleotide sequence isolated from the Sargasso Sea
tgtgaatacgagtgtgggcctttaataaaagaaatattagaaaattccaaaaaatataattgtaaaattacaattcctaaagatgcaattgtgtctactagtctagatggaaaagggaaagaaaaaaaaataaatgaaatagaagagaacgaaatgatattggatattggatctaaaacaatattatctattgaaacaattataaataactcaaaaacaatcttgtggaacggccccgcaggatattttgaaaatccaaattttcaaaatggtacaaaaaaaatattagaattaattactcaaaaaacaaagaatgataaagttttttctgtagccgggggtggtgaaacagttgctgcaataaataagtttaaaaaatttgattcatttacttttgtttcaactgctggtggagcttttttagaatatcttgaaggtaaaactctacctgctataaaagcattaaatcaaaatgtctgaa

SEQ ID NO: 249998 - DNA, 325 bp, Unknown
  Bacterial polypeptide expressing nucleotide sequence isolated from the Sargasso Sea
atgatactagacattggtaggaacacaatagatttaataaacaaaactatagacaattctaatacattgttttggaatgggccagctggatattatgaaaataaaaatttttcaactggctctctatctatagcaaaaaaaattgctgaaaatacaaaattaaaatctctaatatcaatcgttggtggtggagataccattgctgcaattaaaaatactggattggaaaacagttttacgcatttatcaacagctggtggtgcatttctagaatctcttgaaggtaaggaactgcctggtataaaagtattaaaaaagaattaag

SEQ ID NO: 249999 - DNA, 431 bp, Unknown
  Bacterial polypeptide expressing nucleotide sequence isolated from the Sargasso Sea
aatgagattactaaaagaccaagatcttagtaataagaatgtggttgtgagattagatttaaatgttcctattcaaaacaagcaaattatagattcaaccagaatcatttattcagtacctacaataaaatatctcgtagataaaaactgtaaagtccttttaacatcacatcttggcagacctgaggaaggaaagtttgatcaagatttctcaatgtctccggtcgctaaaaaattatctgaaatcttaaatcatgaaattgatcttatcgattccctagacaatagcgatatttttaatacaacccaaatacaattattagaaaatttaagatttcttatcggtgaaaaagacaataatgaaaagctaggaaatcagctagcaaataaaggagatgtttatatatttgatgcttttgggactgctcacc

SEQ ID NO: 250000 - DNA, 694 bp, Unknown
  Bacterial polypeptide expressing nucleotide sequence isolated from the Sargasso Sea
agttttataaatgaaatagacaatttaaataaattttttataaataataaaaaacctaatttagcaattataggcggatcaaaaatctcatcaaaaattaaagtaatttttaatttaattaactcatttgatacaattgtcatcggtggagcaatggcaaatacatttttattatctaataatattaatattggcaattcactttatgaaaaagattttataaaaaccgctaaagatattttaattaaagctagaaataaaaaatgtaaaattattttacctattgatgcagtttgttcaaaaaatttaaagaacaatgcagatatatcaaaatgtaatattaatagtattcctaaggataaaatgattctagatattggagaaaatactactaatttagtttgtaatgaaatcaataagtgctgctcagttttgtggaatggtcctctaggtgcctttgaatttataccttttgagaaaagctctattgaaatagcaaatcaaataaaaaatagttttaaagaacttaattttttttctttagcaggtggcggtgatacactttccgttattaatttagctaaagcaaaagatggttttaattatttatcaaatgctggaggagcttttttagaatggctagagggagacaaatctcctggttacatagcactcgaaaaaaataaactttaat

SEQ ID NO: 250001 - DNA, 199 bp, Unknown
  Bacterial polypeptide expressing nucleotide sequence isolated from the Sargasso Sea
gatgggtgaaataaatttctttcctgacgatttagaaatcaaagatcaaaagataattcttagactagatttaaacgttccaattaaagacaaagttataaaagatgatacgagaataactttatgtttaccttttataaataaactaattgaaaaaaaagcaaaaattataattataagccatttaggtcgaccaaaa

SEQ ID NO: 250002 - DNA, 794 bp, Unknown
  Bacterial polypeptide expressing nucleotide sequence isolated from the Sargasso Sea
tattgaaaaactcatcgcaaccaaaaataagatttttatattggctcattttggaagacctaagggagaggtgatagaaaagttttctttaaaatttattctttcaacccttgaagaaattcttgaagttaaaaaaattcactttttgagaaacctacaagaggaaaaaattagtaaaaaatttgatgagatgaatccaggagaagtttgtcttgtagaaaatattagatttgaaaaaagagaggaaaaaatagactgggattttgcaaaaaatattagcagtttatttgatgtttatgtaaacgatgctttctcagcctctcacagaaaccacacatcaattataggttttgctaagtacatacctgctgtagcaggaaaccatctaattaaagaaatagaaaatataaacgcgtttttagaaaactcaaaaaaaccgaacttggcaattgttggaggttcaaaaatatcaactaaaatcaagcttttaaataatttgatacagcagtttaactgtgttgttattggtggagcaatggctaatacctttttattatcaaaagatatgatagtagggaaatcattagttgaaaaagatttagttgatgtggcaaaagacattcaaaaaaaagctaataagttgaattgtaaattaatacttcctcttgatgtagtatgtggaaaaagtattgaagacaaagaacctatagagtgtgatattaatgatatatcacaagactatatgattttagatttaggaacaaaaaccaccactttgatcaataaagaaattc

SEQ ID NO: 250003 - DNA, 321 bp, Unknown
  Bacterial polypeptide expressing nucleotide sequence isolated from the Sargasso Sea
tatgaaaactctggcagagatcgacttaaataataaaaaagttggaataagagtagatttaaatgtccctataaaagacggtaagatattgagtcatgaaaaactatcagctgccttaccatcaatacttcacatattaggaagaacggagaatttatgtattataagtcaccttggaaggcctacagagggaaacttcaattcaaactactctcttttaccaataaaagaatggtttgataaaaaattaaaaaaagaactgtcatttattgataatctggatgcaattccagaaggcatatcatttttagaaaatataag

SEQ ID NO: 250004 - DNA, 823 bp, Unknown
  Bacterial polypeptide expressing nucleotide sequence isolated from the Sargasso Sea
ctagcctctctaataaataaaaaagttttgttcaacaaaaaaaaaattaacgaaaaaacaaaaagtgaaataaacaaaattccaaatggatctattatgatgttagaaaatattcgtttttatgaaggcgaagagttaaatgataatgagttttccagtaaattatcagatttaggtgatatttatgttaatgacgcattttcatgttctcatagatctcatgcatctattgagggaataactaagcacatgccctcattttttggtctacaaattacaaaagaaattgatgcgttaaaaaaactaacttccgagataaaaaaaccaattactttaataataggcgggtctaaaatttcaacaaaaattaatattattaataatttaataaaaaaatttgataatattataattgtgggtggaatggcaaacacaatgctaaaacatactggtaaaaaaattggaaaatcaatagtcgaagataattataaaaatttaattgaagaaattttaaaaaattctaaaaaatataattgtaacataaattgtccagtcgatgtagtagttgcaaaagatattcatagtaaaggaaaaaacaaaagcataaatgaagttgataatgacgaaatgatattggacattggtccaaaaacagtttcgtctataaagcaaatagttaacgagtcaaaaacagttctatggaatggtcccgcaggatattttgaaaatccaagttttcaacatggtacaaaaaaaattttagaaataatttctaaaaaaacagaaatcgataaaatattttctgtggctggaggaggcgaaa

SEQ ID NO: 250005 - DNA, 295 bp, Unknown
  Bacterial polypeptide expressing nucleotide sequence isolated from the Sargasso Sea
tttgattgcaaaaaaaacggttttattgcgcttagattttaatgtgccaataattaatggtaaaatacaagatgcttcaagaatagatctaactattcccttaattaaaaaactattacaaaaaaaagctaaagtaataattttttctcatttaggacggccaaaaaataataatgaaaaaaagttttctttgctcccaatttttaattatctcaacaataaaataactaataaaatttatttctacacagataaaattgacatagaaacaaaaaaagaaaatttctttaattaa

SEQ ID NO: 250006 - DNA, 432 bp, Unknown
  Bacterial polypeptide expressing nucleotide sequence isolated from the Sargasso Sea
tatgcgactgttgtccgatttagatattgcgaaaaaaaaagtaggattaaggttagatctaaatgttcctattaaagaaggagttgtcgaagatgatactcgaattttagcatcgcttgaaactttaaattatttaattaaagcagaagcaaaaattgtgattatatcccatcttggcagacccaaagagggtacctttgatgaccaactttctctaagaccggttgccactcaccttagtaacgaattaggcatctccattcccttaatcaattctatgaaagaattccatgatacaaatgcacaaatctgtatcctagaaaacattcgtttttttgaaggagaattaaaaaattctgattcgcttgcaaggaaaattggagcacatattgacgtatatgttttcgatgcatttggaacttcgcacagaaa

SEQ ID NO: 250007 - DNA, 535 bp, Unknown
  Bacterial polypeptide expressing nucleotide sequence isolated from the Sargasso Sea
catggctaatacgtttctattggctcaaggcaaaccaattggtgcatcgcttgctgaacctgatatgattcaaactgctcaacgtattctcaaagtcgcggaattaaacgactgcaaaattcttttgcctaaggatgtggtcgtggcagttgaattcaagtcggacgccactcatcggatagttaaaattgatgatgttactaattttgagatgattcttgatgcggggccagaagcagttattgatgcagggagctttttggaaaactgcgccaccatcgtctggaatgggccaatgggcgccttcgaaatgccacccttcgatgcggcaacaaatgcactagccaaaatcgtggcagcaaaaactcaaaacaatggtgtgatgagtatcgcaggcggcggtgatacgatggcggctcttgcaaatgctggggttagtcaccaattctcctacgtatctaccgctggcggcgcctttctggaatggcttgagggtaaacgtttgccaggtgttgaggcgctcaggaagggctaa

SEQ ID NO: 250008 - DNA, 247 bp, Unknown
  Bacterial polypeptide expressing nucleotide sequence isolated from the Sargasso Sea
gacacagaaaataaagtctcacacgtttcgactggtggtggggccagccttgagcttttagagggcaaaatacttcccggattggatgctttgagtgatatgactggcgatgaagagaagcgggaaattgcaaaaaaggaaagcttggttgtcaaaataaggtcatatcttgaagaaaacccagtagttgctgccggatcagtagttttgtttttgttattgatgagaacagtattaaaaaagtaaa

SEQ ID NO: 250009 - DNA, 580 bp, Unknown
  Bacterial polypeptide expressing nucleotide sequence isolated from the Sargasso Sea
gatgcaaataccaagcatggaaacactggatttgcatggcaagaggaccatgatccgattggacctgaatgtgcctattaaaaatggcgctgttatcagtgatgcaagaattattgcttctcttccaaccatacaaatggcccttgataagggcgcaaatgtcattctgttgtcacatctgggtcgacccgaccctgaaaaattagatggcagtttttcgctggagcctgtcgcagagaggcttaaagaaattctaggcattaaggtttcttttcaatccaattggcttgatggaatcgatcatccgtttgatggtgtcactctgtgtgagaatgttcgctatcacgcaggtgaaaaaaagaacgatgagtcgctttctcaaaagatagcagggctttgcgatgtttatgtcatggatgcatttggtgcctcgcatcgaaaacattcaagcacatacggcgcacttcaatacgcaaaagaaagatgcattggaccgctcttatccaatgaggtgaactcaattaagaaggccattgatggacccaaatcacctgtcactgcaatcatcgggggcgccaaa

SEQ ID NO: 250010 - DNA, 352 bp, Unknown
  Bacterial polypeptide expressing nucleotide sequence isolated from the Sargasso Sea
agttagagaattaaatcaaattaaatcagatgaaatgattttggatataggtccaaaaactattgaaaatatatgtaatattattgataatacaaataccatattatggaacggtcctgctggatatttcgaaaaccctaatttttcaaatggaagtactgaaattgcaaaaaaaataattgaaaaaaacaaagaaaataaaatttactctgtagtaggtggtggtgatactgtttcgcttattaattctttaaatgcttttaaaaactttaattttgtttcaactgcaggcggagcttttttggaatatattgaaggaaaagaacttcctggtataagcgcgttagattaa

SEQ ID NO: 250011 - DNA, 385 bp, Unknown
  Bacterial polypeptide expressing nucleotide sequence isolated from the Sargasso Sea
catgaaagaaataaaatttatagaagatgttgtcttggaggggaggagagttttaactcgcttagatctaaatgttccgctagacaataatgcacaaattacggatgactcccgaataaaaagtagcttaaagactattcgttacattattgataaaggcggtaaagcaatattaatgtctcatttaggtcgtcctaatggagaacggttggaaaatatgagtttaaaaccagtatctgaggcgttatctgtaaatcttgggaaaaatgttatatttgctcaagattgtgttggaaataaggttgaaaaaattatatatgatttgcgaaacggagaaattttgcttttagaaaatttaagattccacaaagctgaaactaaaaat

SEQ ID NO: 250012 - DNA, 1015 bp, Unknown
  Bacterial polypeptide expressing nucleotide sequence isolated from the Sargasso Sea
attcaaaaactatcctcttttgatttgagggaaaaaagagttcttctaagagtagacttcatattcccaatcagagacgaagaagttcttaacgatgaaagaatgataagagctttaccgaccattaaacacttattggaaaaagcaaaatctctcaggatcataactcatcgtggcagacctcaagaatcgggagaagttcagtctgaattttcgattaaaccaatagcaaaaagactctctcaattattagatattcctattccaatagctgattctttggatggtttagagcaagacgaaaaaattatcatgttggaaaacataagattttttcaaggagaaaaagaaaactctggaaatctttcaaaaaaactaggtaattttggagatgtttatatcatggatgcttttggtactgctcatcgtaagcaagcatctacctttggagtaattgactcagtagctgaagcaggtgttggctttttggttgaagatgaactggaggctttgaaaaagattttggtgaatccaaaaaaacctctaattgggattattggcggatcaaagatctcaaccaaaattaatgtcattgattcgcttacttcatacgtggataaattaatcataggtggagctttagcaaatacctgctatatggcaatgggaaaaaacattggaaaatctttatttgaagaagattatttagatgtggcagaaaaattagttagtaatgagaagattgtattgccaaaaaatgtcgtagttttagatacatctaacgattctgttgcggaaaagcatattgatgatatagccagccatgaagctatctgcgacgtgggtaaaaaatctttggagtattttcaaaagcatattaattctgctaaaactgttttttggaatggtcccttaggtaagtttgaagatccaagattttctgaggggacttctgaggtagcaaaaattatgtctgaatctgaagcctatagcattattggcggtgggagacgat

SEQ ID NO: 250013 - DNA, 788 bp, Unknown
  Bacterial polypeptide expressing nucleotide sequence isolated from the Sargasso Sea
cgttaagtacttaaatggaaaagtcagtgatgacgagagaattttaagaacactgccaactttaacttatattctgtctaaagccagttcggtaacgattctcagccatcttggcagacctgaaaaagcaggagagattgataaagacttttctttaaaaaaagttgcagaacacttgagtaatttattgtccgaagaaatttattttcatggtgatttaaaccttgattatttctcagagaatcaaaaaaagatttcgatgttggaaaatgtaagattttttgaaggcgaaactgacaacaatgagttattttcaaaaaagcttgcacaattagctgatgtttttgtcatggatgcttttggatcggctcatagaagccactgttccactgaaggagttagtcattttatagattcatgtgttggaaggttggttgaggaagagttaaattctctagaaggaattttaaataatccatcaaaaccaatgttgggaatcatcggcggctcaaaaatatcaacaaaaataaacattctggaatctcttcttgaaaaggttgattggcttttcgttggaggagggatagctaatacattacacaaatcaaaaggatatgaaatcggccaatcgattgtagaaaatgattttttgaaagaagcaaaagatcttagtaaaaataacaaaataatattgcccgagacatttgtagtagaacaaaaagataagtctattgttgagaaaacttttgaaggaatactgccagacgacattatttatgacgttagta

SEQ ID NO: 250014 - DNA, 676 bp, Unknown
  Bacterial polypeptide expressing nucleotide sequence isolated from the Sargasso Sea
gaagaggaacaaaatgatacatcttttgcaaaacatttggcgagttttgctgatttatatgtgaatgacgcgttttcttgctctcatagagctcacgcatccgtaagtaaaattactgaatttataccatcatttgctggcttacaattagaaacagaaataaatgcgctaaagaaagttacaacagaaataaaaaaaccaatcacatgtattatcggaggttcaaaaatttcaacaaaaatcggtataattaaaaatttaataccaaaatttgataacattattattgttggagcaatggctaataatattattagttataagggaaataatataggtaaatcaattaaggaagaaaattgtgaaacaataatcagagaaattttcgagtctacaaaaaattactcctgtaaaattactatccctgaggatgttttggttggaaaaagtttagatgataaatcaattattagagatttagatgatataaagaatgatgacttgatcttagatatcgggccaaaaacaattaataaaattaaaaatattattgaaactagtgaaacagttctatggaatggtcccgcaggttattttgaaaattcaaattttgcaaatggtagtcgagaaattgcaaaaataattataaaaaaaaatcaagaaggctcaatttatt

SEQ ID NO: 250015 - DNA, 843 bp, Unknown
  Bacterial polypeptide expressing nucleotide sequence isolated from the Sargasso Sea
aaaatattaggttttataaagaagaaagtgaaaacgaagataattttgcaaaaaaactggcctcgctaggtgatatttatataaatgacgctttttcttgttctcacagaaaacaagcttcaattcacaaaattactaaatacataaaagagtcttatgcaggaccgcttcttaaaaaggaattggcagctataaattctattatcaaaaataaaaaaagacctattacatgtattgttggtggatcaaaaatttctacaaaaattaatgtaattgtaaatttaataaaaaatgtgaacaatattattattgttggagccatggccaataattttttaatttttaaaggttttaaagttggaaaatcactagtggaggaaaattcaagaaaaatagttagcaatatatacactgaggctaaaaaacataattgcaatatcttcgttccagaagactacaaagtttcaactaattttaagggttctggaaaaacaaaaaaacaggactctgttgatgataatgaaataatcttagatattggtccaaaaacaattaaaaacattgagaatgttatagataaatcaaacacagtcttatggaatggacctgcaggatattttgaaaatgaaaatttttttacaggtactgcagcaatagcaaaaaagatttctgataatacaaggaaaaaatctctaatatcaatacttggtggtggagatactatttctgcgattaacaaaagtaataataaattttcttttacacacttatcaacagcaggtggagcatttttagaatttcttgaaggaaaagacttgcctggccttagtgttttaaaataaa

SEQ ID NO: 250016 - DNA, 829 bp, Unknown
  Bacterial polypeptide expressing nucleotide sequence isolated from the Sargasso Sea
ttaataaaaaaaaattgcaagttagttataatttcacacgttgggagacctaaaggcaaagtaaacaaagaactttctttgaaaccgatttgtgaaaatttagaaagcaaaataaatcaaaaaatcaaactcattaatgaaaatatcttcaaaattaaaaaagataatttatttagaaatttcgatggccaaataatatttttagagaatattaggttttacgaagaagaagaaaaaaatgacacaaatttttcaaaacaattggcgagtcttgcagatctttatgtgaatgatgctttttcttgctcacatagagctcacgcctcaataagtaaaattactgagtttttgccatcttttgctgggatgcaattagaaactgaaataaatgctctcaagaaagtaacgagtgaaataaaaacaccagttacatgtataattggaggatcaaaaatttcaactaagattaatttaattaataatttaataccaaaatttgataacattatcgttgtgggtggaatggcaaataacattttaagctataaaggaaattcgataggaaaatcatttaaagaagagaattgtgaaaaagaaatagaaaacatttttaaaacctccaacgatcactcatgttcaataatttatccaaaggatgtcaaaattggaaaaagcatggatgacaaatctcaaattaaagacttaactgaagtatcagccgatgatttaatactggatattgggcctaaaactttaaaagaaatcgaagatattatcgaaaatagtaaaactgttttgtggaatggtccggcaggttatttgaaaatcc

SEQ ID NO: 250017 - DNA, 748 bp, Unknown
  Bacterial polypeptide expressing nucleotide sequence isolated from the Sargasso Sea
tcttgctctcacagaatgcaggcctctgttcataaaattgtaaggtttgtaaaaaactcctatgccggtccgctgttaatgaaagaagttttagcaatagatatggttttaaataacaaaaaaaacccaactacctgcataattggtggatctaaagtctcaactaaacttggagtgattacctctttaattaaaaaagtagacaacttaattatagtaggtgcaatggctaataacttcgtaaaatttgagggaaataacgttggaaaatctttaatagaaaatgactcagataaaatgattaaagaagttttcgataaagcaaagaaaaataattgtgaagttataactcctttagattttgcagtttcagaaactatgaatggtgatgcaaaatttaaagatcacgacaagattgctgataatgaaataattttagatattggttcaaaaacaattgaaaaaatatgtaatatcattgatatttctaaaactgttttatggaacggacctgcaggttactttgaaaacaagaacttttcaaagggtaccatttcaattggtgaaaaaatttcaattaatacaaaatcaaaatctttaatatcaattgtaggtggtggagatactgtctcggctgttaaaaataatgttataaatactaactttactcacttatcaacagcaggaggtgcatttttagaatatattgagggaaaaaacttgcctggggtagaagttttaaaataga

SEQ ID NO: 250018 - DNA, 271 bp, Unknown
  Bacterial polypeptide expressing nucleotide sequence isolated from the Sargasso Sea
attgaatatagctgatattgtaatttggaatggtccttttggagtatatgaaatggaaaaattttctaaaggaacaaatcaattattaaaaaatatatctaatttgactattgaaaataaaattacatctataattggtggcggtgatacaggtacttgtgctgaaagattaaatttagaagataaattaactcatattagtactggtggaggagcatgtattgaattattagaaggtaaagatttaccaggattaaaatttttaaaataa

SEQ ID NO: 250019 - DNA, 888 bp, Unknown
  Bacterial polypeptide expressing nucleotide sequence isolated from the Sargasso Sea
ttgagggaatcaatgatgaatctgatgacatcatactctgtgagaatgttcgttatcaggcgggtgaaaaaaagaatgatgagaccttgtcccagaggattgccagcctatgtgatgtctatgttatggacgcctttggcgcttctcatagaaagcactctagtacatatggtgtgcttcaatatgcgaaagagggatgcataggaccgcttttatcaaatgaagtgagctcaataaaaaaagcgattgatagaccaactgcacctgtgacagcgatcattggtggtgcaaaggtttcttcaaagttgggtgtgattgagaggttctcaagtttttgtgatcacgtcattgtcggaggaggcattgccaatacatttcttcttgcaagcggtaagcaggttggggcgtcattggttgaaccagaaatgatcgatgcagcgaataaaatccttcaaatggaaaatgtgaatgttcctcttccagttgatgtcagagtggcaaaagaattctcaacagaggcagaggctaccatcaagtcaattgatgaagttggtgaagatgatctgattttagacataggacctgagaccaccaaatcatattgcaatatcatcaatgaaaccaaaacaaccatttggaacggacctttgggtgtatttgaattcagctctttcgcagaaggaacaagagcactcggacaagctgtttcttcaaatcaaggtttcacgattgttggaggtggtgatactgttgctgtggttgaagaattggggattgctgattcaatgagttatatttcaacaggtggaggggcatttctagactttgttcagaatggtacgcttccaatactagatttacttgaaaagaagaggggcgattcatgat

SEQ ID NO: 250020 - DNA, 338 bp, Unknown
  Bacterial polypeptide expressing nucleotide sequence isolated from the Sargasso Sea
cgaaatattatttgatgaaatgatattagatattgtcccaaaaactattgataaaataacaaatattattgataacagtaaaactatactatggaatggacccgcaggatattttgaaaatccaaatttcgcttatggaagtattcaaatagcaaaaaaaataattgaaaataataaagcaaacaaaattttttcagttgctggtggcggtgacacagtttctttattaaataatttaaaagctgtaaatgaatttaattttgtttcaactgcaggtggagcttttttagaatatcttgaaggtaaaaaccttcctggtataaccgcattaaattaaa

SEQ ID NO: 250021 - DNA, 974 bp, Unknown
  Bacterial polypeptide expressing nucleotide sequence isolated from the Sargasso Sea
agtgacacaactagaatagataaaattctacctactttaaaatttcttaataaacaaaaagctaaaattattattttatcacatgtgggtagaccaagaggtaaagctttaaaagaactttcattaaaaccaatttgtaaaaatttagaggagcagttaggtttaaatgtgaaattaattaaacaaaatataaatgaaattaaaaataggaattttttcgataattttgatgagaaaatcttaatgttagaaaatattaggttttatgcagaagaagaaaaaaatgataataagtttgcaaagcacctagcaagttttggcgatatttatgttaatgatgctttctcctgttctcatcgttcacatgcttcaattgttgaaatttcaaaatttttgccctcattttctggattacaaatagatttagaagttgatgcccttactaaaattacctctaaaattacaaaaccaatatcctgtataattggaggatccaaaatttcgaccaaaattgatattattaaaaatttattaccaagatttgataatataattattgttggagctatggctaataattttattgagtactttggttacaatattggaaaatctattaaagaaaaaaactgtgacaaaatcattgaagaaattattttactttcgaaaaaagaaaaatgtcaaataagttatccagaagatgtgcttgtatctaaagacttaaatggatcgtacaaaaaaagaaaattaaatgaagttttaaacgacgaaatgattttagacattggcccaaaaaccattgacaaaataacaaatattattaattctagtaagaccatattgtggaatggacctgctggatattttgaaaaccctaactttgcgaacggcagcattgaaatagcaaaaataataattaaaaataataaatcaaataaaattttttctgtagttggtggaggagatacagtctc

SEQ ID NO: 250022 - DNA, 418 bp, Unknown
  Bacterial polypeptide expressing nucleotide sequence isolated from the Sargasso Sea
gtcattttgccgacagacgtaattattgcaaaagagttgtcaaaaaatacacccacgtcagttgtttcggctaatgaatgtccagaaaattatatgatactggatgcaggaccatcaacagtcgataacataaaacaatgtattaatagttctaaaacacttttatggaatgggccactaggtgcatttgaggtgtttccttttgataaagccactagtcaggctgctaagtatgcctctgaaaggacaataaacggtgatttaatatccgtcgcggggggtggagatactgtagcagctttcaataaagccggagtaaccgattcattcacctatgtttcaacagcaggcggcgcatttttagaatggttagaaggaaaagagttacctggagttgcctgtctcatagaaaattaaa

SEQ ID NO: 250023 - DNA, 686 bp, Unknown
  Bacterial polypeptide expressing nucleotide sequence isolated from the Sargasso Sea
acaaatttctcaagaaatctcagcacttgaaaaaataaccaataaaattgagaaacctgtttctctcgtaattggaggttcaaaaatttcgacgaaatttaaaattataaataatttaataaaaaaattcgataatattataattgtaggtggaatggctaatacagtactaaaacatttgggaaaaaacgttggcagatctatatgtgaaaatgacagtggccctttagtcaaacaaatttttgaagactcaaaaaagtataattgtgaaattatcattcctaacgatgtgattgtatctaaaagcttagatggcacaggaaaaaaaaaagaaattaatgcagtaatggatgatgaaatgatattggatataggaacaaaaacaatatttactatagaaaaaattattaatagatctaaaacagttttatggaatggtccagcaggatattttgaaaatcccaattttcaaaatggaacaaaaaaaatccttgaattcatttcagcaagaactaagaatgaaaatattttctctgttgctggaggtggagaaacagtggcagcaattaataaatttgaaaaatcaaactcctttacttttatttcaactgctggtggagcatttttagaatatcttgaaggaaaaactttacctggtataaaagcactaaatcaaaatgtctgaa

SEQ ID NO: 250024 - DNA, 375 bp, Unknown
  Bacterial polypeptide expressing nucleotide sequence isolated from the Sargasso Sea
aatgattaacctatcatcattagatcttaataataaaaaattagtcattagagtggatatgaacgtcccaattaaagacggagatgttcttgattcaacaagaattaaggcatgcttgtcaactattgaatacgcacttgaaaataatgcaaaagttcttttgataagtcacttgggtagacccattgaaggaaattttgaggaagagttttcactaaaacctgttgcaaatgaactaagtaaaatcataaacatggatgttgaacttattgaaacattagaatctaataaaatttttaagtcatcatcaaatattcaagttttagaaaatataagattttttgaaggagaaaaagagaactctcaagagttagg

SEQ ID NO: 250025 - DNA, 493 bp, Unknown
  Bacterial polypeptide expressing nucleotide sequence isolated from the Sargasso Sea
aggtaaatcaatatgtgaaaatgattgtgaacacttaataaaagaaattttagaaaattctacaaaatataattgtaaaattacatgtccggtagatgttgttgtttcaaaaaattttgaagatactggagtagaaaaaaatatagaagcagtaaatgatgatgaaatgatattagatattggatcaaagacaatttcttgtatcaatatgataattgctcattcaaataccgtattatggaatggtccagcaggatattttgaaaatccaaaatttcaaaatggtactaaaaaaatattagaaataattgctcaaaaaacaataaatgataaaattttttctgtagccggtggaggagaaacagttgcagcaataaataaatttaaaaaaatagactcatttacatttgtttcaactgctggtggagcatttttagaataccttgaaggaaaaactttacctggtataaaagcactaactcaaaatgtctga

SEQ ID NO: 250026 - DNA, 250 bp, Unknown
  Bacterial polypeptide expressing nucleotide sequence isolated from the Sargasso Sea
aatgagaacaatcgatcagtttaatttttgtaatcaaaaggtaataattagggttgatttcaatgttccaattgacaagaatacagttaccgatacaagcaggattgaagctgcaaaacaaaccattgataagatttgttctgacggaggctcgtgtattttggtttctcatcttggaaggcctaatggttttcaagacgatttctccatgaagaaaataattgattcagttgaaaaagttctcggtaaa

SEQ ID NO: 250027 - DNA, 731 bp, Unknown
  Bacterial polypeptide expressing nucleotide sequence isolated from the Sargasso Sea
ttaataatttctcatgtaggacgtccaaaaggaaaaaaaaataaagatttgtctcttaaaccaatttgtgaaaatttagaaaaaaagattaatagaaaaattgaaataattaatgatgatatttttaaaataaaaaaaaaggatttatttaaagaacccaataatcaaataatttttttggagaatataagattttatgaagaagaggagaaaaatgattcatcttttgcaaaacatttggctgggcttgctgatttgtttgttaatgatgctttttcttgctctcatagagctcacgcatctgtaagtaaaatcacagaatttttaccgtcttttgcaggattacaattagaaaccgaaataaatgctttaaaaaaagttacaacagaaattaaaaaaccaattacatgtattattgggggatcaaaaatttcaacaaagattggaattataaaaaatttaatacctaaatttgataatattataattgttggaggaatggctaataatattcttagtcataagggtaaccaaataggtaaatcaattagagaggaaaattgtgaaactataattaatgaaatttttgaaacttcaaaaaatcattcttgtgaaattacttatccagaggatgttctggttggaaaaaaattagaagattcatcaaaaattaaagatattagcaaaattaaagaagatgatatggttttagatatcggaccaaaaacaat

SEQ ID NO: 250028 - DNA, 187 bp, Unknown
  Bacterial polypeptide expressing nucleotide sequence isolated from the Sargasso Sea
aattatagaaaaaaataaagataactcaatttattctattgcaggaggtggagacacaattgcagttttaaatcaaatcaacggaactgataatttcaattttgtttcaactgctggtggagcatttttagaatatcttgaaggaaaagaacttcctggtataaaagccttaaattcacatgtctga

SEQ ID NO: 250029 - DNA, 786 bp, Unknown
  Bacterial polypeptide expressing nucleotide sequence isolated from the Sargasso Sea
gcaataaataatgatgctgtgaacgcctctaaaaatttaatacctggagaggttttgcttatcgaaaatattcgtttttttaaggaagaggaaaacgatgatgaaaatttcgcaaaaaatttatctaagttaggagatttttatatcaatgaagctttttcttgttcacatagaaagcaagcgtccttacataaaataactaaatatatcgatagttatggtggaccactattagaaaaagaaatccaatcaattaatttaattttaaaaaataaaaaaaaacctgtaacctctataatcggcggctcaaaagtttctaccaaaatcaatgtacttttaaacttaattcaaaatacaaataatttaattattgttggggcaatggctaataattttttaaaatttaaaggttttaatgttggtttatctcttttggaaaaaggtgtagaaaaaataataaatgatatttacgctgttgcggaaaaaaacaattgcaacattataattcctgtagattgtattgtgtcaaataatttaaatggcagtcctaaacataaatcaattaacgaaattacttcagaagatatggttttagatatcggaaaaaaaacagttgatctaataaataaaactgtagaaaactcaaaaacggttttttggaatggaccagcaggatattttgaaaataagaatttttctaacggaactattgcaattgccaaaaagattggcgaaaacactcaatcaaaatctctaatttcaattgttggtggtggagatacattg

SEQ ID NO: 250030 - DNA, 123 bp, Unknown
  Bacterial polypeptide expressing nucleotide sequence isolated from the Sargasso Sea
caggtggtggtgatacactagcagcagttgataaatacgggattgccgataaggtctcttatatttcaacaggtggtggcgcgttcctagaatcttggaaggaaaaacactaccagcggtagc

SEQ ID NO: 250031 - DNA, 136 bp, Unknown
  Bacterial polypeptide expressing nucleotide sequence isolated from the Sargasso Sea
aactgcaattgatcatttttcagtaagagataaaatatcgtacatatcaaccgggggcggtgcttttttagagtacgttcaaggtattaaattaccagcagtacaaatcctcgaagagaaagttattggtatgtga

SEQ ID NO: 250032 - DNA, 879 bp, Unknown
  Bacterial polypeptide expressing nucleotide sequence isolated from the Sargasso Sea
ccaccattaaagaattaagaaaaaataaatgtaagattgttattttgtcgcattttggaagaccaaaaggttcattcaataaaaaaatgagtttaaaacatataattccaaaagttgaaaaaataactaaaagtaaaattcatttttcgaaggatcatattggaaagaattttgaaaatttactaaaaaaaattccagacggaagcattgttgtaatggaaaacactagatttcacaaaggtgaagagagaaacttcaaatattttgccaaagatttagctaaaaattgtgatttttttgttaatgatgctttttcagttgcgcatagaagtcatgcttctgttacaggattaacagattatgttccatcttacagcggacgctcattagaaaaagaagttataacgataggtaaattcttatcctcaaaaaataagagaaaaatagcaattattggtggttctaaaatttctactaaaatcaatctaattaataacctattaaagaatgtaaatgcaattgttatagggggagcaatggcaaatacatttcttttggctcaaggaagaaaaattggaaaatcattaaatgaaaaatcaatggtaaaaatagcaaaaaaaattctatctaatgcatcaaaaaataaatgcaaaataattttgcctgtagatgctgtagttgctagcaatttaagagaaggcggcgagttttctgaatacagcattgaaaatattcctaatgatggattaattttagatattggtaaaaaaagtatagctataatagataaagaaatcagcaaaacaaaagaagttttatggtgcggccccttgggattatttgaacaaagtccttttcatgtggaacagcatcagtagc

SEQ ID NO: 250033 - DNA, 922 bp, Unknown
  Bacterial polypeptide expressing nucleotide sequence isolated from the Sargasso Sea
aattacagacaaaacaagattagatagatctaaggaaacgatcgattttattaaaaataaacaatgtaatatttttcttatttcacattttggaagaccaaaagaaaattttgatgagaaatattctttctcaaaattaattgatcagtttgaggatatattggagttaaaattaaattttattagttatgatagttttttaaatggtggtcttaatgaattagatgttaataagccaactataagtcttttagaaaatataagattttttgagggagaaataaaaaatgatttaaattttagtaagtctattacagataaattagatttatatgttaatgaggctttttctgcttctcatcgatttcactcatcagttaatcaaatggctaaaaacatattgtcagcacctggatttaattttgaaagagaaatttcagcaatagataatataaaaaaatctcctaagaaaaaattagcgatcattggcggatcaaaagtttcaactaaaataaaaacacttctatctttaacatcctcatgctcagatatttttattggaggggcaatggctaataattttttaaaatacaatagtataaatgtaagcaattctttaattgaagagggcactgaaagtatgattgaaatgatttatgactctgcaaaatcaacaaattgtaaagttcatcttccatcagatgttatgcttgactcaaatgaaaataaattaatagatgagcttcccacaagttacgattttaaaatattagatatatcagtttcttcacacacagttttagaaaaactgataggtaacagtgatatcgttttgtggaatggtccaatgggaatgattgaggataataaattttcaaaaggatcagtaaatttagcacatctacttgcaaaatctcaagca

SEQ ID NO: 250034 - DNA, 166 bp, Unknown
  Bacterial polypeptide expressing nucleotide sequence isolated from the Sargasso Sea
cttgggggtaaaagttattgttggaggtggagactcaatcgcagcacttaaaaaacttggaaaagaagattgggttagctatatttcaacaggaggaggtgctcttttggaaagcctagaaggtaaaactcttcctggagttaaagcattgcttaatgagaattaa

SEQ ID NO: 250035 - DNA, 418 bp, Unknown
  Bacterial polypeptide expressing nucleotide sequence isolated from the Sargasso Sea
aataattgtaatgttcttattccagaagattgtaatgtttcaactgattttaaaggtaatggaataataaaagaaagaaatttaattagcaaaaatgagataatcttagacattggtccaaaaacaattaaaaaaattaaaaatttaattgatcaatccagaacggttttatggaatggaccggcaggttattttgaaaataaggctttttctactggcactttagcaatagcaaagaaaatttctgaaaatacagaaaataattcactaatatcagtccttggtggtggagatactatttcagctttaaataaaagtgatagaaaatttttttttacacacttatcaacagcaggtggagcgtttttagaatttcttgaaggaaaagacttgcctggtcttgaggttttaaaataaa

SEQ ID NO: 250036 - DNA, 874 bp, Unknown
  Bacterial polypeptide expressing nucleotide sequence isolated from the Sargasso Sea
aaaatagttttattaagacttgatttaaatgtgccattaaaagatggagtaataactgatacaacaagaataaataaaattttaccgatatttgattttttaattaaaaataacacaaaaattgtcgtcatttcccatatcggaagaccaaaaggagtattggacaataatttgtccttaaagcctgtttgtgagtatataaaaaaaaaactaaataaaaaaataaaacttatcaaagaaagtatatttggattaagtaaagaaaaattatttttaaattcagaaaatgaaattctgtttttagaaaatataagattctatgaaaaagaggaaaataatgatagtaatttttctaagcatttagcaagtctaggagatttattcgttaatgatgctttttcttgttctcatagagctcattcgtcaatatgtaagataaccgaacacattccatcatatgcgggtattcaatttgaggcagaaataaatgctttgaaaaaagttacctcagaaattaaaaaaccagtcacttgtataataggaggatctaaaatttctactaaaatatctattattaagaatttaattccaaaattcgataacattgtaattgtaggaggaatggcaaataatattctgaaatataaaggttgttctattggcaaatcaattcatgaggctaatagtgattcaattattgcagacatatttaaagcttcaaaaaattatccttgctcaataatttttcctgaagatgttgctgttagtaaatcaagagaaggaaatgcagaaataaaagagctaaatgagatcgaaaatgacgacttaatcatagatattggtccaaaaacaattgtaagattagttctataat

SEQ ID NO: 250037 - DNA, 613 bp, Unknown
  Bacterial polypeptide expressing nucleotide sequence isolated from the Sargasso Sea
ctgtataatgggggttcaaaagtatcctcaaaaatcggtgttataagcagtttaattaaaaaagtagataatattgcaatagttggtgcaatggcaaataattttttaatgtttaaaggatttaaggttggaaaatcaataattgaaaaagacgcacatttaatagtaaaaaagatttataatttatctaaagataataattgtaaaattattataccggaagattgttcaatctctcagactatgaatggaagatcttcaattaaagatgcaaatcaaatatcgacggaggatataattttagatattggcccaaagtcaattaaaaaaattctacatttgatcgacaattctaaaacagttttatggaatggtcccgctggctacttcgaaaatgaaaactttgcgctaggaactaactcaatagcgaataaaatttcatcaaatacaataaataattcattattatctattgtaggtgggggggacaccgtatcagcaataaaaaatatcaatttcagtttaaattttacacacttatcaacagctggtggagcttttttagagtttttggaaggaaaaaacttgccaggaatagaagttttaaaataat

SEQ ID NO: 250038 - DNA, 865 bp, Unknown
  Bacterial polypeptide expressing nucleotide sequence isolated from the Sargasso Sea
aaaaacatttgatcagaaaaataaaaccgtacttattcgctttgacctaaatattccgctcaataaagaagcctctacaataagcgatcggattacgagaattaaaaatccaatacaaaaccttcttaataagaataataaagttgtaattctatctcatctaggaaggccaaaaggaaaaagaaatgatgagctttcactgaatcaaataatcagctcattagaaaacgtattgcaaaaaaaaataatatttctctcaaattgtataggcgatgagattgaaaaaaaaataaattctttaagccaggactcaattattcttcttgaaaattgccgttttcacgagggcgaagagcaaaatgataaaatttttgcatccgagctatcaaaattagcagacgtttatattaatgatgcttttgcatgctctcatagagctcacgcctcaattgaagcaatcacaaacttcataccatcttattgtggagaattattacatgaagaaatattaaacttaaatgatgtagttaataaccctaaaactcctgcattaactatcattggtggctcaaaaatctctacaaaaattacagttataaaaaatctccttcaaaaaatggactcaattgtcattgctggtgggatggctaataattttcttaaatatttaggaaatgatgtaaaaaattcattgattgaaaatgatgtagatcacctcgtaaaagaaattattaattttgcaaatgagcaaaactgtaaactaattttacctttagatgtcgttacagctgagaaagtatctgaaactacagaaataaacgaatgtgcagttgatgctgtaaaagataatcaaatgattttagat

SEQ ID NO: 250039 - DNA, 634 bp, Unknown
  Bacterial polypeptide expressing nucleotide sequence isolated from the Sargasso Sea
aaataaaaaagagccggttacctgtattattggtgggtcgaaaatttcgacaaaaatcagtgtaattaataatttaataaaaaacgtaaacaatattgttgttgttggagctatggcaaataattttttaaccttcaaaggttataaaattggaaaatcacttgtagaagaaaattctagaaaaatagttgaaaatatatacgctgaagctaaaaaatataattgcaatattattattcctgaagacagcaatgtctcaactaattttgaaggtactggaaaaacaaaaaaacaggacactgttgaggaaaatgaaataatcttagatatcggcccaaaaacaattaaaaatattgaaagtattatagatcattctaatacggttttatggaatggtcctgctggatattttgaaaataaaaacttttctactggcaccacggcaatagcaaaaaagatttctgaaaatacggctaaaaaatctcttatatcagtactaggcggaggagataccatctcagcaattaacaaaagtagggataaatttgcttttacacacttatcaacagcaggtggtgcatttttagaatttctcgaaggaaaagacttgcccggcctcaatgttttaaaataa

SEQ ID NO: 250040 - DNA, 433 bp, Unknown
  Bacterial polypeptide expressing nucleotide sequence isolated from the Sargasso Sea
tttcgaaaaaaagaaaaatgtgaaataagttatccagaagatgtgcttgtatctaaagaattaaatggatcatgcaaaaaaagaagattaaatgaaattatgaacgatgaaatgattttagacattggcccaaaaactattgataaaataacaaatattattaattctagtaggaccatattatggaatggacctgctggatattttgaaaaccctaactttgctaacggcagcattgaaatagcaaaaacaataattaaaaataataaattaaacaaaattttttcagttgttggtgggggagatacagtctcattattaaacagtataaaggctgttgatgattttaactttgtttcaactgcaggtggagcctttttagaatatcttgaaggtaaaaagcttcctggtataaccgccttaaatcaataaa

SEQ ID NO: 250041 - DNA, 738 bp, Unknown
  Bacterial polypeptide expressing nucleotide sequence isolated from the Sargasso Sea
tttggatctcaatgttcctattagtaattcaagtatagatgacgacactagaattaaaattgttgagccttttgtcaacaatctaataaaaaaaaaagctaaagtaatcctgttgtctcaccttggtagaccaaaaggaaagatagttccagaactgtctcttaaaccggtatttgaatatttaaaaaaaaagttaagtggaaaaatttatttttatcaaaaaaaaattgataatgaagccatagaagcttctaataaactaaaatctggagaagttatattgtttgaaaatgttcgtttttttaaagaagaagaaaatgatgaagaaaattttgcaaaaaatcttgcaaaacttggagatttatttgtaaatgaagctttttcttgttcacatagagaacaagcatcaattcataaaataaccaaatttattgatagttatggaggccctcttttagaaaaagaaattcagtcaattaatttaataataaaaaataaaaaaaaaccggttacctgtataattggaggttctaagatatcaaccaaaattaatattttgttaaacttaataaaaaatgtagacaatcttgtaattgtaggagctatggcaaacaattttattagatttaaaaatataaatgttggaaaatctcttgttgaaaaagggacggaagatatcttaaaaaatatagttgaattagctaaaaaaaataagtgtaaaattattgttcctataga

SEQ ID NO: 250042 - DNA, 364 bp, Unknown
  Bacterial polypeptide expressing nucleotide sequence isolated from the Sargasso Sea
atgagattactaaaagaccaagatcttagtaataagaatgtggttgtgagattagatttaaatgttcctattcaagacaagcaaattatagattcaaccagaatcatttcttcagtacctacaataaaatatctcgtagataaaaattgtaaagtccttttaacatcacatcttggtagacccgaggaaggaaagtttgatcacgatttctcaatgtctccggtcgctaaaaaattatctgaaatcttaaatcatgaaattgatcttattgattccctagacagcagcgatatttttaatacaactcaaatacaactattagaaaatttaagatttcttatcggtgaaaaagacaataatgaaa

SEQ ID NO: 250043 - DNA, 804 bp, Unknown
  Bacterial polypeptide expressing nucleotide sequence isolated from the Sargasso Sea
cttgagtgagattgaaggtttagatcaggtcgatcatatttcaattatagaaaatacccgatttaatattggcgagaaaaacaacgatatagaattatcaaaaagattggcagctttggccgatgtgtttgtcatggatgcgtttgcaacttcacatagggctcatgcttcgactactggagtaattacattttctgatgatgcctgcgcgggatttctcttggatgaggagctaactgctttatcaaaagtaaaagaaaacgcaaaaagctctatagctgtcttgggcggtgcaaaaatctcaacaaaattaagtcttattgattcgctttccaaaacagtggataaagtaatcctgggcggaggtattgcaaatacttgtttggcagctaagggttgtgaggtgggtaagtctctaattgaagattctatgctagaagaagctaaagagttgataaaaaatcctaaaataataattccggaatctgtaattgtttctataagcgctgacgagcccggaagaatcgcttctgctaattcaatacaagaaaatgaagcaatattcgatattgctccagcttccttagttgatttggagccaattattatgaacgctggaaccattctatggaatggacctataggtttttttgaaaaagaaaatttttttgctggcacagccatgattgctgagatgattatttcttcaaaaggcttttcagttgctggaggaggagatactatctctgctgctgaaaaagcaggggtgctagatagccttgactatgtttctactgcaggtgg

SEQ ID NO: 250044 - DNA, 210 bp, Unknown
  Bacterial polypeptide expressing nucleotide sequence isolated from the Sargasso Sea
gaacgcagcaagtttgcagaataattgaagaattaactaataatggagtaatatctgtattaggtggtggtgataccgcatctgctgcgaaaagattttccacagcaaataattttactcatatttcaacaggaggtggagcttctttagagctgttatctggaaaaaaattgccagctttgaaagcgttaggatattatgataaataga

SEQ ID NO: 250045 - DNA, 634 bp, Unknown
  Bacterial polypeptide expressing nucleotide sequence isolated from the Sargasso Sea
gattaattcacttaataaagctttaacctttattgaaaatccattcactgctgtaattgcaggttcaaagatttcaacaaagcttgaacttatagctcatttgaattcaaaagcagatttcattgttgttggcggcggcattgctaatacctttctgaaatctcagggcttcgatgttggagagtctttggtagaaaatgacatgattgaaattgcaaaagagctttttaattctggcaaaataatattaccaaataaagtcattgttgctgattcaattgatagcaattcctcaaatactaaaaatatagattctgttagtggctcggataagatttttgacattaatttaactagcaatatgtcggaaatccttaagaactcaaaaactattttatggaatgggccaataggagtttttgaaaaagagacttttcagaaaggcacatatcaattagctaaaactattgcagggtctgaggctttttcacttgctggaggtggagaaactatagctgctataaataaatttattaataaagatgaggtatcatactgttcaacaggtggaggagcttttttagaatatatggaaggcaaattactcccatcaattgaggctttaggaggctaa

SEQ ID NO: 250046 - DNA, 232 bp, Unknown
  Bacterial polypeptide expressing nucleotide sequence isolated from the Sargasso Sea
gatgggtgaaataaatttctttcctgacaatttagaaatcaaggatcaaaagataattcttagattagatttaaatgttccaattaaagacaaagttattaaagacgatacaagaataactttatgtttgccttttataaatagactaattgaaaagaaagcaaaaattataatcattagtcatttaggacgaccaaaaggaattaatgtccctgacttgtctttaatacct

SEQ ID NO: 250047 - DNA, 550 bp, Unknown
  Bacterial polypeptide expressing nucleotide sequence isolated from the Sargasso Sea
tttaataacttaatatttgtaggaggaatggtttataatattttgaaaaataaaaaatttcaaattggaaaatcaatttttgaggaaaattgtgatcatgtagttgaagaaatttttaatttatcaaaaaagaaaaattgtaaaataatttatcctgttgatgtttctgtaagtaaaaaaatagacggaaaaggaagtgtaaaaaagatagctgaagttcaaaaagatgacttaattcttgatatcggtccagcaacattaaaaataatttctaaaactatagaggaaagtaaaacagttctatggaatgggccagctggttattttgagaatgaaaattttaaaaaaggaagcttagaaattgcaagaaaaattgttgaaaaaaataaaaaaaatcaaatttattctgttgctggaggtggtgatactgttgcggctctaaatagttttaatttaacaaatcattttaattttgtttcaaccgcgggtggagcatttttggaatttcttgaaggtaaggatttacctggtataaaggctttatattaaa

SEQ ID NO: 250048 - DNA, 567 bp, Unknown
  Bacterial polypeptide expressing nucleotide sequence isolated from the Sargasso Sea
aatgtctaatttaaaaattttttcagaaaatataaaaataaatagcaaacgagttatagttagactagaccttaacgtaccaattagtaaatcaagcatagaagacagcacaagaatagaaataattgaaccgtttataaaaaaattgattgaaaaaaaagcaaaaattattttaatatcacatttgggtaggcctaaaggtaaagtggtaaaagaattgtctttaaatccaatatttgactatttgcaaaagtctttgaatacaaaagtttatttttataaagataatattgatcaaaaagcaatagatgcttctaacaatttaaaacagggtgaagtattactaattgaaaatatccgtttttttaaagaggaagaagatgataatgaaaattttgcaaaaaatttatctaaattaggagatttttatattaacgaggctttttcttgttcacatagaagacaagcttccttacataaaataacaaattatattgatagttatggtggtccgcttctagacaaagaaactcaatcaataaatttaattattaaaaataaaaaaaa

SEQ ID NO: 250049 - DNA, 359 bp, Unknown
  Bacterial polypeptide expressing nucleotide sequence isolated from the Sargasso Sea
ttcaatcaataatattccaaatgaccaaatgatattagatgttggtgaacaaactacaaaattaatttcagatgaaatattaaaatctaaatcaattttatggaatgggccattaggtgcattcgagtatagtccatttgataaaagtacaatttcagttgcaaatattatacaaaattattcaagtaagtctcaattagatgctctagcaggaggaggagatacacttgcagcaataaaaaaagctaaagcaaatgacgcatttaaatatttatctacagctgggggtgcatttttagagtggcttgagggaaataaatcaccaggatttatagcactaagagaaaacaatttataac

SEQ ID NO: 250050 - DNA, 601 bp, Unknown
  Bacterial polypeptide expressing nucleotide sequence isolated from the Sargasso Sea
aaaataaaagttttagagaatttagtagaaatttttgactctctagtaattggaggtgcaatggctaatacctttttgctatcaaataattataacgttggttcttctctagtagaaaatgattttattgaactatcaagaaagatacaaaaaaaagcagaattaaaaaattgcaaaatacttttaccaattgatgctgtatgttcaaaaaatattgaagatagagtaaatgttaagacttattcaatcaataatattccaaacgatcaaatgatattagatgttggtgaacaaactacaaaattaatttctgatgaaatattaaaatctaaatcattattatggaatgggccattaggtgcttttgaatatagtccatttgataaaagtactatttcagttgcaaatatcatacaaaattattcaagtaagtctcaattagatgctctagctggtggaggagatacacttgcagcaataaaaaaagctaaagccaatgacgcatttaaatatttatctactgctggcggtgcatttttagagtggcttgagggaaataaatcaccaggatttatagcactaagagaaaacaatttttaat

SEQ ID NO: 250051 - DNA, 282 bp, Unknown
  Bacterial polypeptide expressing nucleotide sequence isolated from the Sargasso Sea
aatgtctcaaatacaatatttcaacgatgctgtttcagttgaaaataaaagggttattttacgtttggatttgaatgtaccgatttttgatggatcgataaaagatcacacaagaattgacctatctttaccgttaataaatagtttgttaaaaaaacaagcaaaaataattataatctcacatttgggaagaccaaaaaaagataaaaaaaatgatttatctctcctaccaatattcaattatttgaaggaaaaaattgatactaaattttatttttatac

SEQ ID NO: 250052 - DNA, 870 bp, Unknown
  Bacterial polypeptide expressing nucleotide sequence isolated from the Sargasso Sea
gctgagactagatttaaatgtcccaattagtaataataaaataacagatgaaacaaggattgataaaatcttaccaatattaaattatttaattaaaaaaaaatctaaaattgtagtaatttcacatattggaaggccaaatggaaaagtagtcaaagaactttccctccaaccaatctgtgaaaatttagaaaataaaataaataaaaaaattaaactgattaaagaggatatttttaaattaaccaaaaaacaattatttgaccacacaactaatgaaatagtttttttggaaaatataagattttatgaacaggaagagagtaatgatattgatttttcaagacatctcgcaagccttggagatttatatattaatgatgctttttcttgctcacatagagctcatgcatcggtaagtcatattacagaattcattccctcttatgctgggctacaattagaaatggaaataagagccttaaaaaaactaactactgaaataaagaaacctataacttgtataataggaggctcaaagatttcaactaaaataactgttattcaaaatttaattccaaaggtcgatcacattataattgttggtggaatggctaataatattcttaaatacaaaggtcattcaattggaaaatctactcaagaaagtaattgtgaaacaataattgaaaatatatttaaattattaaacaattcttcatgtaccataacttatcctgaagatgttgtgattggaaaacatatggaagatattccaacgactaaagaattaaatgaaattatgaatgatgacataattttagatatcgggccaaaaacaattgagaagattaatgatataattgaaaa

SEQ ID NO: 250053 - DNA, 718 bp, Unknown
  Bacterial polypeptide expressing nucleotide sequence isolated from the Sargasso Sea
agcaaaatatttaccatcgtgcgctgggaagttgatggaggcggaactaaaagctttagaaagtgttttaggccaacccaaacgacctgtcgttactgtcgttggcggtgctaaaatttctacaaaaattccactattggaaaacctgatagaaaaggtcgactgcatgattataggcggagctatggctaatactttccttttttcgaaggggttcaatgttggtcgatcattggtggaagaaagtttaaagccgactgcactaaaaattcttaataaggcagaaaaatattcgtgcaaaatcattttaccaacagacgtaattattgcaaaagagttatcacaaaatgcacccacttcggttgtttcggctgatgaatgtccagaaaattatatgatactggatgcgggaccatcaacagtcgataatataaaacaatgtatttatagtgctaaaacaattttatggaacgggccattaggtgcatttgaggtgtctccttttgatgaggcaactagtcaggctgctaagtatgtctctgaaaagactaaaaacggtgatttaatatccgtcgcgggaggtggagatactgtagcagctctcaataaagccggagtaaccaagtcattcacccatgtttcaacagcgggcggcgcatttttagaatggttagaaggtagagacttacctggagttgcctgcctcacagaaaattaa

SEQ ID NO: 250054 - DNA, 705 bp, Unknown
  Bacterial polypeptide expressing nucleotide sequence isolated from the Sargasso Sea
acagggcttccacacactcagctattcaacaagcaaagctctcatgtgctggacttctcttagagaaagagattaattcacttaataaagctttaacctcaattgaaaacccattcactgctgtaatcgcaggttcaaagatttcaacaaagctagaacttatagctcatttaaactcaaaagcagatttcattattgttggcggcgggattgctaatacctttctgaaatctcagggcttcgatgttggagattctttggtagaaaatgacatgatcgaaattgctaaagagctttttaatttcggcaaaataatattaccaaataaagtaattgttgctgattcaattgatagcaattcctcaactactaaaaatatagatgctgttagtggctcggataagatctttgacattaatttaactagcaatatgtcggaaatccttaagaactcaaaaactattttatggaatggaccaataggagtttttgaaaaagagccttttcagaaaggcacacatcaattagctaaaactattgcagggtctgaggctttttcacttgctggaggtggagaaactatagctgctataaataaatttattaataaagatgaggtatcatactgttcaacaggtggaggagcttttttagaatatatggaaggcaaattactcccatcaattgaggctttaggaggctaaa

SEQ ID NO: 250055 - DNA, 547 bp, Unknown
  Bacterial polypeptide expressing nucleotide sequence isolated from the Sargasso Sea
tatgataattggtggtgcaatggcgaataattttttaaaaagtgagggatataaaattggaaagtcactatttgaaaaaaacgtagaggatacaattaataaaatttatgatgaggctaaaaaacatagttgtgatcttattttgccaatagacgtagtttgttcaaaaaaatttgatcaacctggagtgaacaaacaaattaatgaagttaatgatgatgacataattctagatattgggatcgatagtaccaaaaaaattgatcagatacttaaagactctaggacagtattatggaatggtccttttggattatttgaatatgatgattttgcaaatggaacaaatgatatatctcgatcaattgcaaggtactcgcaaaaaaaagggttaatatctgttgcaggtggtggagacacatttgcagcaattaaaaaatcaaatcaacagaaacattttacttatatatcaactgcaggtggtgcatttttagaatggcttgaaggaaaagtgcttccagggctaaaagtccttgaaaataaataa

SEQ ID NO: 250056 - DNA, 430 bp, Unknown
  Bacterial polypeptide expressing nucleotide sequence isolated from the Sargasso Sea
tatggaaaaaataaaagaatttaatgaaaatgtggatattgaaaacaaaaaagttatacttagatctgacttcaatgtcccgattttaaaagatgtaattcaagataaaacaagaatagatttaagcataccatttattaaaagcttgctaaaaagaaaggccaaactacttttaatttctcatcttggtaggcctaaaagcgataaagataaaaattattctttaaagcccgtttttgagtatttacaaaaaaaaattgataataaaatctatttttattcagacaaaattacaaataagactaaagaaaaaatatcatttttggataatagtgaaataattttttttgaaaacattaggctaaatgatggagaaataaaaacgatgacgactttgcacagaatttatccctcattggagacatatata

SEQ ID NO: 250057 - DNA, 499 bp, Unknown
  Bacterial polypeptide expressing nucleotide sequence isolated from the Sargasso Sea
cttagttctacatttatagaaaataacataaaaaattactcagaaatcgtaagcaatgcgaagaaactgataactaattacaaaggtaaaattctatatcctactgatgttgcaattaatgaaaacggaaagagagtaggaattcccgtagaaaacttaccatcaaaatatccgatacacgatattggtctagatacattggtaaattacattaatttaatcgaaagtgcaggtacaattatcgcaaatggacctatgggtgtatttgaaaaccaagagtttgcaataggtacgaaagaaatatttgaaagtatttctaaaagtaacggaatgactgtagttggtggcggagaaactgcaatggcatttaatcaaatgggattctcaaagagcatagaacacatatccactggtggtggggcatgtattgcatttatggccgacgaaacaatgcctgctttagaagctatgagacgtagtaaaattaaatttgaataaa

SEQ ID NO: 250058 - DNA, 703 bp, Unknown
  Bacterial polypeptide expressing nucleotide sequence isolated from the Sargasso Sea
ataactaattttttgccatcttactgtggattacaaatggatactgagattacggcattaaaaaaagttacatctgatattgaaagaccaataacatgcattattggtggctcaaaaatttcaactaaaattggtgttataaataatttaatcccgaaatttgaaaatatagtgatcgtaggaggcatggctaataatatattggaacatcaaggatataaaattggaaaatcaattaaagaagataactgtaaagaaattatcaataaaattttttctttagcaaaagtacataattgtaatattttttaccctatcgacgtttgcgtaggaaaaaattttaatgacacacctcaaataaaaaatttaacagatatagaaaatgatgatttaatattagatattggaaatgaaacaataaaaaaaattatctcactaataaaaaatagtaaaactattctatggaatggaccagctggatattttgaaaactcaaattttgcaataggaagtattaaaattgcacaaacaatagtaaatactgaaaataaaatctattctgttgtgggtggtggagatacaatcgctgttttgaataaaattaatgctttaaaacattttaattttgtttctactgctggtggtgcttttttagagttccttgaaggtaaagaaattcctggtataagagctttaaattaaa

SEQ ID NO: 250059 - DNA, 492 bp, Unknown
  Bacterial polypeptide expressing nucleotide sequence isolated from the Sargasso Sea
tttgaatgtgcagaataagaaaataattttaagattagatttaaatgttcctcttaaaaataagataattctagatatgactagaataaatatgtgcctaccttttataaaaaatttaattaaaaaaaaaagcaaaataataattattagccatctcggccgaccaaaaggtataaaagaccctgctctttctctggcaccggtatataaatatattaaagaaaaacttcaaactaaaatttattttttcactggaaatctggatgaagaaattaaaaaaaagatttctcacttaaaaaaaggagaggtagtattgattgaaaatataagatattttaaagaggaaactgatgacgatgaaagtttctcaaagaagttggcatcactaggtgatatttatattaatgatgctttttcttgttctcacaggaaacagtcatctattcataaaattacgaaatttatagataaatgctttgcgggccctctttt

SEQ ID NO: 250060 - DNA, 323 bp, Unknown
  Bacterial polypeptide expressing nucleotide sequence isolated from the Sargasso Sea
aatgattttagacattggaccaaaaactattgataaaataataaatattattaattctagtaagactatattatggaatggacctgctggatattttgaaaatcctaactttgcgaacggcagtattgaaatagcaaaaacaataattaaaaataataaattaaacaaaattttttcagttgttggtggaggagatacagtctcattattaaacagtataaaggctgttgatggttttaactttgtttcaactgcaggtggtgcctttttagaataccttgaaggtaaaaagcttcctggtataaccgccttaaatcaataaa

SEQ ID NO: 250061 - DNA, 961 bp, Unknown
  Bacterial polypeptide expressing nucleotide sequence isolated from the Sargasso Sea
agacttggtagaattcttggccgacctattcgttttgtgtccgatgtctgtggtaaagaagcgatagatgctattcgaagtttgcaaaatggggagattctttgtttggacaatgttagaatgcacaacgaagaaatttccctgaagaaggcagaattagaagaattacgaatatctcaaatcgtcttgaatctagctccagaatttgatgcatatgttactgacgccttcgccgcagcacaccgtaattctccaactctgacagggtttgcagatgatttaccctgtatcgcagggcgcttaatgcaacgagagattaacgctctacaaaccgctgttacaaacccgccacgaccgtacgttgcaattctcggcggggcaaaggcggacgattcgttccgagtagctcagaatctaatcaatcgaggtgtagtcgatacgattgcctttgttggggtggttggaaatatgattctttgggcccaaggcattgacatcggagaaggaaataaggaatttatccgaggaacattaggagacgatttcgatatcgcttgggaaatggctagcacactagtagaaaatcattcagatttactcttagttcccacggatgttgctgtggaaattgaccaagaaagagtgggactaaccgttgaggatcttccagttccacatccaatttacgatattggagtggagaccctgatgcaattacgacccatattgatgcaggcgggctgtattctatggaatggacctgctagttactttgagaagcccgccttcgccttcggaaccattgagattctcaacatgtgtaccgaaactcaagccatgacaattgtaggcggaggtcataccagcgccttggtgaactcgcgaggagttgcagacaaagtatcacacaatagcaccggtggaggagcctgttgcagatgctttgtggggatagaatgcc

SEQ ID NO: 250062 - DNA, 778 bp, Unknown
  Bacterial polypeptide expressing nucleotide sequence isolated from the Sargasso Sea
gatatatatgtaaatgatgctttctcttgttctcacagatctcacgcttctgttgaaggaattactagatatattccttcatattttggactacaaattacagaagagattaatgcattaaaaaaaataacttcagaaattgaaaagcctgtttctctaataatcggaggttcaaaaatttctacaaaaattaaaattataaacaatttaataaagaaatttaataatattataattgtaggtggaatgggtaatacaatgcttaaacatactggttcaaatataggaaaatcaatatgtgaaaatgagtgtggttttttaattaaagaaatattggaaaactcaaaaaaatataattgtgaaattactattcccaaagatgcaatagtgtctactgatctaaatggagaaggaaaagaaaaaaatataaatgaaataaaagataatgaaatgatattagatattggatcaaaaacaatatcatctattgaaacgataataagtaactctagaacaatactttggaatggtcctgcaggttattttgaaaatccaaatttccaaaatggaacaaaaaaaatattagatttaatttctcaaaaaacaaagaatgataaaattttttctgtagcaggaggtggtgaaacagttgctgcaataaacaaatttaaaaaatttgattcatttacttttgtttcaactgctggtggagcttttttagaatatcttgaaggaaaaactctacctgctataaaagctttaaatcaaaatgtctgat

SEQ ID NO: 250063 - DNA, 901 bp, Unknown
  Bacterial polypeptide expressing nucleotide sequence isolated from the Sargasso Sea
aatgtccctggtcggtataaattttaaaattacagataaaacaaggttagatagatctaaggagaccatcgattttattagaagtaaacaatgcaatatttttcttatttcacattttggaaggccaaaagaaaattttgataagaagtattctttctcaaatttaatcgagcagtttgaggatatattggagttaaaattaaattttattagttatgatagttttttagatagtggtcttaataaattagatgttaataagcaaaccataagtcttttagagaatataagattttttgagggagaaataaaaaatgatttaaattttagcaagtctattacagataaattagatttatatgttaatgaggctttttctgcttctcaccgatttcactcatcagttaatcaaatggctaaaaacatattgtcagtgcctggatttaattttgaaagagaaatttatgcaatagataatataaaaaaatcaccaaagaaaaaattagcgatcattggcggatcaaaagtttcaactaagataaaaacacttctatctttaacatcctcttgctcagatatttttatcggaggagcaatggctaataatttttttaaatataataatataaatgtaagcaattctttaattgaagagggcacagaaagtatgattgaaatgatttacaattctgcaaaatcaacaaattgtaaaattcatcttccatcagatgttatacttgattcaaatgaaaataaattaatagatgagcttcctacaaactctgattttaaaatcctagatatatcagtttcttcacatacagttttagaaaaactgattggtaacagtgatatcgttttgtggaatggaccaatgggaatgatcgaagacaataaattt

SEQ ID NO: 250064 - DNA, 196 bp, Unknown
  Bacterial polypeptide expressing nucleotide sequence isolated from the Sargasso Sea
ttagaagctatttcagtaaaaactgaaaatgataaaattttttctgtagctggtggtggggagacggttgcagcaataaacaaatttaagaaatcaaactctttcactttcgtttcaactgctggtggagcctttttggaataccttgaaggaaaaaccttacctggtataaaagcactgaatcaaaatgtctgaa

SEQ ID NO: 250065 - DNA, 271 bp, Unknown
  Bacterial polypeptide expressing nucleotide sequence isolated from the Sargasso Sea
aatgagaaccatagatcagtttaattttaagaacaaaaaggcaataattagggttgattttaatgttcctattgacaacagcaaagtaacagatacaagcaggattaaagccgctaaacaaacaatagacaaggtttgtaacgacggcggatcatgtattttggtgtctcacttaggaagaccaattggttttcaaaaagaattttccatgactaacattataaatgaagttgaaaatgttttagaacgaaatgttgttttatctaaagac

SEQ ID NO: 250066 - DNA, 674 bp, Unknown
  Bacterial polypeptide expressing nucleotide sequence isolated from the Sargasso Sea
tattcaaattaaaactgaggttaatgctcttaacaagataacgtcaaaaataaagaaaccagtaacatgtataataggtggatctaaaatatcatctaaagttaatataataaaaaatttaataccaaaatttaacaatattataatagtaggtgctatggctaataatatttttaaatataaaggtttaaaaattggtaaatctatacacgaaaaaaatattgataacataattcatgaaatattttcatacgctgaaaaaaatgattgtaaaatttattttcctaaagatgttaaagtcggaaaaagattagatagcgaatctaatgaaaaaaactttgaaaatattgaggatgacgatgtaatattagatgttggatcaaaaactctaattgagataaaaaaaattatcgataattcatcgacattattatggaatgggccgttaggttattttgaaaatataaatttttcaataggaagctcagagatagcaaaatatattgcaagcaaaggagaaaatattttttcagttgtaggtggaggagatacagtagcagtcgttaactcactaaatattaacaataaatttaattttgtttcaactgcaggtggagcatttttagaatatcttgaaggcaaagttctccctggtataaaagcattaaactaaa

SEQ ID NO: 250067 - DNA, 724 bp, Unknown
  Bacterial polypeptide expressing nucleotide sequence isolated from the Sargasso Sea
gatgaaaaatctactaaattataaaatatttaataaaaacgttctttttagagctgacttgaatgtccctgtagttaatggaaaaattactgacaaatctagaatgtttgcagttaaaaaatctataaaaaaattaatagtaaacaagaataagatttttattatagctcactatggcagaccaaatggcaaatttaataaaaagtattcattaaagtttttatctactgaggttcaaaaaatttttgaacaagatcgagagcattttattgataatctagatcaaaaaattgtctcaaacaaaatacaagaaatgaaatatggagaagtgtgtcttgttgaaaatattagatttaatccagaagaagaaaaattagatttagattttgctaaaaatgtaacgagccaatttgatgtttatgttaatgatgcattttctgcttcacatagaaatcactcatctattataggatttgctaaatatctaccagctgttgcaggagatcattttttaaatgaaataaaaaatatagattattttataaataatactaaaaaaccaaatttagctattattggtggatcaaaaatttctacaaaaattaaactactaaaaaatttggtaaatcaattttcttctattgtaataggcggcgctatggccaatactttcttattagcaaatgaatttcctattggtatatcattagtagaaaaaaactta

SEQ ID NO: 250068 - DNA, 235 bp, Unknown
  Bacterial polypeptide expressing nucleotide sequence isolated from the Sargasso Sea
agcggggtattttgaaaatccaaattttcaaaatggaacaaaaaaaatattagaaataatatctcaaaaaacaaataatgatcaaatcttttctgttgcaggcggtggagaaactgttgctgcaataaataagtttaaaaaatttgactcatttacatttgtttcaactgccggtggagcttttttagaatatcttgaaggaaaaactctacctggtataaaagcaataaatcaa

SEQ ID NO: 250069 - DNA, 738 bp, Unknown
  Bacterial polypeptide expressing nucleotide sequence isolated from the Sargasso Sea
ctcatagatctcatgcatcaataagtaaaattacagaatttcttccatctttcgctggcttacaattagaaacagaaattgatgcattaaaaagagttacaacagaaattaaaaaaccaataacttgtattattggaggatcaaaaatttcaacaaaaattggattaataaaaaatttaattccaaaatttaataacattattattgttggaggaatggcgaataatattatcagttataaaggaaataatattggtaaatcaattaaagagcgtgattgtgaaatgacagttaaagaaatttttgaaacttcaaaaaatcactcttgtcaagtttcttttcccatagatgttttagttggaaaaaatattgatgataaatcaaaggaaaaggaattaagtgacattgaaaatgatgatattattttagatatcggaccgaagacaattgaaaaaattaaaaatataattgaaaatagtacgactgttctatggaatggcccagctggctattttgaaaacccaaattttgcaagaggcagtcatgagattgcaaaacaaattgtaaaaaaaaataaagataactctatctactctgttataggtggtggagatactgtagctttaattaaccaaatgaatgtagctcaagaatttaattttgtttcaactgctggtggagcatttttagagtatcttgaaggaaaagaacttcctggtataaaagctttaaactaaa

SEQ ID NO: 250070 - DNA, 97 bp, Unknown
  Bacterial polypeptide expressing nucleotide sequence isolated from the Sargasso Sea
attggcaaaatatttcaatttcgtttcaacagcaggtggagcttttttagaatttcttgaaggaaaagaattacctggtataaaggctttagaataa

SEQ ID NO: 250071 - DNA, 598 bp, Unknown
  Bacterial polypeptide expressing nucleotide sequence isolated from the Sargasso Sea
gcccgcctgataatcatgagccatctaggaagacctgaagaaaacaacatgtttcaagaggaattttctttagcacctgtagttaaggaaatggaaggtctattaaacatgcaaatccctctttactccttgagtgagattgaaggtttagatcaggttgatcatatttcaattatagaaaatacccgatttaatattggcgagaaaaacaacgatatagaattatcaaaaagattggcagctttggccgatgtgtttgtcatggatgcatttgcgacttcccatagggcccatgcttcgactactggagtaataacattttctgatgatgcctgtgcaggatttctcttggatgaggagctaactgctctatcaaaagtaaaagaaaacgcaaaaagctctatagctgtcttgggtggtgcaaaaatctcaacaaaattaagtcttattgattcgctttccaaaacagtggataaagtaatccttggtggaggtattgcaaatacttgtttagcagctaagggttatgaggtgggtaagtcgctaattgaagattctatgctagaagaagctaaagaattggtagcaaaatcctaaa

SEQ ID NO: 250072 - DNA, 274 bp, Unknown
  Bacterial polypeptide expressing nucleotide sequence isolated from the Sargasso Sea
aatggataaaataaatttttttcctgataactttaatgttcaaaatcaaacaataattttgagattagattttaatgtgccaattaaagatagaataattactgatgatactagaataagtttgtgcttaccatttattaaaaaattaattgataaaaaagctaaaataataattatcagccatctgggtcggccaaaaggaatgagggatcctaatttgtctttatcaccaatttataaataccttaaaaaaaaactggaaactaacgtttat

SEQ ID NO: 250073 - DNA, 268 bp, Unknown
  Bacterial polypeptide expressing nucleotide sequence isolated from the Sargasso Sea
atgtccgatcccggccaccagtccagaaacaccatcgatcagatcgacgtggacggctccacggtcctggtccgcgtcgatttcaacgtcccgatgcaggacgggcggatcagcgacgacacccgcatccgggccgcgatcccgaccatccgttccatcctcgaccgaggcggatcggtcgtgctgatgagccaaatcggccgtccctccggcaaggggcacgaacccgagttctccctcgagccggtcgcccggagactcggcgaaa

SEQ ID NO: 250074 - DNA, 496 bp, Unknown
  Bacterial polypeptide expressing nucleotide sequence isolated from the Sargasso Sea
attggaaaatctcttttttgaaaaaaatcaggaaaatttattaaaagatatattgaaaaaaggccaaacaaataattgcaaaattataatacctgaagatgtaatagtagctaaaaactataattctgacgcagaacttaaatctttaaataatattgatgataatgatttaattttagatataggggaaaaaacgataaaaaaaattcataatattattaacgaatctaatacaattttatggaatggacctgcgggttatttcgaattagaaaaattttctaatggcagtattaaaattgcaaaaaaaataactgaaaacacaaaaaacaaatctcttacttctattgcgggcggaggagatactattgctgcaataaataagtcgggttgttctgatggatttacatatatctcaaccgctggtggagcttttttagaacttcttgaaggaaaaattttacctggtataaaagtcttagaaataaatgagtga

SEQ ID NO: 250075 - DNA, 795 bp, Unknown
  Bacterial polypeptide expressing nucleotide sequence isolated from the Sargasso Sea
tggtggaggacgccgagatgttcggcgccgccctcgcaccctacttcgtgagccccgggatacacttccaggcagccacctgggtcgtcctcgcaggtgctgcgggaatggcgctcgacagggccgagagggaagacggatcgaagggcagggacctggaggtcctagcctcgggtatgatcctcatgcagttcgcgatctacgcctcgtccatctccggaaacatgggggacagtctggacatgtggcccatgatggcgggactggttctggcactggcgttcgtgtggaactcgagccagctgtcggggatgttctccaacgtccagacgatggtctacctcaacggcgtgggggggaccctgatcttcttcggggcgctctgcgcgttcgcgatcgaggacccgccatcccaggacaggctctggcccctcgtcgtcgtgctggtcgcgcccgccctcgtgtgctactggatgcacgactacgggaaggacgccgtgcgggagctctccgagcaggggctcgtcgcagggctgctggccccgggcatgacggacgaggagtacaggaccaccaccttccccgagaaggaggtcatcgagcccctcaggctcagggcggtgatggcgcagcccctggtctacctcgcggtggcggggcaggtcatggacgggctggccacctggataggcatcgacgggttccccgggctgggggagaagcacgtcgtctcccagagggtgatagacgccgggatgtgggtgaacgagaagctaggtatcacccacccgatgc

SEQ ID NO: 250076 - DNA, 331 bp, Unknown
  Bacterial polypeptide expressing nucleotide sequence isolated from the Sargasso Sea
gaagatattatattagatatcggtaaaaaaactttgagtttaatagataacattatagataattccaacactgtattttggaatgggcccgctgggtattatgagaataaaaacttttcaaatggttctataactattgcaaaaaaaattgctgaaaatacaaaatcaaagtccctaatatcaattgttggtggtggagatactgtcgctgcaattaaaaatactggtttggagaaggttttcactcatttatcaacagctggtggagcatttttagaatctcttgaaggaaaagagctccctggtataaaagtacttaaaaagaattaaa

SEQ ID NO: 250077 - DNA, 799 bp, Unknown
  Bacterial polypeptide expressing nucleotide sequence isolated from the Sargasso Sea
gatcataaattttcagaaaaattggctagctttggtgaaatatatgttaatgatgccttctcatgttcgcatagaaatcatgcttcagtttcaaatataacaaagtatttaccttcatatagtggcattcaaattaatgctgaggttaatgctcttaagaaaataacatctgaaataaaaaaaccaataacgtgtataataggagggtctaaaatttcatcaaaaattaatataattaaaaatttaattccaaaatttaataatattataattgtaggtgctatggcaaacaacatattaaaatataagggattaaatattggaaattctatatatgaaaaaaatattgaaaagataattgaagaaatattatcttacgctggagcaaataagtgtaaaattttttttcctagtgatgttaaggttggaaaaaatttatatgataaatctaccaataaagaattggaggatattgaagatgatgatatgatattagacgtcggaccaaaaactttgatagaaattaaaagaattattgatttttcctcaactatattatggaatggacctttgggttattttgaaaataagaacttttgtttgggaagctcagaaatagcaaactatattgcaaataaaggtgataaaattttttcagtcgttggtggtggagatacagtagcagttattaattcattaaatatgaagaacaaattcaattttgtttcaactgcaggtggagcatttttggaatttcttgaaggcaaagatctccctggtataaaagcattagattaaa

SEQ ID NO: 250078 - DNA, 571 bp, Unknown
  Bacterial polypeptide expressing nucleotide sequence isolated from the Sargasso Sea
aataaaaaatttaatccctaaattcgataacatcattattgttggtggaatggctaataatattattagttataaaggaaacaaaataggtaaatcaattaaagaacaaaattgtgaagttataattaaagaaatttttgaaacgtcaaaaaaatatccttgtaaaattacttttccatcagatgttttggttggaaaagatatgaatgataaatcagagatcaggggattagatgacataaaaaatgatgatttaatattagatattggaccaaaaacgatcaatgaaattaaaaacataatcgaagcaagcaaaaccgttctttggaacggtccagcaggttattttgaaaatccaaactttgctaatggaagtcacgaaattgcaaaatcaattatcaaaaaaaataaagatggatcaatttattcagttgtgggaggtggtgatacagtctctttaattaacaaaattagtgctattaaaaattttgatttcgtctcaactgcaggtggtgcatttttagaataccttgaaggaaaagaactacctggtataaaagcgttaaattaa

SEQ ID NO: 250079 - DNA, 476 bp, Unknown
  Bacterial polypeptide expressing nucleotide sequence isolated from the Sargasso Sea
aatgaaaaatcttaggaattacgagatagttaataaaaaagtattatttagagctgatctaaatgttccggttttagataaagttataactgatagttctaggattttagcaattaaatcttcaataaaagatctgattttaaataaaaataagatttttataatagctcattttggaagaccaaaaggagaagttttgaaacaatattctttaaagtttattctttcacctcttagagaaatgcttggaatcgataaaattcactttttagaaaatttacaaaaaggtgaggttaacaaaaaatttaatgatatgcagtatggtgaagtatgtcttgttgaaaatattagatttcaaaaaaacgaagaaaaaattgatttaaattttgctaaaaacataagtagtttgtttgatgtctatgtaaatgatgcattttctgcctctcatagaaatcatacatcaattacaggttttt

SEQ ID NO: 250080 - DNA, 520 bp, Unknown
  Bacterial polypeptide expressing nucleotide sequence isolated from the Sargasso Sea
ttctgtttgccctcggcccgatattggcgccagcctttgcgaaaaggaattagctgacaaagcccgcgaaattatggcgcttgccgataagattggttgccgcatcgtgctgccgagcgatgttgtcatcgctgctggattggaagagggaattgttaccaaagtcgtgccgattgccgctgtaccgccaaaccagatgatcctcgatgtcggccccgaaacgtgcgctgcgcttaacctacatctggaaaattgcgggaccttgctgtggaacggcccgctaggcgcatttgaggttacgccgtttgatgctgggacgaacgccgtagcacaacgggctgcggaattgaccgcggtagggtccctggtctcagtcgcgggtggtggcgatacggtggcggctctgcgtcgcgcgaatgcgatcgacgacttcagctatgtgtcaacggcggggggagcgtttctcgaatggatggagggctctgagttgccgggtgtcgcggcgctaaataaatattaa

SEQ ID NO: 250081 - DNA, 357 bp, Unknown
  Bacterial polypeptide expressing nucleotide sequence isolated from the Sargasso Sea
aatggaagataaatcaatactaaatattgacactcgcaatacaagattacttattagagcagatctaaatgttcctataaataataataaaatttcagatgaaactagaatagaaagattctgcaacgggatttccaagcttcttaaaaaaaatactaaaataattataatcacacatttgggtaggcctaaaggtaaagaagacttatcactttctaatagaatacttttaaaaccacttaaaaaatatttaaataaagaaattatattttcaagtaatccaatttccacttcagcaattgaaagttcaaaaaaattaaaaaataatcagatacttctttgtgaaaatattaggtt

SEQ ID NO: 250082 - DNA, 607 bp, Unknown
  Bacterial polypeptide expressing nucleotide sequence isolated from the Sargasso Sea
atgtctgatttaaaaattttttctcaaaatattcctgttaaaggcaaacgtgttattgttagattggatttaaatgtaccaattaaaaattcagaaattgatgatgatgccagaattagattggttcagccttttttaaacgatctaattgaaaataaggcaaaactaattttgatctcacatcttggtagacctaaaggcaaagttatatcggagatgtcacttaagcctatatttaatcatttagaaaaaaaattagatgggaaaatttatttttataatgaaaatattgatgaaaaggcaatcaatgcatcgaaaaaattaaaacctggagaagttttattaatagaaaatattcgatttttcaaggaggaggaagaggatgatgaacaatttgcaaaagatcttgcaaaacttggtgatatttttataaacgaagctttttcgtgctcacacagaaaacaggcgtctatgcataaaataacaaaatttatagaaagttatggcggtccttgtttagagaaagaaattcaatctattgatttaattttaaaaaataaaaaaaaaccaataacatgtattataggaggatcaaaagtttcaacta

SEQ ID NO: 250083 - DNA, 647 bp, Unknown
  Bacterial polypeptide expressing nucleotide sequence isolated from the Sargasso Sea
aaataaagctaaaaagcctgtttcatgtattattggtggctcaaaaatttctaccaagataggtcttttaactaatttggtaaagaagatgcagactgttgtaattgtaggggctatggcaaacaatttcataaaacacaaaggacataatattggaaaatctctgtttgaaaaaaatcaagaaaatttattaacagacatagaaaaaaaatgtgaaataaacaattgtaaacttataatacctgaagatgttattgtggcaaaaagttatgagtccgaggctaaattaaaatctttaaataaaattgataatactgatttaattttggatataggagaaaatacagttaaaaaaattaatattataatcgatgaatcaaaaacaattttatggaatggaccagcaggctattttgaaattgaaaaattttctagcggtagtaataaaatagcaaaaaaaataagtgaaaatactaaaaaaaagtctctgatatcaattgcgggcggaggagatactgttgctgctataaataaatcaaattgttctgatggttttacttatatctcaactgctggtggagcttttttggaacttcttgaaggaaaaattttacctggtataaaagtattagaaataaatgagtgac

SEQ ID NO: 250084 - DNA, 343 bp, Unknown
  Bacterial polypeptide expressing nucleotide sequence isolated from the Sargasso Sea
attagtgatataaaaaaggacgaaaaaatttttgatattggtccacaaaccagaatgaagtactttagttttgttgcagaatgttcttgtcttctttggaacggtccattaggtttttatgaacaaaagccatttgacgaaggtacaaactatgtaatcaaagctgtaaaaaataataataataaaaatttcttttctgtggctggtggaggtgatactatatcaatgttgaatcatgcgaaagcctctgattttttttcattcatttcgactggtggcggagcatttcttgaatttattcagggcagtggtcttcccggtctagatagtttgaacgattaaa

SEQ ID NO: 250085 - DNA, 706 bp, Unknown
  Bacterial polypeptide expressing nucleotide sequence isolated from the Sargasso Sea
gatgggtgaaataaatttctttcctgactatttagaaatcaaagatcaaaagataattcttaggttagatttaaatgttccaattaaaaacaaaattatagaagatgatacaagaataactttatgcttaccttttataaatagactaattgaaaaaaaagcaaaaattataattattagtcatttaggccgaccaaaaggaattaatgtctcggacctgtctttaatgcctatctacaaatatctcaaagatgcgcttaaaactaatgtttatttttttagaggaacttttgatgatgaaactaaagaaaaattttctcacctaaaagggggtgaggtaatactaattgaaaatataagattttttaaagaagaaaccgaagatggccaagatttttcaaaaaagttaggtgaactcggggatatttatattaatgatgcgttttcatgctctcatagaaaacaagcttctattcatagtataacaaaatttgtaaaaaaaagttatgccggtccattattaaaaaaagaaatagcagctatagatcttgtaataaaaaataaaaaagagccagttacttgtattataggtgggtcaaaaatttcaacaaagattagcgttattactaatcttttaaaaaaagttaataatttgataattgttggagcaatggccaataacttcttcgtctataaaaatttttaa

SEQ ID NO: 250086 - DNA, 217 bp, Unknown
  Bacterial polypeptide expressing nucleotide sequence isolated from the Sargasso Sea
aatgttaaatgttaaagctctaaaaacatttgatcagaaaaataaaaccgtacttattcgctttgacctcaatattccactcaataaaagaacctctacaataagcgatcggatcacgagaattaaaaatccaatacagaaccttcttaataagaataataaagttgtaattctgtctcatttaggaagaccaaaaggaaaaagaaatgatgagctt

SEQ ID NO: 250087 - DNA, 352 bp, Unknown
  Bacterial polypeptide expressing nucleotide sequence isolated from the Sargasso Sea
gatgcaaataccaagcatggaaacactggatttgcatggcaagaggaccatgatccgattggacctgaatgtgcctcttaaaaatggagccgtcatcagtgatgctagaatcatggcttctcttccaaccatacaaatggcccttgataagggcgcaaatgtcattctgttgtcacatctgggtcgacccgaccctgaaaaattagatggcagtttctcactggaaccagtggcagagagactgcaagagatcttaggtataagagtttcttttcaatcaaattggcttgagggaatagatcatccgtctgatggcgtcactctgtgtgagaatgttcgctatcacgcaggt

SEQ ID NO: 250088 - DNA, 242 bp, Unknown
  Bacterial polypeptide expressing nucleotide sequence isolated from the Sargasso Sea
gggacctgctggatattttgaaaatccaaatttcgccaatggaagttttgaaatagcaaaagaaattataaaaaaaaataaagaaaaatctttttattcgattgcaggaggtggtgatactattgcggttataaatcaatccaactctattaataactttgattttatttcaactgctggtggagcatttttagaatatcttgaaggaaaagaacttcctggtataaaagcattaaattaaa

SEQ ID NO: 250089 - DNA, 646 bp, Unknown
  Bacterial polypeptide expressing nucleotide sequence isolated from the Sargasso Sea
atgaaaaatattaataattttactttcgtaaacaaaaagattcttcttcgtgttgatctaaatgtcccagttattaaaggaaaagtatctgatttatcaaaggtccattcaattaaatccacaattttaaagttaagagaaaataaaaataagattttcttattatctcattttggcagaccaaaaggaaaatttaataaaaaatattcactagaatttttgtgtgatgtcatcaaagaaaatttaaatcttaataaaatatttttttcaccttctgtaaatgagaaagatttaaattttacacaaagccaaatggctgatggtgacatttgtttaattgaaaatataagatttagtgagggcgaagaaaaaaatgatttagatttttccaagtatctttctcaattttttgatttgtatgttaatgatgcattttcagcttcgcatagggaacatgcatcaatagttggagtgttgaaatttttgccagctttcgctggtagtgcatttattaaagaaattaaaaatttaaatatatttattgaaaatccaaaaaagccaacaacttgcattcttggcggatcaaaaatatctacaaaattatcattaatagagaatttaatcgagcattccgattatattatta

SEQ ID NO: 250090 - DNA, 153 bp, Unknown
  Bacterial polypeptide expressing nucleotide sequence isolated from the Sargasso Sea
gactcctgtggctgctcgcctgagcgaactgctgggcaagcccgtgatcaagaccgacagctgcatcggacctgatgccgaagccaaggtgggcgccatggccaacggtgatgttgagctgctggaaaacgttcgcttcttcgctgaggaaga

SEQ ID NO: 250091 - DNA, 319 bp, Unknown
  Bacterial polypeptide expressing nucleotide sequence isolated from the Sargasso Sea
tttaatattagatattgggcctaagactataaataaaattaaaaatattattagaattagtgaaacagttttatggaatggtccagctggctattttgagaatccaaattttgcaaatggtagttacgagattgcaaaagctattataaaaaaaaataaagatagatcaatttactctgttgttggaggaggagatacaatagctttaataaataaaattaatgcaatcgaaaatttcaactttgtttcaactgctggtggtgcatttttagaatatcttgaaggaaaagaacttcctggtataaaagctcttaattag

SEQ ID NO: 250092 - DNA, 883 bp, Unknown
  Bacterial polypeptide expressing nucleotide sequence isolated from the Sargasso Sea
tttgtgaaagtttgggaaaaaaaactaacaaaaaaaattgagcttatcaaagatgatatttacgaattaagtaaaataaatatgtttgcaaattctgaatataaaataaaattccttgaaaatataagattttatgcagaagaagaagataatgacaacaatttttcaaaaaaactcgctagtcttggagatttatttgttaatgatgcattttcctgttctcatagagcgcacgcatcactaagtaaaatcacaaaatttttgccctcctacggtggtttacaactagaaactgagatgaatgctttaaaaaaattaactttagaaatcaaaaaaccgataacttgtataattggaggatctaaaatatcaactaaatttccaataattaagaatttaatacctaaatttgataatattataatagttggaggaatggctaacaatatattgaaatataaaggttatccgattggtaaatcaattcgagaagatggttgtgaagcaattattaatgatattttcaagttatctaaaaatcactcatgttctgtaattttccctaaagatgtattagttggtaaaaaaaaggaagataaagcaaaaactaaaaatttaaacgaaataagtgatgatgatttaattttagatattggtcctaaaacaatacaggaaataaatagtatagtagactcaagcaaaactattctatggaatggtccagctggctattttgaaaattctcattttgctaaagggagttttgagattggaaaaaaaattgctgaaaaaaataaattaaaccaaatcttttcagttgttggtggtggagatacagtagcactaataaataaaattggcatttttaattcttttaattttg

SEQ ID NO: 250093 - DNA, 442 bp, Unknown
  Bacterial polypeptide expressing nucleotide sequence isolated from the Sargasso Sea
agaaattatttcactttcaaaagagaaaaattgtaacttaatttaccctcaagacgtgcttgtttcaaaaaatttgaatggatcagctcaaaataaagaattagatcaaattaattcaaatgaaatgattttagatataggtcctaaaactattaataaaataagaaatattattgataaaagtaaaactatattgtggaatggaccagctggatattttgaaaatcctgattttgctaatggaagtatagaaatagcaaaaaaaataattgaaaaaaacaaatcaaacaaaattttctcagttgtgggaggtggagatactgttgcatttttaaataatcttaacgttgttaataattttaactttgtttcaactgcaggtggagcttttttagaatatcttgaaggtaaaaagctacctggtataaccgctctagattga

SEQ ID NO: 250094 - DNA, 610 bp, Unknown
  Bacterial polypeptide expressing nucleotide sequence isolated from the Sargasso Sea
ggatcaaaaatttctacaaaaattggcgttttattaaatcttataaaaaaaatggataacataataattgtaggtgcaatggcaaataattttataaggcacaaaggatttaaaattggaacgtcgctttttgaaaaaaatcaagaaaatttattaaacgatattataaaaaaatgtgaaataaacaattgtaatttaatattaccaaacgatgtgattgtttcgaaaaatgttaattctaaaggacagctaaaaaatttagatcaaattaatgacgatcaatctattttagatattggtaaaaaaaccatagaaaatatttctaaaataattgatgagtcaaaaacggttttgtggaatggtccagctggttattttgaggttaaagagttttcaacaggaagcaacgaaatagcaaaaaaaataaccgaaaacacaaaaaataaatctttaatatcaattgcaggcggtggggatactgctgcagctattaaaatgttcaaatatgaaaataactttacatatatatcaactgctggtggagcttttttagagcttcttgaaggaaaaattttacctggtataaaagctttagaactaaatgagtgaa

SEQ ID NO: 250095 - DNA, 747 bp, Unknown
  Bacterial polypeptide expressing nucleotide sequence isolated from the Sargasso Sea
aaaaatattaacgagctttctctcaaacctattagtgaagatattaaaaagaaaataaatctaaatataaaattaattacaaaaaatattaaagaaataagttcaaaagatatttttattaatcctgatgaaaaaatattaatttttgaaaacatcaggttttataaagaagaagaagaaaacgataataattttgctaaacatatttcaaaactagccgatatatacgtgaatgatgcattttcttgttcacacagagcacattcatcaattcataagttgccaaaatttcttccctcttattcaggtttgcagttgaattctgaactttatgctttaaaaaggctaacctcagaaattaagaaaccaataacatgcatcattggtggttcaaaaatatctacaaaaataaatataattaaaaatttaatttcaaaatttgataatattataattgttggaggtatggctaacaacatactcgaatataaaggttttgaaattggaaaatcaataaaagagaaagattgtgtcaaacaagttgatgagatatttaatttttctaaaaaaaaaaaatgtaaaattttttttccagaagatgctcttgttggaaaaagtttaaatgactcatcaaaaacaaaagatttaaaagatatatctaatgatgaaatgattttagatattggtcctaaaactattagtacaataaaaaatataataaaaactagtaaaacggtactttggaat

SEQ ID NO: 250096 - DNA, 328 bp, Unknown
  Bacterial polypeptide expressing nucleotide sequence isolated from the Sargasso Sea
atgattttagatgttggtcaaaaatcaattgaacttttcaaacaggctattaatgctagtaaaactattttatggaatggcccgctgggtgcatttgagattaaaccttttgacaattcaacaaatttactagcaaagtttactggccaaaatactatactagaaaaatgcatttcagttgctggtggaggtgatacagtctcagctctaaactcagttaaagtaactaaacagttttcttatgtgtcttcggcaggaggtgcttttttagagtggcttgaggggaaaagacttccaggtatcgaagcaataaaatcaagtaaatgaa

SEQ ID NO: 250097 - DNA, 499 bp, Unknown
  Bacterial polypeptide expressing nucleotide sequence isolated from the Sargasso Sea
aattctttagttgaagaaaatttagctaaagaagcattgataattcaaagaaaagctaaaaaatttaattgtaaattaatattacctacagatgtagtttacggaaaaaatattgaagataaaaaacccattaattgcaagattgaaaaaataaaatcaaataaaatgatcttggatataggaattgatacaataaataagattaattatgaaattttaaaatcaaaaatggtattatggaatggtccagttggagcttttgaatataagccttatgataatgcaacaaatgaaattgcaaagacattaaaactaaatgcaaaaaaaaataatattattacactagctggtggaggtgacaccattgctgctataaaaaattccaatgctgaagatagcttcaattatatctcgaatgccggaggagcttttttagagtggcttgaaggaaatgagtcacctggcgttatcgccctaaaagaaaacaagttgatttagt

SEQ ID NO: 250098 - DNA, 906 bp, Unknown
  Bacterial polypeptide expressing nucleotide sequence isolated from the Sargasso Sea
actggagaaaaataaaactgtattaataagatttgaccttaacgttccacttaattctattgacgactatataagtgatagaataatcagaataaaaaaacctattttaaatctgttgaatggaaataataaagtcattattttatctcacttgggtaggcctaaaggaaaaataagggatgaactatcattgcaacaagtagttcctcagctagaaagagttcttgaaaaaaaaataaatttcttaccagattgtattggaaatgaagtaaaagacaaaattaattcgcttgcaaatggaacaattattttattagaaaactgtagattctataaagaagaggaagagaatgatcatgactttgcaaaacagttatctgagttagctgatgtttacataaatgatgcattcgcctgttcgcaccgcgcacatgcatcaattgaggcaatatcgcatttcatgccttcatattgtggcgatcttcttgaagaagaaatagttaatttgcaagaagtgattcatgaacctcttggtcccgctcttacaataatagggggttctaaaatatccacaaaaattactgttcttaaaaatttatcaaaaaaaatggacaccattgttatagctggtggtatggcaaataactttttgaaatatcatgggtataatatccaaaaatcattgcatgaagaaaatgtcgatcacttaattggagaaatattagatttttcatcaaaaaataattgtaggttagttttgccaattgatgcagtcacagctgataaaatttcaaacaaagcagacactaaagagtctgatattgataatattgaagaacaaaatatgattctggatataggcaaaaatacagtgaaattaataaaaaatgaaattagtaaatctaa

SEQ ID NO: 250099 - DNA, 481 bp, Unknown
  Bacterial polypeptide expressing nucleotide sequence isolated from the Sargasso Sea
attggagtctggtttaaaaattttttctaacgatattcatatcaataacaaacgtgttattgttagattggatctcaacgtcccaattaataattcaaagatagaggataccactagaattaaaattattgagccgtttataaacaaattaattgaaaataaagctaaaattattttgatatcacaccttggaaggcctaaggggaagatggttccagaactatcgctgagcccaatatttaattatttggaaaaaaatttaaaagggaaaatatatttttataaaggaaaaattgactcgaaagcagtagaggcttctaacagattaaaacctggggaagtattgttaattgaaaatgtccgcttttttaaagaagaagaaagtgatgatgaaaattttgcaaaagatcttggaaaacttggagatctttttgtaaacgaagctttttcttgctcacacagaaaacaagcatcaatacac

SEQ ID NO: 250100 - DNA, 720 bp, Unknown
  Bacterial polypeptide expressing nucleotide sequence isolated from the Sargasso Sea
gaactgctcaccgcaaacaggcttccacatattcagctattcaacaagcaagtttttcatgtgctggacttctcttagagaaagagattaattcacttaataaagctttaacctctattgaaaatccattcactgctgtaatcgcaggttcaaagatttcaacaaagcttgaacttataactcatttaaattcaaaagcaaaattcattattgttggcggcgggattgctaatacctttctgaaatctcagggcttcaatgtcggagaatctttggtagaaaatgacatgattgaaattgctaaagagctttttaattccggcaaaataatattacctaataaagtcattgttgctgattcaattgatagcaattcttcaactatcaaaaatatagattctgttagcggttcggataagattttcgacattaatttaaccagcaatatgtcggaaatcctcaagaactcaaaaaccattttatggaatgggccaataggagtttttgaaaaagaaccttttcagaaaggcacatatcaattagctaaaactattgcaggatctgaggctttttcacttgctggaggtggagaaactctagctgcaataaataaatttattaataaagatgaggtatcatactgttctacaggcggaggtgcttttttagaatatatggaaggcaaattactgccatcaattgaggctttaggaggctaaa

SEQ ID NO: 250101 - DNA, 775 bp, Unknown
  Bacterial polypeptide expressing nucleotide sequence isolated from the Sargasso Sea
atatataaacgatgcttttgcgtgctcacaccgatctcatgcttcagttgctgcaataacaaactatcttccctcctattgtggtaatttattatctgaagagcttttaaatttagctgacgtaattcagatgccgttgagcccatctattacaattatgggtgggtcaaaaatatctacaaaaatctctattcttaaatcattatcaatcaaaatggatacaatcataattgttggaggtatggcaaataattttattaaatatagtggtcttaatgtaaaaaattcacttattgaaaatgatgtagatgatctaataaatcaaatttataaatttgctgaggataataattgtaaaataattactcccattgatgtaattacagcaaaagaagttaagaaagatattgagactgtgacatcagcaattgatgaaattaaagaaaacaatatgattttagatattgggcctcagacaattgaattaatcaaaaaagaattgtcatatgctaaaactgttttttggaatggtccagcaggagtatttgaaatacctccatttcaagtaggtactttagaaattgctaaatacattgctgacttatccacaaaaaatttaataaaatcatttgcaggtggaggtgatacaatagctgcattggaaatggcaaatgtaaaaaatgaatttagttatatttctactggaggtggagctcttcttgagttattagaaggtagaaagttaccaggtttgaaagcattaaatatattataa

SEQ ID NO: 250102 - DNA, 472 bp, Unknown
  Bacterial polypeptide expressing nucleotide sequence isolated from the Sargasso Sea
gaaatgagagtagaaaatataattaaagatatttttgaattgtctataactcatgattgtaggatttattatcctgaagacgtcatggtttctaaggaaattaacggatcaccagaagaaaaaagaattaatgaaatatcagatgatgatttgattttagatattggacctaactctataaatactattaatagtataattgaaaaaagcaaaactattctttggaatggacctgctggatattttgagaaccctaaatttgcaagaggtagtcttgcgataggaaaaaaaattgcagaaaaaaataaatcaaataatttattttcagttgctggaggcggtgatactgtctttcttttaaataaaattggcatatttaataattttaattttgtttcaactgctggtggagcattcttggaatatcttgaaggtaaagaactacttggtataaaagctttaaaacaatgac

SEQ ID NO: 250103 - DNA, 181 bp, Unknown
  Bacterial polypeptide expressing nucleotide sequence isolated from the Sargasso Sea
attataaagagaaaaaaagaaaataaaatttactgtgtttctggtggtggagatactgtggcagttctcaataattttggattagtaaaggattttgattttgtttcaactgctggtggagcatttcttgaatttcttgaaggaaaagagcttcctggtataaaggcacttaattcatgac

SEQ ID NO: 250104 - DNA, 646 bp, Unknown
  Bacterial polypeptide expressing nucleotide sequence isolated from the Sargasso Sea
aaagttacaacagaaatcaaaagaccaaccacctgtattatcgggggatcaaaaatctcaacaaaaattggaataatcaaaaatttgatatctaaatttgataatcttatcattgtaggtgggatggctaataacattattaaatacaaaggaaaccaaataggtaagtcaattaaagaagaaaattgcgatctaatgatcaaagagatttttgaaactttaaaaagtcattcttgtaaaattttttttcctgatgacgtgttaattggaaaaaatttagatgatgaacctcaaatcaaagagctaaatgatattcaagatgatgatatcattttggatattggtcctaaaacattagataagataaaaaagattattgagaatagtgaaacagttctttggaatggaccagcgggttattttgaaaatccaaattttgctaatggcagttacgaaattgctaaagctattacaaaaaaaaataaaaataactctctttactcagttgtaggaggtggagatacgattgctcttattaataaaattaaattaatagaaaattttaactttgtttcaactgccggtggagcatttttagaatatcttgaaggaaaagagttacctggtataaaagccttaaactaat

SEQ ID NO: 250105 - DNA, 630 bp, Unknown
  Bacterial polypeptide expressing nucleotide sequence isolated from the Sargasso Sea
taacaaaacctataacatgcataataggagggtctaaaatttcaactaaaatagatattattaaaaatttaataccaaagtttgataacattataattgttgggggtatggctaataattttattgaatattttggaaataacattggaaaatcgataaaagaaaaaaattgtaatgaaataattgaggtaattttatcactttcaaaaaaaaaagaatgtaaaataatttatcctgaagacgttctagtatctaaagattttaatgggtcttctataaacaaagagttagatcaaatcttacctgatgagatgattttagatattggtccaaaaacagtcaataaaataataaatataattgatagtagtaaaacaatattatggaatggaccagctgggtattttgaaaatccaaattttgctaatggaagcattaaaatagcgaaaaaaataatcgaaaataataaatcaaacaaaattttttctgttgtaggtggtggagatactgtttcattattaaatagcttaaaaattgttggtaattttaattttgtttcaaccgcaggtggagcttttttggaatatcttgaaggcaaaaagcttcctggtataaccgctttaaattgat

SEQ ID NO: 250106 - DNA, 522 bp, Unknown
  Bacterial polypeptide expressing nucleotide sequence isolated from the Sargasso Sea
aaggagcaccgatgggaaattcactatatgagcccaatttgaaagaaacagcaaatgatatactcacttatagtaaacaaaaaaattgtaatatacttttaccaatagatattgttacagcacgcaaattagaacaaaacactaaaacaaatacatccaatcatgatgaatgtcctgcagaccaaatgattttagatgttggtcaaaaatctattgaacttttcaaaaaagcaattaactcaagcaaaacaattttatggaatgggccgcttggtgcatttgagattaagccatttgacaattcaacgaatttactagctaagtttactggcaaaaatactatgcaagaaaaatgcatttcagttgctgggggaggtgatacagtctcagctctaaattcagtaaaagtaactcagcaattttcttatgtttcttcagcaggaggtgcatttttagagtggcttgaaggtaaaaaacttcctggaattgaagctataaaatcaagtaaaagaattatttgaa

SEQ ID NO: 250107 - DNA, 904 bp, Unknown
  Bacterial polypeptide expressing nucleotide sequence isolated from the Sargasso Sea
attattccagtaattaattttttactgaagagaaaaacaaaaatattagtaatatctcatgtgggtagaccaaaaggtaaaaaaaataatgatctttctctaaagcctatttgtttaaacatagaaaaaaaaataaaaaaaaaaataaaacttgttacttctaatttatatgaaataacaaaagataaactatttatgcaggaggaggagataatttttttagaaaatatcagattttatcgagaagaagaaattaacgactctaagtttgctaaacaaattgcaagtttgggagatttttatgtaaatgatgctttttcatgctctcacagagatcatgcttcagtttccaaaattacaaaatttttaccatcatatgctggattacaactgcagtctgaaattaatgcgttaaaaaaaataacatctgatattgaaagcccaatcacttgcataattggtggatctaaaatatcaacaaaaataggattaattaaaaatctaacaaataaattagataatttggtttttgttggcggtatggcaaataatattttaaattttaaaggttttaaaataggcaaatctataaaagaggaccattgtaataatataatcgatgatatttttataaacgctgagaaaaacttttgtaaaatatattatccagaggatgtgtgcgttggtaagaattttgatagtcattctgagattaaaagtcttaaagatatatcgaaagaggatataattttagacatcggaccaaaaacagtagaaaaaataaagaaaattatagaaaacagcagaactgtcttttggaacgggcctgctggttactttgaaaatgaaaattttgagaatggaagtttgcaaatttgcaaaattatgaaaataatacaaaaaa

SEQ ID NO: 250108 - DNA, 837 bp, Unknown
  Bacterial polypeptide expressing nucleotide sequence isolated from the Sargasso Sea
tatgggaaaatggaatgagaagctgtcattaaaacccgtttgtgattatataaaaaaaaaaattaacaaaaaaattaaacttatcaccgaaaatatatttaaattaaataaaaaaaaattatttttaaattgtgatgatgaaatagtatttttagaaaatataagattttatgaaaatgaagaagaaaatgatgagattttttctaaacatctggctagtcttggagatttgtttgtcaatgatgctttctcatgttctcacagatcgcacgcctctataagcaaaattaccaaatatattccttcctacgtaggtatgcagtttgaaactgaaataaatgctttggaaaaaattaccgagagtataaaaaaaccaattagctgtataattggaggttctaaaatttctactaaaatttctgtattaaaaaacttgattccaaaatttgacaacatcattattgttggaggtatggcaaataatattcttaaatataaaggttatattatcggtaaatctatttatgaacataattgtgaggagatggtaaaagatatatttaatacatcaaaaaattattcttgttcaataatttttcctcttgatgtttctgttggaaaaaaaatagatggtaactcaaaaattaaagaattaaatgaagtcgaagatgatgatataattttagatattggtcctaaaaccgtaagaaaaattgcttctataattgatgaaagtaaaactattttatggaatgggcctgctggatattttgaaaaccctaattttgcaaaaggaagttttgagattggaaaaaaaattgctaaaaaaaataaatt

SEQ ID NO: 250109 - DNA, 316 bp, Unknown
  Bacterial polypeptide expressing nucleotide sequence isolated from the Sargasso Sea
attctggatattggtcctaaaacattaaataaaataaagaatataattgagaatagtgaaacagttctttggaatggaccagcaggttattttgaaaatccaaattttgctaatggcagttatgaaattgcaagagctattataaaaaaaaataaagataattcaattttctcagtcgtaggaggtggagatacagtagctcttattaataaaataaaagtaattgaaaattttgactttgtttcaactgccggtggagcatttttagaatatcttgaaggaagagagttacctggtataaaagctttaaattgaa

SEQ ID NO: 250110 - DNA, 725 bp, Unknown
  Bacterial polypeptide expressing nucleotide sequence isolated from the Sargasso Sea
cttgggggatatatatattaatgacgcattctcttgttcgcacagagcgcatgcttcaatttgtgagattccaaaattcttaccctcattttctggactgcaactagatttagaagtgaatgcacttaacaaaataacttcaaaaattacaacaccaattacttgtattattggggggtctaaaatttctactaagattaatgttatcaaaaatttaattcctaaatttgataatattgtaattgttggagggatggctaacaattttatagaattttatggaaataatatcggaaaatctattaaagaaaaaaattgtgatcaaattgtaaaagaaataattgatttctcaaaaaaagagaagtgtaaaataatgtatccagaagatgttattgtatctaaagatttaaacggatctcctcaaaaaaaggagttgaacgaaatattgtctaatgaaatgatattagatattggtccaaaaactataaaaacaataacaaatataattgataatagtaaaacaatactttggaatgggcctgctggatattttgaaaatccaaattttgccaatgggagtattcaaatagcaaaaaaaataattgagaataataaagcaaacaaaattttttcagttataggtggtggagatactgtttctttattaaataatttaaaagtagttaataatttcaattttgtttcaactgcaggtggagcttttt

SEQ ID NO: 250111 - DNA, 266 bp, Unknown
  Bacterial polypeptide expressing nucleotide sequence isolated from the Sargasso Sea
aatgaataatcttttggataaaaaattatctcttaaagataaaaaagtattattaagggtcgacctaaatgttccaattaataataaaacaataactgaaacctctagaataaaaaaaattttaccaacaataaaactattaatagaaaaacaggcaaaaattataattttatctcacttgggacggccaaaagggcggattgttgaaactatgactttaaaacctatttcggaaaaattagcttctttgttaaataaagaagttt

SEQ ID NO: 250112 - DNA, 232 bp, Unknown
  Bacterial polypeptide expressing nucleotide sequence isolated from the Sargasso Sea
ggtgaagtattgttgcttgaaaatatcaggtttaccaaagaggaggagttaaatacagcttcttttgcaaaaaaactttctgagttaggtgatatttatgtaaacgaagctttttcatgttctcacagagctcatgcttcagtttgcgaaataacaaatcacatagattcatatgcaggaagattattaaaagaggaagtaaatatgataaaaatgttaaccgacaaagcca

SEQ ID NO: 250113 - DNA, 618 bp, Unknown
  Bacterial polypeptide expressing nucleotide sequence isolated from the Sargasso Sea
gttcaaaaatttcaaccaaaattaatctattaaataatttggtacagcattttaattgtgttgttattggtggagccatggctaatacttttttattgtcaaaagatattaaagtaggtgagtcattagttgaaaaagatttagttgatgtggcaaaagatattcaaaaaaaagccaatcagtttaattgcaaactaatacttcctcttgatgtggtttgtggaaaaagtgttgaagacaaagaacaaatagagtgtgatattaatgatattttgcaaaactatatgattttagatttaggaacaaaaactactgctttgattaatcaagagattaaaaattcaaaaatggttttgtggaatggtcctgttggagcgtttgaatacaaaccatatgataaggccacgaatgaaattgctcttaatataaaaaataatgcaaagaaatttggtataaacactcttgctggaggaggagatactttttcttcaatcaagaatgcaaatgctgaagatggttttgattatatctccaatgcaggtggtgcatttttagaatggttggaaggcaatcaatctccaggagttatagcgttaagagaaaataatttaagctaat

SEQ ID NO: 250114 - DNA, 206 bp, Unknown
  Bacterial polypeptide expressing nucleotide sequence isolated from the Sargasso Sea
cggtaccaacgccgtagccagcgaagcggcgcgtctaacccagaacggtctcctgctgagtgtcgctggcggtggcgacacagtcgcggcgctggccaatgcgggcgcggtggatcacttctcctacgtctcgacggcgggcggtgcgttcttggaatggctggaaggcaagattcttcctggggttgcagctctagaaaagtaag

SEQ ID NO: 250115 - DNA, 833 bp, Unknown
  Bacterial polypeptide expressing nucleotide sequence isolated from the Sargasso Sea
agttaatttcattctagaatcaggtgcccgcttgataatcatgagccatctaggaagacctgaagaaaacaacatgtttcaagaggaattttctttagcacctgtagttaaggaaatggaaggtctattaaatatgcaaatccctctttactccttgagtgagattgaaggtttagatcaggttgatcatatttcaattatagaaaatacccgatttaatattggcgagaaaaacaacgatatagaattatcaaaaagattggcagctttggccgatgtgtttgtcatggatgcatttgcgacttcccatagggcccatgcttcgactactggagtaataacattttctgatgatgcctgtgcaggatttctcttggatgaggagctaactgctctatcaaaagtaaaagaaaacgcaaaaagctctatagctgtcttgggtggtgcaaaaatctcaacaaaattaagtcttattgattcgctttccaaaacagtggataaagtaatccttggtggaggtattgcaaatacttgtttagcagctaagggttatgaggtgggtaagtcgctaattgaagattctatgctagaagaagctaaagaattggtagcaaatcctaaaataataataccggaatctgtaattgtttctataagtgctgacgagcccgggagaatcacttctgctaactcgatacaggaaaatgaagcaatattcgacatagctcctgcttcctttgttgatttggagccaattattatgaacgcaggaaccattttatggaatggaccgctaggtttttttgaaaaagagaatttttttgctggcacag

SEQ ID NO: 250116 - DNA, 604 bp, Unknown
  Bacterial polypeptide expressing nucleotide sequence isolated from the Sargasso Sea
atgtctgatttgaaatttttttctaaagacattcctgtcaataacaaacgtgttattgttagactagatctcaacgttccaattaacaattcaaaaatagatgattataccagaattgaagtcgttgagccttttataaatcaactaatagaaaataaagctaaagttgttttgttatcacaccttggaagaccaaagggaaaagtggtttcagaactatcaatgaggccaatatttaattatttagaaaaaaagttgaatggaaaagtttatttttatcaagaaaaaattgactccaaagcaatagatgcttcgaataaattaaaacctggagaagttttgttgtttgaaaatattcgtttctttaaagaagaagaaagcaatgatgaagtttttgcaaaaaatctttcaaagcttggtgacatttatataaatgaagctttttcttgttcgcatagaaaacaggcctctgtgcataaagtaactaaatttattgatagctatggaggtcctattttagaaaaagagattcaatcaattaatttaataataaaaaacaaaaaaaaaccagtcacttgtataattggtggctctaaagtttcga

SEQ ID NO: 250117 - DNA, 640 bp, Unknown
  Bacterial polypeptide expressing nucleotide sequence isolated from the Sargasso Sea
acttcagaaataaaaaaaccaattacgtgtataattggcggatctaaaatttctactaaaataaatgtaattaataatttaataaagatttttgataatattattatagttggagggatggcaaatactatacttaaatataatggtcataatataggaaaatcaatatgtgaaaatgataaggaaagtttaataaaagaaatttttgaaaaatcaaaaaaatataattgtaaaattattagccctgtagatgttgctgtgtctaatagttttgaaggtttgccaaaatataaagatctttataatgttgaaaatgatgaaatgatattggacattggtccaaaaactatttcttctattgaagaaacgattaaaaaatcaaatacagtcttatggaatggtcctgctggttattttgaaaatccaaattttgaaaagggaacaaaaaaaattttaaatataatttctgagaaaactattaaagacaatattttttcagttgcaggtggaggggaaactgttgcagctatcaataaatttaaaaaattagattcttttacttttgtttcaactgctggtggagctttcttagaatttcttgaaggtaaatctttacctggtataaaagcgataatttaaa

SEQ ID NO: 250118 - DNA, 255 bp, Unknown
  Bacterial polypeptide expressing nucleotide sequence isolated from the Sargasso Sea
tcttatggaatggaccaatgggtttgtttgaaaagaattctttcgcagaaggaactaatgcagtggctaaaatgattgtttcatctaatgggttttcggttgctggtggaggagataccatatctgcagcttcaaaagctggcgtattagatgaacttgattatgtttcaacagctggtggagcctttttagaatttattgaaggaaggaagttaccttctttagaagctttacaattaaagctgaaaaattaaa

SEQ ID NO: 250119 - DNA, 861 bp, Unknown
  Bacterial polypeptide expressing nucleotide sequence isolated from the Sargasso Sea
atacaaaaattgttgttatttctcatattgggaagaccaaaaggagtattagacaataatttatccttaaagcctgtttgtgaacatataaaaaaaaaactaaataaaaatattaaacttatcaaagaaaatatatttagattaaataaaaaaaaattatttgtaaatccacaggatgaaattctttttttagaaaatataagattctatgaaaaagaggaaaataatgatagtaatttttctaagcatttagcaagtctaggggatttatttgttaatgatgctttttcttgttcccatagagctcacgcatcaatatgtaagataacagaaaatattccttcatatgcaggtattcaatttgagactgaaataaatgctttaaaaaaagttacctcagaaattaaaaaaccaatcacgtgtataataggaggatctaaaatttctactaaaatttctattattaaaaattttattccaaaattcgataacatcataattgtaggcggaatggcaaataatatattgaaatataaaggttatactattggcaaatcaattcatgaggctaatagtgactcaattattgaagatatatttaaaacttcaaaaaattatccttgctcaataatttttcccgaagatgttgcagttagtaaaacaagagaaggtaatgcaaaaataaaagagctaaatgatatcgaaaatgatgacttaattttagatattggtccaaaaacaatttataagattagctctataattgatgagagtaaaacgattttatggaatggacccgcgggttattttgaaaatcctcaattttctaagggaagttatgcgattggaaaaaaaattgct

SEQ ID NO: 250120 - DNA, 847 bp, Unknown
  Bacterial polypeptide expressing nucleotide sequence isolated from the Sargasso Sea
aatgaataaaataaaatatttttctgaaaatttagatgttcagagtaaaacaataattcttagacttgatttaaatgttccattaaataaaaaaaaaattcaggataaaagcagagttttggcaagtttgccttttttaaaagacttaataaaaaaaaaagcaaaaataattattataagccatttaggaagaccaaaaggtgtaaaaaataatgaattgtctctagcaccaatttataagtttttaaaagagcagttaggaacaaatgtatatttttttatgggaaatataaatgaagagataaaaagtaaattttcatacttaaaagaaggtgaaattattctattagaaaatattagattctataaagaagagagtgaaaatgacgataactttgcaaaaaaacttgcttcacttggtgatatttatattaatgatgctttttcttgttctcacagagagcaagcttctattcataaaattacaaaatacataaaagaatcctttgcaggtccgcttttaaaaaaagaagtaacagcaataaatgcaattattgaaaataaaaaagagccagtgacatgtatcattggagggtcaaaaatttcaacaaaaataaatgtaattactaatttaataaaaaaagtaaataatattattattgttggagctatggctaataattttttaatcttcaaaggttttaaagttggaaaatcactagtagaaaaaaattctacaaagataattaaaagcatatacactgaagctaaaaaacataattgcaatattgttatacctgaagactgtagtgtctccaataattttgagggatctggagaaacaaaa

SEQ ID NO: 250121 - DNA, 760 bp, Unknown
  Bacterial polypeptide expressing nucleotide sequence isolated from the Sargasso Sea
aatatatgttaatgatgcattttcgtgttcacacagagatcatgcctctgtatcaaaaataacaaagtatattccatcttatagcggaattcaaattaatgaagaggtaaatgctcttaataagataacctctgaaataaaaaagcctataacatgtataattggtggatctaaaatatcttcaaaaataaatataataaaaaatttaataccaaaatttaatagcattataatagttggtgctatggcgaacaatatattgaaatacaaaggtttaaaaattggtaactctgtatatgaaaaaaatattgattacataatccaagaaattttcacatatgctgaaaaaaataaatgtaaaatatattttccgaaagatgttaaaattggaaaaaaattgaacgataagtcttttgaaaaagattttaaagatattgaagatgatgatatgatacttgatgtaggatcaaaaacattagttgaaataaaaagaattattgacgattcatcgacaatattatggaacggtccattaggttattttgaaaataaaaatttttctttagggagctcagaaatagcaaaacatattgcaaataaagggaataaaatttattctgtagttggtggaggtgacacagtggcaatcattaatacattaaatatgagcaacaaatttaattttgtttcaactgcaggtggagcttttttagaatatcttgaaggcaaagttctccctggtataaaagctttaaattaa

SEQ ID NO: 250122 - DNA, 541 bp, Unknown
  Bacterial polypeptide expressing nucleotide sequence isolated from the Sargasso Sea
catggctaatacatttttattatcaaaagatatatcagtaggtaaatcattagttgaaaaagatttagttgatgttgcaaaagatattcaaaacaaagccaatcggttaaattgtaaattaatacttcctcttgatgtgttttgtggaaaaagtactgaagataaagatcccatagagtgcgatattaatgatatttcacaaaactatatgattttagatttaggaacaaaaactaccgctttgattaatcaagaaatcaaaaattcaaaaatgattttgtggaatggccctgttggagcatttgaatataaaccgtatgataaagcgactaataaaattgcttttaatataaaacaaaatgttaagagatttggtataaacgctcttgctggaggaggagatactgtttcttcaatcaagaatgtaaatgctgaagatggttttgattatatctctaatgcaggtggcgcttttttagaatggttagaaggcaatcaatctcctggagttttagcgctaagagaaaataatttaagctaa

SEQ ID NO: 250123 - DNA, 701 bp, Unknown
  Bacterial polypeptide expressing nucleotide sequence isolated from the Sargasso Sea
ggaaatagataaaattccaaatggttctgtaataatgttagaaaatatccgatttcataaagaagaagaagcaaatgacaatgaattttcaaaaaaaatatcctcattgggagatatatatgtaaatgacgccttttcttgctctcaccgatcacacgcgtctgttgaaggaatcacaaaatatataccttcgtattacggtcttcaaattactgaagagattaatgctttaaaaaaaataacttcagaaattgaaaaacctgtttcacttataattggaggatcaaaaatttcgacaaaaattaaaattataaacaatttaataaaaaaatttaataatattataattgtaggaggtatggccaatacaatgctaaaacactctggaatcaatgtaggaaaatcaatatgtgaaaatgaatgtggctcattaattaaggaaattgtagaaaattcaaaaaaatataactgtgaaattatcactcctaaagatgtaattgtttctgaaagtttagatggaaaaggtttggaaaaaaatataaatgaaattgaagaaaatgaaatgattttagatattggaccaaaaacaatatctaatattaaagaaaaaataaataactctaaaactgttctctggaatggtcccgctggatattttgaaaatcctaaattttcaacaatggaactaaaaaaattttaga

SEQ ID NO: 250124 - DNA, 678 bp, Unknown
  Bacterial polypeptide expressing nucleotide sequence isolated from the Sargasso Sea
atgatgcatgtgcaggtttattgttagatgaggaattaaatgctttatcgaaagtaaaagaaaactcgaaaaattcagtagcaattcttggcggtgcaaaaatatctaccaaacttactcttatagactccctttctaaatccatggataagattatcctaggaggaggaatagctaacaccctcatagcagcaaagggcaatgaagttggtaagtctttaatagaagagtctatgctaacagaagcagcaaaactgttagaaaattctaaaataatagttcctaatttcgtgatagtttcagataaccctgacaaacctggaagactcacctctatcgattctatagaaaaaaatgaagcaatttttgatatttcacctgaatcgttcgctgatttggagacaatattaatgaatgcgggaactattttgtggaatggcccgcttggattctttgaaaaggaaaattttgataaggggacaataaaaatagctaaaatgattagttcttcgaacggcttttcagttgccggaggaggcgataccatcgctgcagcgcaaaaggccggagttttgggcaaactggattatgtttctacagcaggtggggcattcttagaatttatggaaggaaaaaaacttcctggagttgaggctttgatagataaagtaaattaaa

SEQ ID NO: 250125 - DNA, 323 bp, Unknown
  Bacterial polypeptide expressing nucleotide sequence isolated from the Sargasso Sea
ttggatattggtccaaaaacaattttctataattaaaaaaatagttaacacttcaaatacagtcttgtggaatgggccagcaggttattttgaaaatccaaatttccaaaatggcactaaagaaatacttgatatgatttcagaaaagacgactaatgataaaatttattctgttgctggtggaggcgaaacagttgcagcaataaataaatttaaaaagatagattcgtttacatttgtttcaactgctggtggagcttttttagaatatcttgaagggaaaactttacctggtataaaagcattaaatcaagatgtctgaa

SEQ ID NO: 250126 - DNA, 766 bp, Unknown
  Bacterial polypeptide expressing nucleotide sequence isolated from the Sargasso Sea
tttacggctcaaagttgatgaggcaataaaaaatcaaaaatcaaaaatatttcttctcgagaacctgagatttgatgaaggtgaaataaataatagtttagatttcgctgcgaatgtaacaaagccctttcaaacatatatttttgatgcatttggggcagctcatagagagcatgcatcagttgtaagctttgggaattatcttgactcttatcaaggaccactgatagacgaagaattaaaggaattaaacaaaatattagatacaaataaatcaggatattcggttttacttggaggcgcaaaaatatcagataagttatctttaattgagaatttacttccaaaagtagaaaaattaatgattggtggaggaatgtgtttcacatttctaaaagcacttggttatgaaattggcaattcgatttttgaagaatcgtttgttgcaaaagctaaatttttaatggattcaaagtacggagacaaaatagtattacctactgattttggagttactgaatctattgaaagtaatattcgatcaaatataaaagttgaagatttccaagaaaaccacattggagtagatattggaaatgaaacgttgtctgaattttcaaatatattaaatgcttcaaaatatattttttggaatgggccgatgggtatttttgaaattgatgaatacagtactggtacgagagaaatacaaaagttatttcaatgtcaaaagcatattctttctgtggagggagagactctgtga

SEQ ID NO: 250127 - DNA, 269 bp, Unknown
  Bacterial polypeptide expressing nucleotide sequence isolated from the Sargasso Sea
ttatcaaagtaaaacaattttgtggaatggaccagctggttattttgaaaaccctcaattttctaaaggaagttttgaaattggaaatcaaattgcaaatcaaaacaaattagataaaattttttctgtagcaggtgggggtgatacatttgcactaattaacaatattgatatttttaataattttaattttgtttcaaccgctggtggagcatttttagaatatcttgaaggtaaagaattgcctggtataaaggcattaaactaat

SEQ ID NO: 250128 - DNA, 204 bp, Unknown
  Bacterial polypeptide expressing nucleotide sequence isolated from the Sargasso Sea
tagaaataatttctaaaaaaacagaaaaagataaaatattttctgttgcaggaggaggagaaactgttgcagtaataaataaatttaaaaagttcgaatcatttacatttgtttcaactgctggtggagcttttttggaatatcttgaaggaaaaactttacctggtataaaagcactaattcaaaatgtccgagttaaataaa

SEQ ID NO: 250129 - DNA, 227 bp, Unknown
  Bacterial polypeptide expressing nucleotide sequence isolated from the Sargasso Sea
ttttgaaaaagaggcatttagttatggtactaaagaaataactgagattatttctaattcatctgcatatacatgtattggtggtggggattctgtaagtgcaattaataaattttctgataaaaaaaactttaatcatatatcaacaggtggtggagcatctttggaatatcttgaaggaaaaaaattaccaggggtaaacaaatacaaatcacttataatttgat

SEQ ID NO: 250130 - DNA, 660 bp, Unknown
  Bacterial polypeptide expressing nucleotide sequence isolated from the Sargasso Sea
caattgatttgattacaaaaaataaaaaaaaacctgtcacttgcataataggtggctcaaaagtatctaccaaaataagcatcttatcaaatttatcagaaaaagcagataatcttataattgtaggtgctatggcaaataactttcttaaatctcagggtataaatgtgggagcatctatgattgaaaaaggaacagagaatattataaaaaatataaacgcattagctaaaaaaaataaatgcaacatcataatacctgtagattgtaacacctcatctaatgttgatggagaacctgtccataaatctttgaaagatttggtttcaaacgatatgattttagacattggtaagaatacaatagaattaattaataaaactatagacagatctaatacggtattttggaatgggccagctggatactatgagaataaaaacttttcgactggctctttatctatagcaaaaaaaattgcagataatacaaaatcacgatcccttatatcaatcgttggtggtggagatactgtagccgcaattaaaaataccggtctagaaaaggtttatacacatttatcaacagcaggtggtgcatttctagaatctcttgaaggtaaagagctccctggtgtaaaagtattaaaaaagaattaaa

SEQ ID NO: 250131 - DNA, 910 bp, Unknown
  Bacterial polypeptide expressing nucleotide sequence isolated from the Sargasso Sea
aagtagtttagagtttgatttaaatgttccaatgaagaatggggctataaccgaaacttcaagaattaaaaaaatattacctactatagaattcttaatagaaaaagaagctaaaataataatattatcacatattggaagaccaaagggaaagatggttaaaggtatgactttagatcctatttcaaaaaagttatcagatttgttgaataaaaaaattatatttaacaaaaatataataagtaaaaacactttttctgaaatagataatctttcaaatggttcaataatgatgttggaaaatatacgttttaatgaaggagaagaaacaaatgataaagaattttcaaaaaaaatttctggtttaggagatatctatattaacgatgctttttcatgctcccatagagctcatgcttctattgaaggtattacaaaatatattccttcctacttcggtttgcaaataacagaagaaattaatgctttaaaaaaaataacctcagaaattaaaaaaccagtttccttaattattgggggatctaaaatttcgaccaaaattaaaattattaataatctgatcaaaaaatttgataatataattattgtgggaggtatggcaaacacattgctaaaacatacgggctcaaaagtaggtaaatcaatatatgagaatgattgtggtcaattgattaaagaaattttaaaaaaatctaaagaatttaattgtgagattacatgcccaacagatgtaattgtagctaaaagtctagagggcatgggtaaaaataaagatatagataaaattgaggaagatgaaatgatattagatatcggacccaagacaattgcttctataaaaaaaataattgataattcaaatactgttttgtggaatggtccagccggc

SEQ ID NO: 250132 - DNA, 664 bp, Unknown
  Bacterial polypeptide expressing nucleotide sequence isolated from the Sargasso Sea
atgggtgaaataaatttctttcctgacgatttagaaatcaaagatcaaaagataattcttagattagatttaaacgttccaataaaagacaaagttataaaagatgatacaagaataactttatgtttaccttttataaatagactaattgaaaaaaaagcaaaaattataataataagccatttaggtcgaccaaaaggaattaatgtccctgacctgtctttaatacctatctacaaatatctcaaagatgtgcttaaaactaatgtttatttttttagaggaacttttgatggtgaaactaaagaaaaattttctcacctaaaagggggtgaggtaatattaattgagaatataagattttttaaagaagaaaccgaagatggccaagatttttcaaaaaaattaggtgaacttggggacatttacattaatgatgcattttcatgctcccataggaaacaagcttctatacatagtataacaaaatttgtaaaaaaaagttatggtggtccattattaaaaaaagaaataacagcaataaatcttgttataaaaaataaaaaagaaccagtcacttgtattatcggaggatcaaaaatttcaacaaagattaatgatattactaaccttttaaaaaaagtaaacaatatagtaattgtag

SEQ ID NO: 250133 - DNA, 270 bp, Unknown
  Bacterial polypeptide expressing nucleotide sequence isolated from the Sargasso Sea
caaaaacaatattatggaatggaccagcgggttattttgaaatagaaaaattttctattggtagtaataaaattgcaaaaaaaataactgaaaatactaaaaacaaatctcttgtatcaatcgctggaggtggagatacagttgctgtaataaataaaacagatagttttaatggatttacttatatctcaaccgctggtggagcttttttagaacttcttgaaggaaaaaatttacctggtataaaagccttagaattaaatgagtgaa

SEQ ID NO: 250134 - DNA, 490 bp, Unknown
  Bacterial polypeptide expressing nucleotide sequence isolated from the Sargasso Sea
tggaaactcaatatgcgaaccagattattgcatttatgctttagatttaattgataaagcaaaaaagaacaatgtgtcgttgcattttcctgttgatgttgtcgcagggaatacttttagcaataatgcaaaacaaaaaattttcgatgttatggaaattgaagatggttgggaagctatggatgctggcccagaaagtataaaaaagtttcatgaagttataataaaatgtaaaaccattctttggaatggaccgcttggagtttttgagtttccaaacttttcagcaggaacaatatctgccgggaaatcaattgctgaagcaactatcaatgggtcctattctctggtaggaggaggagactcagttgctgctgttaaaaagtttaaaatggataatgatatgagctacataagcaccggtggaggtgcaatgttagaaagtttagagggtaaaattcttccaggaattgcttctttgaataaatag

SEQ ID NO: 250135 - DNA, 525 bp, Unknown
  Bacterial polypeptide expressing nucleotide sequence isolated from the Sargasso Sea
tatggatgttcaaaacaaaactgtaattctaagacttgatttaaatgttcctttaaatgaaaaaaagattttggacaatagcagaattttgactagtttgccttttttaaaaaatttaataaaaaaaaaagcgaagataattattataagccatctaggaagaccaaaaggtatgaagattaatgaattatctctaacaccaatatataaatttttaaaagaacaacttcaaacaaacgtatacttcttcatgggggatattaatgaagagacaaaaagtaaattttcatatttaaaagagggagaagttattttattagaaaatattagattttttcaagaagaaagcgaaaatgaagataattttgctaaaacacttgcttcgcttggcgatatttacgttaatgatgctttttcttgttgtcacagagctcaagcttctattcataaaattacaaagtatatcaaagagtcttatgcgggaccccttttaaaaacagaagtgagagcaataagtttcattat

SEQ ID NO: 250136 - DNA, 311 bp, Unknown
  Bacterial polypeptide expressing nucleotide sequence isolated from the Sargasso Sea
aatgctgaatgtctctaatctaaaaaagattactgagaaaaataaaactgtattaataagatttgatcttaacgttccactaaattctattgacgaatatataagtgatagaataatcagaattaaaaaacctattttaaatctgttgcatgaaaatcataaagttattattttatctcacttgggtagaccaaaaggagaaataaaggacgatctgtcattgcaacaagtagttcctcagctagaaaaagttcttgaaaaaaaaataaatttcttaccagattgcatcggaaatgaaataaaaaacaaaa

SEQ ID NO: 250137 - DNA, 691 bp, Unknown
  Bacterial polypeptide expressing nucleotide sequence isolated from the Sargasso Sea
gggtatacaacttatttcagaaattgaggcattagaaaaagttacaaacaatatagaaaaacctgtcacttgcattatgggtgggtctaaaatttcaacaaaaattggtattattaaaaatttaattccgaggtttaataatattataatcgttggaggtatggcaaataatatattgaattataaaaattttcaaattggtaagtctatacaggagactaaatgtggggatattataaaagatatctttaatgaattaaaaaagttcccttgttcattaatttaccctaaagatgtgatagttggtaaaaattttaatgacaaaccttctgtcagagatctaaataaaattaaaaatgatgaaatgattttagacattggccccaaaacaattgaagaaataaatgatttaataaataaaagtaaaacagttttatggaatggtcctgctggatattgtgaaaatccagattttgcaaaagggagtattgaaatagctaagtcaataataagaaaaagtaaaaccaactcattatactctgtagctggaggtggagacacaattgcattattgaataaattaaaagccattgaaaattttgattttgtttcaactgctggtggagcctttttagaataccttgaaggaaaggatcttcctggtataaaagctttgaagaatcatgtctga

SEQ ID NO: 250138 - DNA, 634 bp, Unknown
  Bacterial polypeptide expressing nucleotide sequence isolated from the Sargasso Sea
tatgaactttaaaactcttgagagtataaacttacattccaaaaaagttttattacgtgtcgatttgaatgtacccactatgaatggtaaggttattgatacaacgcgtattactagtattattccaactataaaattaattttacagaaaaagggctttcctattttgttgtctcattttggtaggccagccggaagaattgatggaagattaagtttaaaaatgatagcgcctgttatttcaaaattgctaggccatcccgtattcttctcagatgataccgtgggtaatcgtgtacaaaagctaatagaagattgcgacagtaacgcggttgttttgctagaaaatttaagattcctaccaggcgaagaaaataatgacccaagttttgctaaaagtttagctaaacttggtgacatattttgtaatgatgctttttctgtgtgtcatagagctcatgcttcgacggttggcttagccaattgtttacctagttgtgttggtccatcagttgtccaagagctagaagcacttgataaagccttaaccagaccccgcaagcctattgttgcagtcgtcggcggggcaaaagtttcaacgaagattaaaattttaaagaacttaataaaaaag

SEQ ID NO: 250139 - DNA, 711 bp, Unknown
  Bacterial polypeptide expressing nucleotide sequence isolated from the Sargasso Sea
gcgcggctgcaaagtgataattatgtcgcattttgatcgccctaagggaaaggtggtccccaaaatgtcgctaagagctctgctccctgtccttgtggagatttttggcggacgggaaatagctttcctagagaatcctcttggagacactgccaaaacaattgtagccgacctgcctaatggaagcattgccctagctgaaaaccttcgcttttttgccggagaagagagcaatgatgaaaactttgctcgagctcttggtaaactaggcgatgtttttgtgaatgacgcattttctgtggcccatagggcccacgcttcgacgcaagggcttgctcgcatcatgccagcagcagcaggaaagtccatgcagttggagctagaagcccttgaaaaagccctcgcaaatcctgaacgtccagtagtcgcagtaatcggaggggcgaaagtatcaaccaaattagaagtcctcacaaatctaaccagcaaagttgatcgcttagtagtcggcggcgccatggctaacacgtttttgtacgcccaagggaccactgttggcgcgtcactgtgcgaaaaagatatggccgaggcagcgctcgtagtaatgaacaacgcggctaaagttgggtgcaaactaattttgccatccgatgtagtcgttgctgaacaactcaagctgggctccatcggcgaaacggtgcatatttccgc

SEQ ID NO: 250140 - DNA, 877 bp, Unknown
  Bacterial polypeptide expressing nucleotide sequence isolated from the Sargasso Sea
aataaaactattgatagagaaacaagcaaaaattataattttatctcatatcggaagaccagaaggaaaaattgttaaaggtatgtctttggagccaatttcaaaaaaattagcttctttattaaataaagaagttttgtttaataaaaatataataaatgaaaacactttaactgagataaataaaatacaaaatggctctataatgatgttggaaaatattcgctttaacaaaggcgaagaaacaaatgatagtgaattttcaaaaaaattatcaaatttaggagatttatatgttaatgatgcattttcatgctctcataggtttcatgcatcggtggaaggaattacaaaacatattaaatcatattttggtctgcaaattactgaagaagttaaggcgttgaaaaaaataacttctgaaattaaaaaaccagttacacttattattggaggttcaaaaatttcaacaaaaattaaaattattaacaatttaataaaaaaatttaataatataattattgtgggtggtatggccaatacaatgctaaagcatactggttcaaaaataggaaaatcaatatgcgaaaataatagtggacctttaataaaagaaatcttggaaaactcaataaaatataattgcaatattgtatgtcctatagatgcagtggtttcaaaaaaacttgatggtgttggaaaaaataaaaatataaatgaaatagaccaagatgaaatgatattagatattggaccaaaaacaatttcttctataaaaaacataattatggattcaaatacagtattatggaatggtccagctggatactttgaaaattcaaattttcaaaatggtaccaacaaattattaaaataa

SEQ ID NO: 250141 - DNA, 513 bp, Unknown
  Bacterial polypeptide expressing nucleotide sequence isolated from the Sargasso Sea
aatgaaatctttggataaaataatcataaaaaacaaaaaaattatctttcgtgctgatcttaatgttccggtactgaatggtaagataactgattattcaagaataaattctattattccaacaattgaaattttaaaaaaaaatgaaaacaaaatttttataatagctcattttggaagaccaaaagggaaaaaaaataataaatactctataaaatttttatgtgaggatctaaagaaaattttcaaaataccaaatatacattttctagaaagttttgaaaaaaaaataatacaaaacaagatctctgagatgaaaaatggcgaaatttgtttatttgaaaatattcgttttaatccaggtgaagaaacaaacgatttagatttttcaaaatcattatcttctaactttgatatttatgttaatgatgcattttcagcttctcatcgaaatcatgcatcaataacaggtattactaaatatctaccttcttatgcaggtgtaagtttttc

SEQ ID NO: 250142 - DNA, 544 bp, Unknown
  Bacterial polypeptide expressing nucleotide sequence isolated from the Sargasso Sea
aatgggtgaaataaatttctttcctgacgatttagaaatcaaagatcaaaagataattcttagattagatttaaatgttccaattaaagacaaagttataaaagatgatacaagaataactttatgtttaccttttataaatagactaattgaaaaaaaagcaaaaattataattataagtcatttaggtcgaccaaaaggaattaatgtccctgacctgtctttaatacctatctacaaatacctcaaagatgtgcttaaaactaatgtttatttttttagaggatcttttgatggtgaaactaaagaaaaattttctcacctaaaaggaggtgaggtaatattaattgagaatataagattttttaaagaagaaaccgaagatggccaagatttttcaaaaaagttaggtgaacttggtgacatttatattaatgatgcattttcatgctcccataggaaaacagcttctgtgcatagcataacaaaatttgttaaaaaaagttatgctggtccattattaaaaaaagaaatacggcaataa

SEQ ID NO: 250143 - DNA, 390 bp, Unknown
  Bacterial polypeptide expressing nucleotide sequence isolated from the Sargasso Sea
aatggaagataaatcaatactaaatattgacactcacaataaaagattacttattagagcagatcttaatgttcctataaataataataaaatttcagatgaaactagaatagagaggttttgcagcggggtttccaagcttcttaaaaaaaatgctaaaataattataatcacacatttgggcaggcctaagggtaaagaagacttatcactttctaatagaatacttttaaaacctcttcaaaaatatttaaacaaagaaattatattttcaagtaatccaatttccacttcagcaattgaaagttcaaagagattaaaaaataatcaaatactactttgtgaaaatattaggtttcatcctgaggaagatgaagatgatctaatatt

SEQ ID NO: 250144 - DNA, 853 bp, Unknown
  Bacterial polypeptide expressing nucleotide sequence isolated from the Sargasso Sea
atgcaaataccaagcatggaaacattggatttgcagggcaagaggaccatgatccgtttggatctcaatgtgccaatcaaagacgggttagtggccagtgatgccagaatcatggcttctctttcaaccattgaaatggcacttgataagggcgcaaaagtcatcttactctcacatctgggaagaccagatcctgatcatttagatggaagcttttctcttgagccggtcgcaaataggttaaaagagatcttgaataaaaatatttcttttcaacccgattggcttgagggaatcaatgatcaatccaatgacatcatactctgtgagaatgttcgttatcaggcgggtgaaaaaaagaatgatgagacactgtctcagaagattgccaatctatgtgatgtttatgtcatggacgcattcggagcttctcataggaaacattcaagcacatatggcgtgcttcaatatgcgaaagagggatgcataggtccgcttttatcaaatgaagtgagctcaatcaaaaaagcgattgatagaccaactgcacctgtgacagcgatcattggtggtgcaaaggtttcttcaaagctgggtgtgattgagaggttctcaagtttttgtgatcacgtcattgtcggaggcggcattgccaatacatttcttcttgcaagcggtaagcaggttggggcgtcattggttgagacagagatggtcgatgcagcgaataaaatccttcaaatggaaaatgtaaatgttcctcttccggttgatgttagagtggcaaaagaattctcaacagaggcagaggctaccatcaagtcaattgatgaagttggtgaagatgatctaa

SEQ ID NO: 250145 - DNA, 757 bp, Unknown
  Bacterial polypeptide expressing nucleotide sequence isolated from the Sargasso Sea
aaatgaagccttttcctgctctcatagaaaacaggcatccattcacaaaattactaattttatagaaagttatggcggtcctgttttagaaaaagagattaaatcaattaatttaataataaaaaataaaaaaaaaccggttacgtgtataatcggaggatccaaagtatcaacaaaaataaatattttaaataaactttcagaaaatgcggataatcttgtaatagttggtgctatggcaaataactttctaaaaaacaaaggtataaatattggtgcctcactagttgagagcggggtagaaagtgctattaaaaatttatatactttagttattcgaaataaatgtaaaattatacttcctgtagactgcaatacatctggtaactttgagggtgctcctgtttataaaactgtagaaaatttaagttcacaagatatgattttggacattggaaaaaaaacgattgaattaatacacaaaattatcgatgaatcaaatactgtattttggaatggtcccgcaggttattttgagaataaaaacttcttaaatggttcgatatctatagcaaaaaaaattgctgaaaatacaaagtcaaaatctttaatatcaatcgttggtggtggagatactattgcaacaattaaaaatagcggtttagaaaagacttttacacatttatcaacagctggcggcgcatttcttgaatctcttgaaggaaaagaactccctggtataaaagtattaaaataa

SEQ ID NO: 250146 - DNA, 748 bp, Unknown
  Bacterial polypeptide expressing nucleotide sequence isolated from the Sargasso Sea
atgggtaaaataaaatatttttctgaagatatagatgttcagaacaaaacattaattcttagacttgatttaaatgtaccattaaatgataagaaaattcaggatgaaaatagaattttggcaagcttaccttttttaaaagacctaataaaaaaaaaagcaaagataattatcataagccatctaggaagaccaaaaggtgtaaagaatagtgaattgtctctgtcaccagtatataaatatttaaaagagaaactggagacaagtgtatatttttttatgggagaaataaatcaagagacaaaaaataaattttcatacttaaaagagggagaaattattttgttagaaaatataagattttttaaagaggaaactgaaaatgatgataattttgcaaaggaactagcttcccttggagatgtttatattaacgatgctttttcttgttctcatagaaaacaagcctctattcataaaattacaaaatatgtgaaagaatcatatgcaggaccacttttaaaacaagaagtagagtccattaattcaattattcaaaataaaaaagaacctgtcacttgcattattggaggatcaaaaatttcaacaaaaattaatgtaattactaatttaataaaaaatgtaaataatattataatcgttggagctatggctaataattttttgacctttaaagggtttaaaattggaaaatcacttatgaaaaagactctaaagagacaataaa

SEQ ID NO: 250147 - DNA, 525 bp, Unknown
  Bacterial polypeptide expressing nucleotide sequence isolated from the Sargasso Sea
ataattttattgagtactttggtcacaatattggaagatctattaaagaaaaaaattgtgacccaatcattgaagaaattatttcactttcaaaaaaagaaaaatgtgaattaagttttccagaagatgtgcttgtatctaaagacttaaatggatcacacaaaaaaagagaattaaatcaaattaaaatagatgaaatgattttggatataggtccaaaaactgttgaaagtatatgtaatattattaataatacaaataccatactatggaacggtcctgctggatattttgaaaatcccaattttgctaaaggaagtactgcaattgcaaaaaaaatagttgaaaaaaataaagaaaataaaatttactctgttgtgggtggtggagataccgtttcattaattaattctttaaatgccgttaaagactttaattttgtctcaactgcaggtggagcatttctagaatatcttgaaggaaaaaagcttcctggtataagcgcattaaataaaaatgtctgaa

SEQ ID NO: 250148 - DNA, 620 bp, Unknown
  Bacterial polypeptide expressing nucleotide sequence isolated from the Sargasso Sea
aggttcaaaaatctcaaccaaaatcaacctgttaaataatttgatacaacagtttaattgtgttgttattggtggagccatggctaatacatttttattatcaaaagatatatcagtaggtaaatcattagttgaaaaagatttagttgatgttgcaaaagatattcaaaacaaagccaatcggttaaattgtaaattaatacttcctcttgatgtgttttgtggaaaaagtactgaagataaagatcccatagagtgcgatattaatgatatttcacaaaactatatgattttagatttaggaacaaaaactaccgctttgattaatcaagaaatcaaaaattcaaaaatgattttgtggaatggccctgttggagcatttgaatataaaccgtatgataaagcgactaataaaattgcttttaatataaaacaaaatgttaagagatttggtataaacgctcttgctggaggaggagatactgtttcttcaatcaagaatgtaaatgctgaagatggttttgattatatctctaatgcaggtggcgcttttttagaatggttagaaggcaatcaatctcctggagttttagcgctaagagaaaataatttaagctaat

SEQ ID NO: 250149 - DNA, 209 bp, Unknown
  Bacterial polypeptide expressing nucleotide sequence isolated from the Sargasso Sea
aatgtctgatttaaaaattttttctaaggatattcctgttaatggtaaacgcgttattgttagactggatctcaacgtaccaattaacaattcaaaaatagatgacgatactagaattaaagttattgagccttttataaatgaattaatagaaaacaaggctaaagttgttttattatcacaccttggaagaccaaaggggaaagtgg

SEQ ID NO: 250150 - DNA, 859 bp, Unknown
  Bacterial polypeptide expressing nucleotide sequence isolated from the Sargasso Sea
ctttggaaaaaacaggataactgacacaacaagaatcgataagattcttcctactttaaattttttgataaaagaaaaagctaaaattataattttgtctcatgttgggagaccaaaaggtaaaattgttaaagaactctctctagaaccaatccgtaaagaattgcaaaaaaaattaagtaaaaaagttaagctcatcagtgaaaatattaaagatataaaaaacaaaaatttctttaataattatagtgaggaaattttaattttagaaaatatcagattttattctgaagaagaagaaaacgataataagtttgcagaacacatatcatgtcttggagatatatatgtaaatgatgctttttcatgctcacatagagctcacgcttcaattcgtgagatgccaaaattccttccctcattttccggtttacagttagacttagaagtgaatgcacttaataaaataacctccaaaattacaagacctattacttgtataattggtgggtctaaaatttcttctaaaataaatgttataaaaaatttaattactaaatttgacaatattgtaattgttgggggaatggctaataattttatagaatttttcggaaataatattggaatatctattaaagaaaaaaattgcgatcaaatagtaaaagaaatcatagccctttcagaaaaagaaaaatgtaaaatgatttatcctgaggatgttgttgtttctaaaaattttaatggatctcctacaaaaaaagaattaaacgaaatattatgtgatgaaatgatattagatattggtccaaaaactattgaaaaaataacaaatattattgataatagtaaaacaata

SEQ ID NO: 250151 - DNA, 640 bp, Unknown
  Bacterial polypeptide expressing nucleotide sequence isolated from the Sargasso Sea
catgaaaaatttaaataattacaccataaaaaataagaaaatattatttagagctgatttaaatgtccctgttatagatggcgtaattaccgatacttcacgtataacggcagttaaatcttcaatagaaaaattaattagtaataacaataaaatttttttagtagctcattatggccgaccaaatggagaatttattaagaaatactcattaaactttatattaccatcattaaaaaaaatattaaatttagataaagtttattttctagaaaatttagaccaggactcaattgaaagaacatataatgaaatgcaaggtaacagcgtgtgcttaatagaaaatataagattccttaaagaagaagaaaaaattgattttgattttgcaaaaaaaataagtagcctatttgatgtttatgttaatgatgctttttctgcatcacataggaatcatacatcaataactggtttttcgaaattccttcctgccgtagcgggtgaccacatgattaaagaaataaataatattaatttttttttaaaaaatggaaaaaaaccaaatttagctattgttggtggttctaagatatcaacaaaaattcaattattaaataatctaatagagcaatttactgct

SEQ ID NO: 250152 - DNA, 385 bp, Unknown
  Bacterial polypeptide expressing nucleotide sequence isolated from the Sargasso Sea
tatgcgactgttgtccgatttagatattgcgaaaaaaaaagtagcgctaaggttagatctaaatgttccaattaaagagggagttattacagacgatactcgaattttagcatcgcttgaaaccttaaattacttaattaaagcagaagcaaaaattgttatcctttcccatcttggcagacccaaagaaggaacttttgatgaccaactttctctaagaccggttgccagtcaccttagtaacgaattaggcatctccatttccttaattaattctatgaaagaattccatgatacaaatgcacaaatgtgtatgttagaaaatattcgtttttttgagggagaatcaaaaaattctgattcgcttgcaagggaaattggttca

SEQ ID NO: 250153 - DNA, 1192 bp, Unknown
  Bacterial polypeptide expressing nucleotide sequence isolated from the Sargasso Sea
atgaaaaatgttttaaataaaaatctagatcttgtaggaaagaaagttttattaagagtggatttaaatgttccaatgaaaaatggagctataactgaaacttcaagaatagaaaaaataataccaacaataaaacttttgttggaaaaacaagctaaaataataataatatctcatattggtagaccaaaaggaaaggttgttgaaggcatgtctttaaaacctatttcagaaaaattatcttttttattaaataaagaagttttgtttaataaagagcctataaataaaaatacattattggaaataaacaaaatttcgaatggtaaaattataatgcttgaaaatattcgttttaacgaaggcgaagaattgaataataatgaattttctaaaaaaatatctgatttaggtgatatttatataaatgacgctttctcttgttctcatagatcacacgcttccgttgaaggtatcactaaatatatgccttcatattttggactacaaatcactgaagagataaatgcattaaaaaaaataacatcagaaattgaaaagcctgtttctctaataattggaggttcaaaaatttctacaaaaattaaaattataaacaatttaataaaaaaatttaacaatattataattgtaggtggaatgggcaatacaatgctaaaacacactggctcagatataggaaaatcaatatgtgaaaatgattgtggttttttaattaaagaaatattggaaagctcaaaaaaatataattgtgaaattactattcccaaagatgcaattgtatctactagccttgatggagaaggagaagaaaaaaatgtaaatgaaataaaagataatgaaatgatattggatattgggccaaaaacaatatcatctattgaaacaattataagtaactctagaacaatactttggaatggtcctgcgggttattttgaaaatccaaatttccaaaatggaacaaaaaaaatattagagttaatttctcaaaaaacaaagaatgataaaattttttctgtagcaggaggtggtgagacagttgcagcaataaacaagtttaaaaaatttgattcatttacttttgtttcaactgctggtggagcttttttagaatatcttgaaggaaaaactctacctgctataaaagctttaaatcaaaatgtctgaa

SEQ ID NO: 250154 - DNA, 706 bp, Unknown
  Bacterial polypeptide expressing nucleotide sequence isolated from the Sargasso Sea
ttggatttaaatgttccattaaaaaatggctcaataaccgacgaaacaagaataaataagattattccaatcatagattttttaataaaagaacaatcaaaaatcataataatttctcacgtaggacgaccaaaaggtaaggtaattacagatctctcattaaaaccgatttgtgaaaatattgaaaaaaaaataaatagaaaaataagattagaaaaagaagatatttttaaattgaaaaaagaagatttatttaaagatccaaacgatcaaatagtttttttagagaatattagattttacaaagaggaagaaaaaaatgatactgactttgcaaaacatttagctaaactcgctgatttatatgtaaacgatgctttttcttgctctcatagagcccacgcttctgtaagtaaaattactgaatttcttccctcttttgctggattacagttggaaacagaaattagtgctttaaaaaaagttacttcagaaatcaaaaaaccaatcacatgtattattggaggatcaaaaatttcaaccaaaattgggataatcaaaaatttaatatctaaatttgataatattatcattgtgggtggtatggctaataacatcattaaatacaaaggaaacaaaataggcaaatcaatacaagaggaaaattgtgattctatgattgaagaaatttttgtaactttaaaaa

SEQ ID NO: 250155 - DNA, 1180 bp, Unknown
  Bacterial polypeptide expressing nucleotide sequence isolated from the Sargasso Sea
atgaacaatattaaagattatgaaaatcttagtggtaagagagttttattaagattagacctgaacgtccctttgaaaaatggtgacattgtcgatgaaaccagaattattaaaattatacctgttatcgaatttttaattaaaagaaatgcaaaagttttaataatttctcatgttggacgtcctaaaggcaaattcaataaagatctctcccttaaaccaatttgtgattacatagaaaaaaaaataaaaactagaatcaattttataagtgaagacattttaaaaatcaaaagagataatttatttaaagatcctaaggagaaagtcatcttttttgaaaacataagattttatgcagaagaagaaaataatgagacaaatttttcaaaacacctagctagttttgcagatttgtacgtaaacgatgctttttcttgctcacatagaacacatgcttcagtgtgtaaaattacagaatttctgccatcatttgctggattacaatttgaaactgaagtaaatgctttaaaaaaagttactattgaaatcaagaaaccaattacttgtattattggtggatcaaaaatttctacaaaaatagatataattaaaaatttaatacctaaatttaataacataatctttgtgggaggtatggctaacaatattctgagcttcaaaggtaataaaattggaaaatcaattagtgaggaaaattgtgaaagtataatacaagaaatttttgaaatttcaaaaaatgcactctgtgaagttacttatccagaagatgttttaataggcaaaagtgtagatgacgatgctcagataaaagatctcaaggacataacagatgatgatttaatcttagacgtgggacctaaaacacttaaaagaataaaaaatataattgaaaatagcgaaacagttctttggaatggtcctgctggttattttgaaaacccaaattttgctaaaggtagcattgagattgcaaaaacaattattaaaaaaaataaaaatgattcaattttttctgtagttggtggaggagatactgtggcggttgttaatcagctaaatgcaattaaagattttaattttgtttcaactgctggtggtgcttttttagaatatcttgaaggaaaagaacttcctggtataaaagccctaaaataaa

SEQ ID NO: 250156 - DNA, 906 bp, Unknown
  Bacterial polypeptide expressing nucleotide sequence isolated from the Sargasso Sea
aatgagaagtattaaaaacgaaacaaatcttcgtgataaaaaaatattactaagattagatttaaatgttcctatagttaaaggaaaaataagtgacacaactagaatagataaaattctacctactttaaaatttctaaataaacaaaaaactaaaattattattttatcacatgtaggtaggccaaaaggtaaggctttaaatgaactttcattaaaaccaatttgtgaaaatttaaatgagcaattaggtttaaatgtaaaattaattacacaaaatataaacgaaattaaaaataaggatttctttgataattttaatgaggaaatcttaatgttagaaaatattaggttttatgcagaagaagaaaaaaatgataataaatttgcagaacacctggcaagttttggtgatatttatgttaatgatgctttctcttgctctcatcgttcacatgcttcaattgtcgaaatttctaaattcttgccttcattctctggattacaaatagatttagaaattgatgcccttactaaagttacatctgaaattacaaaaccaatatcctgtataattggtggatctaaaatttcgaccaaaattgatattattaaaaatttaatacctaaatttgataatattattattgttggagctatggctaacaattttattgagtactttggtcacaatattggaaaatctattaaagaaaaaaattgtgatccaatcattaaagaaattatttcaatttcgaaaaaagaaaagtgtgaaataagttatccagaggatgtgattgtatctaaagaattaaatggattatataaaaaaagaaaattaaatgaaattttgaacgatgaaatgattttagacattggcccaaaaactattgataaaattacaag

SEQ ID NO: 250157 - DNA, 1183 bp, Unknown
  Bacterial polypeptide expressing nucleotide sequence isolated from the Sargasso Sea
atgaaaaaaatcaggagttttaacaatagaattaatatcaaaaataaaagaataatattaagatctgacttaaatgttcctattaaaaataaggtaattcaagataaaaccagaataaatctaagcataccacttattgaaaatttattaaaacgagaggcaaaagtattgctaatttcccatcttggaagacccagagatttaaaagatcataatttgtcgcttaaaccggtttatgaatatttaaaagagaaaataagtaataatatttattttttttcagacaaaattacaaataaaacgaaagacaaaatctcatttttgaaaaatggtgaaataattttttttgaaaatattaggctaaacgacggtgaaatacaaaatgatgataattttgctaaaaacctatcatccttaggtgatgtatatattaatgatgctttttcttgtgctcatagaaaacaaacatcaattcataaaattacaaaacatataagtaattcttatgcaggaccattattaatgaaagaaatacaatcaataaatatggttttgaatagtaaaaaaaaaccaactacttgtattattggcggatccaagatttcaactaagcttggagttattactactttgctaaaaaaagttgattatttaataatagtaggtgctatggcaaataattttattaaatttaaagggaataaaattgggaaatctttaatagagtccggctctgaaaaaataattggagaaatatatgacaaagcagataaaaatagttgtgaaattgtaacaccgcttgattttgcagtttcagagtctatcgatggtgaggccaatttgaaaagttttcaagatattcaggaaaatgatataatcctagatattgggcaaaaaacgatcaagaaaataaataaggtaatagatagttcaaaaacagttctttggaatggaccagctggttattttgaaaatcggaatttttcgaagggaacgatctcaatagcaagaaaaatttccgaaaatacaaagtcaaacaatttaatatcaattgtaggtggtggtgacactatttctgctattaaaaataatgggatcgatgtaaattttactcacttatccacagcaggaggggcttttttagaatatatagagggaaaaaacttgcctgggatagaagttt

SEQ ID NO: 250158 - DNA, 919 bp, Unknown
  Bacterial polypeptide expressing nucleotide sequence isolated from the Sargasso Sea
aatgaataatattaaagatcatgaaaatcttaataaaaaaaaagttttattgagattagatttaaatgttccattaaaaaatggagtaataacagaccaaactcgaattaataagattttgccaataattgaatttttactaagtaagaattgtcagataataataatttcccatgtaggacgtccaaaaggaaaaataaataacgatttatctcttaagccaatttgtgaaaatttagaaaaaaaaattaaaaaaaaaataagaatgattaatgataatatttttaaattaaaaaaagaggatttatttaaagtacctaatgatcaaatagttcttttagagaatataagattttatgaagaagaagaaaaaaacgatacttcttttgcaaaacatttggccgggcttgctgatttgtttgttaatgacgcgttttcttgctctcatagagctcacgcatcagtatgtaaaatcacagaatttctaccatcttttgctggattacaattagaaacagaaataaatgctttaaaaaaagttacaactgaaattaaaaagccaaccacttgtattattggaggatcaaaaatttcaacaaaaattggaattattaaaaatttaatacctatatttaataatattatcattgttggcggaatggctaataatattttaagtcataaaggaaaccaaataggcaagtcaattaaagaagaaaattgtgaaatgataattaaagaaatttttgaaacttcaaaaaattactcttgtgagattatttatccggaagatgttttggttggaaaaaaattagatggtgcggccgaagtcaaagaactaaataatataaaaaataacgatctaatattagatattggaccaaagacagtaaataaaattaaaaatattatgaaatta

SEQ ID NO: 250159 - DNA, 820 bp, Unknown
  Bacterial polypeptide expressing nucleotide sequence isolated from the Sargasso Sea
aatgggggctataacagagaattctcgtattgaaaaagttttaccaactataaaatttctaataaaacaaaaagcaaaaataataattattgcacatcttggaagacccaaaggaaaaattattcctgaattaactctaaaaccaattgctgaaaaattatctagctaccttgatcaaaatgtaatgtttttaaatgaaagtataggtttgccaacaataaaaaattcaaaagaaattcctaatggaaggatcttgttgttagaaaacttacgttttcataaagaagaagaattaaactcagcaacttttgctaaagaactttcaaaaaatggcgatatatatgttaatgaagctttttcatgttctcacagagcacatgcttctgtttgtgaaataacaaaacatattaattcttttgcaggcaaacagttgttgaaagaagtaagtgttataaaaatgttaacaagcagtgcaaaaaaacccacaacttgcatcataggtggatcaaaaatttcaactaaatcaggtatattagttaatctcataaaaaatatacaaaatattgtcattgttggtgctatggcaaatatatttataaaacataaaggttataatattggacaatctatattcgaaaaaaatcaggaaaacttgattgaaaatataatcaaagaaactaaaaagaataactgcaatctgatagtgcccgaagatgtaataacatcaaaaaattataattcaaaaggtgttttaaagaacttagatcaaataaatgataatgacttaattttagatattggagaaaaaccatacaaaata

SEQ ID NO: 250160 - DNA, 541 bp, Unknown
  Bacterial polypeptide expressing nucleotide sequence isolated from the Sargasso Sea
aatggctaatacttttttgctatcaaataattataacgttggctcttctctggtagaaaatgattttattgaactatcaaaaaagatacaaaaaaaagcagaatcaaaaaattgcaaaatacttttaccaattgatgctgtgtgctcaaaaacaatagaagatagagtaaatgttaagacttattcaatcaataatattccaaatgaccaaatgatattagatgttggtgaacaaacaacaaaactaatttcagatgaaatattaaaatctaaatcaattttatggaatgggcctttaggcgcatttgagtatagtccatttgataaaagtacaatttcagttgcaaatattatacaaaattattcaagtaaatctcaattagatgctctagcaggaggaggagatacacttgcagcaataaaaaaagctaaagccaatgatggatttaaatatttatctacagctgggggtgcatttttagagtggcttgagggaaataaatcaccaggatttatagcattaagagaaaacaatttttaa

SEQ ID NO: 250161 - DNA, 529 bp, Unknown
  Bacterial polypeptide expressing nucleotide sequence isolated from the Sargasso Sea
tttgctaaaggagcaccaatggggaaattcactatatgagcccaatttgaaagaaacagcaaatgatatactcacttatagtaaacaaaaaaattgtaatatacttttaccaatagatatcgttacagctcgcaaattagaacaaaatactaaaacaaatacatccaatcatgataaatgtcctgcagaccaaatgattttagatgttggtcaaaaatctattgaacttttcaaaaaaacaattgactcaagcaaaacaattttatggaatgggccgcttggtgcatttgagattaaacccttcgataatgcaacaagtttactagctaagtttactggcaaaaatactatgcaagaaaaatgcatttcagttgctggtggaggtgatacagtctcagctctaaattcagtaaaagtaactcagcaattttcttatgtttcttcagcaggaggtgcatttttagagtggcttgaaggtaaaaaacttcctggaattgaagctataaaatcaagtaaaagaattatttga

SEQ ID NO: 250162 - DNA, 715 bp, Unknown
  Bacterial polypeptide expressing nucleotide sequence isolated from the Sargasso Sea
atgaaaagtataaatgaagaagtaaatcttggtaataaaaaaatattattaagattagatttaaacgttcctatagttgataataaaattactgacactacaagaattgataaaattttacctactttaagatttttagttaatcaaaatactaaaatcataattatttctcatgtaggaagaccaaaaggtaaaatcgttaatgagctatcacttaaaataatatgtgaagaattaagtaaaaaattaaatcaaaatgtaaagcttatttcaaaaaatattaaagagataaattcaaaagaattatttagtaataatgatcaaagaattataatgttagaaaatataagatttcatcctgaagaggaaaaaaataatcaacaatttgcaaaacatcttgcaaccttagctgacatttatgtaaatgatgctttttcatgttctcatagggcacacgcttcaattcatgagataacaaaatttttaccctcttattctggcttacagtttgatttagaagttaatgccttaaaaaaaattacttctgaaattaaaaaacctatcacctgtataattggaggctcaaaagtctcgactaaagttaatataattaaaaatttaatacctaaatttgataatattataattgttggtgggatggctaataatattattaaatatatgggtaacaatattgggaaaatctttatatgaa

SEQ ID NO: 250163 - DNA, 844 bp, Unknown
  Bacterial polypeptide expressing nucleotide sequence isolated from the Sargasso Sea
aatgagaagtattataaacgaaaaaaatctaaacagtaaaaaaatattattaagactagatttaaatgttcctttggaaaaagacaagataacagatacaacaaggatcgataaaattctccctacattaaattttttgattaaagaaaaagctaaaattataattttatcccatgttggaagaccaaaaggtaaaattgttaaagacctttccctaaaaccaatttgtgaagaattgcaaaataaattaaaaaaaaaagttaaactcattagtgagaatataaaagacataaaaagtaaaaatttctttagtgactataatgaagatatttttattttagaaaatattagattttattctgaagaagagcaaaatgacaataagtttgctaaactgatctcaaatcttggagatatatatgtaaatgacgctttctcttgttcgcatagagctcatgcctcaatttatgaaattccaaaattcttgccttctttttctggtttacagctagacttagaggtaaatgcactcaataaaataacttctgaaattaccagaccaattacttgtattattggggggtctaaagtttcaactaagattaatgttattaaaaatttaatttctaaatttgataatattataattgtcggaggtatggctaataattttatagaatattttggaaatagtgttggaaaatctattaaagaaaaaaattgcaataaaatagttgaggaaatcatctctctttcaaaaaaagaagagtgtaaaataatttacccagaagatgtgattgtatctaaagatttaaatggatctccgtcaaaagaaaagaattga

SEQ ID NO: 250164 - DNA, 946 bp, Unknown
  Bacterial polypeptide expressing nucleotide sequence isolated from the Sargasso Sea
ttgatagtaaaattactttttcttaatgattgcattggcatagatgtagaaaataaaattaaaaatgcggaccaagaagaaattattcttttagaaaattgtcgtttttataaggaagaagaagataatgataataattttgcacaatcactctctaaattagcggatgtttatataaacgatgctttcgcatgctcacaccgatctcatgcttcagttgctgcgataacaaactatcttccctcctattgtggtaatttattatctgaagagcttttaaatttagctgatgtaattcagatgcctgtgagcccatctgttacaatcatgggcgggtcaaaaatatctacaaaaatctctattcttaaatcgttatcaatcaaaatggatacaatcataattgttggaggaatggcaaataattttattaaatttagcggtctcaatgtacaagattcacttattgaaaatgatgtagatgatctaataaatcaaatttataaatttgctgaggacaataattgtaaaataattactcccattgatgtcattacagcaaaagaagttaagaaagatattgagactgtgacatcagcaattgatgagattaaagaaaacaatatgattttagatattgggcctcagacaattgaattaatcaaaaaagagttgtcatctgctaaaactgttttttggaatggtccagcaggagtatttgaaacacctccatttcaagtaggtactttagaaattgctaaacacattgctgacttatccacaaaaaatttaataaaatcatttgcaggcggaggtgatacaatagctgcattggaaatggcaaatgtaaaaaatgaatttagttatatttctactggaggtggagctcttcttgagttattagaaggtagaaagttaccaggtttgaaagctttaaatatattataac

SEQ ID NO: 250165 - DNA, 1090 bp, Unknown
  Bacterial polypeptide expressing nucleotide sequence isolated from the Sargasso Sea
aatgtctgatttaaaaattttctctgatagtattcaaattgataataaacgagtaattgttagattagatttaaatgttccgatcaaaaattttaaaatagaggatgatactagaattagggttatcatcccttttttaaataaacttcttaagaaaaaggcaaaagttattttaattacacaccttggtagaccaaagggaaaggtagtgccagaattatctcttaatccaatatttgattatttcaaaaaaaatttgaaagagaaaatatatttttatcaaaatgatatggataacaatgcggttgaggctagtaataaacttgctactggagaagtgcttttatttgaaaatattcgtttttttaaagaggaagaaagcaatgaagagtcctttgcaaaaaaacttgccggtcttggagatatttttataaatgaagctttttcttgttcacatagaaagcaagcatcaatacataaaataactaaatttattgacagctatggagggccaactttagaaaaagaaacacgctctattgacctaatattaaagaataaaaaaagaccagttacctgcatcattggaggctcgaaagtttcaaccaaaataaatattttatcaagtttatcaataaatgcagataatattgtaattgtgggtgctatggctaataattttttaaaatttaatggcttaaacattggcgcctcacttgtagaaaaggactcagaaaatatagttaaagatataattgcaacagcagagaaaaataaatgtaacattattattcctgttgattgtaatacttctacaaatgctggtggaagctcaatatataagtcattggatgatgtaagttctgaagatatgattttagacattggcaaaaaaactatagaactgattaataagactattgataattcaaacactgtattttggaatgggcctgcaggatattatgaaaataaaaatttttcagttggttcagaattaatagccaaaaaaattgctaagaatacaaaatctaagtccttaatatctattgttggtgggggagatactgttgcggcaatcaaaaatact

SEQ ID NO: 250166 - DNA, 913 bp, Unknown
  Bacterial polypeptide expressing nucleotide sequence isolated from the Sargasso Sea
aatgaaaaatattagtaattttaatttcaaaaataaaaaaattcttcttcgtgttgatttaaatgttccggttgtcgatggaaaagtatctgacttatctagaattcattcaattaaatccacaatttttaaaataagagaaaacaaaaataagattttcttattatctcattttgggagaccaaaaggaaaatataaccaaaaatattcactagagtttttatgtgatatcattaaagaaactctaaatcttaataaaatttttttttctccttcaataaatgaaaaggatttaaagtatatacaaagccaaatggctgatgatgatgtttgtttaattgagaatataagattttgtgaaggtgaagaaaaaaatgatttagatttctccaagtatctttctcagttttttgatttatatgtaaatgatgcattttcagcttcgcatagggaacatgcatcaatagttggaatagtaaaatttttgccagcttttgcaggcatttcatttagtaaagaaattaaatatttaaattcattcattgatgatccaaaaaaaccaaccacctgcattcttggtggctcaaaaatatctacaaaattatcgctaatagagaatttaattgagtattcagattgtattattattgctggagcaatggctaacactcttctttataatcaagggtataatattggcaaatctttaatagaaaacaatatgtctgaagttgttgataaaatatttcaaaaagcaaaaaaatttaattgtaaaattattctcccaacagatgttgtttgttcaagagatttaaatgaagttttagatattagacattgccatgttaaagatattctgcctaatcaaatgattcttgatattggagacaaaactataaaaaatataaaggat

SEQ ID NO: 250167 - DNA, 757 bp, Unknown
  Bacterial polypeptide expressing nucleotide sequence isolated from the Sargasso Sea
atgagcaagccaaataatcatactgacttaggagacgttttaattaggtcagatttaaatgtaccaattataaataatgaaattactgataaatttagaatttctaaatctatcaacatcattaaaagtatttatgaatcctcaagaacaattacttttacaagtcatcttggtaggccgaataataatgacccaaatttctcgcttattaaaatagctgatgcaatgtcagagttactagataacgaaaaagtaatgtttatagatgcaattcatggttcaaaagttgaggaggcaataaaaaataaaaaatcaaaaatatttcttctcgagaacctcagatttgatgaaggcgaaataaataatagtttagatttcgctgccaatgtaacaaagccttttcaaacatatatttttgacgcatttgggtcagctcatagagagcatgcatcagtagtaagctttgggaattatcttgactcctatcaaggaccactgatagacgaagaattaaaggaattaaacaaaatattaaatacagatgaatctggatattcagttttacttggaggcgcaaaaatatcagacaagttatcgctaattgagaatttacttccaaaagtagaaaaattaatgatcggtggaggaatgtgttttacatttctaaaagcattagattatgaaattggcaattcgatttttgaagaatcgtttgttgcaaaagctaaattttttaatggattcaaagtatggtgac

SEQ ID NO: 250168 - DNA, 979 bp, Unknown
  Bacterial polypeptide expressing nucleotide sequence isolated from the Sargasso Sea
atgaaagatggcttgtcatttcatcccataaaaagtgaaattgagaaagcactagatagggaaatagattttaaagacattgaaaaaatagaaaaaccgaaaataaaaaaatcaaaaaaaaaaatatttttacttgaaaatataagattttatcctggagaggaaacaaacaatgaagaattttcgaaaaaactagcaagcattgctgatgtttacataaatgaagctttctcatgttcacatagatcccacgcttcaattaatggtgtaactaaatatattgactcctatgcaggtgagactgttattgaagaaattaatgcattgaataaaattattactcaaactcaaaaacccgtagcatgcttgattggtggatcaaaaatttcaacaaaaattgatttaatcattaatttacttcctaaaatggactacatgattattggcggggctatggctaataatttttttaaatatgataacgtaaatattggtaaatcgtactttgagcaggtagatattagtattgtaaaaagtattcaccaagttgctaatcgatgtggatgtaaaattattttaccaactgatgtgattgtatctcaaaatcaacatactaaagggatattaaaaaaattaaatgaagtaaataatgatgattttatttttgatattggaaatgaaacaattaaaataatagacgaaaaattgagtaaatgtaaaactgttttgtggaacggtccttttggattatttgagaatgataatttttcaaatggtacagaaaaaattgcaaaatcagtagctaattatacaaaaaaaaataatttgatttcagttgcaggcggtggagatacatttgccgcaataaaaaaatcgaatttaataagtgattttagttatatatcaaccgcaggtggtgcatttttagaatggcttgagggtaaagttttaccaggcttaaaggtacttgaaaaataat

SEQ ID NO: 250169 - DNA, 1111 bp, Unknown
  Bacterial polypeptide expressing nucleotide sequence isolated from the Sargasso Sea
tatgaaaaatattttagatgaaaatttaacattaaagaataaaaaagttttgttgagagtcgatttaaatgtgccaatgaaaaatggttctataacagagtcatctagaattgaaaaaataatcccgactattaaaatactaattgaaaaacaagcaaaaattataattttatcacacattggtagacccaagggaaaagttgtaaaagaaatgactttagaacctatttcaaaaaaattatcttctttaataaataaagaaattatattttataaaaataaaattaataaaaatactatttcggaaattgataaaattccaaatggttcaataatgatgttggaaaatattagatttaatgaaggagaagagtcaaatgataattcattttcaaaaaaactatcaaaactaggtgatatttatgttaatgatgctttttcatgttctcatagatctcattcttcggttgtgggaataacaaaatatattccctcatattttggtatacaaattacagaagaaattgaagcattaacaaaaattacttctgaaataaaaaaaccagttacacttattatcgggggatcaaaaatatctactaaaataaatattataaataacttaataaaaaaatttaataatataattattgtaggtggaatggctaatacaatgttaaaacatactggatataaagtgggaaaatcattatgtgaaaaaaattgtgaatctttgattaaaaaaattttagaaaattcaataaagtataaatgcaatataacactaccaatggatgttgttgtttcaaataacattggaggtttaggatcaaataaaaacattaaagatgtaaacaacaacgagatgattttagacattggtccaaaaacaattttattaattaaaaaaataattgaaaaatcaaatacagtattatggaatggtcctgcggggtattttgaaaatcctaattttgaaaacggtaccaaagaaattttggaaatgatttctaaaaaaacattaaatgatgactgtttttcagttgccgggggtggagaaacagtagctgctataaataaatttaaaaaaacaaattcttttaaatttgtt

SEQ ID NO: 250170 - DNA, 531 bp, Unknown
  Bacterial polypeptide expressing nucleotide sequence isolated from the Sargasso Sea
ttggagctatggctaataattttattgaatattttggaaataatattggaaaatctattaaagaagagaattgtgttcaaatagttgaagaaatcttgtcactttcaaaaaaaaaagaatgcaaaataatttatcctgaagatgtgcttgtgtctaaaaacttgaatggttctcctaaaaataaagatttagatcaaattttgcctgatgaaatgattttagatattggcccaaaaactattaataaaatagtaaatataataggcaaaagtaaaactatattgtggaacgggccagctggatattttgaaaatccaaattttgctaatggaagtattaaaatagcaaaaacaataatagaagataataaatcaaaaaatattttttctgttgtaggtggtggagatacagtttcattattaaataaattaaaagttgttcataaatttaattttgtttcaactgcaggtggagcttttttagaatatcttgaaggtaaaaaactacctggtataaccgctttaaattgat

SEQ ID NO: 250171 - DNA, 271 bp, Unknown
  Bacterial polypeptide expressing nucleotide sequence isolated from the Sargasso Sea
aatggttttgtggaatggtcctgttggagcatttgaatataaaccatataacaaagcgactaataaaattgctcttaatataaaacaaaatgtaaagaaatttggcataaacgctcttgctggagggggagatactgtttcttcaataaagaatgcaaatgctgaagatggttttgattatatctccaatgcaggcggtgcttttttagaatggttagaaggcaatcaatctcagggagttatagcattaagagaaaataatttaagttaa

SEQ ID NO: 250172 - DNA, 229 bp, Unknown
  Bacterial polypeptide expressing nucleotide sequence isolated from the Sargasso Sea
aatgattaatttatcttctttagatatcgcaaataaaaacctagtaattagggtcgacatgaatgtgcctcttaaagatagtgagattcttgatgcaacaagaataaatgcctgttttccgacgattgaacacgctcttagtaacaatgcaagaatcttgttaattagtcatcttggcaggccttctgaaggaaattttgaggaaaaattttctatgcagcctgttgca

SEQ ID NO: 250173 - DNA, 475 bp, Unknown
  Bacterial polypeptide expressing nucleotide sequence isolated from the Sargasso Sea
aatagaaaaaggagcagaaactattattaaagatatttataactctgcaaaaaaaaacaaatgtaatataataataccaacagactgtatggtttcatctgacttaaatggagatgcaaaacataaaaaactaaatgaaatcacatctaaggatattattttagatatcggttcaagtaccgttaaattaattaatgagactattgaaaattcaaaaacagttttttggaatggtcccgcaggatattttgagaataagaattttgcaagtggaaccctttcaattgcgaaaaaaattagtgaaaacactaggtctagttctttaatttcaattgttggtggtggagatacaatttctgcaattaaaaatggggactttaaaaatgttttcactcatttatcaacagcaggcggtgctttcttggagtcccttgaaggaaaagaactccctggtataaaagtacttaaaacataa

SEQ ID NO: 250174 - DNA, 838 bp, Unknown
  Bacterial polypeptide expressing nucleotide sequence isolated from the Sargasso Sea
tcgttttttcaatggagaagaagatgatgatgaaaattttgcaaaagatttgtcaaaaatgggtgacctttacataaatgaagctttttcatgttcgcatagaaaacaagcctcattacataaaataacaaaatttattgatagttacggtggcccacttttagaaaaagaaatgaattcaattaggttgataatagaaaatagaaaaaagccagttacttgtataataggcggttcaaaaatatcatctaaaattaaagttatatcaaatttattaaagaaatcagataatttggtcattattggagctatggctaataattttctaaagtttaaaggtattaatattggatcttcgatttacgaaaaaggaaccgaggatatagttaaagaaattaactctttagctaaaaaatataattgcaaaattattattcctttagattgcaatacagcaacaaatattgacggtgataaaaattataaaactttggagaacttaggtaataaggacatgatattagatattggaaacaaaacaattgacgtaataaacaaaactatagatatttctaaaacagtattttggaatggaccagctggttattatgaaaataaagatttttctgtgggaacattatctatagcaaaaaaaattgcggagaatactaaatcaaagtcactaatatcaattgtgggtggtggtgatactttagcagcgattaaaaatgcaggattagaaaagatctttactcatttatcaacagctggtggtgcttttttagaatctcttgaaggcaaggaattgcctggtataaaagtattaacaaaaaaatag

SEQ ID NO: 250175 - DNA, 997 bp, Unknown
  Bacterial polypeptide expressing nucleotide sequence isolated from the Sargasso Sea
atgaaaactctgtcagagatcgatttaaataataaaaaagtcggaataagagtagatctaaatgtccctataaaagaaggcaagatattgagtcatgagaaactatctgcggccctaccatcaatacttcatatattagaaagaactgagaatttatgtattatcagccatcttggaaggcctatagagggaaatttcaattcaaaccactctcttttgcctataaaagaatggtttgataaaaaattaaaaaaagaactgtcatttactgatagtctggatgcaattccggaaggcatatcgtttttagaaaatataaggttttttaatggtgaaaaagaaaataatgaagagctatctcaaaaaatagcagatgcttttgatgtttatgtaatggatgcgtttgctacagctcacagaaagtctgcctcaacatttggagcaatcaaaaagtctgaaattgtttgtgcaggcatgctcttctctgaagaagtgacaaatattgaatatgctttaaaagaaagcgcatctcttaatagcattgttgggggatcaaaaatatcaactaaattaaaagtaatagagagtcttcttgaaaaatcacaaaaagtattggttggtggaggcatagccaatacatttttaaaggcatctggttatgaaattggtaaatctctagttgaagacaatatgcttaatatggcaagtaatatgcttagaacagaaaaaattataatgccagaaaaagtttatgtagcagaatcaatagaatcaaaagatatatctttggtgccagtaagcaacatctcaaaagataagatgatactagacatagaatttaatgataaagaaatgaaagattatttaagtgaaacaatcatatggaatgggcctttaggcatgtttgaaattgatgaattttcaaatgggacaaaatctttaatagattatcttaagcagtcagatagcaaagttattgctggaggaggagaaacta

SEQ ID NO: 250176 - DNA, 538 bp, Unknown
  Bacterial polypeptide expressing nucleotide sequence isolated from the Sargasso Sea
aatgaatagtataaaagaccagaaaaatcttaataaaaaaaaagttttattaaggttggatttgaatgttccattaaaaaaaggattaattaccgatgaaacaagaataaataagattattccaatcatagattttttaataaaagaacaatcaaagatcataataatttctcacgtaggacggccaaaaggtaaggtaattaccgatctgtcacttacaccaatttgtgaaaacgtagaaaaaaaaataaataagaaaattagattggttaaagaagatatttttaaactaaaaaaagaagatttgtttaaagacccaaatgatcaaatagtttttttggagaatattagattttacaaagaggaagaaaaaaatgacactaattttgcacaacatttagctaaacttgctgatttatatgtaaacgatgcattttcttgctctcatagagcacatgcttctgttagtaaaattaccgaatttcttccctcttttgctggattgcagttggaaacagaatgtaatgctttaaaaaaa

SEQ ID NO: 250177 - DNA, 189 bp, Unknown
  Bacterial polypeptide expressing nucleotide sequence isolated from the Sargasso Sea
aatgattaacctatcatcattagatcttaataataaaaaattagtcattagagtggatatgaacgtcccaattaaagacggagatgttcttgattcaacaagaattaaggcatgcttgtcaactattgaatacgcacttgaaaataatgcaaaagttcttttgataagtcacttgggtagacccattga

SEQ ID NO: 250178 - DNA, 747 bp, Unknown
  Bacterial polypeptide expressing nucleotide sequence isolated from the Sargasso Sea
cctgctctcataggaaagaggcatctatacataatattactaaatttatgaaagaatgttttgctggtccattaattgaaaaagaattaagtgctattaatcttcttattaaagataaaaaagaaccagtaacatgtattgtaggtggttctaaaatttcaacaaaaattaatatattatctaatttaataaaaaatattgataatattattgtggtaggagctatggcaaataactttatatactacaaaggtttcgagattggaaagtcaatggttgagagagattcaaaagaaattattaagaaaatatatttagaagctaaaaaatataggtgtaatataattatacccgaggattttctcgtatctaaaaattatgatggtgaggcaagttcaaaaaacattgatatggttgaaaaggatgaaataattcttgatattggcccgaaaactatacaagctataaataataaaattgatgactcaaatacagtgatgtggaatggtccagcaggttattttgaaaataaaaatttcgctattggaactaactcaatagctaaaaaaatttcaaaaaatactagtgaaaaatctttaatatccattcttggaggtggagatacaatttcagcaataaataatagtaaacttagtttatcgtttacacacttatcaacagctggtggtgctttcctagaataccttgaaggaaaagacttgcctgggctgagtgttttaaaataaa

SEQ ID NO: 250179 - DNA, 466 bp, Unknown
  Bacterial polypeptide expressing nucleotide sequence isolated from the Sargasso Sea
agaaaattgtaaaactatcattgatgaaatttttgaaacttcaaaaaaatattcttgtttaatttattatccagaagatgttttgatagggaaaaatctcaatgacaattcactagccaaagaacttagtgacgtaacagatgatgatttaatcttagatattggaattaaaacaataaataaaattaaaaatatcattgaaaaaagtcaaacagttttgtggaatggcccagcgggatattttgagaacccaaattttgcaaacggtagttatgaaattgcaaaagctatcattcaaaaaaataaagataaatcaatttactctgtagctggaggtggtgatacgatagctcttataaaccaaattaatgcaattaaagatttcaattttgtttcaactgctggtggtgcttttttggaatatcttgaaggtaaagaacttcctggtataaaagctctaaattaa

SEQ ID NO: 250180 - DNA, 1141 bp, Unknown
  Bacterial polypeptide expressing nucleotide sequence isolated from the Sargasso Sea
aatgaaaaatattgaagataaaaatttaagtaaaaaaaatattttagttagagtagatcttaatgtgcctgttgttaacgatcagataactgacagatcaaggattaaatcaatattgccaactttgaataagttgaaagattctaataataaaatttttttaatttctcattttggaagacctaacggcattaaaaataaaaaatattcattaaaatttatatgcaatattcttgaggaagaaataaatattaaaaagatctattttctggaagactttgatgaaaaaaatattcagaatatgattaatgaaattaaaccaggagatatttgtctttttgaaaatatcagattttattcagctgaagaaaagaatgatttagattttgctaaaaatattagtaaaaattttgatgcctttgtcaatgatgccttttcttgctctcatagaaaacatgcatcaatagttggtcttccaacttttttaccctcatatctaggatatagttttttaaaagaaatcaataatcttaattctttattatctaataaagataaaccaaatttagcaattattggcggctcaaaaatttctactaaaatagaattactttttaatttatcttattactttgatacaatagttattggaggagccatggctaatacttttttatatgcaaaaaaaatcaacataggaaaatctttaactgaaaaaaactataatgaagttgtgttttcaattattaataaagcaaaagaaaataattgtgaaatcattctgccaattgatgttgtctgcgcaaataatttaaatgaaaaagaaagtattagaagatgtgaaatagagaatatatctgactctcaaatgattttagatcttggatttaaaacaactcaaatgatctcacaatatattaataaatcaaaattgattttatggaacggacctttaggagcttttgagcacccatcttttgcggagtcttctattaaaattgctaatattataaagtcacgttcaatcaactctgaaattactagtattgcaggaggtggagacacaaactctgttattaaaattgctaaagcaaaagatggtttttcttatatttcaaatgctggaggagcatttcttgag

SEQ ID NO: 250181 - DNA, 883 bp, Unknown
  Bacterial polypeptide expressing nucleotide sequence isolated from the Sargasso Sea
tatgataactgtaaaaggaatttctaatcaagattttaatgggaaaaaatgtctgttgcgacttgatctaaatatacctatatcagaaagtggacaaatcttagatgatactagaattagagaaagcaaaccttcaatagattatcttttagaacaaaatactaaagtaatcatagtttctcatatgggtaggccaaaaggaaaatattcaagtgaattatcatttgaaaatctattaagcgatttcgaaaaaattttaaaaagaaaaattgtattagtaccatttagtgatcaagaagatgccctgaaaattattaattcacttgattttgggactttatttttattagataatattaggtttaataaaggagaggaatctagtgattctgagttcataaaatttttatctagcctagctgatgtttttataaatgatggatttggaactatacacagaaaccattcatcaattacaggagtagcaaatttattaccttcatttggaggaattcttctagaaaaagaaattgaaaaaatttctcagtgcattcaggaaaaggcacaaaattctacggctatattgggtggagctaagattcaagataagattcctattatagaaaacttatcaaaaacttttaacaaaattattattacaggtggaatgataaggccttttttaatagcatctgaaaaaatcccaaactcaaaaaaaataaataacgatgaaataaatatagccaagaaaattctaattgaaaatgaaaagatctttgtcccagatcaattgatctgttcagaatctattgatggagaaccagtattgcttaatgcttcacaaattaatgaatcagataatatatttgatattggtccaaat

SEQ ID NO: 250182 - DNA, 467 bp, Unknown
  Bacterial polypeptide expressing nucleotide sequence isolated from the Sargasso Sea
tcaaactgttatagaagagatttttgaaacttcaaaaaatttttcatgttcaataatttttccagaagatgttttaataggaaaaaatatgaatgataaatcccaagttaaagaattaaatgaaataaaagatgatgatttaattttagatattggacccaaaacaattaaaaaaattaaagatataatagaacttagcagcacgatcttgtggaatggtccagccggctattttgagaatccaaattttgcagatggtagtcatgagattgcaaagatgattattaaaaaaaataaaaataaatcaatttattctgttgtaggtggtggtgatacaatagcattcattaaccagattaatgcattaaaaaattttgattttgtttcaaccgcaggtggagcatttttagaataccttgaaggaaaagaactgcctggtataaagtcattaaaattgtatgtctgaa

SEQ ID NO: 250183 - DNA, 991 bp, Unknown
  Bacterial polypeptide expressing nucleotide sequence isolated from the Sargasso Sea
accaaaaggtaaaatagttaaggaactttctctagaattggtatcgatgtatattaaaagtaaaataaaaaaagaagtatcattacttaaagaaaacatttttaatataaataaagaagacatttttaagaattcaaatgatgagttggtactacttgaaaatattagattttatcccgaagaagaagccaacgatgatacattttcaaagaaattggcaagcttaggtgaaatatatgtgaatgatgcattttcgtgttcacacagagaacatgcttctatatcaaaaataacaaagtatattccatcgtacagcggaattcaaattaatgcagaggtaaatgctctcaacaagataacttatgaaataaaaaagcctataacatgtataattggtggatctaaaatatcttcgaaaataaatataataaaaaatttaatacctaaatttaatagtattataatagttggtgctatggcgaacaatatattgaaatacaaaggtttaaatattggtaaatctgtatatgaaaaaaatattgattacataattcaagaaattttcaagtatgctgaaaaaaataaatgtaaaatatattttccaaaagatgttaaaattggaaaaaaattgaacgatagatcttttgaaaaagattttaaagacattgaagatgatgatatgatacttgatgttggatcaaaaacattagttgaaataaaaagaattattgatgattcctcgacaatattatggaacggaccattaggttattttgaaaatgagaatttttcattaggaagctcagaagttgcaaaatatatagcaagcagggggaacaaaatattttctgttgttggtggaggcgatacagttgcagtaattaattcactaaatatgaaagataaatttaattttgtttcaactgcaggtggagcatttttagaatatcttgaaggcaaagttctccctggtataaaagcattacattaa

SEQ ID NO: 250184 - DNA, 1087 bp, Unknown
  Bacterial polypeptide expressing nucleotide sequence isolated from the Sargasso Sea
atgaaatttttgaataacattgatttaaaaaacaaaaaaattctttttcgtgctgatcttaacgtaccggtattaaatggaaaggtttctgattactcaagaatcaaatccattgtaccatcaattaatcagctgttaaaaaataataataaagtatttatattagcacacttcggcagaccaaaaggtaaaataaataaaaattattccttaaagtttttatgtaatgaacttgcaacaattcttaataaagaaaaaatacattttattgaagcatttgaagatacagttattaataaaaaaattgatgaaatgcacaaaggagaaatttgtttatttgaaaatatacgttttaatccagaagaagaaacaaatgatctaaatttctcaaaaaatctatcattacattttgactattttatcaacgatgccttttcagcttctcaccgcaatcattcatcaattgtaggattgccaaaatttttaccagcagcggctggaattagttttatgaatgaaataaaaaatcttgataattttttaaacaatgcaaaaaaaccaaatatggcaataattggaggttcaaaaatatctactaagataaaagtgatttataatttaattgatttatttgacacagttattattggtggagcaatggctaacacttttttattaacaagtaacataaaaattggaaaatctttggttgaaaaggattatattgatattgctaaagatatccttgagaaagctaaactaagtaattgtgaaattatcttgccgaaagatgttgtttgttcacctgatataaaaaatacagaaaatataagaatctgtaatattgatgatgtatttgatgatcatatgattttagacgttggagaaaaaacaacaaaattaatttctgaaaaaattcttaaatcgcgttcagtcttatggaatggtcctttaggtgcatttgaatacaaaccttttgataagagttctatagatgtcgcaaatataatatatcaatattctaaagatcttcaaattgatacaatggcaggaggaggagatactatagctgcaataaatttaacta

SEQ ID NO: 250185 - DNA, 436 bp, Unknown
  Bacterial polypeptide expressing nucleotide sequence isolated from the Sargasso Sea
tatgagtctgcaaagtctaaatgattgtaaaataatataccctaaagattttttggtgggtaaaaaattgactgatttttcaaataatagaaaaattaacgaaattgaaaatgatgatataatattggatattggtttagaaacaattcaatccataaaaaatattattaataattcaaaaactatcttatggaatggtccagctggatattttgaaaatgaaaattttgcttctggaagttatgaaatagcaaaagagatttctgccaaaacaaaaaatagtaaactattttctgtaataggcggaggagatacagttgctgtattaaacaaattaaatttaattaataattttagttttgtttcaactgcaggtggagcttttttagaatatcttgaaggaaaagaattacctggtataaaatcgttaaattaa

SEQ ID NO: 250186 - DNA, 1195 bp, Unknown
  Bacterial polypeptide expressing nucleotide sequence isolated from the Sargasso Sea
atgtctgatttaaaaatcttttcaaacaacatttctgttgagaataagcgtgtcatagttcgcttagatttgaacgttccaattaaaaactcaataattgaggattacacaaggattgagttggtagaacctttaataaataaattaatagaaaataaagctaaaataattttgctaacacatcttggtaggcctaaaggaaaagtagtcaatgaactttcgcttgaaccagtttataaatatttacaaaaaaaattaaatataaatacctacttttacaaaaaaaatattgactcggaggctattgattttacaaacaaattaaaaccaggtgaagttttgcttatagaaaatattagattcttccaggaggaaaacaatgatgatgaaatttttgctaaaaatctatctaaattaggtgacatttatataaatgaagcgttttcctgttctcacagaaagcaagcatctatacatagtataacaaagtatattgatagttacggaggacctcttttagaaaaagaaattaattcgataaatttaattttgaaaaataaaaaaaaaccagtaacttgtattattggtggatcaaaaatttcaacaaaaattaatatattatctaaccttttaaaaaattcagataatttagtaattgtgggagcgatggcaaataattttcttaattataaaggcataaagattggaaaatctctaattgaaaaaggttcagaaaatataattaaaaatatatatgatttagctaaaaaaaataaatgtgaagtcattatacctgtggatgtaaatacatcttcagatttagatggggaatctttttataaatcttttaataatatagggtctaatgatattattttagatataggtaaagaaactattagtttaattaataatataataaataaatcaaacacaattttttggaatgggcctgctggatattatgaaaataagaatttttctaaaggttctatttctattgcaaaaaaaatcgctgaaaatacaatatctaagtcacttgtatcaatcgttggtggtggagacaccatcgctgcaattaaaaatactggacttgaaaaggttttttcgcatttatcaacagctggtggtgcatttctagaatcgcttgaagggaaagaactccctggtataaaagtattgaaaaggaaataat

SEQ ID NO: 250187 - DNA, 973 bp, Unknown
  Bacterial polypeptide expressing nucleotide sequence isolated from the Sargasso Sea
ttagatggcagtttttctttggagccggttgcaagaagactgcaagagatcttgaataaaaatatttcttttcaacccaattggcttgagggaatcaatgatgaatctgatgacatcattctctgtgagaatgttcgttatcaggcgggtgaaaaaaagaatgatgagaccctgtctcagaagattgccaacctatgtgatgtctatgttatggacgcctttggcgcttctcatagaaagcattctagtacatatggtgtgcttgaatatgtgaaagagggatgcataggtccgcttttatcaaatgaagtgagctcaataaaaaaagcgattgatagaccaactgctcctgttacagcaattattggtggtgcaaaggtctcttcaaagttgggtgtgattgagaggttctcaagtttttgtgatcacgtcattgttggaggaggcattgcaaacacattccttctcgcaagcgggaagcaggttggtgcgtcattggttgaaccagaaatggtcgatgcagcgaataaaatccttcaaatggaaaatgtaaatgttcctcttccagtagatgttagagtggcaaaagaattctcaacagaggcagatgcaacgatcaagtcaattgatgaagttggtgaagacgatctgattttagacataggacctgagaccactgaatcatattgcaatatcatcaatgaaaccaaaacaaccatttggaacggacctttgggtgtatttgaattcagctcattcgcagaaggaacaagagcacttggacatgctgtttcttcaaatgatggtttcacgatagttggagggggtgatactgttgctgtggttgaagaattgggggtttctgattcaatgagttatatttcaacaggtggaggggcatttttagactttgttcagaatggcacgctaccaatactagatttacttgaaaagaagaggggtgattcatgat

SEQ ID NO: 250188 - DNA, 531 bp, Unknown
  Bacterial polypeptide expressing nucleotide sequence isolated from the Sargasso Sea
aatgttaaatgttaaagctctaaaaacatttgatcagaaaaataaaactgtacttattcgatttgacctaaatattccactcaataaagaagcctctacaataagcgatcggattacaagaattaaaaatccaatacaaaatcttcttaataagaataataaagttgtcattctgtctcatttaggaagaccaaaagggaaaataaatgatgaactttcacttaatcaaataatcagctcattagaaaatgcactacaaaaaaaaattatatttctctcaaattgtatcggtgatgagatcaaaaaaaaaataacttctttaagacaggactcaattattcttcttgaaaattgtcgatttcatgaaggtgaagagcaaaatgataaattttttgcttccgagctagcaaaattagcagacgtttatattaatgatgcttttgcatgttctcatagagctcacgcttcaattgaagcaatcacaaacttcataccatcttattgtggagaattattacatgaagaaatatt

SEQ ID NO: 250189 - DNA, 517 bp, Unknown
  Bacterial polypeptide expressing nucleotide sequence isolated from the Sargasso Sea
ttttattaagtttaaaggtataaatattggtaattccctttttgaaaagggctcagaaaatgtagtaaaaaatataaacgaaactgctagtaagaacaaatgtaagattattattccattagactgttgcacttcttctagcgttgatggagatcccacatataaatctttaaataatttaggatcagaggatatgattttagatattggaaaaaaaactatagatttaataaataaaacaatagaagaatcgaatactgtattttggaatggccctgctgggtattatgaaaataaaaattttttaactggatctttgtctatagcgaaaaaaattgcccacaacaccaaattaaagtctttgatatcaattgttggtggtggggacaccgttgctgcaattaaaaatactgggctagaaaacgcttttacacatttatcaacagctggtggtgcgttcctggaatcccttgaaggtaaagagctccctggtgtaaaagtattaagaaagaattaa

SEQ ID NO: 250190 - DNA, 319 bp, Unknown
  Bacterial polypeptide expressing nucleotide sequence isolated from the Sargasso Sea
tttggatgctgggccaaagactataatgcacgttgaatctgtatttgctgattgcaaaacccttgtgtggaatggtcctttaggcgcttttgaaatcacaccttttgaccacgctacaaatactttggctaaaacggccgcaaagttaacttcaaaaggaagtcttataagtgttgcgggaggaggggatactgtgtcagcattaaattcaaaaaacttagcaaaaaaattttcttatgtttcgacggctggcggggcatttttagaatggatggagggaaaaaaattaccaggaatccaggcactagaaagcagatga

SEQ ID NO: 250191 - DNA, 301 bp, Unknown
  Bacterial polypeptide expressing nucleotide sequence isolated from the Sargasso Sea
aatgtctaatttaaaaattttttcagaggatttaatagtaagcaataagcgtattattgtaaggctagatctcaatgttccaattaataattttaaaatagaggataatactagaataaaaattattgaaccatttataaataaattaattgagaaaaaagccaaaattattattatttcacatctcggaagacctaaaggaaagatagtgaaagaaatgtcattaaaaccaatatatgattatttacgaaaaaatcttttaggaaatatctcattctatcaaggtgaaataaataatgat

SEQ ID NO: 250192 - DNA, 974 bp, Unknown
  Bacterial polypeptide expressing nucleotide sequence isolated from the Sargasso Sea
aaaacctatttcagaaaaattatcttccttgttaaataaggaagttttatttaacaaagatcttataaataaaaatacatccttgataataaacaaaattccaaatggctctattataatgctggaaaacattcgatttaatgtaggtgaagaattaaatgatagtgaattttcaaaaaaaatgtcagatttaggggatgtatatataaatgatgctttctcttgttctcatagatcacatgcttctgtagaaggaatcaccaaatatatcccttcatattttggtttacaaattactcaagaaatcagtgcattaaaaaaaataacagcagaaattgaaaaacctgtttcgcttataataggaggatcaaaaatttcgacaaaaattaaaattattaacaatttaattaaaaagtttaataatattataattgttggtggaatggccaatacaatgctaaaacatactggcacgaatataggaaaatcaatatgtgaatatgaatgtggccctttaattaaagaaattatagaaaattcaaaaaagtataattgtgaaatcactatacctaaagatgtcattgtatcaaaaagtttagatggaacaggaaaagaaaaaaacataaatcaaatagaagaaaatgaaatgatattagatattggaactaaaacaatatcttctattaaaagaattattaataactctaaaactatattgtggaatggccctgcgggatattttgaaaatccaaatttccaaaatggaacaaaaaaaatatcagaattaatttctgaaaaaacaaagaacgacaaaattttctctgtagctgggggaggagaaacagttgctgcaataaataaatttaacaaatttggttcatttacttttgtttcaactgctggtggagcctttttagaatatcttgaaggaaaaaccttacctgctataaaagcattaaatcaaaatgtctgaa

SEQ ID NO: 250193 - DNA, 295 bp, Unknown
  Bacterial polypeptide expressing nucleotide sequence isolated from the Sargasso Sea
gaattaattagtaaaactatagataactcaaacactgtattttggaatggacctgcaggatattatgaaaataaaaatttttcagttggttcagaattaatagccaaaaaaattgctgagaatacaaaatctaagtccttaatatctattgttggtggcggagatactgttgcggcaatcaaaaatactggacttgaaaaggtttttacatatttatcaacagccgggggtgcattcttggaatctcttgaagggaaagagctgcctggtatacaagtattaaaaaaaaactaaa

SEQ ID NO: 250194 - DNA, 1003 bp, Unknown
  Bacterial polypeptide expressing nucleotide sequence isolated from the Sargasso Sea
aatgaaaaatttacaaaattataaaattacaaataaaaaagttttactaagagccgatctaaatgtccctgttgttgatggtttaattacagataattcaagaattatggctgttaagtcttcaattagaaaactaatttctaacaataataaaatatttatactgtctcattttggaagaccgaatggtaaatatgaagaaaaatattcattacagtttattctgccatcgcttaaagaagtgtttcaaataaataaaattcattttttaaaaaatttaaataaagaaaatattaatactaaagtagttgagatgaaaagaggcgaggtatgtcttattgaaaatatcagattttataaaagtgaagaaaaaattgatttaaattttgcaaaaaatttaagtgatgtatttgatgtttatgttaatgaagctttctcagtatcacatagaaaccatacttctataataggttttccaaaatttttgcctgctgttgcaggagatcattttgttgaagaaataaaaaatattaatttatttttgaacaatgtaaaaaaacctaatactgcgataataggtggttctaaaatttcaacaaaaattaatcttttaaataatttggtaaaaaattttagtgttgtaattataggtggtgctatggctaatacgtttttattagcaaataaaatcaatattggaaaatcactagttgaagaaaaatttgttggggacgcaaaaaaaattcaaataaatgccaaaaaatctaattgtaaattaataataccgattgatgtagtttgtggaaaaagcatcaaagataaaacgccaatcaactccaatattgatgaggtacccgctaattcatttattttagatattggaaaaaacacaacaagcattatttgtaaacaaattattgaatcaaaaatgattttatggaatggcccagttggtgcgtttgaatataaaccatataacaaagcaacaaatcaaattgctgaa

SEQ ID NO: 250195 - DNA, 430 bp, Unknown
  Bacterial polypeptide expressing nucleotide sequence isolated from the Sargasso Sea
atggttgcattccgaaaacttaatgagattgaagttaaagataaaaaaatacttcttcgtgtagatcttaatgtgccaatacatgagggcattataagcgactcacatagaattgagaaaataatcccaactgtaaataatattttagaacgtgggggttacccaatactgatttctcattttggcagacctaaaggaaaatttaactctgcaatgtcccttgcgccaatagctgcaacgatttccgcatcgatggaaaagccagttcattttgtaaaagactgtataggaccaaatgctgagactaagataaaaggtatgaatttaggagagatagcactccttgaaaacttgcgatttcatccaggtgaagaacaaaatgatagtgagtttgctagttcattagctcgcttgggagatgtctatgtta

SEQ ID NO: 250196 - DNA, 835 bp, Unknown
  Bacterial polypeptide expressing nucleotide sequence isolated from the Sargasso Sea
gatgcaaataccaagcatggaaacactggatttgcatggcaagaggaccatgatccgattggacctgaatgtgcctcttaaaaatggtgccgtcatcagtgatgctagaattattgcttctcttccaaccatacaaatggcccttgataagggtgcaaatgtcattctgttgtcacatctgggtcgacccgaccctgaaaaattagatggcagtttttcactggaaccagtggcagagagactgcaagagatcttaggtataagagtttcttttcaatccaattggcttgagggaatcgatcatccgtctgatggagtcactctgtgtgagaatgttcgctatcactcgggtgaaaaaaagaacgatgagtcgctttctcaaaagatagcagggctttgcgatgtttatgtcatggatgcatttggtgcctcgcatcgaaaacattcaagcacatacggcgcacttcaatacgcaaaagaaagatgcattggaccgctcttatccaatgaggtgaactcaattaagaaggccattgatggacccaaatcacctgtcactgcaatcatcgggggcgccaaagtttcatccaagttaggcgtcatagaaaaattctcaagtttttgcgatcacgtcattgtgggaggagggattgccaatacgtttcttcttgcaagcggaaaggaggttggcgcctcattggctgaaccagaaatggttgacgcagcaaaaaatattctccagatggataatgtgcatgtgcctctgccagtcgatgtcagagtggcaaaagaattttcaggagaagcagtgcaacaatcaaatcgatcgacgaga

SEQ ID NO: 250197 - DNA, 586 bp, Unknown
  Bacterial polypeptide expressing nucleotide sequence isolated from the Sargasso Sea
tttaggtggatcaaaagtttcaacaaaaattaaagttttaaaatatttagtggaaatttttgattcattagcaattggtggagcaatggctaacacttttttgttgtcaaataattacaacgttggatcttctttaattgagaatgattttattaatttatcaaaagaaattcaaaaaaaagcaaaagaaaagaaatgtaaaatacttcttccaatcgatgtagtttgctcaaaagatctccaggataaaacaaatatcaaaacatataacattaatgatatccctaaagatcaaatgatattagatattggagaacaaagtacaaaattaatatcaaatgaaatattaaaatctcaatcagtattatggaacggtcctttaggtgcatttgaatatagtccttttgataaaagtaccatctcagttgcaaatattataaaagactattcaaataacactcaaataaattcgcttgctggaggtggggatactcttgctgcaattaaaaaggccaatgctaataatgcatttaattacttatctacagctggcggcgcttttttagaatggttagaggggagataa

SEQ ID NO: 250198 - DNA, 1180 bp, Unknown
  Bacterial polypeptide expressing nucleotide sequence isolated from the Sargasso Sea
atgaaaaaaataaaagatctagaagatctaaatcaaaaaatagtcttacttagagttgatcttaatgtacctattaaaaatgataaagttttagataacactagaattaagaaggtaattcctactatttcacatcttttgtatcataatgcaaaaataattataattactcacataggtagaccgaaaggcaaaaaaatagcagagctatctttaaacccaatttgtaaatatttaaaagatgaattgagcactggaataagattaattactaaaaatataaaaaatttaaataaaaaagaaatttttcataattctgatgacaagattgcattgctagaaaatataaggttttatcctgaggaagaaaatgacgacattgaatttgcaaaaaatttagcaagtttaggtgatatttatgtaaatgaggctttttcctgctcacatagagcacatgcctccgtatctaatattacgaaatttataaaatcttacggaggattacatttaattagcgagattgatgcattaagtcagataacacataatatcaagaggccaataagttgtataatcggtggatctaaaatttctacaaaaataaacgtaattacaaacttagtatctaaatatgataatattataattgtaggtgcaatggcgaataattttataagatttaacggtcaaaacattggaaaatctttttttgaaaaaaacgctgatactatagttaaagagatttacgataaggcaaaaaaaaataaatgtgaaatagtgtgtccaacagatttttctgtaggaaaaaatcttaacgatatttcaaaaaataaaaaaataaatgaaattgaatatgacgatttaatactagatattggattggaaacaattgtatctataaaaaaagttattaaaaattcaaaaacgattttatggaatgggccagctggatattttgaaaatgaaaattttgcgaccggaagctatgaaatagcaaaagaaatttccgataaaacaataaataataaattattttctgttataggtggtggggatacagttgctgtattaaacaaattaaatatagtaaaaaattttaattttgtttcaactgcaggtggagcatttttagaatatcttgaaggaaaaaaattacctggtataaaatctttagattaaa

SEQ ID NO: 250199 - DNA, 418 bp, Unknown
  Bacterial polypeptide expressing nucleotide sequence isolated from the Sargasso Sea
aatgagattacttaaagaccaggatcttagtaataagaatgtggttgtgagattagatttaaatgttcctattcaagacaagcaaattatagattcaaccagaatcatttcttcagtacctacaataaaatatctcgtagataaaaattgtaaagtccttttaacatcacatcttggcagacccgaggaaggaaagtttgatcaagatttctcaatgtctccggtcgctaaaaaattatctgaaatcttaaatcatgaaattgatcttattgattccctagacagcagcgatatttttaatacaactcaaatacaactattagaaaatttaagattccttatcggtgaaaaagacaataataaaaagctaggcaatcagctagcaaataaaggagatgtttatatatttgatgctttt

SEQ ID NO: 250200 - DNA, 1327 bp, Unknown
  Bacterial polypeptide expressing nucleotide sequence isolated from the Sargasso Sea
cttgagtgggcacagcggaaagcagttttgggtaaaacacaatcaaatttttgtccacaacggccaaaaccaaaccctcggtccagttactgtggaaggggtgctcaccctcgacgatgtggacctcagtggtcgtacagtactatacagggtggacgtcaattctccgcttgaaccttcaacagggagattgctagacgatggacgattgaaagctataatcccaactctggacgccctatcttcttctcgtgtagtgattatgggtcatcagtccagacctggtaaatccgacttcactaatatgcagaaacattgtgaccgcctctccaaacttcttggaaaacaaatcagattcgttccagatatctgtgaggatgtagcagttgaagcaatcaagtctctctccgatggtgaaatgatattcctcgataatgttaggatgaatgaggaggaatatgggactaagtatgactctaacaaacagactgaagacacttcactagtgtcccgactatcctcggtttctgacctactcgtcacggatgcattcgcagcggctcatcgcaggtctcccacgcttaccggattcaccaactccattccttgtgtggctggaactctgatggagaaagagattaggaatctgaggacggcactgaggaatcctcccaatccataccttgcaatccttggaggagcaaaatgcgacgattcagtcagggttgccttgaatctgatatctaagggccaggtggataagattgcgttcgtaggagttactgggaatctaatgctatgggttgcaggaaacgatattggcgataggaacaaggaattcatcagaaccacccttggtcgtgatttcgaaactgcatgggaaacgggaaagaagatattctcggaaaatcctgagaagatattccttccaattgacgtggcagttgaatcagagggaagcaggagaccattgttggtctcagatctacctacagaggatccaatctacgacatcggacttcagactctcgcatctctgaagccactagttgagaatgcaggatgcattctatggaacggtccagcatcttacttcgagctccccgacttcgcgtttggtacgatagagattctcaatatgtgcactgagacagatgcaatgaccataatcggcggcggtcataccagtgccctggtcaatagtaggggcgtatcctcgctagtctcacacaacagtactggagggggatcaaccatgagcttcctttctggggaaccaatgcctgtaatcgcctctctgaaggaatcgttccggaagttcggctaa

SEQ ID NO: 250201 - DNA, 643 bp, Unknown
  Bacterial polypeptide expressing nucleotide sequence isolated from the Sargasso Sea
gataattattggagggtcaaaaatttcaacaaaactaaatactcttcacaatattgttatgaaagcaaacattgtagcaattggaggagcaatggcaaatacttttctagctgcaaaaaatatagaaattggaaatagtttattcgaaaaaaatatgatcaataatacacaagaaattttaaaaattgctaaatatcataattgtgaaatcattttgccttctgatgtagtcactgctgataaccttagagatagtatcacagcaaaagaattcaatgttggcaatattccaaaaaataaaatgatttttgatattggaaaaaaatctatattaaatttgatttctaaaatcagagaatctaaatcactagtatggaatggacctctaggagcctttgaatttaaaccatttgattactcaacaagatctgtatctaatgaagttgccaaattaactttagaaaaaaaaattattagcgtagcaggtgggggagacactgtagcagcgttgagtcaaagtaacaatgaccaaaagttctcttatctctctactgcaggtggagccttcctcgaatggttagaaggcaaagaacttccaggcattactgccctaaaacaagatcaaattattttgaagtcatga

SEQ ID NO: 250202 - DNA, 277 bp, Unknown
  Bacterial polypeptide expressing nucleotide sequence isolated from the Sargasso Sea
atgattaatgttgaaaatattaaaaaatttaaaactgaaaataaaactgtattaataagatttgatttaaatgtacctcttgcaagtgggtctcctgtcagtgataggattaatcgggtcattgactcaattgctgaacttaaattattaaattcaaaaatagtaatattatctcacctaggaagaccaaaaggaaaaataaacaatgaattatctttaaagcaaattacacctcaacttgaacaggcatttgatagtaaaattactttttcttaat

SEQ ID NO: 250203 - DNA, 665 bp, Unknown
  Bacterial polypeptide expressing nucleotide sequence isolated from the Sargasso Sea
aatgttaaatgttaaagctctaaaaacatttgatcagaaaaataaaaccgtacttattcgctttgacctaaatattccactcaataaagaagcctctacaataagcgatcggattacgagaattaaaaatccaatacaaaaccttcttaataagaataataaagttgtaattctgtctcatctaggaagaccaaaaggaaaaagaaatgataaactttcacttaatcaaataattagctcattagaaagcgtattgcaaaaaaaaataatatttctttcaaattgtattggcgatgagattgaaaaaaaaataaattctttaagccaggattcaattattcttcttgaaaattgccgttttcatgaaggcgaagagcaaaatgataaattttttgcatccgagctatcaaaattagcagacgtttatatcaatgatgcttttgcgtgctctcatagagctcacgcttcaattgaagctatcacaaacttcataccatcttattgcggcgaactattacatgaagaaatattaaacttaaatgatgtagttaataaccctaaaactcctgcattaactatcattggtggctcaaaaatctctacaaaaattacagttataaaaaatctcctacaaagaatggactcaattgtcattgctggtggga

SEQ ID NO: 250204 - DNA, 880 bp, Unknown
  Bacterial polypeptide expressing nucleotide sequence isolated from the Sargasso Sea
aatgtctgatttaaaatttttttctaatgatattcctgtcagtgggaaacgtgtagttgttcggctggaccttaatgttccaataaataattcaaaaatagatgacgatactagaattaaaattgttgagccttttataaataaattgattgaaaataaagcaaaaattattttattgtcccatctagggaggccaaaaggaaagataatttcagaactatcgcttaaaccaatattcaatcatctagaaacaaaattaaaaagtaaaatttatttttatcaaaaaaaaatcgacgataaagcggttgatgcttctaaacagttaaagcctggtgaggttttgttaattgaaaatattcgttttttcaaagaggaggaaaacgacgatgaagcttttgcaaaaactctttcaaaacttggtgatatttatataaacgaagccttttcttgctctcacagaaaacaagcatctatacataaagtaactaaatttattgatagttatgggggcccaaatctggaaaaagaaattaaatcgattgatttaataataaaaaataaaaaaaaaccggtcacttgtattattggtggctcaaaagtatcaagtaaaataaatattttatcaaaattattagaaaatgcagataatctagtaattgttggagccatggcaaataattttcttaaatttagaggtgtgaatgttggagcctctctagttgaaaatgagtcagaaaatatcgtaaaaaatttaaataatttagcagataagaataaatgtaatatcatcattcctgtagattgtaatacatcatccagtatgggaggaaaatctttttataaatccttagacgaaataagttcagaggatattattttg

SEQ ID NO: 250205 - DNA, 1201 bp, Unknown
  Bacterial polypeptide expressing nucleotide sequence isolated from the Sargasso Sea
aatgaaaagtatagaagataaaaatttaagtaaaaaaaatattttagttagagtagatcttaatgtgcctgttgttaatgatcagataactgacagatcaaggattaaatcaatattgccaactttgaataagttgaaagatactaacaataaaattttcttaatttctcattttggaagacctaagggcataaaaaataaaaaatattctttaaaatttatatgcaatattcttgaggaagaaataaatattaaaaagatctattttctgaacgacttcgatgaaaaaaatattcagaatatgattaatgatattaaaccaggagatatttgtctttttgaaaatatacgattttcttcagctgaagaaaagaacgatctagattttgctaaaaatattagtaaaaattttgatgcatttgttaatgacgccttttcttgctctcatagaaaacatgcatcaatagttggtcttccaacttttttaccgtcatatctagggtatagttttttaaaagaaattcataatcttaattctttattatctaataaagcaaaaccaaatttagcaattattggtggctcaaaaatttctactaaaatagaattactttttaatttgtcttattactttgatacaatagttatcggaggagccatggctaatacttttttatatgcaaaaaaaattaatataggaaaatctttagttgaaaaaaactacaatgaagttgttgtttcaattatcaataaagctaaagaaaataattgtgaaatcattctgccaattgatgttgtctgcgcaaataatttaaaagaaaaagaaaccgttagaagatgtgaaatagacgatgtatctgaatctcaaatgattttagatattgggtccaaaacaactcaaataatctcacaatatattaataaatcaaaattgattttatggaacggacctttaggagcttttgaatatccttcttttgcggagtcttctattaaaattgccaatattataaagtcacactcagtcaactctgagatcattagtattgctggaggtggagacacaaactcagttattaaaattgctaaagcaaaagatggcttttcttatatttcaaatgctggaggggcttttcttgagtggttagaaggaaatggatccccaggttttaatgcaattgaagaaaataatataaattaa

SEQ ID NO: 250206 - DNA, 322 bp, Unknown
  Bacterial polypeptide expressing nucleotide sequence isolated from the Sargasso Sea
tatgatactagatgcggggccatcaacagtcgataacataaaacattgtatagctagtgctgaaacacttttatggaatgggccattgggtgcatttgaggttcctccttttgatcaagccaccagtcaggctgctaaatttgcctctgaaaggacaaaaaacggtgatttaatatcagtcgcgggcggtggggatactgtagcagctctaaataaagccggtgttgccgagtcattcacctacgtttcaacagcgggcggtgcatttttagaatggctggaaggtaaggagttacctggagttctctgccttacaaaataa

SEQ ID NO: 250207 - DNA, 481 bp, Unknown
  Bacterial polypeptide expressing nucleotide sequence isolated from the Sargasso Sea
aatgtctaatttaaaaattttttcagaaaatataaaaatatataacaaacgtgttattgttagactagaccttaacgtaccaattagtaaatcaagaatagaagacagcacaagaatagagatgattgaaccatttatcaatcaattgattgaaaaaaaagcaaaaattattttaatatcacatttgggtaggcctaaaggcaaagtagtaaaagaaatgtctttgaatccaatatttaattatttacaaaagtctttgaacagtaaagtttatttttataaagataagattgatcaaaatgcaatagatgcgtctaacaatttaaaacagggtgaagtattactaattgaaaatatccgtttttttaaagaggaagaagatgataatgaaaattttgcaaaaagtttatccaaattaggagatttttatattaatgaggctttttcttgttcacatagaaagcaagcttcctatacataa

SEQ ID NO: 250208 - DNA, 371 bp, Unknown
  Bacterial polypeptide expressing nucleotide sequence isolated from the Sargasso Sea
tgatgaaaaccgaccactaaaaaattacccggaaatttccaacgatgatatgattttagatataggacctgaaacaattaaaatgattaaaaatataatcaataattcaaatacaattctttggaacggtcccgcaggttattttgaaaatccagaattttcaaaaggtagtaaagaaattgctgaacaaattgtaaaaagaaaaaaagaaaataaaatctactgcgtttctggcggtggagatacagtcgcagttctaaattattttggactagttaaggattttgattttgtttcaactgctggtggagcatttcttgaatttcttgaaggaaaagagcttcctggtataaaggcacttaattcatgac

SEQ ID NO: 250209 - DNA, 308 bp, Unknown
  Bacterial polypeptide expressing nucleotide sequence isolated from the Sargasso Sea
tattggtccaaaaactatagataagataacaaaaattattgataacagtaaaactatactttggaatggacccgcaggatattttgaaaattcaaattttgctaatggaagtattcaaatagcaaaaaaaataattgaaaataataaagcaaacaaaattttttcagttgctggtggtggagatacagttactttattaaataatttaaaggcagttaatgaatttaattttgtttcaactgcaggtggagcttttttagaatatcttgaaggtaaaaaccttcctggtataaccgcattaaattaaa

SEQ ID NO: 250210 - DNA, 854 bp, Unknown
  Bacterial polypeptide expressing nucleotide sequence isolated from the Sargasso Sea
atgtaacttctcatcagatatttcattaattgaaaatataagatttttgccaggagagcttgagaatgacgcagagcttggaaaaaaactgtcaaacatagcagatgtttatgtatttgatgcgtttgggacatctcatcgcgctcatgcatcaacttatggagctatcaaagcctctgaagtatcgtgcgccggattgcttttagaaaatgagacaaatgcacttcaacaagccattagttcaaaaagttcacccatgctttcaattgttggaggatcaaaagtatcttctaaattagaagtaattaaaaatttgtcaaaaatttctgatgacgtcatgacaggaggcgggatcacaaacactattttgaaagcccaggggcataatattggactttctctgcatgaggactcaatgttgaatgaagcaaaagaattacttgagagtggcaaaattttattgcctgatgaagtgattgtaagcagagatattaaatcaaatattaccagaataactaaagttaattcagtgcaagatgatgagatgattcttgatcaaattctcagccctgctgtgttaaaaaaaataactcaagcaaaaaaaattatttggaacggtcctattggtgtattcgaacgccaagctttttcattggggactaaagatctcgctgaggcaattgcatcatcaaacgcatttagtcttgctgggggcggagaaacccttttagccattaagatgtttattgaaaaaaataatatttcctattgctcaactggaggaggagcttttcttgaatttatggaaggaaaagagctaccatctttatctgctttaggctttaaattttaaa

SEQ ID NO: 250211 - DNA, 561 bp, Unknown
  Bacterial polypeptide expressing nucleotide sequence isolated from the Sargasso Sea
tgattaaaaaagtaaataatttagtaatagttggtgcgatggctaataattttttattatacaaaggttataaagttggtaagtctttgatagaggaaaacagcaaatctacaataaaaaaactgtatgatttagctaatgaaaataattgcgaaatcataatacctttggattgtactgtttctgaaagtacgagtggaaagccttttcagattgaacttaatcaaattaaagagaatcaaattattttagatataggcccaaaaagtattaactatatatcgaaaaaaataaatcagtctaatacggttttatggaatggtccggcaggatattttgagaacaaaaattttgcgagtggaaccattgcattggctcagtcaatatccgaaaatacatcaaagaaaaacttattatcaatcgtaggtggtggtgatacagtttctgcaattaacacttatacttcaaatttaaaatttacacacttatcaacagctgggggagcttttttagagtttcttgagggaaaaaacttgcctggaatagaagttttaaaataaa

SEQ ID NO: 250212 - DNA, 253 bp, Unknown
  Bacterial polypeptide expressing nucleotide sequence isolated from the Sargasso Sea
cttgaataaaaagaaagtgatttcagattttcccaagtcttactataaaagtaaaaaagtttttgttcgtgttgattttaatgttccaattaacattgagactgattctatcagagaggactatagaatcaggagagctataccaacaattgattatcttatagatgcaggtgcaaaagttattttaggctctcatctaggtagacctaagggaaaagttgtaaaaaatctttcacttcggatagtatctagg

SEQ ID NO: 250213 - DNA, 1180 bp, Unknown
  Bacterial polypeptide expressing nucleotide sequence isolated from the Sargasso Sea
taataactcttttttagatgacactaggctgaaggcagtaattccgacaattaacaaattaagtaagacaaaattaattatcttaacacatcaatcaagacctggaaaaaaagattttacaagcacgtcaagtcatgcaagagaatttcaaagactgctaggtaggactgtgaaatttgttgatgacatttgtggtgaaaaagcattttcggcaattgaagaaatgaaaattggagatatattaatgcttaataacgttagaatgaatcaagaagagttagaatacaagactaatgactatgaatcgcaaagtgatactcaatttatccaaagattatcgagtattgctgacgtttttgtaaatgatgcttttgcttgtgctcatagaaattcaccttctatcacaggatttacttacgcattaccctgtatagcaggttcattaatgattgatgaaattaactcactagaaagcgtaatgaataaccctaaaagaccgtgtattgcaattttaggaggcattaaagttgacgattctgtaaaagttgcaaaaaatatgttaataaataatattacagaaaaaattattgttactggtggtgtagcaaatttatttttagatatttcaggtacagacattggtgaaattaatagattatttctcaaaaaagaattaggaaagaagtgggataaaacttgtgaagatattcacaatattttattacatcattctgaaaaaataattttaccagttgatgtagcattaaatgtaaatggtaaaagaatagatcaagaaatttcaaaattacaaaatgaatttcaaatttttgatttaggggttcaatctacattaaagacatcatttgaaattaaaaatgcagggactataattctcaatggacctgctggtgtttttgaattagatgattttaaatttggcactatggaaatcatcaacgcttgtgctgaaagtaaagcatttgttgtagttggtggtggacatacagcaaccctgatcagtaatttaggccttaataataaaattagtcatgtttctacaggcggaggtgcttgtttggaattattggcaggcggaaaattatcaggaattgaaagtttagaaatttctgcgaaaagatttggactcacgattaaaaaattacaaagagaattactatga

SEQ ID NO: 250214 - DNA, 833 bp, Unknown
  Bacterial polypeptide expressing nucleotide sequence isolated from the Sargasso Sea
tcaggcgggtgaaaaaaagaatgatgagaccttgtctcagaggatgcccagcctatgtgatgtctatgttatggatgcatttggagcttcacataggaaacattcaagcacatacggcgtgcttcaatatgcgaaagagggatgcataggtccgcttttatcaaatgaagtgagctcaataaaaaaagcgattgatagaccaactgctcctgtgacagcgatcattggtggtgcaaaggtctcttcaaagttgggtgtgattgagaggttctcaagtttttgtgatcacgttatcgtaggaggcggcatcgcgaacacatttcttcttgcaagcggtaagcaggttggtgcgtcattggttgaatcagaaatggtcgatgcagctaataaaatccttcaaatggaaaatgtaaatgttccacttccggttgatgttagagtggcaaaagaattctcagcagaggcagatgcaacgatcaagtcaattgatgaagttgctgaggacgatctgattttagacataggacctgagaccaccgaatcatattgcaatatcatcaatgaaaccaaaacaaccatttggaacggacctctgggtgtatttgaattcagctcattcgcagaaggaacaagagcacttggacatgctgtttcttcaaatgatggtttcacgattgttggaggtggtgatactgttgctgtggttgaagaattgggtattgctgattcaatgagttatatttcaacaggtggaggggcatttttagactttgttcaaaatggcacgcttccaatactagatttacttgaaaagaagaggggcgattcatgat

SEQ ID NO: 250215 - DNA, 743 bp, Unknown
  Bacterial polypeptide expressing nucleotide sequence isolated from the Sargasso Sea
tgcatttggtgcctcgcatcgaaaacattcaagcacatacggcgcacttcaatacgcaaaagaaagatgcattggaccgctcttatccaatgaggtgaactcaattaagaaggtcattgatggacccaaatcacctgtcactgcaatcatcgggggcgccaaagtttcatccaagttaggcgtcatagaaaaattctcaagtttttgtgatcacgtcattgtgggaggcgggattgccaatacgtttcttcttgcaagcggaaaggaggttggtgcctcattggctgaaccagaaatggttgacgcagcaaaaaatattctccagatggataatgtgaatgtgcctctgccagtcgatgtcagagtggcaaaagaattttcaggagaagcagttgcaacaatcaaatcgatcgacgacattgaaaaagatgaactcattttagatatagggcctcaaaccgctgaagcgtattgcaatatcattaatgaaaccagcacaaccatttggaacggcccgttgggagtgtttgaatttaaagccttctctgaagggactgaggcattgggccatgcagtttcagaaaatcaaggtttcacaattgttggcggaggggatactgtggctgtggttgaagcgcttggtatcacaaaaaaaataagttacatatcgactggcggaggggcttttctagactttgttcaaaatggctcgttgccaatactcgatcttcttggagaatagg

SEQ ID NO: 250216 - DNA, 601 bp, Unknown
  Bacterial polypeptide expressing nucleotide sequence isolated from the Sargasso Sea
taaaattaaacttttaaataatatagttaagcagtttaattgtatagtcattggtggagctatggctaatacatttttattatcaaataatatagatgtgggaaaatctcttgtagaaaaagacttagttgaagaagcaaaaaatatacaaataaaagctaatcaatataattgcacaattgttttaccaaccgatgtagtgtgcggaaaaagtatagaagacaaaaatccttttgagcttagtataaatgaaatcacatcagattttatgatcttagatttgggaaaaaaaacaactgaaacaatcaaccaggaaattaaaaaatcaagaatggttttatggaatggtcctgttggagcatttgaatataaaccatatgataaggctacttcaacaatcgcaatatacattaaagagaatgcaaaaaaatttaatattagcactcttgctggtggtggcgatactatttcttcaattaaaaatgcaaatgcagaagatggctttgattatatatccaatgcaggaggtgcttttttagaatggttagagggcaatcagtctccaggagttattgcaataaaagaaaataattttatttaa

SEQ ID NO: 250217 - DNA, 1330 bp, Unknown
  Bacterial polypeptide expressing nucleotide sequence isolated from the Sargasso Sea
cagaacgggttccagagcgaagacatcttcatcgcgaaggtcgtgcaatttcaggagttgctcgacgtcaggcatagcgtcatgctgctgggcccgccgggcgccggcaagtcgacgatctaccagacgctcgtggcgtgcaagaacgtggaccagccgaagccgctctgcgtttatgaagcggtcaatccgaaggccgtgacgtccgacgagttgtacggctacatgacgctgtccaaggactggaaggacgggtgtctcagtattgtgatgcggaacatgtgcaagtgctggcagccctataccagtgcccagacggaccagtgggtggtcttagatggcgacatcgacgcggtctggatcgagtccatgaacacggtcatggacgataataaagtactaacattagtgtccaacgaaagaattccactcaccccagcgatgaggatggtgtttgaaattgagtccttgaggaacgcgacgccggctaccgtcagtcgcgcggggatcctgttcatcaacgagacggacatcggctgggcgcccttcgcgacgtcgtggacggaacgacgagactcggacaccgagaagagctgcttgccgggtttttttgataaatacatacctcaactgatagctatgttgaaagaaaaaggtgtagagtgcctgacgccggtcatgaccatctccaaggtttcggccttgtgtcacttgctggaaggctatctatcagcggtgccagagagcgaaaaggacgggcatcggatcgagcggttgtttttgtacgcctgcatctgggcctttgggggctgcgcggcggcggacaagacgacggactccaggcaattatttaatgaggtctggcgcgacgtggcgaagggaggtttgaaactcccggaggccgggctctgcttcgagtacgccgtcgacccggtatcaggcgacgtctgcgagtggagtgaattggtacctcgctatgaaccggtcggtgtggtcaaattttcgaatatcgtcgtggctaccgccgacctagtagcattgaaaactctaacaacgaacctccagacgaacggccacggtgtgctgtttgtcggctccgcaggcacgggcaaaacggtcttggtgcgagacttcctccgatccctcccgatcgagaagtacgacaccgccaccatcaacatgaacttttacaccgacgcggtgacgacgcagggccagctcgaggcgccgatcgagaagcgttccggtaaatcttatggtccaccggcgggcaaagtactagtctacttcatcgacgacctgaacatgcccttcgtggaagagtacggga

SEQ ID NO: 250218 - DNA, 580 bp, Unknown
  Bacterial polypeptide expressing nucleotide sequence isolated from the Sargasso Sea
agtatcaacaaaacttgaacttataaagcatatagataatgttgcagataatattattattggtggcggtatagcaaatactttcattctggcatctggtctaaatgtaggaaaatctcttgttgaagaaactttggtagatattgcaaagagtattcttgataaaggtaaaatcattttgccaaaagttgctattacttcagaaagttttgaaggcaagaatattaataaaaaattaatctctgatattaaggataatgaaatgatcttagatttgtatatcgaagaagagactgatcagctaattaataatgcaaataccattctatggaatggaccaatgggtgtttttgagaataaggcatttgaaaaaggcacaagagatttatcaaacgctattgcaaaatctaaagcattttcattagccggcggcggcgaaactttatccgcaattaataaatatattaaaccagatgatgtatcatattgttctactggcgggggagcctttttagaatttatggaaggcaaagcactgccagcaataaaagttttaaattcaaaaggaaatgggagataa

SEQ ID NO: 250219 - DNA, 811 bp, Unknown
  Bacterial polypeptide expressing nucleotide sequence isolated from the Sargasso Sea
aatgaaaaatctcagaaattaccagatagttaataaaaaagtattatttagagccgatctaaatgtcccggttgtagataaagttataactgatagttctaggattttagcaattgaatcttcaattaaagatcttattttaaataaaaataagatttttataatagctcattttggaagaccaaagggagaagtgttgaaaaaatattctttaaagtttattctttcacctcttagagaaatacttggaattgataaaattcattttttagaaaatttacaaaaggataagattaacaaaaaagttaatgatatgatgtatggtgaagtttgtcttgttgaaaatattagatttcaaaaaagtgaggaaaaaattgatttaaattttgccaaaaacataagtagtttatttgacgtctatgtaaatgatgcattttctgcctctcatagaaatcatacatcaattacaggttttgcaaaatatattcccgctgttgctggaaaccacctcattaaagaaattaaaaaaattgattcatttttagaaaattccaaaaaacctaatatggcaatagttggaggatctaagatatctacaaaaattaaacttttaaataatttaattaagcagtttaattgtattgttatagctggggctatggctaatacatttttattatcaaataatatagatgtaggtaaatctcttgtagaaaaagatttagttgaagaagcaaaaaatatacaaaaaaaagccaatcaatataattgcacaattgttttaccaaccgatgtagtttgtggaaaaagt

SEQ ID NO: 250220 - DNA, 313 bp, Unknown
  Bacterial polypeptide expressing nucleotide sequence isolated from the Sargasso Sea
agttcggataagatttttgatattaacttaagtagcaatatgtcggaaatccttaagaactcaaaaactattttatggaatggaccagtaggagtttttgaaaaagagccttttcagaaaggcacacatcaattagctaaaactattgcagagtctgatgctttttcacttgctggaggtggagaaactatagctgctataaataaatttattaaaaaagatgaggtatcatattgttcaacaggcggaggagcttttttagaatatatggaaggcaaattactcccatcaattgaggctttaggaggctaaa

SEQ ID NO: 250221 - DNA, 490 bp, Unknown
  Bacterial polypeptide expressing nucleotide sequence isolated from the Sargasso Sea
aatgattaaactatcatcattagatcttaataataaaaacttagtcattagagtggatatgaacgtgccaattaaagatgggaatgttcttgattcaacaagaattaaggcatgcttatcaactattgaatacgcacttgaaaataatgcaaaagttcttttgataagtcatttgggtagacctattgaaggaaattttgaggaagagttttcactaaaacctgttgcaaataaactaagcaaaatcataaacatggatgttgaacttattgatacattagaatctaataaaatttttaactcatcatcaaatattcaagttttagaaaatataagattttttgaaggagaaaaagaaaactctcaagagttaggtaataaattagggtctcttggagatatatatgtttttgatgcttttgggactgcgcaccgagaacaagcatcgactcatgctgcaataatgaatgctcccatagcatgctctgga

SEQ ID NO: 250222 - DNA, 826 bp, Unknown
  Bacterial polypeptide expressing nucleotide sequence isolated from the Sargasso Sea
gatggcaaagcagtcagtcgccgaccttgatcctgccggtaaaaccgttcttgtccgcgttgattttaatgtccctcaggacggtgacggcacaataaccgatgatcgtcggattcgcatggccgttccaacattacgatccattcttgatcgtggtgggaaagcgattcttatgagccacctcggtcgtccgaagggtgaggtaaacccaaaactctcgcttgctccagtggcgaaacgtttgggtgagcttcttgaaaagccagtagctcttgcgactgataccggagggaaagattcaacagaaaaagcgcatgcattatcagttggtgatgttctggtgctggaaaacgttcggtttaaccccggagaaaaaaagggagatgacgcgagctatgttgcaggcattgctgatcttgcagatgcctatgcgaacgatgcttttggaacctgtcatcggactgaagccagcatgtacgctgttccaaaagcgatgaaagaatcaggtaagcccgtggtcgttggttttcttgttgagaaagaaattcagtatctctcagatgctgttggccaaccgaagcgaccgtttgttgcgattctcggcggtaaaaaggtgagtgataagattgctgttattacaaatcttctaaagatttgtgatcatattttgattggtggtgcaatggcttatacattctctcttgctcaaggtgggaagaccggtgattcccttgtggaaccagataaacttgaattggcaaagcagctcctccgagatggaggagaaaaacttgtttctccctgtggatactcagtgtgcggatga

SEQ ID NO: 250223 - DNA, 937 bp, Unknown
  Bacterial polypeptide expressing nucleotide sequence isolated from the Sargasso Sea
atgcttgatgtcggaagtataaaaaaattagaagatagaaataaaactgttttagtccgctttgacctaaatgttcctctagatgaagtcagtggtaaagttaatgatagactgacaagaataaaaaatacaataaatcaacttcaagaattaaatagcaaaattgtaattttatctcatcttggtcggcctaagggtactaataataaagatttatcacttagtaaaataacagatcagcttgaagaagttttaaattctaagattaattttataaatgattgcattggcgatgaagttaagaaaaaaataaactcttttaatcagagctcaatcattcttttagaaaattgtagattccataaaggagaggaggaaaataacttagaatttgcaaaaaaattatctgagttagccgatgtctacgtgaatgatgcttttggctgtgtacatagatctcatgcatcagtagacgcaatcacacaatatatgccttcttatgtgggaaacctattagatgaagagttaactaatcttcatagtatcactgaagatccacaatcaccttctattacaattcttggtggatcaaaaatatcaacgaagatttctgtcttaaagaatctgtctataaaaatggattctattgtaatttgtggcggcatggctaataatttcttggcatataatggacatgacataaaagattctcttatcgagaaagacgtagataacttaattaaagaaattattttacatgctgaaaaaaataactgtaagcttataactccaattgatgttgttacagctactgagattagagaaaatacaaaagtatatatttcctctgttgatcaaattaaagatggaaccatgattctagatataggacccaaaactatagatattatagaaaatgaattaaacaaatctaaaa

SEQ ID NO: 250224 - DNA, 1053 bp, Unknown
  Bacterial polypeptide expressing nucleotide sequence isolated from the Sargasso Sea
ttatttctcatgttggaagacccaaaggcatgattgatcaaaaattatctctcaaaccgattgctgaaagattagactatattttaaaaaactctcctgactctgagttactttatggatcagaacaaaatattagattaataaatgatgacttaaaagaggttacaaaagaaaatcttttcataaataaaaatgaaaaaatagttatgcttgaaaacataaggttttatgagggagaagaaaaaaatgatagtgaatttgcaaaaaaactatcttctttaggcgatatatatgttaacgatgcattttcatgttctcacagatctcatgcctctatagaaaaaattacaaattttttaccttcattttctggatttcagtttaatgaggagattaatgcccttaaaagactcacatctgaaataaaaaaaccaattacttgtattattggtggctcaaaaatatctactaaaattaatattattaaaaacctaattcccaaatttgataacataataattgttggtgcaatggctaataatattataaaatttaaagattattctgttggaaaatcaatcgtagaagaaaattgtgaaacaattgtagatgatatttttaaaactacaaaaaaatatgattgttgcttaacatttccagaagatgttgcggttggcaaaaataaggaagatttacctaaaataaaaaaaatagatgaaatagaagatgacgatttaatcttagatattggaccgaagacaataaaaataattaaggagattattgaaaatagcaaaacagttttgtggaatgggccagcaggttactttgagaatccagattatagaaaaggtagttttgaaattgctagaaagattatggaaaaaagtaaagaaaaatcattttattctgttgctggaggtggagatacaattgcagttttaaatttatcaaaaactagaaagtatttgaattttagctcaactgctgggggagcatttttagaataccttgaaggaaaagaactgcctggtataaaggcattaaattaat

SEQ ID NO: 250225 - DNA, 550 bp, Unknown
  Bacterial polypeptide expressing nucleotide sequence isolated from the Sargasso Sea
catgattggtggaggaatgattttcactttttataaagctagaggtttagatgtcggaaaaagccttgtagaagaagataaactcgagcttgctaaagatttagaagcaaaagcaaaagcaaaaggagtagaattgctattacccactgatgttgttttggctgatgaattttcccctgacgccaatagcaaaatatctcaaattgatgcaattagtgggaattggatgggtctagatattggtccagattccattaaagtttttcagaatgctcttgcagaatgtaagacaattatttggaatggtccaatgggagtttttgaatttgataaatttgcagacggtacaaattcaatagctacgactcttgcggacttgagtgctttctctgaagtttgtacaataattggtggtggagattcagttgcagcagttgaaaaagcaggattagctgagaaaatgtctcatatatctactggaggtggggctagtttggaacttttagaaggtaaaactttaccaggtgtggctgcgttaaacaacgcttag

SEQ ID NO: 250226 - DNA, 985 bp, Unknown
  Bacterial polypeptide expressing nucleotide sequence isolated from the Sargasso Sea
aaatgaaaaaatgagattaactccagtagcagcaagattaagtgaattgttggaaaaaaacgtttctcttactaacagttgtataggtgatgaatcaatcgcagaatcaaatagcttaaataatggagatgttcttttacttgaaaatgttcgtttttttggtgaagaggaaaagaatgacttggattttgctaaaaacttagcatcacatgcagatatgtttgtaaatgatgcttttggtgctgctcatagagctcatgcttctactcagggagttactaattatttaagtccatcagtagctggattccttttagaaaaagaattgaaatacttacaaggggcaatagatgctccaaaacgtccattggcagcaatagtgggaggatcaaaggttagtagcaaaataggagtgcttgattctttattagataagtgtgacaaaattatgattggtggaggtatgatttttactttttataaagctagaggtttagatgttggaaagagccttgtagaagaagataaacttgagcttgccaaagatttagaagcaaaagcaaaagcaaaaggagtcgagttacttttaccaactgatgttgttttagctaatcaattttctcctgatgctgaaagtaaaatatctcaaattgattcaattagtggggattggatgggtctcgatattggtccagattccattaaagtttttcagaatgctcttgcagaatgtaagacaataatttggaatggcccaatgggtgtttttgaatttgataaatttgcagaaggtacaaacgcaatagctactacccttgcggacttaagtgctttttctgaagtttgtacaataattggtggtggagattcagttgcagcagtggagaaagcaggattagctgagaaaatgtctcatatatctactggaggaggtgcgagtttggaacttttagaaggtaaaactttacctggtgtagctgcttaa

SEQ ID NO: 250227 - DNA, 780 bp, Unknown
  Bacterial polypeptide expressing nucleotide sequence isolated from the Sargasso Sea
aatgaaatttcttgggttgaacgattttcagtttaaagatcaacgtgttttgcttcgtttagatttgaatgctccaatagaagctggtgaagtaagcaatgatgaaaggttaataaggtctttaccaactataaaacatatattgaataacgaagggaggctcgtagtgataagtcatttaggaaggccagaagaaaacggtatgcaccaaccagaattctctttgtatccagtcgttaaaaaattagagcaattattaggtagatcaatagaattaatttctgatttagaagacttaccctcagttaaccagggagagatgattgtccttgagaatataaggttcttaaagggcgagaaatctaacaaacccaatttgtctaagaagttagccaatattgctgatatctttgtcatggatgcttttgcaacttctcatagagctcactcttctacgacaggagtaattgaatatagcaataaagcttgtgctggattcttgttggaagaagagatagaggcactatctaagataacaaataataaagggaattcgcttgcagtattagggggagcaaaaatatctactaaactagatttaattaattctttatgcgaaaagatgggaaatgttattttgggcggagggatagcaaatacatgtttattagcccaaggttttcctgttggtaattctttggtggaagaaagcatgcttaaagaagccttagaacttgctgaaagagagaatgtaatagttccaaaaacagtagtaacagc

SEQ ID NO: 250228 - DNA, 871 bp, Unknown
  Bacterial polypeptide expressing nucleotide sequence isolated from the Sargasso Sea
gatgtggtgctgctggagaacgtgcgcttctttgctgaagaagagaagaacgagtctggctttgctgagaagttggccggtctagccgaggtttacgtcaacgatgcctttggcgctgctcaccgtgcccatgcctccactgaaggcgtcaccaaatatttgagcccgagcgtggccggatacctgatggagaaagagcttcagtacctccagggtgctgttgatgatcccaagcgtcctcttgctgccatcgttggtggatccaaggtcagcagcaagatcggcgtgctggaagccctgatcgataagtgcgacaaggtcttgattggtggcggcatgatcttcaccttctacaaagctcgcggcctctcggtcggcaagagcttggtggaggaggacaagctcgagctggccaaagagctggaagccaaggccaaggccaagggtgttcagctgctgcttcctaccgacgttctgctcgccgacaacttcgctcctgatgccaacagccaggtggcttccatcgatgccatccctgatggctggatgggtctggacatcggcccggattccatcaaggttttccaggacgccttgggtgactgcaagaccgtgatctggaacggccccatgggtgtgttcgagttcgacaaatttgcggctggcaccaatgccatcgccaccaccctggctgatctgagtgccaagggttgctgcaccatcattggtggtggtgactcagtcgctgccgttgagaaggccggcttggccgctcagatgtctcacatctcgaccggtggtggagccagccttgaactgctcgagggcaaggtgctgccaggggtggctgcactcgacgaagcagcctgag

SEQ ID NO: 250229 - DNA, 327 bp, Unknown
  Bacterial polypeptide expressing nucleotide sequence isolated from the Sargasso Sea
atgatgatataattttagatattggcccaaaaactattaacaaaattaaatcaataattaataaaagtaaaacaattttgtggaatgggccagctggatattttgaaaaccctcaattttcaaaaggaagttttgaaataggaaatcaaattgcaaatcaaaataaattagatcaaattttttctgtagcaggtggaggggatacttttgctctaattaacaatattaatattttagataattttaattttgtttcaactgctggtggagcatttttagaatttcttgaaggaaaagaattgcctggtataaaggcattaaactaat

SEQ ID NO: 250230 - DNA, 811 bp, Unknown
  Bacterial polypeptide expressing nucleotide sequence isolated from the Sargasso Sea
aatgtcaaaattatctctttccagtcttgataagacacatttagaaggaaaaaaagttcttgtaagagtagattttaatgttccattaaatgaagacggtcaaataaccgacgatacgcgtattcgtgcagcggtcccaactattgaatatcttattaatcattctgcaaaagtcattttagctgctcattttggtagaccgaagggtcaggtaaatgaaaaaatgagattaactccagtagcagcaagattaagtgaattgttggggcaaaatgttgctcttactaacagttgtattggtgatgaagcagttgcacaatcaaatagcttatctaatggagatgttcttttacttgagaatgttcgtttttttggtgaagaggaaaagaacgacctggagtttgctgaaaaattagcatcacatgcagatatgtatgtaaatgatgctttcggtgctgctcatagagcgcatgcttcaactcagggtgttacaaattatttaagtccctcagtagctggattccttttagaaaaagaattgaaatacctacaaggagcagtagattccccaaatcgtccattggctgcaatagtcggagggtcaaaggttagtagcaaaataggagtacttgattctttactagataagtgtgacaaaatcatgattggtggaggtatgattttcactttttataaagctagaggtttagatgtcggaaagagccttgtagaagaagataaactcgagcttgctaaagatttagaagcaaaagcaaaagcaaaaggagtagagttattattaccccactga

SEQ ID NO: 250231 - DNA, 736 bp, Unknown
  Bacterial polypeptide expressing nucleotide sequence isolated from the Sargasso Sea
ctccccgagggtgtgaccaagttcctcaagcccgccgtggccggcttcctgatggagaaggaacttcagtacctgcagggtgctgtggatgaacccaaacgccccctggctgccatcgtcggcggctccaaggtgagctccaagatcggcgtgctcgaagccctgatcgacaagtgcgacaaggtgctgatcggcggcggcatgattttcaccttctacaaggcccgcggcctctcggtgggcaagagcctggtggaagaggacaagctggaactggccaaggagttggaggccaaagccaaggccaagggcgttgagctgctgctgcccacggacgtggtgctggccgacaacttcgcccccgatgccaacagccaggtggctgatgtcaccgccatccccgacggctggatggggctcgacatcgggcctgatgcggtgaaggtgttccaggccgccctggccgactgtcagaccgtgatctggaacggtcccatgggcgtattcgaattcgagaagttcgccaccggcaccaacgccatcgccaccaccctggcggagctgagcggcaagggctgctgcacgatcatcggcggcggcgactccgtggctgctgtggagaaggccggtctggcccaaaagatgtcccacatttccaccggcggcggcgccagcctcgaactgctggaaggcaaggtgctgcccggtgtgtccgccctcaacgacgccgcctgat

SEQ ID NO: 250232 - DNA, 909 bp, Unknown
  Bacterial polypeptide expressing nucleotide sequence isolated from the Sargasso Sea
aatgtattagacttaacaagaattaaagccagcatacctacaataaattatgcattaaatagcaattcaaaaatattattaattagccacttgggaaggccagccgaggaaaattttgaagaaaaattctctttaaagcccgtagcattatctttaagtaaaattattaatcaatctgttgagataattgataatttagattctaaagatatatttaaaggtgcatcaaatattcaaatgttagaaaatataagattttttgagggtgagaaagaaaattgtaaaaatttaggacaaaaattaggtagtcttggcgatttatatgtttttgatgcatttggaaccgctcatagagagcaagcttcaacccattcggcaattgagaattcaaataatgcttgcgcaggaatattgcttgaaaaggagaatgagtttttatctaaggctcttaataatttcgaaagtccgtatgttgccattattggtggcgctaaagtatcaacaaaacttgagcttatagagcacattaattcagtagcagattatattgttgttggcggcggtattgcgaatactttcttaaaagctacaggaaaaaatataggcaattctttagttgaagattcaatgcttgaaaaagcaaagcatatttatcatcagggaaaaattattttgcccgatagagttgttacatccaaaacctttgaaggagacgatataaaagaaagacaagctaatgaaattgcagatgatgaaacgatcttggatttatgtcttgaacaagaaaccatctctttaatcaataatgctaaaaccattctttggaatggtccaatgggagtttttgaaaataatttttttgaaaaaggaacaaaagatctttcagtggctatagctaaatctgcagct

SEQ ID NO: 250233 - DNA, 460 bp, Unknown
  Bacterial polypeptide expressing nucleotide sequence isolated from the Sargasso Sea
tttaatcaaacaaattttagatatttcaaaaaaatttaattgtaaaattatttgccccatcgatgttgtcgtttcaaaagattttgaaggattaggaaaaaataaagatataactgaaatcaatgatgatgagatgatattagatattgggccaaaaacaatttctttgattaaaaaaataattaatcaatcaaatactgtattatggaatgggccagctggatattttgaaaatcctaacttccaaacaggtactaaagaaatattagaaataatttcacaaaaatcaattaaagacaaaattttttctgtagctggaggtggtgaaactgtagcggcgatcaataaatttaaaaagttcgattcatttacatttgtttcaactgctggtggagcctttttagaatatcttgaaggtaaaactttacctggtataaaagcacttaatcaaaatgtctga

SEQ ID NO: 250234 - DNA, 595 bp, Unknown
  Bacterial polypeptide expressing nucleotide sequence isolated from the Sargasso Sea
taaaatttctacaaagataaacattattaaaaatctaatgaataaatttgattatattatttttgttggaggaatggccaacaacatccttgaatataaaggccataatattggcaaatccttaaaagaaaatattgctaaaaagataattgatgaaatatttcatttatcagattccgttaattgtaaaatttattatcctgaggatgtagcggttagtaaaaaaattaatggatcagctataacaaaaaatcttaatgaaattttagatgatgatttaattttagatattggtccaaaaactataaattcaataaatgaaattatagaaaatagtgaaacaattctttggaatggaccggctggatattttgaaaattctaatttcgcaaaaggaagttttgaaattggaaaaaaaattgcagaaaaaaataaattaaatcagattttttcagtagctggcggaggtgatacggtcgcacttttaaatagcataggattttttaaaagttttaattttgtttcaactgctggtggagcatttttagaatatcttgaaggcaaagaactacctggtataaaagctttgaactaa

SEQ ID NO: 250235 - DNA, 451 bp, Unknown
  Bacterial polypeptide expressing nucleotide sequence isolated from the Sargasso Sea
gccctttcagaaaaagaaaaatgtaaattaatttatcctgacgatgttgttgtgtctaaaaattacaatggatctcccaaaaataaagaattaaacgaaatattatttgatgaaatgatattggatattggtccaaaaactatagaaaaaataacaaatattattgataatagtaaaacaatactttggaacggacccgcaggatattttgaaaatccgaattttgccaatggaagtattcaaatagcaaaaaaaataattgaaaataataaagttaaaaaaattttttctgtagctggtggtggagatactgtttctttattaaataaattaaatcttgtaagtaattttaattttgtttcaactgcaggtggagcttttttagaatatcttgaaggtaaaaacctccctggtataaaggcattaaatttaaatgacagaactaaataaa

SEQ ID NO: 250236 - DNA, 733 bp, Unknown
  Bacterial polypeptide expressing nucleotide sequence isolated from the Sargasso Sea
caaataactgacgatacgcgtattagagcagcaattccaactattgaatatcttattaatcattctgcaagagttatcttagctgcccattttggaagaccaaagggtcaagtaaatgaaaaaatgagattaactccagtagcggtaagattaagtgaattgttgggaaaaaatgttgctcttacgaacagttgtataggtgatgaatcattcgcagaatcaaatagcttaaataatggagatgttcttttacttgaaaatgttcgtttttttggtgaagaggaaaagaatgacttggattttgctaaaaatttagcatcacatgcagatatgtatgtaaatgatgcttttggtgctgctcatagagctcatgcttcaactcagggagttactaattatttgagcccatcagtagctggattccttttagaaaaagaattgaaatatttacaaggcgcaatagattcaccaaagcgtccattggcagcaatagttggaggatctaaggttagcagcaaaataggcgtgcttgattctttactagataagtgcgacaaaattatgattggtggaggtatgatttttactttttataaagcccgaggtcttgatgttggaaagagtcttgtagaagaagataaacttcagcttgcaaaagatttagaagcaaaagcaaaatcaaaaggtgtcgaattattattacccactgatgttgttttagctaatgaatttt

SEQ ID NO: 250237 - DNA, 785 bp, Unknown
  Bacterial polypeptide expressing nucleotide sequence isolated from the Sargasso Sea
aatgatcaaaacattaagagcatttaacctaaggggaaagaatgtgttgctacgtgctgatttcaatgtgccaatgcatgaagatcaggttgctaataaatttcgaataaaggcagtcttgccaaccattttaacctgtatggaggcaggtgctggagttgttattatgtcgcacatgggacgacctaatgggaaaatagattcaaaactaagtctaattgctgtaggcgaagaattagcatcattactggaaatgccaattaagttttcagaagattgtgtatctactgattcaattgatacctcaatcagtttaaaacagggtgaagtacatctgctcgaaaatttgcgatttcattcaggcgaggaagataatgaaatggaattttcatctcagctcgcaagacatggacaaatatatatcaatgatgcatttggtaccgcacacaggtctcatgcgtctaatgttggtgttataccatattttaaaaatgctggcattggatggctaatggataaggagctaaactatttgcaaagaatcatgtctcggcccaagactccgctgacaataattcttggaggagcaaaaattaatacaaaacttgaattgattaatcaatttttagaaaaggcagacaatattatcataggtggaggcatggcatttacctttttaaaagctaaaggaaaaaatattggaggatcacttctagataaatcaatgattaatacagccagagacattatgaacaatggcatgtcaaaaggtacaaagataattt

SEQ ID NO: 250238 - DNA, 829 bp, Unknown
  Bacterial polypeptide expressing nucleotide sequence isolated from the Sargasso Sea
agaatcatcgaatcgggagggaaatgcattctgatgtcccatcttggacgccccaaaggggaacgtgtggaaagcatgagtttgaagccggcggctgaagaactctctttgcttctggatgaaaacgttagtttggctcctgactgcatcggcagtgaagttgagaaaatggtttcgcaaatggaagaaggagaactgctgctacttgagaatttgaggtttcatcagggagagacaaaaaacgatccacagttttgtgaagcattagccaggcttggagaggtttacatcaatgatgctttcggaacggcgcaccgggcccatgcttccaccgcaggagtggcgaatctaattgaggaccgtgcagtaggttacctgatccgcaaggagttggaatttctgggagccgcggtgttggatccccaaaagccttttactgcgatcctgggcggagcaaaagtctccgacaaaatcaaagtcattgaacgcttaatggaaaaagttgatgcgctgatcattgggggagggatggccaacacgttcctcaaggcacagggaatggaaattggagattctttgcttgaggaagatgctctggaaacggcgaaggatctcctggatgaagcaaaaaaatccggagtcaaaattcaccttccagtggatgtttgttcggccccggaacttcttcaggaagtcgaaacggaattcctgaatgttgcggataaggtccaagcaggttggaaaattctcgacattggtccggaaagtgtaaaacagttcggttcagtcattcaaaattccaaaactgttctttggaacggcccgatgg

SEQ ID NO: 250239 - DNA, 658 bp, Unknown
  Bacterial polypeptide expressing nucleotide sequence isolated from the Sargasso Sea
atctcaagttttagataaaccacaaagaccgctagcagcaattgttgctggctctaaaatatccacaaaaattcagatactcaataatctaagtaataaagtagattttttgataattggtggcgcaatggctaatacctttttagatgctcaaggatacggtattggtaaatcattaacagaaaaaaaaatgttaaagaccgcagaggaaatcattcaagaaattatacctaaaaaatgtaagttagttttacccgtagacgtcatctgtgcggactctttgtcagataccgctgcaacaaaaacttttagcgttaaatgttgccccaaagataaaatgattctcgatattgggccattgtctcaaaagaacataatggatattattaaaaattcgaatactttaatttggaatggtccacttggggcatttgaaaccgctccattcgatttaggcactaataacatagctaagtatactggaaacagaaccttagaaagaaaattaatctctatagctggaggtggcgataccttgagtgctcttaaagcatcaaactcagtttctaagtttagttatgtttcaaccgctggaggtgcttttcttgaatggcttgaaggtaaaacacttccaggaatcgaagtattaaaattataa

SEQ ID NO: 250240 - DNA, 784 bp, Unknown
  Bacterial polypeptide expressing nucleotide sequence isolated from the Sargasso Sea
tatggcgaagcgttccctggccagcctcaacgccggcgacctgagcggcaaacgcgttctcgtgcgggttgacttcaacgtgcccctgaacgatgccggtgcgatcaccgacgacacccgcatccgtgctgccctgcctacgatcaacgacctgatcagcaagggcgccaaggtgatcctgtctgcccacttcggccgtcccaagggccaggtgaacgacgccatgcgcctcacccccgtggccgcgcgcctgagcgaactgctgggcaagcccgtggccaagaccgacagctgcatcggccccgacgccgaagccaaggtgggtgccatggccaacggcgatgtggtgctgctggagaacgtgcgtttcttctccgaggaagagaagaacgaagccggtttcgccgagaagctcgcgggcctcgctgaggtgtacgtgaacgacgccttcggcgccgcccaccgcgcccacgcctccaccgaaggcgtgaccaagttcctcaagccctccgtcgccggcttcctgatggagaaggaacttcagtacctgcagggtgctgtggatgagcccaagcgtccactcgccgccatcgtcggtggctccaaggtgagctccaagatcggcgtgcttgaagccctgatcgacaagtgcgacaaggtgctgatcggcggcggcatgatcttcaccttctacaaggcccgcggcctctcggtgggcaagagccttgtggaagaggacaagctggaactggccaaggagctcgaggccaaggccaaggccaag

SEQ ID NO: 250241 - DNA, 937 bp, Unknown
  Bacterial polypeptide expressing nucleotide sequence isolated from the Sargasso Sea
gtaaacgttagtttttgcccgacttctgtaggtaaagatgcagaagaaaaagcccaagcgctttgtccaggagaagtacttttaatggaaaatctgagataccatcaagaagaaatagctggtgagatatcattctctgaaaagctttcaaagcttggaacaatttatatcaatgatgcctttggaacagcgcatagagcacatgcttcaacaactattatagcccagttctttcaagaaaaaaagtgttttggtagactgttggaaaaagaagttgttgccattgaaaaaataatgaaaagcgggaactcgcccgtactggctattcttggaggagcaaagatttcctcaaaaataacaataatagaaagcttgttgcataaggtagatcatattattattggaggcggtatggtgtacacatttacaaaagcattagggggtgaaatcggagattctatatgtgagccaaattattgtgaatatgccttggaactattagaaaaagcaaaacaaaaaagagttgaaattcatcttccaattgatgttctagctggagataattttaacaattatgctaaacaaaaagagtttggtataatggacatacccgatggatgggagggaatggatgcagggcctaaaactattaaaaagtttcatgatattattaaaaattgtaaaacaatcctttggaatggacctatgggggtctttgaattttctaactttgcaaagggtacaattgcaataggagagtctataggaatggcaactcaacatggcgctttttctttagttggaggaggagattcagtcgccgctgttaagctattcggaatgcaaagtaaaatgagttatattagtacaggcgggggggctatgttagaaagtttagaagggaaaaccctccctgggatagcagctctatcttaat

SEQ ID NO: 250242 - DNA, 973 bp, Unknown
  Bacterial polypeptide expressing nucleotide sequence isolated from the Sargasso Sea
cgacgcgacgcgtctgatcgaggcgctgccgacgctgcggctgctcatcgacgcgggcgcaaaggtcgtctgctgcagccacttgggccgtccgaagaaggccaaggacgaggcggagaaggcgcgtatgaagctcgcgccgatcgccgagcgcatgtcaaaggagctcggctttaccgtgccggcggtcgaggactgcgtcggcccggcggtcgaggcggcggtcgccaacctcaaggatggcggcgtcatcctcttggagaatactcgcttctacaaggaggaggagaagaatggcgccgactttgccgagaagctcgtcaaatcgtgcggtgcgacgacctttgtgaatgacgcgtttggcgcggcgcaccgcgcgcacgcgtcgacggccggtgtcgtgccgcacgtgcagaatgctgtggcgggcatcttgctcgagaaggagctcgacttcctttatggcgccgtcgcggcggccgagaagccctttgctgccgtcgtcggtggcgccaaggtctcgtcgaagattgcggtgctcgagtcgcttatggagaaggttgatacgctcgtcgttggtggtggcatggccttcaccttcttgaaggcgcgtggcctcgaggttggcaagtccttggtggaggacgaccagctcgagctcgccgcaaagctggaggcgatggccaaggcaaagggcgtcgagatgatcttaccgtcggacgtcatcgcggccgacaactttgcggccgatgcgaagacggcgacggtgacggtcgacaagatcccggccgattacctgggcgtcgacaatggccccgtgacgaccaagctcatccaggacaccctctccaagtgcaagacggtcatctggaacgggccgatgggcgtcttcgagatggagcccttctcgaagggcacctttgccgtcgccgagtcgctcgcggaggagaccgataagggatgcgtctcgatc

SEQ ID NO: 250243 - DNA, 985 bp, Unknown
  Bacterial polypeptide expressing nucleotide sequence isolated from the Sargasso Sea
agtagattttaatgttccgcaggatgatcagcttaaagtaaccgataatacgagaattgcagcggtaaagcctactatagataagattctttcggatggaggttctgttatcttgatggcgcatctgggaagaccaaaaggagaagctaaggatgagttttctttaaaacatattgtagatgaaatttctgatgtgttgggtaataaagtaaaatttgcagaagactgtattggtgaaaatgctgtaaaagctgcagctgaactgcagcctggtgaaattcttttgcttgagaatctcagatttcataatgaagaagagaaaggagatgtaaaatttgcagaacaattgtctaaacttggagatgcgtatgtaaatgatgcattcggtacagctcacagagcacatgcttcaacggctgtaatcgctcagttttttccttcaactaaatttttcggtattttgatgacgaatgaacttaaagccattgataaagtcttaaaatcaggtgaaaaacctgtaactgctattcttggaggttctaaagtttctactaaaattacaattattgaaaatattcttccagcagttgataatttgattattggcggaggaatggcattcacattcatcaaagctttaggcggaaaaataggaacatctttggtagaggatgacaaactcagtttagcattggaaattttggaaaaagcaaaagaaaataatgttaaggtatatcttccttcagatacgataattgctgaaagtttcaataacgatgctgaaagaaaagaggtgaatatctacgaaattccggaaggttggatgggacttgatgctggaacccaatcaagagagcagtttaatgacgtactcttaaattcaagaactattttatggaatggtcctatcggtgtatttgagatgtcaattttgcacccggaactgttgcacttggtgaaagtattgcagaagccactaagttag

SEQ ID NO: 250244 - DNA, 750 bp, Unknown
  Bacterial polypeptide expressing nucleotide sequence isolated from the Sargasso Sea
cacatcgtgcacatgcctcaacagagggtgtggctttggctgcgaaggttgcatgtgctggtccgctgttgtgtgaagagttaggtgcgctagaaaaggcattaaacacaccgaagaaaccggtggcagcgattgtcggcggtgcaaaggtctcaaccaaaatcaaattgattgattcattgttgtcaaaagtagattgtttgattgtgggtggcggcattgccaatacttttttattggcccaaggccatgaggtaggaacatcactggtagaaaaggactgtgtgtcttatgcgagtgatgcattgaaaaaagcccaggagttgggggtttctattccactgccaactgatgtggttgttgcgccggggatggatcagggagacaaagccgaagtccgagcagtttctgaggtcaaagcagacgaagcaattttcgacttaggcccggaaacccagcgcacttatagctcactgctggcgtctatggctactattttgtggaatgggccagttgggttgtttgaggagcctgcattttctggaggaactcaagcggtggcacaggccgttgcaaatagtccagcttatacactggctgggggtggtgacaccttggcggccattgatcaatttggttttcaggctcaaatgtcctatatttcgacgggaggcggtgccttcctggcttggtgtgaaggtgagccattgccagcggtaaatgcgctgattcaagctgcaacaaggtaaa

SEQ ID NO: 250245 - DNA, 995 bp, Unknown
  Bacterial polypeptide expressing nucleotide sequence isolated from the Sargasso Sea
tttgatgcgtgtagactttaatgtaccttttgacgtgatgggcaacgtgtctgatgatactagaattcttggagcactacctacgattaagtatttagttgagagtaaggctaaagtgattttgatgagtcacttaggtcgacctaaaggtcagcgaattgaaaagtatagcttaagacctgttgctgttgagcttgaaaagcttttagggcagcccgtgtcatttgcaaatgattgcaagggtgaggtagttcaaggtcttattgaaaaagccgaacctggcgctgttgtgcttctagagaacttgagattttataaagaagaagaggcgaatgacctgggttttgcaaaagaacttgcatcattgggagaggtttatgttaatgatgcatttggggcggctcatagggctcatgcttctacagtagggattactcagtttattgaagaaaaagcaggtgggcttttaatggaaaaagaattaaatttcctgggtcatcagacggctaaccctgagcacccttttgtggttatattgggaggggctaaggtgagtgataagattaatgtaattaattccttgttagataaagctgatgtcatgttgattggtggagctatggcttatacctttgctctagctatggggcaggatgttggtgatagtcttgttgaaatagataaagttggtactgcaaaagctgctatagaaaaagcgaaagatcgtggggttaaattattgttacctgtagatcatttagttgccgatagcgttgattttaaaaatggaactttaggagaaacaagtgttattgctgggggaatagagtctggttggcagggtgtggatattggtcctgatacagttgatttatataaagaggaggttactaaagctaagactttattgtggaatggccctatgggaatatttgaaattccagaaagctcaaagggtacatttgctgttgctgaagctgtagcaaaaaggtgac

SEQ ID NO: 250246 - DNA, 886 bp, Unknown
  Bacterial polypeptide expressing nucleotide sequence isolated from the Sargasso Sea
tgtattccaacaattaaacttgctcttgagaataatgcaaaagtattattaataagtcatttaggaagaccggaggagggaaaatttgaagaaaaattttctatgaaaccagttgctaaatctctaagcagcatccttaatgaagaagttggtcttatagatagactagattctgaagaaatttttaaaagctcattaagtattcaaatcttagaaaatattagattttttaaaggagaaaaaactaatgataaagatttgggtaatacattagctaacctaggcgatatttatgtttttgatgcatttggaactgcacatagagagcaggcctccacacattctgctatagagcaatcaaaaattgcttgcgcagggttattgcttgaaagagagattgatttcttgactaaagcacttaatgattatcaaaatccatatattgctattattggtggagcaaaagtgtcaacaaaacttgaacttataaaatatataaataatgttgcagataatattattgttggcggcggtatagcgaatacttttattctggcatctggtctaaatgtaggaaaatctcttgttgaagaaaccatggtagatactgcaaagagtattctggatgaaggtaaaatcattttgccaaaagtagttattactgcagaaagtttagaaggtaaaaatattaataagaaattaatttctgatgttaaagataatgaaatgatcttagatctgtatattgaagaagagacgactcaattaattaatggggcaaagactattttatggaatgggcctatgggcgtttttgagaacaaggtatttgaagaaggcactaaagacttatcgcttgctattgcaaaatctaaagcattttcat

SEQ ID NO: 250247 - DNA, 870 bp, Unknown
  Bacterial polypeptide expressing nucleotide sequence isolated from the Sargasso Sea
gccgaaataaataaaatccaaagtggatctataataatgttagaaaatattcgctttaacaagggggaagaaataaatgatattgaattttcaaaaaatttatcaaacttaggagatatatttgttaatgacgcattttcatgctctcatagatctcatgcatctgttgaaggaattacaaaatttataccttcatattttggattgcaaatttctcaagaaattgaagcattaaaaaaaataacttctgaaataaaaaaaccagttacacttattattggagggtctaaaatttctacaaaaattaatattataaataatttggtaaaaaaatttaataatataattattgttggtggaatggccaatacaatacttaaacacactggttataaagttggaaaatcaatatgtgaggataattgtgaatcgttaataagaaaaatttttgatttttctaaaaaatataattgtaaaattgtatgccctgaagatgtcgttgtttcaaaaaatattgaaggtgatggaacaaataaaaatataaatgagataggtgaagatgaaatgatattagatattggaccaaaaacaatcattagtataaaaaaaattataaacgactcaaatacagtattgtggaatgggccagcgggttattttgaaaatccaaatttccaaaatggaactaaagaaatacttgaatcaatttcaaataaaacaattaatgataaaattttttctgtagcaggaggaggtgaaactgttgcagcaataaacaaatttaaaaaggtgaaatcttttacttttgtttcaactgctggtggagcttttttagaatatcttgaaggcaaaactttacctggtataaaa

SEQ ID NO: 250248 - DNA, 928 bp, Unknown
  Bacterial polypeptide expressing nucleotide sequence isolated from the Sargasso Sea
agatcataataacaaattaattattgcatctcatctcggcagaccgactgaaggttcgtatgatgagagtctctcgctaaaacccatatgcgagcatctctctagtaagttgaataagaaaattcaatttattaagagtataaacgataacattgattttatagattatgatatcgcaatgttggagaatgtaagatttaatattggtgagaaaaaatgtgaccctaaattatctcaaactatcgcgtctttagccgacatttttgttttcgatgcatttggtgtttcacacagatctgagtgcactacaacaggtgtttcgaattatcttcaaacagttgcagggttaaatattagatatgagattgagacgataaataaactcattaacgacaagtcaagacctatgacaataataatatctggtgctaaagtttccacgaaaattgtcctaattaataagttacttagtaagtgtgatcatatgattcttggtggaggaattctaaatacattcttgaaggccaaggggtgtgaagttggtaattcacttctcgaggaggggtctgttcgtgatgctgctaaaattcttgaatcagattttgctgataaaataatttttccgtcagattttacctgtgagactgctgacggaattgcaaatgtagagtcatctcgtatatctagaaatgacacaatttatgatttagggaatgacagtatcaacgaaataaagaatattgtgagaaaatcagtttcagtattctggaacggtcctcttggttatgttgaaaaagaaccattcaataagggtactgaggaactggcgaaagtaattgctgatcataactgtttttctatagtcggtggtggtgatacactaccgattattgaaaatttaaactacagaatgactatagttgtttgt

SEQ ID NO: 250249 - DNA, 643 bp, Unknown
  Bacterial polypeptide expressing nucleotide sequence isolated from the Sargasso Sea
atcgagaaaacctgtaatccctttgaccgttgttatgggtggcgctaagattaaaggaaaaatagaattaattgaaaattttttaaatatcgctgataatctattaattggaggagctttatctttttcattcctaaaagttaaagggttagacattcactctcctttgattaataatgagtcaatagataatgcaaatagactgctagattatgcgaatagtattggtaaagagattattcttccatcagactttgttactgcggcttcaattgatgatgtagatactattgatattaaaacaattgaaaatttgaattcagatataagttgttttgatataggtcctgagactacaatgatttttagtgaactcatatctcaggcaaaaactattttatggaatggtccattaggtgtaagtgagaatccttactttggaactggaacacaacaagtctgtagaataattgaagaattaactaaaaatggagtgatatctgttttaggcggtggtgatactgctgctgcagcaagacgcttttctcataataatggatttactcatatttcaacagggggtggagcttctctagaattattatctggaaaagagttacctgcaattaaagtattaaaataa

SEQ ID NO: 250250 - DNA, 865 bp, Unknown
  Bacterial polypeptide expressing nucleotide sequence isolated from the Sargasso Sea
acggaaaataagtgatacaacgagaattgataaaattctacctactttaagctttttaattcagcagaaaaccaaaataataattttatcacatataggaaggccgaaaggaaaaatagtaaaagagctatctttaaaaccaataggcgacgaattgagaaaaaaattaaatgtaagtgtaaaactaatcacaaaaaatatttatgaaattaaaaataaagatttctttgaaaaatttgatgaggaaattttgattttagaaaatattcggttttatgttgaagaggagaaaaatagttataaatttgctaaacacctagcaagttttggtgatatttatgtaaatgatgctttttcctgttctcatagagcgcatgcatctattcatcaaatttctaaatatattccctctttttctggcctgcaacttgacttggaagtagctgctcttaacaaaattacagctgagataactaaacctataacatgtataattggaggatctaaaatttcgactaaaattgatataatcaaaaatttaataccaaaatttgataatattataattgttggaggtatggctaataattttatcgaatattttggaaataatattggaaaatctataaaggaaaaaaattgtaatcaaatagttgaaaaaattataacactttcaaaaaaaaaaaaatgtaaaatagtttatcctgaagacgtgcttgtatctaaaaatttaaatgggtctccaacaaataaacaattagatcaaatcttgcctgatgaaatgatcttggatataggcccaaaaacaataagtaaaataatagacataattgacaatactaaaacaatattgtggaatggacca

SEQ ID NO: 250251 - DNA, 364 bp, Unknown
  Bacterial polypeptide expressing nucleotide sequence isolated from the Sargasso Sea
gaaacacctaaaataaaagaattaaagcttatttcatctgatgaaatgattttagacataggacctaaaacaataagcaaaattaataaagttattgatgaaagtaatacaattctatggaatgggcctgcaggatatttcgaaaatccaaattttgcaaatggtagtattgaaattgcaaaaaaaattatagaaaacaatttagcaaataatattttctccgtagcgggaggtggcgatacagtatccttattaaataacttaaatgttgttaataattttaactttgtttcaactgcaggtggagctttcttggaatatcttgaaggtaaagagcttcctggtataagcgcattaaattgaa

SEQ ID NO: 250252 - DNA, 820 bp, Unknown
  Bacterial polypeptide expressing nucleotide sequence isolated from the Sargasso Sea
gaaggtgaaagagaatctaatacagaatttgcccaatgtcttgcaaaaccatttgatactttcatattagatgcttttggagcagcacataggaaacatgcatcaatagttgaagttgggaagtacataaattcctatcagggtccattaatgaataaggaaataaatgaactgcaatcgctattaaaatctcctagttcaccttatacggtaataatgggaggagccaaactatcagataagttaaatctgataaataaacttcttccaaaagtagataatttaattttaggaggtggaatgtgctttacatttcttaaatcacaaggttatgaaattggtgattccctgtgcgaaaatgattttttgaatactgcaactgaggtactaaattctacaaatggaaaaaaaataattttaccgaatgattttggtgttaccaacgacttactttcaaaccacagagaagataaaccattagaaaaaattaagacaaatgatattgggttcgacattggatcaaaaactgttgaaatgtttaacgagataatatattcatcaaatacaatattctggaatggaccaatgggtgtgtttgaaaatgaaaaatttgaatacgggacaaaagaaattactaaatctgtatcccaatcaaatgcttatacaatagttggtggaggagattctgttagtgctatcaataaatattctaaaattcaaaattttaaccatgtttcaacaggtggtggagcctcaatggagcttttggaaggaaataaattacctggtgtaaatatttatgaaccacttataatctaaa

SEQ ID NO: 250253 - DNA, 636 bp, Unknown
  Bacterial polypeptide expressing nucleotide sequence isolated from the Sargasso Sea
acaaccaggagaaattatattgatggaaaacttacgattttataaagaagagacggatggagacaagttgttcgcagaaaaactatccagacttggagatctgtatataaatgatgcatttggaacttgtcatagagagcacgcttctactgctgtaattgcaaagtactttcctaatgaaaaatacgttgggaaattattacaaaaagaacttgaagcaattagtcaaattgcagaacatggagaaaaaccagttcttgcaattttaggaggtgccaaggtctcaagcaaactaaatattttatataatctaattaaaaaagtagataaaataattattggaggaggaatggcatacacgtttatagctgcacagggaggaaaaataggagagtctttgattgaagaggatttaatagaaaatgctaaagaaattcttgagattgccatcaatttaaacaaagaaattattctgccggaggatataaaagcgtcaacagattttgaccaaaatgacttaattaaaacttttgattcaaataaaatagaaaacgggtggatgggcttagatattggtacaaaaactattgagaaatttaatcaagcaattttatcaagtaaaacaattttttggaa

SEQ ID NO: 250254 - DNA, 333 bp, Unknown
  Bacterial polypeptide expressing nucleotide sequence isolated from the Sargasso Sea
tattatctgatgaaatgatattagatattggtccaaaaaccatagataaaataacaaaaattattgataagagtaaaactatactttggaacggacctgcaggatattttgaaaatccaaattttgcttatggaagtattcagatagcaaaaaaaataattgaaaataataaagcaaacaaaattttttcagttgctggtggtggggacacagtttctttattaaataagttaaacggtgttaatgaatttaattttgtttcaactgcaggtggagcttttttagaatatcttgaaggtaaaaaccttcctggtataaccgcattaaattaaa

SEQ ID NO: 250255 - DNA, 877 bp, Unknown
  Bacterial polypeptide expressing nucleotide sequence isolated from the Sargasso Sea
agatggagaagaaaataaaaaatatagcctcaagccaatgtcagaatttttatcaaaagaattaaatcaaacagttattttttcatcaagttgtgtaggagaagaagcaattaaaaaaaaaaattccttaaaagaaggggaggttctgcttctagaaaatctaaggtttcataaaagtgaagaaaaaaatgacattgagttttcaaaaaatttgtcgttaggttgtgatatgtatgttaatgatgcattttcatgttcacatagaaatcactcaagtatcactggagtaacagattttttaccttctttttttggtattcatcttaaaaaagaaattgatgctttagaaaatgttttggttgatccaaaaacacctgttgtatcaattataggagggtcaaaagtttctactaaaataggtataatttctaatttattaaaaaaaatggattatattgttattggtggtgctatggctaacacttttttagctacgatgggaaataaaattggaaaaagtttgtatgaaaaagaggctttcggaatagctaatgaaatattagaaaagggaagtaaaaataattgtaaatttattcttcctgaagatgtaatattatcaaaaaaattagaaaagaattcaaaaacattaaatgtagatattaattcaatacctgatgacatgatggctttggacattgggaaaaaaactgttaataatattaaaaaagttgttgatgattgcaaaacattattgtggaatggacccttgggagcatttgaagttaatccttttgataatggcacaaatgaagtggcaaaaatagtttctacaaaaactaaagaaaaaagtcttattagtgttgctggtggtggtgac

SEQ ID NO: 250256 - DNA, 505 bp, Unknown
  Bacterial polypeptide expressing nucleotide sequence isolated from the Sargasso Sea
ttcacatttttaaaatattttggaaccaaaatcggaagttcattatttgatgaagaaggatataaattagttcctgaaattttagaaaacgcattaaaatacaaaaccaatattgtattaccacaggattttatatgtaatgacaaatttgaaaatggaggaaatattgtttataaaaatacttcaatgggtatcccacaaaattatatgggtcttgatattggtattaatacagttaataattttaaacaagtattgtgtgaaagtgattgtattatttggaatggcccacttggagtatttgagttagatgattacgctgatggaagtaaacaaataatggaacatatttctgaattatctgcaacaacaataataggtggtggtgatactgcttcatgttgtgaaaaatttaatttgcagaataaaatgacacatattagcacaggaggtggagcatcattagaattattagaaggaaaaaaacttcctggattattttgaa

SEQ ID NO: 250257 - DNA, 657 bp, Unknown
  Bacterial polypeptide expressing nucleotide sequence isolated from the Sargasso Sea
aagtaaatgcacttaatagaattacaaaagaaataaaaaaacctgtaacatgcatcattggtggctcaaaaatttccacaaaaattaacattatcaaaaatttaattccaaaatttaataacattgtaatagttggtgctatggcaaataatatttttaaatataaaggtttaaaaattggaaattcttttcatgaaaaaaatttagataaaataattcaagaaatatttctattagctaaaaataataattgtaaaatatattttccaatagacgttagagttggaaaaaaattagatgacttttcaactgatagagagtttaaaaatattgaacaagatgatataatattagatataggacctaaaacacttttagatttaagaaaaattatagataattcatcaactatactttggaatggacctttgggatattttgaaaataataacttttcctacggaagcaaagaagtagcaaattatatagttaataaaggtgataaaatattttctgtagtaggaggaggcgatacagtagcgttgattaattctttaaatataatcgataagtttaattttgtttcaactgccggtggagcttttttagaattccttgaaggtaaagttcttcctggtataaaagcactaaattaaa

SEQ ID NO: 250258 - DNA, 631 bp, Unknown
  Bacterial polypeptide expressing nucleotide sequence isolated from the Sargasso Sea
attggcagcaatagttggaggatcaaaggttagtatcaaaataggagtacttgattctttacttgataagtgtgacaaaatcatgattggtggaggtatgattttcactttctataaagctagaggcttagatgtcggaaagagccttgtagaagaagataaactcgagcttgctaaagatttagaagcaaaagcgaaagcaaaaggagtagaattattattacccactgatgttgttttagctgatgaattttctcctgacgccaatagtaaaatatctcaaattgattcaattagtggaaattggatgggtctcgatattggtccagattccattaaagtttttcagaatgctcttgcagaatgtaagacaattatttggaatggtccaatgggagtttttgaatttgataaatttgcagacggtacaaatgcaatagctacgactcttgctgacttaagtgccttttctgaagtttgtacaataattggtggtggagattcagtcgcagcagtagagaaagcaggattagctgagaaaatgtcacatatatctactggaggtggagcaagtttggaacttttagaaggtaaaactttacctggtgtagctgctttaaacgacgcttag

SEQ ID NO: 250259 - DNA, 386 bp, Unknown
  Bacterial polypeptide expressing nucleotide sequence isolated from the Sargasso Sea
gatgatcaaaataaaacaattagaagataatcgcaatatagaaggaaaaagggttctattaagaacagatttcaatgttcctataaatgaaggatccattacagaagcatctcgtattgaaaaagttttacctactataaaatctctaattaataaaaaagcaaaagttataataatttctcacttaggtaggccaaaaggcaaagtagttcctggattaactttaaaaccaatagcaaaaaaattatctcattatcttaatcaaaatgtaacttttgtagatacaaatattggcgaaagtgtagttgaaaaatcaaaaaaaatgaatccaggaactgttttactattagaaaatttgagattttctagagaagaagaattaaatt

SEQ ID NO: 250260 - DNA, 784 bp, Unknown
  Bacterial polypeptide expressing nucleotide sequence isolated from the Sargasso Sea
tgtgatgtgtttgtgatggacgcttttggtacggctcaccgtgctcaggcgactactcatggtgtggcgaagtttgcacctgttgcctgcgctgggcctttattggccgccgaattagatgccttggctgcagcgttgaaaaatccaaaacgtccattggtcgccatagtgggtggttcaaaagtttctacgaagctgactgtactggaatccttgtccggtatcgtggatcagctgattgtgggtggtggcattgccaatacttttattgcggctcagggctatcaggtcggtaaatctctggttgagaccgatcttattcctgaagcgaaacgtttgatggcgcaagccaaagccaatggtggttctattcctgtacctaccgatgtagtgacgggtaaagcttttgccgaagatacaccggcgacgacgaagtctgttgctgatatcagtgccgatgatatggtgtttgatataggccctgacagcagtgctgcactggtcgatattctgaaaaatgccggcactattgtctggaacggcccagtgggtgtatttgaatttgcgtcctttgaacaaggcactaaagcgttggctttagcgatagccgacagtcaggcattttctattgctggtggtggcgataccttagctgctattgataaatatgagttagccgacaagatttcctatatttcaaccggtggcggtgcatttctggagtttcttgaaggtaaaactttaccagcagtggaaattttggaacaacgagctaaagcctgac

SEQ ID NO: 250261 - DNA, 616 bp, Unknown
  Bacterial polypeptide expressing nucleotide sequence isolated from the Sargasso Sea
aatgaaaacaattgataatgtaaattttgattctgaacgagttattataagagttgattacaatgtgccttttgagggtaaaagaataactgatgttactagaatagaggcttctaaagaaactattgatttagttttaaaaaaaggaggaagcattattttgttaactcatatagggcgacccaatgggcatgaacctgagttttcatgtcaattattaatcaatgaagtttccaaaattcttggacgagaggtgtttttttgtaattctacaattggaaaagatgcggaagaaaaatgcaagatgctcaaatcgggagaaataatgcttatggaaaatgttaggtttcattctgcagaaacaaatggtgatacagattttgcaagaaaactatcaagattgggaacagtttatataaatgacgcttttggcactgctcacagggcacatgcgtcaacgtgtactattgcaaaatttttttcaaaaaaatattgcggaaaattacttgaacgagaggtggtttcaattcaaaaagtagttaaaaatggaaaaaagccaatattagcaattattggaggtgctaaaatttcatctaaaataactataatagagagt

SEQ ID NO: 250262 - DNA, 409 bp, Unknown
  Bacterial polypeptide expressing nucleotide sequence isolated from the Sargasso Sea
ttttccagaagatgttattgtatctaataatttgaatggatctcctcaaaaaaaagatttaaatgaaatttcgcccgacgagatgatattagatataggtccaaaaactataaataaaatatcaaaaattattgataacagtaaaactatactttggaatggacctgcaggatattttgaaaatccaaattttgctaatggaagtgttcaaatagctaaaaaaataattgaaaataataaaataaataatattttttcagttgccggtggtggggacacagtttctttactaaataatttaaatgctgttaatgaatttaattttgtttcaactgcaggtggagcttttttagaatatcttgaaggtaaaaaccttcctggtataaccgcattaaatcgaaatgtctga

SEQ ID NO: 250263 - DNA, 553 bp, Unknown
  Bacterial polypeptide expressing nucleotide sequence isolated from the Sargasso Sea
tatggcgaagcgttccctggccagcctcaacgccggcgacctgagcggcaaacgcgttctcgtgcgggttgatttcaacgtgcccctgaacgatgccggtgcgatcaccgacgacacccgcatccgtgctgccctgcccacgatcaacgacctgatcggcaagggcgccaaggtgatcctttctgctcacttcggccgtcccaaaggccaggtaaatgacgccatgcgtctcacccccgtggcggctcgcctgagcgaactgctgagcaagcccgtggccaagaccgacagctgcatcggccccgacgccgaagccaaggtgagcgccatggccaatggcgatgtggtgctgctggagaacgtgcgcttcttcgctgaagaagagaagaacgaagccggtttcgctgagaagctcgctggcctagctgaggtgtatgtgaacgacgccttcggcgccgcccaccgcgcccacgcctccaccgaaggcgtgaccaagttcctgaagccctccgttgccggcttcctgatggagaaggagcttcagtacctgcaa

SEQ ID NO: 250264 - DNA, 654 bp, Unknown
  Bacterial polypeptide expressing nucleotide sequence isolated from the Sargasso Sea
ctcttacaaaaatcacatcaaaaattattaggcctataacttgtataattggcgggtccaaaatttctaccaagattaatgttattaaaaatttaattactaaatttgataacattataattgtgggcggtattgctaacaattttgttgaattttttggaaataatgttggaaaatcaattaaagaaaaaaattgtaatcttatattagaagaaattataactcttgctaaaaaagaaaaatgtaaaataatttatccagaagatgtgattgtatctaataatttaaatggatcccctcaaaaaaaagatttgaatgaaatttctcccgacgaaatgatattggatataggtccaaaaactatagagaaaataattaatattattggtaacagtaaaactatactttggaatgggcctgcaggatattttgaaaatccaaattttgcaaatggaagtattgaaatagcaaaaaaaataattgaaaataataaaattaacaaaattttttctgttgctggtggtggagatacagtttctttgttaaataatatgaacgccgttgataattttaattttgtttcaactgcaggtggagcttttttagaatatcttgaaggtaaaaaccttcctggtataaccgcattaaattaaa

SEQ ID NO: 250265 - DNA, 946 bp, Unknown
  Bacterial polypeptide expressing nucleotide sequence isolated from the Sargasso Sea
tttagaaataaaactaaaaaaaaaaattaaacttattaaagataatatttatgatttaaataagaaaatgatttctaaaaagtttgtagatcaaataatatttcttgaaaatataagattttataaagaggaagaagataataataatgatttttccaaacaactagctagtctcggagatttatttgttaatgatgcattctcctgttcacatagagcccatgcctcagtaagtaaaataactaaatttctcccttcttatgctggtttacaattagaaactgagataaatgctttaaaaaaagttaccacagaaataaagaaaccaattacttgtattattggtgggtcgaaaatatcaactaaaatttctgtaattaaaaatttgatcccaaagtttgataatattgtaattgtaggtggaatggctaacaatattctcaaatatcatggtcatccaattggaaaatcgtttcaagaaaataattgtgaagaaattataagcgatatatttaaactttctaaaaaccattcatgctctgtcatttttccaaatgatgttgttgttggcaaaacgatagaagataatcccaaaattaaagaacttaatgaggtaaatggtgacgatttaattttagatattggccctaagacaattggaaaaataaataatataatagattcaagcaaaaccattttatggaatggaccagctgggtattttgaaaattctaattttgcaagaggaagttttgaaataggaaaaaaaattgctgaaaaaaataaatttaatgaggttttttcagttgttggtggtggagataccgttgccttaataaacaatattggtatttttaattcctttaattttgtttcaactgctggtggagcatttttagaatttcttgaaggtagagaattgcctggtataaaggctcttaactaa

SEQ ID NO: 250266 - DNA, 554 bp, Unknown
  Bacterial polypeptide expressing nucleotide sequence isolated from the Sargasso Sea
aatgaataagaaacaattcattgaaggactgaatcttgaaggacagcgtgtgctgacacgagtggattttaatgtcccgctgaatgatgaactaaacataacagataacgggcggatcaaggctgcattgcctacagttaattatatcattgagaatggaggtaaggctgttcttatgtctcatcttggacgtccaggaggtgagaggtcagagagcatgagtttaaagccggcagcggtggaattgtccagattattaggtcagattgtgacactagcgccggattgtattggagaagaagttaaaactctggtaaacggtatgcagaacggagatgtggtgctgttagaaaatttgcgctttcacaaagctgaaacgaaaaatgatccttcgttttgtgaagcattggcagaaaatggagacgtttatataaatgatgctttcggaacagcgcatcgggctcatgcatcaaccaccggagttgcttcctatgtcaaggacagtgcagtaggatatttgatgcgcagggaaatgcagtttttgggtgaagcag

SEQ ID NO: 250267 - DNA, 823 bp, Unknown
  Bacterial polypeptide expressing nucleotide sequence isolated from the Sargasso Sea
aatgattaatttaacatcgttagatatcacaaataaaaaccttgttataagggtagatatgaatgtaccaattaaggatggaattgttgcagacgcatcaagaataaatgcttgtattccaacaattaaattcgctcttgaaaataatgctaaagttttactaatcagccatctaggaagaccaaaagaaggaaattttgaagaaaagttttctatgaaaccagttgctaaatctctaagtaacattttaaatgaagaagttggtcttatagaggaactagaatctaaagatatttttaaagcctcatcaagtattcaaattttagaaaatattagattttttgaaggagaaaaatctaatgataaagatttgggtaataaattagctaatcttggtgatatttatgtttttgatgcatttggaactgcgcatagaaaacaggcctctacacattctgctatagaacaatcaaaaattgcttgtgcaggattgctgcttgaaagagaaatagatttcttaactaaagcacttaataattatcagaatccatatgtggctatcattggaggggcaaaagtatcaacaaaacttgaacttataaaacatataaatgatgttgcagatagtattattgttggtggcggtatagcaaatacttttattctggcatctggactaaatgtagggaaatctcttattgaagaaacaatggtagatattgcaaagagtattcttgataaaggcaaaatcattctaccaaaaattgctattacttctgaaagttttgaaggtaagcatattaataaaaaattaattttctga

SEQ ID NO: 250268 - DNA, 371 bp, Unknown
  Bacterial polypeptide expressing nucleotide sequence isolated from the Sargasso Sea
taaaacatttgaaggagaggatataaaagaaacctcaataagcaatattggtaatgatgaaatgattttagatttatacctagagcaggagacaaagactttgattaataatgctaagactattctttggaatggacccatgggagtatttgaaaattctttatttgaaaatggcacaaaggaactttctaaagaaattgctaagtctaacgctttttctcttgctggaggaggcgaaacattgtcggcaataaataaatatattaaatcagatgatgtatcatattgttcaacaggcgggggcgcctttttagaatttatggagggtaaagttttaccttctattaaagctctaaattcaaaaaaatagg

SEQ ID NO: 250269 - DNA, 753 bp, Unknown
  Bacterial polypeptide expressing nucleotide sequence isolated from the Sargasso Sea
ctcatagagctcatgcttcaacccagggagttactaattatttaagtccctcagtagctggattccttctagaaaaagaattgaaatacttgcaaggagcaatagattcccctatgcgtccattggcagcaatagttggaggatcaaaagttagtagcaaaatcggagttctcgactctttactagataaatgcgacaaaattatgattggtggaggtatgatttttactttttataaagctagaggtctagatgtaggaaagagcttagtagaagaagataaacttgagcttgctaaagatttagaggcaaaagcaaaagcaaaaggagtcgaattattattaccaactgatgttgttttagctaatgaattttctcctgacgccgaaagcaaaatatctcaaattgattcaatttctggggattggatgggtctcgatattggtccaaattctattaaagtttttcagaatgctcttgcagaatgtaagacgattatttggaatggtccaatgggggtttttgaatttgataaatttgcagaaggtacaaatgcaatagctaccacccttgctgacttaagtgctttttctgaagtttgtacaataattggtggtggagattcagtagcagcagttgagaaagcaggattagctgaaaaaatgtctcatatatctactggaggcggagctagtttggaacttttagaaggtaaaactttacctggagtagccgctttaaatgaggcctaaa

SEQ ID NO: 250270 - DNA, 553 bp, Unknown
  Bacterial polypeptide expressing nucleotide sequence isolated from the Sargasso Sea
gatgattaaaactctaaagtcgttcgatttcaaaaataaaaatgttttgattagggttgatttcaatgtccctataaaaaataatcaaattgaggataattttagaattaagtcttcattgccaacaattagatacttacttgatgctggcgcttctttgattctaatgtctcacctagggcgtcctaatggtaagattattgctaacttaagcttacagactgtgggtgaagaattggcagcaatgctagaaatgccgataaaattttctcacagttgtgtttcagaagattctcttgacacttcattaggtttaaaaactggagaaattcatcttttggaaaacttaaggtttcactctgaagaagagcaaaacgacttcaatttttcaagtagattagccaaacatggatcaatatacataaatgatgcttttggaactcttcatagaaatcatgcttctaataatggagttgtcaaacattttaaacacaaaggcattggaaagttagttgaaaaagaaatttcatatttagataaaacttttaaaaag

SEQ ID NO: 250271 - DNA, 829 bp, Unknown
  Bacterial polypeptide expressing nucleotide sequence isolated from the Sargasso Sea
atgattaatctttcatctttagatataaataataagaatctagtaattcgtgtcgatatgaatgttccaataaaaaatgggaatattttagattcaacaagaatagaagcatccttaccaacgattgaatatgctttaaaaaataatgctaagattttattgatcagccatcttggaagaccaattgaaggtgaatatgaagaaagtttttctttaaaaccagttgcaaaatatttaagcaaaattgttaatgagccatgtaatgttatagatgatttagactctaagtcattctttaataaggaatcaaatattcaattattggaaaatattagattttttgaaggtgaaaaagcaaactgcaaagatttaggggcaaagttagcaagtcttggtgatatatatgtttttgatgcatttggaactgcgcatagagagcaagcctcaacacactctgcaattgaatgcgctcctgttgcatgtgctggtcttttacttcaaagagaaaataaattcttatccctagcgctcaataatcatgaaagtccgtatgtggctgtaattggaggagcaaaagtttcttcaaaacttgaattaattaagcatattaactctgaagcagatcatattattgttggaggaggcattgcaaacacttttttaaaagccaaaggttttgatgttggaaaatcactatttgaagattcaatgatagacattgcttataacctcattgaaaaaggaaaaattattcttcctaaaaaagtgattacatcgactacatttgaaggaaaaaatgtgaaagaaactttggtgagtgaagtcggtc

SEQ ID NO: 250272 - DNA, 673 bp, Unknown
  Bacterial polypeptide expressing nucleotide sequence isolated from the Sargasso Sea
gatgcgttcggcaccgcgcaccgtgcgcaggcctccacccacggcgtgatccgctttgccccggtggccgccggtggcccgctgctgatggccgaactggacgcgctggccaaagcgctgctcgcgccggcccagccgctgctggcgatcgtggccggcagcaaggtcagtaccaagctggaactgctggccaacctggtcggcaaggtcgaccagctgatcgtgggcggcggcatcgccaacaccttcatcgccgccgccggccatgccgtgggcaagtcgctgtacgagccggacctgctcgacaccgcccgcaggatcgtggccgatgccaaggcgcgcggtgccgagatcccgctgcccaccgacgtggtggtggccaagcagttcctgccggacgccgaagcgacggtcaaggcggtcaccgacgtggccgaggacgatctgatcctggacatcggcccggacaccgcccagcactacgccgggctgatcgccaaggcgggcaccgtggtctggaacggcccggtcggcgtgttcgagttcgaggcgttcagccacggtacgcaggcgctggcgcaggcgatcgccgcatcgtcggcgttctccattgccggtggtggcgatacgctggccgcggtcgacaagtacgacatcgctgaccaggtgagct

SEQ ID NO: 250273 - DNA, 773 bp, Unknown
  Bacterial polypeptide expressing nucleotide sequence isolated from the Sargasso Sea
ggcggcccgcctcggggcgggtgatgtgttgatgttggaaaatctacgctttcatcctggtgaggaggccaatgatcctgcttttgctgaggcgttggcagggcttggcgatatctatgtcggtgatgccttctcatgtgcgcacagagcgcatgcgtcggtcgaggcattgccccgacagatggcggcagctggtaaaacagtctgcgctggacgttcaatgggggctgaacttgctgccctcggtgccgcgctgagcaatcctgaacggccggttgttgctgttgttggcggggcgaaagtgtcaaccaagctgcagattcttgaaaatcttgtaacacgtgtcgacggcatcgtgctagggggtggtatggccaataccttccttctggccatgggacatgatgtcggggcctcactcgtcgagttggatatggtgaaaacggccactagcatcatcgccgccgccgttgccaatgactgccgcctgattctgccggtcgatgcgctggtggcaagtgaatttgccgctaatgcgtcgcatcgcgttgtcgccatcgacgctgtcagtgccgatgagatgattctggatgtcggtccgcaatcgattgcagcggttgccgccttcatcaaaggctgcaggactgttgtctggaacggcccaatgggcgcctttgagactccgccctttgacactggcacgaatgcggttgcgcgggcggtcgccgcacggacggtggctggcgagctgctcagcattgccggtggcggtg

SEQ ID NO: 250274 - DNA, 832 bp, Unknown
  Bacterial polypeptide expressing nucleotide sequence isolated from the Sargasso Sea
aatgagaaccatagatcagtttagttttaagaacaaaaaggcaataattagggttgattttaatgttcctattgacaacaacaaagtaacagatacaagtaggattaaagcttctaaacaaacaatagacaaggtttgtaatgacggtggatcatgtgttctggtgtctcacttaggaaggcccaagggttttcaaaaagaattttcgatgactaacattataaatgaagttgaaaatgttttagaacgaaatgttgttttgtctaaagatgttataggtcctgacgcaaagaaaaaatcgcttgaccttaaaccaaaccaagtattacttttagagaatgtaagattccatgatgaagaaaaaaaaggcgacatagattttgcaaaagagctttccttgttggccgattgctatataaatgatgcttttggaactgcacacagatcacatgcttcaaccactacaatatcaactttctttaatgacaaattctttggaaaatgtttagaacgagaagttaactcaattaaaaaagttttaagttctggagaaaaaccaatactagcaattttaggaggggcaaagatttcaagtaaaatccctattctaaaaaatataattaaaatagctgatcatattattattggaggaggaatgtcctttacatttatcaaagcaatgggaggacaaattgggttatctattcatgaggattcaatgttagacaccgcaaaagaaataataaaaaaagcagagaaaaataatgttaaaattcatctgcctattgatgttgtatgctctaaagactttgacaatgaatctgaacgaaag

SEQ ID NO: 250275 - DNA, 331 bp, Unknown
  Bacterial polypeptide expressing nucleotide sequence isolated from the Sargasso Sea
aaaatacaaaatgatgatatgatattagatataggaccaaaaacactaaatttaatatgcaaaattttagataatagtaaaacagttctatggaatggaccagcagggtactttgaaaatcctaatttcgctataggaagtaaagagatagcaaaaaaaattgttgaattaaaaaataaaatttattctgtagctggaggtggagatacaattgtagttattaataaagtaaatgcatttgaaaaattaaactttgtttcaactgctggtggtgcctttttggaataccttgaaggtaaagaaattcctggtataagagccctcaaataat

SEQ ID NO: 250276 - DNA, 701 bp, Unknown
  Bacterial polypeptide expressing nucleotide sequence isolated from the Sargasso Sea
aatgagattactaaaagaccaagatcttagtaataagaatgtggttgtgagattagatttaaatgttcctattcaaaacaagcaaattatagattcaaccagaatcatttattcagtacctacaataaaatatctcgtagataaaaactgtaaagtccttttaacatcacatcttggcagacctgaggaaggaaagtttgatcaagatttctcaatgtctccggtcgctaaaaaattatctgaaatcttaaatcatgaaattgatcttatcgattccctagacaatagcgatatttttaatacaacccaaatacaattattagaaaatttaagatttcttatcggtgaaaaagacaataatgaaaagctaggaaatcagctagcaaataaaggagatgtttatatatttgatgcttttgggactgctcaccgtaaacaggcttccacatactcagctattcaacaagcaaagctctcatgtgctggacttctcttagagaaagagattaattcacttaataaagctttaatctctattgaaaacccattcactgctgtaatcgcaggttcaaagatttcaacaaagcttgaacttatagctcatttaaactcaaaagcagacttcattgttgttggcggcggtattgctaatacctttctgaaatctcagggcttcgatgtcggagagtctttggtagaaa

SEQ ID NO: 250277 - DNA, 493 bp, Unknown
  Bacterial polypeptide expressing nucleotide sequence isolated from the Sargasso Sea
aatgagcaaacttaaagctcttgatgaaaactttaatttatccgaaaaaagagtaattttgcgtgctgatttaaatgtaccaattattgatggcaatataactgatatatctagaattaaaaaaattatccctgaaataaatgagctcaaaaataaaaatgctaaggtaattataatttcacatcttgggagacctaagggtaaagttaatgacaaattgtctttgaaaccagtagttcctattttagaaagcttactagattctaaaattcattttttaaatgagtgttatggtcctgctgtaatagcaaagagtcaaacaattaaatctggtgaggttctattacttgaaaaccttagatttaatgaagaagaagagcagaatacagaatcttttgccaaaaatctttctaaaataggggatatatatattaatgaagctttttcttgctcacatagagctcacacgtctgtttgtgaaataacaaaacac

SEQ ID NO: 250278 - DNA, 628 bp, Unknown
  Bacterial polypeptide expressing nucleotide sequence isolated from the Sargasso Sea
catggcgaagcgttcccttgccggcctcaacagcagcgacctgagcggcaaacgcgttctcgtgcgggttgacttcaacgtgcccctcgatgacaccggcgcgatcaccgatgacacccgcatccgcgccgccctgccgaccatcaacgacttgatcggcaaggaggccaaggtgattctctcggctcacttcggtcgtcccaagggagaagtgaaggagtcgatgcgtctgactcctgtgactgctcgcctgagcgaactgctgaacaagcccgtcaccaagaccgacagctgcatcggccctgatgccgaggccaaagtcgccgccatggccaatggcgatgtggtgctgctggagaacgttcgcttcttcgccgaggaagaaaagaacgaagccgggtttgccgaaaagctggctggtctggcagacgtttatgtcaatgacgcgttcggtgccgctcaccgcgcccatgcctctaccgagggcgtgaccaagttcctcaagcctgccgtggccggcttcctgatggagaaggagcttcagtacctccagggtgctgtggatgagcccaagcgtcccctcgccgccatcgtcggcggttccaaggtgagctccaagatcggagtg

SEQ ID NO: 250279 - DNA, 202 bp, Unknown
  Bacterial polypeptide expressing nucleotide sequence isolated from the Sargasso Sea
atgatcaagtctatttccacatttgacatcaaacataaaagggttctgataagagcagatttaaatgtgccaatcaatgaaggcaaggtccaagatgacttcagattaaaagcgcttttgccaactttgaattattgtttaaagaacaatgctaagatagtcttaatgtctcatctcggtagaccaaaaggcaaaattgata

SEQ ID NO: 250280 - DNA, 831 bp, Unknown
  Bacterial polypeptide expressing nucleotide sequence isolated from the Sargasso Sea
aagaaacattaggagatattttatttgctgaagagctatcaaagttaggggatatatatgtaaatgatgcttttgggacatgccatagggagcattcctcaacagctttaattgcaaaatattttaagaataaaaaatttgcaggcaagctcttagaaaaagaacttacggcaattaatcaaatagctaataatggaaaaaaacctgtactagcaatattaggaggagcaaaggtttctagcaagcttaatatcctgtataaccttataaaaaaagttgacaaaataattattggaggaggaatggcatatacttttattaaagcaaaaggaggaaagattggaaattctttagttgaggatgaattaataataaacgctaaagaaattctaagtttagcagaaaaactagaaaaacaaataattttaccttttgatactaaagcatcaaaggattttgaaaataatgatcaaattaaaacttttgattcaaataaaatcgaagatgattggatggggctagatattggaaaaaaatcaatagaaaaattcagcaaagagatttttttaagcaatactattttttggaatggacctatgggtgtatttgaaaaggaattattctccgaaggaacgagctcaatatgtaattcactgagagaggcaaaacaaaaaggagttaacgtaatagttggtggaggtgattcaattgcagctttgaaaaagcttggaaataaagactgggttagttatatttcaacaggaggaggggctcttttagaaagtttagaagggaaaactctgccaggtgtaaaggctttaatgcaatgaa

SEQ ID NO: 250281 - DNA, 712 bp, Unknown
  Bacterial polypeptide expressing nucleotide sequence isolated from the Sargasso Sea
cctcaagcccgccgtcgctggcttcctgatggaaaaggagcttcagtacctgcagggtgctgtggatgagcccaagcgtcctctcgccgccatcgtgggtggctccaaggtgagctccaagatcggcgtgctcgaggccctgatcgacaagtgcgacaaggtgctgatcggcggcggcatgatcttcaccttctacaaggcgcgtggcctctcggtgggcaagagcctggtggaagaggacaagctggaactggccaaggagctggaagccaaggccaaggccaagggcgttgagctgctgctgcccaccgatgtggtgctggctgacaacttcgcccccgatgccaacagccaagtggctgatgtcaccgccatccccgacggctggatgggtctggacatcggccctgatgcggtgaaggtgttccaggacgcccttggcgattgtcagaccgtgatctggaacggccccatgggcgtgttcgaattcgagaagttcgccaccggcaccaacgccatcgccacaaccctggcggagctcagcggcaagggctgctgcacgatcatcggcggtggtgactccgtggctgctgtggagaaggctggtctggccgacaagatgtcccacatttccaccggtggcggcgccagccttgaacttctagaaggcaaggtgctgcctggtgttgccgccctcaacgacgccgcctga

SEQ ID NO: 250282 - DNA, 788 bp, Unknown
  Bacterial polypeptide expressing nucleotide sequence isolated from the Sargasso Sea
tttagaagggaaaaaagttcttgtcagagtagattttaatgttccattaaacgaagggggtcaaataactgatgatacgagaattagagcagcgatcccaactattaaatatcttattaatcattctgcaaaagttatcttagctgcccattttgggagacctaagggccaggtaaatgaaaagatgagattaattccagtagcagcgcgattaggtgaattgttggggaaaaacgttgctcttactaaaagttgtataggcgaagaatctgttgcagaatctaatagcttaaagaatggagatgttcttttacttgaaaatgttcgattttttgctgaagaggaaaagaatgacttggattttgctaaaaagttagcattacacgcagatatgtatgtaaatgatgcttttggcgctgctcatagggctcatgcttcaactcagggagttactaattatttaagcccatcagtagctggtttccttttagaaaaagaattgaaatatttacaaggagcgatagactctccaaagcgtccattggcagcaatagttggaggatccaaggttagcagcaaaataggagtgcttgattctttacttgataagtgcgacaaaatcatgattggtggaggtatgatttttactttttataaagcgaggggtcttgatgttggaaagagtcttgtagaagaagataaacttgagcttgcaaaaaatttagaagcaaaagcaaaagcaaaaggagtagaattattattgcctactgatgttgttttagctaatg

SEQ ID NO: 250283 - DNA, 415 bp, Unknown
  Bacterial polypeptide expressing nucleotide sequence isolated from the Sargasso Sea
tctgtgtaaaattacttttcctgaagatgtattggttggaaaaaattttaatgataaatctgagatcaaagagctaaatggtatagagagtgatgacttaatattagatatcggtccaaaaacaattaataaaatcaaaaatattatagaaatgagcaaaacaattttgtggaatggtccagcaggttattttgaaaattcaaattttgctaacggtagttatgaaattgcaaaagcaataattaagaagaataaaaataaatctatttactctgttattggaggtggagatacaatcgctgttataaatcaaattaatgacataaaaaactttgacttcgtttcaactgctggtggagcatttttagaataccttgaaggaaaagaacttcctggtataaaagctttaaattaa

SEQ ID NO: 250284 - DNA, 538 bp, Unknown
  Bacterial polypeptide expressing nucleotide sequence isolated from the Sargasso Sea
ggaatggcatacacttttatagctgcacagggaggaaaaataggagagtctttgattgaagaggatttaatagaaaatgctaaagaaattctagagattgcaaacagtttaaacaaagaaattattctaccggatgatataaaagcgtcaacagactttgaccagaatgacttgattaaaacttttgattctaataaaatagaaaacggatggatgggcttagatattgggacaaaaactattgagaaatttaatcaagcaattttatcaagtaaaacaattttttggaatggccctgtaggtgtctttgaaaaagaggcctttttagaagggactcgatcaatttgtaattcattaaaagaagccaaaaccattggggtaaacattattgttgggggtggcgactcaatcgcagcacttaaaaaacttggaaatgaagattgggttagctatatttcaacaggaggaggcgctcttttggaaagcctagaaggtaaaactcttcctggagttaaagcgttgcttaatgagaattaaa

SEQ ID NO: 250285 - DNA, 957 bp, Unknown
  Bacterial polypeptide expressing nucleotide sequence isolated from the Sargasso Sea
cttacgcttgatgatcttgatctcaaaggaaaaagagtactaatcagatttgattacaacgtaaagtatttaaatggaaaagtcagtgatgacgagagaattttaagaacactgccaactttaacctatgttctctctaaagctagttcggtaacaattcttagtcatcttggcagacctgaaaaagtaggagagattgataaagacttttctctgaaaaaagtcgcagaacacttgagcactttattgtccgaagagatttattttcatgatgatttaaaccttgatcatttctcagataatcaaaaaaagatttcgatgttggaaaatgtaagattttttgaaggtgaaactgaaaacaatgagttattttcaaaaaagcttgcacaattagctgatgtttttgtcatggatgcttttggatcggcccatagaagtcactgttccactgaaggagttagtcattttatagattcatgtgttggaaggttggttgaggaagagttaaattctttagatggaattttaaataacccaccaaaaccaatgctgggaatcatcggcggctcaaaaatatcaacaaaaataaatattctggaatctctacttgaaaaagttgattggcttttcgttggaggagggatagctaatacattacacaaatcaaaaggatatgaaatcggtcaatcgattgtagaaaatgattttttagaagaagcaaaagatcttagtaaaaataacaaaataatattgcccgatacctttttagtagaacaaaaagataagtctactgttgagaaaactagtgaagaaatattgccagacgacattatttatgacgttagtattaactcaattaaaaacttaaataatattatctcgagttgtaaaactatattatggaatggtcctttaggtttttttgagagagaagaatttttcaaaaaggtacattgc

SEQ ID NO: 250286 - DNA, 824 bp, Unknown
  Bacterial polypeptide expressing nucleotide sequence isolated from the Sargasso Sea
attttgagaacactgccaactttaacctatattctgtctaaagctagttcggtaacaattatcagtcatcttggaagacctgaaaaagtaggagagattgataaagacttttctctgaaaaaagttgcagaacacttgagcactttattgtccgaagaaatttattttcatgacgatttaaaccttaatcatttttcagataatcaaaaaaagatttcgatgttggaaaatgtaagattttttgaaggtgaaactgacaacagtgagatattttcaaaaaaacttgcacaattagctgatatttttgtcatggatgcttttggatcggctcatagaagtcactgttccactgagggagttagtcattttatagattcatgtgttggccgattggttgaggaggagttaaattccttagaaggaatttttgataatccatctaaaccaatgctgggaatcatcggtggctcaaaaatatcaacaaaaataaatattctggaatctcttcttgaaaaagttgattggcttttcgttggaggagggatagctaatacattacacaaatcaaaaggatatgaaatcggccaatcgattgtagaaaatgattttttgaaagaagcaaaagatcttagtaaaaataacaaaataatattgcccgagatctttgtagtagaacaaaaagataagtctattgttgagaaaacttttgaagaaatattgccagacgacattatttatgacgttagtattaactcagttaaaaacttaaataaaatcatctcaagctgtaaaactatattatggaatggtcctttaggtttttt

SEQ ID NO: 250287 - DNA, 862 bp, Unknown
  Bacterial polypeptide expressing nucleotide sequence isolated from the Sargasso Sea
caataaaaataaaatttttatcatagctcattttggaagaccaaaaggagaatttttaaaaaaatattctttaaagtttattctttcatctcttagaacaatactgaaaatcaagaaaatttattttttagaaaatttacaaaaggatcagatcaacaaaactgttaatgaaatgcaatatggcgaagtttgtttaattgaaaatattagatttcaagaaagtgaggaaaaaattgatttaaattttgcaaaaaatataagtagtttatttgatgtttatgtaaatgatgcattttctgcttctcatagaaatcacacttcaattataggatttgcaaaatacataccagctgttgctggaaaccatctcattcaagaaataaaaaaaattgattcatttttagaaaattcaaaaaaacctaatattgcaatagttggaggatctaaaatatctacaaagattaaactattaaataatttaattaagcagtttaattgtattgttataggtggagctatggctaatacatttttattatcaaacaatataaatataggtaaatcacttgttgaaaaagatttagttgaagaagcaaaaaatatacaaaaaaaagcaaatcaatataattgtactattattctaccaactgatgtagtttgtggaaaaagcatagaagacaaaaatccatttgaacttgatcttaatgaaattacatcagattttatgattttagatttgggaaaaaaaacaactgaaataatcaatcaagaaattaaaaattcaagaatggttttgtggaatggccctgttggagcatttgaatataaaccatatgataaggcaactaaagaaattgcaata

SEQ ID NO: 250288 - DNA, 199 bp, Unknown
  Bacterial polypeptide expressing nucleotide sequence isolated from the Sargasso Sea
aatgaaagcacgtcaattcatagaagaccttgatttaaagggaaggcgggtattgatccgggttgatttcaatgtgcccctggatgaaaatcagaagatcaccgacaatgacagaatcgcggctgctcttccatcgattcggagaatcattgaatctggaggaaagtgcattctgatgtctcatcttggacgcccacaa

SEQ ID NO: 250289 - DNA, 850 bp, Unknown
  Bacterial polypeptide expressing nucleotide sequence isolated from the Sargasso Sea
gacgccgtggcggccatagcctcggccgataacggcgaggtcgtggttctcgagaaccttcggttccatgccggtgaagaagccaatgacggcaccttcgcccaggccatagccgatctcgcggatgcctacgtcaatgatgccttttcctgcgcccatagggcccatgcatcaaccgaagcaatcgcgtgcctgctgccggcggcggcgggacggctgatgcaaatggaattggaagcgcttagcggcgcccttgggaacccggaacgtccggtggcagccgtggtcggcggcgccaagatctcaaccaagatggacgtgctgggcaacttagtgtcgaaggtagatcaattgatcatcggcggcggcatggccaacacattcctctttgccagcggcatcgatgtgggtaaatcgctctccgaaaccgacatggccaaccaggcccaggccatcatggcgaatgcagccgcagaagggtgcgagatcattttaccggtcgacgctaaggtggcccagacgttcgaagccggcgcgagaagtcaggcggtttccgtggacagcgtaccgaccgattcgatgatcctggacctggggcctgccagcatcaacgatttggttcagcgtctaggccgatgccgcaccgtggtgtggaacggcccccttggtgcctttgaaatctcgccctttgatgccggcactaacgccgtagcccgcgaaacggcgcgtctgacccaggacaagttcctgctgagtgtcgctggcggtggcgacacagtcgcggcgctggcaaacgcgggtgtggtggatcacttctcctacgtctcgacggcgggcggtgcgttcttgg

SEQ ID NO: 250290 - DNA, 400 bp, Unknown
  Bacterial polypeptide expressing nucleotide sequence isolated from the Sargasso Sea
atgaccgtgttgaagatgaccgacctcgatctgcaaggtaagcgcgtactgatccgcgaagacctcaacgtccccgtcaaggacggtgttgtcaccagcgatgcgcgaatcctggcctcgctgccgaccatcaagctggccctggaaaaaggcgcggccgtgatggtctgctcccacctgggtcgcccgaccgaaggtgagttctccgccgaaaacagcctcaagccggtcgccgagtacctgagcaaggccctgggccgtgacgtgccattggtcgcagactacctgggcggcgtggacgtgaaagccggcgatatcgtgttgttcgaaaacgtgcgcttcaacaagggcgagaaaaagaacagcgacgaactggcccagcaatacgccgccctgtgcg

SEQ ID NO: 250291 - DNA, 349 bp, Unknown
  Bacterial polypeptide expressing nucleotide sequence isolated from the Sargasso Sea
tcaagggtgtgtggaattgatgacgttcaagatgatgagatgatacttgaccaaattctaagcccaaaagcctttgaaaagatttttaaggcaaaaaaaattatttggaatgggcctgttggtgtatttgagcaagaacttttctcaaaaggtacccaacaacttgctgaggcaattgcatcttcaaatgcttatagtttagctggaggtggagaaactcttctggctattaaaatgtttatagataagagtaatatctcttattgttcaactggtggtggtgcttttcttgaatttattgagggaaaagcgctaccatcattgtctgccctgggctttaaattttgaa

SEQ ID NO: 250292 - DNA, 914 bp, Unknown
  Bacterial polypeptide expressing nucleotide sequence isolated from the Sargasso Sea
aatgattaacctatcatcattagatcttaataacaaaaacttagtcataagagttgatatgaacgtcccaattaaagacggggatgttcttgattcaacaagaattaaggcatgcctgtcaactattgaatatgcacttaaaaataatgcaaaagttcttttgataagtcacttgggcagacctattgaaggaaattttgaggaagagttttcactaaaacctgttgcaaatgaactaagtaaaatcataaacatggatgttgaacttattgatacattagaatctaataaaatttttaattcatcatcaaatattcaagttttagaaaatataagattttttgaaggagaaaaagagaactctcaagagttaggtaataaattagggtctcttggagatatatatgtttttgatgcttttgggactgcgcaccgagaacaggcatcgactcatgctgcaataatgaatgctccaatagcatgctctggactattgctagagaaagaagaaaattttttatcgcaggcgcttaaaaaatatgaaagaccttatgttgctattatcggtggcgcaaaagtttctacaaaacttgagcttataaagcatattaatgaagtcgcagaccatattatcgtaggtggaggtattgcaaatacttttataaagtcttcaggccttaatgtaggaaactcactgactgaacaatcaatgctagaaattgcaaagagcatcttggataaaggtaaaatcatactacctaatagagtattaacatctaaaacatttgaaggagaggatataaaagaaacctcaataagcaatattggtaatgatgaaatgattttagatttaatactagagcaggagacaaagactttgattaataatgctaggactattctttggaatggac

SEQ ID NO: 250293 - DNA, 575 bp, Unknown
  Bacterial polypeptide expressing nucleotide sequence isolated from the Sargasso Sea
aatgagacttgaagaggcagatatagctgaaaaacgagtgttcataagggcggacttgaatgtgcctatgcaggatgggcaaatatctaatgatgccagaataagagcgagcctccccacaatatccagagtgttagaaaagaattgcgcagttacggtgctatcgcacctcggacgtccagaagagggtagatttgatgaggcattttctttagctccgatcgcacaaaggctcagtgagctattgtctgttcccgtaattcttttgaaagatatcgagcagtctaaaaccctctccaaaggacaaattggtctgatggagaacgttagattttttgctggagaaaaaggcaacagtgatgagctgggcagaagaatggcagcttgctgcgatgtttttattatggatgcctttggatctgctcatagagcgcatgcctctaccaattctattgcaaagcacgtagaagtcgttgtgcctggttttttgatggagtccgaattagaagcactaaatggagttgtacagaacgccaaaacgcctgtggttgctgttttgggagggtgcaaggtat

SEQ ID NO: 250294 - DNA, 283 bp, Unknown
  Bacterial polypeptide expressing nucleotide sequence isolated from the Sargasso Sea
aagactgtgattaataatgctaagactattctttggaatggacccatgggagtatttgaaaactctttatttgagaatggtacaaaggaactttctatagaaattgctaagtctaatggtttttctcttgctggaggaggcgaaacattgtcggcaataaataaatatattaaatcagatgatgtatcatattgttcaacaggcggaggcgcctttttagaatttatggagggtaaagttttaccttctattgaagctctaaattcgaaaatagggagttaat

SEQ ID NO: 250295 - DNA, 407 bp, Unknown
  Bacterial polypeptide expressing nucleotide sequence isolated from the Sargasso Sea
attgccgattgatgtttgtgtcgcagaagaattttcagcgacagcagcatcgcgcttgtgtgcagtggatgcggttgctgagcaggataggattcttgatgttggggttgagacagctcaaagttatcaggatctcttaaagggtatgcaaaccgtcatttggaacggtccagtcggtgtttttgagtttcctcaattttctcatggaacccaagctctgggcgaagcgattgcgaacagtcatgctttttcgatagccggtggcggagatacattggctgccttagcaaagtttcatttaagtgatagaatatcctataggagtacgggcggaggcgcttttttagagctgcttgaaggtaaaaccttacccgttgtggcgatattagaacagcgagcacaataat

SEQ ID NO: 250296 - DNA, 906 bp, Unknown
  Bacterial polypeptide expressing nucleotide sequence isolated from the Sargasso Sea
atattatttagagccgatttaaacgttcctgttgttgaaggaataattacagatacctcacgcataaaagcaattaaatcttcaataaaaaaattaatttctaaaaataataaaatttttttaattgcccattttggtcgacctaaaggagagtttgttgagaaatactcgctaaactttattctcccatcattaaaagaaatattcaacttagataaaatatattttctagaaaattttgatcaggattccattaagaaaatagatcaagagatgcaagatggtgatttatgcttagtcgaaaatattagatttttaaaagaagaagagaatattgatttgcaatttgcaaaaaaaatcagcgatttatttgatgtgtatgttaatgatgcgttttctgcatctcatagaaatcatacatcaattactggttttcctaaatttttaactgctgttgctggtaaccatatgattaatgaaataaataatattaattcttttttagacaatgctaaaaaaccaaatatagctattgttggtggctctaaaatatcaactaaaattcaattattaagcaatttaatattgcaatttagttcagttgctattggaggagcaatggctaacacatttttactcgctaataatcacaatattggcaactccttagttgaaaaggatttagttcaagaggcaaataacattcagctaaaggcaaagaaagtcaattgtgaattaatactgccttcagatgcattgtgtggaaaaaatattaatgatataaatccagttcatcgaagtattcatgaaattttatctgacgaaatgattctggatattggagaacagtcaacacagtttatcaaaaataaaattattaattcaaaaatggtattatggaatgga

SEQ ID NO: 250297 - DNA, 631 bp, Unknown
  Bacterial polypeptide expressing nucleotide sequence isolated from the Sargasso Sea
gaaaccagttgcagctatcgttggaggctccattttatcgacaaaaatcgaactcctcaataatttaagcgataaagtagactttttgattattggtggggcaatggccaatacgctcttaaaagctcagggatttgaaattggtaaatcccttacagaaaacaaaatgttaaagattgcagagaatattatcaaagaaatgaagaataaaagatgcaaattagttttacctcgagatatcatctgcgccgaatctatgactaataaagcaaaaacatattcattcagtgttgattgttgtcccattgataaaatgattctcgatattggaccgatgaccgaaaaggatataatgactattattgacaaatcaaagaccttaatttggaatgggccacttggagcatttgaaacccttccttttgatcgaggcaccaataatattgctaaatacgcggcaaataggactttagataggcaattaatctcgatagcagggggtggtgatactgtcagtgctcttaaaacatcagactcagtttcaaaatttagttatgtttcaactgcaggaggtgcgttcctagaatggctagaaggcaaaacacttccagggatcgaatcgcttcaataa

SEQ ID NO: 250298 - DNA, 637 bp, Unknown
  Bacterial polypeptide expressing nucleotide sequence isolated from the Sargasso Sea
atgataaagacactacaagcatttgaccttaggggtaaaaatatattgatccgcactgattttaatgtccctatggatggtgagattgtaactaataacttccgtattaaggctgctcttcccactatcaaaacttgtattgaagctggcgcggcagtagtccttatgtctcatctgggaaggccaaaaggtaagaagaaccaatctttaagtttaattccagttggagaagaattagcagcacttctagagatgccaatcaaattttcagaggactgtgtttctacagatgcaatagatacatcaataagtcttaagcctggagagatacatcttttggaaaaccttaggtttcacaatggtgaggagagtaatgatacagaattctcatcacaattagcaaggcatggtcatatttttattaatgatgcttttggtacagcgcatcgtgaacatgcctcaaatgttggtgttgttccttatttcaagaattcgggtatcggttggctaatggataaagagttgaaataccttgatagattaatgaacaatccaaaacgcccattaacattggtacttggtggagcaaaaatcgatacaaaacttgatttaattgataatttcttaactaatgctg

SEQ ID NO: 250299 - DNA, 381 bp, Unknown
  Bacterial polypeptide expressing nucleotide sequence isolated from the Sargasso Sea
atgcaggacatcgtgctgaggtcaagctggctgcggaggtagccaacgatgacatgattctcgatgtcgggcccgagacggccgcaggcattgccgagcgtgtagccacctctgccaccattttatggaacggtcccctcggtgtattcgagcaggccgcgttcgcggcaggcacgcgcgtgttggcagaggcgattgctgccagtgagggtttctctctggcaggcggtggggataccttggcggctatcgatcttttagatgtggcaagcggcgtctcatatatttccacggggggcggtgccttccttgaatatgtagagggcaaggagctacctgccgtggcggcgctgagagcgcgtgctgaccacgcgtcgtgat

SEQ ID NO: 250300 - DNA, 805 bp, Unknown
  Bacterial polypeptide expressing nucleotide sequence isolated from the Sargasso Sea
aatgattcaaaattttcatcctctttagccaaacttgctgatgtatatgtaaatgaggcatttggaacgtctcatagagaacattgctcaactcatggaatggcgaaagattttgaaaataaaattagtggtttccttgtagataaagaattaagttttgtatctaaaatgatgagaaaaccagagcacccttttttagttattattggaggctctaaaataaaagataagatttctgcacttggaaatttacttgatagtgctgataaaattctagtcggcggaggggctgcttatacatttttaaaagctcaaggagtaagtattggtaaatccatctatgaagaagaaatgttagaatgggttcaagaagtttatgttaaatatagagaaaaaattgttctaccaattgaccacgtgatttcacaaaccctagataaaacaagccagtctttaatctcagatgttgatataccaaaggattatatggctttagatattggccctaaaactattgaattgtttaactctattataaaaggccctggttatatattttggaatggacctatgggtgtattcgaatttaaacaatattcttccggaacaattcatgtagcccgtgcggtcgcattagcaacttggagaggtgctacatctgtagtgggcggcggtgagacaattgctgcaataagaaaagcagaagtgctggaatcagaaatttctcatatgtccaccggtggtggtgctttgcttgaatatttaggtggcggtaatttgccaggtatagaaattttggattaat

SEQ ID NO: 250301 - DNA, 857 bp, Unknown
  Bacterial polypeptide expressing nucleotide sequence isolated from the Sargasso Sea
catgtccgatctagaaaaacaagacttaaaaaataaaaaagtaattgtaagagttgacttaaatgtccctttagatgataatgacaatgtaactgacacaacgagaattatggcatgtaaagagacagttgatttaattctagaaaaaggaggaacatgtattctaatatctcatcttggtagaccaaaaggaaaagaaaataaattctccctaaaaaaaatagtggatacagtctcttcggtgttaaaccggccagtatttttttataaagattgcattggccagggtgctaaagaagcgatatctaaattagatcaaggcagtattattcttatggaaaatcttcgtttttatgaggaggaaacatcaggagatagggtctttgctaaaaacctttcagaattaggggacatatatgtaaatgatgcttttggaacttgccatagagaacatgcatcaacagccgtaattgctgagttttttaagaataaaaaatttgcaggtaagcttcttcaaaaagaacttgaggcaataaatcaaattgctaaaaatggcaaaaaacctgttcttgcaattttgggaggggccaaagtttcaagtaaactcagcattctatataatctgattaagaatgtagataaaataataattggaggaggaatggcatacacttttattaaggcaaaaggaggacaaattgggaactctctggtagaaaatgaattaattaccaatgcacaagaaattttaagtttagcgcaaagattagataaaaaaataattttgcctttagatacaaaagcttcaaaagactttgacaataacgaacaaatctcaacctataattcaaaagaga

SEQ ID NO: 250302 - DNA, 691 bp, Unknown
  Bacterial polypeptide expressing nucleotide sequence isolated from the Sargasso Sea
gaatccatgcggcgcgaactcgatgcgctcgacgccgccctcggcaatccgcagaagcccgtgctgggcgtcgtcggcggctccaaggtctccaccaagctggacctgctgaagaatctggtcggcaagctggaccgcctggccatcggcggcggcatggccaacaccttcctctacgctcagggcgtcgacatcggcggctcgttggcggaaaaggacatggccgatacggcccgcgacatcctggccgaggccgaggcgaagggctgcgaaatcctgctgccgatcgacgtggtcgtcgccaccgacgtcaagccgggcgccgacacccgcaccgtcctggctcgcgaggaaatcggcgacgaggaaaagattctcgacgccggcccgctgacggtcgagaagctgatcaaggcgatggctctgtccaagaccctgatctggaacggcccgctgggcgtgttcgaggttccgccgttcgacgccgccaccgtcaaggccgcaaaggccgccgccgacctggccaagtcgggcgccctggtcgcggtcgcgggcggcggcgacacggtcgcggccctgaaccacgccggggtcgcggacgacatgaccttcgtctccaccgccggcggcgccttcctggaatggatggagggcaaggccctgcccggcgtcgaggcgttgcgcgcgtgac

SEQ ID NO: 250303 - DNA, 517 bp, Unknown
  Bacterial polypeptide expressing nucleotide sequence isolated from the Sargasso Sea
tctgaccggcgggggcattaccaacacctttttaaaagcgcagggaaacaatataggaatttcactttgcgaagactcaatgctgagtcatgccaaggaactcctagagacagagaaaatattgctaccaaatgaggttttggttagcaaaaacatagactcaaacgaatcaagggtttgtaaaattgattctgtccaagatgatgaaatgatacttgaccaaatcctcagttcagctgcaggtgaaaagatatctattgctaaaaaaattatttggaatggtcctgtgggagtatttgaacataagcctttctcaaaaggaacccaagacctcgctaacgcaattgcttcatcacaagcttatagtttggctggtggaggtgagactcttttagccattaagatgtttatagataaaaataacatctcatattgctctactggcggaggcgccttccttgaatttatggaaggaaaagagctaccatcattgtctgccttaggatttaaattttaa

SEQ ID NO: 250304 - DNA, 706 bp, Unknown
  Bacterial polypeptide expressing nucleotide sequence isolated from the Sargasso Sea
aatgagattacttaaagaccaggatcttagtaataagaatgtggttgtgagattagatttaaatgttcctattcaagacaagcaaattatagattcaaccagaatcatttcttcagtacctacaataaaatatctcatagataaaaattgtaaagtccttttaacatcacatcttggcagacccaaggaaggaaagtttgatcaagatttctcaatgtctccggtcgctaaaaaattatctgaaatcttaaatcatgaaattgatcttattgattccctagacagcagcgatatttttaatacaactcaaatacaactattagaaaatttaagattccttatcggtgaaaaagacaataatgaaaagctaggcaatcagctagcaaataaaggagatgtttatatatttgatgcttttggtactgctcaccgtaaacaggcttccacacactcagctattcaacaagcaaagttttcatgtgctggacttctcttagagaaagagattaattcacttaataaagctttaacctctattgaaaacccattcactgctgtaatcgcaggttcaaagatttcaacaaagcttgaacttatagctcatttaaactcaaaagcagatttcattgttgttggtggcggtattgctaatacctttctgaaatctcagggcttcgatgtcggagagtctttggtagaaaatgac

SEQ ID NO: 250305 - DNA, 675 bp, Unknown
  Bacterial polypeptide expressing nucleotide sequence isolated from the Sargasso Sea
catgaaatttcttggattgaacgattttcaatttaaagatcaacgcgttctgctccgtttagatttaaatgcaccaataaaggatggggcagtaactaatgatgaaaggttggtaaggtctctaccaactataaatcatatattaaacaatgaaggcaaacttatagtgatcagtcacttggggagacctaaggagaatggagagattcagccagagttttctttatctcttgttgttaagcggctagagcagttattgaatagacccatcaatctgattactgacataaataacattccttcaatagaagcaggtgagatgatcattttagagaatgtaaggttcttagaaggagaaaaatctaacgactctggtttatctaagaagttagctaatattgcagatatcttcgttatggatgcttttgccacttctcatagagcgcattcttctacgacaggagtaatagaatttagtgagaaagcatgcgctggtttcttgttagaagaagagataaatgccttatcaaagataactctcaaagataaaggcgacactttagctgttttagggggagcaaaaatttccaccaaattggatttgattaattctttatgtgacaagatggatgccgtaattttgggtggaggaatagcaaatacctgcttattggc

SEQ ID NO: 250306 - DNA, 700 bp, Unknown
  Bacterial polypeptide expressing nucleotide sequence isolated from the Sargasso Sea
aaaagcctgtgctggcccattacttgctgcagaattatatgcactgggtaaggcgctagataatcctaagcgcccaatggttgccattgtgggtggttctaaagtatcgactaaacttaccgtgcttaaaacgctagctgaaaaagtagatcagcttattgttggtggcggtattgccaatacctttatagcggcacagggccacaatgtaggtaagtcgctggttgaaatggaccttaccgagcaagccacgcagcttatgaatgaagcgcaggctaatggcggtaatattccagtgccaacagacgtagtggtaggcaaggcgtttgatgagaatactgaagctacgcttaaagtggtaagcgatgttgccgatgacgatatgatttttgatattggcccagactcgtcaaaagcccttgaagatatcattaaaaatgccggcaccatagtatggaatggccctgtaggcgtatttgaatttgaacagttcagtgctggaacaaaggcgctgtctgaagcgattgccgcaagcgacgcattctcaatcgcaggtggtggtgatacactagccgcagttgataaatacggaattgccgataaggtttcttatatttcaacaggtggtggcgcgttcctagagttcttggaaggcaaaacgctaccagcggtagcagtactagaagaaaaaaataaataa

SEQ ID NO: 250307 - DNA, 889 bp, Unknown
  Bacterial polypeptide expressing nucleotide sequence isolated from the Sargasso Sea
aaaaaagaggatttattcaaagaatcaaaaaaccaaatagtttttttagaaaatattagattctatgaagaagaagaaaaaaacgatcaaaatttttcaaaacatttgtctaaacttgcagatatatttgttaatgatgcattttcttgttcccatagagctcatgcttcagtaagtaaaattactgaatttttaccatcttatgcaggactccaattagaaacagaaatgaatgcattaaaaaaagttacaagcgaaattaaaaaaccaatcacttgtattattggagggtcaaaaatttcaacaaaaatagcagtaattaaaaatttaataccaaaatttgataatattataattgttggaggaatggctaataacattttaagttataaaggaaaccctacaggaaaatcaataagagaagaaaattgtgaattaattgttgatgacatttttaaaactgcaaaaacttattcatgctcaattatttatcctcaagatgttgttgttggaaaaagtttaaaagacaaagcccatattaaagaactcaatgaagtaacaaacgatgatttaattttagatattgggccaaaaaccataaataaaatcaaagatattattgaaaacagtaaaacagttttatggaatggtcctgtaggttattttgaaaacccaaattttgctaatggttgttttgagattgcaaaaaagattattgaaaaaaataaaaataacctaatttattctattgtaggaggtggggatacaattgcggttctaaatcaaatcaatgcaattaatcattttaattttgtttcaactgctggtggagcattcttggaatatcttgaaggaaaagaacttcctggtataaaagctctaaattaaa

SEQ ID NO: 250308 - DNA, 862 bp, Unknown
  Bacterial polypeptide expressing nucleotide sequence isolated from the Sargasso Sea
aaaggtagctgctttgtcggttggtgatgtactggtgttggagaacgtccgtttcaatcctagtgaaaaaaagggagatgatgcgaattatgttgccggtattgcgaacctggcagatgcatatgtgaacgatgcttttggaacctgtcatcggactgaagcgagcatgtacgccgttccaaaggctatgaaagaatcaggtaagccagtggttgtcggctttcttgtcgagaaagaaatccgatatctttccgatgcggtgggtcaaccaaagcgaccgtttgtagctattctaggtggtaaaaaggtaagtgataaaattgctgttatcaagaatcttttaatgatttgtgactacgtattaatcggaggcgcgatggcttatacgttttctctcgctcaaggtgggaagacgggcgattctcttgtggagtcagataaacttgaattagcaaagcaacttatccaagatggtggagagaaactcattctcccggtggatacccaatgtgcagatgatttttcatcagatgcgaacaagaaggtagtcaaggccggtgaaataccagatggctttgagggtctcgatatcggccccgatacagccaataagtatgctgaaataatccgcggcgctggcacagttgtctggaacggaccgatgggggtattcgaaatgccgccttttgatgctggtacaaaagcagttgccgacgccgttgccagtgcaacagccagcggtgcaatcacgattattggtggaggtgattcagcagcagcagttgaacagcttggttatgctgaaaaggtaagccatgtttcaactggtggtggagcatctctcgaaatgctcgaggggaaa

SEQ ID NO: 250309 - DNA, 631 bp, Unknown
  Bacterial polypeptide expressing nucleotide sequence isolated from the Sargasso Sea
aataaaatatctcatagataaaaattgtaaagtccttttaacatcacatcttggcagacccaaggaaggaaagtttgatcaagatttctcaatgtctccggtcgctaaaaaattatctgaaatcttaaatcatgaaattgatcttattgattccctagacagcagcgatatttttaatacaactcaaatacaactattagaaaatttaagattccttatcggtgaaaaagacaataatgaaaagctaggcaatcagctagcaaataaaggagatgtttatatatttgatgcttttggtactgctcaccgtaaacaggcttccacacactcagctattcaacaagcaaagttttcatgtgctggacttctcttagagaaagagattaattcacttaataaagctttaacctctattgaaaacccattcactgctgtaatcgcaggttcaaagatttcaacaaagcttgaacttatagctcatttaaactcaaaagcagatttcattgttgttggtggcggtattgctaatacctttctgaaatctcagggcttcgatgtcggagagtctttggtagaaaatgacatgattgaaattgctaaagagctttttaattccggcaaaataatatta

SEQ ID NO: 250310 - DNA, 488 bp, Unknown
  Bacterial polypeptide expressing nucleotide sequence isolated from the Sargasso Sea
tattggtaaatcaattaaagaagaaaattgtgaaacaattattgatgatatttttaaatcatctaaatattactcatgctctataattcttcctgatgatgttgctactggtaaaaaaatggaagatcattcaacagttaaagatttagatgagattgaaaatgatgatctaattttagatattggcccaaaaacaataaaaaaaattaattatataattgaatcaagtaaaactattttatggaatgggcctgctggatattttgagaatcctcattttgcaaaaggaagttttgaaattggaaaaaaaattgaagaaaaaaataaattaaatcaaattttttctgtggccggtggaggtgataccgctgctcttttaaacaagattggtatttttaattcattcaattttgtttcaactgctggtggagcatttttggaatatcttgaaggtaaagaattgcctggtataaaggctcttagctaat

SEQ ID NO: 250311 - DNA, 868 bp, Unknown
  Bacterial polypeptide expressing nucleotide sequence isolated from the Sargasso Sea
ttcaatgtacccctggatgaaaatcagaagattaccgacaatgcgagaatcgcggctgctcttccatcgatccggagaatcatcgaatcgggagggaaatgcattctgatgtcgcatcttggacgccccaaagggcaacgtgttgaaagcatgagtttgaagcctgcggctgaagaactttctctgcttctggagaaaaacgttagtttggctcctgactccatcggcagtgaagttgagaaaatggtctcgcagatggaagaaggagaacttttgctccttgagaatttgaggtttcatcagggagagacaaaaaacgacccgcagttttgtgaagctttggccaggcttggagaggtttacatcaatgatgctttcggaacggcgcaccgggcccatgcttccactgcaggagtggcgaacctgatggaggaccgcgcagtaggttacctgatccgtaaggagttggaattcctgggagccgcagtattggatccccaaaaaccatttactgcgatcctgggcggagcaaaagtctccgacaaaatcattgtgattgaacggttgatggaaaaagttgatgcgctgatcattggcggagggatggccaacacgttcctcaaggcacagggaatggaaattggagattctttgcttgaggaagatgctctggaaacggcaaaaaatcttctggatgaagcaaaaaaatgcggagtcaaaattcaccttccagtggatgtttgttcggctccggaacttctccaggaagtggaaacgaaattcctgaaagttgaggataaggtccaagcggggtggaaaattctcgacattggtccggaaagtgtaaaacagttcggttcagtcattc

SEQ ID NO: 250312 - DNA, 172 bp, Unknown
  Bacterial polypeptide expressing nucleotide sequence isolated from the Sargasso Sea
gggggtggagactctgcggcggccgtgcatcaaacagcgctggaaaaacaaattactcacatttctacaggaggaggagcttcactcgaatttctggaaggcaaaacccttcccggagttcaggcaattccttatcgagaagcatatttaaacaaagtgagccagagctaag

SEQ ID NO: 250313 - DNA, 813 bp, Unknown
  Bacterial polypeptide expressing nucleotide sequence isolated from the Sargasso Sea
catgcaaatccctctgatgcaggatctagatctgcagggattgcggacgataatccgcttggatttaaatgtcccaatgaaagacggtgttattaccagtgatgcaagaatcagggcagccatacccaccatagagatggctttggataaaggcgcaagagtaattttactctctcacctagggcgacccgatcctgatgcgcttgatagttcattcagcttagaaccagtggcaaaacgcttaggagatctgatgggtagacccgtaaatttttgcgccaattggcttgacggtatcccggagaacgaaattactctctgtgagaacaccagatattttaaaggtgagaaatccaatgatgattcgctagcaaataagattgcttcgctctgtgatgtttttgttatggacgcctttggcgcctcacatcgaaaacatgcaagcacctacggggcagctaaggcctcaagtcaggcatgtatcggtccgctattaaacagagaagtcgaagttttatcacaagccttggttaatcctgataagcctctggtggcagttattggcggggcaaaggtttcatcaaaactaggggttatcgaatcgttgtcaaaaatctgcgatcacatcattgtcggtggcggcatagccaataccttcctgatggcatcgggttttgagaccggacaatcgttaagcgaatctgatatggtcgagccggctaggcaaattctagatctcaaagggatcaatgtgcctttgcctgttgatgttataactgccaaggaattctcaagcgatgccgaggctgaaat

SEQ ID NO: 250314 - DNA, 577 bp, Unknown
  Bacterial polypeptide expressing nucleotide sequence isolated from the Sargasso Sea
acttaatctgattgaaaatcttttgccaaaagttgaatatcttatggttgggggaggaatgtgcttcacttttttaaaagctttaggacatgaaatagggaggtcattactagaagagtcatttatttctaaagcagagaaactacttaattcaaaatttggaaaaaaaatagttctacctattgactttggtgtttctgactcaatagatagttcagttagagaagatttaaagttagatgattttaaaaacaatcatataggtgttgatattggacctcaaactgtttccaattttagagaaatactaaaaaaatcaaataatattttttggaatggacctatgggtatttttgaaaaagaaaagtttagttatggaactagagaaataacagagattatttcaaattcatctgcatatacatgtattggcggtggtgattctgtaagtgcaattaataaattttctgataaaaaaaactttaatcatatatcaacaggtggcggagcatcattggaatatcttgaaggaaaaaaattaccaggggtaaacaaatacaaatcacttataatttga

SEQ ID NO: 250315 - DNA, 823 bp, Unknown
  Bacterial polypeptide expressing nucleotide sequence isolated from the Sargasso Sea
atgtctgtaattagagctttaaaagataatataaatatttcaaataaaagagttatattacgctctgacctcaacgtacctatcattaaaaacgaaatacaagacacaactagaataaaatcatgtcttccatttttagaaacattgttaaagcaaggagctaaagttttattaatttctcatcttggaaggccaaaaaatagtggtgataaaaattattctttagaacctgtttttgagtatctaaaaaaaaatattaaaaataatattttttttcattctgaaaaaattaatagtgagactaagaaaaaaatatcttttctaaaacaaggtgaaataatcttatttgaaaatattaggtttaatgatggtgaggttcaaaatgatgatggatttgccaagaatctttcctctattggagatatttatattaacgatgctttttcatgctcacatagaaagcaagcctctgttcacaaaatcactgaatacttgaaagagtcttatggcgggccctccttaattaaggaagtcgactctttaaatctgattttgaataataagcaaaaaccagttacatgtattattggaggttctaaagtttcaacaaaacttggagtaataatatcattaattcaaaaagttgataatttagtcgtagtaggtgcgatggctaataattttattaaatacaaaggtttgaaatttggcagatctttaatagaaaaagactcagaaaaaactattagtaaaatatatgatcagttaaataatagtgattgcaaaataattttgccaactgactttgtagttcaaacaatta

SEQ ID NO: 250316 - DNA, 793 bp, Unknown
  Bacterial polypeptide expressing nucleotide sequence isolated from the Sargasso Sea
taaaacctttgctgaaaaactttcaaagctagctgatatattcgtaaacgatgcatttggaactgcacaccgagcacatgcctctactgctgttattgctgatttttttcatgacaacaaatgtttcggttacatcatggctaaagaaataacaaatctagaaaaaatagtaaccgaaggcgaaagaccaattactgctattatgggtggggctaaagtttcttcaaaaatcaccatcatcaacaaattgatgaataaggttgataaaattattattggaggcggaatgtcttacacatttgcaaaagcattaggaggaaatgtaggtaattcactagtggaagatgataaaatggaattagcactttctttaatctctcaagctaaagaaataggagtagaattacttattcccgtcgactctttaaatgcagatgccttctcaaaagatgcaaacacgaatgttagcgatattgacaaagttgaagacggttggatgggcctcgatattggtgaaaaaacaaaagcaatttaccgaaatgcaatatcgagttcaaaaaccattctgtggaatggcccaatgggtgtttttgaaatggacaaattttcaggtggtactaaatacatcgcagatgccattgcagatgcaacatcgcaaggaagtttttctttagtaggtgggggtgattctgttgctgcagttaaaaaatttaatctgcaagataaagtaagttatttatctactggtggcggagccatgctagaatatcttgaaggtaaagagcttccagga

SEQ ID NO: 250317 - DNA, 325 bp, Unknown
  Bacterial polypeptide expressing nucleotide sequence isolated from the Sargasso Sea
gatgggtctggacatcggtcctgatgcggtgaaggtgttccaggccgctctggccgattgtcagaccgtgatctggaacggccccatgggcgtgttcgaattcgagaagttcgccactggcaccaacgccatcgccaccaccctggcggaactcagcgccaagggctgctgcacgatcatcggcggtggtgactccgtggctgctgtggagaaggccggtctggccgagaagatgtcccacatctccaccggtggcggcgccagcctcgaactgctggaaggcaaggtgctgcccggtgtggccgccctcaacgacgctgcctga

SEQ ID NO: 250318 - DNA, 619 bp, Unknown
  Bacterial polypeptide expressing nucleotide sequence isolated from the Sargasso Sea
aatgagacttgaagaggcagatatagctgaaagacgagtgttcattagggcggacttgaatgtgcctatgcaggatgggcaaataactaatgatgccagaataagagcgagcctccccacaatatccgaagtgttagaaaagaattgcgcagttacggtgctgtcgcacctcggacgtccagaagagggtaaatttgatgaggcattttctttagctccgatcgcacaaaggctcactgagctgttgtctgtacccgtaattcttttgaaagatatcgagcagtctaaaaccctctccaaaggacaaattggtctgatggagaacgttagattttttgctggagaaaaaggcaacagcgatgagctcggcagaagaatggcagcttgctgcgatgtttttattatggacgccttcggatctgctcatagagctcatgcctctacgaattctattgcaaagcacgtagaagtcgttgtgcctgggtttttgatggagtccgaattaaaagcattaaatggagttgtgcagaacgccaaaacgcctgtggttgctattttgggcggtgcaaaggtatcttccaaacttacgttgctagaaagatttccgaaatcaggacaa

SEQ ID NO: 250319 - DNA, 220 bp, Unknown
  Bacterial polypeptide expressing nucleotide sequence isolated from the Sargasso Sea
atgtcgaaattgtctctctccagtcttgataagtctaaattagaaggaaaaaaagttcttgtaagggtagattttaatgttccattaaatgaaagtggagagattactgatgatactcgaataagagcagcaattcctactataaattatcttatagataactcagcaaaagttatattggctgcacattttgggagacccaaaggcaaggttaatgaga

SEQ ID NO: 250320 - DNA, 766 bp, Unknown
  Bacterial polypeptide expressing nucleotide sequence isolated from the Sargasso Sea
atgataagatctttaaaatcttttgaccttaaaggtcaaacaattctgatgaggcttgatcttaatgtgccaatgaatgatgataagattgaagatgattttagaataagatcaagcttacctacaattaaatattgtttagaagagggagcttcaatagtaattatgtctcatcttggaagaccagaaggtgagtgcatttcaaactacagtttaattcctgtgggagagtctcttgctggtatgttagaaataccgattaaattttctgaggactgtatttcacaagatgccattgatacatctctatccttaaaaccaggggaagttcatcttttggagaacttaaggttttacaaagaagagcaagataatgactcagaattctcaaatagattatcaagacacggaaagttatttataaatgatgctttcggaacagcgcataggaagcattcttcaaatttcggtgttgttgataattttaaatattatggtattggcttattagttgaaagagagctgcaatatttgaaagatatgatgaataaacctaaaagacctctagccttcttattgggtggtgcaaaggtatctacaaaaattcaacttattaaaaggtatttacatatggctgatagtataataattggtggcgggatggcatttacttttttaaaagctatgggctataatattggaaaatctttagtcgaagaaaaaatgttaaaaaatgctagatccattatagatctggcgcgtgcaa

SEQ ID NO: 250321 - DNA, 665 bp, Unknown
  Bacterial polypeptide expressing nucleotide sequence isolated from the Sargasso Sea
tgaaataaatgctcttaagaaagtaacgagtgaaataaaaacaccagttacatgtataattggaggatcaaaaatttcaactaagattaatttaatcaaaaatttaataccaaaatttgataacattattgttgttggtggaatggcaaataacattttaagctataaaggaaattcgataggtaaatcaattaaagaagataattgtgaaaatgaaatagaaaacatttttaaaatctctaatgatcactcatgttcaataatttatccaaaggatgtcaaaattggaaaaagcatggatgacaaatctcaaattaaagacttaactgaagtgtcagctgatgatttaattctcgatattggccctaaaactttaaaaaaaatcagagatattattgaaaatagtaaaactgttttgtggaatggtccggcaggttattttgaaaatccaaattttgccttaggaagttatgaaatagcaaagatgattattaaaaaaaataaagataattcaatttattctgttgcaggaggtggtgatactattgcagtgttaaatcagataaatgcaataaatgattttaattttgtttcaactgctggtggagcttttttagaatatcttgaaggcaaggaacttcctggtataaaagctctaaattaat

SEQ ID NO: 250322 - DNA, 540 bp, Unknown
  Bacterial polypeptide expressing nucleotide sequence isolated from the Sargasso Sea
aatgagattactaaaagaccaagatcttagtaataagaaggtggttgtgagattagatttaaatgttcccattcaagacaagcaaattatagattcaaccagaatcatttcttcagtacctacaataaaatatctcgtaaataaaaattgtagagtccttttaacatcacatcttggtagacctgaagaaggaaagtttgatcaagatttctcaatgtctccggtcgctaaaaaattatctgaaatattgaatcatgaaattgatcttattgattcccttgatagcagcgatatttttaatacaactcaaatacaactattagaaaatttaagatttcttatcggtgaaaaagacaataatgaaaagttaggcaatcagctagcaaataaaggagatgtttacatatttgatgcttttgggactgctcaccgtaaacaggcttccacgcactcagctattcaacaggcaaagctttcatgtgctggacttctcttagagaaggaaattaattcacttaataaagctttaacctctattaa

SEQ ID NO: 250323 - DNA, 871 bp, Unknown
  Bacterial polypeptide expressing nucleotide sequence isolated from the Sargasso Sea
tatttcagaatgggcagatggttttgacctcattgagggagaaatagtgctacttgaaaatatcagattttcagaaggtgaaaaagataacagtgataatctgagtaaaaaattagctgatctttgcgatatatttgtgatggatgcatttggttctgctcacagaaagcatgcaagcacctatggagtgattgaattttctgagacagcctgtgctggaccacttttgagcaaggagcttgattcaattagtcggatttatacagattcaaaaagcccaataatagcgattgttggcggatcaaaaatatctactaaattagaagtaataaaatcactttcaaattttgttgattatttaattttaggtggcggtattgcgaatacgattctaaaagcgcaaggaaaggagattggcaaatcgctttatgaagaatctatgctaggtactgcaaaaaaaatgattgagacaaattcggaatgtcagatcatggaaatatttgatgtggtagtggcgaaagaaatcaatgacagcagtaagtcagatgtaaaagatataaattccgtctctaatgatgatttgatattagatattgggccaaaaacttccaattcgtacgaagaaatcataaaaaaatcgtcaacagtaatttggaatggtcctttaggcctatttgaaattgaccaatttagcagtggaactgagagaatcgcgcaagcaatcgcgcaatgtggcggttattctattgctggcggtggagatactgtttctgctatagagaaatttggagtgactgatggaatttcttatatatctactggtggaggagcttttcttgatttatctgcgataaaacactcccctcaataa

SEQ ID NO: 250324 - DNA, 466 bp, Unknown
  Bacterial polypeptide expressing nucleotide sequence isolated from the Sargasso Sea
catgggcaaattaaaagctcttgacgaaaatttaaatttaactaacaaaagaataatcttacgtgtagatttaaatgtccctatgcagggaggaaaagtaacggataaatctagaataaataaaattattcctattataaaagaactaacaaataaaaaagctaagataatacttatttctcacctcggaagacctaaaggaaaaattgatgaaaaattatcactacaaccaataaaacctattttagaaaatttgctaaattctaaagtttatttttccaatgaaaattatggatcaattgtcgtggaaaaaagtaaaaaaattaaaccaggtgaagttttattgctcgaaaatatcagattcaataaggaagaagaagaaaatggagcgatttttgctaaagaactttccaaagcaggtgatatttatgttaacgaagctttttcttgctctcatagagcccat

SEQ ID NO: 250325 - DNA, 846 bp, Unknown
  Bacterial polypeptide expressing nucleotide sequence isolated from the Sargasso Sea
tccaaagggaaagcgagtccctgaattatctttagctcccgttgcttttcgcttagctgaacttcttgagcaacccgtttatatggctacagattgtgtaggggaggaagtcgcggaacaagtgagaaatcttgaacctggtcagatattgcttttggaaaatctacgttatcatcgggaagaagaaggaaatggcgaaaaattttctcataacttggccgctttgggtgaaatatatgttaacgacgcgtttggtgcggctcatagagctcatgcgtctaccgaaggagttacgaatcatttggccccatcactgagcggcttgttgatggaatctgaaataaattatttgcaggagactttaaaacaaccagacaaaccttttgtcgcgattttaggcggcgcaaaaatttctggtaaaattgaggtcattgataatcttctggataaggtcgatacgctaataatcggtggagggatgtcgtatactttctttaaatcgatgggtttagagataggtaattcgttacttgaagcggatcgtcttgatgttgcgaagaaagtcatggaaaaatgtcaggatcagcaagtcgatttattgttacctatcgatatagtagttgctgatgatcttagtgaatcagctcagacccggattgttgagcgagagggtatacctgttggttgggaaggagttgatatcgggccagaaacacgtaaactgtatgcaaggaagcttgccagtgcaggtactgttatttggaatggtccgctcggagtatttgaaataccagctttttgcacacggtacctgtgctgtcgcagaagcattagtttcagccacaa

SEQ ID NO: 250326 - DNA, 940 bp, Unknown
  Bacterial polypeptide expressing nucleotide sequence isolated from the Sargasso Sea
cctctcaatagtaaaatacaagttacagatagaacaagaatagaggctgccaaaccaacgattgcttatattttatcagaaggaggatcctgtattttgatttcacatttaggaagaccaaaaggaagagaccccaaactttcattggaaaatatctactcaacagtatcagatactttgggtgtgcagatttctttttgtaaagaatgcattggtgaggaagctgaagcagcagcttcggcacttaaaccaggacaggtattaatgatggaaaatttacgttatcacaagcaagagactgaaggagattttaacttttcaaaacaactttcgaaattaggaactgtttatgtcaatgatgcttttggcacagcccaccgcccacatgcatctacggcaataatagctcagttctttgaaaataagaagtgctttgggaaactcttagaaaaagaagtattggccatagataaaattatgaaaaaaggggtagcacctattttagctatcctagggggagcaaaggtttcttcaaaaattacaattatagaaagcttacttgataaggttaatcacttaataataggaggaggaatggtgtataccttcattaaggctataggaggaagagttggagactcaatttgcgaattggattattgtgagtacgctttgcatttactaaaaaaagcaaaacaaaaaggagtagtaatccatcttccattggatgttttagcaggtgacgatttcagcaatgatgccaatcaaaagatcttcaatataatggaaatagatgacggctgggaaggtatggatgttggaccaaggactattaaaaagttccatgatcttattttaaaatgtaaaactatactttggaatggcccaatgggtgtttttgagttctcaaactttgctaaaggcactatttcaattgggg

SEQ ID NO: 250327 - DNA, 301 bp, Unknown
  Bacterial polypeptide expressing nucleotide sequence isolated from the Sargasso Sea
gactctgccaaggccctggccgacatcatcatgaacgccaagaccatcctgtggaacggcccggtcggcgtattcgagttcgaccaattcgctgaaggcaccaaggtgatcgccgaagccatcgctgcttctccggccttctccatcgctggtggtggtgacaccctggctgccatcgacaagttcggcatcgccgacaaggtctcctacatctccaccggcggcggcgccttcctggagttcgtggaaggcaaggtactgccggctgttgcgattctggaacagcgcgccaaagcctaat

SEQ ID NO: 250328 - DNA, 714 bp, Unknown
  Bacterial polypeptide expressing nucleotide sequence isolated from the Sargasso Sea
tatgttgaaaacattaaatacatttgatatcaagggtaaaaacatcctcataagagtggatttcaatgtgcctttgtcagatggttctatagttgataatttcaggatcaaagcagcgttgccaactattaaatcttgtattgagggtggagcggctatcgtattgatgtctcatcttggaagacctaatggaaaacatgataaggatttaagccttatgccaataggagaagagttagcaagctacttagaaatgccgataaaattttctcatagttgcgtttccacagatgcaattgatacttctatcagtctaaagccaggagaaattcacctcttagagaatcttcggtttcatgacggagaaattgcgaatgattctaagttttctagagatctttcaaggcatggacaaatttatattaatgatgcttttggtactgcacatcgttcacatgcatctaatctaggtattcttgattatttcaaacagtctggaattggatggttaattgataaagaattaaagtatttacagaggatatttaataagccaaaacatcctttaacacttatactcggtggagcaaagattaagacaaaattaggtttaattgaaaatttcctaaatattgccgataatattataataggaggtgggatggctttcacctttttaaaagctatggataaaaatattggtggttctatgat

SEQ ID NO: 250329 - DNA, 767 bp, Unknown
  Bacterial polypeptide expressing nucleotide sequence isolated from the Sargasso Sea
aatgtcgtctctacgatgcgaaatatgcttaaagcatgatggttctgcatcgttcttatttttactttggagtcacgatatcaacgtcttaacgctttctaaacttccacaagcttttttcaaggataaaagggttattgtcaggtgcgatttaaatgtgccgataagagatggagttatcactagcgaggcgaggatcgttgcctctttaccgacgatagagttggtttccaaactggccaattcggttctcgttatgtctcatttggggagaccaaaaccaggcgaccaaagtcgcgacttttccctagcactcgtagctaaaaggcttggtgagttgcttggaagggatgtaccactcctgcgaagcctcgatgaatcagtgcaggaaaggggaatagcgttgcttgaaaatgtgcgcctatttcccggtgagaccgataatgctagagagcttgcggaaaagctgagttcgaaaggcgatatttttgttatggatgcttttggctccgcccatcgccagcacgcatcaacctttggggttgctgagctctcggatacagcctgcgccggtcttttgctagaacaagagctttttgctatttcggaagcaatggaatctccgcaagtccccatgatctcaattgttggaggttctaaaacctctactaagcttgaggttttaaactcgctgtcacatgtctccagtaggattttagtaggcggaggaatactaaacaccttcttggcggcctccggattcgaac

SEQ ID NO: 250330 - DNA, 973 bp, Unknown
  Bacterial polypeptide expressing nucleotide sequence isolated from the Sargasso Sea
tttaaaatttctaaataaacaaaaaacaaaaattattattttatctcacgtaggtaggccgaaaggtaaaatctccagagagctttcattaaagccaatttgtgaaaatttacaggatcaattaggtttaaatgtgagactaattacagaaaatatcaatgaaattgaaaaaaaagatttcttcgataaatttgaggaggaaattttaatgctagaaaatataaggttttatccagaagaagaaaaaaatgataataattttgcaaaacgtatagcaaatcttggtgatctttatgttaatgatgctttttcttgttctcatcgatcacatacatcaattgttaaagtttctaaattcctgccttcattttctggattacaactagatttagaggttgatgctcttactaaaattacatctgaaatcacaaaaccagtatcctgtataattggggggtctaagatttcgaccaaaattgaaattattaaaaatcttatacctaaatttgataatattattattgttggtggtatggctaataattttattcagtacttcggtcacaatattgggaaatcaattaaagaaaaaaattgtgatcaaataattcaagaaattatttcactttcagaaaaagaaaagtgtgaaataacatatccagaagatgtgctagtatctaaagatttaaatggatcaagcaaaaaaaaaaaagtaaatgaaattttaagtgatgaaatgattttagacatcggcccaaaaaccataaataaaatatcaagtattattaattcaagtaagaccatattatggaatggacctgctggatattttgaaaacccaaactttgcaaacggcagtattgaaatagcaaagacaataattaataataataaattaaacaaaattttttcagttgctggtggaggagatacggtctcattattaaatagcattaaagctgtagatagttta

SEQ ID NO: 250331 - DNA, 556 bp, Unknown
  Bacterial polypeptide expressing nucleotide sequence isolated from the Sargasso Sea
tatgtctcatttaaaaatgaaagatcttgatttaaacgacaaaactattttgattcgagtagaccttaatgtcccgattaaagatggaaaagttttaaatgatgatcgggtcaaagcagttttgccgacaattagattggcagctaaaagcgcaaaaaaaattatactaatgtcgcatttaggacgacccatagaaggtgaaccaatcgatgggcagagggaagcgagtcttctcccggtagcgaaacatctctcatcgatactgggttgtgatgtaccagtgatcgataattacctcaatgctccagaactgatcgagcaaaatccagccaaaaccttgttgctagaaaatgttagagttaataagggggaaaaatctaatttagatagtttggcaagaaaatatgccgaactgtgtgatttgttcgtaatggatgcctttgggactgcgcatagggctcaagctagcactcatggggttgcacgatatgctcctgttgcgtgtgccggtccgcttcttgctgcagaattactagctctagagaagtcgctatct

SEQ ID NO: 250332 - DNA, 822 bp, Unknown
  Bacterial polypeptide expressing nucleotide sequence isolated from the Sargasso Sea
accgagacgaggggaaaaaataaaaattatagtctatttccaattggagagaccctagcttctatgttagaaatacccattaaattttctcaggattgtatttcacaagatgcgattgatacatctctatctttaaaagcaggggaaattcatctcttggaaaacttgagattttataaagaagaacaagataatgaatctgaattttctcgtaggctttcacggcatggaaagttgttcataaatgatgctttcggaacagcgcatagaaagcatgcttcaaattttggtgtagtggataattttaaatattatggtattggcttattgattgaaaaagagctgcgatatttaaaggaaatgatgaacaaacctaaaaggccattgatagtcttactgggtggtgcgaaagtatctacaaaaattgaactcattaaaaggtatctacatatagctgatagaataataattggtggtggaatggcatttaccttttttaaagctatgggatataatataggtaaatctttagtggagtcgacaatggtgaaaaatgctaggtcaataattgatttggcacgtgcaagcggtaaagaattgattttgccagtagatataatatgttctgagagcattagtagctcacctattataaatgttgtagatattagagaaattcccgatgattttatgggtttagatattggaccaaaatcaattaaactatttaatgagatcattgattcggcctcgactgttatttggaatggccctatgggagtttttgaaaatgatgactattcaagtggtactagattaata

SEQ ID NO: 250333 - DNA, 689 bp, Unknown
  Bacterial polypeptide expressing nucleotide sequence isolated from the Sargasso Sea
aggtaaattgatggagcaagagctaattgctctagaaaatatactaacgaaaccccaaagacctctagtagccatagtcggtggctcgaaagtctctaccaagatagatttacttaataacctcattcacaaagtggacacactgatcgtcggcggcggcatggcgaacacttttcttttggcgcaaggtttttttattggggcatctctggctgaacatgcacttacggatagtgctcttaatatattaaattctgcagaaaaagctggatgtagaattttacttcccacagatgtggttgttgccaaagaattaaatgataatgtagagagctttgtggtgccagtaaatgagtgtccagaagataggatgatactagatgttggccctcaaactgtcgaaagaataaaagaaagcctgctgaacacggagactttagtttggaatggtccgctcggagcgtttgaaataggacctttcgaccgcgcaacaactgacctcgcaaattttgtttctaagttaagcaataataataaattggtttcaattgctggcggtggagatacgttggctgcattaaaaaacgctgaagcttctaatggtttcagctatctatcaacggccggtggcgcgtttctagaatggatggagggtaaaaaacttcctggaattacagcactccaataga

SEQ ID NO: 250334 - DNA, 238 bp, Unknown
  Bacterial polypeptide expressing nucleotide sequence isolated from the Sargasso Sea
atgaccgttctgaagatgaccgacctcgacctcgctggtaagcgcgtgttgatccgcgaagacctcaacgtcccggtgaaggacggtgtggtcaagagcgacgcgcgtatcctcgcctccttgccgaccatcaagctggcgctggaaaagggcgctgccgtactggtctgctcgcacctgggccgtccggaagagggcgtgtacagcgaggaagacagcctggcgccggtcgccgcct

SEQ ID NO: 250335 - DNA, 490 bp, Unknown
  Bacterial polypeptide expressing nucleotide sequence isolated from the Sargasso Sea
aaatcaatatgtgaaaatgattgcgaagctttaataaaaaaaattttagaaaactcaaacaaatataattgtcaaattatatgccctgaagatgttgtggttgcaaaaaaccttgaaaataaaggaaaagataaaaatataaatgaaattaatgataatgaaatgatattggatattggcccaaaaacaatttctttaatcgaaaaaataattaatgattcaaatacagtattatggaatggcccagctggatattttgaaaatccatattttcaaaatggtacgaaaaaaattttagaaataatttcacaaaaaacaaaaaaagataagattttttctgtagctggtgggggagaaacggttgcagcaataaacaaatttaaaaaactggattcatttacatttgtttcaactgctggtggcgcttttttagaataccttgaaggaaaaactctacctggtataaaagctttaaatcaaaatgtctgaa

SEQ ID NO: 250336 - DNA, 606 bp, Unknown
  Bacterial polypeptide expressing nucleotide sequence isolated from the Sargasso Sea
ggccaaatgggaaaagacaaaacacttctcttttaataacatattaatagaaatctcaaagcgcttaggcagagaggtggactttattaatgactgtattggagaaattgttgagaaaaaaatttcccagatgaagagcggcgacattctgttgttagaaaatttaaggttttacaaagaagaaataaatggagacgagatatttgcaaaaaaactttccaggttaggagactattatattaacgatgcttttggaacatgccatagggagcatgcgtccacatatactattgcaaaatattttccaaaaaaaaaatatgcaggaaaactcttagagaaagaactaaatgttattgatgaaattttagaaaaagggaaagcgccaattcttgctattcttggaggcgcgaaagtttcatcaaaattaaaaattatcaataaccttattgagcaagttgataaaataatcattgcaggaggaatggcgtttacttttataaaagcaataggaggagaaataggggattctctttatgagccatcgttaattaatgaagctaaatcaattttgaagaaagcaaaaaggttcaaaacagaagtctattt

SEQ ID NO: 250337 - DNA, 847 bp, Unknown
  Bacterial polypeptide expressing nucleotide sequence isolated from the Sargasso Sea
ggggagagagtagaaagcatgagtttaagacctgcagcggtggaattgtctaggttattgggccagcctgtggtactagcgccggattgtattggagaagaagttaaaaatctggttaacggtatggggaacggagatgtggttctgttggaaaatttacgctttcacaaagctgaagctgaaaatactccttcatttaatgaagcattggcagagaatggagacgtttatgtaaatgatgcgttcgggacagcgcatcgagctcatgcatcaacaaccggagtggcttcctatatcaaggacagtgcagtaggatatttgatgcgcagggaactgcattttttgggagatgcagtatcagagcctgtgagtccttttgttgcgattcttggaggagcgaaagtttcggataaaattaaagttattgaaaaacttttggacaaggttcaaaccctgattatcggtggtgggatggcttgcacatttttaaaatctcaaggattcgagataggtgcttcattgcttgaagaaaattccttggatttagcaacaaacctgactaaagaggcagagcagaagggagtcaattttttgcttccagttgatgcagtgattgcagaaagatttgataataatgcctcaaccagaataatttccgtagaggaaggtgttccggaagactgggtgatcctggatgttggaccgagaagtattgaaatattcagtcactcaattctcggatctggtactgttttgtggaacggtccaatgggagtttttgagatggaaaaattttctaaaggtacatacgcgattgcagtgagtcttgccaacgccactgagagtg

SEQ ID NO: 250338 - DNA, 796 bp, Unknown
  Bacterial polypeptide expressing nucleotide sequence isolated from the Sargasso Sea
tgttatcagtgatgcaagaattattgcttctcttccaaccatacaaatggcccttgataagggtgcaaatgtgatcttgctatcacatctgggtcgacccgaccctgacaatatagatagcagtttttcgctggagcctgtcgcagagaggcttaaagaaattctaggcattaaggtttcttttcaatccaaatggcttgagggaatcgatcatccgtctgatggcatcacactgtgtgagaatgttcgctatcacgcaggtgaaaaaaagaacgatgagtcgctttctcaaaagatagcagggctttgcgatgtttatgtcatggatgcatttggtgcctcacatcgaaaacattcaagcacatacggcgcacttcaatacgcaaaagaaagatgcattggaccgcttttatcgaatgaggtgaactcaattaagaagaccattgatggacccaaatcacctgtcactgcaatcatcgggggcgccaaagtttcatccaagttaggcgtcatagaaaaattctcaagtttttgcgatcacgtcattgtgggaggcgggattgccaatacgtttcttcttgcaagcggaaaggaggttggcgcctcattggctgaaccagaaatggttgacgcagcaaaaaatattctccagatggataatgtgaatgtgcctctgccagtcgatgtcagagtggcaaaagaattttcaggtgaagcagttgcaacaatcaaatcgatcgatgacattgaaaaagatgaactcattttagatatagggcctcaaaccgctgaagtg

SEQ ID NO: 250339 - DNA, 763 bp, Unknown
  Bacterial polypeptide expressing nucleotide sequence isolated from the Sargasso Sea
atgtttagaactttaaaatcttttgacatcaaagggcaaactatattaataagacttgatctaaatgtacctattcacgatgaggtgatccaggatgatttcaggataaaatcttgcctgcccacaattaattattgtttggaagaaggtgcggcggtagtattaatgtcccattttggcagaccaaaaggtaaatacagtaaagattttagtttaatgcctgttggtgagcatctagcctctcttctagaaattcctattaaattttcctcagattgtatttcacaggatgctattgacacttcactatctttaaagccaggagaagttcatctgctagaaaatttaaggttctataaagaagaatctgataatgattcgtttttctctaataagctatcaaaacacgggcgtgtatatattaacgatgctttcgggaccgcacatagagcacatgcatcaaatcatggtgtgattaataattttaaaaattatggtattggctttttgtttgaaaaagaaatgaaatacttaagagaggtcattaataaaccagaaagacctttggtcttaattctcggtggttcaaaggtttctactaaacttgaactaataaataaatatttaagtcaagctgataagataataattggcggaggaatggtatttacttttttcaaagcaatgggttataacattggcaaatctctagttgaaactaaaatgattgatcaagcaagaaacattcttggtgcagctaagc

SEQ ID NO: 250340 - DNA, 529 bp, Unknown
  Bacterial polypeptide expressing nucleotide sequence isolated from the Sargasso Sea
atgattaacttatcatcattagatcttaataataaaaacttagttattagggttgatatgaacgtgccaattaaaaacggggacgttcttgattcaacaagaattagggcatgtttatcaactattgaatacgcactcaaaaataatgcaaaagttttgttgataagtcacttgggcagacctgatgaaggaaattttgaagaagatttttccttaaaacctgttgcaaatgaattaagcaaaatcataaacatggatgttgaaattattgatacattagaatccagtaaaatttttaagtcatcatcaaatattcaagttttagaaaatataagattttttaaaggagaaaaagagaactctcaagagttaggtaagaaattaggatctcttggagatatatatgtatttgacgcttttgggactgcacaccgagaacaggcatcgactcatgctgcaataataaatgctccaatagcttgctctggattattgttagagaaagaagaaaatttcttatcgaaagcgc

SEQ ID NO: 250341 - DNA, 886 bp, Unknown
  Bacterial polypeptide expressing nucleotide sequence isolated from the Sargasso Sea
aacccggagcgcccgttttgcgccatcgtcggcggttccaaggtgtcctccaagattggcgtcatcgagtccttgttgcaaaagactgacaagattatcctcggtggtggcatgatcttcaccttctacaaggcgctcggcaagtccgtcggtgcctccctcgtcgaggacgacaagattgacctcgccaaggagctcatggccaaggctgaagccaagggcgtcaagctcttgctcccgacggacgtcgtcgtcgccgacaagttcgccgcggacgccaacacgcaagtcgtctccgttgacaacattccggagggctggatgggtctcgacgtcggtccggactctgtcaagagcttccaagccgaactcaacgagtgcaagtccgtcatctggaacggcccgatgggcgtcttcgagatggatgccttcgccaagggaaccttcgccatcgcggacaccctcgccaacctcgacggtatcaccatcatcggtggtggtgactccgtcgccgcggtcgaaaaggctggcctcgcggataagatgtcccacatctccaccggtggcggtgcttccctcgaattgctcgagggcaaggtgctcccgggcgtcgccgcgctcgacgaggtgcgtccccgtcgtcgtctccgactcgaactcgtcttcgactcgaactcgtctcgaactcgaactcgtctcgttcgctcgactgacgcgcgattattccttcacgacaggcgtaaacattcgttcattcgatgtgatgcactcgcgtcgacgttgacatttttaatcaatcctcaaattaatctcaatctcttccacgcactcatcgtcgcgcgccgctctgcatggaatccaccgccccgtggccgacgtccacgaa

SEQ ID NO: 250342 - DNA, 817 bp, Unknown
  Bacterial polypeptide expressing nucleotide sequence isolated from the Sargasso Sea
ttgatccccggtgtggaaatcatcgaaaaccttagatttgacccaggagagaccgataactcaccggagtttgtgcagtacctagtggaaggtgccgggggtacagcctttgaagggtatgtcaatgacgctttcggggtgtcccaccgttcccacgcatcagttgtcggccccccaggcttggtgccttcagcggcaggtcgacttttagaaaaagaagtcgaggtgctgggagcaatgagatctgcgccacggaggccttttttggctgtccttggcggcgctaaagtcagcgacaagttgggggttatcgaggctctactcggtgtcgttgaccggctcgtcattgggggtggcatgtgtttcacctttttgaaggctctcgggaacaacgtcggagactcgctgtgtgaagatgaccaagttgacgcgtgtaagagaatcatcgattcgggagccccgatacttctgccaacagacatcacagcgctgagccctgagggcgaaattcgtcagatgggacagtccatgccagaagggtggaaaggccttgacattgggcctgggagcgccgctgaatttggtgatgccattcatgaagcaaggacagtcttttggaatggtccagtgggattgttcgaagatccgcgcttcgcggcgggcaccagagctatcggacaggccctagccgactctcgggcctttacagttgtcggagggggagatagtgccgctgccgtagctgaattcgggctgagcccgtatatggatcacatcagcactggtgggggagccagtctcgagtattggaattagg

SEQ ID NO: 250343 - DNA, 733 bp, Unknown
  Bacterial polypeptide expressing nucleotide sequence isolated from the Sargasso Sea
atgttaaaaataaaacaactagaaaataatcagaatatagaaggaaaaagagttttgttgagaatcgatttcaacgttcctttaaaagatggttctgttacagaaatctctagaattataaaaattttaccaaccataaaatggttaataaataaaaaagcaaaaataataattatttctcatttaggaagacctaaaggtaaggtgactcctaaattaacattagagccaatctcaaaaaaattgtctacctatctcagtcaaaatgtattttttttagacgcctgtattggtaaaaatgtaattgaaaaatcaaaagaaatatctaatggttctgtgcttctattagaaaatataagatttcataaagaagaagagcaaaattcagaaaattttgctaaagagctttcaaaaaacggagacatttatattaatgaagctttttcatgttctcatagagcccatgcatcaattgttggaataacgaaacatattgattcctactccggccctatattgtctcaagaggttaattttataaaaatgcttacttctggagccaaaaagccagttacttgtattattggtggttcaaaaatttctactaaaattggtgtgttgtctaatcttataaaaaaaatggaaaatattgtaattgtaggagcaatggcaaacaattttattaagcacaaagggtacaatataggaaaatcattattgaaaaaaataaaga

SEQ ID NO: 250344 - DNA, 183 bp, Unknown
  Bacterial polypeptide expressing nucleotide sequence isolated from the Sargasso Sea
ttgcggacttaagtgctttttctgaagtttgtacaataattggtggtggggattcagttgcagcagttgaaaaagcaggattagctgagaaaatgtcccatatatctactggaggtggggctagtttggaacttttagaaggtaaaactttaccaggtgtggctgcgttaaacgaggcttagg

SEQ ID NO: 250345 - DNA, 496 bp, Unknown
  Bacterial polypeptide expressing nucleotide sequence isolated from the Sargasso Sea
tatgaaatttcactcacttgatcattttgattttcgcggcaagacagtacttgtaaggcttgatcttaactgtcctttaaaaaacggcaaagtttttgatgacacacgaatcagagcaagtcttcctgttttagaacaccttctttcacaaacctcacgggttattgtgatgagtcaccttggtcgccccaaagaaggggatacaaagactttaagtcttgctcctgttggtgaggtgctagcttcacaccttaaaagagaagttatcttaattgattcttataaagaagacgggattaaacaaattctaaatgagctcggccaaggcctttttctgcttgaaaatcttcgttttcacccggaagaaaaagcaaacgagcacgagtttgcagcaaagcttgcagaaggtatggacttttatgtcaatgatgcctttggcgcttgtcacaggcttcatacctcagttgttgagcttgctaagcagtttccttttgac

SEQ ID NO: 250346 - DNA, 572 bp, Unknown
  Bacterial polypeptide expressing nucleotide sequence isolated from the Sargasso Sea
aaatttaattcctaaatttgataatataatcatcgttggtggtatggctaacaatatcttaaaacaccaaggtcatgaaataggcaaatcaattcaagaggataattgcaattcaattgtaaatgaaattttccaaaccttaaaaaacaactcttgctccttaatttttccagaagatgttattgtagctaacggtattgaaagaccaccaaaagtcaaagagcttgaccagatatcacaagatgatttgatattagatattggtccgaaaactattgaaacaataaaaaaaataattgaaaaaagtaaaacaatattatggaatgggcctgctggatattttgaaaatccagattttgcaaatggaagtttagaaataggaaaaaaaattgcagaaaaaagcaaccaaaaagaaattttttctgtagctggtggcggtgatactgttgcccttttaaataagattggtattttaaattcttttaactttgtctcaactgcaggtggagcatttttagaataccttgaaggaaaggaattgcctggtataaaggctctaaaaaatgactgaa

SEQ ID NO: 250347 - DNA, 684 bp, Unknown
  Bacterial polypeptide expressing nucleotide sequence isolated from the Sargasso Sea
caatagcttgctctggactattgctagagaaagaagaaaatttcttatcgcaggcgcttaaaaaatatgagagaccttatgttgctatcatcggtggtgcaaaaatttctacaaaacttgagcttataaagcatattaatgatgtcgcagaccatattatcgtaggtggaggtattgcaaatacttttataaagtcttcaggacttaatattggaaactcactgactgaagaatcaatgctagaaattgcaaagagcatcttagatgaaggtaaaatcatactacctaatagagtattaacatctaaaacacttgagggtgaggatataaaagaaaccacaataagcaatattggtaatgatgaaatgattttagatttatacctagagcaggagacaaagactttaattagtaatgctaagactattttatggaatggacccatgggagtatttgaaaattctttatttgaaaatggcacaaaggaactttctagagaaattgctaagtctaatgctttttctcttgctgggggaggcgaaacattgtcggcaataaataaatatattaaatcagatgatgtatcatattgttcaacaggcggtggcgcctttttagaatttatggagggcaaagttttaccttctattaaagctctaaattcaaaaaaaatagggagttaat

SEQ ID NO: 250348 - DNA, 812 bp, Unknown
  Bacterial polypeptide expressing nucleotide sequence isolated from the Sargasso Sea
gaaaagaagaacaccgacgagctgggcccagcagtacgctgcgctgtgcgacgtgttcgtgatggacgcctttggtactgcccaccgcgcccagggctcgacccacggcgtagccaagttcgccaaggtcgcctgcgccggcccgctgctggcagccgagctggacgcactggccaaggcgctggataagcctgctcgcccgatgctggccattgttgccggctccaaggtctccaccaaactggacgtgctgaacgcgctgtctgaaaagtgcgaccagctgatcgttggcggcggtatcgccaacaccttcctggcggcggccggttacccggttggtaagtcgctgtatgaagccgatttggttgacaccgccaaggcgatcgccgccaaggtcagcgtgccgctgccggttgacgtggtggttgccaaggaatttgccgaaactgcgactgcgaccatcaaggcggtcgccgacgtcgctgaagatgacatgattctcgacatcggcccgcagactgctgcgctgttcggtgaaatgctcaaggcctccggcaccatcctctggaacggtccggtcggtgtattcgagtttgaccagtttggtgaaggcaccaaggcgctggcgctggccatcgctgccggtgacggcttctcgattgctggcggtggcgacaccctggccgcgatcgacaaatacggcgtcgccgaccagatttcctacatctccaccggcggtggcgccttcctcgagtttgtcgagggcaaggttttgccggcggtagagattctggaagcgcgagcgcagtaaa

SEQ ID NO: 250349 - DNA, 669 bp, Unknown
  Bacterial polypeptide expressing nucleotide sequence isolated from the Sargasso Sea
acgcactacacgccgcattagcggcgccgcggcggccgattggggcggtcgtggtgggagcaaaagtgtcaagcaagctggccctattaaaaaatctggtgactaaggtcgatggccttattcttggcggcggtatggccaatacatttctattagcacaagggatccaaattggtgcatcgcttgccgaaccaaatatggtttctatggccagaacgatcatggcgcaagccgatgcgaacgggtgccgaatgatcctgccaaccgatcatgtggtggcgaccgcgtttgctgccaatgctccgcaccgtgtcaccgatggtggtgatattgcacatcatgaaatgatcttagatgcaggaccacaatcggtagccacggtcatggcgtttcttagcgcgtgccagacagttgtttggaatgggccgatgggggcgtttgaattgaaaccatttgatgccgctacaaatattatcgctggcgcggtggcacgcttgacacaagaccaacaggtgatgagcgttgccggtggcggtgatacgatggcggcgcttgcaaatgccggagtgaatgaccatttctcctatgtgtcgacggctggcggggcctttcttgaatggctagagggcaaaaccctgccgggtgttgacgccttgcagctgcgctaaa

SEQ ID NO: 250350 - DNA, 490 bp, Unknown
  Bacterial polypeptide expressing nucleotide sequence isolated from the Sargasso Sea
aatgttggaaagtccttgattgaaaaagataccgaacaaattgtgaagaaaatatttgacaaagctgaaaatagtaattgtcaaataactacgccgatagattgtgctgtatcaacaagtttaaatggtaatcctttttttaaaaattacggcagtgttgaggaaaatgatattattttagatattggaccaaaaacaattaaaaaaattcatgatattatagatttgtctaaaactattttatggaatgggccagcaggatactttgaaaataaaaatttttcgttaggaacaatttctattgccaaaaaaatctctaataacactgaaaaaaattccttgatatcaattgtaggtggtggtgatacacttgctgcaataaaaaacaatgatttaaagttaaagtatactcacttatcaacagcaggaggggcatttctagagtatatagaaggaaaaaacttgcctgggatagaagttttaaaataaa

SEQ ID NO: 250351 - DNA, 489 bp, Unknown
  Bacterial polypeptide expressing nucleotide sequence isolated from the Sargasso Sea
atgttgcagattctttagttgatgattcatttgttgactcagctttaaaatgtatcagcttagctcaagaaaataatgttaacttattattgcctgatgaagtggttgttactgtaggacaaggtgcagaaaatttaatccgtactgtgagcattgatcaaatacctgctgggtggagagtacttgatgtgggtccatctactattgataagtttatgactggtttatctgatgcaaagactgttatttggaatgggccgatgggtatgtttgaacaagaacaatttgctaaaggctcacttgaattagcaaatatgattggtgatttacacacgccaacttctgtaataggcggtggggaaactgcagcaatagctaatctcgcaaagattaaaaataaagttacacatatatctacaggcggtggcgcatctctaatgttattaaagggagatcctttacctgggatagaatcactcatggattaat

SEQ ID NO: 250352 - DNA, 329 bp, Unknown
  Bacterial polypeptide expressing nucleotide sequence isolated from the Sargasso Sea
ttggatgggtcttgatattggtccagattctattaaagtttttcaaaatgctcttgcagaatgtaagacaattatttggaatggtccaatgggagtttttgaatttgataagtttgcagaaggtacaaatgcaatagctacgacccttgcggacttaagtgctttttctgaagtttgtacaataattggtggtggagattcagtagcagcagtggagaaggcaggattagctgagaaaatgtcgcatatatctactggaggtggggctagtttagaacttttagaaggtaaaactttacctggtgtagccgctttaaacgatgcttaga

SEQ ID NO: 250353 - DNA, 619 bp, Unknown
  Bacterial polypeptide expressing nucleotide sequence isolated from the Sargasso Sea
atgagacttgaagaggcagatatagctgaaagacgagtgttcattagggcggacttgaatgtgcctatgcaggatgggcaaataactaatgatgccagaataagagcgagcctccccacaatatccgaagtgttagaaaagaattgcgcagttacggtgctgtcgcacctcggacgtccagaagagggtaaatttgatgaggcattttctttagctccgatcgcacaaaggctcactgagctgttgtctgtacccgtaattcttttgaaagatatcgagcagtctaaaaccctctccaaaggacaaattggtctgatggagaacgttagattttttgctggagaaaaaggcaacagcgatgagctcggcagaagaatggcagcttgctgcgatgtttttattatggacgccttcggatctgctcatagagctcatgcctctacgaattctattgcaaagcacgtagaagtcgttgtgcctgggtttttgatggagtccgaattaaaagcattaaatggagttgtgcagaacgccaaaacgcctgtggttgctattttgggcggtgcaaaggtatcttccaaacttacgttgctagaaagatttccgaaatcaggacaag

SEQ ID NO: 250354 - DNA, 634 bp, Unknown
  Bacterial polypeptide expressing nucleotide sequence isolated from the Sargasso Sea
aaatctcctcttactcttgttctcggaggagcaaaaattgataccaaactggaattgatcgaccaatttctagataaggcagataatatcattattggtggtggaatggcttttacctttttgaaagcaaaaggaagaagcgtaggagggtctttagttgatgattcgatgatagctactgcaaaaaacatcataaatagagcaatgtcaaaagatgtgaaaattattttaccatctgatgcagtatgtgcaagttcattgaaagatggtattgaaaaagatctacatttaattgatagcataccagaaaatgtgatgggattggatattggtcctgattcaatcaaacgtttcaatagcatattaggtaattcagaaacgatattatggaatggaccaatgggggtttttgaagctaaggggtttgagttaggcactagggaaatggctattcatctcgtgagttgcgtaacctctggttcaaaggtcatcgttggtggtggagacactgctgctgctctagaaaaatttggtttaatgaatgagatgacccacgtatcaacaggcggaggtgcctcattagaattactaagtgggaatcctcttcccgcaataaccgcattggagaaataaa

SEQ ID NO: 250355 - DNA, 511 bp, Unknown
  Bacterial polypeptide expressing nucleotide sequence isolated from the Sargasso Sea
aaagcaaatggagggagtattgggaagtcacttgttgaagatgattttttaaatacggcaatatctattcaggaattggcaaaaaataaaaatgttaacctttatttaccagttgatactactacagcagattcctttgataataatgctaaaaaaagcatcgttgatatagaaaaaatccctgttgatttaatggggctcgacattggagagaaaagtgaaaaactgttttcagacgttattgaaaattctaaattaatcctatggaatggcccaatgggtgtttttgaattttcaaattttgaaaaaggaacaaagtctgctgcatatgctattgttaaagcaactcaaaaaggagcattttcattaattggtggaggagactctgtcgcagcaatcaacaaatttaatctatccaaaaaagtttcttatgtgtccacaggtggtggagcgatgttggaatatctagaaggaaaaacccttcctggaatacatgcaattttaaattaac

SEQ ID NO: 250356 - DNA, 779 bp, Unknown
  Bacterial polypeptide expressing nucleotide sequence isolated from the Sargasso Sea
aaagttagctgatttgggggatatatatgtctttgatgcttttggtactgctcatagagagcaagcctcaactcattcagcaattaagagtgcatctaaagcatgtgcaggccttcttttagagagagaaactgaattcttgtcaaaggcattaaacaattatgatcatccatacatagcagtaattggaggagccaaagtttctactaaacttgaattaattaagcatattaattcagttgctgatcaaataattgttgggggtggaatcgccaacacatttcttaaagcctcaggcctaaaaattgggaaatcgctggttgaggattcaatgttagatattgcaaaagatttacttgttcaaggaaaaatagttttaccaaatgtaattattacctctaagacatttgagggagaggatattagagaaacatctgctgaagatgtcaaagatgaagagatgattttggatttacatttaagtaatgaaatattaacttcgttaaatcaagccaaaaccattttatggaatggcccaatgggcgtatttgaaaataaattattttcaaaaggtaccaaagatctttcaatagcaatagcaaattcttcagcattttctattgcaggaggtggcgaaacattgtccgcaataaataagtatattaaatcagatgatgtatcatattgttctacaggtggaggagccttcttggaatttatggagggcaaaaatttgtcatcaattgatgttttaaattcaaaagaaatagggagttaag

SEQ ID NO: 250357 - DNA, 901 bp, Unknown
  Bacterial polypeptide expressing nucleotide sequence isolated from the Sargasso Sea
atgtctaagcgttccctgtcaagtctcggcgctgaagacttatgcggcaaacgtgttttagtgagagttgattttaatgtcccattaggagatgaggggcaaataactgatgacacaagaattcgtgctgctttaccaactattaatgacctcttggataagagtgcaagagtcattctttctgctcattttgggaggccaaagggagaagtcaatgaaacaatgcgtttgactgctgttgctcaaagacttagtgaattgcttggaaaaacagttgtaaagactgaaagttgcataggagcagaagccaagtcaaaagttgatgctatgtctaatggcgatgttgtccttttggaaaatgttcgatttatctctggtgaagaaaaaaacgatactgaatttgcaaaagaattagcttctctggcagaagtttatgttaatgatgcttttggagccgcccatcgtgcgcacgcttcaactgaaggagttacaaagttcttaagtccttgcgtggctggctatttaatggaaaaagaactgaagtaccttcaaggagctatcgagcaacctaaaagtcccctagcagcgatagttggaggttcaaaagttagtagtaagataggtgtcttggaatctttaattgataaatgcgacaagataattgttggtggagggatgatatttactttttataaggctagaggattatcggttggtaatagtcttgtagaagaagataagctcgaattagctagtgctttggagaagaaagcacaagagaaaggagttgagtttcttttgccaactgatgttgtgttggctgataatttttctcctgatgcaaatagtaaactttcaaaagtagatgctattagcgaaggttggatgggattggatattg

SEQ ID NO: 250358 - DNA, 625 bp, Unknown
  Bacterial polypeptide expressing nucleotide sequence isolated from the Sargasso Sea
catgaccgttttgaagatgaccgatctcgacctccagggtaagcgcgtgctgatccgcgaggacctcaacgtgccggtgaaggatggcgcggtgaagagcgatgcacgcatcctggcctcgttgccgaccatcaagctggcgctggagaagggcgcggcagtgctggtctgctcgcacctggggcgaccggaagagggcgtctacagcgaggaagacagcctcaagccggtcgccgactacctgtccaaggccctcggccgcgaagtgccgctggtcaaggactacctcgaaggcgtcgaggtgcagccgggtgagctggtgctgctggagaacgtgcgcttcaacaagggcgagaagaagaacaccgacgagctggcgcagaaatacgccgcgctgtgcgacgttttcgtcatggacgccttcggcaccgcgcaccgcgcccagggctcgacccatggtgtggccaagtttgccaaggtggcctgcgccggcccgctgctggcggcagagctggatgccctgggtaaagcgttgaaaaccccggccaagccaatggtcgccatcgtcgccggttccaaggtgtcgaccaagctcgacgtgctgacctcgctgggcgacatctgc

SEQ ID NO: 250359 - DNA, 831 bp, Unknown
  Bacterial polypeptide expressing nucleotide sequence isolated from the Sargasso Sea
aatgtcaaaattatctctttccagtcttgataagacacatttagaaggaaaaaaagttcttgtaagagtagattttaatgttccattaaatgaagatggtcaaataaccgacgatacgcgtattcgtgcagcgatcccaactattgaatatcttattaatcattcttcaaaagtcattttagctgctcattttggtagaccaaagggtcaggtaaatgaaaaaatgagattaactccagtagcaacaagattaagtgaattgttggggcaaaatgttgctcttactaacagttgtattggtgatgaagcagttgcacaatcaaatagcttatctaatggagatgttcttttacttgaaaatgttcgtttttttggtgaagaggaaaagaacgacctagagtttgctaaaaaattagcatcacatgcagatatgtacgtaaatgatgctttcggtgctgctcatagagcgcatgcttcaactcagggagttactaattatttaagtccatcagtagctggattccttttagaaaaagaattaaaatacttacaaggagcgatagatgctccaaagcgtccgttggcggcaatagttggtggatcaaaggtaagtagtaaaattggtgttcttgattctttactagataaatgtgacaaaattatgattggtggaggaatgatttttactttttataaagctagaggtctagatgttggaaagagccttgtagaagaagataaacttgagcttgccagggatttagaagcaaaagcaaaagcaaaaggagtcgaattattattacctactgatgttgttttagctaatgaatt

SEQ ID NO: 250360 - DNA, 499 bp, Unknown
  Bacterial polypeptide expressing nucleotide sequence isolated from the Sargasso Sea
tttggacacaatatttggaaaatctattaaagaaaaaaactgtgatctaattattgaagaaattatttctctttcgaataaagaaaaatgtgaaattatttatccggaagatgtgcttgtatctaaagatttaaatggatccccaaataaaaaagaattaaatcaaattttaaatgatgagatgatattagacattggtccaaaaactatagataaaatatcaaacgttattaatataagtaaaactatattgtggaacggaccagctgggtactttgaaaaccctttctttgctaatggtagcattcaaatagcaaaaaaaataattgaaaataataaatcgaataaatttttttcagttgtaggtggaggagatactgtttcattattaaataatataaatgtggttgatagatttaactttgtttcaactgcaggtggagcttttttagaatttcttgaaggtaaaaagcttcctggtataaccgcattaaattaa

SEQ ID NO: 250361 - DNA, 805 bp, Unknown
  Bacterial polypeptide expressing nucleotide sequence isolated from the Sargasso Sea
aataaattaagaaaaaaagtaaaacttattagcgaaaatattaaagaaataaaaaataaaaatttcttcagtaactacaatgaaaatatttttattttagaaaatattagattttattcagaagaagagcaaaatgacaataaatttgctgagcacctatcaaatcttggagatatatatgtaaatgacgctttctcttgttctcacagggctcatgcctcgattaatgaaattccaaaatttttaccctcgttttctggattacagctagacttagaagtgaatgcactaaataaaataacttctgaaattaccagaccaattacttgtattattgggggatctaaaatttcaactaagattaatattattaaaaatttaattcctaaatttgacaatattatatttgttgggggtatggctaataattttatagaatattttggaaatagtgttggaaaatctatcaaagaaaaagattgtgataaaataattgaagaaatcatctctcattctaaaaaagaaaaatgtaatataatctgtccagaagatgtgattgtatctaaatatttaaatggatctcctcaaaagaaagagttgaacgaagtattacctgatgaaatgatattagatattggtcctaaaactattaataaaataacaaaaattattgataacagtaaaactatactttggaatggacccgcaggatattttgaaaatccaaattttgctcatggaagtacacaaatagcaaaaaaaataattgaaaataataaagcaaacaaaattttttcagttgctg

SEQ ID NO: 250362 - DNA, 742 bp, Unknown
  Bacterial polypeptide expressing nucleotide sequence isolated from the Sargasso Sea
cttgttccatagagctcattcctctatttgtgaaattccaaaattcttaccctcgttttctggtttacagctagacttagaggtaaatgcacttaataaaataacttctgaaattaccagaccaattacttgtattattgggggatctaaaatttcaactaagattaatgttattaaaaatttaattcctaaatttgacaatattataattgttggaggtatggctaataattttataaaatattttggaaatagcattggaaaatctattatagaaaaaaattgtgataaaatagttgaagaaatcatctctctttcaaaaaaaaaaaaatgtaaggtaatctatccagaggatgtggttgtatccaaacatttaaatggatctccccaaaagaaagaaattggtaaaatattatctgatgaaatgatattagatattggtccaaaaactattgatataatatcaaaaattattgataatagtaaaactatactttggaatggacccgcaggatattttgaaaatccaaatttttcttatggaagtattcaaatagcaaaaaaaataattgaaaataataaagcagacaaaattttttcagttgttggtggtggggacacagtttctttaataaataatttaaaagctgttaatgagtttaattttgtttcaactgcaggtggagcttttttagaatatcttgaaggtaaaaaccttcctggtataaccgcattaaattga

SEQ ID NO: 250363 - DNA, 853 bp, Unknown
  Bacterial polypeptide expressing nucleotide sequence isolated from the Sargasso Sea
ttctgagctacttaataaagagattgtttttgttacggattacactgaggagcccgccgaccagcttctgcgacaacttggtaaaaaccaaattatgcttcttgaaaatttacgtttccatgaagctgagcttaataataaccgcgaattcgcagagaacctatctaaaggcattgacatctatgtaaatgatgcttttggtgcagcacatcgtaaacacgcttctattgttgctcttgcaaaactcctccctaccgagaaacgaagtgcagggtttttaatacaaaaagaaatcaaagccttagaccagcttacaaaaggaactcctccctatacagtagttataggaggcgcaaaagtaagtgataaaataggcgtcatcctgcatttattgaagcactgtaatcaccttatcattggtggagctatggcatatacatttcttaaataccaaggcattcaagttggtagctctaaagtagaagaaaatgctgatgaattaattaaaaccatttatagaaatgctgcctctcgtaaagtatcaatccatctccctattgaccatctatgctccaatgaatttaacgaaaacggttctgttatagagactgaaagccaggaaattccaaacaacttgattggcatggatataggcccaaaaacaattacacagtattgttcaattcttagagagtcacaaacaattttctggaatggtccaatgggagtttttgaatgggccccatttgccaatggcacaaccaaaattgcccaagaaatttcccgctgtcgaggatactctgttgttggtggtggagattccgtggcaagcgtaaatcaagcaggtctagct

SEQ ID NO: 250364 - DNA, 787 bp, Unknown
  Bacterial polypeptide expressing nucleotide sequence isolated from the Sargasso Sea
atgagaacactcaaagatatagatctcagaaataaaagagctgttttacgtttagatcttaatgttcctattcaagataataaaatttccgatgattcacgaataatagcctctttaccaacaatacatagagtacttaaagatgcaaaaaatctattgatcatatctcatctaggaagaccagaagagggcgttatccaaaaagaatttagtatgaagccaattgcagattatctcgaaagagtaattgatgaaaaaattacaattattgattacttagattctacaggactttttcgggcatctaaggtgcaaatccttgaaaatatcaggtttttcaaaggtgaaaaagaaaattgcgaacagctcggtaagagtttaggagaattgggagatgtttatattttcgatgcatttggcactgcccatcggaaacaggcttcaacatattcagcaattaagcatgcaagtcagtcgtgtgcgggactattaatggaaaaagaaataacaatgctttccgaaatactcaacgagatcaaccacccttttactgcaattattgggggggcaaaaatttcaaccaaaataaatctaatttctaatcttgcaaataaggcatcttgcatcgttgttggaggaggcattgcaaatacttttttaaaagctgctggatttgagataggagaatcattatttgaaaaagattttattcaagttgcagaaaagctattagaaaccggcaagatccatttaccaaatcaggtctatgtcggatcacatataaata

SEQ ID NO: 250365 - DNA, 556 bp, Unknown
  Bacterial polypeptide expressing nucleotide sequence isolated from the Sargasso Sea
atgagattactaaaagaccaaaatcttagtaataagaatgtggttgtgagattagatttaaatgttcctattcaagacaagcaaattatagattcaaccagaatcatttcttcagtacctacaataaaatatctcgtagataaaaattgtaaagtccttttaacatctcatcttggcagacctgaggaaggaaagtttgatcaagatttctcaatgtctccggtcgctaaaaaattatctgaaatcttaaatcatgaaattgatcttattgattccctagacagcagcgatatttttaatacaactcaaatacaactattagaaaatttaagatttcttatcggtgaaaaagacaataatgaaaagctaggcaatcagctagcaaataaaggagatgtttatatatttgatgcttttgggactgctcaccgtaaacaggcttccacacactcagctattcaacaagcaaagctctcatgtgctggacttctcttagagaaagagattaattcacttaataaagctttaacctttatgaaaacccattcactgctgt

SEQ ID NO: 250366 - DNA, 460 bp, Unknown
  Bacterial polypeptide expressing nucleotide sequence isolated from the Sargasso Sea
catgagcgaattaaaagctcttaataaaaatttaaatttaaataacaaaaaaataataataagagtagatctaaatgttcctatgctcgaaggaaaggtaacagataagtctagaataaaaaaggttattcctattataaaagaatttaaaaataaaaatgctaaaataatacttatatctcaccttggtagaccaaaaggaaaaattgataaaaaattatctctaaaatcaatagctcctattttagaagatttattaagctcaaaagtttatttttctgacctcagttatggcccggaagtaattgaaaagagcaataaaattaaccctggtgaagttttattacttgaaaatattagatttaataaagaagaggaaaaaaatgaaataagttttgctaaagaattagcaaaaataggtgatatttatattaatgaagctttttcttgttctcataga

SEQ ID NO: 250367 - DNA, 919 bp, Unknown
  Bacterial polypeptide expressing nucleotide sequence isolated from the Sargasso Sea
agattagaccttaacgtaccattaagtaaatcaaatatagaggacaacaccaggataaaaattattgaaccttttataaatcaattgattgaaaaaaaggcaaaaatcattttagtttcacatttgggtaggcctaaggggaaaattgtaaaagaaatgtctcttaatcctatatttaattatttgcaaaaatatctgaatagtaaagtttatttttataaagggaaaattgatcaaaatgcaataaatgcctctaataatttaaaacctggtgaagtattattaattgaaaatatccgtttttttaaagaggaagaagatgataatgaaaattttgctaaaagtttatccaaattaggtgatttttatatcaatgaagcattttcttgctctcacagaaaacaagcttctttacacaaaataacaaattacattgatagttatggtggtccacttttagataaagagactcaatcaataaatttaattattaaaaataaaaaagagcctgttacatcaataattggtggatcaaaagtatctactaaaataaatgttcttttaaatttatctaggaatacagacaatcttataatcgtaggtgctatggcaaataattttttaaaatttaataaattaaatgtgggttcctcattaatagaaaaagacactgaaagtgttataaaaaacatttattcatcagctaataagaataaatgtaatattatagtaccaatagattgtgttgtgtcggataacttaaatggtcaaccaaagccaaaatctttatccgaaattaatccaaatgatataattttagacattggaaaaaaaacgattgaattaattcataaaactattgaaaattcaaaaactgtgttttggaatggtccagctgggtacttgaaaataaaaattt

SEQ ID NO: 250368 - DNA, 477 bp, Unknown
  Bacterial polypeptide expressing nucleotide sequence isolated from the Sargasso Sea
cattaactgaaaaagataccaaaagtattatcgataggatctacaatcaggcgaaaaaaaataattgcaaaatagttattccagaggattgcggagtagcaaaaaattttgagggcacaagtactttcaaagatcaaaagtatattgatgaaaatgaaattatattagacattggtcctaaaactattaaaaaaatagaaaaaattatagatgattctaaaactgttttatggaacggcccagcaggatattttgaaaatgataatttttctaacggaactaatgcaattgcaaataaaatttctcaaaatactattaataaatcattgatatcagtaatcgggggtggtgatactttagcggcaatcaataaaattaaaaagaaattaatattttctcacttatcaacagctggtggagcctttttagaatttcttgaaggaaaagacttgcctggacttagtattttaaaataaa

SEQ ID NO: 250369 - DNA, 875 bp, Unknown
  Bacterial polypeptide expressing nucleotide sequence isolated from the Sargasso Sea
caatgatctgaccggcaagggcgccaaggtgatcctttcggcccacttcggtcgccccaagggtgaagtgaaagaggacatgcgcctcacccctgtggcggcccgcctgagcgagctgctgggcaagcccgtcgccaagaccgatagctgcatcggcgccgatgctgaggccaaggtgggtgcgatggccgacggtgatgtcgtgctgcttgagaacgtccgcttcttctccgaggaagagaagaacgatgccggtttcgctgagaagctcgccgccctggccgaggtctacgtcaacgacgccttcggcgccgcccaccgcgcccacgcctccaccgagggtgtgaccaagtacctgacccccagcgtcgctggctatctgatggagaaggagctgcagtacttgcaaggtgctgttgatgaccccaagcgtcccttggcggccatcgtcggtggctccaaggtcagcagcaagatcggcgtgctcgaggccctgatcgacaagtgcgacaaggtgctgatcggcggcggcatgattttcaccttctacaaggcccgcggcctttccgttggcaaaagcttggtggaagaggacaagctggagctggccaaggagctcgaggccaaggccaaggccaagggcgtgcagctgctgctgcccaccgatgtggtcctggctgacaatttcgctcccgatgccaacagccaggtggcttctgtggaggccatccccgacggctggatgggcctggatatcggtccggactcaatcaaggttttccaggaggctctggccgactgtcggaccgtgatctggaacggtcccatgggcgtgttcgagttcgacaagttcgctgccggcaccaacggcattg

SEQ ID NO: 250370 - DNA, 892 bp, Unknown
  Bacterial polypeptide expressing nucleotide sequence isolated from the Sargasso Sea
gttaaaaaacggtgtcattacagatgaaaccagaatacaggcatccttgccgactctcaaactcgctctagaagccggctcagatgtgctcgtaatgtctcatctaggtcgtcctaaagagggacatttcgactcgacactctcgctcaagcctgtcgctgaacttctatctcagatgttgcagatgcctgtacatttagttaataactggctagcaccatccgcaaaaaaacaaccgcagatcaccctcttcgaaaatgttcgatttttagaaggggagactagtaatgaccctgcattggcgcaaaagatggctaccctctgtgacatctatgtgaatgatgccttcggatcagcgcaccgagcacatgcttctactcatggagttgctggtttagcaccgctcgccgcagctggtccgttgctatggcaagaagtaaatgcgatgcatcaagtactcaaaaatccccgacgtccgctagtggcagtagtcgggggctctaaagtatcgacgaaactaaaagttatagagttcttggcaaaaaaagtggactatttattattgggaggcggtattgcgaatacgctactattagctgccggccaatcagtcggatcctcactatgcgaaccagagttaattgatacagcccaacgtcttctttcatccaatgcaaatacccccttgcctatcgatgttcgaaccgctgaaaatttcagcgaaaatgcgactgggattgtaaaaatgagtggagaaattaacgaaagtgatttgatactcgatctcggtccacgatcgctagacgcgatagagaatataattatgcgagcaggcacaatattgtggaacggccccgtaggcgtattcgaatttccggaatttgcctatgga

SEQ ID NO: 250371 - DNA, 469 bp, Unknown
  Bacterial polypeptide expressing nucleotide sequence isolated from the Sargasso Sea
aatgagattactaaaagaccaaaatcttagtaataagaatgtggttgtgagattagatttaaatgttcctattcaagaaaagcaaattatagattcaaccagaatcatttcttcaatacctacaataaaatatctcgtagataaaaactgtaaagtccttttaacatcacatcttggcagacctgaggaaggaaagtttgatcaagatttctcaatgtctccggtcgctaaaaaattatctgaaatcttaaatcatgaaattgatcttattgattccctagacagcagcgatatttttaatacaactcaaatacaactattagaaaatttaagatttcttatcggtgaaaaagacaataatgaaaagctaggcaatcagctagcaaataaaggagatgtttatatatttgatgcttttgggactgctcaccgtaaacaggcttctacacactcagctatcaacaagcaa

SEQ ID NO: 250372 - DNA, 765 bp, Unknown
  Bacterial polypeptide expressing nucleotide sequence isolated from the Sargasso Sea
ttggaacttgtcatagagagcacgcttctactgctataattgcaaagtactttcctaatgataaatacgttggaaaattattacaaaaagagcttgaagcaattagtcaaattgcagagcatggagaaaaaccagttcttgcaattttaggaggtgccaaggtgtcaagcaaactaaatattttatataatctaattaaaaaagtagataaaataattattggcggaggaatggcatacacttttatagctgcacagggaggaaaaataggagagtctttgattgaagaggatttaatagaaaatgctaaagaaattctagagattgcaaacagtttaaacaaagaaattattctaccggatgatataaaagcgtcaagagactttgaccagaatgacttgattcaaacttttgattctaataaaatagaaaacgggtggatgggcttagatattggggcaaaaactattgagaaatttaatcaagcaattttatcaagtaaaacaattttttggaatggccctttaggtgtttttgaaaaagaagcttttacagaagggactaagtcaatttgtaattcattaaaagaagccaaaacccttggggtaaatgtaattgttgggggtggcgactcaattgcagcacttaaaaaacttggaaaagaagattgggttagctatatttcaacaggaggaggtgctcttttggaaagcctggaaggtaaaacacttcctggagttaaagcattgcttaatgagaattaaa

SEQ ID NO: 250373 - DNA, 514 bp, Unknown
  Bacterial polypeptide expressing nucleotide sequence isolated from the Sargasso Sea
cttaagtttcaaggtataaatattggtgcatctgttgttgaaaaagactcttataaaattgtaaaaaatataaaattaatagcaaaaaagaataaatgtaatattctcattcctgtggattgcaatgtatctcaaagtttaaatggaaaatctacatataaagattttaaggatctagattcaaaagatataatacttgatatcgggaaaaatactattgcaatgataagtaaaactattgacgactcaaaaactatattttggaatggtcctgctgggtattatgaaaataaaaatttttctattggttcattggctatagcaaaaaaaattaaagaaaatacaagaaataagtctttgatatcaattatcggtggtggagatacagttgcagcgattaaaaacactagattggaaaaggcttttacacatttatcaacagctggtggtgcgttcttggaatctcttgaaggaaaagaactgcctggtataaaagcattacgaagggattaaa

SEQ ID NO: 250374 - DNA, 682 bp, Unknown
  Bacterial polypeptide expressing nucleotide sequence isolated from the Sargasso Sea
cgccgcaggtccattgatggcagccgaactagatgcactcggcaaagcacttgcaaacccagagcgcccagctgttgccatcgtgggtggttcgaaagtgtcgactaagctcgatgtgttaacagagcttgcaaacgaggtcgatcaaatcgtcgttggcggtgggattgccaacacctttttagcggcagcagggtttcctgctggtaaatccctgatggaagcggatttgatcgatactgctaaagcattgatgtcgaaagtggatattccattacctgtggatgttgtcgttgccactgaattttccgctgatgcgacggcaacagttaagcgagttgaagatgttgctgatgacgacatgattcttgatgttgggccagagacacaggcctcgtaccacggtataatggcgattgccaaaactatcttatggaatgggccggtgggtgtgtttgagttcccacagtttgagggtggaacgcgcgctttatcgatggcgattgcagcgagtaatggctttagtctcgcaggtggcggtgacacattggccgcgatcggtcagtttagaattgccgatcaaattagttatatctcaaccggcggtggtgctttcctcgaatttgtggaagggaaggagctgccggcagttcagatgttgaaatccagaaacgattcataa

SEQ ID NO: 250375 - DNA, 411 bp, Unknown
  Bacterial polypeptide expressing nucleotide sequence isolated from the Sargasso Sea
agacagagaaaatattgctaccaaatgaggttttggttagcaaaaacatagactcaaacgaatcaaggatttgtaaaattgattctgtccaagatgatgaaatgatacttgaccaaatcctcagttcagctgctgctgaaaagatatctattgctaaaaaaattatttggaatggtcctgtgggagtatttgagcataagcctttctcaaaaggaacccgagacctcgctaacgcaattgcttcatcacaagcttatagtttggctggtggaggtgagactcttttagccattaagatgtttatagataaaagtaacatttcatattgttctactggcggaggtgctttccttgaatttattgaaggaaaagagctaccatcattgtctgccttgggatttaaattttaaa

SEQ ID NO: 250376 - DNA, 505 bp, Unknown
  Bacterial polypeptide expressing nucleotide sequence isolated from the Sargasso Sea
gaatattttggaaataagtattggaaagtctattaaagaaaaaaaatgtgataaaataattgaagaaattatctctctctcaaaaaaagaagaatgcaaaataatctatccagaagatgtgattgtatctaaagatttaaatggatctcctcaaatgaaagaattaaaggaaatattatctgatgatatgatattggatattggtccaaaaactataggtaaaataataaaaattattgataatagtaaaactatactttggaatggacctgcaggatattttgaaaatccaaattttgcttatggaagcattcaaatagcaaaaaaaataattgaaaacaataaagcaaacaaaattttttcagttgctggtggtggggacacagtttctttattaaataatttaaatgctgttaatgaatttaattttgtttcaactgcaggtggagcttttttagaatatcttgaaggcaaaaaccttcctggtataaccgcattaaattaa

SEQ ID NO: 250377 - DNA, 765 bp, Unknown
  Bacterial polypeptide expressing nucleotide sequence isolated from the Sargasso Sea
accgacacaacccgtatcgaacgtgtcgcgccgacgatcaccgagctttccggcaagggcgccaaggttatcctgatggcccatttcggccgccccaagggccaggtcgtgccggagatgtcgctgaagccgatcgtccacgccgtcgaggaagtgctcgatcacgccgttgccttcgccgatgactgcgtcggcgaacccgccgaaaaggcgatcgcggcgatgcgcgccggcgatatcctgcttctggaaaacacccgcttccacaagggcgaggaaaagaacgatcccgatttcgtcgcggcccttgccgcaaacggcgatgtctatgtcaacgacgccttttccgccgcccaccgcgcccatgcctcgaccgaaggcctcggccaccacatgccggcctatgccggtcgcacgatgcaggccgagctcgaagcgctggaaagcggtctcggcaatccgaagcatccggtggtggcgatcgtcggcggcgccaaggtgtccaccaagatcgaccttctggaaaaccttatcgacaaggtcgatgcgctggtgatcggcggcggcatggccaataccttcgtcgcggccaagggcatcgatgtcggcaagtctctgtgcgagcacgatctggccgataccgcccggaccatcatggcgaaagcggaaaagacgggctgcgcgatcgtgctgccggttgacggtgtggtcgccggcgagttcaaggccaatgccgcaaacgaaaccgtcgcgatcgatgcgatc

SEQ ID NO: 250378 - DNA, 778 bp, Unknown
  Bacterial polypeptide expressing nucleotide sequence isolated from the Sargasso Sea
atgagaaccatagatcagtttaattttaaaaataaaaaggcaataattagggttgattttaatgttcctattgacaacaacaaggtaacagatacaagcaggattaaagcttctaaacaaacaatagacaaggtttgtaacgacggtggatcatgtgttttggtgtctcacttaggaagaccaagtggttttaaaaaagaattttcgatgactaacattataaatgaagttgaaaatgttttagaacgaaatgttgttttgtctaaagatgttataggccctgatgcaaagaaaaaatcacttgaccttaaaccaaaccaagtattacttttagagaatgtcaggttccatgatgaagaaaaaaaaggcgatatagattttgcaaaaaagctttcattgttggccgattgctatataaatgatgcttttggaaccgcacacagatcacatgcttcaacgactacaatagctactttctttaatgacaaattctttggaaaatgtttagaacgagaagtcagctcaattaaaaaagttttaaattcaggtgaaaaaccagtactagcaattttaggcggtgcaaagatttcaagcaaaatccctattttaaaaaacataataaaaatagctgatcatattattgttggaggtggaatgtcctttacatttatcaaagcaatgggagggcaaattgggctatctattcatgaggattcaatgttagacacggccaaagaaataataaaaaaagcagataaaaataatgtaaaattcacct

SEQ ID NO: 250379 - DNA, 730 bp, Unknown
  Bacterial polypeptide expressing nucleotide sequence isolated from the Sargasso Sea
atgccacagaaaacatgcttcaatgttgggaattccaaatttttaccctcttttcctggaatgcttttagaaaaagaagttttaaatcttaagaaattaattaccaatgccaattatagctcttctatagcagtatttggtggttcaaaagtttcaactaaaataaaggttatagaatattatttaaaaaaatttggtaaggttattataggtggagcaatggctaatacttttttattctcgaaaaacatcaatattggggcctcaatttatgaaaagtcaatgcaaaaaattgctaaaagtcttttagactactatggtgataaaatatctctaccagaggacgtagtaactattgataaatcaaaaaaaattcagttaaggctatttgatgatattaaaaaagatgaaaaaatttttgatattggtccaaaaactagaatgaaatattataattttatttcagattgttcatgtctcctttggaatggtccgttaggtttttacgaacaaaaaccatttgacgaaggaacaaactatgtaattaaggcagtaaaaaataataataataaaaatttcttttctgtggctggtggaggtgatactatatctatgttaaatcatgcgaaagcctctgattatttttcattcatttctactggtgggggagcatttcttgaatttattcaaggcagtggtctacctggtctagatagtttgaacaattaaa

SEQ ID NO: 250380 - DNA, 463 bp, Unknown
  Bacterial polypeptide expressing nucleotide sequence isolated from the Sargasso Sea
aaatgctaaagaaattctagagattgcaaacagtttaaacaaagaaattattctaccggatgatataaaagcgtcaacagattttgaccagaatgacttgattaaaacgtttgattcaaataaaatagaaaaagggtggatgggcttagatattggcacaaaaactattgagaaatttaatcaagcaattttatcaagtaaaacaattttttggaatggccctgtaggtgtttttgaaaaagaggcatttttagaagggactcgatcaatttgtaattcattaaaagaagccaaaacccttggagtaaacgttattgttggaggtggagactcaatagcagcacttaaaaaacttggaaaagaagattgggttagctatatttcaacgggaggaggtgctcttttggaaagcctggaaggtaaaactcttcctggagttaaagcattgcttaatgagaattaa

SEQ ID NO: 250381 - DNA, 700 bp, Unknown
  Bacterial polypeptide expressing nucleotide sequence isolated from the Sargasso Sea
ttttttaccatcatactctggtttacaacttgatacagaagttggttctttaaaaaaaattacatcagaaataaagaggcctattacctgtataattggaggttcaaaaatctcaaccaaaataaatttgataaaaaatttaatgcctaaatttgataatattataattgtaggcgcaatggccaataatataatcaaatacatggggtataatattgggaaatctttacaagaagataaatcagaactaattattgaagagatattttctctttcaaaaaaaaataaatgtaaaatagtatatccagaagatattatcgtagcaaaagatttgaatggaaatcctaaaattaaggaattaaatgaagttttgccagatgaaatgattttagatattggaccaaaaactattaaaattattaataatattattgacgaaagtaacacgattttatggaatggtcctgctggatattttgaaaatcctagctttgccaatggtagtattaaaatcgctgagaaaataactaaaaataatcaagataataaaatctattcagttgcagggggtggagacacagtttcgttattaaataatttaaataaggttgataattttaattttgtttcaactgctggtggagctttcttggaatatcttgaaggtaaagagcttcctggtataaaagctttaaattaa

SEQ ID NO: 250382 - DNA, 632 bp, Unknown
  Bacterial polypeptide expressing nucleotide sequence isolated from the Sargasso Sea
agcactaaatggagttgtgcagaacgccaaaaagcctgtggttgctgttttgggaggcgcaaaggtatcttccaaacttacgctgctagaaagattttccgaaatcagtgacaagatttttgtcggcggaggaatagcaaatacgtttatagcggcttctgggcacggcataggaaagtctctctacgaagagactatgttggacgcggcgacgaaacttctgtcgaaaacagatatccctatcccaaaagatgtgatggtggcgaagtcctttgactcgagcgccactgctattttgaggctgatcgatgaagttcatcaagacgagatgatcttggatatagggcccgtgacagcgagagaatggtcctcgactattgaggaatctgggacgattatctggaatggtcccatgggtgtgtttgagtttgaccaattcggtgaaggtacccgagaaattgccgagtcgatagcaagatcgtctgcatactctttagcaggcggaggggacactattgctgctattgacaagtacgaagtgtccgacaatgtgtcatatatatctaccgggggcggtgcatttatggaatacctagaaggaaaaaaattgcctggggttgatatcctttaaa

SEQ ID NO: 250383 - DNA, 217 bp, Unknown
  Bacterial polypeptide expressing nucleotide sequence isolated from the Sargasso Sea
tgatgaatacagtactggtacgagagaaattacaaaagttatatcaatgactcaagcatattcctctgttggaggaggagactctgtgagtgctatcaacaagttttctgacaggaaaaagtttaatcatatttctactggtggtggagcctccctagagtttttagaaggtaaaaaattaccgggagttaacatttataaaccacttataatttga

SEQ ID NO: 250384 - DNA, 559 bp, Unknown
  Bacterial polypeptide expressing nucleotide sequence isolated from the Sargasso Sea
catggcgaagcgttccctggccagcctcaacgccggcgatctgaaaggcaaacgcgtcctcgtgcgggttgatttcaacgtgcccctcgatgacagcggtgcgatcaccgacgacacccggattcgagcggccctgccgacgattcaggacctgatcagcaagggcgccaaagtaattctctcggcacatttcggccgtcccaagggtgaggtgaaggagtcgatgcgtctgacccctgtggcagctcgcctcagcgacctgctcagcaagaccgtcaccaagaccgacagctgcatcggtgcagacgctgaatccaaggtgtctgccatgaacgatggcgaggtggtgcttctggagaacgttcgtttctttgccgaggaggagaagaacgaacccggcttcgccgaaaagctggcaagcctggcggatgtctatgtgaacgatgcctttggcgccgcccaccgtgcccatgcatcgaccgaaggagtcaccaaatacctcaagcctgctgtcgctggcttcctgatggaaaaggaacttcagtacctccagggcgct

SEQ ID NO: 250385 - DNA, 853 bp, Unknown
  Bacterial polypeptide expressing nucleotide sequence isolated from the Sargasso Sea
gcgtcaaagcgtgtgttgatccgagaagatctgaacgtccccatcaaggcaggccttgtagcgagcgatgctcgtatccgggcggctctgcctacgatcaggatcggggttgaagcaggcgcgaaagtcatgctgatgtcacacctcggtcgtccgacagagggcgaatttgagagtgtttattctttagcacccgtggcggaacatttgagcaccctgttgaatcagcccgtgcggctggtaccggactggcttgatgttgttgatattgaggcgggcgaggtcgtgctttgtgaaaacgtgcgtttcaacgtgggcgagaaggctgacgatgacgcgcttgcgcaaaaaatggcggccctttgtgatgtatttgtgatggatgcgtttggaaccgcgcatcgcgcccaggcgtccactcatgcggtcgcacattatgcgccacttgcctgtgcagggccgctgcttgcagctgagcttcatgccctgggcaaggcactggagaaccccacaagaccgatggccgcgatagttgggggagcaaaggtgtcaaccaaattgactgtgctggagtctctgtcgaaagtcgttgatcagttgattccggggggcggaattgcaaatacctttatcgcagcagccggctatcccgttggcaactcgctgattgagacagatctcatcgatcaggcgaaagcgctgattgaccaagcggcggcgaaaggcggcgagattcctgtgccgactgatgtcgtagtaggaaaggcattttctgctgatacgtccgcgatcataaagcccgtaacggatgtcgcagaagatgacatgatctttgatatggaccggaaacggc

SEQ ID NO: 250386 - DNA, 483 bp, Unknown
  Bacterial polypeptide expressing nucleotide sequence isolated from the Sargasso Sea
gatggcaaagcagtcagtcgccgaccttgatcccgctggtaaaaccgttcttgtccgcgttgattttaatgtcccacaggacagtgatggcacaataaccgatgatcgtcggattcgtatggcggtcccaaccatacgttctattcttgatcgcggaggaaaagcggttcttatgagccacctcggtcggccgaagggtgaagtaaaccccaaactttcacttgcccccgtggccaaacgtttgggtgaattgctcggaaaaccagtagttcttgcggctgataccggagggaaggactccacagaaaaggcacatgcattgtcgaccggcgatgttctggtgctggaaaatgttcggtttaattcaggagaaaaaaagggagatgacgcgagctatgttgcgggtattgctgacctggcagatgcctacgtaaacgatgcttttggaaactgtcatcggactgaagccagcatgtacgctgt

SEQ ID NO: 250387 - DNA, 673 bp, Unknown
  Bacterial polypeptide expressing nucleotide sequence isolated from the Sargasso Sea
aatgaaaaaaaaacaatttattgaaaaactgaatcttgaaggacagcgagttttgacacgagtagattataatgtgcctctaaatgataagcaaaaaataacagataacgggcgtatcaaagccacattgcctacagtcaattatatcattgaaaatggtggtagggctgttcttatgtctcatcttggacgtcctggaggtgagagaatagacagcttgagtttaaaaccggcagcagtcgaattgtctggattattaggtcagaatgtaaaattagcgccggattgcattggagaagaagttaataatttggtggacactatgcagaacggagatgtggtacttttagaaaatttgcgctttcacaaggctgaaaccaataatgatccttctttttgcgaagcattggcagataatggagatgtatatgtaaacgatgcctttgggacagcgcacagagctcacgcttcaacaaccggagtcgtctcctttataactgacagtgcagtgggatatttgatgcgcaaggaattgcagtttttgggggaagcagtagcagaacctctaaggccatttgttgcgattcttggtggtgcgaaagtttcggataaaattaaagttatcgaaaaactgctggacaaggttcaaaccctaattatcggtggtgggatg

SEQ ID NO: 250388 - DNA, 389 bp, Unknown
  Bacterial polypeptide expressing nucleotide sequence isolated from the Sargasso Sea
ttgttcaaaatcaattgaagacgaatctgggaaaaatatttatgatatcaccaaaataccagatgatcaaatgggcctagatattggtccaaaaaccattgaatcattctcaaaacatatcacagaatctgatacaattatatggaatggtccgatgggtgtttttgaatcaagttcttatgaaaatggaacaaagtcacttgcaaatcacatagctacttgcacacaaaacggattaataagtattatggggggtggtgatacggcatcagcattaagaaaatttaacttagaagatagaatgtcacatttatctactggcggaggcgcatcaattgagcttctatcaggaaaaaatttaccggcaatttttgccttggaggtataat

SEQ ID NO: 250389 - DNA, 175 bp, Unknown
  Bacterial polypeptide expressing nucleotide sequence isolated from the Sargasso Sea
atgttacaagtaatagttggtggcggctcaactgctgaagcaattaataaattggggctagttaatgctgtaactcatatatctacaggaggtggtgcctctctggaatttcttgaaggtaaagatttaataggggtatcaaaaataccagaaattgatgtagtggatttatagt

SEQ ID NO: 250390 - DNA, 631 bp, Unknown
  Bacterial polypeptide expressing nucleotide sequence isolated from the Sargasso Sea
ttggcagcaatagttggaggatcaaaggttagtagcaaaataggagtacttgattctttactagataagtgtgacaaaatcatgattggtggaggtatgatttttactttttataaagctagaggtttagatgtcggaaagagccttgtagaagaagataaactcgagcttgctaaagatttagaagcaaaagcaaaagcaaaaggagtagaattattattacccactgatgttgttttggctgatgaattttctcctgacgccaatagtaaaatatctcaaatcgatgcaattagtgggaattggatgggtctagatattggtccagattccattaaagtttttcagaatgctcttgcagaatgtaagacaattatttggaatggtccaatgggagtttttgaatttgataaatttgcagacggcacaaatgcaatagctacgactcttgcggacttaagtgctttttctgaagtttgtacaataattggtggtggagattcagttgcagcagttgaaaaagcaggattagctgagaaaatgtctcatatatctactggtggtggggctagtttggaacttttagaaggtaaaactttaccaggtgtggctgcgttaaacgacgcttagg

SEQ ID NO: 250391 - DNA, 787 bp, Unknown
  Bacterial polypeptide expressing nucleotide sequence isolated from the Sargasso Sea
gctcttacttgaaaatttacgttttcactcagaagaaaaagctggcgacaaaacctttgctgaacaactttcaaagctggctgatatatacgtaaacgatgcttttggaacagcacaccgagcacatgcctctactgctgttattgctaacttttttcatgacaacaaatgtttcggttacgtcatggctaatgaaataacaaatctagaaaaagtagtaaacgaaggcgaaagaccaattactgctattatgggtggggctaaagtttcttctaaaattaccatcataaataagctgatggataaagttgataaaattattattgggggcggaatgtcttacacatttgcaaaagcattaggaggaaatgtgggcaattcgcttgttgaagatgataaaatggaattagcgctttcttcaatatctcaagcaaaagaaaaaggagtagaattacttattcccatcgattctttaaatgcagatgccttctcaaacgatgcaaacacgaatattagcgatattgacaaagttgaagacggttggatgggactcgatattagtgaaaaaacgaaagccatttatcgacaagcaatattaagttcaaaaaccattctgtggaatggcccaatgggtgtttttgaaatggataaattttcaagtggaactaaattcgttgcaaatgccattacagatgcaacatcgcgaggaagtttttctttagtaggtgggggcgattcagttgctgcagttaaaaaatttaatctgcaagataaggtaagctatgtt

SEQ ID NO: 250392 - DNA, 217 bp, Unknown
  Bacterial polypeptide expressing nucleotide sequence isolated from the Sargasso Sea
gttcgccaccggcaccaacgccatcgccaccaccctggcggagctcagcggcaagggctgctgcacgatcatcggcggtggtgactccgtagcagctgtggagaaggccggtctggccgcgaagatgtcccacatctccaccggcggcggcgccagcctcgaactgctggaaggcaaggtgctgcctggtgttgcagccctcaacgacgccgcctga

SEQ ID NO: 250393 - DNA, 877 bp, Unknown
  Bacterial polypeptide expressing nucleotide sequence isolated from the Sargasso Sea
tgagcagatgggagcgagtcttttcccgatagcgaaacatctctcaacgcttttaggttgtggtgtaccattgatcgataattatctcaatgctccagaactgattgagcaaaacccagcccaaatcttgttgctagaaaatgtaagaattaataaaggggaaaaatctaatttagatagtttggcacaaagatatgccgaactttgtgatttgttcgtaatggatgccttcggaactgcgcatagggctcaagctagtactcatggcgttgcacgttatgctcctgttgcatgtgccggcccgcttcttgttgcagaattacatgctctagagaagtcgctatctaatccctcaagacctttaatggcgatagttgggggttctaaggtttcaacgaaattgcatgtccttgagtcactcgccaataaggtggataagctaatcttgggcggcgggatagcaaatacttttcttgctgcttgtggtgctaacgtcggaagttctctttatgagaaagactttttagagtcagcgaggaagattatggagttaacttttgtgccactgccaagtgatgtagtcaccgcaaagtcatttaacaaggaagcgatggcggaagaaaaagttatatctgacattgaagatgacgatattatcatggatgtcggaccagagactcgaagtcatttcggcggtttggttagagagatgaacaccttgatttggaatggccctttaggagtttttgagtttccccagtttgcaaagggcactgagtcaatcgcgttggctgttgcaaagaatggaggtttttcggtagcgggagaaggagaaacagtcactgcaattgatcatttttcagtaagagataaaata

SEQ ID NO: 250394 - DNA, 622 bp, Unknown
  Bacterial polypeptide expressing nucleotide sequence isolated from the Sargasso Sea
aatgagaaccatagatcagtttaattttaagaacaaaaaggcaataattagggttgattttaatgttcctattgacaacagcaaagtaacagatacaagcaggattaaagccgctaaacaaacaatagacaaggtttgtaacgacggcggatcatgtattttggtgtctcacttaggaagaccaattggttttcaaaaagaattttccatgactaacattataaatgaagttgaaaatgttttagaacgaaatgttgttttatctaaagacgttataggtcctgacgcaaagaaaaaatcacttgaccttaaaccaagccaagtattacttttagagaatgtcagattccacgatgaggaaaaaaaaggcgacatagattttgcaaaagagctttcattgttggccgattgctatataaatgatgcttttggaactgcacacagatcacattcttcaaccactacaatatcaactttctttaatgacaaattctttggaaaatgcttagaacgagaagttaactcaattaaaaaagttttaaattcaggtgaaaaaccaatactagcaattttaggcggtgcaaagatttcaagtaaaatccctattctaaaaaatataata

SEQ ID NO: 250395 - DNA, 612 bp, Unknown
  Bacterial polypeptide expressing nucleotide sequence isolated from the Sargasso Sea
gtataattggaggatctaaaatctcatctaagataaatgttataaaaaatctaatatttaaatttgataatataattattgtaggtgctatggctaataatattatagaatttatgggtaacaatattggaaaatctttgaaagaagataattcagaaactataataaaagaaatattttcaatctctaaccaagaaaattgcaatcttttatatccagaagatgttgttgttgctaaaagttttcaagataaaccaaatacaaaagatttaaattttatttcatctgatgaaatgattttggatattggcccgaaaacaatcaaaaaaattaaaaaaattattgacgaaagtaatacaattttatggaatggccctgctggatattttgaaaacccaaattttgcaaatggaagtattgaaattgctgaaaaaattatagaaaataataaagaaaataaattatattcagttgcaggtggcggagatactgtgtctctgttaaatagtctaaatgccttaaataattttaactttgtttcaaccgcaggtggagcttttctggaatatcttgaaggtaaggaacttcctggtataagcggacttaattaat

SEQ ID NO: 250396 - DNA, 508 bp, Unknown
  Bacterial polypeptide expressing nucleotide sequence isolated from the Sargasso Sea
gcaatggggaaaaatatttggaggatctttgctggaagagtcaatggtgccagttgccttagatcttataaataaagctagaatgaaaaatgtaaatttaattttaccatgtgatgttatatgtgctgaatcttttgaaagcaaatcagttaaagggtgttttgcaatagatagtataccaaaaaattttatgggattagatattggtgataatacaattgaattgtttagctccgttatttcttcatctagtattatcgtatggaacggtccaatgggagtatttgaaaaaacaaacttttctaaaggtactaaaaaattaggaaaggttctttccgatgtagtttctgagcaggtaaaagttgtagtgggtggtggggatactgccgctgccttagaattgtttggactagatagtaatatgacacacatatcaactggtggtggagcatctcttgaattactcagcggaaattctttgccagcaatagaatcattggagaattaa

SEQ ID NO: 250397 - DNA, 1207 bp, Unknown
  Bacterial polypeptide expressing nucleotide sequence isolated from the Sargasso Sea
tatggcgaagcgttccctggccagcctccaagccggcgacctgagcggcaaacgcgttctcgtgcgggttgacttcaacgtgcccctgaacgatgccggtgcgatcaccgacgacacccgcatccgtgctgccctgcccacgattaacgacctgatcagcaagggcgccaaggtgatcctctctgctcacttcggccgtcccaagggccaagtcaacgacgccatgcgcctgacccctgtggctgctcgcctgagcgaactgctgggcaagcccgtgaccaagaccgacagctgcatcggacctgatgccgaagccaaggtgggcgccatggccaacggtgatgttgtgctgctggaaaacgttcgcttcttcgctgaggaagagaagaacgaagcaggcttcgccgagaaactggcaggcctggctgacgtatacgtgaacgacgccttcggcgccgcccaccgtgcccatgcctccaccgaaggcgtgaccaagttcctcaagccctccgtcgccggcttcctgatggagaaggagcttcagtacctgcagggtgctgtggacgagcccaagcgtcccctggccgccatcgtcggtggctccaaggtgagctccaagatcggcgtgctcgaggccctgatcgacaaatgcgacaaggtgctgatcggcggcggcatgatcttcaccttctacaaggcccgcggcctctcagtgggcaagagcctggtggaagaggacaagctggaactggccaaggagctggaagccaaggccaaagccaagggcgtgcagctgctgcttcctactgatgtgatgctggccgacaacttcgcccccgacgccaacagtcagatcgctgacatcaacgccatccctgatggctggatgggcctcgacatcggccccgactcgatcaaggtgttccaggacgccctggcggattgccagaccgtgatctggaacggccccatgggcgtgttcgagttcgacaagttcgctgctggcaccaacgccatcgccaccaccctggcggacctgagcggcaagggctgctgcacgatcatcggcggcggtgactccgttgcagccgttgagaaggctggcctggccgagaagatgtctcacatctccaccggtggcggcgccagccttgaactactggaaggcaaggtgctgcctggtgtggctgccctcgacgccgcctga

SEQ ID NO: 250398 - DNA, 1123 bp, Unknown
  Bacterial polypeptide expressing nucleotide sequence isolated from the Sargasso Sea
tatgagagaattaaaggatgtagttctcgtcggtaagcatgtaggtttgagggttgatctcaacgttccaattgaagatggtgctgtaatgaatgatgaacgactttcagcaactttgcccactatcctagaaattctgaaatcaactaaaaatcttacaatcataagtcatctaggccgaccaaaagagggtgaatattctgaggagctttctttaaaaccaattgtgcattggttcgaaaaaagactaaatcttgagataccgctagtaaaatctttggatgagcttcctaatggaatttcttttttagaaaatataagaatgttccctggtgaaagcagaaatgatgatttgctttccgagttgctttccaaaaagtttgacatatacattatggatgcctttgctactgcacatagagaggcttcatcaacttatggcgcaattgtaaaatcaaaagattcagtgcctggccttctattttcacgagaaattaatgccctatcaaacattcttgatgactctaaaaaattgcttagtgttgttggggggtcaaaagtttctacaaaattagaagtaattactaatttattatcaaagtcagataaagtgctggtgggaggaggtattgcaaacacttttttaaaagccaaaggttttgatattggtaactctctggtggaagatgacatgattagttctgcaaaaaaaatgcttggcaccggaaagattattctcccagaaagagtatgtatatctaaatcaacgcagtcagatgatattgactttgttccaattgaaagtgttccagaggataaaatgattttagatattgaattaaacatcaaagagctatctaaaaaagattatgatgccattctttggaatggtccgctcggcatctttgaaataaaaaattttgaaaaaggcacaagagatttagtgaaatatttgactcaatcagggtcaagggttgttgcaggcggcggcgagactatttttgccattagcaaatactcagataaaaaacacttccactatatatccactgcaggtggtgcatttttagagtttatatcaggcaaaaaactaccatcagtcgaggcattggagttaaaatag

SEQ ID NO: 250399 - DNA, 1168 bp, Unknown
  Bacterial polypeptide expressing nucleotide sequence isolated from the Sargasso Sea
tatgaaatctctgaaaaatttgaactttgaaaaaatccgaaatgtagggattagagtcgatttcaatgttcctacagataaaaattttagaattacagacaaaacaagattagatagatctaaggagacaatcgattttattagaaataaacaatgtaatatttttcttatttcacattttggaagaccaaaagaaaattttgatgagaagtattctttctcaaaattaattgatcagtttgaggacatattggagttaaaattaaattttattagttatgatagttttttaaatagtggtcttaatgaaatagatgttgataagccaactataagccttttagagaatataagattttttgaaggagaaataaaaaatgatttaaaatttagcaagtctattacagataaattagatttatatgttaatgaagctttttctgcttctcatcgatttcactcatcagttaatcaaatggctaaaaatattttgtcagcacctgggtttaattttgaaagagaaattttagcaattaataatattaaaaattcttcaaagaaaaaattagcaataattggcggatcaaaagtttcaactaaaattaaaacacttctatctttaacatcctcttgctcagatatttttattggaggtgcaatggctaataatttttttaaatataataatataaatgtaagcaattctttaattgaagagggcacagaaagtatgattgaaatgatttacaattctgcaaaatcaacaaattgtaaaattcatcttccatcagatgtcatacttgactcaaatgaaaataaattaatagatgagcttcctacaagctctgattttaaaatcctagatatatcagtttcttcacacgcagttttagaaaaactgataggtaacagtgatatcgttttgtggaatggtccaatgggaatgattgaagacaataaattttcaaagggatcaataaatttagcacatctccttgcaaaatctcaagcagatgttgtcataggcggtggagacacaattttagcaatcaacatggctgaggaaaaatttgaaaatttttattttgtttcaacagctggcggtgcttttcttgaggcgctcgagaacaaagatcttcctggaattcaagcccttatggctgattaa

SEQ ID NO: 250400 - DNA, 1201 bp, Unknown
  Bacterial polypeptide expressing nucleotide sequence isolated from the Sargasso Sea
atggcaaagcagtcagtcgccgaccttgatcccactggtaaaaccgttcttgtccgcgttgattttaatgtcccacaggacagtgatggcacaataaccgatgatcgtcggattcgtatggcggttccaaccatacgatctattattgaccgtgggggaaaagcgattcttatgagccatctcggtcggccgaagggtgaggtaaaccctaaactttcacttgcccccgtagccaaacgtttgggcgaattgctcggaaaaccagtagttcttgcggctgataccggagggaaggactcaacagaaaaggcacaggcattatcgaccggcgatgttttggtactggaaaatgttcggtttaatccaggagaaaaaaagggagatgacgcgagctatgttgcgggtcttgctgacctggcagatgcctacgtaaacgatgcctttggaacttgtcatcggactgaagccagcatgtacgctgttccaaaaaccatgaaagaatcaggaaagccagcggttgtcggttttttggttgaaaaagaaattcagtatctttcagatgctgtgggtcaaccgaagcgaccgttcgtcgctattcttggtggcaaaaaagtgagtgataaaattgctgttatcacaaatcttttaaaaatttgtgaccatgttttgattggtggtgcaatggcgtatacgttttctcttgcccaaggtgggaagacgggtgattctcttgtggagccagataaactggaattagcaaagcaacttatccatgatggcggagacaaactcgttctcccggtagatacccagtgcgctgatgacttttcaccagatgccaataaaaaaatagtgaaagccggagaaattcctgatggcttcgagggtcttgatattggccccgatacggccacgaggtatgtagaaattattcgcggcgcaggcacagttgtctggaatggcccgatgggtgtatttgaaatgccaccttttgatgcaggtacaaaagcagttgctgacgccgttgccagtgcaacagcgagtggtgcaatcacgattattggtggaggtgattcagcagccgctgttgagcaacttggatatgctgaaaaagtaagccatgtctcaacaggtggtggagcctccctcgaaatgcttgaaggcaaggcattcaagacagttgatatccttgatgagtgaa

SEQ ID NO: 250401 - DNA, 1213 bp, Unknown
  Bacterial polypeptide expressing nucleotide sequence isolated from the Sargasso Sea
atgtcaatactagttaaaatcgctgacctagatctatcaaacaaaatagtgcttgttagagaagattataatgttccgttggagaacggtgaaatttctgataacacaagaataacggcaacactccccacattaaagcaaatccaagaagcaggcgctaaaattattatcgtctcccatttgggacgcccggaggagggtaaatatgatgaaaaattttcccttgcgccggttgctaaagccttaagtaaaaatcttgaaatggaagtacctctcataaaagattgggtaagtggtatagatatgtctgacaaagaaattgtactttgtgaaaatgtcagatttgaaattggcgaaatatcaaataatgatgatctttcaagaaagatggcacagctttgtcaggtttacgtcaatgatgctttcgcaacgtcacaccgagcacaatcctctactcatggtgttgcgaaatatgcggctgtctccgcagctggtcctctgcttataaaagaactaaaagcattaacccaagcactaagagatccggaaaaaccaataattgcggtaattggtggcgctaaagtttccacaaaattaactgttttagaagtgctttataaaaaaattgacaagctaatcctaggtggaggaatagcaaatacttttctaaaagctgctggatatgaaatcggtaagtctctttttgaaaaagacttagtaaaaaccgctgaaaaaattatcaaagaggctgaaaaaaataattgtgatattccgcttcctatagatgtcgtaactggtgaaagttttgataataatacaattgctaaaataaaatctttagatgaaattcaaaaaaacgatatgatcatggatgttggtcctaaaacaacaaagaaattaaatgaaataattaccgaagctaaaactattgtatggaatggtcctttaggtgtttttgaatttgagcaatttgctcaaggaacaaaaaatctggcagaagctattgctacgagtaatgcttattcaattgctggcgggggtgatacaattgcagctgtatcaaaattcaaggttgaaaaaaatatttcatacatatcgactggtggaggtgcatttcttgaatttctagagggaaagaaactccctgcaatagatatacttgaagaggctgcacgtgcttggatagcgatggaaaaaggtagagagctgtaac

SEQ ID NO: 250402 - DNA, 1099 bp, Unknown
  Bacterial polypeptide expressing nucleotide sequence isolated from the Sargasso Sea
tatgaatgtgccaataaaagatggcaatattttagatgctacaagaatagaatcttgtatacctacaattaattatgttttggaaaacaatgcaaaagttttattggtaagtcatctcggcagaccaattgaaggaaattttgatgaaaaattttcattaaagccagttacagaatatttaggaacaattattaataggccttgtgagttaattgctagcttggaatctgatgaaatttttaatggtgaaacagatattcaatttttagaaaatataagattttttaaaggagaaaaagaaaattgccaagaactaggaaataaactggctagtctaggagatatatatgtttttgatgcttttgggacggctcacagagagcaggcttcaacccactcagcaattaaaaatgcgcctatagcatgtgcgggccttcttttagaaagagaaaatgaatttttatctcaaacgttaaataactatgaaagtccatacgtagcaataattggaggagcaaaagtttccaccaaacttgaattaataaaacacattagttcagtcgctgattacataattgttggaggcggcattgcaaatactttcttgaaggcttctggtttaaatattgggaaatctcttgctgaagattcgatgatagatattgcaaaagaaatacttggtaaaggaaaaatagttttaccaaatacagtaataatatctaaaacatttgagggcgaggatataaaagaaattcctattaataaagttttagatgaagaaatgattttagatgtttatttaagtgacgaaacagttgctttgatagatcaagctaaaaccattttatggaatggtccaatgggcgtgtttgaaaatgaagctttttcaaaaggtactaagaatctgtcagaagtaatagcaaaatccaaagcattttctttagcaggcggtggtgaaacgttgtcggcaattaataaatatattaaatcagatgatgtatcatattgttcaacaggtggaggagcctttttagaatttatggaaggcaagatattaccatcaatagatgttttgaattcaaaggttacagggggctaa

SEQ ID NO: 250403 - DNA, 1198 bp, Unknown
  Bacterial polypeptide expressing nucleotide sequence isolated from the Sargasso Sea
atgatcaaatatcggacgctagatgaccacgatttttctaaagatagagttttactgaggcttgatctaaacctccctacccacaatggcgccatctccgaccctactcgcttgacaaaagctattcccaccattgcgaggctggcatctcaaggggctaaagtcataataatttcacactttggccggcccaaaggaaaaattgtaagagaaatgtctatggaacaaatattctcaagtcttcgcgaggcactgaatggatttacagtaaaattcattccacattcaatcgggtcaggagtggcggaggatatacgaaacatgaaaaatggagaaatctgtttacttgagaacttgaggtttcatcctggagaggaagaaaatgaccctgagttttcaaaaagcctagcgcttttaggcgactgctttgttaatgatgctttctccgtttcccatcgagcccatgcatcgaccgcagggattgctagacacatgccaagtttcgcagggcctcttatggatctagagttaaaggccttatctaactctttagatagtcccaaaagaccgcttactgctataattggaggagccaaaatctcaactaaattggatttgttgaggaacatcgtaaaactcgtagacaaaatgatcgttggtgggggtatggcaaatacgtttctttttgcaagaggtgtttccattggaaattctcttgtggaaaaagatctaaccaatttggtccagacgattgagcgtttagctgcagaaaattcttgtgaaataattcttcaaaatgacgcgctaatagcaacaaaactggagagcggcgccaattataaagctgttgaattggatgatatcccagacaacgctatgattctggatgctggacccaactcgattccagtattctctaatcatataaaagatagcaacaccataatttggaatggacccttaggtgcattcgaatgcccaccgtttgatacttcaactacggcaatcgcgaaattagtgggtaagttgagccaaaaaggtaatttatattctattgcgggagggggagatacattagcggctcttaaccaagctggtgttgtcaaaaaattaaattacgtctctaccgcgggtggggcctttcttgaatggcttgaaggaaaagagttaccaggcgttgccgctttgaagccataaa

SEQ ID NO: 250404 - DNA, 892 bp, Unknown
  Bacterial polypeptide expressing nucleotide sequence isolated from the Sargasso Sea
aatgacttcttcaataaaaagtataataaacgaaaacgtccttgataaaacagtattagttcgagctgatttaaatatacctatgtccaatggaaatatttcagaccagtcacgtgttgaaagagtgataccaactatcaactttttgaaatcgtctggtgcaaaaatagttatatgcagtcatctaggaagaccaaatggaaaatataataaaaactatactttaagacctctagtagaaattttatcaaatatcttagaaacaaatgttcgctttagcaactcttgtttaggtcaagaggctctagaaataaaaacaagtttaaaagcaggagaaattcttttacttgagaatgttcgttttcatgaagaagaaataaataacagtcttagctttgcaaaaaaattatctgagggttgtgatttatttgtaaatgatgctttttcttgctctcatagagcgcattcaagtttgcatgccattacaaattttctaccttcatattcaggcaaattgatggatgaagaaataaaagccttaacatccgtcttaagttctccaataaaaccagtagctgccttggttggaggtgcaaaaatttctacaaaaataaacattattgaatacttaataacgaagatggattatttaataattggtggagcaatggcaaatacttttcttgcagctgagggcttggatgttggaaaaagtctttttgaaaaagattctgtaaatattgcaaagtcaattttgaaagaaagtaaaaaaataaattgtgaaataatactgcctattgatgtagtagtttcaaaatcttttgaaacaaatggaaacactaaaatcgtatcatcgaatatgatacctttagatatgatggcgcttgatgtt

SEQ ID NO: 250405 - DNA, 1050 bp, Unknown
  Bacterial polypeptide expressing nucleotide sequence isolated from the Sargasso Sea
ttttacttaaaaaagaagccagtatcataatcatatctcatattggccgtccaaagggtaaatttgttaaagaaatgtcactagagcctatttcaaaaaaactatctcaatttttaaataaagaaattttttttaataaaatcccaattagtgaaaagaatataaatgaaattaacaaaacttccaaaaacccacttactatgcttgaaaatattcgtttttatgaaggtgaagaaaaaaatgatgaaaaattttctaaactaatttcaagtctaggagatttttttgtgaacgatgctttttcctgttcacatagatcgcatgcatctattgatggcataacaaaatatatcccttcatattttggtttacaaataattcaagaaataaatgcgcttaaaaaaataacatctgaaattaaaaagccaattacttgtattattggaggttccaaaatatcaactaaaataaatgttgttaaaaatttaattagaatttttgataatattataattgttggtggaatggccaatacaatacttaaatttaagggcttaaatattggtaaatctatttgtgaagataataaggaaaagttaatagaagaaattttcaaatcttctagggaacataattgtgaaattaattacccaatagatgttgtagtgtcagaaaaattggatggatttggaaaaaataaagaattaagtgaaatacaaaaaaacgaaatgatattagacattggtccaaaaacacttttttctattaaaaaaattttagacaaatcaaatactattctttggaacggaccagcgggatactttgaaaacccaaattttgaaaatggaacaaaagaaattgctaagatgatttcacttagatcaagcaaaaatgatattttttctgtggtcggaggtggagaaactgtcgcggcaataaataaatatagcaatataaattcttatacttttgtttcaaccgctggtggcgcttttttagaatttcttgaaggtaaaacattacctggtataagagccttaaactcatgac

SEQ ID NO: 250406 - DNA, 1192 bp, Unknown
  Bacterial polypeptide expressing nucleotide sequence isolated from the Sargasso Sea
aatgattagatcattaaattcattcgatttaaaagataagcgcgtattgatacgggtagactataatgtgcctgttgaaaatggtgttgtcaaagatgcctatagaattcagtgttcaattccaactattaaagaatgtcttgaagcaggggcttcagtagttttaatgtctcatcttggaagaccaaatggaagcactaatgataattatagtatgatctctgtgggagaggttctttctgattttctagaaattccaataaaattttctcatgactgtataaatgaagattcaattaatgtaactattggccttcacccgggagaggttcatttattagaaaacctacgatttcatacgggtgaagaagaaaatgattttgaattttcaagattactttcaaagcatggtcaaatatttatcaatgatgcttttggaacttctcatcggtctcacgcatcaaatgttggtgtaacagataattttatgcataaagggatgggtttattgatggagaaagaaattcaatatttaatgcataagtttaaaaaaccaaaagaacctttagtgcttttgctaggtggggcaaagatatctgataaaatagatatgatcgaaagatttataattaaagcaaagagtatactcataggtggcggaatgacttttacctttttaaaagcaatggggctaaatgtagggaaatctatgattgatgaaagtatgatttcaactgccaaaacaattattaagaaagctcgtcaaaatagagttaaaataaaacttcctgtggattttgttgtgtcagatgctattgataagccatcaaaaattgaaacagtatcttttgattcaatacccgataacatgattggtcttgatattggtcctgaaactataaaattattttctaatataatccttcaatctggtacagtattgtggaatggtcctatgggggtatttgagaaaaaggaatttgaaaatggtacaaaatctatcgcaaatttactatctgatatgaaagatcaaaatatagatacgatagttggtggaggtgatagtgcctctgcaataagaaagttctctgatattgaaaacataacacatgtttctactggtggcggagcatctttagaattattaggaggaaaaaaccttcccgccatagctgcattggagaaattatga

SEQ ID NO: 250407 - DNA, 892 bp, Unknown
  Bacterial polypeptide expressing nucleotide sequence isolated from the Sargasso Sea
atcaaataacttatctaatggagatgttcttttacttgaaaatgttcgttttttcggtgaagaggaaaagaacgacctggagtttgctaaaaaattagcatcacatgcagatatgtatgtaaatgatgctttcggtgctgctcatagagcacatgcttcgactcagggtgttacaaattatttaagtccctcagtagctggattccttttagaaaaagaactgaaatacttacaaggagcaataaattccccaaagcgtccattggcagcaatagttggaggatcaaaggttagtagcaaaataggagtacttgattctttacttgataagtgtgacaaaatcatgattggtggaggtatgattttcactttctataaagctagaggtttagatgtcggaaagagccttgtagaagaagataaactcgagcttgctaaagatttagaagcaaaagcgaaagcaaaaggagtagaattattattacccactgatgttgttttagctgatgaattttctcctgacgccaatagtaaaatatctcaaattgattcaattagtggaaattggatgggtctcgatattggtccagagtccattaaagtttttcagaatgctcttgcagaatgtaagacaattatttggaatggtccaatgggagtttttgaatttgataaatttgcagacggtacaaatgcaatagctacgactcttgcggacttaagtgctttttctgaagtttgtacaataattggtggtggagattcagtcgcagcagttgagaaagcaggattagctgagaaaatgtctcatatatctactggaggtggcgcaagtttggaacttttagaaggtaaaactttaccaggtgtagctgcgttaaacgacgcttag

SEQ ID NO: 250408 - DNA, 744 bp, Unknown
  Bacterial polypeptide expressing nucleotide sequence isolated from the Sargasso Sea
atagagctcatgcaagtttacacgcaataacaaaatttcttccatctttttctggtttattacttgatgaagaagttaaagcacttacttctgttttgaactctccagtcaaaccagttgcagcactagttggtggcgctaaaatatcatcaaaaattaatataatagaatatttgttaacaaaaatggattatttggttattggaggagcaatggcaaatacttttcttgttgctcagggtttaaatatgggaaaaagcctttacgaaaaagattgtattgatattgcaaaatcaatattaaaaataagtgagacaaataactgtcaaataattttacctttagacctagttgtttctgagaaatttgaaacttatgcaaagtttgaaatagtgtcttcagatgctgtcccatcagaaatgatggctttagatattggtcctaaaacgataaacaaaataagttctgtgtttcaaaaaattaatactttactctggaatggcccagtcggcgcctttgaaacgccaccatttggagagggaacttacaagcttgctagagaggctgctaaattaacggtaaataaaaatttaattactgttgctggtggaggtgacacgacttctgctctaaacaatgctaatgctgtcgatgattttacatatgtatcctcagcaggtggagcttttttagaatggctagagggtatagaattaccaggaatatcagtattaagtaaataat

SEQ ID NO: 250409 - DNA, 1198 bp, Unknown
  Bacterial polypeptide expressing nucleotide sequence isolated from the Sargasso Sea
atgaaaaatcttaataactacagcataggcatgaaaaaagtattatttcgagctgatttgaatgttccagttaccaatggaattgtaactgatacatctcggattttagcagttaaaaaatccataaaaatactcttagaacaaaaaaataaaatttttataatttctcattttggtagaccaaaagaagataataaaatgcaatactcgcttgaatttctttgcacgtatttagaaaaaatttttgaagtaaaaaaagtcttttttttaaaaaatattgaatcaaaagagcttaacaaaacaataaatgaaactaattatggagaaatttgtttgattgaaaacatccgtttttatccaggtgaagaaaagaatgaccaagatttttcaaaattttttgcaggtcattttgatgtttttgtaaatgatgcattctccgcttcccatcgtaatcatgcatctataactggatttgctaaatatttgccagctgttgcgggcaatcatcttatcaaagaaattaataacattgacttatatttaaaaaaattaaaaaaaccaaatcttgcattaattgggggttcaaaaatttctacaaaaataaagttgctaaacaacttaattgaactttttgataccattgcaataggtggggctatggctaataccttcttgttatcaaataatattgaaataggaagttcattggttgaaactgaattaattgaacattgtattaaaattaaaaataaagctgataaatttaattgtaagttaattttacctattgatgttgtttgttctattaacattaatgataaaaaaaatattagaagctgtaacattgaaaatattttacctaatgaaatgattctagatattggtgaaaaaaccacaaaaattatttattatgagatattaaaatccaaaatgttaatttggaatggcccttttggcgcttttgaaactaagccttttgatgaaagcagtaaaaaaattgcaaatattataaaaaattcgtcaaaaaatattaatctggatgcattggcaggtggaggagatacagtatcttttattagaaatgctaacgcagaagatggatttaaatatatttcaaacgcaggtggagcttttttagagtggcttgaaggtaagcaatcccccggtgtagttgcattaaaagaaaataaactttaat

SEQ ID NO: 250410 - DNA, 1111 bp, Unknown
  Bacterial polypeptide expressing nucleotide sequence isolated from the Sargasso Sea
taatggaaaagttacagacactacaagaataaaaagtatattacccaccattaaagaattaagaaaaaaaaaatgtaagattgttattttgtcgcattttggaagaccaaaaggttcattcaataaaaaaatgagtttaaaacatataattccaaaagttgaaaaagcaactaaaagtaaaattcatttttcgaaagatcattttggaaagaattttgaaaatttactaaaaaaaattccagatggaagcattgttgtaatggaaaatactagatttcacaaaggtgaagaaagaaactttaaatattttgccaaagatttagctaaaaattgtgattattttgttaatgatgctttttcagttgcgcatagaagtcatgcttctgttacaggattaacagattatgttccatctttcagcggacgttcattagaaaaagaagttataacgataggcaaattcttatcctcaaaaaataagagaaaaatagcaatcattggtgggtctaaaatttcaacaaaaataaatctaattaataatctattaaagaatgtaaatgcaattgttataggtggagcaatggcaaatacatttcttttagctcaaggaagaaaaattggaaaatcattaaatgaaaaatcaatggtaaaaatagcaaaaaaaattttatctaatgcatcaaaaaataaatgcaaaataattttacctgtagatgctgtagttgctagtaatttaagagaaggcggagagttttctgaatacagtattgaaaatattcctaatgatggattaattctagatattggtaaaaaaagtatagctataatagataaagaaatctctaaaacgaaagaagttttatggtgcggccccttagggttatttgaacaaagcccttttcatgttggaacagcatcagtagcaaaaactctgtcaaagatgacaaaaaatggtaaaattatatcagttgctggcgggggagatacggtagctgccataagccaatcaaactatgttaatgattttacatatatatccactgctggtggagcttttttagaaatgatagcgggtcaaaaattacccgggattgaagtgttaagaaaataa

SEQ ID NO: 250411 - DNA, 325 bp, Unknown
  Bacterial polypeptide expressing nucleotide sequence isolated from the Sargasso Sea
tatgatgggtttagatattgggaatgagaccataaagttattctctaaaatattaagtcaatctggtacaatattatggaatggtccaatgggagtatttgaaaaaaaggaatttgaaaatggcactaaagagattgcaatttctttatctaatttaaaggatgaaaatataacaacgatagttggtgggggggatagcgcatctgcagtgaaaaaattttcaaatattgaagatattacacatgtttctactggtggtggtgcatccttagagctcttaagcggtaggagtcttcctgctattgaagcattgggaaaattatga

SEQ ID NO: 250412 - DNA, 1189 bp, Unknown
  Bacterial polypeptide expressing nucleotide sequence isolated from the Sargasso Sea
aatgataagaacattgcaagcatttgatatcaagggtaagaatgtattaattcgtgcagattttaatgttcctatgagcggtgagaccatcactaataattttcgaattaaatcttcactccctacaataaagacatgtattgaagctggtgcttccatcatacttatgtctcatctaggaagaccaaaaggtaaagaagaacagtctttaagtttgattccggttggagaagaattagcaggcttattagaaatgcctattaaattttctgcaaattgtatttcaacggatgcaatagatacatctatcagtcttaaaccaggagaaatacatttattagaaaatcttaggttttattcagaagaagaagacaatgatacagatttctcatctcagttagcaaggcatggtaatatctatattaatgatgcatttggtactgcgcaccgttctcatgcatctaatgtaggtgttgtccctttttttaagaatgctggtattggctggttaatggataaagaactgaattatcttgatcgattaatgaataatccaaagcgaccactgactcttgttcttggtggttctaagattgatacgaaattaagtcttattgataagtttttagataatgccaaccatattataattggtggtggaatggcttttacatttctcaaggctaggggcaaatcagtgggaggttctttggtagatgaaaagatgttagatactgccaaaagaataattaataaagctagggtcaagggcgttaaacttagtcttcccattgatgttatttgtggtagctcaccaacagaatcagaagtgatgggtacatttttgattcaagatatacctgatgattatatgggtttagatattggtcctgaaacattaagcatgtataatagtatactgggtaattcaaatactatattatggaatggtccaatgggtgtttttgaaaatagacaatttgaacaaggaactagagaaatggcaattcatttggttagttgtattagcaatggatcaaaagttattgttggtggtggagatactgctgctgcactagaatcatttggtttattaaaagaaatgtcccatgtatccactggtggtggagcatcgttggaactattaagcggaaatcaattacccgcgttaaaatcattggagagataa

SEQ ID NO: 250413 - DNA, 1129 bp, Unknown
  Bacterial polypeptide expressing nucleotide sequence isolated from the Sargasso Sea
attggatcaagtagtgcagcttgaagagataagagataaaaaagttctcgtgcgattagattataacgttccaatagaagacggggtcatattaaatgattttaggattaggcaaacttacaatacattaaattcactattagacaataataataaattaattattgcatctcacctcggaagacctactgaaggtctttacgatgagagcctttcactcaagcctatttgtaaccatctttctagtaaattaaacaagaaaattcaatttattaaggatatcaatgatgccattgatttttcaaatcatgatatcgcaatgcttgagaatgtaagattcaatataggtgagaaaaaatgcgatcccagattatcacaaactatagcgtcccttgctgatatcttcgttttcgatgcatttggtgtctcacatagatcggagtgcactacaactggtgttgtgacttatcttgagacagtcgcaggattaaatattagatatgagattgagacgataaataaacttattaatgaacaatcaagacctatgactataataatatctggcgctaaagtttctacgaagattgttttaattaaaaagctactagagaagtgtgatcatatgatacttggaggaggaattctaaatacattcttgaaggccaagggatatgaagttggtaattcactctttgaggaggagtttgtttatgatgctactaagattcttgaatcagatttcgctagcaaaataatttttccgtcagatttttcttgtgagactgtgaacggaattgcaaatgtagatttatctcgtatatctacaaatgacacaatttatgatttaggaactgagagtattaatgaaataaaggatatcgtgagaaattcagtttcagtattctggaatggtcctcttggttatgtcgaaaaagagccattcaataaaggcactgaggaactggcaaaagtaattgctgaccataactgtttttctatagtcggtggtggtgatacactaccgattattgaaaacttaaaattacaaaatagatataattgtctatctacagggggaggatctcttctgacatatttagagggcggatcattgccaattatagat

SEQ ID NO: 250414 - DNA, 1213 bp, Unknown
  Bacterial polypeptide expressing nucleotide sequence isolated from the Sargasso Sea
aatgaaagcacgtcaattcatagaagatcttgatttaaagggaaggcgggtattgatccgggttgatttcaatgtacccttggatgaaaatcagaagatcaccgacaatgccagaatcacggctgctcttccttcgattcggagaatcatcgaatcgggagggaagtgcattctgatgtctcatcttggacgccccaaagggcaacgggtggaaagtatgagtttgaggccggcggctgaagaactttctttgcttttggagaaaaacgttagtttggctcctgactccatcggcagtgaagttgagaaaatggtctcgcagatggaagaaggagaactgttgctacttgagaatttgaggtttcatcagggagaaatcaaaaacgatccacagttttgtgaagcattggccaggcttggagaagtttacatcaatgatgctttcggaacggcgcaccgggcccatgcttccaccgcaggagtggcggctctgatgggggaccgcgcagtaggttacctgatccgcaaggagttggaattcctgggagccgcggtgttggatccccaaaagccatttactgcgatcctgggcggggcaaaagtctcagacaaaatcatagtgattgaacggttgatggaaaaagttgatgcgctgatcattggcggagggatggccaacacgttcctcaaggcacagggaatggaaattggagattctttgcttgaggaagatgctctggaaacggcaaaaaatctcctggatgaagcaaaaaaatgcggagtcaaaattcaccttccagtggatgtttgtacggccccggaacttcatcaggaagtggaaacgaaattcctgaaagttgaggataaggtccaagcggggtggaaaattctcgacattggtccggaaagtgtaaagcagttcggttcagtcattcaaaattccaaaaccgttctttggaacggaccgatgggagtttttgagtattctgcttttgcttcaggaaccaggggagtgacggaagccctggcaaaagctactgacgcaggagcggtgagcatcattggaggaggagattctgcagctgccgtgaatcagtttggaatgcaggataggatcacccatatctctacgggaggaggagcctcactggagtttctggaagggaaagaacttcctggagtgggtgtaatccccgagaagatgaatatctga

SEQ ID NO: 250415 - DNA, 1132 bp, Unknown
  Bacterial polypeptide expressing nucleotide sequence isolated from the Sargasso Sea
gttgagattagatttaaatgtaccattaaaaaatagagttattaccgatgaaacgagaataaataagatattaccaattattgattttttgatcaaaaaaaactctaaaattattgttttatctcatgttggaagaccacaaggtataatagataataatctgtccctaaaaccaatttgtgaaaatttagaaaaaaaaataaatcaaaaagtacgtttaataggtgacaatatttttaaattaaaaaaagagaatttatttaaagatcctaatgataaaatagtttttttagaaaatatcagattttatagagaggaggaagaaaatgacacttcatttgcaaaacatttagctgaactaggtgatttatatgttaatgatgcattttcttgttctcatagatttcatgcatctatcaataaaatcactaaatttttaccatcctttgcaggtttgcaattagagactgaaataaatgccttaaaaaaggttacaagtgaaataaaaaaaccaattacttgcatcataggagggtcaaaaatttcaacaaaaattggtataattaaaaatttattacctaaatttgataatattgtaattgttggaggtatggccaataatataataaattttaaaggtaaccaaataggtaagtcaattagagaggaaaattgcgaagaagttgtaaaagaaattttcgaaatttcaaaaaaatattcttgtgaaattacttttcccgaggatgttttagttggaaaaaattttaacgacggatctaagatcaaagaactgaatggtgtagagagtgatgatttaatattagatataggaccaaaaacaattgataaaattaaaaacattatagaaagtagtaaaacaattttgtggaatggaccggcaggatattttgaaaattcaaattttgcaaaaggcagtcatgaaattgcaaaggcgattattagaaaaaataaaaataattctatttactctgttgttggaggcggagatacaatcgctgttataaatcaaattaatgatataaaaaattttaattttgtttcaactgctggtggagcatttttagaataccttgaaggaaaagaacttcctggtataaaagctttaaattaa

SEQ ID NO: 250416 - DNA, 1198 bp, Unknown
  Bacterial polypeptide expressing nucleotide sequence isolated from the Sargasso Sea
aatggaagataaatcaatactaaatattgacactcgcaataaaagattacttattagagcagatcttaatgttcctataaataataataaaatttcagatgaaactagaatagaaagattttgcagcggggtttccaagcttcttaaaaaagaggctaaaataattataatcacacatttgggtaggcctaaaggtaaagaagacttatcactttctaatagaatacttttaaaacctcttaataaatatttaaataaagaaattatattttcaagtaatccaatttccacttcagcaattgaaagttcaaagagattaaaaaataatcaaatactactttgtgaaaatattaggtttcatcctgaggaagaagatgatgattcaatatttgcaaaaaaactctcaagccttggggatatttatgtaaatgatgcattttcctgttgtcacagagctcattcatcaacacattctattacaaactttttgccatcatactttggcccaatgttgtgtgaagagatttcagctttaaatagaactttagaaaatccatcaaagccatcactagcaattattggaggttctaaagtatctactaaaatctcagtcctaaaaaatttagtattgaaattggatagcattataattggtgggggaatggctaatacattcttgtttgctaaaggagcacctatgggaaattcactatatgagcctgatttaaaagataaggcaaatgagatactcacttttagcaagcaaaacaattgtaatattcttttaccggtagatattattacagcaaataaattagaaaaaaatattagaacaaatacatcaaattatgacgaatgcccttcaaaccaaatgattttagatgttggtcaaaaatcaattgaacttttcaaacaggcaattgattcaagtaaaactattttatggaatggtccactgggtgcatttgaaattaagccatttgacaattcaacgaatttactagctaagtttactggcaaaaatactatgcaagaaaaatgcatttcagttgctggtggaggtgataccgtctcagctctaaattcggtgaaagtaactcatcaattttcttatgtatcatcagcgggaggagcttttttagagtggcttgaaggaaaaaaacttccaggtattgaagctttaaaattaagtaaatga

SEQ ID NO: 250417 - DNA, 643 bp, Unknown
  Bacterial polypeptide expressing nucleotide sequence isolated from the Sargasso Sea
gatcccgccccggcccgtggccgcgattgtcggtggcgccaaggtgtcgaccaagctgcaggtactagaaaatctggtcaggagtgtcgatatcctaatccttggcggcggcatggcgaatacctttcttctcgcgcgcggacagggtgtcggcgcgtcgctcgtcgaggccgacatggtggacaccgcccgtgtgatcgaggccggcgcaaaagcgaatggctgccacatcgtgcttcccgcagatttccttgtggccggcgaatttgccgcgaatgttccgtatcgggtggctgggctcggcgatgtcggcgagggcgagatgatcctcgatgctggaccggcctctgcgcaagatgtggcgcaccaactcgagacatgccgtactgtggtctggaacggtcccatgggggcctttgagttccagccattcgacagtgccacgaaccatgtcgcgaaggccgttgcgatgctgacggcagatggcgcgatgatgtcggtcgccggtggtggcgacacgctggcggcacttgcaaatgccggggtcagtgaccaattctcctatgtgtcgacagccggcggcgcgttcctcgaatggcttgaggggcgtgtgctgccgggggttgaagtccttcgccgctaa

SEQ ID NO: 250418 - DNA, 722 bp, Unknown
  Bacterial polypeptide expressing nucleotide sequence isolated from the Sargasso Sea
aatgagattactaaaagaccaagatcttagtaataagaatgtggttgtgagattagatttaaatgttcccattcaagacaagcaaattatagattcaaccagaatcatttcttcagtacctacaataaagtatctcgtaaataaaaattgtaaagtccttttaacatcacatcttggaagacctgaggaaggaaagtttgatcaagatttctcaatgtcacctgtcgctaaaaaattatctgaaatcttaaatcatgaaattgatcttattgattccctagacagcagcgatatttttaatacaactcaaatacaactattagaaaatttaagatttcttatcggtgaaaaagacaataatgaaaagctaggcaatcagctagcaaataaaggagatgtttatatatttgatgcttttgggactgctcaccgtaaacaagcttccacacactcagctattcaacaagcaaagttttcatgtgctggacttctcttagagaaagagattaattcacttaataaagctttaacctctattgaaaacccattcactgctgtaatcgcaggttcaaagatttcaacaaagcttgaacttatagctcatttaaactcaaaagcagatttcattgttgttggcggcgggattgctaatacctttctgaaatctcagggcttcgatgtcggagagtctttggtagaaaatgacatgattgaaattgcta

SEQ ID NO: 250419 - DNA, 748 bp, Unknown
  Bacterial polypeptide expressing nucleotide sequence isolated from the Sargasso Sea
tatggatgcttttgcaacttctcatagagcacactcttctacgacaggagtaatagagtttagcgagaaagcttgtgctggttttttattagaagaagaaataaatgcattatcaaagctaactctcaagaataaaggaggttctttagctatattaggaggggcaaaaatttctaccaaattggatttaattaattctttgtgtgaaaagatggataccgttattttgggtggaggaatagcaaatacttgtttattggctcaaggatttcctgtgggcgattcgttagtggaagaaagcatgcttaaagaagctttagaactatctaaaaaaagtaatgtaattattcctaggatcgtagttacagcgaagaatcaatacaaagaatgctctataaaacatgttggtcacgttgaagaagatgaatctatttttgatatagcaccggaaagttttaaagagcaccaggatatatttgatgcagctaaaacaatcctatggaatggacctatgggcctttttgaagaaagtgctttttctgaaggaactattcaggtggctaagatgattgtttcgtctaaggggttttcagttgctggcggaggagatactatatctgcagcttcaaaagctggtgtattggacaaacttgattatgtttctactgctggcggagcgtttttagaatttatagaaggaagaaagctcccttccttagaagctttacagttaaagctagtaaaataa

SEQ ID NO: 250420 - DNA, 754 bp, Unknown
  Bacterial polypeptide expressing nucleotide sequence isolated from the Sargasso Sea
tatgccgcttaaaactattgaaaatttagacgtcgctggaaaaattgttttagtaaggtgtgatttaaatgttccaatatccgaagatggagaaatttcggatactagtagaattgaaaggcatgcgcctacaataattactttagtaaataaaggtgccaaagtagctttactctctcattttggaagaccaggaggaaaatttgatgaaaatttttctttagggtttgtttcagagagtatatcagaaatttttaaagcttcagagatagtagttattcctgattgtattggcggtgttgcaaaacaagttcttaatgacttacctaatggaggaatagctcttttagagaatgtaagattctatgaaggagaagaaaaaaatgatgatagtttctgtaaatctctagctgatttagctgatatatatataaatgactctttttcagtttgtcatagagagcatgcttcagttcacggcattactaaatttttgccgtcttttgctggtttagccttacaacttgaaattgagatgcttgaaaaagttttagaaaaccctgaaccccctatgatggctattattggaggttcaaaagtgtctacgaaactaaagttattatctaatatggtagaaaaaatgaagtttttggcaatcggaggaggtatggctaatacttttttagctgctcaaggaacaaatataggatcatctttttatgaaaaagatatgatagatgaagcaaataaaata

SEQ ID NO: 250421 - DNA, 1204 bp, Unknown
  Bacterial polypeptide expressing nucleotide sequence isolated from the Sargasso Sea
atgataaaaatcaagaaccttgatgaccttttaacaaatgatcttaaaggtaaaactgtttatttgagggccgatcttaatcttccaacaattaatggaaaagttacagacactacaagaataaaaagcatattacccaccattaaagaattaagaaaaaaaaaatgtaagattgttattttgtcgcattttggaagaccaaaaggttcattcaataaaaaaatgagtttaaaacctataattccaaaagttgaaaaaattactaaaagtaaaattcatttttctaaggatcatattggaaagaattttgaaaatttactaaaaaaaattccagacggaagcattgttgtaatggaaaacactagatttcacaaaggtgaagagaaaaactttaaatattttgccaaagatttagctaaaaattgtgatttttttgttaatgatgctttctcagttgcgcatagaagtcatgcttctgtcataggattaacagattatgtcccatcttacagcggacgctcattagaaaaagaagttataactataggcaaattcttatcctcaaaaaataagagaaaaatagcaattattggtggttctaaaatttcaactaaaataaatcttattaataatctattaaagagtgtaaatgcaattgttataggtggagcaatggcaaatacatttcttttggctcaaggaaaaaaaattggaaaatcattgaatgaaaaatcaatggtaaaaatagcaaagaaaattctatctaatgcatcaaaaaataaatgcaaaataattttgcctgtagatgctgtagttgctagcaatttaagagaaggcggcgagttttctgaatacagtattgaaaatattcctaatgatggattaattttagatattggtaaaaaaagtataactataatagataaagaaatcgctaaaactaaagaagttttatggtgcggccccttaggattatttgaacaaagtccttttcatgttggaacagcatcagtagcaaaaactctgtcaaagatgacaaaaaatggtaaaattatatcagttgctggcggaggggacacggtagctgccataagccaatcaaactatgttaatgattttacatatatatccactgctggtggagcttttttagaaatgatagcgggtcaaaaattacctgggattgaagtgttaagaaaataag

SEQ ID NO: 250422 - DNA, 1150 bp, Unknown
  Bacterial polypeptide expressing nucleotide sequence isolated from the Sargasso Sea
aatgaaaagaaaaaaatttattgaagaattgaaacttgaaggaaaacgagtgcttacacgagttgattataatgtccccctgaataataaaatggaaatcactgataacggccgtatcaaagcaacattgcctacagttaattatatcattgaaaatgggggtcgggctgttcttatgtctcatctagggcgtcctgatggtgagcgagtagagagaatgagtttaaaacctgtatcggtggaattatctgaattgttaggaaagccagttaaattagcatcagattgtattggagaagaagtttataatatggttgacaatatgcagaacggtgatgtagtacttttggaaaatttgagatttcacaaagctgaagtaaaaaatgagccttggttttgcgaagcattagcagttaatggggatgtttacattaacgatgcatttggaacagcccatagagctcatgcatcaaatagtggagtggtctcctatatctcagacagtgcagtggggaatttaatgcgcaaagaacttaagtttttgggcgaagctgtatctaaacctgtcaggccatttgtcgcgattcttggtggagcaaaagtctcagataaaattaaagttatcgaaaaactgttggaaaaggttcagtctgtgattatcggtggtggaatggcgagcatctttttaaaatctcaaggatataaaattggtgcttctttgattgatgaagattccttgaatttagcaaaaaatctaattcaagatgcagagcaaaggggagtagagtttttgctcccagtcgatgtagtcatcgcagaaaattttgataacaatgcctcaactaaaataatttccatagaagaaggtgtccccgaaaagtggctaattctggatgttgggccacgaagtatcgaagtatttagtgacacaatttttggttcagggactgttttgtggaatggtccaatgggtgtttttgaaatggaaaaattttccaaaggcacttatgatatcgcaaaatgccttgctgttgcgactgaaaatggtagcgtgacaattgtcggagggggtgactctgctgcggcaattaaaaaattgggactgattgggaacatgactcatgtctctacaggaggtggggcatcactt

SEQ ID NO: 250423 - DNA, 847 bp, Unknown
  Bacterial polypeptide expressing nucleotide sequence isolated from the Sargasso Sea
aatgcttgagaatttaagattttataatgaggaagagcaaaacaatgaggaatttgctaaaattttagctggttttggcgacttgtatgttaatgatgcattttcttgttctcatagaaaacatgcttcagttttcagtattactaaatttgtgccgtcttatgctggaattcaattaatgtcagaaataacagcattaagcaagataacaaaagatataacaagaccaattacatgtattattggtggttctaaaatatctacaaagatagatgtaattaaaaacctcatatctaaatttgataatttaatattcgttgggggaatggctaataatattttaaaatataaaaaatttcaaattggaaaatcaatatttgaggaaaattgtgatcatataattgatgatatttttaatttatcaaaagagcaaaattgcaaaataatttttcctgtcgatgtttctgtaagtaaaaaaatagatggtaaaggagatataaaaaaaataagtgaagttcgggaagatgatttaattcttgatattggaccagaaacattaaaaatacttaataacactatagaagaaagcagaacagttttatggaatgggccagctggttattttgaaaatgaaaattttaaaaaaggcagcctagaaatagcaaaaaaaattgtcgaaaaaaataaaaaaaatgaaatttattctgttgctggaggtggtgacaccgttgcagctttaaatagttttaatttaacaaaacattttaattttgtttcaactgcgggtggagcatttttagaatttcttgaaggtaaagatttacctggtataaaggctttaagttaa

SEQ ID NO: 250424 - DNA, 1186 bp, Unknown
  Bacterial polypeptide expressing nucleotide sequence isolated from the Sargasso Sea
aatgatcaaaccccttaaaaccttcgaccttaaaaataaaagaatactcttaagagtagattttaatgttcccattgaaaacgataaggtagttgacgattttcgcatcaagcagaccttacctacaattaattattgcctggaagctggagctaaggtaattattatgtcacacctaggtcgcccaaatggtaagccggatccaagcttgagcttaatgccggttggtgaaatgctagcagatcatctggagatgcctatcaaattttccaatgactgtatatccgaggactcgcatgatgtcaccctaggtttaaagccaggcgaaattcatcttttagaaaatgtgagattttattatgatgagattaagaatgattcagaattttgcgcacaactagcaaagcatggcgatatctttattaacgatgcttttggcacagcgcatcgtacccatgcatccaatgtaggtattgctaaatatttttccataaaaggcatagggttattgtttgaaaaagagctgaatttcctttcaaaaattctatcaaaaccttctagaccgcttacgcttgtcttgggaggcgctaaaattgacactaaaattggtttaatcgatcattacattggcattgcagatcatatcctcattgggggaggaatggcatttacattgttaaaggctagagggatagaaatcggtaaatccattgtagatgattctaaacttaaggctgcaatagcgttaattgataaagctaaaaagaagaaaaatctttttttccctaaagatattgtttgtgctaagtcgattgataaagacgagaattataaaacttacgatattacaaaaataccaaaaaatttaacgggacttgatattggtcaaaaaactatcgattcgtattcaaagcttatttcgaattcacagacagtaatatggaatggaccaatgggtgtttttgaatctgaaaattttcaaaatggcacgcaatcacttggaaagcatatcgcagcttgcagtcagggggaatttgtcagtattataggtggtggcgatacagctgcagcattaagaaaatttaatttagataataaaatgacacatttatctacaggtggtggagcgtcaattgaactactttcaggaaaaaatttacctgcaatttttgcactagaggtttag

SEQ ID NO: 250425 - DNA, 1156 bp, Unknown
  Bacterial polypeptide expressing nucleotide sequence isolated from the Sargasso Sea
atgattaacctttcttcactagaaattaaaaacaaaaatctcgttattcgagtagatatgaatgttcctatattaggcggtaaggttttggatacaaccagaattacagcatgcataccaacaattaattatgcactagaaaataatgcaaagattctattagtaagtcatcttggtaggcctactgaaagtgttttcgaagataaattttctttaaagccggtagcagcatgcctaagtgaaattattgatgagtctgtagaggttgttgatcaacttgactctaaaaaaatatttaatagcgcatcaagagttcagattcttgaaaacattagattttttaagggtgaaaaagataactctgacgagcttggtagcatcttgggaagtttaggtcatatatatgtttttgatgcatttggtactgcacatagaaagcaagcttcgacacattctgcaattaaacatgcttctattgcatgcgctggtctattaatggaaaaagagaatagttttctttcacaagcattaaatgtagatgataggccatatttagcagttattggtggagcaaaagtgtcaaccaagcttgaacttataaagcatataagtgatgtagcagaccacattattgttggaggaggtatcgcaaatacttttttaaaagcttcaggaaaaaatataggcacatcattagtagaggattcaatgttagatgtggcgaaaaacatacttaatcagaagaagataatcttgcccaaaagagtagtgacatcaaagacatttgaaggagagaatgttaataaaaaatcaattcatgacattttagaaagtgagatgattctagatgcctgtttggagcaagaagtcatctctttgattcatagtgcaaaaacaattttatggaatggccctatgggagtattcgagaatatctactttgaagagggtactagagagcttgcaaaagctatagcaacatccgaagccttttctatagctggaggaggagaaacattatcagcaattaataaatatattaaatcagatgatgtatcatattgttctactggcggaggggcctttttagaatttatggaaggtaaagttttgccgtcaattgaagtattaaattcaaaagaaatagggagttaga

SEQ ID NO: 250426 - DNA, 877 bp, Unknown
  Bacterial polypeptide expressing nucleotide sequence isolated from the Sargasso Sea
atgattaatttatcatctttaaatatagcaaataaaaaccttgttattcgggttgatatgaatgtgccaataaaagatggcaggattcttgattcaaccaggatagaagcttgtatacccacaattaattatgcgctgaaaaataatgcaaaagttttattagtaagtcatttaggtagaccattggaaggtaattttgaagaaagcttttctttaaaacctgtagcaaattttttgggtgaagtaattaaaagttctatagatgtaattgataaattggactcggtagatttttttaaatcttcatcaaatattcaaatcttagaaaacgtaagattctttgatggagaaaaaagaaactgcgagaaattaggaaagaaattaggctgtcttggagacatatatgtctttgatgcattcggaacagcacatcgagaacaggcttcaacacactcagcaattgaaaatgcttatattgcctgcgctggcctattgttagaaaaagaagaaaaatttttatcacaagctctaaaaaaatatgacaggccttatctagcaattattggtggagcaaaagtctcaactaagcttgcgctattaaaacaaatcaatgaagttgctgactatattattgtgggcggcggcattgcaaatactttcttaaaatcttcaggtttaaatgttggtaattcacttgttgaggactcaatgctagaaacagctaagacaattcttgaaaaaggtaagattgtgcttccaaaaaaagtagttacatcaaaaacatttgaaggagaaaacataaaagaggctacgattaacgaagtgaataatgatgtaatgatcttagatttatttctagaacaggaatcaaaagctt

SEQ ID NO: 250427 - DNA, 1180 bp, Unknown
  Bacterial polypeptide expressing nucleotide sequence isolated from the Sargasso Sea
atgagaagcattattaacgaaaaaaacctaaataataaaaaaattttactaagactagacttaaatgttcctttggaaaaaggcaagataacagacacaacaagaatagacaaaattcttcctacaataaattttttgattaaaaaaaaagctaaaattataattttatcacatgttggaagaccaaaaggtaaaattgttaaagatctctccctaaaaccaatttgcgaagaattacaaaataaattaagaaaaaaagtgaaacttataagtgaaaatattaaggaaataaaaagtaaaaatttcttcagtgactacaatgaaaatatttttattttagaaaatattagattttattcagaggaagaacaaaatgacaacaagtttgctgaaatgctgtcaaatcttggagatatatatgtaaatgaagctttctcttgttcgcatagagctcatgcctcaatttgtgaaattccaaaattcttaccctcgttttctgggttacaactagacttagaagtgaatgcacttaacaaaataacttctgaaattaccagaccaataacttgtattattggggggtcaaaaatttcaactaagattaatgttattaaaaatttaattcctaaatttgaaaatattataattgttggaggtatggctaataattttattgaatattttggaaatagtgttggaaaatctattaaagaaataaattgcaataaaatagttgaagaaatcatttcactttcaaaaaaagaaaaatgtaaaataatctatccagaagatgtgatcgtatcaaaaaatttaaatggatctcctcaaaagaaagaattgaacgaaatattgtttgatgaaatgatattagatattggtccaaaaactatagacaaaataacaaaaattattgataacagtaaaactatactttggaatggacccgcaggatattttgaaaatctaaattttgcttatggaagtattcaaatagcaaaaaaaataattgaaaataataaagcaaataaaattttttcagttgctggtggaggagacacagtttctttattaaattatttaaatgctgttaatgagtttaattttgtttcaactgcaggtggagcttttttagaatatcttgaaggtaaaaaccttcctggtataaacgcattaaattaaa

SEQ ID NO: 250428 - DNA, 1162 bp, Unknown
  Bacterial polypeptide expressing nucleotide sequence isolated from the Sargasso Sea
atgatattacctggattgagcgattttcaatttaaagatcagcgtgttctgttgcgtctagatttaaatgccccaatagaagatggtttagtcagtaatgatgaaaggttggttagatctcttccaaccattaatcatattttacaaaatcaaggtaaacttatagtaatcagtcacttggggagacccaaagaaaatggcaaactccagacagaattttctttaaggccagtcgttaaacgattagagcagttattaaatagatctattatcctgattagtgacataaataaattaccttcgatagcaagtggcgagatgattattcttgaaaatgttaggtttttagaaggagagaaatctaatgatcctgttctgtctaggaagttagctgatcttgcagatatttttgttatggatgcttttgcaacttcacatagagcacactcatccactacaggagtaatcaagtttagtaaaaaagcttgcgctggctttcttctgcaggaggaggtagatgcattattaaaattcactagcaataataatggaaagtctcttgctgtattggggggagcaaaaatatctactaaattagatttgattaattctttatgcgcgaagatggataatgtaattttgggaggcggcattgctaatacttgtttgctggctcaaggcttttctgtaggaaactctctagttgaagaaagcatgcttgaagaggctttagaactctcaaagagaaataacgtgattcttccaaaaatggttgtgactgcagataacataaaacaaaaagggactataaaaagtgttgataatataagagaagatgaatcaatttttgatatagctcccgaaagttttgaagagcagcaagatatatttcgcaaggcagatacaattttatggaatggaccaatgggcttgtttgaagaaattgcctttgctcaaggaactaatcaaatagctaatatgattgtttcgtccaaggggttttcagtagctggtggaggcgatactatatctgcagctgataaagcaggtgtattaaaagagctcgattatgtttcaacagcgggaggagcatttttagagtttattgaaggaagaaatttgccttcactagaagctttacaattgaaatgggcaaaatgat

SEQ ID NO: 250429 - DNA, 373 bp, Unknown
  Bacterial polypeptide expressing nucleotide sequence isolated from the Sargasso Sea
ttgaaagtaatatttcgatcaaatataaaagttgaagatttccaagaaaatcatattggagtagatattggaaatgaaaccttatctgaattttcaagcatattaaatgcttcaaaatatattttttggaatggaccgatgggtatttttgaaattgatgaatacagtactggaacgaaagaaattacaaaagttatatcaatgtcaaaagcatattcctctgttggtggaggagactctgtgagtgctattaacaagttttcagacagaaaaaagtttgatcatatttctactggtggtggcgcctcattagagtttttagaaggtaaaaaattacctggagttaacatttataaaccacttataatttgat

SEQ ID NO: 250430 - DNA, 1207 bp, Unknown
  Bacterial polypeptide expressing nucleotide sequence isolated from the Sargasso Sea
catggcgaagcgttccctggccagcctcaatgccggagacctgagcggcaaacgcgtcctcgtgcgggttgatttcaatgtgcccctgaatgatgccggtgccatcaccgacgacacccgcatccgcgcagcgctgcccacgatcaatgacctgaccggcaagggcgccaaggtgatcctctccgcccacttcggacgccccaagggtcaggtgaacgacgccatgcgtctcacccctgtggccgcccgcctgagcgagctgctgggcaagcccgtgatcaagaccgacagctgcatcggccccgacgccgaggccaaggtggcggccatggccgacggagacgtggtgctgcttgagaacgtgcgcttcttcgctgaggaagagaagaacgaagccggcttcgccgagaagctcgccggtctggccgaggtgtacgtgaacgatgccttcggtgcggcccaccgcgcccacgcctccaccgagggtgtgaccaagttcctcaagcccgccgtggccggcttcctgatggagaaggagcttcagtacctccagggcgctgtcgatgaacccaaacgtcccctcgctgccatcgtcggcggttccaaggtgagctccaagatcggcgtgctcgaggccctgatcgacaagtgcgacaaggtgctgatcggcggcggcatgatcttcaccttctacaaggcccgcggcctctcggtgggcaagagcctggtggaagaagacaagctggagcttgccaaggagctggaagccaaggccaaggccaagggcgtcgaactgctgctgcccacggatgtggtgctggccgacaacttcgcccccgatgccaacagccaggtagccgatgtgaccgccatccccgacggctggatgggtctggacatcggtccggatgcggtgaaggtgttccaggccgccctgggggattgtcagaccgtgatctggaacggccccatgggcgtgttcgaattcgagaaattcgccaccggcaccaacgccatcgccaccaccctggctgagctgagcggcaagggctgctgcacgatcatcggcggaggtgactccgtggctgctgtggagaaggccgggctcgccgagaagatgtcccacatctccaccggtggcggcgccagcctcgaactgctggaaggcaaggtgctgcctggcgttgctgccctgaacgaggcctga

SEQ ID NO: 250431 - DNA, 1210 bp, Unknown
  Bacterial polypeptide expressing nucleotide sequence isolated from the Sargasso Sea
atgtcaaaattatctctttccagtcttgataagacacatttagaaggaaaaaaagttcttgtaagagtagattttaatgttccattaaatgaaaatggtcaaataaccgacgatacgcgtattcgtgcagcgatcccaactattgaatatcttattaatcattccgcaaaagttattttagctgctcattttggcagaccaaagggtcaggtaaatgaaaaaatgagattaactccagtagcagcaagattaagtgaattgttggggcaaaatgttgctcttactaacagttgtattggtgatgaagcagttgcacaatcaaatagcttatctaatggagatgttcttttacttgaaaatgttcgtttttttggtgaagaggaaaagaacgacctggagtttgctaaaaaattagcatcacatgcagatatgtatgtaaatgatgctttcggtgctgctcatagagcgcatgcttcaactcagggtgttacaaattatttaagtccctcagtagctggatttcttttagaaaaagaattgaaatacctacaaggagctgtagattccccaaatcgtccattggctgcaatagttggagggtcaaaggttagtagcaaaataggagtacttgattctttactagataagtgtgacaaaatcatgattggtggaggtatgattttcactttttataaagctagaggtttagatgtcggaaagagccttgtagaagaagataaactcgagcttgctaaagatttagaagcaaaagcaaaagcaaaaggagtagagttattattacccaccgatgttgttttggctgatgaattttctcctgacgccaatagtaaaatatctcaaattgatgccattagtgggaattggatgggtctagatattggtccagattccattaaagtttttcagaatgctcttgcagaatgtaagacaattatttggaatggtccaatgggagtttttgaatttgataaatttgcagatggtacaaatgcaatagctacgactcttgcggacttaagtgctttttctgaagtttgtacaataattggtggtggagattcagttgcagcagttgaaaaagcaggattagctgagaaaatgtctcatatatctaccggaggtggggctagtttggaacttttagaaggtaaaactttaccaggtgtggctgcgttaaacgacgcttagg

SEQ ID NO: 250432 - DNA, 1119 bp, Unknown
  Bacterial polypeptide expressing nucleotide sequence isolated from the Sargasso Sea
aatgagattactaaaagaccaagatcttagtaataagaatgtggttgtgagattagatttaaatgttcctattcaagacaagcaaattatagattcaaccagaatcatttcttcagtacctacaataaaatatctcgtagataaaaattgtaaagtccttttaacatctcatcttggcagacctgaggaaggaaagtttgatcaagatttctcaatgtctccggtcgctaaaaaattatctgaaatcttaaatcatgaaattgatcttattgattccctagacagcagcgatatttttaatacaactcaaatacaactattagaaaatttaagatttcttatcggtgaaaaagacaataatgaaaagctaggcaatcagctagcaaataaaggagatgtttatatatttgatgcttttgggactgctcaccgtaaacaggcttccacacactcagctattcaacaagcaaagttttcatgtgctggacttctcttagagaaagagattaattcacttaataaagctttaacctctattgaaaacccattcactgctgtaatcgcaggttcaaagatttcaacaaagcttgaacttatagctcatttaaactcaaaagcagatttcattgttgttggcggcggtattgctaatacctttctgaaatctcagggcttcgatgtcggagagtctttggtagaaaatgacatgattgaaattgctaaagagctttttaattccggcaaaataatattacctaataaagtcattgttgctgattcaattgatagcaattcctcaactactaaaaatatagattctgttagtggctcggataagatttttgatattaatttaactagcaatatgtcggaaatccttaagaactcaaaaactattttatggaatggaccaataggagtttttgaaaaagagccttttcaaaaaggcacacatcaattagctaaaactattgcagggtctgaggctttttcacttgctggaggtggagaaactatagctgctataaataaatttattaataaagatgaggtatcatactgttcaaccaggtggaggagcttttttagaatatatggaaggcaaattactcccgtcaa

SEQ ID NO: 250433 - DNA, 1138 bp, Unknown
  Bacterial polypeptide expressing nucleotide sequence isolated from the Sargasso Sea
aatgagattactaaaagaccaagatcttagtaataagaatgtggttgtgagattagatttaaatgttcctattcaagaaaagcaaattatagattcaaccagaatcatttcttcagtacctacaataaaatatctcgtagataaaaactgtaaaatccttttaacatcacatcttggcagacctgaggaaggaaagtttgatcaagatttctcaatgtctccggtcgctaaaaaattatctgaaatcttaaatcatgaaattgatcttattgattccctagacagcagcgatatttttaatacaactcaaatacaactattagaaaatttaagatttcttatcggtgaaaaagacaataatgaaaagctaggcaatcagctagcaaataaaggagatgtttatatatttgatgcttttgggactgctcaccgtaaacaggcttccacacactcagctattcaacaagcaaagctctcatgtgctggacttctcttagagaaagagattaattcacttaataaagctttaacctcaattgaaaacccattcactgctgtaatcgcaggttcaaagatttcaacaaagctagaacttatagctcatttaaactcaaaagcagatttcattattgttggcggcgggattgctaatacctttctgaaatctcagggcttcgatgttggagagtctttggtagaaaatgacatgatcgaaattgctaaagagctttttaattccggcaaaataatattaccaaataaagtaattgttgctgattcaattgatagcaattcctcaactactaaaaatatagattctgttagtggctcggataagatctttgacattaatttaactagcaatatgtcggaaatccttaagaactcaaaaactattttatggaatggaccaataggagtttttgaaaaagagccttttcagaaaggcacacatcaattagctaaaactattgcagggtctgaggctttttcacttgctggaggtggagaaactatagctgctataaataaatttattaataaagatgaggtatcatactgttcaacaggtggaggagcttttttagaatatatggaaggcaaattactcccgtcaattgaggctttaggaggctaa

SEQ ID NO: 250434 - DNA, 1009 bp, Unknown
  Bacterial polypeptide expressing nucleotide sequence isolated from the Sargasso Sea
atgaaaaaaaaacaatttattgaaaaactgaatcttgaaggacagcgggttttgacacgtgtggattataatgtccctttggatgataagcaaaaaatagcagataatagtcgtatcaaagctacattgcctacagtaaattatatcattgaaaatggtggtagggctgttctaatgtctcatcttggacgtcctggaggtgagaaaatagagagcttgagtttaaaaccggcagctgtggaattgtccaaactattaggtcagaatgtaaaattagcgccggattgcattggagaagaagttaataacttggtggaagctatgcagaatggagatgtggtacttttagaaaatttgcgctttcacaaagctgaaaccagtaatgatccttctttttgcgaagcattggcggaaaatggtgatatatatgtaaacgatgcctttggaacagcacatagagctcatgcatcaacaagcggagtggtctcctatataattgacagtgcagtgggatatttgatgcgtaaggaactgcagtttttgggggaagcagtagcagaacctatcaggccatttgtagcgattcttggcggcgcaaaagtttcggataaaattaaagttatcgaaaaacttttggacaaggttcagaccttaattatcggtggtggaatggcctgtacatttttaaaatctcaaggatacaaaataggtgcttcattgcttgaaaaagactccttggatttagcaaaaaatttgattcaagaggcagagcataaaggagtcgaatttttgcttccagttgatgtagtgatttcagaacggtttgataataagtcctcaaccagaacaattcccatagaggaaggtgttccggataactggctaatcttggatgtcggtcctagaagcatcgaaatatttagtcactcaatctttgaatcagggactgttttgtggaatggtccaatgggcgtttttgaaatggaaaaattttccaaaaggtacatat

SEQ ID NO: 250435 - DNA, 826 bp, Unknown
  Bacterial polypeptide expressing nucleotide sequence isolated from the Sargasso Sea
ttgttggagaatgttagatttctagaaggcgaaaagagcaataatgataaattggctaaaactttatctagcttagcagatgttgtagtttttgatgcttttgcaacttctcatagagctcatgcatctacttctggaattatttctcatagtaaagaagcttgtgctggatatttgatagaagaagaactttattcactaaataaagctttttctgactcaaaaaggccttttgtagcagtaataggaggctcaaaagtatcaacaaaactgggtctcttggattccctagccagtaaagtagatttattattattaggtggagggatagcaaatacttgcttactttcacaaggaaaaagtattggaaattcattagctgaagagagcatgttgcatgaagcaaagcgcctttcagaaaataaaaaagtgataattcctgataagtttatggttcttacagaaaatggaatggtgatcgaaaagacaacagatgagattgaagatacagatcagatttttgacgtatctgaaaattttttcagagagaatgacgacttatttaaagaagcaaagacaataatttggaatggtcctataggaatgatagaggatgatcgattttcaataggcacagtaagacttgcaaaaattatttcaagctctaatgctttttctgtcataggtggcggagataccatagcgggcgctaagaaagctaaagttttggataaggtaggttatgtatcgactgcaggtggtgctttcttggagtttttggaaggcaagcaattacctgcaattgcttgcttagaaaacaaataac

SEQ ID NO: 250436 - DNA, 1186 bp, Unknown
  Bacterial polypeptide expressing nucleotide sequence isolated from the Sargasso Sea
tatgtttttcctatctaatcaaagttttaaaaaccagaaggtcctaatacgccttgacctaaacgtacctctaggcgacgatttgagtgttacagattcaacaagaataaaggcatccaaagagactgttgactttgttattaataaagggggggcatgtattttaattgcacacctaggtcgtccaaaaggaaaagataaaaacctttctatgttaaatatcttaaaagatattagcaagtgtttcggaaaaaaaattcagtttgttaacgattgcattggagatgaggttgaacaagcaatctcaaaaatgaataatggagacattttattactagagaacttaaggtttcatgaagaagaaacaaatggggatgaaggatttgcaaaaaaattatcaagactaggcgattcatatataaatgatgcttttggcacgagccacagggagcatgcctctacatttactattgcaaaacacttccctaataaaaaatatggaggaatacttttacagagagagctagatgttataggaaagattttagataaaggaaaaccgccaattctctctattctaggaggggctaaagtttcctctaaattaaagattattaataaccttgtagagcaagtagataaaataattatttccggaggaatggcatttacatttattaaagcgaatggaggagaaattggagattcactttatgagccatcattactcaatgaagctagattaattttggaaaaggccaagaagctaaaaacagaaattcacctccctttagatgttttagcagcaaaagacaaaaataatattggagaaacagaagtttttaatattgacaagattgagccaggatggatgggaatggatatctccagaaaatctattgctgcttttgagaaagttataatgtcaagcaatacagttttctggaatgggcctatgggtgtttttgaaaaggaaaaatttagtcaaggaacgatgggaatatgcaagattttaaaaagagccaaagaagacaacaaatatgtgattactggtgggggagattcaattgctgcattaaaaaagtttggaaaaacctcttgggttaattatatttcgacaggtggaggagcaatgttagagagccttgagggaaaagaattgcctggagtaaaagcgctaaattaa

SEQ ID NO: 250437 - DNA, 680 bp, Unknown
  Bacterial polypeptide expressing nucleotide sequence isolated from the Sargasso Sea
tatgacagatcttcactcaatcgatcttaagaataagtatgttgggctaagagtagatttaaatgttcctttagaaagcggtgaagtattaagccctgatagattgtcagctgctttgccaacaattctacatattcttgaacacacagaaaatctctgtctaataagccaccttggtcgtccaaaagaggatgattatgaccaagccctttctttgaaaccaataaaagagtggtttgagaaaagattaaacaaaaaaatatctttagagaatgaaattaaaaaaagcgagggaataaagatgcttgaaaatattcgttttttcaaaggagaaaatgaaaactctgaaaacttaggacaaaagcttgcagatatttttgatgtttacattatggatgcctttgcaactgcgcaccgtaaatctgcttcaacttatggagctataattaaatcaaagattaaatcacccggacttttatttagcaatgaagtcagaaatttaaaagaaattcttaatgagccggatcgattagtaagcataattggtggttctaaggtttcaagtaagcttgaagtggttgaaaatttacttcagaagtctgaaaagattattgttggaggtggcattgctaatactttccttaaagcagttggatacgaaattggagaatcaatttatg

SEQ ID NO: 250438 - DNA, 1186 bp, Unknown
  Bacterial polypeptide expressing nucleotide sequence isolated from the Sargasso Sea
atgtcagttattaagatggccgatatcgatttaacagggaagcgggtattgatccgcgaagatttaaacgtaccggtgaaaaacggcaaagtcacttcagatgcacgtttaaaagctgctattcctaccatcgaattagcgcttaaaaaaggcggcaaagtgatggtgtgttctcacttaggtcgtcctgatgaaggtgtatacgccgaagaattctcgatggcacctgtggttgattatttaaatgccgctttatctgtgcctgtacgtttagtcaaagagtacctggacggtgttgaagtgaataccggtgaagtggtggtgtttgaaaacgtgcgctttaacaaaggcgaaggtaaaaacgacgaaaccttatcgaaaaagctggctgctttatgtgatgtgtttgtcatggacgcttttggtacagcacaccgcgctcaggccactactcatggtgtggctcaatttgcgccaattgcttgtgctggtcctttgttggctgccgagttagatgcattagccgcagcgcttaaaaatccgaaacgtccattggttgctattgtaggcggctctaaagtgtccactaaactgacagtacttgagtctttatctggtattgtcgatcagctgattgttggtggcggtatcgctaatacctttattgccgctcagggctatcaggttgggaagtctctggttgaaaccgaccttattcctgaagccaagcgtttaatggcacaagccaaagccaatggcggctctatccctgtgcctacagatgtggtgacaggcaaagcttttgccgaagacacgcctgcaaccaccaagtctgttgctgatattagcgacgacgatatggtgtttgatattggtcctgacagcagcgctgcgctggtcgatattctgaaaaatgccggtactattgtttggaatggccctgtgggtgtgtttgaatttgcttcttttgaacaaggtacgaaagctttagctcttgctattgcagacagtcaggcgttttctatagcaggtggtggcgataccttagctgctattgataagtatgaattagctgacaaaatttcttatatttctacaggtggcggcgcctttctggaatttctggaaggtaaaactttaccagcagtggaaattttggaacaacgcgctaaaaccacagcataaa

SEQ ID NO: 250439 - DNA, 469 bp, Unknown
  Bacterial polypeptide expressing nucleotide sequence isolated from the Sargasso Sea
atgtctgttatcaagatgactgacctggatctggcgggcaaacgcgttctgatccgtgctgacctgaacgtgccggtaaaagacggcaaggtcacctccgatgcacgtatcgtggcgactctgccgaccatcaagctggctctgaaaaagggcgccaagctgatgatcacctcccatctgggtcgtccgaccgaaggcgagtacaacgaagaattctccctggctccggttgtcaactatctgaaagacgctctgtcctgctcggttcgcctggccaaggattacctggatggcgtagaagtcgccgaaggtgagctggttgtgctggaaaactgccgcttcaacaaaggcgagaagaagaacaccgaagagctggccaaaaaatacgccgccctgtgtgacgtctttgtaatggatgcgttcggtactgctcaccgcgccgaaggctccacatacggtgtggcccagt

SEQ ID NO: 250440 - DNA, 1198 bp, Unknown
  Bacterial polypeptide expressing nucleotide sequence isolated from the Sargasso Sea
aatgctagatgtctctaatctaaaaaagattactgagaaaaataaaactgtattaataagatttgatcttaacgttccactaaattctattgatgaatatattagtgatagaataatcagaattaaaaaacctattttaaatctgttgcatgaaaatcataaagtcattattttatctcacttgggtagaccaaaaggagaaataaagaatgaactatcattaaagcaagtagttccccagctagaaaaagttcttgaaaagaaaatcaatttcttaccagattgtatcggaaacgaaataaaagataaaattaattcccttgaagatggaacagttattttattagaaaactgtagattctataaagaagaggaagagaatgatcatgactttgcaaaacagttatccgagttagctgatgtttatataaatgatgcatttgcctgtgcgcaccgtgcacatgcatcaattgaggcaatatcacatttcatgccttcatattgcggcgatcttcttgaagaagaaataaataatttacaagaagtgattcatgaacctcttagccccgctctcacaataataggaggttctaaaatatccacaaaaattactgttcttaaaaatttatcaaaaaaaatggacaccattgtcatagctggcggtatggcaaataactttttgaaatatcatgggtataatatccaaaattcattgcttgaggaaaatgtcgaccacttaattacagaaatattggatttttcatcaaaaaataattgtaggttagttttgccaattgatgtggtcacagcagataaaatttcagacaaggcaaacacaaaagagtctgatattgataacattgaaaagcaaaatatgattctggatataggcaaaaatacattggagttaataaaaaatgaaattagtaaatctaaaactgtattctggaatggtccacttggagtgtttgaaacttctccatttgacaaaggtactctagaaattgcaaattttattggcactctaactgaaaataataaaattaggtcatttgctggtggaggtgatacaatttctgcattggacttagcccgtgtgaaagataaattttcttatgtttctactggcggtggggcattacttgagctaatagaaggtaagaaattaccaggcctggtcgcattaggaattttataa

SEQ ID NO: 250441 - DNA, 606 bp, Unknown
  Bacterial polypeptide expressing nucleotide sequence isolated from the Sargasso Sea
gtggatctaaaatcgactcgaaattatccttgatagatagattcttgaatattgcagatcgtataataataggcggtggtatggtgtttacttttttgaaagcgcaaggaaaaaatataggtaactctatctatcaagagaatcttgttagcgctgcgtttgatatcttagaaaaaactaaaaattcacaaaaattagttttcccttctgattacttatgcaatacatctatcgaaagtaaaaaaaagccagttatattttcaaaaaatgaaatcaaagatgaatatatgggcctcgatataggtccacgttcgataaaaaggtttcaatctatattgaacgatgctgaaactatcttttggaatggccctatgggggtctttgaaaataaaaattatgaagaaggtactaaagcgctagcatcttctattgctgagcttactgaaaaagacgttgaaagtataattggcggtggggactctgcctcagcattaagaaaatacaacctcaccaaaaatgttacgcatctatcaacagggggaggtgcttctttagaactaatttcaggaaaaacgcttcctgcattacaaagattggaaatataat

SEQ ID NO: 250442 - DNA, 1117 bp, Unknown
  Bacterial polypeptide expressing nucleotide sequence isolated from the Sargasso Sea
aatgaaatatataaaatatcaagaaaatttaaacggtaaaataattttattaagacttgatttaaatgttcctttaaaagatggagtaatcacagatgagactagaatagacaaaatattgcctataattaaatttttattagcaaataaagctaaaattttagtcatttcgcatgttggaagaccaaaaggcaaatcaattaatagtctttcactaaaaccaatatgcgagaatatagaaaacaaaataaacaataaaattaagttaattaatgaaaatatatttaaattaagaaaaaatgatttttttaaagacccaaaagatcaaatagtttttttagaaaatatcagattttatgaacaagaggaaaaaaatgacattattttttcagaacatttatcaaaacttgcagacatctatgttaatgatgctttttcatgctcgcacagagaacatgcgtcggtaagcagtatcactaggtttattccgtcttttgcaggattgcaattacagaacgagataagtgcattaaaaaaaatcactagcgaaatagaaaaaccaatttcatgtattgtgggtggttctaaagtttcaacaaaaattggtttgataaagaatttaattccaaagtttgataatattatacttactggaggtatggctaataatattttaaattacaaaggtcatcctataggaaaatctattaaagaggataactgtaatgaaataatagatgaaatatttaaatttgcaaaaattcattcatgttcaattatttatcctgaagacgtagctgtaggtaaaaatatggaggacaaagcacgagtaaaaaaattaaatgaagtaattaatgatgatattattttagatattggaccaaaaactatagataaaataaaagaaataattgattcaagtaaaacaattctctggaatggtccaacaggatattttgaaaattctaactttgcaaacggttcttatgaaattgcaaaaaaaattgttgaaaataataaaaagaatttaatttattctgttgctggtggtggtgatacaattgctgttttaaataaattgggagtagtaaataattttaattttgtttcaactgct

SEQ ID NO: 250443 - DNA, 775 bp, Unknown
  Bacterial polypeptide expressing nucleotide sequence isolated from the Sargasso Sea
atgcaaataccaagcatggaaacattggatttgcagggcaagaggaccatgatccgattggatctcaatgtgccaatcaaagacgggttagtgaccagtgatgccagaatcatggcttctctttcaaccattcaaatggcacttgataagggcgcaaaagtcatcttactctcacatctgggaagaccagatcctgatcatttagatggaagcttttctcttgagccggtcgcaaataggttaaaagagatcttgaataaaaatatttcttttcaacccgattggcttgagggaatcaatgatcaatccaatgacatcatactctgtgagaatgttcgttatcaggcgggtgaaaaaaagaatgatgagaccctgtctcagaagattgccaacctatgtgatgtctatgtcatggatgcattcggagcttcacataggaaacattcaagcacatatggcgtgcttcaatatgcgaaagagggatgcataggtccgcttttatcaaatgaagtgagctcaataaaaaaagcgattgatagaccaactgctcctgtgacagcgatcattggtggtgcaaaggtctcttcaaagttgggtgtgattgagaggttctcaagtttttctgatcacgttatcgtaggaggcggcattgcgaacacatttcttcttgcaagcgggaagcagattggtgcttcattgggtgagccagaaatggtcgatgcagcgaataaaatccttcaaatggaaaatgtaaatgttcctcttccagtagatg

SEQ ID NO: 250444 - DNA, 772 bp, Unknown
  Bacterial polypeptide expressing nucleotide sequence isolated from the Sargasso Sea
atgattaacctttcttcactagaaataaaaaacaaaaatctcgttattcgagtagatatgaatgttccgatatcaggcggtaaggttttagatgcaaccagaattacagcatgcataccaacaattatttatgcactaaaaaataatgcaaagattttattagtaagtcatcttggtaggcctgctgaaagtgttttcgaagatcaattttctttaaagccggtcgcagcatgtctaagtgaaattattgatgagtctgtagaggttgttgatcaacttgactctaaaaaaatatttaatagcacatcaagagttcagattcttgaaaacattagattttttaagggtgaaaaagataactctgatgagcttggtagcaccttgggaagtttaggtcatatatatgtttttgatgcatttggtactgcacacagaaagcaagcttctacacattctgcaattaaacatgcttctattgcatgcgctggtctattaatggaaaaagagaatagttttctttcacaagcattaaatgtagatgataggccatatttagcagttattggtggagcaaaagtgtcaaccaagcttgaacttataaagcatattagtgatgtagcagaccacattattgttggaggaggtatcgcaaatacttttttaaaagcttcaggaaaaaatataggcacatcattagtggaggattcaatgttagatgtggcgaaaaatatacttaatcataagaagataatcttgcccaaaaggaagtagt

SEQ ID NO: 250445 - DNA, 451 bp, Unknown
  Bacterial polypeptide expressing nucleotide sequence isolated from the Sargasso Sea
agaaatagaaaatatttttaaaaactctaatgatcactcatgttcgataatttatccaaaagatgtcaaaattggaaaaagcatggatgacaaatcccaaattaaagacttaaccgaaatatcagccgatgattttattcttgatattggcccaaaaactttaagggaaattgaagatattatcgaaaatagtaaaactgttttgtggaatggtccggcaggttattttgaaaatccaaattttgctttaggtagttatgaaatagcaaaaatgattattaaaaaaaataaagataattcaattttttctgttgcaggaggtggtgatacaattgcagtgttaaaccagataaacgcaataagagattttaattttgtttcaactgctggtggagcttttttagaatatcttgaaggcaaagaacttcctggtataaaagctctaaattaa

SEQ ID NO: 250446 - DNA, 1156 bp, Unknown
  Bacterial polypeptide expressing nucleotide sequence isolated from the Sargasso Sea
aatgattaatttatcttctttagatatcgcaaataaaaacctagtaattagggtcgacatgaatgtacctttgaaagatagtaaggttcttgatgcaacaagaataaaagcctgtttgcctacaattgaacacgctcttagtaacaatgcaagaatcttgttaattagtcatcttggtaggccttctgaaggaaattttgaggaaaaattctctttgcagcctgttgcagaatatataagcaatctttttaatgaaaaatgtgagctgattaattctctagaatcaaaagatatttttaatggcaaatttaatgtacagcttttagaaaatattagattttttgaaggtgaaaaaagtgattctgcaaagcttggaaaaatattagcaagtcttggtgatatttatgtttttgatgcttttggtactgcacatagagaacaggcatctacgcactcagcgatagaacaagcaaacatagcatgcgcaggctttttgctagagagagaaaacaggaatctaacgaaagtcctaaataattatgaaaatccatatattgcggttattggaggagcaaaagtatcaaccaagttagaattaataaagtctattaataataaagcacaaaatataattgttggtggaggtatagctaatacttttatcaaggctgctggatttaaaattggacagtcactatatgaagaatctatgttggacattgctaaaagcattcttgagaaaaataaaattgtattacccgataaagttataacttcagagacttttgagggtaaaaatattcaaaaaaaatctcttgatgagattgaagataatgaaatgattttagatttactgcttaaagaggaaacttattcaattttggattctgctaaaactattctttggaatggtccaatgggtgtttttgaaaataaattattcgaacaaggaacaagagatttatctgaaacaatagcaaaatcttcagcattttctattgcaggcggtggagaaacactgtcagctattaataagtatattaatacagatgatgtatcatattgttctacgggtggaggcgcttttttagaatttatggaaggtaagactcttccatcaataagtgctttaaacgctaaaaatacggagagatag

SEQ ID NO: 250447 - DNA, 984 bp, Unknown
  Bacterial polypeptide expressing nucleotide sequence isolated from the Sargasso Sea
ttattaatgacctttcgctaaaccaatatgtgaagaatttaggaaaaaaattaaatcaaaatgtgaaacttatttctaaaaatataaaagaaataataattaaaaacttattcaaaaataatgatgaaaaaatcattatgatggaaaatattagattttattttgaagaagaagctaacgattatgaatttgcaaaaaaccttgcaagatttgctgacatttatgtaaatgatgcattctcttgttcccatagagcacattcatctatctgtaaaattccaaattttttaccatcttattctggcttgcaacttgacaaagaggttaatgctttagaaaaaattacatcagaaattaaaagacctattacttgtataattggaggttctaaaatctcaactaaaataaatttaataaaaaatttaatacctaaatttaacaatataataattgtaggtgctatggcaaataacataattaaatacatggggcataatattggaaaatctttacaagaagaaaactctaatttaattattgaagagattttttctctttcaaaacaagagaaatgtaaaattatatacccagaagatattgtcgtagcaaaaaattttaatggagatccccaggttaaaaaattaaatgaaatttcatcagatgaaatgattttagatattgggccaaaaactattgaaattattaagaaaattattgatgaaagtaatacaattttatggaacggtcctgctggatactttgagaatccatactttgctaatgggagtattaaaattgcagagaagttaatcgaaaaaaacaaagctaacaaaatttattcagttgctggtggtggagatacggtttcattattaaatagtttaaatgcaatttataactttaattttgtttcaaccgctggtggagctttcttggaatatcttgaagggaaagaacttcctggtataaccgcattaaactaaa

SEQ ID NO: 250448 - DNA, 529 bp, Unknown
  Bacterial polypeptide expressing nucleotide sequence isolated from the Sargasso Sea
aatgagattactaaaagaccaagatcttagtaataagaatgtggtcgtgagattagatttaaatgttcccattcaagacaagcaaattatagattcaaccagaatcatttcttcagtacctacaataaaatatctcgtaaacaaaaattgtaaagttcttttaacatctcatcttggcagacctgaggaaggaaagtttgatcaagacttctccatgtctccagtcgctgaaaaattatctgaaatcttaaatcatgaaattgatcttattgattccctagacagcagcgatatttttaagacaactcaaatacaactattagaaaatttaagatttcttatcggtgaaagagacaataatgaaaagctaggcaatcagctagcaaataaaggagatgtttatatatttgatgcctttggaaccgctcaccgcaaacaggcttccacatattcagccattcaacaagcaaagttttcatgtgctggacttctcttggagaaagaaattaattcgcttaataaagcttta

SEQ ID NO: 250449 - DNA, 814 bp, Unknown
  Bacterial polypeptide expressing nucleotide sequence isolated from the Sargasso Sea
atgattaatttaacatctttagatatcacaaaaaaaaatcttgttataagagtggatatgaatgtgccaattaaagatggtattgtccaagatacttctagaataatcgcatgtattcctacaattaaacttgctattaaaaataatgcaaaagttttactaatcagtcacctaggaaggccagaagaaggaaattttgaagaaaagttttcaatgaaaccaattgttgaatcattaggtaaaattttaaatgaagaaattgatcttttggatagtttggactctgaagaaatttttaatagcgcatcaaatattcagattttagaaaatataagattttttcaaggagaaaaagtcaatgatatagatttgggtaaaaaattagcagatctgggtgatatttatgtttttgatgcatttggtacttcacatagagagcaggcctcaactcattctgctatagatcaagcaaaaattgcttgcgcaggattattgcttgaaagagaaatagattttttaaccaaagcacttaagaattataaaaatccatatatagctatcataggcggggcaaaagtatctaccaagctcgagcttataaagcatataaacaatgttgcagacaagatagttgttggagggggtattgcgaatacttttattcaggcatctggacttaatataggaaaatctcttattgaggaatcaatggttgatattgcaaagagtattttagataaaggtaaaatcatattgccaaaaattgctatcacttcagaaagtttgaaggaaaaaatgttaataaaaaattgat

SEQ ID NO: 250450 - DNA, 988 bp, Unknown
  Bacterial polypeptide expressing nucleotide sequence isolated from the Sargasso Sea
agttacggtgctatcgcacctcggacgtccagaagagggtaaatttgatgaggcattttctttagctcctatcgcacaaaggctcagtgagctgttgtctgttcccgtaattcttttgaaagatatcgagcagtctaaaaccctctccaaaggacaaattggtctgatggagaacgttagattttttgctggagaaaaaggcaacagcgatgagctcggcagaagaatggcagcttgctgcgatgtttttattatggatgcctttggatctgctcatagagctcatgcctctacgaattctattgcaaagcacgtagaagtcgttgtgcctgggtttttgatggagtccgaattaaaagcactaaatggagttgtacagaacgccaaaacgcctgtggttgctgttttggggggtgcgaaggtatcttccaaacttacgctgttagaaagattttccgaaatcagtgacaagatttttgtcggcggaggaatagcaaatacgtttatagcggcttctgggcacgggataggaaagtctctctacgaagagactatgctggacgcggcgaggaaacttctgtcgaaaacagatatccctatcccaaaagatgtgatggtggcgaagtcctttgactcgagcgccactgctattttgaggccgatcgatgaagtttatgaagacgagatgatcttggatatagggcccgtgacagcgagagaatggtcctcgactattgaggaatctgggaccattatctggaatggtcccatgggtgtgtttgagtttgaccaattcggtgaaggtacccgagaaattgctgaggcgatagcaagatcgtctgcatactctttagcaggcggaggggacactattgctgctattgacaagtacgaagtgtccgacaatgtgtcatatatatcgactgggggcggtgcatttatggaatacctggaaggaaaaaaattgcctggggttgatatcctttaa

SEQ ID NO: 250451 - DNA, 858 bp, Unknown
  Bacterial polypeptide expressing nucleotide sequence isolated from the Sargasso Sea
tccatcaggaagaagaagagaatgaattaaaattctctgaaaaattatctagtctaggggatatttattgtaatgatgcattttcggcagcacatcgagcacacgcttcaacagttggagtggctcagttcatgcagaattgtatagggcttttaatgttagaagagcttagtatcctaaaaactgttctaggtgatcctaaaaggcctttagtggccgtagttggtggtgccaaggtttccacaaagctagatttgctaacaaaccttattcacaaagttgaccatcttgtaataggaggcggcatggcaaatacgtttctctatgcgcaaggtaattctattggtaaatcactttgtgaacagacattaaaagataaagccatcagtattctggaggaggcaaaaagaaaaggatgtgacattcatataccacatgacgcaattatttcatcaacatttgaggcgcatgcaccatttcaagttgtcgatacaagaaatgtacctgacgactcacttatactagacataggtccttctacgtgtaaaaaaatatgccaagttttcaaggaatgtaaaacactgatctggaatggaccaatgggtgcattcgaactgcctccctttgataatgggacgaatatgactacagcctgtgcagctaaactgaccttaaataaaggcttgatctcagttgcaggaggtggggacacagtatccgctctcagaaaagctggggtttccaaagactttacatatgtatctctcgccggtggtgctttcttagaatggatggaaggcaagaaattacccggtatctcttgcttgaataacaaaataacttatcgtcattcatgag

SEQ ID NO: 250452 - DNA, 1192 bp, Unknown
  Bacterial polypeptide expressing nucleotide sequence isolated from the Sargasso Sea
atgaacagcattacaaataacaatcttgatctaaagggaaaaaaagttttactgagagtcgatttaaatgttccaatggaaaatggagcaataaccgaaatatcaagaattgaaaaaataataccaactataaaacttttattaaaaaaagaggctaaaattataattatgtcacacataggaaggcctaaaggaaaggtggttagtggaatgactttaaaacctatttcagaaaagttatctcttttattgcaaaagaaaatattttttagcgaagatcttgttagtgaaaacacaatattagaaataaataaaattccaaatggatctattttgatgttagaaaatattcgattcaatgaaggtgaagaaacaaatgatagccagttttcaaaacaaatatccacactgggagacatatatgtaaatgatgctttctcttgttcacatagatctcatgcttccgttgaaggaattactaagtatattccttcatattttgggcttcaaattacagaggagattaatgcattaaaaaaaataacttccaaaattgaaaaacctatttctctaataattggaggttcaaaaatttctactaaaattaaaattataaataatttaataaaaaaatttaataatattataattgtaggtggaatgggtaatacaatgttaaaacatactggttcaaatattggaaaatcagtgtgtgaaaatgagtgtggccatttaattaaagaaatattagaaaactcaaaaaaatataattgtaaaattactattcctaaagatgcagttgtatccactagtctaaacggaaatggaaaagaaaaaaatttaaatgaaatagatgatgacgaaatgatattggatatcggttcaaaaacaatatctgatattgaagcaactataaataattctaaaacaattttgtggaatggtcctgcgggatattttgaaaatccaaattttcaaaatgggacaaaaaaaatattagaattaattactcaaaaaacaaagaatgataaaattttttctgtagcaggaggtggcgaaacagttgcagcaataaacaagtttaaaaaatttaattcatttacttttgtttcaactgctggtggagcatttttagaatatcttgaaggaaaaactctacctggtataaaagcattaaatcaaaatgtctgaa

SEQ ID NO: 250453 - DNA, 1198 bp, Unknown
  Bacterial polypeptide expressing nucleotide sequence isolated from the Sargasso Sea
catgagccaagtcaagcgtcttaccgacctgatcgccgccggccagctcgccggcaagcgggtattcatccgtgccgacctgaacgtcccgcaggacgaccagggcaacatcaccgaagacacgcgcgtgcgcgcgtccgtgccggccatccaggccgcgctcgacgccggcgcggccgtgatggtcacgtcgcacctcggccgtccgaccgaaggcgaattcaagccggaagattcgctcgcgccggtcgcgaagcggctcgccgagctgctcggccgtgacgtgccgctggtgtcgaactgggtcgagaacggcgtgaacgttgcgccgggccaggtcgtgctgctcgagaactgccgcgtgaacaagggcgagaagaagaattcggacgagctcgcgcagaagatggcgaagctctgcgacgtgtacgtgaacgacgcgttcggcaccgcgcaccgcgcggaagcgaccacgcacgggatcgcgaagtacgcgccggtcgcgtgcgcgggcccgctgctggccgcggaactcgacgcgctcggcaaggcgctcggcaacccggcgcgcccgctggtggcgatcgtcgccggctcgaaggtgtcgaccaagctcacgatcctcaagtcgctggccggcaaggtcgaccagctgatcgtcggcggcggcatcgcgaacacgttcatgctcgcggccggcctgtcgatcggcaagtcgctcgcggaagccgacctcgtcgacgaggcgaaggcgatcatcgacgaagcgcgcgagcgcggtgcgtcggtgccgatcccgaccgacgtcgtgacggccaaggaattctcgccgacggccgtggccacggtgaagcaggtcgccgacatcgaagcggacgacatgatcctcgacatcggcccggacaccgccaaggcgctcgcgagccagctcgagaaggccggcacgatcgtgtggaacggcccggtcggtgtgttcgagttcgaccagttcggcaacggcaccaagacgctcgcggaagcgatcgccaaatcgtccgcgttctcgatcgcgggcggcggcgacacgctcgcggccatcgcgaagtacggcatccatgaccaggtcagctacatctcgacgggcggcggcgccttcctcgagttcctcgaggggaagaagctgccggcggtggaagtgctggaaacgcgggcggcctga

SEQ ID NO: 250454 - DNA, 1147 bp, Unknown
  Bacterial polypeptide expressing nucleotide sequence isolated from the Sargasso Sea
aatgattaacctatcatcattagatcttaataataaaaacttagtcattagagtggatatgaacgtcccaattaaagacggagacgttcttgattcaacaagaattaaggcatgcttgtcaactattgaatacgcacttgaaaataatgcaaaagttcttttgataagtcacttgggtagacccgttgaaggaaattttgaggaagagttttcactaaaacctgttgcaaatgaactaagtaaaatcataaacatggatgttgaactcattgatacattagaatctaacaaaatttttaagtcatcatcaaatattcaagttttggaaaatataagattttttgaaggagaaaaagagaactctcaagagttaggtaataaattaggatctcttggagatatatatgtttttgatgcttttgggactgcgcaccgagaacaggcatcgactcatgctgcaataatgaatgctccaatagcttgctctgggctattgctagagaaagaagaaaatttcttatcgcaggcgcttaaaaaatatgaaagaccttatattgctatcataggtggcgcaaaagtttctacaaaacttgatcttataaagcatattaatgaagtcgcagaccatattatcgtaggtggaggtattgcaaatacttttataaagtcttcaggccttaatgttggaaactcactaactgaagaatcaatgttagaaatagcaaagagcatcttggataaaggtaaaatcatactacctaatagggtattaacatctaaaacatttgaaggagaggatataaaagaaacctcaataagcaacattggtaatgatgaaatgattttagatttatacctagagcaggagacaaagactttgattaataatgctaagactattctttggaatggacccatgggagtatttgaaaattctttatttgaaaatggcacaaaggaactttctaaagaaattgctaagtctaatgctttttctcttgctggaggaggcgaaacattgtcggcaataaataaatatattaaatcagatgatgtatcatattgttcaacaggcgggggcgcctttttagaatttatggagggtaaagttttaccttctattaaagctctaaattcaaaaaaatag

SEQ ID NO: 250455 - DNA, 1177 bp, Unknown
  Bacterial polypeptide expressing nucleotide sequence isolated from the Sargasso Sea
catggcaattatcaatatgtcagatttagatctccaaggtaagcgagtgcttattcgtgaagatctcaatgtgcctgtcagcaacggcgtcgtcaccagtgatgcacgtctgcgtgcctcactccccactatcgagttagcccttgccaaaggtgcagcggtgatggtgatgtctcacttaggtcgtccaaccgaaggtgagtacaacagtgaattctccatgcaacctgtagtcgattacttggccaaagccctgtcttgcaccgtccgtttagcgaccgactatttagacggcgttgaagttgcggtaggcgaagtggttgtgtttgaaaacgttcgctttaacaaaggcgagaagaaaaacgatgaagcgctgtcaaagaaaatggcagccttatgtgatgtgtatgtgatggatgcttttggcacggctcaccgcgcagaagcctcaacgaatggtgttggtttacacgcccctatcgcctgtgctggtccattactggcccaagagttagatgctttaggtaaggcgttagataatcctgctcgtccattagttgcgattgttggtggctctaaagtgtcaactaagctgaccgtattagaaagtttatccggcattgtggatcaattagtggttggcggtggtatcgccaacacctttatcgctgcggcgggccacaacgtgggtaaatccttatacgaagcggatttaattgatgaagctaagcgcttagtggcgaacgcccaaagccgcggtggcgatattcctgtgcctaccgatgtggttgtggcgggtgagtttagtccaacggctgctgcgaccttaaaagcagtgagtgaggttggcgatagcgacatgattttcgacatcggtcccgacagcgccgaagcgttagcgaaaatcattgagtctgctggcactatcgtatggaacggtcctgtgggcgtgttcgaattcgaccaattcggtgaaggcactaagcgtatcgcgcaagctatcgctgattctaaagccttctctatcgctggcggtggtgacaccttagcggcggtcgataaatacggtatcgccgataaagtctcttacatctctactggtggtggtgctttcctcgagttcctcgaaggtaaagagttacccgctgtagctatgttgaaaaaacgcggtgcctaa

SEQ ID NO: 250456 - DNA, 547 bp, Unknown
  Bacterial polypeptide expressing nucleotide sequence isolated from the Sargasso Sea
tttgattaaaactctaaactcatttgatttaaaggacaaacgagtccttttacgtgttgatttcaacgtaccgatagttaatgataggattactgataactttcggattgtttcatcattgccaacaattaaatattgtcttaggcatggtgcaaaaattattatcatgtcccatttaggtcgacccaaaggtaatgtaattcctgaaatgagcttgatttcagtaggtgaagcattggcagatttattagaaatgccaataaagttttctcatgattgcgtttctgaggatgctcatgatgtaactctaggcctaagatccggtgagattcatttattagaaaatctaagatttcatattgatgaagagaaaaatgataaagattttagtaaaaaattagctaagcatggtgaaatttatattaatgatgcttttggcacagcgcacaggtcacatggttcaaattctggaattacaagatattttttaaataaaggaatgggtcttctttttgaaaaagaattagaatttttatcaaaaaaataa

SEQ ID NO: 250457 - DNA, 1177 bp, Unknown
  Bacterial polypeptide expressing nucleotide sequence isolated from the Sargasso Sea
atggcaattatcaatatgtcagatttagatctccaaggtaagcgagtgcttattcgtgaagatctcaatgtgccagtcagcaacggcgtcgtcaccagtgatgcacgtctgcgcgcctctcttcccactatcgaattagcccttgccaaaggcgctgcggtaatggtgatgtctcacttaggtcgtccaaccgaaggtgaatacaacagcgaattctccatgcaaccggtggtcgattacttggccaaagccctgtcttgcccagtgcgcttagcgaccgactatttagacggcgttgaagtggcggtaggcgaagtggttgtgtttgaaaacgttcgctttaacaaaggcgagaagaaaaacgacgaagccctgtcaaagaaaatggcggccttatgtgatgtgtatgtgatggatgccttcggtaccgctcaccgcgcagaagcgtcaaccaatggtgttggcttacacgctcctatcgcctgtgcaggcccattattagcacaagagttagaagcgttaggcaaggccttagacaacccagcgcgcccattagtggccatcgttggcggttctaaagtgtcgactaagctgaccgtattagaaagcttatctggcatcgttgaccaattagttgtgggtggcggtatcgccaacacctttatcgctgcggcgggtcacaatgtaggtaaatccttatacgaagcggatttaattgatgaagctaagcgcttagtggcgaatgctcaaagccgcggtggcgacattcctgtacctaccgatgtggttgttgcgggtgagtttagcccaacggccgccgcgaccttaaaagcggtcaatgaagtgggcgatagcgacatgattttcgacatcggccccgacagtgccgaagcgttagcgaaaatcatcgagtctgctggcactatcgtatggaacggccctgtgggcgtgttcgagttcgaccaattcggtgaaggtactaagcgtatcgcgcaagctatcgctgattctaaagccttctctatcgctggcggtggtgacaccttagcggcggtcgacaagtatgatatcgccgataaagtctcttacatttctactggcggtggcgctttccttgagtttttagaaggtaaagagttaccagctgtagctatgctaaaacaacgcggtgcctaat

SEQ ID NO: 250458 - DNA, 1159 bp, Unknown
  Bacterial polypeptide expressing nucleotide sequence isolated from the Sargasso Sea
aatgatcaacgggatcccgacgcttgatgatcttgatcttcaaggaaaaagagtattagtcagatttgattacaacgtaaagtatttaaatggaaaagtcagtgatgacgagagaattttaagaacactgccaactttaactaatattctatcaaaagccagctcagtaataattctcagccatcttggtagacctgaaaaagtaggagagattgataaagacttttctctgaaaaaagtcgcagaacatctaagcactttgttgtccgaagagatttattttcataatgatttaaaccttgatcatttctcagataatcaaaaaaagatttcgatgttggaaaatgtaagattttttgaaggtgagactgataacaatgagttattttcaaaaaagcttgcacaattagctgatgtttttgtcatggatgcttttggatcggctcatagaagtcactgttccactgaaggagttagtcattttatagattcatgtgttggaaggttggttgaagaagagttaaattctcttgaaggaattttaaataatccatcaaaaccaatgttgggaatcatcggcggctcaaaaatatcaacaaaaataaatattctggaatctcttcttgaaaaagttgattggcttttcgttggaggggggatagctaatacattacacaaatcaaaaggatatgaaatcggtcaatctattgtagagaatgattttttggaagaagcaaaagatcttagtaaaaataacaaaataatattgcccgagacctttgtagtagaacaaaaagataagtctattgttgagaaaacttttgaaggaatattgccagacgacattatttatgacgttagtattaactcaataaaaagcttaaataatgttatctcgagttgtaaaactatattatggaacggtcctttaggtttttttgagagagaagaattttcaaaaggtacattgcatcttgccaaggttatttctgaatcagacgcatactctgttattggtggaggagagactttaactgcctttaatcaatcaaacttattagataaagtaggatatgcctcaactgctggaggtgcctttttggaatatattgagaaaggatcattaccctctcttgaggcattaaaggagaaaatatga

SEQ ID NO: 250459 - DNA, 390 bp, Unknown
  Bacterial polypeptide expressing nucleotide sequence isolated from the Sargasso Sea
gatgattaatctctcttctatagacatatcaaaaaaaaatcttgtaataagagttgatatgaatgttccaataaaaaatggaaatgttcaagatgcaacaagaatacaagcctgcattcctactattaaatatgctttaaaaaataatgctagaattttactaataagtcaccttgggagaccaactgaaggaaactttgaggagaagttttctttaaagcccatagcagattatcttagtaaaataacaaataagccttgcaagttaataagtcatttagagtcagatgaaatttttgatggaaaaacagatattcagttattagaaaatataagattttttaaaggcgaaaaagaaaactgccaagatctgggaaaaaagttagctga

SEQ ID NO: 250460 - DNA, 1033 bp, Unknown
  Bacterial polypeptide expressing nucleotide sequence isolated from the Sargasso Sea
aaaagttattctgggggtttcacacttaggtagaccaaaaggtaaaataaaaagtgaattgtctcttaaaccagtttttgaatatttgaaaaaaaatttaagtaaaaaaattgttttttacgataaaaatatagacgataatgcagtttcgtgttcaaaaaatcttaagaccggtgaaatactttttttagaaaatattagattttttaaagaagaagaggaagacaatgaagtatttgcaaaaaaattgtcaaatctagcggacatatttataaacgaggcattttcttgctcacacagaaaacaagcttcaattcacagtataacaagatttgtcgaaagttatggagggccccaactagaaaaagaaattaagtcaatagatttaataaaaagaaagaaaaaaaaacctgttacatgtattatcggcggatcgaaaatttcaacaaaaattaatgtattatcaagcttaattcaaaactccgataatcttattgttgttggagctatggcgaataattttttactttttaaaggtttgaaaattggaatgtctctaattgaaaaagatgttggaaactttatagaaaaaattaattatttggcaaaaaaatatagttgtaaagtttttatcccaactgattttcaagtatcaacaagtatgaatggtaagccaatttatagatcaaaaaacgatataaggaaaacagagattattttagacataggaaaaaactctttaaactcaatttgtaaaataattgacagttcaaacactgttttttggaatggaccagccggattttttgaaaataaaaattttacacatgggacgatttcgatagcaaaaagtattgctaaaaatacaaaaaaaaggtctttaatttcaatcgtggggggtggggatactttagcagctctgaatgggggcggttttgaaaactcttttacacatttatcaacagctggaggagcattcttagaatctcttgaaggtaaagaactccctgctataaaagtgcttaggaaataa

SEQ ID NO: 250461 - DNA, 1195 bp, Unknown
  Bacterial polypeptide expressing nucleotide sequence isolated from the Sargasso Sea
catgaacaaggtattgcgtctctccgatctgatcgccgaaggcaagctatccggcaaacgcgtgttcatccgcgccgatctgaacgtgccgcaggacgatcaaggcaacatcaccgaagacacccgcatccgcgcctccgtgccggcgatcaaggccgcgctggacgctggcgccgctgtcatggtcacgtcgcacctgggccgtccgaccgaaggcgacttcaagccggaagactcgctggcgccggtcgcgaagcgtctcgccgagttgctcggccgtgacgtgccgctggttgcgaactgggtcgaaaacggcgtgaacgtggcgccgggtcaggtcgtgttgctggaaaactgccgcgtcaacaagggcgaaaagaaggattccgacgagctcgcgcagaaaatggcgaagctttgcgacatctacgtgaacgatgcattcggcactgcgcaccgcgccgaagccaccacgcacggaattgcgaagtacgcgccggtcgcctgtgccggcccgctgctggccgctgaactcgaagcgctcggcaaggcgctgggcgcgccgaagcgtccgctggtggcgatcgtcgccggctcgaaggtgtccaccaagctgaccattctgaagtcgctcgccgacaaggtcgatcagttgatcgtcggcggcggcattgccaatacgttcatgctggcggccggcctgaagatcggcaagtcgctcgccgaagccgatctggtcaacgaagccaaagccattatcgacgccgcgaaagcccgcggcgcctcggtgccgattccgaccgacgtggtcaccgccaaagaattctcgccgaccgccaaggccgaagtgaaggccgtcgccgacgtgcaggacgacgatctgatcctcgacattggaccggaaaccgccaaagtgctcgccgcacaactggaaaaagccggcacgatcgtgtggaacggcccggttggcgtgttcgaattcgaccagttcggcaacggcaccaggacgctggctgacgccatcgccaaatcgtcggcgttctcgattgccggcggcggcgatacgctggcggcgattgccaagtacggcattcacgacaaggtcagctatatctcgacgggcggcggcgccttcctcgagttcctcgagggcaagacgctgccggcggtcgctgttctggaatcgcgggcttaa

SEQ ID NO: 250462 - DNA, 358 bp, Unknown
  Bacterial polypeptide expressing nucleotide sequence isolated from the Sargasso Sea
atctcaaattaaagacttaactgaagtatcggctgatgattttattttagatattggtccaaaaactttaaagaaaattgaggatattatcgaaaatagtaaaactgttttgtggaatggtccagcgggttactttgaaaatccaaattttgctttaggtagttatgaaattgcaaaaatgattattaaaaaaaataaagataattcaatttattccgttgcagggggtggagatacaattgcagtgttaaatcaaataaatgcaattaatgattttaattttgtttcaactgctggtggagcttttttagaatatcttgaaggcaaagaacttcctggtataaaagctctaaattaa

SEQ ID NO: 250463 - DNA, 277 bp, Unknown
  Bacterial polypeptide expressing nucleotide sequence isolated from the Sargasso Sea
aagactttgattaataatgctaagactattctttggaatggacccatgggagtatttgaaaattctttatttgaaaatggcacaaaggaactttctaaagaaattgctaagtctaatgctttttctcttgctggaggaggcgaaacattgtcggcaataaataaatatattaaatcagatgatgtatcatattgttcaacaggcgggggcgcctttttagaatttatggagggtaaagttttaccttctattaaagctctaaattcaaaaaaatagg

SEQ ID NO: 250464 - DNA, 919 bp, Unknown
  Bacterial polypeptide expressing nucleotide sequence isolated from the Sargasso Sea
gctgtatggtgaagaggctctagctaaatctaatagtttaaataacggcgatgttttattactagaaaatgttcgtttttatgaagaagaagaaaaaaacgatttagatttcgctaaaaatttagcttctcatgcagatatgtatgttaatgatgcttttggagctgcgcatagagctcatgcttcaactcaaggagttacacaatttctagagccagctgttgcaggatttttgttagaaaaagagttgaaatatttacagggcgcaattgatgctccaaaacgtcctcttgcagcaatagtaggaggttctaaagtaagtagcaaaattggagttttggattctcttttagataagtgtgacaaaattattattgggggaggtatgatttttactttttataaggccagaggattagatgttgggaagagtcttgttgaggaagataaacttgaactagcaagaaatttagaggcaaaagcaaaaactaaaggggtagagcttctattaccatctgatgtattacttgcaaatgagttttctcctgatgcagaaagtaaagtctctcaaatagattcaataagtggtgattggatgggcctagacattgggccacaatcaatcaaggttttccaaaatgctcttgccgaatgcaaaacaattatttggaatggcccaatgggtgtttttgaatttgataaatttgctgaaggtacaaatgcaatagcaacaaccctggcagatttaagttctttctctgaggtttgtacaattattggaggaggagattctgtcgctgcagtggaaaaagctggcttggctgaaaaaatgtcacatatatctactggtggaggggctagtctagaacttttagaaggtaaaactttacctggagtagctgctttaaaagacgcttga

SEQ ID NO: 250465 - DNA, 1183 bp, Unknown
  Bacterial polypeptide expressing nucleotide sequence isolated from the Sargasso Sea
aatgagaagtataagaaacgaaacaagtcttcgtgataaaaaaatattacttagattagatttaaatgttcctttagataaagaaaaaataagtgacacaacaagaatagataaaattcttcctactttaaaatttcttaatgaacaaaaagctaaaattattattttatcacatgtaggtaggccaagaggtaaggttttaaaagaactttctttaaaaccaatttgtgaaaatttacaggaacaattaggtttaagtgtgaaattaatttcacaaaatattaatgaaattaaaaataagaatttctttgataaatttaatgagaaaatcttaatgttagaaaatattaggttttatgcagaagaagaaaaaaatgacaataagtttgcaagacacttagcaagtcttggtgatctttatgttaatgatgctttttcatgttctcatcgtgcacatgcatcaattgttgaaatttctaaattcctgccttcattttctggattgcaactagatttagaaattaacgctcttactaaaattacatctgaaatcacaaaaccaataacctgtataattggagggtctaagatttcgacaaaaattgaaatcattaaaaatctaatacccaaatttgacaatattattattgttggtggtatggctaataattttattgagtattttggtcacaacattggcaaatctattaaagaaaaaaattgtgccccgataattgaagaaattatttcactttcgaaaaaagaaaaatgtgaaataacttatccagaagatgtgcttgtatctaaagatttaaatggatcatgcaaaaaaaaagaattgaatgaaattttggacgatgaaatgattttagatattggtccaaaaactataaataaagtaacaaatattataaactcaagtaataccatattgtggaatggacctgctggatattttgaaaaccctaactttgcaaacggcagcatagaaatagcaaaaacaataattaataataataaattaaacaaaattttttcagttgttggtggaggagatacagtttcattattaaatagtataaacgctgttgatagttttaactttgtttcaactgcaggtggagcttttttagaatatcttgaaggtaaaaagcttcctggtataaccgcgttaaatcaataa

SEQ ID NO: 250466 - DNA, 1168 bp, Unknown
  Bacterial polypeptide expressing nucleotide sequence isolated from the Sargasso Sea
aatgagcaagccaaataatcatactgacttaggagacgttttaattaggtcagatttaaatgtaccaattataaataatgaaattactgataaatttagaatttctaaatcaatcaacattattaatagtatttatgaatcctcaagaacaattacttttacaagtcatcttggtaggccgaataatagtgacccaaatttctcacttattaaaatagctgatgcaatgtcagagttactagataacgaaaaagtaatgtttattgatgcaattcacggctcaaaagttgaggaggcaataaaaaatcaaaaatcaaaaatatttcttctcgagaacctgcgatttgatgaaggcgaaataaataatagtttagatttcgctgcgaatgtaacaaagccctttcaaacatatatttttgacgcatttggggcagctcatagagagcatgcatcagttgtaagctttgggaattatctaacctcttatcaaggaccactggtaagcgaagaattaaaggaattaaacaaaatattagatacaaataaatctggatattcggttttacttggaggagcaaaaatatcagataagttatctttaattgagaatttacttccaaaagtagaaaaattaatgatcggtggaggaatgtgtttcacatttctaaaagcactaggttatgaaattggcaattcgatttttgaagaatcgtttgttgcaaaagctaaatttttaatggattcaaagtacggagacaaaatagtattacctactgattttggagttactgaatccattgaaagtaatattcgatcaaatataaaagttgaagatttccaagaaaaccatattggagtagatatcggaaatgaaacgttgtctgaattttcaagtatattaaatgcttcaaaatatattttttggaatgggccgatgggtatttttgaaattgatgaatacagtactggtacgagagaaattacaaaagttatatcaatgtctcaagcatattcctctgttggaggaggagactctgtgagtgctatcaacaagttttctgacagaaaaaagtttaatcatatttctactggtggtggagcctccctagagtttttagaaggtaaaaaattaccgggagttaacatttataaaccacttataatttga

SEQ ID NO: 250467 - DNA, 1180 bp, Unknown
  Bacterial polypeptide expressing nucleotide sequence isolated from the Sargasso Sea
aatgaagagtattttaaaagaaaaaaatcttaataataaaaaaatattattaagattggatttaaatgttcctttagaaaacggaaaaataagtgacactacaagaattgataaaattcttcctactttaaattttttattaaaacaaaaaactaaagtaataattttatcgcacattggaagaccaaaaggtaaaaaagtaaaggagctatctttaaaaccaataggtgaagatctaggaaaaaagttaaaagtaagagtaaaactaattacaaaaaatatttacgaaataaaaaataaagatttctttgaaaattttgatgaagaaattcttattttagaaaatattaggttttattatgaggaggagaaaaatgattataaatttgcaaaacatatagcaaatttgggagatatttatgttaatgatgctttttcttgttctcaccgagcacatgcatcaattcatcaaattccaaaatatttgccatctttttctggactccaacttgatttagaactagctgctcttaataaaattactgctgaaatagttaaacctataacgtgcataattgggggatcaaaaatttcaactaaaatagatattatcaaaaatttaataccaaaatttgataatattattattgttggaggtatggctaataattttattgaatattttgggtataatattggaaaatcaataaaagataagaattgccgacaaatagttgaagaaattatttcactgtcaaaaaaaaaaaattgtaaaataatttatcctgaagatgtacttgtatccaaaaatttaaatgggtcttctaaaaataaagaattagatcaaattttatctgatgagatgattttagatattggcccaaaaacaataaaaaatataatagatataataaataatactaaaacaattttgtggaatggaccagcagggtattttgaaaatccaaattttgcgaatggaagtattaaaatagcaaaaaagataattgaaaataataaatcaaacaaaattttttctgttgtaggtggtggagatactgtttcattattgaataacttgaatgttgtaaataatttcaattttgtttcaaccgcaggtggagcttttttagaatatcttgaaggcaagaaactacctggtataagcgctttaaactaa

SEQ ID NO: 250468 - DNA, 1192 bp, Unknown
  Bacterial polypeptide expressing nucleotide sequence isolated from the Sargasso Sea
gatgggtgaaataaatttctttcctgacgatttagaaatcaaagatcaaaagataattcttagattagatttaaatgttccaattaaagacaaagttataaaagatgatacaagaataactttatgtttaccttttataaatagactaattgaaaaaaaagcaaaaattataattattagtcatctaggtcgaccaaaaggaattaatgtacctgacctgtctttaataccagtctacaaatatctcaaagatgctcttaaaactaacgtttatttttttagaggaacttttgatggtgaaactaaagaaaaattttctcacctaaaagggggtgaggtaatattaattgagaatataagattttttaaagaagaaactgaagatggccaagatttttcaaaaaagttaggtgaacttggggacatttatattaatgatgcattttcatgctcccataggaaacaagcttctgtgcatagtataacaaaatttgtaaaaaaaagttatgctggtccattattaaaaaaagaaataacggcaataaatcttgttataaaaaataaaaaagaaccagtcacttgcattattggaggatcaaaaatttctacaaaaattaatgttatttctaatcttttaaaaaaagtaaacaatatagtgattgttggggcaatggctaataatttcttcgttcataagaatttaaaagttggtaaatctttaattgaaaaaaatacaaaagagataatagcaaatatttataaaaaagcagaggaacataattgtaaaatattaatacctgaagattgcatcgtaggaacagactttgaaggaaccggtaaaaataaaaatattgatgagattcaagaaaatgaaataattttagatattggcttcaatacaatcaaaaaaattcaaaaaaagattaacgagtcaaatactgttctgtggaatggaccagctgggtattttgaaaataagaatttcttaaaaggcacattatcgattgcagaaaatatctctaaaaatactattgaaaaatctttaatatctattcttggaggtggagacactctcgcagcaataaataaaagtgacgacaaacttactttctctcacttatcaacagcaggaggagcatttttagagtacttagaaggaaaagacttgcctggtataagtgttttaaaataa

SEQ ID NO: 250469 - DNA, 785 bp, Unknown
  Bacterial polypeptide expressing nucleotide sequence isolated from the Sargasso Sea
aatgattaacctatcatcattagatcttaataataaaaacttagtcattagagttgatatgaatgtaccaattaaagatggtgatgttctcgattcaacaagaattaaggcatgtttatcaactattgaatatgcacttaaaaataatgcaaaagttcttttgataagtcacttgggtaggcccattgaaggaaactttgaggaagagttttcactaaaacctgttgcaaatgaactaagcaaaatcatgaaaatggatgttgaacttattgatagattagaatctaataaaatttttaattcaccatcaaatattcaagttttagaaaatataagattttttgaaggagaaaaagagaactctcaagagttaggtaataaattaggatctcttggagatatatatgtttttgatgcttttgggactgcacacagagaacaggcatcaacccatgctgcaataatgaatgctccaatagcatgctctggactattgctagagaaagaagaaaattttttatcgcaggcgcttaaaaaatatgaaagaccttatgttgctattatcggtggcgcaaaagtttctacaaaacttgagcttataaagcatattaatgaagtcgcagaccatattatcgtaggtggaggtattgcaaatacttttataaagtcttcaggccttaatgtaggaaactcactgactgaacaatcaatgctagaaattgcaaagagcatcttggataaaggtaaaatcatactacctaatagagtatttacatctaaaacat

SEQ ID NO: 250470 - DNA, 339 bp, Unknown
  Bacterial polypeptide expressing nucleotide sequence isolated from the Sargasso Sea
acgtgaccgacggcgacatgatcttcgacatcggccctgactctgccaaggccctggccgacatcatcatgaacgccaagaccatcctgtggaacggcccggtcggcgtgttcgaattcgaccagttcgctgaaggcaccaaggtgatcgccgaagccatcgctgcttctccggccttctccattgctggcggtggtgacaccctggctgccatcgacaagttcggcatcgccgacaaggtctcctacatctccaccggcggcggcgccttcctggagttcgtggaaggcaaggtactgccggctgttgcgattctggaacagcgcgccaaagcctaat

SEQ ID NO: 250471 - DNA, 1201 bp, Unknown
  Bacterial polypeptide expressing nucleotide sequence isolated from the Sargasso Sea
gttgcgtaagatttcaacaatagattttaagtcgtcaaatacaacatctgggaaaactgttctcattcgggttgattataatgtaccggtagaaaatgaattagtaacagatgattatcgaattcttaaatcaattcctactattaagtattgtttagatcagggagcaaaggtagtcttgatgtctcatatgggaagaccaaaaggaaaggttaatagtaattattctcttattcctgcaggcgaaaagctagctgaattattagaagtaccaataaaattttctgaagattgtatatctgaagatgctatagatgtttcaaaaaatcttaaagacggagaaatacacttactagaaaacttaagattttataatgaagaaattgaaaataattcagatttttcttcaaagctagctaaacatggctctatatatataaatgatgcttttggaactgctcatagaaatcacgcttcaaactcagggattacaaagcactttgcaacaaaaggaataggtcttttagttgaacaggaaataaaatttctttctgaaaagctatcaaatccctctaaaccacttacattaattattggaggttcaaaaattgatacaaagattgctgtaatcaagaaatttttagatcttgcagataatattattattggcggtgctatggcaaatacatttttacttgcaatggataataatatcggtatgtccttagcagaaaaggataagattaatgttgcaaaaaatttattaaaagaagcttcaaaaagaggaaccaatattattcttccggtagatttgacaggagagctagattcattcggctcaggcaacattacctatgctgatgctaaagatattccagaaaatatgttctgtgaggatattggagaaaaatcaataaagttatttactaatattatatcttcatcacaaactttactgtggaatggtactgtgggagtagctgaaaatcctaattttgcagtgggaacaaatagaattgttgatgctatcatagaaaaccaattaacttcaattgttggaggtggagatactgtagcagctataagaaattatgataatagtttgattgagcaattttctcatgtatctactggaggaggttcgtgtcttgaaatgctatcaggtaaaacactaccagcgttggagatgttgaaaaaatga

SEQ ID NO: 250472 - DNA, 1120 bp, Unknown
  Bacterial polypeptide expressing nucleotide sequence isolated from the Sargasso Sea
atgaatcatcttgaacagacagttattaaagataagaaagtaggtctgagagtagatttaaatgttcctattgaaaatggtgaaattctcagccatgaaaggctttcagctgctcttccgacaatactttacatattaaaacatactaaaaagttatgtgttattacacatcttggtagaccaagagagggcgaatttgatattaatcaatcagtcatgccaattaagaagtggtttgaaaaaagattaaatttggatatagagcttcttaataattttgagaatattccggaaaatatttgttttatggagaatattaggtttttcaaaggggagaaagataatgataaaaatttgtctatgcaaatagcaaatgtttttgatgtttatgttatggatgcttttgctactgctcatagatcagctgcttctacatttggtgcaatagaattatctaaaaatgcatgtgctggacttttattttcagatgaaataaaaaatttagagtcagcattagaagaaaacaaacaaattctgagcatagtaggaggttcaaaagtatcaacaaaattaaaagtaattgaaaatttactcactaagtcctcttcagttgttgttggtggtggaatagctaatacttttttaaaagctgctggtaaacctattggaaactcacttgttgaagataatatgttagacaccgcaaaagaattactcacgacaaataaaatcattcttccaaaaagtgtttatgtagcagaatcgcctcaatcaaatcaagtaaacttagtttctgttgaagatgttcctaaaaataaaatgattttagatatagaactaaatgaagaaataatacctgttgatcatgaatatattatttggaacggcccgcttggtatttttgagatagatcaattctcaaatggaacaaaacaattgataggttttttagaaaattcaaaatcaaaagtaatcgcgggtgggggtgaaactctatttgccatcaataaattctcagaaactaacaaatttcattacgtgtctacagctggcggcgcttttttagagtacttatcaggaaataaactaccatctatagaagctttaaggttaaaatagc

SEQ ID NO: 250473 - DNA, 877 bp, Unknown
  Bacterial polypeptide expressing nucleotide sequence isolated from the Sargasso Sea
ttgtttaaaggcactaatgatcagatagtttttttagagaatataagattttatgaagaagaagaaaaaaatgacacttcttttgcaaaacatttggctggacttgctgatttgtatgtcaatgacgcgttttcttgctcccacagggaacatgcatctataagtaaaatcacagaatttcttccttcttttgctggaatacaattagaaacagaaataaatgctttaaaaaaagttacatctgaaattaaaaaaccaattacatgtataattggggggtcaaaaatttcatcaaaaattggaataattaaaaacttaatacctttatttgataatattatcattgttggaggaatggctaataatattcttagtcataaaggaagccgaataggcaaatcaattaaagaagaaaattgtgaaatgataattaaagaaatttttgaaagttcaaaaaatcattcttgtaaaataatatatccagaagatgttatggttggaaaaaatttggatagcacatcagaagtaaaagaactgaataacataaaagataatgatctaatattagatatcgggccaaagacagtaaataaaattaaaaatattattgaaattagcgaaacgattttgtggaatggtccagcaggatattttgagaatccaaattttgcaaatggtagttacgaaattgcaaaagcaattattaaaaaaaataaagatagatcaatttactctgttgttggaggaggagatacaatcgccttaataaataaaattaatgcattcgaaaatttcaactttgtttcaactgctggtggtgcatttttagaatatcttgaaggaaaagaacttcctggtataaaagctctaaattaat

SEQ ID NO: 250474 - DNA, 455 bp, Unknown
  Bacterial polypeptide expressing nucleotide sequence isolated from the Sargasso Sea
tctgattcaagaggcagagcagaagggagtcgaattgttgcttccagttgatgcagtgattgcagaacgatttgataataatgcctcaaccagaataatttccatagaggaaggtgctccagaggactggttgatcttggatgttggaccgagaagtattgatatattcagtcactcaattcttggttccgggactgttttgtggaacggtccaatgggtgtttttgagatggaaaaattttctaaaggtacatacgcgatagcagagagtcttgccaacgccactgacagtggcagtgtgacaatcatcggcgggggagactctgctgcggcaattcaaaattatggattgagtgagcgaatcacccacgtatccacaggaggtggcgcatcacttgaatttttggaaggtaaagagcttcctggagtgagagcaattcgtaaatcaaaataat

SEQ ID NO: 250475 - DNA, 940 bp, Unknown
  Bacterial polypeptide expressing nucleotide sequence isolated from the Sargasso Sea
aatgatcaaaacattaagagcatttgacctaaggggaaagaatgtgctgctacgtgctgatttcaatgtgccaatgcataaagatcaggttgctaataactttcgaataaaggcagtcttgccaaccattttaacctgtatagaggcaggtgctggagttgttcttatgtcgcacatgggacgaccaaagggggaaatagattcaaaactgagccttattgctgtaggtgaagaattagcatcattattagaaatgccaattaagttctcagataactgtatatctactgattcaattgatacctcaatcagtttaaaacaaggtgaagtacacctgcttgaaaatctgcgatttcattcaggcgaggaagataatgaaatggaattttcatctcaacttgcaaggcatggacaaatatacatcaatgatgcgtttggtaccgcacacaggtctcatgcgtctaatgttggtgttataccatattttaaaaatgctggcattggatggctgatggataaagagctaaactatttgcaaagaatcatgtctcggcccaagactcccctgacaataattcttggaggagcaaaaattgacacaaaacttgaattaattaatcaatttttagaaaaggcagataatattatcattggtggaggcatggcattcacctttttaaaagctaaaggaaaaaatattggaggatcactgctagataaatcaatgattaaaatagcaaaagacattatgaacaatgcaatgtcaaaaggtactaagataatcttaccaattgatgccgtatgtgctgcgtcaccgaaagatattagtgataaaaaaacatatccaatcgatgaaattccatcaaaaatgatgggactagacattggtccggactcagtggttagatttaatgaaattttaggtaattcagagacaata

SEQ ID NO: 250476 - DNA, 355 bp, Unknown
  Bacterial polypeptide expressing nucleotide sequence isolated from the Sargasso Sea
aaatattacaaggatcaccaaagttaactctgtgcaaaacgatgagttaattcttgaccaaattctcagtcccgcagccattaaaaaaataattcaagcaaaaaaaattatttggaacggtcctgttggtgtatttgagcgtcaaactttctcatcaggaaccaaagctttggctgaggcaattgcgtcatcaaaagcatttagtcttgctggcggcggagaaactcttttagccataaagatgtttattgaaaaaaacaatatttcctattgctcaactggaggaggagcttttcttgaatttatggaaggaaaagagctaccatcattgtctgctttaggctttaaattttaa

SEQ ID NO: 250477 - DNA, 1153 bp, Unknown
  Bacterial polypeptide expressing nucleotide sequence isolated from the Sargasso Sea
ttgacgtctaaaaatttaggtaatgtattaataaggtctgatttaaatgttccaattagaaatggtactgttttagataactttagaataaaaaaatctattgagtatatagaagaactgcaaaatatttcaagcagcgttacttttataagccaccttggaagacctaaaggagtagaagattctttatcattgaagccaatctcagatgaaatgagcaaactattaaaccaagatgttgtatttataaataataatttagacgaagacattaaaaatattttaaagagtaaagagaaggggatatttttattagaaaatcttagatttaatgaaggggaaataatgaatgatgaaaaatttgccaaaggtatatcaagccccttcgatacttatattcttgatgcttttggggcatctcatagagaacatgcttcaatagttaagattggaaatcacttaaattcatttcaagggcctttaatgtctaaagaaatcgaagaattagataaagtattaaatgaatctaatcaggattttacgataatactcggaggagcaaaggtgtcagataagctagcacttataaaaaatcttctacctcgagttaatagcttattaataggtggaggaatgtgttttactttcttaaaagctttaggtcacaatataggaaattcactatgtgaggatcaatttattgaatcagctaaagaaattctagattcagctgatggtaaaaaaataactttaccagttgattttggagtcactaaagcaattgacagtcatgcaagaaataatattgatttatctcaatttagcgatgatgatatcggtgttgatataggcaatgaaacaataaaaaattttcaagaaatattatcaaaatctaaaactatattttggaatggcccaatgggggtatttgaagttgatgaatttagccatggtacaaaggagattacgaatgcaatagctgaaatggaagtttactcaatagtgggtggaggagattcagtaaatgcaattaatagattttctaatgtagataaatttaaccacgtatcaacaggcggtggagcatctctcgagtatttagaaggaaaagctctaccgggtgtaaatatttataatcaacttataatttaga

SEQ ID NO: 250478 - DNA, 1009 bp, Unknown
  Bacterial polypeptide expressing nucleotide sequence isolated from the Sargasso Sea
tttgggaagaccaaaaggtgttaaagataataaattgtctctaacaccagtttacaaatttttgaaagaaaatcttaatacaaatatttatttttttatgggagatattgataatgaaacaaaaaataaatttgcatacttaaaaggaggtgaaattattttattagaaaatattagattttttaaagaggaaggcgaaaatgatgataattttgcaaaaaggcttgctggtcttggggaaatttatataaatgacgctttttcatgttctcacagagagcaagcttctatacataaaattacaaagtatataaaagattcttatgcagggcctttagtgaagaaggaaataactgctataaatacaattattgaaaacaaaaaagaaccagtaacctgtattattggaggcgcaaaagtttcaacaaaaattaacgtaatatgtaatctgattaaaaaagttgataatattattattgttggtgctatggctaataattttttatccttcaatggtttaaaggttggaaaatcattaatagaggaaaattcaagaaaagtaatagatttaatatactctaaagctaaaaaatataattgtaacatttttatcccagaagattgtaatgtttcaactgatacacaaagttcagggaaaattaaaaaaaataacttaattgatgaaaatgaaataattttagatattggtccaaaaacaattcaaaatattgaaaaaattatagatcaatctaatacagttttatggaatggtcctacaggttattttgaaaataaagaattttcgattggcactttagctgtagcaaaaaagatttcagaaaatactataaaaaaatctcttatatcaatactaggtggtggagataccgtttcagcggttaataaaagcgctgataaatttacttttacacacttatcaacagcaggtggagcatttttagaatttctagaaggaaaagacttgcccggacttaatgttttaaaataa

SEQ ID NO: 250479 - DNA, 1192 bp, Unknown
  Bacterial polypeptide expressing nucleotide sequence isolated from the Sargasso Sea
atgaaaaatatctcaaatcaagacataacatttaaagataaaaaagttttacttagagttgatttaaatgttccaatgaaaaatggatctataactgagttatctagaattgaaaaaataatacctactataaagttactactagataagaaagcaaaaataattattttatctcatattggtagaccaaaaggaaaatttattgaaggaatgtccttaaggccaatttcaaaaaaattagagtctttattaagtgaaaaaattttattttacgaaaatataattaatgaaaatactctatccgaaataaataaaatccaaagtgaatccataataatgttagaaaatattcgctttaacaaaggagaggaaaaaaatgatattaaattttcaaaaaatttatctaaattaggtgatatatatgttaatgacgctttttcatgttctcatagatctcatgcatctattgatggaataacaaaatttattccttcgtattttggattgcaaatttcacaagaaatagatgcattgaaaaaaataacttctgaaataaaaaaaccagttactcttattataggaggatccaaaatttctacaaaaattaatattataaataatttagtaaaaaaatttaacaatatagttattgttggaggtatggccaatacaatgcttaaacacacaggctcaaaagttggaaaatcaatatacgaagataattgtgaattcttaataaaagaaattctagatgtttcaaaaaaatataattgtacaattacatgtcctgtcgatgttgttgtctcacaaaacatagaagggcatggaaaaaataaaaatattaatcaaataaatgaagatgaaatgatattggatataggtccaaatacaattaataatattaaaaaaataattaatgaatcaaatacagttctgtggaatgggccagcaggttattttgaaaatccaaattttcaaaatggtactagggagatactgcatgcaatttcaaataaaacaatcaatgataatattttttctgtagcaggagggggcgaaactgttgcagcaataaataaatttaaaaagttagactcatttacatttgtttcaactgctggtggagcttttttagaatatcttgaagggaaaactttacctggtataaaagcaataaataaaaatgtctgaa

SEQ ID NO: 250480 - DNA, 1192 bp, Unknown
  Bacterial polypeptide expressing nucleotide sequence isolated from the Sargasso Sea
atgtctgatttaaaaattttttcagaaaatattccattaaataacaagagagtaattgttcggttagatctaaacgttcctttagagaattttaaaataaaagattatactagaattaaagttgttcaggaattcttgattaaattaattgagaaaaaagctaaaattattctaatttctcatctaggaagaccaaaaggaaagatagttaatgacatgtcattgaaaccagttttggaatatttggaaaaaaaattaggctcaaaaatttatttttttaaggaaaaaattgatcacagtgctgtagatgcatcaaaaaaacttaaaggtggggaaattttattaattgaaaatatacgtttctttaaggaggaagagaacgatgatgaaaattttgcaaaagacctatcgaagttaggagatttatacataaacgaagctttttcatgttcgcatagaaaacaagcttcacttcataatatcacaaaatttattgatagttatggagggcctttattaaacaaagagattcaatcgatcaatttaatcataaaaaacaaaaaaaaacctgtcacatgcataattggtggatcaaaagtatcaactaaaataaatgttattttaaacttgttaaaaaatgcaaataatcttgtgatagttggtgcaatggcaaataattttcttaaatttaagggatttaatattggagcatctttaatagaaaagggagcagaaacggttattaaagacatttacaactcagcagaaaaaaataaatgtaaaatattaataccaaaagactgtatggtttcatctgatattaatggaagtgcaaaatataaaatactaaaagaaattacgtctgaagatattgttttagatattggtaaaagtacagttaaattaattaatgagaccattgaaaattcaaaaacagtattttggaatggtccagcaggatattttgaaaattcaaatttttcaggcggaactctttcaattgcaaagaaaattagtgaaaatacaaagtcaggttccttaatttcaattgttggtggtggagatacaatttctgcaattaaaaatagcgagtataaaaatgtttttactcatttatcaacagcaggcggtgcctttctggagtcccttgaaggaaaagaactccctggtataaaagtacttaaaaaataat

SEQ ID NO: 250481 - DNA, 361 bp, Unknown
  Bacterial polypeptide expressing nucleotide sequence isolated from the Sargasso Sea
tatggatgataaatcacaaatcaaggaactcaatcaaataagtgatgatgattttattctagacattggtccaaaaactttaaataagataaaacatattattgggaatagtgaaacaattctttggaatggacctgctggttattttgaaaatccaaattttgcaaacggtagttatgagattgcaaaagaaattattaaaaaaaaatcaatttattctgttgcgggaggaggagatacaattgctgttttaaatcaaataaatgctacaaaagattttgattttatttcaactgctggtggagcatttttagaatatcttgaaggaaaagaacttcctggtataaaagctctaaattaa

SEQ ID NO: 250482 - DNA, 1042 bp, Unknown
  Bacterial polypeptide expressing nucleotide sequence isolated from the Sargasso Sea
aaccagaatcatttcttcagtacctacaattaaatatcttgtaaacagaaattgtaaagttcttttaacatctcatcttggcagacctgaagaaggtaagtttgatcaaaaattctcaatgtgtccggtcgctgaaaaattatccgaaattttaaaccatgaaattgatcttattgattccatagatagcagcgatattttcaacacaactcaaatacaactactagaaaatttaaggtttcttatcggtgagagagacaacaatgaagagcttggaaatcagctagcaaataaaggagatgtttatatatttgatgcttttggaactgctcaccgtaaacaggcttccacatactcagctatccaacaagcaaagctttcctgtgctggacttcttttagagaaagaggttaatgcactcaataaagctttaacctctattgaaaatccattcactgctgtaatcgcaggctcaaagatttcaacaaagcttgaacttatagctcatttaaactcaaaagcagatctcattattgttggaggtgggattgctaatacctttctgaaatctcagggctttaatgtcggagagtctttggtagaaaatgacatgattgaaattgctaaagagctttttaattccggcaaaatagtattacctaataaagtcattgttgctgattcaattgatagcaattcctcagctatcaaaaatatagattctgttagtagttcggataagatttttgatattaacttaagtagcaatatgtcggaaatccttaagaactcaaaaactattttatggaatggaccagtaggagtttttgaaaaagagccttttcagaaaggcacacatcaattagctaaaactattgcagagtctgatgctttttcacttgctggaggtggagaaactatagctgctataaataaatttattaaaaaagatgaggtatcatattgttcaacaggcggaggagcttttttagaatatatggaaggcaaattactcccatcaattgaggctttaggaggctaa

SEQ ID NO: 250483 - DNA, 1168 bp, Unknown
  Bacterial polypeptide expressing nucleotide sequence isolated from the Sargasso Sea
gatcagaaaaataaaaccgtacttattcgctttgacctaaatattccgctcaataaagaagcctctacaataagcgatcggattacgagaattaaaaatccaatacaaaaccttcttaataagaataataaagttgtaattctgtctcatctaggaagaccaaaaggaaaaagaaatgatgagctttcacttaatcaaataatcagctcattagaaaacgtattgcaaaaaaagataatatttctttcaaattgtataggcgatgagattgaaaaaaaaataaattctttaagccaggattcaattattcttcttgaaaattgccgttttcatgaaggcgaagagcaaaatgataaattttttgcatccgagctatcaaaattagcagacgtttatattaatgatgcttttgcatgctctcatagagctcacgcctcaattgaagcaatcacaaacttcataccatcttattgtggagaattattacatgaagaaatattaaacttaaatgatgtagttaataaccctaaaactcctgcattaactatcattggtggctcaaaaatctctacaaaaattacagttataaaaaatctcctgcaaaaaatggactcaattgtcattgctggtgggatggctaataattttcttaaatatttaggaaatgatgtaaaaaattcattgattgaaaatgatgtagatcacctcgtaaaagaaattattaattttgcaaatgagcaaaaatgtaaactaattttacctttagatgtcgttacagctgagaaagtatctgaaactacagaaataaacgaatgtgcagttgatgctgtaaaagataatcaaatgattttagatattgggaaacaaactatcgagttgattaagaatgaaatttcaaattgtgaaacagtattttggaatggaccagtgggtgtctttgaaactaaaccatttcataaaggcacattcgagatcgctaaattcattgctgaaattactgataaaaatagtcttcgatcttttgctgggggtggtgatacaatttccgcactggatatggcggctgttaaagataaattttcttatgtttctactggcggaggagctctacttgagctaatagaaggtaagaaattgccgggtttagttgccttaggagctttataaa

SEQ ID NO: 250484 - DNA, 1195 bp, Unknown
  Bacterial polypeptide expressing nucleotide sequence isolated from the Sargasso Sea
aatgtctgatttaaaaattttctctgacagtgttcaagttaataacaagagagtaattgttagattagatttaaatgttccaattaaaaattttgaaattgaggatgatactagaattaaagttgtcatcccttttttaaataaacttcttaaaaaaaaagcaaaagttattttaattacacacttggggagaccaaagggaaaagtggtgccagaattttctcttaatccaatatttaattatttacaaaaaaattttaaagagaaaatatatttttaccaaaatggttttgatgaaaacgctgttgacgctagcaacaaacttgcttcaggcgagatgcttttgtttgaaaatattcgtttttttaaagaagaagaaagtaatgaggaaacctttgcaaaaaagcttgcggatcttggagatatttttataaatgaagctttttcttgctctcacagaaagcaagcgtctatacataaaataactaaatttattgacagttatggggggccaactttagaaaaagaaacaaattctattgacctaatactaaagaataaaaaaggaccagttacctgcatcatcggaggctcaaaagtttcaaccaaaataaatattttatcaagtttgtcaaaaaattcagataatattgtgattgtaggtgctatggcgaataattttttaaaatttaatggcttaaacgttggcgcatcacttttagaaaaagactcggaaaatatagttaaacatattattaaaatggcagagaaaaataaatgtaacattattattcctgttgattgtaatacttctataaatgttgatggaagctcaacatataagtcgttggatgatgttgagtctgaagatatgattttagatgttggtaaaaaaactatagaattaattagcaaaactatagataactcaaacactgtattttggaatggacctgcaggatattatgaaaataaaaatttttcagttggttcagaattaatagccaaaaaaattgctgagaatacaaaatctaagtccttaatatctattgttggtggcggagatactgttgcagcaatcaaaaatactggacttgaaaaggtttttacatatttatcgacagccgggggtgcattcttggaatctcttgaagggaaagagctgcctggtatacaagtattaaaagaaaactaa

SEQ ID NO: 250485 - DNA, 1204 bp, Unknown
  Bacterial polypeptide expressing nucleotide sequence isolated from the Sargasso Sea
atgataaaaattaaaaatcttgatgatcttttagaaaacaatctaaaaggtaaaactgtttatttgagagctgatcttaatttacctactatcaatggcaaagttacagatacgacgagaataaaaagtattcttcctactattagagaattaaaaaaaaataaatgcaagattgttatcttgtctcactttggaagacctaaaggttcatataataaaaaaatgagtctcaaacatataattcctaaagttgaaaaagtaactcgaagtaaaatttatttctcaaaggatcatagcggaataaattttgaaaaattaattaaaaaaattcctgatggaagtgttgttataatggaaaatacaaggtttcataaaggagaggaaaagaactttaaatactttgcaaaagacttagctaaaaattgtgatttttttgtaaatgatgctttttctgttgctcatagaagccatgcatctgttacaggattaacaaattatgttccgtcttttagtgggcgttctttagaaaaagaagttataacggtcagcaaattcttatcctcaaaaaataaaaaaaaattagctatcattggtggttccaaaatctcaactaaaattaatttaatcaataaccttttaaaaaatgtaaacgcaattgttattggaggagcaatggcaaatacatttctgctagctcaaggaaaaaaaataggaaaatcattaaatgaaaaaacgatgattaaaacggcaaaaaaaattatgtctaatgcttcaagaaaaaaatgcaaaattattttaccagttgatgcagttgtcgccagcaacttaaaaaaaggtggaaagttttccgagtataatattgataatattcctgatgatggattaatcttagatatcggaaaaaatagtatatccataatagatgatgaaatttcaaaaacaaaagaggtattgtggtgtggtcctcttggattattcgaacaaagtccttttcatgtaggaactgcttcagtagcaaaaaccctgtcaaagatgacaaaaaatggtaaaattgtatctgttgctggtggtggcgatacagtggctgccataagtcaatcaaactatgttaatgattttacatatatatcaactgctggaggagcttttttggaaatgatagctggtcaaaaactacctggtattgaagtgttaaaaaaataaa

SEQ ID NO: 250486 - DNA, 610 bp, Unknown
  Bacterial polypeptide expressing nucleotide sequence isolated from the Sargasso Sea
aggctccaaaatttctacaaaaataaatattattaataatttagtaaaaaaatttaataatataataattgttggaggtatggccaatacaattcttaaacatactggtttcaaagttggtaaatcaatatgtgaggataattgtgaaatgctaataaaagaaatttttgattattctaagaaatacaattgtaaaattatatgtcctgaagatgttgttgtctcgcaaaatattgaaggtaatggaaaaaataaaaacataaatgagattaataaagatgaaatgatattagacattgggccaaaaactatatttgctataaaaaaaataataaatgagtcaaatacagtgttgtggaatgggcccgcaggatactttgaaaatccaaatttccagaatgggactagagaaatacttgaatcaatttcaaataaaacaattaatgataaaattttttctgtagctggaggaggagaaaccgtagcggcaataaataaatttaaaaagctggaatcttttacctttgtttcaactgctggtggagcttttttagaatatcttgaagggaaaactttacctggtataaaagcactaaatcaaaatgtctga

SEQ ID NO: 250487 - DNA, 1123 bp, Unknown
  Bacterial polypeptide expressing nucleotide sequence isolated from the Sargasso Sea
atgaaagctttgtcagaaattgatttaaataataaaaaagtcgggataaggctagacttaaatgtgccaataagtgcaggcaaaattttagatcatgaaaagttaaatgcagccttaccatcaataattaatattctcgaaaaaactagtaatttatgtgtcatcagtcatcttggaaggccaacagaaggaagtttcgatcaagaactatcacttttaccaataaaagaatggtttgaagaaagaatggagaaagaaattccgcttattaatgatttagactcagttcctgaaggcttatcatttttggagaatattagattttttagtggcgaaaaagaaaataacgaagatttagctgaagaaatagctaatacttttgatctttatgtgatggatgcgtttgcgacagcacatagaaagtctgcttcaacatatggagcgataaaaaaatctaaaaatgtttgtatgggaatgctattttcttatgagataaaaaaaattgatcaagctttaaaagaaagttcaaaactcaatagcattgttgggggctcaaaaatatcaacaaaaataaaggtattagaaaatcttctagaaaaatcacaaaaagtattagttggaggaggcatagccaatacttttttgaaagcaatgggctatgaaattggtaaatcgcttgtagaagataatatgcttgatatggctgaaaaaatgctcaaaactgacaagattatagtgcctgaaaatgtttatatagcagaatcatcagaagtgggcgaagcgatactagtcccagttgaagatgtccataaagacaagatgatactagatatagagttcaacattaaagagatggataagctcttaactgagatgacgatatggaatggtcctttaggtatgtttgagcatgataaattttcaaatggcacaaagaaattaataagctatcttgaatatacaagtagtaaagttattgctggtggaggcgaaaccatttttgcaattaaaaaattctctgacattaaaaattttgattatgtatcaactgctggtggtgcttttttatcctatctaggcggagatttacttccagccattgaagcgttaaagacaaaataaa

SEQ ID NO: 250488 - DNA, 375 bp, Unknown
  Bacterial polypeptide expressing nucleotide sequence isolated from the Sargasso Sea
atggaaaaggaaaagaaaaaaatataaatgaaattgatgaagatgaaatgatattagacattgggccaaaaacaatattatctatcgaagaaaaaataaataattctaagactatattatggaacggtccagcaggatattttgaaaatccaaatttccaaaatggaactaaaaaaattttagaaataatttcccaaaaaacaactgaagataaaattttttctgtagctggaggtggagaaacagttgctgtaataaataaatttaaaaaatttgactcatttacatttgtttcaaccgctggtggagcctttttagaataccttgaaggaaaaactttacctgctataaaagcattaaataaaaatgtctgaa

SEQ ID NO: 250489 - DNA, 816 bp, Unknown
  Bacterial polypeptide expressing nucleotide sequence isolated from the Sargasso Sea
atgatattgaattttcaaagaaattatctagcttaggtgacatttatgttaatgatgcgttttcttgctctcacagatcacattcatctattgatggaataacaaaatatattccttcatattatggcttacaaattactcaagaaatactagcattaaaaaaaattacttctgaaataaaaaaaccagtctcacttattattgggggttctaaaatttcaacaaaaattaatataattaataatcttgcaaaaaaatttgataatataattattgttggtggcatggctaacacaatgttaaagcatacaggtttaaaaataggaaaatcaatatgtgaaaatgattgtgaaactttagtgaaggaaataataagtatttcaaaaaaatttaattgtaaaattacctgtcctgaagatgctgttgtttcaaaaagtattgagggtgatggtaaaaataaagatttaaaagatataaatgacgatgatatgatattggatatcggtccaaaaacaattttaatgataaaaaaaataatttataattcaaatacagttttatggaatgggccggctggatattttgaaaaccctaattttcaaaatggaactaaagaaattgtggaaattatttcacaaaagacaattaacgataaaattttttctgttgctggaggtggtgaaacagttgcagcaattaacaagtttaaaaaattagattcttttacttttgtatcaactgctggtggtgcatttctagaatatcttgaagggaaaaatttacctggtataaaagctttaaatcaaaatgtctgaa

SEQ ID NO: 250490 - DNA, 711 bp, Unknown
  Bacterial polypeptide expressing nucleotide sequence isolated from the Sargasso Sea
caacccattcagcaattaaaagtgcatctatagcatgtgcaggccttcttctagaaagagaaaatgaatttttacttaaagcattaaaaaattataaaaatccatatatagctgtaattggaggcgcaaaagtttcaaccaaacttgaattaataaaacatatttgttcagttgctgaccaagtaattgttggcggtggaatcgcaaatacttttttgaaagcatctggttttaatattggaaaatctcttgttgaggattcgatgatagatatcgccaaggaaatacttaaagaagggaaaattgtcttaccaacaacagtcataacatctaagacatttgaaggcgatgatattagagaaacttccattaatgaagttacggatgaagagatgattctagatcttcacttaaaaaacgagacaatcactttgattgagcaagctaataccatcttatggaatggcccaatgggtgtgtttgagaatagctccttttcaaaaggtaccaaggatctttcagaagcaattgcaaattctaaggcattttctttagctggcggtggcgaaacattatcagcaattaataaatatattaaatcagatgatgtatcatattgctcaacaggtggaggtgcctttttagagtttatggagggtaaaattctgccatcaattaatatgttaaattcaaaaataacagggagttaga

SEQ ID NO: 250491 - DNA, 628 bp, Unknown
  Bacterial polypeptide expressing nucleotide sequence isolated from the Sargasso Sea
aatgagaactatagatcagtttaattttaagaacaaaaaggcaataattagggttgattttaatgttcctattgacaacaacaaagtaacagatacaagcagaattaaagcagctaaacaaacaatagacaaggtttgtaacgacggcggatcatgtgttttggtgtctcacctagggcgaccaaagggttttcaaaaagaattttccatgaccaacattataaatgatgttgaaaatgttttagaacgaaatgtttttttatctaaagatgttataggtcctgacgcaaagaagaaatcacttcaccttaaaccaaaccaagtattacttttagagaatgtaagattccatgatgaagaaaaaaaaggcgacatagattttgcaaaagagctttccttgttggccgattgctatataaatgatgcttttggaactgcacacagatcacatgcttcaaccactacaatacctactttctttaatgacaagttctttggaaaatgtttagaacgagaagttaactcaattaaaaaagttttaagttctggagaaaaaacaatacttgcaattttaggaggagcaaaaatttcaagtaaaatccctattctaaaaacatatttaaaatag

SEQ ID NO: 250492 - DNA, 1201 bp, Unknown
  Bacterial polypeptide expressing nucleotide sequence isolated from the Sargasso Sea
ctgcgtaagatttctacaatagatttcaagtcgtcaaatacgacatctggaaagactgttctcattcgagtagactataatgtacctgtcgaaaatgaattagttgttgacgactatagaatacttaaatcaataccgaccataaaatattgcctagatcaaggtgctaaggttgtattaatgtctcatatgggaagaccaaaaggtaaaattgatgataaattatcacttattcctgctggagaaaaattagcagaattgctagaaatgccaataaaattttcagaggactgtatttcagaagactctatagatgtttctagaaatcttaaagatggagaaattcatctgcttgaaaatttaagattttataacgaggaaactgaaaatagttctgatttttcttcacagcttgcaaaacatggttctatttatataaatgatgcttttggaactgctcatagaaatcatgcttcaaattcaggtattacaaaacattttgctactaaaggaatgggtcttctaattgaacaggaaatgaagtttctttctgacaagctttcaaatccatctaaaccattaactttaattattggaggttcaaaaattgacactaaaattggagttattgagaattttttagggcttgcagataatatcataataggtggagcaatggcaaatacttttttactagctatgaatcataggattggtatttccttagctgaaaaagaaaaaatgaatgttgcaaaaaatcttttaaaaaaagcatcaaaaagaggtactaaaattattcttccaatagatttttcaggagaattagagacatttggatctggtgatatatgtgttgctgatgcaaaagatattcctaataatatgatttgtgaggatataggagaaaaatctatcaagcttttttcagatataatttctttatcaaaaacaatattgtggaatggaacagtaggtgttgctgaaaatccaaattttgctgttggaacaaatagaattgttgatgctatcattgaaaaccagttaacttcaattgttggtggtggagatacagttgctgctatcaggaattataatgaagaatatattaatgatttctcacatgtttctacaggtggtggatcatgtttagaaatgttgtctggtaaaaagttgccagctttggagatgttgaagaaatgag

SEQ ID NO: 250493 - DNA, 541 bp, Unknown
  Bacterial polypeptide expressing nucleotide sequence isolated from the Sargasso Sea
tattatgaagtcgcagaccatattatcgtaggtggaggtattgcaaatacttttataaagtcttcaggccttaatgtaggaaactcactgactgaacaatcaatgctagaaattgcaaagagcatcttggataaaggtaaaatcatactacctaatagagtattaacatctaaaacatttgaaggagaggatataaaagaaacctcaataagcaatattggtaatgatgaaatgattttagatttatacctagagcaggagacaaagactttgattaataatgctaagactattctttggaatggacccatgggagtatttgaaaattctttatttgaaaatggcacaaaggaactttctaaagaaattgctaaggctaatgctttttctcttgctggaggaggcgaaacattgtcagcaataaataaatatattaaatcagatgatgtatcatattgttcaacaggcgggggcgcctttttagaatttatggagggtaaagttttaccttctattaaagctctaaattcaaaaaaatagg

SEQ ID NO: 250494 - DNA, 1174 bp, Unknown
  Bacterial polypeptide expressing nucleotide sequence isolated from the Sargasso Sea
ttgataataaatgcagtaagtgatgaaaaatatcttggagatgtccttgttagatcagacttgaatgtaccgatcgtaaataatgaaattagtgatgattttagaatttctaaatctcttgaaattattgataagatttatgattattctcgttctatcacatttgttagtcatttaggtaggccaaaggctaatgatgtggataattcattaagaccaatagctgaaaatatgtcagaaaaacttaaaaacgaaaaagtacattttataaaaagtatttatggtgatgatgtgaaaaaatctataaaaaatcttacttcaaagatatttcttctagaaaacttaagattcgatgaaggtgaaatgaaaaatgatattgaattttcaaaattagtaacgagcccatttgaaacttatatttttgacgcatttggtgcttcacatcgtcaacatgcgtctgtagtaagttttggtaattttcttaattcttatcaaggtccattaatgaataaagaaatttcagaactagacaaattattaaataatgaagaatctggttattctgttttgttgggtggagcaaaaatatcagataaattgggtttaatcgataaacttttaccaaaagttgaacatctaatgattggagggggaatgtgttttacttttcttaaagcaatggattatgaaattggaaaatctcttgttgaaaattcatttatttcaaaagcaaaagatttaatcaattcaaaatatggaaaaaagattgtcctacctacagattttggagtcactgaatctattcaaagcaatattagacatgaaataaatagtgataatttttctaaaacccagataggtattgatattggaccagatacaattactaaattttctaaaattatatcttcatctaaaaatttattttggaatggacctatgggtatttttgaacttgatcaatttagtcatggaacaaaggcaattactcaagcaatagctaaagcagacggatatacctctgttggagggggagattcagtgagtgctataaacaaattttcaaatttaaataactttaatcatgtttctactggtggcggggcatctctagagtacttagaaggtaaaaatttacctggagtaaacatttacaaaccacttataatttgat

SEQ ID NO: 250495 - DNA, 1015 bp, Unknown
  Bacterial polypeptide expressing nucleotide sequence isolated from the Sargasso Sea
cgttacttttataagtcaccttggtaggcctaaaggaacagaagaatctttatcattgaagccaatctcagatgaaatgaccaaactattaaaccaagatgttgtatttataaataataatttagatgaagacattaaaaatattttaaagactaaagagaaaggtatatttttattagaaaatcttagatttaatgagggggagataaggaatgatgagaaatttgctaaaagtttagcaaggccctttgacacttatattcttgatgcttttggtgcctctcatagagaacatgcttcaatagttaagattggagatcacttaaattcatttcaagggcctttaatgtctaaagagattgaagaattagataaagtattaaatgtatctaatgaggattttacgataatacttggaggagcaaagttatcagataagttagcacttataaaaagactcctccctcgaattaatagcttattaataggcggaggaatgtgttttactttcttgaaagctttaggtcataatataggcaattcattatgtgaggatgagtttattgaatcggctaaagaaattctagattcagctgacggaaaaaaaataactttaccaatagattttggaattaccaaaataattgacagtcatgcaagaaacgatattcaattatcccaatttagtgatgatgatatcggtgttgatataggtaaagaaacagtaaataaatttcaagaaatactatcaaaatctagaactatattttggaatggcccaatgggagtatttgaagttgatgaatttagctatggaacaaaggaaataacaaaagcaatagctgaaatggaagtttactctatagtaggtgggggagattcagtaagtgcaattaataaattttccagtttagagaaatttaaccatatatctacaggcggaggagcatctctagagtatttagaaggaaaagctctaccgggtgtaaatatttataatcaacttataatttag

SEQ ID NO: 250496 - DNA, 712 bp, Unknown
  Bacterial polypeptide expressing nucleotide sequence isolated from the Sargasso Sea
atttaagtcctcagtagctggattccttctagaaaaagaattgaaatacttacaaggagcaatagattcccccaagcgtccattggcagcaatagttggaggatcaaaggttagtagcaaaatcggagtactcgactctttactagataaatgtgacaaaattatgattggtggaggtatgatttttactttttataaagctagaggtcttgatgttggaaagagtcttgtagaagaagataaacttgagcttgccagagatttggaggtaaaagcaaaagcaaaaggagtcgaattattattacccactgatgttgttttagctaatgaattttctcctgacgccgaaagtaaaatatctcaaattgattcaattagtgggaattggatgggtcttgatattggtccagattccattaaagtttttcaaaatgctctcgcagaatgtaagacaataatttggaatggtccgatgggtgttttcgaatttgataaatttgcagaaggtacaaatgcaatagctacgactcttgcagacttaagtgctttttctgaagtttgtacaataattggtggtggagattcagttgcggcagtagagaaagcaggattagctgacaaaatgtctcatatatctactggaggtggagctagtttggaacttttagaaggcaaaactttaccaggtgtcgcttctttgaacgaggtttag

SEQ ID NO: 250497 - DNA, 1156 bp, Unknown
  Bacterial polypeptide expressing nucleotide sequence isolated from the Sargasso Sea
aatgattaatctatcttccatagatatagcaaacaagaatcttgtggtacgagttgatatgaatgtaccaatggaagatggacacatcttagatgcaacaagaatagaagcctgtatacccacgattaattatgctttaaaaaataacgcaaaaatcttgctcataagccatcttggcaggccaaccgaaggaagctttgaggaaaagttttcactaaagcctgttgctaaacatttaagcaatattatcaataaaacctgtaagttaattagtagtttagaatctgatgagatctttgatggtgaatcaaatgtccaactattagaaaatattagattttttaaaggagaaaaagaaaattgcaaagatttgggaaataaactcgctagtcttggcgacatatatgtttttgatgcctttggaacagcacatagagagcaagcttcaacacattcagcaattaaaagtgcgcctatagcatgtgcagggcttcttctggaaaaagaaaatgaattcttatttcaggcattaaacaaatatgaaaagccttatatagcagtaattggaggagccaaagtctcaaccaaacttggattaataaaacatattagtggggttgccgatcacataattgttggaggtggtatcgctaatactttcttgaaagcttctggttttaatgttggaaaatcccttattgaggattcgatgatagatgtggcaaaggaaatacttaaacaaggaaaaattgttttaccaacaacagttataacgtctaaaacatttaaaggagatgatattagagaaacctccattaatgaagttacggatgaagaaatgatcttagatttatatttaacagacaagacaaccgccttgattgagaaagctagtactatcttatggaatggtccaatgggtgtatttgagaatagcttcttttcaaaaggcactaaggacctttcagaagcaattgcaaattccaaggcattttctttagctggtggcggcgaaacattatcagcaattaataaatatattaaatcagatgatgtatcatattgttcaacaggtggaggtgcctttttggagtttatggaaggcaaaattttaccatcaattgatatcttaaattcaaaagtaacagggagttag

SEQ ID NO: 250498 - DNA, 1062 bp, Unknown
  Bacterial polypeptide expressing nucleotide sequence isolated from the Sargasso Sea
tctccaataaaaataaaatttttataatagcccattttggaagaccaaaaggagaggttttggaaaaatattctttaaagtttatactttcgtcccttagagaaatacttgaaattaagaaaatttattttttagaaaatttacaaaaggataatattaataaaacaattaatgacatgaattacggtgaagtttgtctaattgaaaatattagatttcataaaggtgaggagaaaattgatttaaattttgcaaaaaatataagtagcttgtttgatgtatatgtaaacgatgcgttttctgcctctcatagaaatcatacatctattacaggttttgcaaaatacattccagcagttgctggcaaccatttaattcaagaaataaaaaaaattgattcatttgtagaaaatgtaaaaaaacctaatatggcaatagttggtggttctaaaatttctacaaagataaaattattaaataatttaattaaacagtttaattgtattgttataggtggagctatggctaatacatttttgctatcaaataatataaatataggcaaatctttagttgaaaaagatttagtgaatgaagcaaaaaatatacaaaaaaaagctaaaaaatataattgtaaattaattcttcccactgatgtagtttgtggaaaaagtttagatgataaaaaacccatagaatttaatattaatgaaattgaatcacattttatgattttagatttaggaaaaactacaactcaaataattaatcaagaaataataaattcaaaaattgttttatggaatggacctgttggcgcatttgaatacaagccatatgataaagctacaaatgcaattgctcaaaatattaaagaaaatggaaaaaaacttaatatagatattcttgctggaggcggagatactgtttctgcaattaaaaatgcaaatgcagaagatggttttaattatatatctaatgccggcggtgcatttttagagtggttagagggaaatcagtctccgggagttattgcaataaaagaaaacaactttatctaat

SEQ ID NO: 250499 - DNA, 874 bp, Unknown
  Bacterial polypeptide expressing nucleotide sequence isolated from the Sargasso Sea
catgaaaactgtagtattaaaatttggtggaacttctgtaggaaatatcgatagaataaaaaaagtgtgtaaaattatagcaacctataaaaagaaaaaatataatgtggttgtaatttcctctgctatgagtggtgttactaatgaactagttaataaatctaagtcattaagtaataattttgatttggcagaatatgacgcactattatctactggtgagcaagtttcttgtgcacttatagcaggaagattaaatcatattggattaaaatctagatcttggttgtcttggcaattaccaattgttacagagggaaatcattcaggtgctcgaataaataaaataaatattaatgaattaaatagatatattaaaaatggaggaattccagttgtaactggttttcaaggcatcaataaaaattatagaataactactattggtagaagtggatctgacgcaacagcaataatgttagctaaatatattaaagctgacgaatgcataatattcactgacgtcgaaggggtttatacaactgatccacgacagcataaaaaagcaaaaaaaataaaaaaaattttttatgatgagatgctcgaaatggcatcattgggttcaaaagttatgcaaccaacttcaattcaggacgcaaagctgaatgaaatagatataaaagttcaatcttcttttgcatccaagtcaggaactttgattacaaattcaaaaaaatcatttagtgatcaaataataactggaatctcatcaacaaaaaatgatgctaaaattacaatagttggtgttaaagacagacccggtgttgctgcatcaatttttaaaccattatctaaaaatttgattaatgttgat

SEQ ID NO: 250500 - DNA, 361 bp, Unknown
  Bacterial polypeptide expressing nucleotide sequence isolated from the Sargasso Sea
tatgcaacaagttatagttcaaaaatttggaggcacatctgttggttcaggagaaagaattgctgccgttgctgaaattataaaaaaagaggcggaaagaaatactgttgtagtagttgtatcagcaatggctggagaaacggacagacttatagagctttcaaagttgtttggtaataattcaaataaaagagagtttgacgcattaatatcaacgggtgagaaggtaagtgcatctcttcttgctatggctctagattctctcggattaaaagcaaaatcttattcggctgctcaagtttctctaaaaactacttccaatttctcaaaagcaagaattctcgatatagataaagaaaaa

SEQ ID NO: 250501 - DNA, 864 bp, Unknown
  Bacterial polypeptide expressing nucleotide sequence isolated from the Sargasso Sea
tcaaattcaagaatagtaaatgtaaatgtaaaaaaaattaataagtacttagatcaaggtattgcagtagtacctggatttcaaggagtttcaaaaaatggggatatcacgacaattggaagaggaggatctgatgcaactgctgtagcttttgctaaactttttaatgctgatacgtgtgaaatatatacagatgttgatggagtttattcatcagatccaaataaaattccggttgcaaaaaaaattgataaaatttcttatgacgaaatgttagagctgtcatccctaggagcaaaagttatgcagccctcagccgtgcaaaccgctatgatgtatgatatctcattggaggtaaaatcaacttttacggatagacgaggaacaaaaatttttgatcaaggtaaaattgattattcaaaaagtgtaactggagttgcctattctaaagatgatgcaaaattgaccataattggagttgaagataaacccggagtagcagctgatatatttgaaccattaaataatgctcaaataaacgtagatatggtaatacaaaatgtttcttcagactacagcacaactgacattacgttcacagtaaaaagggatgacttattaaaaacaaaaggtattttgaaaaataataaaaaaataaagtataaaaatattacacataatgaaaaagtagcaaaggtgtctattgttggtgccggcatggtttcaacacctggcgtaacttataaaatgtttagagctcttgcagacgacaaaattaatattttagccatttcaacatctgagattaaattatcagtgataattgaggaagaaaacactttgaaggctgttaaaaaattacat

SEQ ID NO: 250502 - DNA, 535 bp, Unknown
  Bacterial polypeptide expressing nucleotide sequence isolated from the Sargasso Sea
atgaaaattgttgtacttaaatttggaggcacttctgtaggatcagtggaaagaataaaaaaagtcgttgatattattataagtttcataaagaaaaaatataaagtaattgttgtttcttctgctatgagcggagtaacaaacgatctaattaaaaaatctaaagaattatcttctgattttaatacatcagaatatgatgcgcttgtttcatcaggtgaacaaatgtcatgtgcactaatagctggcagattgtgtcatattggatataaatctagatcttggatgtcttggcaaattccaattgttgctgaaggaaaatatacttcagcaaaaattagagaaattaaacaaagtaatatcaaaaaatatttgaaatcaggaggggtcccaataattacaggttttcaaggtataaattttgataatagaattacaactttaggaagaggtggttctgatgcaaccgcgataatgttggcaaaatttttcaaagctgaaaaatgtataatttttaccgatgtagttggtgtca

SEQ ID NO: 250503 - DNA, 539 bp, Unknown
  Bacterial polypeptide expressing nucleotide sequence isolated from the Sargasso Sea
aatgaaaattgtagtcttaaaatttggaggaacttccgtaggcaatttaaataggattaaaattgtctcaaacatagtttcaagttatataaaaaaaagatttaaagtaatagttatctcatctgcaatgagtggcgtaacaaatgatttaataaaaaaggccagggaattaagtagtgactttaataaatccgaatatgacgtattactatctaccggagaacaagtttcttgttctttaattgcaggaaggttaaattatcttggttataaatcacaatcatttatgtcatggcagataccgataattgctaatggcccccatggttcatcaaggataaattatataaataaaaataaaattttaaaatatttaaaatctggaggcacaccaattgttactgggtttcaaggagtaaatcattctcaacgtttaacgacattaggaagaggtggctcagatgcttctgcaataatgatcgctaaattttttaatgctgaaaaatgtataatttatactgatgttgatggtgtttata

SEQ ID NO: 250504 - DNA, 870 bp, Unknown
  Bacterial polypeptide expressing nucleotide sequence isolated from the Sargasso Sea
aaatgaattgataaaactttcgaatactgttgctaaaaattttgataaaagagaattagacgtccttttatcttctggagaacaaataacatgtgctttactagcaggtgctttgatagaactcaatattaatgcaaaatcttggatgaattggcagatacctattttgacagaaggagagcattccaacgccaggataataaatatgaacactagcaagattaacgattatttaaaaaccggtgtggcgattgtaccaggttttcaaggaatctcaaaagatggtgaaattactacaataggtcgaggtggatctgacgcgtcagcagttgcaatagctaaattatttgagacagatacatgtgaaatttatacagatgttgatggcgttttttcgactgatccaaataaaataccggtagcaaaaaaaattgataaaatatcttatgatgaaatgttagagttatcctcggttggagcaaaggttatgcaatcatctgcagtacagacggcaatgatgtacaatattcctttagaagttaaatctacatttaccaatcgtattggtacaaaaatatttgatcaacaagagattgattattcaaaaagtgttactggagtggcatattcaaaagatgatgctaaaataacattaattggtgttgaagataagccaggagttgcagcgaatatatttgagccattaaataaatcacaaataaacgtagatatggttatacaaaatatttcttctgaacataaaaaaacagatattacttttactataaaaagagaagatctatctaaaacaaaagaaattttacagagtaatagtaaaattaagtataaagaaattactcataatgataa

SEQ ID NO: 250505 - DNA, 571 bp, Unknown
  Bacterial polypeptide expressing nucleotide sequence isolated from the Sargasso Sea
atgagtataacagtaatgaaatttggtggtacctctgttgcaaatatagagaggataaaaaacgtcgcagatattatcaaatataaaaaaaaaaataattcaaaattagtagtagtagtctctgcaatggcaggagttacaaatgatttggtgcaaaaatctaaagatatatcaagaaacttttctaatgaagaatatgatgtactattatcttccggagaacaagttacctcagcacttctatctgcttgtcttttagataagaatattcaggctaggtcaatgctggcatggcaaattccaattgttactgaaggtcagcataaaaatagcagaatattatctgtgaactctaaagctattttaaattatttagatatgaactatgttgtagttatccctggtttccaaggtctatctgaaaaaatgagggtttctactattggtcgaggtggatcagatgcatcagcagttgctttagcaaaagcattaaatgctgatcgatgtgaaatttatactgacgtggagggtatttttacaacaaatccagaaatatgtgataaagcaaaaa

SEQ ID NO: 250506 - DNA, 862 bp, Unknown
  Bacterial polypeptide expressing nucleotide sequence isolated from the Sargasso Sea
cggatggcaaataccaattattacagatagcaaccatcaaaaagctaaaattttaaatattgataaaaatagaatagatcaatttctaaaaaactatgatgtaatagtagttgctggatttcagggtgttgatatggatggaaatattacatcattaggtaggggcggttctgacacaactgctgttgctgttgctgcagctgttgatgcagatagatgtgatatttatactgacgttgatggagtttatacaactgaccccaatttggaacctaaggctaaaaaaataaataaattagcatttgaagagatgttggaaatgtcttcaactggagcaaaagtacttcatacacgttctgtagaattagcaatgaaaaacaatcttactttgcaggtactctcttcaataacaaaaaaaactggtacttttgttgtagatgaaaataaattaattgaaaaagaaatagtaagtggtgtaagctatagtaataatgaatcaaaattaaccttatctggtattgcagataagcccggtatatcagcaacaatctttggattgttagctaataataatattaatgttgatatgattgttcaaaatacatcacaagatggtgtaactgcaaatatcacatttactgtaccgaatagtgaaattcataatactaaaaaactattagaagataatcaaaaattaattgattttaaatctattaaaacagataccaatatttctaaaatttcagtaattggtatggggatgatgtctcaatcaggagttgccaagaaaatgtttacaactttagcagaaaattcaatcaatatattagcaatctcaacctctgaaataaagataagcgtc

SEQ ID NO: 250507 - DNA, 790 bp, Unknown
  Bacterial polypeptide expressing nucleotide sequence isolated from the Sargasso Sea
aataaaaaaatctaaaaatataagtcataacttcaaagactcagagtatgatgtgcttgtttctgcaggggagcaaatttcttgtgctttaatagctggaagattaagtcatatggggtacaagtcagagtcatggatgagctggcaaattccaattttagctgaaggaaaacatgcttattcaagaattactaacattaataaaaaaaaaattataaattatattaaagttggaggaataccaattataaccggttttcaaggtataaataacaacaatagaataacaacactaggaaggggaggctctgatgcttcggcaattatgtgtgcaaaattttttcatgcaaaaaaatgcattatttataccgatgttgagggtgtatatacaactgaccccaatattcttaaaaaggcaaaaaaaataaaaattatttcctatgaagaaatgttggaaatggcatcactcggagcaaaagtaatgcaaccaagctctatacaggatgcaaggttaaacgaaattgatattaatgtaaaatcctcatttgctaataaaaaaggtactttaattacaaaaagaaaaaatatatttaggaataaaataataacaggaataacttctacaaaaaatgatgcgaaagttactcttgtgggagttaaagataggcctggagtagctgcatcaatatttaaaccactttctaaaaattcaataaatgttgatatggttgttcaaaatatatcaacagatggaagagaaactgatttgacatttacaataaactcagaa

SEQ ID NO: 250508 - DNA, 900 bp, Unknown
  Bacterial polypeptide expressing nucleotide sequence isolated from the Sargasso Sea
taatagtcatcgtatccgctatggcaggaaagactaatgagctaataagcttagcgaatgaaatttcatcaaattttaacaaaagagaactcgatgtgcttttatcatctggtgaacaagtaacatgttctttactcgctggagctttgatagaattaaaagttaattcgaaatcttggctgaactggcaaatacctattttaacagagggtaaacacaccaatgcaagaattgttaatatgaatattgataaaataaatgattttttaaaagaaggtgtagctatcattccaggatttcaaggcatctcaaatcaaggagaagttaccacgattggaagaggaggctcagatgcatctgcggtagctgtagcgaaattatttaaaactgattgttgtgaaatttatacagatgttgatggtgtttactctactgatccaaataaaattcctgtagcaaaaaaaattgaaaaaatctcttatgatgaaatgttagagctttcctctttaggcgcaaaagtaatgcagtcctcagctgtccaaactgctatgatgtatgatattcctcttgaagtaaaatcaacttttaccgatagaaaaggaactaagatttttaaccaacaaaacattgattattcgaaaagcgtaactggcgtggcttactctaaagatgatgcaaaaatcactttgataggtgtcgaagataagccaggcgttgctgcaaatatttttgaaccacttaataacgctgaaattaatgtcgatatggttattcaaaatgtttcttctgatcaacaaacaaccgatatatcttttactattaaaagagttgatctttttaaaacaaatgaaatcttaaaaaacaataaaaatattgaatacagaaagtattataaataat

SEQ ID NO: 250509 - DNA, 835 bp, Unknown
  Bacterial polypeptide expressing nucleotide sequence isolated from the Sargasso Sea
aatggcaaaaaaagtattaaaatttggtggaacttctgttggaacgacagagaggattctacatgtcgctcaaattattaaaaaagagcatgattctggcaatgaagtcatagctatagtttcagcaatgtctggtaaaacaaatgaattgcttaatcagtctaaaacaatctctcaagatttcaataaaagagagcttgatgtgcttttagcctcaggagaacaagtgacaagctctttactgtcaggagcactaatagaacttggtgttaactctaggtcatggcttaattggcaaataccaattttgactgaaggtgaaaatttaaacgctagaattataaatatgaatgtttctaaaataaataagtttttatctaaaggaggagttgctataattcctggattccaaggagtatcaaaaaatggagaagttactacaattggtagaggcggttcagatgctacggctgtagctgttgctaaaatatttgaagcagataaatgtgaaatatatactgatgtggatggaatttattctactgatccaaacaaaatacctgtagcaaaaaaaatagataagatatcttatgaagaaatgctagaactatcatctttgggtgcaaaagttatgcaatcttctgcagtgcaaactgccatgatgtataatattcccttagaggttaagtctacatttaccgatagacaaggaacaaaaatctttgatcaagaaagcatagattatacaaaaagtgtaacaggagttgcttattcaaaagatgatgctaaagttactttgaccagggtacaagacaaaccaggagtcgcagcaaat

SEQ ID NO: 250510 - DNA, 705 bp, Unknown
  Bacterial polypeptide expressing nucleotide sequence isolated from the Sargasso Sea
catgaaaattgtagttttaaaatttgggggcacttcagttggtacaataaaaaagattaaaaaagttgccgaaataatcgctgattacaaaaagaaaaattataaagttgtcgttgtttcatcagcaatgagcggtgtgacaaatgagttagtaaaaaaatcttttgaaataagtgataatttttctgaagcagagcatgatgttttggtttcttccggagaacaaatggcttgttctctgatagcaggaaggttaattcataaagggtttaaatccagatcttggttatcctggcaagttccaattattacagtgggaacacataagaattcaaggattaatcaaattaataaaaataaaataataaaatatataaaagagggcggcataccaattattaccgggtttcaaggagttaataatgaaaatagaattaccactattggacgaggaggatctgatgctagtgcaattatgtttgcaaaatttttaaaagctgagagatgtataatttatactgatgttgaaggagtatacactacagatccaaataaattaaataaagcaaaaaaaattaaagtaatttcatatgaggaaatgttggaaatggcctcacttggcgctaaggttatgcaaccagtttcaattcaagatgcaagattaaatagaattgatattgaagtaaaatcatcttttataaaaaa

SEQ ID NO: 250511 - DNA, 904 bp, Unknown
  Bacterial polypeptide expressing nucleotide sequence isolated from the Sargasso Sea
agcaatgagtggtgtaacgaatgatttagtaaaaaaatcgagaaatataagtagcaattttaatttttcagaatatgacgctcttgtttccgcaggtgagcaaatttcatgtgccttaatagctggtagattaaatcatattggatataagtcacgttcttggacaagttggcaaatacccatattgactgaaggagaacataaatcatcaagaataagtaaaattaataaaagaaagataattaattatattaagacaggaggaattccaatcattactggatttcaaggtataaataataataacagaataacaacccttggaagaggaggctcagatgcttcagcgataatgtgtgcaaaattttttaaagcaaaaaaatgtgttatttttacagatgttgatggagtttatacaactgatccaaataatttaaaaaatgcaaagaaaataaaaataatttcttatgaagagatgttggaaatggcttcattaggagcaaaagtcatgcagccacattctatacaagatgcaagattaaatagaatcgagattgatgtaaaatctgcatttgttgaaaaaaaaggaactattataacaaaaaggaaaaatattattagaaatagaacaatcactggattaacatcaactaaaaatgatgcaaaggtaagtcttgttggcgttaaagataaacctggtgttgcggctgcagtatttaaacctctttctcaaaattacataaatgttgatatggttgttcaaacttcatcaagaaataacaaagaaaccgatattacatttaccattaaacttgatgatttaccgaaaactctgaagcttattaagcaaaataaaaaaataaaatatagagatttaatagccaacaaaggagtaagtaaagta

SEQ ID NO: 250512 - DNA, 976 bp, Unknown
  Bacterial polypeptide expressing nucleotide sequence isolated from the Sargasso Sea
ttatttgctttacaaaaacagttatcaaaaggtagaaatgcgcaagaatatgacgttgttgtttcttcaggtgaacaagtaactgctgggttactttcaatggccttgaattctcaagaaatccaatctagatcatttatgggttggcaaattccaattttaacagataatactttttctaaagctaatattgttaagatcagtatagatgttttaatgaaagctcttaataggaatgaaattgttgttatacctggctttcaaggggttacagatgaaaataagataactactcttggtagaggtggttctgatacaacagctgtggcgatagcatcagctttaaaagcaaaaagatgtgatatttacactgatgttgatggaatttatactgctgatccaagaatggtaccaaaagcaaaaaaactagataaaatttcatatgaagaaatgttagaaatggcaagtcaaggagcaaaagttcttcaaacacgttcagttgcattggctatgaaatataaattaaagattaaagttttatcaagctttgaaaataaagatggtacgcttgttttacatgaggatgaaattatggaaaagaaaaacgtaagtggcattgctttttcattagatgaagcaaaattgactgtgataggcatacctgataaaccgggccaggcctctattttatttaaatctttagggctgaaagccattaatgttgatatgattgtacagtcatcatctgctaataaaagtgctacagatttatcatttactgttccaaaaaatgaattagatgaagctattaatacaattaaattggtacagaagaaaattggatttaagtcaattatatcagatagtgacgtagccaaaatttctgttattggtattggaatgaaaactcaagctggtgtagctcaaaaaatgtttgatgttttagcagaaaaaaatattaatttaaaagtgatat

SEQ ID NO: 250513 - DNA, 925 bp, Unknown
  Bacterial polypeptide expressing nucleotide sequence isolated from the Sargasso Sea
gatagttttaggaaataaagttattgccgtagtttcagcaatggcagggaaaaccaatgaacttataaaactttcaaaagaaatatcaaatgagtttaacaaaagagaatttgacgttcttctttcctctggagagcaagtaactagcgcacttctttctggcgcattgataaaattaaacattagagcaaaatcctggttaagctggcaaatacctatacttactagtggagaacatattaacgctagaattatcaatatgcatgttgaacaaattaataaatatttagatgaaggaggtgtgccaattattccaggctttcaaggaatttcgaaagaaggagatataactaccattggcagaggaggctctgatgcaacagctgtagctgtggctaagatttttaactctgattcatgcgaaatatatacggatgtcgatggagtttattcaactgatccaaataaaattccagtagcaaaaaaaattgaaagaatttcttatgatgaaatgcttgaattatcttcactgggtgcaaaagtaatgcaatcttcagcagttcaaacagcaatgatgtacgatatcccactagaggtgcgctccacattcactgagagaaaaggaacaaaaatttttagccaagaaaacattgattacacaaaaagtgtaactggagtagcatattctaaagatgatgcaaaaattaccttaacaggagttcaagacaaaccaggggtagcagccaatatatttgagcctttaagcaaagctcaaattaatgttgatatggtaattcagaatatttcttcagatcagaaaactacagatataacttttactgttaaaagagatgaagtcattaaaactgagcaaatcctaagagataataaaaacattaaatacaaacaaaattattcaaaataa

SEQ ID NO: 250514 - DNA, 526 bp, Unknown
  Bacterial polypeptide expressing nucleotide sequence isolated from the Sargasso Sea
atgagcataatagtaatgaaatttggaggaacatcagttgcaaatttagacaagatttcaaatgttgctgatattgttgaaagggaacaagaaaaacataaaattatagtagtattatcagctatggctggaactacaaaccatttacaagcatatttagataaaataaaatccagtccttcccctgagaatgatcttgtattaacatctggtgaacagataacagttggtttattatcctcaattttgaatcaaagaaaaataaaatctatgcctattttaggatggcaagttccaataattacagatgagtatcatgaaaaagcaaaaatattaaatattaataaagaaaaaattttatcacatttaaaaaaatttgatgtactggtactagctggctttcaaggagtaagcataaaaggtcatatcacatccattggtcgaggaggttcagatacaactgcagtagcaatagcttctagtgtaaaagctgaaagatgtgatatttatactgatgtagaaggag

SEQ ID NO: 250515 - DNA, 857 bp, Unknown
  Bacterial polypeptide expressing nucleotide sequence isolated from the Sargasso Sea
agtaatcgccggatttcaaggaatcgatgatttaaacaagttaaataccctgggtcgaggaggatccgatacatcagcggttgcagtagctgcagcagtcggcgctgacgaatgtcaaatatttacagatgtagatggcgtctacaccacagatcctagagtagtaaaatcggctagacttttgaataaaataacattcgaagaaatgcttgagatggcgagtttagggtctaaagtgcttcaattaagatctgtagagttcgcgggaaaataccgagttaaattgagagtactatcaagtttaactgaccctaattgcaacctagaggatgaggcaaagtctggcactttgattacttacgaggaagatataaatatggaaaaagcggaagtttcaggaattgctttcaacaaagacgaagcgaaagtaaccatcgttggcgttccagatgaacctggagttgcttttaaaatactcgagccagtagcctcagcaaacattgaagttgatgttatagtgcaaaatgttggtagagatggaaccactgatttttcatttactgtaccccgaaaagacctagcaaagactattgatacattacaagacgtgtctaaagaaatccgagccagagaaataatcggtgatgacaaaatatgtaaagtgggtttagtaggtgttggaatgagatcgcatgtaggaatcgccagtaaaatgtttaaggctctgtctaaccaaaatatcaatatccaaatgattagcacatcagaaattaaaataaccatcgttattgatgaaaatttaatggagtctgcagcacagattctgcatgaaacctttggtctagataaacggtaac

SEQ ID NO: 250516 - DNA, 757 bp, Unknown
  Bacterial polypeptide expressing nucleotide sequence isolated from the Sargasso Sea
aaaattaaaaacatatctgatatagtttttaaggaagcacaaagtaataaagttatagttgttttatcagctatggctggagaaacaaataaattgcaatcttatttagatgaatttgagtctcaatattcagctgaaagtgatttagttctaacttctggagaacaagttacagttggtttattatctgcggctttaaaaaataggggagccaagtcaatacctcttttgggctggcaaattccaatcataacagataataatcatgaaaaagctaaaatattaaatattaataaaaaaagaatccaaaaattttttgaaaccaatgatgttattgtgctagcaggcttccaaggaataaatcaagaaggacagattacttcactaggaagaggtgggtcagatacaacagctgttgctattgcttcagcagtaaaagctgaaagatgtgatatttttacagatgttgatggtgtttatacaactgatccaaatattaatcaaaatgcaaaaaaaatctctaaaatgtcatacgaagaaatgcttgaaatggcatcaactggagcaaaagtattgcatactaggtcagttgagcttgcaatgaaaaataatttaattcttcaagtattgtcttctttaacaaaagagaatgggacatttatagttgatgaaacagaattaatagaaaaagaaattgttagtggtgtgagctatagcaaaaatgaagctaaagtaactatttcaggtattttagata

SEQ ID NO: 250517 - DNA, 799 bp, Unknown
  Bacterial polypeptide expressing nucleotide sequence isolated from the Sargasso Sea
catgaaaactgtagtattaaaatttggtggaacttctgtaggtaatatcgatagaataaaaaaagtatgtaaaattatagcaacttataaaaagaaaaaatataatgtagtcgtaatttcctctgctatgagtggtgttactaatgaactagttaataaatctaagtcattaagtaataattttgatttggcagaatatgacgcactattatctactggtgagcaagtttcttgtgcacttatagcaggaagattgaatcatattggaataaaatctagatcatggttgtcctggcagctaccaattgtaactgaaggaaatcactcaggtgctcgaataaataaaataaatataaatgaattaaataaatatattaaaaatggtggagttccaattgtaactggttttcaaggcattaataaaaattatagagtaactactattggcagaagtggatctgatgcaacagcaataatgttagctaaatattttaaagctgacgaatgcataatattcactgacgtagaaggggtttatacaactgatccacgacagcataaaaaagcaaaaaaaataaaaaaaattttttatgatgagatgctcgaaatggcatcattgggttcaaaaattatgcaaccaacttcaattcaggatgctaagcttaatgaaattgatatcaaagttcaatcctcttttgcatctaaatcaggaactttaattacaaattcaaaaaaatcatttagtgatcaaataataactggaatctcatcaacaaaaaatgatgctaagattacaata

SEQ ID NO: 250518 - DNA, 667 bp, Unknown
  Bacterial polypeptide expressing nucleotide sequence isolated from the Sargasso Sea
atgtctattattgtaatgaaatttggaggtagttctgtagcagatattgattgcatcaaaaatgttgctaagaaagtagttgcccaatacaaaaaaaataaaaagattgttgttgttgtatctgcgatgtcagggacaactaacaatcttattggcttaacaaaacagttatcaaaaggtagaaatgcgcaagaatatgacgttgttgtttcttcaggtgaacaagtaactgctgggttactttcaatggccttgaattctcaagaaatccaatctagatcatttatgggttggcaaattccaattttaacagataatactttttctaaagctaatattgttaagatcagtatagatgttttaatgaaagctcttaataggaatgaaattgttgttatacctggctttcaaggggttacagatgaaaataagataactactcttggtagaggtggttctgatacaacagctgtggcgatagcatcagctttaaaagcaaaaagatgtgatatttacactgatgttgatggaatttatactgctgatccaagaatggtaccaaaagcaaaaaaactagataaaatttcatatgaagaaatgttagaaatggcaagtcaaggagcaaaagttcttcaaacacgttcagttgcattggctatgaaatata

SEQ ID NO: 250519 - DNA, 820 bp, Unknown
  Bacterial polypeptide expressing nucleotide sequence isolated from the Sargasso Sea
ttaaaatttggtggtacgtctgtaggttctgttgatagaattaaaaaagttgccaaaataatcaaaagaaacatcaaaaataaaaaaaaagttatagttgtatcctcagcaatgagtggagttacaaatgatttaataagtaaaacgaaaaaaataagtaataattttagtccttctgaatacgatgttttagtttctgcaggtgaacagatgtcttgtgctcttatttcaggaagacttaattatctaggaataaaatctagatcttggttaagttggcagataccaatttttacagagggtgaacacaaaaaatcaagaattacaaacatatttaaaaaaaggattttaaaatacctaatttctggaggtgttccggttataactggctttcaaggaataaactctgaaaatcgtttaactacactagagcgaggtggatctgattcaagtgcgatcatgattgctaagtttttcaatgctgagaaatgtataatatatacggatgtggaaggtgtttacacaaccgatccaaatttcttaaaaaaagcaaaaaaaataaaaaaaatttcttatgaggagatgcttgaaatgtcctctttaggtgcaaaagttatgcaacctgcttcaatccaagatgcaagattaaacagagtaaacgttgatgtaaaatcgtcttttgtcaacaaatctggaactcttattactaaaagagcaaatatttcaaaagaaaaaattattactggagtttcatttactaataatgactcaaagataactcttataggagttgtagataaaccagagagtggcagcttct

SEQ ID NO: 250520 - DNA, 664 bp, Unknown
  Bacterial polypeptide expressing nucleotide sequence isolated from the Sargasso Sea
gttgaaggcaatataacaacccttggcagaggcggtactgatacgtcggctgtagaaatagctgcggctataaaagctgatgaatgtcagatctatactgatgttgacggcgtatatactacagatcctcggattgaacctaacgcacgaagaatgagccaagttacctttgctgaaatgctagagttagcaagcttaggtgctaaagtattgcatattcgttctgttgaggcggcaggtaaacacaatgttccattaagggtgctttcgagctttaaccccgatgaaggaacattgattacgtttgaggaagacgatatgccaagtaaagttgtttcgggtattgcatttaatgctgatgagtgcttaattaaggtacagggtgtgcaaagcggcactcaaaatcttgtaaaaatattgaaactttttgctgataacggcatcgaaatagatatgattaatcaagttaatcatatctttgaaaaaatagactatgcttttactgtgcactcgaacgactacccgcaagcgcttgagttactaaccgagcaaaaggtgtctttaggtgctgaaaatataatcgggctaacaaccattgcaaaagtatctgctgttggtatgggaatgaaatcgcactggggtgttgctagtttattttttgatg

SEQ ID NO: 250521 - DNA, 514 bp, Unknown
  Bacterial polypeptide expressing nucleotide sequence isolated from the Sargasso Sea
atgaaacttgtagtaatgaaatttggaggtacttcagtaggcagtattgataaaatcaataatgttgctaacattgttgaaaagcaactaaatgataaaaaattgattattgttttatctgcaatgtcaggtgtaacaaataaaatgcaagaatatatagatgaaattaagtcaaaagaaattattgaaaatgatttaattttaacatctggtgaagcagtttctgttggacttctttcagctattttaaaaaaaagaaatattaaatccaccccattacttggttggcaaattccaattataacagacagtaaccatcaaaaagccaaaatcttaaacatagataaagttagaattgaccagtatctaaaaaattatgatgttattgtagttgctggatttcaaggtgtagatatagatggaaacattacatcattaggaagaggtggctctgatacaactgccgttgctattgctgcagctgtagatgctgatagatgtgatatttatactg

SEQ ID NO: 250522 - DNA, 617 bp, Unknown
  Bacterial polypeptide expressing nucleotide sequence isolated from the Sargasso Sea
aatgaaaattgtagttttaaaatttggcggaacatcagttggtacaattgatagaataagaaaagtagctgatttaattactaattatgcaaaaaaaaaatataagataattgttgtttcttcagcaatgagtggtgtaacaaacgatttagtaaataagtcaaaaaagataagcaaaaatttttcgaatgctgaatatgacgcattagtatcctcaggagaacaagtatcttgtgcgttaattgcaggaagattaattcataaaggctacaagtcacgatcatggatgggatggcaagtgcctatcattacggacaacaaacataaatttgcaaaaattaatcaagtttatagaagtaatatagtcaaatatctaaaatcaggagggattccaataattgcaggatttcaaggagtcaatcacgaaggaagagttacaacaataggaagaggaggctcagattcaagtgcaattatgttggctaaattttttaaagccgaaagatgtataatatatactgatgtagaaggggtatatactactgatccaaaaaaattgaaaaaagctaaaaagataaaagttatttcatatgaagaaatgttagaaatggcttctc

SEQ ID NO: 250523 - DNA, 785 bp, Unknown
  Bacterial polypeptide expressing nucleotide sequence isolated from the Sargasso Sea
gagtcggaaggtatttctgctaaatcatattctgcatctcaagtatcgcttaaaactacttcacaattctctaaggcaaaaattttagatatcgataaacaaagaatgcaaaagattttggaagacgataatgttccaattattacaggatttcaggggattactgagggaggagatgttactactcttggaagagggggttctgataccacggcagtggcaattgcagcagctgttgatgctaagagatgcgatatctataccgatgtggatggaatttatacaaccgacccaaatttagttccaagtgccaaaaaacttgaacaaatttcaatggaggggatgctggaattatcaggtcaaggagcaaaagtaattcaaataagagccgtcgagtttgccaataaataccgagttccagttcgagtgttgtcgagttttagcaagggtactggtactatgataaatttagatgataataatatggaagatgcggaaatttcaggaattgcttttcagaaaaaccaaaccaaagtaacttttactgccgtcgaggatactcccggtattgcctctaaaattcttggacctcttagtgatgcagacattcaagtggatgtaatcgtccaaaatgtaggtattgaagggaaaacagatttcacttttaccatcgattctgatgaaaaatccctactcgataaagtcgttccaataattcaagaatctataaattataaggatatattaattgataatcagattgcccaggtatcgattgttggagt

SEQ ID NO: 250524 - DNA, 832 bp, Unknown
  Bacterial polypeptide expressing nucleotide sequence isolated from the Sargasso Sea
atggcaaaaaaagtattaaaatttggtggaacatctgtaggttcaatagatagagttgtacatgcggcaaaaatcgttaaaaaggagcacgataacaagaataaaattatcgtggtagtttctgctatggcaggaacaaccaacaatttaattgcttattctgaagctgtatccaaaaaatttaataaaagggaactcgatgttctattaacatctggtgagcaggtcacaagtgctcttatggctggtgcattaaatgatataggtgttaaatcaaaatcatggatgaattggcaaatacctattcttaccgagggtgaacatactaattctagaattattaatatgaatgttaaagttatcaacgattatctttcagaaggcggggtagcagttattcctggatttcaaggaatttcaaaatcaggagatataacttcaatcgggcgtggtggttcagatgctactgcagttgcaatcgcaaaaatatttaacacagatagttgtgaaatttataccgatgtagatggagtatattcatctgatccaaacaaaattccagtagcaaaaaagatcaataaaatttcatatgaggaaatgttagaactttcctccttgggcacaaaagtaatgcagtcatcggctgttcaaactgcaatgatgcacgatattcctttacaggttaaatcaacttttactaatcgaaaaggaacagaaattattaaccaagaaaatatagattatactaaagttgttacaggtgtagcctattcaaaagatgatgcaaaaattaccctaatgggagtagaggataaacccaggcgtagccgca

SEQ ID NO: 250525 - DNA, 793 bp, Unknown
  Bacterial polypeptide expressing nucleotide sequence isolated from the Sargasso Sea
ataagtacacttggaagaggtggatctgacaccactgcagtggctatttcagcggcatttaatgcaaaaagatgtgatatatttaccgatgtagaaggtatctttacaacggatcctcgtatagtaaaaagtgctcggaagttagataaaatttcttatgaggaaatgcttgaattagcttcaatgggagcaaaagtccttcatacaagatctgttgaactagctatgcgatatggtgtaaatttacaagttttaagtagttttcaagaaaaaattggcacattagtttgtagagaggacaaaatgttagaaagtagaatgatatcaggagtagcttcctcaaaggatgaggcaaaagttactctatcgggagttttagacaagcctggaattgctgccgccatatttgggcccttgtctgagtctggcataaacgttgatatgattattcaaaatgtatcggaaaatgaaactacggacataacattttcatgccctatgtctcaggtttcagaggcagaagaggcaataaatacagcctctaagaagaaagacatatcttttaaagcttgtgttattgacactgaggtagcaaaagtatccattgtaggcattggaatgagaagccatgctggtatagcaaaaaagatgtttgaatcacttgcaaatgaaaacataaatatactagtgatatcaacatcagaaattaagatatctatccttgtagagcaaaagtatatggagcttgctgtccaagtactccatgatgcatttgagttagataaagtctaag

SEQ ID NO: 250526 - DNA, 789 bp, Unknown
  Bacterial polypeptide expressing nucleotide sequence isolated from the Sargasso Sea
aaaaattaaagatattgcaaaaaacatcttcacgttaataaagaaaaagaaatcagtagttgtagtagtttccgcaatggcgggtgaaaccgataggcttcatggtttaaccagaaatattgccaacgttccaaatgagagagaatatgatcaggtggtttctacaggagaaaaagtttctgctggtttagttgccatagcactttcagaggttggagtcaaagcaatatcacttgatccatcaaaattgggtttgatgacaaacgatttacatactaaagctacgattatttcagtcggagccaccaagataaaaacgtacttaagaaaaggttatgttattgtcgttcctggatttcaagggataaattcaaaaaacgatatcactacactaggaagaggtgggtcagatttaactgcagtggcgctagcatcagcattaaatgcgtctcactgcgaactactcaaagatgatgtaagtggaatttacacagcagatccaaaactttacaaaggagcaaaaaaaattaattatatttcgtatcaagaaatgcttgagatgtcgagtttagggtcgaaagtcttacaagcaaaagcagttgagtatgcaaacaatttaaagataaaattgcatgtcaaatcaacaaagaaggctgcacaaagaggaacttgggttatggatgaaaaactaattcctattaaggaaaaaaatgttataaggggcattacccatgatttaaaacaatctaaaataaccatcgtcggaatcgaggataggcccggtattgc

SEQ ID NO: 250527 - DNA, 505 bp, Unknown
  Bacterial polypeptide expressing nucleotide sequence isolated from the Sargasso Sea
atgaaaataattgtattaaaatttggaggtacttcagttggtaccactgatagaattaaaaaagtagcaaaaattattgctaagtataaaaaaaattacagtgtaattgtattgtcctcagcaatgagtggtgtgacaaataatttaataaatttatcaaaaaaaataagtaaaaatttttcagagtcagaatatgatgttttagtttcatccggagaacaaatgtcatgtgcattgatttcgggagaattaattgataaaggttttaactcaagatcttggatttcttggcaagttcctatttatacagagggaaaatataaattttcaagaattaataaaattaacaagcgacaaattttaaattatttaaaaaaagatggtattcccataattacaggtttccaaggtataaatagcgaaaaaagaattactacaattggcagaggtggatctgatgcaagcgcaattaagtttgcaaagtattttaatgcagaaaaatgta

SEQ ID NO: 250528 - DNA, 761 bp, Unknown
  Bacterial polypeptide expressing nucleotide sequence isolated from the Sargasso Sea
aatgaaaattgtagtattaaaatttggtggaacttccgttggttcggttgaaagaataaaaaacattgtaaaaattgttattagttacataaagaaaagatataaagttattgttgtatcttctgcaatgagtggagaaacaaataaactagtaaaattaactaaagaaatttcaaataattttacaccttcagaatatgactcaattgtcgcaacaggggaacaggcatcttgttcattgatagcgggcagacttaaccatcaaggttatccagcaagatcgtggcttgggtggcaaataccaatttttacgactggaaatcattccaattcaagaattgttaaaattaataaactaaaaattcttaaattcttaaaaaaaggtgggacaccaataattgcaggattccaaggtattaattctgatcatcgaatcactacaattggcagaggaggatcagacgcaactgctataatggtggcaaaatttctaaaagcgaagaattgtattatatataccgatgttgaaggcgtatatactacagatccgaatgtagtcccaaaagcaaaaaaaataaaaaaaatatcctatgaggaaatgttggaaatggcatctttaggagctaaagttatgcagccaaattcaattcaagttgcaagattaaatagaattgatattgaagttagatcttcttttaaaaatatttcaggttctttgattacaaaaagaaaaaatatatcaaaaaataatgtaatccgtg

SEQ ID NO: 250529 - DNA, 871 bp, Unknown
  Bacterial polypeptide expressing nucleotide sequence isolated from the Sargasso Sea
gatgacaaggaattagacgtattgcttgcttcgggcgaacaagcttcttgctcacttctatcgggagcactgatagatttgggaataaaagcgagatcatggctaggttggcaaataccaatcattacaaatatgaatcacacatcatcacaaataattaaaataaaaacagatgaaattttaaattttatttcagaaaaaggtgtagccgttattgctggtttccaaggaatttctaaagaaatgagaatcactacattaggtcgtggcggttctgacttatcagctgtcgctgttgccaaattttttcaaacagattcttgcgaaatttatactgatgttgaaggagtgcttacaactgatccttcgataaatgaaaaagctaaaaaaattgaaaaaatttcctatgaagaaatgctcgagatggcttctttaggcgcaaaagttatgcagccaaatgcagttcaaacatccatgatagataatattcctatccatgtaaggtctactttttcggaaaattctggaactaaaataatttctgaaaatgaaattgatcgtaaaaaggtggtaacaggcatagcctattcaaaaggtaatgcgaaagtttctatcgttggagttgtggacaaaccaggtgtggcagctgatgtttttgaaccaataggaaaaaacaacattaacattgatatggtaattcaaaatacttctttggatgggaaaaatgctaacattacttttactattaaacaggaggatttaaacaaaacattaggtataatcaaaaaaagtaaagaaaaattaaattataataaaataacacatgatgataagcttgccaaaatatcaatcatcggagcaggcatgataa

SEQ ID NO: 250530 - DNA, 781 bp, Unknown
  Bacterial polypeptide expressing nucleotide sequence isolated from the Sargasso Sea
tatggcaaaaaaagtattaaaatttggtggtacttccgttggatctatcaaaagaatcctgcatgcggctaaaattgtcaaaaaagaacatgacaatggcaataaattaatagttgtagtctcggctatggcaggcacaacaaacaacttaattgaacattctaaggagatatcaaaaaaatttaacaaaagggagctagatgtcttattgacctctggcgaacaagttacaagtgcattaatagctggagcattaaatgatttaggaatcaaatcaaaatcttggttgaattggcaaatcccaattataactgaaggcgaacattcaaatgctagaattattcatatgaatataaaacatataaatgattatatttcttcaggaggtgttgcagttgtgccaggttttcaaggagtctctaaatctggagacgttacatctattggaagaggtggatcagatgcaactgctgtagcgatagcaaaaatttttcaaacagatagttgtgaaatttataccgatgtagatggtgtgtattcctctgacccaaacaaaatacccttggctaaaaaaattgacaagatatcctacgaagaaatgttagagctttcatctttaggcgcaaaagtaatgcaatcctcagccgtgcaatctgccatgatgggtgatattcctattcaagttaagtcaacatttactgaaagggagggaacagaaataattaatcaagacaacatagattataccaaagcagtaactggtgttgcttatcaaaagatg

SEQ ID NO: 250531 - DNA, 799 bp, Unknown
  Bacterial polypeptide expressing nucleotide sequence isolated from the Sargasso Sea
accgacgttccgggtgtgctgacaaccgatccccgcaaggtgccggaagcccaactgatgactcaggtgagctgcgatgaaatgttggaactagccagcctgggtgcggctgttctgcacccaagagcggtggaaatcgccagaaactacggcgtcccactggtcgtgcgatctagctggagcgatgagccaggaacgcgcctgttcagtcaaccaagtcggagaattggcagcgaaggattggagctgggcaagcccgtggaccgggcggaactgctggaaggccaagccgtggtggccctggcccatgtgcccgatgaacccggggtggccgctcgcttgtttgaagggctcggtgccgctggcctgaacgttgacctgatcgtacaagccacccatgacggcagtagcaatgacatcgccttcaccctggcggaagctgagcttccggaggctgaagccttctgccgcgagcatctgagcgaaggaagtcagctgcaggtgcaaagcgggctggccaaactgagcattgggggtgctggaatcatggggcgacctggaatcgctgcccaactgtttgacgggctaagcaaggtaggcataagcgttcgcatgattgccaccagtgaggtaaaggtgagctgcctaatgcaaggcgaacaaggcgcgaaagccctgcggaccgcagcacaggtctttgagctcgatgatcatcagctccagcacaacccatttcccgggggggaaggagagcctgatgtgcggggtgttgccctcgatcgcgatcaagcgcaactaa

SEQ ID NO: 250532 - DNA, 559 bp, Unknown
  Bacterial polypeptide expressing nucleotide sequence isolated from the Sargasso Sea
atgaaaattatagtattaaaatttggtggtacatcagttggcactgtaaatcgtatagggaaagttgctaaaataataatttcttacttaaaaaaaagatttaaagttattgttgtatcatcagctatgagtggagtaacaaatgatttattaaaaaaatctaagttattatcagctagttttcctaaatcagagcacgatgtgcttgtatcttcgggagaacaggtatcttgttctttgctagctggaaaattaatagatcttggttttagagcaagatcatggatgggttggcaaataccaattttaactagtggagagtttagtaaatctagaattatttatataaataaatcaaaaataattaaatttatgaaatcaggaggaataccagttattgctggttttcaaggtatcaactcagactcgaggataacaactctagaaagaggtggttctgatttaagtgcaatcatgtgtgcaaaattttttggagcagaaaaatgtgtaatttatactgatgtagagggtgtttataccactgatccaaatataataa

SEQ ID NO: 250533 - DNA, 180 bp, Unknown
  Bacterial polypeptide expressing nucleotide sequence isolated from the Sargasso Sea
aatgagtttaattgtacaaaaatttggtggtacgagtgttgcagatacagattcactcagaattgttgctgagagaattatccaatgtaagaaaaatggcaatgacgtagtagttgttccatctgcaatgggctcaagtacagatgaattaattcaacttgcaagcgatctctcagaaag

SEQ ID NO: 250534 - DNA, 883 bp, Unknown
  Bacterial polypeptide expressing nucleotide sequence isolated from the Sargasso Sea
atgaaaataattgtattaaaatttggaggtacttcagtaggtacaattgatagaataaaaaaggttgcaaagattattgctaaatataaaaaaaaatacaatgtaatcgtgctttcctctgcaatgagtggtgtgacaaataatttaatcaatttatcaaaaaaaattagcaaaaatttttcggaatcagaatatgatgttttagtttcatcgggagaacaaatgtcctgtgcattaatttcaggagagttgataaatcaaggtttcaattctagatcttggatgtcttggcaaattcctataaatacagagggtaaatacaaattttcaagaattaataaaattaacaaaagcaaaatcattagttttttaaaaaaaggagggatcccaataattacaggatttcaaggtattaacgataaaaatagaataactactattggtaggggtggcacagatgcaagcgctattatgtttgctaagttttttaatgctgaaaaatgtataatatacacggatgtggatggagtttattctacagatccaaataaacttaagtcagctaaaaaaataaaagttatatcttatgaagaaatgctagaaatggcttctcttggagcaaaagttatgcaaccccattctattcaagatgcaagattgaatagagtagatatagaggtgagatcctcttttacagataatgaaggtaccctaataacaaaaagaaaaaatataataaatagtaagattataactggtatttcaaatacaactaacgatgccaaagttactcttttaggtgtaagagacaagcctggtattgcagcatcaatttttaaaccgctatctgaaaattctataaatgtagatatggtagtacaaa

SEQ ID NO: 250535 - DNA, 678 bp, Unknown
  Bacterial polypeptide expressing nucleotide sequence isolated from the Sargasso Sea
catgaaaattgtaatactaaaatttggtggcacatcagttggctcaatagataaaatcaaaaaagtcgctgaaattattgaagaatacaaaaaaaaaaattataagataattgttgtttcttcagcaatgagtggtgtgacaaatgagttgataaaaaaatctaaaggaattagtaaaaatttttcagatgctgagtatgatgtattagtatcatccggagagcaagttgcatgttccttaatagcgggaagattaatccataaaggctttaaggcaagatcttggttggcgtggcaaatacctatcttaacaaaaggaccacagaaaaattctaaaattcatctagttaacaaaaaaaaaataagcgattatcttaagaaaggaggaataccaattataacaggttttcaaggagtaaatgaagaaggaagagtaactacaataggcagaggtggctcagacgtaagtgctatagtattagcaaaattctttaaggccaaaagatgtgtgatttatactgatgtcgagggtgtttatacaactgatcccaataaactaaaaaaagcaaaaaaaattaagatcatatcctacgaagaaatgcttgagatggcctctttaggagcaaaagtaatgcaacctgtttcaatccaagatgcaagattaaatagaattgacgt

SEQ ID NO: 250536 - DNA, 591 bp, Unknown
  Bacterial polypeptide expressing nucleotide sequence isolated from the Sargasso Sea
aatgattaaaaaagtattaaagtttggtggtacatctgttgggtctatagaaaggatacaacatgtcgcaaatataattaaaaaggagcatgaattaggacatcaaattattgcagtcgtgtcggctatggccggtcaaacaaatgaattaattggtaaatcaaaagctatttctgatgagtttgataaacgagagctagatgttttactttcctctggagaacaagtaacttcggcgttactagctggtgcgttaaaaaaaattgatgtaaaatcaaaatcttggcttaattggcaaatccctatactcactgagggagattacaataattctcgaataataaatatgaacgtagaaaaagttaatgaatttttaaacaataatggtgtagctgtaatacctggttatcaaggaatttcaaaaaatggcgatgtaactacaattggcagaggaggctctgatgcaactgctgttgctgtggcaaaaatatttaatgcagatacctgtgagatttatacagatgtagatggagtattttctactgatcccagcaaaatacctttagcaaaaaaaattgaaaaaatttcata

SEQ ID NO: 250537 - DNA, 805 bp, Unknown
  Bacterial polypeptide expressing nucleotide sequence isolated from the Sargasso Sea
tgtcgatatagatggtaagattacgtcattaggaagaggtggctcagacacaactgcagtagctgttgccgctgccgttgatgctgatagatgtgatatttatacagatgtagacggtgtttatacaactgatccaaatatggaacctaaggctaaaaagattcataaattagcatttgaagaaatgctagaaatgtcttctactggagctaaagtccttcatacacgttctgttgaattagcaatgaaaaataatcttaccttacaggtactttcttccataacaaaagaagatggtactcttgttgtagatgaaaataaattaattgaaaaagaaatagtaagtggagtaagttatagtaacaatgaatcaaaattaactttatctggaattgctgataaacccggaatatctgcaactatttttgggttgttagctaataaaaatataaatgtggatatgattgtacaaaacacatcacaagatggcatttctgcaaatattacatttacagttccaaatagtgaaatccgtaaaacaaaaaaattactagaagacaatcaaaacttaattaattttaaatctattgaagcagatacaaatatttcaaaaatttcagtaattggtatggggatgatgtctcaatcaggggttgctaagaaaatgtttagaactttagcagaaaattcaattaacatattagcaatttctacctctgaaataaagataagtgtcttaattgataaaaaattcacaaaaattgctgtaaaatctcttcatgaagcatataatctagataattaa

SEQ ID NO: 250538 - DNA, 604 bp, Unknown
  Bacterial polypeptide expressing nucleotide sequence isolated from the Sargasso Sea
tatggcaaaaaaagtattaaaatttggtggtacctctgttggatctattaaaagaatcctgcatgcggctaaaattgtcaaaaaagaacacgacaatggtaataaattaatagttgtagtgtcagctatggcaggcacaacaaacaacttaattgaacattctaaggggatatcaaaaaaatttaacaaaagggagctagatgtcttattgacctctggtgaacaagtgacaagtgcattaatagcaggagcattaaatgatttaggagtcaaatcaaaatcctggatgaactggcaaatcccaatcataactgaaggtgaacattcaaatgcgagaattattcatatgaatataaaaaatataaatgattatatttcttcaggcggtgttgcagttgtgccaggttttcaaggtgtctcaaaatctggagacattacatctattggaagaggtggatcggatgcaacagctgtagcggtagctaaaatttttcaaacagatagttgtgaaatttataccgatgtagatggcgtgtactcatctgacccaaacaaaatacctctggcaaaaaaattgacaaaatatcctacgaggaaatgttag

SEQ ID NO: 250539 - DNA, 885 bp, Unknown
  Bacterial polypeptide expressing nucleotide sequence isolated from the Sargasso Sea
gatgtcgctgaccgtattgtgtctgagcataagcaaggccatcagctggtgattgtatgttctgccatgcatggtgaaacagaccgtctgattaagctagccaaacaaatgatgcccataccagatccattggcttatgacttgttgttatcatcaggtgagcaggtcacagtgagtttattggcgatggcgctacgggcaaggggggtggatgccaagcctatgactggctttcagtctggtattaaaaccgatgcacagcataaaaaagcccgtattttagacattgatagtgatattttacacactatattggctgaagctgtgatacctgtggtagctggctttcaaggcatggacagctctggtagtatcactacctttggacgcggtggttcggatacaacagcggttgctttggcagcggctttgaaggctgatgaatgccgtatatacactgatgtagatggtgtatatacaactgatcctagggtcgtgcctactgcacggcgattggatcgtgtgacatttgaagaaatgttagaaatggccagtttgggggcaaaagttttgcaaattcgtgcggtagagtttgcgagtaaatacaatgtatcggtgcgggtattatcgagctttgaggatgggcctggtacgttgatcacagatgaggatgcggatatggagcagccgttggtttccggaattgcttttgatcgcaatcaggcgcagttaacgctggtaggtgtgcccaatgtgcctggtcatgccaagcatattttagctgccatcagtgagaagggtattgaggtggacatgattgttcaaaacatgcccaactctagcggtactgtggattttagttttacggtacagcgggatgattca

SEQ ID NO: 250540 - DNA, 755 bp, Unknown
  Bacterial polypeptide expressing nucleotide sequence isolated from the Sargasso Sea
gagtagaattacaactcttggcaggggtgggtcagactcatcagcaatcatgtgtgcaaaattttttagggcagaaaaatgtgtaatatacacagatgttgagggcgtttatactacagatccaaataatttaagaaaagcgaaaaaaattaaagttatttcttatgaggaaatgcttgaaatggcatctttaggtgcaaaaataatgcaacccaattcaatacaggatgcgagacttaatagaattgaaatagatgttagatcttcttttgttaataaacaaggcacgtcaataaaaaaaagaaaggatatttttagaagcaaagtaataactggcataacatcaacaaaaaatgatgccaaagttacactagttggagtaagagataaacctggtgttgctgcttcaatatttaggccactttcacaaaatctaataaatgttgatatggtggttcaaaatatttctgcgaatggaaaagaaactgacttaacatttacgattaaatcagaggatgtaataaaaacttctaaattaattcaacaaaacaaaaaaataaaatttaggaagctaattattgataaaaatgtttcaaaagtctcaattattggtgttggaatgattacaacacctggtgtaacatacagaatgtttcaaacactagcagataagaaaattaacatattggttatctcaacttctgagataaaaatttcagtattgattgataaaaaaaatataaaaaaagctgtaa

SEQ ID NO: 250541 - DNA, 583 bp, Unknown
  Bacterial polypeptide expressing nucleotide sequence isolated from the Sargasso Sea
aatggcaaaaaaagtattaaaatttggaggaacttctgtaggaactacggaaaggattttacatgtggcagaaataattaaaaaagattatgtcgcaggcaatgaaatcatagctgttgtttcagcgatgtcaggtaaaacaaatgaattagttaaacactctcaaaatatctcagaaaacttcgacaaaagagaactcgacgtacttttggcttcaggagaacaggcatcaagttcattattagcaggagcactaattaagcttggtattaaatcgaaatcctggatgaattggcaaataccaattttgactgagggcgaacactcaaactctagaatagtaaatatgaatgttgaaaagattaataaatttctatcagaaaaaggtgtggctataattcctggctttcaaggcatttctaaatctggggatgtgactacaattggcagaggaggttcagacgcaacagcagttgcaatagctaaaatatttaatgcagatatgtgtgaaatttatacagatgtggatggagttttctcaactgatccaaataaaattcctgttgcaaaaaaaatagataaa

SEQ ID NO: 250542 - DNA, 768 bp, Unknown
  Bacterial polypeptide expressing nucleotide sequence isolated from the Sargasso Sea
aatgaaaattatagtattaaaatttggaggaacatctgtaggcacaacagaaagaataaaaaaagtagcaaatataattatttcattcgttaaacaaaattataaagtcattgttacctcttctgcaatgagcggggtaactaatgatttagtaaaaaaatctaaaagtatttctaatgaatttatacctgaagagtatgatgttttagtttcttcaggagaacaaatgtcatgttcgctaattgctggaagactaaatcacctaggatataaatctagatcctggatggggtggcagataccaatttttacagaaggaaagcattcttcatcaagaatagaaaaaatatataaaaaaaatattataaaatatttaaaaacaggaggaatacctattgttgcaggttttcagggaattaattctgaaaatagaataactactataggtagaggaggaacagatgctagcgcaataatgctttcaagattctttaatgcaataaaatgtataatatataccgatgtagatggagtttatactactgatccaaatacaatttcaaaagcaaaaaaaattaaagtaatttcatatgaggaaatgcttgagatggcttcactaggagcaaaagttatgcaaccacactcaattcaagatgcaagattaaatagaattgatattgatgtaagatcatcatttaaaaaatctttaggtactttaattactaaaagaaaaaatatcattagtaataaaattattcgtggagtgtc

SEQ ID NO: 250543 - DNA, 778 bp, Unknown
  Bacterial polypeptide expressing nucleotide sequence isolated from the Sargasso Sea
atggcaaaaaaagtattaaagttcggaggtacatctgttgggacgacagaaagaatccagttagtagccaaaataataaaaaaggagtgttccttgggtaataaaataatagctgtagtatctgcaatgtcgggtaaaactaacgagcttataagtctctctgaaaaaatttctgatgaatttaataaaagagagctcgatgttcttctttcttctggagagcaagtaacttgcgcactcctttccggtgctttgacaaaattagatattaaagcaaaatcttggttaaattggcaaattccaattattactgaaggagagcatgctaatgctaggatcattaacatgaacattgaaaaaataaataattatttagatgcagagggagtggcaattatcccaggctttcaaggtatttcaaaaaatggagacattaccactattggcagaggaggctcagatgcaacagcagtcgctgttgcaaaaatattcaatgctgactcctgtgaaatatatacagatgttgatggagttttttcaactgatcctaataaaataccagtagcaaaaaaaattgacaaaatttcctataatgagatgttagaactttcttctcttggagcaaaagtgatgcaatcatcagctgttcaaactgcaatgatttacaatgttcctcttgaggtaaaatctacctttacagatagaaaagggactaaaatctttagtcaggaaaatattgattataaaaaaaagtgttactggagtagcctattctaaa

SEQ ID NO: 250544 - DNA, 875 bp, Unknown
  Bacterial polypeptide expressing nucleotide sequence isolated from the Sargasso Sea
cttaacctctggtgagcaagttaccattggtcttctttcaatgttattaaaaaaagaggggataaaaagcgttcctttattgggttggcaaattccaatagttacagatgacaagcatgagaaaggaagaatactaaatataaacaatgaaaatttaaataaatattttcaatcatatgacgttattgttttagctggttttcaaggtgtaagtacccatggttatattacttctttaggaagaggtggatctgatactactgctgttgcaattgcttcttctatcaaagctgaaagatgcgatatttatactgatgttgaaggcgtatatactactgatccaaatattgaaaaaaatgcaaaaaaaattgataaattaacatatgaagaaatgctagaaatgtcttcaactggtgctaaagttttgcagactcgatcagtagaattagcaatgaaaaataatcttactcttcaagttctttcttcatttacaaatcaaaaaggtacgtatgtagttaatgaaaatgaattaattgaaaatgaaatagtaagtggagtttcctatagtaaaaatgaatctaaaattactatttctggaataccagataaacctgggatatctgctttagtttttggcttaatggctagcaataatataaatgttgatatgatagttcaaaatatttctcaagatggtattaatgctaatataacttttacagtacctaataatgaattagaagaatctaaaaagattattgaagaaaaatataatgaattaaattattctaacttgtctactgactctgatatagcaaagatttcagttgtagggatggggatgatgtcacagtcaggagttgctgagaaaatgt

SEQ ID NO: 250545 - DNA, 903 bp, Unknown
  Bacterial polypeptide expressing nucleotide sequence isolated from the Sargasso Sea
ttagatgtacttctgtcgaccggagaacaagttacaatcgctttgttaacaatggcacttgaagtgaaaggttgtcaggccctgtcttttactggtggacaggtctgcatacatactgatagcgctcataacaaagcgagaatagctaatatagaggtggaacgagtcaaaaaggaattacaacagggaaaagttgttgtcatcgctggttttcagggggttaacgaagatggagatataacaacattaggacgaggtggttcagacactacagctgttgctatggcaacagcccttgctgccgatgaatgcagaatttatacagatgttgatggtgtttataccgcagatccaaggatagttgagaatgcacaaagattgccctcattaacatatgaggaaatgctcgaaatggcgagcctcggctcgaaagttttgcaaacacgcgcggttgaatttgccgggaaatataatataaatttacgtgtattatctagttttgaagaggggccgggaactttaataactaatgaaggagaaattatggaagcggctttaatatctggaattgctcataatagtgatgaggctaaattgaccgtagtcggcgtaccggataaacctgggattgcatctacgatacttgacccaattgccgcagcaaatattgaagtggatatgattgttcaaaatgttggtttaaataatagtactgattttacttttacagttcatcgaaatgactatgacaaagctatgtcaattttgaaagaaactgcaaaagacatagatgctacagatgtaactggcgacaacaggattgtaaaaatttctgttgttggtgtaggtatgcgttctcatgcaggagttgctagtactatattcaaggcgttggcagatgaa

SEQ ID NO: 250546 - DNA, 577 bp, Unknown
  Bacterial polypeptide expressing nucleotide sequence isolated from the Sargasso Sea
atgcaaattattgttttaaaatttggtggaacttcagttggtactatagataggataaaaaaagtatctaatataattgccacatatgttaaaaaaaaatataaagtaatagtggtttcatcagcaatgagcggggttactaatgatttgatcatcaaatcaaagaaaatatcaaataattttaatccttctgagtatgatgttcttttatcatcaggtgaacaggctgcttgtgcacttatagcggcgagattaaatcatctgggttacgaatctagatcctggatgagttggcaaattccaattttagctgaaggaaatcacagctattctcgaataacgtacataaataaaaaaaaaattattgactatataaagtctggaggaattccaattataacgggatttcaaggaattaataatttaaatagactatctactttaggtagaggaggttctgacgcatcagcaattatgtgcgcaaagttttttaatgctagaaaatgtgttatctatacagatgttgaaggagtttatactactgatccaaaaaatctaaaaaaagcaaaaaaaatta

SEQ ID NO: 250547 - DNA, 739 bp, Unknown
  Bacterial polypeptide expressing nucleotide sequence isolated from the Sargasso Sea
tttgacgataaagaattagacgtattgctcgcatcaggcgagcaagcttcatgctcgcttttatctggagctcttatagatttaggaattaaagcaagatcatggttaggttggcaaattccaattgttacaaatgataatcatacatcgtcacaaataattaaaataaagacggacgaaattttgaattttatttcaaaaaaaggtgtggctgttattgcaggttttcaaggaatttcaaaagaaattagaattactactttaggtcgtggaggttctgatttatctgctgttgaaatcgcaaaattttttaagacagactcgtgtgaaatttatactgatgtagaaggtgttcttacaacagatcccagtatagatgaaaaagcaaaaaaaattgataaaatatcttatgaagaaatgctcgaaatggcttctttgggtgcaaaggttatgcaaccaaatgcagttcaagcatcaatggtagataatattccaattcatgtgagatctactttttctgaaaaatccggaacaaaaataatttctgacagtgagatagattatgaaaaagtggtaacaggaatagcctattctaaaaacaatgctaaaatttctatcgtcggagttgtagataaaccaggagttgcggctgatgtttttgaaccaataggaaaaaataatattaatattgatatggtaattcaaaatacttcattagatggtaaaacggctaatataa

SEQ ID NO: 250548 - DNA, 628 bp, Unknown
  Bacterial polypeptide expressing nucleotide sequence isolated from the Sargasso Sea
tatgaagaaaatagttcttaaatttggtggtacttctttgggaagtatagagaaaataattcatgccgcaaagattataaaaaaaaggcatgaagaaaataatcaagtaatagctattgtttcggctatggctggagttaccaatgatttaattaataaatccaatcaggttagtaaaaattttgatagcaaagaattagatgtactactttctactggtgaacaagtttcatgtgcacttttgtcagcagctcttatagatttaggagttaaagcaagatcttggttaagttggcaaattccaatacttacaaatgataaccacacatcatcacaaataataaaaattaaaacggatgaaattttgaattttatttcaaaaaaaggtgttgctgtgattccaggttttcaaggaatttcttcggaaagcagaattactactttaggccgaggtggctctgatttgtcagctgtagcaattgcaaaatttttcaatacagatttttgtgaaatttatactgatgtggaaggtgtgcttactactgatccttcaataaatgaaaaagcaaaaaaaattgaaagaatatcttatgaagaaaatgttagaaatgttcttcccttgggagca

SEQ ID NO: 250549 - DNA, 558 bp, Unknown
  Bacterial polypeptide expressing nucleotide sequence isolated from the Sargasso Sea
aatgtttaaaaaagtattaaagtttggcggcacatctgttggttctattgaaagaattcaacatgtagctaatattatcaaaaaagagcatgaaacaggtaataaaattatcgcggttgtttctgcgatggcaggaaaaactaatgaattaataaacctatctcacagtgttagcaatgattttgataaaagagaaatggatgttcttttagcatcaggagagcagattacttgttcactattagctggtgcattgattaatttgaaattaaaagcaaaatcgtggatgaattggcaaataccaattctaactgatggagaccactcaaacgcaagaattgtcaatatgaatgttgaaaaaattaatctttttttaaaagagaagggaatagccgtaattccaggttttcaaggcatatctaaagaaggaaatataactactattggaagaggcggatcagatgcaacagctgttgcaatagctaaactatttaaaactgatagttgtgaaatttacactgatgtagatggtgttttttctactgatcctaataaaat

SEQ ID NO: 250550 - DNA, 850 bp, Unknown
  Bacterial polypeptide expressing nucleotide sequence isolated from the Sargasso Sea
actgcagcaacctgaagctgtggctgcacaaatcatcaccttattggctgatttacgtaacctgattgaaacaggaggcgctgtctattctggcgcgcataaagacttaatccagtcctttggagagcgtttaagttcagtgttatttactcaggtgttagtggaacgcggcgctgcagcagagtgttttgacgtgcgccgggtgcttcgcaccgacagtcgttttggtaaaggcgagccgcaaattcatctgatcgctgaattagcgcaaacccatctgcagcctttactgcgtgaacagattgtggtcactcagggttttattggtgctgatgaagcagggcaaactaccactttaggtcgtggcggctcggattacagtgcggctttgttaggggaagctttaaatgctcacatcgtacaaatctggactgacgtagttgggatttttaccacagacccacgtttgacatctgacgcccgttgtatcaatgaaatcagctttgatgaagcggcagaaatggccacttttggtgccaaagtattgcacccagccaccttaattccggcgatgcgccgcaatattaaagtttttgttggctccagtcgtgaacctgaagccggtggtacctggattgcaaaaactgtggaacacaaacctgcttatcgcgccatagccttacgtaaatctcaaaccctgatcacagtgaaaagccctgagatgttgcacgctgcaggctttttagcccgggtttttgatattttaagtcgtcatcaaatatcagtcgatttagtgacaacgtcagagatttccgtggctttaactttggacgaatctgctggaagtgcg

SEQ ID NO: 250551 - DNA, 769 bp, Unknown
  Bacterial polypeptide expressing nucleotide sequence isolated from the Sargasso Sea
catgaaaacagtggtattaaaatttggcggtacatctgtaggaagcatagatagaataaaaaaagtatgtaaaataattgctttttacaaaaagaaaaaaaataggatagtggttgtttcatcagcaatgagtggtgtgacaaatgaattggtaaataaatctaaactgattagtaataattttgatagagcagaatacgacgcactagtttcaactggggaacaagtttcatgtgcacttattgcaggaagattaaaacataatggttttaaatcaagatcttggacatcttggcaattacctattttaacagatggtcctcattcaagtgcaagaattagctctgtaggcattaaagaacttaataaatatattaagtcaggcggtatacccataattactggttttcaaggtattagtaatgattttagaattactactataggaagaagtggatctgatgcaacagcaattatgctggcaaaatttattaaagcagatgagtgtataatatatactgatgtagatggagtttatactacagacccaagacaatataaaaaagcaaaaaaaattaaaaaaatcttttatgatgaaatgttagagatggcatctcttggctcaaaagtaatgcagcctacttcagttcaagatgcaaagttaaataaaattaatattaaagttaaatcctcttttgtatcagaaagtggaactttaataacaggttcaaaaaagacttttagtaatcaaattataactggaatttcc

SEQ ID NO: 250552 - DNA, 685 bp, Unknown
  Bacterial polypeptide expressing nucleotide sequence isolated from the Sargasso Sea
atgaaaattattgtattaaaatttggcggtacttcggttggatcaattcaaagaattaaagaagtttcgaaaataattaaatcttattcaaaaaaatataaggtaattgttttatcttctgcaatgagtggcaccactaataagttgataaatatgtctcaaaaaataagtaaaaaatttcctgatcatgagtatgatacattagtttctgctggtgagcagattgcatgctcattattagcaggtcaattattatcaaacggtttaaaatcaaggtcatggatggcttggcaaataccgatattaacagagggaaaacacaaattctcaagaattaaatacataaataaaaataaggtattaaaatttatgaagtctggaggaatacctattatagctggctttcaaggtataaataaaaatttaaatatcacaactatcggtaggggaggatcagattcaagtgcaattatggttgcaaagtttttcaaagccgaaagatgcataatatatactgatgtagaaggtgtttatacaacagatccaaataaactaaattctgcaaaaaaaattaaaagcatatcttatgaagaaatgctagaaatggcatcattaggatcaaaagttatgcaaccgcactcaatacaagatgcaagattaaatagaattgatattgaggtaaaat

SEQ ID NO: 250553 - DNA, 880 bp, Unknown
  Bacterial polypeptide expressing nucleotide sequence isolated from the Sargasso Sea
atcagagcttataaataagattctcaaagataaaaaagtatgcgttattcctggatttcaaggcattacatcagaggggagagtttcaactctaggaagaggaggctctgatacatcagcggtagcaattgctgcagccataaacgctgattattgtgacatatatactgatgtagatggcgtatatacaactgacccgaataaagtacctgaagcaaagagacttgataaagtgtcatatgaagaaatgttagaaatggcatctttgggcgctaaagttcttcaaacaagatcagttgagactgctatgacaaataatgttgctttaagggtattatctagttttgctaacgaaaataaagaagatgttggtactattgtaacagaagaagacgctattaatgatcaacgtgttgttacaggtgtaacctcaagcctcaatgattgtaaaataactttaataggcgtaagagataaacctggtattgctgctaaaatattttcgtctctttcagaaaataatattaatgttgatatgatcgtacagaatatttcagagagctctaggacaactgatataacttttacaatacctaaagatgatttgttgaacgcagaaaaaattatggaacaaattaaagatgatgttccatatgaaagtttattgactgatagtaacattgctaaaatttctattgttggtgttggtatgcgaagtaatgcaggtgtagccgctaagatgttcagtatattgtctgaaaatgatatcaatattgatgttatttctacttcagaaattaaaatatctattctcattagcaatgagcaggctgaaaaagctgttaacatgctacatcagtcctttatattagataggtaa

SEQ ID NO: 250554 - DNA, 292 bp, Unknown
  Bacterial polypeptide expressing nucleotide sequence isolated from the Sargasso Sea
tatgcagcaagttatagttcaaaaatttggaggcacatctgttggttcgggagagcgaatagctgaggtagctgaaattataaaaaatgaggcagcgatgaacaccgttgtggttgttgtatcagcaatggcaggagagaccgatagacttatagagctctcaaaattatttggagaaaatacgaataaaagagaatttgatgccctgatatcaactggcgagaaagtaagtgcatctcttttagcaatggccctcaattctcttggtttgaaagctaaatcttactcagct

SEQ ID NO: 250555 - DNA, 770 bp, Unknown
  Bacterial polypeptide expressing nucleotide sequence isolated from the Sargasso Sea
catgaaaactgtagtattaaaatttggtggaacttctgtaggtaatatcgatagaataaaaaaagtatgtaaaattatagcaacctataaaaagaaaaaatataatgtagttgtaatttcctctgctatgagtggggttactaatgacctagttaataaatctaagtcattaagtaatagttttgatttggcagaatatgacgcactattatctactggtgagcaagtttcttgtgcacttatagcaggaagattaaatcatattggattaaaatctagatcttggttgtcttggcaattaccaattgttacagagggaaatcattcaggtgctcgaataaataaaataaatattaatgaattaaatagatatattaaaaatggaggaattccagttgtaactggttttcaaggcatcaataaaaattatagaataactactattggtagaagtggatctgacgcaacagcaataatgttagctaaatatattaaagcagaagaatgcataatattcactgacgtcgaaggggtttatacaactgatccacgacagcataaaaaagcaaaaaaaataaaaaaaattttttatgatgagatgctcgagatggcatcattgggttcaaaagttatgcaaccaacttcaattcaagatgcaaagctgaataaaatagatattaaagtcaaatcctcttttgcatttaagtcaggaactttaattacaaattctaaaaaatcatttagtgaccaaattattactgggaatttca

SEQ ID NO: 250556 - DNA, 643 bp, Unknown
  Bacterial polypeptide expressing nucleotide sequence isolated from the Sargasso Sea
tatgtcaaaaaaagtacttaaatttggtggtacatcggttggatctattgataggataaaccatgtagcaaaaattattaaaagtcactacgaggctggtaatgagttaatagtaattgtatcagcgatggctggtaccacaaataaacttatggaatattctaaatctgtatcaaaaagttttgataaacgggaattagatgtcttgctagcaagcggagagcaagtaactgcttcattacttagcggggctttaataaatttaggaattaaagcaaaatcatggatgaattggcaaatacctattttgaccgaaggagatgcaaataattcaagaataattaatatgagtgtggaaaaaataaatcaattcttaaaaagtggaggaatagcaattatacctggttttcaaggagtctcaaaaaataatgacatcactaccattggaagaggaggttctgatgcaacagctgtggcagtagcaaaaatatttgaaacagatacttgtgaaatctacactgatgtagatggagtttattctactgatccaaataaaattccattggcaaaaaaaattgataagattgcctacgaagaaatgcttgaactttcatctttgggagcaaaagttatgcaaccaacc

SEQ ID NO: 250557 - DNA, 802 bp, Unknown
  Bacterial polypeptide expressing nucleotide sequence isolated from the Sargasso Sea
aatagagaatttgatgccctgatatcgactggcgagaaagtaagcgcttctctcttagcaatggccctcaactctcttggcttgaaagccaaatcttattcagctgctcaagtttcacttaaaactacatctaacttttcaaaggcaaagattttagatatagataaagcaaaaatggaagagattcttgcagatggctcaattccaattattaccggtttccaaggaataactgaaaccggagaagttactaccttaggtagaggcggatctgatactactgctgttgcaattgctgcttctcttaaagctaatcgttgtgatatttatacggacgttgatggtatttacactacagacccaagaattgttcccaatgctaagaaacttgatgcaatttccatggagggcatgctcgagcttgcaggacaaggagctaaagtcatccagataagagctgtagaattcgcaaataaatttaaggttcctgtgagagttctatcgagcttttcatcaggtactggtactatgataactttagagaatgatactatggaaaatgcagaaatttcaggaatagccttccaaacagatcaaacaaaagtaacttttactgcggttgaagatactccaggcatagcgtcaaagatactaggtccgctaagtgaattagacatgaaagttgacgttattgttcagaatgttggaattgaaggcaagacagattttacttttaccatagcaactgaggaaaaaagtttgttggataaagcaattaacaatatccaaaaatccataaact

SEQ ID NO: 250558 - DNA, 643 bp, Unknown
  Bacterial polypeptide expressing nucleotide sequence isolated from the Sargasso Sea
tatgataaaaaaagtattaaaatttggtggaacgtctgtaggttcaattaaaagaattgtacatgcggcaaatattgttaaaaaagagcatgataatggcaacaaagtaatagtagttgtatctgcaatgtcaggaactacaaataatctgattgcccattcacaatccatttcaaagaaatttaataaaagagagctggatgttttgttgacatcaggagaacaagttactagcgcactaatgtctggagcattaaacgatttaggagttaaatcaaaatcttggatgaattggcaaatacccattttaaccgaaggcgaacactcaaatgcaagaattgtgaatattaatgtaaaaggcattaacgagtacctatctcaaggaggtgtacctgtagtccctggatttcaaggtatttcaaaatctggagaaatcacatcaataggcagaggaggatctgacgcaactgcagttgctgtagccaagatatttgacacagatagttgtgaaatttatacagatgttgatggagtctattcctccgatcctaacaaaataccgcttgcgaaaaaaattgacaaaatttcttatgaggagatgttagagctttcatctttaggagcaaaagtaatgcagtcgtct

SEQ ID NO: 250559 - DNA, 637 bp, Unknown
  Bacterial polypeptide expressing nucleotide sequence isolated from the Sargasso Sea
aatgaaaattgtagttttgaaatttggaggcacatcagttggtacaattgatagaattaaaaaagtagctgatataattgctaaatatgtaaaaaaaaaatataaagtaattgttgtctcttcagcaatgagcggtgtgacaaatgatttagttaataaatcaaataatataagtaatgatttttctaatgccgaatatgatgtattagtttcatctggagaacaagttgcctgcgctcttattgcgggaagattaattcataaaggttacaactcacgatcttggatgggttggcaaattcctatcattactgatgatgatcataaatattcaaaaattaatacaatttataaaaaaaatataaatcaatatttaaaatctaatgggatacccattattgcaggttttcaaggaataaattttgatagaagaattacaacaattggaagaggtggatcagatgcaactgctattatgcttgcaaaattctttaaagcagaaagatgtataatttatacagatgtagaaggagtatacactacagatccaagaaaattaaaaaaagcaagaaaaataaaagtaatatcttatgaagaaatgttagaaatggcttcattaggagcgaaagtaatgcaa

SEQ ID NO: 250560 - DNA, 790 bp, Unknown
  Bacterial polypeptide expressing nucleotide sequence isolated from the Sargasso Sea
aatgagtcttattgtaatgaaatttgggggtacttctgtagcaaatacagaaaaaattataaatgtctcagacattatagagaaagaagccaaaggtaataaattaattgttgttttatcagcaatggcaggcgttacaaataaaatgcaagaatatatagatgaaatagaatctattaataatcttgaaaatgatttaattttaacttctggtgaaagtattactatcggtttactatcaagttgtcttaaaaaaaaaggaataaaatcaattcctttattaggatggcaggttccaatagtcacagataataattatcaaaaagcaaaaatattaaatataaatacaaaaagggttaattcttatttagataaatacgatgtaattgttttagcaggattccaaggaattaatttagaagggcatattacttcattaggtagagggggttcagatacaacagcagttgcaattgcatcagctgtaaacgctgatagatgtgatatatacactgatgttgacggtgtttttagatctgatccaaatttagtggataaatcaaaaaaaataccaaaactagcttttgaagaaatgctggaaatgtcatcaactggcgctaaagtattacatactcgttcagttgaattagcaatgaaaaataatcttgttttacaagttttatcttctattacaaaagaaccaggcacactaattttagatgaaaaaaaattaattgaaaaagaaattgtaagtggagtaagctataataaaaatgagtctaaaataact

SEQ ID NO: 250561 - DNA, 730 bp, Unknown
  Bacterial polypeptide expressing nucleotide sequence isolated from the Sargasso Sea
atgaaaatagtcgtattaaaatttggtgggacatctgttggaagtatagaaagaataaaaaaggtttgtaaaataattgctttttacaaaaagaaaaaatatagagtagcagttgtttcatcagctatgagtggtgttacaaatgaattaataaataaatcaaaatcaattagtaataatttcgatagtgccgaatatgattcattagtttcaaccggagaacaggcgtcatgtgcactgattgccggaagattaaaacatgacggatttaaatcaagatcttggttatcttggcaattaccaatcttaacagatggacctcattcaagtgcaagaattaactcaataggtattaaagaaattagtgtttatattaaatcaggcggcataccggtcataacaggttttcaaggtattaacaatgattttagaattacaacaatcggaagaagtggatcagatgctacagcaattatgctagcaaaatttattaaagcggatgagtgtataatttataccgatgtagatggagtttatactactgatccaaggcaatataaaaaagcaaaaaaaattaaaaaaattttttatgatgagatgctagaaatggcatcacttggctcaaaagtaatgcagcctacatccgttcaagatgcaaagttgaacaagattgatattaaagttaaatcttcctttatatcaaaggctgggaactttaataacagattct

SEQ ID NO: 250562 - DNA, 718 bp, Unknown
  Bacterial polypeptide expressing nucleotide sequence isolated from the Sargasso Sea
atataaatctcaatcttggatgggttggcaggttccaattttaaccgaaggcaactatagctcatcaagaattagtcaaattaacaaaaaaaaaattaataaatttttacggtctgaagggattccaataattgcgggttttcaaggaattaatttaaataaaagaataactactctaggaagaggtggatctgatgcaactgcaattatgtgcgcaaaatttttcaaagctcaaaaatgtattatttatacagatgttaacggtgtctatacaaccgatcctaaaactttaaaaaatgcaaaaaaaatcaaagttatttcttatgaagagatgttggaaatggcttctctgggggcaaaagttatgcaaccaacctcaatacaagatgcaagattaaatagaattaatattgatgtaaaatcttcatttataaataaacctggaactttaattacaaaaagaaaaaatatatttaacaataagataattacaggacttacatctactaaaaatgatgcgaaagtaactcttctcggagtaaaagataaacctggagtagcagcttctgtatttaaaccgctttctcaaaattatattaatatagatatggttgttcaaacttcatcagacaataaaaaagaaactgatataacttttactattaaatcagataatttatcaaaaactttaaaacttataaaaaaaaacaaaaaaata

SEQ ID NO: 250563 - DNA, 868 bp, Unknown
  Bacterial polypeptide expressing nucleotide sequence isolated from the Sargasso Sea
atgaaaattgtagtattaaaattcgggggtacatcagttggaactattaaaaaaataaagaaagttgctaaaataattattgattataagaagaaaaattacaaagtaattgtggtttcatcagctatgagtggtgtgacaaatgagttaataaaaaaatcttttgagataagtgatagtttttctgaatctgagcatgatgttttggtttcctcaggtgaacaagttgcatgttctttaatagctggaagattagttcatgagggtcataagtctagatcctggttatcctggcaaattccaatattgactaaaggtagttataaaaattccaggataaatcaaattaataaaaacaatattattaaatatttaaaaaagggtggcataccaataatcactgggtttcagggattgaatcaggaaaacagaattaccaccattgggaggggaggatctgatgcaagtgccattatgattgctaagttttttaaagcagaaagatgtataatttataccgatgtagaaggggtgtacacaactgatcctaacaaattgaaaaaggcaaaaaaaattaaagtaatctcatatgaggaaatgttggagatggcatcattaggtgcaaaaattatgcagccagtttcaatacaagatgcgcgactaaataggattaatattgaagtaaaatcttctttcactaaaaagtctggaacattgattactaaaagatctaatattattaataataaaattgtcactggaattacttcaactcaaaacgactcaaaagtttctcttataggtgtgagagataaacctggggttgctgcagcaatctttaaaccattatcgaaaaattttataaatg

SEQ ID NO: 250564 - DNA, 901 bp, Unknown
  Bacterial polypeptide expressing nucleotide sequence isolated from the Sargasso Sea
gaaggcgaacatactaatgcaagaatagtgaacatgcacatttctgtaataaataaatttatttcagataaaggtgtaattgttattccaggttttcaaggaatttctaaaaaaggagatttgaccacaataggccgaggaggctccgatgcaactgcagtagcagtagctaaaatatttgaagcagatagttgtgaaatttatacagatgtagacggtgttttttcatctgatccaaataaagtaccagttgcaaaaaaaatagacaaaatttcttatgatgaaatgcttgaactctcgtctttgggtgctaaagtaatgcaatcttcagctgttcagaccgctatgatgtataacattcctttagaagttcgatcaacttttactgataggcaaggtacaaaaatatttagtcaagaaaatattgattattcaaaaagcgttacaggggtagcatattcaaaagatgatgcaaaaattacattaattggagtagaagataaaccgggtgttgccgctaatgtgtttgaacctttaagcaataaccaaattaatgttgatatggtaattcaaaatatttcttcaaatcataaagttactgatataacttttaccgttaaacgagatgacctaaaaaaaactattgatattctaaaaaataataagaatataaattataaagaattaagtcataacgaaaaagttgcaaaaatttcaattgttggtgctggaatggtttctactcctggtataacttatagaatgtttgaaggacttgctaaagaacaaattaatatattagctatttctacttcagaaataaaactttcagtaataattgatgaagatgaaactttaaaagctgtaaaaaaagtacacacaatttttgatctagattaaa

SEQ ID NO: 250565 - DNA, 765 bp, Unknown
  Bacterial polypeptide expressing nucleotide sequence isolated from the Sargasso Sea
attcttcataatgcattagaaaaaaacattgttcctgtaatcacaggatttcaagggtttgatgatgaaaataacattactaccttaggaaggggcggttcggacacctctgcagtagcgattgcagtttctttgaatgctaaggagtgtcagatttatactgatgtggatggggtatttacaaccgatccaaatatttacgataaagccaggaaacttgatcatttaacatacgaagaaatgttggaactttcttctttaggagctaaagttttacaaataaggtctgtggaatttgcaagtaaatacaaattacctttgagagtcttatcaagttttgggtcaaaaggaggaactttgataaataataacgataatttagaagaggctgtagtatcaggaattgcgtttacttcaaatgaagcaaaaataaccatcagaaaagttcctgacattcctggagttgcagcaaaaatactttctcccataagcgatgctggaattgaggtagatgtaattgtccaaaatgtggcatctgataacacaaccgacttcactttcacagtgcataaagattttgctgatgaaacttcaaaaattttagataagttacgcaaagagctaggtagcggtgaaattgaagttgatctagatatttgcaaagtatccgtagttggaaacggaatgaagtcccacgcaggtgtagcaagtaaaatgtttggagcattggcagatgaggcaataaatatcgaaatgatttcaacc

SEQ ID NO: 250566 - DNA, 595 bp, Unknown
  Bacterial polypeptide expressing nucleotide sequence isolated from the Sargasso Sea
atggcaaaaaaagtattaaaatttggtggtacctctgttggatctattaaaagaatcctgcatgcggctaaaattgtcaaaaaagaacacgacaatggtaataaattaatagttgtagtgtcagctatggcaggcacaacaaacaacttaattgaacattctaaggggatatcaaaaaaatttaacaaaagggagctagatgtcttattgacctctggcgaacaagttacaagtgcattaatagcaggagcattaaatgatttaggaattaaatcaaagtcctggatgaattggcaaatcccaatcataactgaaggtgaacattcaaatgcgagaattattcatatgaatataaaaaatataaatgattatatttcttcaggcggtgttgcagttgtgccaggttttcaaggagtctcaaaatctggagacattacatctattggaagaggtggatcggatgcaactgctgtagcggtagctaaaatttttcaaacagatagttgtgaaatttatacagatgtagatggtgtgtactcctctgacccaaacaaaatacctctggctaaaaaaattgataagatatcttatgaag

SEQ ID NO: 250567 - DNA, 602 bp, Unknown
  Bacterial polypeptide expressing nucleotide sequence isolated from the Sargasso Sea
tatgaaaaaaaaagtaattaaatttggcggtacatccgtaggctctatcgagagaataatgcatgcggcaaaaattattcaagaagagtcaaataaaggcaacaaattaattgttgtagtttcagctatggcaggaaaaacgagtgaattaatttcaatgtcaaaacaaatttctaacaaatttgtaaaacgagaattagacgtattattatcaactggagaacaagtttcatgtgctttaatatcaggagctttaaatgagctagggataaaagcacaatccttcatgaactggcaaattcctatcttaactgacggtgaccataataattcaagaataattaatatgaacacaactaagattaatgattacataactaatggtggagtagccatagtgccaggatatcaagggatttccaaacttggagaagtaacaacaatagggagaggtggctcagatgctacagctgtagcaatagccaaaatttttgatactgatagttgtgaaatttacacagatgttgatggagtatattctactgatcctaataaaattcctgttgcaaagaaaattgataaaatttcttatgaagaaatgc

SEQ ID NO: 250568 - DNA, 882 bp, Unknown
  Bacterial polypeptide expressing nucleotide sequence isolated from the Sargasso Sea
aagatatgaagaaaatagtcaaattatagtggtagtttctgctatggccggggtaacaaatgatttaattgataaatcaaaccagataactaaaaattttgataaaaaggaattagacgtgctgctttcttctggagaacaagtttcatgttccttattagctggagcacttatagacttaggtattaaagctagatcctggttaagttggcaaattccgattattacaaacgataattacacgtcttcacaaataataaaaattaagacagatgaagttttaaattttatttctaaaaaaggtgtagcagtaataccgggttttcaaggaatttcttctgaaagtagaattactactttggggagaggcgggtcagatttgtcagcagtagcagtagcaaaattttttaatacagattcttgcgaaatttatacggatgtagatggagtttttactaccgatccttctataaatgaaaaagctaaaaaaattgacaagatatcttatgaagaaatgttagaaatgtcttctttaggagccaaggttatgcaacctaatgctgtgcaagcatcaatggttaacaatatacccgtacatgttaaatcaacattttctaaaaaatccggaacaataatagtgtctgaaaatgaggcagattataaaaaagtaataacaggtatagcttactcaaaaggtaatgctaaaatttcaattgtgggagttgttgataaacccggcgttgctgcagatgtttttgaaccaataggaaaaaataatattaatgttgatatggtaattcaaaatacttctttggatggcaaaacagcaaatataacatttactattaaacaaacagatttaaagaaaacattgagtataat

SEQ ID NO: 250569 - DNA, 589 bp, Unknown
  Bacterial polypeptide expressing nucleotide sequence isolated from the Sargasso Sea
aatgagtttaatagtacaaaaatatggtgggactagcgttgcagacacagattcactcagaattgttgctgagagaataatcgattgcaaaaaaaatggtaatgacgtagtagttgttccatccgcaatgggatctagtacagatgaattaattcaacttgcaagtgatctatcagaaaccccaacaccaagggaattggatatgctcttatcagcaggtgaaagaatcacaatgtctttattatcaatgcatctaaatagtcttggacacagttctttttctcttactggttctcaagctggcataattacaacatctagacacggacaagccgaaatagaggaaataactggtgaaagggttaaagaaggcttagaaaacggagacattgtaattgttgctgggtttcaagggtttaacagagacactaaagaaataacaactttaggcagaggaggttccgatgctactgcagttgcacttgcagctgctcttggagcagagaggtgcgaaatatttactgatgtagaaggagtatttactgcagacccaagaattgtcagttctgctcaattaatttcggaaatc

SEQ ID NO: 250570 - DNA, 850 bp, Unknown
  Bacterial polypeptide expressing nucleotide sequence isolated from the Sargasso Sea
agcaaaaatacttcaaatagataataatagaatacagaggtattttgaaaaaaatgatgtaattgttttagcaggtttccaaggaattaatttagatggaaaaattacttcacttggaagaggtggatcagacacaacagctgttgctattgcatcctcggtagatgctaaaagatgtgatatctacacagatgtagatggagtgtacactactgatcccaatattgaaaaaaatgcgaaaaaaatttctaaaatgtcttatgaagaaatgcttgaaatgtcatcaactggagcaaaagttttacatactagatctgtggaacttgcgatgaaaaataatctaactcttcaagttttatcttatttaaataaggagcccggcacttttatagttgatgaaaaagaattaatagaaaaagaaattgttagtggtgttagttatagtaaaaatgaagctaaaataacaatttctggcatattagataaacctggtatttctgctaaaattttcagccttttgacaaaacataatattaatgttgatatgatcgttcaaaatatttctcaagatggtatatcagcaaatattacttttactattaatctaaaagattatgatttaactaagtcagttcttaaaaaaagcaataaggtattacaatataaatcattatctttagataaaaatgtatcaaaaatttctgttattggaatgggaatgatgtcacaatctggtgtagctgaaaaaatgttcaagactttggctaataattctataaatatacttgcaatatctacctcagagataaaaattagtgttttaattgatgaaaaacatacaaatattgct

SEQ ID NO: 250571 - DNA, 800 bp, Unknown
  Bacterial polypeptide expressing nucleotide sequence isolated from the Sargasso Sea
catgaaaacagtcgtattaaaatttggtggaacatctgtaggaagcatagatagaataaaaaaagtatgtaaaataattgctttttacaaaaagaaaaaaaataggatagtagttgtttcatcagcaatgagcggtgtgacaaatgaattggtaaataaatctaaactgattagtaataattttgatagagcagaatacgacgcactagtatcaactggagaacaagtgtcatgtgcacttattgcaggaagattaaaacataatggttttaaatcaagatcttggacatcttggcaattacctgttttaacagatggtcctcattcaagtgcaagaatacgttcagtaggtatcaaagaactaaataaatatattaagtcaggaggtattcccataatcactggttttcaaggtattagtagagattttagaattactactataggacgaagcggatctgatgcaacagcaattatgcttgcaaaatttattaaagctgatgaatgtgtaatatatactgatgtagatggagtttatactacggatccaaggcaatataaaaaagcaaaaaaaattaaaaaaattttttatgatgagatgttagaaatggcatcacttggatcaaaagtaatgcagcctacttcagttcaggatgcaaagttaaataaaattaatatcaaagttaaatcctcttttgtttcaaaaagtggaactttaataacaggttcaaaaaagacttttagtaatcaaattataactggaatttcttcaacaaaaaatgatgctaaaattacaatca

SEQ ID NO: 250572 - DNA, 721 bp, Unknown
  Bacterial polypeptide expressing nucleotide sequence isolated from the Sargasso Sea
aatgaaaatcgtagtacttaaatttgggggaacctcagttggatcaacaaatagaataaaaaaggtttcaaaaataatcatttcttatattaaaaaaaaatataaagtaattgtagcaacttctgctatgagtggtgtgacaaatgatttaattaaaaagtcaaaagaaatttcaaacgacttcttaaaagatgaatatgatgtcctagtttcagctggggagcaaatctcatgttctttaatagctggaagattaaaccacttagggtataaatctaggtcatggctgggatggcaaataccaatcttaacttctggaaaacatgcctcatctagaattgaaagtataaataaaaaaaaaattttgaaatatataaaatcaggaggtattgctatagttgcaggttttcaaggagtaaattcagaatctagaataactactaccggcagaggaggcacagactcaagtgctataatgttagctagattttttagtgcaaaaaaatgtataatatatacagatgtagatggagtttattcgacagatccaaataaaattagaaaagcaaaaaaaataaaagtaatatcttatgatgaaatgcttgaaatggcgtctttaggggcaaaagttatgcagccacattcaatccaagacgcaagattaaataaaattgatatagatgttaaatcatcatttaagaatgtatcaggaacttttata

SEQ ID NO: 250573 - DNA, 281 bp, Unknown
  Bacterial polypeptide expressing nucleotide sequence isolated from the Sargasso Sea
gatgaaatttggtggcacaagtgtccaaactaaagagtcccagcagcttgtaatcaagcatatacgtaggaatgttgaatccagaaaaaaggtggttgtagttgtttccgcgatgggccgtaaaggagatccttatgcaacagacacactcatctctcttcttaaagatgctggagaacctgtaaatccgtctgagctagatttagttatgagtatcggggaaagacttagctcagcctatttttcacatttgctttctataaatggtattcctgcagttg

SEQ ID NO: 250574 - DNA, 580 bp, Unknown
  Bacterial polypeptide expressing nucleotide sequence isolated from the Sargasso Sea
aatgaaaataattgttttaaaatttggtggaacatcggttggtacattagataggataacaaaaatatctaaaataatcatttcatacgtaaaaaaaaattacaaagttatcgttgtaacatctgctatgagcggtgttacaaatgaacttataaaaaaagcagaaaaaatttctaaaaaatttccaaactctgagaaagatgtgctgttatcaactggcgaacaaatggctagtgctttaatagccggaaagttatgtgacttaggtttaaattctagatcttggatgtcatggcagattcctattataacaagaggtaattatagttctgcaagaattgtaaagattggaacagagcagttaaaaaaatatttaaaaaaaggtggaaccccaataataactggttttcagggtttaaataaagaaagcagacttacaactctagaaagaggtggcagtgatgcgagtgcaattatgctcgctaaattttttaaagccaaaagatgtataatttatactgatgttgatggtgtgtatacgaccgatcctaatttaatgaaaaaagcaaaaaaaataaaa

SEQ ID NO: 250575 - DNA, 487 bp, Unknown
  Bacterial polypeptide expressing nucleotide sequence isolated from the Sargasso Sea
atgaaacttatagtaatgaaatttggtggtacctcagtaggtagcatagataaaataaataatgttgcaaacattgttgaaaagcaaataaatgataaaaagttgattgtcgttttatctgccatgtcaggcgtaacaaacaaaatgcaagaatatattgatgaaattgagtcaaatgagattgttgaaaatgatttaatattaacatcaggtgaagctgtttcagttggacttctttcagctatattaaaaaaaagaaatattaaatctgttccattacttggatggcaaatcccaattttaacagacagcaatcatcaaaaagctaaaatattaaacattgataaagttaggattgaaaaatatctgaaaaattatgatgttatagtagttgctggatttcaaggtgttgatatagatgggaacattacatcattaggaagaggtggctccgatacaactgccgtagctgttgcagctgctgtcg

SEQ ID NO: 250576 - DNA, 717 bp, Unknown
  Bacterial polypeptide expressing nucleotide sequence isolated from the Sargasso Sea
catgaaaactatagtattaaaatttggtggaacatctgtaggaactatagatagaattaaaaaggtatgtaaaattattgctttttacaaaaagaaaaaaaataaggtagtagttgtttcatcggcaatgagtggtgtgacaaatgagttaattaataaatctaaactgataagtaataattttgataaagcagaatatgatgcattagtttcgactggagaacaagcatcatgtgcacttattgccggtagactaaaacataatggatttaaatcaagatcttggacatcatggcaattacctattttaacagatggtcctcatacaagtgcaaggattagttcagtaggtattaaagaactatataaatatattagctcaggtggaatacctataattactggttttcaaggtgttagcaatgatttcagaattacgactataggaagaagtggatctgacgcaacagcaattatgcttgcaaaatttattaaagctgatgagtgtataatttatactgatgtggatggagtttatactactgatccgagacaatataaaaatgcaaaaaaaattaaaaaaattttttatgatgaaatgttggaaatggcatctcttggttcaaaagtaatgcagcctacatcagtacaggatgcaaagttaaataaaattgatatcaaagttaaatcttcttttgtttcaaaaagtggaacttt

SEQ ID NO: 250577 - DNA, 824 bp, Unknown
  Bacterial polypeptide expressing nucleotide sequence isolated from the Sargasso Sea
tatgagcggagttactaacgatttaataaaaaaatcaaaaaaattaagtaataattttaatttgtcagaatatgatgttttggtttcatctggcgagcaaatgtcctgtgcattaatttctggaagactaaaccatattggctataaatcacaatcatggatggggtggcaagttcctattttgactgaaggaagtcatagctcaactagaatagtaaaaatctataaaaaaagaattattaattttcttaaaaatggaggcataccagtaattgctggttttcaaggtattaacccagatagaagaataacaactttaggaagaggcggatcagatgcaagcgcaattatgattgcaaaattttttaaagcagaaaaatgtgtaatttatacggatgtagaaggcgtttatacgacagaccctaagatgattaaaaattcaaaaaaaataaaaaccatatcctatgaagaaatgttggaaatgtcatcactaggagcaaaggtaatgcagccaatatccatacaagatgcaagattaagtagaatagatatagatgttaaatcatcttttaaaaataaaactggtactttaattaccaaaagaaaaaacatttttagaaacaaaattattacaggtatttcatttactaaaaatgatgccaaaatttctttggttggcgttaaggataaaccgggagttgctgcctcaatatttaaaccattatcagaaaattttataaatgttgatatggttgttcaaaatatatctgcaaatggaaaagaaacagatttaacttttacaattaaatcagaagatataaaaa

SEQ ID NO: 250578 - DNA, 1108 bp, Unknown
  Bacterial polypeptide expressing nucleotide sequence isolated from the Sargasso Sea
gcaatggtaggagccactgatgaactgataacaaaaatagagagtatgaccaaattatatgacgccagggaattttccgcaattgtatcatccggtgaaaacgtgaccgctggcttactatctttgaatcttcaaaagattggaattcatgcaagaagttggcaaggatggcaaatacctatattgacatccaatgaacactcgtcagctcgcattctagaagtgaaaactgaacgacttaacgaaaagttttcagaaggtatggaagttgctgtggtggctggatttcaaggaatagcttcggatggcagaattacaactcttggtcgtggaggatcagacactagcgctgtggctttggcagctgctattcaagcggagcgctgcgatatttacactgatgtagatggaatttatactacagacccgcgagtttgcagaagggctcggaaactttcaagaatatcttatgaagagatgctagagatggcttcattaggagctaaagttcttcagacaagatctgtcgagctagcgactcgatacaacgtccgtcttaaggttctaagtagtttttccgataatagcgaaggaacacttgtttgtgatgagggagatatgatggaaaacaatgtaatatctggtgtagcattttctagagaagaggctaaacttacactcgccggaatcgaagatcggcctggcatagcggctacaattttcggacctttggctgatattggtgtcaatgtagatatgatagttcagaacatctctgataatggtcttacggatctaactttttcttgtcctatagaccaagtctttcgcgcgcaggaagctttaaaaggcgcaaaggacagtggggttctcagatataaaaacctacttctagataaagaaatagcaaaaatatccatagttggaataggtatgaaaactcatgcaggaatagctaaaaagatgtttgaggccttagccagcgaaagtataaatataatagtgatatctacttctgaaattaagatttcagttcttatagaaaggaaatacctagaacttgccgtgcaaactcttcatgatacatttgagttggacaaagtctaaa

SEQ ID NO: 250579 - DNA, 1213 bp, Unknown
  Bacterial polypeptide expressing nucleotide sequence isolated from the Sargasso Sea
tatgacaaaaaaagtattaaaatttggcggaacatccgttggttcaatccaaaggattgttcatgcggcaaaaattgccaaaaaagaacacgatagcggtaacaacgttatcgtggtcgtctctgctatggccgggacaaccaataatcttatagctcactctcagtcagtatcaaaaaaatttaataaaagagaacttgacgtattattaacgtcaggcgaacaggttacaagtgcacttatggctggagctttgagtgatttaggcgtgaaagcaaagtcatggatgaattggcaaattcctattataaccgaaggtgaacatacaaacgccaggataattaatatgaatgtagaaagtataaataattatttatcagaaggcggcatagctgtaattcctggatttcaaggtatttcaaaatctggggaaattacttcgattggtagaggcggttcagacgcaactgcagttgctattgcaaaaatatttgaaacagatagttgtgaaatttatactgatgttgatggggtatactcttccgatcctaacaaaattcctcttgcaaaaaaaattgacaaaatatcttacgaagaaatgttggagctttcgtcgctaggtgcgaaagtaatgcaatcttccgctgttcaagcagccatgatgaataatattccaattcatgtaaaatcaacttttacagaaagaaaaggcacagacataaacaatgaagaaaatgttgattataacaaagcggtaacaggtgtagcatattcaaaagacgatgctaaaattactcttttaggcgtagaagacaaacctggtgttgcagcagatatatttgaacctctttcaaaggaccaaataaatgttgatatggtcattcaaaatatttctactgatggcaaaagaacagatttaacatttactacgaaaagacaagacagtaaaaatgccatttcattaataaaagcaaacaaaaaaataaagtatgaaaaaatgaatatgaatgataaagtttcaaagatatccatagttggagccggaatggttgcaactccaggaataacatataaaatgtttagatcattggcagaagaaaaaataaatattttagctatttctacctctgaaattaaaatttcagttattatagatgaaaaatcaacaatagatgcagtaaaaaaattgcacaaaacttttaatttagattaa

SEQ ID NO: 250580 - DNA, 828 bp, Unknown
  Bacterial polypeptide expressing nucleotide sequence isolated from the Sargasso Sea
catgaaaacagtcgtattaaaatttggtggaacttctgttgggactttagatagaataaaaaaggtttgtaaaataattgctttttataaaaagaaaaaaaatagagtattagttgtctcttctgcaatgagtggtgtgacaaatgaattagtaaataaatcaaaatctattagtaataattttgatagagctgaatatgactcattagtttcaactggagaacaggtatcatgtgcactaattgctgggagattaaaacatgagggatttaaatcgagatcttggctatcttggcaattgccaattttaacagaaggacctcattcaagtgcaagaattaattcaatcggtattaaagaactcagcagatatataaaatcaggtggcatacctgtagtcacgggttttcagggtattagtaatgattttagaattacaacaattggaagaagtggatcagatgcaacagcaatcatgcttgcaaaatttgttaaagctgatgagtgtatgatttatactgatgtagatggagtttatactactgatccaaggcaatataaaaaagcaaaaaaaattaaaaaaattttttatgatgagatgttagaaatggcatcacttggttcaaaagtaatgcagcctacatctgttcaggatgcaaagttaaacaatattgatattaaggttaaatcttcctttgtatcaaaagctggaactttgataacagattctaaaaaggcatttagcaaccaaataattactggtatctcatcaacaaaaaatgatgctaaaattacaattataggagtaaaagacaggcctggagttgc

SEQ ID NO: 250581 - DNA, 1363 bp, Unknown
  Bacterial polypeptide expressing nucleotide sequence isolated from the Sargasso Sea
tatgactcgcatttatccaccatccgtcgttgccaaatttggcggcaccagcgtcgctgattttgatgcgatgaaccgaagcgccagcattgtccttgctgatcaagatgtccgtttagtcgttttgtctgcttcagcaggcgtgacaaacttactggtcgagctttctgaaggtctggaaacgcatcaacaattagataagtttgagactttacgcgccatccaatacaacattatttcccgcctgaagcagccttccgttatcagcacggaaatcgataatcttctcaacaacatacatcgtcttgcacaaacggcgatggtttcaccgtctgatgcgttaagcgatgaattagtcagccatggcgagctgatgtcgtcactactgtttactgaagtcttacgtgaacggcaggccgaggccgggtggtttgacgcccgcagcgtgatgcgtactaacgcgaacttcggctgcgccgaacccgagcttggcacactgcaccaccaggtggagactcacctgcgccctcgtcttgagcaagcgattatggtgactcagggatttatcgggcgtgatgccgcaggacacaccacaacgcttggacgcggcggtagtgattacacggctacgcttctcggtgaggcacttcacgccacacgcgttgacatctggaccgacgtcgcagggatctacaccaccgacccacgcattgcaccgcgggccaaacgaatcgaccatatctcattttccgaggccagcgatatggccgcctacggtgcgaaggtcctccacccggctacgctactcccggcaatgcgtaaaagcattccggtctttgttggctcaagtaaggatactgccgccggaggtacgttggtgcacaacaccaccgataatccacctcgctatcgtgcgctcgccgtgcgtcgtaaacagacgctgttgcggttacacagtctggagaagcaaccttcctgctcttttctggcgcagtccttcgccattttagctcgccacgctgtcacggtggatttggttacaacctcagaaaatagtattgcgctggcgctggacgccactcatgcaacctcaggtgaagaccatgtgctgaccaccgcattgtttaccgcattgtcctcccactgtcgcgtggaagtggaaaccgggctggcgttggtcactttggtggggaatcaactcacacaggctacgggagtttgcaaagacgtttttgcctggcttgaagagcatacggtacgaatgatttgccatggagcatcgaacgacaacctgtgcatcctgttaccggctgacgatgcagatagcgcggttagagcattgcattaccggttattcgaataa

SEQ ID NO: 250582 - DNA, 706 bp, Unknown
  Bacterial polypeptide expressing nucleotide sequence isolated from the Sargasso Sea
atgaaaattgtagtcctaaaatttggaggaacttctgtaggttctacggatagaataaaaaaagttgcaaatataatattatcatttgttaaaaagaaatataaagtaattgcaacctcttccgcaatgagtggagtaactaacgatcttgtaaaaaaatctaaaaaaatttccaaagaatttattccggaggaatatgatgttttagtttccgcaggagaacaaatgtcgtgttctttaattgcaggtagacttaatcatttaggatataaatctagatcttggatgggatggcaaattccaattctcacagaaggaaaacattcatcgtcaaggataaaaacaatatacaaaaaaaatattttaaattatttgaaatctggaggcatacctattgttgcaggatttcaaggaattaattcctttgaaagaataactaccattggcagaggcggaactgatgcaagtgcaataatgctttcacgattctttaaagctgaaaaatgcgttatatttacagatgtagaaggcgtttataccactgatccaaatacaatttcaaaagcaaaaaaaataaaagttatttcatatgaagaaatgttagagatggcctcacttggagcaaaagttatgcaaccacattcaattcaagacgcaagattaaatagaattgatattgatgtaagatcatcatttaaaaaatcct

SEQ ID NO: 250583 - DNA, 689 bp, Unknown
  Bacterial polypeptide expressing nucleotide sequence isolated from the Sargasso Sea
aatgaaaattgtagtattaaaatttggaggaacatctgttggttcaacagataggattaaaaaagttgcaaaaataattacttcttatctaagaaaaaggtacaaagttatagtagtaacttcagcgatgagtggagtaacaaatgatttagtgagaaagtcaaaagaaatttcaaataactttatcgcagaagaatatgatgttttggtctcagctggagaacaaatttcatgttcattaatatcaggaaggcttaatcacctaggatataaatccaggtcttggctgggatggcaagttcctatttttacttcaggtaatcatgcttcggctagaattaaaaatatatataaaaaaaatattatcaaatatctaaaatcaggaggaattccaataattgccggattccaaggaattaattctagttcaagggtaacaactatcggcagaggaggaactgatgccagtgcaattatgttagctagattttttaaagctgaaaaatgtataatttatactgatgttgatggggtttacacaacagacccaaatataattagaaaagcaaaaaaaattaaaaaaatatcatacgaagaaatgctcgaaatggcatcttcaggttcaaaagttatgcagcctcactcaatccaggatgcaagactaaatagaatagatattgaagttagat

SEQ ID NO: 250584 - DNA, 566 bp, Unknown
  Bacterial polypeptide expressing nucleotide sequence isolated from the Sargasso Sea
aatggatcaaaaatataaaaaaattgtcatgaaattcggcggaacgtcaatggcggatatggattgtatatcaaaagtagcggaccatattgaaagagaattatccaatgggaccctaattgctgttgttgtatcagcaatggctggtgaaactgaccgcctcataagtctagcagatcaagcgggtaataatatgcagcaatctgagagggatgttataatttcaacaggtgaacaggttagttcggcaatattatcaatgatattaaatagaagaaatatagatgcgagatccatacaaggctggcaaatacctttaattactagggggattcatggatctgcaaggataagcaatgtcaagtcaaaccatcttgaaaatctaatgaaaaacggtattgtcccaataattgcagggtttcagggtatatcagaagaaaatagagtaacaacccttggcagaggcggctctgacacaacagcagtggcaatcgcttgtggtattcatgcagatctatgcgatatatacacggatgtcgatggagtttatacatcagacccaagaa

SEQ ID NO: 250585 - DNA, 1234 bp, Unknown
  Bacterial polypeptide expressing nucleotide sequence isolated from the Sargasso Sea
atgtcacgtatcgttatgaaatttggtggaacatctgttggaagtgttgatagaataaaaaatgtctcgaatatagttcagtctgtatatgatgaagggcatgaggttgttgttgttctatctgctatggcaggagaaacagaccgcttgataaatcttacaaaagatatttccaatgattttaataaggaagaatatgatgttgttatttcttctggtgaacaagtcagtgtcggattactcgctgctgcattacatgagaatggaataagtgcaaaatcatgcttgggctggcaaattcctataataacatctaacgatcataagtctgcgagaattgagggtataagatcagatcttataaataagatcttagaagataaaaaagtatgcgttattcctggttttcaaggcataacttcagagggtagagtttctactttaggaagaggaggttctgatacatcagctgttgcaattgctgcggctataaaggctgatttttgtgacatatatactgatgtagacggtgtatatacatctgaccccaacaaaatacctgatgctaaaagactagataaagtatcctatgaggagatgctggaaatggcatctttgggagctaaggttcttcaaacacgttcagtagaaacagcaatgacaaataatgttgccttaagagttctatcaagttttgaaggcgctgataaagaaaatataggcaccatcgttgaagaagaagataaaattaatgaccaaagagttgttacaggagtaacctcaagccttaatgactgtaaaattactttaattggagtgagagataagcctggtattgcagcaaaaatattttcatctttatccgagaacaacattaatgttgatatgatcgtacaaaatatctcagagagatcaaagacaacagatattacttttactataccgaaagatgatttatcgaatgcagaaaaaattatggacctaataaaagacgatgttccatatgaaagcctattgattgatagcaatattgctaaaatctcaattattggtgttggtatgcgaagtaatgctggtgtagctgcaaaaatgtttagcgtattgtcggataacgatataaatattgatgttatttctacttcagaaataaaaatatcaatccttattaataaagaacaggctgaaaaagctactagtatgcttcatcagtattttattaatgaaaatgaataat

SEQ ID NO: 250586 - DNA, 1000 bp, Unknown
  Bacterial polypeptide expressing nucleotide sequence isolated from the Sargasso Sea
tctgggcgaacaggtaacttgtgctttacttgctggagctttaattgaattaaaattaaaagcaaaatcttggctcaattggcaaataccaatactaactgaaggtaagcataccaacgctagaataataaatattcaaacagataaaattaataaatttttaaaagaagacggtgtagtaattattccgggatttcaaggtatatccaaaaacttagatgttactacaataggacgcggcggttcagacgcgacagcagttgcaatagctaaattattcaaagcagactcttgtgaaatttatacggacgtagatggagttttttctacagatcctaataaaatcccagtagcaaaaaaaattgataagatctcttatgatgagatgttagagctatcttcattgggagcgaaagtcatgcaatcatcagccgttcagactgcaatgatatataatattcctttagaggttaaatcaacatttacagatagaggtggaacgaaaatttttaatcaagaaagtgttgattacagtaagagtgttactggggtagcttattcaaaagatgatgctaaaataactttaatcggtgtagaagataagccaggtgtagctgcaaacatatttgaaccactaaataaatcacaaataaatgtagatatggttattcagaatatatcttctgatcagaagactacagatataacttttacaattaagagagatgatttacaaaaaactaaacacattttagaaaataataaaaatttaaattatcaagaaattacttacaacgacaaggtttcaaaagtatctattgttggcgccggaatggtttctacgcccggagtaacctttaaaatgtttaaaggattagctgatgaaaaaataaatattctagcaatttctacttcagaaataaaactatctgttataatagatgaaaaaaatactttaccttctataaaaaaattacatactatttttaacttagattaa

SEQ ID NO: 250587 - DNA, 1225 bp, Unknown
  Bacterial polypeptide expressing nucleotide sequence isolated from the Sargasso Sea
aatggcacgaattgttcaaaaatttggtggcacatcagtagctgaccttgattgcattcgaaatgtggcacggcgagtaaaaatagaggtcgacgctggtcacgaagttgcggtcgtcgtttcggcaatgtcgggtacaactaaccagcttgtgggttgggcttctgatattggtgcactacatgacgccagggaatacgacacggttgtggcaaccggtgagcaagtcacagttggtttgctagctattgctttgcaaaatattggcattgacgcgcggtcttggcttggctggcagatccctatccggtcggacaatgtgcacggcgcggcgcggattgatacgattgatggcaaggccattcgtgatcggctaaaaaatggccaagtagcggtgattgccggttttcagggcattggccccgatggtcgtattaccacatttggccgcggcggctcggatacatctgctgtagcggttgccgccgcgctcgaggcagatcgctgtgatatttacaccgatgttgatggtgtgttcacaaccgacccgcgaatcgcgccaaaagcgatgaagttatcgcgcattactttcgaagaaatgcttgaaatggcatcttcaggtgccaaggtcttgcaaacaagatccgttgctatggccatgcggcataacgtcaacctgcaggtgcggtcaagttttaatgataaaacaggaacattagttgtgaatgaggactcaatcgtggaacaggaaaccattagtggaattgcttacagtccagatgaagcaaaaattactatcattggcttgccggacaagccaggaatcgctgccagtgtatttggcgccttggcagatcaacaagtgaatgttgatatgattgttcaaagcgcgtcaagcgctacgaaaaagactgatattagtttttctgttgggcgcgacgatatcaaaaaagcagttgatattattcataatattgatgttaaacttgaatttgaaacggtagatgcatcaccaaatgttgctaagatttcagttgttggtacagcgatgcggactcagccaggcgtggccaaaacaatgtttgaaactttggcctcgaagggggttaatatgcatgtgatttcaacctctgagattaaaatttcagttttgattgactccgaatacaccgaattggcagtccgcagcctgcacacggcctatggtttggacgatgactcgtag

SEQ ID NO: 250588 - DNA, 1216 bp, Unknown
  Bacterial polypeptide expressing nucleotide sequence isolated from the Sargasso Sea
atgagaagtgtagtacttaaatttggtggaacatcggtcggaacaattaaaaaaattaaaaaagtagcgcagattataagtgattacaaaaaaaaaaagtataaagtgattgtcgtttcgtctgcaatgagtggtgtgacaaatgagttgattaaaaaatctaaagatttaagtgaaaatttttcggacacagaatatgatgtgctagtttcaagtggtgaacaagcagcttgttcattaattgcaggaagattaattcacaacggttacaaatcaagatcttggttagcttggcaaatcccaataattacaaaaggttttaacaaaaactcaagaattgatttcattaacagaaataaaattttgagatatctaaaaactgggggcattccaattattactggatttcagggaattaataatgatgaaagagtaacaacaatcggaagaggagggtcagatgctagtgctataatgcttgcaaaattttttaaagctgaaagatgtgtaatttatacagatgttgaaggtgtatacacaacagatcctaagaaattaagcaaagcaaaaaaaattaaagttatttcgtacgaagagatgttggagatggcatctttaggagctaaagtaatgcaaccagtttcaattcaagacgcaagattaaatagaattgacattgaagtaaaatcttcatttataaaaaaaccaggaaccttaattaccagaaaatcaaatattataaatgataaaataattacaggaatttctttgacgcacaatgactctaaagtcactctggttggtgtaaaagataagccaggtgtagcagcatcaatttttaagcccttatcaaaaaatttgataaatgttgatatggttgttcaaaatatttcagctaatggaagagaaactgacttaacatttacaattaaatcagatgatttaacaaaaacaaaaagaataataagaaataatcaaagtataaattttagaaaattattatttgaaaaagatgtttgtaaaatttctattattggcgtaggaatgatcactacaccaggtgtaacttatagaatgtttcaagctttggcgaaaaaaaatataaatatactagtaatttcaacatctgaaataaagatttcagtattaattgaaaaaaaaaataataaaagagctttagcagcactacacaaggaatttaaactagaaaaataac

SEQ ID NO: 250589 - DNA, 997 bp, Unknown
  Bacterial polypeptide expressing nucleotide sequence isolated from the Sargasso Sea
aatgaaaattattgtattaaaatttggcggtacttcagttgggtcaattcaaagaattaaaaaagtatcaaaaataattaaatcttactcaaaaaactatagggtaatagttttgtcatctgcaatgagcggcactaccaataagttgatcaatatgtcaaaaaaaattagtgaaaattttcctgataatgaatatgatactctagtttctgctggtgagcagatttcgtgttcgttattagcaggccatctagcagcaaatggattaaattctagatcttggatggcttggcaaataccaattgtgacagagggtaaacacaaatattcaagaattaaacatataaataaaactaaaattttaaaatttttaaaatctggaggaatccctattattgctggatttcagggcgtggataaaaattcaaatattacaactattggcaggggtggttcagattcaagtgcaattatggttgcaaagttttttaaagctgatcgatgtgtcatttacacagatgttgagggagtatatacaacagatccaaataaacttaattctgcaaaaaaaattaaaaatatttcttatgaagaaatgttagaaatggcctcattaggatcaaaagtaatgcaaccagattctatacaagatgcaagattaaataggataaatattgaggtaaaatcgtcatttatagacaaatctggcacattaattacaaaaagaaaaaatattattaataataaaattatcacaggaatttcttccacagataatgatgcaaaagtaactttattaggagttaaagatagaccaggcatagcagcatcgatatttaaaccactttcacaaaattcgataaacgtagatatggtagttcaaaatatatctgctgatggaaagcaaacagatcttacatttacaatcaagtcaaatgatttgaataaaacaaagaaaattataaacaaaaataaaaatattgttttaaaaaattaa

SEQ ID NO: 250590 - DNA, 391 bp, Unknown
  Bacterial polypeptide expressing nucleotide sequence isolated from the Sargasso Sea
atgagtttaatagtacaaaaatttggcggtacgagtgttgcagatacagattcactcagaattgttgctgagagaattattgattgcaagaaaaacggtaatgacgtagtagttgttccgtctgcaatgggttccagtacagatgaattaattcaacttgctaataatctctcagaaaacccaacaccaagggaactggacatgctcctatcagcaggtgagagaatcacaatgtctttattatcaatgcatctaaacagtcttgggtacagctctttttctcttactggttcacaagctgggataattacaacatctaggcacggacaagctgaaatagaggaaataactggtgaaagagttaaagaaggcttagagaacggcgacattg

SEQ ID NO: 250591 - DNA, 1051 bp, Unknown
  Bacterial polypeptide expressing nucleotide sequence isolated from the Sargasso Sea
atggaaacgattatattaaaatttggcggcacttctgttggctcaactgacagaatatctgctgttgcaaatatcataaaagcagctagcgatgaggctactcctgtggtcgtggtttcagctatgagtggagaaacaaatcgattgattgatcttgctaattcttttggctctgagccaaataaaagagaatttgatgctcttgtttcaactggtgagaaggtcagcgcatccttggtggcaattgctttgcatcaaataggctttaaagcaaaatcactatctgcagctcaggttggtatgaaaacaactgctaatttttctcgtgcaaaaattcttgatcttgataaagaagttatttttaaaactatcgaagatggatacatcccaattattacaggatttcaaggtatcaccagtgatggagatacaactacaatgggacgcggaggcagtgacactaccgcagtagctatcgcagcttcaatgcaagctaaacgttgtgatatttatacagatgttgatggaatatatacaacagatccaagaattgtgccgaatgcaaaaaaattggattcaattaacattgaggaaatgttggaactctcagggcagggtgctaaagttatgcaaatacgagcagttgaatttgcaaataaatataaagttttagttagagttttatcaagttttgagcctggctcaggaacgcttatcttacaggaggaagacggaatggaagatgctgtcattacaggtatagcttctcaaaaagatcaaactaaatttactttacacggagtgggtgatactcctgggattgcctcaggtattttaagcccagttagtgatgcaggcattgaagtagacgttattgttcaaaatgtaagtgtttctggaaaaacagatttcactttcactgtaggaacgcctgatagagctgaagttgagtcagtattaaaagaaaagatgcagggcatatcttatgatgaattaattattgacgaagctataggaaaagtttctttagtgggagttggaatgcgttcgc

SEQ ID NO: 250592 - DNA, 1213 bp, Unknown
  Bacterial polypeptide expressing nucleotide sequence isolated from the Sargasso Sea
catgaaaactgtagtattaaaatttggtggaacgtctgtaggtaatatcaatagaataaaaaaagtatgtaaaattatagcaacctataaaaagaaaagatataatgtagttgtaatttcctctgctatgagtggtgttactaatgaactagttaataaatctaagtcattaagtaataattttgatttggcagaatatgacgcactattatctactggtgagcaagtttcttgtgcacttatagcaggaagattgaatcatattggaataaaatctagatcttggttgtcctggcagctaccaattgttacggagggaaatcactcaggtgctcgaataaataaaataaatattaaggaattaaataaatatattaaaaatggcggagttccagttgtaactggttttcaagggattaataaaagttatagagtaactactattggtagaagcggatctgacgcaacagcaataatgttagctaagtatgttaaagcagacgaatgtataatatttactgacgtggaaggtgtttatactactgatccacgacagcataaaaaagcaaaaaaaattaaaaaaattttctatgatgagatgctcgaaatggcatcattgggttcaaaagttatgcaaccaacttcaattcaggacgcaaagctgaatgaaatagatataaaagttcaatcttcttttgtatccaagtcaggaactttgattacaaattcaaataaaacatttagtgatcaaataataactggaatctcatcaacaaaaaatgatgcaaaaattacaatagttggagttaaagacagacccggtgttgctgcgtcaatttttaaaccgttatctaaaaatttgattaatgttgatatggttgttcaaaatatctcacagaatggaaaaaataccgatttgacttttacaatcaaatctgaggacctcaaaaaaactgaaaggctaataaaagaaaatagaagtatctcatataaaaaattatcttttgacagaaatgtatctaaagtctcaataattggtgttggaatgataacaacgccaggaataacatatagaatgttccaagctttagcttcaaaaaaaataaatattttagttatttcaacatctgaaattaaaatttcagttttagtatcagcaaagcatgttaaaaaggcaattgcatctttacataaagaatttaaattagattaa

SEQ ID NO: 250593 - DNA, 1216 bp, Unknown
  Bacterial polypeptide expressing nucleotide sequence isolated from the Sargasso Sea
atgaaaatcgtcgttttaaaatttggtggcacttcagttggttcaattgagaaaattagaaatgtttctaatatcattcaaagctataagaaaaaaggaaacaatgtaattgttgtatcttcagcgatgagtggggttacaaatgatttaataaaaaaatcaagaatgataagcaaaagtttttccgacgctgaatatgatgttttggtcgcctctggagaacaaatcgcatgttcattaatagccggtaggttaattgacaaaggatatagatctcggtcttggctagcttggcaaataccaattttaacaacaggtcatcataaaaattcaagaataaatcaaattaataaaattgaaataatcaaatatcttaaaaaaggtggcattcctataattgcaggcttccaaggagttaataatgaaaaaagattaactactattggaagaggaggatcagatgctagtgctataatgcttgcaaagttttttaaagcaaaaaaatgtgtcatttatacagatgttgaaggtgtatacacaactgatcctaataaattatataatgcaaaaaaaataaaagtaatttcctacgaggaaatgttagagatggcatcattaggtgctaaggtaatgcaaccagtttctattcaagatgccagattaaacagaattgatgttgaagttaaatcttcgtttaaaaaaaattcaggtaccctgattaccaaaaaatcaaaaataagcagtaatagaattattactggaataacatcaacaatgaatgatgctaaagttacattagttggtgttaaagataaacctggagtagcagcatcaatatttaaacctttatctaaaaatttaattaatgtagatatggtagttcaaaatatttcagccaatggaaaagaaactgatttaacttttacaattaaaagagatgatttgaaaaaaacaaaaaaaattattttggacaataataatattgtttatagaaatttaatatttgaccaagaggtatcaaaaatatcaataattggtgttgggatggttactacaccaggagtaacatttagaatgtttcaaaagttagctgataaaaagattaatattttagttatttccacttcagaaattaaaatttctgtattaattgaaaaaaagaatgtttcaaaagcacttaaagctttacataaagaatttggcttagataaataaa

SEQ ID NO: 250594 - DNA, 652 bp, Unknown
  Bacterial polypeptide expressing nucleotide sequence isolated from the Sargasso Sea
tctggagttaaatatagtgacaaatgccttatcgatagctaagttcggtggaactagcgttgcgaattacgaagtaatgcaaaactgcgcccgaattgttgccggtaatgacaaaacgcgcattgtggtagtgagcgctgctgcaggtgtaaccaatcacctggtaagcttagcgcacacacctatgacgcaacagcaaattgaagagacctgtcaggccattatcaatattgagcttgccattcttaacaagttgaaagataaagacgcggttgagccaaaactcaacgacttgttagatgaaatgcgaagcttagcgtttcacgaagaaatccttcaccgtgatgatttaaaagatcagctgctttcaatgggtgagcggatgtcatcgctgatgttctcttccgtgcttgcagagcagggcgtaaaaaccatgaactttgacgtacgtaaggtgttacgtacggacagtgagtttggagaaggtgcgccgcaaatcgaagaaatcgaaaagctgtctaaacaattgctggcacctgaaattaaagacgcgatagtggttactcaaggctttgttggtgctgacgaggaaggccgaactacaacgctaggtcgtggtggttctgattttacggcggcgctacttgctgaa

SEQ ID NO: 250595 - DNA, 1216 bp, Unknown
  Bacterial polypeptide expressing nucleotide sequence isolated from the Sargasso Sea
atgaaaatcatagtattaaagtttggtggaagttcggtaggaactgtagatagaattaaaaaaatagcaaatataatagctggttataaaaaaaagggatacaaaccaattgtaatatcttctgcaatgagcggtatgacaaatgatttaataaaaaaatcaaaggcggtgagtagcaattttaatgcttctgaacatgatgtacttgtttctgcaggtgaacaaatttcatgttctttaatagcgggaaggttaaatcatctaggttacaaatcacaatcctggatggcgtggcaaattccaattttaactgaaggtatgcatagcttttctagaataacccatatctataaaaaaaaaattataaattatttaagatcaggaggggtaccaattataacaggttttcaaggcataaatagtaataatagaataacaacactaggcagaggaggatcagatgcttcagcgattatgtgttcaaaattttttaaggcaaaaaaatgtataatttataccgatgttcaaggtgtttataccacagatccgaatactttaaaaaaagcaaaaaaaataaaagttatctcttacgaagaaatgctggaaatggcttctttaggagcaaaagtaatgcaaccaacttcaatacaagatgcaaggttaaacagaattgatatagaagtaaaatcttcttttgtaaaaaaagatgggactaaaattacaaagagaaagaatattataaccaataaaataattagaggtatatcttgtaccaaaaatgatgctaaagttacacttataggagttaaagacaaaccgggtatagctgcatctatatttaaaccattatcaaataatgcaataaatgtagatatggttgttcaaaatatatctgcaaatggtaaagaaactgatttaacttttacaataaaatctgaggatttaattaaaacacaaaagcttattcaaaaaaattcaaaaattagctttagagatttaattgttgataaaaatgtttcgaaagtttcaattattggagttggaatgattgctactccaggagtaacatatagaatgtttcaagctttagccaaaaaaaatattaatatcttagttatatccacttcagaaataaaaatatctgttttgataaacaaaaggaatataagtaaagcaattttagcattacataaagaatttaagcttgaaaagtaaa

SEQ ID NO: 250596 - DNA, 1216 bp, Unknown
  Bacterial polypeptide expressing nucleotide sequence isolated from the Sargasso Sea
tatgtcagaaattatagttcaaaaatttggaggaacgtctcttggctctgttgagagaattgatgctgttgctgaaatcattaagaaagcttcaaaaaaaaataaaattgctgttgttgtatctgcaatgagtggcgaaacaaacagattgatagatttagcaaattcatttggaaataaccctgataaaagagagtttgatgctctagtgtcaactggcgaaacaataagttcagcattattatcaatggcgcttcattcaaaaggtattaaggcaagatcattttcagcctcgcaaatagcaatcagaacaacgagttcatattcaaaagcaaaaatattggatgttgatgcaaaaaagatattagatgttcttgaaaatgacacaattcctattattactggttttcaaggtataactgagggtggtgatattacaacacttggaagaggcggttcggatgcaactgcggttgcaattgctgcgcagataaacgctaatcgatgtgatatttataccgatgtagatgggatttttacaacagatccaaatattgtaagtaatgcaaaaaaattagattcaattacaatggaagagatgcttgagcttgcaggacaaggtgcaaaagttgtgcaaacaagagctgtagaatttgcaaataaatatcatgttccagttagagttttatcaagttttaacgatggaagtggaacacttatttcattaaaggatgaaagtatggaaaatgcacttgtttctggaatcgcttctcagaaagatcaagtaaagttcactttgcatagcgttggtgatattccaggaacagcttttaaaatcttaggtcctattagtgaggctgaagttgaggttgatgttattgtgcaaaacgttagtattgacggtaaaaccgacttcacttttacagtttcaaatgaagatcaagaaatagttaaaaagattctttccaatataaaagacgaaataaattataaagagctcattataaacccagatattgctaaggtttcactggttggagcaggaatgcgatcacagtctggagttgctagcaaggcatttaaagctctatctgaaaacgatgttaatattcaaataatatgtacttctgaaatcaagataacaatggtgatcaaagaagaagaggtagaaaaagctataaatgttcttcatgaggaatttgaattagataaataa

SEQ ID NO: 250597 - DNA, 1213 bp, Unknown
  Bacterial polypeptide expressing nucleotide sequence isolated from the Sargasso Sea
atggcaaaaaaagtattaaaatttggtggtacttccgttggatctattaaaagaatcctgcatgcggctaaaattgtcaaaaaagaacatgacaatggtaataaattaatagttgtagtgtcagctatggcaggcacaacaaacaacttaattgaacattctaaggggatatcaaaaaaatttaacaaaagggagctagatgtcttattgacctctggcgaacaagttacaagtgcattaatagcaggagcattaaatgatttaggaatcaaatcaaaatcctggttgaattggcaaatcccaattataactgaaggtgaacattcaaatgctagaattattcatatgaatataaaaaatataaatgattatatttcttcaggcggtgttgcagttgtgccaggttttcaaggagtctcaaaatctggagacattacatctattggaagaggtggatcggatgcaactgctgtagcaatagctaaaatttttcaaacagatagttgtgaaatttatactgatgtagatggtgtgtactcctctgacccaaataaaatacctctggctaaaaaaattgataagatatcctacgaagaaatgttagagctttcatctctaggtgcaaaagtaatgcaatcctcagcagtacaatctgccatgatgggtgatgtacctattcaagtgaagtctacatttactgaaagggagggaacagaaataattaatcaagataacatagattatactaaagcagtaactggtgttgcttattcaaaagatgatgcaaaaattactttgcttggagttgaagataaaccaggtgttgcagcagatgtatttgaaccgttatcaaaaaatcaaataaacgttgatatggtaattcaaaatatctcaactgatggaaaaaaaactgatattacttttacaacaaaaagacaggacgttaaaaatgcaatttcattaatagaaaacaataaaaaaattaagtatgaaaaaatgtatatgaatgataaagtttcaaaaatatcaattgttggtgctggaatggttgctaccccgggtattacttttaaaatgtttagatctttagcagatgcaaatataaatttgttagctatctctacatctgaaattaaaatttcagtaataatagatgaaaaatttacaattgatgcagtaaaaaaattacataaaacatttaaacttgattgaa

SEQ ID NO: 250598 - DNA, 1213 bp, Unknown
  Bacterial polypeptide expressing nucleotide sequence isolated from the Sargasso Sea
aatgattaaaaaagtattaaagtttggcggaacatctgttggaacagttgaaagaatccagcatatagccaatattataaaaaaagagcaattaagcggaagcaaaattattgcagttgtttcagcaatggcaggaaaaactaatgagctaataaagctttcaaatgaaatttcagaggaatttaacaaaagagaattagacgttcttttatcctctggggaacaagtaacctgcgcgcttttgtcaggtgctttgttaaaattaaaaattaaagcacaatcatggatgaactggcaaattcctatactcacggaaggtgaccatgctaatgccagaataattaacatgaacgtcgaaaaaattaatcagttcttagatgataatggtgtagcaattattcctggttttcaagggatatcaaaaaaaggagatataactacaattggcagaggaggttctgacgcaactgcagttgctatagctaaaatatttaatgctgacacatgtgaaatttacacagatgtggatggtgtcttttctactgacccaaataaaattccagttgctaaaaaaatagaaaaaatttcttttgaagaaatgcttgagctctcttctcttggagcaaaagtaatgcaatcctcagcggttcaaactgcaatgatgtatgatattccacttgaagttagatcaacatttactgataggaaaggaacaaagatttttagtcaggaaaatattgattatacaaaaagcgttacgggagtagcttattcaaaaaatgatgcaaaaataactattactggagtacaagataaaccaggagtagcagctaatatatttgaaccattaagcaaagcacaaataaatgttgatatggttattcaaaatatttcttcagatcaaaaaacaacagatattacctttactgtaaagagagatgatatattaataacaagagaaattttaaaaaatgaaagcaaaataaattataaacagattattcaaaatgaaaaagtagcaaaagtatcaattgttggtgcaggaatggtttcaactcctggcgtaacctataggatgtttagagctttatctgatgaaggaataaatattttagcaatatcaacttctgaaattaaactttctgtcattatcgatgaagataaaactttagcagctatcaaaaagctacacacaatatttgatttagattaa

SEQ ID NO: 250599 - DNA, 813 bp, Unknown
  Bacterial polypeptide expressing nucleotide sequence isolated from the Sargasso Sea
aatgaaaataattgttttaaaatttggcggaacatcggttggtacattagatagaattgtaaaaatatctaaaataatcgtttcgtacataaaaaaaaaatataaagttattgttgtaacttctgctatgagtggtgttacaaacgaacttataaaaaaagccggaaaaatttctaaaaatttcccaaactctgagagagatgtgctattatctactggagaacaaatggctagtgctttgatagcaggaaagttatatgacttaggttttgattcaagatcttggatgtcatggcagataccaattataacaagggggaattatagctctgcaagaattcaaaaaattggtatagatcagataaaaaagtatttaaaaaaagggggcacaccaattgtaactggttttcaaggtttgaataaagaaaatagaattaccactttagaaagaggtggtagtgatgcgagtgcaatcatgctcgctaaattttttaaagccaaaaaatgtataatttatactgatgttgaaggagtttatacgactgatccaaatttaagtaaaaaagcaaaaaaactaaaaatactgtcttatgaagaaatgctcgaaatgtcttcacttggtgctaaagtaatgcagccagcttcaattcaggatgcaaaattaaataaagtaaaaattgaggtaaaatcctcatttaagaataaactagggacacagatagttggaagaaaaaagattaaagataacaatataattagaggtgtgtcatttacaaagaatgatgcgaaagtaagcttacttggtgtaaaaga

SEQ ID NO: 250600 - DNA, 1213 bp, Unknown
  Bacterial polypeptide expressing nucleotide sequence isolated from the Sargasso Sea
atgaaaactgtagtattaaaatttggtggaacgtctgtaggtaatatcgatagaataaaaaaagtgtgtaaaattatagcaacctataaaaagaaaagatataatgtggttgtaatttcctctgctatgagtggtgttactaatgaactagttaataaatctaagtcattaagtaataattttgatttggcagaatatgacgcactattatctactggtgagcaagtttcttgtgcacttatagcaggaagattgaatcatattggaataaaatctagatcttggttgtcctggcagctaccaattgtaactgaaggaaatcactcaggtgctcgaataaataaaataaatattaaggaattaaataaatatattaaaaatggtggagttccagttgtaactggttttcaaggtattaataaaagttatagagtaactactattggcagaagcgggtctgacgcaacagcaataatgttagctaaatatattaaagcagacgaatgtataatatttactgacgtagaaggggtttatactactgatccgcgacagcataaaaaagcaaaaaaaattaaaaaaattttttatgatgagatgctcgaaatggcatcattgggttcaaaagttatgcaaccaacttcaattcaggacgcaaagctgaatgaaatagatataaaagttcaatcttcttttgcatccaagtcaggaactttgattacaaattcaaaaaaatcatttagtgatcaaataataactggaatctcatcaacaaaaaatgatgctaaaattacaatagttggtgttagggacagacccggtgttgctgcgtcaatttttaaaccattatctaaaaatttgattaatgttgatatggttgttcaaaatatctcacaaaatggaaaaaataccgatttgactttcacaatcaaatctgaggatcttaaaaaaactgaaaagctaataaaagaaaataaaagtatttcatatcaaaaattatcttttgacagaaatttatctaaagtctcaataattggtgttggaatgattacaacgccaggaataacttatagaatgttccaagctttagcatcaaaaaaaataaatattttagttatttcaacatctgaaatcaaaatttcagttttagtatcagcaaagcatgttaaaaaggcaattgcatctttacataaagaatttaaattagattaat

SEQ ID NO: 250601 - DNA, 966 bp, Unknown
  Bacterial polypeptide expressing nucleotide sequence isolated from the Sargasso Sea
aatgaaacttatagtaatgaaatttggtggtacttcagttggcagtatcgataaaatcaataatgttgcaaacattgttgaaaggcaagtaaatgacaaaaaactaattgttgttttatccgcgatgtcaggcgttactaataaaatgcaagaatatatagatgaaattgaatcaaatgagattattgaaaatgatttaattctaacatctggtgaagctgtttcagttggacttctttcggctattttaaaaaaaagaaatattaaatctatcccattactcggatggcaaatcccaattataacagacagtaactatcaaaaagctaaaatcttaaacatagataaagttagagttgataaatatctaaatgattatgatgttttagtagttgctggattccaaggtgtcgatatagatggaaagattacatcattaggaaggggtggttctgatacaactgcagttgctgttgccgctgctgttgatgctgatagatgtgatatttacacagatgttgatggagtttattcaactgatccaaatctggaacccaaagctaaaaaaattaataaattggcattcgaagaaatgttagaaatgtcttctacaggagcaaaagtacttcatactcgctctgttgaattagcgatgaaaaataatcttacattgcaagtgctttcttcaataacaaaacaaggcggtactcttattgtagatgaaaataaattaattgaaaaagaaattgtaagcggagtgagttttagtaataatgaatcaaaattaacattatctggtattgcagataaacctggtatatccgcaacaatttttggattattagctaataataatattaacgtagatatgattgttcaaaacacatcgcaagatggtataactgcaaatatcacctttaccgttccaaatagtgaaattcataatgctaaaaaaatattagaaga

SEQ ID NO: 250602 - DNA, 1045 bp, Unknown
  Bacterial polypeptide expressing nucleotide sequence isolated from the Sargasso Sea
aatgaaaattgttgtattaaaatttggaggtacctcagtaggcaccatagaaagaataaaaaaagcggctaaaattatagttagctatgcgaaaaaaaaatataaagttatagttgtttcatcggctatgagcggagttaccaatgaactggtcaaaaagtcgcaaaagattagtgagaactttgaaccgtcagagtacgatgttttggtttcatcaggagaacaggcagcttgtgcgctaattgcaggtagactcaatcatatcggatataaatccagatcttggatgggctggcaaattccaattctaacagaaggtgatcataaagtttcaaaaattaatcaaataaaaaaagataaaattataggttatttaaaatctggcggaataccaattatagcaggattccaaggtataaatttaaatcaaagaattacaactttaggcagaggagggtctgacctaagtgcaataatgatttctaaattttttcaagcacaaaaatgtgtaatttatacagatgttgaaggggtaatgactactgatccacgcatttataaaaaagcaaaaaaaataaaaattatttcatatgaagaaatgttagaaatggcgtcattaggatcaaaagttatgcaatcaaactcaattcaagatgcgagattaaatagaattgatatagatgttaaatcatcttttgttaagacaaatggaactttaataacaaaaagaaaaaatattattaataataaaattataactggaatatcatcaactaaaaatgatgcgaaagtaactctcgttggagttaaagataaacccggaatagctgcatctatatttagaccactttctaagaattatataaatgtagatatggtcgttcaaaatatatctgctgatggaaacgaaactgatcttacatttacaattaaatctgaagatgtcaaaaaaactcaaaaattattaaagcaaaataaaaatattaaatttaaaaatttaattattgatactaggtgtatcaaaaggtttctaattattggagta

SEQ ID NO: 250603 - DNA, 875 bp, Unknown
  Bacterial polypeptide expressing nucleotide sequence isolated from the Sargasso Sea
tagatcaaattcaaaaaaaaatattgttaagttcattaattctggcgggattccaattataactggatttcaaggtgtaaacctagacaatagactaaccaccctaggcagaggtggaactgatgcttctgccattatgattgcaaaattttttaaagcccatcaatgtataatttataccgatgtggatggagtatacactacagatcctaggtttcataaaaatgcaaaaaaaattaataaaatttcttatgatgaaatgctagagatggcatcgcttggtgcaaaagttatgcaacctacatctgtacaggatgcaaaattgaataatattaattttactgtaagatcgtcttttgtaaaaaaaagtggaacgttagtcactaattataaaagatcttttagcaatcaaattataactggaataacttcaacacaaaatgagtctaaagttacaattgctggagtgaaagataaacctggggtagcagcatctatttttaaaccattatcacttaacaatataaatgttgatatggttgttcaaaatatatctttaaatggaaaagaaactgatttaacttttacaataaaaacagatgatataaaaaagactcaaaaattaattagaaataacaaaaaaatttcttatagaaaattaagctatgacaataatgtatctaaagtttcaattattggagttggaatgattactactccaggaattacttatagaatgtttcaagctttagcaaaaaaaagaattaatataatggtaatttcaacttcagaaataaaaatttctgttttaatttctagtaaacatgtaaaaaaagcaattcctattcttcataaagaatttaaattggattaat

SEQ ID NO: 250604 - DNA, 611 bp, Unknown
  Bacterial polypeptide expressing nucleotide sequence isolated from the Sargasso Sea
tatgggattacttgttcaaaagtttggcggaactgcagtaggagatcctgaacgtatacgagctgttgcggatcatattgcacgaactgttaatagtggaaatcaggtagtagtagttgtttctgctatgggtaaagaaactgacgaattattgcgtttagctgaagatgtatcaagtaaacggccaggtcgtgaaatggacatgcttattaccgcgggtgagcggaaagcaatgtctttattgtgcatggctcttcatgatttaggagttaaagcggattcgtttacaggaagtcaggctggttttttaactgatacaaatcatcaaaatgccaaaattcttgaggtaaaacctgaccgtatagagaaggccttatctgaaggccgagtgccagttgtaggaggttctcaaggagtttcagttgataataatattacttttttgggaagaggaggttctgacacgactgctgttgctatagcacacgcagttaaagccgatgcatgcgaattgtacacagatgtaacaggtgtttttacgactgaccctcgtgtagttccctcagctcgacttatgtcaaatgtatcttttgatgaacttttagaaatga

SEQ ID NO: 250605 - DNA, 687 bp, Unknown
  Bacterial polypeptide expressing nucleotide sequence isolated from the Sargasso Sea
aatggcaaaaaaagtattaaaatttggtggaacttctttaggaacaatagagaggattctgcatgtggctaaaatcataaaaaaggagtatgattctggcaatgaaattatagctatagtttccgcaatgtctggcaaaacaaacgagttattaaaacaatctaaagctatttctgaaaattttaataaaagagaactagatgtacttttgagttcaggagaacaagtgacaagctctctattagctggggcattaattaagtatggtgttaaatctaagtcatggcttaattggcaaataccaattttgacagaaggcgatcattcaaattctaggatagtaaatattaatataaaagaaataaataaatttttatcagataaaggagtagcaataattcctggttttcaaggaatttctaacaatggagatgtgactacaattggtcgaggcggttctgatgctacagctgtcgcctttgctaaaatatttgatacagacacttgtgaaatatatacagacgtcgacggagtttattccactgatccaaaaaaaatacctgtagcaaaaaagatagataaaatttcctatgatgaaatgcttgagctatcttctctgggagcaaaagttatgcaatcttcagcagtacaaactgctatgatgtataatattccacttgaagttaa

SEQ ID NO: 250606 - DNA, 1213 bp, Unknown
  Bacterial polypeptide expressing nucleotide sequence isolated from the Sargasso Sea
catgaaaactatcgtattaaaatttggtggaacatctgtaggaactatagatagaattaaaaaggtatgcaaaattattgctttttacaaaaagaaaaaaaataaggtagtagttgtttcatcggcaatgagtggtgtgacaaatgagttagttaataaatctaaactgataagtagcaattttgatagagcagaatatgatgcattagtttcgactggagagcaagcatcatgtgcacttattgctggtagactaaaacataatgggtttaaatcgagatcttggacatcatggcaattacctattttaacagatggtcctcattcaagtgcaaggattagttcagtaggtatcaaagaactaaatagatatataaatttaggtggaatacctataatcacaggatttcagggtgtaagtaaagatttaagaataacaacaatcggaagaagcggatctgatgcaactgcaattatgcttgcaaaatttattaaagctgatgagtgtataatatatactgacgtagatggagtttatactactgatccaaggcagtataaaaaagcaaaaaaaattaaaaaaattttttatgacgaaatgttagaaatggcatctctcggttcaaaagtaatgcagcctacatcggttcaggatgcaaagctgaataagattgatgttaaagtaaaatcttcatttgtatcaaaatctggtaccttaataacaaattctaaaaaagcatttagtgaccaaattattactggaatttcatcaacaaaaaatgatgctaaaattacaattgtaggagtaaaagatagacctggtgttgctgcttctatttttaaaccactatcgaaaaatcttatcaatgtagatatggtggttcaaaatatatctttagatggaaaagagacagatcttacatttactataaaagctgatgatttaaaaaaaacagaaaaattaattaaacaaaataaaaaaatatcttttaaaaaattatcttttgataaaggtgtttctaaagtttcaatcatcggtgttggtatgataacgactccaggtataacatatagaatgttccaggcactagcctcaaaaaaaattaatattttagttatttctacctcagagataaaaatttcagttctagtttctgttaagcatgttaaaagagcaatagctgctttacataaagaatttaaattagattaa

SEQ ID NO: 250607 - DNA, 1213 bp, Unknown
  Bacterial polypeptide expressing nucleotide sequence isolated from the Sargasso Sea
atgaaacttatagtaatgaaatttggtggtacttcagttggcagtatcgataaaatcaataatgttgcaaacattgttgaaaagcaactaaatgacaaaaagctaattgttgttttatctgcaatgtcaggcgttacaaataaattgcaagaatatatagatgaaattgagtcaaatgagattattgaaaatgatttaattttaacatctggtgaagctgtttcagttggacttctttcggctattttaaaaaaaagaaatattaaatctattccattacttggatggcaaatcccaattataacagacagcaaccatcaaaaagctaaaatcttaaacatagataaagtaagaatttataaatatctaaatgataatgatgttttagtaattgctggattccaaggtatcgatatagatggaaagattacatcattaggaaggggtggttctgatacaactgcagttgctgttgccgctgctgttgatgctgatagatgtgatatttacacagatgttgatggtgtttattcaactgatccaaatctggaacccaaagctaaaaaaattaataaattagcattcgaagagatgttagaaatgtcgtctactggagcaaaagtacttcatactcgctccgttgaattagcgatgaaaaataatcttacattgcaagtactttcttcaataacaaaacaaagtggtacacttgttgtagatgaaaataaattaattgaaaaagaaattgtaagcggagtgagctttagtaataatgaatcaaaactaacattatctggtattgctgataaacctggtatatccgcaacaatttttggcttgttagctaataataatattaacgtagatatgattgttcaaaatacatcacatgatggtgtaactgcaaatatcacctttactgttccaaatagtgaaattcataatgctaaaaaaatattagaagaaaatcaaaatttaattgattttaaatctattgaaaccgatagcaatatttctaaaatttcagtaattggaatggggatgatgtctcaatctggagtagcaaagaaaatgtttacaacgttagctgataattcaattaatatattagctatctcgacatcagaaataaagataagcgtcttaattaataaaaaatttacaaaaattgctgtaaaatctctacatgaggcatataatctagataattaaa

SEQ ID NO: 250608 - DNA, 458 bp, Unknown
  Bacterial polypeptide expressing nucleotide sequence isolated from the Sargasso Sea
tatgcaacaagttatagttcaaaaatttggaggcacatctgttggttcgggagagcgaatagctgctgtcgctgaaataattaaaaatgaggcagagatgaacactgttgtagttgttgtatcagcaatggcaggagagactgatcgacttatagaactttcaaaattatttggagataatcctaataaaagagaattcgatgccctgatatcaactggcgagaaagtaagcgcatctctcttagcaatggccctaaactctcttggcttgaaagccaaatcttattcagctgctcaagtttcacttaaaactacatctaacttttcaaaggcaaagattttagatatagataaagcaaaaatggaagagattcttgcagatggctcaattccaattattaccggtttccaaggaataactgaaactggagaggttactaccttaggtagaggcggat

SEQ ID NO: 250609 - DNA, 424 bp, Unknown
  Bacterial polypeptide expressing nucleotide sequence isolated from the Sargasso Sea
atgcaacaagttatagttcaaaaatttggaggcacatctgttggttcgggagagcgaatagctgcagttgctgaaattataaaaaatgaggcagagatgaacactgtggtagttgttgtatcagcaatggcaggagagactgatcgacttatagaactctcaaaattatttggagataatacgaacaaaagagaattcgatgccttgatatcaactggcgagaaagtaagtgcatctctcttagcaatggcccttaattctcttggcttgaaggcaaaatcttattcagctgctcaagtttcacttaaaactacatctaacttttcaaaggcaaagattttagatatagataaagcaaaaatggaagagattcttgcagatgactcaattccaattattacccggttttcaaggaataactgaa

SEQ ID NO: 250610 - DNA, 807 bp, Unknown
  Bacterial polypeptide expressing nucleotide sequence isolated from the Sargasso Sea
aaggaataaactcacattcaagaataactacaattggcagaggaggtacagatgctagcgctattatgttagcaagattttttaaagctcaaaaatgtataatttatacagatgttgatggagtctatacaacagatcctaattcaattaaaaaagcgaaaaaaattaaagttatttcttatgatgaaatgcttgaaatggcttcattaggttctaaagttatgcagcctcactcaattcaagacgcaagattaaatagaattgatattaacgttaaatcatcatttaagaatttacccgggactataataactaagagaaaaaatatattaagtgataaaattattagaggagtatcatttacaaaaaatgatgccaaagttacattaattggggtaaaagataagcctggggttgcagcctctatatttgagccaatttataaaaattctataaatgttgatatggtagtacaaaatatttcatcaaatggcaaagaaacagatttaacatttactataaaaaatgaagatttatttaaaactcaaaaattactaaaaaaaaataaaaaaattaattttagaaaattaattgtagacagcaaagtatcaaaagtttctatagttggagtaggaatgattacaactcccggtgtaacttacagaatgttcaatgcactagcaaaaaaaaatataaatatcattgtaatttcaacatctgaaataaaaatatctgttttagtaaatagaaaagatttaaataatgctataaaagttttgcataaagagtttaatttagaaaaataaa

SEQ ID NO: 250611 - DNA, 641 bp, Unknown
  Bacterial polypeptide expressing nucleotide sequence isolated from the Sargasso Sea
aatgaaaattgttgtactaaaatttggtggaacctcagtcggttcaatagaaagaattaaaaagatttccaaaataattttaagttatgtcaaaaaaaaaaacaaagtcattgtagtttcatctgcaatgagtggtgtgacaaatgaccttttaaacaaatcaaaaaaaattagtaaagttttttctagtaccgagcatgatgttcttgtctctgcaggagaacaaatttcttgtgctttaatagctggtagcctcaatgatttaggctataagtctaggtcatggttaggttggcaaataccaatattaacaactggggagtattcacaatctagaatttttaaaattaaaacctctgaaataattaaatatttaaaattaggtggaataccaatcataactggttttcagggactaaattctgaaaatagagttaccaccttagggcgaggaggctcagatgcaagtgcaattatgtgtgctaaattttttaaagcagaaaaatgcgtaatttatacagatgttgatggtgtttatacaactgatccaaaaacttataaaaaagcaaaaaagattaaagttatttcatatgaagaaatgttagaaatggcatcattaggctcaaaagtaatgcagcctg

SEQ ID NO: 250612 - DNA, 693 bp, Unknown
  Bacterial polypeptide expressing nucleotide sequence isolated from the Sargasso Sea
gatggctttgatcgttcagaaatttggtgggacgagcgttggtgatctggaaaaaataaaaggggttgccgaccgaatatccaagtatgtaaataaaggagataaggtggtcgctgtcgtatctgctatgtctggtgagactaacagattggtagcacttggcaccgacatttcaaacggtgaaccagatcccaaagaaatggattctttaacagcctctggtgagcaggttagtactgctttgttaactttagctttgcagaatctgggtataaaggcttcgtctttattcggtgatcaaataaaaatccacactgattctgcccacggtaaggccagaattttagagatcgatacggataaacttttgtctttcgtggattctggggtagtgcccgtcattgcaggttttcagggagtagatgtaaataacaatattacgacattgggtagaggagggtctgatacatcggcggttgcggttgccgctgcgatcaaagccgacgagtgtgagatatgtaccgatgtagacggagtttatactgcagatcctcgattggtggaaaacgcgagacgtttagagcaaattagttttgaagaaatgttagaactggcaagtcttgggtctaaggttcttcacccgcgttcaatagagtttgctggaaggtataaagtcccacttagagttgtgtc

SEQ ID NO: 250613 - DNA, 496 bp, Unknown
  Bacterial polypeptide expressing nucleotide sequence isolated from the Sargasso Sea
tatgtcaaaaattatagttcaaaagtttgggggtacttctgttggatctgttgaaagaattgatgcagttgccgagattatcaaaaacgcctcaaaatccaacgatattattgtagttgtatctgcaatgggtggagaaacaaataagttaataaaactatcaaaacatttcagtgaagatcctgacaaaagagaattcgatgcattagtttcaacaggagaaacagtaagctcagcattgcttacaatggcattgcattcaaaaggaattaaagcaaaatcgtactcagcatcacaaattgctatgaaaactactaattctttctcaaaagctaaaatactagatgtaaatgcaaaaaaaattcttgaggtagttgaagataatacaatacctattattactggatttcaaggcataactgaaggtggagatataactaccctgggaaggggtggttccgataccactgctgttgcaatagcagctcaggttgga

SEQ ID NO: 250614 - DNA, 724 bp, Unknown
  Bacterial polypeptide expressing nucleotide sequence isolated from the Sargasso Sea
atgaaaattgttgttttaaaatttggtggtacttcagtaggtactatagaaagaattaaaaaagtagccaatataatagttggttatgtaagaaaaggattcaagccaatcatagtttcctcagctatgagtggagaaactaatcatttaattaaaaaatcaagaaaaattagtaacaattttaatttttctgaatatgatgtacttgttgccgcaggagaacaaatttcatgtgctttgatagctggtagattaaatcatattggatacaaatcacaatcttggatgagttggcaaattccaatattaacaaagggagagcataaatcttctaggatcagtaaaataaataaaaaaaaaataattgattatttaaaatctggtggaattccagttgttacaggttttcaaggaataaataataatagcagaataacaactctcggaaggggtggttctgacgcttcagcaattatgtttgcaaaattctttaaagcaaaaaaatgtgttatttttacagatgtcgagggcgtttacacaacagatccgaacaatttaaaaaatgcaaaaaaaataaaagttatatcttatgaagaaatgctggaaatggcatctctaggagctaaagttatgcaaccaaattctatacaagatgcaaggttaaatagagtagaaattgatgtgaagtcctcctttgttaaaaaggaaggaaccttaatcacaa

SEQ ID NO: 250615 - DNA, 622 bp, Unknown
  Bacterial polypeptide expressing nucleotide sequence isolated from the Sargasso Sea
atgccatttataattcaaaaatacggtggttcgtccattggtaccattgagaaaattaaaaaagttgccaataaaattatagagtcgaaaaaaaacggtaatgatatagttgtagtggtttcagcaatgcaaggtgaaactaatagacttaccgaattagcaaaatcaatcaacgttgacgctagcggcagagaacttgacacacttttatctacaggtgaacaagttactattgctttactttctttagccatatctgaattaggatataaagccatatctttaactggtgctcaagctggaataattacgtctgatatttttaataaagccagaataaaatatattaattcagaaaaaattaaaaaattgttaagaaatgataacattgttgttattgctggttttcaaggcatgactgagcagggtgaaattacaaccttaggaagaggtgggtccgatacatctgctgttgctttatcagttgcattaaatgcagatgaatgccaaatatactctgacgtcgacggagtttatacaaccgaccctaaaattgcacaaggtgcaaaaaaaatcgataaaattacaaatgaagaaatgcttgaattagcaagtcaaggct

SEQ ID NO: 250616 - DNA, 961 bp, Unknown
  Bacterial polypeptide expressing nucleotide sequence isolated from the Sargasso Sea
atgaaaattattgttttgaaatttggaggtacctcagtaggtacagtggatagaattaaaagtgttgcaaatataatttctagttatattaaaaaaaagtataaagtgattgtagtttcatcagcaatgagtggtgtgacaaatgatttaataagaaaatcagagaaaatttcaaatgattttgatgttcaagaacttgatgttctattatctactggcgaacaaatagcatgctccttattggcaggcaggttgcgtcatcttggttatagttcaagatcttggttggcttggcaaattccaataattacttctggagattataattcatctagaataattaacattaataagaataaaatttacaaatatttaaaatctaatggaataccaataattacgggtttccaaggaattaataataaaaatagaattacaactttaggtaggggaggctcagatacaagtgcaataatggttgctaaattttttaaagcaaaaaaatgtattatttacactgatgttgatggtgtaatgacaacagaccctagagtttttaataaagctaagaaaataaaagttatttcttatgaagagatgcttgagatgtcatctttaggttctaaagtaatgcaatcatcctcagttcaagaagctaggttaaatagaatagatgttgatgttaaatcgtcttttcaaaataacagtggaacattaatcacaaaaaggaaaaatataattaataataaaataattacaggagtctcatctaccaaaaatgatgctaaaattaccttgattggagttaaagataaaccgggtatagctgcatctatatttaaaccactctctgataataatataaatgtagatatggttgtacaaaatatttcatctaatgggaaagaaactgatttaacattcacaatcaaatctggagatgtaaatacaactagaaaat

SEQ ID NO: 250617 - DNA, 665 bp, Unknown
  Bacterial polypeptide expressing nucleotide sequence isolated from the Sargasso Sea
aatgagtaaacttattgtcaagaagtttggcgggacgtcagtagctaatcctgaacggatagaagcagtagctgagatagttgagcaaacaattaatgaaggcaatagggtaacagttgtcctttctgctatgggcaacaatactgatgaacttattagtttagctaaagaaattaaccccgaaccagatcttagagaatatgatgctctgttatcaacaggagagcaggtttcagtagctcttttggctatggcactattaaagagaggcattcaaggaaagtcttatacagcttatcaattaggaattaaaactaactctagccatagtcgagcaagaatattagatgtagacgtaaataagattacgaaagaactgggagaaggagttgttcctgttataactgggtttcaaggaatgaatgaacttggcgacatcacaactttaggaagaggcggttcagatacaactggagttgccttagcagttgctcttaatgcagatgaatgtcagatttatactgatgtagatggtgtttttactacagatcctagagtttatgataaggcaagactcttaaagaatgtcagctttgaagaaatgcttgagttatcaagcatgggggctaaggttctccaacttcgtgctgtagaatacgctagta

SEQ ID NO: 250618 - DNA, 839 bp, Unknown
  Bacterial polypeptide expressing nucleotide sequence isolated from the Sargasso Sea
aaaaactaatgaattgataaaatttgcaaaagaaattgataataattttaataaaagagaatttgatgttttgttgtcatccggagaacaagtaacatgcgcccttttagctggtgctttaatcaaactcaatttaaatgcaaaatcatggttgaactggcaaataccaattttaaccgaaggtgagcatacaaatgctagaataattaatatgaatgtaaataaaattaatgactatttaaaaaaagggatagcaattgtacctggctttcaaggaatatcaaaactgggtgaggtgacgacgattgggcgaggaggctcagatgcaactgctgttgcttttgctaaaatatttgaggctgatagttgtgaaatttatactgatgttgacggagtttactcatcagatccaaacaaaataccagtagcaaaaaaaattgaaaaaatatcttacgatgaaatgctagaattatcatctttaggtgcaaaagttattcagtcttcagcagttcaaactgcaatgttgtataatatccccttggaggtaaaatcaacatttactgataggaaaggaactaaaatttttgatcagcaaaatattgattattctaaaagtgttactggagtagcttattcaaaagatgatgccaaagttaccttaataggtgtacaagataaaccaggcgtagctgcgaacatatttgaacctttaaacaaatctcaaataaatgttgatatggttattcaaaacatttcctctgatcaaaaaacgaccgatatcacttttacagttaaaagagatgatctaaatcaaactaaggaaattcttaaaaataaca

SEQ ID NO: 250619 - DNA, 804 bp, Unknown
  Bacterial polypeptide expressing nucleotide sequence isolated from the Sargasso Sea
tttgattatgacacgggttgtccaaaaatttggtggcacctcagttgccgatattgaccgtatcaaggctgtagctcaaagggtcaaagcggaggtagatcggggtaatgaagtagccgttgttgtttctgctatgtcgggcacaaccaatcaactggttgactggacggtcaaagcagctcctctccatgatactcgggagtacgatactgttgtcgcggctggggaacaagtgacagcaggtcttttggctctatcattacagactttgggtgttgatgcccggtcttggcttggttggcaggtgccgctgcgaactgacgatgcacacagtaaagcgagaatcaaagatattgataccactgatcttgaatcgcggataatatctggtcaggtagctgttgttgccggttttcaaggtcttggccccaataatagaattacaaccctcggaaggggtggttccgatacgtcagcggtggctcttgcagcagctttaaaagctgaccgctgtgatatatttacggatgtggatggaatttatactactgatccaagaattgttagcaaagcgcgtaaacttgatcgaattacatatgaagaaatgcttgagatggcatctctcggtgccaaggtattacagagtcgctcagtggagctcgccatgaatcacaacgttagggttcaagtgagatcttctttttcagacgtaaatggaacattggttgtagatgaaggtgaaattgtggaacaggaaattgtcagtggaatagcttatagtaaggatgaagcaaagatcacact

SEQ ID NO: 250620 - DNA, 475 bp, Unknown
  Bacterial polypeptide expressing nucleotide sequence isolated from the Sargasso Sea
attgaaatttggaggtacttcagttgcagatgttccacaaattaaaaaaattgcattaaaaattaaagccgaagttaaaaaaggtaataaggttatagcagtagtttctgctatgtcaggagttacaaacaacttaattgaccaagttaaaaaaacatctgaaaattttccttattctgaatatgatactgttgtatcctcaggggaacaggttacgtcggctcttttatccattgctttagaagaagtgtctataaaagcacgttcttggttaggatggcaagttcctatatttacagacgatatttatggaaaagcagtcataaaaaatattgagactgcaaatatttctaaatctcttgaaaatggttttgtggcaatagtatctgggtttcaaggtgtttctaataataatagaataacaactttaggtagaggcggttctgatacgtcggcagttgctttagctgcagca

SEQ ID NO: 250621 - DNA, 901 bp, Unknown
  Bacterial polypeptide expressing nucleotide sequence isolated from the Sargasso Sea
ttgatgagtatgtcattaagaaataataatgtgaaagcagtaagtcttactgggcaaaaagcaggaatatttacagatgaattacatggctctgcaagaatagcttccattgatgaaaaaatgatactaaatgaattaaacaataaagatgttgttattgttgctggctttcaaggtgtttcaggatatggtgaggtaaccactctaggaagaggaggatctgatacaacagctgtagcaattgcatcagctttaaatgctgaaaaatgtgaaatatacactgacgtaaaagggatttttactgccgacccaagattagttaaagatagcaagttaataagaaatatttcttataatgaaatgttagagatggcttcattgggtgcaaaaatgcatccacgatcaattgaaatagctgcaataaataacatagagatgataattaagcatacaatgtatgaaagtgagggtacaaagttgaataacaatgaaataaaaatggaaataagaaatgcagttacaggcataccaacatcaaaaggagtaagcaaagtaactataaacaatattgatgatgaaccaggcattgcttcttctatttttttaccactcagtgaaatgggcataagtgttgatgtaattgttcaaactgctggaaatgatgggaaaacaaatttaagttttactttaaatgacaatgatcttgaaagttgtgtaaatgaattaatgaaaaataatgtatcaaaaaaagaatttataaaaacacaatcaggtttgggtaaaataagtattgttggaactggtattcaaaatcagcccggctacgcatctaggatgtttaaaacattatcagaaaacaaaataaatatagaaatgattactacatctgaaattagaataa

SEQ ID NO: 250622 - DNA, 798 bp, Unknown
  Bacterial polypeptide expressing nucleotide sequence isolated from the Sargasso Sea
catgctcttgaccgctggcgagcggatctccatggcggtgctcgcaatggcgattcatgacctaggcgccgaggcgcgcagttacaccggatcgcaagcggggttgatcaccgactcggctcatggtgccgcgcggatcatcgatgtttcccccgggcggatcagcgaggctctggccgagggagctatcccgatcgtggcgggcttccagggtgtcgcgcaagattcgaaggacatcaccactctcgggcgaggtggctccgatacgacggcggtcgcgctggcagccgccctgaacgctgacgtctgcgagatctacaccgatgtcgacggcgtctttagcaccgacccgcgagtggtcccggctgctcgccgcgtccccttcatcacgtacgaggagatgatggaacttgcagccgtgggcgccaaggtgctgcacctgcgatgtgtcgagtatgcccggcgattcgatctacccatccacgttcgttcgtcgttttcgtcgaaagaaggaacctgggtgatgtcgcctgaagcgatcacccacgccatcggagaaggaagagctatggagcagccgatcatttccggagttgccgcagatgtgaacgacgccaaggtgacagtcgtcggtgttcctgacaagccgggtcaggcatccgcgatatttcgcgctctagccgatgccagcatcaacatcgacatgatcgttcagaacgtgtcggcggcggcaacgggtcgaacggatgtcaccttcacctgtccgcaagggtcggtgcaacaggcaatggaggcgat

SEQ ID NO: 250623 - DNA, 805 bp, Unknown
  Bacterial polypeptide expressing nucleotide sequence isolated from the Sargasso Sea
atgagcataattgtaatgaaatttggaggcacatctgtagcaactgtagaaaaaataagaaaagttgctaaaactgttaaagctgaattagttaataataagattgtagttgttctttctgcaatggctggagtaactaatgaattacaatctttaataaatgaagtgaattttaaagcttcaaaggaagctgatttaatacttacttctggcgagcaagttactatcggtcttctttcaatgatgctaaaaaaagaaggaataaaaagtattcctttgttaggttggcaaattccaatagttacagatgatcatcatgaaaaaggacgaatattaaatatcaataatgaaaatttatataaatattttcaatcaaatgatgttattgttcttgctggctttcaaggtattagcactcatggttatatcacttctttagggagaggtggttctgacacaactgctgtggctatcgcatcttctattaaagctgagagatgtgatatttatactgatgttgaaggtgtctacactactgatccaaacattgaaaaaaatgcaaaaaaaataaataaattaacatatgaagaaatgttagaaatgtcttccactggagccaaagttctacaaactcgatcagtagaattggcaatgaaaaataatcttacccttcaagttctttcttcattaacaaatcaacaaggaacgtatgtagttaatgaaaatgaattaattgaaaatgaaattgtaagtggtgtttcctatagtaaaaatgaatctaagattacaatttctggaatccaga

SEQ ID NO: 250624 - DNA, 637 bp, Unknown
  Bacterial polypeptide expressing nucleotide sequence isolated from the Sargasso Sea
aatggcaaaaaaagtatttaaatttggtggaacttctgtaggcactattgaaagaatattgcatgttgctaatattttaaaaaaagaatatgtcgcaggcaatgaaataattgcagtagtttcagctatgtccggaaccacaaataatttgcttcaacaatctgagtcaatttctaagaactttgacaaaagagaactcgatgttcttctatcttcaggcgaacaaataacgagtgctcttttaactggagcgctgaaagaaattggagttaaatctaaatcatggttaaattggcaaataccaatattgactgagggcgatcactcaaatgcaagaataataaatatgagcgttactgaaataaataaatatttatcagaaaaaggtgttgtagtaattcctgggtttcaaggaatttcaaaatcaggtgatattaccactattggaagaggaggttcagatgctactgccgtcgcaattgcaaagatatttaatgctgactcatgtgaaatatatacagatgtggacggtgtattttctaccgatccaaacaagattccagtagcgaaaaaaattaataaaatttcatatgatgagatgttggagctttcgtctctaggggctaaagtcatgcaa

SEQ ID NO: 250625 - DNA, 546 bp, Unknown
  Bacterial polypeptide expressing nucleotide sequence isolated from the Sargasso Sea
tatggcacttattgttcaaaaatttgggggtacttctgtcggctctgtcgatcgcataaatgctgtcgcaaaaaaggtgggtgaattccgagaccgaggggacgatgtaattgtcgtagtttctgctatgagcggagaaactaatcgcttaactgctcttgctcaaggcttcatttctaatcctgcttcgcgagaaatggatgttcttctttctacgggtgaacaagtcaccatttctttgttagcgatggcattggagtcgcggggttatggggcgatttcttacactggtgctcaggtgaaaattttaactgatagttttcatacaaaggctcggattaaagaaattgatacaacgctcttgcagaatggaattaaagccggcaaggttgtagtcgttgctggctttcaaggtgttgattcaagtggaaatattaccaccttgggtagaggagggtccgatactacagccgtcgctctggcggctgctttgaacgctgaagagtgtcaaatttatacggatgttaaaggtgtttacacaacgga

SEQ ID NO: 250626 - DNA, 563 bp, Unknown
  Bacterial polypeptide expressing nucleotide sequence isolated from the Sargasso Sea
cggtgaaccagatccaaaggaaatggattctttaacagcgtctggtgagcaggttagcaccgctttgttatctctagctttgaagaatctgggtataaaggcttcgtctttattaggtgatcaaataaaaattcacaccgattctgcccacggtaaggccagaattttagagatcgatacggataaacttttgtcttacgtggattctggcgtagtgcccgtcattgcaggttttcagggagtggatgtaaataacaatataacgactttgggtagaggagggtccgatacatcggcggttgcggttgctgctgcgatcaaagccgacgagtgtgagatatgtaccgatgtagacggagtttacactgcagatccccgattggtggaaaacgcgagacgtttagagcagattagttttgaagaaatgttagaactggcaagtcttgggtctaaggttcttcactcgcgttcggtagagtttgctggaaggtatagagtcccacttagggtggtgtctaccttttccgatggagagggtactttgataactgatggagaatgaa

SEQ ID NO: 250627 - DNA, 827 bp, Unknown
  Bacterial polypeptide expressing nucleotide sequence isolated from the Sargasso Sea
tacagggtttcaaggtatttcaaatgaaaataatgttacaacaattggtagaggcggatccgatacatctgctgttgttttagccgcagcgcttggtttgagtgagtgtgatatttatactgatgttgatggtgtgtatactacggaccctcgtttagttgatgatgctaaaaagttagatgaagttgcttaccatgaaatgtttgaactagcatcaatgggtgctaaggtattgcatccaagagctgttgaatgtgcacaagaaaataatatcgtactacatgttcggtcatcattttctgttaaagatggaacacgtataaaggagttagagcatatggaattaaatcgagttgttactgggattgcattaaaaaaagatgaagctaaaatttcaatttcaggaattagtgatgagcctggtgtggctggtaaattgttttctgaattgagtcatcataatattaatattgatatgattattcaaagtaatgaagaagcaaataaaaccaataccattacatttacagttagtgaagattcgtttgaagaagcgatgtcaatcactcgcaaaattgctgaggcgttaggctctggagttgtgcttgggcatactaacattgctaaagtttcagttgttggtgttggtatgatatctaagcctggagttgctgcaaaaatgtttcaaattttaggtgatcactccattaatattcaattaattacaacatcagaaattaaaatttcatgtgcaatagattcgacacaggctgaaatggcagttcaggcattgcatgaaggttttcaattagatcaagctaaatgat

SEQ ID NO: 250628 - DNA, 556 bp, Unknown
  Bacterial polypeptide expressing nucleotide sequence isolated from the Sargasso Sea
tatgggcaaattaatcgttaaaaaatttggaggtacgtcagttgctgatgcagaacgcattgaagctgtggcagataacattgaatctgaaattcatgcgggaaataaggtaaccgtggttctttctgcaatgggagatagtaccgatgatcttattaaattagcaaaagagattaatcctgaacccgatcttcgagaatatgacgctcttgtatctacgggtgagcaaatatcggtagctttattggcaatggcccttcttaaaagaggtataaaaggtaagtcttacactgcataccaattaggtataaaaaccaattcaagccatagtagagcaagaatattggatgttgaagtaagtaagattacttctgaaataaatgaaggtgttgtgccagtaattacaggttttcaaggaatgaatgagtctggcgacattactactcttggaaggggagggtctgacactactggggttgctcttgctgcagctttggatgctgatgaatgccaaatttatacagatgtagatggcattttcaccacagatcctaga

SEQ ID NO: 250629 - DNA, 828 bp, Unknown
  Bacterial polypeptide expressing nucleotide sequence isolated from the Sargasso Sea
tatgaaaaatatcattgttcaaaagtttggcggtacctctgtgggttcggtggaacgcatattggcagtggcaaacattattaaagcagctttcaaaaacgaatttcctgttgttgtagtttcagcaatgggtaaagagactgataggttggttatgctagctaaaggcatttcaaagaatccagaaaaaagagaattggatgctttgctttccaccggtgaaaaagtaagtgcatctttgcttgccatgcagctaaatgaaatgggcataaaagccaaatcattttctgcagctcaaatctcaatgaaaacaacttctcagtattcgaaagcaaaaatattggatattaactatcaaattatccttgattccattcagagcggttttgttcctgtcattactggttttcaaggagtcactgattcaggagatgtaaccacccttggtagagggggctctgacacaactgctgttgctgtatctgcagcaattgaggcatctaggtgcgatatatatactgatgttgatggtatctacaccactgatcctaaccttgttaataatgccaagaaactagaatcaattaccatggaggaaatgctagagctttctggtcaaggagcaaatgttctccaaatcagggcagttgaatttgcaaacaagtacaatgttccattgagggtcctttcgagcttcaaaagtggatcaggcacacacatcttaaaggaggaatcaagcatggaagatgctgtaataactggaattgcttaccaaaaagatcagacaaaaattacacttcatggcgtagttgataccccaggaatagc

SEQ ID NO: 250630 - DNA, 814 bp, Unknown
  Bacterial polypeptide expressing nucleotide sequence isolated from the Sargasso Sea
aatggtaaaaaaagtattaaagtttggaggcacatctgttggaactattacaaggattcaacatgtggcaaatattatcaggaaagaaaaagatgatgggcatcaaataatagtcgtagtttctgctatggcaggcaaaactaatgaattaataagtttatcaaaaaacctctcacaagattttaacaaaagagaattagacgttttgttgtcctcaggagaacagataacttgtgctttacttgccggagcactattagatctgaatataaatgcaaagtcttggcttaattggcaaattccaattttaactgatggtgagcatgctaatgcaaggattatcaatataaatgttaatagaatagaagattttttaaaatttggagttgcaatagtaccagggtttcaaggaatttctaaaaatggggatattactactattggaagaggtggatcagatgcaacagcagtagcttttgcaaaattatttaacgcagatacttgcgaaatctacacagatgttgacggggtatattcatcagatccaaacaaaatacctgttgcaaaaaaaattgataaaatttcatatgatgaaatgttggaactttcatcactaggcgctaaagtaatgcaatcatcagctgttcaaactgcaatgatttatgatatacctttagaagtaaagtcgacttttactaatagaaaaggcactaaaatttttgacaaacaaaatattgattattcaaagagtgtcacaggtgttgcgtactctaaagacgatgctaaagttactttgatgggtgttgaaggatag

SEQ ID NO: 250631 - DNA, 845 bp, Unknown
  Bacterial polypeptide expressing nucleotide sequence isolated from the Sargasso Sea
aacttgtaaaattttcaaagaaatatcagaggattttaataaaagggaacttgatgttttattatcttcaggtgagcaagttacgtgttctctactcgcaggagcactaattgaaaaaaaattaatagctaaatcttggttaaattggcaaattcctattttaaccgaaggtgagcattgtaacgcaagaataatcagtatggatatagaaaaaataaataattttttaaacaaaggagtcgcgataattccaggttttcaaggtgtttcaaaaaatggtgacataacaactattggaagaggaggatcagatgcaactgcagtggcagtagcaaaattatttaacgcagactcttgtgaaatttatacagatgttgatggtgttttttcatctgatcctaataagatacctgtcgcaaaaaaaattaaaaaaatttcttatgatgaaatgcttgaattatcatcattaggcgctaaggtaatacaatcatcagcagtacaaactgctttgatttacaatatacctttagaagtaaaatctacttttaccgatagaaaaggaacgatgatatctaaccagcaagatatagattatacaaaaagtgttacaggagttgcatattccaaagatgatgcaaaaataactttactagatgttgaggataggcctggagttgccgcgaacattttcgaaccacttaataaagctcaaattaatgtcgatatggttattcaaaatatctcctctgatcaaaaaactacagatatctcatttacgattaaaagagatgatttaattaaaacaatagaaattttgaaaaaaaatagagtaattaaatataaag

SEQ ID NO: 250632 - DNA, 619 bp, Unknown
  Bacterial polypeptide expressing nucleotide sequence isolated from the Sargasso Sea
atgaaaactattatacttaaatttggtggtacctccgtaggatctattgataggatcaagagaattgcaaatattataataggttataagaaaagaagaaataaagtaattgttatttcctcagcaatgagcggaacaacaaatgatttgatcaaaaaatcaaaactgattagtaatgattttgataaggcagaatatgacgcacttgtttctactggagaacaggtagcttgtgcgctaattgctggaagattaaatcatcttggttttaaatctagatcgtggacttcatggcagatccctatcatgactgatgggccaaactcaggttctagaattgataaaatttctactaaagatttatcaagatatattaaatctggagggatacctgtaattacaggattccagggcataaataaatttttaagaattaccacactaggaagaggcggatctgatgcctctgcaataatgatagcaaaattttttaaagctgatgaatgtattatttacaccgatgttgatggtgtttacacaactgatccaaaattagacaaaaaagcaaaaaaaattaagcagattcaatatgatgaaatgcttgaaatggcatctttag

SEQ ID NO: 250633 - DNA, 861 bp, Unknown
  Bacterial polypeptide expressing nucleotide sequence isolated from the Sargasso Sea
agatatttctgaagattttgataaaagagagcttgatgttcttttaagctcaggagagcaagtcacaagctctttattagctggagcattaattgaactaggtgttaaatctaaatcatggcttaattggcaaatacctattttgacagaaggagaacattctaattctagaattataaatattaatgttcaaaaaattaataaatttttatcagaaaaaggtgtagcaataattcctgggtttcaaggagtttcaaaaaaaggagatgtgactacaattggaagaggtggatcagacgctactgctgtggctgttgcaaaaatattcaatacggaaacttgtgaaatatatactgatgttgatggagtttattctacagatccaaaaaaaataccagtagcaaaaaaaatagataaaatatcttatgatgaaatgcttgaactttcatcattgggagcaaaagttatgcaatcctctgcagtccaagctgcaatgatgtataatattcctctcgaagttaaatctacatttacagatagacaaggaacgaaaatttttgaccaagagagtttagactatactaaaagtgttacaggagtagcttattcaaaagatgatgctaaaattacccttacaggggtagaagataaacccggagttgccgcaaatatatttgagccattaagcaaaaatcaaataaatgttgatatggtgatacaaaatatttcatcagatcataaaattactgatataacttttactataaaaagagatgatcttttaaaaactattgaaatattaaaaagcaataaagatataaaatataaaaacatgagtcataataataaagttgcaaaaat

SEQ ID NO: 250634 - DNA, 515 bp, Unknown
  Bacterial polypeptide expressing nucleotide sequence isolated from the Sargasso Sea
tatgcaacaagttatagttcaaaaatttggaggcacatctgttggttcaggagaacgcatagcagccgttgctgaaatcattaaaaaagaggctgagatgaacactgttgtagttgttgtatcagcaatggcaggagagactgatagacttatagaactctcaaaattatttggagataatccgaataaaagagaatttgatgccttgatatcaactggcgagaaagtgagcgcttctcttttagcaatggccctgaattctcttggcttgaaagccaaatcttactcggctgctcaagtttcacttaaaactacatcaaacttttcaaaggcaaagattttagatatcgataaagcaaaaatggaagagattattgcagatggctcaattccaataattactggtttccaaggaataactgaaactggagaagttactaccttgggtagaggcggatctgatactactgctgttgcaattgctgcttcacttaaagctaatcgatgtgatattt

SEQ ID NO: 250635 - DNA, 595 bp, Unknown
  Bacterial polypeptide expressing nucleotide sequence isolated from the Sargasso Sea
tcatctgtaagtaacgcgacaaaaataaagagtgtggcgttaagaattgctgaatcaaaaaagcaagggcatcaactagcagttgttttatcagccatgggtgactctactgatcaattaattgaactggcagagtcgatcagtactaaccctgaaccacgagagttggatacattgctatctacaggagagctagtgtcatgcaccttaatggcaatggctctaagagaattaggtattccggcaataagcatgagtggcgcccaagcagggataaaaactgatacagctcacgggagagcatccattgtaggccttgatgcaaatcgaatcatcagcatccttaattcaggtactgtggcaatcgtcgctggtttccaaggcgttagcgaagacatggatattacgaccctcggaagaggagggtctgatacaacagcagttgctcttgcagcggccataggtgctgaaaggtgcgaagtctttactgatgtagatggtatatacaccgctgacccgagagtagtaccaaatgcaaaaaaaattaaggaaattggatacgaggaaatgcttgaacttgcaagctacggagcaa

SEQ ID NO: 250636 - DNA, 628 bp, Unknown
  Bacterial polypeptide expressing nucleotide sequence isolated from the Sargasso Sea
atgaaaattgttgttttaaaatttggtggtacctcggtaggaaaaatagaaagaataaataaagtagcaaatataattattagctatgtaaaaaaaaaatatagagtaattgtgatttcatctgcaatgggaggtgtaactaatgatttaattaaaaaatcaaaaaaaatatctagagattttatatcttcagaacaagatgtactagtttcatcaggggagcagatatcatgtgcattaattgccggtagattaaatcatctagggtataaatcacaatcttggcaaggttggcaaatacctattataacaacaggtatatttggctcttcaagaataataaaaataaatacaaaaaaaataaacaactatttaatttctggagggattcctgtaattgcgggttttcagggaattaacatgaataatagaattacaaccctaggaaggggaggatcagacgcaaccgcaataatgattgcaaaattttttaaagcacataaatgtataatttataccgatgttgaaggagtttatacaactgatccaaaaaagtttaataatgcaaaaaaaattaaagtaatctcatatgaagaaatgttagaaatggcatctttgggagctaaag

SEQ ID NO: 250637 - DNA, 900 bp, Unknown
  Bacterial polypeptide expressing nucleotide sequence isolated from the Sargasso Sea
taattggcaaataccaattttgacagaaggtgaaaattcaaatgccagaattataaatatgagcactttaagtataaataaatttttatcagaaaagggagtagcaataattcctggatttcaaggaatatcaaaagctggtgatataactacaattggaagaggtggttcagatgccactgctgttgccattgctaaaatatttgatgctgatttatgtgagatatatactgacgttgatggtgtttattctacagaccctaataaaattcccgtagcaaagaaaattgataaaatatcttatgatgaaatgcttgagttatcatctctaggagcaaaggttatgcagtcttcagccgtacaaactgccatgatgtataacattccacttgaagtaaaatccacatttacagctagacaagggacaaaaatttttgatcaagacagcatagattatactaaaagtgttactggtgtagcttattctaaggacgacgctaaaattactttggttggggtgcaagataaacctggcgttgcagcgaatatatttgaaccattaagcaaaaatcaaataaatgttgatatggtaatacaaaatatttcttcagaccaaaagacaactgatataacttttacaattaaaagagaagatcttttaaaaactattgagatattaaaaagcaataaaacaattcaatatgaaagcttgaatcataatgataaggtttctaaaatttcaattgtaggtgcgggtatggtttctactccaggtataacttataggatgtttcgaagtttggctgacgaaaaaattaatattttagctatttcaacctctgaaattaagctgtcagtaattattggtgaagatgataccttaaaagctattaaaaagtt

SEQ ID NO: 250638 - DNA, 630 bp, Unknown
  Bacterial polypeptide expressing nucleotide sequence isolated from the Sargasso Sea
tatggcgcttattatacaaaaattcggcgggacatccgtcgcaaacccggaacgcataaatgatgttgctgaacgtattgcaagatatcacaaatcaggtcatcaaattattgcagtggtatcagcgatgtcaggagaaacaaataaattaataagtttggctgatgaaatgatgcaaaacccagatccaagagaattagacatggtcatgtctaccggagagcaaataactgctgggttaactgcgctttctttaattgacaaaggtgttcaagctaaaagttacacgggtcatcaattaggaatttcgacagactctagttttggtaaagcaagaattgtagacatcgataccaaaatactaaaaaaagatttaaaacagggtttcgttgttgtagttgctggattccaagggcttgataaagtcggtaatatcactacactagggcgaggtggatctgacacaactgcagtggcaatagctgccgcaataaaagcagatgaatgtcaaatatatacagatgttgatggaatttatactaccgacccaagggttgtgccagaggcacgcaaattaaactctattacttttgaagaaatgcttgaaatggcaagtcttggatcaaaagt

SEQ ID NO: 250639 - DNA, 478 bp, Unknown
  Bacterial polypeptide expressing nucleotide sequence isolated from the Sargasso Sea
atggctttgatcgttcagaaatttggggggacaagtgttggtgatctggaaaaaataaaaggggttgctgatcgaatatccaagtatgtaaacaaaggacataaggtggtcgctgtcgcatccgcaatgtctggtgagactaacagattggtagcacttggtaccgacatttcaaacggtgaaccagatcccaaagaaatggattctttaacagcttctggtgagcaggttagcactgctttgctatctttagctttgcagaatctgggtataaaggcttcgtctctactcggtgaccaaataaaaatccacaccgattctgcccacggtaaggccagaattttagagatcgatacggataaactcatgtctttcgtcgattctggtgtagtgcccgtgattgcaggttttcagggagtggatgtaaataacaatatcacgacgttgggtaggggagggtccgatacatcggcggtcg

SEQ ID NO: 250640 - DNA, 828 bp, Unknown
  Bacterial polypeptide expressing nucleotide sequence isolated from the Sargasso Sea
caaatgcagaacacgatgtgatagtttcatcaggagagcaggttacaagtgggcttttagcactatatttgaacaatataggcatcaatgctcgctcatggatggcgtggcaaatgccctttatgacagataatacttttactaaggcacgaataacagaaatagatgcaacagaacttaaagtttctttggataacaatttcgtggcagtcattcccggttttcagggggttacggacaacaaacgaattacaaccctgggacgcggaggatcagacacaactgctgtcgcactagcagctgctttgagcgctgagcgttgtgatatatataccgatgtagacggcgtttataccaccgacccgcgtatcgtatcaaaagcgcaaaaaatcgatgcggtgacatacgaagaaatgctagaaatggcatcccaaggagcaaaggttcttcaaacaaggtcggttgcgttggcaatgctgcatgatgtccgcctgcaagttttgtccacttttgaaaacaaaccaggaaccctggttttgagtgaggaggaaatattggaacacgaaacagtaaccggtattgcctacagtcctgatgaagccaaagtaactcttcgtcgcgtcggcgataaaccgggtgtggctgctagtatttttggttcgttagcaaaggcatcaattaatgtagacatgatagttcagaatgtctcagaggatggtaaggcaacagatataaccttcacaataaaccaaactgacagcgaaagagcatcagaagttttacataaccttaaagacgaaattggtttttgtgacctaaattgctgac

SEQ ID NO: 250641 - DNA, 778 bp, Unknown
  Bacterial polypeptide expressing nucleotide sequence isolated from the Sargasso Sea
accctggggcgcggcggttccgacacatcagcagtggccttagccgcagctctcggagcagacacctgtgagatttacaccgatgttcctggtgtcctgactacagatcctcggaaggtgctcgatgcgcagctaatgcgggaggtgagctgcgacgaaatgttggaactggccagtcttggtgctgccgtgttgcacccacgggcagtggaaattgccagaaattatggcgtacctctggtcgtgagatcgagctggactgagggaatgggaactcgtctcttcagccaggcagaacgcaaaatcagcagtgaaggtttagaactagggaaaacagtggacagagctgaactcgttgaagagcaagctgtgatcgctcttgcccatgtgcccgacgagccaggagttgcagcgaacctttttgaaggacttggcaacgcaggactgaacgttgatctaattgttcaagcaacacatgatggcgtaacgaatgacatagcttttacacttgcagagtctgagatagcagttgcagaggctttctgcaggcaaaaactgggaaatgacagtcacgtagaaattcaaagtggaatggcaaaacttagtattggtggcgcagggatcatgggccgtcctggcatagctgcacagctatttgaggcactaagcaaagtcgggattagcatacgtatgattgccacgagcgaagtacaagttagctgtctaattcgaggggaagaagcagccaaagcaatgcgaacaacggcacaagtatttg

SEQ ID NO: 250642 - DNA, 970 bp, Unknown
  Bacterial polypeptide expressing nucleotide sequence isolated from the Sargasso Sea
tttcggcccaacccgaccccgcgtgaactcgacatgattgcctcgactggcgagcaggtgagtgtgggtctgctggcgatcgcgctgcatgccgaaggcatcgatgcccgcagctacaccggctggcaagtgccggtgaagaccgattcggcctacaccaaggcgcgcatccagtcgatcgacgacgagcgtgtgcgcgccgatctcgacgccggtcgtgtggtggtcatcacgggcttccagggcatcgacagcgaaggccatatcaccacgctgggccgtggtggctcggatacctcggccgtggcggttgccgccgcgctcgaagccgaggagtgcctgatctataccgacgtcgatggcgtttatacgaccgatccgcgcgtggtggacgacgcgcgtcgcctggacaagatcaccttcgaagagatgctggaaatggccagccttggctcgaaggtgctgcagattcgctcggtggagtttgccggcaagtaccgcgtgaagacccgcgtgctgtcgtcgctgaccgacccgctgatgccgctcgacgttgagatgaactcgggcacgctgattacttttgaggaagattcgaacatggaagccgccgccatttccggcatcgcctttgcccgcgacgaagccaagatcaccgtgatcggtgtgccggacaagcccggcatcgcctatcagatcctgggcccggttgccgacgccaacatcgacgtcgacatgatcatccagaaccagtcggtggaaggtaagacggacttcaccttcaccgtgccgcgtggcgaataccagcgcgccctggcgatcctgaacgatagcgtgaaggcgcatatcggcgcggccagcgtgtcgggtgacccgaaggtgtcgaaggtgtcggtggtgggcgtgggcatgcgctcgcacgtaggtatcgccagcaagatgttccgcacgctgtcggaagagggcatca

SEQ ID NO: 250643 - DNA, 520 bp, Unknown
  Bacterial polypeptide expressing nucleotide sequence isolated from the Sargasso Sea
aatgagtttaatagtacaaaaatttggtggtacgagcgttgcagatacagattctctcagaattgttgctgaaagaataatcgattgcaaaaaaaatggtaatgacgtagtagttgttccatctgcaatgggctccagtacagatgaattaactcaacttgcaaacgatctttcagaaagtccaacaccaagggaactggatatgctcttatctgcaggtgagagaatcacgatgtctttattatcaatgcatttaaatagtcttggatacagttccttttctcttactggttctcaagctgggataattacaacatctagacacggacaagctgaaatagaggaaataactggtgaaagagttaaagaagggttagaaaacggagatattgtaattgttgctgggtttcaagggtttaacagagatactcaagaaataacaaccttaggcagaggaggttctgatgctacggcagttgcacttgctgctgctcttggagcagagaggtgcgaaatattt

SEQ ID NO: 250644 - DNA, 917 bp, Unknown
  Bacterial polypeptide expressing nucleotide sequence isolated from the Sargasso Sea
tatgagcatgtctttaagagaaattagtgtaaatgcaattagtcttactgggcaaaaagcaggaatttttacagatgacttgcacggctctgccagaatttcatcaattgataaaaaagtaatattaaatgaattaacagaaagagatgttgttattgttgctggattccaaggtgtatcagaatatggcgaagttacaactttaggaaggggcggatctgacacaactgcagttgcaattgcatcagccctaaatgcaaaaagatgtgaaatttacactgatgtaaaaggaatttttacggcagacccaagattggttaatgatagtaaattaataagtaatatatcttatgatgaaatgcttgaaatggcttcattaggagcaaaaatgcatccaagatcaatagaaattgcttcaataaacaaaattgaaatgataataaaacacactaaatatgaaagcgaaggtacaagaatgagaaatgatgaagtaaagatggagaaaagaaatgctgttaccgggatcccaacatctacaggtgtcagcaaagtaacaataaataatattgatgataaacctggcatagcatcttcaatatttttgcctttaagtaaaatgggaataagcgtagatgttattgtccagacagctggaaatgatggtaagaccaatctaagctttacattggaagataaaaatcttgatgtatgtgtaaatgaattaattaaaaataatattgcaaaaaaagagaatataaatactcaatcaggcctaggtaaagttagtattgttggaacagggattcagaatcaacccggatatgcctctagaatgtttgagaccttatcagaaaaaaatataaacattgaaatgattacaacatctgaaataaggattacatgcatcattaattcag

SEQ ID NO: 250645 - DNA, 879 bp, Unknown
  Bacterial polypeptide expressing nucleotide sequence isolated from the Sargasso Sea
tggccttgcgttgcaaaatcttggcgtcgacgcgcgttcatggcttgggtggcaagtgccaatctataccgatgatgtgcatggtgctgcccgtatcaacaaggttggtgcggcaaacatagatcagtgcctcagcgaagggcatgtggcggtcattgctggttttcagggcattggactggatcatcgcattaccacgcttgggcgtggcggatctgatacatcggcggtagcggtagcggctgcactgaatgccgatcgctgcgatatttatacagatgttgacggcgtctatacaacagatccccgaattgccccaaaagcccgcaagctagaccgaatcacctttgaagaaatgttggaaatggcatcatcgggagcaaaagttctgcaaacgcgctcggtggcgatggcgatgcggcaaaatgttaatattcaggtacggtcaagtttcaatgacgcgcctggcactttcgttgtgaatgaggactcgatcatggaacaagaaacaattagcggcatagcttacagcccggatgaggccaaaattaccattgttggtttgccggaccgccctggtgttgccgccgctgtttttggccagttggcagatcatcatgtcaatgtcgatatgattgtgcaaacggcgtcaagcacaacaaagacaaccgatattagtttttcggttgggcgtcttgataatgagaaagctgttgaaataataacgaaaaatcgagaatctttggagtttgaaactgtcgtttctgaccctaatgtttccaaaatttcaatcgttggtactgccatgcggtcacagcctggagtggccaagaaaatgtttgaaactttggctacaaagggtgtgaatattcaggttat

SEQ ID NO: 250646 - DNA, 574 bp, Unknown
  Bacterial polypeptide expressing nucleotide sequence isolated from the Sargasso Sea
atgggcaaattaatcgttaaaaaattcggaggtacgtcagttgctaatgcagaacgcattgaagctgtggcagataacattgaagctgaaattcacgcgggaaataaggtaaccgtggttctttctgcaatgggagatagtaccgatgatcttattaaactagcaaaagagattaatcctgaacccgatcttcgagaatatgatgctcttgtatctacgggtgagcaaatatcggtagctttattagcaatggcccttcttaaaagaggtataaaaggtaagtcttacactgcataccagttaggtataaaaaccaattcaagccatagtagggcaagaatattggatgttgaagtaagtaagattagttctgaattaaacgaaggtgttgtgccagtaattacaggttttcaaggaatgaatgagtctggcgacattactactcttggaaggggagggtctgacactactggggttgctcttgctgcagctttggatgctgatgaatgccaaatttatacagatgtagatggaattttcactacagatcctagagtttatgataaagcttagg

SEQ ID NO: 250647 - DNA, 895 bp, Unknown
  Bacterial polypeptide expressing nucleotide sequence isolated from the Sargasso Sea
gaaagctaaatcttactcagctgctcaagtttcactaaaaactacatctaacttttcaaaagcaaagattttagatatagataaagccaaaatggaagagattcttgcagatggctcaattccaattattactggttttcaaggaataactgaaactggagaagttactactttgggtaggggtggatctgatactactgctgttgcaattgctgcttctcttaaagctaatcgatgtgatatttatacggatgttgatggtatttacactacagatccaagaattgttcccaatgctaaaaaactagatgtgatttctatggaaggcatgcttgagctagcaggacaaggagctaaagttattcaaataagagccgtagagttcgcaaataaatttaaggttcctgtacgagttctatcgagcttttcatcaggtactggtaccatgataactttagagaacgaaactatggaaaatgcagaaatttcaggaatagcctttcaaaaagatcaaacaaaagtaacttttactgcggtggaggacacccctgggatagcgtcaaaaatacttggccccctgagtgaatcagatataaaagttgatgttattgttcagaatgttggaattgaaggtaagacagattttacttttaccatagcaagtgaagaaaaaaatttattagatgaagcaattaacaggattcaaaaatccataaactataaagaagtaataatagacgacgaaattgctaaagtttccattgtaggtgttggaattaggtctcatgctggagttgcagctaaagcttttcaggcgttatctgaaaatgaaataaatattggcatgattagtacttctgaaattaagttaactttggttatcgaagaaggacga

SEQ ID NO: 250648 - DNA, 748 bp, Unknown
  Bacterial polypeptide expressing nucleotide sequence isolated from the Sargasso Sea
gtttgcccaagggtggggtgtcttataatcgccggatttcaaggtattaatgaagatcaggatactaccaccctaggtagaggtggttcagatacaacagcagtggctctagccgcggcattgagtgtaggacggtgcgaaattttcacagacgtcgcgggagtgttcacctcggatccaaggatctgtccgcgagcacgatcacttattgatatttcttacgacgagatgttggaaatggctacgacaggagcaaaagttatgcacccgagggctgtggaggttggtcaagactatggagttgaaattcatgtgcggtcgaccaatcatcccaacgagccgggaacaataattcggaaggaagcccagatggagaaggaaaaaaaagcgagagcagtgacccatgaatccaatgtcgcgaagataacaattcgcgggttgattgatcagcctgggatagcggccagcttattcgagccgctagcggaggcaggtgtttcggtagacacaatagtccagaatgcctcggaggaaggtactacggatctcacatttacggtggctcctgacttgcttgttagtgctgagagtgtagtcactaggatgaaaactgaacttttggcgcgtgatgtggtcaccaattctgacttgggaacggtatcagttgttggttcaggaatgacaaattcgcctggttacgcagctcagatgtttagaacattgactaacgcaggagttaatatcgata

SEQ ID NO: 250649 - DNA, 643 bp, Unknown
  Bacterial polypeptide expressing nucleotide sequence isolated from the Sargasso Sea
aatgaaaattattgttttgaaatttggaggtacctcagtaggtacagtggacagaattaaaaatgttgcaaatataattactagttatattaaaaaaaagtatagagtaattgtagtttcatcagcaatgagtggtgtgacaaatgatctaataagaaaatcagagaaaatttcaaatgattttgatgttcaagaacttgatgttcttttatctactggagaacaaatagcatgctcattgttggcaggtagattgcgtcatcttggttataattcaagatcttggttggcttggcaaattccaataattacatcaggagattataattcatctaggataattaatattaacaagaataaaattcacaaatatttaaaatctaatggaataccaattattactggtttccaaggaattaataataaaagtagaattacaactttaggtagggggggctcggatacaagtgcaataatggttgcaaaattctttaaagcaaacaaatgtattatttatactgatgttgccggtgtaatgacaacagaccctagggtttttaataaagctaaaaaaataaaagttatttcttatgaagagatgctagagatgtcatctttaggttctaaagtaatgcaaatcttc

SEQ ID NO: 250650 - DNA, 757 bp, Unknown
  Bacterial polypeptide expressing nucleotide sequence isolated from the Sargasso Sea
ataataacttcaaatgaacatatgaaatcaagaattctatcaatagaacatgaaaaaatattcaatgaacttcaagattatgatgtattacttatccctggttttcagggaataaatgctaaaaatgaaattactacacttggtagaggtggttctgacactagcgccgtagccgtagcagctgctataaatgcagaatgcattatatatactgatgtggatggagtttatacaactgatcctaacttagttaaaaatgcaaaaaaaattccacaaatatcatatgaagaaatgcttgaattagcctcgcaaggagctaaagttcttcaaactcggtcagtggaattggcaatgagaaaaaaaacaaaattaagcgtaagatcatcaatgaagccaaaaacagcaggcactgttgttactgaagaaaatagtaaattagaaaataatacagtaagtggtattgcttattcaaaggatgaagcaaaaattaccctttcaagagttttggacaaacctggggtatcttcaaaaatttttgggcctttagccaagggaaatatcaatgttgacatgatattacaaaacgtctctcaagatggtaaatttgctaacttatcttttactctaccaagaggagatctagaaaaggctctgaaaattttaaaaaaagaaaaagctaatataggatataaaaaaattaacgcatctaactcaatatcaaaaatttctgtggttggagtggggatgaggtcacatg

SEQ ID NO: 250651 - DNA, 754 bp, Unknown
  Bacterial polypeptide expressing nucleotide sequence isolated from the Sargasso Sea
gccttattgagtttggccttagaaaaaattggtgtcactgcgaagtcttttttggcagatcagattccattgcgaactgatggagagtttggcaaagcaagaatagttgagattgagagtaaatccctaaaggaggcgattgctgatggaatagttccagtcgtagcaggttttcagggcgtcacagctgatagtcttatcactacgttagggcgcggtgggtccgatacctcagctgtcgccgtcgccgctgcgttggacgctgacgagtgcgagatttgcactgacgtagatggagtatatacggctgatcctaggattataaaaaaagcaaacaggttggatcagattacctttgaggaaatgcttgagctcgcgagcctaggctcaaaggtattgcatcctagatctgtagaattggctggaagacacaaagtgccgttgcgcgttgtgtctaccttcgatgaaggtccaggtacacttatatctttcgacggagacaatatggaaggagcagtggtttcgggaattgcgcacgcttctgatgaggcgaaaatcacgatagaaggggtgccagatatccccggtgtcgcgtccaagattattagtcccgtcagtgcggccaatattgatgtcgatatgattgtccaaaatacttctgcggaggggttaacagattttacgtttaccgtgaaacggcccgattttgatgaggcactagcactattgcggtcagtatctgaggttattggcg

SEQ ID NO: 250652 - DNA, 838 bp, Unknown
  Bacterial polypeptide expressing nucleotide sequence isolated from the Sargasso Sea
gataatacaatacctattattacaggctttcaaggcataactgaaggtggcgatgtaacaactctaggtagaggtggttctgatacaactgccgttgcaatagcagctcaggttggggcattaagatgtgatatatatacagatgttgatggcatttttactaccgatccaaaagttgtttcgaatgcaaaaaaattagattcaattacaatggaagaaatgcttgagcttgctggacaaggggcaaaagtaatgcaaaccagagcagttgaatttgctaataaatataaggtcccggtcagagttttatcaagctttaatgaaggaaatggaactttaattactttgaaggatgaaagtatggaaaatgcatcagtctcaggcatagcctttcaaaaagatcagattaaatttacgttacatggtgttggtgacgttcctggaaccgcatttagaattttaggaccaataagtgatgccgaggtcgaagtcgatgttattgtgcaaaacgtgagtgttgatggtaaaactgattttacatttactgtttcatctgaagacaaggatactgttaaaaaggttcttgaaaatgtaaaaaatgatattagtttcaaagaatttatcgttgactctaacattgcaaaagtttccttggttggtgtgggcatgagatcacaagctggtgttgctagtaaggctttcaaagctctatcagagaatgatgttaatatacaaatcatatgtacgtcagaaattaaaattacaatggtagttgaaaaagatttagtagataaggctgtatcagtacttcataaagagtttgaattagaaaaataga

SEQ ID NO: 250653 - DNA, 679 bp, Unknown
  Bacterial polypeptide expressing nucleotide sequence isolated from the Sargasso Sea
atgtctattatcgtaatgaaatttggaggcacatcagtagcagatactgattgtatcaataatgttgctagcaaagttgttgctcaatataaaaaaaacaaaaaaatagttgtagtggtttctgcgatgtctggaacaactaataatttaattgacttaacaaaaaagttatcaaaaaaaagaaatcctaaagaatatgatgtagtggtttcttcaggggaacaagttactgccgggttactttctatggctttgacttctcataatataccatctaggtcgtttatgggatggcaaattccagtcttaacagataatactttttcaaaagctaatattgttgagatcaatgtagatattttaatgtcttctttaaacagaaatgaagttgctgttgtacctggttttcagggggttacaaataaaaatcagattactactcttggtagaggtggttctgatacatccgctgtcgcgatagcttcagctttaaaggcagaaagatgcgatatttatactgatgttgatgggatttacactgcagatccaagaatggttccaaaagcaaggaaacttgaaaaaatttcatatgaagaaatgctagaaatggcaagtcaaggagctaaagtacttcaaactcgttcagttgcattagctatgaaatataaattaaagatta

SEQ ID NO: 250654 - DNA, 979 bp, Unknown
  Bacterial polypeptide expressing nucleotide sequence isolated from the Sargasso Sea
gtgtcgactggcgagcaagtgacaattgcgttgttatgtatggctatagaggcattagggctaaaggcccgatcatacacgggcgggcaagtgccaattatcactgatagtgcttttgggaaagcaagaatcgagagaattgaaccgagtaatatcaagaaagatcttgatctgggaagagtggtggtggtagcaggtttccagggagttgactcggacggaagcattacgactttgggtagaggaggctcggatactacagcagtagctttggcggcaacactgaaagcagatgagtgtcagatttacacggacgttaacggcgtttatacaacggatccgcggatagtaatggaggcgcgcttgctgcctgaaattacttttgaagaaatgctggaaatggcaagtcaagggtcgaaagtgctccaaattcgtgcggttgagtttgcaggcaagtacggagtcccgctccgagttaaatcgagctttaatgagggcgaaggaacattaataacattagaggggcaaaaagatatggagaaacctatggtttctggaattgcttttaatcgggatgaagccaagttaactatcagaggaatccctgatcagccaggagtggcggcaaaagttttgggaccgataagcgacgcaaatattgatattgatgtgatagttcaaaacgtggccaaagataattctgctaccattactttcactgttaatcgaagtgaactcgaatcagccactgaaattctctcagttatcgccaatgatctcggtgcggaagagattatcgccgatagcaaaatcgcgaaagtttccatcgttggagtgggtatgaaatcacatgctggtgtggcgacacgaatgtttgagtgtctggcaagcgagggaataaatattcagctgattacgacgtcggaaatcaaaattgctgtcgttatcgaggaacgttatttagaactgcagttagagc

SEQ ID NO: 250655 - DNA, 851 bp, Unknown
  Bacterial polypeptide expressing nucleotide sequence isolated from the Sargasso Sea
tattgatgggttggacgatcattcaggcttatctgatgcagagtctgcattgattttatcacgaggcgaatatttactaacaaaaatggcgactcggtggctttcaaaatcctatgaggatgcattatgggttgatgcaaaaacggtttttcgtgcatcaagttcgaatggtcttacgcattatttacatgcaacttgtgaggtaatacctgatccacagatacaagcgatgtgggctggccaaacacggttgcttgttgtgcctggtttttatgcgtctaatggaaataatgaagtggttttgttggggcggggtggatcagatacatcagctgcctacttgtctgtactgctctcggcagtgctttgtgaaatatggacggacgtgcctggcgtatttacagccaatcccaatcgtttacctgaagcgagaatcattgggcgactcgattatggtgaagcacaagaattggcccatttgggtgccaaggtcatccatcccccagccttgttgccactgaaaatgcatgctatcccaatgcgtgtggcatcgacgcatcatcggcatattgcagggacattggtgtttaaagatgaaagtgatagtctaccatcattgaaagcggtgatggttaggcgagattgcttggtggtaaatatcagtaatcctttgttgccttatcaatcacaccatagcgcagagataatcaatgctattgtgagtactggcttatcgattgaactgatgacagcttcaaaaacacaattgagtttttgtttgaatcgagtcgattctatttatgccagtgaatttgatgcttgtttgcaagagttagaacgttggggtgagg

SEQ ID NO: 250656 - DNA, 760 bp, Unknown
  Bacterial polypeptide expressing nucleotide sequence isolated from the Sargasso Sea
atggttaaaaaagtattaaagtttggaggcacatctgttggcactattgagcgtatccagcatgtggcaaatattatcaaaaaagagcattctttaggaaacgaggtaattgttgtggtttcagcgatggccggaaaaacaaatgagcttttaaaattttcaaacagcatttctcaaaaatttgataaaagggaacttgatgttttgctcgcttccggtgaacaagtgacttctgcattattagctggcgcattaatagaaattaagattaaagctaaatcatttcagaattggcaaataccaattttaactgaaggggagcattctaacgctagaataactaatatgagtgttaaaaagataaatgaatttttaaatgataaaggtgtagcaattattccaggttttcaaggcatatctaaaattggagatattactacaatcggaagaggtggctctgatgctactgcggttgcaattgcaaaattatttcaagcagataactgtgaaatttatacagatgttgatggagtattttctactgatccgaataaaataccagtagcaaaaaaaatagataaaatttcttacgacgaaatgctagagctatcatctgttggagccaaagttatgcagtcttctgcagttcaaactgcgatgatgtatgatattcctctggaagttagatcgactttcactgatagacagggtacgaaaatttttgatcaagaaaaaatattgactatacaaagagtgtaac

SEQ ID NO: 250657 - DNA, 724 bp, Unknown
  Bacterial polypeptide expressing nucleotide sequence isolated from the Sargasso Sea
aatgagtattattgtaatgaaattcggtggcacatctgttgctagtgtagaaaaaataagaaaaattgctaaaactgtgaaagcagaatcagttaataataagattgtagttattctttctgctatggcgggggtaactaatgaattacaatcatttattaataaagttgattataaggctccaatggaagcagatttaatattaacttctggcgagcaagttactattggtcttctctcaatgctattaaaaaaagaaggaatcaaaagtattcctttgttaggttggcaaattccaatagtgacagatgaacaccatgagaaaggacgaatattgaatattaataatgaaaatttaaataaatattttcaatcaaatgatgtcatcgtattagctggttttcaaggtataagcacacatggttacattacttctttaggaaggggtggttcagatactactgctgtggcaatagcttcttctatcaaagcagaacgatgtgatatttataccgatgttgagggcgtatacactactgatcctaatattgaaacaaaagcaaaaaaaattgaaaaattaacatatgaagaaatgttggaaatgtcttctacaggagcaaaagttttacagactcgatcagttgaattggcaatgaaaaataatcttactctccaagttctttcatcatttacaaatcaacaaggaacatatgtagttaatgaa

SEQ ID NO: 250658 - DNA, 717 bp, Unknown
  Bacterial polypeptide expressing nucleotide sequence isolated from the Sargasso Sea
gggcttttagcactatatttgaataatataggcatcaatgctcgttcatggatggcgtggcaaatgccttttatgacagatgatacttttactaaggcacgaataacagaaatagatgcaacagaacttaaagtttctttggataaaaattttgtagcagtcattcccggttttcagggaattacggacaataaacgaattacaactctgggacgcggaggatcagacacaactgctgtcgcgctggcagctgcattgagcgctgagcgttgtgatatatataccgatgtagacggcgtttataccaccgacccgcgtatcgtatcaaaagcgcaaaaaatcgatgcggtgacatacgaagaaatgctagaaatggcatcccaaggagcaaaggttcttcaaacaaggtcggttgcgttggcaatgctgcatgatgtccgcctacaggttttgtccacttttgaaaacaaaccaggaaccctggttttgaatgaggaggaaatattggaacacgaaacagtaaccggtattgcctacagtcctgatgaagccaaagtaactcttcgtcgcgtcggcgataaaccgggtgtggccgctagtgtttttggttcgttagcaaaggcatcaattaatgtagacatgatagttcagaatgtctcagaggatggcaaggcaacagatataactttcacaataaaccaaacagacagtgaaagg

SEQ ID NO: 250659 - DNA, 709 bp, Unknown
  Bacterial polypeptide expressing nucleotide sequence isolated from the Sargasso Sea
aatgaaaattgtagttttaaaatttggaggaacgtcagtaggcagcattaatagaattgaaaaagttgcagatattataaaacaatataaaaaaaaatataaagttattgttctatcatccgcaatgagtggagttactaatgatttagtcagcaaatcaaaacaaattagtaaaaacttctctgaaagtgaatatgatgccttagtttcagcaggagagcaaatgtcttgttcattaatcgccggacagttaatcgaaaaaggtcaaaaagcaagatcttggcttgcatggcagattccaattataacagatggaaaacataagtttgctagaataaaccaaattaataaaaaaaatattttaaaatatttaaaaactggtgggataccaataattactggatttcaaggaataaattatcaaaatagaataaccacaataggaagaggaggaactgatgcaagtgcaataatgtttgctaagttttttaatgccgaaaagtgcattatatatacagatgtagaaggagtatatactacagatccaaataaacttaaatcagcaaaaaaaattaaggaaatatcatatgaagaaatgctagaaatggcttccttaggtgcaaaggttatgcaaccacactcaattcaagatgctagacttaatagaatagatatagaggtaaaatcatcatttaaaaataaatctgga

SEQ ID NO: 250660 - DNA, 841 bp, Unknown
  Bacterial polypeptide expressing nucleotide sequence isolated from the Sargasso Sea
tatgtcaaaaattattgttcaaaaatttggaggcacttctgttggttcagttgaaagaattgatgcagttgccgagatcatcaaaaatgcctcaaaatctaatgaaataattgtagttgtatctgcaatgggcggagaaacaaataaattaataaaactatcaaaacattttagtgaggatccggacaaaagagaatttgatgcactagtctcaactggagaaaccgtaagctcagctttgctagcaatggcattgcattcaaaaggcattaaagcaaaatcatactctgcatcacaaattgctatgaaaactaccaatacattttcaaaagcaaaaattctagatgtaaatgcaaaaaaaatacttgaggtagttgaggataatacaatccctattattactggctttcaaggcattactgaaggtggtgatgtaacaactctaggtagaggtggttctgacacaactgccgttgcaatagcagcccaggtcggagcattaagatgtgatatttatacagacgttgatggcatttttactaccgatccaaaagttgtttcgaatgcaaaaaaattagattcaattacaatggaagaaatgcttgagcttgcagggcaaggagcaaaagtaatacaaactagagcagttgaatttgctaataaatataatgtccctgtcagagttttatcaagctttaatgaaggaaatggaactttaattactttgaaggatgaaagtatggaaaatgcatcagtctctggcatagcctttcaaaaagatcagattaattcactttacatggtgttggtgatgttcctggaacccgctttaagattttaa

SEQ ID NO: 250661 - DNA, 787 bp, Unknown
  Bacterial polypeptide expressing nucleotide sequence isolated from the Sargasso Sea
aatgaaaaaaaaagtattaaagtttggtggcacatcagttggttctatagatagaatccaacatgttgcaaatataatcaagagcgaagttgaagcaggtaataaaattattgctgttgtttctgctatggcaggcaaaactaatgaattaatcgaatattctcaagctattgataaaaattttgataaaagagaattagatgttttactatcaactggtgagcaagttacttcttctttacttgccggagctttagttaacttaaatataaaatcaaagtcatggttgaattggcaaatacctattttaactgaaggtgagcatactaatgctaggatactaaatatgaatgtatcaaaaattaatcagtatttaaaagaaggtgttgcgatcgtacctggtttccaaggagtttcaaaaataggagacattacaacaatcggtcgaggtggttctgatgccacagctgtagctattgcaaaactacttaatgcagatacttgtgaaatatataccgatgttgacggagtttactccactgacccaaacaaaatacctgtcgctaaaaagattgaaaaaatttcttacgatgaaatgctggaattatcctcattaggggcaaaggtaatgcagtcatctgcagttcaaactgcaatgatgtatgatattccgcttgaagtaagatctacatttactaacagaaaaggtacaaaaattttcgatcaacaagaaatcgattattctaaaagtgtgactggtgtagcttattccaaagatgacgctaaa

SEQ ID NO: 250662 - DNA, 573 bp, Unknown
  Bacterial polypeptide expressing nucleotide sequence isolated from the Sargasso Sea
tatggcattactagtaaaaaaatttggcggtacttctgtcggtgatattaaaaaaattcaaaatattgcaagtagcatttttcaaagtaaagaagcagggaatgaaattgttgtagttgtctctgcaatgggtcaaactacagatgatttaaattgtttagcggaatcaataagtaaaaatcctaaccgaagagaattggatatgcttctctcaactggagagcaagtaaccatagctcttctatccatggcattaaacgaatacggaatacctgcaatttcaatgactggtagccaagttggaattattactgaatcaatacatggaaaggcaagaattctggatattaaaacagaaagaatcaaaaattatataaatcagggttttgtagttgtagtggctggatttcaaggaacaacattaagtcatacaggatccatggaaattacgactttaggtagaggtggttcagatacctccgcagtagctttatcaacagctttaggagctgagacttgcgaatttacacagacgttccaggggttcttactactgatccaagaatgttccct

SEQ ID NO: 250663 - DNA, 901 bp, Unknown
  Bacterial polypeptide expressing nucleotide sequence isolated from the Sargasso Sea
tatggaaggagaaaccaataaactggtaggtttagctaatcatttttctcaaagtcctgataaaagagaatttgatgctttggtttcaactggcgaaacagtaagttcagcactattagctattgcacttcatgcaaaaggaataaatgcaaaatcttattcagcatctcaaatttctatgaaaacaactgattcgtattcaaaagcaaaaattttagacattgatgctaataagatcatggaagtagttggacaaaatacaatacccataattactggatttcaaggtattactgaaacaggtgatatcacaacacttggaagaggtggatcagatactacagccgtagctatagctgctcaaataggggcaaagcggtgtgatatttatacagatgtagatggagtttttaccactgatccaaaagttgttccaaatgcaaaaaaattagattccattacaatggaagaaatgcttgaacttgcgggtcagggagctaaagtgatgcaaacaagagcagttgagtttgctaataaatataaagtacctgttagagttttatcaagttttgatgagggagatggtacattaatatctttaaaggatgatggtatggaaaatgcattaatatctggaatagcttttcaaaaggatcaagtaaaattcacacttcatggtgtaggcgatattcctggaacagcttttaagatcttaggcccaattagtgaaaaagatattgaggtagatgtcatagttcaaaatgttagtgtagatgggaagaccgattttacatttacagtatcaaaagacgatgaaagtgatgtaaaagatattattgaagaaataaaaacagaagttgagtttaaagatttgatgattaactcagatattgcaaaagtt

SEQ ID NO: 250664 - DNA, 838 bp, Unknown
  Bacterial polypeptide expressing nucleotide sequence isolated from the Sargasso Sea
aatggcaaaaaaagtacttaaatttggtggcacctctgtaggaacaatcgaaagaattctacatgtggcaaaaattattaaaagagaacatgacgcaggcaatgaaataatagccgtcgtatcagccatgtctggcgaaaccaattctttaatagatcgatcaaaatctatttcaaaaaactttgataagagagagctagatgtcctcttgtcgtccggagaacaggtaactagttctttgttggcaggagcactaatcaatcttggcattttgtctaaatcatggatgaattggcaaatacctattttaactgaaggtgataactctaacgctagaattataaatatgaatatttcaaaaattaataaatttttatccgagaaagggatagctataattcctggttttcaaggagtgtcaaaagaaggtgacattacaacaattggcagaggaggatcagacgctacagcagtagctgttgctaaaatatttaatgctgatacttgtgaaatttatactgatgtggacggagtttattctactgaccctaataaaatacctgttgcaaaaaagatagataaaatatcttatgatgaaatgttagaactgtcatcgcttggggcaaaggttatgcaatcttcagcagtgcaaactgctatgatgtataatattcctttagaagtaaaatctacattcaccgatagacaaggaacaaaaatttttgatcaagcaaatattgactataataaaagtgttactggagttgcttactctaaagatgacgctaaaattactttaatcggggttcaagacaaacctggtgtggcagcaaaatat

SEQ ID NO: 250665 - DNA, 784 bp, Unknown
  Bacterial polypeptide expressing nucleotide sequence isolated from the Sargasso Sea
atgaaacttgtagtaatgaaatttggtggcacttctgttggtagtattgataagatctataatgtcgcaaaaattgttgaaaagcaattaaatgataaaaaattgattgttgttttatctgcaatgtcaggtgtaacaaataaaatgcaacaatatattgatgaaattgagtcaaatgaaattattgaaaatgatttaattttaacatctggtgaagctgtttcagttggacttctttctgctattttaaaaaaaaggaatatcaaatctgttccattacttggatggcaaatcccaattataacagacagtaatcatcaaaaagctaaaattttgaatatcgataaagtaagaattactcaatatttaagagattgcgatgttatagtagttgctggatttcaaggtatcgatatagatggaaatattacatcattaggaaggggtggctctgatacaactgcagttgctgttgcggcagctgttgatgctgataggtgtgatatttatactgatgttgagggtgtttatacaactgatccaaatctggaacccaaagctaaaaagatcaataaattagcattcgaagaaatgttagaaatgtcttctactggagcaaaagtacttcatactcgctcagttgaattagcaatgaaaaataatcttaccttgcaagtgctttcatcaataacaaaagaaaacggcactcttgttgttgatgaaaataaattaattgaaaaagaaatagtaagcggagtaagctacagtaataatgaatcaaaat

SEQ ID NO: 250666 - DNA, 778 bp, Unknown
  Bacterial polypeptide expressing nucleotide sequence isolated from the Sargasso Sea
tatgaaaacaattgtgcttaaatttggaggaacttcagtaggttctgttgagagaatcaagagagttactcaaataatctcaagctataaaagcagaaagaatagagtaatagttgtttcctctgcaatgagtggtgttacaaatgatttagttaaaaaatcaaaattaataagcaataattttgataaagcagagtatgatgtgcttgtttcaacaggagaacaggcagcatgctcattaatagctggaagacttaatcactgtggaattaaagcaagatcgtggatgtcttggcaattaccaatttttactcatggaccacatgctggtgcaaaaataaatagaattttcactaaacaattacaaaagtatttaaattctggaggtataccaataataacaggttttcaaggagtaaacaataattcaaggttaacaacattaggaagaggaggatcagatgcttcagcaataatgattgctaaatttttaaaggcagatgaatgtatcatttatacagatgtagatggtgtttacacaactgatccaaaacttcacagaagggcaaaaaaaataaagcgaattgaatacgatgagatgttagagatgtcatctttaggttcaaaagtaatgcaaccaacatctgttcaagatgctaaattaaacaatatagatattaatgtaaaatcttcctttattaataggccaggaactttaattaccaaaagttttagaaaaaaagattttagtaaccaaaattattactggcatatcatc

SEQ ID NO: 250667 - DNA, 574 bp, Unknown
  Bacterial polypeptide expressing nucleotide sequence isolated from the Sargasso Sea
aatgaaaattgtcgttttaaaatttggaggtacttcagtaggtactataaaaagaataaaaaaagtatctaatataatagttagttatgttaaaaaaggatttaaagtcatcgttgtttcatctgcgatgagtggttcaacaaatgatttgataaaaaaatcaaaaaatattagtaaaaattttaattcttcagaatatgatgtgcttgtttcttctggagagcagatatcatgtgctttaatagctggaaggctcaatcatattggatacaagtctcaatcttggatgagctggcaagttccaatatttgctgaaggagatcataaaacttctagaatcagcaaaataaacaaaaataaaataactgattatttaaaatctggaggaattccagttattacaggttttcaaggtttaaataataataacagaattacaactcttggaagaggaggttccgacgcatcagcaattatgtttgcaaaattttttaaggcaaaaaaatgtataatctttactgatgtagagggtgtttatacaacagacccaaataaaataaaaaatgcaaaaaaa

SEQ ID NO: 250668 - DNA, 915 bp, Unknown
  Bacterial polypeptide expressing nucleotide sequence isolated from the Sargasso Sea
ttaaaagtaagagatgaagtaaatcaaggttataaagttattgttgtagtttctgccatggctggagtaactaataatttaattgatctagttaaaagtacatcagacacacctcctgattcggaatatgatgtcgtattatctacaggtgaacaagtaacttcagcactattagctattgccttagattatttaaatatcaaagctcgttcctggctaggttggcaagtgccaataattactgacaaatcatatggtaaatctggtattaaaaagataaaaacggagcaaatattaaaatttttaaaaaataatcaggttgcaataatatcaggatttcaaggtatatcagaagaaaatagaattactactttgggaagaggaggttcagatacttcagcggtagcaatagcagcgtctttttcagcagaacgatgtgatatttacactgacgtagatggtgtttacacaacagatccaagaatagtaaaaagggcaaaaaaacttcatcaaattacttacgaagaaatgttagaattagcttctcaaggtgctaaagttcttcaaacaagatccgtagcattagctatgaaatatagtgtaaaattgagagttctgagtagctttgaagatttacctggaacttccataattaaagaggaaaaaaatatggaaaaatctgaaataagtggaattgcccatagcttaaatgaggccaaaataacattatctgacatccctgatcaaccaggtcaggcagctgagatttttggtgcattagctaaccattcaattaatgttgatatgatagtacaatcatcgtctataaaccgtgatgctaccgacataacttttactataccagaaactgacttagttatagctgaaagcacaattaaaaaatacaaaaaaaaa

SEQ ID NO: 250669 - DNA, 721 bp, Unknown
  Bacterial polypeptide expressing nucleotide sequence isolated from the Sargasso Sea
catgaaaaagttagtattaaagtttggcggaacatccgttggaactatagaaaaaattaagaaagtagctaatattattaaaaaaaggcttagcgaaggtaatcagattatagttgttgtatcagcaatgtctggtgttactgatgagttaaaagcaaaatctgaattagttagtaaaaactttgaccccaaagagttagacgtattactatcatctggcgaacaagcttcttgttcacttttatcaggagctcttatagatttaggagttaagtcaaggtcgtggttaggttggcaaataccgattgttacgaatgataaccatacgtcatcacaaataatcaaaataaaaacagatgaaattttaagttttatttcaaaaaaaggtgtagctgtaattgcaggatttcagggaatttcaaaagatattagaattactactctgggtcgcggaggttctgatttatctgctgtagcattagcaaagtttttcaatacagactcctgtgaaatttataccgatgtagaaggagtgcttacaacagatccttctataaatgaaaatgctaaaataattgaaaaaatttcttatgaagaaatgttagaaatggcttcattaggcgcaaaagtaatgcaacctgtcgcggttcaaaaatccatgatagataatattccaattaatgtgaggtctaccttctcagaaaaatctggaacaaaataa

SEQ ID NO: 250670 - DNA, 1216 bp, Unknown
  Bacterial polypeptide expressing nucleotide sequence isolated from the Sargasso Sea
aatgaaaattgtagtattaaaatttggcggaacatctgtaggttcaatagatagaataaagaaagttacaaatataattatttcgtttgctaaaaaaaattataaagtaatcgttacttcttctgcaatgagtggggtaactaatgatttagtcaaaaagtcaaaaagtatttctaatgaatttatacctgaagagtatgatgttttagtatcttcaggtgaacaaattgcgtgctcacttatcgcaggaagactcaatcatttaggatataaatctagatcttggatgggatggcaaataccaattctaacagaaggaagttattcttcatcgaggatacaaaaaatagataaaaaaaatattataaaatatttaaaatctggaggaataccaattgttgcgggatttcaaggaattaattctataaacagaataaccaccataggcagaggaggaacggatgctagtgcaataatgctttcacgtttcttcaaagcagaaaaatgcataatatttacagatgtagatggtgtttataccactgacccgaatacgatttcaaaagcaaaaaaaataaaagttatttcatatgaagaaatgttggagatggcctcacttggagcaaaagttatgcaaccacattcaatccaggatgcgaggttaaatagaattgatattgatgtaagatcatcatttaaaaaatcttcaggaactttaattactaaaagaaaaaatattgttagtaataaaattattcgtggtgtgtcttttacaaagaatgatgcaaaagtaactttaattggtgttaaagataaaccaggtattgccgcagctatatttgagccactttataaaaactctattaatgttgatatggttgttcaaaatatatcctctaatggaaaagaaacagacttaacttttacaattaaatctgaaaacctatctaaaactgaaagactcttaaaaaaaaataaaaaaattagttttagaaaaattattgtagataataaagtgtcaaaagtatcgattgttggagttggaatggtaactactcccggtgtaacctatagaatgtttaatgctttagcaaaaaaaaatataaatattattgtaatttcgacatcagaaattaaaatatctgtattagtgaatagaaaaaatattaataaagcagtatcagctctgcataaagaatttaatttagaaaattaa

SEQ ID NO: 250671 - DNA, 707 bp, Unknown
  Bacterial polypeptide expressing nucleotide sequence isolated from the Sargasso Sea
tatgtcgctgattgttcaaaaatttggaggcacttctgtcgggtcagcagaaagaatagtaaatgtcgcgaaaaaagttggtgaatttcgagaccgaggacatgatgtaattgtggtggtgtccgcgatgagtggtgaaacgaatagattaactgagctagctcgagaaatttcccctcatccaaagccgagagagattgatgtccttttatccactggagagcaggtcacgatagctttgctagctatggccctagagtctgagggctacgaggcggtttctttcacgggtggacaaataaagattttaactgacgactttcacacaaaggcccgcattaaagaaatagagactacgtctattagaaatgaaatctcatcagggaaggtcgtaattgtagcaggttttcaaggtgtcgattctaaggggaatattacaactttaggtaggggtggttctgacacaaccgctgtagcgttggctgcggcgttggactctgatgaatgtcaaatttacacggatgtcaaaggcgtttatacgacagaccccagggtcgttgaagatgcaaagttactgtcaaacataacttttgaagagatgcttgagctttccagcttgggtgcaaaagtccttcaaatacgcgcagtggaatttgccggcaaatataaagtaccccttcgagtgctttcctcattcgaagcgggtc

SEQ ID NO: 250672 - DNA, 1021 bp, Unknown
  Bacterial polypeptide expressing nucleotide sequence isolated from the Sargasso Sea
atgaaaattaaagttttaaaatttggtggcacatcagtcggaagcgttgaggctataaaaagatcagctaatattatttgtgattggtcaaaaaagtcaaaagttatagttgtgctatctgcgatgtctggtgagactgatcgtcttattaacttaactaaatctttttcaaaatccccaaatccagttgactttgataacgccatttccacaggagaaaatctttcttgcgctttaatgtctatttatcttaataatcaaaagactaaatctaaatctcttcatagttggcaaatacctataatgacctcttcagagcatatgaagtcaagaattttgtccattaacaaaaaatttttattaaatgaattagagaatttagatgttctagtagttcctgggtttcaaggtataaatgagaggagagaaataactactttaggcagaggtggctctgatactagtgctgtcgcagtagctgcagctatagacgctgagtgtattatttataccgatgtggagggtgttttcactactgatccaaacatagtgcctaacgcaaaaaaaataaataaaatttcatatgaagaaatgcttgaattagcctctcaaggggctaaggttcttcaaactcgttctgtcgaattagctatgagaaaaaatactaaattaagtgttaggtcatctttaaaaccaaaaaaaattggcacaatcataactgatgagaaaagtgttttagagaaaaatactgttagcggaatagcttatactaaagacgaagcgaagattactctctcaagagttttagacaaacctggtgtttcttctaagatctttggacctttagccaaaggaaatataaatgtggatatgatacttcaaaatatttcccaagatggaaagtttgcaaacttatcttttacacttccaagagcggatctagaaaaagcattaaaaatattaaaaaaagagaaattcaaaataggatacaaaaagattatttcttctaataatattcaaa

SEQ ID NO: 250673 - DNA, 1111 bp, Unknown
  Bacterial polypeptide expressing nucleotide sequence isolated from the Sargasso Sea
atgaaaattaaagttttaaaatttggtggtacgtccgttgggagtattgaagctataaaaagatcagcagatatcattcatgattggtcaaaaaaatcaaaagttatagctgtgttatctgctatgtcaggtgaaactgatcgtttaataaatttaacaaaatctttttcaaaaaatccaaatccaattgattttgataacgccatttcatcaggtgaaaatgtatcttgcgcgttaatgtctatatgtctcaataatcaaaagattaaagctaaatcgctacttagttggcaaatacccattataacatcatcagagcatatgaagtctagaattttatctattgataaaaaatttttatatgatgaattaaaaaattttgaagttctattaattcctggtttccaaggtattaacaacaagggagaattaactaccttaggtaggggtggttctgatactagtgctgttgctgttgcggcagcgatggaaacagaatgtataatttatactgatgttgagggtgtatttaccactgatccaaacatagtacctaaagcaaaaaaaattaataaaatttcatatgaagaaatgcttgaattagcctcacaaggggctaaggttcttcaaactcgttctgttgagttagctatgagaaaaaatactaaattaagtgtaagatcttctttcaaacccaaaaaaattggtaccatgattactgacgaaaaaagtgttttagaaaataatactgtgagtggaataacttactccaaagatgaagcaaaaattacactttcaagagtacatgataaacctggagtctcttcaaaaatctttggcccattagctaaaggtaatataaatgttgatatgatactccaaaatatttcacaagatggaaagtttgcaaatttatcttttactttgccaagactagacttagaaaaagcattaaaaatactaaaaaaagagaaatctataattggatataaaaaaattatttcatctaataatatttcaaaaatttcagtggttggagtagggatgagatctcatgctggagttgcccaaacattatttgatactcttggaaaaaataaaataaatatac

SEQ ID NO: 250674 - DNA, 979 bp, Unknown
  Bacterial polypeptide expressing nucleotide sequence isolated from the Sargasso Sea
atgacaaaaaaagtattaaaatttggtggaacatctgtgggatctgtaaaaagaatccttcatgctgcagagattgtgaaaaaagagcattctaaaggcaaccaaataatagtagtagtatcagcaatgtccggaaaaactaatgagttaattagtcactctaactctatttcagaaaaatttaacaaaagagaaatggatgttttgttatcatcaggagaacaggtgacaagtgccttaatggctggagctttaaatgaaataggaattaaatctaaatcctggatgaattggcaaatacctattttaactgagggagagcataccaactcgaggattgtaaatatgagtataaataaaataaactcttttttatctgaaggtggtgttgcagtcattcccggttttcagggaatttctcaaaatggtgaaattactacgattggaagaggcggttctgacgcatcagcagttgctatagcaaaaatatttcaaaccgaaagttgtgaaatttatacagatgttgatggtgtttactcaactgatccaagtaacatacctgttgcaaaaaaaatttctaaaatttcttatgatgaaatgctagaactttcttcattaggtgcaaaagtaatacaatcatctgctgttcaaactgccatgatgtatgatattccgcttcaagttaagtcgacgtttacagacagagaaggcactgaaatttttagccaagaaaatattgactattctaaagccgtaacaggtgttgcatattctaaagacgatgcaaaagttactattataggtgtagaagacaaaccaggggtagcagctgatatttttgaaccattaggtaaaaaccaaataaacgtagacatggttatccaaaatatttcgcctgatggcaaaacaactgatataacttttactattaagagaaatgatttaaacaaaacactcaaaacattaaaatccaatgaca

SEQ ID NO: 250675 - DNA, 1210 bp, Unknown
  Bacterial polypeptide expressing nucleotide sequence isolated from the Sargasso Sea
aatgacaaaaaaagttttaaagttcgggggcacatctgttggaactattgaaagaattcaacatgtggcaaaaattattgggaaagaacgtgatttaggcaacgaaataatagttgttgtatctgcaatggctggaaaaactaatgagttaataaaactttcttcaagtattacaaataattttaataaaagagaacttgatgttcttttatcatctggcgaacaagtaacttgtgcgcttttagcaggagctttaaatcaaataaagattgatgcaaaatcttggttaaattggcaaataccaattttaacagagggagatcattccaatgcaagaattattaatatgaatattaacaatataaataattacataaagaaaggtgttgcagttattcctgggtttcaaggagtctctaaaagtggagatattactactattgggcgtggcgggtctgatgcaactgcagtcgcggttgctaaaatttttgatacagatagttgtgagatttacacagatgtagacggtgtcttttcaactgatcctaagaaaatacccgtagctaaaaaaatagataaaatttcctatgacgaaatgcttgagctttcatctttaggagcaaaagtaatgcaatcctctgctgttcaaacagcaatgatgtatgacatacctcttgaagtaaaatctacatttactgacagaaaaggtacaaaaatattcaatcaagaaaatatcgattatacaaaaagtgtaacaggtgtagcatattctaaagacgaatctaaaatcactttaattggagtagaggataaaccaggtgtagctgcaaatatttttgaaccattaaataaagctcaaataaatgtagatatggtaatacaaaatatttcttctgatcaaaagactacagatatcacatttacaattaaaagggatgatctattaaaaacaatagaattattaaaaattaataacagaataaattacaaaagtattagccataatgataaagtggctaaagtatccattgttggcgcaggcatggtgtcaacaccaggtgtaacctataaaatgtttaggggtttggctgatgaaaaaattaatattttggcaatttcaacttctgagataaaattatcagtcataatcgatgaagaaaacactttgaatgcagtaaaaaaattacatacaattttcgatttagattaa

SEQ ID NO: 250676 - DNA, 847 bp, Unknown
  Bacterial polypeptide expressing nucleotide sequence isolated from the Sargasso Sea
aatgagtaaacttattgtcaagaagtttggcgggacgtcagtggctaatcctgaacggatagaagcagtagctgacatagttgagcaaacaattaatgaaggcaatagggtgacagttgtcctttctgctatgggcaacaatactgatgaactgattagtttagccaaagaaattaacccagaaccagatcttagagaatatgacgctctattatcaacaggagagcaggtttcagtagctctttttgctatggcattattaaagaggggtattcaaggaaagtcttatacggcttatcaattaggaattaaaactaactcaagccatagtcgagcaagaatattagatgtagacgtaaataagattataaaagaattgggagaaggagttgttcctgtcataacagggtttcaaggaatgaatgaacttggtgatataacaactttaggaagagggggctcagacacaaccggagtagccctagcagttgcccttaatgcagatgaatgtcagatttatactgatgtagatggcgtttttactacagatcctagagtttacgataaggcaagactcttaacgaatgtcagttttgaagaaatgctagagttatcaagcatgggggctaaggttctccaacttcgtgctgtagaatatgcaagtaaatttaatatgcccgtaagggtgctttcgagctttaatcaaggtgaaggcactttagttcaagaggagaagaacatcatggaaagaccaattgtttcaggaataagtagcatagacaccgaagctaagttaaccattaggggggtgcctgatatacctggtgttgcagcaaagatattaggt

SEQ ID NO: 250677 - DNA, 1213 bp, Unknown
  Bacterial polypeptide expressing nucleotide sequence isolated from the Sargasso Sea
aatggttaaaaaagtactaaagtttggcggaacatctgttggaacaagcgaaagaatacaacatgttgcaaaaattataaaaaaagagagatctttaggaaataagattattgttgttgtttcagcaatggcgggaaaaactaatgaattgattaaactttctaaagaaatttctgaggaatttaataagagagaaatggatgttcttttgtcatcaggggaacaagttacttcagctttattgtcgggagctttaaccgagatagatgtaaaagcaaagtcctggttaaactggcaaatacctatacttactgaaggagaacatacaaattcaagaattataaatatcaatgttgaaaaaattaatgaatatttggatgaaaacggagttgcaatcttaccaggttttcaaggtatttcacaaaaaggagaaatcaccacaattggaagaggaggatccgatgcatctgcagtcgcaattgcaaagatatttaacactgatagttgtgagatatatacagatgtagatggagtgttttccactgatccaaataaaataccagttgcaaaaaaaattgaaaaaatttcatacgacgaaatgttagaattatcatctttgggagcaaaagtcatgcaatcgtctgcaattcaaacggcattgatgtatgacataccacttgaagtaaagtcaacttttaccgaaagaaaaggaacgaaaatatttagtcaagaaaatattgattattcaaaaagtgtaacaggagtagcatattccaaagatgatgcaaaaataacaattataagtgttgaagatagaccgggggtggctgctaatatattcgaacctttaagcaaggctcaaattaacgtagacatggtaattcaaaatatttcatctgatcaaaaaactacagatataacctttacggttaaaagagatgatgtttctaaaacaaaacaaatattaaaagatgaaagtaaaataaattataaagaaataattcataacaacaaagtagcaaaagtttcaattgttggtgctgggatggtttctacaccaggagtcacttatagaatgtttagagctttatcagatgaaaaaattaacattttggccatttcaacctcagaaattaaactctcggtaattattgaagaagatgatactttgaaagctataaaaaaattacacacaatttttgatttggactaa

SEQ ID NO: 250678 - DNA, 1216 bp, Unknown
  Bacterial polypeptide expressing nucleotide sequence isolated from the Sargasso Sea
catgaaaattgtcgttttaaaatttggtggcacctcagtaggtacaatagaaagaattaagaaaatagccgatataataattagtcatgttaaaaaaagatataaagttattgttgtctcatcagccatgagcggtgtaactaatgaattacttaaaaagtcaaaaaaattatgcaataattttatattatctgaacaggatgtgctaatctcatctggagaacaaatggcgtgtgcccttatttctggtaggttaaattatcagggttataaatctaggtcttggttgagttggcaagtaccaattttaaccgaaggaagttatggttcatcaagaatagtaaaaattaatacaaaaaaaattaccaactttttaaaattgggaggcattccagtcatttcaggatttcaaggaataaatatggataatagaataaccactctaggaagaggaggatcagacgctagcgcgataatgattgcaaaattttttaaagctgagaaatgcataatctataccgatgttgatggagtgtatacgacagaccccaaaaactacaataaagctagaaaaattaaagttatttcttacgaagaaatgcttgagatgtcatctttgggagctaaagttatgcagccaaattctatacaagatggaagattaaacagaattaatattgatgttaagtcttcattctcaaataaagacggaacattaattacgaaaagaaaaaatatttttatcaataaaataattacaggtataacttctactaaaaatgacgccaaaattacactggttggagtcaaagatagacctggaatagctgcatcaatatttaaacctttatctgaaaattctataaatgtagatatggttgttcaaaatatatctgcagatggaaaagaaactgatttaacttttactacaaagtcagaaaatttatcaaagattgaaagactgattaaaaaaaatacaaaaattagatttagagatataatttttgataataatgtatcaaaattatcaataattggagttggaatgattactacacctggagtaacgtatagaatgtttcaagctctggcaaaaagaaagatcaatatcctagcaatctctacttctgagataaaaatatctgtattaataaataaaaaaaatataaaaaaggctatatcagtacttcataaagaatttaaattagatagataa

SEQ ID NO: 250679 - DNA, 1059 bp, Unknown
  Bacterial polypeptide expressing nucleotide sequence isolated from the Sargasso Sea
aatgaaacttgtagtaatgaaatttggcggtacttcagttggtagtatcgataaaatcaataatgttgcaaacattgttgaaaagcgactgaataataaaaaattgattgttgttttatctgcaatgtcaggtgtaacaaataaaatgcaaaaatatatagatgaaattgagtcaaatgaggttattgaaaatgatttaattttaacatcgggagaagctgtttcagttgggcttctttcagctattttaaaaaaaagaaaaattaaatccgttccgttgctcggatggcaaattccaattataacagatagtaatcatcaaaaagctaaaatcttaaacattaataaaaatagaatcgatcaatttctaaaagattatgatgtaatagtggttgctggatttcagggtgtcgatatggatggaaacattacatcattaggaagaggtggttctgatacaactgctgttgctgttgccgcagctgttgatgctgatagatgtgatatttatactgacgttgatggagtttatacaactgatcccaatttggaacctaaggctaaaaaaataaataaattagcatttgaagaaatgttggaaatgtcttcaactggagcaaaagtacttcatactcgttctgttgaattagcgatgaaaaacaatcttaccttacaagtactttcttcaataacaaaagagaagggtactcttgttgtagatgagaataaattaattgaaaaagaaattgtaagtggagtaagctatagtaataatgattcaaagctgactttatctggtattgctgatcaacctggcatatctgcaacaatttttggattgttagctaataataatatcaatgtagatatgattgttcaaaatacatcacaggatggtgtaactgcaaacataacatttactgttccaaacagcgaaatcaataatgctaaaaaattattagaggaaaatcaaaaattaattgattttaaatctattgaaactgatatcaatatttctaaaatttcagtaattggtatggggatgatgtctcaatctgg

SEQ ID NO: 250680 - DNA, 1216 bp, Unknown
  Bacterial polypeptide expressing nucleotide sequence isolated from the Sargasso Sea
aatgaaaattgtagtattaaaatttggaggaacatctgtaggatcaacagatagaataaaaaaagttgcaagtataattatttcgtatgttagaaagaattacaaagtaattgttacttcctctgcaatgagcgggataacaaacgatttagtgaaaaaatctaaaagtatttctaatgaatttatacctgaagagtatgatgttttggtttcttcaggagaacaagtatcttgctccttaattgcgggaagactaaatcatttaggttttaaatctagatcttggatgggatggcaagtaccaattattacagagggaaaccattcatcttcaagaatacaaaatatatacaaaaaaaatattgtaaattatttaaaatcaggtggaatacctattgttgccggttttcagggaattaattctacaaacagaataaccactataggcagaggaggaacggatgctagcgcaataatgctttcaaaattttttaatgcagaaaaatgtataatctatacagatgttgatggtgtttataccactgatccaaatacaatttcaaaagcaaaaaaaataaaagtaatttcatatgaagaaatgctagaaatggcctcattaggagcgaaagttatgcagccccactcaattcaagatgcaaggttaaatagaatcgatattgatgtaagatcatcatttaaaaaatcttcaggaactttaattactaaaagaaaaaatattcttagcaataagattattcgcggagtatcctttacaaaaaatgacgcaaaagtaactttaattggagtaaaagataaaccgggtattgcagcggctatatttgagccactttataaaaacactattaatgttgacatggttgttcaaaatatatcatctaacggaaaagaaactgacttaacatttacaattaaatctgaaaacctatttaaaactgaaagattattaaaaaaaaataaaaaaattagttttagaaaaattattgtcgataataaagtgtcaaaagtatcaattgttggagttggaatggtaaccactccaggtgttacatatagaatgtttaatgctttagcaaaaaaaaatataaatattattgtaatttcgacatcagaaattaaaatatctgtattagtgaatagaaaaaatataaataaagctgtatcagctttgcataaagaatttaatttagaaaattaa

SEQ ID NO: 250681 - DNA, 1222 bp, Unknown
  Bacterial polypeptide expressing nucleotide sequence isolated from the Sargasso Sea
atggaaaatttaattgtacaaaagtatggcggtacttctgtaggaagtttcgaaagaatagaagctgtagcagataatatcgctaatacacataagaagggcaacgatgtcgtggttgttctgtctgctatggccggagaaacggataagctaattcaattggcaaaatctattcaacctgaacctgaacctagagaatatgatgctctcatatcaacaggtgaacaaatatcagtagctttaatggctatggctttaacgaaaagaggcattaaatctaaatcttatactgcctatcagttaggaataaaaacaaatgatagacatagccaggctaggattcttgaagtaaatgtagatagactcaaagatgatctttctgaaggatctgtacctgtaatcacaggatttcagggaatgacagagggcggtgacattacgactttagggagaggcggttccgatactacaggagtagcattggcagtagcccttaatgcaaatcaatgtgaaatatatacagatgtggaaggagtgtttaccactgatccaagaatttgcccaaaagctaaattgatagaaagaatttcttttgaagagatgttggagctttcttctactggagcaaaagtcttacagttaaggtctgtagaatatgcaagtaaaaataatatgccaattagggtactatctagttttaaagaaggaaatggaactttagtttgtgaggagggtaatgatatggaaaaaccggttgtttcaggaataagcagtattgataatgaagctaaactgacaataagaggcgtacccgatatacctggagttgcagcaaagatattagggccaattagcgattctgatattgacgttgatgtaattgttcaaaatataagtgcagaaaacaataccgattttacttttaccgtaaaacaagaagatgccccaagagcaaaagaaatcttagagaatacttctaaaagtttaggtggaggcttgatcgagctagatgatgacatagcaaagataagtattgttggaaggggtatgagagggcaatcaggtatagctagcaaaatgtttgaatctttagcagataatgaaattaacattttgatgattaccacttctgaaataaagatatcagttgttattagaaaagaccttcaagaaaaagcagttaatgccctacataatgcttttgaattagataaagattaac

SEQ ID NO: 250682 - DNA, 1216 bp, Unknown
  Bacterial polypeptide expressing nucleotide sequence isolated from the Sargasso Sea
atgtctgaaattgttgttcaaaaatttggaggtacatctgttggaacagtcgacaggatagattctgtagctgaaataattaaaaacgcctctaaatcaaacaaaatagttgttgtagtctcggcaatgggtggtgagacaaatagacttgttgatttagctaaagcgtttggagatgatcctgacaaaagagaatttgatgccttagtatctacaggtgaaacagtaagttccgctctattaactatggcacttcattctaaaggagtaaaagcaaaatcattttcggcatctcaaatttctatgagaaccactagttcatactctaaagcaaaaattcttgacgtagacgctaagaaaattctagatgttgttgaaaacgatacgatcccaattattacaggttttcaaggagtgacagagggtggcgatgtaacaactcttggcagaggagggtctgatacaacagcagtagctattgcagctcaaatatcagcaattagatgtgacatatatacagatgttgatggaatttttaccacagaccctagcgtagttcctaatgcaaaaaaattagattcaattacaatggaagagatgcttgagcttgcaggtcagggtgcaaaagtcgtgcaaactagagcagtagaatttgctaataaatacaaggttccagttagagttttatcaagttttaatgatggaaatggaactttaatttcattaaaggatgaaagtatggaaaatgcattagtatcaggaatagcatttcaaaaagatcaggtaaagtttacccttcatagcgttggagatactcctggtacagcttttaagatacttggaccaataagtgatgcagaaatagaagttgatgttattgttcaaaatgtaagtattgacgataaaacagattttacttttaccgtatcaaatgaagataaagaatcagttgaaaagatactcacagacctaaaaactgaagttgactataaagaagtaataatcaattcagacatagcaaaagtttctcttgttggagcaggaatgagatctcaagccggcgttgcaagcaaggctttcaaagctctttcagaaaacgatgtgaatattcaaattatttgtacatctgaaattaagattacaatggttatagatgaagcattggttgataaagcagttaatgttcttcatgaagagtttgaacttgaaaaataaa

SEQ ID NO: 250683 - DNA, 739 bp, Unknown
  Bacterial polypeptide expressing nucleotide sequence isolated from the Sargasso Sea
aatgaaattaatcgtacaaaaatttggtggaactagcgtagctaacacaagctcgttaaaaatagttgcggaaagaataattgaccgtaagaaagaagggtatgaagttgtagttgtgccttcagcaatgggttccagcacagatgaattaattgatttagccaatgagctttccgaacaacctactccacgtgagatggatatgttgttatctgctggcgagagaataaccatgtcactactttcaatgcatttaaacagtttgggtcatagttcattttctcttacaggttctcaagctggaataattactacatctagacacggcaaagcagaaattgaagaaatctcaggtgaaagagttaaagaaggcattgaaagaggagacattgttattgttgcaggattccaaggttttaatcgtgacacgagagaaataactaccttaggcagaggaggatctgatgccactgcggttgctttagcagctgctctaggtgctgaaaagtgtgaaatatttactgatgtggagggaatatttactgcagatccgagaattattgagtcagcaaagttaattgatgagattacttacgacgagatgcttgaaatgtcttcttcaggagcaggcgtattaatggctaggtctgtagaatttggtagaaggtataatgtgccaataattgtaaaatcaacttttacaaacaacaaaggtaccgtaggaaagaaaaaacaatga

SEQ ID NO: 250684 - DNA, 949 bp, Unknown
  Bacterial polypeptide expressing nucleotide sequence isolated from the Sargasso Sea
atgggcaaattaatagtaaaaaaatttggaggtacttctgttgctgatgctgagcgcattgaagcagtggctgataatgttgaagctgaaatccaaaaaggcaataaagtcactgtggttttatcggcaatgggtaaaagtactgataacctaattgatttagcaaaagagattaatcctgaacctgatctaagagaatatgatgccttggtctctactggagagcagatttctgttgctttgttggctatggctctccttaaaagaggcataaaaggtaaatcttatactgcttatcaattgggtattaaaacaaactcaagtcatagcagagccagaattctagatgttgaagtaagtaagataacctcagaacttgatgaaggtgttgtgcctgtaattactggctttcagggaatgaatgaattaggtgatattacaacactaggcagaggtggttctgacacaacgggcgttgctcttgctgttgccttaaaagcagatgaatgccaaatatataccgatgtggatggagtttttacaactgatcctagggtttgtgataaagcaagattattgaaagaggtaagttttgaagaaatgttagaattatcaagttcaggagcaaaagttcttcagttaagggccgttgaatatgcaagtaaatttaatttgccgctacgtgttctgtctagttttcaagaaggtgaaggcacattagttcaagaggagaaaaatattatggaaagaccaattgtttctgggataagcagtatagattctgaagcaaaacttactattaggggtgttcctgatgtaccaggtgttgctgcaaagatcttgagcccaattagcgaggctggaattgaagtggatgtaatcgtccaaaatattagtgcagataataatactgacttcacattcacagttgataaaagtgatgctaaaa

SEQ ID NO: 250685 - DNA, 1240 bp, Unknown
  Bacterial polypeptide expressing nucleotide sequence isolated from the Sargasso Sea
atgcccgtgttggtaatgaaatttggaggcacctctgtcgcgtctctcgataaaataaagagcgctgcaaaaagtgttgctttagaggtatctgcaggccattcggttattgtaattgtttcagctatggctggaaggacaaatgaacttgttgattgggttaatgaaacatctcctctttatgatgctcgcgaatatgacgcgattgtttcttctggagaaaatgtaaccgctggacttatggcgcttactttgcaggagatggatattccagcccgcagttggcaagggtggcaagtgccggttagaacatcttcggcacactcttcagccaggattgaagaaatacctactgaaaatataatgaatgaattcaacgagggaatgcgcgttgcagtagtagccggatttcaaggcatgagtgaaaccaacagggtcacaactcttggacgcggggggtcggacacgacggctgtagcctttgcagctgcttttgaggccgttcgatgtgatatctacacggatgtagatggaatttacacaacagatccccgcataactgaaaaagccagaaaattaaataaaatttcatttgaagagatgctcgaactggcttctctaggagcaaaagttttacaaacacgatccgttgaattggcaatgcgatttaacgtaaaacttagagtcctttcgagttttgataagccagaatctaatgcaggaacactcgtatgcagtgaggaggaaattatggaatctaatattgtatcaggtattgcacattctaaagatgaagcaaaaatgactttaatttcagtagcagatcggcctggaattgcggccgcaatatttggccctctctcagaagcaggcattaacgttgacatgattattcaaaatattgccgaagaaggaaggactgatatgacattttcatgtcccaccgaccaagtattgagagcagagaaagcgctcaataccgcaaaaattgaaggtgatattaatttttcgcaactcgttgccgacaccaatgtggctaaaatctctgcggttggcattggtatgcgaagtcaatcgggtgtagctgcaaaaatgttccgtacgttgtctgatgaaggaattaatataaaagtcattgcaacatctgaaataaaaatttctgttttgatcgatagaaagtatatggaattggctattcagtcgttacatgatgcatttggcttggaaaaaattacttaat

SEQ ID NO: 250686 - DNA, 1216 bp, Unknown
  Bacterial polypeptide expressing nucleotide sequence isolated from the Sargasso Sea
atgccagaaattattgttcaaaaatttggaggaacttccgttggttcagtcgaaagaattgattctgttgctgagattattaaagatgcttcaaaaaaaaataacattgttgttgtagtctctgcaatggggggcgaaactaataagcttgtagatctagcaaagcattttggtgaaagtcctgataaaagagagtttgatgccttagtctcaactggtgagacagttagctctgcattgttagcaatggctcttcaatcaaaaggcattaaagcaaaatcatatacggcttcacaaatatctatgaaaaccactaattcattttctaaagcaaaaattttagatattaatgcaaaaaagattatggatgaggttgatcaaaatacaatacctatcatcacaggttttcaaggcataactgaaacaggtgatattacgactcttggtagagggggctctgacaccactgctgttgctattgcagctcaaataggtgcaaaaagttgtcatatatataccgatgtagatggagtttttactaccgacccaaaggtagttccgaatgcaaaaaaattagattccattacaatggatgaaatgcttgaactagcaggccaaggagctaaagtaatacagacaagagctgttgagtttgcaaacaaatataaggttcctgtaagaatcttatcaagttttaataaaggggatggaacatacatctctttagaggatgatggtatggaaaatgctttaatatcaggaatagcctttcaaaaggatcaagtaaaatttacgcttcatggtgtcggtgatactcctggaacagcttttaagatcataggcccaattagtgataaagacattgaagtagatgttatagtgcagaatgttagtgtcgatggtaaaactgattttacatttacggtatcaaaagaagatgaaatcgcagtaaaggatattattggagaaataaaaaaagaagttaaatttaaagatctaattattaattctgatatagcaaaggtatctcttgtaggagtaggcatgagaacacatgctggaattgcaagcaaagcatttaaagccttgtctgagaacgatgttaatatccaaataatatctacttctgaaataaagataaccatggtaattgacaaaaacttagttgaaaaggctgtacaagttttacatgaagaattcgatttagataaataat

SEQ ID NO: 250687 - DNA, 1222 bp, Unknown
  Bacterial polypeptide expressing nucleotide sequence isolated from the Sargasso Sea
atggataatttaatagttcaaaaatatggtggaagttcattagccactttagaacaatttgaatttgttgcaaaaaaggtaaaaaacagccttaagaattctaataaaattgtaattgtagtttctgcaatgggaaatacaacagatgaattagttgaactcggtgagagtttcttgaaagacagtaaaaatatagaaaacttaagagattttgatcaattattatcaacgggagaaataatttctgcttcattaatgagtatgtcattaagaaaaaataatgtaaaagctataagtctaaccggacaaaaagcaggaatatttactgatgaattccatggttcagcaagaatatcctccattgatgaaaaagtgattttaaatgaattaaaaaaaagggatgttgtaattgttgctggtttccaaggtgtttcagaatacggtgaagtaaccactcttggaagaggtgggtcagatacaacagcagtagcacttgcatcagctttaaatgctgaaagatgtgaaatatatactgatgtaaaagggatatatactgctgaccctaggttagttaaaggtagcaaattgataagtaatatttcttataatgaaatgctagaaatggcttcattgggagcaaaaatgcatccaaggtcaattgaaatagcagcgataaataacattgagatgataatcaagcatacaatgtatgaaagtgagggtactagattgaacaacaatgaaataaaaatggaaattagaaatgcagttacaggcatacctacatcaaaaggtgttagtaaagtaactattaataatattgatgataagcccggaattgcttcatctattttttcaccacttagcgatatgggcattagtgtcgatgttattgttcaaacggctggaaatgacggaaagacaaatttaagtttcacattaaatgacaatgatcttgaaaattgtgtaaatgaattgattaaaaataatgtatcaaaaaaagaattcatcaaaacacaatcaggtttaggtaaagtaagtattgttggaactggaattcaaaatcagccaggttatgcttcgaggatgtttaaaactttatcgaaaaataacattaatattgaaatgattactacatctgaaataagaataacatgcataattaaatcttctgatctagatttggcggcaaaatcattgcataaagaatttattgaatgaa

SEQ ID NO: 250688 - DNA, 564 bp, Unknown
  Bacterial polypeptide expressing nucleotide sequence isolated from the Sargasso Sea
tatggctttactagtaaaaaaatttggcggtacttctgtaggtgatattaaaaaaattaaaaatattgcaagtagcatctgtcaaagtaaagaagcaggaaatgaaattgtcgtagttgtctctgcaatggggcaaactacagatgatttaaattgtttagcggaatcaattagtaaaaatcctaatcgaagagaattggatatgcttctctcaactggagagcaagtaaccatagctcttctctcaatggcattaaacgaatacggaatacctgcaatttcaatgaccggtagccaggttggaattattactgaatcaattcatgggaaagcgagaattctggatattaaaacagaaaggatccaacattatataaatcaaggttttgtagttgtagtggctggatttcaaggaacaacattaagccatactggttcaatggaaattacaactttgggtagaggtggttcagatacttccgcagtagctttatcaacagctttaggagctgagacgtgcgaaatttatacagacgttccaggggttcttactactgatccgag

SEQ ID NO: 250689 - DNA, 1213 bp, Unknown
  Bacterial polypeptide expressing nucleotide sequence isolated from the Sargasso Sea
aatggttaaaaaagtattaaagttcgggggcacatctgttggaactattgagagaatccggcatgtggcaagtattattaaaaaagagcactctgagaaaaataaagttatagctgttgtttcagcaatgtcaggtaagacaaatgaacttttaaaactatctaatgaaattgcagaagattttaataaaagagaattagatgtgcttttatcttcaggagaacaagttacttgtgcacttctctcaggagctttaactagattaaatataaaatctaaatcttttatgaattggcaaattcctatactaaccgaaggtgatcactctaatgctagaattattaatattcacgttgaaaagataaatgattatttaaataacaacggagtagctattgtaccagggtttcagggtatatcaaaaaatggagacataactactataggtaggggagggtctgatgcaactgcggtagctattgctaaaatatttaatgctgaatgttgcgaaatatatactgatgttgacggtgttttttcaacagatccaaacaaaataccagttgctaaaaaaattgataaaatttcctacgatgaaatgttagaactttcatcgttgggagcaaaagtaatgcaatcatcagctgtccaaacagcaatgatgtatgatatcccacttgaggtaaaatcaacttttactgagagaaaaggaacaaaaatttttagccaagaaaatattgattatacaaaaagcgttaccggagtagcatattctaaagatgatgcaaaaataacagtaaaagaagtagaggataaacccggagtagcagctaatatgtttgagccattgagcaaagcacaagtaaatgtagatatggttatccaaaatatttcctcagatcaaaaaactactgatataacttttacagtaaaaagagatgatatttctaagacaaaacaaattttaaaagaaagcaccagtattaattataaagaaataatctctaatgaaaaagtagccaaggtttcaattgttggtgctggaatggtctctacaccaggagttacatataaaatgttcagaggattatctgacgaaaatataaatattttagctatttctacttcagaaataaaattatcagttattattgatgaggaaaatactttaaaagctgttaaaaagttacatacaatttttgatttagattaa

SEQ ID NO: 250690 - DNA, 756 bp, Unknown
  Bacterial polypeptide expressing nucleotide sequence isolated from the Sargasso Sea
tatgcaacaagttatagttcaaaaatttggaggcacatctgttggttcgggagagcgaatagctgctgtcgctgaaataattaaaaatgaggcagagatgaacactgttgtagttgttgtatcagcaatggcaggagagactgatcgacttatagagctctcaaaattattcggagataatccgaataaaagagaattcgatgccctgatatcaaccggcgagaaagtaagtgcatctcttttagcaatggccctcaactctcttggcttgaaagctaaatcttactcagctgctcaagtttcacttaaaactacatctaacttttcaaaggcaaagattttggatatagataaaacaaaaatggaagagattcttgcagatggctcaattccaattattactggtttccaaggaataaccgaaactggagaagttactaccttaggaagaggtggatctgataccactgctgttgcaattgctgcttctcttaaagctcatcgttgtgatatttatacggatgttgatggtattcatactacagacccaagaattgttcccaatgcaaaaaaacttgatgcaattacaatggaaggcatgcttgagcttgcaggacagggagctaaagtcattcagataagagctgtagaattcgcaaataaatttaaggttcctgtcagagttctatcgagcttttcatcaggtactggtactatgattactttagagaatgatactatggaaaatgcagaaat

SEQ ID NO: 250691 - DNA, 583 bp, Unknown
  Bacterial polypeptide expressing nucleotide sequence isolated from the Sargasso Sea
atgtctgaaattattgttcaaaagtttggaggcacttctgtcggctcagtagaaagaatagatgctgttgcagaaattgttaaaaatgcatcccaatcaaacaagattgtggttgttgtctctgctatggcaggcgaaacaaataagttagtcaatttagcaaaaaattttagtgaaaatccaaataaaagggagtttgacgcattagtagcaactggggagacaataagttcagctttattggcaatggccttacattcaaaaggtcttaaagctaaatcttattctgcatcacaaatctcaatgagaactactgattcattttcaaaagcaagaattttagatgttgatgcaaaaaaaatattagaagttctagaagaagacactattccaattattactggtttccaaggcataactgaaacaggggatgttactactctaggcagaggaggatcagatactacggctgtagcaattgctgctcaagtcaaagcagaaagatgtgacatttatactgacgtagatggtatatttactactgatccaaaaattgtaccgaatgcaaaaaaattagatttcg

SEQ ID NO: 250692 - DNA, 1315 bp, Unknown
  Bacterial polypeptide expressing nucleotide sequence isolated from the Sargasso Sea
ctgtgcttttgtgcggttgtctccagcgcgccagcgcggtttatcctccagttcagaacgacaatggcactcatcgtacataaatacggcggcacttcgatgggctcggtcgagcgcatcaagaacgtcgccaagcgcgtcgcgaaatggcacaaggccggccacaagatggtcgtcgtgccgtcggcgatgtccggcgaaaccaaccgtttgctcggtctcgcgaaagaaatcacgggccagccgagcccgcgcgaactcgacatgattgccgctaccggcgagcaggtcagctcaggactgctcgctatcgcgttgcaggaagccggcgtcgacgcggtcagctatgccggctggcaagtgcccgtcaaaacggatagcgcgttcacgaaagcgcgcatcagcgaaatcgacggcgagcgcgtgctgcgcgatctcgaagcgggcaaagtcgtggtgatcacgggcttccagggcatcgaccccgagggcaatatcactacgcttggccgcggcggttcggacacgtccgcggtcgcagtcgctgccgcattgaaagccgacgagtgtctgatttacacggacgtcgacggcgtctacacgaccgacccgcgtgtggtggacggtgcacgccgcctcgatcgcgtgacgttcgaagaaatgctggaaatggcaagcctgggttcgaaggtgctgcagatccgctcggtggaattcgccggcaaatatcaggtgaagacgcgcgtgctgtcgagcctgaccgatccgctcatcccgctcgacgctgaaatgaagtcgggcaccctgattacttttgaagaagacgagaccatggaaaaagcagtcatctcgggcatcgcgttccagcgcgacgaagctcgtatcgccgtgatgggtgtgcccgacaagccgggcatcgcgtatcagattctcggcccggtggcggacgcgaatatcgacgtcgacatgatcatccagaaccagagcgtcgagggcaaaaccgcgttcacgttcacggttggccgtggcgattatcagcgtgccatggacatcctcacgagtcaggtgaagggccacgtgcaggctgagcaggtgctgggcgatccgaaggtgtcgaaggtatcggtggtcggcgtcggcatgcgttcgcatgtgggtattgcgagcacgatgttccgcacgctgtcggaggagggcatcaacatccagatgatctcgacttccgaaatcaagatctcggtgctgatcgacgagaagtacatggagctcgccgtgcgcgcgctgcataaagcgttcgaactggatcaggcgtaat

SEQ ID NO: 250693 - DNA, 694 bp, Unknown
  Bacterial polypeptide expressing nucleotide sequence isolated from the Sargasso Sea
atgtctgaaattattgttcaaaagtttggaggtacttccgtaggctcagtggagagaatagatgctgttgctgaaattattaaaaatgcctctaaaactaattcattggttgtggtagtttcagctatgggtggcgaaacaaacaaattaatagaactatcaaagtattttggtgaagacccagataaaagagaatttgatgccttggtatcaactggagaaacagttagttcagccctacttgccatggcattaaattccaaaggcatcaaagctaagtcttattccgcatcacaaatttctatgaaaactacagattcatattcaaaagctaaaattcttgacgttaatgcagataaaatacttgaagttgttcaaaataataccattccaattatcactggttttcagggtgttaccgaaggaggtgatgtaactacccttggcagaggaggttctgataccacagctgtagcaattgctgctcaagttggagctaaaagatgtgacattttcacagatgttgatggaatttttacaacagatccaaaagttgtttcgaatgcaaaaaaattagattctattacaatggaagaaatgcttgagcttgctggacaaggtgcaaaagtaatgcaaacaagagcagttgagtttgctaataaattcagtgtacctgtaagagttttatcaagtt

SEQ ID NO: 250694 - DNA, 1249 bp, Unknown
  Bacterial polypeptide expressing nucleotide sequence isolated from the Sargasso Sea
atgattaataatggattaaacagaatacttgtgcacaaatatggcggatcgtccgtatctgatgcaaaaaaaatagctaatgtagctaaaaggatagcttctgcttatgaagcagggtttcagatggtagctgtttgctctgcaatgggagatacaactgatgaccttctggatctagcgtcccaggttacgaccaacccgcaacccagagaattggatttgttgctttctactggagaattagtttcagcaacgttattggctatggcgattgccgaacttggtcatcctgctattagtttaagtggaattcaagctggtatacataccgatgaaatgtatggcaaggctaggatagataatatagaaactgaccgtataaacaaggaattgaatgaagggaacattgttatagttgcaggatttcaaggcatcaatattaatgatgatgtaactactttaggacggggaggatcagataccacagcagtggcattagcagctgctttgagagcggatagatgtgaagtttacactgatgttgatggcatatacactgccgatcctagaatagctaagcaagcgaggaaaatcacacatataggttatgaagaaatgctggagttagcttgttatggagcaaaaatgcatccaaggtccatagaattgggttctgtttacaatgtaccgatatatgtagcctccagttttaatgatgatccaggcaccctaattgattcttatgttcaggagcaaactatggagaaccgaataaaagtcactggtattgcgtatcaaagaaatatagcaaaaatcactttgagagacgttccggataaaccgggcttagcaggggcgctatttgaacctttaacgaatgatggtatcagtgttgatactattgtccagaatactagtgctgataaacttacagatatcagttttactattgataaaaatgacttgccagcaacattgctgactctagaaaaaattacgtccgttcttggtagcggtcaactactgagtgaagaaaatttggccatggttagtatagttggttcgggaatgcaaaacactccagggtacgcatctaaaatgttcactatactagcaaaaggtagtatcaatattgatatgatcactacgtctgaaattaggattagctgtatcatatctgaagataaactcgaagatgctgtacagctacttcatcaagggttcgaattagaccgggtagttaattaaa

SEQ ID NO: 250695 - DNA, 874 bp, Unknown
  Bacterial polypeptide expressing nucleotide sequence isolated from the Sargasso Sea
gatatagataaagaaaaaatggatgagattcttgcagatggagcaataccaattattacaggattccaaggagtaaacgaaagcggagaagtaactacacttggaagaggcggatctgatacgactgcagtagcaattgcagcatcacttaaagcagaccgttgcgatatttatacagatgttgatggtgtatatactactgatcctcgcattgttcccaatgctaaaaaactagatacaatttcaatggagggtatgcttgaattagcaggccaaggagcaaaagttattcaaataagagctgtagaatttgccaacaaatttaaggttcctgtcagagttttatcgagcttttcatcaggtactggtactatgataactttagagaatgaaacaatggaaaatgcagaaatttcaggtattgcctttcaaaaagatcaaataaaagtaacttttactgctgtagaagataccccaggtatcgcttcgaagattcttggccctcttagcgagtcagatattaaggttgatgtaattgttcaaaatgttggtattgaaggtaaaacggatttcactttcacaatagcaactgatgaaaaagatttgcttgatggcgcaattgaaaagattcaaaagtccatcaattacaaagaagtgattatagatgatgagattgccaaagtttctattgttggagttgggataaggtctcatgcgggagttgcagcaaaggctttccaaacactatctgaaaacgaaataaatattggcatgataagtacttctgaaattaagctgacactagtaattgaaaaagatgatcttgaaaaagctgtaaaagtcttacatgatgtatttgagttagctaaataat

SEQ ID NO: 250696 - DNA, 1216 bp, Unknown
  Bacterial polypeptide expressing nucleotide sequence isolated from the Sargasso Sea
tatgacaaaaattattgttcaaaaatttggaggaacttctgttggctcagttgagagaatagatgctgttgcagacattattgctgatgcatccaaaactgccaaaattgttgtggtagtttcagctatggcaggagagacaaataaacttgtgaatctggcaaaaaactttagtgaaaatccagacaaaagagagtttgatgctcttgtttcaactggcgaaactgtgagttcagcattgttgagtcttgcacttcattcaaaaggaataaaagcaaaatcttattctgcctctcaaatttctatgaagacaactgatacttattcaaaagccaaaattctagatgtgaattctgaaaaaattcttcaggtaataaaagaagaaacaataccaattattactggtttccaaggagtaacagaagatggtgacataactacgcttggcagaggtggttctgatacaactgctgtagcaattgcagcacaaattggagcagaaagatgcgatatttatacagatgttgatggtatctatactaccgacccaaagatagtacctaatgcaaaaaaactggattctattacaatggaggaaatgcttgagcttgcaggccaaggtgcaaaagttatgcagacaagagcagttgagtttgcgaataaatataatgttcctgtaagagttttatcaagttttaatgaggggagtgggacattaatcactttagaagaggaaagtatggaaaatgcattaatttcagggattgccttccaaaaagatcaagttaaatttactcttcatggtgttggagatattccaggaaccgcgtttaagattctagggccaataagtgatgctgaagtagaagttgatgtaattgttcaaaatgtaagtgttgatggaaagactgattttacatttactgtgccttatgaagatcaagagacagtcattaaaatcattgactcaattaaagatgaagttaagtttaaacaaatgatggttgattcagacattgcaaaagtttctttagttggagttggcatgcggtcacaagctggtgtggcgagtagagcatttaaagcactatctgaaaatgaagtaaacattcaaattatttgtacctcagagataaagcttacaatggtaattgataaaaatttaactgataaagctgttaaaattttacatgaggagtttgatttagagaattag

SEQ ID NO: 250697 - DNA, 1357 bp, Unknown
  Bacterial polypeptide expressing nucleotide sequence isolated from the Sargasso Sea
aatgtctcttgttgtcgcaaaatttggtggtacctcagtcgccgattacggtgcaatgaatcgctgcgccgatatcgtactgggcaatcccgattgtcgtttagtggtggttagcgcctccagtggcgtgactaacctcttggttgaactcactcaagagtcaatgaacgacgatggtcgtttacagcgcttaaagcaaatcgcccaaattcaatacgctatcttagataaactgggtcgccccaacgacgtagctgcggcattggataagctgttaagccgtatggcggtattgagcgaagcgctagcatcccagcgcagcaaggccaccatggatgagttattgtcccttggcgagcagtgttcgtcggcattatttgcggcggtattgcgggaaaaaggcgctaactcgagtgccttcgatgtgcgcagagtgctgcgcaccgacagccattttggccgcgccgaaccacaggttgagcaaattgcctctctctcacgtgagcatttactgccgctgttatctgaacaagtgattgtgactcaaggctttattggttccgatgaggcgggacaaaccaccacgcttggccgtggcggtagcgactattctgcggcactgttagccgaagctttaaaagcctccgcggttgagatttggaccgatgtggccgggatttatacaactgatcctcgccttgcgccaaacgcccatcctatagccgaaatcagttttaacgaagccgccgaaatggcgactttcggtgctaaagtgctgcatcctgcgacgattctgcctgctgtgcgccagcaaattcaagtgtttgtcggctcaagtaaggagcctgaaaagggcggcacttggatccgtcatcaggttgaagatgcgcccgtgtttcgcgcggttgcgctgcgccgcgaccaaacgctactcaatttacacagcctgcaaatgttgcatgcacagggcttcttggctgaaacctttgccacactggcaaggcataagatcagtgtggatttgatcaccacttccgaagttaacgtatcgctgaccctagataaaactggctcagattcgagcggccagggactattaagcgaagcgttgctgcaggaattatcacagcattgccgtgtgcgtgttgaagatggtttagcactggtggcgattatcggtaaccgtattgcgaccactgcgggcatatgccgccgggtgtttgaagtgctcgagccccacaatgtgcgcatgatctgccaaggtgccagcccgcataacttgtgtgtactcgtggccgaatcagaagcggcgcaagtggttaaagcgctgcacgaaaacctgttcgaaggcgcgtaa

SEQ ID NO: 250698 - DNA, 997 bp, Unknown
  Bacterial polypeptide expressing nucleotide sequence isolated from the Sargasso Sea
atgggcaaattaatcgtcaaaaaattcggaggtacctcagttgctgatgcagaacgcattgaagctgtggcagataatattgaatctgaaattcttatgggaaataaggtaaccgtggttctttccgcaatgggagatagtaccgatgagcttattaaattagcaaaagagattaatcccgaacccgatctccgcgaatatgatgctcttgtatctacgggtgagcaaatatcggtagctttattagcaatggcccttcttaaaagaggtataaaaggtaagtcttacaccgcatatcaattaggtataaaaaccaattcaagccatagtagggcaagaatattagatgttgaagtaagtaagattacctctgaattaaatgaaggttttgtgccagttattactggttttcaaggaatgaatgagtctggtgacattactactcttggaaggggagggtctgatactactggagtcgctcttgctgcagctttggatgctgatgaatgccaaatttatacagatgtagatggcattttcaccacagacccaagagtttatgacaaagctaggcttctcaaggaggtcagttttgaagaaatgttagaattatcaagttctggtgcaaaagttttacaattaagagctgtggaatatgccagtaaatttaatttaccaattagggtgttgtctagttttaacgatggcgaaggaacattagttcaagaggagaaaaatattatggaacgaccaattgtttcaggaataagcagtatagactctgaggccaagctaacaatcagaggcgtgccggatattccaggtgttgcagcaaagattttaagcccaataagtgatgctggtatcgaggtggatgtgattgtccagaatattggggctgataacaccactgattttacatttaccgttcataaagatgatacaaaacaggctgaggagattctcaaaaaaacatctactacccctaggtggaggt

SEQ ID NO: 250699 - DNA, 1192 bp, Unknown
  Bacterial polypeptide expressing nucleotide sequence isolated from the Sargasso Sea
tatgacctacatcgtccaaaaattcggtggaacatcagtagcagacttagatagaattcaacgcgtagcatctaaggtaagagaagaggtttcgaaaggcaacaaagttgcagttgtagtatcagcaatggcgggcgagacgaacaaacttaatgagtgggctaatcagctcggtggttcaaacttaaatgcagagtacgatgtgatcgtttcatctggggaacaagttaccagtggacttctggcgctccatttaaataagattggaataaatgcccgctcatggatggcgtggcagataccatttgtaacagatagtacatataccaaagcgcgcataatggaaatacgggcaaccgagctcaaagcctctttggatgaaaagtgcgttgcggtcgtacctgggttccagggtgttacgaacaataaacgcattacgacacttgggcgcggtggatcagacacaaccgccgttgcattagcagctgcactcaatgctgagcgatgtgatatatacaccgatgtagatggcgtttataccactgatccacgaatagttgcaaaagcaagaaaaatcgacgcggtaacatacgaagagatgctggaaatggcatcacaaggagcaaaggtactgcaaacaagatcagtcgcgttagcaatgttgtatgatgtccgcctgcaagttctatctagttttgaaaataaaccgggaacgctagttttaaatgaggaggaaatattggaacatgagacagtaaccggcatcgcctacagccctgatgaagcaaaaattaccctgcgtcgcgtcggagacaaaccaggagtcgccgccaatatttttggctcgttggcaaaagcatcaataaatgtagatatgatagtccagaatgtctctgaagatgggaatgctaccgatataacgtttacagtaagccaaactgacagcgaacgcacatcagaagttttgcataatcttagaaacgaaattggtttcagtgacttaatcgcagatcaaaatgtcacaaagatctccgtaattggtgtcgggatgcgttctcaaccaggagtcgcaactactatgtttagaacgctaggtgaaaaaggtatcaacatcgaggtgatatcaacttccgaaataaaggttagcgtacttattcgctcggaatatactgaacttgcagttcgagcactc

SEQ ID NO: 250700 - DNA, 990 bp, Unknown
  Bacterial polypeptide expressing nucleotide sequence isolated from the Sargasso Sea
catgaaaattaaagttttaaaatttggcggcacatctgttggtagcattgaagctataaaaagatcagcagacattattcatgattggtcaaaaaaatataaagttatagctgtgttatctgctatgtcaggtgaaactgatcgtttaattggtctaacaaattctttttcaaaaactcctaatccaatagattttgataacgccgtatcatctggtgaaaatgtatcttgcgcgttaatgtctatatgtctaaataatcaaaagattaaatctaaatctctgctaagttggcaaatacctattttaacatcatcagagcacatgaagtcgagaattttgtctattaacaaaaaatttttatatgatgaattagaaaattttgaagttctagtaattcctggtttccaaggtattaacaataagggagaattaactaccttaggtaggggtggttctgatactagtgctgttgctgtagcagcagcaatggaaacagaatgtataatttatactgatgttgagggtgtatttacaactgatccaaacatagtacctaaagcaaaaaaaattaataaaatttcatatgaagaaatgcttgaattagcttcacaaggggctaaggttcttcaaactcgttctgtcgagttagctatgagaaaaaatactaaattaagtgtaagatcttctttcaaacccaaaaaaattggtaccatgattactgatgagaaaagtgttttagaaaataatactgtaagtggaataacatatactaaagatgaggcaaagattacactttcaagagttttggataaacctggtgtttcatcaaaaatctttggtccattagctaaaggtaatattaatgtagatatgatactccaaaatatttcacaagacggaaagtttgcaaatttatcttttactttgccaagacaagatttagaaaaagcattaaaaatactaaaaaaagagaagtctaaaattggata

SEQ ID NO: 250701 - DNA, 1222 bp, Unknown
  Bacterial polypeptide expressing nucleotide sequence isolated from the Sargasso Sea
atgaataagattgttgttcaaaagtacggaggtacttcaataggagatgttgaaaaacttaagtctatagcgaaaaaggtttcagataaaaaagaagcaggtttctttccaattgttgtagtttcagcaatgggaaagtcaacagatgaacttgtaaggatgtctgaggaagttacctttaataagaagtctcctgacctaagagaaaaagatactttattgtctacaggagaattagtatcatctactcttttggcaatatcaataaagtctcttgataaaaaagtaataagcttatcaggatcacaagcaggaatcacaactgatgatatccacggttccgctagaatatctgatataaatacttctagaattcttcaggaaattaaagaggataaaattataataattgccggctttcagggtgttaatatagatggcgatattacaacattgggaagaggaggttcagatactactgcggttgcattggctgccgcccttaatgctgatgtttgtgaaatctatactgatgttgaaggtatttatacaactgatccaagaattgtatcaaatgcgaaaaaattagataaaataaattatgaagatatgcttgaaatggcagtattaggtgcaaaaatgcatccaagatccattgaattagcatctatttatgatgttcctgtatatgtggcaggtactttttcaaaagaaacagggacacttattacgaagggagtaaatatggaaaaaacaaaaactgttacaggcattgcaattgataaaaatgtttctaaaattacgatcaaaaaaattaaaaatcttccaggaacggccgcatctatattgaagcccttatcagataactctataagtattgatgttatagttcaaaatactccttctgatggattaatagatttttcattttcactgtctcaggaagatttagagaaagcatatgaaattttgaataataataataccttagattttgaagaagtcgtcaagggtgaagattttgctaaggttagcttagttggaacaggtatgcaaaatgctccaggttatgcgacagaaatgttcaatgcattaggtgaaaaaaatattagcattgatatgataactacttctgaaataagaattacttgccttattaatcaaaatgacttagatattgctgtaaattctcttcatgaaacttttgaacttgataaataaa

SEQ ID NO: 250702 - DNA, 826 bp, Unknown
  Bacterial polypeptide expressing nucleotide sequence isolated from the Sargasso Sea
aatggcccgcatcgtcatgaaattcggcggcacgtctgtcgccaatatcgagcgtatccgcaatgtggcgcgccatgtgaaacgggaagtcgatgccggccacgaggtcgccgtcgtggtctcggccatggccggaaagaccaacgaactggtggagtggacgcgcgaggcctcgccgatgcacgacgcccgcgaatatgacgtcgtcgtctcctccggcgagcaggtgacctccggtcttctggcgatcgtgctgcaggcgatgggcgtcaacgcccgctcctggcagggctggcaattgccgatcaagaccgacggcacccatggcgcggcccggatcgtcgatatcgacggctcggacatcatcaagcgcatgggcgagggccaggtcgccgtctgcgccggcttccagggcattggcccggacaaccgggtcgcgacccttggtcgcggcggctcggatacctccgccgtcgccatcgcggccgccgttcacgctgatcgctgcgatatctacaccgatgtcgacggcgtctacaccaccgatccgcgcatcgagccgaaggccagacgtctgaagaaggtggcgttcgaggaaatgctggaaatggcctcgctcggcgccaaggtgttgcaggttcgttcggtcgaacttgccatggttcacaaggtgcgcacatttgtgcgttcaagcttcgatgcgccggacgcccccggcatgggcgatttcgacaatccgcccggtaccctgatttgcgacgaggatgagattttggaacaggaagtcgtaaccggcatcgcgtatgccaaggacgaggctcagatt

SEQ ID NO: 250703 - DNA, 1033 bp, Unknown
  Bacterial polypeptide expressing nucleotide sequence isolated from the Sargasso Sea
atgaatttagttgtaaaaaaatatggaggaacttctgttgcctcaatagcaaaaatttctaaaattgcagaaaatctcatcgacgaatacaattctaagaagaagttagtcgttgttttgtcagcaatgggtgattctactgacaaattagtcaatctgagttcaaaagtatccaaatatcctaacgtcagagattttgatatgttattgtcgtcgggtgaacaagtgagtgtatcattactctcaatgattcttaatgagagaggtattgctgcaaaatcctatacagggtggcaagcgggaataaaaacaaatatagatcataataacgctcgtatattatcgattgatactaaaagaattagagctgatttaaagaagggttttataattgttgtagcaggttttcaaggaattaacaacagaggagatataactacacttggaagaggtggttcagatactactgcggtagcgttagccgccgcattaaaagctcaagaatgtcaaatttgcacagatgttgatggtgtatatactacagaccctcgaatatgtgctaaagccaaaagaattgatgtattaacttatgaagagatgcttgaaatggctggcttaggatcgagagttttacaattacgttctgtggagtttgcaagtaaatataatgttccactaagagtattacatgcacataattctaataatattggtacacttattaaaaaagaggagaaaaatatggaaggggcgcttatatccggtattgcattcacaaaagacgaatcagagataattattaaaggggtaaaagaccaaccaggagttgcttcaaaaatcttgggtcctattggtgatgcaaatattgaggttgatatgattgtccagaatgttggttcggatggcctggctgattttacgtttacagttagtagaaattcactaaataaagctgtaaaagttattgaaaaacataagaaaattatgggatatcaaaatattgaatctaagagaaatattgttaaagtgtcgc

SEQ ID NO: 250704 - DNA, 1216 bp, Unknown
  Bacterial polypeptide expressing nucleotide sequence isolated from the Sargasso Sea
tatgtctgaaattgttgttcaaaagtttggaggtacatctgttggaacagtcgacagaatagattctgtcgctgagataattaaaaatgcctctaaatcaaacaaaatagttgttgtagtctccgctatgggtggtgagacaaatagacttgttgatttagctaaagcgtttggagatgaccctgacaaaagagaatttgatgcgttagtatctacaggtgaaacagtaagctccgctttattggctatggcacttcattctaaaggagtaaaagcaaaatcattttcggcatctcaaatttctatgagaactactagttcgtactctaaagcgaaaattcttgatgtagatgctaagaaaattttagatgttgttgaaaacgatacgattccaattattacaggttttcaaggagtgacagagggtggcgatgtaacaactcttggcagaggagggtctgatacaacagcagtagctattgcagctcaaattgaagcaattagatgtgacatatatacagatgttgatggaatttttaccacagaccctagtgtagttcctaatgcaaaaaaattagattcaattacaatggaagagatgcttgagcttgcaggccagggtgcaaaagtcgtgcaaactagagcagtagaatttgctaataaatacaaggttccagttaaagttttatcaagttttaatgatggaaatggaactttaatttcattaaaggatgaaagtatggaaaatgcactagtatcaggaatagcatttcaaaaggatctagtaaagtttacccttcatagtgttggagatactcctggtacagctttcaagatactcggaccaataagtgatgcagagatagaagttgatgttatcgttcaaaatgtgagtattgacgataaaacagattttacttttaccgtgtcaaatgaagataaagaggcagttgaaaagatacttatagatttaaaaactgaagttaattataaagagttaataatcaattcagacatcgcagaagtttctcttgttggagctggaatgagatctcaagctggtgttgcaagcaaggctttcaaagctctttcagaaaacgatgtaaacattcaaattatttgtacatccgaaattaagattacaatggttattgatgaagcattggttgataaagcagttaatgttcttcatgatgaatttgaacttgaaaaataa

SEQ ID NO: 250705 - DNA, 1066 bp, Unknown
  Bacterial polypeptide expressing nucleotide sequence isolated from the Sargasso Sea
gatggaaacaatagtattaaaatttggcggtacctcagttgggtcgactgacagaatatctgctgttgcaaatttaattaaaaccgcatgtaaagaagcctcacccgttgttgtagtttctgcgatgagcggagaaacgaatcgtttaattgatttggcaaaatccttcggagctgaacctaataaaagagagtttgatgcccttgtttctactggagagaaggttagcgcctccttggtttccattgccttgaatcaattaggcctaaaagctaaatcgctgtctgctgctcaatttggtatgaagaccacttctaatttttcgcgagcaaaaatcctagatttagataaggacattattttcaaaactattcaagacggctatatcccaattattactggatttcagggcgtcaacaatgacggtgataccaccactatgggaagaggtggaagtgatactactgcagtagcaatagctgcttcaattaaatctaagcgctgtgatatctataccgatgttgatggtatctatacaacagatcctagaattgttccaaatgcaaaaaaacttgattcaatcagcatggaagaaatgttggaactagcaggtcagggtgctaaagttatgcaaatacgtgcggttgagttcgcgaacaaatataaggttctagtaagagttttatcaagtttcgaaccaggctcaggaacgcttattttacaggaggaagagggaatggaagatgctgtgattacgggtatagcctcacaaaaagatcagacaaaatttactttgcatggagtcggtgatactcctggaattgcctctggtattttaagcccagtaagcgatgcaggcattgaagtagatgttattgttcaaaatgtgagtgtttttggaaaaacagattttacttttacagttggaaacaatgatagagcggaggttgaatcagttttaagaacaaaaatgcagggcatttcatacgatgaattaatcattgacgaaggcatcggtaaggtttctttggtaggcgttggcatgcgctctcatgcgggaatcgct

SEQ ID NO: 250706 - DNA, 847 bp, Unknown
  Bacterial polypeptide expressing nucleotide sequence isolated from the Sargasso Sea
ttgttaggtgaaaatataattcctataattaccggttttcaaggtatcactgagggtggtgatgtaacaacgctgggcaggggtggttcagatacaactgctgtagcaattgcagctcaagtgggagcaagcagatgcgatatttacacagatgttgatggtatctttacaactgatccaaaagttgtttcgaatgcaaaaaaattagattcaattacaatggaggaaatgcttgaacttgctggacaaggagcaaaagtaatacaaactagagccgttgaattcgctaataaatacaatgtaccagttagagttttatcaagttttaataaaggtaaggggactttaattaccttagaggaagatagtatggaaaatgcattagtgtcaggtatagcctttcaaaaagatcaaattaaatttactttgcatggtgttggcgatactcctggaactgcatttaaaattttgggacccgtaagtgatgcagaagtcgaagttgatgtcattgttcaaaatgttagtgttgacggtaaaacagattttacttttactgttgcatctgaagataaagatactgttaaagaggtgcttgataagcttaaggacgatgtgagttatacagagttaattatagattctaatattgcgaaagtttctatagttggggttggtatgagatcacaagcaggtattgcaagcaaggcttttaaagctctatctgaaaatggtgtaaatatacaaattatttgtacatctgaaattaaaattacaatggttattgaaaaagaattagttgataaagcagtcacagttcttcataaagagtttgaactagaaaaataaa

SEQ ID NO: 250707 - DNA, 882 bp, Unknown
  Bacterial polypeptide expressing nucleotide sequence isolated from the Sargasso Sea
aaattttagatgtagatgcaaaaaaaatattagaagtattagataataatactattccgataatcactggttttcaaggaattacagaatctggtgatattactactcttggaagaggtggctcggatacaactgcagtagcaattgcctctcaagtcggtgcttgcaggtgtgatatatacactgatgtagatggaatttatactacagatcctaaaattgtaagtaatgcaaaaaagttagattccattacaatggaagaaatgcttgaattggcggggcaaggcgctagagtaatgcaaactagagctgttgaatttgcaaacaaatttaaagtacccgttaaagttttatcaagttttagtaatagcagtggtaccttaataactttaaaggaagatggtatggaaaatgcactagtctcaggaattgcttttcaaaaagatcaaataaaatatactcttcatggcattggtgatacaccaggtacagcatataaaattttgggtccaattagtgatgcagaaattgaggttgatgttatcgttcaaaatgtaagtgttgatggaaaaacagactttaccttcacagtctcttcagaggaaaaagaaacagtaaataaaattatcgaatcaattagatataaagtggagttcaaagaattgattgtaaattcagacattgcaaaagtttctttggttggtgttgggatgagatctcaagctggagtagctagcagggcattcaaagctctttcagaaaatgatgttaatattcagataatatgtacatctgaaattaagctaactatggttattgataaatctttgaccgaaaaagctgttaaggttttacatgaggaattcgagctagaaaaataaa

SEQ ID NO: 250708 - DNA, 593 bp, Unknown
  Bacterial polypeptide expressing nucleotide sequence isolated from the Sargasso Sea
aatgaaatttgggggtacatcagtagctgaccttaacattatgcgaaatgcaattttaaaaattgttgaagaagtaaaaaacaaaaaaaaagtcatagtcgttgtttcagcaatgggatcaacaactgataatttagttacaaaagtaaaggaagtgtctgcaatttacgatgctagagaatatgatgccattttatcaactggagaaaatatttctgctagcattatggccctacttttacaaaatgagggaattaattcaagaagctggcaagggtggcaaatacctataataactaccgacaatcattctaatgctaggatattagatataaatactaaaaatctagagcaaaggtttacaaatggaatgcaggttgcaattgttgctggatttcagggaataagtaataagaataggataacaactcttggaagaggtggttcagatacaagtgcagttgctttagctgcagcaatttgtgctgaaaggtgtgatatatatactgatgtagacgggatttatacaactgaccctcgaattacagctagtgcaaaaaaattagataaaatttcttatgaggaaatgttag

SEQ ID NO: 250709 - DNA, 814 bp, Unknown
  Bacterial polypeptide expressing nucleotide sequence isolated from the Sargasso Sea
tatgactgaaatcattgttcaaaaatttggaggcacttctgttggcacggtggaaagaattgatgctgttgctgaaattattaaagatgcttcaaaatcaaacaatattattgttgttgtttctgctatggaaggagaaactaataaacttgttggcttagcaaatcatttttctcaaagtcctaataaaagagaatttgatgctttagtttcaactggtgaaacagtaagctcagcgttattagccatagcacttcatgtaaaaggaataaatgcaaaatcttattcagcgtctcaaatttccatgaaaacaacagattcgtattcaaaagcaaaaattttagatattgatgccaataagattctggaagtagttgagcaaaatacaatacccataattactggatttcaaggtgttactgaaacaggtgatatcacaactcttggaagaggtggatctgatacaacagctgtagctatagctgctcaaataggagctaagaggtgtgacatctatacagatgtagatggagtttttactactgatccaaaagttgtttcaaatgcaaaaaaattagattccattacaatggaagaaatgcttgaacttgcaggtcagggagctaaagtgatgcaaacaagagcagttgagtttgctaataaatacaaagtacctgttagagttttatcaagttttaataaaggagatggtacattaatatctttaaaggatgatggtatggaaaatgcattaatatctggaatagcttttcaaaaggatcaagtaaaattcacacttcatgggtgtaagtga

SEQ ID NO: 250710 - DNA, 943 bp, Unknown
  Bacterial polypeptide expressing nucleotide sequence isolated from the Sargasso Sea
atgcaacaagttatagttcaaaaatttggaggtacatctgttggctcgggagagcgaatagctgcagtcgctgaaataattaaaaatgaggcagagatgaacactgttgtagttgttgtatcagcaatggcaggagagactgatagacttatagaactctcaaaattatttggagataatacgaacaaaagagaattcgatgccttgatatcaactggcgagaaagtaagcgcatctcttttagcaatggccctcaactctcttggcttgaaagctaaatcttattcagctgctcaagtttcacttaaaactacatctaacttttcaaaggcaaagattttagatatagataaagcaaaaatggaagagattcttgcagatggctcaattccaattattaccggtttccaaggaataactgaaactggagaagttactaccttaggtagaggtggatctgatactactgctgttgcaattgctgcttctcttaaagctaatcgttgtgatatttatacggatgttgatggtatttacactacagacccaagaattgttcccaatgctaagaaacttgatgcaatttccatggagggcatgctcgagcttgcaggacaaggagctaaagtcattcagataagagctgtagaattcgcaaataaatttaaggttcctgtgagagttctatcgagcttttcatcaggtactggtactatgataactttagagaatgatactatggaaaatgcagaaatttcaggaatagccttccaaacagaccaaacaaaagtaacttttactgcggttgaagatactccaggcatagcgtcaaagatactaggtccgctaagtgaattagacatgaaagttgacgttattgttcagaatgttggaattgaaggcaagacagattttacttttaccatagcaactgaggaaaaaa

SEQ ID NO: 250711 - DNA, 1216 bp, Unknown
  Bacterial polypeptide expressing nucleotide sequence isolated from the Sargasso Sea
tatgactgaaatcattgttcaaaaatttggaggcacttctgttggcacgattgaaagaattgatgctgttgctgaaattattaaagatgcttcaaaatcaaacaatattattgttgttgtttctgctatggaaggagaaaccaataaacttgtaggcttagcaaatcatttttctcaaagtcctgataaaagagaatttgatgctttagtttcaactggtgaaacagtaagctcagcgctattagccatagcgcttcatgcaaaaggaataaatgcaaaatcttattcagcgtctcaaatttcgatgaaaacaacagattcgtattcaaaagcaaaaattttagatattgatgccaataagattctggaagtagttgggcaaaatacaatacccataattactggatttcaaggcgttactgaaacaggtgatatcacaactcttggaagaggtggatctgatacaacagctgtagctatagcttcacaaataggagctaaaaggtgtgatatctatacagatgtagatggagtttttactactgacccaaaagttgtttcaaatgcaaaaaaattagattacattacaatggaagaaatgcttgaacttgcgggtcagggagctaaagtgatgcaaacaagagcagttgagtttgctaataaatacaaagtacctgttagagttttatcaagttttaataaaggagatggtacattaatatctttaaaggatgatggtatggaaaatgcattaatatctggaatagcttttcaaaaggatcaagtaaaattcacacttcatggtgtaggtgacattccaggaacagcttttaagatcttaggcccaattagtgaaaaagatattgaagtagatgtcatagttcaaaatgttagcgtagatgggaaaactgattttactttcacagtatcaaaagatgatgaaagtgatgtaaaagatattattgaagaaattaaaaaagaagttgaatttaaggatttgatgattaactcagatattgcaaaagtttctcttgtaggagttggtatgagaactcatgctggaattgctagcaaagcattcaaagcgttatctgaaaatgatgttaatattcaaataatatcgacatcagaaattaaaattaccatggtaattgataaaagtttagttgaaaaagctgtacaagttttacatgaagagtttgagttagataaataa

SEQ ID NO: 250712 - DNA, 844 bp, Unknown
  Bacterial polypeptide expressing nucleotide sequence isolated from the Sargasso Sea
atgggcaaattaatcgttaaaaaattcggaggtacctcagttgctgatgcagaacgcattgaagctgtggcagataatattgaatctgaaattcatgcgggaaataaggtaaccgtcgttctttccgcaatgggagatagtaccgatgatctaatcaaattagcaaaacagattaatcctgatcccgatctccgagaatatgatgctcttgtatctacgggtgagcaaatatcggtagctttattggcaatggcccttcttaaaagaggtataaaaggtaagtcttacactgcatatcaattaggtataaaaaccaattcaagccatagtagggcaagaatattagatgtggaagtaagtaagattacctctgaattaaatgaaggtgttgtgccagtgattactggttttcaaggaatgaatgagtccggtgacattactactcttggaaggggagggtctgatactactggagtcgctcttgctgcagctttggatgctgatgaatgccaaatttatacagatgtagatggcattttcaccacagacccaagagtttatgataaagctaggcttctcaaggaggtcagttttgaagaaatgttagaattatcaagttctggtgcaaaagttttacaattaagagcagtggaatatgccagtaaatttaatttaccaattagggttttatctagttttaacgaaggcgaaggaacattagttcaagaggagaaaaatattatggaacgaccaattgtttcaggaataagcagtatagactctgaggccaagctaacaatcagaggcgtgccagatattccaggtgttgcagcaaagattttaa

SEQ ID NO: 250713 - DNA, 987 bp, Unknown
  Bacterial polypeptide expressing nucleotide sequence isolated from the Sargasso Sea
tatgactgaaatcattgttcaaaaatttggaggcacttctgttggcacggttgaaagaattgatgctgttgctgaaattattaaagatgcttcaaaatcaaacaatattgttgttgttgtttctgctatggaaggagaaactaataaactggtaggtttagcaaataatttttctcaaagtcctgataaaagagaatttgatgctttagtttcaactggtgaaacagtaagttccgcgctattagctatagcgcttcatgcaaaaggaataaatgcaaaatcttattctgcttctcaaatttctatgaaaacgacagactcctattcaaaagcaaaaattttagacattgatgccaataagatcatggaagtagttgggcaaaatacaatacctataataactggatttcaaggcattactgaaacaggtgatatcacaactcttggaagaggtggatctgatacaacagctgtagctatagctgctcaaataggagctaagaggtgtgatatctatacagatgtagatggagtttttaccactgatccaaaagttgtttcaaatgcaaaaaaattagattccattacaatggaagaaatgcttgaacttgcgggtcagggagctaaagtcatgcaaacaagagcagttgagtttgctaataaatacaaagtacctgttagagttttatcaagttttaataaaggagatggtacattaatatctttaaaggatgatggtatggaaaatgcattaatatctggaatagcttttcaaaaggatcaagtaaaattcacacttcatggtgtaggtgatattccaggaacagcttttaagatcttaggcccaattagtgaaaaagatattgaagtagatgtcatagttcaaaatgttagtgtagatgggaagactgattttacattcacagtatcaaaagatgatgagagtgatgtaaaagatattattgaagaaattaaaaaagaagtgaa

SEQ ID NO: 250714 - DNA, 1300 bp, Unknown
  Bacterial polypeptide expressing nucleotide sequence isolated from the Sargasso Sea
cctgcccagcgcgcccgtgcggcttctcctccagttcagaacgacaatggcactcatcgtacacaaatacggcggcacttcgatgggctcggtcgagcgcatcaagaacgtcgcgaaacgcgtcgcaaaatggcatcaggccgggcaccagatggtagtcgtgccttcggcgatgtccggcgaaaccaaccgtctgctcggtcttgcgaaagagatttcgagccagccgagcccgcgcgagctcgacatgatcgcgtcgaccggcgagcaggtcagcgtcggcctgctgtcgatcgcgctgcaggaaatcggcgtcgaggccgtgagctacgccggctggcaagtgccgatcaagaccgacagcgcgttcacgaaagcgcgcattcactcgatcgacgacgaacgcgtgaaggccgatctgaatgcaggcaaggtcgtgatcatcacgggcttccagggcgtcgatccggacggccacatcacgacgctgggccgtggcggctcggatacgtcggcagtggcggtcgcggccgcgctgggtgccgaagagtgcctgatttatacggacgtcgacggcgtctacacgaccgatccgcgcgtcgtcgaagaggcgcgccgcctcgatcgcgtgacgttcgaggaaatgctggaaatggccagcctcggctcgaaggtcctgcagatccgctcggtcgaattcgccggcaaataccaggtgaagacgcgtgtgctgtcgagcctgaccgatccgctgattgcgctcgacgaagaaatgcgctcgggcaccctgattacttttgaagaagacgagaccatggaaaaggcagtcatttccggcatcgcgttccagcgcgacgaagcacgcattgctgtgatgggcgtgcccgacaagccgggcatcgcgtatcagatcctcggcccggtcgcggatgcgaacgtcgacgtcgacatgatcatccagaaccagagcgtccagggcaagaccgacttcacgttcacggtcggccgtggcgactaccagaaggcgatggacatcctcaccaaccaggtgaagggccacgtgagcgccgagcacgtgcagggcgacccgaaggtgtcgaaggtgtcggtcgtcggcgtcggcatgcgttcgcacgtgggcgtcgcgagcaagatgttccgcacgctgtcggaagagggcatcaacatccagatgatctcgacgtccgaaatcaagatttcggtgctgatcgacgagaaatacatggagctggctgtccgcgcgctgcacaaggcattcgaactcgaccaggcatcgtga

SEQ ID NO: 250715 - DNA, 830 bp, Unknown
  Bacterial polypeptide expressing nucleotide sequence isolated from the Sargasso Sea
tgcacaaagtattattcaaagtaaagaagctggaaatgatatcgttgtagttgtatctgcaatgggtcattctacagatcacttaaataagttagcagaatcaatcagcaaaaatcccaatagccgagaattagatatgctcctctctacaggggagcaagtaactatggcacttctatcaatgtcattaaatgaatatggtattcctgcaatatctttgacaggtagccaagtgggaattgttactgaatcaattcatggaaaagcaagaattctagatatcaaaacagaacgaatacaaaactatattaatcaaggttatgtagtagtagttgcagggtttcaaggctcaacgcttagtcatactggatcaatggaaatcacaactttgggaagagggggttcagatacttcagcagtagcactatccacagcattaggtgcagaaacttgcgagatatatacagatgttcctggagttcttaccactgatccaagaattgtacctaatgcaaaattattagatattattagttgtgaagagatgctagaacttgcgagtgtgggtgcctcagtacttcatccaagagctgtagaaattgctcgcaattatggaattaaattatatgtgaaatcgagtcaaaccctctcaaatggcactcttctacatagcaaaattaaaccattagctttaaaaagaggagggttagaattaacaaagactgttaatagtcttgaagtattagaaaagcaaaccgtatttagtatttccaaactacctgacagacctggaattgcagctcaaatatttgaaaccttgtctgaagcga

SEQ ID NO: 250716 - DNA, 655 bp, Unknown
  Bacterial polypeptide expressing nucleotide sequence isolated from the Sargasso Sea
atggctttactagtaaaaaaatttggcggtacttctgtcggtgatattaaaaaaattaaaaatattgcaagtagcatttgtcaaagtaaagaagcagggaatgaaattgttgtagttgtttctgcgatggggcaaactacagatgatttaaattgtttagcggaatcaattagtaaaaatcctaatcgaagagaattggatatgctcctctcaacaggagagcaagtaaccatagctcttctatcaatggcgttaaacgaatacggaatacctgcaatttcaatgaccggtagccaggttggaattattactgaatcaattcatgggaaagcgagaattctggatattaaaacagaaaggatccaaaattatataaatcagggttttgtagttgtagtagctggatttcaaggaacaacattaagccatacgggttcgatggaaattacaactttgggtagaggtggttcagatacttccgcagtagctttatcaacagctttaggagctgagacgtgcgaaatttatacagacgttccaggggttcttactactgatccaagaattgttcctaatgcaaaactcttagatgaaattagctgcgaggaaatgcttgaacttgcaagtgtcggtgcctcagttctccatccaagag

SEQ ID NO: 250717 - DNA, 951 bp, Unknown
  Bacterial polypeptide expressing nucleotide sequence isolated from the Sargasso Sea
tacaactttgggtagaggtggttcagatacttccgcagtagctttatcaacagctttaggagctgagacgtgcgaaatttacacagacgttccaggggttcttactactgatccaagaattgttcctaatgcaaaactcctagataaaatcagctgcgaagaaatgcttgaacttgcaagtgtcggtgcttcagttctgcatccaagagcagtagaaattgctcgcaattatggaatcaaattgtgtgtcaaatcaagccaaagtgactcaagtgggactctcctagaaagtcaaatccaacctctcccgctaaaaagaggaagcttagaattaacaaaaacagtcaatagtcttgaggtattagaaaaccaagcagtattcagtctctcaaatattcctgataggcctgggattgctgcgcaaatatttgagaaactttcagaagcaagtattagtgtagatttaataatacaagcgacaaatgatggaaataaaaacgatattacatttactgttagtgaattagaagttaaaaagactgcagaacaatgtgaacttataacaagtcaattaggaggagaatataacttaaaaacaaacatgactaaattaagtattcaaggagcaggcattatgggcagacctagtgtttcggctgatttatttgatactttatctcaagcaaatataaatgtcagattaatagctactagtgaaattaaagtcagctgtgtaattgaaatcaataatataccaaaagctattagatttgttgctgagaaatttaagttatctgatacacaaatatttgttaatccaatcaataaaaaacaagatcaacctgaagtaagaggaattgcattagataaaaaccaagttcaagtaagttttcgaaaactacctgatcgtcctggtgtagcagcatcaatatgtttagcattagctgaaat

SEQ ID NO: 250718 - DNA, 613 bp, Unknown
  Bacterial polypeptide expressing nucleotide sequence isolated from the Sargasso Sea
tatgacgctgattgttcaaaaatttggaggtacctctgtcgggtctgcagaaagaatagtaaatgtcgcgaaaaaagttggtgaatttcgagaccagggacatgatgtaattgtggtagtttccgcgatgagtggtgaaacgaatagattaactgagctagctcgagaaatttcccctcaaccaaagccgagagagattgatgtccttttgtccactggagagcaggtcacgatagctttgctagctatggccttagagtctcagggctacgaggcggtttctttcacgggtggacaaataaagattttaactgacgactttcacacaaaggcccgcattaaagaaatagagactacgtctattagaaatgaaatctcatcagggaagatcgtaattgtagcaggttttcaaggtgtcgattctaagggaaatattacaactttaggtaggggagggtctgatacgaccgcggtagcattggctgcggcgttgaacgctggtgaatgtcaaatttatacggacgtcaaaggcgtttatacgacagaccctagggtcgttgaagatgcaaaattactttcaaacataacttttgaagagatgcttgagctttcc

SEQ ID NO: 250719 - DNA, 718 bp, Unknown
  Bacterial polypeptide expressing nucleotide sequence isolated from the Sargasso Sea
tatgtcagacataattgttcaaaagtttggaggaacctctgttggctcagtcgaaaggattgatgctgtagcggagattatcaaaaaaacatctcgagataataaagtcgttgttgtcgtttcagctatgagcggagagacaaatagattaatagatttagcaaaacatttcagcaaaagtccagataaaagagaatttgatgcacttatttcaacaggtgaaacagtgagctctgctttgctaacaatagctcttcaatctaaaggcattcaagcaagatcatactcagcatctcaaatatcgatgaggacaaccagttcattttcaaaagctaaaatattagatgttgatgaaaataaaattaaagatgtcttggatgaagggatgattccaataattactggatttcaaggaataactgaaagtggtgatatcactactttgggtagaggaggatcagacactacagctgttgcaattgcctcaaaaattagtgctaaaagatgtgacatctatacagatgttgatggaatctttactgcagatccaaaggtagttcccaatgcaaaaaagctagactctattactatggaagaaatgctagaactggctagtcaaggagcaaaagtaatgcaaacaagggctgttgaatttgcaaataagtataaagtcccagtaaaagtattatcgagttttaatgagagtagtggtacatta

SEQ ID NO: 250720 - DNA, 829 bp, Unknown
  Bacterial polypeptide expressing nucleotide sequence isolated from the Sargasso Sea
ggcggcacttctctaggaggcattgagcgaattaaagctgtcgcgcaaagaattaaatcaagtaaagaaaaaggtaatgatctagtaatagttgtttcggctatgggacatgcaactgatgaattaacgcagctagcctcagaaataactattgatcctcctcaaagagagatggatatgctcttatcaactggagagcaggtttccatatcattattgacaatggccttgaatgaattgggcatacaagcaatatccttaactggaactcaagctgggattattacagaatcagctcatggacgagccagaatactcgagataagaacagaaagaataaaaaatcttttagctcaaggcaacacaatagttattgctggtttccaaggaaccagtcttggtataggagggatttctgaaatcacaactttaggaagagggggatcagatacttctgcagtagctttggcagcatctcttgaggctgtaaagtgtgaaatttataccgatgttcctggtgttttaacaactgatccaagaattgtgaaaaatgcacaactaatgaaaagtattagttgtgatgaaatgttagaactggcaagccttggagctgctgttttgcatcctcgggcagttgaaatagcaaggaatttcggcgtaactcttgtagtcaagtcaagttgggacaatcttgatgggacgactctaactagtaaaaagaatcaagttttttctaaaggtgggatagagcatcgcagtcctgtagatggattagaacttgttgagaatcaagcagtcgtgggtttatctaatattccagatcgcccag

SEQ ID NO: 250721 - DNA, 853 bp, Unknown
  Bacterial polypeptide expressing nucleotide sequence isolated from the Sargasso Sea
tcaggtcgggatcatgaccgaatccacccacggtcgtgcccgcatccttgagatccgcaccgacagggtgcgcgcccgcttgaacgatggtcacgtggtggtggtggccggcttccagggcaccagcagcggcagcggcggcatcgccgagatcaccaccctcggccgaggaggctctgacacctcagctgtggcgcttgcggctgcccttggcgccgatgcctgtgagatctacaccgatgtgccgggcgtgctcagcaccgacccacgcaaggtggtggatgcgcagttgatgacaacaatcagctgcgacgaaatgctcgagctggccagcctcggtgcatccgtgctccatcctcgagcggtcgaaatcgcccggaactacggcgttccgatggtggtgcggtccagctggagtgatgaaccgggcacccgcctgaccagtcgcagcggtcgcgcgatcggacgggacggcctcgaactgggcagccctgtcgatggagtggaacagctggaccaccaagcggtccttgctctctcccacctgcccgatcaaccaggaatcgccgcaggcttgtttgaagccctctcaacagctggcatcaatgtggatctgatcatccaatccacccacagcggcaacagcaacgacatcaccttcaccgtgggtgacagcgatcttcaagccgcacggcaggtttgcagtgacgtgctcgaaacgctgggaggtgagcttggtttcgatggcggcatgagcaaactgagcatccgcggtgccggcatcatggggcgcccgggcattgcagccaccctgttcaattgcctgtcgcaacaggggatcaatcttcggctg

SEQ ID NO: 250722 - DNA, 844 bp, Unknown
  Bacterial polypeptide expressing nucleotide sequence isolated from the Sargasso Sea
gctgctgtctatggccttacaggtcaagggcgtgacggcaacatccatgacgggaccacaggtaggaatcgtgacggaatccacccatggccgtgcgcgaatcttagaaatacgcaccgaacgcatccaacgacgactcgacgaaggacatgtcgtcgtcgtggccggattccaaggcaccagcaccggaagctctggaacaccggaaatcacgaccctcggtcgcggaggttcagacacatcagccgtcgccctagccgctgctttaggggcagaggcctgtgagatctacaccgatgtaccaggtgtactgaccactgacccccgcaaggttccagaggctcggctcatggctgaggtgagctgtgatgagatgttggaactcgccagccttggtgcgtctgttctgcatcccagggcagtagaaatcgccagaaactatggcgtacctctaatcgtgcgatccagttggagtgacaaaccaggaacacgcctattaagtaagccgagtcggcgaattggcagcgaaggtttggagctgggcaagcccgttgaccaggcggagcttctagaaaaacaggccgttgtggcacttgcccacgtaagtgatgaaccaggcgtagcagccaatttgtttgaaggtctaagcgatgcaggtgtaaacgtcgatttgattgttcaagccacccatgacggcaacagcaatgacattgccttcacactggcagaagctgaacttccggccgctgaagccttctgccgcgagcacctgggcagtggaggccaactacaggtggaaagcggtttagcaaagctcagcatcggcggtgcaggcatcatgggt

SEQ ID NO: 250723 - DNA, 933 bp, Unknown
  Bacterial polypeptide expressing nucleotide sequence isolated from the Sargasso Sea
gcgggaccaagtgttgcagatccggaaaaaatcctgagagctgccaagaaagcagcttcccggcatgcggcgggtgatcaggttgttgttgttgtgagcgcaatgggtaagcagaccgacttacttgtgagactcgcgcaacaaattactgaaactcccagcgatcgtgaaatggatatgttgctttctacgggcgaacaggtaagtgtctctcttttcgccatggcccttcagagcatgggtcacaaagccgtaagtctgactggcgggcagatcggtatccgtaccgactcaagccatacaaaggcgcgtatccagtcaatttcaacgaatcatgttcaggacttacttgaggatggctcaatcgtcatagcagctggctttcaggggtatgatccggatgggaatatcacgacgctcggcagaggtggttctgatacaacagcggtggcacttgcagccgtactgaacgcagattgttgtgaaatctataccgatgtagacggaatttataccaccgacccgcgggttcatagcaacgccgtccggcttgctaccgtgagccatgatgaaatgctcgaacttgccagtttgggtgccggggttatgcattcccgatctattgagtttgctaaaaagtttggggtcccaattgttgtccgatcgagctttgaagatggcccggggacaaaaatattatccggcacaacgattaagcgtaccgtgagtggggtggcacttgcgaagaatgaggcacgaatcactgttgaggatgtgcccgatcagcccggagcgagtcatcagctttttgccgaattggcgtctcaaggcattgcagtggacatgattattcagaatgcaggcacaggcggaacggcggatatctcgtttaccgtaactgataaagatctgccagcagcgtacagatacaga

SEQ ID NO: 250724 - DNA, 772 bp, Unknown
  Bacterial polypeptide expressing nucleotide sequence isolated from the Sargasso Sea
gatgaatttaatagtacaaaaatttggtggaactagtgttgaaaatcccgaaacactaaaaattgttgcacaaaaaataattaattgtaaatcaaaaggaaacgaggttgtagtagttgtatctgctatgggttcaagtacggatgagttaattgatcttgctaatgaactatccgatacaccctcccccagagaaatggatatgttgttgtcggcaggagagagaataacaatgtcactattagcaatgcatttaaataatcttggttatgaatccttttctttaacaggttcacaggcaggaataactacaacgtcaagacatggaatggcggagatcgaaaatatttctggtgaaagagttaaagagggcattaatgaaggaaagatagtaatagttgctggttttcaaggagtaaacaaagagactaaagagattacaacacttggaagaggaggatctgatgctacagcagttgcgttagctgcagcacttggtgcagaaaaatgtgagatttatacagatgttgagggggtatttacagcagacccaagaatagttaaaaaagccaaattaattgaagagataacatacgatgaaatgttggaaatggcttcatcaggtgcaagggttttaatggctaggtctgtagaatttggtagaaggtataatgtaccaataattgtaaaacctacctttagcgaaggttcaggcacaattgtaaaggacaaagtaatggaacaagcaattgtaagtggagtcactcacaac

SEQ ID NO: 250725 - DNA, 769 bp, Unknown
  Bacterial polypeptide expressing nucleotide sequence isolated from the Sargasso Sea
gaaaaaatagtgagagctgccaagaaagcagctgtccggcatgcggcgggcgatcaggttgttgttgttgtgagtgcaatgggtaagcagaccgacttacttgtgagactcgcgaaacagattaccgacgctcccagcgatcgtgaaatggatatgttgctttctacgggcgaacaggtaagtgtctctctgtttgcaatggcccttcagagtatgggccacaaagccgtgagtctgactggcgggcagatcggtatccgcaccgactcgagccatacaaaggcgcgtatccagtcgatttcaacggatcatgttcaggacttacttgaggatggctcaatcgtcatagcagctggctttcaggggtatgatccggatggcaatatcacgacgctcggcagaggtggttctgatacaacagcggtcgcacttgcagccgtactgaacgcagactgttgtgaaatctataccgatgtagacggaatttatactactgacccgcgggttcatggcaacgcggtccggcttgctacagtgagccacgatgaaatgctcgaacttgccagtttgggtgccggggttatgcattcccgatctattgagtttgctaaaaagtttggtgtcccaattgtggtccgatcgagctttgaagatggcccggggacaaaaatattatctggcgcaacgattaagcgtaccgtgagtggtgtggcacttgcgaaaaatgaggcacgaataactgttgaggatgtgcccgatcagcccggag

SEQ ID NO: 250726 - DNA, 1090 bp, Unknown
  Bacterial polypeptide expressing nucleotide sequence isolated from the Sargasso Sea
atagcgcttctctcaatggcattaaacgaatatggaatacctgcaatttcaatgaccgggagccaggtaggaattattactgaatcaatacatgggaaagcaagaattctagatattaaaacagaacgaattcaaaattatatcaatcaaggttttgtagtggtagtcgctggatttcaaggaacaacattaagccatactggatcaatggaaattacaactttgggtagaggtggttcagatacatccgcagtagctttatcaactgctttaggagccgagacttgtgaaatttatacagacgtacctggggttcttactactgatccaagaattgtgcctaatgcaaaactgttagatgaaattagctgtgaggaaatgcttgaacttgcaagcgtcggtgcttcagttctgcatccaagagcagtagaaattgctcgcaattatggaatcaaattgtgcgtcaaatcaagccaaagtgactcaagtgggactctcctagaaagtcaaatccaacctctcccgctaaaaagaggaagtttagaattaacaaaaacagtcaatagtctggaagtattagaaaaccaagcagtattcagtctctcaaatattcctgataggcctgggattgctgcacaaatatttgaaaaactatcagaagcaagtattaatgtagatttaatcatacaagcgacaaatgatggaaataataacgatattacatttactgttagtgaattagaagtgcaaaaaactgcagaacaatgtgatcttataactagtcaattaggaggagaatataatctaaaaacaaacatgactaaattgagtatccaaggagcaggcattatgggcagaccaagtgtttcagctgatttatttgatactttatctcaagcgaatataaatgttaggttaatagctactagtgaaattaaagtcagctgtgtaattgaaattaataatattccaaaagcaattagatttgttgctgagaaatttaagttatctgatacacaaatatttgttaatccaatcaatgcaaaacaagatcaacctgaagtaagaggaattgctttagataaaacca

SEQ ID NO: 250727 - DNA, 1120 bp, Unknown
  Bacterial polypeptide expressing nucleotide sequence isolated from the Sargasso Sea
attgaaatttgggggaacatcagttgcagacgttcctcaaataaaaaagattgctttgaaagttaaaaacgaactgaaaataggcaataaggttattgttgtagtttctgctatggctggtgtaacaaataatttgattgatttagtcaatagcacagcagatagaccctcttattcagaatatgatgtagttttgtctacaggtgagcaaattacttcagcactattggctatttctttaaagaacttaaatattaaagctcgttcatggttaggatggcaagtaccaataatatctgataaatcatatggcaaggctgtcatagaagaaattaaaacagaccaaattttaaaatttctaaaacaaaatgatgttgcgatagtatcaggtttccaaggcatatcaaatgaaaatagaattacaactttaggtagaggagggtctgacacatcagcagtagcaatagctgctgcattttcagcagaacgttgtgatatttatacagatgtagacggagtatatacaacagatcctagaatagttaaaagtgcaaaaaaacttgatttaattacatatgaagaaatgttagaattagcctctcagggagctaaggttctgcaaaccaggtcagtagcattagctatgaaatataatgtaaaattgagagttcttagtagctttgaaaacgtacctggaacttccataataaaagaggaaaaagatatggaaaaatctgaaataagtggaattgcgcatagcttaaatgaagcaaaaataactttgtctggtgttccagaccaaccaggccaggcggctgaaatttttggaactttagctaaacattctattaatgttgatatgatagtacaatcttcttccatcaactatcaggcaactgatattactttcaccataccagaaactgatttgttaatagcagaaagtacaattaaaaaagttcagaaaaaaattggttttgagaaaattattactgatacaaatgttgttaaaatttcagttattggaaatgctatgagaactcaatcaggtattgcaaaaacaatgtttgaaactttggctaataatcacattaatattcacgttatctcaacccagtga

SEQ ID NO: 250728 - DNA, 1181 bp, Unknown
  Bacterial polypeptide expressing nucleotide sequence isolated from the Sargasso Sea
catggccctcctgatgcagaaattcgggggcacctccgtcggcagcgtggaacgcatcaaggcggtggctgatcggatcggacgttgtcgggaggaggggcacgacgttgttgtggtggtctcggccatgggccacaccaccgatgaattgaccggtctggccaacgccatcaccgccgcccccacccagcgggagatggacatgctgctggccagtggcgaacaggtgtcgatcgccttgctggcgatggccttgaacgcccagggagtcagtgcgacgtcgatgaccggtccacaggtgggcatcgctacggaatccacccatggccgggcccggatcctcgggattcgcaccgaccgaatccgcaaccgcctcgcggctggccaggtggtggtggtggcaggtttccagggcaccagcaccagcagcgatggcctgaacgaaatcaccaccctcgggcgcggaggctccgacacctccgctgtcgccctggcggcggccctgagtgccgatgcatgcgagatctacaccgacgttccgggtgtgctcagcaccgatccgcgcaaagtgtccgatgcccagctgatggagacgatcagctgcgacgaaatgctggaactggccagccttggggcctccgtgctgcatcccagggccgttgagatcgcccgcaactacggcgtgaaccttgtggtgcgctccagctggagcgacgcccccggcacccggatcaccagccgttcagcccgcccgatcagtagcagcggcctggagctcggcagccctgttgatgggatggaggaagtgaacggacaggccgtgctcgccctctcccacattcccgatcagcctgggattgccgcacgcctgttcgaaaccctctccaaagcgggaatcaatgtggacctgatcattcaggccacccacgagggcagcagcaacgacatcaccttcactgtggcggaagcggatctcgagctggcccgcgctgtaagccagaaggtgctggatcaactgggcggcgatctggcgtccgaagcagggctgacgaaactcagcatcagcggggccggcatcatggggcgccctggcattgccgccggcctgttcaactgcctgtgtcagcaaggcatcaacctgcgactgatcgccaccagtgaggtgaaggtgagctgcgtga

SEQ ID NO: 250729 - DNA, 749 bp, Unknown
  Bacterial polypeptide expressing nucleotide sequence isolated from the Sargasso Sea
gctggttcaaaaatttggcggcacctctctaggaagtattgagcgcataaaagctgtcgcgcaaagaatcaaatcaagtaaagaaaaaggagatgatctagtagttgtcgtgtcggcaatgggacatcgaactgatgagttaacacgcctagcttcagaaataactgttgatcctcctcatcgagaaatggatatgctgctctcaactggggagcaagtttcaatatcattattgacaatggccctgaatgaattgggcacaccagcaatctcgttaactggaactcaagctggaattatcacagaatcagcgcatggacgagccagaatattagaaatcagaacagagcgaatcacaaatctcttagttcaaggtaaaaccatagttattgctggattccaaggtacaactcttggcataggaggaattgctgaaatcacaactttaggaagaggaggatcagatacttctgcagtggctctagcagcatctcttcaagctgaaaaatgtgaaatttataccgatgttcctggcgtacttacaactgacccaagaattgttaaaaatgcaaaattaatgaaaaatattagttgtgatgaaatgttagagctggcaagccttggagcagctgttttacatccgcgagcggttgaaatcgcaagaaatttcggcgtaactcttgttgttaaatccagttgggacaaccttgatggaacaactctaactagtaataagaagcctgagattt

SEQ ID NO: 250730 - DNA, 1762 bp, Unknown
  Bacterial polypeptide expressing nucleotide sequence isolated from the Sargasso Sea
atggcattactagtaaaaaaatttggcggtacttctgtcggtgatataaaaaaaattcaaaatattgcaggtagcatttgtcaaagtaaagaagcaggaaatgaaattgtcgttgttgtctctgcaatggggaaaacaacagatgatttaaattgtttagcggaatcaataagtaaaaaccctaatcgaagagaattggatatgcttctctcaaccggagagcaagtaactatagctcttctctcaatggcattaaacgaatacggaatacctgcaatttcaatgactggtagccaggtaggaattattactgaatcaatacatgggaaagcaagaattctagatattaaaacagaaagaatacaaaattatataaatcaaggttttgtagttgtagtcgctggatttcaaggaacaacattaagccacactggatcaatggaaattacaactttaggtagaggtggttcagatacatccgcagtagctttatcaacagctttaggagctgagacttgcgaaatttataccgacgtcccaggggtgcttactactgatccaagaattgttactaatgcaaaactcttagatgaaattagctgtgaggaaatgcttgaacttgctagcgtaggcgcttcagttctgcatcccagagctgtagaaattgctcgtaattatggaattaaattgtgcgtcaaatcaagccaaagtgactcaaacgggactcttctagaaagtcaaatccaacctctcccagtcaaaagaggaagcttagaattaacaaaaacagtcaatagtcttgaagtattagaaaaccaagcagtattcagtctctcaaatattcctgatagacctgggatagccgcactaatatttgaaaaactatcagaagcaagtataaatgtagatttaatcatacaagcgacaaatgatggaaaaaataacgatattacatttactgttagtgaattagaagttaaaaaaactgaagaacaatgtgaactaataactagtcaactaggaggagaatacaatctaaaaacaaacatgactaaattgagtattcaaggagcagggattatgggtagaccaagtgtttcggctgatttatttgatactttatctcaagcgaatataaatgtcaggttaatagctactagtgaaattaaagtcagctgcgtaattgaaattaataatattccaaaagctattagatttgttgctgagaaatttaagttatccgatacacaaatatttgttaatccaatcaagagaaaacaagatcaacctgaagtaagaggaattgcattagataaaaatcaagttcaagtaagttttcgcaaattgcctgatcgtccaggtgtagcagcatcgatatgtttagcattagctgaaaataatttacttttcgatacgatcgtgcaatctgagagaatttcctctttaaaaactaaggatattagtctgacaatgaataagcaagatagagaaaaagctaacttagtttttgaggctttaaccaagaaattaccaggctcattcattgaagatggtcctgcaatagccaaagtaagcgctgtaggtgcgggaatggcatttaaggttggaactgctggaaaaatatttagagcactagctgatcaaaatatcaatattgaaatgattgcaactagtgaaattaggacttcatgtattgttttagaaaaagattgtgacaaagcagttaatgcaattcataattatttcgaattagagaaataag

SEQ ID NO: 250731 - DNA, 1210 bp, Unknown
  Bacterial polypeptide expressing nucleotide sequence isolated from the Sargasso Sea
atgaatttaatagtacaaaaatttggtggaactagtgttgagaatcctgaaacactaaagatagttgcacagaaaataattgaatgtaaagaagcaggtaacgaagttgttgtagtagtttcagctatgggatcaagcacagatgaattgatcaatttagcaaatgaactttcagaaacaccatcaccaagagaaatggatatgcttttatctgctggagaaagaataacaatgtcattgttagctatgcatttaaataatcttggctatgaatctttctcgctaactggctcacaagcagggataacgactacttccagacatggaatggcagaaattgaggacatttcaggagaaagggttaaagaaggaatagaagatggaaaaattgtaatagttgctggttttcaaggagtaaataaagaaacaaaagaaattacaacattaggcagaggaggctctgacgcaacagctgtagcattagcagctgctcttgatgcagaaaaatgtgaaatatatacagatgttgaaggagtttttacagctgatccaagaatagttgagaaagcaaagcttataaaagagattacttatgatgaaatgctagaaatggcctcttctggagccaaggttttaatggctagatctgtagagtttggtagaaggtataatgtaccaataattgttaaacctacgtttagtattggtgaaggaacaattgtaaaggataatgtcatggaacaagccatagtaagtggagtcacacacaacgataaagaaattaaatttactttatttggggttccagatcaaccgggtatagctggtaaagtatttggcccactttcagaagccggtgtaattgtcgatatgatcgttcagaatgtatccaaagactctaaaactgatataagctttacttcacccagcgaacaaaaaaacgatgtagaaactatattagataatttatcaagtgagttgaatgctgaaggatctgattctgattcagacattgcaagagtttcacttattggagcagggatgaaagctgaatctgggatagcttcaaaaatgttctcaattcttggcaaaaataaaatcaatatcgcgatgatttcaacttctcctatacgtatttcttgtgttgttagcaagagcgatatgcaaaaagcaattgactctcttcataaagagtttattgaaatataaa

SEQ ID NO: 250732 - DNA, 1210 bp, Unknown
  Bacterial polypeptide expressing nucleotide sequence isolated from the Sargasso Sea
gatgagtttaatagtacaaaaatttggaggaacaagtgtttcaaatcctgaatcacttaaaactgtcgcgaataaaattattgcatgcaaagagagtggcaacgaagtagtggttgtcgtttcagcaatgggttcaagcaccgatgaattaattgacttagcgggagagctttctgaaaccccatctcctagagaaatggatatgctcttatctgctggagaaagaatcacaatgtctcttttagcaattcatctgaataatttaggatatgaatctttttcattgactggctcacaagctggtattacaactacatcgagacatggaatggcagaaattgaaaacataagcggagaaagagtaaaagaaggaatagagagaggcaatattgttattgttgcaggctttcaaggagtcaataaagagactaaagaaataacaaccttaggtagaggagggtcagatgcaacagcagttgctttagcagcatcattaaatgctgaaaggtgtgagatttatacagatgttgaaggtgtttttacagcggatccaagaataattaaaaatgcacaacttatagatgaaataacttatgacgaaatgctagagatggcttcgtcaggagcccgagtattaatggctaggtcagtagaatttggtagaaggtataatgtaccaataattgtaaagtcaacatttaataacggcgagggtacgttagtaaaggaaaaagtaatggaagaagcaatagttagaggagttactcataacgacaaagaaatgaagttcacactttttggagttcctgatcaacctggtatagcaggaaaggttttcggtcctttatctgaaggtggaataattgttgatatgatagtacaaaatgtttcaaaggattcaaaaactgatataagctttacggcccctactgatcaaagagaagatgtagtagaaattctctcaagcctttctagcgacttggacgctgaaggaaccgattcagatgaaaatgtagcaagagtttcaattattggtgcaggaatgaaagcagaatctggcatagcttcaaagatgttttctatattaggtaaaaatgagataaatataggaatgatttccacatctcctataagaatttcatgcgtaattccaaaaaatgacatgaataaagctatagaagcccttcatgaagaatttatttctcagtaa

SEQ ID NO: 250733 - DNA, 1243 bp, Unknown
  Bacterial polypeptide expressing nucleotide sequence isolated from the Sargasso Sea
atgtctctacttgtaatgaaatttggcggtacttctgttgcaaatgtcgaccgaataaaaagggcggctaaacgagttgcgcttgaggtggctcatgggaagaatgttattgttatagtatcagcaatgtctggtaaaacaaacgaattggttgactgggtaaataacacctcacagttctatgacgcacgtgaatatgatgctgttgtttcatcaggtgagaatgtcacggcaggtcttatggcacttactttgcaggaaatggatattccagccagaagctggcaaggctggcaagtcccggttcgaactacttcggctcattcgtcagcaaggatagaaagtatttcgcctcaaataattaatgaaaagtttgctcaaggaatgaaagttgcagtagtcgcgggttttcaaggaattagcaatgaagaccgcattacaaccttgggtagaggggggtctgataccaccgccgtggcttttgctgcagcgttcgaagcggaaagatgtgatatctatactgacgtggacggagtctacactacggatccacgagtatgtgacaaagcgataaagctcgataaaatttcctatgaggaaatgcttgagcttgcatcactcggtgcaaaagttttgcaaacacgatctgtcgaaatggctatgcgatttaaagttaagttgcgggttttgtctagcttcgaagagcctaataacaaagcgggaacacttgtctgcgatgaggaggaaattatggaatcaaatgtagtatcaggaattgcatattcacgggacgaagccaaaatgacattagtatcagtagcagatagacctgggattgctgctgctatttttggtccactgtccgatgcgggtataaatgtcgatatgatcattcagaatatcgctgaagctggaagaactgacatgactttctcatgtccaatagatcaggtaagcagggctgaaatggcactaaataccgcaaaggagtctgaattaataaatttccaagacttacttgctgatacaaatgtttcgaaaatttctgcagttggaattggaatgagatcacaatcaggtgttgcagccaaaatgtttcaaactctttcagatgaaggaataaatattaaagtgattgcaacctctgaaataaagatatctgttttagttgacagaaaatatttggaactcgcagtacagtcattgcatgatgcatttgaattacatgaagtttcctcctaaa

SEQ ID NO: 250734 - DNA, 1216 bp, Unknown
  Bacterial polypeptide expressing nucleotide sequence isolated from the Sargasso Sea
atgcagcaagtaatagttcaaaaatttggaggtacatctgttggctcaggagagcggatagctgctgttgctgaaatcattaagaaagaggctgaaataaataatgttgtggttgttgtatctgcaatggcgggtgagactgatagactcatagagctttcgaaacaatttggcgataatcaaaataaaagagaattcgatgctttgatctcaactggtgagaaagttagtgcatctcttctagctatggctcttaattcgcttggcttgaaagctaaatcttattcagctgctcaagtttcacttaaaactacatccaacttttcaaaggcaatgattttagatattgataaaacaaaaatggaagagattctttcagatgactcaattccaattattaccggctttcaaggaataactgaaactggagaagttactactttaggtaggggaggatctgatactactgctgttgcaattgctgcatctattaaagcagaccgatgtgatatctatactgatgtagatggtatatacactacagacccaagaattgttcccaatgctaagaagttagatgcaatttctatggagggtatgcttgagcttgcaggacaaggagctaaagtaattcagataagagcagtagagtttgcaaataaatttaaggttcctgtgagagttctatcgagcttttcaccaggtactggtactatgataactttagagaatgaaactatggaaaacgcagaaatttcaggaatagccttccaaaaagaccaaacaaaagtaacttttactgcggtagaagatacccctggtatcgcatcaaaaatacttggcccactgagtgagtcagatataaaagttgatgttattgttcagaatgttggaattgaaggtaagacggattttacttttaccatagcaactgaggaaaaagctttacttgatgaggcagttaacaatatccaaaaatccataaactacaaagaagtaataattgatgatgcaattgctaaagtttctattgttggtgttggaattaggtctcacgctggagttgcagctaaagctttccaagcattatcagaaaatgaaataaatattgtcatgattagtacttctgaaattaagttaacaatggttatcgaaaaagacgatcttgaaaaagctgtaaaagtcttacatgatgtatttgagttagagaaataat

SEQ ID NO: 250735 - DNA, 1762 bp, Unknown
  Bacterial polypeptide expressing nucleotide sequence isolated from the Sargasso Sea
tatggctttactagtaaaaaaatttggcggtacttctgtcggtgatattaaaaaaattaaaaatattgcaagtagcatttgtcaaagtaaagaagcagggaatgaaattgtcgtagttgtctctgcgatggggcaaactacagatgatttaaattgtttagcggaatcaattagtaaaaatcctaatcgaagagaattggatatgcttctctcaactggagagcaagtaaccatagctcttctttcaatggcattaaacgaatacggaatacctgcaatttcaatgactggtagccaggttggaattattactgaatcaattcatgggaaagcgagaattctggatattaaaacagaaaggatccaaaattatttaaatcagggttttgtagttgtagtggctggatttcaaggaacaacattaagccatacgggttcaatggaaattacaactttgggtagaggtggttcagatacttccgcggtagctttatcaacagctttaggagctgagacttgcgaaatttatacagacgttccaggggttcttactactgatccaaggattgttcctaatgcaaaactcttagatgaaattagctgcgaggaaatgcttgaacttgcaagcgtcggtgcttcagttctgcatccaagagcagtagaaattgctcgcaattatggaattaaattgtgtgtcaaatcaagccaaagtgactccagtgggactctcctagaaagtcaaatccaacctctcccgctaaaaagaggaagcttagaattaacaaaaacagtcaatagtcttgaagtattagaaaaccaagcagtattcagtctctcaaatattcctgataggcctgggattgctgcgcaaatatttgaaaaactttcagaagcaagtattaacgtagatttaataatacaagcgacaaatgatggaaataaaaacgatattacatttactgttggtgaattagaagtaaaaaagactgcagaacaatgtgaacttataactagtcaattagggggagaatttaacttaaaaaccaacatgactaaattaagtattcaaggagcaggcattatgggcagacctagtgtttcagctgatttatttgatactttatctcaagcgaatataaatgttaggttaatagctactagtgaaattaaagtcagctgtgtaattgaaattaataatataccaaaagctattagatttgttgctgagaaatttaagttatccgatacacaaatatttgttaatccaatcaatgaaaaacaagatcaacctgaagtaagaggaattgcattagataaaaaccaagttcaggtaagctttcgaaaactgcctgatcgtccaggtgtagcagcatcgatatgtttagcattagctgaaaataatttacttatcgatactattgttcagtctgaaagaatttcctctttaaaaactaaggatattagtcttacaatgaataaacaagatagagaaaaagctaacttagtttttgaggccttaacaaaaaaattacccggatcatacattgaagatggccctgctatagcaaaagtaagtactgtaggagcgggaatggcatttaaggttggaacggctggaaaaatatttagagcattggctgaccaaaatatcaatattgaaatgattgccactagtgaaattaggacttcatgtattgtcttagaaaaagattgtgacaaagcagttaatgcgattcataatcatttcgaattagaaaaataa

SEQ ID NO: 250736 - DNA, 1210 bp, Unknown
  Bacterial polypeptide expressing nucleotide sequence isolated from the Sargasso Sea
aatgttaaaaaaagtattaaagtttggaggaacgtctgttggtacagttgaaagaatccaacatgtggcaaatattatcagaaaagaatacgacgctggtaatcaaattattgctgttgtttcagcgatgtctggaaaaactaatgaattgataaaattatcaaaagagattgcaaaagattttaacaaaagagaactagacgttttattatcttcaggagaacaaattacatgtgcacttcttgctggtgctcttttagaaaaaaaacttaaggcaaaatcatggttgaactggcaaattcccattttaaccgagggggaacataataacgctagaattgtgaatatgaatataaaaaaaataaatgaatatttaagtcaaggtgttgctatagtcccaggatttcaaggcatttcaagagatggaaatattactacaattgggcgtggaggctcagacgctactgcggtagctatcgcaaaattatttaatgcagatacttgtgaaatttatactgatgtagatggagtatattcttctgatcccaacaagatacctttcgctaaaaagattgataaaatttcttatgacgaaatgcttgaactagccacagttggcgctaaagttatgcaatcttcggctgttcaaacagcaatgatgtatgatattcctattgatgttaaatctacttttactgatagacaaggaacaaaaatatttgatcaagaaaatattgactattcaaaaagtgtcacaggtgtagcctattcgaaagatgatgctaaaattacgttaattggtgtgcaagataaaccaggagtcgctgcaaacatatttgagcctttaaacaaagctcaaataaatgttgatatggtaattcaaaacatatcatctgatcaaaaaacaactgatataacttttacagtaaaaaggaacgatcttataaaaacaaaagagattttagaaaataataacaatattaaatacaaaaaaattactcataacgataaggtttcaaaaatatctgtagttggagcaggtatggtatcgactcctggagtgacatacaaaatgttcagagggttagcagatattaaagtaaatatacttgcaatatctacttcggaaattaagatatctgtaattattgatgaaaataatactttaaatgctgtcaaaaaattacatacaatatttgatttagattaa

SEQ ID NO: 250737 - DNA, 670 bp, Unknown
  Bacterial polypeptide expressing nucleotide sequence isolated from the Sargasso Sea
atgtatcttaaagactcaaagactgtcgttataaaaattggatcatctttattgattaatgacaaaaaaattatcagagaaaaatggttgtcagaatttgcaaaagatattcaacatctacaaaaattaaaaaaaaatataattttggttagttcaggagcgattgctttaggatgtaaaaaattaaaattaagtaaaaaaaaattgaaacttgataaaagtcaggcagtagcatcaattggccaaattgagttaatgaatctttttaaaaaaacttttaataagtcaaaaatcaatctttctcaaattttgttaacacttgaagatacagaaaaaagaagaagggctattaatgcaaaaaggacttttgagaatttatttagtcttggttttattccaatagtaaatgaaaatgatagtatagccacttctgagattaagtatggtgataatgacagactagcttctagggttgcacaaatatcaagtgcagattgtttaattttattatctgacgttagtggtctttactctaaagatccaaaattagacaaaaaagctaaattaattcgtgaaattaaaaatattgaccaaaatgtagaaaagttagcaacaaataaatctggagaatttggatctggtggaatgaaaacgaagattgatgctgcta

SEQ ID NO: 250738 - DNA, 835 bp, Unknown
  Bacterial polypeptide expressing nucleotide sequence isolated from the Sargasso Sea
aatggaccttgaaaagatattacctaaagatgggccaccaattaatgaagtaactaaatatattgaaaaatataaaaatgatttaatagtaattaaatacggtggaaatgttttaattgatagaaatgtatttaataattttataactgatcttattgttttaaataaattgggccttgcaactgtggtaattcatggtggtggacctagaattaaaagagagctagaaaaatcaaatattcaatcaaaatttataagaggactaagagtaactgacaaaaatataattgacattgttgaatctgttttgattgattttaataatgacattgttaattctttaaaagacaaaggcacagaggcaatctctattaacacaaaaaataataatgttataaaaattataccggaagtagaagagctaggatttgtaggaacaccaaatgagattaataatgaacaaatattaaatataattaaacaaaataaaattcctataatttctcctttaggattaggtaaagaaaaccaaacatataatattaatggagatacagctgcgatggctatagcaaagtctttaaaatctagaagactattgttaatgacgaatgttgatggtgttttagataaaaataagaaattaatagaggaaatttcttcatctgaggttcttgagatgattaaagatgaaactattacagaaggtatgatacctaaaataaacgcatgcttagacgcagtgaataatggtgtaacagcagttggaataatcaatggcacaaagccacattcgtgtttatgggaaatattctctgacaagggctcagggacc

SEQ ID NO: 250739 - DNA, 214 bp, Unknown
  Bacterial polypeptide expressing nucleotide sequence isolated from the Sargasso Sea
tccggtacaattgctggcgggatgattcccaagattgaggggtgcctgagcactcttgatcagggtgtcaagaaaatccacatcattgatggtcgtcttcgtcactcacttctacttgagatttacacaacaagtggcgtaggaactgagctcgtagccgattcagttacggacgcaattcgccatcctccggaagttattccagccggataga

SEQ ID NO: 250740 - DNA, 672 bp, Unknown
  Bacterial polypeptide expressing nucleotide sequence isolated from the Sargasso Sea
aatatggcgataatgatagattggcttctagagttgcacaaatatcaagtgcatattgtttaattttattgtctgacgtaagcggtctttactctaaagatccaaaattaaataaaaaagctaaattaattcgtgaaattaaaaatattgaccaaaatgtagaaaagttagcaacaaataaaactggagagttcggttctggtggaatgaaaacgaagattcatgctgctaaaatttgtcaattctcagggtgtcatatggcgattgctaacggcttaataaatagaccaattcagaaaattttaactaaaaatatatgtacttggtttttgcctaaaatttcaaaattagacgcaagaaaaaagtggattataagctcagtttccccaaaggggaaaatagttattgatgaaggtgcattatcagctttgaataatgggaaaagtttactagctgcagggattaaggatgttcaaggtagttttagcaaaggtgatcatataaaaatcctaaacaataatatgaccgaatttgctagaggattaagtagtttctcttcagaggaaattttgaaaattaaaggtaaacactctaataaaataaatgatattttaggttatgtttcaaaatcagaagttattcataaagatgatatggtattaattaaatgaa

SEQ ID NO: 250741 - DNA, 345 bp, Unknown
  Bacterial polypeptide expressing nucleotide sequence isolated from the Sargasso Sea
ctttaggcatggataaagaaaaaaatatttataatattaatgcagatacagctgctggttttattgcaagtgaattgaaagctaacaaactactattattaactgatgttccaggtatattagacgaaaaaaaacaattaatttcttctttgagtttaaaagaagcaaataaaattttagatgaagattttgtttctggaggaatgaaaccaaaaattttaacatgtattgaagcaatgaataaaggtgttaaaaaatcgactattttagatgggaggattccacattcactaattttagaactttttaccgaacatggtataggaacacaaatttatagttaaa

SEQ ID NO: 250742 - DNA, 613 bp, Unknown
  Bacterial polypeptide expressing nucleotide sequence isolated from the Sargasso Sea
tattaaaacaaattttataaaagggcttcgagtaactgatcaaaatactattaatgttgttgaaaatgttttaataaattttaataatgagatagttaacgctttaaaaattcaaaaatgtgaagcaataggcattaattcaaagaaaaataatataataatggttaaacaggaaaataacacgctgggttttgttggttgtcctacaaaaataaatataaatgttataaaaaatatgattaaaaaaactgaagtaccagttatagctccattaggacttaacgaaagtaatcaagcatttaatattaatgctgatactgttgctggtgctgtgtcaaaagcgctcaaagctagaagattaatgatgataagtgatgtggagggtgttctagataataaaaaaaagttaatcccagagattaattcttcaaaagctaaagatctgattaatagaggaattatatcagaaggaatgataccaaaaataaataattgtattgatgttgctagtaatggagtaaagggtgttgtaattatagatggaagaagagcccatgcaattctatttgaattgctctctgacaaaggagcaggaacacttataagaaaatga

SEQ ID NO: 250743 - DNA, 571 bp, Unknown
  Bacterial polypeptide expressing nucleotide sequence isolated from the Sargasso Sea
tttacaattaaactagtagaagaggctctgctggatctaaatgatgatttaatagataaattaaaaaaatctaaagccctaggaaattcaataactccaaaaaaaaataatataatttatgtaaaacccgaaagagaagaattgggatttgttggaattcctacaaaaattaatgatgatgagattttagaaaatattaagcaaggaaaaatatctataattgcgccactaggacttgatgaaagtaattgcctttacaatataaatgccgatatagcagcaggagcaatagcaaaaaagctagaagcaagaagattattgcttatgacagatgtggagggtgtgttagatgaaaatgggaaacttttgacagaaattaatgcaaagaaaaccttagaattgttaaagaaaaaagtaataacaggtggaatgattcctaaaataaacacttgtttagatgcaatatctaatggtgtgagaggtgttgttattgttgatgggagaaaaccacattcaatactatttgagttattttctgataagggcgcaggaacattaataagaaaatgaa

SEQ ID NO: 250744 - DNA, 417 bp, Unknown
  Bacterial polypeptide expressing nucleotide sequence isolated from the Sargasso Sea
aagtcattagaaatttcatagagagtgactttatacccataattgctcctattggttttggagatagtggtcagtcgtttaatatcaacggagacaccgcagcaggaggtttggcagctagcttaaatgcagacagattgcttcttttaacggatgtagaaggggtaaagagtaaagaaggtagcctagttccacagctaaattcagatgaggcaagaagactgatagatttagaggtaataacaggcggaatgatcccaaaggttaatactgcactagaagcaatagaaaatggggttagggcttctgtaataattgatggaagagtaaaccacgcctgtctattagagctcttcacagatcatggtattggaacattatttaaaaatcactcatcaagaaagtttcctcattgag

SEQ ID NO: 250745 - DNA, 424 bp, Unknown
  Bacterial polypeptide expressing nucleotide sequence isolated from the Sargasso Sea
aatgtctgaagaaattagcttagaggaaataaaaaaattttggcccaaagatgcaccggatgtaaataatgtccccaaatatataaaaaaatataaaaagaatttgattgttataaagtatggtggaaatgttttgatcgaaagaaatatttttaataattttatacaagatataagcatattaaataagttgggtctttcaattataattgtgcatggtggaggtccaagaatagaaagagagttaaaaaaaagtaatattcaaagtaagtttattaatggtttaagaattacaaataaagatgtaatagatattgttgaaaaggtacttattgattttaataatgatattgtcgactcacttaataaaaaaggatcaaaagcggtatcaattaatacaaagaaaaataatattattaatgta

SEQ ID NO: 250746 - DNA, 298 bp, Unknown
  Bacterial polypeptide expressing nucleotide sequence isolated from the Sargasso Sea
gtggcagctgcagcgattgcaaaagaaataaattctagaagattattattaatgacagatgtagaaggagttttagataaagataaaaaacttatctcagaaattaattctgaaacagcaaataatatgattaatgatcaatctatttctggtggaatgatacctaaaattaacacatgtattgatgctgttaacaatggtgtaactggtgtagttatagttgatggacgtaaacaaaactcactgttgtttgaaatattttctgataagggtgctggaactttgatcagaaaatgaa

SEQ ID NO: 250747 - DNA, 533 bp, Unknown
  Bacterial polypeptide expressing nucleotide sequence isolated from the Sargasso Sea
tatgaatagagattggatagctacggcagaaaccttgtcacaagcgcttccgtacttgcaacgttactcgggagctatcatcgtgattaagcttggcggtcacgctatggtaagtgatgaagccctcgaaactttcgcaagagatgtcgtgcttatgcgccaagtaggcataaatcctgtaatcgtccatggtggcggaccgatgattaattctatgttagataaattaaacattgagtccgagttcattgatggaaagcgcgttacagactcagagacaatcagtgtagttgaaatggttttgtctgggaacgtaaacaaaaaaattgtacaagctattaataaacaagatgggcgtgctgtcggtctatccggcaaagatgcaaaactaattaactgcgttcaagataaaccagaattgggactcgtaggtacacccaaagatgttaatcccgaagtaatctttaatttatttgaaaatgacatgatccccgtagttgccccactggggtccagcattgacggtgaaactt

SEQ ID NO: 250748 - DNA, 310 bp, Unknown
  Bacterial polypeptide expressing nucleotide sequence isolated from the Sargasso Sea
atcaatgctgatattgctgctggctcagttgcaaaagaacttaattcaagaagattattgctgatgactgatgtagagggcgttcttgataaagataaaaaactaatctcggagattaattcttctattgcagaaaaaatgcttaaagatggtgatatttctggtgggatgattccaaaaatcaagacctgtcttgattctgtaaataatggagtgacgggtgtagttatagttgatggaagaaaacctcattcaatattatttgagctattttctgataaaggtgcgggaactttaatcagaaaatgaa

SEQ ID NO: 250749 - DNA, 310 bp, Unknown
  Bacterial polypeptide expressing nucleotide sequence isolated from the Sargasso Sea
taatataaatgctgacacagctgctggtgcaattgctagaggtattaaatctagaagattaatattattgactgacgttgaaggggttatgagagataataaattaattccagaaattaatacaactcaggctaaagaactaattaacaatcaaacaattcatggtggtatgatacctaaaatgaaaacctgcattgatgctataaataatggggttagggctgttgttattaccgatggaagaaaaccccattctatcctgtttgaattattttcagatcagggtgcaggaacacttattagaaaatga

SEQ ID NO: 250750 - DNA, 268 bp, Unknown
  Bacterial polypeptide expressing nucleotide sequence isolated from the Sargasso Sea
taactcaagaagattattgctgatgaccgatgttgaaggtgttcttgataaaaataagaaactaataccagagattaattcttctattgcagaaaaaatgcttaaagataaagatatttcgggtgggatgattccaaaaattaatacctgtcttgatgctgtaaataatggagtgacaggtgtagttatagttgatggaagaaaaccacattcaatattattcgagttattttctgataaaggtgcaggaactttaatcagaaaatga

SEQ ID NO: 250751 - DNA, 259 bp, Unknown
  Bacterial polypeptide expressing nucleotide sequence isolated from the Sargasso Sea
aatggaaatagaaaaaatagtaccaaaagatggtcctgccatcgaagaggttaaaaaatatatagataaatataaaaatgaattaatagttattaaatatggaggaaacgtttttattgatagaaatatttttaacaattttatttcagatataagtattctaaataagttaggattatcaataataatagttcacggaggtggtcctagaattaaaagagaattagaaaaatcaaatattcaatcaaaattttattag

SEQ ID NO: 250752 - DNA, 588 bp, Unknown
  Bacterial polypeptide expressing nucleotide sequence isolated from the Sargasso Sea
gagtaacagatagtaaaataattaatgttgttgaaaatgtattaatagaattaaataaggaaattgtaaaagcatttaatattaattcttgtaaagctaaaagtgtaacatcaaaagattataatataattactgatgtaattgttgataacaaagaattaggatttgttggtacaccacataaaattagaactgatattttgaaacaaattattgaaaaaaatgaaatacctatagtagctcctctaggattaaactctgataaccaagtgtataatatcaatgcggatacaacagctggagcaatcgcaaaagaacttaaagctagaagactattgattgtaagtgatgtagagggggttttagataaaaaccagaatttaatttcagaaataaactcattaaaagcaaatgagatgataagtaatgatataataacaggcggcatgatacctaaaattaataactgtatagatgttgcgagtaaaggagttaaaggtgtggtaattatagatggaagaaaagcccattctattctatttgaacttttatcagataaaggatcgggaactttaataaggaaatgaa

SEQ ID NO: 250753 - DNA, 486 bp, Unknown
  Bacterial polypeptide expressing nucleotide sequence isolated from the Sargasso Sea
aatggaccttgaaaaaatacttcctaaaaatgggccaccattaaatgaagtaactaaatacattgaaaaatacaaaaatgatttgatagtaattaaatatggtggaaacgttttaattgatagagacgtatttaataactttataactgatcttagtgttttaaataaattgggtcttgcaactgttgttattcatggtggtggacctagaattaaaagagagctagaaaaatcaaatattgaatcaaaatttataagaggactaagagtaactgataaacatataattgatattgttgaaactgttttaattgattttaatgatgacattgttaattctttaaaagacaaaggaacagaagcaatctctattcacacaaaaaataataatattataaaaactataccagagtcagaggagctaggatttgtaggaataccaaacgaaattaataatgaacaaatattaaatataattaatcaaaa

SEQ ID NO: 250754 - DNA, 387 bp, Unknown
  Bacterial polypeptide expressing nucleotide sequence isolated from the Sargasso Sea
taggaggtaaagcagtaggcgtaagcggtaaagacggtaatttaattgaggcagacaaaatatcccatgaaggcggtattgatctgggatttgttggtaaaataaaaaaggtaaatcccgaattgctgatggttttgctaaagcagggttttcttcctgttgtctcacccattggtctcagcaaagacggggttacctacaacattaatgctgatacaaccgcctcccgaattgcagtctctttgggagcatacaaaataatcttcatgacagatgttaatggagtcctcgaagacgggaatttatgtgcgcagcttaattcaagcgaactgggaataatgatagaaaaaaagtttattaccggtggaatgttgcccaaaagttgac

SEQ ID NO: 250755 - DNA, 290 bp, Unknown
  Bacterial polypeptide expressing nucleotide sequence isolated from the Sargasso Sea
aggtgctatagcaagaagtatcaaatctaggagattaatgttattaacagatattgatggggttttggataataatgaaaaattaatttcagaaataaacactatagaagcaaaagaattagttaataacgaaacgatacatggtggcatgataccaaaagttaaaacttgtattgatgctataaataatggtgtaagagcagttgtgattcttgatggtagaaaaccacactctattttgtttgaattattttctgacaaagggtctggaacgcttataagaaaatgaa

SEQ ID NO: 250756 - DNA, 193 bp, Unknown
  Bacterial polypeptide expressing nucleotide sequence isolated from the Sargasso Sea
gcactcccatatttacagagatatacggaagctattgttgtaattaagcttggcggacatgttatgaccagtgatcagggtatggaaacttttgcaagggatgtggccttgatgcggcaagttgggattaacccagttattgttcatggtggtggccccatgatcaatgcaatgttgaaaaagttaaagatag

SEQ ID NO: 250757 - DNA, 805 bp, Unknown
  Bacterial polypeptide expressing nucleotide sequence isolated from the Sargasso Sea
atgaacttagaaaagatattacctatagatggaccaccaataaatgaagtaactaaatatattgaaaaatacaaaaatgatttaatagtaattaaatatggtggaaacgttttaattgatagaaatgtatttaataacttcattactgatcttaatgttttaaataaaatgggccttgcgactgttgtaattcatggtggtggaccaagaattaaaagagagctagaaaaatcaaatattcaatcaaaatttataagaggactgagagttactgacaaaaatattattaatattgttgaaactgttctgatcgattttaataatgacattgttaaatccttaaaagataaaggaacagaagcaatctcaatacattccaaaaaaaataatgttataaaaattataccagaagcagaagagctaggatttgtaggaataccaaacgaaataaataaccaacaaatattaaatgtaataaatcaagataaaattcctataatttcaccattaggtttagacacagaaaatcaaacatataacattaatggggatacagctgcaatggccatagcaaaatctttaaaatctagaagacttttgttaatgacgaatgttgatggtgttttagataaaaataaaaaattgatagaagaaatttcttcatcagagattatggaaatgattaaagatgaaactattactgagggtatgatacctaagataaatgcatgcttagatgctgtgaataatggggtcactggggttggtataattaatggaacaaaaccgcattcatgtttatggg

SEQ ID NO: 250758 - DNA, 268 bp, Unknown
  Bacterial polypeptide expressing nucleotide sequence isolated from the Sargasso Sea
actaacgttgaaggtgtgaaagacaagacaggaaatgttttgacaggattaacccccatccaagcgtcgaggctcataaccaatagaacattgaaagatggaatggttcctaaagtgcagtgcgctataaatgctatcaaaagcggcgtgacttcagctcatataatagatggaagggtggagcatgcagttttattggaaatatttacagatgaaggcgttggtacactaataactaagcgtgcaaaaaaagctcacaatttataag

SEQ ID NO: 250759 - DNA, 302 bp, Unknown
  Bacterial polypeptide expressing nucleotide sequence isolated from the Sargasso Sea
gatggatttagaaaaaattttacccaaaaatgggcctgcaataaatgaagtctctaaatatattaaaaaatacaaaaatgaattaattgtaatcaaatacggaggaaatgtttttatagatagagatatattcaacaatttcatttcagacttaaacttactcaacaagatggggctttctgttgtagttattcatggtggtggtccaagaataaaaagagaattagataagtctaacattgagtcaaaatttttaagaggattaagggtaactgatgaaaaattattaaaattgttgagag

SEQ ID NO: 250760 - DNA, 142 bp, Unknown
  Bacterial polypeptide expressing nucleotide sequence isolated from the Sargasso Sea
atgattccaaagacagaatgctgtataagagctttagcccaaggagtcaaagcagctcacataattgatggaagaatagaacattcattacttcttgagatttttacaaattccggaataggcacaatgatagtcgcctaac

SEQ ID NO: 250761 - DNA, 385 bp, Unknown
  Bacterial polypeptide expressing nucleotide sequence isolated from the Sargasso Sea
atgaacgagcaagtaaagtatagaaaaaatagtagtataacaccaagcaccgctaaaatcttaatagaggcgctaccttatattcaaaaattatctaataaagtaattgtcattaagtttggtggcaatgcaatgatagatgaagttcttaaaaataactttgctcgtgacgttgttcttcttaaacaggtaggattgcacccagttattattcatggtggtggtccacaaataacatcatatcttaagaaacttggtatagaatcagaatttgcaaatggcatgaggataactagtcccgaatcagtacatataatagagatggtacttggaggtcttgtgaataaagaaatcgtaaatgcaattacatcacatggcggtaagg

SEQ ID NO: 250762 - DNA, 778 bp, Unknown
  Bacterial polypeptide expressing nucleotide sequence isolated from the Sargasso Sea
gatgaatttaaaaaatacatagataaatataaagatcagttaattgtaattaaatatgggggaaatgtttttatagatagaaacatctttaataattttatttcagatattagtattttaaacaatttaggactttctataattatagttcatggaggcggacccagaattaaaagagaattagataaatcaaatattcaatcaaaatttataagaggattaagagttacaaatgaaaaaattattaacatagttgaaaatgtccttatcgactttaatgaggatattgtaaattctttattcgaaaaaggtgcaaatgctgtctctataaatacaaagaaaaacaatgctatagaagttattccagaagcagaggaactaggatttgttggtattccaaataaaataaatgtagaaataataaaagatataatcaaaataaatgcagtaccaattatctctcctttaggtctggggaaaaataatcaaacatataatattaatggagatacagctgctggagctatagcaaaatctttaaaatgtagaagattattgttaatgactaatgtggaaggagttttaaacaaagaaaaaaagcttatcgatgagataagctcttctgaaattttagaaatgataaataatgaaacaatcacagagggcatgatacccaaaataaatacatgccttgacgcagtaatgaacggggttacaggagtaggaatcatagatggaagaaaaaaacattcaattttttcgaattatttcagataaa

SEQ ID NO: 250763 - DNA, 118 bp, Unknown
  Bacterial polypeptide expressing nucleotide sequence isolated from the Sargasso Sea
tgcaattgatgcaatatcatcaggagttactagcgctcacataattgacgggagagtccctcatgcagtacttctcgaagtttttaccgctgaaggtgtgggcaccttgataagctaa

SEQ ID NO: 250764 - DNA, 274 bp, Unknown
  Bacterial polypeptide expressing nucleotide sequence isolated from the Sargasso Sea
agagatcgatgctagacgacttcttttgatgacagatgttgaaggggttcttgatgaaaatcaaaaacttatatctgagattaatctcaatagggccaatgaaatgttaaaaaataatattatttctggaggtatgataccaaaaataaacacttgtctggacgcaatatctaatggtgttagaggtgtagttattgttgatggaagaaaaccacattcaatactatttgagttattttctgacaagggtgcaggaacgttgataagaaaatga

SEQ ID NO: 250765 - DNA, 526 bp, Unknown
  Bacterial polypeptide expressing nucleotide sequence isolated from the Sargasso Sea
atggaccttaaaaaaattttacctgaaaatggtcctccaatagatcaggtttctaaatatattgaaaaatataaaaatgatttaatagttattaaatacggaggaaatgtttttattgatagaaatatttttaataattttattgaagacattagtattttaaataagttaggtttatcaattgtagtaattcatggtggtggtcctcgaattaaaagagagctggatagatcaaatataacttctaagtttatcaggggtttgcgtgttacagatgcaaaaataataaatattgttgaaaaagtattaatcgaatttaacgaagatatagtttcctctttaaaagaaaaaggtgttaaagctatatctttaaatacgaagcagaattgtgtaattgaagtaattccagaggctaaggagctgggatttgttggaataccagataaaattaatgttcatataattaaggacaaaattgaaaataatttaattccaaatagtatctccacttggacttggaactaat

SEQ ID NO: 250766 - DNA, 816 bp, Unknown
  Bacterial polypeptide expressing nucleotide sequence isolated from the Sargasso Sea
gatgtagatccagatgaattaaacgaaatttatgaaaaggcttgggaaattggtggccttcaatttagggcagtatttaatgatttggttacaaatattaaagcaaataaaacagcatcagattttataaaaaagaaaattagagaaactgtttcaaataaaaagtttgcttcaatattgtcggacattgaccatccctatgctgggaaacgtccacctatcgatagtaattattttgaaacctttaatcgagacaacgttaatttagttgaccttcgcagtgagccaatagagttgatagacagaactggaattaaaactaagaaaaatcatttcgacctcgatataattgtttttgctacaggttatgatgcaatgactggacctttaataaatatgaatattatcggaaagaatggtctaaaacttaatgatgtatggaaagaaggcccaaaaacctttttaggccttcaaattcctggatttcctaatttgtttactataacaggaccaggcagtccttcagtgttaacaaatatgccaatggctatagaacaacatgtggaatggattcgagactgtattaattacatgaataagaaagattactcaacaattgaaacagatataaattctgccgaaaaatggggagatgaagtcaattcagtagccaacaaaacacttttaccaactgtaaaacattcttggtacttgggagcaaatattccaggtaaacctagagtttttatgccttatgccggtgggcttccgagatatactgaggtatgcaacaaaataaaaaataataaatataaa

SEQ ID NO: 250767 - DNA, 382 bp, Unknown
  Bacterial polypeptide expressing nucleotide sequence isolated from the Sargasso Sea
gcagcgctgggtaaaaatcaaataccagtgattgcaccgttgggatatgatacaaataaaaatacgctaaatattaatgctgatactgcggctgcgtttgtcgcggagacagtcaaagccgaaaggcttctgcttttgacagatgtagaaggggtaatggataataacaaaaaattaattgctgagctggatcgtaaaaaagcatttcaatacataaaaaaaggcactataaaaagtggtatgattcccaaaattaaggcgtgtttcaatacccttaaaaatggggcaaaaggagttgctttaatcgatggtcgtaaacaaaatgcagtggttatggagcttttaaccacgaaaggtgcgggaacactgataaagaaatgag

SEQ ID NO: 250768 - DNA, 850 bp, Unknown
  Bacterial polypeptide expressing nucleotide sequence isolated from the Sargasso Sea
atggaccttgaaaagatactacctaaaaatgggccaccaattaatgaagtaactaaatatattgaaaaatacaaaaatgatttaatagtaattaaatacggtggaaacgttttaattgatagaaacgtatttaataattttataactgatcttagtgttttaaataaattgggccttgcaactgtggtaattcatggtggtggacctagaattaaaagagagctagaaaaatcaaatattcaatcaaaatttataagaggactaagagtaactgataaaaacataattaatattgtcgaatctgttttgatcaattttaatgatgatattgttagttccttaaaagataaaggaacagaagcaatctctattcacacaaaaaataacaatgttataaaaactgtaccagaagcagaagaacttggttttgtaggaataccaaatgaaattaataatgaacaaatattagatataattaatcaaaaaaaaattcctataatttcaccactaggattaggtaaagaaaatcaaacatataatattaatggagatacagccgcaatggccatagcaaaatctttaaaatcaagaagacttttgctgatgacgaatgttgacggtgttttagataaaaataagaaattaatagaggaaatttcttcatctaaggtcctggaaatgattaaagatgaaactattacagaaggtatgatacctaaaataaacgcatgcttagacgcagtgaataatggtgtaacagcagttggtataatcaatggcacaaaaccacattcatgtttatgggaaatattctctgataagggctctgggaccctaataagacaatgaa

SEQ ID NO: 250769 - DNA, 379 bp, Unknown
  Bacterial polypeptide expressing nucleotide sequence isolated from the Sargasso Sea
atgaatgattctcaaagagtatcaatattaagcgaagcacttccatatatacaaagtttatcaggtagaaaaattgttatcaagtatgctggttcagttatggagaatgctaatttaaaaaatgctttttttagagacattgcacttttatcaaccgttggggtttgtccgatagtaattcatggaggtggaccagagattaataattggtcaaagaaattagaaatatctctcaaattagaaaatggattaagaattactgatcaaaaaacaatggaaattgtcgagatggttctaatgggtagagttaacaaacaaattgtaaaagggattaataaaactggatctttagctgtgggaatatcaggtcttgatggca

SEQ ID NO: 250770 - DNA, 247 bp, Unknown
  Bacterial polypeptide expressing nucleotide sequence isolated from the Sargasso Sea
gatgactgatgttgagggtgtccttgataaaaataaaaaactaataccagagattaattcttctattgcaaaaaaaatgcttaaagatggtgatatttcgggtgggatgataccaaaaattaatacctgtcttgatgctgtaaataatggagtgacgggtgtagttatagttgatggaagaaaacctcactcaatattatttgagttattttctgataaaggtgcgggaaccttaattagaaaatga

SEQ ID NO: 250771 - DNA, 927 bp, Unknown
  Bacterial polypeptide expressing nucleotide sequence isolated from the Sargasso Sea
tcatctttattgattaatgacaaaaaaattgtcagaaaaaaatggttgtcagaatttgcaaaagatattctacatctacaaaaattaaaaaaaaatataattttggttagttcaggagcgatagctttaggatgtaaaaaattaaaattaagtaaaaaaaaattgaaacttgataaaagtcaggcagtagcgtcaattggccaaattgagttaatgaatctttttaaaaaaacttttaataagtcaaaaatcaatctttctcaaattttgttaacacttgaggatacagaaaaaagaagaagggctattaatgcaaaaaggacttttgagaatttatttagtcttggttttattccaatagtaaatgaaaatgatagcatagccacttctgagattaagtatggtgataatgacagactagcttctagggttgcacaaatatcaagtgcagattgtttaattttattatctgacgtaagtggtctttactctaaagatccaaaattagacaaaaaagctaaattaattcgtgaaattaaaaatatcgaccaaaatgtagaaaagttagcaacaaataaatctggagaatttggatctggtggaatgaaaacgaagattgatgctgctaaaatttgtcaattctcaggatgccatatggcgattgctaatggcttaataaatagaccaattaaaaaaattttaattgaaaatatatgtacatggtttttacctaaaatttcaaaattagatgcgagaaaaaagtggataataagctcagtttctccaaagggagaaataattattgatgaaggtgcattattagctttgaataatgggaaaagtttactagccgcggggatcaaggatgttcaaggcagttttagcaaaggtgatcatatcaaaatcctaaacaacaatatgaccgaa

SEQ ID NO: 250772 - DNA, 247 bp, Unknown
  Bacterial polypeptide expressing nucleotide sequence isolated from the Sargasso Sea
aatgactgatgttgaaggcgtattagataaaaacaaaaaactagtttcagaaattacacctgatattgcaaaaaaaatgatggatgaagatactattagtggtggcatgatacctaaaattaatacatgtatagatgctataagcaatggagtgaaaggtgtggttattattgatggcagaaggcatcatagtatactttttgaattattatctgacaaaggcgctggaactttaataagagaatga

SEQ ID NO: 250773 - DNA, 331 bp, Unknown
  Bacterial polypeptide expressing nucleotide sequence isolated from the Sargasso Sea
atgtcagaaattgaaaaagttaatttaaagaaaattttacctaacagtggtccttcagtagatgaagtaaaaaaatatttagaaaaatatactgatgaaaatattgtcattaaatgtggtggcagtgttttaattgatcctaaactttttaatctttttatatccgatataataataatgaaaaaactcggtttaactcctataattgtacatggtggtggtaaaagaattaataatcaattaaaaaaattaaatattacaagtacattcattaaaggcttaagagttacagacaaagacacaattaaagtagtcgaagaagttttgatag

SEQ ID NO: 250774 - DNA, 619 bp, Unknown
  Bacterial polypeptide expressing nucleotide sequence isolated from the Sargasso Sea
atgtgccccgccgccgccgccccgccgccgccgccgccgcactacccgccgccggcgttcgcgcactttcccgcggggacgccgccgcacccgcataccgtccacgcgcaccaccacgcgcacgtcggcgttcaccctcgaccgaacgcgacgcaccagccgccgcccgattggccgccgccatccacggtagtttccggaagcggcacgagtagcgcgttgagcggcggcggagggggagtagtggtacacggaggaggagtacacggagcaggaggaggaggaggtgccggcgcgtgcacgccgccgacgacgtccgcggactccgattcggtccgttcgaacggcggcgtcggcggcggcggcgcggccgggcacactcgccgggcctttgtcgtcctcgacaaaaccgtcacgcagtcgcgcctcgagtcgctgtttcgggaaacgtgcgagggggtcgtagcggtcgagttgaagacggacggcgagagcggtcggtcgcgcgggttcgcgtacgtcacgttcgacgcccccgcgcgcgtgcgatcggcgtgcgagcgtttgaacgggcgggagctgccggaagggagcggggtgcggtgcaaggtgatgccgg

SEQ ID NO: 250775 - DNA, 748 bp, Unknown
  Bacterial polypeptide expressing nucleotide sequence isolated from the Sargasso Sea
aatggatttagagaaaatattacccaaaagtggtcctccaataaatgaggtcacaaaatatattgaaaaatacaaaaacgagttaattgtaataaaatatggaggaaatgtttttatagaccgagatatatttaacaattttatttcagatttgagcttactcaataagataggactttctgttgtagttattcacggtggtggtccaagaataaaaagagaattagataagtctaacattgagtcaaaatttttaagaggactaagagtaactgatgaaaaaattattaaaattgtggagaaagttttaattgattttaatgatgatatcgtttcgtctttaaacgaaattggaactcaagctatctcaattcatacacaaaaaaacaatattattgagattaaccctgaggaagaagagcttggatttgttggaattccaaacaagataaatatagacattataaaaaggattgttgaaaaaaatataataccaataatatcacccttaggattaggtaaaaaaaaacagacatataacataaacggagatactgcagcgggtgcaatagcaaaatcattaaaatctagaagattacttttaatgacaaacgtcagaggtgttcttgataaagaaaaaaaacttatagaagaaatttcatcatcagaaattttagaaatgattaaagatgggaccatcactgaaggtatgataccaaaaatcaatactttgcctagatgctgttaa

SEQ ID NO: 250776 - DNA, 316 bp, Unknown
  Bacterial polypeptide expressing nucleotide sequence isolated from the Sargasso Sea
tataatatcaatgcagatgtagcagctggcgcaattgcaaaggagttaaatgccagaaggttattattaatgaccgatgttgaaggtgtattagacaaaagcaaaaatttaatttctgaaataaattcttcaatggcaaatgaaatgcttgaaaataaaacgatcgaaggtggaatgatacctaagataaaaacatgtttagacgctgtaaataatggtgttactggtgttgtcattgtcgatggcagaaaacaacattctatattatttgaaatcttctcagataaaggagctggcactttaataagaaaatgaa

SEQ ID NO: 250777 - DNA, 484 bp, Unknown
  Bacterial polypeptide expressing nucleotide sequence isolated from the Sargasso Sea
atggatcttaaaaatctttggccaaataaagatgcacctccaatagaaaaagcccttaaatttattgaaaaatataaatcaaaaaaaattgtactaaaatatggtggacaagtcatggcaagtgatcagttatctaaagcctttgctcaggacgctgcaatatgtaatcttattggtttaaagaatttggttatccatggtggtggaccgcaaataaaaaaaaaattagaagcacaaaatataaaaagtaaatttatattaggcttaagagtaacagatgagaaagttataaaaattgtagaagatgtattactaaatgatattaatccggatttagtaaacacaataagttcatttaatgctgttgctgagccagtaactgcaagaaataaaaatggaattttaaaagttacaaaagcaaaaaatcctaatttgggtttcgtggctgacccagaagaaatagacgatgaaaaactaaacagta

SEQ ID NO: 250778 - DNA, 805 bp, Unknown
  Bacterial polypeptide expressing nucleotide sequence isolated from the Sargasso Sea
aatggaccttgaaaagatattacctaaagatgggccaccaattaatgaagtaactaaatacattgaaaaatataaaaacgatttaatagtaattaaatacggtggaaatgttttaattgatagaaacgtatttaataattttataactgatcttagtgttttaaataaattaggccttgcaactgtggtaattcatggtggtggacctagaattaaaagagagctagaaaaatcaaatattcaatcaaaatttataagaggactaagagtaactgacaaaaatataattgatattgttgaaactgttttgattgattttaataatgacattgttaattctttaaaagacaaaggcacagaggcaatctctatacatacaaaaaataataatattattaaaactataccagaagcagaagaacttggttttgtaggaataccagatgagattaataatcagcaaatattaaatataattaatcaaaataaaattcctataatttcaccattaggattgggtaaagaaaaccaaacatataatattaatggagacacagctgcgatggctatagcaaaatctttaaaatctagaagactattgttaatgacgaatgttgatggtgttttagataaaaataagaaattaatagaggaaatttcttcatctgagattcttgaaatgattaaagatgaaactattagagaaggcatgatacctaaaataaacgcatgtttagatgcagtgaataatggtgtaacagcagttggtataatcaacggcacaaagccacattcgtgtttatgg

SEQ ID NO: 250779 - DNA, 175 bp, Unknown
  Bacterial polypeptide expressing nucleotide sequence isolated from the Sargasso Sea
ttgagcaaagttgagtttttatcagaagttctgccttacatgcaccagtacaacggatcttctttagttattaaatacgggggtcatgccatgatagacaaagaaatgcagacttcatttgcaagtgatattgcccttcttcagcaggttggtaccaagccagtttgttcatggt

SEQ ID NO: 250780 - DNA, 264 bp, Unknown
  Bacterial polypeptide expressing nucleotide sequence isolated from the Sargasso Sea
caagaaggttgcttttgatgacagatgtagaaggagttttagatgaaaataaaaaacttatttcagaaattaattcagaaatagctcttaaaatgcttcagaatggaactattagtggaggaatgatacctaaaataaatacatgtttaaatgctgtaaaaaacggagtaaccggagtagttatagttgatggaagaaaacaacactcaattttatttgaattattttcggacaagggcgcgggaacattaattagaaaatgaa

SEQ ID NO: 250781 - DNA, 781 bp, Unknown
  Bacterial polypeptide expressing nucleotide sequence isolated from the Sargasso Sea
aatggctgtattaataaacaattatggacttggtctttttgttgaccatgaactagtgataaagtatggtggaagacctccagaagcaaaaaaccctccttgggacgggggctttacctggtcaagggacaaacaaggactggcttggcttggtgtatcttgtcagtctaatggcgcacacatatggtttccatgtgtagaacaccctagtgataaggttgaaggtgcagaaataatcgttgaggttccagacccattaatggcggtatctaatgggctactactttcaaaacaaaaagaaaaagacagatggactagatggcattggaaaacaagttatccaataagtgcgtataatataaatttcacaattggagggtttgaggtgttaagaaaaaatggttacgttttagacaagccgataaaaatggaatattatgtgttgcccgagatggtgagtggtggtactcaactgcttgaggaagcggaaaaacatctaaatttttacgcatcgatttttggtcagtatccatggatagatgaaaagtttggaatcgttcacactccatatttaggaatggagcatcaaaccattaacgcatatggcaataaatataaaaaaacaaaactcggttacgattttattctttttcatgaaatgggtcatgagtggttcggaaactttatcagtgttaaggattggaaagatttttggatacatgagggatttgttacatacgctgaggctatgtatgtagaaaaaaaccatggtcttgaaata

SEQ ID NO: 250782 - DNA, 193 bp, Unknown
  Bacterial polypeptide expressing nucleotide sequence isolated from the Sargasso Sea
ttggaaaacgggaaaaaaaatactaatactatagttattaagattggtggaagcactcttggtgaaagtgatagctcgctatcagatattataaaattttcaaaagaagatatttctccaatcattgttcatggtggtggtaaagaaataaacaagtggattgccaaacaaggtattcatcctgaattcctaa

SEQ ID NO: 250783 - DNA, 410 bp, Unknown
  Bacterial polypeptide expressing nucleotide sequence isolated from the Sargasso Sea
tacaaaaattaatgaagatgagattttggaaaatattaagcaaggaaaaatatctataattgcaccactaggacttgatgaaagtaattgcctttacaatataaatgccgacatagcagcaggagcaatagcaaaaaagctagaagcaagaagattattgcttatgacagatgtggagggtgtgttagatgaaaatgggaaacttttgacagaaattaacgcagataaaaccgtagaattgttaaagagaaaagtaataacaggtggaatgattcctaaaataaatacttgtttagatgcaatatctaatggtgttagaggtgttgttattgttgatgggagaaaaccacattcaatactatttgagttattttctgataagggcgcaggaacattaataagaaaatgaa

SEQ ID NO: 250784 - DNA, 640 bp, Unknown
  Bacterial polypeptide expressing nucleotide sequence isolated from the Sargasso Sea
aatggaattagctaagattattccaaaagatggaccaaatattaatgaagtcgaaaagtatataaataaatatgagtctgaagttatagtcattaaatgtggtggatctgttttattagagaaaaaattattcaatcagtttatagaggatatatctataataaataagattggtttatcagcaatcgttgttcatggaggagggaaaaatataaaaaaaaaattagatgaaaataatatcgaaacaagatttgttaatgggctcagagtttcagatgaaagaacaatacattatatagaagaggccttactagatctgaataaagaaatattacaagaattaaaatctaaaaaatctaatgtttgctcaatctcgcctagggataataatataattaacatagttccagaaaaagaagaattgggttatgttggtataccaaatataatcaataaaaataaaattttaaaattaataaataatcaacaaattccaattgttgctccattaggattgggtgacgatgaaaaagtttataatataaatgcagatgtagcggctggatcgattgcaaaagaacttaatgctagaagacttcttttaatgacagatgtagagggagttcttgatgagaatcaa

SEQ ID NO: 250785 - DNA, 835 bp, Unknown
  Bacterial polypeptide expressing nucleotide sequence isolated from the Sargasso Sea
attgattaatgacaaaaaaattgtcagagaaaaatggttgtcagaatttgcaaaagatattctacatctacaaaaattaaaaaaaaatataatcttggttagttcaggagcgattgctttagggtgtaaaaaattaaaattaagtaaaaaaaaattaaaacttgataaaagtcaggcagtagcgtcaattggccaaattgagttaatgaatctttttaaaaaaacttttaataagtcaaaaatcaatctttctcaaattttgttaacacttgaagatacagaaaaaagaagaagggctattaatgcaaaaagaacttttgataatttatttagtcttggttttattccaatagttaatgaaaatgatagtatagccacttctgagattaagtatggtgataatgacagactagcttctagggttgcacaaatatcaagtgcagattgtttaattttattatctgacgtaagtggtctttactctaaagatccaaaattagacaaaaaagcaaaattaattcgtgaaattaaaaatattgaccaaaatgtagaaaagttagcaacaaataaatctggagaatttggatctggtggaatgaaaacgaagattgatgctgctaaaatttgtcaattctcaggatgccatatggcgattgctaatggcttaataaatagaccaattcaaaaaattttaactgaaaatatatgtacttggtttttgcctaaaatttcaaaattagatgcgagaaaaaagtggataataagctcagtttctccaaaaggaaaaataattattgatgaaggtgcattattagctttaaataatgggaaaagt

SEQ ID NO: 250786 - DNA, 265 bp, Unknown
  Bacterial polypeptide expressing nucleotide sequence isolated from the Sargasso Sea
gatggacaagcagactctggtaatcaagttgggtggcgcactgatcgaaaacgacgaggcgctgaccgccctgttcgccaccctcaagacctttctgaacgagcagcacagacccctggtgctggtgcacggcggcggctgcctggtggatgacctgctcaaggggctgggtctcacctccaccaagaagaacggtctgcgggtgaccccgttcgagcagatccccttcattgccggcgcgctgggcggtaccgccaacagatga

SEQ ID NO: 250787 - DNA, 882 bp, Unknown
  Bacterial polypeptide expressing nucleotide sequence isolated from the Sargasso Sea
cggacaaaagggtcacatctattgaggttagagatgttgcatactcagtgtttagtaaaactaataaaaaaatagttgattccttacaggctcaaggagccaatgcaaaaagcgttacttcagatgtatttgaatgtgttatggataatgatgatttaggctatgtgggctcaattcaatcagtaaatcatcaactcattaatgaaatattagaatccgactcaataccagtaattgcgcccattggttttcaagataacgagatattaaatattaatgcagatattgcgactgttgaacttgttaaagctattaatccatataaagccatcttcttatctgatacaggcggcatttttaatcaaaggggtgaattaatgcctaatattaatttagctctagagtttgatgaattaatgcagcaagaatggcttcattctggaatgaagttaaagcttgaacagattaaatctcttttagattttctcccaaaaacagcatctgtttcaatcactgagccaatcaatctgccaaaagagctatttactgattctggatcaggtactttaataaagcatggctatagtgttcttcaacaccaacttcccgaaaaagatattcaggaacaatttacaaatattattgagaaatcttttagtggcaagttagtagatgatttttttgaaaacccaaatgatttagatatttttatgactacatgcaagagggcatcaattgcaatctctaatgactttaagattccttatatggataaatttggtgttattcctgaggccaaaggagaaggtttaggtgcggggatttggcatgagatgaggaaagtatatcctgcaagtattttggcgttctcgagcaaataat

SEQ ID NO: 250788 - DNA, 430 bp, Unknown
  Bacterial polypeptide expressing nucleotide sequence isolated from the Sargasso Sea
catggcagcttcctcacatggcagcttcctcacatggcagcttccttacatggcagcttccttacatggcagcttccttacatggcagcttccttacatggcagcttccttacatgacagcttccttacatggcagcttccttacatggcagcttccttacatggcagcttcctcacatggcagcttcctcacatggcagcttccttacatggcagcttccttacatggcagcttccttacatgacagcttccttacatgacagcttccttacatggcagcttccttacatggcagcctaccacctcgcgtgccaccactcgcacgtactcgcgggcgtcgtggtgcacggcggcggacagacgcagcgtgacctcgaccactgccgcccgagcacgccgctgcacgtgctgcacatccacggtgcgtaa

SEQ ID NO: 250789 - DNA, 661 bp, Unknown
  Bacterial polypeptide expressing nucleotide sequence isolated from the Sargasso Sea
tctgatcgacgcggagaatcccgtggaactgaagggcaatacgctgggcttgtggcagatcgtgttcctcgtcatatccgcagccgcgccgctgaccggcatgctcggcgcggtgccgccggcgatcagtctgggcaacggcgcgggcattcctggcgcgttcgtgattgccggcgtggtgctgctgattttcagcgtgggatttgcgtcgatgagccggcacgtggtgcgcgccggcgcgttctacgcgtacattaccgcgggactcggacggccgctgggcatggccggcgcactcgtcgcgctgatgtcgtacacctttatccagatcgcgctgtacgggctgtttggattcttctgcacggtgattctctcgccgctgctgcacaccgcgatgccctggtacggctactcgctgatctgcgtggccgtggtgcaattcaccggcattcgcggcatcgatctgaatagccggctgctcggcgtgctgatgtgtctcgaactcggcattctgctgctgctcgcgattgcaattgtggtgcacggcggtggcccgaacggcctcacgctcgcgccgttcacgccggaacatgtgttcagcggccacctcggcatcgcagtgatgttcgccttcgcgtcgtttatcggtttgaagcgacgg

SEQ ID NO: 250790 - DNA, 967 bp, Unknown
  Bacterial polypeptide expressing nucleotide sequence isolated from the Sargasso Sea
catgtttgaaatattgatcctgatgctggatgctaccattcgcaccgcgccaccgctgatcctggcggccatggccggcatgttctgcgagcgctccggggtggtcaacatcgccctggagggcaagctgctggcggcggcgttcgccagcgcggcagcggcagccgtctccggctctgcctggattgggctgggtgccggggtgggcgtctccatcctgttcgccctgatgcacggctttgccaccatcacccaccgcggtgatcaggtggtgagcggcatggccatcaacatcctggcggccggcctgaccgtcaccctgggccgttactggttcgatcagggcggccagaccccggcgctgtccggcgcggcccgcttcgcccccatcgacctgccctatgccaaggagctgtatgacgtgcctgtcgttggccagctctacagcgagctgctgagcggccactccctgctggagtacgtggcgttcgccgccgtgccgctggcctggtgggtgctgttccgtacccgtttcggcctgcgcctgcgggcggtgggcgaggccccggcagcggtcgacaccgccggtatctcggtggtgcgcatgcgctacaccgcgctcatcatcggcggcctgctggccggcatcggcggcacctacctggcggtggcccagaccgcccagttcatccccaacatgagcgcgggcaagggcttcatggcgctggcggcgctggtgttcggcaagtggcgcccctggaacgccatggcggcctgcctgctgttcggcttcctcgatgcggtcgccatccggctgcaaggggtcagcatcggcggtttcccgatcccggtgcaggccatcgaggcgctgccctacatcctgaccgtgttcctgctggccggcttcatcggcaaggcggtggcacccaaggcgctcggtaccccctacgtcaaagagcgggaatag

SEQ ID NO: 250791 - DNA, 850 bp, Unknown
  Bacterial polypeptide expressing nucleotide sequence isolated from the Sargasso Sea
aatggaacgattaaattctatcgaaacggctcgcacattggcagaagcacttccgtatttgcagcggtatgacaagtcaattgttatcataaaattgggtgggcatgccatgactaataaaatcgccatgaccaattttgcgcgtgatgtagtgctaatgaagcaatgtaacgttaacccaatagtggttcatggcggcggcccaatgattagcacattcttgaaaaaaatgaatatcgagtccaaattcattaaaggaaaacgggtaacaagcgaggaggctattaccgccgttgaaatggttttaaccggaaatataaataagagtattgtttcggccattaacaggcaggggggaaaagccgtaggtctctcaggcaaagacgctaacctaatgatatgtgagccagacgaccccgagcttggatttgttggcattcctaaaacaatagacccttccattctcaggaattttctggaaagtgactttattcctataattgctcctgttggaatgggattagatggaagaacatacaatgtgaatgctgatgatgtagcaggagcaatagctggtgttatgaatgctgaccgcttacttttgctgacggatgtatctggtatacaagacaaagacggaaaactattaaccaatctatcaacaacagaagtgaaaaatctgatcagtgaaggtacaatagtaaagggaatgatccctaaggcagataccgcaattagagccttgtcagatggtgtaaaggcagtagttattatggatggcagagctccgaatgcgtgcttactagaattgttcactgatcatggagcgggtacattggtgagaaattag

SEQ ID NO: 250792 - DNA, 139 bp, Unknown
  Bacterial polypeptide expressing nucleotide sequence isolated from the Sargasso Sea
aatgactccaaaacttaaggctgccctcaatgccaagaaaagaggtgtaaaaacttgtcacataattgatggaagagttccacatgcagttctactagaagtactaacggaagaaggcgtaggaactatgataagctaa

SEQ ID NO: 250793 - DNA, 850 bp, Unknown
  Bacterial polypeptide expressing nucleotide sequence isolated from the Sargasso Sea
aatgaaccttgaaaagatattacctaaagatgggccaccaattaatgaagtaactaaatatattgaaaaatataaaaatgatctaatagtaattaaatatggcggaaacgttttaattgatagaaacgtatttaataattttataactgatcttagtgttttaaataaattaggccttgcaactgtggtaattcatggtggtggacctagaattaaaagagagctagcaaaatcaaatattcaatcaaaatttataagaggactaagagtaactgataaaaatataattaatattgttgaatctgttttaatagattttaatgatgacattgttaattctttaaaagacaaaggaacagaagcaatctctattcacacaaaaaataataatattataaaaactataccagagacagaagagctaggatttgtaggaataccaaatgagattaataatgaacaaatattaaatataattaatcaaaataaaattcctataatttctccattaggattaggtaaagaaaaccaaacatataatattaatggagatacagctgcgatggctatagcaaaatctttaaaatctagaagactattgttaatgacgaatgttgatggtgttttagataaaaataagaaattaatagaggaaatttcttcatctgatgttcttaaaatgattaaagacgaaactattacagaaggtatgatacctaaaataaacgcatgcttagacgcggtaaataatggtgtaacagcagctggtataatcaatggtacaaagccacattcgtgtttatgggaaatattctctgacaagggctctgggaccctaataaggcaatga

SEQ ID NO: 250794 - DNA, 319 bp, Unknown
  Bacterial polypeptide expressing nucleotide sequence isolated from the Sargasso Sea
atgaataaggtttatacaaaagaaactattcttaagcttttaagtgggatgagtagcgaaaaagagatacgtaagtatctagaaagattctcatctgatgattttagatttgcagtaataaaagtcggtggagcagtaatacaaaatgatcttgaaaacctagtttcctctatatcttttcttcatgaagttggtttaaagcctattattgttcatggtggtggacctagcctctcaagtgagctagaagcaaatgaaatagaattttcttttttagatggccaaagaataaccactagtgaggttcttgacgttgcac

SEQ ID NO: 250795 - DNA, 847 bp, Unknown
  Bacterial polypeptide expressing nucleotide sequence isolated from the Sargasso Sea
atgaatttagaaaaaatacttccttcagatggtccaaataatgatgaaattcaaaaatacatcaataagtaccggggagaaataattgttattaaatgtggaggttctgttttaactgatcagaagttatttaatcaatttatacaagatgtttcaattctaaataaattaggccttagtatttgtttaatacatggtggtggaatttttataaataaaaaattaaaagaaaaaaatatatctaataaatttataaatggtctaagaattacaaatgaagaaactataaaaattgttgaagaagcattagtagagttaaatttagaaataattaataatttaaaaagtaaaaattgctactctcaatctattacgacaaaaaataaattaattacagttgaaccaaaaaacaaagaattaggctttgttggcgaacctaagtatgtaaataaagatattttgataaaaattttaaaaaaaaatgaagtaccggtaattgttcccatgggagtaggaaaagatgaaaagatatataacattaatgcagatattgctgctggatttatagcaaaaaatctaaaatcaagaagacttcttttgatgactgatgttgacggcgttttagacaaaaataaatcattaataccagaaataaattctgaaaaagcaaaagaaatgattgatcaaggaacaataacgggtggaatgataccaaaaataaatacatgcttagatgctgttaaaaatggtgttacaggagtcgtaattgttgacggaagaaaaaatcattcaattttatttgagctattttcagatataggttctggaactcttattagaaagtaat

SEQ ID NO: 250796 - DNA, 327 bp, Unknown
  Bacterial polypeptide expressing nucleotide sequence isolated from the Sargasso Sea
ataaaaaaatctataatataaatgttgatattgctgctggttcggttgctaaaaaacttagctcaagaagattattgttgatgactgatgttgagggtgtccttgataaaaataaaaaactaatatcagagatcaattcttctattgcagaaaaaatgcttaaggatggtgatatttctggtggaatgattccaaaaatcaatacctgcctcgatgctgtaaataatggagtaaagggtgtagttatagttgacggaagaaaacctcattcaatattatttgagttattttctgataaaggtgctggaactttaatcagaaaatgaa

SEQ ID NO: 250797 - DNA, 701 bp, Unknown
  Bacterial polypeptide expressing nucleotide sequence isolated from the Sargasso Sea
tataagtattctaaataagttaggattatcaataataatagtccacggaggtggtcctagaattgaaagagagttagaaaaatcaaatattcaatcaaaatttattagaggtttaagggttaccgatgaaaaaattattaatatagttgaagatgtccttattgattttaacgaggatattgttaattctttaactgaaaaaggatcaaacgctgtatcaataaacacaaaaaaaaataatgttattgaggttattccagaaacaaaggaacttggattcgttggaaagccaagtaaaatcaatataaatataataaaagatataataaaagtaagttcagttccaataatatcacctttaggtttagataaaaataatcaaacatttaatattaacggagatacagctgcaggtgctatagctaaatctttaaaatgtagaagattattattaatgacaaatgttgaaggtgtactagataaagaaaaaaaactcattgaggaaattacatcctcagaaatcttagagatgataaataatgaaattataacagagggcatgattcctaaaatcaacacttgcttagatgcagtaatgaatggagttacaggtgtcggaattattgatggaagaaaaaaacattcaattctttttgaattattctcagacaaaggtgctggtacgttaataagaaaatgaa

SEQ ID NO: 250798 - DNA, 286 bp, Unknown
  Bacterial polypeptide expressing nucleotide sequence isolated from the Sargasso Sea
attgcctaacgatgggccaccaattaatgaagtaactaaatatattgaaaaatacaaaaatgatttaatagtaattaagtacggtggaaacgttttaattgatagaaacgtatttaataattttataactgatcttagtattttaaataaattaggccttgcaactgtggtaattcatggtggtggacctagaattaaaagagagctagaaaaatcaaatattcaatcgaaatttataagaggactaagagtaacagataaacatataattgatattgttgaatct

SEQ ID NO: 250799 - DNA, 331 bp, Unknown
  Bacterial polypeptide expressing nucleotide sequence isolated from the Sargasso Sea
ttggatataaaagaagaagaattaaaaacaattctaccactagatggtccttcaactgacgaggtgaaaaaatatttagaaaaatataacgatgaatatattgttattaaatgtggtggtagtgttttaattgatcaaaatctttttgatttttttattcaagatatttcaacattaaataaactaggatttactcctataattgttcatggaggtggaaaaagaataagcaataaacttaatgagattggtttagaaagtaaatttattaaaggattaagggtaactgacgatgaaaccattaaagttgtagagaaagtattaattaatt

SEQ ID NO: 250800 - DNA, 892 bp, Unknown
  Bacterial polypeptide expressing nucleotide sequence isolated from the Sargasso Sea
agtcaggcagtagcatcaattggccaaattgagttaatgaatctttttaaaaaaacttttaataagtcaaaaatcaatctttctcaaattttgttaacacttgaagatacagaaaaaagaagaagggctattaatgcaaaaaggacttttgagaatttatttagtcttggttttattccaatagtaaatgaaaatgatagtatagccacttctgagattaagtatggtgataatgacagactagcttctagggttgcacaaatatcaagtgcagattgtttaattttattatctgacgtaagtggtctttactctaaagatccaaaattagacaaaaaagctaaattaattcgtgaaattaaaaatattgaccaaaatgtagaaaagttagcaacaaataaatctggagaatttggatctggtggaatgaaaacgaagattgatgctgctaaaatttgtcaattctcaggatgccatatggcgattgctaatggcttaataagtagaccaattcaaaaaattttaactgaaaatatatgtacttggtttttgcctaaaatttcaaaattagatgcgagaaaaaagtggatcataagctcagtttctccaaagggaaaaataattattgatgaaggtgcattattagctttgaataatgggaaaagtttactagccgcggggattaaggatgttcaaggcagttttagcaaaggtgatcatatcaaaatcctaaacaataatatgaccgaatttgctagaggattaagcagtttctcttcggatgaaatcttgaaaattaaagggaagcactctaataaaataaatgatattttaggttatatttcaaaatcagaagttattcataaagatgatatggtattaatcaaatgag

SEQ ID NO: 250801 - DNA, 385 bp, Unknown
  Bacterial polypeptide expressing nucleotide sequence isolated from the Sargasso Sea
atggatttagagaaaattttacctactaatggtccatctaccaatgaagttaaaaaatatattgaaaagtatttagaagaagtaattgtaattaaatgtggtgggtcagtactacttgatgaaaatttatttaaacaatttatcgaagatatttcagtaatatataagctaggtttatcagcagtagttgttcatggaggtggaaaaaatataaaaaagaaacttgataagttaaatatacaatcaaagtttattgatggtttgagagttacaaatgaaataactattaaagttgtcgaagaagcacttttagaattaaattctcaaattataaatgatttaaaaaatcttcaaataaatgtggagtctgtagcaccggaataat

SEQ ID NO: 250802 - DNA, 850 bp, Unknown
  Bacterial polypeptide expressing nucleotide sequence isolated from the Sargasso Sea
aatggaccttgaaaagatactacctaaaaatgggccaccattaaatgaagtaactaaatacattaaaaaatacaaaaacgatttgatagtaattaaatatggtggaaacgttttaattgatagaaacgtatttaataactttataactgatcttagtgttttaaataaattgggtcttgcaactgttgttattcatggtggcggacctagaattaaaagagagctagaaaaatcaaatattgaatcaaaatttataagaggactaagagtaactgataaacatataattgatattgtcgaaactgttttaattgattttaatgatgacattgttaattctttgaaagacaaaggaacagaagcaatctctattcacacaaaaaataataatattataaaaactttaccagaagcagaggagctaggatttgtaggaataccaaacgaaattaataatgaacaaatattaaatataattaatcaaaataaaattcctataatttcacctttaggattaggtaaagaaaatcaaacatataatattaatggagatactgccgcaatggccatagcaaaatctttaaaatcaagaagacttttattgatgacaaatgtagatggggttctagataaaagtaaaaaattaatagaagaaatttcttcatctgagattatggaaatgattaaagatcaaactattacagagggcatgatacctaaaataaatgcttgtttagatgcagtgaataatggtgtaaaagcagttggtataatcaatggcactaagcaacattcatgtttatgggaaatattctctgacaagggttctgggaccctaataagacaatga

SEQ ID NO: 250803 - DNA, 1111 bp, Unknown
  Bacterial polypeptide expressing nucleotide sequence isolated from the Sargasso Sea
tatgtatcttaaagactcaaagactgtcgttataaaaattggatcatctttattgattaatgacaaaaaaattatcagagaaaaatggttgtcagaatttgcaaaagatattcaacatctacaaaaattaaaaaaaaatataattttggttagttcaggagcaattgctttaggatgtaaaaaattaaaattaagtaaaaaaaaattgaaacttgataaaagtcaggcagtagcatcaattggccaaattgagttaatgaatctttttaaaaaaacttttaataagtcaaaaatcaatctttctcaaattttgttaacacttgaagatacagaaaaaagaagaagggctattaatgcaaaaaggacttttgagaatttatttagtcttggttttattccaatagtaaatgaaaatgatagtatagccacttctgagattaagtatggtgataatgacagactagcttcaagagttgcacaaatatcaagtgcagattgtttaattttattatctgacgtaagtggtctttactctaaagatccaaaattagacaaaaaagctaaattaattcgtgaaattaaaaatattgaccaaaatatagaaaagtttgcaacaaataaatctggagaatttggatctggtggaatgaaaacgaagattgatgctgctaaaatttgtcaattctcaggatgccatatggcgattgctaatggcttaataagtagaccgattcaaaaaattttaaccgaaaatatatgcacttggtttttgcctaaaatttcaaaattagatgcgagaaaaaagtggatcataagctcagtttctccaaagggaaaaataattattgatgaaggtgcattattagctttgaatgatgggaaaagtttactagccgcagggattaaggatgttcaaggcagttttagcaaaggtgatcatatcaaaatcctaaacagtaatatgacggaatttgctagaggattaagcagtttctcttcggatgaaatcttgaaaattaaagggaggcactctaataaaataaatgatattttaggttatatttcaaaatcagaagttattcataaagatgatatggtattaatcaaatga

SEQ ID NO: 250804 - DNA, 506 bp, Unknown
  Bacterial polypeptide expressing nucleotide sequence isolated from the Sargasso Sea
tttgcctaaggatggtccacctatagaacaagttaaaaaatatatagaaaaatataaaaatgacttaatagttattaaatatggaggaaatgtttttattgatagaaacatttttaataactttatagaagatataagtattttaaataaactgggtctgtcaattgtcgtaattcatggtggaggacctagaataaaaagagagctagataaatcaaatatcgtatcaaagtttattagaggattacgagtgacagatgcaaaagttataaatattgttgaaaaagtactaattgagtttaatgaagatatagtttcttctttaaaagaaaaaggtgttaaagctatatctttaaatacaaagcaaaactgtgcgattgaagtgatacctgaagctaaagagctaggatttgttgggataccagacagaattgatgttgatactattaagaataaaattgaaaataaattaataccaaataatatctcctcttggactcggaagt

SEQ ID NO: 250805 - DNA, 385 bp, Unknown
  Bacterial polypeptide expressing nucleotide sequence isolated from the Sargasso Sea
aatggatttaaaaaagatacttcccaaagatggaccaccattagatgaggtttcaaaatacatagaaaaatataaaaatgatctcatagttataaaatatggaggaaatgtttttatagacaaagaaatctttgataattttataacagatattaacatactaaataaattaggtatttcttttacagttgttcatggagggggtcctagaataaaaagagaactagacaaatcaaatattcaatcaaaatttatcagaggtttaagggtcactgatgaaaagattataaacatagttgagtcagttttaattgattttaataatgatattgttgactctttaaagaagttggaactgatgctgtctcaaccacacaaaaaaaaa

SEQ ID NO: 250806 - DNA, 602 bp, Unknown
  Bacterial polypeptide expressing nucleotide sequence isolated from the Sargasso Sea
tgaaaaatctatagatattatagagatggttttaggcggtttaataaataaagatattgtaaatacaattacatctttaggaggtaaagccgttggtttatcaggtaaagatgggggattaataagagctaagaagattgaaggagaaggtgaatttaaaaatattgattttaaaaatactggtactgttaaaagtattgatcctggtgtagtaaatttattagacggctccacttttatacctgttattgctccaataggaattggggatgatggcaagacatacaatattaatgcagatatagttgcaggtaaaattgctcatatattacaagctagcaaatatttaatattgacaaatactcaagggattttagattccaatggaagtcttatccaatctataaacactgatggcgtaaagaaacttgtagaaaaaggaatcttgtcgcaagggatggtgccgaaagtcaactctgcattggaagcggtgacatcaggtgtagagcatgtacaaatcattgatggcacaatagatcattcagttattctcgaattattcacggacgaaggtattggaactatgattcgaaggaattaaa

SEQ ID NO: 250807 - DNA, 619 bp, Unknown
  Bacterial polypeptide expressing nucleotide sequence isolated from the Sargasso Sea
atggaaatagaaaaaatagtaccaaaagatggtccttccatcgaagaggttaaaaaatatataaataaatacaaaaatgaattaatagttattaaatatggaggaaacgtttttattgatagaaatatttttaacaattttatttcagatataagtattctaaataagttaggattatcaattataatagtccacggaggtggacctagaattaaaagagagttagaaaaatcaaatattcaatcaaaatttattagaggtttaagagttacggatgaaaaaattataaatatagttgaagatgtccttattgattttaacgaggacattgttaattctttaattgaaaaaggatcaaatgcagtctcgataaacacaaaaaaaaataatgttattgaaattattccagaagcagaggaacttggatttgttggaaagccaaataaaataaatacaaatattataaaagatataattaaattaaatacagttccaattatatcacctttaggaaaaggtaaaaataatcaaacttataatattaatggagataccgctgctggcgctatagctaaatctttgaaatgtagaagattattattaatgaccaatgttgaag

SEQ ID NO: 250808 - DNA, 705 bp, Unknown
  Bacterial polypeptide expressing nucleotide sequence isolated from the Sargasso Sea
aggacataagcatattaaataagttaggactttcaataatagtagtacatggtggaggcccaagaatagagagacaattaaaaaaagaaaaaattcaaactaagtttattaatggattaagggtaacagacgaaaaagtaataaagatagttgaagaagtattagttgatttcaataatgatattgtaaattcactaaataaaaaaggatctagtgcggtctcaataaataccaagaataaaaatataattggtgttgttccggataacaaagagctaggatttgttggtataccagacaaaattaatttagatattattgaagatgtgttaaaaaaaaatcaaattcctgtagttgcaccattaggcttagatataaatgatcacacttataatattaatggtgatactgcagcaagtgctatagcaaaaaaaataaagtcaagaagacttttgttaatgacaaatgttgagggagtttatgatgataggaaggacttaatatctgaaattaaaccttttgatatagaaaacttaataaaattaaaaatagttcaaggaggcatgatacctaaaataaaaaattgtatagacgctgttgaaaatggagtaagaggtgtagttattcttgatggtagaaaacctcattcaatcctttatgaaatattttctgacaaaggcgcgggaactttaataagaaaatgag

SEQ ID NO: 250809 - DNA, 682 bp, Unknown
  Bacterial polypeptide expressing nucleotide sequence isolated from the Sargasso Sea
aatgaaagtaattattgttcatggtggagggccgcaaattgaaagtcaattgagaaagaaaaaaattaagaatgaagaataccaaggtttaagggttacaacaaaacagattttaagtgttgtaaagacagttctagccaatgatctcaataaacttatttcaaatgaaattacaaaatatggcggtaaaccgaaacgttttgatggaataagacaaaaaatcatcaattcaaaaatagccatgaatgggaatattggttttgttggagagcccaaaaaaattaataaatcattaattcaagcagcgctgggtaaaaatcaaataccagtgattgcaccgttgggatatgatgcaaataaaaatacgctaaatattaatgctgatactgcggctgcttttgtcgcggagacagtcaaagccgaaaggcttctgcttttgacagatgtagaaggggtaatggataataacaaaaaattaattactgagctggatcgtaaaaaagcatttcaatacataaaaaaaggcactataaaaagtggtatgattcccaaaattaaggcgtgtttcaatacccttaaaaatggggcaaaaggagttgctttaatcgatggtcgtaaacaaaatgcagtggttatggagcttttaaccacgaaaggtgcaggaacactgataaagaaatga

SEQ ID NO: 250810 - DNA, 332 bp, Unknown
  Bacterial polypeptide expressing nucleotide sequence isolated from the Sargasso Sea
aatgaatgattctcaaagagtatcaatattaagcgaagcacttccatatatacaaagtttctcaggtagaaaaattgttatcaagtatggtggttctgttatggagaatgataatttaaaaactgctttttttagagacattgcacttttatcaaccgttggggtttgtccgatagtaattcatggaggtggaccagagattaataattggttaaagaaattagaaatatctcctaaattcgaaaatggattaagaattactgatcaaaaaacaatggacattgtcgagatggttctaatgggtagagttaacaaacaaattgtaaaaggga

SEQ ID NO: 250811 - DNA, 354 bp, Unknown
  Bacterial polypeptide expressing nucleotide sequence isolated from the Sargasso Sea
aatggaaatagaaaaaatagtaccaaaagatggtccttccatcgaagaggtgaataaatatatagataaatacaaaaatgaattaatagttattaaatatggaggaaacgtttttattgatagaaatatttttaacaattttatttcagatataagtattctaaataagttaggattatcaataataatagtccacggaggtggccctagaattaaaagagagttagaaaaatcaaatattcaatcaaaatttattagaggtttaagggttacggatgaaaaaattataaatatagttgaggatgttcttattgattttaatgaggacattgttaattctttaattaaaaaagg

SEQ ID NO: 250812 - DNA, 376 bp, Unknown
  Bacterial polypeptide expressing nucleotide sequence isolated from the Sargasso Sea
aatgaatgattctcaaagagtatcaatattaagcgaagcacttccatatatacaaagtttctcaggtagaaaaattgtaatcaagtatggtggttctgttatggaggataatgatttaaaaaatgctttttttagagacatagcacttttatcaacagtgggggtttgtccgatagtaattcatggagggggacccgagattaataattggttaaacaaattagaaatatctcctaaattcgaaaatggattaagaattactgatcaaaaaactatggaaattgtcgagatggttctaatgggtagggttaacaaacaaattgtaaaaggcattaataaaactggatcattagctgttgggaatatcaggtcttga

SEQ ID NO: 250813 - DNA, 672 bp, Unknown
  Bacterial polypeptide expressing nucleotide sequence isolated from the Sargasso Sea
tatggaaaagtttgttcaaagggcgaagactttaatagaggctttgccatatataaaaaaattcaactctaagactattgtttttaaatatggcggtagtatagggtcaaaagatttttcaaattttgcgagagatatcgtattgatgaagctagttggaataaatcctgtaattgttcatggcggcggtgctgaaatttcaaaagttttagagtctttgaaaatagaatctaattttatcgatggattaagagttacatgtcctaaaacaatggaagttgttgaaatggtactcggaggaaaggttaataaagagatagtttctaagattattatgaatggtggtaagtcagttggtatttcgggaaaagatggtggttttttgagagttaagaaagttaaagcttctaaaaagtcacaggatttaggaagagtaggggaaataaccaaagttgatataaaattaataacagaactccaagataatggttatatacctgtagttgcccctatagggtctgataataaaggtgtttcttacaatatcaatgctgatcatgcagcatcaaagattgcatcttctctaaaagctgaaaaattaattatattaacggatgtgcctggaatacaagatgaaaaaagaaagttaatttcatcaataacgaaaaaaac

SEQ ID NO: 250814 - DNA, 367 bp, Unknown
  Bacterial polypeptide expressing nucleotide sequence isolated from the Sargasso Sea
atcctctcctccactggatccgacgaatccggccagtgttacaacattaatgctgatacagcggcggcacgcgtagccatggctttgggtgcacggaggttagtctatctgtccgatgttcccggtttacttcgaaaccccgaagatccagacagtttactttccagccttcccgtcgatcaggtccaaccgcttaaggatgaaggagtcatcgccaaaggcatgcttcccaaagtcaatagtgcggttgatgcactgaaatccggcgtcaaccgggtgcacttcattgacggccggctcgctcacagcatcctgcttgaaatcttcaccgaccaaggaattggtacggaaatcgttcacgcctgaa

SEQ ID NO: 250815 - DNA, 465 bp, Unknown
  Bacterial polypeptide expressing nucleotide sequence isolated from the Sargasso Sea
atgaaacagattcaaatattgaaaaaattttagatattggttttgttggtcagcctaacaaagttaaaactgacataataaatgaacaaattaaaaagggatatattccagttattgcaccattaggaatagatgaaaatggtaataattataacattaatgcagatacagcagctggttttattgcaggagaaatgaaggcaagtaaattacttttattaactgatgttgcaggtatattggatgagaaaaaaaaattaatttcatctctagaattaaagcaagctagagaattacttgataaagattttattgaaggaggaatgaaaccaaaaatattaacttgtattaaagccatggaaaaaggtgttcaaaaagcaactattcttgatggtagaattcctcattcgcttattttagaactttttactgaacatggtataggtactcaaatatattcgtaat

SEQ ID NO: 250816 - DNA, 448 bp, Unknown
  Bacterial polypeptide expressing nucleotide sequence isolated from the Sargasso Sea
aatgtcaaaaaaaaattctctagatgagattagaaaattttggccggaaaaagctccggatataagtattgttcaaaaatacgtaaaaaaatatgaaaaagaaaaaattgtaattaaatacgggggaaacgttttaatagatagaaaagtatttaataattttatatctgatataaatgttttagataaattaggattttctgtaatagtagttcatggaggtgggccaagaataaaaagggaattagacaagaaaaaaattgtctctaaattcattaatggcttgagagttactgataagaacataatagatgtagtagaagaagttttaattgattttaataaagatatagtaagttctctaaaaaaattaggttctgaagcagctgcgtttcatactaaaacagaaaacataatagaggttaagcctgaaagagaggagctagga

SEQ ID NO: 250817 - DNA, 493 bp, Unknown
  Bacterial polypeptide expressing nucleotide sequence isolated from the Sargasso Sea
aatgtttgttcaatatcacctaaagaaaataatataattaatattgttcctgaaagtaaagaactgggatatgtcgggacaccgaaaaaaattaacaaagagaaaatattaaattttattaataacaaacaaattccaattgttgttcctttgggattgggagatgatggtagaatttataatattaatgcagatgttgccgcaggttcaattgcaaaagagatcgatgctagacgacttcttttgatgacagatgttgaaggagttcttgatgaaaatcaaaaacttttgtctgaaattaatctcgatagagccaacaaaatgttaaaaaataatactatttctggaggcatgataccaaaaataaacacttgtttagatgcaatatctaatggagttagaggtgttgttattgttgatgggagaaaaccacattcaatactatttgaattattttctgataagggcgcaggtacattaataagaaaatgaa

SEQ ID NO: 250818 - DNA, 397 bp, Unknown
  Bacterial polypeptide expressing nucleotide sequence isolated from the Sargasso Sea
aatggatttaaataaaatactcccagaaaaaggaccaccaattaatgaggtatcaaaatatatagagaaatacaaaaatgatctaattgtaatcaaatatggaggaaatgtatttatcgatagagaaatatttaataattttatttctgacataagtatattaaatagactaggtatttctattgcagtcgttcatggaggtggtccaagaataaaaagagagcttgataaatcaaatattcaatcaaaatttattagaggtcttagagttactgatgaaaaaattataaatatagttgagtctgtcttaattgatttcaataatgacattgtaaactctttaaacaaaatgagtacagaagcaacttcgatacacacaaaaaaaaataatatcatc

SEQ ID NO: 250819 - DNA, 718 bp, Unknown
  Bacterial polypeptide expressing nucleotide sequence isolated from the Sargasso Sea
tataattttattactgatataaatattttaaagaaattaggtatttcaattgtaattgttcatggcggtggtccaagaataaaaagagaattagagaaatcaaatattgagtcaagatttattagaggcttaagagttacagacgaaaaaattataaatatagttgaaaatgttcttattgattttaataatgatattgtaaattctttaatccagaaaggatctgaagctgtttcgatacactcaaaaaataataatataattgaagttgttccagaagtagaggaactaggttttgtaggaataccaaataaagtaaatagtgaatttttaataaacacaattaagaaaaataaaattccaattatttcaccattaggcttaggtaaagataatcaaacatataatataaatggagatactgcagcaggagcagttgcaaaatctttaaaatctagaagattgctcttaatgacaaatgttgagggagttttaaataaagaaaaaaaactaattgaggaaatttcttcattagaaattttacaaatgatcgaaaatcaaaccattactgaaggtatgatcccaaaaataaacacatgtttagatgcagtaaataatggggttacagctgttggaataattgatggtagaaagaaacattcaatattatttgaaattttttctgacaaaggatctgggacattaataagaaaatgaa

SEQ ID NO: 250820 - DNA, 315 bp, Unknown
  Bacterial polypeptide expressing nucleotide sequence isolated from the Sargasso Sea
aatggcaggactaaataataaaaaagcatcggtacttcttgaggcgttaccttatattaaaaagttttatggtcaaaccatcgttattaaatatggtggttcgattatggtagatccaaacttaaagaaaaaatttgcacaagatgttgttttgttaaaatatgtaggtataaaccccattgttgtacatggtggtggtaaggaaatatccaagtggatgtcaagaatgggtaagaaagctatgtttattgatggatttcgaatcactgattcagaaacacttgaaattactgaaatggttttatcgggtaaaat

SEQ ID NO: 250821 - DNA, 562 bp, Unknown
  Bacterial polypeptide expressing nucleotide sequence isolated from the Sargasso Sea
atgccaaataatttttctctaaatgagataaaaaagttttggcctgaaaaagctccagatataaatattgttcaaaaatatgtttcaaaatatcagaatgaaaaaattgtaattaaatacggaggtaatgttcttattgatagaaatgtttttaataattttatttctgatataaatgtgcttaataaattgggtctgtcaattatagtagtgcatgggggtgggcctagaattaaaagggaactggataaaaaaaatattgtttcaaaatttataaatggcttaagagttacagataaaagtataattgatatcgtagagaaagttttaatcgatttcaataaagacatagtaaactctttaaaaaaactaggatgtgaagctatttcatttcatactcagcaaaataatactattgatgttgagcctgaaaaggaagaattgggatttgttggcatcccaaaaaagataaatattaatttgattgaaagttctctaaatgaaaacaaaattccaattattgctcctctcggtaaagggaaaaataatcaaacatttaata

SEQ ID NO: 250822 - DNA, 666 bp, Unknown
  Bacterial polypeptide expressing nucleotide sequence isolated from the Sargasso Sea
aatgtcgaagaatatttctctagaggagataaaaaaattttggcctgacaaagctcctgatattaatacagtacaaaaatatataaaaaaatacaaaaaagaaaaaattgtaatcaagtatgggggaaatgttcttatagatagaaatgtcttcaataattttatatccgatataaatgttattaataaattgggtttatctattattgtagtacacggtggtggtccaaggatcaaaagagagctggataggaaaaagattgtatctaaatttattaatggcctaagagttactgataaaaatataattgatactgttgaagaggttttgattgattttaacaaagatattgcaatttctctaaagaaattaggctcagaagcagcttcttttcatactaagactgacaacgtgatagaagttgaaccagagagaaaagagcttggatttgttggaaggccaaataaaataaatgataatttaattcaaaatgctttaaatcaaaataaaattccaattatagctcctttaggtctgggtaaacaaaatcaaacatataatattaatggtgataccgcagcaagtgcaattgcaaaaaaactgaaatcaagaaggctgatactaatgacaaatgtagaaggtgtgtatgatgatcagaaaaaatt

SEQ ID NO: 250823 - DNA, 661 bp, Unknown
  Bacterial polypeptide expressing nucleotide sequence isolated from the Sargasso Sea
attgcccgaagatgggccacctttaagtgaagtttataaatatattgaaaaatataaaaatgacctaattgtaattaaatatggtggaaatgttttaattgacagaaatgtatttaacaattttataacagatctatatgtattaaataaattaggtctttcaacaatagttgtgcatggaggcggaccaagaataaaaagagaattagaaaaatccaatattcaatcaaaatttataagaggtttaagagttactgataaaaatataatcaatattgtagagtctgttttaattgactttaatgatgatattgtcgaaaatttagacaaaaaaggctctaaaggtgtttcaatacacacaagaaatagcaatattatagaggtaatacctgaagcaaaagagttaggctttgtagggataccaacatcggttaataataaaataatatttaatatcctagagcaaaataaagttccaattgtatctccattaggtttagataaaaataatcaaacctataatattaatggtgatacagctgctatggctatagctaaatctttaaaagctagaagattattactaatgacaaatgttgatggtgttcttaacaaagaaaaaaaattaatagaagaaatatcttccacagaaattttagaa

SEQ ID NO: 250824 - DNA, 808 bp, Unknown
  Bacterial polypeptide expressing nucleotide sequence isolated from the Sargasso Sea
aatgtttgaaataacaaaagaagagcttaaaaaaatattaccatcagaaggtccctcaatagaagaggtaaaaaaatacttagaaaaatataatgatgaatatattgttattaagtgtggcggcagtgttttagatgatcaaaatttatttaataattttattaatgatatttcaatactcaataaattgggtttaatcccaattataattcatggtggtggaaaaaggatttcaagcagattaaacgatgcaggaataaaaagtaattttatcaatggattaagagttacagataaaaaatctataaatattgtcgaagatgtattaaataatctaaataaagaaataatagagtccttaaaaaaaaataaatgcgacagtgagggattaaatagtaaaaataagaatattcttatggttgaacaaggtgacaaagatctaggctttgtgggaatacccaaagaagtaaaacagtcaataatagaacaggtagtaagcgaaaaaaaagtaccagtgatagctcccctgggcttaaataagatcaatcaagttttcaatataaatgctgatacagctgctggggctatagcaaaaaaactaaatgcaagaaggttaattataatgagtgatgttgaaggtgtactgaacaatgacaaaaaattaatacctgaaataaatactgaaaaaattaatgagttaataaacaaacaaataattagtggaggcatgattccaaaaattaaaaactctttagatgttgcgaataatggtgttaaaggtgtttgtataattgacggacgcttaaac

SEQ ID NO: 250825 - DNA, 778 bp, Unknown
  Bacterial polypeptide expressing nucleotide sequence isolated from the Sargasso Sea
aatggaaatagaaaaaatagtaccaaaagatggtccttccatcgacgaggttaaaaaatatatagataaatataaaaatgaattaatagtcattaaatatggaggaaatgtttttattgataggaatatttttaacaattttatttcagatataaatattctaaataagttaggattatcaataataatagttcacggaggtggtcctagaattaaaagagaattagaaaaatcaaatattcaatcaaaatttattagaggtttaagagttacagacgaaaaaattataaatattgttgaagatgtccttattgattttaacgaagatatagtgaattctttaattgaaaaaggttcaaatgcagtctcattaaacacaaaaaaaaataatgtgattgagattattccagaagcagaggaacttggttttgtgggaaaaccaaataaaataaatataaatattataaaggatataattaagttaaattcagttccaattatatcacctttaggattaggtaaaaataatcagacatttaatattaacggagatacagcagctggtgcaatagctaaatctttgaaatgtagaagattattattaatgaccaatgttgaaggtgtattagataaagaaaaaaagctcattgaggaaattacgtcatctgaaattttagaaatgataaataatgaaattataacagagggtatgattcctaaaattaatacatgcttagatgcagtaatgaatggtgttactggtgttggtattatttga

SEQ ID NO: 250826 - DNA, 547 bp, Unknown
  Bacterial polypeptide expressing nucleotide sequence isolated from the Sargasso Sea
aatggaaatagaaaaaatagtaccaaaagatggtcctgccatcaaagaggttaaaaaatacatagataaatacaaaaatgaattaatagttattaaatatggaggaaacgtttttattgatagaaatatttttaacaattttatttcagatataagtattctaaataagttaggattatcaataataatagtccatggaggtggccctagaattaaaagagagttagaaaaatcaaatattcaatcaaaatttattagaggtttaagggttacggatgaaaagattataaatatagttgaggatgtccttattgattttaacgaggacattgttaattctttaattgaaaaaggatcaaatgcagtctcgataaacacaaaaaaaaataatgttattgaagttattccagaagcagaggaacttggttttgttggaaagccaagcaaaatcaatataaatataataaaagatataataaaagtaagctcagttccaataatatcacctttaggtttaggtaaaaataatcaaacatttaaatattaa

SEQ ID NO: 250827 - DNA, 268 bp, Unknown
  Bacterial polypeptide expressing nucleotide sequence isolated from the Sargasso Sea
aatggatttaaaaaagatcttacctacagatgggccgccagtcgaagaagttttaaaatatgttgagaaatacaaaaatgaaataatagttataaagtatgggggcaatgtattcattgatagaaaaatttttgataattttattaaagatttaagtgtccttagcaagcttggtttacaagtggttgttgtgcacggaggaggaccaagaattaaaagagagttatctaaacaaaatattgagtctaagtttgtaagaggtcttaga

SEQ ID NO: 250828 - DNA, 512 bp, Unknown
  Bacterial polypeptide expressing nucleotide sequence isolated from the Sargasso Sea
catcacgggcaaggatggccagctcattcaggctcgcaaactagcgggtgactggaatcgtgaaggggtaaaggatattggccaggtcggcgaggtggccagcattgataccgatattctgaccatgctgatcggcagcgactacattcccgtgattgcgccggtggcgggcagtacggacggcaaaacctacaatatcaatgccgacctagtcgccggcaaattggccgaggtgctgcaggcagaaaagctgatgctcttgaccaatgtggcaggactcctggacgcggagggcaatattgtgaccgggcttaatacccaccaggtcgcgaagctgattgcgcaaggcgtcattcacggcggcatgttgcccaagattcaatgcgcgctcgaggctgtacaaggcggcgtgtccagcgcccacattatcgacggccgggtggctcacgcagcgctactggaaattttctcagacgagggtatcgggacacagatcagctctcggcgctgag

SEQ ID NO: 250829 - DNA, 577 bp, Unknown
  Bacterial polypeptide expressing nucleotide sequence isolated from the Sargasso Sea
aatgaatgattctcaaagagtatcaatattaagcgaagcacttccatatatacaaagtttctcaggtagaaaaattgttatcaagtatggtggttctgttatggagaatgataatttaaaaaatgctttttttagagacattgcacttttatcaaccgttggggtttgtccgatagtaattcatggaggtggaccagaaattaataattggttaaagaaattagaaatatctcctaaattcgaaaatggattaagaattactgatcaaaaaacaatggaaattgtcgagatggttctaatgggtagagttaacaagcaaattgtaaaagggattaataaaactggatccttagctgtgggaatatcaggtcttgatggcaacttaattcaatctagagaactaggagatggtagccatgggttagtgggagaggttacaaaaatcaatcctgaaatattagatcctcttatttctaaaggatatatcccaattatttctagcattggatcaaccttggagggtatttcccataacattaatgcagattttgttgctggagaaattgctgctgcataa

SEQ ID NO: 250830 - DNA, 385 bp, Unknown
  Bacterial polypeptide expressing nucleotide sequence isolated from the Sargasso Sea
atggaaatagaaaaaatagtaccaaaagatggtccttccattgaagaggttaaaaaatatatagataaatataaaaatgaattaatagttattaaatatggaggaaacatttttattgatagaaatatttttaacaattttatttcagatataagtattctaaataagttaggattatcaataataatagtccatggaggcggtcctagaattaaaagagaattagaaaaatcaaatattcaatcaaaatttattagaggtttaagggttacggatgaaaaaattattaatatagttgaagatgtccttattgattttaacgaagatattgtgaattctttaattgaaaaaggttcaaatgcagtctcattaaacacaaaaaaaa

SEQ ID NO: 250831 - DNA, 372 bp, Unknown
  Bacterial polypeptide expressing nucleotide sequence isolated from the Sargasso Sea
aagaaaaaaaaattccaatagtagtgcctatgggtaccagtgatgataataaaatctataatataaatgctgatatagctgctggcgcaattgctaaagaacttaactcaagaagattattgctgatgactgatgttgagggtgtccttgataaaaataaaaaattaataccagagattaattcttctattgcagaaaaaatgcttaaagacagtgatatttccggtggaatgattcccaaaattaatacttgtattgatgctgtaaataatggtgtgatgggcgtagttatagttgatggaagaaaacctcattcaatattatttgagttattttctgataaaggtgcaggtactttaatcagaaaatgaa

SEQ ID NO: 250832 - DNA, 733 bp, Unknown
  Bacterial polypeptide expressing nucleotide sequence isolated from the Sargasso Sea
caagagaagttttgctcaagatatagttttacttcaatcattaggtatgctcccagtgattgtccacggaggaggaccagaagtctctcatgcaatggaaaatttaggacaagaagtttcttttatagatggattaagagtaactagttccgaaaatttaaaagttgctgaaatggttctatcaggaacgataaataaagaaattattactaatcttaatacattcggaggcaaagctgtcggtgttagtggaaaagatggattattgattgaagcttataaaaaagaacacaatgggggtgtagatcttggttatgtgggagaaataaaaagcgtaaatccagaacttttacatgttttactttcaaaagattttcttcctgttgtatcacctattgggctaggtgaagatggaattacgtataacataaatgctgatacaattgcttcacatattgcagtttcaattaatgcctataagattatttttatgactgatgttgatggtgtaaaaaaagatggtgaactaatagagcaattttcttcagatttagcggaaagtatgattaaaaaaaatttaatcagtggaggaatgcgacctaaggtgaatgcctgtctttacagtgtcagaaatggagtccaatcagcacaaataattaatgggaccgttgaacattctgtaattgcagaattatttactgataaaggtattggaacaaaaattatcctttga

SEQ ID NO: 250833 - DNA, 660 bp, Unknown
  Bacterial polypeptide expressing nucleotide sequence isolated from the Sargasso Sea
tggtggcggcccgcaaattggggcgatgctggacaagctgaagatcgaatcaaattttatcgacgggctgcgggtcactgatgaagccaccatatcggttgttgagatggtgttggccggcggtatcaataaggcgcttgtcgccgctgtggcaagtgctggtggtcgggctgttggcgtttctggaaaggatggcaggctgatcaccgcccgcaagctgttagccaaggcaaaaaaaactggcagtgcgatccatgatgcggttgatctgggttttgtcggtgagccgtcggatattgatgtcactgtgcttgatgcgctgatgcaacatcacctgatcccggtggtcgcgccggtcggctgcggtaaggatggtaagacctataatatcaatgccgatgcggccgctggtgccattgcagccgcgctgcatgccacccgcatgctgatgctgactgatgttgccggggtgcttgataaaaatggcgatttgatcccggcattaaccgtcagcgaggccgaggcgctgatccgtgatggcactgtgaaaggcggcatgatcccaaaagtcgagacatgtattgatgccgtgcgtggtggcaccgaggcggcggtgatcatggatggccgcgccccccatgcgttgcttgttgagttgtt

SEQ ID NO: 250834 - DNA, 259 bp, Unknown
  Bacterial polypeptide expressing nucleotide sequence isolated from the Sargasso Sea
atggaacttgaaaagatattacctaaagatgggccaccaattaatgaagtaactaaatatattgaaaaatacaaaaatgatttaatagtaattaaatacggtggaaacgttttaattgatagaaatgtatttaataattttataactgatcttagtgttttaaataaattaggccttgcaactgttgtagtgcacggcggtggacctagaattaaaagagagttagaaaaatcaaatattcaatcaagatttataagag

SEQ ID NO: 250835 - DNA, 583 bp, Unknown
  Bacterial polypeptide expressing nucleotide sequence isolated from the Sargasso Sea
ctggaagtagaaaaatatattaaaaaatactctaaagaaaaaatagtaataaagtgtggaggcaaagttcttctagaccaatctcttttaaataacttaatcgaagatgttgtaattttaaaaaagttaggtttgactcccatacttgtacatggcggtggcctaggaattaaaaggaagttagatgagcaaaatatcaaaagtaaatttattatgggtttaagagttacagacgaaaaaatgattaatattgttgaaagtgttatgactgaatttaataaagaaattgttgatgctcttgaaaaaaaatcatgtaaagcaaaatctataacgataaaaaaaaataatataatttatgttgagcaagaaaataaagaactaggctatgtaggtaaaccaaaaagagtagatgcaaaactgcttaaagaaataattaaagatgactttgtacctataatagtaccaatgggtttagatgaaaaaggaatttcttataatatcaatgccgatactgctgcaggtgccatagcaagaagcatcaaatctagaagattaatgttattgacggatatcgatggtgttt

SEQ ID NO: 250836 - DNA, 268 bp, Unknown
  Bacterial polypeptide expressing nucleotide sequence isolated from the Sargasso Sea
aatgtttactaaggaaaataaaaatctgctcatcgaagctctttcatatattaaacgcttcaatggaaaaatagttgtagttaaatacgggggtgccgccatgattgaagagcatctcaaacaaaactttgcccaagatattgttcttcttcagtccctcggaatgcttcctgttattgtacatggaggtggaccggaagtttcaaaagcaatggaacaattaggacaggaagtcttatttatcgatggcctgagagttacaagctct

SEQ ID NO: 250837 - DNA, 559 bp, Unknown
  Bacterial polypeptide expressing nucleotide sequence isolated from the Sargasso Sea
cagtgctggcggacgggctgttggtgtgtcttgcaaggatggcggcttgattaacgcacgcaagttgatggcaacagcaaaacaggccggtagtgctactcaagatgcggttgatctgggatttgttggcgagccatcctcgattgatgtcactgtgctagatgcgttaatgcagcatcatctgatcccggttgttgccccagttggaagcggtgaggatggcaagacttataacattaatgctgataccgcggctggcgcgattgcggcggcgcttcatgccactagaatgctgatgctgaccgatgtcggcggggtgctaaacaaaaacggcacgctgatccctgcattgacggtcagcgaggctgaggccttgatcaaagacggcaccgtaaggggcggaatgattccgaaggttgaaacctgtgttgatgcggtacgcgggggcgctgaagcggccgtgatcatggatggccgcgcgccacatgcgttgcttgttgaattatttactgaacatggcatgggtactatgatcaaagctgatgaggagttatcataa

SEQ ID NO: 250838 - DNA, 632 bp, Unknown
  Bacterial polypeptide expressing nucleotide sequence isolated from the Sargasso Sea
cgacaaagaaacaatgaaagtggtagaaatggttcttggaggaagtgtaaacgctgaaattgtttcgagtatcaacagaagtggaggcagtgctgttggactcacgggtaaggatggacaactaattagagcgaaacctgtccaagttgatcactcatatttgcatgcagaaaatgacaaattatctgacatgagctgtgttggagaagtagagcaaatagataccgccattctaaatgagatggttgatagccactttataccaattatagcgccgataggtgtggactccgccggcaacacctataacatcaacgccgatttggtggctggtaaacttgcgtcagtgatggaagcagaaaagttaattcttcttaccaatacaaaagggcttctagataaaaaaggatcgctattgtcgggccttagcgtcaaggatgttaaagcgctagtcggtgacggaacaattactgaaggaatgctacccaaggtaaagtgcgctaccgatgcgattaattctggagttacgagtgcccatatccttgacggacgagtcccgcacgcagtgcttctagaaatttttaccagcgaaggagtgggcacgctgattagtaaccgtaataacaattagt

SEQ ID NO: 250839 - DNA, 436 bp, Unknown
  Bacterial polypeptide expressing nucleotide sequence isolated from the Sargasso Sea
agatatcggctttgtaggtgagcctataaaacttaataaagaattgatattagaacatattaaaaagggagatatacccgttattgctccattaggcattgatacggataactttacttataatattaatgcagatacagcagcaggttttattgctggtgaactaaaagcaagtaaattacttttattgacagatgttgctggaataatagataataaaaataatttaatctcatctttaagtttttcagaagctcaggacataataaaaaagaaatttatttcaggtggaatgaaaccaaaaatacaaacttgcatcaaagctatggaaaaaggagttaaaaaaacaacaatattagatggaagaatacctcattccgttatattagaattatttacagaacatggtatcggaactcaattaatatcaaattaa

SEQ ID NO: 250840 - DNA, 516 bp, Unknown
  Bacterial polypeptide expressing nucleotide sequence isolated from the Sargasso Sea
gatgtctggggaaaaaagtttagatcaaataaaaaaaatttggcctaaggaagcgcctgatattaagaatgtaccaaagtatatcgaaaaatataaagaagacttaatagttattaagtatggtggcaatgttttaatagatagaaatatatttaataattttatagaggatataagcgtaataaataaattgggcctttcaattatagttgtacatggaggaggtccaagaatagaaagggaacttaaaaaagaaaatattcaaacaaagtttataaatggtttaagagtaacagacaaaaaagtaattaaaattgtagaggaggtattgattgattttaataatgatattgtaagctctttaaagaaaaaaggttcaaaagcagtctcaataaattctaaaatcaataatgtaattaatgtaattccaaacaaacaagaactaggttttgttggtgtaccagataaaattaattcagatactcttaaggatatgattagtcaaaatcaaatacc

SEQ ID NO: 250841 - DNA, 280 bp, Unknown
  Bacterial polypeptide expressing nucleotide sequence isolated from the Sargasso Sea
atgtttactgaggaaaataaaaatctgctcatcgaagctctttcatatattaaacgcttcaatggaaaaatagttgtagttaaatacgggggtgccgccatgatcgaagagcatctcaaacaaaactttgcccaggatattgttcttcttcagtcccttggaatgcttcctgttattgtacatggaggtggaccggaagtttcaaaagcaatggaacaattaggacaggaagtctcatttatcgatggcctgagggttacaagctctgaaaatctcaaag

SEQ ID NO: 250842 - DNA, 307 bp, Unknown
  Bacterial polypeptide expressing nucleotide sequence isolated from the Sargasso Sea
atgatagatgattccctaagagtatcaatattaagcgaggcgcttccttacatacaaagtttttcaggtagaaaaattgttgttaagtatggcggttccattatggaagatgaaaaattaaaaaaagctttcttccgagatattgctcttttatcaagtgttggtgtatgcccagtagtcatacatgggggcggccccgaaatcaatcgttggctaaataaattagaaatatctccaaaatttaaaaatgggttaagagttaccgatgaaaaaacaatggaaatagttgagatggttcttatgggaa

SEQ ID NO: 250843 - DNA, 469 bp, Unknown
  Bacterial polypeptide expressing nucleotide sequence isolated from the Sargasso Sea
aatgggtatatcagttaaacaagcaagaaatatatcctctgttctgagcgaagggctgccatatattcaaaaatttaaaggtaaggtcatagttgttaagtatggtggtggggctatgtcagatcaaagcttaaaaagaaattttgcaaaagatattgccttaatgaatctggtaggcatgaagccagttatagtccatggaggaggtccacaaatagctaaagaattaaagaagtctgggataacttcaagttttatctcgggtcatagagttacggacaaacctacaatgtcagtagtaaaaaaaattctaggtacaaaaattaaccatgaaatagtcaatctaataaagcaatcaggaggagatgcaattagctttaatcacataaaacataaaattattaaagcttctcaacacgccggcaaggataagaataacttaggtttggtaggtaaagttgacagaatc

SEQ ID NO: 250844 - DNA, 729 bp, Unknown
  Bacterial polypeptide expressing nucleotide sequence isolated from the Sargasso Sea
tatatagaaaaatatagagatgaaataattacaataaagtatggtggtaacgttttcatagataggcaaatatttaataatttcattaatgacttatctatcttacaaaaattaggtttatcagttgttgttgtgcatgggggtgggccaagaattaaaagagaattagataaatcaaatataaattctaaatttgttagaggcttaagagttactaatgaaaaaattatagatattgtagaaaaagttcttattgaatttaatgaagacattgtttcctcattaaaacatattggaagcaatggtatttccataaatacaaaagaaaacaatgttctaaagattatacctgaatctaaagaattaggatttgttgggataccaaataatattaatgttaaaattattattgataaaataaagaagaatttgatacctataatatctccactaggattaggaccctataataagacttataacattaatggagatactgcagctggagcgatagctaaatcgcttaagtcaagaaggttactattgatgacgaatgtagagggtgttctcaacaaggataaaattttaatagaggaaatatcatcttctaaaatcatggaaatgatagacgataaaactataaccgaaggcatgataccaaaaattaatacatgtttagatgctgtcaacaacggggttgcagctgttgctataattgatggtagaaaa

SEQ ID NO: 250845 - DNA, 629 bp, Unknown
  Bacterial polypeptide expressing nucleotide sequence isolated from the Sargasso Sea
ggtcacggacaaagcgacagtagatgtcgtcgagatggttcttgctggatccatcaacaagcagatcgtcgccggcatctcggcggcgggcggctacgcggtgggcatttgcggcaaggacagcaacctgatccaagccgatcgactgaagcgggcgacccgcgatcccgactcgaacatcgaaaagttcttggacctaggcctggtcggcgacccgaagcagatcaacccgtatgttctggaggccttcaacgagggtggtatcacgccggtgatcgcgcccatcgggctgggccccgacggcgagaccttgaacatcaatgctgatacggtggccggcgctatcgcgcgggcggtgggcgcggcgcggctttacatgttgaccgacgttgccggggtgcttggcgttgacggcaacctgatttccgaaatgacgatggccgacgcgcaaggcctcatcgacgatggcatcattcagggcggcatgattccgaaaattgaaacctgtatggacgtggttaattccggcgtcgacgcggccaccatcatcgacggccgggtgccgcacgcgattctcatcgaactgttcaccaagggcggcgtcggcacccagatcgtgcgcagctgat

SEQ ID NO: 250846 - DNA, 847 bp, Unknown
  Bacterial polypeptide expressing nucleotide sequence isolated from the Sargasso Sea
gcaactgaagaagtaaacttaaaatcaattttaccttcaaatggcccttccatagacgaagttaaaaaatatattggaaaatatagtaatgaaaaaattgtaataaagtgcggcgggagtgttttaattaaccctaatctttttaatatttttatatctgacatagccattataaaaaaactaggattgactcctataatcgtacatggcggaggaaaaagaataaacaatcaattaaaagaattaaatattgaaagtacttttataaaaggcttaagagttacaaacaaagatacaataaaagtagttgaagatgttttaattaagttaaataaggaaattgtagatgctttaaatagtaaatcttgtgaagcaaaatcaataacaactaaagaaaataatataattttagttaaatcagaaaaaggagaacttggttatgttggggagccaactgaaatcaaaacaaattttttagataaaataatcaattctaaacaagtacctgttatagctccgatgggtctaaaaaataaccaaacatttaatattaacgctgacactgctgcaggagcaatagctaaagggctaagatcaagaagacttttgctcatgactgatatagaaggtgtgatggataataataacaaattaatttcagaaattactactgatttagcaaaaaaaatgattaacaaagaagttataaaaggtggaatgttaccaaaaattaatacttgtattgacgccgttaacaatggagtcagaggtgtagttataattgatggcagaaaagctcattctattctttttgaattattttctgataaaggttcaggaacattaa

SEQ ID NO: 250847 - DNA, 712 bp, Unknown
  Bacterial polypeptide expressing nucleotide sequence isolated from the Sargasso Sea
atgtttactgaagaaaataaaaatctacttatcgaagcactttcatacattaagcgtttcaaaggaaaaatagtcgtagtaaaatatggaggtgcagcaatgattgaaaagcatctaaaacagaacttcgcccaggatattgttctgcttcaatcgctcgggatgcttccagtcattgtccatggtggtggtccagaggtttcaaaagcaatggaacaattaggacaagaagtttctttcatcgacggattgaggattacaagctcagaaaatattaaagtgaccgaaatggtgctttccggaactgttaacaaagaaataatagcacatattaacactttcggaggaaaagcagttggcgtaagcggtaaggatgggaatttaattcaagcagacaaaaaatcacatgacggtggcattgatttaggattcgttggtgaaataaaaaaagtaaatccagaattgctgatggttttgcttaagcaggggtttctacctgttgtttctccaattggtcttggaaaagacggcgttagctacaacataaatgctgatacgatcgcctccagaattgcagtctccctagaagcatataaaataatctttatgacagatgttgacggaattctcgaaaaaaataaattatgtactcaacttacctcaaatgaagtagaaaaaatgattgagaaaaaggttattaccggaggaatgt

SEQ ID NO: 250848 - DNA, 376 bp, Unknown
  Bacterial polypeptide expressing nucleotide sequence isolated from the Sargasso Sea
cgtcccagtcatttctagcgtagccaactcacctgatggcagatcacacaatatcaatgctgatactgttgctggggagcttgctgcagcactaggtgccgaaaaattaatccttctaacagatactcctggtattttaagaaatgaaaatgatccttcttccttaatagaaaagatacgtttatcggaagctagagaattaattgataaggggatagttaaagcaggtatgaaaccaaaagttgaatgttgtatacgttctcttgcccaaggtgttaatgctgcccatatcattgacggaaggactcctcactcacttcttttagaagttttcactgatgcaggtattggaacaatggttatgggtagaggttaa

SEQ ID NO: 250849 - DNA, 495 bp, Unknown
  Bacterial polypeptide expressing nucleotide sequence isolated from the Sargasso Sea
aatggctgacacatcatcgccagtagttataaaagtgggtggcgctctgctggaaaatcctcagattgccggccagttattggctgagatcaaaacactgcaaagccagcgtccggtaatattagtccatggcggtggcccgctggtggaaaccttactggccgctatgcaacttaccagtaccaagattgacggtttacgggtaacccccgatgaacaaatgccgtttgtttgtggcgcactggctggcagtgccaataaaagtttatgcggtctggctattggtgccggtatcacaccggtgggactatctttgctggacggtggcataaccgattgtaaagtactgaatgaaaagtacggcgcagtgggcgtaccggctgcgggcaatccagagttgctgaatcagctgctcagcgccggctttctgcccgttataagctcgattggcagcaacgccaaggggcgtctgctcaatgtcaatgccgatcaggc

SEQ ID NO: 250850 - DNA, 748 bp, Unknown
  Bacterial polypeptide expressing nucleotide sequence isolated from the Sargasso Sea
cggaacgttttaattgatagaaatgtatttaataattttataactgatcttagtgttttaaataaattaggccttgcaactgtggtagttcatggtggtggacctagaattaaaagaaagcttgaaaaatctaatattaaatcaaaatttattagaggactaagagtaactgataaaaatataattaatattgtcgaatctgttttgattgattttaatgatgatattgttagttccttaaaagacaaaaaaacagaagcaatctctattcatacaaaaaataataatgttataaaaacaataccagaagcagaagagctaggatttgtaggaataccaaatgagattaataatgagcaaatattagatataattaatcaaaataaaattcctataatttcaccattaggattaggtaaagaaaatcaaacatataatattaatggagatactgctgcaatggccatagcaaaatctttaaaatcaagaagacttttgttgatgacaaatgtagatggtgttttagataaaaataaaaaactaatagaggaaatttcctcatctgagattatggaaatgattaaagatgaaactattacggcgggcatgatacctaaaataaatgcgtgcttagatgcagtaaataatggtgtaacagcagctggtataattaatggtacaaagccacattcatgtttatgggaaatattctctgataagggttctgggaccctaataagacaatgaa

SEQ ID NO: 250851 - DNA, 529 bp, Unknown
  Bacterial polypeptide expressing nucleotide sequence isolated from the Sargasso Sea
gcaagaattaataaaactggggggaagggcaataagtctttcaggtcataaaaaaaatttaataaaagcaaaaaaaattcaaaaaaaaataaatcaagatttcggctttgttggaattccatataaaatcgaaaaaaaaattattaatcaacaaattaaaaaaaatttaattcctgtaatttccccattaggaatagatagtaaaagaaatatatataatattaatgcagatacagcggcaggttctattgcaagtgaattaaaagctaataaattacttttattaactgatgttcccggtattttagatcaaaataaaaaattaatttcatcgctttctataattgatgcaaaaaaaattattaataaaaaattcattagtggaggtatgaggcctaaaattcaaacctgcattgatgcaattgataaaggagtcaagcaagctacaattttggatggccgaattcctcattctttaatacttgaattgtttacagagcatggcataggaacacagatttattcttga

SEQ ID NO: 250852 - DNA, 436 bp, Unknown
  Bacterial polypeptide expressing nucleotide sequence isolated from the Sargasso Sea
gatataggttttgtaggtgaacctcaaagactcaaaaaagaaataatattagatcacattaataaaggtaacattccagttatagcccctcttggaattgataataatcaatttacatataatattaatgcagatacagcagctggttttatagcaggtgaattaaaagcaagtaagttactgttattaactgatgtagctggtattttagataataaagaaaaacttatctcttctttaagtgttgaggaggcaaaagaaattattgaaaaagaatttatttctggaggaatgaagccaaaaattcaaacttgtattgatgccatgaaaaaaggagtaaaaaaatctacaatattagatggaagaatacctcattccgttatactagagttatttactgaacacggaatcggaactcaactggtatcagaataaa

SEQ ID NO: 250853 - DNA, 574 bp, Unknown
  Bacterial polypeptide expressing nucleotide sequence isolated from the Sargasso Sea
aatgcctttatctccctctcttgaggaaattaaaaaattttggcctgaaaaagcacctgacattaatattgttaaaaaatatgtgtcgaaatatgaaaatgaaaaaatcgtaattaaatatgggggaaatgtattaatagacagaaaagtatttaataatttcatttcagatataaatgttttaaataagttaggtctctctattattgttgttcacggtggtggacctagaataaaaagagaattagaaaaaaaaaagattgtatctaagtttattaatggtttaagagtaacagataaaaatattataaatacagtagaagaagttttaatagattttaacaacgatatagtagactctcttcaaaagttgggttcagatgctgcttcttttcacacaaaggacaaaaatttaatagaggttactccagaaagaaaagaattaggtttcgtgggaattccagaaaagataaatataaatgtaatagaggaggctttaagtaaaaatagaattccaattattgcccctttaggtttagataagaataatcaaacgtacaaatataaatggtga

SEQ ID NO: 250854 - DNA, 235 bp, Unknown
  Bacterial polypeptide expressing nucleotide sequence isolated from the Sargasso Sea
gttgttactaaaagaagaagatttaaaaaaaatattacctgaagatgggcctccaaaggaggaagtatctaagtatattgaaaaatataaaaacgatttaatagttattaaatatggaggaaatgtttttattgatagaaatatatttaataattttatagaagatattaccatattaaataaattaggaatctcgattgtagttgttcatgggggtgggccaagaataaaaaga

SEQ ID NO: 250855 - DNA, 745 bp, Unknown
  Bacterial polypeptide expressing nucleotide sequence isolated from the Sargasso Sea
atgttcttatcgacagaaatattttttaataattttattcaagatataagcataataaataagttaggtctttcggttgttattgttcatggtggagggccaagaatagaaagggagttaaaaaaaaataatatccaaagcaggtttattaatggcttaagggtcacagacaaagacgtgataaatattgtcgaaaaggtacttatcgattttaataatgatattgtcgactcactcaataaaaaaggatctaaagcggtatcaataaatacgaaaataaataatataattaatgtaatccctgatcaacctgaactgggttttgtgggagttccccaggaaataaatatcaaaataattaaaaatattataaatcaaaatcaaataccgattgttgctcccctgggtttagacaaagataaacaaccttataatattaatggggatactgccgctagtgctattgcaaagaaattaaaatctagaagacttttattaatgacaaatgttgaaggtgtttatgatgatagaaaaactttaatctcggaaataaaacccttcgatatggaaaatttgattaaactgaaaatcattcaagggggcatgataccaaaaataaaaaattgtattgatgcagttgaaaatggtgtaagaggtgttgttattctcgacggaagaaagcccagatcaatattaaaagaaatcttttcagatcagggtgccggcactcttattagaaaatgaa

SEQ ID NO: 250856 - DNA, 303 bp, Unknown
  Bacterial polypeptide expressing nucleotide sequence isolated from the Sargasso Sea
atgtcgtcgccggcaagatggccgagatcctgaaagccgaaaagctggtcatgatgaccaacattccgggcgtgatggacaagcagggcaacctgctgaccgacctgtcggcgcgcgagatcgacgaattgtttgccgacgggacgatctcgggcggcatgctgccgaagatttcgtcggcactggatgccgccaagagcggcgtgaactcggtgcacatcgtcgatggccgcatcgagcactcgctgctgctggaaatcctgaccgaacaggcgttcggcacgatgatccgctcgcactgat

SEQ ID NO: 250857 - DNA, 346 bp, Unknown
  Bacterial polypeptide expressing nucleotide sequence isolated from the Sargasso Sea
aaactctaagccaacttctgatgatcaaattttgaatgttaatgcagatagtgttgctggagaagtggcaaaatcaattaaagcaaataaattgatatttataactgacgtaccaggagttctggatatatccaaaagagtaatacccaaattactttcttcacaagttaaaaaattagtgaaaaactcttttatttcaggaggtatgattcctaaattagaagcttgtttgaattcagtagctaatgttagtgaggctcacatcattgatggtagaaaaacaggagcgttgttttctgcggtaaccaaatcaggatttaataaaggcacagtaatagtcaaatag

SEQ ID NO: 250858 - DNA, 406 bp, Unknown
  Bacterial polypeptide expressing nucleotide sequence isolated from the Sargasso Sea
atgtctgaggaaaatagtttagaagaaataaaaaagttttggcctaaagatgcacctgatgtaacgaatgttccaaaatatgtcaaaaaatataaaaaagatttaatagttattaaatatggcggcaatgttctaattgatagaaatatttttaataattttattcaagacataagtacattaaataagttaggtctttcaattattgttgttcatggtggtggtccgagaattgaaagaaaattaaaaaaagaaaaaattcagaccaaatttataaatggtttaagagttactgataaaaatgtaattaatattgttgaagatgttttgattgattttaataaagacattgtaaactctttaaagaaaaagggatcacaagcaatatcaataaatactaaaatca

SEQ ID NO: 250859 - DNA, 511 bp, Unknown
  Bacterial polypeptide expressing nucleotide sequence isolated from the Sargasso Sea
aatgccaaataatttttctctagatgagataaaaaagttttggcctgaaaaagctccagatgtaaatattgttcaaaaatatgtttcaaaatatcagaatgagaaaattgtaattaaatacggaggtaatgttcttattgatagaaatgtttttaataattttatttctgacataaatgtgcttaataaattaggtctatcaattatagtggtgcatgggggcgggccaagaattaaaagagagctggataaaaaaaatattatttcaaaatttataaatggcttgagggttacagataaaagtataataaatattgttgagaaagttttaattgatttcaataaagatatagtaaactctttgaaaaaacttgggtgtgaagctatttcttttcatacacaaataaataatgctattgaggtagagcctgaaaaggaagaattaggttttgttggtgtcccgaaaaagataaatattaatttgattgaaaatattctaaatgaaaacaaa

SEQ ID NO: 250860 - DNA, 364 bp, Unknown
  Bacterial polypeptide expressing nucleotide sequence isolated from the Sargasso Sea
gatggatgattccctaagagtatcaatattaagcgaggcacttccatacatacaaagtttttcaggtagaaaaattgttgttaagtatggaggttctattatggaagatgaaaaattaaaaaaagctttcttcagagatattgctcttttatcaagtgttggtgtatgcccagtcgttatacatggcggcggtcccgaaatcaatcgttggctaaacaaattagaaatatcgccaaaatttgaaaatgggttaagagttaccgatgagaaaacaatggaaatagttgagatggtgcttatgggaagagtaaataaacagattgtaagggggatcaataaaacaggctcattagctgtgggtatt

SEQ ID NO: 250861 - DNA, 754 bp, Unknown
  Bacterial polypeptide expressing nucleotide sequence isolated from the Sargasso Sea
aatggatttaaaaaaagtactacctcttaatggaccgccaataaaagaagtttcaaaatatattgaaaaatataaaaatgatttaattgttataaaatatggaggaaatgtttttattgatagaaatatatttaataattttataacagatataagtatattaaacaaactgggtctctcaatagtagttgtccatggagggggaccaagaatagaaagagaattagaaaaatctaatattcaatcaaaatttttaagaggactcagggttactactgaacaaattattaatatagttgagaatgttcttattgattttaataatgatattgttagatcattaaaaaaaattggctcagaagcagtttcaataaacacaaaagaaaataatattattgaagttgtgccagaagcaaaagagttaggatacgttggaataccaaataaaattaataatgatattttacttaatataataaatgaaaataaaattccaattgtttcacctttgggattacaaaaaaatcaaacttttaatataaatggtgatgtggctgctggcaaaatagcagaatcacttaaatgtagaagattacttttaatgacaaatgtggaaggtgttttagataaaaataaaaagttaatagaggaaatatcttcaactgaaattttagaaatgattaaaaatgaaaccatcacttcaggaatgataccgaaaattagcacatgtttaaatgcaattaataatggggtt

SEQ ID NO: 250862 - DNA, 793 bp, Unknown
  Bacterial polypeptide expressing nucleotide sequence isolated from the Sargasso Sea
aatgtttactgaggaaaataaaaatctgctcatcgaagctctttcatatattaaacgcttcaatggaaaaatagttgtagttaaatacggaggtgccgccatgatcgaagagcatctcaaacaaaactttgcacaggatattgttcttcttcagtccctcggaatgcttcctgttattgtacatggaggtggaccggaagtttcaaaagcaatggaacaattaggacaggaggtctcatttatcgatggcctgagagttacaagttctgaaaatcttaaagtaacagaaatggtactatccggaacaatcaacaaagaaatcatagctcatattaatactttcggaggtaaagcagtaggcgtaagcggtaaagacggtaatttaattgaggcagacaaaaaatcccatgaaggcggtattgatctgggatttgttggtaaaataaaaaaggtaaatcccgaattgctgatggttttgctaaaacagggttttctccctgttgtctcaccaattggtctcagcaaagacggggttacctacaacattaatgctgatacaaccgcctcccgaattgcagtctctctgggagcatacaaaataatcttcatgacagatgttgatggagtcctcgaagacgggaatttatgtgcgcagcttacttcaagtgaactgaaaaaaatgatagagaaaaaagttattaccggtggaatgtcgcccaaagttgactcatgcctttattgtgttaaaaatggggttgaatccgctcaaataataaatgggactgagcctcac

SEQ ID NO: 250863 - DNA, 304 bp, Unknown
  Bacterial polypeptide expressing nucleotide sequence isolated from the Sargasso Sea
gatgcaatctattaaagaagaagatttaaagaaaatattacctgaaaacggtccaccaataaatgaaatatttaaatacattgagaagtataaaaatgatttgattgttattaaatatgggggaaatgtttttactgatataaatatatttaacaactttatagaagatatcgctatattaaataaattaggaatctcgattatagttgttcacggaggtggaccaaaaataaaaagagaattagataagtcaaatattcaaactaaatttatcaagggtttaagagtaacagatgaaaaagtt

SEQ ID NO: 250864 - DNA, 337 bp, Unknown
  Bacterial polypeptide expressing nucleotide sequence isolated from the Sargasso Sea
aatgaatgattctcaaagagtatcaatattaagcgaagcacttccatatatacaaagtttctcaggtagaaaaattgttatcaagtatggcggttctgttatggagaatgataatttaaaaaatgctttttttagagacatagcacttttatcaaccgttggggtttgtccgatagtaattcatggaggcggacccgagattaataattggttaaagaaattagaaatatctcctaaattcgaaaatggattaagaattactgatcaaaaaacaatggaaattgttgagatggttctaatgggtagagttaacaaacaaattgtaaaaggcattaat

SEQ ID NO: 250865 - DNA, 333 bp, Unknown
  Bacterial polypeptide expressing nucleotide sequence isolated from the Sargasso Sea
aatcaaaaaataatgattactggaatattaatgcagatgtcgttgctggagaggtggcgcagtctctaaaggctgaaaaattaatactattaaccgatgttaaaggcattggagattcagaaaataaacttatctctaagatttctctaaaaagaggtcaaaaagttctcaaggaaaaattcatcaaaggtggaatgactcctaaattaactgctgcgttagaagctaagaaaaatggtgttaaatcttgccacattatagatggaagagttcctcatgcagttctattagaagtacttactgaggaaggtgtaggaactatgataagctaat

SEQ ID NO: 250866 - DNA, 617 bp, Unknown
  Bacterial polypeptide expressing nucleotide sequence isolated from the Sargasso Sea
aatggaaatagaaaaaatagtaccaaaagatggtccttccatcgacgaggttaagaaatatatagataaatataaaaatgaattaatagtcattaaatatggaggaaatgtttttattgatagaaatatttttaacaattttatttcagatataagtattctaaataaattaggattatcaataataatagtccatggaggcggtcctagaattaaaagagaattagaaaaatcaaatattcattcaaaatttattagaggtttgagagttacagacgaaaaaattataaatattgttgaagaagtccttattgattttaatgaagatattgtgaattctttaattgtaaaaggttcaaaagcaatctcattaaacacaaaaaaaaataatgttattgaggttattccagaagcagaggagcttggttttgttggaaaaccaaataaaataaatacaaatattataaaagatataattaaggtaaattcagttccaattatatcacctttaggattaggtaaaaataatcaaacatttaatattaatggagatacagctgctggtgctatagctaaatctttgaaatgtagaagattattattaatgaccaatgttg

SEQ ID NO: 250867 - DNA, 200 bp, Unknown
  Bacterial polypeptide expressing nucleotide sequence isolated from the Sargasso Sea
ccaaatcaagatatccgaagttaagaaattaattggtaatggaactatctctggaggaatgataccaaaagttgagacttgtgttgaagctgtaaaaaatggcgtcaaagcagcagtcatacttgatggaagacttgaacattctatattattagaaatttttactgaacatggtgttggtacactaatcactaattaaa

SEQ ID NO: 250868 - DNA, 236 bp, Unknown
  Bacterial polypeptide expressing nucleotide sequence isolated from the Sargasso Sea
aatgatcaaagatagtaaatcggcagaatcgctagcaaaaatccttagtgaggctctgccttatatacagaagttttctgggaagatagtggtcattaagtacggtggaagcgctatgaaagaaaacaaattaaggcaaaattttgcgagagatattgctttgatgaggcaaattggaatatttcctgttcttattcatggaggcggaccacaaattgaagaaaatttgaagaaga

SEQ ID NO: 250869 - DNA, 568 bp, Unknown
  Bacterial polypeptide expressing nucleotide sequence isolated from the Sargasso Sea
ctggtggaaactcttccctatataaccagatttgcagggagggttgtagtcgtaaaatttggtggcaatgccatggaaagcgatgagctagctgatcaattcgcccaagacattgttttaatgcactcagtgggtatcaaacctgtagtcgttcatggaggtgggccccaaattggtgaccttgtagaaaggctcggtttaagcacagaatttaaagacggtcagcgagtaaccgataaggaaactttagaaatagcacagatggttcttattggaaaagttaacacagacattgtgtcgagtatcaatgttcattcgccaatagctgtagggctatcaggtggtgactcaaatttaattgaagcaacccaaagagactcatcgcttggctatgtgggtgacgttgtaaaaataaatccgacaatattggaatgcctcatggaagaaaatcttattcccgtgatatctactataggaacagattcaaaagggcaggcttacaacataaattcagacacagtggcagctgctttagccggttctctcaaagccgaaagattgctctatc

SEQ ID NO: 250870 - DNA, 349 bp, Unknown
  Bacterial polypeptide expressing nucleotide sequence isolated from the Sargasso Sea
tgtccctttaggattgggtgatgacggtagaatttataatattaatgcagatgttgctgcaggttcaatcgcaaaagagatcgatgcaagacgtcttcttttgatgacagatgttgaaggagttcttgatcaaaatcaaaaacttatatctgaaattaatctcaataaagccaatgaaatgttaaaaaataatattatttctggaggcatgataccaaaaataaatacttgtttagatgcaatatctaatggtgttagaggtgttgttattgtagatgggagaaaaccacattcaatactatttgagttattttctgataagggtgcaggaacattaataagaaaatga

SEQ ID NO: 250871 - DNA, 661 bp, Unknown
  Bacterial polypeptide expressing nucleotide sequence isolated from the Sargasso Sea
atggcagcaattgaagaagtaaacttagaaaaaattttaccttcaaatggtccttccatcaaagaagttaaaaaatatctagaaaaatatagtgatgaaaaaattgtaataaaatgtggaggaagtgttttaattgatcctaatctttttaatctttttatatccgatataaccatcatgaaaaaactaggattgaccccaacaattgtacatggtgggggaaaaagaattaacataaagttaaaggaattaaatatcgaaagtacttttataaaaggtttaagagttaccaacaaagatactataaaagtagtcgagaatgttttggttgactttaataaagaaattgtaaatgcgttaaaagacaagtcctgtgatgctaaatcaattactactaaagagtataatataattacagttaaatccgaaagaaatgaacttggttttgttggtgaaccaaccgaaattaaagtaaatgttttaaatgaaataattcaagctaaagaaattccagttatagctccaattggactaaaagataatcaagcatttaatattaatgctgatacagcagctggagctatagctaaaaaactcaagtcaaggaggcttttactaatgacagatatagaaggagtcattgataataataataaattaa

SEQ ID NO: 250872 - DNA, 679 bp, Unknown
  Bacterial polypeptide expressing nucleotide sequence isolated from the Sargasso Sea
cctcaaatttggagaaacattaaaggcgcaaggcgtggaaagtaagttccataatggcttaagaattacagatcgagatacaataaaagttgttgaacgagtattgtatgaaataatcaatactgacattgtgaagaagattaaaaagcatggaggcaaatcgataagcctgtctggaaataaagactcaataattttcgcaaaaaaattgacaaatatttacaaaaccgactcaaatattgaaaaaataatggatcttggttttgtgggtgaaccaaaaaaaattaacccttctacaattattgatcactgcaaaaaaggttctatacccgtaataacacccctaggtaaggacaataatactacctataatataaacgccgatacagcagcaggcgctattgcaggtgccttaaaagcaagtagactattgatgctaacagatattgcaggtgttattgatgaaaagaaagaactaatattggagctcaaagtcgagaaagcagaaaaacttatttcagatggcgtaatagtgggagggatgatacccaaaatcaaaacttgcattgatgctctaaaaaatggggtggacaaagcagttattttggatggacgagtagaaaatgctataatacttgaattgttcactgaagagggaattggtacactcataaattaa

SEQ ID NO: 250873 - DNA, 319 bp, Unknown
  Bacterial polypeptide expressing nucleotide sequence isolated from the Sargasso Sea
aatgaatgattctcaaagagtatcaatattaagcgaagcacttccatatatacaaagtttctcaggtagaaaaattgttataaaatatggcggttctgttatggagaacgataatttaaaaaatgcattttttagagacatagcacttttatcaaccgttggtgtttgtccgatagtaattcatggcggtggacctgagattaataattggttaaagaaattagaaatatctcctaaattcgaaaatggattaagaattactgatcaaaaaacaatggaaattgttgagatggttctaatgggtagagttaacaaacaa

SEQ ID NO: 250874 - DNA, 337 bp, Unknown
  Bacterial polypeptide expressing nucleotide sequence isolated from the Sargasso Sea
atggatttaaaaaaaatacttcccaaaaatggaccaccaataaatgaggtttcgaaatacatagaaaaatataaaaatgatcttatcgtaataaaatatggaggaaatgtttttatagacagaaaaatctttgataattttataacagatataagcatactgaataaattagacatttcttttgcggttgttcatggaggcggtcctagaattaaaagagaactagacaaatcaaatattcaatcaaaatttatcagaggtttaagggtgacagatgaaaaaattataaaaattgttgagtcagttttaattgattttaataatgatattgttgact

SEQ ID NO: 250875 - DNA, 608 bp, Unknown
  Bacterial polypeptide expressing nucleotide sequence isolated from the Sargasso Sea
aatgtcaaaaaatatttctctagatgagataaaaaaattttggcctgagaaagctccagatataaatattgttcagaaatatgtcaaaaaatatgaaaaagaaaaaatagtaattaaatatggaggaaacgttcttatcgatagaaatgtttttaataactttatatctgatataaatgttcttaataaattaggtttctctattatagttgttcatggaggcgggccaagaattaaaagagagctagataagaaaaaaattgtatcaaaatttattaatggattaagagttactgataaaaacataattgatactgtagaggaagtattgattaattttaataaagatatagtaagctctctcaaaaaactaggctctgaagcagcttcatttcacaccaaaaccgaaaatgtaattgaagttgagcctgaaagaaaggaacttggtttcgttggaataccaggtaacataaatgataatttgatacaaaaagcactaaatgaaaataagatcccaattatagctcccttaggtttgggaaaaataatcaaacttataatattaatggtgatactgcagcaagtgctattgcaaaaaaacttaaatc

SEQ ID NO: 250876 - DNA, 439 bp, Unknown
  Bacterial polypeptide expressing nucleotide sequence isolated from the Sargasso Sea
gatggacaagcagactctggtaatcaagttgggtggcgcactgatcgaaaacgacgaggcgctgaccgccctgttcgccaccctcaagacctttctggacgagcagcacagacccctggtgctggtgcacggcggcggctgcctggtggatgacctgctcaaggggctgggtctcacctccaccaagaagaacggtctgcgggtgaccccgttcgagcagatccccttcatcgccggcgcgctggccggtaccgccaacaagatgatgatggccaaggccatcgccaccgacatcccggcggtggggctctgcctggcggacggcggtctgtgccaggtgacccagctcgacccggcgctcggcgccgtgggtgactgccagccgggcaacccggcgctggtggcggggatcctcgctcaggcttcctgccggtggtga

SEQ ID NO: 250877 - DNA, 656 bp, Unknown
  Bacterial polypeptide expressing nucleotide sequence isolated from the Sargasso Sea
tgaagtctcaaaagccatggagcaactcgggcagcaagtgcattttgttgaagggctgagggttaccagtgcagagaatcttaaagtcactgaaatggtcctttccggaaccatcaacaaggagattatcgctcacctaaacacctgtggcggaaaatccgttggattgagtggaaaagatggacacctgattgaggcttccaaaaaagatggtggagaaggagtggatctggggtatgtgggagagattgactctaccaatccggaactgcttagggttctcctgaaagaaggatacattccagtcatatcacccatcgggttgggaaaggatggcaccagttacaacatcaatgccgataccgcagcttcccacattgcggtctcgcttcaggcgatgaaattgatcttcatgaccgatgttgagggaattcttgaaaaaggagaattatgtgcagaattgaagcatgatcaggcattaagcatgatcgattcaggagtcatcgagggaggaatgaagccgaaggttcaggcagcattgaatgccgtcacccagggagtggaatcggcccagatcatactcggcacagacccgcactcggtgattacagagttatttactgatcaggggataggaacgaaaatcgttgcctgat

SEQ ID NO: 250878 - DNA, 251 bp, Unknown
  Bacterial polypeptide expressing nucleotide sequence isolated from the Sargasso Sea
aatgtttactgaagaaaataaaaatctgctcatcgaagcactttcatatatcaaacgcttcaatggtaaaatagtggtagttaaatatggaggtgccgctatgattgaaaagcatctcaaacaaaactttgcacaagatattgttctgcttcaatcactaggaatgcttccagtcattgtgcatggtggaggaccagaagtttcaaaagcaatggaacaattgggacaggaagtctcgttcatcgacggtc

SEQ ID NO: 250879 - DNA, 286 bp, Unknown
  Bacterial polypeptide expressing nucleotide sequence isolated from the Sargasso Sea
aatgaaaatctccaagaaaaatacaaaacatgttatcgatcaagcctcgatactgtcaaaagcgcttcccttcatgcaaagatattctggtaaaaatatcacaattaaatttggtggtgcagtgatgggtgataaaaatctttccacaagttttgccaaagatattgtgttgttgaaacaagtaggaatcaatcctgtggtagttcacggaggtggaccaaaaattaagaaaatgctggataaattaaatgtgaaaactaatttcataaacgggttaagagtaaca

SEQ ID NO: 250880 - DNA, 318 bp, Unknown
  Bacterial polypeptide expressing nucleotide sequence isolated from the Sargasso Sea
aatgactactcattctgttttagtgcttaaagttggcggcgcgttactacaaaccgaaaccggaatggccaatttaatgtcagcaattaaagacatgacagcagctggccaaaaaattgtcctagtgcatggtggtggttgcttggttgacgagcaactaaccgccaacggtaaagacatcattaaacttgatggcttgcgtgttaccccagccgatcaaattggcattgttgtgggtgcattagctggtacctcaaacaagattttacaagccgcagcagcaaaagccggtgtggtaagtgttggcatgagcctagg

SEQ ID NO: 250881 - DNA, 252 bp, Unknown
  Bacterial polypeptide expressing nucleotide sequence isolated from the Sargasso Sea
catgaaatttgattttttatcagaaagcgataaagcttattatattcataaagcatctactcttgtagaagcaataccttatattagagaacatgctggccaaaaatttgtaattaaatatggggggcatgcaatgggagatactgaattatctcatagtttttcaaaagatatatgcttaatgaaagaaattggtattcttccaattatagttcatggtggtggacccacaataggcaaggtggtaaaaaa

SEQ ID NO: 250882 - DNA, 698 bp, Unknown
  Bacterial polypeptide expressing nucleotide sequence isolated from the Sargasso Sea
aatggaaatagaaaaaatagtaccaaaagatggtccttccatcgaagaggtgaagaaatatatagataaatacaaaaatgaattaatagttattaaatatggaggaaacgtttttattgatagaaatatttttaacaattttatttcagatataagtattctaaataagttaggattatcaataataatagtccacggaggcggtcctagaattaaaagagagttagaaaaatcaaatattcaatccaaatttattagaggtttaagagttacggatgaaaaaattataaatatagttgaggatgttcttattgattttaacgacgacattgttaattctttaattgaaaaaggatcaaatgcagtctcgataaacacaaaaaaaaataatgttattgaagttattccagaagcagaggaacttggatttgttggaaagccaaataaaataaatacaaatattataaaagatataattaaattaaaatcagttccgataatatctcctttaggtttaggtaaaaataatcaaacatttaatattaatggagacatagcggctggtgctatagctaaatctttgaaatgtagaagactattattaatgaccaatgtcgaaggtgtacttaatgaagaaaaaaaattaattgaagaaattacatcatcagaaatcttagagatgataaataataaaatta

SEQ ID NO: 250883 - DNA, 787 bp, Unknown
  Bacterial polypeptide expressing nucleotide sequence isolated from the Sargasso Sea
tattaataaatataaaaacgatttgattgtcataaaatatggagggaatgtatttattgatagagatatatttaataattttatcgaagatataagtgttttaaataaattaggtctttcaattgtggtaattcacgggggtggacctagaatcaaaagagaattagataaatcaaatatccagtcaaattttattagaggtttaagagttacagatgaaaaaattattaatatagttgaagatgtattgatagattttaataatgatattgtagactcattaaaaaaaaaaaatacaaaaggtatttcaattcatacaaaaaagaataatgttatagaaattattccagagtctgaagaacttggatttgttggaaagccaaataaaattgataaagaaataatttataatatattagaaaaaaaagaagtccctattatctctcctttgggcttaaaagataatcaaacctataatataaatggagatacggcagctggtgctatagccaaatctttaggggcaagaagattaattttaatgacaaacatagaaggagtattagataaagaaaaaaaacttatagaagaagttacatcttctgaaatcttacaaatgattgaagataagactataactggaggcatgatacctaaaattaatacatgccttgatgctgtaaataatggagttacaggtgtagtgatagttgatggaagaaagccacattcaattttatttgaaatattttctgataaaggtgcgggaactttaattagaaaatga

SEQ ID NO: 250884 - DNA, 207 bp, Unknown
  Bacterial polypeptide expressing nucleotide sequence isolated from the Sargasso Sea
cttggatgaaataaaaaaattttggccagagaaagcccctgacgttaacattgtcaaaaaatatgtttctaaatatgaaaaagagagaatagtaataaagtatggagggaacgtattaatagacagaaacgtatttaacaatttcatatcagatattaatgtgctcaacaaactgggtctttctatagtcgttgtacatgggggcgg

SEQ ID NO: 250885 - DNA, 314 bp, Unknown
  Bacterial polypeptide expressing nucleotide sequence isolated from the Sargasso Sea
cttgaatattaatgcagatgtcgttgccggagaggtggcgcagtcactaaaggctgaaaaattaattctattaacagatgttaaaggcattggagattcagaaaataaacttatctctaagatttctctaaaaaaaggtcaaaaagttctcaaagagaaatttatcaaagggggaatgactcctaaattaactgctgcgttagaagctaaaaaaagtggtgttaaatcttgtcacattatagacggaagagttcctcatgcagttctattagaagtacttactgaggaaggtgtaggaactatgataagctaat

SEQ ID NO: 250886 - DNA, 386 bp, Unknown
  Bacterial polypeptide expressing nucleotide sequence isolated from the Sargasso Sea
tttaaatataattagagagaaaaaaattccggtcataattcctatgggaattggaattgataaaaaaatttataatataaatgccgatgtagcggcaggagcaattgcgaaagagctaaattctagaagattattattaatgacagatgtagaaggtgttctcgataaaaataaaaaattaattttagaaataaattctgaagttgcaaaaaaaatgcttgaagaagaaattatttcaggtggaatgataccaaaaatcaatacatgtatagatgctgtagaaaatggtgtaacaggcgttgtaattgttgatggaagaaaacctcattcaatcttattcgaattattttctgataaaggttcaggtactcttattcgaaaataat

SEQ ID NO: 250887 - DNA, 628 bp, Unknown
  Bacterial polypeptide expressing nucleotide sequence isolated from the Sargasso Sea
gctgtggccaaaagatggaccctctagtcaagaagtagaaaaatacattaaaaaatattcaaaagaaaaaatagtaatcaaatgtggaggcaaagtccttttagatcaatctcttttgaataatttaatcgaagatatagtgattttgaaaaagttaggtttaactcctatacttgttcatggtggtgggctaggaattaaaaaaaaactcgatgagcaaaatatcaaaagtaaatttattatgggtctaagagttacagatgaaaaaatgattaatattgttgaaagtgttatgaccgaatttaataaagaaattgttaatgctcttgaaaaaaaatcgtgcaaagcaaagtctttaacgataaaaaaaaacaatataatttatgttgaacaagaaaatgaagaattaggttttgttggtaaaccaaaaagagtggacgcaaaacttcttaaagaaataattaaagaagattttattcctgttatagtccccatgggtttagacgagaaaggaattgcttacaatattaatgcagatactgctgctggtgccatagcaagaagtattaaatctagaagattgatgctattaacagatatagatggcgttctagataataatgaaaaa

SEQ ID NO: 250888 - DNA, 549 bp, Unknown
  Bacterial polypeptide expressing nucleotide sequence isolated from the Sargasso Sea
aatgtcaaaagaagtttctcttgaagagattaagaagttttggcctgaaaaagctcctgatgttaatatagttcaaaaatatatttcaaaatacgaaaaagaaaaaattgtgattaaatacggaggaaatgtattaatagatagaaacgtatttaataattttatatctgatataaatgttttaaacaaactaggtctttcaataatagtcgttcacggaggtggtccaaggattaaaagagaattggaaaaaaaaaaaattgtttctaaattcattaacggattgagagtaaccgataaaaatattattaatattgtagaagaagtgttgattgactttaataaagacatagcaacctctcttgaaaaattaggaaccaaatcagcctcatttcataccaaaactgataatataattgaggttgagccagaaaaagaagagttaggattcgtaggaattcccaaaaaaataaatgtaaacttaattcaggacgctattgataataatagaataccaataattgccccgcttggtttagacaaaaataa

SEQ ID NO: 250889 - DNA, 325 bp, Unknown
  Bacterial polypeptide expressing nucleotide sequence isolated from the Sargasso Sea
ggtagaacttacaatataaatgcagatgttgttgcaggttcaattgcaaaagagatcaatgctagacgacttcttttgatgacagatgttgaaggagttcttgatcaaaatcaaaaacttatatctgaaattaatctcaataaagccaatgaaatgctaaaaaataatattatttctggaggcatgataccaaaaataaacacttgtttagatgcaatatctaatggtgttagaggtgtagttattgttgatggaagaaaaccacattcaatactatttgaattattttctgacaaaggtgcgggaacattaattagaaaatgaa

SEQ ID NO: 250890 - DNA, 412 bp, Unknown
  Bacterial polypeptide expressing nucleotide sequence isolated from the Sargasso Sea
aatgtctataaaaaataatgtgagtgaaagctctcagcttttacagagatattggccatcaggaaaaaaatattacaacagtacagatcaatttattaaaagatataaaaatcgaattattgttattaaatacgggggttatgctcttacaaaacctcatttagtaaaatcatttgcaaaaaatattgctcttctgaaccaactgggaatgaaagttattattgttcatggtggagggccgcaaattgaaaatcaattgagaaagaaaaaaattaagaatgaagaataccaaggtttaagggttacgacaaaacagattttaagtgttgttaagacagttctagcaagtgatctaaataaacttatttcaaatgaaattacaaaatatggcagtaaaccgaaacgtttgagg

SEQ ID NO: 250891 - DNA, 754 bp, Unknown
  Bacterial polypeptide expressing nucleotide sequence isolated from the Sargasso Sea
aatggaaatagaaaaaatagtaccaaaagatggtccttccatcgaagaggtgaagaaatatatagataaatacaaaaatgaattaatagttattaaatatggaggaaacgtttttattgatagaaatatttttaacaattttatttcagatataagtattctaaataagttaggattatcaataataatagtccacggaggcggtcctagaattaaaagagagttagaaaaatcaaatattcaatccaaatttattagaggtttaagagttacggatgaaaaaattataaatatagttgaggatgttcttattgattttaacgacgacattgttaattctttaattgaaaaaggatcaaatgcagtctcgataaacacaaaaaaaaataatgttattgaagttattccagaagcagaggaacttggatttgttggaaagccaaataaaataaatacaaatattataaaagatataattaaattaaaatcagttccgataatatctcctttaggtttaggtaaaaataatcaaacatttaatattaatggagacatagcggctggtgctatagctaaatctttgaaatgtagaagactattattaatgaccaatgtcgaaggtgtacttaatgaagaaaaaaaattaattgaagaaattacatcatcagaaatcttagagatgataaataataaaattataactgaaggtatgattcccaaaatcaacacatgtttagatgcagtaatgaacgga

SEQ ID NO: 250892 - DNA, 298 bp, Unknown
  Bacterial polypeptide expressing nucleotide sequence isolated from the Sargasso Sea
ttgcctgaagatgggccacctttaagtgaagttaataaatatattgaaaaatataaaaatgacttaattgtaattaaatatggtggaaatgttttaattgacagaagcgtatttaacaattttataacagatctatatgttttaaataaattaggtctttcaataatagttgtgcatggtggcgggccaagaataaaaagagaattagaaaaatctaatattcaatcaaaatttataagaggtttaagagttactgataaaaatataatcaatattgtagaatctgttttaattgact

SEQ ID NO: 250893 - DNA, 605 bp, Unknown
  Bacterial polypeptide expressing nucleotide sequence isolated from the Sargasso Sea
ggatggagaaacgctcgctgcagttcgtgaggttcttgttcagcaagttgggaaaaaaatagttgaggcaataattacttatggaggatcagctacggcactaactggagagacggaaggccttctcactgtgaagccaaaaggggatcgttttggtttcgtaggagaagtctcaaaagtaaatcccgacattatttcacacttacatggacaaggagaagtgccagttatttcaactatcggacaagacgctgatgggcaagcatataatatcaacgcagatacagctgctggagccctcgcaggagctcttgtagcagaaaaggcgatttatctatccgatgttcctggtttgctaattgataaggatgatccgacgtcgataatatcttcaatccaatataaggaattgtatgaaatgtttgaaaccggagtgatttctgatgggatgatccccaaagtggaatcatgtatccatgctctggaaaaaggtgcaaaagcggctcatttacttgatggccgcgtttcacatgttctacttttggagattttcacagatagtggtatcggaacgatgatcaagaaaggggatgaagatgtctagc

SEQ ID NO: 250894 - DNA, 319 bp, Unknown
  Bacterial polypeptide expressing nucleotide sequence isolated from the Sargasso Sea
aggagctttctttgatataaacgcagacgttgttgctggaaaagtagctgaaagcttaaaggcggaaaaactgatacttcttacggatataaaaggaatcatagaaaaaaataaagtaatttcgaggatttctgcttacaaaggaaggcagttaataaataataatactatccaaggaggcatgaccccaaaggtaacagcagctttagaagcaaaaaaaaatggggtaagatcatgtcatataattgatggcagattacctcatgccgtcttactggaagttcttacagctgaaggggttggaactatgataagctag

SEQ ID NO: 250895 - DNA, 445 bp, Unknown
  Bacterial polypeptide expressing nucleotide sequence isolated from the Sargasso Sea
atgtctcaaaacatttctcttgaagaaatcaaaaagttttggcctgaagatgcccctgatatccataatgttcaaaaatatgtttcaaaatatataaaagaaaaaattgtcattaaatacggtggaaacgtattgattgatagaaatgtatttaataattttattttagatattagtattcttaataaattaggtctatcagtaattattgttcatggtggcggtccaagaataaaaagagaattagataaaaaaaagattgagtccaaatttatcgatggattaagagtaactgataaaaatattattaatgttgttgaagaagttcttattgatttcaatgatgatatagttcaaaatttaaaaaagttaggttcaaatgctgtatcttttcatacaaaaaataataatataattgaggttaaacctgaaagaaaagagctag

SEQ ID NO: 250896 - DNA, 405 bp, Unknown
  Bacterial polypeptide expressing nucleotide sequence isolated from the Sargasso Sea
aatggacttaaaaaaaattcttcctgaaaacggacctccaataaacgaggttaataaatatatagaaaaatataaaaatgacttgatagtcattaaatatggaggaaatgttttaattgatagaaatatctttgataattttattactgatttaagtattttaaataaattaggtctttcagttattgtggttcatggtgggggcccaagaatcaagagagagttagataaatctaatattcaatcgaaatttataagggggctaagagtcactgatgaaaaaattataaacattgttgagtcagtcttaatagattttaacaatgatattgttagctctttggacaaaaaaaatacagaagcagtttccattcacacaaaaaaagataatattattgaagtcgt

SEQ ID NO: 250897 - DNA, 272 bp, Unknown
  Bacterial polypeptide expressing nucleotide sequence isolated from the Sargasso Sea
aatggaactagaaaaaattttacctaaagatggtcctcctattgagggagttcacaaatacgttcagaaatataaaaatgaattaatagtaataaaatatggcggtaacgtatttattgacagagaaatttttaataattttatatcagatttaaaaatattaaacgagttaggactttctgttatagtagtacacggtggaggtcctagaataaaaagagaattagataaatcaaacatcaaatcaaattttataagaggtttaagggtaa

SEQ ID NO: 250898 - DNA, 191 bp, Unknown
  Bacterial polypeptide expressing nucleotide sequence isolated from the Sargasso Sea
agaggcgcgacaactgatcgaggacggcgtggtcgcaggaggcatgacgcccaaaaccgaatgttgcatccgcgccctggctcagggcgtgtcagccgcccacatcattgatggtcgggttccccatgccctcctgctcgaagtcttcaccgacgccggcatcggcaccatggtggtgggacgcggctaga

SEQ ID NO: 250899 - DNA, 286 bp, Unknown
  Bacterial polypeptide expressing nucleotide sequence isolated from the Sargasso Sea
aatggatatagaaaatatacttccaaaaaatggtcctccaacaaatgaagttaataaatatattgataaatataaaaatgacttaattgttattaaatatggcggaaatgttttaattgatagaaatatttttgataattttataaccgacctaagtattttaaataaattaggcctttcagttattgttgttcatggaggaggggccagaataaaaagagaattagataaatctaatataaaatcaaaattcataagaggtttacgtgtcactgatgaaaaataa

SEQ ID NO: 250900 - DNA, 341 bp, Unknown
  Bacterial polypeptide expressing nucleotide sequence isolated from the Sargasso Sea
gggaaaagggcaagataataaaaaatataatataaatgctgatactgctgctggtgctatagcaaaaaaaattaatgcaagaagactacttttaatgacagatgtagaaggagttttggataaagataaaaaacttatttcagaaattaaatctgacactgctaacaaaatgatggatgaaaagataattactggtggaatgatacctaaaatcaatacatgtattgattctgtaaataatggtgttacaggtgtggcaattgttgacggaagaaaacctcattcaattttatttgaaatattttctgacaaaggtgcaggaacattaattagaaaatgaa

SEQ ID NO: 250901 - DNA, 487 bp, Unknown
  Bacterial polypeptide expressing nucleotide sequence isolated from the Sargasso Sea
atgaaatttgattttttatcagagagtgatcaggcttattttattcataaagcctcaacattagttgaagcgttgccatttattagagagcatagtggagatactattgtcatcaaatatggaggccatgcaatgggcgatcctaaacttgctaaaagttttgcaagagatattggcttaatgaaagaagttggaatatttccagtagttattcatgggggaggaccacaaattgcagagaatttaaaaactaaaaatataacgtctaaatttgttgatggcttacgagttactgatgctgaaacagtaaaagttgttgaagatgtattagccaacgagataaatagtgaaatagtgaaagcaataaatgactctggtggaaaagcagttggcttaagtggaaataaaaataatctcctaagtgcaacaaaattaaaagtagaagtcaaagactcagattcaaataagaaaaaattattgatatagg

SEQ ID NO: 250902 - DNA, 736 bp, Unknown
  Bacterial polypeptide expressing nucleotide sequence isolated from the Sargasso Sea
atgtcaactattgttgaatcaaatttaaaatcaattttaccttcaaatggtccttctacaaatgaagtaaaaaaatatttagataaatataacaatgaatatattgttattaaatgtggaggtagcgttttaattgatccaattctctttgatatttttattagtgatgttgctgtcttaaaaaaacttgggttatctcctattattgtacatggaggaggaaagagaattaataataaacttaataaattaaatatcaaaagtaattttatcaaaggtctaagagttactgacaatgaaacaataaatatagttgaagatgttctaatagaattcaataaagaaattgtagattctttaaaaagtaaaacttgtgaagcaagaagaattacatcaaaagaatataatataattaatgttaaacctgaaagtaaagaattaggttttgttggagttccaactgaaattaaaactaatgttttgaaggaaattataaaaaataatgaagtgccagttatagccccattgggtttaaatgataaaaatcaaattttcaacataaatgccgatactgcggctggtgctattgcaaaaaaacttaaagctagaagattgttaattataagtgatgttgaaggcgtactagatcaagataaaaaattaatcacagaaattaatagtgctaaagcaaaaaaattaattgaccaagaaattatatcaggagggatgataccaa

SEQ ID NO: 250903 - DNA, 700 bp, Unknown
  Bacterial polypeptide expressing nucleotide sequence isolated from the Sargasso Sea
tatttcaacattaaataaactaggatttactactataattattcatggaggtggaaaaagaataagcaataaacttaatgagataggttcagaaagtaaatttataaaaggattaagggtaactgatgatgaaactattaaagttgtagaggaagtattaattgattttaataaggaaattattaatgctcttgatcagcaaaattgtaaaagtcagagtattaattccaaggaaaataatattttaacagttgtccaagaaaatgaagaacttggttttgtgggctctcctataaatgtagatcaatcaataatagataaaattatagcagataaaaaagtccctattattgcacctttaggtttagataaaaatgatcaaacttataatgtcaacgcagacactgcagctggctatattgctaaaaaaattaacgcaagaaggttaattatattaagtgacgtagaaggtgttttggataaaaatgaaaatctaattccagaaattaattcagagtctataaaaaacttaatcggtaatgaaacaatttctgggggcatgatcccaaaaataaataattgcttagatgttgctagtaacggagtaaaaggagttgttataatagatggaaggaaaagtcattctcttttatttgaacttttatcagatgaaggatctggaactttaattagacaatga

SEQ ID NO: 250904 - DNA, 155 bp, Unknown
  Bacterial polypeptide expressing nucleotide sequence isolated from the Sargasso Sea
aatgaaatttgattttttatctgaaagtgatcaagcttattttattcataaagcttcaacgcttgtagaagctcttccttatattagacagcatagtggggaaattattgtcattaaatatggtggtcatgcgatgggtgatccaaaattgtcaa

SEQ ID NO: 250905 - DNA, 745 bp, Unknown
  Bacterial polypeptide expressing nucleotide sequence isolated from the Sargasso Sea
aatgtcaaagattacagaggaagaaattcaaaaaatcttaccagaaaaaggtccttcttttgaagaagtaaaaaaatatttagataaatacaataaagagtacatagtcattaaatgtggaggtagtgttttaattgatccaaaattatttaaaatttttattgaggatgttgctgttttaaaaaaacttggttttaatcccatagttatccacggtggtggaaaaaggataaacagcaaactagatgaacttaacattaaaagtgattttattaatggactgagagtaacagataaaaatactattaatatagttgagaatgtattgattgaatttaataaggaaattgtcaatgctttaaaggatcaatcatgtgaaacaagaagaattacttcaaaggaatacaatataataactgtaaaacctgaaagtgaaagattaggttttgttggtactcccactcatattaaaactcatgttttagaagaaattattaaagttaatgaagtacctgttgttgcaccactagggttagatgaaaacaatcaaacttttaatatcaatgcagatacagccgcaggtgctatagcaaaaaaacttaaagctagaagattaataataatgagtgatattgaaggtgttatggataatgataataaattaatatctgaaatcaatactgataaagttaataaattaataaaaaatgaaataatatttggtggaatgataccaaaaatttaa

SEQ ID NO: 250906 - DNA, 700 bp, Unknown
  Bacterial polypeptide expressing nucleotide sequence isolated from the Sargasso Sea
gttggatattaaagaagaagaattaaaaacaattctaccactcgatggtccttcaactgaagaagtaaaaaaatatttagaaaaatataacgatgaatatattgttattaaatgtggtggaagcgttttaattgatcaaaatctttttgatatttttattaaagatatttcaacactaaataaactaggatttactcctattattgttcatgggggtggaaaaagaataagcaataaacttaatgagataggtttagaaagtaaatttataaaaggattaagggtaaccgacaaagaaattattaaagttgtagaagaagtattaattgattttaataaagaaattatcaatgcactagatcagcaaaattgcgaaagtcagagtattaattccaaggaaaataatattttaacagttgtacaagaaaatgaagagcttggttttgtgggctctcctacaaatgtagatcaatcaataatagataaaattatagcagataaaaaagtgcctattattgcccccttaggtttagatgaaaatgatcaaacttataacgtcaatgcagatactgcagctggctttattgctaaaaaaattaacgcaagaaggttaattatattgagtgacgtagaaggtgttttggataataataaaaatctaattccggaaattaattcaatctctataaaaaacttaatc

SEQ ID NO: 250907 - DNA, 714 bp, Unknown
  Bacterial polypeptide expressing nucleotide sequence isolated from the Sargasso Sea
attgagaaaaattcttcctaaaaatggtccaaatattgacgaggtttcaaagtatataaaaaaatatagagatgaaataattacgataaagtatggtggtaacgttttcatagataggcaaatatttaataatttcattaatgacttatatatcttacaaaaattaggtttatcagttgttgttgtgcatgggggtggaccaagaattaaaagagaattagataaatcaaatataaattctaaatttgttagaggcttaagagttactgatgaaaaaattatagatattgtagaaaaagttcttattgaatttaatgaagacattgtttcctcattaaaacatattggaagcaatggtatttccataaatacaaaagaaaacaatgttctaaaaattatacctgaatctaaagaattaggatttgttggaataccaaataatattaatattgaaattattattgataaaataaagaagaatttgatacctataatatctcctctaggattaggacccgataataagacttataacattaatggagatactgcagctggagcgatagctaaatcgcttaaatcaagaaggttactattgatgacgaatgtagagggtgttctcaacaaggataaaattttaatagaggaaatatcatcttctaaaatcatggagatgatagacgataaaactataaccgaaggcatgataccaaa

SEQ ID NO: 250908 - DNA, 481 bp, Unknown
  Bacterial polypeptide expressing nucleotide sequence isolated from the Sargasso Sea
tatgtttaatgaggagaataaaaatttaatcttggaggctttgtcttacataaagcgtttcaaaggtaaaatagtagtaataaaatatgggggttcagccatgatcgaagataaactcaaaaggagttttgcacaagacatagttttacttcaatcattaggaatgctaccagtaattgtgcatggtggaggaccagaagtctcttatgcaatggaaaaattaggacaggaagtttcttttatagatggattgagagtaactagctctgaaaatctaaaagttgccgaaatggttctatcaggaactataaataaagaaattattactaatcttaatacatttggaggcaaagctgtaggtgttagcggaaaagatggattattgatagaagcttataaaaaagaacacgatggtggtgtagatcttggatatgttggagaaataaaaagtgttaatcctgagcttttgaatgttttactt

SEQ ID NO: 250909 - DNA, 787 bp, Unknown
  Bacterial polypeptide expressing nucleotide sequence isolated from the Sargasso Sea
aagaaatataacaatggatatattgtcattaaatgtggtggtagcgttttaattgatcaaaatatttttgatatttttattcaagatatttcaacgctaaataaactgggatttactcctataattgttcatggaggtggaaaaagaataaacaataaacttaatgagataggtttagaaagtaaatttataaaaggattaagggtaacagacaaagaaactattaaagttgtagaagaagtattaattgattttaataaagaaattatcaatgctctagataagcaaaattgtaaaagtcagagtattaattccaaggaaaataatattttaactgttatccaagaaaatgaagagctcggttttgtgggctctcctataaatgtagatcaatcaataatagataaaattgtagcagataaaaaagtcccaattattgcacctttaggtttggataaaaatgatcaaacttataacgtcaatgcagacaccgcagctggctatatttctaaaaaaattaacgcaagaaggttaattatattaagtgacgtagagggtgttttggataacaataaaaatctaattccagagattaattcagagtctataaaaaacttaatcgataatgaaacaattactggcggcatgatcccaaaaataaataattgcttagatgttgctagtaacggggtaaaaggagttgttataataaatggaagaaaaaatcactctgttctatttgaacttttatcagatgaaggatctggaactttaattagacaatgaa

SEQ ID NO: 250910 - DNA, 601 bp, Unknown
  Bacterial polypeptide expressing nucleotide sequence isolated from the Sargasso Sea
aatgtctgagagaaataatttagaggaaataaaaaaaatttggcctgcagatgcaccagatattaagaatgttcctaaatataccaaaaaatataaaaatgagctaattgtcgtaaaatatggtggtaatgttttaattgatagagaaatttttaataattttatagaggacataagtttactaaataagttaggtttatctattataatagtacatggtggaggcccgagaattgagagagagctaaaaaaagaaaatataaaaacaagatttatcaatggactaagagtaactgatgagaacgttatatcgatagttgaaaaagttttaattgattttaataacgatattgtaaactccttaacaaaaaaagggacaaaggcagtacctgttaatacaaaaataaataacattatagaagttgtgccggaccaaaaagaacttggttatgttggaatacctagctcaattgataaagataaacttaaaaatatcattaatcaaaaacaaattcctgtagttgctccattgggtctaaataagacaaaaattacatataatataaatggagacaccgcagcaagtgcaatagcaaaaaaa

SEQ ID NO: 250911 - DNA, 569 bp, Unknown
  Bacterial polypeptide expressing nucleotide sequence isolated from the Sargasso Sea
aatgaatgattctcaaagagtatcaatattaagcgaagcacttccatatatacaaagtttctcaggtagaaaaattgttatcaagtatggtggttctgtgatggagaatgataatttaaaaaatgctttttttagagatattgcacttctatcaaccgttggggtttgtccgatagtaattcatggaggtggactagagattaataattggttaaagaaattagaaatatctcctaaattcgaaaatggattaagaattactgatcaaaaaacaatggaaattgtcgagatggttctaatgggtagagttaacaaacaaattgtaaaagggattaataaaactggatccttagctgtgggaatatcaggtcttgattgcaacttaattcaatctagagaactaggagatggtagccatgggttagtgggcgaggttacaaaaatcaatcctgaaatattagatcctcttatttctaaaggatacatcccaattatttctagcattggatcaaccttggagggtatttcccataacattaatgcagattttgttgctggagaaattgctg

SEQ ID NO: 250912 - DNA, 700 bp, Unknown
  Bacterial polypeptide expressing nucleotide sequence isolated from the Sargasso Sea
atgtctggggaaaaaaatttaaaagaaataaaaaagttttggcctgaaaaagctccaaatattaatattgttcaaaaatacgtatcaaaatatgaaaaagaaaaaattgtaattaagtatggagggaacgttcttatagacagaaatgtatttaataattttatctcagacataaatgtgcttaataaactaggtctttctattattgtagttcatggaggtggtccaagaataaaaagggaattagataaaaaaaaaattgtttcaaaatttataaacggtttaagagtaacagataaaagtataatagatactgtagaggaagtactaatagattttaatattgatatagtaaactctttaaaaaagttgggatcgaatgcaacttcatttcatacaaaaagtgaaaatattattgaggtagagcctgggaaagaagagttgggtttcgttggaattccgaaaaaaattaatgttaatttaattgaaagcgcgctttataacaatcagattccaattatagctcctttaggcttaggtaaaaataaccaaacttttaatataaacggagataccgctgcaagtgctattgcaaaaaaacttaaatctagaaggcttatattaatgactaacgttgaaggtgtttatgatgatcaaaaaaaacttatatcagaaattaaaccctttgacctagaaaatc

SEQ ID NO: 250913 - DNA, 850 bp, Unknown
  Bacterial polypeptide expressing nucleotide sequence isolated from the Sargasso Sea
atggaaatagataaaattgtacccaaagacggtcctacaatcgatgaatttaaaaaatacatagataaatataaagatcagttaattgtaattaaatatggggggaatgtttttatcgataggaatatctttaataattttatttcagatattagtattctaaataaattaggactttctataattatagttcatggaggtgggcccagaattaaaagagagttagataaatcgaatattcaatcaaaatttataagaggattaagagttacagatgaaaaaattattaacatagttgaaaatgtccttatcgactttaatgaggatattgtaaattctttagccgaaaaaggtgcaaatgcagtttctctaaatacaaagaaaaacaatgctatagaagttattccagaggcagaggaactaggatttgttggtattccaaataaaataaatgtggacataataaaagatataatcaaaataaatgcagtaccaattatatctcctctaggtttgggaaaaaataatcaaacatataatattaatggagatacagctgcgggagctatagcaaaatcattaaaatgtagaagattattattaatgaccaatgtggaaggagttttaaataaagaaaaaaagcttatcgaagagataagctcttctgaaattttagaaatgattaataatgaaacaatcacagagggcatgatacccaaaataaatacatgccttgatgcagtaatgaacggggtcacaggagtaggcattatagatggaagaaaaaaacattcaattttgttcgaattattttcagataaaggtgcaggaacattaataagaagatgaa

SEQ ID NO: 250914 - DNA, 784 bp, Unknown
  Bacterial polypeptide expressing nucleotide sequence isolated from the Sargasso Sea
gatgtctaccaacaactcagtattagttcttaaagtcggcggcgccctgctgcagtgtgaaatggggatggcgcgtttaatggataccgcagcagcaatgatcgccaatggtcagcaagtgctgatggtgcatggcggcggctgtttggtcgacgagcaattagccgcaaacggcatggaaaccgtcaagctagaaggcttgcgggtcactccgccggagcaaataccgattattgccggtgcattggccggaacatcaaacaagatcctccaaggcgcagcgactaaagccgggattgtgagcgttggcatgagcttagccgatggcaacacagtctcggccaagatcaaagacgagcgtttagggttagtgggcgaggtttctcctaaagacgccacttacctcaagtttattctgtcccaaggctggatgccgatttgtagctcgattgccatgatggacgatggccaaatgctgaacgtgaacgccgaccaagcggcgacggtattagctaagttggtcggtggcaagttggtgctgctatcggatgtgtctggcgtgctcgacggtaaaggtcaattaatcccttcactgaatggtaagcagattgcggatttggttaagcaaggcgtgatcgaaaagggaatgaaggtaaaagtagaagctgcgctcgaagtggcgcagtggatggggcaggcggttcaagttgcctcatggcgtgatgcaagccaattagtcgcattagcaaaaggtgaggccgtgggcacacaaatccaaccataa

SEQ ID NO: 250915 - DNA, 757 bp, Unknown
  Bacterial polypeptide expressing nucleotide sequence isolated from the Sargasso Sea
aaagtacggtggaaacgttttaattgatagaaatatttttaataattttattgaagatataagtatattaaataaattgggcttatcaattattgttgttcatggaggtggtccaagaatagaaagagaattaaagaaagggaaaattcaaagtaaatttataaatggtctaagagttacaaataaagaagtaataagtattgtagaaaatgttttaattgatttcaacaatgatattgttaactcattaaataaaaaaggatcgaaagcagtttcaataaacacaaaaataaataatgttatgaatgtaattcctgataaacctgagcttggttttgtgggaatacctcaagaaattaatttaggtataattaaaaatatgattaatcaaaatcaaataccaattgttgctcctttgggtcttgataaaaataatcaaacttataatattaacggggatactgccgctagcgctattgctaaaaaattaaagtctaggagacttttgttaatgacaaatgttgaaggtgtttatgatgatagaaaaactttaatatcagaaataaaaccatacgacatggagaatttagttaatttaaaaattgttcaaggcggcatgctgccaaaaataaaaaattgtattgatgcagttgaaaatggtgtaaggggtgtggttattttagatggtagaaaacctagatctatattaaaagaaattttttcagatcagggtgcaggtactttgattagaaaatga

SEQ ID NO: 250916 - DNA, 901 bp, Unknown
  Bacterial polypeptide expressing nucleotide sequence isolated from the Sargasso Sea
tatggatacaaatgctataataaaaaatgtttctaatcttttaaagactgatcaaaaagatatagagaattacttaaagaaatttagtaagaaaatagttgtgattaaattcggtggtcacgccatgggagacagaaagctttctcatacttttgctgaggatgttactatattacaaaaattaggcataaggccagttgtaattcatggaggtgggccacaaattggttcaatgttaaaaaaacttaatatagaatcatcttttgtaaatggacttagaattactaacgaagaaacagttgaaattgtggaaatggttttatctggttcaataaataaagatattgttaataaaattcactccgctggtgggatatctgtaggtctatctggaaaagacgctaaaattatattggctaataaacttaaagataaattcagggacccagattcaaatattgaaaaatttttagatattggatttgttggcaaaccagaaaaaattgatcctaccattataaatattgttacaaataattctatgattcctgtcatagctcctgttggttttggagttaatggagaaacttttaatataaatgcagatactgcggcgggcgcaatagctagtgcattaaaagcagagaggatattattactaacagatgttgaaggtgttttagactcagaaaaaaaattgatatctagtatttcaacgactcaagctgaatcaatgataaacgaaaaaataataactggcggcatgattccaaaaattgaaacatgtttagaaacagtagcagctggtgttaaagccgcagttattattgatggaagatctcctcatgctatacttagagagatttttacaacaagtggttcaggaacaatgattgaataa

SEQ ID NO: 250917 - DNA, 1057 bp, Unknown
  Bacterial polypeptide expressing nucleotide sequence isolated from the Sargasso Sea
attgatagacgataaaagtgtaataagaaaaaaatggctagaagaattttcaaaagacataaaagaattattagaccaaaaaaaaaatgtaattgtagtaagttctggtgcaatagctctaggatgtaaaaaacttaatataaataaaaaaagtttaaagctcgataaaagtcaggcaattgcttctataggccagatagaattaatgaatctctttaaaaaaacattcaacaaaaataaaattaatttatcacaaatgttattaacactagaagatacagaaagaagaggacgtgctatcaatgctaaaagaacttttgataacctttttaaattaggctatgtccctattgtaaatgaaaatgatagcacagctactacagagataaaatacggcgataatgataggttagcttcaagagtagcgcagatatcctcagcagactgtttaattttattatcagatgtatctggattatactcaaaaaatccgaaaatttttaaagatgcaaagctaataagtgaaataaatgatattaattctactattaaaaaaatttcaacaaaagggattagtcaactcggttcaggtggtatggaaacaaaaatagaggcagcaaaaatttgtcaaaattccggttgcacaatggcaatagcagatggcttaaaatttcgaccaattaaaagaataaatacttataataattgtacatggtttcttccaaaagtttccaaactccatgcaagaaaaaaatggataattagctcggtatctccaaaaggtgaaataattattgatgatggtgctgttgcagccctagagaaaggtaaaagcctacttgcggctggtatcaaaaaagtaaatggtaactttaacaagggtgatcatataaaagttttaaataaagatttaaaagagtatgctagaggactgagttcttttagctctgatgaaattagaaaaatacaaggtttgcattctaataaaattaaagacactttaggatatgtctcaaagtcagaggtaatacataaagacgacatggtggaagtgtga

SEQ ID NO: 250918 - DNA, 850 bp, Unknown
  Bacterial polypeptide expressing nucleotide sequence isolated from the Sargasso Sea
catggatcttaaaaatatattacccgaagatgggccacctttaagtgaagttaataaatatattgaaaaatataaaaatgacttaattgtaattaaatatggtggaaatgttttaattgacagaagcgtatttaacaattttataacagatctatatgttttaaataaattaggtctttcaataatagttgtgcatggtggcgggccaagaataaaaagagaattagaaaaatctaatattcaatcaaaatttataagaggtttaagagttactgataaaaatataatcaatattgtagaatctgttttaattgactttaatgatgatattgtcgaaaatttgaacaaaaaaggctctaaaggtttttcaatacacacaaaaaataacaatattatagaggtaatacctgaagcagaagagttaggctttgtagggataccaatatcggttaataatgaaataatatttaatatcctcaagcaaaataaagttccaattgtatctccattaggtttagataaaaatagtcaaacctataatattaatggtgatacagctgctatggctatagctaaatctttaaaagctagaagattattactaatgacaaatgttgatggcgttcttaacaaagaaaaaaaattaatagaagaaatatcgtccacagaaattttagaaatgattaaaaatgaaaccataacagaaggcatgatccctaaaattaatgcgtgtttagatgctgtaaataatggagtaactggagttggaataattaatggcacaaaaaagcattcatgtttatgggaaatattttctgacaagggtgcaggtacattgattagaaaatga

SEQ ID NO: 250919 - DNA, 850 bp, Unknown
  Bacterial polypeptide expressing nucleotide sequence isolated from the Sargasso Sea
aatgaatttagaaaaaatacttcccaaagatggaccaccaataaatgaggtttcaaaatacatagaaaaatataaaaacgatctcatcgtaataaaatacggaggaaatgtttttatagacagaaaaatctttgataattttataacagatataaacatactaaataagctaggtatttcttttacagttgttcatggaggaggtcctagaataaaaagagaactagacaaatcaaatattcaatcaaaatttatcagaggcttaagggtgactgatgaaaaaattataaacatcgttgagtcagttttaattgattttaataatgatattgttgactctttgaaaaagtttggaactgatgctgtctcaatccacacacaaaaaaataatattattaaagtaaccccagaggctaaagagctcggatttgtaggaatacctaatcaaattgataataatcttattgaaaaaattcttaataaaaaacaagtcccaataatttcaccattgggtttaggaaatgacaatcgtccatataatatcaatggagatacagccgctggtgcaattgcgaagtctttaaaatctagaagattacttttaatgactaacgttgaaggagttttagataaaaacaaaaaattaattaatgaaatctcttcatcggaaattttgaaaatgattgaggataatacaattaccgaaggtatgatacctaaaatcaacacttgtttggatgctgtaaataatggagtaacagcagttggaataattgatggtagaaaacaacactctatattatttgaaattttttctgacaagggctctggaactttaattagaagatga

SEQ ID NO: 250920 - DNA, 850 bp, Unknown
  Bacterial polypeptide expressing nucleotide sequence isolated from the Sargasso Sea
atggacttaaaaaaaattcttcctgaaaacggacccccaataaacgaggttaataaatatatagaaaaatataaaaatgacttaattgtcattaaatatggaggaaatgttttaattgatagaaatatctttgataactttataactgatttaagtatcttaaataaattaggtctttcagttattgtagttcatggtggaggtccaagaatcaagagagagttagataaatccaatattcaatcgaaatttataagagggctaagagtcactgatgaaaaaattataaacattgttgagtcagtcttaatagattttaacaatgatattgttagctctttggacaaaaaaaatacagaagcagtttccattcacacaaaaaaagataatattattgaagtcgtaccagaggcaaaagaactgggttttgttggcctaccaaataagatcaataacgatattttattgaatataattcaacaaaataaaataccgattatttcaccattaggcttagataaaaataatcaaacacataatattaatggtgatactgcggcaatggctgtagccaaatctgtcaaatcaaggagattactattgatgacaaatgttgatggtgttttaaataaagaaaaaaaacttatagatgaaatatcctcatccgaaatattagagatggtaaaagatgagacaattactgaaggaatgatacctaaaataaatgcttgtctagatgctgttaataatggagttacagcagcaggtataattaatggtacaaaacagcattcttgtttatgggaaattttctcagacaagggatcaggtacattaataagaaaatgaa

SEQ ID NO: 250921 - DNA, 871 bp, Unknown
  Bacterial polypeptide expressing nucleotide sequence isolated from the Sargasso Sea
aatgtccgaagagaataatttagaagaaattaaaaagttttggcctaaagatgctccgaatgtaaagaatgttccaaaatacgttaaaaaatataaaaaagacctaatagtaattaaatatggtgggaatgttttaattgatagaaatatttttaataattttatccaagatataagtatattaaataaactaggtctttctattattattgtacacggaggtggtcctagaattgaaagagaattaaaaaaaagtaatatccaaactaaatttataaatggtttgagagtaacagataaaaatgtaattaatatcgttgaaaaagtcctaatagactttaacaatgatattgttgtttcgcttaataaaaaaggatctaaagcagtttctgttaatacgaaaattaacaatgttataaatgtaattcctgataagcctgaattgggttttgttggtgttccacaagaaataaatgttgagataataaaaaatataattagtcaaaaacaaataccaattgttgctcccttgggtttagataaagacaaacaaacttataatattaatggtgatacagctgctagtgctattgccaaaaaacttaaatctagaagacttttattaatgacaaatgttgagggtgtttatgatgatagaaaaactttaatttcagaaataaagccttacgatatggaaaatttagttaatctaaagattgttcaaggtggaatgttacccaaaataaagaattgtattgaggcagttgagaatggagttagaggtgtcgttattcttgatggtagaaaaccaagagctatattgaaagaaattttctctgatcaaggtgctggtactttaattagaaaatga

SEQ ID NO: 250922 - DNA, 589 bp, Unknown
  Bacterial polypeptide expressing nucleotide sequence isolated from the Sargasso Sea
atgaaccgtgactggattgctactgcgcgtactctttccgaagcacttccatatttgcagagatatacggaagccatcgttgtaattaagcttggtggacatgctatgaccagtgatcagggtatggaaacttttgcaagggatgtggcattgatgcgacaagttgggattaacccaattattgttcatggtggtggccccatgatcaatgcaatgcttaaaaagctaaagatagagtctaaattcataaatggtaaaagggttacagacgaagcaactatggaagttgtcgaaatggttcttagcggtagcgttaataaaaaaattgttcaagccattaacgatcaaggtggacgcgctgtcggtttatcaggaaaagacgccaaactaattgaatgcgagcaggcagataaagatttgggaatggtcggttcgccctcaaagattaacccttctgttatcaatacgctgaccgaaaatgataccattccagtaatcgcacccctaggatacggtccaaatggtgaaacattcaatataaatgctgatacagccgccggagccattgcagcggcattaaaaagctgac

SEQ ID NO: 250923 - DNA, 850 bp, Unknown
  Bacterial polypeptide expressing nucleotide sequence isolated from the Sargasso Sea
atggaaatagaaaaaatagtaccaaaagatggtccttccatcgaagaggttaataaatatattgataaatataaaaatgaattaatagttatcaaatatggaggaaacgtttttattgatagaaatatttttaacaattttatttcagatataagtattctaaataagttaggattatcaataataatagtccacggaggtggccctagaattaaaagagagttagaaaaatcaaatattcaatcaaaatttattagaggtttaagggttacggatgaaaaaattataaatatagttgaggatgtccttattgatttcaacgaagacattgttaattctttaattgaaaaaggatcaaattcagtctctataaacacaaaaaaaaataatgttattgaagttattccagaagcagaggaacttggattcgttggaaagccaagtaaaattaatataaatataataaaagatataataaaggaaagttcagttccaataatatcacctttaggtttaggtaaaaataatcaaacatttaatattaacggagatacggctgctggtgctatagctaaatctttgaaatgtagaagattattattaatgaccaatgttgaaggtgtacttgataaagaaaaaaagctcattgaggaaattacgtcatctgaaattttagagatgataaataatgaaattataacagaaggcatgattcctaaaattaacacctgcttagatgcagtaatgaatggagttactggtgttggaattattgatggaagaaaaaaacattcaattctttttgaattattctcagataaaggtgctggtacattaataagaaaatgaa

SEQ ID NO: 250924 - DNA, 850 bp, Unknown
  Bacterial polypeptide expressing nucleotide sequence isolated from the Sargasso Sea
aatggaaatagaaaaaatagtaccaaaagatggtccttccatcgaagaggttaaaaaatacatagataaatacaaaaatgaattaatagttattaaatatggaggaaacgtttttattgatagaaatatttttaataattttatttcagacataagtatcctaaataagttaggattatcaataataatagtccacggaggtggccctagaattaaaagagaattagaaaaatcaaatattcaatcaaaatttattagaggtttaagggttacggatgaaaaaattataaatatagttgaggatgtccttattgattttaacgaagacattgttaattctttaattgaaaaaggatcaaatgcagtctcgataaacacaaaaaaaaataatgttattgaagttattccagaagcagaggaacttggatttgttggaaagccaaataaaataaatacaaatattataaaagatataataaaagtaagttcgattccaattatatcacctttaggaaaaggtaaaaataatcaaacttataatattaatggagataccgctgctggcgctatagctaaatctttgaaatgtagaagattattattaatgaccaatgttgaaggtgtacttgataaagaaaaaaagctcattgaggaaattacatcatctgaaattttagagatgataaataatgaagttataacagagggcatgatacctaaaattaatacctgcttagatgcaataatgaatggagttactggtgtcggaattattgatggaagaaaaaaacattcaattctttttgaattattctcagataaaggtgctggcacattaataagaaaatga

SEQ ID NO: 250925 - DNA, 496 bp, Unknown
  Bacterial polypeptide expressing nucleotide sequence isolated from the Sargasso Sea
ggaagaacaaaaacattcaatgacgttagagaaagtattcttatctgtaaaaaaattaaaacacagatggatcttggctttgtaggagatattacaaaagttgatggtaatttgatcaggaaaaatatttttaatggaaaaattcctgtaattgctccaattggcagggatagatttggaatgcattacaatattaatgctgatcatgtggcttgtaaggttgctgaaaaattaaaagctgaaaagataattatgatgacggatgtgaaaggagtgttgacaagtacagggaagaaaatatctgaaatgaatatcaacaaagccaaaaaaatttctaaaaccataaaaggaggaatgcttccaaaactctcatctgtgataaaaagtctagaaagtggcgtgaaaagtgctcacatagtcgatggtagagtgccccacgcagttttagttgagatacttactgacaagggcgttgggacttggataactaaataag

SEQ ID NO: 250926 - DNA, 442 bp, Unknown
  Bacterial polypeptide expressing nucleotide sequence isolated from the Sargasso Sea
atgaatgacaaccagacaaatcagactgcttcagtattaatcgaagcgctgccgtatattcaaaaatttcacggcaaaacgattgtcataaaatatggtggtaacgcaatgattgatgaagttctgaagcagtcatttgcccacgacatagttctaatgaaactcgttggaataaaccccatcattattcacggtggtggccctcagataaacgaactattggacaaattggagattcaatcaaaatttatcgacgggatccgtgtgaccgatgagaaaaccatggaggttgtccaaatggttttgggaggattggttaacaaggacgttgttactcgactatgccaagccggaggaaaagcagtaggtctaacgggaaaagatgcaaatcttatacaggccaagaaattacttattccatcaagtgactctgcagaaaacg

SEQ ID NO: 250927 - DNA, 399 bp, Unknown
  Bacterial polypeptide expressing nucleotide sequence isolated from the Sargasso Sea
gatggatttagaaaaaatacttcccaaagatggaccaccaatagatgaggtctcaaaatacatagaaaaatataaaaatgatctcatcgtaataaaatatggaggaaatgtttttatagacagaaaaatctttgataattttataacagatataaacatactaaataaattaggtatttcttttacagttgttcatggaggaggtcctagaataaaaagggaattagacaaatcaaatattcaatcaaaatttatcagaggcttaagggtgacagatgaaaaaattataagcatcgttgagtcagttttaattgattttaacaatgatattgttgactctttgaaaaagtttggaactgatgctgtctcaatccatacaaaaaaaaataatatcatcaa

SEQ ID NO: 250928 - DNA, 667 bp, Unknown
  Bacterial polypeptide expressing nucleotide sequence isolated from the Sargasso Sea
gatgtcaaaaaatatttctctagacgagataaaagaattttggcctgataaagcgccaaacattaatactgttcaaaaatacataaaaaaatatgaaaatgaaaaaattgtaattaaatatggtggcaatgttcttatagacagaaatgtctttaataattttatatctgatataaatgttcttaataaattaggtttatctataatagttgttcacggtggaggaccgagaattaaaagagagttagataagaaaaaaatcgtatcgaaatttattaatggcttaagggttactgataaaaacataattgatactgtggaggaagttttaattgattttaacaaagatatagctagttctcttaagaaattaggttctcaagcagctatgtttcattctaaggctgataacataatagaggttgagcctgaaagagaggaactcggatttgttggaatacctaataagataaatgatagtttaattcaaagcgcattaaatgaaaataaaattccaattatagcgcctttaggtttaggaaagaatgaacagacatataatattaatggtgacactgcagccagcgctattgcaaaaaaacttaagtctagaaaaataatattaatgacaaatgttgagggtgtatatgatgataagaaaaagtta

SEQ ID NO: 250929 - DNA, 850 bp, Unknown
  Bacterial polypeptide expressing nucleotide sequence isolated from the Sargasso Sea
atggagatagaaaaaattgtacctaaggatggtcctacaatcgatgaatttaaaaaatacataaataaatataaagatcaattaattgtaattaaatatgggggaaatgtttttattgatagaaacatatttaataattttatctcagatattagtattttaaataaactaggactttctataattatagttcatggaggcgggcccagaattaaaagagaattagataaatcgaatattaaatcaaaatttataagaggattaagagttacagatgaaaaaattattaacatagttgaaaatgtccttattgactttaatgaggatattgtaaattctttagtcgaaaaaggtgcaaatgcagtttctctaaatacaaagaaaaacaatgctatagaagttattccagaagcagaggaactaggatttgttggtattccaaataaaataaatgtaggcataataaatgatataatcaaaacaaatgcagtaccaattatatcccctttaggtctgggtaaaaataatcaaacatataacattaatggagatacagctgcaggagctatagcaaaatctttaaaatgtagaagattattattaatgactaatgtggaaggggttttaaataaagaaaaaaagctcatcgaagaaattagctcttctgaaattttagaaatgataaataatgaaacaatcacagagggcatgatacccaagataaatacatgccttgatgcagtaatgaatggggttacaggagtaggaatcatagatggaagaaaaaaacattcaattctgttcgaattattttcagataaaggtgcaggaacattaataagaaaatgaa

SEQ ID NO: 250930 - DNA, 458 bp, Unknown
  Bacterial polypeptide expressing nucleotide sequence isolated from the Sargasso Sea
aatgaccattactagaaaacaggcggagaatattgcttcagttttaaccgaaggccttccctatataagaaagtttaaagataaagtaattgtaattaaatatggcggcgctgccatgatagatgagtcacttaaagagagctttacaagagatatagctcttatgaaattagtaggaatgaaacctgtaattgttcatggaggaggtccacaaattggtaatgagcttgctaaggcaggagttgaatcagagtttattggtggacttagggtcacaactaaatctgccatgactgttgtgaagaaagtccttggaacagcaattaataatgagattgtgaaattgttaaaaaagtttggtggaaacgcaatatcttttaaccataccaagtaccaaattattagagcatcaaaagaaataagccgaggtagtattgatttaggttatgtaggtaaag

SEQ ID NO: 250931 - DNA, 577 bp, Unknown
  Bacterial polypeptide expressing nucleotide sequence isolated from the Sargasso Sea
gaccaaataactattagagttgtcgaagaagcacttttagagcttaattacgaaattataaataatttaaaaaattttcaaataagcgcagagtccgtaacacctcacaataaaaatataattaaaattaaaccagaaaaaaaagagcttggttttgttggttcgccaaaagaaataaatttaaaggatattttaaaaataataaaagaaaaaaaaattccaataatagtacctatgggtaccagtgatgacaaaaaaatctataatataaatgctgatattgctgctggtgcagttgctaaagaatttaactcaaggagattattgctgatgaccgatgttgaaggtgtccttgataaaaataaaaaactaataccggagattaattcttctattgcagaaaaaatgcttaaagatggtgatatttctggtgggatgattcccaaaatcaatacttgtcttgatgctgtaaataatggagtaacgggcgtagttatagttgatggaagaaaaccacattcaatattatttgagttgttttctgataaaggtgcaggaactttaatcagaaaatgaa

SEQ ID NO: 250932 - DNA, 850 bp, Unknown
  Bacterial polypeptide expressing nucleotide sequence isolated from the Sargasso Sea
atggaattagataagattattccagcagatgggccgaatattaatgaggttgaaaaatatataaacaaatatcagtctgaggtaatagtaattaaatgtggtggatctgttttattagataaaaaactatttaatcagttcatagaagatatttcagtaataaacaaaatcggtttatcagcaatagtcgttcatggtggaggtaaaaatattaaaaaaaaattagatgaaaataatattgaaacaagatttatcaaaggacttagggtttcagacgaaaaaacaataagatatatagaagaggctttactagagcttaatttagagattttacatgaattaaaatctaaaaacactaatgtttgttcaatatcacctaaagaaaataatgtaattaatattattccagaaagtgaagaattgggatatgtcgggaaaccaaaaaaaattaataaagagaaaatattaaattttattaataataaacaaattccaattgttgtccctttaggattgggtgatgacggtagaatttataatattaatgcagatgttgctgcaggttcaattgcaaaagagatcgatgccagacgtcttcttttgatgacagatgttgaaggagttcttgatcaaaatcaaaaacttatatctgaaattaatctcaataaagccaatgaaatgttaaaaaataatattatctctggaggcatgataccaaaaataaacacttgtctggatgcaatatctaatggtgttaaaggtgttgttattgttgatgggagaaaaccacattcaatactatttgagttattttccgataagggcgcaggaacattaataagaaaatgaa

SEQ ID NO: 250933 - DNA, 283 bp, Unknown
  Bacterial polypeptide expressing nucleotide sequence isolated from the Sargasso Sea
tattcacccaaatatagttcacggaggtgggcctcaaattggagaaagattaaaattaaaaaatattaaatctgagtttgttgaaggattaagagtaacagatgaagaaacaataaaagtagttgaagaagttttatcaaaagatattaataaagaaattgtagatgctataaatgactcaggtgcgaaagctataggcttatctggacatcaaaataacttaataaatgcaaacaaattaaaagttgaagtaaaagatactgattcaaatattgaaaattag

SEQ ID NO: 250934 - DNA, 835 bp, Unknown
  Bacterial polypeptide expressing nucleotide sequence isolated from the Sargasso Sea
attttggcccaaagatgcacctgatgtaacaaatgttccgaaatatattaaaaaatataaaaagaacttgatagttataaagtatggtggaaatgttttaattgacagaaatatttttaataattttattcaagatgtaagcatattaaataaattaggtctttcaattgtaattgttcatggtggaggtccaagaatagaaagagagttaaaaaaaagtaatattcaaagtacctttattaatggcttaagggtcacaaacaaagatgtaataaatattgtcgaaaaggtacttatcgattttaacaatgatattgtcgactcactcaataaaaaagggtctaaagcagtatcaataaatacaaaaaaaaataatattattaatgtaacccctgataaacctgagcttggttttgtaggggttccacgggaaataaatatagaaattattaaaaatattataagtcaaaatcaaataccaattgttgctccgctgggtttagataaagataaacaagcttataatattaatggtgatacggcagctagcgctatagcaaaaaaattaaaatctagaaggcttttattaatgacaaatgttgagggtgtttatgatgatagaaaaactttaatatcagaaataaaaccctttgatatggaaaatttagttaaactaaaaattattcaagggggcatgataccaaaaataaaaaattgtattgatgcagttgaaaatggtgtgagaggtgttgttattcttgatggtagaaagccaagatcaatactaaaagaaatcttttcggatcagggtgctggtactcttattagaaaatga

SEQ ID NO: 250935 - DNA, 784 bp, Unknown
  Bacterial polypeptide expressing nucleotide sequence isolated from the Sargasso Sea
gatgtctaccaacaactcagtattagttcttaaagtcggcggcgccctgctgcagtgtgaaatggggatggcgcgtttaatggataccgccgcagcaatgatcgcaaatggtcagcaggtgctgatggtgcatggtggtggctgtttggtcgatgagcaattagccgcaaacggcatggaaaccgtcaagttagaaggcctgcgggtgaccccgcctgagcaaatgccgattattgccggtgcactggctggcacatcaaacaagatcctccaaggcgcagcgacaaaagctgggattgtgagtgtgggcatgagcttagccgatggcaacacggtatcggccaagattaaagatgagcgtttagggttagtgggcgaggtttctcctaaggacgccacttaccttaagtttattttgtcccaaggctggatgccgatttgtagctcaattgccatgatggacgatggccaaatgctgaacgtgaacgctgaccaagcggcgacggtattagctaaattggtcggtggcaagttggtgctgttatcggatgtgtctggcgtactcgatggtaaaggtcaattaatcccttcactgaatggtaagcagattgcggatttggtgaagcaaggtgtgatcgaaaagggaatgaaagtaaaagtagaagctgcgctcgaagtggcgcagtggatggggcaggcggttcaagtggcctcatggcgtgatgcaagccaattagtcgcattagcaaaaggtgaggccgtgggcacacaaatccaaccataa

SEQ ID NO: 250936 - DNA, 850 bp, Unknown
  Bacterial polypeptide expressing nucleotide sequence isolated from the Sargasso Sea
aatggatttagaaaaaatacttcccaaagatggaccgccaatagatgaggtttcaaaatacatagaaaaatataaaaatgatctcattgtaataaaatacgggggaaatgtttttatagacagaaaaatctttgataattttataacagatataaacatactaaataaattagggatttcttttacagttgttcatggaggaggtcctagaattaaaagagaactagacaaatcaaatattcaatcaaaatttatcagaggtttgagggtaactgatgaaaaaattataaacatcgttgagtcagttttaattgattttaataatgatattgttgactctttgaaaaagtttggaactgatgctgtctcaatccatacaaaaaaaaataatatcatcaaagtaactccagaggctaaagagcttggttttgtagggatacctaataaaattgataacaatttaattgagaaaattcttaataaaaaacaggttccaataatttcaccattaggtctaggaaatgacaatcatccatataatatcaatggagatacagctgcaggtgcaattgcgaagtcattaagatctagaagattgctattaatgactaacgttgaaggagttttagataaagacaaaaaactaattgatgaaatctcttcctctgaaatttttaaaatgattgaggacaatataattaccgagggtatgatacctaaaataaatacttgtttggatgctgtaaataatggagtaacagcagttggtataattgatggaagaaaacaacactctatattgtttgaaattttttctgacaagggctctgggactttgattagaaaatga

SEQ ID NO: 250937 - DNA, 460 bp, Unknown
  Bacterial polypeptide expressing nucleotide sequence isolated from the Sargasso Sea
tattatttatgtcgagccagaaaataaagaattaggctatgttggtaaaccaaaaagagtagatgcaaaacttttaaaggatataattaaagatgattttgttcctgttgtaataccaatgggtattgacgaaaaaggaacttcttataatatcaacgccgatactgctgcaggagcaatagcaagaagcattaagtctagaagattgatgttgttaacagatattgatggtgttctggatgataataataaattaatttcagaaattagtactatgcaggcgaaagagttaattgataaagaaacaatacatggaggaatgatacctaaaattaaaacttgtattgatgctattaataatggtgtaagagcagtagcaattcttgatggtagaaagccccactctatattatttgaattattttcagacaaaggctccggaactcttataagaaaatga

SEQ ID NO: 250938 - DNA, 250 bp, Unknown
  Bacterial polypeptide expressing nucleotide sequence isolated from the Sargasso Sea
atgaaagataatttaaaaaaagcgcaaactttaatcgaggccttaccttatattcaaaagtttaggggtaagacagtagtattaaaatttggcggtagtattggttctaaggaatttgccaattttgcgagagacttagttctatttaattatgtcggcattaatcctgttgtcgtccatggtggcggtaaagagatttctaaggcacttactagttcaggaattaaaccaattttattgatggactaag

SEQ ID NO: 250939 - DNA, 832 bp, Unknown
  Bacterial polypeptide expressing nucleotide sequence isolated from the Sargasso Sea
ttgcctaaagatgggccaccaattaatgaagtaactaaatatattgaaaaatataaaaatgatttaatagtaattaaatacggtggaaatgttttaattgatagaaacgtattcaataattttataactgatcttggtgttttaaataaattaggccttgcaactgtggtaattcatggtggaggacctagaattaaaagagagctagaaaaaacaaatattcaatcaaaatttataagaggactaagagtaactgataaaaatataattgatattgtagagactgttttgattgattttaatgatgacattgttaattctttaaaagacaaaggaatagaagcagtctctattcacacaaaaaataaaaatgttataaaaactataccggaagcagaagagctaggatttgtaggaataccaaatgagattaataatgaacaaatattaaatataattaatcagaataaaattcctataatttcaccattgggattaggtaaagaaaaccaaacatataatatcaacggagatactgccgcaatggccatagcaaaatctttaaaatcaagaagacttttattgatgacgaatgtggatggtgttctagataaaaataaaaaattaatagaagaaatttcttcatctggaattatggaaatgattaaagatgaaactattacagggggcatgatacctaaaattaatgcgtgcttagatgcagtgaataatggtgtgacagcagttggcataatcaatggcacaaagccacattcatgtttatgggaaatattctctgacaagggctctgggaccctaataagacaatgaa

SEQ ID NO: 250940 - DNA, 865 bp, Unknown
  Bacterial polypeptide expressing nucleotide sequence isolated from the Sargasso Sea
gttggatattaaagaagaaaaattaaaaacaattctaccggtagatggtccttcaactgaggaagtaaaaaaatatttagaaaaatataacaatgaatatattgttattaaatgtggtggtagtgttttaattgatcaaaatcttttcgatatttttattcaagatatttcaacactagataaattaggaattactccgataattgttcatggaggtggaagaagaataagcaataaacttgatgatataggtttagaaagtaaatttataaaaggattaagggtaactgacaaagaaactattaaaattgtagaagaagtattaattgattttaataaggaaattataaatgctctagatcaacaaaattgtaaaagtcagagtattaattccaaggaaaataatattttaacagttatccaagaaaatgaagagcttggttttgtcggctctcctataaatgtagatcaatcaataatggataaaattatagcagataaaaaagtccctattattgcgcctttaggtttggataagaatgatcaaacttataacgtcaatgcagacactgcagctggttatattgctaaaaaaattaacgcaagaaggttaattatattaagtgacgtagaaggtgttttggataacaataaaaatctaattccagaaataaattcagaatctataaaaaacttaattgataatgaaacaattactggtggcatgatcccaaaaataaataattgcttagatgttgctagtaacggagtaaaaggagttgttataatagatggaaggaaaaatcattctcttctatttgaacttttatcagatgaaggatctggaactttaattagacaatga

SEQ ID NO: 250941 - DNA, 583 bp, Unknown
  Bacterial polypeptide expressing nucleotide sequence isolated from the Sargasso Sea
atggaattaaaaaaaatactacctaaaaatggaccgccgatagaggaggtttctaaatatattgaaaaatataagaacgaattaattgttattaagtatggaggaaatgtttttatagatagaaatatttttaataattttattgaagatataagcttattaaataagcttggactttcaattatagtagttcatggtggagggccaagaattaaaagggaattagataaatctaatattcaatcaaaattcgtaagaggattacgtgtaactgatgaaaaaattataaatatagttgagtcagttctgattgattttaatgttgatattgtttcttccttaaaaaaaatgggatccgaagctatttcaattaatacaaaaaaaaataatgttattgaggtaatgcctgaagcagaagaactaggctttgttggaataccagataaaattgatattgatgttataaaaaatatagttgaaaaaaatatagttccaataatatctcctttgggattaggaaaaaaaaatcaagtatataatataaatggagatacggctgctggagctatagctaaatccttac

SEQ ID NO: 250942 - DNA, 442 bp, Unknown
  Bacterial polypeptide expressing nucleotide sequence isolated from the Sargasso Sea
atgtctataaaaaataatgtgagtgaaagctctaggcttttacagaaatattggccatcaggaaaaaaatatttcaacagcacagatcaatttataaaaagatataaaaatcgaattattgttattaaatacggaggttatgctcttacaaaacctcatttagtaaaatcttttgcaaaaaatattgctcttctaaaccaattgggaatgaaagttattattgttcatggtggagggccgcaaattgaaaatcaattgagaaagaaaaaaattaagaatgaagaataccaaggtttaagggttacaacaaaacaggttttaagtgttgtcaagacggttctagccaatgatcttaataaacttatttcaaatgaaattacaaaatatggcggtaaaccgaaacgttttgatggaataagacaaaaaatcatcaattcaaaaa

SEQ ID NO: 250943 - DNA, 441 bp, Unknown
  Bacterial polypeptide expressing nucleotide sequence isolated from the Sargasso Sea
aaagtaaagaatttggatatgtcgggaaccaaaaaaaaaatgacaaagagaaaatattaaattttattaaaaataaacaaattccaattgttgtccctttaggattgggtgatgacggcagaatttataatattaatgcagatattgctgcaggttcaattgcaaaagagatcgatgccagacgtcttcttttgatgacagatgttgaaggagttcttgatgaaaatcaaaaacttatatctgaaattaatctcaataaagccaatgaaatgttaaaaaataatattatttctggaggcatgataccaaaaataaacacttgtctagatgcaatatctaatggtgttagaggtgtagttattgttgatggaagaaaaccgcattcagtactatttgagttattttctgacaagggtgcgggaacattgataagaaaatgaa

SEQ ID NO: 250944 - DNA, 865 bp, Unknown
  Bacterial polypeptide expressing nucleotide sequence isolated from the Sargasso Sea
atgagcataagtaaagaagaattaagaaaagttcttcctaaaaatggtccaaatattgatgaagtttcaaaatacatagaaaaatataaagatgaaattattacaattaagtatggtggtaatgttttcatagataggcaaatatttaataacttcataagtgacttatctatcttacaaaaactgggtttatcagttgttgttgtgcatggtggtggaccaagaatcaaaagagaattagataaatcacatatagattctaaatttgttagaggcttaagagttactgacgaaaaaattatagatatcgtggaaaaagttctcattgaatttaacgaagatattgtttcctcattaaaaaatataggaagtaaaggtatatccttgaatacaaaagaaaataatgttttaaaaattatacctgagtctaaagaattgggatttgttgggataccacataaaattaatattgagattataatggataaaataaagaatgatatcatacctataatatctcctctcggtctaggatccgataataagacctataacattaatggtgatactgctgctggagcgatagctaaatcgcttaaatcaagaaggttactattgatgacgaatgtagagggtgttctcaacaaggataaaattttaatagaggaaatatcatcttctaaaatcatggagatgatagacgataaaactataaccgaaggtatgataccaaaaattaatacatgtttagatgctgtcaacaacggggttacagctgttgctataattgatggtagaaaaaaacactctattttatttgaaatattttcagataaaggttcagggactttgataagaaaatgaa

SEQ ID NO: 250945 - DNA, 832 bp, Unknown
  Bacterial polypeptide expressing nucleotide sequence isolated from the Sargasso Sea
ttgccagaagatgggccacctttaagtgaagttaataaatatattgaaaaatataaaaatgacttaattgtaattaaatatggtggaaatgttttaattgatagaaacgtatttaacaattttataacagatctatatgtattaaataaattaggtctttcaacaatagttgtgcatggtggcgggccaagaataaaaagagaattagaaaaatcaaatattcaatccaaatttataagaggtttaagagttactgataaaaatataatcaatattgtagagtctgttttaattgactttaatgatgatattgttgaaaatttaaacaaaaaaggctctaaaggtgtttcaatacacacaaaaaatagcaatattattgaggtaatacctgaagcagaagagttaggctttgtagggataccaacatcggttaataatgaaataatatttaatatcctagagcaaaataaagttccaattgtatctccattaggtttagataaaaatagtcaaacctataatattaatggtgatacagctgctatggctatagcaaaatctttaaaagctagaagattattactaatgacaaatgttgatggcgttcttaacaaagaaaaaaaattaatagaagaaatttcttccacagaaattttagaaatgattaaaaatgaaaccataacagaaggcatgatccctaaaattaatgcgtgtttagatgctgtaaataatggtgtaactggagttggaataattaatggcacaaaaaagcattcatgtttatgggaaatattttctgacaaaggtgccggtacattaattagaaaatgat

SEQ ID NO: 250946 - DNA, 196 bp, Unknown
  Bacterial polypeptide expressing nucleotide sequence isolated from the Sargasso Sea
atgaaatttgattttttatctgagagcgaccaagcttatttcattcataaagcttcaacactagttgaagcactgccatatatacgtcaacacagtggtgatataattgttataaaatatggtggacatgctatgggtgataaaaatctttcatccagttttgccaaggatataggtcttcttaaagaaattggta

SEQ ID NO: 250947 - DNA, 739 bp, Unknown
  Bacterial polypeptide expressing nucleotide sequence isolated from the Sargasso Sea
gatcgaaaacgacgaggcgctgaccgccctgttcgccaccctcaagacctttctgaacgagcagcacagacccctggtgctggtgcacggcggcggctgcctggtggatgacctgctcaaggggctgggtctcacctccaccaagaagaacggtctgcgggtgaccccgttcgagcagatccccttcattgccggcgcgctggccggtaccgccaacaagatgatgatggccaaggccatcgccaccgacattccggcggtgggactctgtctggcggacggcggtctgtgccaggtgacccagctcgacccggcactcggcgccgtgggtgattgccagccgggcaacccggcgctggtggcggggatcctggggcagggcttcttgccggtggtgagctccatcggcatcactgccgaggggcagctgatgaacgtcaacgcggatcaggcggccaccgccattgccgaggcgctgggcgccgacctggtgatgctctccgacgtgagcggcatcctcgatggcaagggcaagctggtgccccagctcgacaaggtgaccgcgctggatctgatggagaagggggtgatcagcgacggcatggcggtcaaggtgaaagccgctctgcatgccgccgagaccctgggcaaaccggtctgcgttgccagctggcgctacccggatcagttgctcaagctgctggctggcggcgccgtcggcacccaggtcaccctctga

SEQ ID NO: 250948 - DNA, 868 bp, Unknown
  Bacterial polypeptide expressing nucleotide sequence isolated from the Sargasso Sea
aatgaaaaagattggagaagtaaatttagaaacaattttaccttcagacggtccttcttttgaagaagtaaaaaaatatttagataaatataacaaagaatacatagttattaaatgtggtggtagtgttttagttgatccaaaattatttaaaatttttattgaagatgttgctgttttaaaaaaacttggttttaatcccatagttatacacggtggtggaaaaaggattaacaacaaactaggtgaacttaacattaaaagtgattttattaatggactaagagttacagataaaaatactattaatatagttgaagatgtattgattgaatttaacaaggaaattgtcaatgccttaaaggatcaatcatgtcaaacaagaagaattacttcaaaagaatacaatataataactgtaaaacctgaaagtgacaaattaggttttgtaggttctcctactcacattaaaattaatgttataaaagaaaatattaaagcgaatgaagtgcccgttgttgcgccattagggttagatgaaaacaatcaaacttttaatatcaatgcagatacagctgcaggtgctatagcaaaaaaacttaaagctagaagattaataataatgagcgatattgagggtgttttggataataataataatttaatatctgaaatcaatactgataaagttaatgaattaataaaaaatgaaacaatatttggtgggatgataccaaaaattaaaaattgtttagatgtaacaaataatggtgttaaaggtgttgttataatagatggaagaaagtctcactctatattatttgaattattgtcagataaaggagctggaacacttatcagaaaatga

SEQ ID NO: 250949 - DNA, 247 bp, Unknown
  Bacterial polypeptide expressing nucleotide sequence isolated from the Sargasso Sea
atgcagcttgaaagttttcttccacaaggaggccctagaatttctgaagtaaaaaaatatgttgaaaaatataagaatgatttgattgttatcaaatatggtggaaacgtattaatagacagaaatatatttaataattttatatctgacatttgtgttttaaacaaattaggactatcaatagttgtcgtacatgggggtggacctaggattaaaagagaattagataaatcaaatataaaatcaa

SEQ ID NO: 250950 - DNA, 361 bp, Unknown
  Bacterial polypeptide expressing nucleotide sequence isolated from the Sargasso Sea
atgagtaaggaaatagtatatagagaaaaggatgttgagaagttaagtaccgctaaagtcttaatcgaggcgctaccctatattcaacaactatcaaacaaagttattgtgatcaagtttggtgggaatgccatgacagatgatacattaagaaataattttgcaagagatgtggttctactaaaacaagttggtctacaccctgtgattgttcatggtggtgggccacaaatcacatcacatttaaaaaaactcgggatagaatctaaatttgcaaatggactaaggattacagatccagaatctattcatacgatagaaatggttttaggagggcttgttaataaagatattgttaatt

SEQ ID NO: 250951 - DNA, 610 bp, Unknown
  Bacterial polypeptide expressing nucleotide sequence isolated from the Sargasso Sea
ataaaagtagtagaggaagtattatcaaaagatattaactctgagattgtaaattcaatatcttctactggtggtaaaccgattggaatggcaggaaatatagaaaatttgattgaagcaacaaaattaaatattgaagttaaagatagtgattctaatattgagaaaattgttgatataggctttgtgggtaagccaatcaatttaagaggtgaaattattataaatcatattaacaatggtgaaattccagttatcgctcctcttggaattgataaggaaaattttacctacaatattaatgcagatacagcagcaggatttatagcaggcaaacttaaagctagcaaattattattacttactgatgtatcaggaattttagataataacaaaaaacttatatcttcattaagtttaaatgaagctaaaaagataatatcagaggattttatatctggaggcatgaagccaaaaataaaaacatgtattgaagcaatggaacaaggtgttaaaaaatcaacaatacttgatggcagaattcctcattcagttatattggaattattcaccgaacatggtattggaactcagttagtatctaattaaa

SEQ ID NO: 250952 - DNA, 730 bp, Unknown
  Bacterial polypeptide expressing nucleotide sequence isolated from the Sargasso Sea
taagaatttatttagacaattcattgaagacgtttcaataatatataagttgggattatcagtaatagttgttcatggtggtggaaaaaatataaaaaaaaaacttgatgaattaaatatagagtcaaagtttattgatggtttgagaattactgacgatataactattaaagttgtcgaagaagcgcttttggaattaaattcagaaattataaataatttaaaaaatcttcaaacaaatgcagaatctgtagcacctcataataaagatataattaaaattaaaccagaaaaaaaggaacttggttttgttggttcaccaaaagaaatagattcgaaagcaattttaaaaattataaaagaaaaaaaaattccaatagtagtgcctatgggtaccagtgatgataaaaaaacctataatataaatgctgatattgctgctggctcagttgcaaaagaactaaactcaagaagattattgctaatgactgatgtagagggtgttcttgataaaaataaaaaaataattccagagattaattctttaattgcagaaaaaatgcttaaagatggagatatttcaggggggatgattccaaaaatcaatacctgtcttgatgctgtaaataatggagtgataggtgtagttatagttgatggaagaaagcctcattcaatattgtttgagttattttctgacaaaggtgctggaactttaattagaaaatga

SEQ ID NO: 250953 - DNA, 396 bp, Unknown
  Bacterial polypeptide expressing nucleotide sequence isolated from the Sargasso Sea
aatggatttaaaaaaaatacttccaaaaaatggaccaccaattaacgaagtgtctaaatacatagaaaaatataaaaatgacctcatagtaataaaatacggaggaaatgtttttatagatagaaatatctttgacaattttataacagatataaatatactcagtaagttaggtatttcatttgtagtcgttcatggaggaggtccaagaataaaaagagaactagacaaatcaaatattcaatcaaaatttattagaggtttaagagtaacagataaaaagataataaacattgttgagtcagtgttgattgattttaataatgatattgtcgattctttaaaaagatttggtactgatgcaatctcaattcatacgaaaaaaaacaatataat

SEQ ID NO: 250954 - DNA, 856 bp, Unknown
  Bacterial polypeptide expressing nucleotide sequence isolated from the Sargasso Sea
cttgtccccactcttactaccaacgaatcctgaagtggtatcctcttcggtcaaaaaggacctgctgatcgaggccctttcctacatcaaacgttttcgtgaccggatcatcgtcatcaagtacggtggtgcagcaatgatagagaacaatctcaaacagagttttgctgaagacattgtcctgctccaaacgcttgggatgaaaccggtgattgttcatggaggaggacctgaagtctcaaaagccatggagcagctcgggcagcaagtgcattttgtagagggactgagggttaccagtgcagagaatcttaaagtcactgaaatggtcctttccggaaccatcaacaaggaaatcattgctcacctcaacacctgtggcggaaaagccgttggattgagtggaaaagatggacacctgattgaggcttccaaaaaagatggaggggaaggagtggatctggggtatgtgggagagattgactcgaccaatccggaactgcttagggttctcctgaaagaaggatacattccagtcatatcacccatcgggttgggaaaggatggcaccagttacaacatcaatgccgatactgcagcttcccacattgcggtctcccttcaagcgatgaaactgatcttcatgaccgatgttaagggaatttttgtaaatggagaactatgtgcagaattgaatcatgatcagacattgaacatgatcgattccggagtcatcgagggagggatgaagccgaagatacgggcagcattgaacgccgtcacccatggggtggaatcagcccagatcatactcggcacagatccgcattcggtgattacagtaattgtttactga

SEQ ID NO: 250955 - DNA, 755 bp, Unknown
  Bacterial polypeptide expressing nucleotide sequence isolated from the Sargasso Sea
tgccatgatagatgagtcacttagagagagctttacaagagatatagctcttatgaaattagtagggatgaaacctgtaattgtccatggtgggggtcctcaaattggtaatgagcttgctaaggcagggattgaatcagagttcataggtggacttagaatcacaactaaatcttcgatgactgttgtaaagaaagtacttgggacaacaattaacaatgagattgtgaagttgataaaaaagtttggtggaaacgctatatcttttaaccatgccaagtaccaaattatcaaagcatcaaaagaagtaagccaaggcaatatcgatttaggttatgtaggtaaagtagataagataaaaactcgtgatcttaaaaagataatagaaaaaggctttataccggttatagctcctattgggatatctagaaagcataattacttaaatataaacgccgatgttgtcgcgggtgaggttgcaaaggcacttgatgcggaaaaacttatactgttaacggatgttcaagggattggggactcgaaaaataaacttatttcaaaaatctctttacagaagggtcaaaggatactcaaacaagaatatataaagggtggaatgactccaaaactaaaggctgctcttaatgccaaaaagaaaggtgtaaaaacttgtcatataattgatggaagagttccgcatgcagtgttactagaagtactaactgaagaaggcgtaggaactatgataagctaaa

SEQ ID NO: 250956 - DNA, 577 bp, Unknown
  Bacterial polypeptide expressing nucleotide sequence isolated from the Sargasso Sea
aatgaaattcgattttttatcagaaagtgatcaagcatattttattcacaaagcttctactttagttgaagctttaccgtttataagacaacatagtggagacactattgttatcaaatatggaggtcatgctatgggaaattctaaactttcaaaaagttttgctaaggatattggattaatgaaagaagttggaatatttccagttatagttcatggaggtggaccacaaatagaagaaaaattaaaatcaaaagatatttcttcaagatttgttgaaggtttgagagtaactgacaatgaaacaataaaggttgttgaggatgtattaactaatgaaataaatactgagatagtaaaagcaattagtgaatcgggtggaaaggcagttggacttgctggaaatcaaaataatcttttgagtgcaacaaagctaaaattagaaataaaaaaatcagtttcaaatattgaaaaaatagttgatattggttttgttggtcaaccaactaatgtcaacactgatcttattaagaatcatattatgaaaggtgagattcccagttattgctccccttag

SEQ ID NO: 250957 - DNA, 833 bp, Unknown
  Bacterial polypeptide expressing nucleotide sequence isolated from the Sargasso Sea
tttggacaatataaaaaaattttggcctgaaaaagctcctgatattaatattgttcaaaaatacgtatcaaaatatgagaaagaaaaaattgttattaagtatggaggaaatgtactaatagatagaaaagtatttaataattttatttctgatatagatgtacttaacaagttaggtctttctattattgttgttcacgggggtggtccaagaataaaaagagaattagataaaaaaaagattgtatcaaaatttatcaatggattgagagtaactgataaagatattatagacactgttgaggaagtattaatagattttaataatgatatagtaagttctctaaaaaaattaggtactgaagcagtttcttttcatacaaagaaggataatataattgaagttgagccagaaagaaaagagctaggttttgtaggaactccaaaaaaaattaaatcaaatttaattgaaaaagcgctaaataaaaataaaattccaattattgctccgttaggtttaggtaaaaataatcaaacttttaatattaatggagatactgctgcaagtgctatagctcaaaaacttaaagcgagaagacttatattaatgacaaacgtagaaggtgtgtatgatgataaaaaaaatcttatttcagaaattaaaccttttgatcttgataatttaataaagtggaagatagtagaaggaggaatgattcctaaaatagaaaattgtgtagatgcagtagaaaatggagttagaggtgttgtaattcttgacggaagaaaacctcattcaattcttcacgaaatattttcagatacaggttcgg

SEQ ID NO: 250958 - DNA, 386 bp, Unknown
  Bacterial polypeptide expressing nucleotide sequence isolated from the Sargasso Sea
tctacagaaagctctcaggagcgactatattcctgtcatagcgcccataggtctgaatagaaaaaatgattttttgaatatcaatgctgactcagtggcgggaaaggtagctcaagctctcagagcagaaaaattgatacttttgacagatgttaaaggtattggcgattcaaaaaatgatctaatctctaaaatttctttaagaaagggacaaaaactacttaaagaagattttatcaaaggaggaatgactccaaagctttcagctgcattggaggcaaagaaaaatggtgttaaatccagtcacataatcgatggaagggtccctcacgccgtcctccttgaagtgcttactgaagagggcgtaggaactatgataagctaaa

SEQ ID NO: 250959 - DNA, 766 bp, Unknown
  Bacterial polypeptide expressing nucleotide sequence isolated from the Sargasso Sea
aatgtcaaaaaatatttctctagatgaaataaaaaatttttggcctgaaaaagccccagacataaatattgttcagaaatatgttaaaaaatatgaaaaggaaaaaatagtaattaaatatggaggaaacgttcttatagatagaaatgtttttaataactttatatctgatataaatgttctaaatagattaggtttatctattatagttgttcacggtggtggcccaagaattaaaagagagttagataagagaaaaattgagtcaaaatttattaatggcttaagagtaactgataaaaacataattgatactgtagaggaagtattaatcgattttaataaagatatagtaagctctctcaagaaattaggttctgaagcagcctcgtttcatactaaaaacgaaaatataattgaagtggagcctgagagagaggagcttggatttgttggaataccaaataacataaatgataatttaattcaaaatgcactaaatcaaaataagattccgatcatagctcccttaggtttgggaaaagataatcaaacatataatattaatggtgacactgcagcaagtgctattgcaaaaaaacttaaatcaagaaggttaattttgatgacaaatgtagaaggtgtatatgatgatcaaaaaaaattaatatcagaaataaaaccttttgatcttgaaaatctaataaaatggaaagttgtgcaaggcggtatgattcccaaaatagaaaattgtgttgatgctgtt

SEQ ID NO: 250960 - DNA, 304 bp, Unknown
  Bacterial polypeptide expressing nucleotide sequence isolated from the Sargasso Sea
cggcgagctggcggcagccctcgaggccgagaagttgatcctgctgaccgatacccccggaattctcagggatcgggacaatcccgactcgctgattcgcaaactgcgtctctcagaggcgcgtcaactcatcgatgatggtgctgtggccggtgggatgacccctaagacggaatgctgcatccgggccctggcgcaaggcgtttcagcggctcacatcgttgatggacgggtgccccatgctctgctgctggaagtgttcaccgatgccggcatcggcaccatggtggtgggacgcggctga

SEQ ID NO: 250961 - DNA, 802 bp, Unknown
  Bacterial polypeptide expressing nucleotide sequence isolated from the Sargasso Sea
catcaaatatggtggccatgcgatgggagatcctaagctcgctaaaagctttgcaagagatattggtctaatgaaagaagttggaatatatccaattgttgttcatggaggaggacctcaaattgcagacagattaaaaactaaaaatattacgtctcaatttattgagggtttaagagttactgatattgaaacagtaaaagtggtggaagatgtattaggaaatgaaattaatggagagattgtcagagcaatcagtgactcaggtggaaaagcaattggcttaagtggtaataaaaataatcttttaactgcaacaaaactaaaagtagaagttaaagattctgactctaacattgaaaaactagtagatattggatttgttggacaaccaatagatgtgaatatcaacttaattagagagcatattaatttaggagaaattcctgtaattgctccacttggtatcgatgaagagggtaactcttataatatcaatgctgatacagctgcaggatttatcgctggaaagttaaaagctagcaagttattgcttttaacagatgttgccggcgtattgaataaagataaaaaattaatcccttccttaaaaattgaagatgccataagcataatggaagaagattttgtcgttggtggcatgaaacctaaaattaaaacatgtattaatgctatgaaaagtggggtaactaaatcgacaattctagatggtaggattcctcattcattagtattagaattatttactgaacatggtattggaacacaaatttattcttaa

SEQ ID NO: 250962 - DNA, 837 bp, Unknown
  Bacterial polypeptide expressing nucleotide sequence isolated from the Sargasso Sea
aatgaatgattctcaaagagtatcaatattaagcgaagcacttccatatatacaaagtttctcaggcagaaaaattgttatcaagtatggtggttctgttatggagaatgataatttaaaaaatgctttttttagagacattgcacttttatcaaccgttggggtttgtccgatagtaattcatggaggtggaccagagattaataattggttaaagaaattagaaatatctcctaaattcgaaaatggattaagaattactgatcaaaaaacaatggaaattgtcgagatggttctaatgggtagagttaacaaacaaattgtaaaagggattaataaaactggatccttagctgtgggaatatcaggtcttgatggcaacttaattcaatctagagaactaggagatggtagccatgggttagtgggagaggttacaaaaatcaatcctgaaatattagatcctcttatttctaaaggatacatcccaattatttctagcattggatcaaccttagagggtatttcccataacattaatgcagatttcgttgctggagaaattgctgctgcaataaatgcagaaaaacttattcttcttactgatactaaaggaattttaaaagaaaaagataacaaaaatagtcttgttgaaaaaactaatctcaaagaggcaaggtattttattgataaaaaaattgtgactgaaggtatgattccaaagacagaatgctgtataagagctttagcccaaggagtcaaagcagctcacataattgatggaagaatagaacattcattacttcttgagatttttacaaattccggaataggcac

SEQ ID NO: 250963 - DNA, 810 bp, Unknown
  Bacterial polypeptide expressing nucleotide sequence isolated from the Sargasso Sea
tttgattgaggccttgccttatattcaacaattatctgggacaacgattgttattaaatttggtggaaatgcaatgacagacgatgcattgaagaataattttgctagggatgtagtgctacttaaacaagtaggatgtcatccagtaattattcatggaggaggtccgcaaataactaaacatttagagaagcaagggatagaatcaaattttgctaatggcatgagaataactgatgaaaaatctatagatattatagagatggttttaggcggtttaataaataaagatatagtaaatacaattacatctttaggaggtaaagccgttggtttatcaggtaaagatgggggattaataagagctaaaaagattgaaggagaaggtgaatttaaaaatattgattttaaaaatactggcactgttaaaagtattgatcctggtgtagtaaaattactagacggctccacttttatacctgttattgcaccaataggaattggggatgatggcaagacatataatattaatgcagatatagttgcaggtaaaatagctcatatattacaagctagcaaatatttaatattgacaaatactcaagggatattagattctaatggaaaccttatccaatctataaacactgatggcgtaaagaaacttgtagaaaaaggaatcttgtcgcaagggatggtgccgaaagtcaactctgcattggaagcggtgacatcaggtgtagagcatgtacaaatcattgatggcacaatagatcattcagttattctcgaattattcacggacgaagg

SEQ ID NO: 250964 - DNA, 499 bp, Unknown
  Bacterial polypeptide expressing nucleotide sequence isolated from the Sargasso Sea
gttgggaatatcaggtcttgatgggaacttaattcaatccagagaattaggagatgggagccatgggttagtgggagaggtcacaaaaatcaatcctgagatattagatcctcttatttctaaaggatatatccctattatttctagtattggatcaaccatggagggtatttctcataatattaatgcagattttgttgctggagaaattgctgctgcaataaacgcagaaaaacttattcttcttactgatactcaaggggttttaaaagaaaaagataacaaaaatagtcttattgaaaaaacgaatctcaaagaggtaagagatttcattgataaaaaaattgtgactgaaggtatgattccaaagacagaatgctgtattagagctttagcacaaggagtcaaagcagctcacataatcgatggaagaataaaacattcattacttcttgagatttttacaaattccggaataggtacaatgatagtcgcctaa

SEQ ID NO: 250965 - DNA, 256 bp, Unknown
  Bacterial polypeptide expressing nucleotide sequence isolated from the Sargasso Sea
atgaaatttgattttttatcagagagcgatcaagcttattttatccataaagcctcaacattagttgaagctttgccttttattagagaacatagtggagatacaattgtgatcaaatatggtggacatgctatgggagatcctaagcttgctaaaagttttgcacgagatattggtttaatgaaagaagttggaatatacccaatagtagttcatggaggcggacctcaaatcgcagacaaattaaaaactaaaa

SEQ ID NO: 250966 - DNA, 749 bp, Unknown
  Bacterial polypeptide expressing nucleotide sequence isolated from the Sargasso Sea
tcaggcttattttatacataaagcctcaaccttagttgaagctcttccatacattcgagaacatagtggtgataccattgtaataaaatacggtggacatgcaatgggagataaaaaactgtctgagagtttttcaagagatattggattattaaaagaagtaggtgtgtcaccaattattattcatggtggaggacctcaaattggcgagagacttaaatcaaaaaatatatcaacacaatttgttgaaggattacgagttactgataaagaaacaattaaggtagttgaggaagttttatctaaagatatcaattcagaaatagtcgaatctataagtgcctctggaggaaaagcgattggagtatctggtaatgataacttagtcactgcaactaaattaaatgtggaaattaaagatagtgattcaaatattgaaaaaatagttgatattggttttgttggacaaccaaaaaaattaaacaaagatatgctaactagctttatagaaaatggtcaaatacctgtcatatctcctttaggtaaggatgaaaataattttacatataatattaatgctgacactgttgcaggttttatagcaggtgagttacaggcaagtaaattactattactaaccgatgtacctggaattttagacaaagatgaaaaattaatctcatcaataactttagaagaagctaaaggtattgctaataaagaatatatttctggaggtatgaagccaa

SEQ ID NO: 250967 - DNA, 776 bp, Unknown
  Bacterial polypeptide expressing nucleotide sequence isolated from the Sargasso Sea
aatggatttagaaaaaatattacctgaaaatggtccacctattaaagaggtatcgaaatacgttgaaaaatataaaaatgatttaatagtaatcaaatatgggggaaatgtttttattgatagaaatatatttaaaaattttatatcagatattagtttattgaataaactaggactatcaattgttgtagttcatggaggcggtccaagaattaaaagagagctagaaaaatcaaatataaaatcaaattttattagaggattaagggtaacagataaaaatataatcaatatagttgaaaatgtattggtagattttaataaagatattgtagactccttaaaaaaagaaggcacaaatgcaatctcaataaatactaaagagaataatataattgaagtcattcctgagtcaaaagaacttggttttgtaggtatacccaatcatatcaatatcaatattgtagaaaataatgttagaaaaaatattattcctattatctctcctctaggtttgggaaaaaataatcaaacttataatatcaatggagatactgcagcaggagcaatagcaaaatctttgaaatctagaagattgcttctaatgacaaatgtagaaggagttttagataaagagaaaaaattgatagaagaaatctcttcatcaaaaattttagaaatgataaataatggaactattacggaaggcatgattcctaaaattaatacatgtttagatgctgtaaataatggtgttacagcagtcggaattattg

SEQ ID NO: 250968 - DNA, 463 bp, Unknown
  Bacterial polypeptide expressing nucleotide sequence isolated from the Sargasso Sea
atgagttcagctagccgcgacccccaggtcgttgtggaggtgctgtcagaagcgcttccctatattcagcaattttccggtaaaactgtcgtcgtgaaatatggcggcaatgccatgaccgaagacacgctgatcgactcatttgctcgcaacatcgtgctgatgaaggaagttggcattaatccggtggtggttcacggcggcggtccgcaaatcggcagcctgctagaaaagctcaatatcgaatcccgctttgttaatggcatgcgcgttaccgactcgcaaaccatggacgttgtagagatggtgctgggcggactggtgaacaaaagcatcgtcaacctgatcaatcaaagcggcggcaaggcgattggcctgaccggcaaagatggcgcccagattcgcgcccggcagctgaaggtggagcaccagagcccggagatgaccgcgccggaaatcatcg

SEQ ID NO: 250969 - DNA, 641 bp, Unknown
  Bacterial polypeptide expressing nucleotide sequence isolated from the Sargasso Sea
aatgaatgattctcaaagagtatcaatattaagcgaagcacttccatatatacaaactttctcaggtagaaaaattgttatcaagtatggtggctctgttatggaaaatgataatttaaaaaatgctttttttagagacatagcacttttatcaactgtgggggtgtgtccgatagtaattcatggaggtggacccgagattaataattggttaaagaaattagaaatatctcctaaattcgaaaatggattaagaattactgatcaaaaaacaatggaaattgtcgagatggttttaatgggtagagttaacaaacaaattgtaaaaggcattaataaaactggatccttagctgtgggaatatcaggtcttgatggcaacttaattcaatctagagaactaggagatgggagccatgggttagtgggagaggttacaaaaatcaatcctgaaatattagatcctcttatttctaaaggatatatcccaattatttctagtattggatcaaccttggagggtatttcccataacatcaatgcagattttgttgctggagaaattgctgctgcaataaatgcagaaaaacttattcttcttactgatactcaagggattttaaaagaaaaagataataaaa

SEQ ID NO: 250970 - DNA, 811 bp, Unknown
  Bacterial polypeptide expressing nucleotide sequence isolated from the Sargasso Sea
tccgggcaagacctttgtcatcaagtttggcggcaacgccatgacggatgcggaactccaagagagttttgcccgtgacgtggtgttgatgaagctagtaggcatgaatccgattgtggtgcacggtggtgggccacaaattggccagctacttgagcggctgaatattgagactgaatttgttgacggcatgcgcgtcaccgacgagcacacgatggatgtggtcgaaatggtgctgggcgcctcggtgaacaaggagatcgttgacagcattcaccgcaatggcggacgggctattggtatcacaggaaaagacgggcaactgatacaggcgagaaagctcgctggagtttggcaagcggagggagtacaagacatcggccaggtgggagaagtggccagtatcgataccgacatcctgacgatgctcatcggcagcgactatatcccggtcattgcgccagtggccggcagtaccgatggcaagacctacaacatcaacgccgatctggtcgccgggaagctggccgaagtcctccaggcggaaaaactgatgctcctgactaatgtggccgggctattggacgcggagggcaacattctgaccgggctcaatacccatcaggtcgaggagttgattgagcaaggcgttgttcacggcggcatgttgcccaagattcactgtgcgctggaagccgtgcaagccggcgtgtccagcgcccacatcatcgacggccgcgtggctcacgcagcgctgctggaaattttctcggacgagggtatcgggacgcagatcagctctcgtcgctga

SEQ ID NO: 250971 - DNA, 469 bp, Unknown
  Bacterial polypeptide expressing nucleotide sequence isolated from the Sargasso Sea
atgcagattgatctgctggttaaaactggaatgcttgttgaggcattgccgttcatgcggcgatattcggacaagaccatattaatcaagtttggcggtcacgcgatgggcaaggtggagtatataaacgcctttgcatctgatattgctttgctggatcaagttggggctcgtcccgttgttgttcacggtggcgggccgcaaattggcgaaatgcttaaaaaactgagaattgaatcaaagtttattgatggtttgcgagttactgatgaggccacaatgtcggttgttgagatggttctggcgggcggcatcaacaaagcgctagttgcagccattgcatctgctggtggacgcgctgttggagtatctgggaaggatggtggtcttataacagctcggaaattgatggctgttgccaaaagcagtgatagcgctattcagaaatctgtcgatcttgggtttgttg

SEQ ID NO: 250972 - DNA, 747 bp, Unknown
  Bacterial polypeptide expressing nucleotide sequence isolated from the Sargasso Sea
aatgtcaaaaaatatttctctaaatgagataaaagaattttggcctgagaaagcccctgatgtaaacattgtacaaaaatacattaaaaaatatcaaaatgaaaaaattgtaattaagtacggaggaaatgttcttatagatagaaatgtttttaataactttatatctgatgtagatgttctcaacagattgggtctttcaatagtagtagttcatggtggtggtcctaggattaaaagagaattagataagaaaaaaattgtgtcaaaatttatcaatggcttaagagttaccaataaaaacataattgaaactgtagaagaagttttaattgattttaacaaagatatagtaggttctcttaaaaagttgggttctgaggcagctccatttcatactaaaactaacaacgtaattgaggttgagcctgaaagagaagaacttggatttgttggcatacctaataaaataaatgacaatttaattcaagacgcattagatgcaaacaaaattccaattattgcccctttaggtttaggaaagaacgatcaaacatataatatcaatggtgacactgcggcaagtgctatagcgaaaaaacttaaatctagaagattaatattaatgacaaatgttgagggtgtatatgatgatcaaaaaaagttaatatcggaaataaaacctttggacttagaaaatctaattaaatggaaagttgttcagggtggtatgatacctaaaataga

SEQ ID NO: 250973 - DNA, 478 bp, Unknown
  Bacterial polypeptide expressing nucleotide sequence isolated from the Sargasso Sea
taagtatcaaattattagagcatcaaaagaagtgagccaaggcagcattgatttaggttatgttggaaaagtaaataatataaaaactcgcgatctcaaaaaaacaatagaaaaaggttctatcccagtcatagcccctatcgggatatcaaggcagcataaatacttaaatataaacgctgatgttgtagcaggtgaggttgcgatagctcttgatgcggaaaaacttatactcttaacagatgttaaagggattggagattctaaaaatcaacttatttctaaaatctctttgcagaaaggtcaaagaatactcaaagaagaatatataaagggcggaatgactccaaaacttagggctgcccttaatgccaagaagagaggtgtaaaaacttgtcatataattgatggaagagttccgcatgcagttttactagaagtactaactgaagagggcgtaggaactatgataagctaa

SEQ ID NO: 250974 - DNA, 865 bp, Unknown
  Bacterial polypeptide expressing nucleotide sequence isolated from the Sargasso Sea
aatgtccaaggaaaaaagtttagatgaaataaaaaaattttggcctaaggaattgccggatattaaaaatataccaaagtatatcaaaaaatataaaaaagacttaatagttattaaatatggcggtaacgttttgatagatagaaatatatttaataatttcattgaggatataaacatattaaataaactaggcctttcaattatagttgtgcatggaggaggtccaagaatagagagagaactcaaaaaggggaatattcaaacaaaatttataaatggcttaagagtaacggatgaaaaagtaattaagattgttgaaaaagtattgattgatttcaataatgatattgtaagttctttaaagaaaaaaggctcaaaagcggtctcgataaattctaaactcaacaatataattgatgtaattccagataaacaggaactaggttttgttggtgtgccagacaaaattaattcagatattattaaagatatagttaatcaaaatcaaatacctatagtggcaccattggggttggataaaaataatcaaacatacaatataaatggagataccgctgctagcgctattgcaaaaaaactaaaatcaagaaggcttttgttaatgactaatgttgagggggtatacgatgatagaaaaaatttaatatctgaaataaaaccttatgatatggaaaatttagtaaatttaaaaattgttcaaggtggtatgttgccaaaaataaaaaattgtattgatgcagttgaaaatggcgttagaggtgtcgttatacttgatgggagaaagcctcactctatcttgagggagattttctcagataaaggtgctgggactttaataaga

SEQ ID NO: 250975 - DNA, 607 bp, Unknown
  Bacterial polypeptide expressing nucleotide sequence isolated from the Sargasso Sea
gtcaccgacgccgacaccatggacgtagtggagatggtgctggtgggccgcgtcaacaaacagatcgtgaatggcctcaatcagctcggcacccgtgcggttggtttgagcggaagtgacggaagtcttgtggaggcacgcccctggggaaatggcagccatgggctggtgggggatgttgcccgcgtcaatcccgatgtgctcgaaccgctgctggagaagggttatgtgcccgtcatttccagcgttgccgcaactcccgatgacgggcgagcccacaacatcaatgccgacacagtggcgggagagctggcggcggccctggaagccgaaaaactgatcctgcttaccgacacccccggcatccttgaagatcgggatgaccccgattccctgatccgcaaactgcgcctctcaaaggcgcgacagctaattgaggacggcgtggtcgcagggggcatgacgcccaaaacggaatgttgcatccgcgccctggctcagggcgtgtcagccgcccacatcattgatggccgggtaccccatgccctcctgctcgaagtcttcaccgacgccggcatcggcaccatggtggtgggacgcggctaga

SEQ ID NO: 250976 - DNA, 784 bp, Unknown
  Bacterial polypeptide expressing nucleotide sequence isolated from the Sargasso Sea
cggatcatcgtcatcaagtacggtggtgcggcaatgatagagaaaaatctcaaacagagttttgctgaagacattgtcctgctccaatcgcttgggatgaatccggtgattgttcatggaggaggacctgaggtctcaaaagccatggagcaactcgggcagcaggtgcattttgtagagggactgagggttaccagtgcagagaatctaaaagtcactgaaatggtcctttccggaaccattaataaggagatcatcgcccacctcaacacctgtggcggaaaagccgttggattgagtggaaaagatggacacctgattgaggcgtccaaaaaagacggtgggggaggagtggatctggggtatgtgggagagattgactcgaccaatccggaactgcttagggttctcctgaaagaaggatacattccagtcatatcacccatcgggttgggaaaggatggaaccagttacaacatcaatgccgataccgcagcttcccacattgcggtctcgcttcaggcgatgaaattgatcttcatgaccgatgttgagggaattctagaaaacgggaagctttgtgcagaactgaaacatgatcaggcattgagcatgatcgattccggagtcattgagggaggaatgaagcctaaggttcaagctgcattgaatgccgtcacccagggagtggaatcggcccagatcatactcggcacagacccacattcggtgattacagaattatttactgatcaggggataggaacgaaaatcgttgcctgag

SEQ ID NO: 250977 - DNA, 320 bp, Unknown
  Bacterial polypeptide expressing nucleotide sequence isolated from the Sargasso Sea
catgagtaatttaatcaataaaatagcaaaacaaatttccgtttctaaaaaagaggttaactctaatcttagaaaatatattaatgaaattatagttattaaatatggtggcagtgccatgttagacaaaaaactatctttaaacttttttcaaaatattaaagccctagttgatttagacataaaaccaattatagttcatggcggagggcctcagataaatgaaatgttagataaagtaaatataaaacataaatttttcaaaggcatgagaataacagacaaaaaaacttttgatattgtagagatggttttatcag

SEQ ID NO: 250978 - DNA, 598 bp, Unknown
  Bacterial polypeptide expressing nucleotide sequence isolated from the Sargasso Sea
atggatttgaaaaaaatattacccaaagacgggccgccaatagaagaggtcacaaaatatattgaaaaatataaaaatgaattaattgttattaaatatggtggaaatgtttttattgatagaaatatatttaataactttatattagacatatgtttattaaataagctgggactttctatagtggtggttcatggaggtggaccaagaattaagagagaactagacaaatcaaatataaaatcaaaatttataagaggattaagagttactgataaaaaaattataaatattgttgagcgagttcttattgattttaacaatgatattgtatcttccctagaaaaaatgggatctaaagcaatttctataaatacaaaaaaaaataatataatcgaggtggtaccagaagcaaaagagcttggttttgttggtctaccaaacaaaattaataacaacattttattagataatattaaacaaaatagaatacccattgtttccccattaggtttggataagaataatcaaacacacaatattaatggtgataatgcggcgatggctgttgcaaaatctcttaaatcgagaagattgc

SEQ ID NO: 250979 - DNA, 439 bp, Unknown
  Bacterial polypeptide expressing nucleotide sequence isolated from the Sargasso Sea
ccatggattagtgggagaggtcacaaaaatcaatcctgaaatattagatcctcttatttctcaaggatacatcccaattatttctagcattggatcaaccttggagggtatttcccataacatcaatgcagattttgttgctggagaaattgctgctgcaataaatgcagaaaaacttattcttcttactgatactcaagggattttaaaagaaaaagataacaaaaatagtcttcttgaaaaaactaatctcaaagaggcaagagattttattgataaaaaaattgtgactgaaggtatgattccaaagacagaatgctgtataagagctttagcacaaggagtcaaagcagctcacataattgatggaagaatagaacattcattacttcttgagatttttacaaattccgggataggcacaatgatagtagcctaa

SEQ ID NO: 250980 - DNA, 867 bp, Unknown
  Bacterial polypeptide expressing nucleotide sequence isolated from the Sargasso Sea
cacccgatgccttgcgggttgaggtccttagcgaagcactgccttacatccagcgcttccgtggccgccgggttgtcatcaagtacggcggtgccgccatggtgcgggaggacttgcgcgatgcggtttttcgcgatgtggccttactcgccagtgtcggtgtggagccggtggtcgttcatggtggcggcccagagatcaaccagtggctgaatcgcctcgccattgaaccggtgtttcaggagggcctgcgggtgacctgccctgacaccatggatgtcgttgagatggtcttggtcggtcgcgtcaacaagcagattgtcaacggactgaaccgggttggtggccgggctgttggcttgagcggtgccgatggcgcgctggtgcaagcccgtacccatggcgatggttctttggggttggtgggtgatgtggctcaggtggacccatctgtgatcattcccctgctcgatcagggctacatccctgtgatctcgagtgtggctcccaaccatgaaggccagccttacaacatcaatgccgacacagtggctggtgaactggccgcggcgatggatgccgagaagctcattttgttgaccgataccccagggatcttgcgtgatcgtgatgatccccagtccttgatcgatcagctcagcctttcagaagcccgggaactcatccattccggcgtcgtggctggtggcatggttccaaaaacccagtgctgtattcgtgccttggcccaaggggtacgggcggcccacatccttgatgggcgcgttccccattcgttgctgcttgaggtgttcaccaactcaggcatcggcacgatggtcgtgggaagccgccagcagggctgac

SEQ ID NO: 250981 - DNA, 428 bp, Unknown
  Bacterial polypeptide expressing nucleotide sequence isolated from the Sargasso Sea
ccatgtcggcgaagtggccagcgtgaatgtggatgtgatcgacatgctcacccgcagcaacgtgattccggtgattgcgcccatcggtgtcggcccggacggtgcgtcctacaacatcaacgcagacctggtggccggcaaggtggccgaggccatgaaggcggagaagctgatcctgctgaccaacgtctccggcctgaagagcaaggacgacaaggtgctgaccggcctgactgcgcagcaggtcaacgacctgatcgaagacggcaccatccacggcggcatgctgccgaaaatccgttgcgccctgagtgcggtggaaaacggcgtgcgtacctcccacatcattgatggccgggtggcccatgcctgtctgctggaaatctttaccgacgaaggtgtcggtaccctgatttcccgtaactgaa

SEQ ID NO: 250982 - DNA, 325 bp, Unknown
  Bacterial polypeptide expressing nucleotide sequence isolated from the Sargasso Sea
aatggatttaaaaaagattttacctacagacggaccgccaatcgaagaagttttgaaatatgttgagaaatacaaaaatgaaataatagttattaagtatgggggcaatgtatttattgatagaaaaatttttgataattttattaaagatttaagtgtacttaacaagcttggtttgcaagtagttgttgttcacggaggaggaccaagaataaaaagagagctatctaaacaaaatattgagtccaaatttataagaggtcttagagttactgatgaaaaaattataaatgttgttgagacagtgcttattgagtttaatgag

SEQ ID NO: 250983 - DNA, 388 bp, Unknown
  Bacterial polypeptide expressing nucleotide sequence isolated from the Sargasso Sea
aatgaataataatattgaagaattaaataaaattcttcctgaaaaaggacctaatataaatgaggtttcaaaatacatagaaaaatataaagacgatataatagtaattaagtatggaggaaatgtttttattgatagacaaatttttaacaattttgtaagcgatttatctgtattacaaaaacttggtctatctgttgtagttgttcatggaggaggaccaagaattaaaagagagcttgatagatcaaatatttcctcaaaatttgttagaggtctaagagttactgatgaaagaattataaatatagttgaaaaagttctaatagaatttaatgaagatattgtttcctctttaagcgacttaaatgcaaaggcaatttcacta

SEQ ID NO: 250984 - DNA, 674 bp, Unknown
  Bacterial polypeptide expressing nucleotide sequence isolated from the Sargasso Sea
ttcaattattgttgttcatggaggtgggccaagaattgaaagaaagcttaaggaggaaaatattcaaacaaaatttataaatgggttaagagttactgatgaaaaagtaatttctatagttgaagatgtgttaattgactttaataaggatattgtaaattctttgaaaaagaaaggatcggaagccgtgtccgttacctcaaaactaaataatataattaatgttgtgccagataacaaagaacttggatttgtcggaatacctgcggatataaatattgaatttcttaaaaatgtaataaataaaaaacagattcctgtaatagcgcccttaggaattgataaaaataaaaatacatacaacataaatggtgatactgcggctagcgctatagcaaaaagactcaagtcaagaagacttctgcttatgacaaatgtggaaggtgtttatgacgataggaaaaccttaatatcagaaattaaaccttttgacatagaaaatctagttaaattaaaaatagttcaaggtggcatgatacctaaaattaaaaattgtattgatgcagttgaaaatggagtaaggggtgtagttatacttgacggtagaaaaccacattcgatattagatgaaatattttcagataaaggttcgggaactctaataagaaaatgaa

SEQ ID NO: 250985 - DNA, 697 bp, Unknown
  Bacterial polypeptide expressing nucleotide sequence isolated from the Sargasso Sea
atggaactagaaaaaattttacctaaagatggtcctcctattgaggaagttcagaaatacgtccagaaatataaaaatgaattaatagtaattaaatatggcggcaacgtatttattgacagagaaatttttaataattttatatctgatttaaaaattttaaacgagttggggctttctgttattgtagtgcatggtggaggtcctagaataaaaagagaattagataaatcaaacatcaaatcaaagtttattagaggcttaagggtaaccgacaaaaaaatcataaacattgtagaaaatgttcttatagattttaacaatgatattgttaaatcattaaaagaaaaagggacaaaaggagtttcaattaatacaaaaaataaaaatgttattcatgttgacccagagtcaagtgaattgggctttgtaggtgtgcctaaaaaaattgaatataatgttattaataaaatattaaatgaaaattttattcctgtaatttctcctttaggattaggaaaagatctacaaacttataatataaacggtgacactgctgcaggggcaatagccaaatcgctcaaatcaagaagattgcttttaatgacaaatgtagagggagttttagacaaaaataaaaagctaatacaagaaatttcctcttccaaaattttagagatgatcaaagatgagacaa

SEQ ID NO: 250986 - DNA, 691 bp, Unknown
  Bacterial polypeptide expressing nucleotide sequence isolated from the Sargasso Sea
atgaagcatactgaagaagaattaaaaagaattcttccagaaaatggacctactctaaatgaagttcaaaaatatattgaaaaatataaaaatgatttaatagtcattaaatatggaggaaatgtttttattgatagaaaaatttttaataattttatttctgatcttagtacattaaaaaaattagggctttcagttgtagttgtacatggaggcggtcctagaataaaaagagaattggataaatcaaatattcaatcgaaatttataagaggattaagagtaacagatgagaaaattataaatatagttgaggatgttttaattgatttcaataaagatattgttgaatctcttaaaaatctagggacaaaaggaatttcaattcacacaaaaaaaaataatattattgaagttattcctgagtcaaaggaacttggctatgtaggaagaccaagtaaaattaaagttgatgtaattaaagaaatattaaaaaataatatgattcctattatctctccccttggtctaggagagaataaacagacatataatattaatggagatactgctgcaggcgctatagcaaaatcactaaaatcaagaagattaattttaatgacaaatatagaaggggttctaaataaagaaaaaatattaattgaggaaataacttctgctgaaattataa

SEQ ID NO: 250987 - DNA, 351 bp, Unknown
  Bacterial polypeptide expressing nucleotide sequence isolated from the Sargasso Sea
aatgtccgaagaaaataatttagaagaaataaaaaagttttggccaaaagatgctccagatgtgacgaatgttccaaaatacgtaaaaaaatataaaaaagatttaatagtaataaaatatggtggccatgttttaattgatagaaatatttttaataattttattcaagacataagcatattaaataaactaggtctttcaattgtagttgtacatggtggaggtccaagaatagaaagggaattaaaaaaagaaaatattcaaagtaaatttataaatggtctaagagtaacagataaagatgttattaatattgtagaaaaagttcttatagattttaataaagatat

SEQ ID NO: 250988 - DNA, 822 bp, Unknown
  Bacterial polypeptide expressing nucleotide sequence isolated from the Sargasso Sea
aatgaatttaaaaaaaatacttccaaaaaatggaccgccaattaatgaagtgtttaaatacgtagaaaaatataaaaatgatctcattgtaataaaatatggaggaaatgtttttatagacagaaatatctttgacaattttataacagatataaacatacttaataagttaggaatttcttttgtagttgttcatggtgggggtcctagaatagaaagagagcttgacaagtcaaatatccagtcaaaatttataaggggcctgagagtgactgatgaaaagataataaacattgtagagtcagttttaattgattttaataatgatattgttaaatctttaaaaaagtttggaactgaagcagtatcaatccatacaaaaaaaaataatattatcgaggtaattccagagacaaaagagcttggttatgttggggttcccaagaaaattgataacagttttatagagaaaattcttagtcaaaaaaaagttccaataatttcaccgttaggcttaggaaatgacaatcatccatataatattaatggtgatacagctgctggtgcaatcgcaaagtcattaaaatctaggagattgctactaatgactaatgtggagggagttttagataaagacaaaaaactaattaatgagatttactcatcagaagttttaaaaatggttgaagataatactattacagagggtatgataccaaaaattaacacttgtttagatgctgttaaaaatggagtcacagcagtgggaataatcgatggtagaaagcaacactccatattatttgaaattttttctgacaa

SEQ ID NO: 250989 - DNA, 646 bp, Unknown
  Bacterial polypeptide expressing nucleotide sequence isolated from the Sargasso Sea
tttgttgacggattacgggtcacagatgaagcaaccatatccgtcgttgaaatggttttggctggagggatcaacaaggcacttgttgccgccatcaccaatgctggtggtcgtgctgtcggtatctccggcaaggatggtggcttgataatggctcgcaagctgttggctcaggcgaaatcagctgaaagcgcgatagagaaagctgttgaccttggctttgttggtgaaccctcgaagatcaacactgaagttctggacgccctcggtgaaaaaaatctgatccccgttgtggctccggttggtggtggtgaggacgggatgacttacaacatcaatgctgacacggcagccggtgctatctctgctgcgcttggtgccacgcggatgttgatgctgacagatgttccaggggtgctcgacaacgctggcaatctgatgtccgaactcacggtgagcgaggcagaaagcctgatccatgatggtacggtctctggcgggatgatcccaaaggttgagacctgtattcaggctgtccttggcggcgccgaagctgcggttatcatggacggacgcgcgccgcatgccttgcttgtcgaattgtttaccgaacatgggatgggcacctttatcaagcctgactaga

SEQ ID NO: 250990 - DNA, 868 bp, Unknown
  Bacterial polypeptide expressing nucleotide sequence isolated from the Sargasso Sea
atgtcaaagattacagaggaagaaatcaaaaaaattttacctaaaaacgggccacctctaaaggaggtatctaaatatattgaaaaatataaaaatgaattaattgttatcaaatatggaggaaatgtttttattgatagaaatatatttaacaattttatagaggatataagcctactaaataaattgggattatcaattgtagtagttcatgggggaggaccaagaatcaaaagagaattagataaatcaaatattcattcgaaatttataaaaggactaagagtaactgataaaaagattatagatattgtggagtcagttttaattgattttaacaatgatatagtttcttctttgaataagattggatctaaggctatttcaattaatacaaagaataataatataatcgaaattattccagaaatagaagagcttggctttgttggtatcccaaataaaataaatataaatataataaaagatataattaaggataatataattcctattgtatctccattaggtttggggataaataaccaaacatataatattaatggtgacactgctgcaggtgcaattgcaaagtctttaaaatctagaagattactcttaatgacaaatgtgaaaggtgttctagataaagaaaagaatcttatagaagaaatatcctcatttgaaattttagagatgattaaagatgggactattactgagggcatgattccaaaaattaatacctgtttagactctataaaaaatggagttactgctgtaggaataatagatgggagagaaaaacactcaatattatttgaaatattctctgataaaggctctggaactttaataagaaaatgag

SEQ ID NO: 250991 - DNA, 712 bp, Unknown
  Bacterial polypeptide expressing nucleotide sequence isolated from the Sargasso Sea
caggttggtttacaccctgtaattgttcatggtggtggacctcaaattactactcatctagaaaaactaggtattaaatctaaatttgccaatggaatgagaataactgaccctgaatcaattcatataatagaaatggtattagggggcttggttaacaaagatatcgttaattctattacttcacatggcggtaaagcggttggtttatctggtaaagatggcggtttaataagagcgaaaaaaattattggtgaaggcgagtttaagaatatcgattttaaaaatactggtacagtacaaagcatagatccagaagtagtgagtcttttagatggctcaccatttataccagttattgcgcctataggcattggtgatgatggaactacttataatattaatgcagatttagttgcaggtaaaatcgcacatattttacaagctaataaatatttaattctaactaatactactggtattttagatggtgataaacatttaataaaatcaataaatgcaggtaaagttaaaaaattaataaatcaaggtgttatatctaaaggtatgctacctaaagtagagtccgctcttgaagctgtctcgtatggtgttgaacatgtacaaataatagatggtactgttgaccatgctgtgctacttgaattatttacagatgaaggtattggcacaatgatacgaaggttataaa

SEQ ID NO: 250992 - DNA, 862 bp, Unknown
  Bacterial polypeptide expressing nucleotide sequence isolated from the Sargasso Sea
atgggtatatctgtaaaacaagctaaaaatatatcttctgtactaagcgaaggccttccatatattcaaaaatttaaagataagatcatagtggttaaatatggtggcgctgctatgtcggaccaaaatttaaaaggaaactttgctagagatattgccttaatgagccttgtgggcatgaagccagttatagttcatggtggaggtccgcaaatagcgaaagaacttaagaaatctggagtaacttcaaattttatatctggccacagagtcaccgacaaacctactatgtcagtagttaaaaagattcttggtaagaaaattaataatgaaattgttaacttaatcagaaattcagggggggatgcggttagttttaatcacgtaaaacctaagattataaaagcttcaaaattcattggtcctgataaaaatgatttaggtttggttggaagggtagataaaatattggtttcggagctaaaaaatactatctcaagaggatctattcctgttattgcacccataggaataaataaacaaggaaatttcttaaatataaatgcagacgtagttgctggaaaagtagctgaaagcttacaagcagaaaaattgattcttcttaccgatataaaaggaattttgaataaaaataaaataatctcaaagatttctgcccacaaaggaatgcagttaattaagaatcgtgttatccaaggaggcatgatgcccaaattaattgctgctttagaagctaaaaagaaaggcgtaaaatcgtgtcatattattgacgggaggttgcctcacgcagttctacttgaagttcttacagctgaaggtgtcggaactatgataagctaaa

SEQ ID NO: 250993 - DNA, 588 bp, Unknown
  Bacterial polypeptide expressing nucleotide sequence isolated from the Sargasso Sea
aatgaaatttgattttttatctgaaagtgagcaagcttattttatacataaagcctcaactcttgttgaagcacttccatacataagacaacatagtggggatataattgtaattaaatatggtggacacgcaatgggcgataaaaaactttcatctagctttgctagagatattggtcttttaaaagaaattggtatttcacctgttattgttcatggaggagggcctcaaattggcgaaaaattaaaaagcaaaaatataaattcaaagtttatagagggcttaagaataactgatagtcaaacaataaaagttgttgaagaagtattatcaaaagagattaattcggaaattgtaaactcaatatcttcaacaggaggtaatgcggtaggaatttctggaaatattaataatctaataactgcgacaaaaattaatgttgaagtaaaagataatgactcaaacatagaaaaaattgttgatataggatttgttggagaacctataaatttgaaaagtgaagttattttgagtcatataaataatggggaaatccctgttattgccccgcttggtatcgatgataa

SEQ ID NO: 250994 - DNA, 808 bp, Unknown
  Bacterial polypeptide expressing nucleotide sequence isolated from the Sargasso Sea
atggctataactagaaaacaagctgaaaacattgctttagtactaagtgagggattgccttatatacaaaaatttaaagggaagataattgtcgttaaatacggaggagctgcgatgacggatgaatctctaaaaaaaagcttcgcaagagatatagcacttatgaaacttgtaggcatgaatccggtaataattcatggaggaggacctcaaattggcaaagagctctccaaagctgggcttgaatctgaatttatcggaggtttaagggtaacaactaaatctgtgatgagtgtagtaaaaaaaatacttggcacacaaataaatcatgaaatagttaggttaattaaacattttggaggtaacgcaatttccttcaaccataataagtattcgattattagagctacaaaaagaaataatgatgaaggtccagaccttggatatgttggaaaagttgaaaaaattctgactggagagataaagaaaaaaattgataatggctttatccctgttatagctccaatcggtaaatcaaaaaataatgattactggaatattaatgcagatgtcgttgctggagaggtggcgcagtcactaaaggctgaaaaattaattctattaaccgatgttaaaggcattggagattcagaaaataaacttatctctaagatttctctaaaaaaaggtcaaaaagttctcaaggaaaaattcatcaaagggggaatgactcctaaattaacttctgcgttagaagctaggaaaaatggtgttaaatcttgccacattatagatggaagagttcctc

SEQ ID NO: 250995 - DNA, 868 bp, Unknown
  Bacterial polypeptide expressing nucleotide sequence isolated from the Sargasso Sea
cccgcagccatcgcgccggtattggcagaagccctgccgtacatacagcattttcacggccgcaccattgtgatcaagtatggcggcaacgccatgaccgacgagtcgctgaagcgcagtttcgcccgggatgtcgttctgatgaagctggtcggcatgaacccggtagttgtgcatggcggcggcccccagatcggccaactgctcgaccggattggcaagaagagtgagtttgtcgagggacttcgcgtgacggacagtgaaaccatcgacgtggttgagatggtactgggtggactcgtcaacaaggatatcgtggccctgatcaatgcccatggcggccgcgctgtggggttgtctggtaaggacggcggattgatccgggcgcgcaagctggtgctgcgcaaggagggcgcctccgatgaagatgagacagtggaattgggattcgtgggtgaaatcgagtctatcaatccggctgtggtcgacacccttgatgagggagatttcattcccgtgatcgctcccatcggtacgggtgaggatgacaagacctataacatcaatgcagacaccgtcgccggtaaactggcggtcacactgggcgccgagaaactgatccttctcaccaacacgccgggtgtgctgaaccagcagggcgaactgttgaccggtctatcggagagtcgggtccaggaactgattcaggaaggtgtcatcaccggcggcatgttgcccaaagtccgctgtgctctggatgcagtctcaggcggggtcaggaccgcgaccatttcagatggtcgggtgccacacgctactatgctggaaaccctgactgatcagggtgtcggcacccagatcggacgca

SEQ ID NO: 250996 - DNA, 783 bp, Unknown
  Bacterial polypeptide expressing nucleotide sequence isolated from the Sargasso Sea
actgacttctgacaatggggaatatctagtaaaacaagctaaaaatatttcttcagtgttaagtgaaggccttccttatattcagaaatttaagggtaagacaatagtggttaagtatggtggtgctgctatgtctgatcacagcttaaaaaggaacttctcaagagatatagctttaatgagtttagtgggaatgaagccagtcattgttcatggtggaggacctcaaataggtaaggaactgaagaaatctggaatagtttctaattttaattctggtctcagggttactgataagcccactatggctgtagtcaaagaaatcctaggaaagcaaatcaatcgagaaatagtcaacttaatcaaaaaatctggcggtaattcaattggttttaatcatataaaaccaaagataataaaatcgtctaaatatataggtccggataagcttgatttaggtctagtaggcaaagttgatagaattttaattacagaactaaaaaaggctttatctcttgatttaattcctgtgattgctcctattggagtaagtaaagacggaagtttcttgaatatcaatggtgacgtagtggcaggaaaagttgctgaaagcttaaaagcagaaaaattgatacttctaacagatataaaagggattctagatgacaataatcaattgatctcgaagatttctcctggcaaaggtaccaagttaattaaaaataacgtcatccgaggaggcatgactccaaaattaaaagctgctttagaggcaaaaaagaa

SEQ ID NO: 250997 - DNA, 556 bp, Unknown
  Bacterial polypeptide expressing nucleotide sequence isolated from the Sargasso Sea
aatggatttagaaaaaatattacctgagaatggtccgccaattaaagaggtttcaaaatatattgaaaaatacaaaaatgatttaatagtaattaaatatgggggaaatgtttttattgatagaaatatatttaaaaattttataatggatatcagtatattaaataagttaggactatcaattgttgttgttcatggcggtggcccaagaattcaaagagagcttgaaaaatcaaatattaaatcaaattttatcagggggctaagagtaactgacaaaaaaattattaatatagttgagaatgtattgatagattttaataaagatattgtagactcattgaagaaggaaggcactaaagcaatctcaataaatactaaagaaaataatatcatcgaagttatgcctgaatctaaagagcttggttttgtaggtatacctcattatatcaatattgatattataaaaaataaaatcgaaaaaaatattattccaattatctctccccttggattaggagagaataatcaaacttataatattaacggagatact

SEQ ID NO: 250998 - DNA, 696 bp, Unknown
  Bacterial polypeptide expressing nucleotide sequence isolated from the Sargasso Sea
aatgtctgaggaaaaaagtttagactcaataaaaaaattttggcccaaaaatgctccggatattaagggtgttcaaaaatatatcgataaatataaaaaagaaattatagtaataaaatatggtggtaacgttttaattgatagaaatatttttaataattttattgaggacataagtgttttaaataaattaggcctatcaattatagttgttcatgggggcggcccacgaatcgagaggaaattgaagaaagaaaatatacaaacaaaatttataaatggattaagagtaactgatgaaaaggtaatttcaattgttgaagaagtattaatagattttaatatagacattgtaaattcattaaaaaaagaaggtgcgcaagcaatttctatcacttcgaaattaaataatataatcagcgtcataccagacaatgaagaacttggttttgttggtattccaaatagtattaatacagaatttttaataaaaattattaataaaaaacaaatacccgtgatagctcctttaggtattgataaagataaaaatacatacaatattaatggtgatacggctgctagtgccatagcaaaaaagcttaagtcaagaaagcttttgttgatgacaaatgtggaaggtgtttacgatgatagaaaaaatttgatatcagaaattaaaccttttgatatcga

SEQ ID NO: 250999 - DNA, 844 bp, Unknown
  Bacterial polypeptide expressing nucleotide sequence isolated from the Sargasso Sea
aatgtcaaaaaatacttctctagatgagataaaaaaattttggcctgaaaaagctccagatattaatatagttcagaaatatgtaaaaaaatatgaaaaagaaaaaatagtaatcaaatatggtgggaatgtccttatcgatagaaatgtctttaataattttatatctgatataaatgttcttaataaattaggtttatctataattgtagttcacggtggaggcccaagaatcaaaagagaattagaaaagaaaaaaattgattcaaaatttattaatggcttaagggtgactgataaaaatataattgacactgtagaagaagttttaattgattttaataaagatatagtaagttctttgaggaaactaggatctgaggcagcttcgtttcatactaagactgataacataatagatgttgaaccggaaagagaggagctcggatttgttggaatacctaataagattaatgatagtttaattgaaaaggcattaaatgagaataaaattccaattatagcgcctttgggtttaggaaagtatgatcaaacatataatattaacggtgacactgcagcgagtgcaatcgcaaaaaaacttaaatcaagaagacttatcttaatgacaaatgttgagggtgtctatgatgatcaaaaacaattaatatcagaaattaaacctattgatcttgaaaatcttatcaaatggaaagttgtacaaggtggtatgatacctaaaatagaaaattgtgttgatgctgttcaaaatggagtaaggggtgtagttattctagacggaagaaaacctcactcaattttacacgaaatattttctgattag

SEQ ID NO: 251000 - DNA, 427 bp, Unknown
  Bacterial polypeptide expressing nucleotide sequence isolated from the Sargasso Sea
ttttgttggagatccgagccacattgatccgacagttctaaataagtttgctgccgcaaatatcataccggtaatcgctccgatcggattgggcgaggaggggcagacctttaatatcaatgccgatacagtcgctggggcgatagcttctgcggtgggggcagcgaagctagtgatgatgactgatgtcgaaggtcttatggatagttccggtaaattagtgccaaaattgacggaaattgaggccgcggcgatgttgcgtgacggaacgatttctggaggtatgattcctaagatcgaaacctgtgttgccgctataaaaggaaaaacggaggcggcacatattcttgatggtcgtgtgcctcatgtattgctgttggaaatttttactgaacatggcgttggcactatgattaaatccgagtaa

SEQ ID NO: 251001 - DNA, 280 bp, Unknown
  Bacterial polypeptide expressing nucleotide sequence isolated from the Sargasso Sea
aatgaaatttgattttttatcagagagtgatcaagcttattttattcataaagcatcaactttagttgaagctcttccttatatacgtcaacatagtggagaaataattgtagttaaatatggtgggcatgcaatgggtgataaaaaactatcagatagttttgccaaagatatgggtctattaaaagaagttggtatcaaacctgttattgtacatggtgggggacctcagattggcgataggttaaaaagtaaaaatatatcttcaaaatttgttgag

SEQ ID NO: 251002 - DNA, 795 bp, Unknown
  Bacterial polypeptide expressing nucleotide sequence isolated from the Sargasso Sea
aatatttaaaaaaatattcaaaagaaaaaatagttatcaagtgtgggggtcgtgttcttttggatcctattttatttgaaaattttattaaggatgtcgtgactttaaaaaaattgggtttaactccattattagttcatggcggcggtttaggaataaaaaaaaaattagacgaatcaaatattaaaagtaactttattatgggtttaagagttacagatgaaaaaatgattaaaatagttgaagatgtaatgtttgaatttaacaaagaaattgttgaaactttagaaaaagaatcctgtaaagcaaaatctattacgataagagaaaataatgtaatttatgttcgtcaaaaaaataaagagctaggatacgttggcagtccaactagcatagatgataaattaataaaaaattttgttgatgatgattttataccggtaatagccccaatgggtgtagatgaaaaaaatcaagcctataatataaacgctgatactgcagctggagcgttagcgataagtttaaaatcaagaagattgttgctaatgactgatgttgagggtgtttacgatgaaaataataaattaatttctgaaatcaaatcggcagaagcagaaaaactaatttataatcaaacaattcatggcggaatgattccaaaaataagaacttgtataaatgctgtgaacaacaacgtccgaggtgttgtgattatcgatggcagaaagcctcattcaattctttttgaattattttcagatcaaggagctggaactcttataagaaaatgaa

SEQ ID NO: 251003 - DNA, 514 bp, Unknown
  Bacterial polypeptide expressing nucleotide sequence isolated from the Sargasso Sea
ttggaagaaataaaaaaattttggcctgaaaaagctcctgatattaacatcgttcaaaaatacgtatcaaaatatgaaaaagaaaaaattgttattaagtatggaggaaatgtactaatagatagaaaagtatttaataattttatttcagatatagatgtgctcaacaaattaggtctttctattgtggtagttcacggaggtggtccaagaatcaaaagagaattagataaaaaaaagattatttcaaaatttattaatggtttaagagtaacagataaaaatgtcataaatattgttgaagaggtattaattgattttaacaacgatatagttaactctcttaaaaagctaggcacagaagcaacttcttttcatacaaagcaggataatataattgaagttgatcctgaaaaagaagaactaggttttgtaggaattccaaaaaaaattaaagcaaatttaatcgaagatgcactaaataaaaataaaattccaattattgctccattgg

SEQ ID NO: 251004 - DNA, 724 bp, Unknown
  Bacterial polypeptide expressing nucleotide sequence isolated from the Sargasso Sea
cccggtgattgtgcacggcgggggcccccagataggcgagttactggaacgtcttggcaaagaatccaaatttgttcagggtatgcgtgtcaccgaccgggaaaccatggacgtggtacagatggtgctcggagggctggtcaacaaagacatcgttaacctgatccagcataacggcggtcaggccatcggcctcactggcaaagacggtcggctgattaaagctcgcaagatggttctcaaggcaagcgatgcggatagccctgcattacaggcctcagagatcatcgacatcggccacgttggcgaagtgcagggtatcgacactcgcatcatcgacctgctcgccggcagcgattttatccctgtaatcgcacccatcggcgtagacgacaacggcgccagttacaatatcaacgccgaccttgtggccggcaaagtagctgaagtgctgcgtgcagaaaaactcattctgctcaccaacgtccccggcctgaaagacaaacaaggccagatcctcaccgggctcaccaccgaaagggtcaacagcctgatcaaggacggcaccatctacggcggcatgctgcccaagataggctgcgccctagaagcagtgcaaaacggcgtgcacactgcccacatcatcgatggccgggtgtctcacgccgttctgctagaaattctcacagacaagggcatcggcaccctaattagcaaagactag

SEQ ID NO: 251005 - DNA, 817 bp, Unknown
  Bacterial polypeptide expressing nucleotide sequence isolated from the Sargasso Sea
agctgatttacttacagaaactttaccttttatgaaacgttatgcaaataaggttattgttataaagtttggcggaaatgcaatgggtaaaaaggaatatgtaaacagctttgcaaaagatattgttttattacaacaagtaggaatgcttccggttgtagtacatggaggtggtcctcaaataggtgaaatgttatctaagcttcaaataaaaactgagtttataaatggacttagaataactgatgccgcaacaattgatgttgttgaaatggttcttagtggcgtaacaaataggtcaatagtttcagcaattgctaattctggatcaaaatcagttggtatttctggtaaagatggaaatttaataactgctagaaggctaattaaagttgacgaaaattctgactctaatgtggaaaaagcagttgatcttggttatgtaggtgaaccggaaaaaattgatcctcaagttattcatgctttaattaatgaaaaaatgatacctgtaattgcacctgttgggattggaaaagatggcttaacttataatataaatgccgatacagcagctggttctatttcagcagcaatgaaagcatctagaatgattatgttaactgatgttgcaggagttcttgatcaaaatggtaagttgattccagaattaacaatttcagaagcacaagaattaataaaaaataaaattgtcgttgggggtatgatcccaaaaattaaaacttgtattgatgcggttttaggtggtgcagaggcatctgtaattatggatggaagaatgtctcattctttgttgtta

SEQ ID NO: 251006 - DNA, 786 bp, Unknown
  Bacterial polypeptide expressing nucleotide sequence isolated from the Sargasso Sea
aatgaatctagaaaaaattataccaaaagatggtccttccatcgaagaggttaataaatatattaaaaaataccacaatgaaataattgtaataaaatgtggtggctcggtattgcttgataaaaatttattcaatcaatttattgatgatgtttgtgtaattaataaattaggattgtcagctatcgttgtacatggtggaggtaaaaacattaaaaaaaaacttgatcaacattatatagagtcaaaatttatagatggtttaagagttactgatgaaaaaacaattaaaattgttgaagaagcattgctagaactaaatactgaaattttaaataatataaataacaaagaagcaaatgcaaaatcagttactcctaaaaacggaaatgtaattaaaattattcccgaaaaaaaagaacttggatttgttggtgccccaaaagaaataaataaagaaatacttttaagtatagttagagaaaaaatagttccaattatagtaccattgggaattggagatgatggaaaaatttataatataaatgcagatgtagcagctgcagcgattgcaaaagaaataaattctagaagattattattaatgacagatgtagaaggagtgttagataaagataaaaaacttatctcagaaattaattctgaaacagcaaataatatgattaatgatcaatctatttcgggcggaatgatacctaaaattaatacgtgtattgatgctgtcaaaaatggcgttactggtgttgttatagtcgatggacgaag

SEQ ID NO: 251007 - DNA, 629 bp, Unknown
  Bacterial polypeptide expressing nucleotide sequence isolated from the Sargasso Sea
catgaagaatagtcaaaaaacccaaaagacagcgcaattattagctgcggcattaccttatatccagcagtatcaaggcaagacaatggtcgtgaagtatggcggaaatgccatgggagatagcctcgtcgaaactagttttgcgagggacatcgttttaatgaagttggtcggtattaaccctatagtggtacatgggggtgggcctcaaatagctaacttattggaaaagattggtaaaaaaacagagtttgttaatggtatgagggttactgacgacgagacgatggacgtggtagagatggttttgggggggttggtcaataaagagatagtaaatctgataaattcaaatggaggtagggctataggtcttactgggaaagatggtgaacttttgaaggcaaaaaagcttagtccgagtaatggggattcgttaactaaagtttctgaaattatcgatcttggccatgtaggagaagtaagctcagttaacaaggatttattaaatttttttactgatggagattttttgccgattattgccccaataggcgtaggtgatgagggcagatcctataacataaacgctgatttggttgctgggaaagttgcagaagctgttcagg

SEQ ID NO: 251008 - DNA, 646 bp, Unknown
  Bacterial polypeptide expressing nucleotide sequence isolated from the Sargasso Sea
aatgaatgattctcaaagagtatcaatattaagcgaagcacttccatatatacaaagtttctcaggtagaaaaattgttatcaagtatggaggttctgttatggaggaggagcatttaaaaaatgctttttttagagacatagcacttttatcaaccgtgggtgtttgtccgatagtaattcatggaggagggcctgagattaataattggttaaagaaattagaaatatctcctaaattcgaaaatggattaagaattactgatcaaaaaacaatggaaattgtagaaatggttctgatgggtagggttaacaaacaaattgtaaaaggcattaataaaactggatccttagctgtgggaatatcaggtcttgatgggaacttaattcaatctagagaattaggagatgggagccatggattagtgggagaggtcacaaaaattaatcctgaaatattagatccccttatttctgaaggatatatccctattatttctagtattggatcaaccatggagggtatttcccataatattaatgcagattttgttgctggtgaaattgctgctgcaataaatgcagaaaaacttattcttcttactgatactcaaggtattttaaaagaaaaagataacaaaaatagt

SEQ ID NO: 251009 - DNA, 385 bp, Unknown
  Bacterial polypeptide expressing nucleotide sequence isolated from the Sargasso Sea
aatgaaatttgattttttatcagaaagcgatcaagcttattttatccataaagcctcaacattagttgaagcattgccttttattagagagcatagtggagatacaattgtgattaaatatggtggacatgctatgggagatcctaagcttgctaaaagttttgcacgagatattggtttaatgaaagaagttggaatatatccaatagtagttcatggaggtgggcctcaaatcgcagacaaattaaaaactaaaaatattactacacaatttatagatggattaagagttacagatattgaaactgttaaagttgtagaggatgtcttgggaaatgaaattaatgctgaaattgtcaaagcaatcagtgactcaggtggaaaa

SEQ ID NO: 251010 - DNA, 826 bp, Unknown
  Bacterial polypeptide expressing nucleotide sequence isolated from the Sargasso Sea
ctgctgatcgaggccctttcctacatcaaacgttttcgtgaccggatcatcgtcatcaagtacggtggagcggcaatgatagagaaaaacctcaaacaaagttttgctgaagacattgtcctgctccaatcgcttggaatgaaaccggtgattgttcatggaggaggacctgaggtctcaaaagccatggagcagctcgggcagcaagtgcattttgtagagggactgagagttaccagtgcagagaatctaaaagtcactgaaatggtcctttccggaaccatcaacaaggagatcatcgctcacctcaacacctgtggcggaaaagcggttggattgagtgggaaagatggacacctgattgaggcttcaaaaaaagatggaggagaaggagtggatctggggtatgtgggagagattgactcgaccaatccggaactgcttagggttctcctgaaagagggatacattccagttatatcacccatcggtttgggaaaggatggcaccagttacaacatcaatgccgataccgcagcttcccacattgcggtctcgcttcaggcgatgaaattgatcttcatgaccgatgttgagggaattctagaaaacgggaagctttgtgcagaactgaaacataataaggctttgagcatgatcgattccggagtcatcgagggaggaatgaagccgaaggttcaggcagcattgaatgccgtcacccagggagtagaatcagcccagatcatacttggtacagacccgcactcggtgattacagaattatttacagatcaggggataggaacgaaaatcgttgcctgaa

SEQ ID NO: 251011 - DNA, 681 bp, Unknown
  Bacterial polypeptide expressing nucleotide sequence isolated from the Sargasso Sea
aatggaccttaaaaaaatacttcctgaaaatggacctcctataaatgaagtaaaaaaatatattgaaaaatataagaatgatttaatagtaataaaatatggtgggaatgttttaattgatagaactatatttaataattttattacagatctgagcatattaaataaaattggtctttcaattgtagttgttcatggtggaggaccaaggatcaaaagagaattagaaaaatctaatattaaatcaaagtttataagaggcctaagggttacagatcaaaaaataatagaaattgttgagtcagttttaattgattttaataatgatattgtaaattctcttaaagaaaaagaaaccgaggcaatttctataaatacaaaaaataacaatataattaaagttataccagaagcagaggagttaggttttgtaggaataccaaatataattaataaccaaattttactaaatataattaaacaaaaaaaaattccaattatttcacctcttggtttggatgaaaaaaatcaagcacacaatatcaatggtgatacggcagcaatggctgtagcaaaatctttgaaatctagaagactgcttttaatgactaatgttgatggtgttttaaataaagaaaaaaaattaatagaagaaatatcttcttcagaaattttaaaaat

SEQ ID NO: 251012 - DNA, 655 bp, Unknown
  Bacterial polypeptide expressing nucleotide sequence isolated from the Sargasso Sea
atgaccctcagccgtgaagctgccacccaattcgccaaggtactttccgaggcgctgccctacatccgccggttcgtcggcaagactctggtcatcaagtacggcggcaacgcgatggaaagcgaggagctgaaaaccggcttcgcgcgcgacatcgtgctaatgaaggcggtcggcatcaatccggtggtggtgcacggtggcggtccgcagatcggcgacctgctcaagcggctgaacatcgaaagccacttcatcgacggcatgcgggtcaccgacagccagaccatggacgtggtggagatggttctcggcgggcaggtaaacaaaagcatcgtcagcctgatcaaccagcatggcggcagcgccattggcctgaccggcaaggacgccggcctgatccgcgccaagaagctcaaggcgacccgccagacaccggagatgaccaagccggaaatcatcgacattggccatgtcggcgaagtcaccggcgtcaatgccgagctgctggaaatgctggtgcagggcaacttcatcccagtgatcgcgccgattggcgtgggcgagaacggtgagtcctacaatatcaacgccgacctggtcgccggtaaggtggccgaggcgctgaaggccgagaagctcatgctgctgacca

SEQ ID NO: 251013 - DNA, 871 bp, Unknown
  Bacterial polypeptide expressing nucleotide sequence isolated from the Sargasso Sea
attcacgcgcaggacagcctccgggttgaggtgctcagtgaagctctcccctacatccagcggttccgtggccggcgggtggtgatcaagtatggcggtgccgccatggtccgggatgatttgcgcgatgcggtcttccgggacgtggccctgctagccagcgtcggtgtcgagccggtggtggtccatggcgggggaccggaaatcaaccaatggctcaatcgtctgtcgatcgaagcggtgtttcaggagggtctgcgggtgaccgatccagacaccatggatgtggtcgaaatggtcctagtgggccgcgtcaacaaacagatcgtcaacggccttaaccgcgttggtggacgggcggtgggtctatcaggggctgatggtggtctggtgcaggcccgcacccatggcgatggttcactcggacttgtgggcgatgtggctcgcgtcgatccctcggtgatcattccgctgcttgagcagggctacatccctgtggtctccagcgtcgcgcccaatcacgagggtcagtcctacaacatcaatgccgacacggtggcaggtgaactggccgctgctcttgatgccgaaaagctggtgttgctcaccgatacccccggcatcctcaaagacagaaatgatccagcttcactgttccgtcagttgagccttgccgaggcccgcgccttgattgacgatgccatcgttgctggtggcatggtcccgaaaacccaatgctgcatccgtgccttggctcagggggttcgcgccgcccacatccttgatgggcgcgtcccacacgccctgctgctggaggtgttcaccaaaaccggcatcggcaccatgttggtgggcagctgccgcaactagg

SEQ ID NO: 251014 - DNA, 871 bp, Unknown
  Bacterial polypeptide expressing nucleotide sequence isolated from the Sargasso Sea
atgtccgaggaaaaaagtttaaatgaaataaaaaaattttggcctaaggaagtgccagatattaataatgtaccaaagtatataaaaaaatataaagaagacttaatagttattaaatatggtggtaacgttttaatagatagaaagatatttaataattttatagaggatataagcatattaaataaactaggtctttcaattatagttgtacacggaggaggtccaagaatagagagggagctaaaaaaagaaaatattcaaacaaaatttataaatggtttaagagtaacagatgaaaaagtaattaaaattgttgaaagggtattgattgattttaataatgacattgtaagctctttaaagaaaaaaggtttaaaagcaatctcaataaattctaaaatcaataacgcaattaatgtaattccagataaacaggaactaggttttgtcggtgtaccagataaaattaattcagatattattaagagtataattagtcaaaatcaaatacctatagtagcaccattgggtttggacaaaaataatcaaacatacaatataaatggagatactgctgctagtgctatagcaaaaaaactaaaatctagaaggcttttattgatgaccaatgttgagggagtttacgatgatagaaaaaatttaatatcagaaataaaaccttacgatatggaaaatttggtaaatttgaaaattgttcaaggcggcatgctaccaaaaataaaaaattgtatagatgcagttgaaaacggagtaagaggtgtcgtaatacttgatggaagaaaacctcactctatcttaaaggagattttctcagacaaaggtgctggcaccttaataagaaaatgaa

SEQ ID NO: 251015 - DNA, 406 bp, Unknown
  Bacterial polypeptide expressing nucleotide sequence isolated from the Sargasso Sea
aatggatcttgagactatattgccaaaagatgggccagccataaacgaagttaaaaagtatatggataaatataaagatgacttaatagtcatcaagtatggtggtaatgtttttattgatagacaaatttttgacaattttataactgacttaactatactaaataaattaggtctttctattgttgtcgtacacggtggaggaccaagaattaaaagagaattagaaaaatcaaaaattgaatcgaaatttattagagggttaagagtaacagatgaaaaaattataaatatagttgagtcagtcttaatagaatttaatgaagatattgtttcatctttaaaagaaagaggatttgaaggcatatctttaaataccaaagaaaataatgttattaatgttgaa

SEQ ID NO: 251016 - DNA, 703 bp, Unknown
  Bacterial polypeptide expressing nucleotide sequence isolated from the Sargasso Sea
aatgaaatttaattttttatctgaaagcgatcaagcttactttattcataaagcatcaactctagtagaagctcttccatatattcgtcaacacagtggtgagacgatagttattaaatatggaggacatgcaatgggagattcaaaattatcttcaagttttgcaaaagatataggtttattaaaagaagtaggtatttcgccaattattgttcacggaggaggacctcaaataggtgaaagattaaaaagtaaaaatatttcttctaagtttattgatggattaagagttaccgataaagaaactataaaaattgtagaggaagttttatctaaagatattaattcggaaatagttgggtcaatttcttcctctggtggaaaagctataggaatatcaggtaatattaataatttaataacagcaacaaaattgcatgttgaaactaaagatagtgactctaatattgaaaaagttgttgatattggttttgttggacagcctgtaaaacttgataaaagtattataactaatattataaacaaaggagagatacctgtgatagctccccttggtattgatcacaataattttacttataatattaatgcggatactgtcgctggtttcattgctggtgaattgaaagcaagtaaattacttttattaacagatgtttcgggtattttagataataataaa

SEQ ID NO: 251017 - DNA, 712 bp, Unknown
  Bacterial polypeptide expressing nucleotide sequence isolated from the Sargasso Sea
aatgaatgattctcaaagagtatcaatattaagcgaagcacttccttatatacaaagtttttcaggtagaaaaattgttatcaagtatggtggttctgttatggaagatgatgatttaaaaaatgctttttttagagacatagcacttttatcaacagtgggggtttgtcccatagtaattcatgggggtggacctgagattaatcattggttaaagaaattagaaatatctcctaaattcgaaaatggattaagaattactgatcaaaaaacaatggagattgtcgagatggttctaatgggtagagttaacaaacaaattgtaaaaggcattaataaaacaggatccttggctgtgggaatatcaggtcttgatggaaatttaattcaatctagagaattaggagatgggagccatgggttggtgggagaggttacaaaaatcaatcctgaaatattagatccccttatatctaggggttatatccctatcatttctagtattggatcaaccttagagggtatttcccataacattaatgcagattttgttgctggagaaattgctgctgcaataaatgcagaaaaacttattctccttactgatacaccagggattttaaaagaaaaagataacaaaaatattcttgttgaaaaaacgaatctcaaagaggcaagagattttattgataaaaaaattgtgactgaaggt

SEQ ID NO: 251018 - DNA, 646 bp, Unknown
  Bacterial polypeptide expressing nucleotide sequence isolated from the Sargasso Sea
tctgggcgccgcatcgtgatcaagtacggcggtgcagccatggcccatgccgaactgcgcgaggcggtgttccgggatctcgccctgctggcctgtgtcggagtgcagccggtggtggtgcatggaggtggcccggaaatcaaccaatggctcaaacgcctggagatccctgccgaatttcgcgacggcctgcgggtcaccgatgccgacacgatggatgtggtggagatggtgctggtcgggcgggtcaacaagcagatcgtcaacggactcaaccagctcggaacgcgggccgtcggcctgagcggcagcgacggcaggttggtggaggcacgcccttggggcgacggcagccatgggttggtgggtgatgtggcccgcgtcaacccggatgtgctggagcctctgctggaacgcggctacgtgccggtgatctccagcgttgccgccaccccggatgacggccgcgctcacaacatcaacgccgacaccgtggccggcgagctggcggcagctctcgaggccgagaagttgatcctgctcaccgacacccctgggatcctgaaggatcgggacgatccagattctctgatccgtaagttgcgcctctcggaggcccgtcaactcatcgatgatggtgtggtgg

SEQ ID NO: 251019 - DNA, 754 bp, Unknown
  Bacterial polypeptide expressing nucleotide sequence isolated from the Sargasso Sea
aaatcagctgaatcactggcaaagatccttagtgaggccttgccttacatacaaaaattttctggaaaaatagtagtcattaagtatggtggcagcgctatgaaagaaaataaattaaggcaaaattttgcaagagatatcgctttgatgaggcaaattggaatatttcctgttctagttcacgggggcggacctcaaattgaaagaaatttgaagaagagcaatgtaagaagtgtatttattgatggtctaagaaaaacagatgaaaattcgataaaaattattgttaaaactctaagagaagttaacggagatatttccgaactgatcaaaacttggggagcaaaaacaaaaacattcaatgacgttagagaaagtattcttatctgtaaaaaaataaaaacaaagatggatcttggttttgtaggcgatattacaaaagttgatggagatttaataaagaaaaatatttctaatggaaaaattcctgtaattgctccaattggtagagatagatttggtatgcattacaatattaatgctgatcatgtggcttgtaaggttgctgaaaaattaaaagctgaaaagataattatgatgacagatgtaaaaggagtattgactaatacagggaaaaaaatatctgaaatgaatatcaagaaggcaaaaagaattgctaaaactataaaaggaggaatgctcccaaagctagcatccgtaattataagtctagaaagcggtgtgaaaagtgctc

SEQ ID NO: 251020 - DNA, 712 bp, Unknown
  Bacterial polypeptide expressing nucleotide sequence isolated from the Sargasso Sea
aatgataaaaaagaataaaaaaccaagttatattgccgaagtcttaacagaggcattgccatatattaaacgttttagaggtaagtccattgttataaaatatggtggcaacgccatgtctgatgaatctttaaagtcaggttttgcacgcgatgttgttttaatgaaactagtcggcatgaacccaatagttgttcatggaggtggcccacaaattggagctacactagaaaagcttgggaaaaaaagtagttttgtggacgggatgcgcgttactgatcgcgaaacaatgagtattgttgaaactgttcttgcaggggagataaatcaagaaatagtcagccttattaatagtttcggaggaaatgctgttggtttaagtgggaaagatgaaaaattaattatcgcaagaaagatggtgcttaaaaaaaataatataaaacttggtactcccgaaataattgatattggttatgttggggatattgaaactgtagataagtcagcagttaatgcactagcacaaaacgataccataccagtgatcgctcctattggtgtggatgagtctggccagacatacaacatcaatgctgacttagtcgcaggtaaaatcgcgcaagcaataggtgcggaaaaactcatcatgcttacaaacacacaaggtctactagatgaaaatggcgaggtgttaactggggtatctatgaag

SEQ ID NO: 251021 - DNA, 472 bp, Unknown
  Bacterial polypeptide expressing nucleotide sequence isolated from the Sargasso Sea
tatgactaataataaaaaaaaaattactatagataaaagaagatggctaagaactgctaacactatttctgaagcactcccttaccttagaaacttctcaggtcatacttttgttataaaatatggtggccatgctatgggcgacgaaaaccttgcagaaaattttgcacgagatgttgtactgcttaagcatgtaggaattaatcctatagttgttcatggagggggaccccaaataggggatatgctccaacggttaggaataaaaactacctttattgacggcttaagagtaacagatgctgaaactgtaaagatcgccgaaatggtcttatctggtcatataaataaagaaatagttagccaaatatcatctgtggggggaaatgctataggcttgtcaggtaaggatggaaacctcataacctgcaaacgaattaaaaaaaataaggaccttggatttgttggagaa

SEQ ID NO: 251022 - DNA, 598 bp, Unknown
  Bacterial polypeptide expressing nucleotide sequence isolated from the Sargasso Sea
catgaacgatgaaattaaaaataatttccaacagacggcaactacgctagcagaagcgctaccgtacattcagagatacgcgggtacgacaatagttattaagctcgggggtcatgctatgactagtaaatcctcaatggataattttgctagggacatcgtattaattaagcaatgtggcgtaaaccccgtgatagtgcacggcggcggccctatgattaataaagtactttccgatctaaaaattgaaagtgtattttctaaggggaaaagggttacagatagaaaaacaatggaagtagttgaaatggttctttcaggaagtattaacaaatccatcgtaaatgcaattaataatcagggtggaaaaggagttggactctctggaaaagacgcaaatatgattcagtgcgaacaggataacccaaaactgggctttgtaggtaaagtaaaaaaaattaatactgacatagtccaaaattttttagagagtgactttattccggttatcgcaccaattggctatggtattaacggtgacacatacaatattaatggtgatacagcggcaggtgctatggcctctagcctcttagct

SEQ ID NO: 251023 - DNA, 643 bp, Unknown
  Bacterial polypeptide expressing nucleotide sequence isolated from the Sargasso Sea
gatgaaaaagatacactcgtcggtaagggcaaaaattttagccgaagcgctaccttacatgcaaatgtatgacagcaaatatgtggttgtaaaatatggcggtcatgcaatggtaaatgataatttagctgatatcttcgctcaaaacatcgttatgttgcagcaagctggaatgaagcctgtcgttgtccatggtggaggtcctcaaattggagaaactttaaaggcacaaggcgtggaaagtaagttccataatggcttaagaattacagatcgagatacaataaaagttgttgaacgagtattgtatgagataattaatactgacattgtgaagaagattagaaaacatggaggcaaatcgataagcctgtcaggaaataaagactcgataatttttgctaaaaaattgacaaatatttacaaaaccgactcaaatattgaaaaaataatggaccttggttttgtgggcgagccaaaaaaaattgatccatcaacaattattaatcactgcaaaaaaggttcgatacccgtaattacaccccttggtaaggataataatactacctataatataaacgccgatacagcagcaggcgctattgcaggcgccttaaaagcaagtagactattaatgctgaca

SEQ ID NO: 251024 - DNA, 833 bp, Unknown
  Bacterial polypeptide expressing nucleotide sequence isolated from the Sargasso Sea
tatgaataaaatagagataagagagcagtccgctaaatcaagtacagcaaatgtgctgattgaagcactgccatatattcagaaacttgcaaacaaaactatagtaatcaagtttggtggtaatgccatgatagacaatactctgaagaataactttgcgagagatgttgtgcttttaaaacaagtaggccttcatcctgtcattattcatgggggcggcccacaaataacacaatacctagaaaaaatgggtataaagtcagaatttgttgatggtatgcgagtaactgatgaaaactctattgatatgatagaaatggtactaggcggatcaatcaataaagagatagtaaatctaattacgagtcacggtggaagagcagttggattatctggaaaagatggtggactcattcgtgcaaagaagatgataggtgaagggaaaactaaagattttgattttaaaaacacaggtatggtctctagtattgatccaagtgtagtaaatttacttgatgcaacatcattcataccagttatagcgcctattggaattggagaagattataaaacttacaatattaatgctgatattgtagcaggcaaaattgcaaaaatacttcaagcaggcaagttcatagtattgactaatactacaggtatttttgatgaaaatgataatctaattaagtcaatgaatgcacaacaagtgagagatcttataaaaaaagggatcatatcatctggtatgctaccaaaagtcgagtctgcacttgaagcagtatcctctggtgttcaaaatgtacaaataatagatgggacgatagatcatg

SEQ ID NO: 251025 - DNA, 317 bp, Unknown
  Bacterial polypeptide expressing nucleotide sequence isolated from the Sargasso Sea
aatgaaatttgattttttatctgagagcgatcaagcttattttatacataaggcctctacccttgttgaagcacttccctacatacgtcaacacagtggagatataattgtaataaaatatggtggtcatgcaatgggtgataaaaaactttcttcaagctttgctaaagacatcggtcttcttaaagaaattgggatatcaccagtaattgttcatgggggtggaccacaaatcggtgaaagattaaaaagtaaaaatatttcatcaaaatttgtagagggtttaagagtaaccgatattgaaacaattaagattg

SEQ ID NO: 251026 - DNA, 734 bp, Unknown
  Bacterial polypeptide expressing nucleotide sequence isolated from the Sargasso Sea
aaaaaatagctttacaagagatgtggctttaatgagccttgtcggaatgaagccagttatagttcatggtggagggccacaaatcgctaaggagttaaaaaagtcagggataagttctaattttatatcaggccatagggttactgacaaagtaactatgtcagtagttaaaaaaattcttggaacgaagattaatcatgagatagttaatttaataaaaaaatcaggaggggattcaattagtttcaatcatatcaaacctaaaataattaaggcttctaaatatatagattctcatcaaaatgatttaggtttagtaggtaaagtagataaaattttagtgtcagaattgaagaaagccttgaccaaaggatcaattcccgtaatagcgccaataggagtaaatagaaaaggaaacttcctaaatatcaatgctgatgttgttgctggaaaagtagctgagagcttaaaagcagaaaaatttatacttcttactgatataaaaggaattctagacaataaaaaagaaattatctcgaagatttctagcttcaaaggaagacagcttattaataacaacgttataaagggaggaatgactcccaaattaactgctgctttagaagcaaaaaaaaatggcgtaagatcatgtcacataattgatggaagattaccacatgcagttttacttgaagttcttacagctgaaggtgttggaactatgataagctaaa

SEQ ID NO: 251027 - DNA, 409 bp, Unknown
  Bacterial polypeptide expressing nucleotide sequence isolated from the Sargasso Sea
atgaagtttgattttttatcagaaagtgaccaagcttattatattcataaagcttctactcttgttgaagcattaccttatattagaaaacatgctggacaaattgtagttattaaatatgggggtcatgctatgggtaatcctaaattatctaaaagtttttcagaagatatagctttaataagagaaataggtattcagccaattattgtgcatggaggtgggcctcaaatagggaaaatgttaaagaaaaaaaatattgaaactaagtttgtgcaaggtttgagaataacagacaaagaaactgtcaaaatagttgaggaagtattagcaaatgaaataaataaagaaattgttaattctataaatgagactggggggaaggctattggattagcaggaaataagg

SEQ ID NO: 251028 - DNA, 541 bp, Unknown
  Bacterial polypeptide expressing nucleotide sequence isolated from the Sargasso Sea
tatgaaatttgattttttatcagagagtgatcaggcttattttattcataaagcctcaaccttagttgaagctcttccatacattcgagaacatagtggtgataccattgtaataaaatacggtggacatgcaatgggagataaaaaactgtctgagagtttttcaagagatattgggttattaaaagaagtaggtgtgtcaccaattattattcatggtggaggacctcaaattggtgagagacttaaatcaaaaaatatatcaacacaatttgttgaaggattacgagttactgataaagaaataattaaggtagttgaggaagttttatctaaggatatcaattcagaaatagtagaatctataagtgcctctggaggaaaagcgataggagtatctggtaatgataacttagtcactgcaactaaattaaatgtggaaattaaagacagtgattcaaatattgaaaaaatagttgatattggttttgttggacaaccaaaaaaattaaacaaagatatgctaactagctttataaaa

SEQ ID NO: 251029 - DNA, 709 bp, Unknown
  Bacterial polypeptide expressing nucleotide sequence isolated from the Sargasso Sea
gtaggatgtcatccagtaattattcatggaggaggtccgcaaatatctaaacatttagagaagcaagggatagaatcaaattttgctaatggcatgagaataactgatgaaaaatctatagatattatagagatggttttaggcggtttaataaataaagatatcgtaaatacaattacatctttaggaggcaaagccgttggtttatcaggtaaagatgggggattaataagagctaagaagattgaaggagaaggtgaatttaaaaatattgattttaaaaatactggtactgtcaaaagtattgatcctggcgtagtaaaattactagacggctccacttttatacctgttattgctccaataggaattggggatgatggcaagacatacaatattaatgcagatatagttgcaggtaaaatagctcatatattacaagctagcaaatatttaatattgacaaatactcaagggattttggattcaaatggaaaccttatccagtctataaacactgatggcgtaaagaaacttgcagaagaaggaatcttgtcgcaagggatgttgccgaaagttaactctgcattggaagcagtgacatcaggtgtagagcatgtacaaatcattgatggcacaatagatcactcagttattctcgagctattcacggatgagggtattggaactatgattcgaaggaactaaa

SEQ ID NO: 251030 - DNA, 718 bp, Unknown
  Bacterial polypeptide expressing nucleotide sequence isolated from the Sargasso Sea
atgaatattgaaaaaattttacctaatgatggtccatccattcaagaagtaaaaaaatatattgagaagtattctaatgaaacaatagtagttaaatgtggaggaagtgttttacttgaaaaaaaattatttgaccaattcgtcgaagatatttctattgtaaataaattaggattatcagcaatagttgtccatggaggtggaaaaaatattaaaagaaaacttaatgaaaaaaatattgagtcaaaatttatcaatggcttaagagtcactgatgaaaatactattaatatagtcgaggaagctttattagaactgaattttgaaattatagatcaaataaagaattgccaagcagaagctatgtcagttacacccaaaaatggtaatataattaaagtaattcctgaaaaaaaagagcttggtcttgttggttatcctagtgaaataaataaaaaacaaattctagaaattataaaagataaaaaagttccagttatattaccaatgggcactggcgatgatggaaagatttacaacataaatgctgatactgccgctggttcagttgcgcaagagctaaattctagaagactattgctaatgacagatgttgaaggagttcttgatcaaaacaataatctaattaccgaattaaattctaaagttgcaaaaaatatgcttaatgatgggactatttcaggtggaatgattccta

SEQ ID NO: 251031 - DNA, 325 bp, Unknown
  Bacterial polypeptide expressing nucleotide sequence isolated from the Sargasso Sea
atggatttaaaaaatatactgccagaagacggtccacctttaagtgaagtaaataaatatattgaaaaatataaaaatgatttgattgtaattaaatatgggggaaatgttttaattgatagaagtgtatttaataatttcataacagatctatttattttaaataaattaggtctttctacagtagttgttcatggtggtggaccaagaattaaaagagaattagagaagtccaatattcaatcaaaatttattagaggcttaagagttactgataaaagtataataaatattgtagagtctgttttaatagattttaactgat

SEQ ID NO: 251032 - DNA, 665 bp, Unknown
  Bacterial polypeptide expressing nucleotide sequence isolated from the Sargasso Sea
aatgtccacaaccgaaaatttagataataaaataaaagagttttggcctgaaaatggaccaccaactcaggaaatagaaaaatatgtaaaaaaatattcaaaagaaaaaatagttattaaatgtggaggccgggtacttttggatccagatctatttaacaattttattaatgatgtaataatattaaaaaaactaggattaacacctattgtagtacatgggggcggaccaagaataaagaataaattagatgagttaaatatagaaaccaaatttattatggggctaagggtaaccgatgaaaaagttataaaaattgtagaagaagttatgataaaatttaatagggaaattgttgattctttagaaaaaaaagcatgtaaagcaaaatcaataaccataaaggaaaataatgcaatttatgttgaacaaaaaaataaagaattgggttatgttggtaaaataacaaaagttaacacccagctaattaaaaatttaattaaagaaaacttcatacctgtggtctctccaatgggtttagatgaaaaaaaacaaacttataatatcaatgctgatactgcagcaggatcactcgcaataagtttgaaatcaaggagattaatgctgatgacagatgtagaaggagtttatgataaaaataaaa

SEQ ID NO: 251033 - DNA, 378 bp, Unknown
  Bacterial polypeptide expressing nucleotide sequence isolated from the Sargasso Sea
gatctcgagcgtggcccccgaaccatgagggtcagccttacaacatcaatgccgatacggtggcgggtgaattggccgcggcaatggatgccgaaaaactgatcctgctgaccgacaccccaggaatcctgcgggaccgcgatgatcccgagtcattgattgatcagctcagcctgtcggaggcgcgcgagctgattcatgccggggtggtggcaggcggcatggttcccaaaaccgagtgctgcattcgcgcgttggctcaaggagtgcgggcggcccacattcttgatggtcgcgttccccattccttgctgcttgaggtgttcaccaactcaggaatcggcacgatggtgttgggaagccgccagcagggctgag

SEQ ID NO: 251034 - DNA, 546 bp, Unknown
  Bacterial polypeptide expressing nucleotide sequence isolated from the Sargasso Sea
cggttggagtgacaggaaaagatggcggattaataaaagccaggaaacttcggataagaaagaagttgccaaaactgaccgatgagatagttgatatcggtcacgttggagaagtagtaaatatcaacactgaaatactagaagtcatgaaaaacagcgattttataccagttattgccccgatagggaccgatgactccggagccagctacaatataaacgctgactcagtagccggcgagatagctaaagtcatgggagcagagaaattaatacttctgactaatgttgagggggtaaaggacaaaaaaggaaatgtcttaactggactgaacccgacgcaagtgtcaagactcataactaatagaactcttaaaggcggaatgttgccaaaagtgaagtgcgctgttgaggctgtcaaaggaggcgtgaccggagcacatataatagatggacgagttgagcacgcagtcttattagaaatcttcacagataaaggcgttgggacactgataactaagacagcgcggaaaattcgcccatagc

SEQ ID NO: 251035 - DNA, 807 bp, Unknown
  Bacterial polypeptide expressing nucleotide sequence isolated from the Sargasso Sea
atgaggttagtaaatatattgaaaaatataaaaatgaattaatagtaattaaatatggaggaaatgttttaattgatagaagtattttcgataattttattactgatttaagtattttaaataaattaggactctcagttgtagttgtacacggaggaggtccgagaatcaaaagagaattagataaatctaacatccagtcgaaatttataagaggactaagagtaactgataaaaagattatagatattgttgagacagttttaatagattttaataatgatattgttagctctttaaaaaaaaaagatataaaaacattctcaattcactctaaaaaagataatattattgaggtaattccagagtcagaagagcttggctttgttggcctcccaaacaaaatcaataacaatattttattagatgctattaaacaaaatagaataccaattatttctccattaggcttagataaaaataatcaaacacacaatatcaatggtgatactgctgcaatggctatagccaaatctgtaaggtcgagaagattattattaatgacaaatgttgatggtgttttgaataaagaaaaaaaacttatagctgaaatatcttcatctgagattttggaaatggtaaaagatgaaacgataactgaagggatgatacctaaaattaatgcttgtctagaagctgttaataatggagttacagcggctggtataattaatggtacgaaacaacattcttgtttgtgggaaattttctcagacaagggatccggaacattaatcagaaaatgaa

SEQ ID NO: 251036 - DNA, 808 bp, Unknown
  Bacterial polypeptide expressing nucleotide sequence isolated from the Sargasso Sea
atggcccagtccgcccagaacaacgatgacgccctcagggtgtcggtgctcagcgaagcccttccttatatccagcgtttcgccgggcgacgcattgtgatcaagtacggcggtgccgccatggcccatgccgagctgcgtgctgccgtctttcgcgatctggctctgcttgcctgtgttggggtccaacccgttgtggttcatggcggcgggccagaaatcaaccagtggctgcagcgtctggaaattccagccgaattccgcgacggattgcgcgtcactgacgccgacaccatggacgtggtggagatggtgctggtgggtcgcgtcaacaaacagatcgtgaatgggctcaatcagctcggcacccgtgccgttggcttgagcggaagtgacggaagcctggtcgaggctcgcccctggggggacggcagccatgggttagtaggggacgttgcccgcgttaatcccgatgtgctggaaccgctgctggagaagggctacgtgcccgtcatttccagcgttgccgcaacccccgatgacggacgagcccacaacatcaatgccgacacagtggcgggagaactggcggcggccctggaggccgaaaaactgatcctgctgaccgacacccccggcatcctcaaggaccgaaacgatgccgactccttgatccgcaaactgcgcctctcagaggcaagacagttgatcgaagacggcgtcgtcgcaggaggcatgaccccaaaaacggaatgctgcatacgcgccttggcgcaaggcgtcgcagccgcccacatcatgacggcag

SEQ ID NO: 251037 - DNA, 370 bp, Unknown
  Bacterial polypeptide expressing nucleotide sequence isolated from the Sargasso Sea
aatgaaatttgatttcttatctgaaagcgaccaagcttatttcattcacaaagcatcaacgcttgttgaagctctcccttatatacgccaacatagaggtgatataattgttataaaatatggaggacatgcaatgggagataaaaaactctctgaaagttttgctaaggatattggtcttctaaaagaagttggtgttttaccaataatagtacacgggggaggaccacaaattggactaagattaaaaagtaaaaaaatatcttctaaatttgttgaaggtttacgagtaactgacacagaaacaataaaagttgtagaagaagtgctatctaaagacataaactctgaaattgtaaagtcaatctcc

SEQ ID NO: 251038 - DNA, 314 bp, Unknown
  Bacterial polypeptide expressing nucleotide sequence isolated from the Sargasso Sea
aatgtccgaggaaaataatttagaagaaataaaaaaattttggccaaaagatgctccagatgtgacgaatgttccaaaatatgtaaaaaaatatgaaaaagatttaatagtaataaaatatggtgggaatgttttaattgatagaaatatttttaataattttattcaagacataagtatattaaataaactaggtctttcaattgtggttgtacatggtggaggtccaagaatagaaagagaattaaaaaaaggaaacattcaaagtaaatttataaatggtctaagagtaacagacaaaaatgttataaata

SEQ ID NO: 251039 - DNA, 634 bp, Unknown
  Bacterial polypeptide expressing nucleotide sequence isolated from the Sargasso Sea
atgagtaatttaatcactaaaacagcaaaacaaatttctgcttcaaaaaaagaagtgggctctaatcttcaaaaatatattaatgagattattgttattaaatatggcggcagtgctatgttagataaaaaactatctttaaacttctttcaaaatataaaagcactagtagatttaggcattaagccaattattgttcacggtgggggacctcagataaatttaatgctaaataaagtaaatataaaacataaatttttcaaaggaatgaggataacagacgaaaaaacttttgatatagtagagatggttttatcaggagtaataaataaaaatatttcttattgtctttcaaataataaagttaatgctttaggactttcaggagttgattctaaaattataatagctaaaaaatatagaaaaaaaaatatatctgatcctgacttaggactagtaggacaaccacatagtatcaacaaaaatcttttattaaacctcgtctcaaataaaattgttccggtcatagctcccataggagctaatgccaaaggaactaaatttaatattaatgctgatttaaccgcaggttttatagcatccaaaattggtgccaggagattacttatgttaa

SEQ ID NO: 251040 - DNA, 907 bp, Unknown
  Bacterial polypeptide expressing nucleotide sequence isolated from the Sargasso Sea
catgaccctcgagcgtgacgccgctgcccaggttgccaaggtactgtccgaagccctgccctacattcgccgcttcgtcggcaagaccctggtgatcaagtacggcggcaacgccatggaaagcgaggagctcaagcagggcttcgcccgcgacatcgtgctgatgaaggctgtcggcatcaaccccgtggtggtgcacggcggcggcccgcagatcggtgatctactcaagcgcctgtccatcgagagccacttcatcgacggcatgcgggtcactgacaccgccaccatggacgtggtggaaatggtgctcggcggccaggtcaacaagagcatcgtcaacctgatcaaccagcatggcggcagcgctatcggcctgaccggtaaggatgccggcctgatccgcgccaagaagctcacggtcagccgccagacgccagagatgacccagccggaaatcatcgacatcggccatgtcggcgaggtcaccggggtcaacactgacctgctgaacatgctggtcaagggcgacttcatcccggtcatcgcgcccatcggcgtaggcccgggcggtgagtcctacaacatcaacgccgacctggtcgctggcaaggtggctgaggcgctgaaggccgagaaactgatgctgctgaccaacatcgccggcctgatgaacaagcagggtgaggtgctcaccggcctcaccaccgagcaggtcaacgatcttattgccgacggcaccatctacggcggcatgctgccgaagatcaaatgcgccctggaagcggtgcagggtggcgtgaccagttcgcacatcatcgatggccgtgtacccaatgcagtgctgctggagatcttcaccgatatcggcaacggcaccatgatcagcaaccgcaagcgtccttag

SEQ ID NO: 251041 - DNA, 913 bp, Unknown
  Bacterial polypeptide expressing nucleotide sequence isolated from the Sargasso Sea
catgaaatttgattttttatcagagagcgatcaggcttattttattcataaagcttcaacattagttgaagcattgccatttatcagagagcatagtggagatactattgttatcaaatatggaggtcatgcaatgggagatcctaaacttgctaaaagttttgcgagagatattggcttaatgaaagaagttggaatatttcctgtagttattcacggaggaggacctcaaattgcagaaaaattaaaaactaaaaataaaacttctaaatttgttgatggcttacgagtgactgatgctgaaacagtaaaagtggttgaagatgtattagtcaacgagataaatactgaaatagtaaaagcaataagtgactctggtggaaaagcaattggattaagtggaaatgaaaataatctcttaagtgccacaaaattaaaagtagaaatcaaagactcagattcaaatatagaaaaaataattgatataggatttgtaggacagcccacaaatgctaacacagaattaatcaagcaacatattgatgaaggtgaaatacctgttattgctccattaggaatagataataatggtaattcatacaacataaatgctgacactgcagcaggttttattgcaggtaagttaaaagcaaataaattattgcttttgacagatgttgctggtgtattagataaagataagaaattaatcccatcactaaaacttgaaaatgcaattgaaattgttaatgaagattttgtagtaggaggtatgaaaccaaaaattacaacatgtatagaggctatgaaaagtggagtgactaaatcgactatcttagatggaagaattcctcactcattagtattagaattattcactgaacatggtattggaacacagatttattcttaa

SEQ ID NO: 251042 - DNA, 913 bp, Unknown
  Bacterial polypeptide expressing nucleotide sequence isolated from the Sargasso Sea
atgaaatttgattttttatcagaaagtgatcaagcttattttattcataaagcttctacattggttgaggcattgccttttataagagaacatagtggtgatactattgtaattaaatatggtggtcatgcaatgggtgatactaaactagcaaaaagttttgctcaagacataggtttaatgaaagaagtaggaatatttcctatagttgtccatggaggtggtcctcaaattggagaaaagttaaaaaataaaaatattagttcaaaatttgtagaaggactaagagtgacagataaagatacagtaaaaattgtagaagaggtattagcaaatgatataaatgctgaaattgttaaatctattagtgagtcaggtggaaaagctattggactaagtggaaataaaaacaatttgttaaatgcgacaaaattaaaattagaagttaaagattcagactcaaatattgaaaaattagttgatattggttttgttggtcgaccaacaaaagtaaatgttaatttaatcaaagaacatattaaagaggggaaaattcctgtaattgctcctttaggtatagataatgaaggtaattgctataatattaatgccgatactgctgcaggttttattgctggagaaatcaaagcaagtaaattattattactgacagacgtagcaggcatattagatcaggataaaaacttgatttcatccttaaaacttgatgatgcttgtaaaataattgatgaagattttattgtaggaggaatgaaaccaaaaattattacgtgtgttgaagcaatgaaaaaaggtgtaaataaatcaactattttagatggaagaattccacattctgtaattctagaattatttacagagcatggtattggtacacaaatatattcttaaa

SEQ ID NO: 251043 - DNA, 850 bp, Unknown
  Bacterial polypeptide expressing nucleotide sequence isolated from the Sargasso Sea
gatggatctaaaaaaatataccccagaaaatggaccacccataaaagaagtatctaaatatattgaaaaatacaaaaatgaattaatagtaattaaatatggaggtaacgtttttattgacagaaatatatttgataatttcataacagatatatgtttgttaaataaattgggtctctctatcgtagtagttcacggtggtgggccaagaataaaaagggaattagataaatctaatattcaatcaaatttcataagaggattaagagttactgataaaagaattatagatattgttgaaagagttcttattgattttaataatgatattgtatcttctttagaaaaaatggggtctaaagctgtttctattaacacgaaaacaaataacataatcgaggtgataccagaagcaaaagagcttggttttgttggtctaccaaacaaaattaacaacaaaattttattagatattattaaacaagatagaatacctattgtttctccattagggttagataaaaataatcaaacacacaatattaatggtgatactgcagcaatggctgttgcaaaatctcttaaatcaagaagattgctcttaatgacaaatgttgatggtgttttaaataaagaaaaaaaactgatagcagaaatttcttcttctgagattttagagatgataaaagatgaaacaattaattctgggatgatacctaaagtaaacgcgtgtctgacagcagtaaataatggagttactgctgctggtataattaatggtacaaaacaacattcttgtttatgggaaattttttcagataagggctcaggtacattaatcagaaaatga

SEQ ID NO: 251044 - DNA, 871 bp, Unknown
  Bacterial polypeptide expressing nucleotide sequence isolated from the Sargasso Sea
gatgtcaaaaaatatttctctagaagagattaaagaattttggcctgagaaagctccagacataaatattgttcaaaaatacattgaaaaatataaagatgaaaaaattgtaattaaatacggtggcaatgttttaatagacagaaatgtctttaataattttatatctgatataaatgttcttaacagattaggtttatccgtagttgtggttcatggtggtggtccaagaattaaaagagagctggacaagaaaaaaattgtatcaaaatttattaatggtttgagggttactgataaaaacataattgataccgtagaggaagttttaattgattttaataaagacatagctaattctcttaagaaattaggctctcatgcagctatgtttcatactaaggctgacaacgttatagaagttgaacctgaaagagaggaacttggatttgttggagtgccaaataaaataaatgatagtttgatacaaaatgcattaagtgaaaataaaattcctataattgcacctctaggtttagggaagaatgaacaaacatataatattaatggtgacacagcagctagtgctattgcaaaaaaacttaagtcaagaagactaatattaatgacaaatgttgaaggtgtatatgatgatcagaaaaagttaatatcagaaattaaacctttcgatcttgaaaatctcattaaatggaaagttgttcaagggggcatgattccaaaaatagaaaattgtgtagatgctgtgcaaaatggagtgagaggcgtagtaattctagatggaagaaaaccccattcaattttacacgaaattttttcagataagggatctggaacacttataagagaatga

SEQ ID NO: 251045 - DNA, 805 bp, Unknown
  Bacterial polypeptide expressing nucleotide sequence isolated from the Sargasso Sea
atgagtgtttcacctattataattaaagttggcggcgcactgcttgatgatgccgccgcaatgacgcgcttatttctaagcgtaaaagatgtgcaggccactcgcccagtggtagtggttcacggtggcgggcctttagtggaaacactaatggcaagccttggccttaaaagcaccaaaattgatggccttcgggttacccccgatgagcatatgccctatatttgtggtgcactggccggttctgctaacaagcagttatgcgccgccgcactcgcctcgggtttaacacctgtcggcttgtccttacttgacggcaacatggtggtatgtgaaccacttgctgatcaatatggcgcggtgggtgtgccaagtaccgcagatgcggcgtttcttaagagtgttttagctcaatcgaccttgccaattattagctccataggctctagcccgcaaggcaggctgcttaacgtaaacgcagatcaagcggctacggttatcgccgaactgctcaacgccgagcttttgctgctttcaaatgttgatggcgtacttgacggcaacaaagcacttatcagtgcgttaaatgctaatagtattgctcaatacgccagtgaaggcgtaatcaccgatggtatgaaagtaaaagttgacgctgcgcttgcctctgcagagagcctaagccgccctgtttatatcgcaagttgggcggcagatatcaccgatatactaaataaaacaacaggtacacaaatagtacctacaacccttgccgctgaaaacggcaatgccggagaaatataat

SEQ ID NO: 251046 - DNA, 804 bp, Unknown
  Bacterial polypeptide expressing nucleotide sequence isolated from the Sargasso Sea
aagtattaaaatatatcgaaaaatattcgagtgatatcattgttataaaatatggtggaaatgtatttattgatagaaatatattcaataattttatagaagacataagtgtattaaataaattaggactttctattgttgtagttcatggtggtggaccaaggataaagagagagttagacaaatcaaatattgagacaaaatttattagaggtttaagagtaacagataaaaaagttataaacatagttgaaaatgttcttattgattttaatcaagatattgtaaattctttaaaagaaaaaggatcagaagctgtctcaatcaatacaaaagaaaataatataattgaagttatcccagaaaaagaagagctaggctttgtaggaatccctaataaaattgatgtaagtaaactcaaagatataattaaaaataaaaaaattcctattatttctcccttaggccttggaaaaaataatcaaacctataatatcaatggtgatacagccgcaggtgctatagctaaatccttaaaatccagaagactgcttttaatgacaaatgtagaaggagtattaaataaggaaaaaaaactaataagtgaaatttcttcgtcaaaaattttagaaatgataaaagaccaaacgattactgaaggaatgataccaaaaataaatacatgtttagatgctgttgataatggagtaaaaggagtagttataatagatggaagaaagcaacactctattttagatgagatattttctgacaaaggttcagggacacttatcagaaaatgat

SEQ ID NO: 251047 - DNA, 916 bp, Unknown
  Bacterial polypeptide expressing nucleotide sequence isolated from the Sargasso Sea
tatgtcccttaatttaagaagcgcaaaaaatattgccaaggttttaactgaggccctgccctacattcagaaattcactggcaagacagttgtcgtaaagtacggtggcaatgccatggtagacgatggattaaaaaagagttttgcaagagatatagtgctgatgaagttagttggaattaatccaattgttgttcacggaggtggtccccaaattgggtcagtacttaagaaactgtcaatccaatcggaatttatagatggattacgcgtaacagatagtcaaacaatggacgtagtagaaatggttcttggtggattagtgaataaggaaatcgttaacttactcaatcaaaatcagggcagggcaattggggtttcaggcaaagacggcaaactaatcaaagctaaaaagcttcgcctcaaacaaaaagaaccgaggcttactgacgaaataattgatattggccacgttggggaggtagtcagcattaatactgaaatactcgatgttatgaaggatagtaattttattccggttatagccccaattgggacagacgactctggtactagttttaatattaacgcagactcagttgccggtgagatcgcggcagtcatgggcgcagagaagctaatccttttaacaaacgttgaaggcgtaaaagacaagacgggaaatgttttgacaggattaactcccatccaagcgtcgaggctcataaccaataaaacattgaaagatggaatggttcctaaagtgcagtgcgctgtaaacgctgtcaaaagcggtgtgactgcagctcatataatagacggaagagtcgaacatgcagttttattagaaatttttaccgatgaaggcattggtacacttataactaagcgtgcaaaaaaagctcaccattcataa

SEQ ID NO: 251048 - DNA, 823 bp, Unknown
  Bacterial polypeptide expressing nucleotide sequence isolated from the Sargasso Sea
gttggttgaaattttgccttatattcagcgttggagaggcaaagtagtcgtaattaagttcggcggaaatgccatgacggacgcttccttagctgaacgttttgccgaagacgtcgttttgatgcaccaagtgggaatattgccgttaatcgtccatggcggaggaccccaaataggggaacttatggagcgcctagggaaagagccagaattcaaggacggccttcgagtaaccgacgccgaaactttagatatcgccaggatggttcttgtcggaaaagtcaatagggagattgtgagctcgataaacgttcacggtcctttggccgtaggagttagtggcgaagatggcggtttgataactgctgctgcgagaaacccagagctcggctttgtcggcgatgtaacggctgtcgatcccactttgctgcagaaactgttctcagaaggtctcataccggttatgtccacaatcggtgctgatgagaccggtcaggcctacaacataaacgcggacactgtcgcaggggccgttgcccaagcgatggaagctgaaaaagttgtctatctgactgacgttgaaggcttatacgaagacttgagcgatgaaacttctcttatacgccagatatctgcggcagatttatcgcagaaaatccaaagcggccaaatcactgacggcatgatccccaagacagaggcatgcgtgcgtgcggtgcaaaatggggtaactagcgcacatttggttgacggcaggattcctcatgtcgccttgctggaacttttcaccgatgctggcatcggaacaatgatttcggactga

SEQ ID NO: 251049 - DNA, 906 bp, Unknown
  Bacterial polypeptide expressing nucleotide sequence isolated from the Sargasso Sea
tgaaaaataaaattttagaagaaaaaaattctctgctaaaaaaagctgatctacttatggaaacactccctttcatgagaagatatacagacaaaattgtagttatcaaaattggtggtaatgcaatggggaaaaaagaatatatacagagctttgctgaagatatagctctcctacagttagttggaattttgccaatagttgttcacggaggtggccctcaaattggtgaaatgttaaaaaaattgaagatagaaagtaattttgtcgatggattaagggtcactgatgaagcaactattgacgttgttgaaatggttttgtgtggtgttactaataaatcaattgtgtctgctatttcacttgcgggagcactttcagttggtatttctggaaaagatggtaatttaattaaagctaaaagattatcaattttggataaaaactcagactcaaatgttgaaaaggccgttgatcttggctttgttggagaaccaagtagtattaatgttgatgtcttgaatgctcttataagccagaaaatgataccagttatttctcctgttggaattggaaataacggagaaacttataatataaatgcagatactgctgctggagctattgcatcagcaatgaaggcttcaaggatgattatgttaactgatgtagttggtgtattggacgcaaagcaagaattaataacggaattaaaaatatctgaagctaaaaacttaatacaaaataaaatagttttgggcggtatgatacctaaattaaaaacttgtataagctctgtcgaagagggtgttgaagcatcagtgatattggatgggagattgcctcatgcactgttaattgaacttttcacagagcatggaataggtaccttaattaaaaagtaat

SEQ ID NO: 251050 - DNA, 949 bp, Unknown
  Bacterial polypeptide expressing nucleotide sequence isolated from the Sargasso Sea
cctgtacaattcgccctgttttaactgttccgtgccagagcctgccgccatgtccgagcttcctgacctttcgcagatcgcgcccaccctgaaggctgaaatcctggccgaggcgctgccctacattcgccagtatcacggtaagaccgtggtcatcaaatacggcggcaacgccatgacggaagagcgcctgaagcaaggcttcgcgcgcgacgtgattctgctgaaactggtcggtatcaatccggtcatcgtgcacggcggcggtccgcaaatcgaccaggcgcttaagaaaatcggcaagcagggcaccttcattcagggcatgcgcgtcaccgacgaagagacgatggaagtcgtcgaatgggtgctcggcggcgaagtgcagcaggacatcgtcacgctgatcaaccacttcggcggccacgcggtcggtctgaccggcaaagacggcggcctgatccacgcgcgcaagatgcagatgccggatcgcgacaatccgggccagtacgtcgatatcggtcaggtgggcgaagtcgaggcgatcaatcccgcggtcgtgaaagcgctgcaggacgacgccttcattccggtgatctcgccaattggcttcggcgaagacggcctgtcatacaacattaatgcggatctggttgcaggcaaactggcggtcgtgctgaacgccgaaaagctcgtgatcatgaccaacatcccgggcgtgatggataaggaaggcaatctgctgaccgatctgtcggcacgcgaaatcgacggcctgttcgctgacggcacgatctccggcggcatgctgccgaaaatctcgtcggcactggatgcggccaagagcggcgtgcgttcggtgcacatcatcgacgggcgtatcgagcactcggtgctgctggaaattctcaccgaacagccgttcggcacgatgatccgctcgcattga

SEQ ID NO: 251051 - DNA, 815 bp, Unknown
  Bacterial polypeptide expressing nucleotide sequence isolated from the Sargasso Sea
aatgtcagaggatgaaaatttaaataagttcaaaaaattttggcctaaagatgcgccggatatcaataatatacctaagtatattaaaaaatataagaatgaattaatagttattaaatatggtggcaatgttttaatagacagaaaaatatttaataattttatagaggatattagtgttttaaataaactgggactttcaattatagttgtgcatggaggaggtccaagaattgaaagggaattaaaaaaagcaaatatccaaacaaagtttataaatggtttgagggtaactgataaaaacgttataaaaatagttgaagaggttttgatagattttaataatgatattgtaaattcccttaacaaaaaaggttcaaaggcgatatcaatcaatacaaagtcaaataatgtaataaatgtaattccagatcaacaagaactaggttttgtgggtataccagatgaaattaatactgatttcattaaagaaaaagtaaagaaaaatgaaatacctattgttgcaccattaggcttgagcaaaaataaccaaacttataatataaacggagataccgctgctagtgctatagcaaagaaattaaaatctagaaggcttttgttgatgacaaatgtggaaggagtttatgacgatagaaaaagtttaatttcagaaataaaaccttatgatatggaaaatttagtaaatttgaaaattgttaaggggggtatgcttccaaaaataaaaaattgtatagatgcagttgaaaatggagtaagaggtgttgttatacttgatgggagaaaacctcact

SEQ ID NO: 251052 - DNA, 913 bp, Unknown
  Bacterial polypeptide expressing nucleotide sequence isolated from the Sargasso Sea
atgaaatttgattttttatcagaaagcgaccaagcttattttatccataaagcctcaacattagttgaagcattaccttttattagggagcatagtggggatacgattgtcatcaaatatggtggccatgcaatgggagatcctaagcttgctaaaagcttcgcaagagatattggtttaatgaaagaagttggaatatatccaatagttgttcatggaggtgggcctcaaattgcagaaagattaaaaactaaaaatattacttctcaatttattgagggtttgagagttactgatattgaaacagtaaaagtagtagaagatgtcttaggaaatgaaattaatgctgaaattgttaaagcaataagtgattcaggtggaaaagcaattggcttaagtggcaataaaaataatcttttaactgcaacaaaactaaaagtagaagttaaagactcagattctaatattgaaaaactagtagatattggatttgttggacaaccaacagatgtgaataccaacttaattagagaacatattaatttaggagaaattcctgtaattgctccacttggtatcgatgaagagggtaactcttataatatcaatgctgatacagctgcaggatttatcgctggaaagttaaaagctagcaagttattgcttttaacagatgttgctggcgtattagataaaggtagaaaattaatcccttccttaaaaattgaagatgctataaccataatgaatgaagattttgttgttggtgggatgaaacctaaaattaaaacatgtattgaagctatgaaaagtggagtaactaaatcaacaattctagatggtagaattcctcattcattagtattagaattatttactgaacatggtattggaacacaaatttattcttaaa

SEQ ID NO: 251053 - DNA, 898 bp, Unknown
  Bacterial polypeptide expressing nucleotide sequence isolated from the Sargasso Sea
tatgaatgataaagtgatactaagagaaaactctgcaaatattccgtcaacagctaatgtgttgattgaggcacttccatacattcaaaagctagccaacaaaatcattgtcataaaatttggtggtaatgcaatgatagacgataggctgaaaaataactttgctagagatgtagttcttctaaaacaggttggtcttcatccagtaataattcatggtggtgggccacaaattaccagctaccttgaaaaaatgggtatcaaatctgaatttgttgatggaatgagagtaacggatgataaatcaattgaaatgattgaaatggttttaggaggatcaattaacaaagaaattgtaaatctaataaccagccatggagggagagcagtaggtttatctggaaaggacggaggattaataagagccaaaaaaatgataggtgaaggtaaaaacaagaattttgattttaaaaatactggaatggtctccagtatagatcccagtgtagtaaacctacttgatgcaaccccattcatacctgttattgcgcctataggtattggtgaagattttaaaacatacaatataaatgcagatattgttgctggcaaaatagcaaaaatactccaagcgggtaaatatgtggttctaactaacacaactggaatatttgacgacaatggcaacctaatcaagtcaatgaatgctgaacaagttagacaacttgtcaacaaggggataatttcatctggtatgcttccaaaggttgaatctgcgttagaggccgtatctgctggtgtacaaaatgttcagataattgatgggacaatcgaccatgctatactacttgagttatttacagatgaaggtgtaggtacgatgatacgaagaacctaa

SEQ ID NO: 251054 - DNA, 898 bp, Unknown
  Bacterial polypeptide expressing nucleotide sequence isolated from the Sargasso Sea
atgaacaaagaaattgtgctaagaaaagatactgcgaatataccctctacggcagacgtgcttatagaagcattgccctatatacaaagactatctaacaaaataatagtcattaaatttggtggcaatgcaatgattgatgacaaacttaaaaatagctttgcccgtgatattgttcttttaaaacaagttggtctccaccctgtaattattcatggtggtggaccacaaataacaagctaccttgagaaaatgggaattaaaagtgaatttgtagatggtatgagagtgacagatgagaaatcaatagaccttattgaaatggttcttggcggatctattaataaagagattgtaaatttgatcacaagccatggaggcagagccgtaggtttatctggcaaagatggtggattaataagggctaaaaaaatgatttccgaaggtaaaaataaaaactttgatttcaagaatacaggtatggtcgcaagcattgatccaagtgtagtaaatctcctagactctacatcgtttattcctgtcattgcgccaattggcataggagatgattacaaaacctataatattaatgccgacatagttgctggcaaaattgcaaaaatcctacaagctggtaaatatgttatgttgactaacactgcaggtgtctttgatgatgatggcaatcttattaaatccatgaatgctgaacaggtaagacagtttgtaaaaaaaggtactatatcttcaggaatgttacctaaggttgagtctgcacttgaggctgtatctgctggtgtacataacgtgcagataattgacggcacaattgaacacgcattactccttgagctttttacagacgaaggtgttggaacaatgattcgcagaacataag

SEQ ID NO: 251055 - DNA, 850 bp, Unknown
  Bacterial polypeptide expressing nucleotide sequence isolated from the Sargasso Sea
atggaattagaaaaaatacttcctaaacatggtccatcagaatcagaagttcaaaaatatatagataaatataaagatgagttaatagttattaagtatggtggtaatgtttttatagatagaaaaatttttgataatttcataaatgacttaacaatactaagtaaacttggactttcgtttgttgttgttcatggtgggggaccaagaatacagagagaactagacaaatcagatataaaatcaaaatttataagaggcttaagagtaacagacgaaaaaattataaatattgttgagtcggttctaatcgaatttaatgaggatattgttttgtctttaaaaaataaaggagttgagtcaatatctttgcacacaaaaaagaatagtgttattgaggttttacctgattctaaggaattgggttttgtgggggtccctaataaaataaatgttgatttaataaaaaatataataaaaaaaaaattaattccaattatatctccacttggtttaggaaataataatcaaacgtataatataaatggagataatgcagcaggtgcaattgcccaatcactaaagtctagaagactacttttaatgactaatgttacaggtgtattggataaagatgacaatttaattgaagaaatttcttcatcagaaattgtagagatgattaaagatggcactattaccaaaggaatgatacctaaaattaatacttgtctaaactccatagataaaggtgtgacagctgtagcaataatcgatggtagaaaaaaatattctgtattatttgaaattttctctgacaaaggttctggtacattaataagaaaatgaa

SEQ ID NO: 251056 - DNA, 865 bp, Unknown
  Bacterial polypeptide expressing nucleotide sequence isolated from the Sargasso Sea
atgaatctaaataacgaagaattaaaaaaaattcttccaaataatggacctgctttagaggaagttcaaaaatacataacaaaatataaaaatgatttaattgtaataaaatatggtggaaatgtttttattgatagaaatatatttaataattttatatcagatttgagtatattaaaacaattagggctttcaattgttgttgtccatggcggtggaccaagaataaaaagagaattagataaatcaaatattcgaactaaatttataagaggcttaagagtaactgatgaaaaaattataaatatagttgagaatgtgctgattgattttaatattgacattgttgactctcttaaagaaaagggaacagaagcaatttcaataaatactaaaaagaataatataattgaagttattcctgaatcagaagaacttggttttgtaggaaaaccatctaaaattaatattgatataatcaaaaatatattggcaaaaaatatgattcctataatttctcctttgggaataggaaaaaataatcaaacatataatataaatggtgatacagctgcaggtgcaattgcaaaatctttgaaatcaagaagactgattttaatgacaaatataaatggggtattagataaagaaaagaaactaattgaggaaattacatcatctgaaattttaaaaatgattaatgatgagattataacagaaggtatgatacctaaaataaacacatgtcttgatgctgtaaataatggtgttactggcgttgtaatagttgatggaagaaaacctcattcgattttatttgaaatattttctgacaaaggtgcaggaactttaataagaaaatgaa

SEQ ID NO: 251057 - DNA, 850 bp, Unknown
  Bacterial polypeptide expressing nucleotide sequence isolated from the Sargasso Sea
atgaatttagatacaattttaccaaaagatggtcctgccattgaagaggttaaaaaatatattaataaatacaatgatgagttaatagtcattaagtatggtggaaatgtttttatagacagacaaatttttgataattttataacagacctaactatacttaataaattaggactatcgattgtggttgttcatggtgggggaccaagaattaaaagggagttagataaatctaatatagagtccaaatttataagaggtttaagagtaacggatgagaaaattatcaatatagttgagtcagtcttaattgaatttaatgaagatattgtttcttcattgaaaaaaaggggattcaatggaatatctttaaatacaaaagaaaataatgtaattgaagttaaacctgagtctgaagaattaggatttgttggaataccaaataaaattaatgttgatataattaaagacaaaattagtaaaaatttaattcctataatatcgccactaggtttaggatataataatcggacttataatattaatggagatactgctgctggagctatagctaaatcgctaaaatctagacgactacttttaatgactaatgtagaaggagtattggataaaaataataaattgatagaagaaatttcatcatcagaaatcataaagatggtcaaagatggaactattactgaaggaatgatacctaaaattaatacatgtttagacgcaattaataataatgttactgcagttgctataatcgatggaagaaaaaaacattctgtattatttgaaattttttcagataaaggttctgggactttaataagaaaatgaa

SEQ ID NO: 251058 - DNA, 739 bp, Unknown
  Bacterial polypeptide expressing nucleotide sequence isolated from the Sargasso Sea
atgaatttagagaatattatacctaaagatggaccatccatcgaagaggtaaaaaaatatataaaaaaatattctaatgaactaattgtaataaagtgtggtggctcagtattgcttgatgtaggtttgtttaatcagtttatagaagatatatcagcaattaatcatctaggattatctgtaattgtcgtgcatggtggtggaaaaaatatcaaaaaggaacttgataaacataaaatagaatcaaaatttatagatggtttaagagttacggatgaaaataccatgacaattgttgaaaaagcgttactggagttgaatactgagattttaaacaatttaactaataaagaagcaaatgcaaaatcggtaactcctaagagtgaaaatataattaaaataaatcccgaaaaaaaagaacttggatttgttggtaatccaaaaaaaataaataaagaagctttattaaatatagtaatagaaaaaaaagttcccattgtagctccaatgggagttggggatgatggtaaaatttacaatataaatgctgatgtagtcagtggatcaattgcaaaggagctaaattcaagaagattgctgttaatgactgatgttgaaggagttctagataaagataaaaatttaatttctgaaattgactctaaacttgctttaaaaatgctaaaagatggggatatttctggaggaatgataccaaaaattaatacttgtcttgatg

SEQ ID NO: 251059 - DNA, 790 bp, Unknown
  Bacterial polypeptide expressing nucleotide sequence isolated from the Sargasso Sea
atggatatagaaaaaattttacccaaaaatggtccatctattgatgaagtaaaaaaatatattgataaatatttaaatgaaatagttgtaattaaatgtggtggctcagtgctacttgatgaaaatttatttaatcaatttatagaagatatttcagtaataaataaattaggattatcagctatagttgtgcacggtggtggaaaaaatattaaaaaaaaacttgataagtatgacatagagtcaaaatttatagatggtttaagagttactgacgaaaaaacaattaaaattgttgaagaagctttattagagttaaatttggaaattttaaaaaatataaataataaggaagcaaaagcacaatcagtaactccaaaaaatgaaaatataattaaaattattccagaaagaaaagaacttggatttgttggtataccaaaagaaataaataaaaaggttctaataaatatagttaaagaaaaaaaagttcctattatagttccaatgggacttggagatgatggaaaaatttataatataaatgcggatatagtggcaggagcaattgcaaaagagataaattctagaagattattattaatgactgatgttgagggagtacttgataaaaataataaattattattagaaataaactctgaagtaacaaaaaaaatgctatccgaaggaactatttctggaggaatgataccaaaaattaatacctgcataaatgctatagaaaatggagtaactggagttgtaattgtagatggaaaaaaacctt

SEQ ID NO: 251060 - DNA, 850 bp, Unknown
  Bacterial polypeptide expressing nucleotide sequence isolated from the Sargasso Sea
aatggaactagaaaaaattttacctaaagatggtcctcctattgaggaagttcacaaatacgttcagaaatataaaaatgaattaatagtaataaaatacggtggtaatgtatttattgaccgagaaatttttaataattttatatctgatttaaaaatattaaacgagttagggctttctgttattgtggtacatggtggaggtcctagaataaaaagagaattagataaatcaaatatcaaatcaaattttataagaggtttaagagtaaccgacaaaaaaatcattaatattgtggaaaatgttcttatagattttaataatgatattgttaaatcattagaggataaagggacaaaaggagtttcaattaatacaaaaaataataatgttatccatgttgatccggagtcaagtgaattaggctttgtaggtgtgcctaaaaaaattgagtctgatgttattaataaaatattaaatgaaaattttattcctgtaatttctcctttaggattaggaaaagatctacaaacttataatataaacggagacacggctgcaggggcaatagctaaatcgctcaaatcaagaagattgcttttaatgacaaatgtagaaggagttttagacaaaaataaaaagctaatacaagaaatttcctcttccaaaattttagagatgatcaaagatgagacaataactgagggaatgataccaaagataaatacatgtttagacgctattaataatggagtaaccgctgttgcaataattgatggtagaaaaaaacattcaatattatttgaaattttttcagataaaggatcaggaactttaataagaaaatga

SEQ ID NO: 251061 - DNA, 655 bp, Unknown
  Bacterial polypeptide expressing nucleotide sequence isolated from the Sargasso Sea
atgtctcttcaaaagaaacagcctgaaagcaaagagcttttagaaaaatattggatatctggtaaaaaattccataccaaaactttttcctttataaaaaaatatcagaataaaatcatcgttataaagtatggaggatacgctctgactaaacctgcacttttaaaatcatttgcaaaaaatatatccttattaaatcaattgggtattaaagttattgtcgttcacggtggtggtcctcaaatagaaaaagaattgaaaaaaagaaaaattaataatgatgagtatcaaggattaagggtgactacaaaaagtgtgcttggagttgtcaaaagaattttgtctcacgatttgaataaactaatatctgatgaaatcaaaaaaaatgggggtaaaacaaaaagatttaatggagtaattacaagagtgcttaaggcaaagattgcgatgaatggtaatattggtttcgtgggggagccaagaggtattgataaaaatatgataatgaaagcccttaaaagtaatcatattcctattatcgcaccacttggaattgatacaaataaaaatacattgaatattaatgcagacacagcagccgcttacatcgctgagtcagtaaaagctgagaggttattgcttttaaccgatgtag

SEQ ID NO: 251062 - DNA, 293 bp, Unknown
  Bacterial polypeptide expressing nucleotide sequence isolated from the Sargasso Sea
aatggatttaaaaaagattttacctacagacggaccgccagtcgaagaagttttgaaatatgttgagaaatacaaaaatgaaataatagttattaagtatgggggtaatgtattcattgatagaaaaatttttgataattttattaaagatttaagtgtacttagcaagcttggtctgcaagtagttgttgtacacggaggaggaccaagaataaaaagagagttatctaaacaaaatattgaatctaaatttataagaggtcttagagttactgatgaaaaaattataaatg

SEQ ID NO: 251063 - DNA, 316 bp, Unknown
  Bacterial polypeptide expressing nucleotide sequence isolated from the Sargasso Sea
atgcttacagaggcacttccatatatgcagaaatatgcagactcaatcattgtaataaaatatggcggtcatgctatgaaggacacaaaatcaataaaatctttttgcgaggatattgctctccttaagcaaagtggtctcaaaccagtgattgttcatggcggaggccctcaaataggtaatatgcttgaaaagttaggtatagaaacaaaatttgagtcaggtatgagaattactgatgataaaactcttgaaatagtagaaatgggtcctttgtggaggcataaacaaagaaatagcatcaaatatcaataat

SEQ ID NO: 251064 - DNA, 853 bp, Unknown
  Bacterial polypeptide expressing nucleotide sequence isolated from the Sargasso Sea
aatgaatgattctcaaagagtatcaatattaagcgaagcacttccatatatacaaagtttctcaggcagaaaaattgttatcaagtatggtggttctgttatggaggatgatgatttaaaaaatgctttttttagagatatagcacttttatcaactgtgggagtttgtccgatagtaattcatggaggtggacccgagattaataattggttaaagaaattagaaatttctcctaaattcgaaaatggattaagaattactgatcaaaaaacaatggaaattgtcgagatggttctaatgggtagagttaataaacaaattgtaaaaggcattaataaaactggatccttagctgtgggaatatcaggtcttgatggcaacttaattcaatctagagaactaggagatgggagccatggtttagtgggagaggttacaaaaatcaatcccgaaatattagatcctcttattgctaaaggatatatcccgattatttctagcattggatcaacctttgagggtatttcccataacatcaatgcagattttgttgctggagaaattgctgctgcaataaatgcagagaaactaattcttcttactgatactcaagggattttaaaagaaaaagataacaaaaatagtcttgttgaaaaaactaatctcaaagaggcaagagatttaattgataaaaaaattgtgactgaaggtatgattccaaagacagaatgctgtattagagctctagcacaaggagtcaaagcagcgcacataatgatgggaagagtacaacattcgttacttcttgagattttcacaaattccggaataggcacgatgatagtcgcttaa

SEQ ID NO: 251065 - DNA, 565 bp, Unknown
  Bacterial polypeptide expressing nucleotide sequence isolated from the Sargasso Sea
tatgtcgataactagaaaacaggctgaaaatatagcttctgtattgagtgaaggtcttccttatatacagaaatttaaagataaagtaattgttgttaaatatggtggtgcagcaatgaccgaagagtcgcttaagcagagcttttcacgagatatagcactaatgaaattagtggggatgaaacctgtaatagtccatggaggtggtcctcagataggcgatgaactgaaaaaagcaggaataaattctgagtttattaatggattgagagtaacttcaaagccagcaatgactgtagttaagaaagtcctagggacacaaattaataatgaaattgtaagattaataaaagaatttggtgccaacgctatatcttttaaccacaatagatatcagataattagagcttcaaaagaaactaactcacaaagtgttgatttaggctatgttggaagtgtagataagatcatcaccggtgaactcaaaaagagaattaacaatggtttcatcccagttattgcgcctattggcaagtctaaagacaataattatcttaatattaat

SEQ ID NO: 251066 - DNA, 871 bp, Unknown
  Bacterial polypeptide expressing nucleotide sequence isolated from the Sargasso Sea
atgtcaaaaaatatttctctaaatgagataaaagaattttggcctgagaaagctcctgacataaatattgttcaaaaatacgttaagaaatatgaaaacgaaaaaattgtaattaagtatggtggtaacgtacttatagatagaaatgtatttaataactttatatctgatataaatgttcttaatagattgggccttgcagtagtagtagtacatggagggggtccgagaattaaaagagagttagataaaaaaaaaattcaatcaaaatttatcaatggcttaagagtcactgataaaaatataattgaaactgtagaaaaagttttaattgattttaacaaagatatcgtaaactctctgaaacaattgggttctgatgcaacttcatttcatactaaaactgataacgtaattgaggttgagcctgaaagagaggaacttggatttgttgggatccctaataaaataaataacaaattaattcaaaacgcattaagtgaaaacaaaattccaatcattgctcctttaggtttagggaaaaacgatcaaacatataatatcaatggtgatactgcagcaagtgctatagcgaaaaaactcaaatccagaagattaatattaatgacaaatgttgaaggtgtatatgacgatcaaaaaaaactaatatcagaaataaaacctttcgacttagaaaatctaattaaatggaaagttgttcagggcggcatgatacccaaaatagaaaattgtgttgatgctgtccaaaatggagttagaggggttgttattcttgatggaagaaaacctcactcagttttacatgaaattttttccgataaaggttctggaacattaattagagaatgaa

SEQ ID NO: 251067 - DNA, 811 bp, Unknown
  Bacterial polypeptide expressing nucleotide sequence isolated from the Sargasso Sea
tttgcccaaacgcagtctcttatttaagggtgcaacaatgaatccattaattatcaagctgggcggcgttttactggatagcgaagaggcgctggagcgcttgtttaccgcactggtgaattatcgtgagacgcaccagcgttcgctggtcattgtgcacggtggcggctgtgtggttgacgagctgatgaagcagctgaatctgccggtgaaaaagaaaaatggtctgcgcgtcacgcctgccgatcaaattgacattattaccggtgccctggcaggaacggcgaataaaaccttgctggcctgggcgaaaaagcatcacatcgcgtctgttggtctgtatcttggcgatggcgacagcgtaaaagtgacgccgctcgataaagaactgggtcatgttggactggcgcagccgggttcgcctaagctgattaacacgctgctggaaagcggttttctgccggtagttagctctattggcgtcactgatgatgggctgctgatgaacgtgaatgccgatcaggcggcaacagcgctggcggcaacgctgggtgcggatctgatcctgctctctgatgtgagcggtattctggatggcaaaggccagcgtattgccgaaatgaccgcagcgaaagcggaacagctgattgaacagggcattattaccgatggcatgatcgtgaaggtgaatgcggcgctggatgccgcgcgtacgctgggtcgtccggtggatatcgcttcctggcgtcatgcagagcaactcccgacgctgtttaacggcacgccaattggtacgcgtattctggcttaa

SEQ ID NO: 251068 - DNA, 865 bp, Unknown
  Bacterial polypeptide expressing nucleotide sequence isolated from the Sargasso Sea
atgaccattactagaaaacaggcagaaaatattgcttcagttttaactgaaggccttccctatataagaaagtttaaagataaagtaatcgttattaagtatggcggcgctgccatgatagatgagtcgcttaaagagagctttacaagagatatagctctcatgaaattagtaggaatgaaacccgtagttgtgcatggagggggtcctcaaattggcaatgagctggctcaggcaggagttgaatctgagttcattggtggacttagggtcacaactaaatctgccatgactgttgtgaaaaaagtcctcgggacaaaaattaataatgagattgtgaaattgataaaaaagtttggtggaaatgcaatatcttttaaccatagtaagtatcaaattattagagcatcaaaggaagtgatccaaggcagtattgatttaggttatgttggaaaagtagataagataaaaactcgtgatctcaaaaaaataatagaaaaaggctttatcccagtcatagcacctattggggtatcaagggaaaataattacttaaatataaatgctgatgttgttgcgggtgaggttgcagaagctcttgatgcagaaaaactcatactcttaacagatgttaaagggattggagactctaaaaataaacttatttctaaaatctctttgcagaaaggtcaaagattactcaaagaagaatacataaagggtggaatgactccgaaactcaaggctgcccttaatgccaagaagaaaggtgtaaaaacttgtcatataattgatggaagagttccgcatgcagttttactagaagtgctcactgaagagggcgtaggaactatgataagctaaa

SEQ ID NO: 251069 - DNA, 853 bp, Unknown
  Bacterial polypeptide expressing nucleotide sequence isolated from the Sargasso Sea
atgaatgattctcaaagagtatcaatattaagcgaagcacttccatatatacaaagtttctcaggcagaaaaattgttatcaagtatggtggttctgttatggagaatgataatttaaaaaatgctttttttagagacattgcacttttatcaaccgttggggtttgtccgatagtaattcatggaggtggaccagagattaataattggttaaagaaattagaaatatctcctaaattcgaaaatggattaagaattactgatcaaaaaacaatggaaattgtcgagatggttctaatgggtagagttaacaaacaaattgtaaaagggattaataaaactggatccttagctgtgggaatatcaggtcttgatggcaacttaattcaatctagagaactaggagatggtagccatgggttagtgggagaggttacaaaaatcaatcctgaaatattagatcctcttatttctaaaggatacataccaattatttctagcattggatcaaccttggagggtatttcccataacattaatgcagattttgttgctggagaaattgctgctgcaataaatgcagaaaaacttattcttcttactgatactcaaggaattttaaaagaaaaagataacaaaaatagtcttgttgaaaaaactaatctcaaagaggcaagggattttattgataaaaaaattgtgactgaaggtatgattccaaagacagaatgctgtataagagctttagcccaaggagtcaaagcagctcacataattgatggaagaatagaacattcattacttcttgagatttttacaaattccggaataggtacaatgatagtcgcctaac

SEQ ID NO: 251070 - DNA, 850 bp, Unknown
  Bacterial polypeptide expressing nucleotide sequence isolated from the Sargasso Sea
atggacttagagaaaattatacccaaggatggtccttccatcgaagaggttgaaaaatatgttaaaaaatattctaatgaattaatagtaataaagtgtggtgggtcagtattgcttgataaaaacttatttaatcaatttatagaagacatatcaataattaataaattgggattatcatcaatcgttgtacatggtggaggtaaaaacattaaaaaaaaacttgataaaaataatatagattcaaaatttatagatggtttaagagttactgatgaaaaaacaattaaaattgttgaagaggccttattagagttaaatgctgaaattttaaatagtataaataataaagaagcaaatgcaaaatctgtaactcccaaaaaaggcaatataataaaaattattcctgaaaagaaaaaacttggatttgttggtaaaccaaaaaaaattaataaagaagtgcttttaagcataattagagaaaaaaaagttccaattgtagttccattaggaattggggatgatggaaatatttataatataaatgcagatgtagtagctgcagcgattgcaaaagaaataaattctagaagattattattaatgacagatgtagaaggagttttagacagagataaaaaacttataccagaaattaattctgaaacagcaaataagatgattaatgctcaatcaatttctggaggaatgatacctaaaattaaaacatgcattgatgctgtcaacaatggtgtaactggtgtagttatagtagatggacgaagacaaaattcactgttatttgaaatattttctgataagggcgctggaactttgatcagaaaatgaa

SEQ ID NO: 251071 - DNA, 829 bp, Unknown
  Bacterial polypeptide expressing nucleotide sequence isolated from the Sargasso Sea
atgaaatttgattttttatcagagagcgatcaggcttattttattcataaagcctcaactttagttgaagcattgccatttattagagaacatagtggagatactattgtcatcaaatacggaggtcatgcaatgggagatcctaaacttgccaaaagttttgcaagagatattggcttaataaaagaagttggaatatttcccgtagttatccatgggggaggacctcaaattgcagataaattaaaaactaaaaatatatcttctaaatttgttgatggtttaagagttactgatgctgaaacagtaaaagttgttgaagatgtattagccaacgagataaatactgaaatagtgaaagcaataagtgactctggtggaaaagcaattggattaagtggaaataaaaataatctcttaaatgcaacaaaattaaaagtagaagtcaaaaactcagattcaaatattgaaaaaattattgatataggatttgtaggacagccaacaaactttaacaccgacttgattaaacaacatattgaaaagggttatatacctgttattgcgccattaggaatagataatgaaggtaattcatacaatattaatgctgacactgctgcaggttttatcgcaggaaagttaaaagcaaataaattattgcttttgacagatattgctggtgtattagataaaaataagaaattaatcccttccctaaagcttgaagatgcaattgaaattgttaatgaagattttgtagtaggaggcatgaaaccaaaaattacaacatgtatagaagctatgaaaagtggagtggctaaatcaa

SEQ ID NO: 251072 - DNA, 898 bp, Unknown
  Bacterial polypeptide expressing nucleotide sequence isolated from the Sargasso Sea
atgtcatatcaaaatgagagtaatcaatggttaaaaaaggtagaatttttatctgaatttttaccatatatgcatcagtataatggttcatcaattgttattaaatatggtggacatgcaatgacaaataaagaaatgcaaagttcttttgccaaagacatagctttgttacagcaagttggcacaaaacctgtggttgttcatggtggtgggccacagattgagacaatgcttgaaaaacttaatattaaaacagactttgttgatggtttaagagttacagataaagacactgtaaatgttgttgagatggtattatcaggtgcaataaataaatctatagttgcagctataacttctgctggtgctaaagcagtaggcatctcaggtaaagatggagggctaattaaagcagaaaaaattaagtcaagaagagatccaaattcagcaatcgaaaaagttgttgatcttggatttgttggaaagccaactaatattgaaaataaagttcttaatgctcttatggaaggtagtttgataccagtggttgcacctttaggattaggtaatgatggtcaaacctataatataaatgcagacactgtagcaggagcaatttcaagctctctcaatgcaaaaaggatgttgatgttaactgacgtaccaggtgttttagataaaaatggtaaacttattaaagaactaagttctgaagaagcaaaaaaattaattgatcagaaagtaattacctctggcatgataccaaaagtcgagacatgtattgaaacagttgaaaatggaactgatgcggcagtgattttagatggaagagccccgcatgctactttaatggaactatttacagagcatggtggaggaactcttattagaaagtaaa

SEQ ID NO: 251073 - DNA, 898 bp, Unknown
  Bacterial polypeptide expressing nucleotide sequence isolated from the Sargasso Sea
tttgattaataaagcttctacattagctgaagctcttccatatattcgtcaacatactggaaaaaatatagtaattaaatatggtggacatgcaatgggtgatgctgcattggctaaaaaattctctcaagacataggtttaataaaagaggtaggaataaatcctattatagttcatggaggaggtccgcaaataggggcaatgttaaaaaagaaaaatattaaaacaaaatttgttgagggcttaagaattacagataaaaaaacagtaaaaattgttgagagagttttatcaaaagatatcaataaaaagatagtttcagatattaatctaacaggaggtaaagctgagagtttttcaggcaatgtaaataatttaattcaagcaaaaaaattgaaaattgctattaaggaaagtgattctaatattgaaagaattttagatttgggttttgtaggagagccaacaaagataaatataaaaaaaattttaatatccataaaaaacggtaaaataccagttatagctccactaggaattgataaaaatggcaacacatacaatataaatgcagatacagttgctggggcagtagcaggcgcgctcaaagcaagtaaattactattattaactgacgtcgatggaatacttgatcaaaataataagttaatatcttctcttagttataaagaagcgttaaaaattaataaaaaaaaatatatatctggtggaatgaagcctaaaattgcaacatgtatagaggccatatcaaaaggggttaatgaggcaactattcttgatggaagaatatctcatgcattaattttagaattatttacagaacatggtatagggactcaaatttattcaaaaataaatgtcaaaaataaaaaataa

SEQ ID NO: 251074 - DNA, 865 bp, Unknown
  Bacterial polypeptide expressing nucleotide sequence isolated from the Sargasso Sea
aatgggaatatcagtaaaacaagctaaaaatatatcttctgtgttgagtgaagggcttccttacattcaaaggtttaaagggaagatcatagttgtgaagtatggtggagcagctatgtcagaacagagtttaaagagaaactttactagagatatatctttaatgagtcttgttggcatgaaacccgttattgtccatggcggcggccctcagatagctaatgagctaaagaagaaaggggtaatttcaaaatttatatcagggcacagaattacggataaacctaccatgaatattgttaaaaaaattctaggagaaagcataaaccatgagatagttaaattaatcaaaaaagcaggtggagatgctgttagctttaatcacataaaacctaagattattaaagcttcaaaatatttaggccctgataaacaggatttaggattagtaggaaaagtagatagaattctagtctctgagttaaagaacataatatcctctggatctattcctgttattgcacctattggagtaaataaagatggaagtttcttaaatattaatgctgatgttgtagctggaaaggttgctgaaagtttaaaagcagaaaaactgattctccttactgatataaaaggaatcttagatgacaacaagcaaataatctcaaagatatccgccaacaaaggaagaaaactgatcaaagataatattattaagggaggcatgactccaaaattattagccgctttagaggcaaaaaagaatggcgttaagtcatgtcatatcattgatggtagattgcctcacgcagttttacttgaagttcttacagctgaaggtgtgggaactatgataagctaa

SEQ ID NO: 251075 - DNA, 538 bp, Unknown
  Bacterial polypeptide expressing nucleotide sequence isolated from the Sargasso Sea
tatgagtgtttcaccaattgtaattaaagttggcggtgcattactcgacgacaccgccgcaatgacacgtttatttctaagcgtaaaagacgtgcaggccacacgccccgtcgtagtggttcacggaggcggaccattagtggaaacgctaatggcgagtcttggtcttcaaagcacaaaaatagatggccttcgggttacgcccgatgaacatatgccttatatctgcggagcgcttgcaggctctgccaataagcaactatgcgcagcggctttggcttcaggcttaacccctgttggtttgtcgttgttagacggtaatatggtggtgtgtgagcctctagctgaccagtatggtgccgtgggcgtgccgtcgacagcagacgcatcatttctaaaaagcgtattagcccagtcaacactaccggttatcagttctattggttcaagcccacaaggcagattactaaatgtaaacgccgaccaagccgcaacggttattgccgagcttcttaacgctgaacttttactcctttcc

SEQ ID NO: 251076 - DNA, 784 bp, Unknown
  Bacterial polypeptide expressing nucleotide sequence isolated from the Sargasso Sea
aatgaaatttaattttctctcaaaaagtgttcaaaattatttaattaataaagcttctacattagctgaagctcttccatatattcgtcaacatactggaaaaaatatagtaattaaatatggtggacatgcaatgggtgatgctgcattggctaaaaaattctctcaagacatagggttaataaaagaggtaggaataaatcctattatagttcacggaggtggcccacaaataggagcaatgttaaaaaagaaaaatattaaaacaagatttgttgaaggcttaagaattacagataaaaaaacagtaaaaattgttgagaaagttttatcaaaagatatcaataaaaaaatagtttcagatattaatctaacaggaggtaaggctgagagtttttcaggcaatgtaaatagtttaattcaagcaaaaaaattaaaaattgctattaaggagagtgattctaatattgaaagaattttagatttaggttttgtaggagagccaacaaagataaatataaaaaaaattttaatatccattaagaaaggtaaaataccggttatagctccgcttggaattgataaaaatggaaatacatacaatataaatgcagatacagttgctggggcagtagcaggcgctctcaaagcaagtaaattactattattaactgatgttgatggaatacttgatcaaaataataagttaatatcttctcttagttataaagaagcgttaaaaatttataaaaaaaaaatatatatctggtggaatgaagcctaa

SEQ ID NO: 251077 - DNA, 844 bp, Unknown
  Bacterial polypeptide expressing nucleotide sequence isolated from the Sargasso Sea
gttgaaaaatatttggccaaaagatgccccagaaataaaagatgttccaaaatatgtagaaaaatataagaatgaattaattgtaattaagtatggtggaaacgttttcatcaaaagagagatatttaataatttcattgaggatataagtttaataaataaattaggtctttcaattgtagtggttcatgggggtgggccaagaatagaaagggaactaaaaaaagaaaatattaaaactagatttataaacggcttgagagttacagatgaaaaggtaattaagatagttgagagggttcttatagactttaataatgatattgtaaactctttgaataaaaaaggaacaaaagcggctccagttaatactaaaataaataatataataaaagttacaccagacaaaaaagagttgggttttgttggagttcctaatgaaattaatacagatattttaaaaaatcttattgaaaataaacaaatcccaatcgtagctcctttaggcttagacaaaaataaaataacttttaatattaatggagatacagctgcaagctctattgcaaagaaacttaaatctagaagacttttgttgatgacaaatgttgagggtgtttacgatgatagaaagaacctaatttcagaaattaaaccgtttgatatggaaaatttagtaaaactcaaaattgttcaaggaggtatgctccctaaaataaataattgtattgatgctgtagaaaacggggtaagaggtgtagtaattcttgatggtagaagaccaagatcaattctacatgaaatcttttctgataaaggtgcggggactttaataagaaaatga

SEQ ID NO: 251078 - DNA, 322 bp, Unknown
  Bacterial polypeptide expressing nucleotide sequence isolated from the Sargasso Sea
atggatttaaaaaaaatattacccaaaaatgggccgcctattgaagaagtttctaaatatatagaaaaatataaaaatgaactaattgttattaaatacgggggtaacgtttttatagatagaaatatatttaataattttattgaagatataagtttactaaataagctaggactttcaattgtagtagttcatggtggaggaccaagaattaaaagagaattagataaatctaatatacaatcaaaattcataagaggattgcgtgtaactgatgaaaaaattataaatgtagttgaatcagttctgattgattttaatg

SEQ ID NO: 251079 - DNA, 703 bp, Unknown
  Bacterial polypeptide expressing nucleotide sequence isolated from the Sargasso Sea
attggaaaaaattcttccgaaagatggtcctaatctagaggaagttcagaagtacataaataaatataaaaatgagctcatagtggtaaagtatggtggcaacgttttcatagatcgtgagattttcaataattttataacagatttaacaatattatttcaattaggtctttctgtagtggttgtacatggcggaggacccagaataaaaagagaattagataaattaaatataaaatcaaaatttatcagaggtctaagagttaccgatgagaaaattattgatattgtagaaaaagtattgatagagtttaacgaagatattgtttcatctttaaaagaaaaaggaactaacggaatatctttgaatacaaaacaaaataatgtaattgaagtgatccaagagtccgaagagctgggatttgttggaatacccactaaaataaatgttgatattatcaaagacaaaattgataaaaaattaattcctattatatcgccgcttgggattggaaaaaataatcaaacatttaatataaatggagattcggctgctggctttatagctaaatctcttaaatctagaagacttcttttaatgactaatgttgaaggagtattagacaaaaatagaaaattaatacaagaaatctcctcatctaaaattttagagatggtcaaagatgaaactatcactgaaggt

SEQ ID NO: 251080 - DNA, 820 bp, Unknown
  Bacterial polypeptide expressing nucleotide sequence isolated from the Sargasso Sea
atgccaaaaatagcaaatatagagaagtacatctcaaaatataaaaaagaaataatagtcattaaatatggtggcaatgtactaatagatagaaacatttttaataattttatagaagatataggtgtactaaataaactaggactttctattgtagttgttcatggaggaggcccaagaatagagagagaattaaaaaaagaaaatatagaatcaaaatttgttaagggattaagagttactgacagaaaagtaattgggatagttgaaaaagtattaattgatttcaataaagatattgtaaattctttaattaaaaaaggttcaaaagcaattcctataaatacagatagtaataatataataaatgttaccccagatagggaagaacttggttttgtcggtataccagataaaattaatattgatataattaatgaggcaataaatcaaaatcaaataccagtggtggcacctttaggtttggatatgaataatcagacttttaatattaacggggatactgcagcgagcgctatagccaaaaaacttaggtcaagaagacttttattaatgacaaatgttgaaggtgtatatgatgataaaaaaaatttaatatcagaaattaaaccttttgatttagaaaatttagtaaaatttaaaattgtacaaggtggcatgataccaaaaatagaaaattgcatcgatgcagttgaaaatggggttagaggtgtagttatacttgatggtaggaagcctcattcaatacttgaggaaatattttctgataaaggtgcgggaactttgataagaaaatgaa

SEQ ID NO: 251081 - DNA, 409 bp, Unknown
  Bacterial polypeptide expressing nucleotide sequence isolated from the Sargasso Sea
atgaaatttgattttttatcagagagtgatcaggcttattttatacataaagcctcaaccttagttgaagctcttccatacattcgagaacatagtggtgataccattgtaataaagtacggtggacatgcaatgggagataaaaaactgtctgaaagtttttcaagagatattggattattaaaagaagtaggtgtgtcaccaattattattcatggtggaggacctcaaattggcgagagacttaaatcaaaaaatatatcaacgcaatttgttgaaggactacgagttactgataaagaaacaattaaggtagttgaggaagttttatctaaagatatcaattcagaaatagtagaatctataagtgcctctggaggaaaagcgattggagtatctggtaatgata

SEQ ID NO: 251082 - DNA, 853 bp, Unknown
  Bacterial polypeptide expressing nucleotide sequence isolated from the Sargasso Sea
atgaatgattctcaaagagtatcaatattaagcgaagcacttccatatatacaaagtttctcaggcagaaaaattgttatcaagtatggcggttctgttatggagaatgataatttaaaaaatgctttttttagagacatagcacttttagcaaccgttggggtttgtccgatagtaattcatggaggtggacctgagattaataattggttaaagaaattagaaatatctcctaaattcgaaaatggattaagaattactgatcaaaaaacaatggaaattgtcgagatggttctaatgggtagagttaacaaacaaattgtaaaaggcattaataaaactggatccttagctgtgggaatatcaggtcttgatggcaacttaattcaatctagagaattaggagatggtagccatgggttagtgggagaggttacaaaaatcaatcctgaaatattagatcctcttatttctaaaggatacatcccaattatttctagcattggatcaaccttggagggtatttcccataacattaatgcagattttgttgctggagaaattgctgctgcaataaatgcagaaaaacttattcttcttactgatactcaagggattttaaaagaaaaagataacaaaaatagtcttgttgaaaaaactaatctcaaagaggcaagggattttattgataaaaaaattgtgactgaaggtatgattccaaagacagaatgctgtataagagctttagcccaaggagtcaaagcagctcacataattgatggaagaatagaacattcattacttcttgagatttttacaaattccggaataggtacaatgatagttgcctaac

SEQ ID NO: 251083 - DNA, 781 bp, Unknown
  Bacterial polypeptide expressing nucleotide sequence isolated from the Sargasso Sea
atgaaatttgattttttatcagaaagtgatcaggcttattttatacataaagcctcaaccttagttgaagctcttccatacattcgagaacatagtggtgataccattgtaataaaatacggtggacatgcaatgggagataaaaaactgtctgagagtttttcaagagatattggattattaaaagaagtaggtgtgtcaccaattattattcatggtggaggacctcaaattggcgagagacttaaatcaaaaaatatatcaacacaatttgttgaaggattacgagttactgataaagaaacaattaaggtagttgaagaagtattatctaaggatatcaattcagaaatagtagaatctataagtgcctcaggaggaaaagcgataggagtatctggtaatgataacttagtcactgcaactaaattgaacgtggaaattaaagatagtgattcaaatattgaaaagatagttgatattggttttgttggacaaccaataaaattaaacaaagatatgttaactaactttataaaaaatggtcaaatacctgtcatatctcctttaggtaaggatgaaaataattttacatataatattaatgctgacactgttgcgggttttatagcaggtgagttacaggcaagtaaattattattactaaccgatgtacctggaattttagacaaagatgaaaaattaatctcatcaataactttagaagaagctaaaagtattgctaataaagaatatatttctggaggtatgaagccataaa

SEQ ID NO: 251084 - DNA, 889 bp, Unknown
  Bacterial polypeptide expressing nucleotide sequence isolated from the Sargasso Sea
atgtctcttcaaaataaacagcctgaaagcaaacagcttttagcaaagtattgggcaactggtaaaaaatttcatgccaaaactttatcttttataaaaaagtataataataaaattatcgttattaagtatggaggatacgctttaactaaacctgcacttttaaaatcatttgcaaaaaatatatccttgttaaatcagttgggtattaaggttattgtggtacacggtggaggtcctcaaatagaaaaagaattgaaaaaaagaaaaattaataatgaagagtatcaggggttaagagtaactacaaaaagtgtgcttggagttgtcaaaagaattttatctcacgatttaaataaactaatatctgatgaaatcaaaaaaaatgggggtaaaacaaaaagattaaatggggtgagctctaaagtgctcaaagcaaaaatagcaatgaatggtaatattggtttcgtaggggagccaaggggtattgataaaaatttgataatgaaagcccttaaaagtaatcagattcccataatcgcgccacttggaattgatacaaataaaaatacattgaatattaatgcagatacagcagccgcttatatcgctgaatcagtaaaagctgagaggttattgcttttaacagatgtagcaggagtactggataacaataagaaattgataacagagcttgatcgtaaaaaagcatttcaatacataaaaaaaggaactataaaaagtggtatgatacctaaaatcaaagcatgttttaataccttgaaaaatggtgcaaaaggggttgccttaattgatgggagaaaacaaaacgctgttgcgatggagctcctaacaacgcaaggagctggaacattaatcaaaaagtaaa

SEQ ID NO: 251085 - DNA, 898 bp, Unknown
  Bacterial polypeptide expressing nucleotide sequence isolated from the Sargasso Sea
gatgattgaaaatgataatagcgcaaaggactggcttaataatgcagatatgcttacagaagcactcccatatatgcaaaaatatgcgggttcaattatagtaataaaatatggcggaaacgctatgaaagattctcattcaataaattcattttgcgcagatattgcacttcttaaacaaagtggtttaaagccagtaatcgttcatggtggaggccctcaaataggaactatgttagaaaaagtaggtatagaaactaagttcgagtcaggaatgagaatcactgatgagaaaactttagaaattgttgaaatggtactttgtggcggtataaataaagaaatagcctcggaaattaataattgtggttgcaaggctgtaggattgtctggcaaagatgcatcaatgataattgcaagaaagcatgatggaaaaattaaagacgagtcaaatattgaaaaaattgttgatcttggtttcgttggagtcccagagaaaattaataccggaataattgaaatattaacctcaaatgattttatacccgtaatcgctccattaggtattaatgaagaaggtaaaacttttaatattaatgcagatacagttgcaggagctatagctcattctttgaatgctaaaagacttttagttttaactgatgttgaaggtgtaatagatgatcaaaaaaatgtcatagctgaactctctaaaagcgaggcaaaaaatcttataaataatgatattatatccgggggaatgatcccaaaaatcaatacatgtattgatgcagtagaaaatggcgtaagtgcagctgtaattgtagatggaagagtaaaacacgctgttcttcttgaattatttacagaacatggtgccggaactttaatcagataa

SEQ ID NO: 251086 - DNA, 796 bp, Unknown
  Bacterial polypeptide expressing nucleotide sequence isolated from the Sargasso Sea
aaatattttaaaaaatattcagacgaattaattgtaataaagtgtggtggttcagtattgcttgatgaaaatttatttaatcaatttatagaaaatatagcagtaattaataaattaggtttgtcagcaatcgttgttcatggcggtggtaaaaatattaaaaaaaaacttgatcaaaataatatagagacgaagtttatagatggtttaagagttactgatgaaaaaacaattaaaattgttgaagaagctttattagagttaaatacagaaattttaaataaaataaatgacaaagaagcaaatgcacaatcagtaactcctaagaacgaaaatataatcaaaatcattcccgaaaaaaaaaaacttggatttgttggtactcctaaagaaattaataaagaagtgcttttaagcatagttagagaaaaaaaaattccaattatagttccactaggaattggagatgatgaaaagatttataatattaatgcagatgtggctgctgcagaaattgcaaaagaaataaatgctagaagattgatactaatgacagatgtagagggagttttagataaagataaaaaacttatctcagaaattaattctgaaaaagcaaatagtatgattaatgatcaatctatttctggtggaatgatacctaaaattaaaacatgcattgatgctgttaacaatggtgtaactggtgtagttatagtcgatggacgaagacaaaactcaatattgtttgaaatattttctgataagggagctggaactttaatcagaaaatgaa

SEQ ID NO: 251087 - DNA, 868 bp, Unknown
  Bacterial polypeptide expressing nucleotide sequence isolated from the Sargasso Sea
aatgcctcagaaaaatttaagttttattaaaactatttggccgaaagaagcgaaaaattttggcaatgttttaaaatatcttgaaaagtataaaaatgatttaatagttatcaaatacgggggcaatgtattaatagacaggaatatatttaataattttatcaatgatataaatattttaaataatttaggtttatcaataatagttgttcatggtggcggcccaagaattgaaagggaattaaaaaagaaaaaaatccaatcaaattttataaatggacttagggtaactgataaaaacgttatttctattgtagagaaagttttgattgattttaataatgatattgttgcttctttaaataaaaagggttcaagagcagtatcaattaattcaaaagtaaataacattattaaaattattccggataataaagaacttggatatgttggcattccacaagatatcaatattaattttttaaaaaacttaattaaagaaaacaaaatacctgttgttgctccattaggtctcgatgaaaatgataatgtgtttaatataaatggggatactgcagcaagcgcaattgctaaaaaacttaaatcaagaagattgcttttaatgactaatgttgaaggtgtttatgatgacagaaaaagtcttatctctgaaataaaaccttttgatattgaaaatttagtaaaattgaaaatagttcaaggcggcatgataccaaaaattaaaaattgtattgatgcagttgaaaatggtgtaaggggcgtagttatactagatggaagaaaaccacattcaatattggacgaattattttctgacaaaggctctggaactttgattagaaaatga

SEQ ID NO: 251088 - DNA, 649 bp, Unknown
  Bacterial polypeptide expressing nucleotide sequence isolated from the Sargasso Sea
ttgattgaggccttgccttatattcaacaattatctgggacaacaattgttattaaatttggtgggaatgcaatgactgacgatgcattgaagaataatttcgctagggatgtagtactacttaaacaagtaggatgtcatccagtaattattcatggaggaggtccgcaaataactaaacatttagagaagcaagggatagaatcaaattttgctaatggcatgagaataactgatgaaaaatctatagatattatagagatggttttaggcggtttaataaataaagatattgtaaatacaattacatctttaggaggcaaagccgttggtttatcaggtaaagatgggggattaataagagctaagaagattgaaggagaaggtgaatttaaaaatattgattttaagaatactggtactgttaaaagtattgatcctggtgtagtaaaattactagacggctccacttttataccggtcattgctccaataggaattggggatgatggcaagacatacaatattaatgcagatatagttgcaggtaaaatagctcatatattacaagctagcaaatatttaatattgacaaatactcaagggattttggattctaatggaagccttatccaatctataaacactg

SEQ ID NO: 251089 - DNA, 808 bp, Unknown
  Bacterial polypeptide expressing nucleotide sequence isolated from the Sargasso Sea
catgactgtatcaagaatagatgctgaaaaaatagcttccgtcttagttgaaggaatgccatatattcaaagattctcaaataaaaggattgtcatcaaatatggtggagccgcaatgttaaaaaataaacttagacaaggttttgctagagatatagctttgatgaaattagttggcatgcatccaatagtaattcatggaggcggtcctcaaattggagctgaattagaaagaaaaaatattgagactagcttttatgaaggctatagagttacgaataaggcaactatgacggtagttaaaaaggttcttggaaaagaaataaataaagaaattgttcaattaattaaatcttttggaggaagtgcagaaagtctttcctggtttaattcagatttaattaaagcttcaaaattaaatgaggagaaattgggactggtaggtaaggtgaatacagtaaaaatatctgagataactaaacttctaaaaaaaaactacatacctataatttcaccaattggaaaagataatgaaggaaattacttgaacataaatgctgatttagttgcaggaaaaattgcctcatccttaaaagctgaaaaattaatactgctaactgatgtggcaggtataaaagatgaagatggaaaattcctatctaaaattacaaaaagaaaagcgaaacagttaattaagacaaatgttataaagggaggcatgtctcctaaactttcttcttctttgaattcaataaagaaaggaaccaaatctgtaacaataactgatggtagagtacctcatgctgta

SEQ ID NO: 251090 - DNA, 913 bp, Unknown
  Bacterial polypeptide expressing nucleotide sequence isolated from the Sargasso Sea
atgaaatttgattttttatcggaaagtgatcaagcttattttattcataaagcttctacattagttgaagctcttccttacataagagaacatagtggagatactattgttataaagtatggtggacatgcaatgggagataaaaaactgtcagagagtttttccagagatattggattattaaaagaaataggtgtgtcaccaattattattcatggtgggggacctcaaattggtgagaggttaaaatcaaaaaatatatcaacacaatttgttgaaggattacgagttactgataaagaaacaattaatgtagttgaagaagttttatctaaagatatcaattcagaaatagtagaatctataagtgcctctggaggaaaagcgataggagtatctggtaatgataacttagtcactgcaactaaattgaatgtggaaattaaagatagtgattcaaatattgaaaaaatagttgatattggttttgttggacaaccaaaaaaattaaacaaagatatgctaactagctttataaaaaatggtcaaatacctgtcatatctcctttaggtaaggatgaaaataattttacatataatattaatgctgacactgttgcgggttttatagcaggtgagttacaagcaagtaaattattattactaaccgatgtacctggaattttagacaaagatgaaaaattaatctcatcaataactttagaagaggctaaaaatattgctaataaagaatatatttctggaggtatgaagccgaaaattaatacatgtattgatgcaatgaaaaaaggtgttaaaaaatctactattttagatggaagaattcctcattcagtaatattagagttattcactgaacatggaattggtacacaaataacaagtaattaaa

SEQ ID NO: 251091 - DNA, 883 bp, Unknown
  Bacterial polypeptide expressing nucleotide sequence isolated from the Sargasso Sea
gatggctgattccaagcagtccggggatgacgccctgagggtgtccgtcctgagcgaggccctgccgtacatccagcatttcgctggccgacgcattgtggtgaagtacgggggcgccgccatggcccacgccgagttgcgcgatgccgtgttcagggatctggcgctgctggcctgcgtgggagtccagccggtggtggtccacggtggtgggcccgaaatcaaccaatggctgaagcgcctggagatcccagcggaattccgtgacggccttcgtgtcaccgatgccgacaccatggatgtggtggagatggtgctggtcgggcgcgtcaacaagcagatcgtcaatggtctcaaccggctcggtgcccgcgcagtcggcctgagcggcagcgacggcggtctcgtggaagcgaggccctggggggatggcagccacgggctggtgggtgacgtggcccgcgtcaaccctgatgtgctcgaacccctcctggagcgcggctacgtcccggtgatctccagcgtcgccgccactcctgaagacggcaaggcccacaacatcaatgcagacacggtggcgggagaggttgccgcagccctggaggccgagaagctggtgctgctcactgacacaccaggcatcctgcgggatcgggcggatccggcgtccctgattcgccagctgcggctgtcggaggcgcgccagctgatccatgacggtgtggtggccggcggcatgacgcccaaaacggagtgctgcatccgagctctcgcccagggcgtcgcggcggcgcacatcatcgacggccgcgtccctcatgctctgctgctggaggttttcactgatgccggcatcggcacaatggtggtgggacgcggctga

SEQ ID NO: 251092 - DNA, 697 bp, Unknown
  Bacterial polypeptide expressing nucleotide sequence isolated from the Sargasso Sea
atgccggttattgaatcaaaaataatgataaactctaattcttttaaaaagaatgaagaagatcacatagaattaatcaatgaatttagatcgttagaaaaaaaaatcgctgataattctgagagagccaagccaaaatttgaaaagagaggtcagcttcttccaagagaaagacttgcggctcttttagaccctgatagctatttcatacccctttctactcttgctggatataaaatgggagatgatgatggagataaaaatatttccggtggcggtggtattagtggaataggatatgtatcaggcgtaagatgtatggtcagcgcttcagactctggaattaagggcggaagcatgacagaaatgggagttgttaaagcacttcgaggagctgaaatcataaaagaaaataagcttccattaattagtcttgttgaaagcgcaggggcaaatctctttagacaatcggaagtttttttgccaggtggacgtagttttgcaaacttagctaaaatgtctgctatgggtatacctacaattgcagtagttcatggtaattctactgcaggaggtgcatacactcctggattatcagatcaagtcattgtagttaaaaatagatctaaaatatttttagcgggcccaccattgcttaaggcagcattaggggaaattgctacagatgaagaactga

SEQ ID NO: 251093 - DNA, 457 bp, Unknown
  Bacterial polypeptide expressing nucleotide sequence isolated from the Sargasso Sea
ttcatcatctgggtgggcgaggaggaccacctgcgcatcatgtgcatggagaagggctccgtgctcaacacgatcttcgaccggctgaagaaggcgctggacaagatcgacggcatcgagggcctcgccttcgccaagtcgcccgactacggctacgtcacctcgtgccccaccaacctcggcacgggcatgcgcgcctccctgcacatcaagctgccgaagctgacggccgacggccagggcgacccccacggcaactcgccggcggcgaaggccatcgcgaagccgctcgggctgtccgtgcgcggcaccggcggcgagcacacgccgatcgacgccgagggcaccgtcgacatctcgccctccgcgcgcttctgcatcaaggagagccagatcatcacaaacctctacctcggcatcaaacagatgaaggaggcggaggatgccaaggcgtgag

SEQ ID NO: 251094 - DNA, 1048 bp, Unknown
  Bacterial polypeptide expressing nucleotide sequence isolated from the Sargasso Sea
ctggatttttctattgctgcaactatctcacttgatgaaggaataaaagaattaactgcaaaatataaaagtattattgagaaatataattcatcatctcgagaaatagaagcagaagttctagaagcatatattttaattcttaatgatcctgaattaataaatagtttatccgaattaaatgaagcaaacttagaaaaaatttatgacgtatttttggaacaatcagaagtatttaaacaaatggatgatgagtattttcaacaaagatcggaggatattgaagcaatcggtaaagaattaatatttaccctccaagatatatctatagagtttgatgcagatgttcctcaagttatctttgcaaatgagctaacaccaaatgaaacatcatcgatgaatttaaatcttgttaaagggtttgttgtaaaagaaggtggtccaacttctcatgctgtaattgtggctaaaaattacggcattccatgtattttagggattagtattgctgactttgatatagataatgttgaagaagttattatcaatggttcaactggggaattaacaattaatcctgatgaaagctcattaaaaattgttgaagagtataaagcaaccataactaaacagcttgaaaactacacagaagaaaacttgaataaattaggcgttgaacttagggcaaacattggctcaacggatgaaattaaaagttttaaagattcattaattaaatcaataggtttgtttcgttccgaatttctttacatagaagaatcaacagaacctgaattagatagcttaattaattcaaacaacctacttaatgaaaagtttgaggaaactattgtttatagaacattagatataggtggagacaagcaagttgattacttaaatctacctcaggaagagaacccatttttaggagtaagaggggttaggcttactttagaaaacagaaaactttttgaaactcaaatcagttctattttgaattcgaatattagtggaaaagtaaaaataatgtttccaatggttgcaa

SEQ ID NO: 251095 - DNA, 874 bp, Unknown
  Bacterial polypeptide expressing nucleotide sequence isolated from the Sargasso Sea
atggtcgatgaagaccaaaatcttacagagatttttcaagtttttaaagacacatcagatcaaatgcttagttttgaagatgagtattttaaacaaagagccgaagacataatttctataggtaaagaaatcatttttacaatgcaggatattgttaatgataagaatttaactgaggatgtaattatttttgctgacgatttaacaccaaatgatacttcatccattgaccttacaaaggtaaagggttttgttgtatccaatgcaggacctacatcacatgctgtaattgttgctaaaaacttaggaataccctgtgtgataaattttgatatttcaaaaatcgatacagactttgataaaagtgttgtattagatggtgatacaggagaaattttcttagatccaacatcggatgttctcaaaaaagttgaagaaggtatgaataaaataaataaattaagggagtcatataatcaagattcaatcaaagacctaggtattgaacttagagcaaatataggtagcagtgaagagataaatgcttttaatgatgaccatataaaatctgttggcctatttagatctgaatttgtctatattgatagagcatcaaaacctacattaaaagaacaaatagaaattaataatgaattaaatacaaaattttctaacactattgtttttagaactttagacataggtggcgacaaacaagttccatatttaaatttacctaaagaagagaacccatttcttggggtaagaggaataagatattctctagatgaaaaagatctttttagagaacaaataatttcaattcttagttcagatctgatagacaaagtaaaaataatgtttccaatggttt

SEQ ID NO: 251096 - DNA, 760 bp, Unknown
  Bacterial polypeptide expressing nucleotide sequence isolated from the Sargasso Sea
atatccctatagaaaaccggtaattttccgcacattggatgtaggggcagacaaggctgctccttacatgggatttcaagaagaagagaatccatttttgggttatcgagcagtacgtcgtcaattaaaacagaaaactgtgcttaaagaacaacttacggctttactgatggctacagaaaaacgtcctaatgttcgcctactattcccaatgattacaaacgtaaatgaaattgttgaggcgaaggaattgtttcagcagtgcaaaatggaattggagttaatcggacgacccacttcaaaaattgaaatcggcatgatgtttgaggtcccaagtacattactaatatgcgataaatttatgaacgaaattgacttttgctcaataggaagcaatgacctcactcaatatgttcttgctgtagatcgaaataatcagcatattgctgatctttatgatccacttcatcctgcggtactatgcttaattgataaactgataaaaaccgcgcaggaatatcataaacctgttgagatatgcggagaaatggcttcagatccggatggttgtgtaatacttgcaggattaggaattaattcactcagtatgaatgcaccattaattcccgtagtcaagaggagactctcaaaaatatcaattgtaaacgcaagatcactcgcagaaaaagctctaaaagcaacttcgccaaaagaagtgcgcaagatgattaaggaaagtttgccagcatctcattcatag

SEQ ID NO: 251097 - DNA, 493 bp, Unknown
  Bacterial polypeptide expressing nucleotide sequence isolated from the Sargasso Sea
cattgaggttggcatgatggttgaagtgccgagtgcagcattgatggccgctacatttactagagaagtaaacttcttttcaataggtacaaatgatttaattcagtacacagtagcggttgataggggtaatgagcgagtggctaatttgtattcggcagccaatcctgcagttgtaaaattgatgaaatcagtgattagagctgcaagaagagggggaatagaaactagcatttgtggtgagattgcaggtgatcccatatatactatgcttctcattggtcttggattacgccatttgtcgatggttccatcacaaatacccgcagtaaagcaggtcattaggaaggtaagtgtcccagattgtgaacgattggctcgaaagattgggtctctcgattcggatcgtcgtatattgtctacgctccgaaaagaattgaatgaaattgtgcctgaggcattacgcggttggtccgctgagcaaacgtcttag

SEQ ID NO: 251098 - DNA, 880 bp, Unknown
  Bacterial polypeptide expressing nucleotide sequence isolated from the Sargasso Sea
gtgattgccaccgctccaatcaacaccattcgcgaacaaaagaagaacgcagaatgggcgttgaaactaaatgccgacaggttgatcactttttttgagggcattgaagatgcgtacctgcgcagtaagcaaaacgatgtcattcaagttgttgatcgcattttgttatcattgcaacaagcacctgctgaagcggataacagactggcccatgatctagccggtcacattgtggtagcagccgatctcactcccgctgacaccgtgatgttgcgacatcgacacatggccggctttgtcacacgctttggtggccccatttctcacacagccattctagcgagaagtttgcgcgttcccgcagtgttgggcctgcacggcaccatcgactacatccataacgacgatcttctggtgatcgatgctgcgaacaacacggttttagtagcacctgatgaaaccttactggcagagttccgacatcgtcgggatcaagcgcaggcgcggacactttcgctccaatcactgcagacaaaaaatgcgcaaacacaagacggtctaatcgtgcgtcttcttgccaatgttgaattaccagaggatcttgacgtactgcccgatgccggcgccgacggcatcggtctgtatcggactgagtttcttttcatgaatgctcatcagcaacccagcgaatcagaacaatacaacgcttactgccaggttctggaacactctccaggccctgttgctatccgcacactcgatctcggtgcagacaaacaggtagacggagggcgtagcaatagccaaaacaccgtcaatccagcgctagggctacgcgcgatacgcctttgcctgcgtgaaccggatctttcaaaccaca

SEQ ID NO: 251099 - DNA, 760 bp, Unknown
  Bacterial polypeptide expressing nucleotide sequence isolated from the Sargasso Sea
acatctcatgctgtaattgttgctaaaaacttaggaataccctgtgtgataaattttgatatttcaaaaatcgatacagactttgataaaagtgttgtattagatggtgatacaggagaaattttcttagatccaacatcggatgttctcaaaaaagttgaagaaggtttgaataaaataaacaaattaagagagtcatataatcaagattcaatcaaagacctaggtattgaacttagagcaaatataggtagcagtgaagagataaatgcttttaatgatgaccatataaaatcagttggcctatttagatctgaatttgtctatattgatagatcctcaaaacctacattaaaagaacaaatagaaattaataatgaattaaatacaaaattttctaacactattgtttttagaactttagatataggtggcgacaaacaagttccatatttaaatttacctaaagaagaaaacccatttcttggggtaagaggaataagatattctctagatgaagaagatctttttagacaacaaataatttcaattcttagttcagatctgatagaaaaagtaaaaataatgtttccaatggtttctattcttgatgattttttagatgctaaaaaaatagtcatagatgaatctaaaaaattaaatgttaaccctcctcctttagggataatggttgaaacaccctctgttacattaaatactgatcaatacattcaacatgttgatttcttttctataggaa

SEQ ID NO: 251100 - DNA, 865 bp, Unknown
  Bacterial polypeptide expressing nucleotide sequence isolated from the Sargasso Sea
gacaatacccggctggagcatagtctggcgacgcttgccgaacagctcaatcagcagctgcgcgagcgcgacggcgagagtaaaaccatccttagcgcgcatctgtctctgattcaggatgacgagtttgccgggaatattcgccgcttaatgctggagcaacatctggggctaggggcggcaattgttgccaatatggagctggtgtgcgacaagctgtcggcctccggtagtgattacctgcgcgaacgcgtcagtgatatccgtgatatcagcgaacagttgctgcacatcacctggcctgaaagacgaccgcgtaatgcgctggtgctgaataaaccgacgattctggttgctgaggatttgacgcccagccagtttttaagcctcgatttgcagcatctgtctggcatgatcctggagaaaacggggcgcacttcacataccttgatccttgcccgtgcgtcagctattccggtacttagcggcttgccgctagcggccattaaccggtattccgggcagcatgcgatactggatgcccgatgtggggtattagccatcaatccagacgatgccgttcgcggctattacgcgattgcgcagaagctggccgatgaatgccagcggcggcaggcgcttgatgccgcccagcctgcgttgaccaaagataatcagcgtattgacgttgcagcgaatatcggtaccgcgctggaagcgccgggagcgtttgccaatggtgcggaagggattgggctgtttcgtactgaaatgctgtttatggaccgcgacagcgcacctgatgagcaagaacagtttgaagcctaccagcaggtcttactggccgcgggcgacaagccggtta

SEQ ID NO: 251101 - DNA, 754 bp, Unknown
  Bacterial polypeptide expressing nucleotide sequence isolated from the Sargasso Sea
gccaggtgtccaaatatttatgaatgttggaataggaaaaccgctaccttgatgattttgggtgatacctgtacaagagcttgcggattttgttcagttaaaacaggaaaacctacatggaatgatcctttagaaccactaagagttgcacaggcagtaaaaaaaatgggcttaagacatgttgtaattacttcagttgatagagatgatttaaaaggagactatggagcatcaatttgggcagatacaattaaacaaaccaaaaaggttaatcccgaatgtaccgtagaagtacttaccccagactttaaagggtatgaaccagctttaaaaattgtctttgatgcaaagccagatatttttagtcataatgtggaatgtgttgaacgtataagtaaagcagtaagagctcaagcaaattggaaaagatctttaggagttcttgaaaaatcaatccaatatggattaagaaccaaaacaggaattatggttggtcttggagaaaaaactaaagaagtaaagggaactatgaagcaagtcgtagatttaggagtacaaatttttacaattggtcaatatcttcaaccaactaaaaatcacttaaaagtacaagaatatgtatctaaagaacagtttgaagcatataaagaatatggttattccattggatttaaggtggtggaatcaggtcctttagttcgtagttcatatcatgcagatgaacaagcaaggatggtatttaataatggttaat

SEQ ID NO: 251102 - DNA, 822 bp, Unknown
  Bacterial polypeptide expressing nucleotide sequence isolated from the Sargasso Sea
cagcagctgtccagcaagctgtcttcccagctcaggccggaagagctggcgctgttcgacgtctacctgatgatgctggacgatgcggcgctgggcaatgaagtgacccgtatcatccggtccggccagtgggcccagggcgcactgcgtgaggtggtgctggcccacgtgacccgcttcgagctgatggatgacccctacctgcgcgaacgtgcggcggacgtcaaggatctggggcggcgtattcttgcctatctgcaggaggtcggtcgccaggagctggtattccccgatcagactattctggtcagcgaagagctgtcgccggtgatgctcgggcaggtgcccaaggaaaaactggttggtctggtgtcggtgctcggctcaggtagctctcacgtcgccattctggcacgggccatgggcattcctacggtgatgggcgcgctggacctgccctacacccggctcgacggcatggaactgatcgtcgacggtaaccgcggcgaggggtattccaacccgtccccggagctgcgtcggcattacctggagctggtacgcgaggagcgtgagctggtccaggggctggagaaactgcgtgacgtgccctgtgtcaccctcgacggtttccgtatgccgctgatggtcaacaccggcctgcaggccgatgtggcgcgttcacttgatcggggcgccgagggtgtcgggctgtaccgcaccgaagtgccctttatgattcaggatcgcttccccagcgagaaggagcagcaggcgacctaccgcgagcagctcgaagccttccacccgctgccggtcacc

SEQ ID NO: 251103 - DNA, 853 bp, Unknown
  Bacterial polypeptide expressing nucleotide sequence isolated from the Sargasso Sea
attgttttgctctctttgggcttgttgtatgagtggtcgtctgaaaaaaggggtgcctcgatccaaaaacagttagaccttgcgcttgaacaagcaagtaaaaacgaagaaggaatagtgtcaattgagagtgatgagctggttgttagggttgctgttgagacaggcgccattattgaaacaagattaaaaaaatatccggttgagaatattacaggatcgcttggttttagggtttttggccaatcaccagactctgcttttaattattattttaaaagtggttttactggtactaatccaagctttgttgtttcttctatgggtgatgattttgtttctttgattgatgaaaggctgggaataataaaaacaatttcttttttatcttcgccttatgagatttctgtttatgacagatctttggttggggttgatggaaagtcgtttgctgggctttatagaacagagggtaggtctcttgatttaaaaacagatgtcttaagtggtggcatgatgaacaatagttcgtttgagggggttgctattagcacagaatcagacccttataaaacatcacgcctaagatcaatagatgaacctattgaggctctgtctcgctctggctggattgcttttatacagaaatatttttttgctgcaatattgggttctgatgagtatatatataactattatgttttacctaaagagtctgggctttttaggatggggtatacggttgaaagctcggctaaaagcagtgtggtttttgatcatacgcataggctttttgttgggccaaagattagaaaagatttgatgcagagggctaaaaatcttgagctttcaa

SEQ ID NO: 251104 - DNA, 910 bp, Unknown
  Bacterial polypeptide expressing nucleotide sequence isolated from the Sargasso Sea
ttttcggcatggtgcggaaggcataggtctctataggacagaaatcttttttctgtcccttgaccgttatcctgaaatagaagaacaggtcgaagtctatcaaaaagtctttgatagcattccccaggaacaacccttgatgattcgtaccttggatctgggtgccgataaagcagcaccctatatgggctatccccatgaaggaaatccttatctgggctgcagagccctcagaagacaattaagaaagccaagggtgctgaaaaaccagctcaagtcgattctgcttgcttcaaaaaaccgtgagaaactttcattgatttttccaatggtgaccgacgttcatgaaatccgtcaggccaaaaaactgctccacgaatgtgcagtagaccttggaaatcaatacaacccggcaaaacttcctgaaatcgggatgatgtttgaggttccaagttcctttatgatcagtgaacgcttcatgcaggtaatcgattattgcgccattgggagtaatgacttaacccaatatcttttggcagtggataggaacaatcctcaaatctcccatctttatgatccattgcatcctgccgtccttcaaatgatcaaaattttgatcgacaacgcgaaccgccatcagaaacccgtggaattatgtggtgaaatggcttctgacccggatggctgtgtgattcttgtgggattaggactcaagattttcagcatgaatgctcccctgataccaacggtcaaagaacgcctgtcattgattacaatgcccgaagcagtaaagcttgcagaaaaatctttgcaatcagaatccgcacttgaagtaagaaatctggtccgggctcattttcaagaacctctcctccaaaccgatcccattcgtccaaccgtgccttcatga

SEQ ID NO: 251105 - DNA, 772 bp, Unknown
  Bacterial polypeptide expressing nucleotide sequence isolated from the Sargasso Sea
atcaatattattaaaaatggcgataaactgattatggatccagagaaccaaataatcatagtcaatcttgatgaatttgaactaaagcatttcaaaaaaattcagttagaaaataactcattaataaaatcttttaaaaaaacaacaaataagaaagcggtcaccaaggatcgaataaaaattgatgtaatgtgcaatcttgagctttcagaagaagtaaagctattaaatgacagttctgatggagtaggtttgtttagaactgagtatctatatatgaatcgaaatgatttacctacggaacaagaacaattccaagcttacagtaaagtttttaataaagtaaaaaataaacctgtaacacttaggacgttagatataggctctgataaagaagtatcagaaaatatgaaagttggtcaaatcgtaaaaaatcctgcgctgggcttaagaggtattagatacagcttgtatgaaaaaaatctttttaaagttcaaatcaaggcaatgttgagagctgcaaaaaatgggaagcttagaatattaattccaatgatcacgacgcttgacgagattaatcaagcgaaagaactaatagacgatgctaaagttgaacttatcaaagagaaacaatctttcagtcataaatatgaagttggtattatgattgaagtacccgcaagtgcaattcagtcaaatgtcctttcaaaacacgtagactttatgtcaattggaactaatgatcttgttcagtatattcttgctatagata

SEQ ID NO: 251106 - DNA, 926 bp, Unknown
  Bacterial polypeptide expressing nucleotide sequence isolated from the Sargasso Sea
aaaaataaagttaagaattgaatcaggaaatactgcatcatggtctatatttaagacagtagaggattacctgggagcatttgcagaaatcaaagatccatatctaagcgaaaaaggggctgatttaaaagatgtcggatatagacttttacattatttaggtcatgaagttctttcagtaactaaaaaaacaggcattcttattatgcgtcaactcctacccggagatatagcaaggttagataccactcgcatcaaaggtataattttgtccaaaggtggagtagtttcacatgcagcaatattggcacggtcgctgagaataccagccgtatgtattgaagatcaggaattagaacaaattcatgatggtgatcctcttgctataaacggagattcagggattgccgtggcatatcctgacaaaaaaatcctggaagaatttaaaaaactacttgttgaacaacagaactatttcgatcaccttgatgattttcgtgatatcccttgtaaaacaactgatggtacccgaataagtttgttagccaatatagcactcggaagtgatgaaattcagttgcctctatacggtgcagaaggggtaggattatttagaacagaattttattttctatcgctagatcgatatccaagtgtttctgagcaagcgcaggtatacagtgatttactaagaaatatccctgaagataagccagtgatattccgtacgcttgatgtcggtgcagacaaggctgctccctacatgggatttcaggaagaagaaaatccatttttaggttatcgtgcaatacgtcgtcaattaaaacaaaaaactgtacttaaagaacagcttacggctttactgatagctgcagaacaacgtcaaaacgtgcgcctgctttttccaatgattaccaaacgttaat

SEQ ID NO: 251107 - DNA, 422 bp, Unknown
  Bacterial polypeptide expressing nucleotide sequence isolated from the Sargasso Sea
attgcttatatgtgaaaaatttttgaacgaaattgacttctgctcaattggaaccaatgacctcactcaatatgttcttgcggtagatcgaaataatcaaaatattgctgatctttatgaccctcttcatcctgcagtacttaagttaatagataaactagtaaaagccgcaaagaaatatcaaaagcctgttgaaatttgtggagaaatggcttcagaccctgacggttgtgtaattctagctggattaggaattatttcactaagcatgaacgcccccctaattcctgtgatcaagaaaagactctcagaaatatcaatcacagatgcaagatctctcgcagaaagagcactggaagtaaactcaccaagggaagtaagaaacttgatcagaaaatatctacctgattctcattcataaa

SEQ ID NO: 251108 - DNA, 1288 bp, Unknown
  Bacterial polypeptide expressing nucleotide sequence isolated from the Sargasso Sea
tctgaacggaaccggtatcggacggggaattgcgatcggccgcgccctggtgctcgatgcgccccaacatgaggtgccgcattttcagattgatgtaaaacgcatcgatgacgagatcctgagatttaatcaagccatttcgacagtacgccaggaactccaacacctccagtcgaacctgcccccgacagcgcctcccgagaccggcgcgtttatcgatgtccatcttctgatgctggacgatccattgatttcaaaggagcccgcagaatcgatccggcgcaagcaaatcaacgccgaatgggccctcagcaaccatgcccagacgctgatcgccttcttcgacaatatctcggatccctatctgcgaaccaaaaaagacgatgtcgctcaggtagtggggcggatcatgaatatccttacccaacagccggagcggcaccccaacctgtccagtatggagcctgcgctcaccgatcgaatcatcgtcgcccgggacctcagccctgcagatgcggtgatgctgcgccataggagtatggccgctttcgtcaccagcctcggcggtccgatttcccacaccgcgattctggcccgcagcctcgggattcctgccattgtcggtctgcatggggtgatcgatgcgatcagagatcaagacgaactgatcgtagatgccgccagcggcaccgtgctggtttccccggatgagcgcttgctaaaacagtttgaactcctgcaggcgcgccaacatgaagaaagacaagcgctcgccaaggtgggcgagaaaagagcggcgacccttgatgatcaggaaatgacgctgctggccaatatcgaactacccgaagacctcgacgcattggctggcagtggtgcagcgggggtcggtctataccggaccgagtttttgtttatgaatcggaccgagcctccgggggaagaagaacagtaccaggcctacagtcagatcattaaagcggtaaacggacccgtaacgatccgcacacttgatcttggcgcggacaaacaggtagacgggggtcgtgatgagcctaaggcggcgatgacggcagcacttgggctccgggccattcgactctgcctcagtgaaccttccctcttcaagccccagttgcgggccatcctgcgggctgccgtgcacggcgacgtgcagatgatgatcccgatgttgtccagcctttccgaactcgagcaaagcctctcgctgatccgagaagtctgtgccgaacttgaaagagagggcgccctattcaaacccaatatt

SEQ ID NO: 251109 - DNA, 1654 bp, Unknown
  Bacterial polypeptide expressing nucleotide sequence isolated from the Sargasso Sea
ctcaaatcctcctgaagaagaattacaggattttcacagtgctctggagcacacaatcaacgacacaatcaagcttgtggagaaaatcagtagtgatgtcggaccggaggaagcagcgattttccacgtgcatctgatgtttttggaagaccagcattttcaggaaaaaatccagaattacatccttgacggcaattcggtgagttggtcgatttatgaaaccatcgaagaatacctcagtgcattttctgaaattgatgatccgtatctcagtgaaaaaggcgctgatttaaaagatgtagggtatcggttgcttcattttcttggacacgaactgctggcagaaacgcagaaggaaggaattctggtgatcgacgaactgttgccaggggatatggcaaggctggacccgaatcggatcaaaggcattatcacttcaagcggaggtattgtttcccatgcggccatccttgcccgttcgttacgaatccctggaatatgtctggaaccggaattaatgaaacgaattcatgaaggtgatctcatagcgcttgacggaaaaaacggaactgccgtcgttcaccctggagaagaattaatggccgccttcaaacggaggttggtgcttgaagaacaacatcaggagcatctggatcagttccgggacaaaccctgtaaaaccaaggatggtttaagaatcaatgtcctggccaacatcgccatggaaaacgacctgaatcaacttttccggcatggtgcggaaggcatcggtctctacaggacagaaatattctttctctcccttgaccgttatcctgagatagaagaacaggtcgaagtctatcaaaaagtctttgatagcattccccaggaacagcccttaatgattcgtaccttggatctgggtgccgataaagcagcaccctatatgggctatcctcatgagagaaatccttatctgggctgcagagctctcagaagacaattacgaaaaccaagggtgctgaaaaaccagctcaagtcgatcctgcttgcttcaggaaaccgtgagaaactttcactgattttcccgatggtgaccgaccttcatgaaatccgtcaggccaaaaaactgctccacgaatgcgcagcagacctgggaaatcaatacaacccggcaaaacttcctgaaatcggaatgatgtttgaggttccaagttcttttatgatcagtgaacgcttcatggaggtaatcgattattgcgccattgggagtaatgacttaacccagtatcttctggcagtggataggaacaatcctcaaatctcccatctttatgatccattgcatcctgccgtccttcaattgatcaaaattttgatcgacaacgcgaatcgctatcagaaacccgtggaattatgtggtgaaatggcttctgacccggatggttgtgtgatccttgtgggattaggactcaagattttcagcatgaatgctcccttgataccaacggtcaaagaacgcctgtcgttgattacaatgcccgaagcagtcaggcttgcagaaaaatctttgcaattagaatctgcacttgaggtaagaaatctggtccgtgctcattttcaagaacctctcttacaaaccgattccattcgtccaaccgtgccgtcatga

SEQ ID NO: 251110 - DNA, 751 bp, Unknown
  Bacterial polypeptide expressing nucleotide sequence isolated from the Sargasso Sea
atgtcttcgggtttttctttggaggatggttatgcgtctattgaaaacgatgatcttattgttgtggtatctgttccaactggaaatattgttgaaacgcggctaaaaaaatatcctgttgaaaatgttcaagggtcactaggttatagggttttcggcgaatcaaaagagagcgctttcagctattattttaaaagcggttttacaaacacctctccagtttattctgttcgtgattttggaaaagattatcttgttttgattgatgacaatcttggtttggttaaaaaaatatcttttagtgattcttcttatgagctgtctattcatgatgagtctttggtgggtgttaatggaaaaatctttgctggtctttatagaaccgaggggagggctttggatttaaaaagaaatgcgcttgatggtgggatgatgaacaacagctcttatgaaggagttgcaataagctctgagcaagacccgtatgacacatctaggctgtcaaggatagatgatcccaaggaggttctcacaagatctggttgggttgcttttgttcaaaagtatttttttgcagcgttaataggttcagacgaatatatctacaactattatgttttaccaaaggaatctggtgtgtataggatggggtatacggttgaaagctcctctacaagcaatctgtctatcagtcacgagcaccgtctttttgttggtcctaaaataagaaaggatttaatgcaaagagctg

SEQ ID NO: 251111 - DNA, 814 bp, Unknown
  Bacterial polypeptide expressing nucleotide sequence isolated from the Sargasso Sea
atgaatattagaaatttttatattgttggtattgttttgctctctttgggtttgttgtatgagtggtcgtctgaaaaaagggatgcttcgattcaaaaacagctagaccttgcacttgaagaagcaagcggcaataaagatggggttgtttcaattcaaagcgatgagttggttcttaagattgctgtaaacacaggtgccattattgaaacaagattaaaggagtatccggttgagaatattcagggctcgcttggttttagggtgtttggtcggtcattggactcatcttttaattattatttcaaaagtggttttactggggttagcccaaattttgttatctcctcgatgggtgatgattatgtggtcctggttgatgaaaaactaaaaataacaaaaacagtttcttttttatcttcgccttatgaggtttctatttatgataaatctaacaccggggttgatggaaagtcttttgctggtctttatagaacggagggaaggtctcttgatttaaaaacagatgctttgagtggggggatgatgaataatagttcttttgaaggggttgctattagtacagaatcagacccctatgaaacaacccgccttaggtctgttgatgaacctattgaggttttgtctcgatctggttgggttgcttttatacagaaatatttctttgctgcaatattaggttctgacgaacatatatataactattatgttttacccaaagagtcggggttttttaggatggggtatacagttgaaggggcagccacaaacaacaaggttttttggtcatgag

SEQ ID NO: 251112 - DNA, 931 bp, Unknown
  Bacterial polypeptide expressing nucleotide sequence isolated from the Sargasso Sea
atggcacaaaaacaatctcaaaacgatgtcgatctttcggggcagactgtctgggttatcgacctcttttctcgcgtctatcagctctttcatgcattgcctgaaatgagtagccccgaaggcacaccggtctcggtcatattcggtctcacgcgtgacctgatagacattacggaaaagaaaaaaccaaactatttgttttgtggctctgatacgccagagccaacgtttcgtcataagcaatttgaggcctataaggcaacacgttcagagatgcctgctgaccttgttccgcagttgcctctcgtgaaaaaattacttgaagtgttcggtgtgccgtgtattgaacttgctggctacgaagcggatgatgtacttgccacgcttgcagtgcaaaccgttgccgctggaggtgattgtacgctcgtgacatcagacaaagatgctcggcaacttcttgggccacatgttcggcttttgaatttacgaaacaatgcctttgttggtgaggctgaactgctggcagattgggggataaggcctgatcaggttgtcgattatctttcacttgtgggcgatgcggtcgataatgtgccgggcatccctggtattggtccaaagattgcatccagtcttctgcaacagtttggaacgcttgaggaaattctgtctcgatgcgatgaggtcaaagggaaaaagcgtcaagaaaacattgcgttacacggagatactgcgaggcagggccgaagtctcattcagcttgaactgaatacaccgatcgagatttcgtgggaatcagctgttgttcaacgtccagatccggagccgcttctccagttcttacagcaactgggttttaagacgcttgtgaaaaaagtgcagagtctttccggtggaaagacttctgttgcaaagccgataaagtctgacg

SEQ ID NO: 251113 - DNA, 2530 bp, Unknown
  Bacterial polypeptide expressing nucleotide sequence isolated from the Sargasso Sea
cctgctttccccgttgacggggccgatcgtcgcgctggccgacgtgcccgatccggtgttctccggcgggatgttcggcgacggcatcggtgtcgacccgctcgcgggccagctcgtcgcaccgtgcgcgggcgtcgtgtcgcatctcgcgcgcacgggccacgcggtgacgatcacgacgccgcagggcgcggaagtgctgctgcacatcggcatcgataccgtcgagctgaacggacagggtttcatcgcgcacgtcgaggcgggcgcgcgtgtcgaggcgggcacgctgctgatcgagttcgaccaggacgcggtggcgcgcagcgcgcattcgctcgtgtcggtggtcgcgatcgccaactcggatgcgttcgaggtcgtcgatcgtgccagcggcttcgcgacggccggcaagacgccgctgctcgtgctgcgcggcaagggcgaagcggccgtgcaggcggcgcaaaccggcgccgcggcgcagaacgaagtgcgccgtgaaatcgtgctggcgcaaccgggcggcctgcatgcgcggccggccgcgcgggcgcgcgaagccgtgcgcgggttcgacgcgaccgtcgacgtgctgttcgacggccgcaaggcgtcgatcgcgagcgtcgtcggcctgctcggcctcggcgccggcgaaggcgcgacggtcgagctcgttggtcgcggcgcccatgcacagcaggccgtcgatgcggtcgagcacgagctgctgcgcgaagcgcacggcgaagtcgaggagcaaccggcgcggctgaagtcgcccgcgccgcagacggtcgcacgcaacgtcggtgcccctgtcgaacccaacacgctcgcaggcgtgtgcgcggcgcccggcatcgcggtcggcacgctggtgcgtctcgacgatgcggaaatcgtgccgcccgagcaggccgccggcacgccggccacggaaagccgccagctcgaccaggcgctgaaggcggtcgacgccgaactcgccgaaaccgtgcgcaacgcatcggcgcgcggcgcggtcggcgaagcgggcatcttcgcggtgcaccgtgtgctgctcgaggacccgacgctgatcgacgcggcgcgcgacctgatcagcctcggcaagagcgcaggcttcgcatggcgcgcgacgatccgcacgcagatcgatacgctgtcgaagctcgacgatgcactgctcgccgaacgcgcggccgacctgcgcgacatcgagaagcgcgtgcagcgtgcgctcggccatacgaacggcgccgcgcgtgtgctgcccgacgaagcggtgctcgcagccgaggaattcacgccgtccgacctgtcgtcgctcgatcgccagcgcgtgaccgcgctcgtgatggcgcgcggcggtgcgacttcgcacgcggcgatcatcgcgcggcagctcggcatcccggcgctggttgcggtcggcgatgcgctgtacgcgattccggacggcacgcaggtcgtcgtcgatgcgagcgcgggccggctcgaacacgcaccgaccgcgctcgacgtcgagcgcgcgcggcacgagcgccagcgtctggacggcgtgcgcgaggcgaaccggcaactggcgggtgaagcggctgcgacggtcgacggtcgcgcgatcgaggtcgccgcgaacatcgcgacgctcgacgacgcgaacaccgcggtcgacaacggcgccgacgcagtcggcctgctgcgcaccgaactgatgttcatccatcgccaggccgcaccgacggcggtcgaacaccagcagagctaccagtcgatcgtcgacgcattgcagggccgcacggcgatcatccgcaccctcgacgtcggcgccgacaaggaagtcgactacctgacgctgccgcccgaaccgaacccggcgctcggcctgcgcggcatccgtctcgcgcaggtgcgccccgatctgctcgacgatcagttgcagggcctgctcgcggtgaagccgttcggcgcggtgcgcatcctgctgccgatggtgaccgacgcgggcgagctcgtacggctgcgcaagcgcatcgacgaattcgcgcgtgcgcagggccgcaccgagccgatcgaggtcggcgtgatgatcgaggtgccgtcggccgcgctgctggccgaccagctcgcgcagcacgcggatttcctgtcgatcggcaccaacgacctgacgcagtacacgctcgcgatggaccgctgccaggccgatctcgctgcgcagtccgacggcctgcatccggccgtgctgcgcctgatcgacatcgcggtgcgcggcgccgcgaagcacggcaagtgggtgggcgtgtgcggcgcgctcggcggcgatccgctcgcggtgccgatcctggtgggtctcggcgtgaccgaactgtcggtcgaccccgtatcggtgccgggcatcaaggcgcgtgtgcgccgtctcgattaccagttgtgccgtcagcgcgcgcaggatctgctcgcgctcgattcggcacaggcggtaagggcagcaagccgcgaggtctggccgctcgactga

SEQ ID NO: 251114 - DNA, 1792 bp, Unknown
  Bacterial polypeptide expressing nucleotide sequence isolated from the Sargasso Sea
cacgtgaagcgcacgcgaagtcgaagaaagccggcacgtcaaagctcgccggcgccgcaagccgttgcccacgcagcgggtgaaacgctcgcgccgaatacgctcgcgggcgtgtgcgcggcgccgggcgtcgcggtcggcaagctggtgcgttgggacgatgcggatatcgatccgccggaaaaggcgaatggcacgtcggcggctgaaagccgtctgctcgataaggcgattgccactgtcgacgccgacctcggcacaaccgtgcgcgatgcttcgcagcgtggcgcggtaggtgaggcgggtatcttcgccgtacatcgtgtgctgctcgaagatccgaccctggtcgacgccgcgcgcgatctgatcagtctcggcaagagcgccggctttgcgtggcgcgaagcgatccgtgcacagatcgcgatcctgacgaatatcgaagacgcgttgctcgcggaacgtgccgccgatctgcgcgacatcgaaaaacgcgtgttgcgcgcgctcggttatacgaatgcggcggcgcgcacgctgccggacgaagcggtgctggcggctgaagagttcacgccttccgatctttccacgctggatcgttcacgcgtcacggcgctcgtgatggcgcgcggcggagcgacctcgcatgctgcgattctcgcgcgtcaggccggcattccggcgctggtggcggtcggcgatgcattgcatgcgatccctgaaggtacgcaggtcgtggtaaacgccacgaccggccgcctcgaatttgctccgaccgaactcgatgtcgaacgcgcccgtcttgaacgtagccgcctcgccggcgtgcgcgaagcgaatcgccgcacgtcgcaacaagccgcggtcactgcggacggccgcgcgatcgaagtcgccgccaacatcgccacgctcgacgacgcgaaaaccgccgtcgaaaacggtgccgattccgtcggtctgctgcgcaccgaactgctgtttattcatcgcgccgccgcgccgaccacggacgaacatcgccagagctaccaggccatcgtcgatgcattgagcggccgcaccgcgatcattcgcacgctggacgtcggcgcggacaaggaagtcgactacctgacgctgccgcccgaaccgaatccggcgcttggactgcgcggcatccgccttgcacaggtgcgcccggatctgctcgacgaccagttgcgcggtctgctggcggtgcagccgctcggcgccgtgcgcattctgttgccgatggtgaccgatgtgggcgagctgatccgcatccgcaagcgcatcgacgaattcgctcgtgaagcgggccgtaccgaaccgatcgaagtcggcgtgatgatcgaagtgccgtcggccgcgttgctcgccgatcaactgtcgcagcatgcggatttcctctcgatcggcaccaacgatctgacgcaatacacgcttgccatggatcgctgccaggccgacctcgccgctcaggcggacggtttgcatccggcggtgctgcgtttgatcgcagcgaccgtgcagggcgcgaacaagcatggcaaatgggtcggcgtgtgcggcgcactggcgggcgatccgctcgccatgccgctgctcgttggcctcggcgtgaccgagctttcggttgacccggtgtcggtgccgggcatcaaggcgcgcgtgcgcaacctcgattatcagctgtgccgtcaacgcgcccaggatgccctggcgctcgaatcggcgcaggcggtaagagcagtaagccgcgaaacctggcctttggactgaa

SEQ ID NO: 251115 - DNA, 1274 bp, Unknown
  Bacterial polypeptide expressing nucleotide sequence isolated from the Sargasso Sea
ttttagggtcttcggccaatccaatgaatcggcatttaattattattttaaaagcgggtttacgggggtcagcccttcgtatgttgtgcttgagcgcggaaatgactttgttactctttatgatgaggttttggatataactaaagccatttcctttttaccgtcaccttatgagatttctatatatgattattcttctaagggtgtaaatgggaaatcgtttgctggtctttatagaacagagggtcgggcccttgatctaaaaagagatgctctgagtgggggtatgatgaacaatagctcgtatgagggggttgcgataagcacagaatcagacccttatgagacctctaggcttaggtctattgatgagcctgttgaggttctttcaaggtcgggttgggttgcctttattcaaaaatatttttttgcagcccttttgggttctgatgaatatatatataactattatgttttacctaaagagtctggtctttatagaatggggtatacggttgagggttcctcaaccaataatgtggctttcagccataagcacaggttgtttgttggcccaaaggttagaaaagatttgatgcaaagggcagaaaatttagagctatcaatagatatgggttggttttggtttttggcccaacccatggtttcgtttatggcgtttttaaacagttacttaaataactggggattaacaataataatgtttacattaattattaagcttgttttttggcctgtaacagcaaaaagctttaggtcgatggccgcattaagaaaaataacacccgagctaaacgaaataaaagaaagatataaagacgacagacaaaaacaaggcacagaaacaatgaagcttatgagacaaaacggtgcaaaccctttgggtgggtgtcttcctttgttaatccaaatgcctttttttattggttttttctttgcattaagagagatggtggagttgcggcacagctctttaggtttttggtcagatctttctgcgcctgatccttattttgttttgcctgctttgttttgtttaacaatggtgttaacccaaaaactcaacccgcagccagctggtatggaccaaacccaggcccaggtaatgaaatatatgccagttatgttttctgttttgtttatactttttcctgcagctctttgtttatataccgttgtgaactctgctatacagcttgctcaacaaagctatttatacaaaaagcttggggctcttgagggcgccaaataaa

SEQ ID NO: 251116 - DNA, 895 bp, Unknown
  Bacterial polypeptide expressing nucleotide sequence isolated from the Sargasso Sea
agagtgttgccccagttgcgcaacgaaacaggtggcgaacgggagtatccggaaaatgccgtgttggtcgccgacgaaattacccccgacatgctgggagaagttcctcgtcatctgttggcggggattgtctcgttgcgcggttcttctaattcacatgtggcaatactgacagaagcgatgggcgtcccatcggtgatgggtacagagaacctgccactcgaagtattggagggtaaagctgttgtagtcgatggctttaacggcattgtcatcacagaccccacagaagatcagcgacgggtctacgaaaggattcagaaagaagaggagcaactcgctgaagggttgtctgagctgaaatccgaaccgcctgagacactcgatggtcatctaatcagattgtccgtaaacactggtctgactactgatgtcacgacatcattggatcggggagcggaaggcgtcggtctttaccgaactgagttccagttcatgatgaaagataggtttccgaccgaagaggaacagtatgggatctatagagagcacctgtctgcattcgcgccgaatcccgttaccatgcgcacactggacatcggtggcgacaagtcgttgacctacttcccgatcgaagagacaaatccgttcctgggatggcgcggcattagagtatcgttagatcatccggagcttttcctgtctcaggtccgcgcaatgattcgtgcgtgtgaaaacactgatgcctacctccggatcatgcttcccatggtaagtagtgttgctgaagtcgatgaggcgcaaaggctgatcagtcagtgttatcaagagctcattgaagaaggtattgaagtagaaatgccggacatcggtgtaatgatcgaagttcccgcgg

SEQ ID NO: 251117 - DNA, 818 bp, Unknown
  Bacterial polypeptide expressing nucleotide sequence isolated from the Sargasso Sea
ggtaggcctggtctcggtattgggttcgggtaactcccacgtggcgatcctggcccgggccatgggtatcccgacggtgatgggcctggtggacctgccgtactccaaggtcgatggcatcgacatgatcgtcgacgggcatcgcggcgaggtgttcaccaaccccagcgacgtgctgcgcaagcaatacgccgaggtggtggaagaagagaagcaactggcccagggcctggattcgctgcgcgagctgccgtgtgtcacccccgacggccaccgcgtaccgctgctggtcaacaccggcctgctggcggatgtagctcgtgcgcaacaacgcggcgccgaaggggtgggtctgtaccgcaccgaagtgccgttcatgatcaaccagcgtttcccgagcgagaaggagcagctggcgatttatcgcgagcaattgcaagccttccacccgttaccggtgacgatgcgcagcctggatattggcggcgacaagtcactgtcctatttcccgatcaaggaagacaaccccttccttggctggcgtggcatccgcgttaccctcgaccatcccgaaatcttcctcgtccagacccgcgccatgctcaaggccagcgagggcttgaacaacctgcgtatcctgctgccgatgatctccggcacccatgaactggaagaagccctgcacctgatccaccgcgcctggggcgaagtgcgcgacgaaggcgccgatgtgccgatgccgccgattggcgtgatgatcgaaatccctgcggcggtgtaccaggccaaggaactggcgcggcaggtggacttcctgt

SEQ ID NO: 251118 - DNA, 860 bp, Unknown
  Bacterial polypeptide expressing nucleotide sequence isolated from the Sargasso Sea
aggacctacatcacatgctgtaattgttgctaaaaacttaggaataccctttgtgataaattttgatatttcaaaaattgatacagactttgataaaagtgttgtattagatggtgatacaggagaaattttcctagatccaacatcggatgttctcaaaaaaattgaagaaggtttgaataaaataaacaaattaaaagagtcatataatcaagattcaatcaaagacttaggtattgaacttagagcaaatataggtagcagtgaagagataaatgcttttaatgatgaccatataaaatcagttggcctatttagatctgaatttgtctatattgatagatcctcaaaacctacattaaaagaacaaatagaaattaataatgaattaaatacaaaattttctaacactattgtttttagaactttagacataggtggcgacaaacaagttccatatttaaatttacctaaagaagaaaacccatttcttggggtaagaggaataagatattctttagatgaaaaagatctttttagagaacaaataatttcaattcttggttcagatctgatagaaaaagtaaaaataatgtttccaatggtttctattcttgatgattttttgggtgctaaaaaaatagtcacagatgaatctaaaaaattaaatgttaaaccacctcctttagggataatggttgaaacaccctctgttgcattaaatactgatcaatacattcaacatgttgatttcttttcaataggaactaatgatttaattcaatacacatatgcagctgatcggggtctttccacactaaataaatatcaagatcctcttgatgtgtctgtacttagat

SEQ ID NO: 251119 - DNA, 868 bp, Unknown
  Bacterial polypeptide expressing nucleotide sequence isolated from the Sargasso Sea
ttcttagatccaacatcggatgttctcaaaaaagttgaagaaggtttgaataaaataaacaaattaagagagtcatataatcaagattcaatcaaagacttaggtattgaacttagagcaaatataggtagcagtgaagagataaatgcttttaatgatgaccatataaaatcagttggcctatttagatctgaatttgtctatattgatagatcctcaaaacctacattaaaagaacaaatagaaattaataatgaattaaatacaaaatttcctaacactattgtttttagaactttagacataggtggcgacaaacaagttccatatttaaatttacctaaagaagaaaacccatttcttggggtaagaggaataagatattctttagatgaaaaagatctttttagagaacaaataatttcaattcttagttcagatctgatagaaaaagtaaaaataatgtttccaatggtttctattcttgatgattttctggatgctaaaaaaatagtcacagatgaatctaaaaaattaaatgttaacccacctcctttagggataatggttgaaacaccctctgttgcattaaatactgatcaatacattcaacatgttgatttcttttcaataggaactaatgacttaattcaatacacatatgcagctgatcggggtctttccacactaaacaaatatcaagaccctcttgatgtgtctgtacttagactaattagtaatgtaatcgatactggacttaagaatgatatcgaagtctctgtatgtggagatatggcttcggataaagactcatcaattattttatacctacttggacttagagtatttagtattgctccatctcaag

SEQ ID NO: 251120 - DNA, 739 bp, Unknown
  Bacterial polypeptide expressing nucleotide sequence isolated from the Sargasso Sea
agttatatttagaacattagatattggtgctgataaagaaataccagaaaatattaagacaggttctgtggctagaaatcccgcattaggacttagaggaataagatatagcttaagtgataaatcgatttttataaatcaaattaaagctattctaagagctggcgctaaccatgaagtaaaaatcatgcttccaatgattaccacaatatccgaaataaaagaagccatgaaacttattgacatagcaaaaaacgaattaaacagagaaaggaaggcgtataacaaaaatgtagaaataggtataatgattgaggtaccgtcttctgcagttctcgctaatagatttgcaaaatatgtggatttcttttcaatcggcactaacgatttggttcaatatactcttgcaatcgatagagttgatgatgaagtaaactatctttatgatcctacaaactctgccgtattaactctaataaaaatggttatagatgcgggaattaagggtcgtatcccggttgcattatgcggagagatggctggtgatgctaattatacgaaactgcttttaggactaggtctaaaatcctttagtatgcatcctagcgctataccagaaataaaaaatataattattaattcaaatattaaaaatcttaaaagtctgactcgaaggataattaattgtgattctaaaactgcgaaagaaaaattacttgagaaaattagtaatcattaa

SEQ ID NO: 251121 - DNA, 936 bp, Unknown
  Bacterial polypeptide expressing nucleotide sequence isolated from the Sargasso Sea
atcctgacaaagggagcaaaaaaatattatcaaaagattcaactcgaccaatctgagaataaaaaagaattaatttcaataatgcacaaggatgctatcacaagtgataaaaagcatatagaactgatggtgaatctggaacttccagaagaattaaaaatgcttaaagctgagcatatagacggtattggtctatttagaactgaatatatctattcagatagagatgattttccatcagaattggaacaatataatacctataaaaaagttgtacagaaaatgttgggcaaacccgtcatattccgaacactagatattggggcagataaagaagtacctgaaaatataaaatcagggtctattgcaagaaatcccgcattgggattacgagggattagatacagcctaaataatcaaataatttttctaaatcaaattaaagcgattcttagagcagcacattacggaaatgtaaagattatgcttcctatgataacaacagtatcagaggttgaagatgcaaaaaatttgattgcaaaagctaaagaggagcttaacagtaaaaaaaagaatttcaatgattctgtaaatataggaataatgattgaggtaccatcaagcgctgtgaatgcctcgcaatttgctaagcatgtagattttttttcaataggtactaatgatttagttcaatatgcactggctattgatagagtaaatgatgaggtaaactatttatacgatccttttaattctgctgttttacaattaattcataatgtaattaaagttggtaagaaaaataatattccagtttcactatgtggagagatggctggagatattaattttacaagattattacttggtatgggattgcaatcgttcagtatgcatccaagcgctattcctgagataaagaaaattatattaaac

SEQ ID NO: 251122 - DNA, 852 bp, Unknown
  Bacterial polypeptide expressing nucleotide sequence isolated from the Sargasso Sea
tagacaattttgaacatttattcttagattcgataggtttatttagatcagaatttatttatttagacaggcaaagcccaccaacacttgaagatcaaaaaaaagtattatctgaactttcagaaaaatttaaaggcacaattgtattcagaactcttgatattggtggagataaacaagttaagcatttaaatttaccagttgaagaaaacccctttttgggagttaggggggtaaggttgtcactcgagaataaagatattttctattcacaagttagatcaattttggaatcagagtgtattgatagacttaaagtgatgtttcctatggtatctacaattgaagattttttggatgctaaaaattatgtaaatgaaattgctgaagagttagatttaaaaacaccaccattggggattatggttgaaacaccatcatcagcactaatgtcagatcagtttgctgaagttgtagattttatttcaattggtacaaatgatttaacacaatacataatggctgctgatagggggaatagtaatcttagcaaatatcaaaacccgctccatccagctgtactaagagcaatctcaggcgtaataaataattgtaaaaaaaataaaattgaagtttctgtctgtggtgaaatggcatcagatcctatgtcagctttggcattatacactttagggttaagaacatttagcatgtctccatctgctgctccttttgtttttgaaattctagataaaaatcatcaaagtattcctgaacaatttgaggataaaatgttatctgcacttaatgctgaggaagtaacacttctaatagaggaaaatatactttgaa

SEQ ID NO: 251123 - DNA, 624 bp, Unknown
  Bacterial polypeptide expressing nucleotide sequence isolated from the Sargasso Sea
tctgaacaaactaaggtctatcgtgatttactggtgaatgttcctgaagacatgccagtaatattccgaacacttgatgttggtgcagataaggccgctccttacatgggatttcaagaagaagataatccatttttgggttatcgtgcagtacgtcgtcaattaaaacaaaaaactgtactcaaagagcagcttacagctttactgatagctgcagaaatccgccctaatgtgcgcctgctgtttccaatgattacaaacgtaaatgaaataattcaggccaaagaattgtttcagcagtgccgcttagaagtagaagcgaaagggatatccattgcagaaattgaaatcggtatgatgtttgaggtccccagcacgttactcatatgtgaaaaatttttaaatgaaattgacttctgctcaataggaaccaatgacctcactcaatatgttctagcggtagatcgtaataatcaaaatattgctgatctttatgaccctcttcatcctgcagttcttaaattaatagataaactagtaaaatgcgcagagaaatgtcaaaaacctgttgaaatttgtggagaaatggcttcagaccctgacggttgtgtaattctggctgga

SEQ ID NO: 251124 - DNA, 751 bp, Unknown
  Bacterial polypeptide expressing nucleotide sequence isolated from the Sargasso Sea
aaaagaacaaatagaaattaataatgaattaaatacaaaattttctaatactattgtttttagaactttagatataggtggcgacaaacaagttccatatttaaatttacctaaagaagaaaatccatttcttggggtaagaggaataagatattctctagatgaaaaagatctttttagagaacagataatttcaattcttagttcagatctgatagaaaaagtaaaaataatgtttccaatggtttctattcttgatgattttttaaatgctaaaaaaatagtcacagatgaatctaaaaaattaaatgttaacccccctcctttagggataatggttgaaacaccctctgttgcattaaataccgatcaatacattcaacatgttgatttcttttcaataggaactaatgacttgattcaatacacatatgcagctgatcggggtctttccacactaaacaaatatcaagatcctcttgatgtgtctgtacttagattaattagtaatgtaatcgatactggacttaagaatgatatcgaagtctctgtatgtggagatatggcttcggataaagactcatcaattatcttatacttacttggacttagagtatttagtattgctccatctcaaggaccaaacataatcaattcacttattcatgcaaaacaaaatttatcccatataaagaaagaagaaattctttcttcaacagattctcaaagtttaagaaaactcatatcataa

SEQ ID NO: 251125 - DNA, 301 bp, Unknown
  Bacterial polypeptide expressing nucleotide sequence isolated from the Sargasso Sea
tcatgtttcttatctttatcagccgataaacccaggtgtagttcggctgatttcttggtctgtggctgcggctaaaaaattaagaaagccggtgtttctttgcggagaaatggcgagcgacgctaagtatcttccgttacttttggggcttggactcactcaagtcagtgtgagaccctcggtggttgcggatattagaaccaaaatagaaaatacttccgttaagaactcaaggttattagttgaaaggtttatgaattcaggtgactcaaacgtactggaagaattattggctgactag

SEQ ID NO: 251126 - DNA, 775 bp, Unknown
  Bacterial polypeptide expressing nucleotide sequence isolated from the Sargasso Sea
ctggaaccggcgaacggccgcagcattatcattcgcaccatggatatcggcggcgataagccggtggcctatctcaatatcccggcggaaaacaaccctttccttggctatcgcgcggtgcgaatttacgaggagtaccagacgctgttccgcacgcagctcagggcgattctgcgcgcctcggcgcacggctcgttgaaaattatgattccgatgatctcctcgatggaagagattctgtgggtgaaagatcagctggccgaagccaggcaatccctgcgcgatgaacatattccgttcgatgagaagatcccgtttggcatcatgctggaagtgccatcggtgatgtttatcatcgaccagtgctgtgaagagatcgatttcttcagtatcggcagcaatgacctgacgcagtatctgctggcggtggatcgtgataacagtaaggtcacgcgccactacaacagcctcaacccggcttttttgcgcgcgctggactacgccgtgcaggcggtacatcgccaggggaaatggattggcctgtgtggagaactgggggcgaaaggttcggtgctgccgctgctggtggggcttgggctggatgaactgagcatgagcgcgccggcaataccggcgacgaaagcgcgtctggcccggctggatagccgggcctgtcgccagctgttgaaccatgccatgcagtgtcgcacctcgctggaggtggaacacttattggcccagttccgcatggctcagcaggacgcgccgctgatta

SEQ ID NO: 251127 - DNA, 732 bp, Unknown
  Bacterial polypeptide expressing nucleotide sequence isolated from the Sargasso Sea
atgggcgcggtcgacctgccgtactccaaggtcgacggcatcgagctgatcatcgacggctatcgcggagagatcatcaccaacccgggcaaggtcctgcgcgagcagtatgaagtgctggccgagcaggagcgccagctctccgccgggctcgacgtgctgcgcgagctgccgtgcgagaccaccgacggtcatcgcattccgctgtgggtgaataccggcctgctcgccgatgtggtgcgcgcgcaggagcgcggcgccgagggtgtgggcctgtatcgcaccgaagtgccgttcatgatcaaggagcgcttccccagcgagaaggagcagatggcgatctaccgcgagcagctggaagccttccatccgctgccggtaaccatgcgcagcctcgacatcggcggcgacaagtgcctgccgtacttcccgatcaaggaagaaaacccgttcctcggctggcgcggtatccgcgtcaccctcgaccaccccgagatcttcctgctgcagacccgcgcgatgctcaaggccagcgccgggctgaacaacctgcgcatcctcttgccgatgatttccggcatccgcgaactggaagaggcgctgcatctgattcaccgtgcctggtgcgaggtgcgcgacgagggcctggacgtgatcatgccgccggtcggcgtcatgatcgaagtgccggcggcggtctacctgacgcgcgagctggcgcgcatggtggac

SEQ ID NO: 251128 - DNA, 337 bp, Unknown
  Bacterial polypeptide expressing nucleotide sequence isolated from the Sargasso Sea
aatgtgcctcttttccgtacgcaattgagagctattctgcgggcgagtgctttaggcaaggtgcagatactgtttcctctcatcatgacgctcaaagagttgcggcaggcaaaaatgcttctttctgatgtcatggaggatcttgaggaaagtaagattaagttcgatcgacagattaaagtgggcattatggctgaagtcccggccaccgctttgttgctagagcgatttttggatgaggtcgattttgtaagtattggcacaaacgacttaattcaatacacacttgcggtggatcgaagcaataaagatgtggcattccatgtacactgtcgag

SEQ ID NO: 251129 - DNA, 1388 bp, Unknown
  Bacterial polypeptide expressing nucleotide sequence isolated from the Sargasso Sea
catgctaaaactacaaggtattgcggtctcgtcgggggtgacaatcggcgaagcacttgttctcgacagcgaaggctttcggattccgaggcgtttcgtggctcgaagtgctgtcgatacagaacttcaacggctgtcaaacgcaatcgctgaatcaacagatgaaatcaagagaaaccgtgatgcggtccgagaggaacttggcgagcagtatgccgccatttttgacgcccatctggcgatgcttcatgatcaacggctacaggaagagttgacaagtgcggtccgtgaacgcaattggtggccagaatatgcggtgagccggacgctccgacgatacgccaaagtttttcagaaacttgacaatcatattgcacagcgggctcacgatatctatgacattgaaaagagcctgcttcgcaaccttttaggtcagcgtagggagacgctcgcatcaatttctgagccggtcgtgatactggctcataatctgacgccaagtgaaacagcaaatctagatcgacgttttgtcaaaggttttgcaacagaactcggtggtccagggagtcataccgcgatcgtcgcagaaggacttgagatacctgctgttgttggtattggtccatttttggcagatgtttccggtggggagccggtcattcttgatggtaatcaaggcgtagtcattcttcagccagatgaagaaacgatagctcgatacaggcttgaagctgaagttgccgaaacggtcgccgcgtccctcggacacttacgagacttgccggctgagacagtcgatggtgtgagagtgcaaatccgaggaaatattgagtttcctgaggaagttgaacagtgcaagcgacgtggtagcgatggcataggactttatcgcaccgaatttctctaccttacgagtcagcatgagccaagcgaagaggatcattatcgtgcatatagcaaggtcattgacgcaattgacgggaagccgatggtggtccggacgttggatctagggtccgacaagatgctcactgaaaaaagtccggaggaggagcgaaatccatgcctgggcttacgaagcattcgcttgtccttgcggcagttgccaatgtttcgcacccagttgcgggccattctacgagcgagttctcacggtgacgttcgagtgatgtttccgttggtctcgacaatcattgaattacgccaggcacgattagtcttggcagatgtgatggaggatctcgctgagcacgatattgatttcaatccaaagctaaaaattggaataatggttgagacacctgccgccgcaatgatgctcgatgcattcattaaggaagtggattttgtctctgttggaacaaacgatctcattcagtacacgctgg

SEQ ID NO: 251130 - DNA, 1705 bp, Unknown
  Bacterial polypeptide expressing nucleotide sequence isolated from the Sargasso Sea
atgtcgataacggggattattgtgtcatcgggtatagccttcggtaaggctttacaccttaatcattgcgaaaaccacctcgactatcgcccaattccgctctctaggatcccgcagcaacaaagtaagtttcttaaggcgttacaaacactgaaacaacagctcagtctaagccaaactaagctcgatcctgacagcgaaaactaccaactgattgaagccgatttattactccttgatgatgaagaactgatagaacaagtcaaagaagccattcgcaccttacaactttccgccagtgtcgctgttgagcgaatatttgcccatcaagcgaatgaactcgagtccctagacgatccctatttagccaatcgagcccaagacgttcgatgccttggacagcgcatagtcaccgcgattaatggccgtttggaccaaggtttaactcacctgagtgaacctacgatactgctagcacaggatctcaccccagcagaatttgccttgctccctaaagagcacatcagcggtattgtgcttaaaaccggtggactcaccagtcataccgctattttggcccgtgcagcaggtatacccgctattttaagttgtcagttcgatgcagagctcatccctaatggcatcccattagtgctcgatgcaataagtggagcgctttatgtcaatccggagcctgagcaacaagctcgtttaaccgtgaccctgcaccatgaacaagcaagacgtcaggcacttcaagcttatcgcgatgttccggctcaaacacaggacggacatcaggttcgcctgctggcaaacgtcggcaatttgaatgagatcacccatgtcaaagatgaaggggccgatggaataggcttattccgcactgaatttatgttaatgcataccagcaccctgccggatgaaaaagcccagtacaatctttactgcgaggctctgcatgctctaggtggtaaaacttttacgatcagaaccttagatattggcgccgataaagaactcccgtgtttatgccaagacatagaagataatcccgccttaggacaacgtggggtgagatacaccttagcgcacccagaattatttaagacccaacttcgtgccattttacgggcagcaaatcacggtccgattcgcttaatgtttcctatggtcaatcaagtcgaagagttagatgagatatttacgcttatcgccgaatgccaggatgccctcgaagacgaagaaaaaggctatggtgaactgagttatggcatagtggtagaaacgcccgcagcggtgttgaatttagcctctatgctaccaaggctggattttgttagcataggcaccaatgatttaacacaatatgccatggcagcagaccgcaccaacccacaactgacacgggattacccttccctttcacctgcgattttaagcttgataaacatgacaatcattcaagccaaagcagccgaggtcacagtatcactctgtggtgaattagccagctcgccacacatcgctccgctactcgtgggaatggggctggatgaactcagcgttaacttaagctcattactagaagtgaaagcagccatttgccaaggtgaactggcgaaattttctgcgttagcgcacactgcgatgcagcaaaatagaatttcagatctgcaacagtgtataacaaactgtaaatagt

SEQ ID NO: 251131 - DNA, 586 bp, Unknown
  Bacterial polypeptide expressing nucleotide sequence isolated from the Sargasso Sea
tttgctgccgatggtaaccagcattgatgaagtggacgaagcgcgacgtttgattgaacgcgccggacgcgaagtggaggagatgatcggttacgagatcccgaaaccgcgcattggcatcatgctggaagttccgtcgatggtgttcatgctgccgcatctgacaaaccggattgactttatctcggtcggaaccaacgatcttacccagtacatactggccgtcgatcgtaacaacacacgggtagccagcatttatgacagtctgcatccggggatgttacgtgcgctggcgatgattgcgcaggaagccgaaagaagcggtatcgatttgcgcctgtgcggtgaaatggcgggcgacccgatgtgcgtggctattctgatcggcctgggtttccgtcatttgtcgatgaacggtcgttctgtcgctcgcgtcaaatatctgctgcgtcatatcgattttgatgaggcgcaaacgctggcgcagcgcagcctggaagcgcagatggcggcagaggtacgccatcaggtagcggcctttatggagcgccgcggcatggggggattgattcgcgggggattgtag

SEQ ID NO: 251132 - DNA, 1744 bp, Unknown
  Bacterial polypeptide expressing nucleotide sequence isolated from the Sargasso Sea
aatgaataaactatcaccaataattctaaatggtttatcagtctcaaaaggaattgctataggtaaatgtaaaataattgagcatggtcaacgaaatattgagaaatccatacttaagaaaaatgaggacattaaaaaagagttacttaagtttgataatgctcataaatcgactttagatgagcttaaaaaaattaagaataaaataaaaccctctgtacaaaagaatataatattatttttagatactcacatattattaataaatgataaagattttttgttaaacatcagaaaaagaatcaaagaaagtcgttattctgcagagtggtctgttcatcaagaatatttgaatattaaagcttcttttgaagatatgactgacaattatattaaacaaagaatagatgatgttcagcatgtagtgaatatgatcattaaaaatctccgtagaaacaaaaacataaagaatacgtctattaaaaatgttaataaaaaaattattatcacagatgatttaagtcccgctgatgttttggtcgcatttcattcaaaatgttctgcaattatctcagagtttggggggagatcatcgcatagttcaattcttacgaggagtatggagattccatctattgtgggtgtaaaaaacattactaaactaataagagatgatgacgagataattattgatggagaaaaaggcataattatcatccatcctgacaaaggatcaaaaaaatattatcaaaagatccaacttgatcagtttgagaataaaaaagaactaatttcaataatgcatagggatgcaattacaaaagataaaaaacaaatagagctgatggtgaatcttgaacttccagaggaactaaaaatgcttaaagctgagtatatagatggtattggtctatttagaaccgaatatatctattcagatagagatgattttccatcagaattggagcaatataatacttataaaaaagttgttcaaagaatgtcgggtaaaactgtaatattcagaacattggatattggggcagataaagaagtacctgaaaatatacaatcaggagctattgcaagaaaccctgcattgggattacgaggaattaggtatagccttaataatcaaataatttttctaaatcaaattaaagcaattcttagagcagcacattatggaaatgtaaaaattatgcttcctatgataacaacattatcagaggttgagcatgcgaaaaatttaattaagaaggctaaagaggaccttagtagtaaaagaaataattttagtgattgtgtagatataggaataatgattgaggtaccatcgagtgctgtaaatgcctctcaattcgctaagcatgtagattttttttcaataggtactaatgatttggttcaatatgcactggctatagatagagtaaatgatgaagtaaactatttatatgatccttttaattctgctgttctacaactaatacataatgtaattaaagccggtaagaagtataatattccagtttcattatgcggagagatggctggagatattaatttcacaagattgttacttggcatgggtttacaatcattcagtatgcacccgagcgctattcctgagataaagaaaattatattgaattcagatactaataaatttcgctctatagtaaagagaattattaataatgatgctaagaagaaagaattaattgatagaattaatagttag

SEQ ID NO: 251133 - DNA, 1465 bp, Unknown
  Bacterial polypeptide expressing nucleotide sequence isolated from the Sargasso Sea
atggacagtttcaagggaacaggggtatctccaggaataggtttgggcaagtttcattttgttaataatgaaatcgacctatctatacccagtaaaataagctttaaagcaagccagcagcagttagatttaaaatattcgaacttaattgaaaaattaaaaaaagataatcgtaacagtgaagccgaagttttagatgcatatcgattgctcataaacgatccggagatatcagatatgatcaatgaagatcatgatcttaaagaaatttttgatatatttaaaaatacttctgatgaaatgatgaaattcgaagatgaatattttaaacaaagagctgaagacatcatctcaataggtaaagagataattttctctatgcagaatattgttttagaccaaaaacttgatgaagatgtgattatatttgcttttgatttaactccaaacgatacatcctctttagatttaacaaaagtcaaaggttttgttgttacaaattctggtccaacttctcacgcagtaatagttgctaaaaatttgggtataccttgtgtaataaatttcgacatatcaatcttggatttaagcgctgaagagcaaattgttattgatggagattcaggtgaaatatttataaatcctgataacaagatccttaatagagttgaggaaagtatggatagatccgataagttaaaagaaatttacaatcaggaatctatcgataatcttaatttaacattgagagcgaacattggtagcaatgatgaaatacaagcttttaatgatcaattaattaaatccgtaggattgtttagatctgaatttatttatattgataagacaaccaagccttcattagaggatcagataaagataaataatgaattagattcaaagtttagtgaaacaattgtttttagaacattagatattggtggagacaagcaggtcccttatttaaaattgccaaaagaagaaaatccttttttaggcgtaagaggaataagatattcacttgaagaagaagcactttttagagagcaaatagtttctatactcacctcaaaattaaataataaagtaaaaataatgtttcctatggtgtcaattttagatgactttataaaagctaaaaatattgtcattgaagaatctgagaaattaaatattaaaacacctcctcttggaataatggtcgagacaccctctgcagcattaaatgctgaattatatgttggtcatgtgaatttcttttcaattggtacgaatgatttaattcaatatacctatgcagcagatagaggtttagcttcattaaacaaataccaagacccacttgatactggagtattaaaattgataaataatgtaattaaagttggtgttgaaaataacattgaagtttcagtatgtggagatatggcatcggacaaagaggccgctgttgttttgtatctcc

SEQ ID NO: 251134 - DNA, 466 bp, Unknown
  Bacterial polypeptide expressing nucleotide sequence isolated from the Sargasso Sea
cgcgaagagatcgaggtacgcgacctgcagatcggcatcatgatcgaagtgccctcggcagcgttgttggcaccggtgctggcgcgtgaggtggacttcttcagcatcggcaccaatgacctgacccagtactgcctggccatcgaccgcggccatccgcagctgtcggcacaggccgatggcctgcatccggccgtgctgcgcttgatcgagatgaccgtgaccgctgcccatgcccagggcaagtgggtcggcatctgcggcgagctggccagcgaccgtctggccgtgcctctgttggtcggcctgggcgtcgacgagttgagcgtcacaccgcgctcgattgccctggtcaaggcgcgcgtacgtgagctggacagccgccaggcgcgaaccctggctgaccgcgccctgaccctggacagtgccagcgccgtgcgcgcgctggtggcggagatgcactgat

SEQ ID NO: 251135 - DNA, 1705 bp, Unknown
  Bacterial polypeptide expressing nucleotide sequence isolated from the Sargasso Sea
tatgtcgattacggggatcatagtgtcatcggggattgccttcggacaggcgctccaccttacccaggccgaacaccacctcgattatcgccctattcccctatcacggatcccgcagcaacagagtaaatttgtcaaagccctacaggcgctgcaacaacaactcagccacagccaaactaagctcgacccacaaagcgaaaactatcagttaattgaagccgatttgttactgcttgaagacgaagagcttatcgaccaagtgaaggaagcaatccgcaccctgcagttatctgccagtgtggcggtcgagcggatcttcgcccatcaggcgaatgagcttgaatccttagacgatccctatcttgccaatcgtgcccaagatgtacgttgcctcggccagcgattagtcactgctattaacggtcgcttagatcaaggcttagcccagttaactgagccgacgatccttttagcgcaagatctcactcccgccgaatttgcgttattacccaaggagcagatcagcggcatagtgctcaaaaccggcggcttaaccagccatacggcgattttggcccgcgccgcggggatccccgccattcttagctgccagttcgatgccgagtttattcccaatggcacgccattggtgctcgatgccctcagtggcgaactatttgttaatccagcacccgagcagcaagcacgcttaaccgtcacattgcaccatgagcaggcccgacgtgccgctctgcaagcgtaccgagatgtgcccgccaagacccaagatggccacctcgtgggcctgatggccaacgtgggcaacttgaacgatatcacccatgttggcgatgtcggtgccgatggcattggtttgtttcgcaccgagtttatgctgatgcacaccagtacactgccggatgaaaaagcgcaatacaatctgtactgcgaagccttgcatgcgttaggcggtaagacctttacgatcagaaccttagatattggtgccgataaagagctgccctgcctctgccaggaggttgaagacaatcccgccctgggcctgcgcggtgtcagatacaccttggcgcatccagagctgtttaagacccagcttagggcgattttgcgagcagccaaccatggccccattcgactcatgtttcccatggtgaatcaggttgaagaactcgatcagatttttaccctcatcgccgaatgccaagacgccctcgaagaggaagaaaaaggcttcggtgaactcagttacggcatagtagttgaaacccccgccgccgtgatgaatcttgcctccatgctgccacggttagattttgtgagcataggcaccaatgacttaacccaatatgccatggcggcagatcgcacgaatccgcaactgacacgggattacccttccctgtcaccggcaattttagggcttatcaagatgaccgtcgaccaagccaaagctgctggagtcaaagtgtcactctgtggcgaacttgccagctcgccgctgatggtcccgctccttatcggcatgggactcgatgaactcagcgtaaacttaagcgcattgctggaggtgaaagccgccgtttgccaagggcaattgatgaaattttctgcgttagcgcacaccgccatgcaacagaatagaatttcagaactacagcagtgtataacaagctataaataa

SEQ ID NO: 251136 - DNA, 1633 bp, Unknown
  Bacterial polypeptide expressing nucleotide sequence isolated from the Sargasso Sea
atgataaatgttacaggcttaggagcttcattaggtattgccataggttcatcttttatttatgagaacgagatagattttaataaacaggccgttctttctcatagtgaggcaagcaaacaactcattgaaaaatttagtggacaaattagtgagtttcgctccaaagacagaaatgatgaagcggatattttagatgcctatatactaatccttcaagatcctgaaatactccaacaacttaatcaaaaacaagatttatcaattgataatgtttatgaaatctatacatctacagctcaaatatttgaatctatggaagatgaatattttaagcaacgtgctgaagacataatttcagttggtaaacatcttatttttaatatgcaaaatatcgacattaaaatctcgctagatgaaaatacgatcttaattgcaagtgacttaactccggcagatacatcctcaatggatttaagtaaagtaagtggaattattttaaaagagggaggatttacctcgcatgctgttattgttgcaaaaaaccttggtattccttgtgtaattggtgttaaagaattgttggacaacattacaaatggtgagtcgttatccatagatggcagcagtggcgatattatagtctcaccaaacgacaatcagatctctactttaaagaagaaacaaggaaaaattgagaagttgattcaaaattttactgaagaaaaatacaaaaagctaggtttagagtttagggttaatatagggtccttagaagagattaattcatttaatcattcatttttgaactccataggtttatttagatcagagtttatatatcttgacaatacaacaaacccaacacttgaacaacaaagtagtgttttagaaaaaataactcaaaaatttactggaacaattgtttatagaacgcttgacattggtggagacaaacaagtaagttaccttaacttgcctgttgaagataatccatttcttggtgtaagaggtataagactttcattaaataatttggatttattcgattctcaaataaagtcaattttaaattctgactcactagataaaataaaaattatgtttccaatgatatctacaattgaagactatttagaagcaaaagaatttgtaaataaaatagcaaaagatttaaacgtcgaatctccaccaatgggaataatggtagaaacaccatcgtctgcttttatcgccgataagttttcagaaatagttgattttatatctataggtaccaatgacttaacacaatacattatggccgcagatcgtggcaatagtaatcttagtcattatcatgactcactacacccctctgttcttagagcaatatccaatgtaattgattgttgcaatgcaaataatattgaggtgtctgtttgcggtgaaatgtcttcagatccagtttcagcccttgcattatacatacttggattaaagacatttagcatggcaccttctgctgctccttttgtgtttgatatattaaatacaaattctgagattaataaacaaagtgcaaaagaattaattttatcgcttaataatgctcaacaaacaagaaaaactatccaagaaattataaattgaa

SEQ ID NO: 251137 - DNA, 1030 bp, Unknown
  Bacterial polypeptide expressing nucleotide sequence isolated from the Sargasso Sea
aatgactatttctattcaaggtgtgagtgtctctcgaggcatagcaattggaagagtacatcgtatcaaggatgatcaaattgatgctcctgagtacattataaagagcaaacaaattgatgctgaaatttctagactaaacgaagcaataaaaaatgcacatggtgaattaagggctattagagacaatataccaagctctacctctaaaaacatagctgaatttataaatacacatttattaatgctagaagataatgcattaacagaagaacccaaaactattattagagaaaaattatgtaatgcagagtgggctttgaaattacagcgtgatgcattagttaatgtttttgatgaaatggctgatacatatcttcgcacaagaaaagatgatgtcgatcatgttgttaacagaatattacgtgtactgttaaaacaaacaccaatcatagaaaaatacccagaaaaacaattaaaaaataaattaattgtagcggatgatttgaccccagcagatacagtcttgatgcaacactatggtatagcaggatttgcaactgaatttggtggatcaacatcacacacggcaattctcgcacgtaacttaagaattccagttgttgtaggcttacatggagctaaaaaacttattaagaatgatgactatgcaattctagatggtgactcggggataatactaattaaccctgatgaaaccatattaaatgattacaaaaaaaaacaaaaagaagtaaaaaaatattatgtatcactagagaaacttaaagattcaccagcaaaatcaatggatggaattgacataacattaatggccaatattgaactccctggtgattttgaaagagttagagatgttggtgctgatggagttggcttatatagaactgaatttttatatatgaatagaaacaatccgccagacgaggaggaacactatgaaacatacatcaatgtaatcaacgcgcttcgtgggttacctttaactattagaacagttgatttagga

SEQ ID NO: 251138 - DNA, 1036 bp, Unknown
  Bacterial polypeptide expressing nucleotide sequence isolated from the Sargasso Sea
aatcgattcggattttaataaaagtgttgtattagatggagatacaggagaaattttcttagatccaacatcggatgttctcaaaaaagttgaagaaggtttgaataaaataaataaattaagggagtcatataatcaagattcaatcaaagacttaggtattgaacttagagcaaatataggtagcagtgaagagataaatgcttttaatgatgaccatattaaatcagttggcctatttagatctgaatttgtctatattgatagatcctcaaaacctacattaaaagaacaaatagaaattaataatgaattaaatataaaattttctaacactattgtttttagaactttagatataggtggcgacaaacaagttccatatttaaatttacctaaagaagaaaacccatttcttggggtaagaggaataagatattctctagatgaagaagatctttttagacaacaaataatttcaattcttagttcagatctgatagaaaaagtaaaaataatgtttccaatggtttctattcttgatgattttttagatgctaaaaaaatagtcatagatgaatctaaaaaattaaatgttaaccctcctcctttagggataatggttgaaacaccctctgttgcattaaatactgatcaatacattcaacatgttgatttcttttctataggaactaatgacttaattcaatatacatatgcagctgatcggggtctttctacactaaataaatatcaagaccctcttgatgtgtctgttcttagattaattaataatgtaatcgatactggacttaagaatgatatcgaagtctctgtatgtggagatatggcttcggataaagactcatcaattatcttatacttacttggacttcgagtatttagtattgctccatctcaaggaccaaatataatcaattcacttattcatgcaaaagaaaatttatcccacataaagaaagaagaaattctttcttcaacagattctcaaagtttaagaaaactcatatcataa

SEQ ID NO: 251139 - DNA, 741 bp, Unknown
  Bacterial polypeptide expressing nucleotide sequence isolated from the Sargasso Sea
gaaatatacaaaaaaaattttctggaacaattgtatatcgaactttagacattggtggtgataagcaggttgattatttagatcttcctgaggaagaaaacccttttcttggtgtaagaggcataagactttcattagacaagaaagaattatttgaaacacaaattgaatcaatattaatttctgaaaatgttgaaagagtcaaaataatgtttccaatgatatctacaattgaagattttcttgaatcaaatcagatagttgagacaattgctgataaattaaaaatcaataaaccagaagtaggaataatgattgaaacaccagcatcaacattattaatcgaagaattttctaagtatgttgatttcttttctatcggaacgaatgatttaacacaatatattatggcagcagacagaggcaatccaaatcttgttaagtatcaagacccacttcaccctgcagtattaagaacattagaaaatgtaatatcaacagctaacaagaacaatatagaagtttctgtatgtggcgaaatgtcctctgattcaacatcagcattagctctttatgctttaggactaagaattttcagtatgtctccttcatcagctccttttgtatttcagcaactaaataaaataaaagatatggatttaaagaagattaaaaataatatattagctcttgagaactcaactgaagtcagagaagaattaaaaaaattaaatatatgaa

SEQ ID NO: 251140 - DNA, 865 bp, Unknown
  Bacterial polypeptide expressing nucleotide sequence isolated from the Sargasso Sea
catgtggaccccgacgccgctatcctgcaacgggccaccgtggagcgcgacagccgcgaacagcgcttgcaagccgcatcggcccagcgccatgaagcggcgctgacccgtgacggccacgccgtggaagtgttcgccaacattggcgaaagcgccggggtggccagcgcagtggagcagggcgccgaaggcattggcctgctgcgcaccgaactgattttcatggcccacccccaggcgccggacgaggccactcaggaggccgaataccgtcgcgtactcgacggcctcaacggtcgcccgttggtggtgcgcaccctggatgtgggcggcgacaagcctttgccctattggccgatcgccgaagaggaaaacccctttctgggtgtgcgcggcattcgcctgacgttgcaacgcccgcagatcatggaagcgcaactgcgcgcattgctgcgtgcagcagacaaccgcccgctgcgcatcatgttccccatggtcggcagcgtggatgagtggcgcgccgcccgggacatgacccagcgcctgcgcctggagatcccagtggcagacctgcaactggggatcatgatcgaagtgccctcagccgcgctgctggcgccggtcctcgccaaggaagtcgacttcttcagcgtcggcaccaacgacctgacccaatacaccctggccatcgaccgcggccacccgaccctgtcggcccaggccgatggcttgcaccctgcagtcctgcaactgatcgacatcaccgtgcgcgccgcccatgcccacggcaaatgggtaggcgtgtgcggcgagttggcggcggacccgctggcggtgccggtgctggtcggcctgggcgtggatg

SEQ ID NO: 251141 - DNA, 796 bp, Unknown
  Bacterial polypeptide expressing nucleotide sequence isolated from the Sargasso Sea
tgagctgccagaagacctcaatgcgctgaagggcagcggcgctgcgggggttggcctgtaccggaccgagttcctgtttatgaatcggaccgaacctccggaggaagaggaacagtatcaggcctatagtcagatcatccaggcggttaacgggccggtaacggtccgcacacttgatcttggcgcggacaaacaggtagacgggggccgtgatgagcctaaagccgcagtgacgccggcgctggggctgcgggcgatccggctctgtctcagtgagccttccctcttcaagccgcaattgcgggccatcctgcgggctgccgttcacggcgacatccagctgatgattccgatgctgtccagtcttcccgaacttgagcaaagcctgtccctgatccgcgaagtctgtgctgaacttgaaagagagggcgcagcattcaatccgaacatcccgatcggcggcatgatcgaagtgcccgcagcggcgattgcggcagatctctttgcgcagaagctcgactttctttccatcggaaccaatgatctcattcagtacaccctggccatcgatcgcgtagacgactcggtcaactatctgtatgaccccctgcatccttccgtgctgagactggtgcgcaatatcatccaggcaggtgaccaggcaaacatccccgtctccatgtgtggtgagatggctggagatcccgtgtttacccggcttctgatggggctgggtttacgccagttcagtatggagccttcgcagttgctggagatacgccagcagatcgcaaca

SEQ ID NO: 251142 - DNA, 745 bp, Unknown
  Bacterial polypeptide expressing nucleotide sequence isolated from the Sargasso Sea
tttgaaaatatacaaaaaaaaattttctggaacaattgtatatcgaactttagacattggtggtgataagcaggttgattatttagatcttcctgaggaagaaaacccttttcttggtgtaagaggcataagactttcattagacaagaaagaattatttgaaacacaaattgaatcaatattaatttctgaaaatgttgaaagagtcaaaataatgtttccaatgatatctacaattgaagattttcttgaatcaaatcagatagttgagacaattgctgataaattaaaaatcaataaaccagaagtaggaataatgattgaaacaccagcatcaacattattaatcgaagaattttctaagtatgttgatttcttttctatcggaacgaatgatttaacacaatatattatggcagcagacagaggcaatccaaatcttgttaagtatcaagacccacttcaccctgcagtattaagaacattagaaaatgtaatatcaacagctaacaagaacaatatagaagtttctgtatgtggcgaaatgtcctctgattcaacatcagcattagctctttatgctttaggactaagaattttcagtatgtctccttcatcagctccttttgtatttcagcaactaaataaaataaaagatatggatttaaagaagattaaaaataatatattagctcttgagaactcaactgaagtcagagaagaattaaaaaaattaaatatatga

SEQ ID NO: 251143 - DNA, 1900 bp, Unknown
  Bacterial polypeptide expressing nucleotide sequence isolated from the Sargasso Sea
atgcgaaatgcgcaatgctgcggtgcatgcagtcagcggggagtcgcggaatttataatcgctaaccggggtcataagcgcatcgcagcagtgtgccgcggctttacttgtacagaggaggtgcgcgtgtccttcacgctgcatggcattcccgtctcacgtggtatcgcgatcgggcgagcgtatctgatcgcgccggcggcgctcgacgtcgcccattacctggtcgaggcgaaccagatcgatgcggaggtcgagcgcttccgcaccgcgctcgaggtcgtgcatcacgaactcgaagcgctgcgcgccgacctgaccgacgacacgccgagcgaagtcggcgcattcatcgacgtccacgcgatgatcctgagcgacgagatgctcgtgcaggaaaccatcgacctgatccgcacgcgccgctacaacgtcgagtgggcgctgaccgagcagctcgagctgctcacgcgccacttcgacgatatcgaggacgaatacctgcgcgagcgcaaggccgacatcgagcaggtggtcgagcgtgtgctgaaggcgctcgccggcgcaccgtccgcgtcgcaggcgctcgaccgtgcggccaagaacggcacgaacgagatgatcgtcgtcgcgcacgacatcgcgccggccgacatgatgcagttcaagtcgcagtcgttccaggcgttcgtcaccgatctcggcgggcgcacgtcgcacacggcgatcgtcgcgcgcagcctcggcattccggccgcggtcggcgtgcagcatgcgagcgcgctgatccgccaggacgacctgatcatcgtcgacggcgaccagggcatcgtgatcgtcgatccggcgccgatcgtcctcgaggaatattcgtaccggcagtccgagaagctgctggagcaacgcaagctgcagcgcctgaagttctcgccgacgcaaacgttgtgcggcaccaagatcgagctgtacgcgaacatcgagctgcccgacgacgcgaaggcggccgtcgaggccggcgcggtcggcgtcggcctgttccgttccgagttcctgttcatgcatcagaaggagatgccggaggaggaggagcagttcgccgcgtacaagcgggccgtcgagtggatgaagggcatgccggtgacgatccgcacgatcgacgtcggcgcggacaagccgctcgaggcgctcgacgaaggctacgagacggcgccgaaccccgcgctcggcctgcgcgcgatccgctggagcctgtccgagccgcagatgttcctcacgcagttgcgcgcgatcctgcgcgcgtccgcgttcggccaggtgaagatcctgatcccgatgctcgcgcacgcgcaggagatcgaccagacgctcgacctgatccgcgaggcgaagcgccagctcgacgacgcggggctctcgtacgacccgaacgtgcgcatcggcgcgatgatcgagatcccggccgcggcgatcgcgctgccgctgttcctgaagcggttcgatttcctgtcgatcggcacgaacgacctgatccagtacacgctcgcgatcgaccgcgcggacaacgcggtcgcgcacctgtacgacccgctgcatccggccgtgctgcacctgatcgcctatacgttgcgcgaagcgaagcgcgcgggcgtgtccgtgtcggtgtgcggggaaatggcgggggacccggcgctcacgcgcctgttgctcgggatggggctgaccgagttctcgatgcacccgagccagttgctggtcgtgaagcaggagatcctgcgcgcgcacctgaaggcgctcgaaaagccgacggccgacgtgctcgccgcgttcgagccggaggaagtgcaggccgcgttgcagcgcctgtcggtggcggagccgcgcgcggatgcggctgcgtagc

SEQ ID NO: 251144 - DNA, 1633 bp, Unknown
  Bacterial polypeptide expressing nucleotide sequence isolated from the Sargasso Sea
aatgaaaactgttaaaggaaatggtgtatcaatcggcacagctattggagctgcttttatttatgaaaacgaagttgatttaaacattgaagctgaattaactttcgaagaagctgtcaaaatacttactgaaaaatttaatttacagataaaagattttaagaaaaataatagaaaagatgaagcagacgttttagatgcatatattttaataatgcaagaccctgaagtcattaatggaataaatgaaaataacaacacttctgtagtggatgtatttgaagtttttaaaacaaatgctgagattttacagtcaatggacgatgaatatttcagtcaaagagcagaagatctattgtcagttggaaaacatttgataaacacaatgcaggggattgcttcttcagtggagctagaaaacaattcaataattgtagctgttgatttaacaccagcggatacttcatcaatgaatatgagctatataaatggaattattcttaaagaaggaggaaccacatcacacgctgttatagttgctaaaaacctaggtattccatgcatcattggtattggagaagaaatgaatagtattaaaaataaagatgttatgtcaattgatggtgaaactggtgaaataaatattaatcctgatgatgcaactattaaagagataaatgagagatcaaaattgcaagaagaaatagttagttcgttcacgcaagatatatatgaagcttcagatttagaattcagggtaaatgttggttctaatgaggaaataaactctttcgaccatccatttcttaactctataggattatttagatctgaatttatatatttagatagatcaagcatcccaacaacagaagagcaaaaaacgatacttgaaaatatacaaaaaaaattttccggaacaattgtatatcgaactttagacattggtggtgataagcaggttgattatttagatcttcctgaggaagaaaaccctttccttggtgtaagaggcataagactttcattagacaagaaagaattatttgaaacacaaattgaatcaatattaatttctgaaaatgttgaaagagtcaaaataatgtttccaatgatatctacaattgaagattttcttgaatcaaatcagatagttgaaacaattgctgataaattaaaaatcaataaaccagaagtaggaataatgattgaaacaccagcatcaacattattaattgaagaattttctaagtatgttgatttcttttctatcggaacgaatgatttaacacaatatattatggcagcagacagaggtaatccaaaccttgttaagtatcaagacccgcttcatcctgcagtattaagaacattagaaaatgtaatatcaacagctaacaagaacaatatagaagtttctgtatgtggcgaaatgtcctctgattcaatatcagcatcagctctttatgctttaggactaagagttttcagcatgtctccttcatccgctccttttgtatttcagcaactaaataaaataaaagatatggatttaaagaaaattaaaaataatatattagctcttgagaactcaactgaagtcagagaagaactaaaaaaattaaatttatga

SEQ ID NO: 251145 - DNA, 1633 bp, Unknown
  Bacterial polypeptide expressing nucleotide sequence isolated from the Sargasso Sea
atgaaaactgttagaggaaatggtgtatctatcgggatagctattggaagtgcgttcacttatgaaaatgaagttgatctaagcattaaagctgagatgccttttgaagaagctgtcaaaatactaactgagaaatttagtttacagataaaagagtttaaggaaaataatagaaaagacgaagcagatgttctagatgcatatattttaataatgaaagatcccgaagttattaatggaataaatgaaaataacaacaattctatagaagaagtgtttgatatttttaaagcaaatgctgaaattttaaagtcaatggatgatgaatattttagtcaaagagcagaagatgtattatcagttggaaaacacttgataaacacaatgcagaatattacctcttcagtagaactagaagaaaattcaataattgtagctgatgatttgaccccagctgatacttcatcaatgaatatgaccaatataaatggaatcattctaaaagaaggaggaaccacctcacatgctgtaattgtcgcaaaaaatctagggattccctgcatcattggtgttggcgatcaaataagtattataaaaaacaaagatacgctctctatcgatggagaaacaggcgaaattaatgttaatcctgacaaagaaacgattaaagatataaaccagagatcaaaaatacaagaagatattgttaatgaatttacgaaagaggtgtatgaaagttcagatgtagaatttagggtaaacgttggttcgaatgatgaaataaattcttttaatcaccaatttcttaactcaataggattattcaggtctgaatttatatatttagacagatcaaatatcccaacaactgaagagcaaaaaataatacttgaaaatatacaaaaaaaattttccggaacaattgtttatagaactttagatatcggtggtgacaaacaagttgattatttagatctccccgaagaagagaaccctttccttggtgtaaggggcataagactttcactggacaagcaagaattatttgaaacacaaattgaatcaatattaatttctcaaagtgttgatagagtaaaaattatgtttccaatgatatctacaattgaagattttcttgaatcaaatcaaatagttgaaactatagcgaagagattaaaggttaataaaccagaagtaggaataatgattgaaacaccatcatcaacattgttaattgaagaattttgtaaatatgttgatttcttttcaataggaacaaatgatttaacacaatatattatggcagcagatagaggcaatccaaatctcgttaagtaccaagaccctcttcatccttcaatattaagaacattagacaaagtaatatcaacagccaataaaaacaatattgaagtttccgtatgtggcgaaatgtcatcggattcgttatcagcaacagctctttatattttaggtttaagagtatttagcatgtctccttcagcagcaccttttgtatttcagcaactaaataaaataaaagaaatggatttaaataaaataaaacaaaatatattaggtcttgaaaattcaactgaagttagagacgaattaaaaaacttaagttcatgaa

SEQ ID NO: 251146 - DNA, 1054 bp, Unknown
  Bacterial polypeptide expressing nucleotide sequence isolated from the Sargasso Sea
tatgatatctggcattcttgcgtcccccggtatcgcattcggcaaggcgcttcttctgaaagaagatgaaatcgttatcaatcagggcaaaatcgctgccgaacagattgatgccgaaatcaaccgcttcctcgaagcccgcaccaagtcagccgcacagctggaagccatcaaagagatggccggtcgcaccttcggtgaagaaaaagaggccatcttcgaaggccacatcatgctgctcgaagatgaagagctggaaggggatatcagatccttcatcaaagacaacaaggccaccgctgacaaggccatctacgaggtcatcgagcagtacgcgaagatgatggccgagctggatgatccctatctgcgcgagcgcgccaccgacttccgtgacatcggcacccgtctggtcaagaacgtactgggcatcgccgttgtcaacctgagcaccatcgacgaagaggtgatcctggtcgccaaagacctgaccccgtccgaaaccgctcagatcaacctgaaatacgtgctgggtttcgtcaccgacatcggtggccgcacttcccacacctccatcatggcccgctccctggagctgccggccatcgtgggtaccaacgacatcaccgagcgcgtcaagaatggtgacgtgctggtgctggacgcgatcaacaaccagatcatcatcaatccgactgccgaacagctgaacgaagccaagcaattccaggcccagttccaggccgagaaagatgaactggccaaactgaaagatctgcctgccatcaccctcgatggccatcaggtcgaagtgtgcgccaacataggtaccgtcaaggataccgaaggtgccatccgcaacggcgccgaaggcgtgggtctgtaccgtaccgagttcctgttcatggaccgtgacgcgctgccgaccgaagacgagcagttcaaagcctacaaagaagtggccgaagcgatgccggatcagccgatcatcgtgcgcaccatggacatcggcggcgacaaagaactgccctacatgaattcccgaaagagatga

SEQ ID NO: 251147 - DNA, 622 bp, Unknown
  Bacterial polypeptide expressing nucleotide sequence isolated from the Sargasso Sea
catgcacgctcagctgcgggccatcctgcgtgcgtctgccttcggcaaactgcgcatcatgttcccgatgatcatctctgtcgaagagttccgcagcctgaaggctaccgtggagacgctgaaagccgaactgcgtgccgaaggcaaagcctttgatgaatccatcgaagtgggtatcatgatcgagaccccggctgctgccgtgatggctcatcatctggccaaggaagtggatttcttcagtatcggtaccaacgacctgacccagtatactctggctgtcgaccgtggtaacgagatgatttccgccatgtacaacccgctgtcaccctccgtcctgacgctgatcaagatggttatcgatgcatcccacgccgaaggcaagtggaccggtatgtgtggtgaactggctggtgacgagcgtgccaccctgctgctgctgggtatgggtctggatgagttctccatgagcgccatctctgtaccgcgtatcaagaagcttatccgcaacaccaacttcgaagatgtgaaggccatggctgatcaagcgctgagctttgccaccgccgccgaaatcgaagcctgtgtagataactttattaagcagaaggcagtctgctaa

SEQ ID NO: 251148 - DNA, 361 bp, Unknown
  Bacterial polypeptide expressing nucleotide sequence isolated from the Sargasso Sea
gtgaatgagagattaggtagaccagattgtagaaatgggtacatcttagatgggtttcctagaacactaaatcaggctaatggccttgaaaaaattatggattcatttaaccatagcttagatagagcaataagcctctacgcagatgaagatgcgcttgtggagagactggtaaaacgtggggaaaattctggacgaagtgacgatacttctaacataattagaaaccgacaaaaaatctattggcaacagactgcaccattgctagacttttatgaagaaagaggtctattagacaatatcaatggccttggagaaataaaagagataacagaaagaattttaactacaataagatagt

SEQ ID NO: 251149 - DNA, 343 bp, Unknown
  Bacterial polypeptide expressing nucleotide sequence isolated from the Sargasso Sea
atacaacctttcacatatttttactggagatatattaagatctcaaattgctgaaaaaaccaaattaggcaatgctggtaaagtatttatggataagggtgatttggtgcctgacaatttattaattgatatggtttttagtacaagtaaaactcttcaatcaatacttcttgatggttttccaagaacaatcaatcaagcaatatctttggaagatgagatggaaaagctaggtaaaaaaatagtctatgtattatattttgatgtaccttttgaaaaattaattgatagattatcccaaaggctttcttgtaaaaaatgctctaaaactttttcaaaatca

SEQ ID NO: 251150 - DNA, 835 bp, Unknown
  Bacterial polypeptide expressing nucleotide sequence isolated from the Sargasso Sea
aatgcgtcccttggcggaccgtttgcgtcccacagccttagctgaggtcgttggccaagaccaccttttggctgcgaacgctcctatcggtcgtatggttgaatcgggccgtataacgtcaatgatcttgtggggaccgccgggaagcggaaaaacaacgatcgcacacctcttggcatcaagcggaaacatggcgttcacctcattgtcggcggtattttcaggggttgcggatttgcgcaaagcatttgatgaagccaaacgcgttcttcaggtgggacgtggcacgctgctttttgttgatgagattcatcgctttaacaaatctcaacaggacggcttccttccctatgttgaggacgggactgtaattctggtgggggctactaccgaaaacccatcgtttgaactaaacgcagctattctctctcgcgcgcaagtcctagtccttaatcgtctagaagatatggcattggaagaattgttattgcgtgcagagcaagatgcggagcgtggactacccgtcgatgcggacgctcgacgagccttacgcgccttggcagatggcgacgggcgatatcttctcaatatggctgaagaacttcttaaccttccggaagagccgatcttggataccaccgcactcgccggaaacattcaacggcggatgccgctatacgacaaatccgatgacgcccactacaacctgatcagcgccttgcacaaatcgctgcgaggctctgatacggatgccgcgctttattggctcgcgcgaatgttggaagggggggaagatccgcattacataatgcgccgcctcacgcgatttgctttg

SEQ ID NO: 251151 - DNA, 244 bp, Unknown
  Bacterial polypeptide expressing nucleotide sequence isolated from the Sargasso Sea
atgatcatcaccgtcgacgggccggcagcatctggcaagggtacgttggcccggcgactcgcggtagagtacggcctcgctcatctcgataccgggctgctctatcgagcgatttccaaacgcgtgctcgatacgggtgatgaccccagcgatgaagctaccgcagtggccgcggcccgcgcgcttgaccttggcgacatcgagagcaatgggctgcgtagcgagacgatcggcgaagcagctc

SEQ ID NO: 251152 - DNA, 344 bp, Unknown
  Bacterial polypeptide expressing nucleotide sequence isolated from the Sargasso Sea
aagtcatgatgattgtttaggaggcacaatacttgatggattcccaagaacactccctcaagctaaaagtttagaaaagataaacgataaatttccagtagtaaaagtaattgtttttgaagctgatcaggaagagcttacaaaaagaatacttttaagaggtgaaaccagtggtagaggagatgacactgaagattctataagggtgagattagaagtttaccagaaagatacagaacctcttattacttattatgaggataaagaaatcacaacaaaaattaacgctgtaggtaatgttgatgatatttataaagaaatttctaaagagtttattaagtagg

SEQ ID NO: 251153 - DNA, 784 bp, Unknown
  Bacterial polypeptide expressing nucleotide sequence isolated from the Sargasso Sea
ttggcgccggtgcgagagatcgcgcgagtgagcgcgaagacggttgaaccggtggcgaaacccgtgatcggatcgacgacgctcgcggcgggcgcggcggtcgcggcggcggcggcggcgctcgcgatcaagcgggcgaagcgtggatcgggatcttcaaagcaaaagagaatcgtcatcgcgggcgcgccggcgagcggaaaagggacgcagtgcgaactcatcgtgaagaagtttggtctcacgcacatctccgccggtgatctgttgcgcgcggccgtcgccgcgggtaccgaggctggactcaaggcgaaggagtacatggaccgaggagacctcgtgccgaacgaagtcgtggtgacgatggtgaaggagcgattgtcgcagccggactgcgcgaagggttggttgttggacgggtacccgagaagcgaagaacaagccgatgcgttgatcgagagcggcattcaaccggatttgttcttgttgctcgacgtaccggatgaaatcttgctcgaccgcgtcatcggccgtagactcgacccggtggacggaaccatctaccacatgaccttcttcccgccgccgactccggaaatcgcggcgcgattgacgcagcgtagcgatgataccgaagagaaggcgtcgaaccgcttgtctgtgcaccacaagaatgtcgacgccgtcgtcggcaagtacgagaccatcatgaagacggtggacggtaaccgcgccaagcaagacgtattcaaggacatcgagtcactcatcaagaagatgtaaa

SEQ ID NO: 251154 - DNA, 487 bp, Unknown
  Bacterial polypeptide expressing nucleotide sequence isolated from the Sargasso Sea
cctctcgactggagagagttacgggcagccattgctcagaagacaactgaaggaaaagaggcctcctcgtacatggaggcggggcagttggttccggatcaactcgtacttggattagtgacccgtcggctgaagggccaggattgtcggagaggctgtctccttgacgggttcccgagaacaataaatcaggccgaaatgctcgatgatctgcttgagcgacaggcaatgagcgttgacggtgttattgaactgtccgttcctcaggaagaacttgttcgtcgtatgcttgcacgaaaacgggaggatgacagtccagaagtttttgcacgtcgaatcgaaagtttcgaaagacagacggctcctctgctggaatattatgaattccagggaaaattgaggactgtgaacgggttaggttctgctgatgatatctttgagcgggtgcggcaggcaatccgtgcatttcggcgtgcaaaacgctaga

SEQ ID NO: 251155 - DNA, 451 bp, Unknown
  Bacterial polypeptide expressing nucleotide sequence isolated from the Sargasso Sea
aactgcactagatgttacagtacaagcacagattatagaattgttacaagacctacaagaacaacttggaatggccataatgtatataacacatgatttaggggttatctgtgaaattgctgacgtagtacatgtcatgtatttaggtaagattgtggaaagtgctagtactaaagaacttttccacaatcctttacatccatatacgcaacggttgttagcatccataccaaaacttggggccagcggtaaaggaactaaactcgatgcgattcgaggcaatgtgccagtaccattaaatcttccgccacaatgcggttttcaatcccggtgtaatgaaataatagaaaatgtttgtgatttgaaagtacctggtctagtagacatgggtaatgaacactacgtcagatgcttcctgcacagtgaggaagaggaaaaaacatatgtctga

SEQ ID NO: 251156 - DNA, 256 bp, Unknown
  Bacterial polypeptide expressing nucleotide sequence isolated from the Sargasso Sea
atgaatattattctattagggcctcctggttcaggaaaaggaacacagtcctctcatttagctaagaaatacagccttaatcatctttcaactggagacgtattaagatccgaaatagtttctggctccaaactaggaaaagaagctagtaaatatatgaatgaagggaacttagttcctgatgaagtcataattggaatggtatcgcaaaaattgagtgcaattgattctgttttgcttgatggttttccttagg

SEQ ID NO: 251157 - DNA, 568 bp, Unknown
  Bacterial polypeptide expressing nucleotide sequence isolated from the Sargasso Sea
tatgaatctaattatatttggtccaccaggagcaggaaaaggaactcaatcaaattttattgcaaaaaaatataacctttttcaactttctactggtgagattttaagagaacaaattagaaataaaacagatttaggaataaagatttctccagttattaattcaggatcatttgtatcagacgacatagtctctgaattaattgacaaaattataaaagataaaaattatcataatagaattatatttgacgggtaccctagaagtttatcacaagcatcaaatttagacgttttattaaaaaggtataatcaaaaaatagatctagttctaaaattgtcggtaagtttagatactgttataaagagaatttctgaaagaagaacacttgaaaaaagagaagacgataatgaaaaaatagcaattaaaagatataaaacttacgagaaatctacagagccagttatagaatattataaaaaattgaatttattaaagatgattgatggtgagagatctattgatcaaataaataaagaaattagcgacataattagcctcatatag

SEQ ID NO: 251158 - DNA, 262 bp, Unknown
  Bacterial polypeptide expressing nucleotide sequence isolated from the Sargasso Sea
atgaacatagttatttttggcccacctggggctggcaaaggaactcaatcaaactttattgttcaaaaatttaatttatatcaattatcgactggagaacttttaagaaaagaaatcaataataaaactcaattaggaaaacaaatttcctcaataataaatactggaaatttggtctcagatgagatcgtgggtaatttaattgaaaaatttattactaataaagagtataaaaacagacttattttgatggatacccacg

SEQ ID NO: 251159 - DNA, 205 bp, Unknown
  Bacterial polypeptide expressing nucleotide sequence isolated from the Sargasso Sea
aatgaatttagttatttttggaccgccaggagctggaaaaggcactcaatcaaaatttattgcagaaaaatttaaaatgtttcaactatctactggagagtttttaagaaaagaaataactaaaaatactgaaataggaaaaaaaatatcatcagttataaatactggagctcttgtttctgataaaatagtttcggatttaatt

SEQ ID NO: 251160 - DNA, 547 bp, Unknown
  Bacterial polypeptide expressing nucleotide sequence isolated from the Sargasso Sea
atgaaattattaattatggggcctccaggtgttgggaaaggaacccaagcagaaatattaaaaactgaattcaatattgcacatctttctactggagaaatacttcgcaaagagattgctagaaaaagtgaagttggaatcattgctaaacaccatattgataagggccagttagtcccagataaagtgttattaaatattattcgtgatagaattattatgtcagattgtagcaatggatatttgcttgatggattcccaagaacaatagaacaggcaattggtcttgaagatatcatggtatcattagatcacgcattggatatggctattagtttaaccgcggatgaagaggagctcataaagagactaaaaaagagaggcgttgattcaggtagaagtgatgatactgctaatatcataagtaaacgtcaaaagatttattgggagcaaactgctccattattagatttttacgataataaaggtctcttaaaaaatatagatggcataggaacaattgatgaaatcactaagaggatataaa

SEQ ID NO: 251161 - DNA, 574 bp, Unknown
  Bacterial polypeptide expressing nucleotide sequence isolated from the Sargasso Sea
aatgaacatagttatttttggacctcctggcgctggtaaaggaactcagtcaaaatttattgttgaaaaatataatttgtgtcaattatcaaccggtgaactactaagaagagaaataaaagataatacaagtttagggcaaaaaatttcatcaataataaatagcggtaatcttgtttctgatgaaattgttacagatttaatagaaaaatttatttcaaataatgattataaaaataggttggtttttgatggatatccaagaaatttatctcaagcaaaaaaactcgatgaactacttaaaaatgataatcaaaaagtagacttagctcttaaattatctgtaagtttagaaattattaaaaaaagaattgttgaacgcagaaaccaagaaaatagatctgatgatagtgaaaatatagctattaaaagatttcaaaattacgaagataacatcaaacctgtaattgatttctataagcaggcaaatttattaagagtggttgatggagaaggctctattagtaaaattaacaatgaaattggcgttttaattgagtctatcaagggttga

SEQ ID NO: 251162 - DNA, 643 bp, Unknown
  Bacterial polypeptide expressing nucleotide sequence isolated from the Sargasso Sea
atgaggctaattttaatgggtgctcccggttctggaaaaggaacgcaagctgaaaaactcatggatgagtataattgtcgccaaatttcaacgggtgttttgctcagagaagccattgaatcaggttctgagcttggccaggaagttcaaaaaatcatgtctgaggggttgcttgtttctgacggcattgttttagatttaattaagaatgaattatccaaaatcggtgagaatagttttctcttggatggttatccaagaaatattacacaggcaaaatctttggatgatttgctctcaaatctaaacaagccattggattacactatattgattgacgttccaagcgagattctaattaagagactttctggcagaagaacttgttcgcttacaggaaagacattaaatatttacttttcatctgaaaccgagatcgatgaatgcctctctaaaggaggggagttactccagcgggaagatgacaatgagcagtcaattactaaaagaatagaggtttatggtcaacagacagaacccatgattgattattataaatcagcagggcttcttgaagcgattgatggccaagggtctattaacgatgtttacggaaggctaaaaaaattgatggaattatagt

SEQ ID NO: 251163 - DNA, 568 bp, Unknown
  Bacterial polypeptide expressing nucleotide sequence isolated from the Sargasso Sea
aatgaatcttattatttttggacctcccggagctggaaagggaactcaatctaaatttattgttaaaaaatttcaaatgttccaactttctactggagaatttttaagaaatgaaatttccagtaatacaaccattggcaaaaaaatatcttctataataaatacaggatctcttgtatcagatgatattgtctcaaatttgatagaaaaagtagtttctaattcaaaatatcacaataatattatttttgacggatatccaagaagcctaaatcaggcaaaaaatttagataatttacttaaaaaatataatcaaaaaattagtttagttttaaagttatctgtgagtttagaaacaattaaaaaaagaatttcagaaagaagaaatcttgaaaaaagatcagatgacaacgaagaaatagcggtgaaaagataccaaacttatgaaaaatctactgaaccagtaattgagttttacaaaaaattgaatttattaaaagtagttgatggagagagatctatagatcaaattaacaaagaaataagcgatattattgcacttatatag

SEQ ID NO: 251164 - DNA, 574 bp, Unknown
  Bacterial polypeptide expressing nucleotide sequence isolated from the Sargasso Sea
aatgaatttaattttatttggacctcctggttcaggaaaaggaactcaagcaaaaaatttagaaaaaaaattaaataattttcaaatatcaactggtgaaatgctcagagatgaaatcaaaaaagatacagaaattggtaaaaagataataagtaatatgaatgaaggaaaatttgttaatgatgaaatcattaacaaacttatgaaaaaaataatatttgatccacaaaaaaaggataagttgatttttgatggatatccaagaactttagaacaagcaaaaaatttagatctattgttaactgaatcaaaccaaaaaattgatttcattttttttctcaatgtaaataaagagacaataataaaaagaatcgagagaagaaaaattttagaaaaaagagcagatgatgacttaaacattattcttaaaagatatgatgtttatatagaaacaaccaaacctgtattagattactattcaactaaatccaattttaaagaaattaatggaggcttaaaaatagacgaaataaccaaggaaatagaaggtttattggaaagtataagtcattga

SEQ ID NO: 251165 - DNA, 515 bp, Unknown
  Bacterial polypeptide expressing nucleotide sequence isolated from the Sargasso Sea
tatgaatctaattatatttggtccaccgggtgctgggaaaggtacccaatctaattttattgtaaaaaaatataatctttttcaattatctacaggtgaaattttaagagaacaaataaaaaaaaagactgatttaggaattaagatttctcctgtaattaattctggatcttttgtttcagacgaaatagtttctgagttaatagaaaaaattatcaaagataaccaatataatagtagaattatttttgatggatacccaagaagtttagcacaagcaagaaatttagataatttattagataaatataaacaaaagatagatatcgttttaaaattatctgtgagtttagaaacagtaaaaaaaagaatttctgaaagattaactttagaaaaaagacctgatgatagtgaaaaaatagcaattaaaagatataaaacttatgaaaaatcgacggagccagtgattgaacattataaaaaattgaatttattaaaggtgatagatggtgagg

SEQ ID NO: 251166 - DNA, 235 bp, Unknown
  Bacterial polypeptide expressing nucleotide sequence isolated from the Sargasso Sea
atgaggttaattttgatgggagctcccggttctgggaaggggactcaggcagaaaaactcatggatgagttcaattgtcgccaaatatcgacaggtgtcttacttaggcaagccatagaatctggttctgaacttggcaaaaaggtgcaaaagatcatgtctgagggtttgcttgtttctgacgatatagttttggatttaatcaataatgagttatcagaaataggtgagagtg

SEQ ID NO: 251167 - DNA, 244 bp, Unknown
  Bacterial polypeptide expressing nucleotide sequence isolated from the Sargasso Sea
aatgaacatagttatttttggtccacctggtgctggtaaaggtactcaatctaaattcatagccgaaaaatttaaaatgttccagctttctacaggagaatttttaagaaaagaaattactgcagctacaccaacagggaaaaaaatttcatccgtaattaattctggagccctcgtttcagatcaaattgtttcagatttaattgaaaaggtaatatctaatattgactaccaaatagaataa

SEQ ID NO: 251168 - DNA, 568 bp, Unknown
  Bacterial polypeptide expressing nucleotide sequence isolated from the Sargasso Sea
atgaacgtaatcatttttggacctcctggagctggaaaaggaacacaatctaattttatttctaaaaaatttaatcttttaaaactttcaacaggtgaaattttaagagatcaaattaaacaaaaaacagatttaggaattaagatttctccaataattaattctggcgcatttgtatccgatgaaatagtttcagaattaattgaaaaagtaatcaaagataaaaaaaattataatagaattatttttgatggttatccaaggagtttagcccaagcaaaaaatttggataatttgcttgttaaatacaaacaaaaaataggcattgttttaaagttatctgtaacacttgaaacaataaaaaaaagaatttctgagagaagaaacttagagaatagaccagatgatagtgaagaaatagcggttaaaagatatgaaacttatgagaaatctacagaaccagttatagagtattataaaaagttgaatttgttaaaagtgatcaacggagagaggtcgattcatcaaataaataacgaaattagcgatataattaaccttatataga

SEQ ID NO: 251169 - DNA, 568 bp, Unknown
  Bacterial polypeptide expressing nucleotide sequence isolated from the Sargasso Sea
aatgaatttagtaatatttggtccaccaggcgctggtaaaggaacccaatcaagttttatagtaaaaaaatttaaattacatcaactgtcaactggggaacttttaagaaatgaaataaaaaataaatccgagttaggtttaaaaatttcatctataatcgactctggaaatttagtttctgatgaaattgtaagtaaattgattgaaaaatttgtttctagcgaaatttataaaaatagattaatatttgatggttatccaagaaatctgaatcaagcagtaaatttagataaattactaaaacaatataatcaaaaaattgatttagtactcgtattgtcagttagtttaaatactatcaaaaaaagaataatggaaagaaaaacgctagaaaaaagatccgatgacaatgaagatgttgcagtgaagagatacgatacatatgaaagcaatataaaaccagtattggatttttacaaaaaatcaaatttaatcaaagtagtaaatggcgagacctcaatatccagaattaatgatgaaataagcgatttaattgggactatctag

SEQ ID NO: 251170 - DNA, 503 bp, Unknown
  Bacterial polypeptide expressing nucleotide sequence isolated from the Sargasso Sea
aatggtaagcgtaatcatttttttaggatctcctggttctggcaaaggtactcaagcgtctaaactttcagatgcatttggatatgaacacatttctataggagatatgttgaggaaaaatgtcgaagaaaaatctgacctaggcttgaaggcttctgagtttattgattcaggcagattggttcccgatgaacttatcatagaagtagtcagttcattttttggagactttgtctcaaataaagaaggtagggttatattggatggattcccaagaactgagcctcaagcatttgcattagagaaaattattagagaattacgtattaacctttcttcggttctatatcttgatgtggatgacgatgaagtgatttctagactatctgagagaggtcgtaaagatgatgagcctgaattagtccttaacagacttaatgtatacagagatcaaactgagcctttgcttaaatattataatgatcagggtgttttaaaagaaa

SEQ ID NO: 251171 - DNA, 842 bp, Unknown
  Bacterial polypeptide expressing nucleotide sequence isolated from the Sargasso Sea
aattattgacagagtgcccaatgtttatgatacgccaaatgcttcagagcttactatcggagaaggaactctaaaatttgaaaacgtaagtttcagttttactaaagataacagaaaagttgaggtgctaaggaatattaatttttcagtcggtgctggagaaacactcgggattgtaggccctcccggttcaggaaaatcaaccgtagcccagctcgcaccacgtttttatgatgtagatagcggaacaatctacataaatgaccaggatattcgagaaatctcaatagagtcattgcggcgttttgtatgcgtgattcagcaagactcttttttatttacggcttcaatcgaaaataatacagcatacggaaacccctgggttgatgatgatgaaattttaagcgcaaatcaggctgcgcaatttcatgaacatatcgaccaacttccactgaaatacaagacacttgtaggtgagcgaggcgtatcgttatcaggggggcagcgccaaaggctctcgattgcacggggactagttaccgaaccagcgataatcatctttgacgattctaccgcttcaattgatgctgtaaccgaacgcctcattaggaaaaacctggatgaaagtcgccatactagaggcacaattataatttcgcacaggttaacttcgttgatgcacgcaaaagaaattttatttgttgataagggggaaattatagagaggggttctcataaacaacttatttctctaaaggggaaatactttgaattgtaccaacttcaaactcgttccggctcgaatggtgttcctttgaaaaagggggggggtgattattgaa

SEQ ID NO: 251172 - DNA, 553 bp, Unknown
  Bacterial polypeptide expressing nucleotide sequence isolated from the Sargasso Sea
tctgattggaccacctggatcaggaaaaggtactcaagctaaatttctagtagaaaaactaaataattttcaaatttctacaggaaatatgcttagagaagaaattaaaaataattcagaaatcggtaaaaaaattataaataatatgaatgatggaaaatatgttgaagatgaaatagttaataaacttcttgaaaaagtaatatttgattcacaaaaaaaaaataaactgatttttgatggttatccaagaactttaaatcaagctaaaaatttaaaaaatctattgcataaatccagtcaaaaacttgactatatcttttttcttaatgtgaataaagaaactataataaaaagaattgagaaaagaaaaattttagaaaaaagatcagatgacgatgctaatatcattctcaaaagatatgatagatacatggaaattaccaaacctgtgttagattattattcaataaacgctaattttcatgaagtagatggatcaatgaaaattagtgaaatttcaagtaaaattgacgaaatagttagtgaatga

SEQ ID NO: 251173 - DNA, 100 bp, Unknown
  Bacterial polypeptide expressing nucleotide sequence isolated from the Sargasso Sea
aatgaaattaatattattcggacctccaggttctggaaaaggtacgcaagcttcattaatagccaaaaaaatcaacataccacattttgtcaccggagat

SEQ ID NO: 251174 - DNA, 643 bp, Unknown
  Bacterial polypeptide expressing nucleotide sequence isolated from the Sargasso Sea
tatgaggttaattttgatgggagctcccggttctggaaaggggactcaggcagaaaagctcatggatgactttggttgtcgccaaatatcgacaggtgtattactcagacaagccattgaatctggctctgaacttggcaaaaaggtacaaaagatcatgtctaagggtttgcttgtttctgacgatatcgttttggatttaatcaagaatgagttatccgaaatagttgagagtagattccttttagatgggtatccaagaaacatcaatcaagcaaaatcattgaatgatctacttgaaaatatagataaaccattggattacagcatattgattgatgtaccgagtgaaattttaattaaaagactgtctggaagaaggacatgctcattaacaggcaagactttgaatatttacttttcctcagaaaatgaaatagatgaatgcctttctaaaggtggtgaattgctacagcgagaggatgataacgaggagtcaattacgaaaagaattgaagtatacgaagagcagacagagccgatggttgatttttatagatcaacagggcttcttcatacaattgatggtcaaggttctgttgatgatgtttatattaggttaaagaaactgatggaattatga

SEQ ID NO: 251175 - DNA, 643 bp, Unknown
  Bacterial polypeptide expressing nucleotide sequence isolated from the Sargasso Sea
atgaggctaattttaatgggtgctcccggttctggaaaaggaacgcaagctgaaaaactcatggatgagtataattgtcgccaaatttcaacgggtgttttgctcagagaagccattgaatcaggttctgagcttggccaggaagttcaaaaaatcatgtctgaggggttgcttgtttccgacggcattgttttagatttaattaagaatgaattatccaaaatcggtgagaatagttttctcttggatggttatccaagaaatattacacaggcaaaatcattggatgatttgctctcaaatctaaacaagccattggattacactatattgattgacgttccaagcgagattctaattaagagactgtctggtagaagaacttgttcgcttacaggaaagacattaaatatttacttttcatctgaaaccgagatcgatgaatgcctctctaaaggaggggagttactccagcgggaagatgacaatgagcagtcaattactaaaagaatagaggtttatggtcaacagacagaacccatgattgattattataaatcagcagggcttcttgaaacgattgatggccaagggtctattaacgatgtttacggaaggctaaaaaaattgatggaattatagt

SEQ ID NO: 251176 - DNA, 292 bp, Unknown
  Bacterial polypeptide expressing nucleotide sequence isolated from the Sargasso Sea
atgaaattattaattatggggcctccaggtgttgggaaaggaacccaagcagaaatattaaaaactgaattcaatattgcacatctttctactggagcaatacttcgcaaagagattgctagaaaaagtgaagttgggatcattgctaaacaccatattgataagggccagttagtcccagataaagtgttattaaatattattcgtgatagaattgttatgtcagattgtagcaatggatatttgcttgatggattcccaagaacaatagaacaggcaattggtcttgaaa

SEQ ID NO: 251177 - DNA, 562 bp, Unknown
  Bacterial polypeptide expressing nucleotide sequence isolated from the Sargasso Sea
tatgaatttattaattatgggtcctcctggagttgggaaaggtacccaagcaaaaataataaaaaatgagctgaagatagcacatctttcaacaggcgaaattctacgtaaagaaatagaaatggggactaaagttgggcttatagcaaaggattatatagataaaggacagttagtccccgatcaaatattgttagatatcattaatgataggattgttttacccgactgtaagaatggatatctactagatggtttcccaagaacactagggcaagcaaacgggcttgaaaaaataatgaaatctttgaagcattctctggatatggcaattagcttaactgcagatgaggatgaattaataaataggctcataaaacgtggacgtaagtcaggtaggaccgatgatactcctgaagttataagaaaacgccaaaaaatttattgggtccaaactgcacaaatattagacttttatcaaaataaaaacttgctgaaaaatattgatggtctgggtgaaataaatgaaataacaaatagaatattagcagtattgaaataa

SEQ ID NO: 251178 - DNA, 631 bp, Unknown
  Bacterial polypeptide expressing nucleotide sequence isolated from the Sargasso Sea
atgacagcccatgacatggctaaagtgatatttgagggcataaaatctctcaaaccgaaagaagatcggactctaattgcgattgcgggccctccaggctcagggaagtctacagttgcagaaatagtcacagatttaatgaatgaaaatcttatgaaaacgagccttgtacccatggacggttttcatttggataacaaaattttggagagaaaaaacttatttgatcgtaaaggcgctccggagacttttgacgtaaaaggtttcatagaattaattaaaaagttgcgttataaaaggaattcaagcgtaccgctttttgatcgcacattagatgaagttgttaacaatgctcgaaaaatttcgagtgaacaagagtatatagtaatagaaggtaactatcttttgctagacaaagatctttggcgagaccttcatgtttattgggattacaaggttttcctgtcagttgataacaatgttttaaaatcaagattgattgagaggtggctaggtgaaaatcatacttactcagaagctgagacaagagttataaaaaatgacttagtaaatgccgacgtggtaaactcaaatagattagaagccacattagaactccaaactggatagc

SEQ ID NO: 251179 - DNA, 382 bp, Unknown
  Bacterial polypeptide expressing nucleotide sequence isolated from the Sargasso Sea
atgaatttagttatttttggtccaccaggagcaggcaaaggaactcaatcaggttatatcgctaaaaaatttaaattatttcagctttctactggggaattattaagaaatgaaatcaaaaacaatacaaacttaggtaaacaaatttcatcaataatgaactcaggaaatttagtttctaatgaattagttagtaatttaattgaaaaatatttatcagataaaacttatcaaaataaaattatttttgatggctatccaaggaatttaattcaggcacaaactctaaatgactcattgattaaatataatcaaaaaattcatatagctttaagattaactgtaagtcttgatacgataataaaaagaattaaagagagaa

SEQ ID NO: 251180 - DNA, 289 bp, Unknown
  Bacterial polypeptide expressing nucleotide sequence isolated from the Sargasso Sea
tatgaggctaattttaatgggcgctcccggttctggaaaaggaacgcaagctgaaaaactcatggatgagtataattgtcgccaaatttcaacgggtgtgttgctcagagaagccattgaatcaggttctgagcttggccaggaagttcaaaaaatcatgtctgaggggttgcttgtttctgacggcattgttttagatttaattaagtatgaattatccaaaatcggtgagaatagttttctcttggatggttatccgagaaatatttcacaggcaaaatcattggat

SEQ ID NO: 251181 - DNA, 565 bp, Unknown
  Bacterial polypeptide expressing nucleotide sequence isolated from the Sargasso Sea
aacatagttatttttggaccccctggagcaggtaaaggaacacaatctaaatttattgtagaaaaatttaatatgtttcagctttcaactggtgaatttttaagaaaagaaatttcaaacaacacagaactaggaaaaaaaatttcttcagttataaattctggtgcactcgtatctgatttaattgtgtcagatttaattgaaaaaattgtttctaacaaagaataccaaaacagaattatatttgatggttatccacgaaacctaaatcaagcaaaaaatttagataatttattgaaaaagtataaacaaaaaatagatgtcgttttaaaattatctgtaaaattaaaaacaataaaaaaaagaatttcagaaagaaaaaatttagaaaaaagaactgatgatgacgagaaaatagctataaaaagatttgaaacttatgaaaaatctaccgaacctgtaattgaatattataaaaaattgaatttattaaaggtagtagacggagagagacctatagatcaaataagcaatgaaattagcgatataatttcccctatatagg

SEQ ID NO: 251182 - DNA, 565 bp, Unknown
  Bacterial polypeptide expressing nucleotide sequence isolated from the Sargasso Sea
atgaatttaattttatttggacctcctggttctggaaaaggaactcaagcaaaaaatttggaaaaaaaattaaataattttcaaatatcaactggtgaaatgctcagagatgaaattaaaaaagatacagaaataggaaaaaagataataaataatatgaatgaaggaaagtttgttaatgatgaaattgttaataagcttatgaaaaaagtaatatttgatccacaaaaaaaagataagttgatttttgatggatatccaagaactctagaacaagcaaaaaatttggatttattgttaactgactcaaaccaaaaaattgattttattttttttctcaatgtaaataaagagacaataataaaaagaattgagaaaagaaaaattttagaaaaaagatctgacgatgatgcaaatactattttaaaaagatacgatacttacatggaaattacaaagccggtacttgattattactcaaaaaacctaaattttcatgaagttgatggatccatggaaatcaacgatatttctcttaaaattcagcaaattcttactttataac

SEQ ID NO: 251183 - DNA, 256 bp, Unknown
  Bacterial polypeptide expressing nucleotide sequence isolated from the Sargasso Sea
atgagagtaattttttttggtcctccagggtcaggaaaagggactcaggccaaactagttgctgataaatataaaataacacatatttctactggtcatattttaagagaaaaattaaatgatgaagatgagttatcattaaagttaagagatattatttcatcaggtaatttagtagttgatgatatactaaacaaaattatagctcaaaaattattaaataatgaatgtaaaagtggttttatattagatggtt

SEQ ID NO: 251184 - DNA, 483 bp, Unknown
  Bacterial polypeptide expressing nucleotide sequence isolated from the Sargasso Sea
aatgaacttagttatttttggaccacctggcgcaggtaaaggaacgcaatctaagtttattgtagaaaagtttaatatgtttcagctctctacaggagaatttttaaggaaagaaatttcaaataatacaaaattaggaaaaaaaatttctacagttataaattcaggtgagctagtttctgatataattgtttctgatttaatagaaaaaattatttcggatagtaagtatcaaaacagaattgtatttgatggttacccaaggaacttaaatcaagcaaaaaatttagataatttgttaaagaaatataagcaaaaaatagatgttgttttaaaattatcagtaagcttagaaacaattaagaaaagaatttcagaaagacgtgatttagagaaaagatctgatgataacgaggaaatagcaatcagaagattcgaaacttatgaaaaatcaaccaaacctgtaattgaatattataaaaa

SEQ ID NO: 251185 - DNA, 126 bp, Unknown
  Bacterial polypeptide expressing nucleotide sequence isolated from the Sargasso Sea
aatgaatttaattttactgggaccaccaggagcaggaaaaggcacacagtctgatttcatttcaaataaatttaatttaaaacaaatatcaactggaaatttacttagagaagaaataaaaaaaaa

SEQ ID NO: 251186 - DNA, 271 bp, Unknown
  Bacterial polypeptide expressing nucleotide sequence isolated from the Sargasso Sea
atgcggataatcctgattggaccaccgggggcagggaagggaacgcaatgcgagagactcgtcaactttcttcgagtgccgcacctttcgacaggtgagatgctacgagccgccattgcacagaaaacagctgagggaaaagaggcctctttctacatgcaggcgggccagttggtcccggatcagctcgtacttggattagtaacgcgccgactgaaggaccaggattgccggggaggctgccttcttgatgggttcccgagaaccaaat

SEQ ID NO: 251187 - DNA, 184 bp, Unknown
  Bacterial polypeptide expressing nucleotide sequence isolated from the Sargasso Sea
tatgtcgaaagcatcattttcagaaaacgctaatattagcaatcaactcataaacagagaattatcttggcttcagtttaatgatcgtgttttagaagagtcaaaagataaaacaaatcctctatttgaaagagtaaaatttttatcaatcgcaggtacaaatttagatgaattttttatggta

SEQ ID NO: 251188 - DNA, 775 bp, Unknown
  Bacterial polypeptide expressing nucleotide sequence isolated from the Sargasso Sea
gcattatcatcctgtaaatgctaaaatttatactgatttgtctttatttagttgtgataagaaaatggcatcagatgttgaaaagtttttcaattatgtaacaggatacgcaaaaccaaaaaatttaaataaaatttctatttcaccagtaaatatgaggcaaaccttaaatgaaaatattgatgctgaaattaaaaattctaaaaatggaaaatttgcagctatttgggcaaaaatgaactctttagtagatccagaaattattgataaattttatgaagcttcgaatgctggtgtaaaaattcatttatttgtaaggggtgtttgttgtttaagaccaggagttaaagatagatcagaaaacatagttgtgaaaagtatcataggaagatttttagagcattctagaatttactgctttagtaatggtataaaaaaaatgcctaatagaaatgcaaaagtatatatttcttcagccgatttaatgccgagaaatttaaatagaagagtagaacttctagtgccaattgaaaatgaaactgttcatgagcaaattttagatcaaataatgttagcaaattatcttgatactagtcagagctgggagctcaatgctgatggtaattataaaaaaattaaatatagtaagaacgattccttttcagctcatgaatattttatgaataatccgagcttatctggaagaggtaaagctaaactaaaaatgcagcctaaacaactgcacttaagattgattaaaagtggaagtaattaa

SEQ ID NO: 251189 - DNA, 749 bp, Unknown
  Bacterial polypeptide expressing nucleotide sequence isolated from the Sargasso Sea
ttatactgatttgtctttattcagttgtaataaaaaaatgtcatcagatgttgagaaattttttaattatgtaacaggatacgcaaaaccaaaaaatttaaataaaatttctatttcgccagtaaatatgaggcaaaccttaaatgaaaatattgatgctgaaattaaaaattctaaaaatggaaaatttgcagctatttgggcaaaaatgaactcattagtagatccagaaattatcgataaattttatgaggcttcgaatgctggtgtaaaaattcatttatttgttaggggtgtttgttgtttaagaccaggagttaaagatagatcagaaaacatagttgtaaaaagtatcataggaagatttttagagcattctagaatttattgttttagcaatggttcaaaaaaaatgcctaatagaaatgcaaaagtatatatttcttcagctgatttaatgccaagaaatttaaatagaagagtagaacttctagtgccaattgaaaatgaaactgttcatgaacagattttagatcaaataatgttagcaaattatcttgatactaatcagagctgggagctcaatgctgatggtaattataaaaaaattaaatatagtaagatcgattccttttcagctcatgaatattttatgaataatccgagcttatctggaagaggtaaagctaaactaaaaatgcagcctaaacaactgcacttaaaattgattaacagtggaagtaattaaa

SEQ ID NO: 251190 - DNA, 663 bp, Unknown
  Bacterial polypeptide expressing nucleotide sequence isolated from the Sargasso Sea
aatttttcaattatgtaactggttatgcaaaaccaaaaaaattgaataaaatttttatgtctccattaaatagcaggaatttttttgaagaaaaaattgaaaatgaaattgtaaatgcaaataaaggaaaacctgcagaaatatgggcaaaaatgaattctcttgtagaccctggaattattaagaaattttacgaagcttcaaacgcaggggtaaaaataaatttatcagtaagaggagtatgttgcttaagacctggaattaaaggtcaatctgaaaatataaaagtaaaaagccttattggcagatttttagaacactcaagaatttattgttttgcaaatggtagttctatgccctctcgagagaatcaggtatatatttcatctgcagatttaatgcctagaaatttagatagaagaattgaaattataatcccgatagaaaacaatactgtgcatgaacaaattttagatcaaattatgttagccaactttaaagataaatcagaaacatggtatttagatagcttaggaaactatcataaagaacaagagaaaggcttttccgcacattcctatttcatgaagaacccaagtttatcaggtcgtggtaagtcaattttaagagctaaacctcaaaatttaagattagtaaaatgaa

SEQ ID NO: 251191 - DNA, 844 bp, Unknown
  Bacterial polypeptide expressing nucleotide sequence isolated from the Sargasso Sea
ttttttgagttttgtgacattcaggcgttttcgttaaaactcaccaaagacgccgaatacaatttaagtgatacgctggatcaaagtctgctggataaaatgtccagaggtattcgccagcggctggaatctgagccggtgcggctggtatatgacgccactatgccggaacatatgctgaaaattctgaaaaagcagcttggagccagttcttttgactcactgatcccgggttcacgctaccgcaattttaaagactttatcagcttcccgaatattggccacgccagtctggaatatccaccactgccgcctttgccaagcccggattttgagcagcacactaccacttttgatgccatccgcagtaacgatgtgttgttgcattacccttatcacaactttacctattttactgagtgggtacggcaagcgtcttttgaccctaaagtcaccgccatcaaaatgaccatgtaccgggtggcaaaaaactcccgtgttattcattcgttgctggatgcagtacgcaacggcaaaaaagtcacagtagtggttgagctcaaagcccgttttgatgaagaaaacaatatccactgggccagacgcatgacgcaggccggtattcaggtggtgtttggcctcaccaccttaaaaattcactccaaactttgtttaatcagccggcaggaaaaaggcaaagtggtgaaatacgcccatatcggcaccggcaactttaatgaaaaaaccgcccgaatttataccgatatgagtttattcacctgtcatccggaagtgtgtgatgaagtggatcaagtgtttgagtttattgaatacagctacaaac

SEQ ID NO: 251192 - DNA, 669 bp, Unknown
  Bacterial polypeptide expressing nucleotide sequence isolated from the Sargasso Sea
acataacgggttatgcaaaaccgcttgaaatggaaaagatttttatagcgcctttaagcttacgctctaatttacaaaagtttatcgaacgggaaatagagttcgcgaaagttgggaggccggcaaatatttgggcaaaaatgaatgcgcttgttgatcccgaaatcatagacttattatataaggcgtctgatgccggggtatatatcgacttaattattaggggtatgtgctgtttaagaccaaatttggaaggtctatcggaaaatatcagggtgcgtagcattgtggggcgttttttagagcattctagaattatttgttttggtaatggcgatcatttgccctcaaagtctgcagaaatttttatctcttcagcagattggatgggaagaaatttagatagaagactggaacactttgttccaattgagaatcctactgttagacgacaagttttagatgaaattatggttgcaaacttaaaggacgaaagaaattcctggttacttgactctaacgggacttatcatcgaattgtggtaagcgatgaacctttttcagctcacaaatattttatgactaatcccagtctttctggaatgggtagtgctcttgaaaaaatatcgccagaaaatttgatttcgttggataatagaaaagaataac

SEQ ID NO: 251193 - DNA, 520 bp, Unknown
  Bacterial polypeptide expressing nucleotide sequence isolated from the Sargasso Sea
atacggcgtgaaatcgaacatgccagggaaggtcgggaaggtcacatcagagccaagatgaattccttggtggatccggacatcatcgcgttgttgtacgaagctgcagcagcgaatgtgcgggttgaactgatcatccggggcatgtgcagcctctacccaggccgagaaggactgagtgaaagcatcagcgttgtgagcatcatcggccagttcctcgaacactcgcgcattttctggttcggaaacggtggctcacctgaggtgtacatcggaagcgcagactggatgagtcgcaaccttgatcgccgggtggaagctgtgacacccgtggaagatgccaaccttcgaggccgactggagcgcttgctggagctctacctgaaggacaaccggggcgcctgggacatgcaaagcgatggcagctttatccaacggcaaccagaggacggaggggacgttcgcaactctcaagttcaactgatcaagcaatggagccaaggcgtgccgcaatcgtgat

SEQ ID NO: 251194 - DNA, 553 bp, Unknown
  Bacterial polypeptide expressing nucleotide sequence isolated from the Sargasso Sea
ggcgccggtccgctgcgctctggcacagaagcattgatccgccgcgaaatcgaacacgccaatgccggccgcggtggccacatcattgcaaagatgaattctttggtggatccaggggtcattgccctgctgtacgaggcctcccgcgccggcgtgaaaatcgagctggtgatccgggggatctgctgcttgatccccggcctacctaaccacagcaaaacagtaagtgtgatcagcatcatcggccgtttcctggagcactcccgcatcttctggtttggtaatgccggagcatcggaggtcttcatcggcagcgccgactggatgggccgaaaccttgaccgacgcgtggaagccgtcaccccaatcgaggatccaatgcttagagagaggattgagcaaatgctgcgtacctatctcgatgacaaccgtggcgcctgggagatgcagagcgatggccacttcatgcagcggcaaccaaacgacggtgaacgcaattctcaactgcaactcatgtacgactggcgcgcagtacaaggccaacctgtgtgat

SEQ ID NO: 251195 - DNA, 742 bp, Unknown
  Bacterial polypeptide expressing nucleotide sequence isolated from the Sargasso Sea
ggaaggcatggcggtcgagcaggaggacgtctaccaaatcagtggaccactggggctcgacgacctgtttgccctcaccggagtgccgctgccgaagttcaaagaccagccccaaaaggcgcgcattgcagcgccgttggcgcgcgcacagaaagccttgctggccgatggctcgatcccagaagaggagtttgaaagcatctttgctgtgctcaaacgcggcgatgttctgctgcatcacccctatgacctgttctcctcatcggttgaggaattaatcaatcaatcggccgatgatcctgatgtgctcggcatcaaaatgaccctgtaccgagtctcaaaagactcggccgtgatcagttcattaatccgcgccgctgagaatggaaaacaggtgatggccctggtggagctcaaggcccgtttcgacgaagaaaacaacatccaatgggcccgccagcttgaaaatgccggtgtgcatgtggtgtacggggtcatcgggctcaaaacccacaccaaaatcactctggtgttgcgacgcgaaaaagaagagttgcgctcctacgtgcacatcggcaccggcaactacaactcgaaaacgtcacgtttgtacaccgatcttggtttgctcagtgccaggcctgaattggggcaagacctggtggagttgttcaactacctcaccggtttctccaagcagcagacgttccgcaaactgctcgttgctcccgtcagcctgcgc

SEQ ID NO: 251196 - DNA, 783 bp, Unknown
  Bacterial polypeptide expressing nucleotide sequence isolated from the Sargasso Sea
tcagcaattgatcctgcgcacccatttccatttataatcaatcaaggaagagcaatcgtaatgaagttaagaaaaaaaaataaaaaaaggattttaaactcaataattgtaataccaaaagcattatctagatttattgaaatagagtcttcaaaaaatcataagaagtttgttattctagatgacgtaataagtttttttgctaatgaaatttttccagatcatgatttagaaaagagaatgatttttagagtaataagagacagcgatgtagagattcaagaggaagcagaagatttagttagatcttttgaattggctttaaaaagacgtagaacgggtgatattgttcgtttagaggttcttgaaaatagcgataacgaattggtaagatttataactaataaattagatataaatcctgactatatttatgatgtatctggccttgttggaattcaagatatagatcaaatatgtaaagtaaaaaatccaaaactaagatttaagcattttacgcctagagaagttgaaagattaaaagaatataatgataatttttttgaaactattaaaaagaaagatttagttgttcatcatccttttgaaacatttgactcagtaattgaatttttaaatcaagcagcaaatgataaaaaagttatagctattaaacaaactttatatagaacaactctagactcaccaattgttaaagctttaataacagctgcagagaatggaaaaacagttactgctttaattgaaattaaagctagattt

SEQ ID NO: 251197 - DNA, 681 bp, Unknown
  Bacterial polypeptide expressing nucleotide sequence isolated from the Sargasso Sea
attgaaatattccaaggacctaggtgctatcaatccccttataaatcgagagctttcttggatttcgtttaattggcgggttttgcaagaagctaataataaaaaagtgccactatttgaaagacttagattccttgcaatatctgctcgaaatcttgatgagttttacacggttcgagttgccgggtttagacaaatggtaaaaaataagatcgaagtaataagtgctgatggtctcacgcctgaggagcagctaatacaaatagaacgagaagctaaagctctaatagagaaacaacaagagctattgccctctatattatctcatttgaagcaaaaaggggtggtacttgtaaaaccgaagggaatattggtatccgaaaaaaagaatttagagaaacaatttatgtcaaaggtctttccagcgcttaccccgttggctctagatcccgctcatccatttcccttcatcccgactgagggctctgccctagcattaaaattaagaacgagagatggaaaaaaattcttgaatgccttggttcctattccaggcatgcttgaccgatttcaaagacttagggatgggagtaaaggtgaaaaaagatttttatcactcgaagatttcattgtaatttttatttatagattatttccaaattatcttctcgatgagtattt

SEQ ID NO: 251198 - DNA, 613 bp, Unknown
  Bacterial polypeptide expressing nucleotide sequence isolated from the Sargasso Sea
aatacaatcggaaatgaaataggcgaactcttcaattcattgaccgcttacggaaaacaaagagaatttcagaacctgctagtcgctcccttccagttaagagaaaggatgaaagaactcataaagaatgaaatctcatatggtgaagctggtcatatcagaatgaaaatgaatgccttggtggatgaagaactaatagatctcttatatcaagcagcatatgaaggcacaaaagttgatctacaaattagaggtatttgttgcttaacattacgtaatgaaaaaatcgctgaacgtatatccgttcgctcggtactaggaagatttctagaacattctcggctatattggttcgccaatgggaaaggccccgatgaatcttcctgttatattggctcggctgatctcatgcctagaaatctaaaccggcgagtagaagttctggcgcctgtgaatgacgaaataatttcaaaccaacttatagagatttttgaacacggctttaatgatcgacatttatcttgggatttagacttgtacgggaattgggttaaaaacggaacagatccaacgtcgagttctcaaaatatagaaatcaataaatcccgctaag

SEQ ID NO: 251199 - DNA, 928 bp, Unknown
  Bacterial polypeptide expressing nucleotide sequence isolated from the Sargasso Sea
tctgatggtttgacacctgaagagcaaatggatgaggtagtgcttgaaactaagaatctattaaaaaaacagaacaaaatttttattcaactgattaaggaattaaaaaaaaataatatcagtttagttaaaccagttaatttaaatactaaggataaaaaaaaacttctagaaatatttaaagaagagatttaccctttattaacgccatcagcaattgatcctgcacacccatttccttttataatcaatcaaggaagagcaattgcaatgaagttaagaaaaaaaaataaaaaaaggattttaaactcaataattgtaataccaaaagtattatctagatttattgaaatagagtcttctaaaaatcataagaagtttgttattctagatgacgtaataagtttttttgctaatgaaatttttccagatcatgatttagaaaataaaatgatttttagagtaataagagacagcgatgtagagattcaagaggaagcagaagatttagttagatcttttgaattggctttaaaaagacgtagaacgggtgatattgttcgtttagaggttcttgaaaatagcgataacgaattggtaagatttataactaataaattagatataaatcctgactatatttatgatgtatctggccttgttggaattcaagatatagatcaaatatgtaaagtaaaaaatccaaaattaagatttaagcattttacgcctagagaagttgaaagattaaaagaatataatgataatttttttgaaactattaaaaagaaagatttagttgttcatcatccttttgaaacatttgactcagtaattgaatttttaaaccaagcagcaaatgataaaaaagttatagctattaaacaaactttatatagaacaactctagactcaccaattggttaaa

SEQ ID NO: 251200 - DNA, 490 bp, Unknown
  Bacterial polypeptide expressing nucleotide sequence isolated from the Sargasso Sea
aatgcttggtgtaaaagttcatttatttgtaaggggtgtttgttgtttaagaccaggagtaaaagatagatcagaaaacatatttgtaaaaagtatcataggaagatttttagagcattctagaatttactgctttagtaatggtacaaaaaaaatgcctaatagaaatgcaaaagtatatatttcgtcagctgatttaatgccgagaaatttaaatcgaagggtagaacttctagtcccaattgaaaatgagactgttcatgaacagatcttagatcaaataatgttggcaaattatcttgatactaatcagagctgggaacttgaagctgatggtaattataaaaaaattaaatatagtaagagcgattccttttcagctcatgaatattttatgaataatccgagcttatctggaagaggtaaagctaaactaagaatgcagcctaaacaactgcacttaagattgattaaaagtggaagtaattaa

SEQ ID NO: 251201 - DNA, 682 bp, Unknown
  Bacterial polypeptide expressing nucleotide sequence isolated from the Sargasso Sea
acttggccaagatgttgaaaaatttttcaattatgtaactggttatgcaaaacccaaaaaattgaataaaatttttatgtctccattaaatagtaggaatttttttgaagaaaaaattgaaaatgaaattgtaaatgcaagtaaaggaaaacctgcagaaatatgggcaaaaatgaattctcttgtagaccctggaattattaagaaattttatgaagcttcaaacgcaggagtaaaaataaatttatcagtaagaggagtatgttgcttaagacctggaattaaaggtcaatctgaaaatataaaagtaaaaagccttattggcagatttttagaacactcaagaatttattgttttgcaaatggtagctctatgccctctcgagagaatcagttatatatttcatctgcagatttaatgcctagaaatttagatagaagaattgaaattataattccgatagaaaacaacaccgtgcatgagcaaattttagatcaaattatgttagccaactttaaagataaatcagaaacatggtatttagatagcttaggaaactatcataaagaacaagaaaaaggcttttccgcacattcctatttcatgaagaacccaagtttatcaggtcgtggtaagtcaattttaagagttaaacctcaaaatttaagattagtaaaatga

SEQ ID NO: 251202 - DNA, 607 bp, Unknown
  Bacterial polypeptide expressing nucleotide sequence isolated from the Sargasso Sea
gtaaaatcaattaaaataactttatataggctctctaggcaatccaatgtaattagttcattaattaatgcagcaaaaaatggaaaaaaagttctagttcaaattgaattacaagctagatttgatgaagaaaataatattaaagtatcccagcaactaaaagctgctggtattgatttaatttttggtgtaaaaggtttaaaagttcactccaaaatttgtttgattgaaagaattgaaaataataagaaaagattatacggttttgtaagtactggaaattttaatgagactacagcaagagtatactctgactttactttatttacatcaaatcaaaaaattctaaaagaggttagcaaagtatttgattttctccaggttagctataaaatacatgattataaacacttaattgtttctcctcatcatactacaaacaaaatatttaagctaattgataatgagatagataatgcaaaaaaaggcatttactcagaaatcattctgaaactaaatagtttcaccagttataaattagttgacaagttatatgaagctagtcaatatggtgtaaaaaagatattgttaattagaggaatatgtt

SEQ ID NO: 251203 - DNA, 663 bp, Unknown
  Bacterial polypeptide expressing nucleotide sequence isolated from the Sargasso Sea
aaattttcaattatgtaactggttatgcaaaacccaaaaaattgaataaaatttttatgtctccattaaatagtaggaatttttttgaagaaaaaattgaaaatgaaattgtaaatgcaagtaaaggaaaacctgcagaaatatgggcaaaaatgaattctcttgtagaccctggaattattaagaaattttatgaagcttcaaacgcaggagtaaaaataaatttatcagtaagaggagtatgttgcttaagacctggaattaaaggtcaatctgaaaatataaaagtaaaaagccttattggcagatttttagaacactcaagaatttattgttttgcaaatggtagctctatgccctctcgagagaatcagttatatatttcatctgcagatttaatgcctagaaatttagatagaagaattgaaattataattccgatagaaaacaataccgtgcatgagcaaattttagatcaaattatgttagccaactttaaagataaatcagaaacatggtatttagatagcttaggaaactatcataaagaacaagaaaaaggcttttccgcacattcctatttcatgaagaacccaagtttatctggtcgtggtaagtcaattttaagagctaaacctcaaaatttaagattagtaaaatgaa

SEQ ID NO: 251204 - DNA, 909 bp, Unknown
  Bacterial polypeptide expressing nucleotide sequence isolated from the Sargasso Sea
aatggatgaggtagtgcttgaaactaagaatctattaaaaaaacagaacaaaatttttattcaactgattatggaattaaaaaaaaataatatcagtttagttaaaccagttaatttaaatactaaggataaaaaaaaacttctagaaatatttaaagaagagatttaccctttattaacgccatcagcaattgatcctgcacatccatttccttttataatcaatcaaggaagagcaattgtaatgaagttaagaaaaaaaaataaaaaaaggattttaaactcaataattgtaataccaaaagcattatctagatttattgaaatagagtcttcaaaaaatcataagaagtttgttattctagatgacgtaataaatttttttgctaatgaaatttttccagatcatgatttagaaaagaaaatgatttttagagtaataagagacagcgatgtagagattcaagaggaagcagaagatttagttagatcttttgaattggctttaaaaagacgtagaacgggtgatattgttcgtttagaggttcttgaaaatagcgataacgaattggtaagatttataactaataaattagatataaatcctgactatatttatgatgtatctggccttgttggaattcaagatatagatcaaatatgtaaagtaaaaaatccaaaattaagatttaagcattttacgcctagagaagttgaaagattaaaagaatataatgataatttttttgaaactattaaaaagaaagatttagttgttcatcatccttttgaaacatttgactcagtaattgaatttttaaaccaagcagcaaatgataaaaaagttttagctattaaacaaactttatatagaacaactctagactcaccaattgttaaagctttaat

SEQ ID NO: 251205 - DNA, 556 bp, Unknown
  Bacterial polypeptide expressing nucleotide sequence isolated from the Sargasso Sea
tgccgcgagtttgtttaattacatgacctgtaccgcgcggccgaccaagatggagaaactggcctattcgccggtcacgcttcgtaaaaggcttcttaagctaatcgatgaggaaatatctcacgccaaagagggcaaaccagcggcaatctgggcaaagatgaatgccattgtcgatggtgacataatcgatgctctctacaaggcttcccaggcaggcgttcagatcgaccttgtcgtgcgtggcatctgttgtttgcggcccggtataaaaggactgtcagaaaatattcatgtcaaatcgattgttggacggttcctggaacatggccgtattttttgtgctggtgctggccatggattgccgcatgacaaggcaaaagtgtttatatcttcagccgaccttatgccgcgcaatctggatcgtcgggtcgaaacactggtccccattgagaaccctacagtgcaccgccagatactcaatcaaatcatgattgcgaacttaaaagacaacgagcaaagctgggagatggatgctaggggcgcttatcataga

SEQ ID NO: 251206 - DNA, 301 bp, Unknown
  Bacterial polypeptide expressing nucleotide sequence isolated from the Sargasso Sea
aaaatatctatatcaccaattaatcttagggaaactttaaacaaatgtattgctaacgagatagcaaatgtcaaaaaaggtaaaaaaggtgaaatatgggccaaaatgaattccttagtagatccagcgataattgataaattttacgaagcttcaaatgctggagtaaagatatttttatttgtaagaggtgtttgttgtttaagacctggagttaaagataaatctgaaaatataatagttaaaagcatgattggaagatttttggaacattcaagaatttattgttttgcaaatggaa

SEQ ID NO: 251207 - DNA, 841 bp, Unknown
  Bacterial polypeptide expressing nucleotide sequence isolated from the Sargasso Sea
gcggtcgagcaagaggacctgtaccgaatcagcggaccgctcggactcgatgacctattcgcactcaccggtgtcccgctaccgcagttaaaagaccaacctcaaaaagcccggatcgctgcaccactggctcgcgcgcagaaagccctgctggctgatggatccatcccagaagaggagttcgagagcatctttgatgtcctcaaacgcggtgatgtgctgctgcatcacccctatgacctgttctcctcatcagtggaggaattgatcaatcaggctgccgaagaccccgatgtgctcggcatcaaaatgactctctatcgagtctcaaaagactcagcagtgatcagttcattgatccgagctgcagagaatggaaagcaggtcatggccttggtggaactcaaggcccgtttcgacgaagaaaacaacattcaatgggctcgccagctggaaaatgctggggtccatgtggtgtacggggttattggcctcaagacccacaccaaaatcaccctggtgttaagacgcgaaaaagaagagttgcgctcttacgtgcatatcggcaccggcaattacaactcaaaaacttcacgcttgtacacagatctcggactgctgagtgcacgacccgaactgggggaagacctcgtggagttgttcaactacctgacgggtttctccaagcaacaaaccttccgcaaactcctggttgcaccggtgagcctgcgctccgggatggaggcattaatccgccgcgagattgaccatgccaaagcaggccgcggcggtcacatcatcgccaagatgaattcactggtggacccgcggatcattgcaa

SEQ ID NO: 251208 - DNA, 232 bp, Unknown
  Bacterial polypeptide expressing nucleotide sequence isolated from the Sargasso Sea
atgtttctggatcgtgaccacagcattctggcgttcaatgaacgcgtgttcgactgggcggtccgtacggatgtgccgctgctggagcgcctgcgctatctgtgcatcgtctcgtccaacctcgacgaattctttgaggtgcgtgcggcagcgcacatcacggcggcgaagaaaggcgagaccaagggcatctataccgcagcgtcttttgaggcgctgtccgcccaggttc

SEQ ID NO: 251209 - DNA, 496 bp, Unknown
  Bacterial polypeptide expressing nucleotide sequence isolated from the Sargasso Sea
ggtcaaatcaaactgttgatccgcggtatgtgctcgctgattccacaaattccggggatcagcgacaacatcgagatttacagtattgtcgaccgatttttagaacattcacgggtgatgctgttccatgccggtggtgagaataaattatttatcagctccgccgattggatgagccgcaacatagataaccgcgttgaagtaagtgtgcctatttatgatccgcgtctaaaacaaatggtgatggatattttatcgttacagttcaatgacaacactaaggcgcgcatcatcaataaggaacagagcaatccttatcgtaaccgcggtaataaacgtaaagtgcgttctcaaattgccatttatcaatatctgattaattatgagaagcgattgcagcaagaatttagcgcccagcgcgaagccgcaaagcttgaagcggagcacacggcggaacttgcccacaatctcgaattacaggccaaagccagctaac

SEQ ID NO: 251210 - DNA, 496 bp, Unknown
  Bacterial polypeptide expressing nucleotide sequence isolated from the Sargasso Sea
gtcaaaatcaaactgttgatccgcggtatgtgctcgctgattccacaaattccggggatcagcgacaacatcgagatttacagtattgtcgaccgatttttagaacattcacgggtgatgctgttccatgccggtggtgagaataaattatttatcagctccgccgattggatgagccgcaacatagataaccgcgttgaagtaagtgtgcctatttatgatccgcgtctaaaacaaatggtgatggatattttatcgttacagttcaatgacaacactaaggcgcgcatcatcaataaggaacagagcaatccttatcgtaaccgcggtaataaacgtaaagtgcgttctcaaattgccatttatcaatatctgattaattatgagaagcgattgcagcaagaatttagcgcccagcgcgaagccgcaaagcttgaagcggagcacacggcggaacttgcccacaatctcgaattacaggccaaagccagctaac

SEQ ID NO: 251211 - DNA, 727 bp, Unknown
  Bacterial polypeptide expressing nucleotide sequence isolated from the Sargasso Sea
agcatctgataaatcagtgcctattctcgaaagactgaaatatttgtgtattgcagatagtaatttagacgaattttttgaaataaaagtagcttttattagaaagaaattgaaatattctgatggtcttttaactgcttcagatgagagtaaccttaggctttttaaagatgttaggcgtaaagcaaattctgttattaaactacaatatgatcttcttcaaaaaagtgtatttagagcactaaggacaaaaaatatcatttttttaagacggagagagcttaattctaatcaaagagagtgggcaaataaatattttgatgaacatattttacctataattaatccaatgattcttgagggagattctccagaaattgttggtagtcatccttttccaaaaatacaaaataaaagtttaaattttatgattaaacttaaaggaacggatgattttggcaacagtcccaaactagccgttgtcccagcgccaagaattttatcaagatacatacagctaccaaaaaagatatcaaataataaagattgctatatgtttctctcttcaataatccatgaaaacatagataaactttttccgggtttaaaagttagaggctgtcatcaattcagggtaacaatgaatagtaacttggtttttgatgatgaagatttaaatgatattaagaagtctcttactagactgttgcctgatagaaagtatagt

SEQ ID NO: 251212 - DNA, 793 bp, Unknown
  Bacterial polypeptide expressing nucleotide sequence isolated from the Sargasso Sea
accggcgggcggcggcggcacgtcggcgctttcctacatcgaaaccttgctgtcgctgctgccctttggcctggccatggccgaccgcgacgggcgggtgctgttcctcaataatgcctttgcgcgggtggctggcctcaaacccggcgacaagcccagctatcctggcgatctggtggtgcgggaggatcaggcggcggtggccgacgcggtgcggcgctttgccgtggggccgcaaatgtcgggcgatatagccgtgcgtatgcgggaccagcctgacgagccgatcgcattgagcctggctggcgtgcgcgggctgggcgaggcggcggtgctcctctcgctcaaggataatagcgaggaatccaagctcaagcggcaggtggcgcaggcgaccaagatgcaggcgatcggccagttggcgggcggcgtcgcgcatgatttcaacaatatcctgaccgccatcatcggccattgcgacctgatgctgatgcgccatacgcccggcgacagcgactatgacgatattcagcagatcaagtcgaacagcaatcgcgccgctggcctgacccggcaattgctcgccttttcgcgccagcagacgctgcggccccagatcctgcaactgcccgacatcgtggcggacgtctccaatcttttgaagcgcctgctgggcgaaaatgtgaagctggacgtcagccatgggcgcaatctgggcgcggtgcgcgccgatcccggccagctggaacaggtgatagtcaatctggcggtcaatgcccgcgatgccatgccc

SEQ ID NO: 251213 - DNA, 482 bp, Unknown
  Bacterial polypeptide expressing nucleotide sequence isolated from the Sargasso Sea
tgtaaaaattcatttatttgtaaggggtgtttgttgtttaagaccaggaataaaagatagatcagaaaacatagttgtaaaaagtatcataggaagatttttagagcattctagaatttactgctttagtaatggtacaaagaaaatgcctaatagaaatgcaaaagtatatatttcttcagccgatttaatgccgagaaatttaaatagaagagtagaacttctagtgccaattgaaaatgaaactgttcatgagcaaattttagatcaaataatgttagcaaattatcttgataacagtcagagctgggagctcaatgctgatggtaattataaaaaaattaaatatagtaagaacgattccttttcagctcatgaatattttatgaataatccgagcttatctggaagaggtaaagctaaactaaaaatgcagcctaaacaactgcacttaagattgattaaaagtggaagtaattaaa

SEQ ID NO: 251214 - DNA, 739 bp, Unknown
  Bacterial polypeptide expressing nucleotide sequence isolated from the Sargasso Sea
tcatccaattaacgcaaaaatttatactgacttatcactgtttagctctaatcaagacttggccaaagatgtcgaaaaatttttcaattatgtaactggttatgcaaaaccaaaaaaattgaataaaatttttatgtctccattaaatagcaggaatttttttgaagaaaaaattgaaaatgaaattgtaaatgcaagtaaaggaaaacctgcagaaatatgggcaaaaatgaattctcttgtagaccctggaattattaagaaattttatgaagcttcaaacgcaggagtaaaaataaatttatcagtaagaggagtgtgttgcttaagacctggaattaaaggtcaatctgaaaatataaaagtaaaaagccttattggcagatttttagaacactcaagaatttattgttttgcaaatggtagctctatgccctctcgagagaatcaggtatatatttcatctgcagatttaatgcctagaaatttagatagaagaattgaaattataattccgatagaaaacaatactgtgcatgagcaaattttagatcaaattatgttagccaactttaaagataaatcagaaacatggtatttagatagcttaggaaactatcataaagaacaagaaaaaggcttttcagcacatacctattttatggaaaactcaagtttatcaggtcgtggtaagtcacttttaaaagctaaacctcaaaatttaagattggtgaaatga

SEQ ID NO: 251215 - DNA, 873 bp, Unknown
  Bacterial polypeptide expressing nucleotide sequence isolated from the Sargasso Sea
actgccaatacccgttaatctttcaagtatagagtcaatttttttaaaagattttaaaaaattattttttccaaaatttaaggtacgatttcctgaaagaattaaagattttaaaaatgattattttaaagctatagcaaataaagatattgttattcatcacccttttgaatcttttgaagtagtgactcagtttattgatcaagctgcagatgatccaaaagtcttatcaataaaacatactttatatcgaactactgatgactcaccaatagaagcaagtttagttagagcagcacaaaaaggaaaattagtaactgtcattatagagttgcaagcacgttttgatgaagagcgtaacttaaaatgggcaaaagaattagagttagctggagcgcaagttgtttttggcaatattaatatgaaaacgcatgcgaaaattacacttgtaacaaggaagcaaatgaattctgttataaattacgcacattatggaacaggtaattatcacccaagaaatgcaaaaatttatatggatttatcttacttcacctctgataaaacattaacaaatgatgcggcaaaaatgtttaattatttaactagttattcagaacaaacaacaataaaaaaaatagtatattcgccaataactgcaagaaacaaattaaatgaactaattagaaatgaaattacaaatgttggaaaaaataaaccatctggaatagtatgtaagtgcaatgctcttgttgataaacaaattattgatgaattttataaagcatctcaaaaaaatgtaaaaattgaattgttgataagaggaatttgctctctaatacctggtaaagaaaatctatcagaaaatatagtttg

SEQ ID NO: 251216 - DNA, 490 bp, Unknown
  Bacterial polypeptide expressing nucleotide sequence isolated from the Sargasso Sea
aatgcttggtgtaaaaattcatttatttgtaaggggtgtttgttgtttaagaccaggtgttaaagataaatcagaaaacattgttgtaaaaagtatcataggaagatttttagagcattctagaatttactgctttagtaatggtgcaaaaaaaatgcctaatagaaacgcaaaagtatatatttcttcagccgatttaatgccgagaaatttaaatagaagagtagaacttctagtgccaattgaaaatgaaactgttcatgagcaaattttagatcaaataatgttagcaaattatcttgatactagtcagagctgggcgctcaatgctgatggtaattataaaaaaattaaatatagtaagaacgattccttttcagctcatgaatattttatgaataatccgagcttatctggaagaggtaaagctaaactaaaaatgcagccaaaacaactgcacttaagattgattaaaagtggaagtaattaa

SEQ ID NO: 251217 - DNA, 540 bp, Unknown
  Bacterial polypeptide expressing nucleotide sequence isolated from the Sargasso Sea
tgaactcattagtagatccagaaattatcgataaattttatgaggcttcgaatgctggtgtaaaaattcatttatttgttaggggtgtttgttgtttaagaccaggagttaaagatagatcagaaaacatagttgtaaaaagtatcataggaagatttttagagcattctagaatttattgttttagcaatggttcaaaaaaaatgcctaatagaaatgcaaaagtatatatttcttcagctgatttaatgccaagaaatttaaatagaagagtagaacttctagtgccaattgaaaatgaaactgttcatgaacagattttagatcaaataatgttagcaaattatcttgatactaatcaaagctgggaacttgaagctgatggtaattataaaaaaattaaatatagtaagatcgattccttttcagctcatgaatattttatgaataatccgagcttatctggaagaggtaaagctaaactaaaaatgcagcctaaacaactgcacttaaggttgattaaaagtggaagtaattaaa

SEQ ID NO: 251218 - DNA, 655 bp, Unknown
  Bacterial polypeptide expressing nucleotide sequence isolated from the Sargasso Sea
aatttaaataaaatttctatttcgccagtaaatatgaggcaaaccttaaatgaaaatattgatgctgaaattaaaaattctaaaaatggaaaatttgcagctatttgggcaaaaatgaactctttagtagatccagaaattattgataaattttatgaagcttcgaatgctggtgtaaaaattcatttatttgtaaggggtgtttgttgtttaagaccaggagttaaaaatagatcagaaaacatagttgtaaaaagtatcataggaagatttttagagcattctagaatttattgttttagtaacggtactaaaaaaatgcctaatagaaatgcaaaagtatatatttcgtcagctgatttaatgccgagaaatttaaatcgaagggtagaacttctagtcccaattgaaaatgagactgttcatgaacagatcttagatcaaataatgttggcaaattatcttgatactaatcagagctgggaacttgaagctgatggtaattataaaaaaattaaatatagtaagagcgattccttttcagctcatgaatattttatgaataatccgagcttatctggaaggggtaaagctaaattaaaaatgcagcctaaacaactgcacttaagattgataaaaagtggaagtaattaaa

SEQ ID NO: 251219 - DNA, 850 bp, Unknown
  Bacterial polypeptide expressing nucleotide sequence isolated from the Sargasso Sea
agagatttaatttttcaattaaaaaaagcaaatataagtatagttaaacctgaaaatttaagtaaatcggatcagaaaagattatttaaaatttttaatgaagaaatttaccctctgctaacaccatcagcaatagatccagctcatccctttccatttattgcaaatcaaggaagagcattagttatgagattaaataagaaaaataaaaaaagagttttaaatgcaataatagtaattccaaaagctttatcaagatttattgaaatagatggaaataaaagttttaaaaaatttttaattattgatgatgttataagtttttttgcttctgaaattttccctgatcatgatttagataaaaaaatgttatttagggttataagggatagtgacgttgaaattcaagaggaagctgaagatttagtaagatcttttgaattggcattaaaaagaagaagaacaggtgacatagtacgtttagaaattttaaaaaatagtaataatgaattaattaagtttataaccaataagttaaacgtgaaatctgaatacatctacgaaatagaaggcattgttggaattcaagatatcgaccaagtttgtaaaattaaaaattctaaattaagatttaaaaatttcaatcctagagaggttgagagattaaaggaatttaataataatttttttgatactataaaaaaaaaagatttgatagttcatcacccttttgaaacatttgatgctgtcattgagtttttaaatcaagccgcatatgataaaaaagttatagcaattaaacaaaccctatacagaacaactttagactctccaattgttaaagccttaa

SEQ ID NO: 251220 - DNA, 702 bp, Unknown
  Bacterial polypeptide expressing nucleotide sequence isolated from the Sargasso Sea
tttgaggcatagctttttcaatagagaggtgtcttggcttaaatttaatgagcgggttttagaagaagcagaaaataagaaacaccctattcttgaaaggctaaaatttctctcaatttcagcgtctaatctagatgaattctatatggtaagggtggcagggctaaaaagtcaaattgtagcaaaagttgatgagttaagtgatgacgggttgactccttctcagcagttgcaacttgtaaagggcgttgcaagtaagctaatggcaaggcaacagagttgttggaaaaaaataaaatcagagctaaaaaaagatgatgtatttgtattagatccaaaagacgttgaccctagtcaaaaaataactctagcagactattttagaagtaacgtttttcctgttttaacacccgttgcaatagatcctgtgcatcctttcccctttatacccaatctcgggatttcattggtactattactaagacgtgaaacagatggcgaagagttgagagccttattacccttacccaatttaatggatcgttttgtacctattgggcgcgctgaggatacgtttattgctctagaggatcttataagccttaatcttgatttagtttttccagatttttctgttcttaaatcggcttggtttagggttatacgtgatactgagtttgagattgatgaggaaggtgaaga

SEQ ID NO: 251221 - DNA, 1009 bp, Unknown
  Bacterial polypeptide expressing nucleotide sequence isolated from the Sargasso Sea
taaatatcatcatagaagtgactatatgaactttcctgatttaggaagaacagaccttttatatccaaaagataaagccttagatattaataactttaaaattgactcaaaccttttggatcaactggtggatagagattaccttatgtatactccataccattcattttcatatttaatatctattttaagacagtcagccattgatccgacagtaaaatctattaaaataacattgtatagactatcaaagaaatctaatgtgataagttgtttgataaatgcagctaaaaatggaaaaaaagttttagtccagatagaactacaggctagatttgacgaagaaaataatataaaggtttctcaagagttaaaagctgctggtgtagatttaatttatggagttaaaggactaaaagttcattcaaagatctgtttaattgaaaggtttaagagtaaaaaaaataaatactatggttttattagcactggaaattttaatgagtctacagcaaaagtttattctgacttcactctatttacatctaatcaaaaaatattaaaagaaataaataaagtctttgatttcctacaatctaattataaaatacttgattataaacacttgattgtttcacctcaccatacatcaaaaaaactatttggcttgattgataacgaaataactaacgttaaaaaaggccttaaaggaggaattattttaaagttaaatagctttaccagttataaatttgttgataaactatatgaggccagtagatcaggggttaaggttaaattgttagtcagaggaatatgttgtctaattcctaataaattgggtctcagtgaaaatattgaggttaaaagtgttgttgataaatatcttgaacattcaagagtttatgtctttgagaatggaggtgataaaaaagtatacatctcctcagctgacttaatgacaaggaatatgaaaaaagagttgaagttgcatgtccaatatatcaag

SEQ ID NO: 251222 - DNA, 841 bp, Unknown
  Bacterial polypeptide expressing nucleotide sequence isolated from the Sargasso Sea
tttaatgatcgtgttttagaagagtcaaaagataaaacaaatcctttatttgaaagagtaaaatttttatcaatagcaggtacaaatttagatgaattttttatggtgagagtcgctggactttttaatcaaattaaagatggttttgacgaattaagcgcagatggattaaccgcagaggatcaattaaatatggtcgtattaaaaactaaagatctattaaagaagcaaaacgaagcgtttctagagttaaaaaaagagctatcgaaagaaaaaattttcattcggaaaatatcagaactaaataagaaggatcttatgtatctaagagaatattttcaggaaacaatttatcctataataacacctactgccattgacccatcacatccctttccttttataccaaataaaggccaagcaattttattaagaatgacaagaattaaaaaaaaaagagaactaaacgcaattatagttataccaagagcacttccaaaatttatatcgctaaataattctgaaacaataaatgaatttgtcacaattgatgacgtaatttgtaaatttgcaaatgaaatatttccagaccataatatcgaggcaagtttgcagtttaaaataattagagacagtgaaattgaaatagatgatgaagctgctgatcttgtgagatattttgaaaaagcaattaagaaaagaagaaggggaaacgtagttaaacttgaagtactcactaactcaaataaaaatcttttaaattttatttcaaaaaaatttaaaatggatgaaaatgatatttatgaggctgaaggattagttggaatacaagatatagatg

SEQ ID NO: 251223 - DNA, 695 bp, Unknown
  Bacterial polypeptide expressing nucleotide sequence isolated from the Sargasso Sea
tatgaagaaaaaaaatactaaaattgtttacgatgaaaaaattaaaaacactcccctgcgttttattaatagggaattatcttggttaaattttaacgaaagagttctgagtgagtcagaaaacaaccaaaatccattgatggaaaggttaaggtttctttcaatttcaggtaataatctagatgaatttcatatggttagagttgcaggtttatatcgtcaaatcaaagaaaaagttttcacgcgaactgatgatggaagaacaactaggcaacaatttaatgatgtaactaaatcactaaaactacttctaaaaaaacaacagactgtatgggataaacttaaaaaagaattaggtttaaaaaaaactaaaattttagaatctaaatcagaattaaagaatgaaaaaaaaaagattgaagagatttttagaaaaaatgtctacgcctcattaacgccacttgcgatagaccctgctcatcctttcccttttcttcctagtcaaagcataacaatggtttgtgcattaaaaaataaaatggacaaactttcatattctcttgtaatttttccaccaaaacttgaaagattttttaaaatatcaaaacccaataattttgttaaggccgaagatattattaaaaataacatgaaaattatttttcctgattttaaactcataaatttttcactaa

SEQ ID NO: 251224 - DNA, 697 bp, Unknown
  Bacterial polypeptide expressing nucleotide sequence isolated from the Sargasso Sea
cttagcaagggatgctactaaggtgtttaattatgtttcagggtatattgaacctggtgattttgagaatataagtttagcgcccttaaatttgaaaaagactattcttaataatctggcaaatgaaagtagattcgcctccaggggcttaagggctatggcttggattaagctgaactcattgatagaaaaagatgtaattgatgcaatgtatgcagccagtaatgctggagtgaagattgaccttgtgatccgtggaatatgtggtcttaggcctggtgtgaaaggtttatcagaaaatattagggtaaaatctgtagtgggtaggttccttgagcattcgagaatagcttgttttggtaatggtaatagtcttccttcttcgaattctaaggtttacatttcctctgcagattggatggatagaaacttaaatcgaagagtggaaatattagtgaaaattaataatccaacggtgaaagcccagatagtaagtcaaattatggctgctaatttgagagatcaagcacagtcttgggttttacagggtgatggttcctatttgagggataatatgcaaattgctgaaaagttctcttgccatgattttcttatgcaaaacccctctctttctggtagaggtagagctttaaaaaagaatccgccacagctactagtagaccaaaagacagtatag

SEQ ID NO: 251225 - DNA, 547 bp, Unknown
  Bacterial polypeptide expressing nucleotide sequence isolated from the Sargasso Sea
ccgttcaggattggaaagattgatcgaacgtgaaatagaacatgcacgccgaggcagaccctcaggaatgatcttcaaggtcaattccgtcgctgaccagaaagtgattaccaaactttatgaagcgtcaaaggcgggagtgagacaggatctgattgtacggggaatctgctgtctcaaacctggagtggagggagtaagcgaaaaaatcaaggtacgttcgatcatcgggcgctttctggaacattccagaatttattattttgagaatggtggaaatccggaaatctactgtggaagcgcggatttgatggaacggaatttgagccgaagggttgaaatcctctttccgctaatcgaccaggaaatcctcgatcacctcaaacaaaatcttgatctgatgctttcagacaacaccctggctttcaaccttcagcaggacggcagttacagaaggatcagtaaaaaagctcaagatcctgagatcaattcacaaataaaattattggaatggtacgctgaggaaaacctgttcgtcagcgtttga

SEQ ID NO: 251226 - DNA, 799 bp, Unknown
  Bacterial polypeptide expressing nucleotide sequence isolated from the Sargasso Sea
acggtttcctgaaagaattaaagattttaaaaatgattattttaaagctatagcaaataaagatattgttattcatcacccttttgaatcttttgaagtagtgactcagtttattgatcaagctgcagatgatccaaaagtcttatcaataaaacatactttatatcgaactactgatgactcaccaatagaagcaagtttagttagagcagcacaaaaaggaaaattagtaactgtcattatagagttgcaagcacgttttgatgaagagcgtaacttaaaatgggcaaaagaattagaattagctggagcgcaagttgtttttggcaatattgatatgaaaactcatgcaaaaattacacttgtaacaaggaagcaaatgaattctgttgtaaattacgcacattatggaacaggtaattatcacccgagaaatgcaagagtttatatggatttatcttacttcacctgtgacaaaacattaacaaatgatgccgcaaaaatgtttaattatttaactagttattcagaaccaaccacaataaaaaaaatagtatattctccaataactgcaagaaacaaattaaatgaactaattagaaatgaaattacaaatgctggaaaaaataaaccatctggaatagtttgtaagtgtaattctcttgttgataaacaaattattgatgaattttataaagcatctcaaaaaaatgtaaaaattgaattgttaataagaggaatttgctctctaatacctggtaaagaaaatctatcggaaaatatagttgttaaaagtata

SEQ ID NO: 251227 - DNA, 643 bp, Unknown
  Bacterial polypeptide expressing nucleotide sequence isolated from the Sargasso Sea
catgatcatagcacctctcgagttaaagagtagcttaattaacatgataaaaaacgagattttcttagcaagaaaaggcaagccagctgaaatgtgggttaagttaaatgctcttatagaccctgaagttattgacatgttatataaggcgagccaatcgggagttaggatcaatatgatcatccgaggtatttgtggtttaagacctggtctaaggggcctctctgaaaatattcgagttaaatctgtgataggacgtttcttggagcatagtagagtatgtgtttttggaaatgggtctcagttaccctccacaaaggctaaagtttttatttcctcagctgactggatgggaagaaacttgaaccgtcgagtggaatcttttgtagagattaaaaatttgacggttaagtcacaaattgttaatcagattatggcggcaaatttagctgataaagagcaatcatgggtgctgcaaccagacgggcaatataaaaggcaccaatttaaacctaacgaacctagctttaattgccacgagtatttcattgaaaacccctctttgtcgggaagaggcagagctgcacaaaatgcgcctccaagtttattgaatgtcagtaataaaagaaaaaaagcattttga

SEQ ID NO: 251228 - DNA, 718 bp, Unknown
  Bacterial polypeptide expressing nucleotide sequence isolated from the Sargasso Sea
ttacgttcacatcgggaccgggaattacaactcaaagacttcgaagctctacaccgatctcgggcttctctccacgcggccggagctgggccaagacctagtggaactgttcaactacctgaccgggttctcaaagcagcagagtttccgccgactgctggtggctccggtgaccctgcgcaaagggatggaatccctgatccggcgcgaaatcgaacatgccagggaaggtcgggacggtcacatcagagccaagatgaattccttggtggatccggacatcatcgcgttgttgtacgaagctgcagcagcaaatgtgcgggttgaactgatcatccggggcatgtgcagcctctatccaggccgagaaggactgagtgaaagcatcagcgttgtgagcatcatcggccagttcctcgaacactcgcgcattttctggttcggaaacggtggctcacctgaggtgtacatcggaagcgcagactggatgagtcgcaaccttgatcgccgggtggaagctgtgacacccgtagaagatcccagccttcgaggccgactggagcgcttacttgagctctacctgaaggacaaccggggcgcctgggacatgcaaagcgatggcagcttcatccaacggcaaccagaggacggagaggacgttcgcaactctcaggttcaactgatcaagcaatggagccaaggcgtgccgcaatcgtga

SEQ ID NO: 251229 - DNA, 388 bp, Unknown
  Bacterial polypeptide expressing nucleotide sequence isolated from the Sargasso Sea
tggtgtggccgtagacttgattgtaaggggaacttgctgcctcaaccgggcttaaaaggcgtaagtgagaacattcgggttatctcagttgttggaagatttttagaacattcgcgagtttacttctttgaaaacagtccaaaccaggtattctgttcaagcgcagattggatggaacgaaatctttctaacagaatagaagtttgctttcccataattaaaaaaaaatgggctaatcgaatagtcaacgaaatggaactctatttgtcggacaaagtccaatcttgggccttaacaagtgatggcgcttataatcaaaaggatcttaaaaacgaagaagcgctcggtgtacaaagcattcttcaaaaatcgctgggtcgcctatagt

SEQ ID NO: 251230 - DNA, 484 bp, Unknown
  Bacterial polypeptide expressing nucleotide sequence isolated from the Sargasso Sea
attaagaaattttacgaagcttcaaacgcaggggtaaaaataaatttatcagtaagaggagtatgttgcttaagacctggaattaaaggtcaatctgaaaatataaaagtaaaaagccttattggcagatttttagaacactcaagaatttattgttttgcaaatggtagttctatgccctctcgagagaatcaggtatatatttcatctgcagatttaatgcctagaaatttagatagaagaattgaaattataatcccgatagaaaacaatactgtgcatgaacaaattttagatcaaattatgttagccaactttaaagataaatcagaaacatggtatttagatagcttaggaaactatcataaagaacaagagaaaggcttttccgcacattcctatttcatgaagaacccaagtttatcaggtcgtggtaagtcaattttaagagctaaacctcaaaatttaagattagtaaaatgaa

SEQ ID NO: 251231 - DNA, 904 bp, Unknown
  Bacterial polypeptide expressing nucleotide sequence isolated from the Sargasso Sea
tctgatggtttgacacctgaagagcaaatggatgaagtagtgcttgaaactaagaatctattaaaaaaacagaataaaatttttattcaactgatcatggaattaaaaaaaaataatatcagtttagttaaaccagttaatttaaatactaaggataaaataaaacttctagaaatatttaaagaagagatttaccctttattaacaccatcagcaattgatcctgcacacccatttccttttataatcaatcaaggaagagcaattgtaatgaagttaagaaaaaaaaataaaaaaaggattttaaactcaataattgtaataccaaaagcattatctagatttgttgaaatagagtcttcaaaaaatcataagaagtttgttattctagatgacgtaataagtttttttgctaatgaaatttttccagatcatgatttagaaaagaaaatgatttttagattaataagagacagcgatgtagagattcaagaggaagcagaagatttagttagatcttttgaattggctttaaaaagacgtagaacaggtgatattgttcgttgtgaggttcttgaaaatagcgataacgaattggtaagatttataactaataaattagatataaatcctgaatatatttatgatgttgctggccttgttgggattcaagatatagatcaaatatgcaaagtaaaaaatccaaaattaagatttaagcattttacacctagagaagttgaaagattaaaagaatataatgataatttttttgaaactattaaaaagaaagatttagttgttcatcatccttttgaaacatttgattcagtaattgaatttttaaaccaagcagcaaatgataaaaaagttatagccattaaacaaactttatatagaacaa

SEQ ID NO: 251232 - DNA, 265 bp, Unknown
  Bacterial polypeptide expressing nucleotide sequence isolated from the Sargasso Sea
ccaactttgtatcgaacccctcctgactctcctattgtaaaagcccttagtagagcagcagaaaacggaaaagttgtaacagctgtagtagaaataaaagctcgatttgatgaggaagctaatattgaattttctaggaaactagagaaagctggcgttcaaattgtttatggattcgcaaaatacaaaacgcctgcaaaggcaagtttagttttaagaaaagaaggagttaaaacgcgaagctatgttcacttaggtaccggaa

SEQ ID NO: 251233 - DNA, 684 bp, Unknown
  Bacterial polypeptide expressing nucleotide sequence isolated from the Sargasso Sea
gatgcgtgataataactttttcacaagagagttaagcttactagagtttaacaaaagagtcatcgaacaagcctcagataagtccgttccaattctagagagattgaagtacttatgcattgcagatagcaatctagatgagttctttgaaattaaagtcgcgtttttaagaaaaaaattaaaactttcagataaacgcttcttatctgagagagagaataatcttcagctgttgaaagacataagaaggaaagtgaatgcaattattaagcttcaatacgatctattgcaaaaaagtgttttcagagctctaagaaccaaaaatatagtctttctaagaagaagggaattaaacagcgctcaaagagattgggcaagtaaatatttcgatgcacatattttgccaattattaaccccatgattctagaggggaattctccagatataattggaagtcacccctttcctaaaattcaaaataaaagtttgaattttatggtaaagttaaaagggtcagatgtatttggcaattcacctaaacttgccgtagtgcctgcaccgaggatcttaccgaggtatataaaacttcctaaaaagatctctcaagataaggatacctatattttcctttcttctctaatacatgaaaatgttgacaagcttttccctgggctgaaagtttg

SEQ ID NO: 251234 - DNA, 398 bp, Unknown
  Bacterial polypeptide expressing nucleotide sequence isolated from the Sargasso Sea
gtcgattgtcggccgcttcctggaacattcccggatctactgcttcggcaacggccacggcctgccctcggaaaacgcccatgtctatctgggttccgcagacctgatgccgcgcaacctcgaccgccgggttgaaacgattgtaccggtcaccaacccaaccgtgcatgaacaggttctgtcccagatcatgctgggcaatatcattgacaatcagcagagctacgagatactccccgacggaacctcgcggcggacggaaccgcgcgagggcgaggaaccgttcaacgcgcaggagtatttcatgaccaatccgagcctgtccggccgcggagaagccctgaagtcaagtgcgccgaagctcatcgccggcctgctttcgggccgcaccaaataag

SEQ ID NO: 251235 - DNA, 220 bp, Unknown
  Bacterial polypeptide expressing nucleotide sequence isolated from the Sargasso Sea
gtcggtgtaaaagtctctttatttgtaagaggtgtatgttgtttaagacctggtattaaaaataaatcggaaaatattattgtaaaaagtatcattggaagatttcttgaacactcaagaatatattgttttgcaaatggaaaattaatgcctaacagaaatgcaaaagtttatatttcatctgcagatttgatgccaagaaatctagatagaagagtcg

SEQ ID NO: 251236 - DNA, 651 bp, Unknown
  Bacterial polypeptide expressing nucleotide sequence isolated from the Sargasso Sea
atgtaactggttatgcaaaaccaaaaaaattgaataaaatttttatgtctccattaaatagcaggaatttttttgaagaaaaaattgaaaatgaaattgtaaatgcaagtaaaggaaaacctgcagaaatatgggcaaaaatgaattctcttgtagaccctggaattattaagaaattttatgaagcttcaaacgcaggagtaaaaataaatttatcagtaagaggagtgtgttgcttaagacctggaattaaaggtcaatctgaaaatataaaagtaaaaagccttattggcagatttttagaacactcaagaatttattgttttgcaaatggtagttctatgccctctcgagagaatcaggtatatatttcatctgcagatttaatgcctagaaatttagatagaagaattgaaattataattccgatagaaaacaatactgtgcatgagcaaattttagatcaaattatgttagctaactttaaagataaatcagaaacatggtatttagatagtttgggaaactatcataaagaacaagaaaaaggcttttccgcacattcctatttcatgaagaacccaagtttatcaggtcgtggtaagtcaattttaagagctaaacctcaaaatttaagattagtaaaatgaa

SEQ ID NO: 251237 - DNA, 533 bp, Unknown
  Bacterial polypeptide expressing nucleotide sequence isolated from the Sargasso Sea
acctgcagaaatatgggcaaaaatgaattctctgttagaccctgaaattattaagaaattttatgaagcttcaaacgcaggagtaaaaataaatttatcagtaagaggagtgtgttgcttaagacctggaattaaaggtcaatctgaaaatataaaagtaaaaagccttattggcagatttttagaacactcaagaatttattgttttgcaaatggtagctctatgccctctcgagagaatcaggtatatatttcatctgcagatttaatgcctagaaatttagatagaagaattgaaattataattccgatagaaaacaatactgtgcatgagcaaattttagatcaaattatgttagccaactttaaagataaatcagaaacatggtatttagatagcttaggaaactatcataaagaacaagaaaaaggcttttcagcacatacctattttatggaaaactcaagtttatcaggtcgtggtaagtcacttttaaaagctaaacctcaaaatttaagattggtgaaatgaa

SEQ ID NO: 251238 - DNA, 886 bp, Unknown
  Bacterial polypeptide expressing nucleotide sequence isolated from the Sargasso Sea
gtacaattcctgcagcaagcggcgcgcgatccaaacgttgtggctatcaggcaaactttatatcgaactagtcgagaaagtcctattgtacaggcactttgtgaggcggctgaggatggtaagtctgtcacagcattgatcgaacttaaggcacgatttgacgaggcagctaatatcagacaatccagagcgcttgaacgtgctggagctcaggtaatctacggttttatggactggaagacacacgcaaaactgtcaaccgtggtaagaagagaaagaacagggttggtgacttattcacattttggaacaggaaactatcatcctataacggcaaaattttatactgacctcagccttctgacatcagatgaggctctaggtcgtgacgcgactaaggtttttaattatgtctcgggatatgttgaacctgaaaaactagagaacttaagtatttcaccactcaacctcaaagagaccctgttgaaaaatttgcagaatgagattaagcactcctcattaggaaaacccgcaatggtttgggttaaagttaactctttgatcgattctgaaataatcgatgctttatacgatgcgagctgtgctggcgtaaaaattgatcttattgtgcgtggtatttgtggcgtaagacccggtataaagtcactatcagaaaatattcgcgtaaagtcggttataggacgattcttggagcattcgagaatagtgtgctttggtaacggtaagcaacttccatcaaagagagcaaaagtttatatctcttctgctgattggatggagagaaatcttaatagacgtgttgagtctcttgtcgaaataaaaaacgagactgttcacgaacaaattttggaacaaataatggctg

SEQ ID NO: 251239 - DNA, 851 bp, Unknown
  Bacterial polypeptide expressing nucleotide sequence isolated from the Sargasso Sea
gatgccacggagggtcgaagaatttggtggtgattatttttctgctataagtaaaaaggattttattgttcatcatccatatgaaagttttgatacagtagtaagatttttactacagtcatcaaaagataaaaatgtgatttcaataaaacaaacactctatagaacaagtaataattcacctataattgctgcattaatgcaagctgcttttaatgggaagtccgtaacagcattgattgaattaaaagcaagatttgaggagaaaaaaaatatccaatgggcaagaaacttagagaagtctggtgttcaggttgtttatggattaccaaatcttaaaattcattctaagattagtcttgttgcgaggaaagaaagtggttcaatagtaacttattgtcattttggaaccggtaattatcatcctcaaactgcaaaaatttatacagatctttccttatttaccaaagataaagatttaacaaatgatgcagcaaaagtttttagttatatgacaagctatgttgaaccaagaggcttaaaaaagctatcagtggcgcctgtaatgatgagagaaaccttctatcagcttatagaccaagaaataaaaaactccaaaaaaggtttatcctcaggaatttgggctaaaatgaattccttagttgatagtgggattatttcaaaattatatgaggcatccaatgcaggtgtttcaattaaattaattgttagaggaatttgctctttgcagccaggtattaaaaatctttctgagaatatagaagttaagtctattgttggtagatttctagaacactcaagaatctattgttttggcaacggtcaatctt

SEQ ID NO: 251240 - DNA, 940 bp, Unknown
  Bacterial polypeptide expressing nucleotide sequence isolated from the Sargasso Sea
atgaaagattatatttttaaaaatagagaattaagttggctagattttaatgctagggtattgcaagaggcggaggataaaaaagtgccaatcattgaaagattgagattcataggaattttctctaacaatcttgatgagttttttaaggttaggtatgcgactgttaaaaggattgctttgtcaggaaaaaagcaaaaaaagctatataaaggcccaaatgctactgatttacttcaaatgataacaaacaaagctattgaacttcaagagaaaagtgaccaggtattaggatctattattaatgatttaaaacatgaaaatattttttttgttgatgaaaaatcaattccgaaagagtttatagaatatataaatacttttttcattgaaaagattcaacctcaacttgaggtggtcattcttaataagaaatctaaatttccaaatttatccgatacatcatcttttttgacgataaaaattaaaactaaagatgagaagataaagtttgctttgatcaaacttccaaatcaaattgatagatttattgtgttaagtaagtctgaaaaaaagtatatcattctcattgatgatataattaggtttcatttaaatgaaatctttgaaatttttgccccaaaaaaaatagtggcaaacatgataaaaattagtagagatgcagagcttgattttgcttatgatatttctaaaagttacttggaaaaaatatctcaaagcataaaaaatagatctattggggaaccagtaagattcctttatgatcaagatattgataaaagcacattgaaatttctcataaataagttaaactttgatgacaacactgatagtataattccaggatcaaaataccataatcgaagggattatatgaattttcccacaataggtaatagtactttagtttataaggatt

SEQ ID NO: 251241 - DNA, 1196 bp, Unknown
  Bacterial polypeptide expressing nucleotide sequence isolated from the Sargasso Sea
gttggatcaggctctggacgaacgacacccgcttttggaaagggttaaattcctggcgattacggggaccaatctcgatgaatttttcatggtccgtgtggccaccatcctgcgtcagatcaaaaacggaagtgaaagtctgacttcagacggcctgactcctaaacagcagttttctgaaatccatggacggacggaaaagttgcttaaggatcagcactcggcatggtcgttgttgaggccactgctagaaaaaaatggagtaaaatttcttgaaatgcgttcttataacgatgggatcaaggattatctgaatgggcgtttcatgaatgagatttatcctgtgctgactccgatggcatttgatccggggcatccttttccgcacatttcgagcctcagcatgaaccttgcggtggtggttcgacacaatcaggaaaccaaattcgcccgggtcaagattccggatgttttgccaagatttctggaaattcctgagtctgtgagtggacagaacaaaatcgtctttgtctttctggaagatgtaatcagaagcaacatcgatgaactttttccgggaacagaaattcgtgacatccgccttttccggatcattcgcgatactgatctggtgattcaggaagatgaggctgatgatttattggagacggtggacaagggattgaaacagatccgttacggggatgtttcgctgctccaggttgaaaaatcgatgccgaaacgaaccctcagtgtacttgctgataattgtcaggtcgatgaggaactcgtttcgagatccgaaggcaggatgaattttgcggatctgatgcaattgatgaaattgccgttaccccaattgaaagacaaaccgtttttcccgcctgttctttttgaaggacttccgtcggaacagttgttcgaaaggatccgatatcgggattacctgctgcatcatccatatcagtccttttatcccgtggaagcactggttaaggctgcggcggaagatcctcaggttcttgcagtgaaaatgacgctttaccgtattggaagcaattccccggtgatcgagcatttgatcaatgccgcagaagtgggtaaacaggttacggttctggttgaactcaaggcaaggtttgatgaacggaataacatcgtctgggcaagaaggctcgaagcggtgggagcccatg

SEQ ID NO: 251242 - DNA, 586 bp, Unknown
  Bacterial polypeptide expressing nucleotide sequence isolated from the Sargasso Sea
ttgaaaattctaaaaatggaaaatttgcagctattttgggcaaaaatgaattctttagtagatccagaaattattgataaactttatgaagcttcgaatgcgggtgtaaaaattcatttatttgtaaggggtgtttgttgtttaagaccaggagttaaagatagatcagaaaacatagttgtaaaaagtatcataggaagatttttggagcattctagaatttattgttttagtaacggtactaaaaaaatgcctaatagaaatgcaaaagtatatatatcttcagctgatttaatgccaagaaatttaaatagaagagtagaacttctagttccaattgaaaatgaaaccgttcatgaacagattctagatcaaataatgttagcaaattatctcgatactaatcagagttgggagctcaatgctgatggtaattataaaaaaattaaatatattaagagcgattccttttcagctcatgaatattttatgaataatccgagcttatctggaaggggtaaagctaaattaaaaatgcagcctaaacaactgcaattaagattgataaaaagtggaagtaattaaa

SEQ ID NO: 251243 - DNA, 1063 bp, Unknown
  Bacterial polypeptide expressing nucleotide sequence isolated from the Sargasso Sea
aataagtattttaatagagaaatatcctggctaaaatttaatgagagagtaaatgaattatcctatgataaaaacgtcccaattttagaacgactaaattttataagtattgctgcatcaaacttagatgaatttttttcagtaagagtggctggattaattgaacagttaaaactcactcctaataaaaaaagttttgatggaatgaagattgaggatcaaattaaaattgttgactcattaacaagaggtttgattaaaaggcaaaatgaatcgtatggtcaaattgaaaaagaattaaaaaaaaataaaatctatattttaagagataagtttttaaaaaaacatttgtcccacataaaaaattattatttgaatgaaattatttcgattctgacaccaattacagttgatagcacacaccctttgccctttataccaaatttaagtttgtgtcttatcgctaaaattaaaaataaaaaatcaaaaaaagaatttatctcagttatgagagtatcagatttaaaacaacgctttcttaaaattattgataaacagggtatttatttttatcccgtagagtcaataattaacaattatgttggggatgtattccatgattttgatgttattgatacaaatctatttcgcgtaataagggacagtgatttagaggttttggaggaggcagacgatcttatcagagagtttaaaaaacttgtcagggaaagaaaaagaggacaggtaatcagattagatgttcaaaaaagtcttaataataattttaaatcattcatcattaacgagttgaatgtatctgaaaatgaaatttttgaatacgaagatctactggggttcgaccaattatcagaagtctttggaaatataaaaaacaagaatttaaattataaaaaatttaaacctcgtttcccacagcgaataaatgattttggcggtgattgttttgcagcaatcaaaaaaaaggatttagttgtacaccacccttttgagtcttttaatgttgttgttagttttttagatcaagcatcaaacgacaaaaacg

SEQ ID NO: 251244 - DNA, 265 bp, Unknown
  Bacterial polypeptide expressing nucleotide sequence isolated from the Sargasso Sea
tatgaaaaaagaacctaaattttttagtaatatgctcagtcttttagaattcaataaaagagttgtagctcaagcacttaataaaaatgttcctattttagagcgtttgaaatttctttgtatagcaagtagtaatttggatgaattttttgagataaaagtagctatattaaggcgacaaattttatctaagtcacaaaagataggtcgtgatggttactctcacgaagaaagatttaaagtaacaagaagaaaagtaagatca

SEQ ID NO: 251245 - DNA, 520 bp, Unknown
  Bacterial polypeptide expressing nucleotide sequence isolated from the Sargasso Sea
aatggtaaggaaaaataaaaataatattaaaaaaagtccccaaagatttattaacagagaattatcctggttaaattttaatgaaagagttctaaaagaagcgcaaaataataaaaaccctattcttgagagattaagatttttatcgatttcgggaaataatttagatgagtttcatatggtaagagttgctggtttatttaggcaactcaaaaaaaaaatttttatccgaacctctgatggacgaactacaagacagcaataccaagaggttgctaaatctatgaaaatacttctaaaaaaacaacaattaatcttaactgatttgagggagaagttagagaaagaaaaaataagaatcattgattccccaaaaaatttaaaaaaaaaacgtgaaataacttatacaatctttgagaaaaaaatcttttcaacactaacacccctagcaatcgatcctgcgcatccttttcctttcttaccaaatctgagtttgagcttagtttgctcattaaaaaat

SEQ ID NO: 251246 - DNA, 1061 bp, Unknown
  Bacterial polypeptide expressing nucleotide sequence isolated from the Sargasso Sea
gacacaaatctccaaaaaagattttcttatgtatactccttatcactcattttcatatttagttgctttcctaaggcaatctgctattgatccaaatgttaaatcaataaaaataactttgtatagactgtctaaaaactctaatgttattagttcattaattaatgcagcaaaaaatggaaaaaaagttctagttcaaatagagcttcaagcgagatttgatgaagaaaataatattaggattgctgaaatgttgaaattagctggagttgaattaatttttggtgttaaaggtttaaaagttcattctaaaatatgtctaattgagagaagggataataataaaaagaaattttatggatttataagtacaggaaattttaatgaatctaccgcagaagtatatacagactatactctatttacttcagatcaaggaatccttaaagatgtgagtaaggtttttgaattcttaaaggttaattataagatacaaaaatacaaacacttaatcgtctcacctcactatacatcatcattacttttttcattaattgataaagaaatagataatgctgtcaatggtaaaaagtcacagataattttaaaattaaacagcttgacaagccatagatttgtcgataaattatatgaagcaagtaattctggagttaaaataaaattaattgttcgtgggatatgctgtttaattcctaatattaaaaatttaagtaaaaatatagaggttataagtatagttgataaatatttagaacacccaagagtttatatttttgaaaatggtgggaataaaaaagtttatatatcttctgctgatcttatgacaagaaatctagataatagagttgaggttgcctgccctatatatcaagaagatctaaaaaaacaaatactggataccatccaaataagtttaaatgataatgttaagtctagacttattaatcttaataaacagaatgaatttgttgaaaacaaaaataaaaaggttagatctcaatgggatacttatgattatttttataggattaatacttagg

SEQ ID NO: 251247 - DNA, 673 bp, Unknown
  Bacterial polypeptide expressing nucleotide sequence isolated from the Sargasso Sea
tatgtcaaaaatagatttaacaaaagcattgtcttcagagcagcagctaatcaatagagaaatttcttggctacaatttaatgaccgagttttggaagagtctaaaaatgttaaaaaccctctttttgagagagttaaatttttatcaattgctggaactaatcttgacgaattttttatggtaagagttgcaggattatataatcaaataaaagacgattttgatcaattaagtgcagatggtttaacttcagaagaacaattatctagagtagttttaaaaactaaagatttattaataaaacaaaacgactcatttaaacaacttttaaatgaactaaaaaaagagaaaatctatttaaaaaaaataaaagatttggataaaaaatccatagattttttaagagattattttaatgaaaccgtctatccagtgattacacctacagcgatcgacccctctcatccctttccctttattgccaataaaggacaagcaattttgatgaaactagaaaaagtaaaaaacaaaagaaatttaaatgtgattattgttatacctagggctcttccaaagtttatagatatagatggacaatctgatcaattcatcacgatagaagatttaataagttacttttctgaaagtatatttcctgagcacgaacttgta

SEQ ID NO: 251248 - DNA, 727 bp, Unknown
  Bacterial polypeptide expressing nucleotide sequence isolated from the Sargasso Sea
gcaaaaaatttatactgacttatcactgtttagctctaatcaagacttggccaaagatgtcgaaaaatttttcaattatgtaactggttatgcaaaaccaaaaaaattgaataaaatttttatgtctccattaaatagcaggaatttttttgaagaaaaaattgaaaatgaaattgtaaatgcaagtaaaggaaaacctgcagaaatatgggcaaaaatgaattctcttgtagaccctggaattattaagaaattttatgaagcttcaaacgcaggagtaaaaataaatttatcagtaagaggagtgtgttgcttaagacctggaattaaaggtcaatctgaaaatataaaagtaaaaagccttattggcagatttttagaacactcaagaatttattgttttgcaaatggtagttctatgccctctcgagagaatcaggtatatatttcatctgcagatttaatgcctagaaatttagatagaagaattgaaattataattccgatagaaaacaatactgtgcatgagcaaattttagatcaaattatgttagccaactttaaagataaatcagaaacatggtatttagatagcttaggaaactatcataaagaacaagaaaaaggcttttccgcacattcctatttcatgaagaacccaagtttatcaggtcgtggtaagtcaattttaagagctaaacctcaaaatttaagattagtaaaatga

SEQ ID NO: 251249 - DNA, 403 bp, Unknown
  Bacterial polypeptide expressing nucleotide sequence isolated from the Sargasso Sea
tttgggtaccgggggacgtgcgctcttcgccccgggatgcccgggtgtgagtgagaccattcgcgtgcgcagcatcgtcggtcgtttcctcgagcattcgcgggccttctgcttcacgaacggtggcaaccactcggtgtggatcgggtcggcagatctgatgcatcgaaacttggatcgacgggtcgaggcactcgtgagcctcgaagaccccgagcacgtcgcggagctctacgacctcttcgacctcgccttctctcccactaccgccgcatgggatctcgatgttcacggttcatggaatcgccgactcaccgacgagtcggggtctgcgctccaggacctccaggagtacctcatccgcgagaagaccaagcgcaccaccgccctggggagcgcgtga

SEQ ID NO: 251250 - DNA, 306 bp, Unknown
  Bacterial polypeptide expressing nucleotide sequence isolated from the Sargasso Sea
catgacgtcggttgaactcgcgcccgagctctacctcaaccgggaactggcctggattgacttcaaccaacgggtgttggcccaggccatggacccccgcacgccactgctggagcaggccaaattcagcgcgatcttcagcaacaacctcgacgaattcttcatggtgcgggtggcgtcgctgaagtcacaggtggaagccggcatcgagaccccaagcgtcgatggcctcaccccgctggagcaaatgacggcgatccaagcaagttgcgaccactgcttgagcagcagcagcagcactaccgc

SEQ ID NO: 251251 - DNA, 471 bp, Unknown
  Bacterial polypeptide expressing nucleotide sequence isolated from the Sargasso Sea
atttatttgttaggggtgtttgttgtttaagaccaggagttaaagatagatcagaaaacatagttgtaaaaagtatcataggaagatttttagagcattctagaatttattgttttagcaatggttcaaaaaaaatgcctaatagaaatgcaaaagtatatatttcttcagctgatttaatgccaagaaatttaaatagaagagtagaacttctagtgccaattgaaaatgaaactgttcatgaacagattttagatcaaataatgttagcaaattatcttgatactaatcaaagctgggagctcaatgctgatggtaattataaaaaaattaaatatagtaagatcgattccttttcagctcatgaatattttatgaataatccgagcttatctggaagaggtaaagctaaactaaaaatgcagcctaaacaactgcacttaaggttgattaaaagtggaagtaattaaa

SEQ ID NO: 251252 - DNA, 959 bp, Unknown
  Bacterial polypeptide expressing nucleotide sequence isolated from the Sargasso Sea
aacagcattaaaaaaaagacgtcgtggtgaggttgttggtttatacgttcaaggtagagtagaaaagaaattactaaactttctaagaaaatctttaaaggttaaagatgaaagtatttttcgcttaaaatcaattttagatgttagttctcttaatgaactaattgatgaaaaaaaattatccctttgcttcaaaccttttaaatcaagatacccgcaaagaatactagattttaaaggaaaatgtttttctgccattaaaaaaaaggatatacttatacatcatccattcgaaagttttgatgttgtagttaactttttacaacaggcatcaaaagatcctaaagttatttcaattaaacaaactctttacagaactagttctgaatcaccaattattgaggcattaaagacagcatcaaataatgggaagtctgtaacagcagtagttgagttaaaagcaaggtttgatgaggaaaaaaatatacagtgggcaaaggatcttgaaagatcaggggtaaacattgtttatggttttctcaaatggaaaacacatgcaaaaatttctttgatttcaagacaagaagatgatgatataacctcttatgttcattttggaactggaaattatcatccgattaatgctaaaatttatacagacctatcgtatttttcttgtaacgaggaattggtgaatgatgccttaaaaatttttaattttattacaggttatacaaaacctcaaaaaatgcagttggtttcatattcgccaactttacttagaaactttatgatagagctcattgataacgaaataattaactcaaagaaaaaattgccagcagaaatttggattaaagttaattcattaattgatgatgaaatcatcgataaactttatgaagcctctcaagcaggagtaaaaatttttcttatagttagaggaatatgtggtttac

SEQ ID NO: 251253 - DNA, 717 bp, Unknown
  Bacterial polypeptide expressing nucleotide sequence isolated from the Sargasso Sea
gcatcaaacggtatgtgcatctaggcaccggcaattaccacacaaaaacgaccaagctatacacagattatggcctgatgacctgcgaaaagagtatgggccaggacgtgcacaagatatttcaggaattgacgggtatgggtaaggcggcccggctgaagcagctcaagcattcgccgttcaccctacacccctcgattatcgagtggatcgactttgaaaccgcacaagcccaggccggtaaacctgcacgcattattgccaagttcaattccctgacagaaaaaaatatcatgcaggccctgtaccgggccagccaagcgggcgtggaaatcgacctaatcatacggggcatatgctgcctgaggcccggaattcctggcctgtcggagaacattcgcgtgcgttctattatcggccgctttctggaacacacccgcatctaccatttccaccacggcggtgacgaactggtgtattgctccagcgccgactggatggagcgcaatctgttcaaccgtgtggaaacgtgttttccgatcaatgaccccgctctcaaggcacagatcttggagcagggcctgcatatctatttgcgagacaactctcgcgcctgggaactgcagccagacggccactaccagcgggtgcaaccacaaaacggcgaagagcatttcattgcccaacagagcctgctcgatacactagggggatgaa

SEQ ID NO: 251254 - DNA, 190 bp, Unknown
  Bacterial polypeptide expressing nucleotide sequence isolated from the Sargasso Sea
ttgaaatctaaatatataaatagagagctttcttggttaaaattcaacgatagagtacttttagaggcgcaaaatatcgaaaatcctctttatgaaagagtaaagtttttatcaattgctgggtctaatctagatgaattttttatggtccgtgtagctgggttatatagtcaaataaaacaagaagtga

SEQ ID NO: 251255 - DNA, 545 bp, Unknown
  Bacterial polypeptide expressing nucleotide sequence isolated from the Sargasso Sea
tatgtcgaaagcattattttcagaaaaatctaatattagcaatcaactcataaacagagaattatcttggcttcagtttaatgatcgtgttttagaagagtcaaaagatgaagcaaatcctctattcgaaagagtaaaatttttatcaatcgcaggtacaaatttagatgaattttttatggtaagagtcgctggactttttaatcaaattaaagatggttttgacgaattaagcgcagatggattaactgcagaggatcaattgaatagggtcgtattaaaaactaaagatctattaaagaagcaaaacgaagcattcctagagttgaaaaaagagctatcgaaagaaaaaattttcattcgaaaaatatcagaactaaataagaaggatcttatgtatctaagagaatattttcaggaaacaatttatcctataataacacctactgccattgacccatcacatccctttccttttataccaaataaaggccaagcaattttactaagaatgactagaataaaaaaaaaaagagaactaaatg

SEQ ID NO: 251256 - DNA, 256 bp, Unknown
  Bacterial polypeptide expressing nucleotide sequence isolated from the Sargasso Sea
tatgttaaaaaaaaataccgcttataactatgcaaacagggaattgtcttggctaaaattcaatgaaagagtcttaagtcagacatctgatagtaaaattccacttttagaaagggttagatttttatcaatagcattctctaatttagatgaattttttatggttagagtagcaggattgaatgttcaaaaattttcacgaaataaaagttttgatggatataacaccacaacaacaactcaagctgatagataa

SEQ ID NO: 251257 - DNA, 322 bp, Unknown
  Bacterial polypeptide expressing nucleotide sequence isolated from the Sargasso Sea
atgtcgaaagcatcattttcagaaaacgctaatattagcaatcaactcataaacagagaattatcttggcttcagtttaatgatcgtgttttagaagagtcaaaagataaaacaaatcctctatttgaaagagtaaaatttttatcaatcgcaggtacaaatttagatgaattttttatggtaagagtcgctggactttttaatcaaattaaagatggttttgacgaattaagcgcagatggattaactgcagaggatcaattaaacagggtcgtattaaaaactaaagatctattaaagaagcaaaacgaagcgttcctag

SEQ ID NO: 251258 - DNA, 752 bp, Unknown
  Bacterial polypeptide expressing nucleotide sequence isolated from the Sargasso Sea
aatgaaaagccagactgatgtttttattaatagagaattaagttggattgaattcaataaaagagtactccttactggtatggaaaaggagtacaaaactctagataaagtgaaattttgttcaatttttagtaataatcttgatgagttttttatggtaagagtagcttcattaaaagctcaagttgaagcagaaattactaaaaaaagtattgatggactcacccctaaagagcaattaaaaaaaatcaataatgaaataaaaaaattaactattctccaagaaaactatgtaaataatgaattaaaaaatgaattaaaagaaaaaggtgtatttttaaaaaaatataaggaactaagagaaaatcaaagaaattggtgtaataacttctttacaacatctattttccctttattaactccattagttgttgatccggcacatccatttccttttataagtaatttaagtctaaatttagcagctttaataaaggatgaggaggattctaaaaatcagttcgtcagagtaaaaataccaacaaaaaatataccccgatttatacgaattcccaatgaaattactcaacttaatgatgaaagttctcactatttcataagtgttgaagatttaattgggaataatataaatactttatttaatggaatggaatgtataaattactctttttttagagtaacaagagatgcagatttagaattaaaagaactgaagcagatgatctacttta

SEQ ID NO: 251259 - DNA, 782 bp, Unknown
  Bacterial polypeptide expressing nucleotide sequence isolated from the Sargasso Sea
agctaaaacgcgaagctatgttcacttaggtacaggaaactatcatccaattaacgcaaaaatttatactgacttatcactgtttagctctaatcaagacttggccaaagatgtcgaaaaatttttcaattatgtaactggttatgcaaaaccaaaaaaattgaataaaatttttatgtccccattaaatagtaggaatttttttgaagaaaaaattgaaaatgaaattgtaaatgcaaaaaaaggaaaacctgcagaaatatgggcaaaaatgaattctcttgtagaccctggaattattaagaaattttatgaagcttcaaatgcaggagtaaaaataaatttatcagtaagaggagtgtgttgcttaagacccggaattaaaggtcaatctgaaaatataaaagtaaaaagccttattggcagatttttagaacactcaagaatttattgttttgcaaatggtagctctatgccctctcgagagaatcaggtatatatttcatctgcagatttaatgcctagaaatttagatagaagaattgaaattataattccgatagaaaacaatactgtgcatgagcaaattttagatcaaattatgttagctaactttaaagataaatcagaaacatggtatttagatagcttgggaaactaccataaagaacaggaaaaaggcttttccgcacattcctatttcatgaagaacccaagtttatcaggtcgtggtaagtcaattttaagagctaaacctcaaaatttaagactagtaaaatgaa

SEQ ID NO: 251260 - DNA, 960 bp, Unknown
  Bacterial polypeptide expressing nucleotide sequence isolated from the Sargasso Sea
ttatgaaagagtaaagtttttatcaattgctgggtctaatctagatgaattttttatggtccgtattgcaggattatatagtcaaataaaacaagaagttgactcactaagttctgatggtttgacacctgaagagcaaatggatgaggtagttcttgaaactaagaatctattaaaaaaacagaacaaaatttttattcaactgattaaggaattaaaaaaaaataatatcagtttagttaaaccagttaatttaaatactaaggataaaaaaaaacttctagaaatatttaaagaagagatttaccctttattaacgccatcagcaattgatcctgcacacccatttccttttataatcaatcaaggaagagcaattgtaatgaagttaagaaaaaaaaataaaaaaaggattttaaactcaataattgtaataccaaaagcattatctagatttattgaaatagagtcttcaaaaaatcataagaagtttgttattctagatgacgtaataagtttttttgctaatgaaatttttccagatcatgatttagaaaagaaaatgatttttagagtaatacgagacagtgatgtagagattcaagaggaagcagaagatttagttagatcttttgaattggctttaaaaagacgtagaacgggtgatattgttcgtttagaggttcttgaaaatagcgataacgaattggtaagatttataactaataaattagatataaatcctgactatatttatgatgtatctggccttgttggaattcaagatatagatcaaatatgtaaagtaaaaaatccaaaattaagatttaagcattttacgcctagagaagttgaaagattaaaagaatataatgataatttttttgaaactattaaaaagaaagatttagttgttcatcatccttttgaaacatttgactcagtaattgaatttttaaa

SEQ ID NO: 251261 - DNA, 329 bp, Unknown
  Bacterial polypeptide expressing nucleotide sequence isolated from the Sargasso Sea
gctgaaatctagatatataaatagagagctttcatggttaaaattcaacgacagagtacttttagaggcgcaaaatatcgaaaatcctctttatgaaagagtaaagtttttatcaattgctgggtctaatctagatgaattttttatggtccgtgttgctgggttatatagtcaaataaaacaagaagttgactcactaagctctgatggtttgacacctgaagagcaaatggatgaggtagtgcttgaaactaagaatctattaaaaaaacagaacaaaatttttattcaactgattatggaattaaaaaaaaataatatcagtttag

SEQ ID NO: 251262 - DNA, 841 bp, Unknown
  Bacterial polypeptide expressing nucleotide sequence isolated from the Sargasso Sea
ttaaactcaataattgtaataccaaaagcattatctagatttattgaaatagagtcttcaaaaaatcataagaagtttgttattctagatgacgtaataagtttttttgctaatgaaatttttccagatcatgatttagaaaagagaatgatttttagagtaataagagacagcgatgtagagattcaagaggaagcagaagatttagttagatcttttgaattggctttaaaaagacgtagaacgggtgatattgttcgtttagaggttcttgaaaatagcgataacgaattggtaagatttataactaataaattagatataaatcctgactatatttatgatgtatctggccttgttggaattcaagatatagatcaaatatgtaaagtaaaaaatccaaaactaagatttaagcattttacgcctagagaagttgaaagattaaaagaatataatgataatttttttgaaactattaaaaagaaagatttagttgttcatcatccttttgaaacatttgactcagtaattgaatttttaaatcaagcagcaaatgataaaaaagttatagctattaaacaaactttatatagaacaactctagactcaccaattgttaaagctttaataacagctgcagaaaacggaaagacagttaccgctttaattgaaattaaagctagatttgatgaggaagctaatattcaactatcaagaagtttagaaaaagtaggtgttcaaattgtttatggttttgctaaatataaaactcatgcaaaatcatcactagttttaagaagagaacaaggtaaaatacaaacctattttcatttaggaa

SEQ ID NO: 251263 - DNA, 307 bp, Unknown
  Bacterial polypeptide expressing nucleotide sequence isolated from the Sargasso Sea
ttgaaatctaaatatataaatagagagctttcttggttaaaattcaacgatagagtacttttagaggcgcaaaatatcgaaaatcctctttatgaaagagtaaagtttttatcaattgctgggtctaatctagatgaattttttatggtccgtgtagctgggttatatagtcaaataaaacaagaagttgactcactaagctctgatggtttgacacctgaagagcaaatggatgaggtagtgcttgaaactaagaatctattaaaaaaacagaacaaaatttttattcaactgattatggaattaa

SEQ ID NO: 251264 - DNA, 868 bp, Unknown
  Bacterial polypeptide expressing nucleotide sequence isolated from the Sargasso Sea
tatgtcgaaagcatcattttcagaaaacgctaatattagcaatcaactcataaacagagaattatcttggcttcagtttaatgatcgtgttttagaagagtcaaaagataaaacaaatcctctatttgaaagagtaaaatttttatcaatcgcaggtacaaatttagatgaattttttatggtaagagtcgctggactttttaatcaaattaaagatggttttgacgaattaagcgcagatggattaactgcagaggatcaattgaatagggtcgtattaaaaactaaagatctattaaagaagcaaaacgaagcattcctagagttgaaaaaagagctatcgaaagaaaaaattttcattcgaaaaatgtcagaactaaataagaaggatcttatgtatctaagagaatattttcaggaaacaatttatcctataataacacctactgccattgacccatcacatccctttccttttataccaaataaaggccaagcaattttactaagaatgactagaataaaaaaaaaaagagaactaaatgcaattatagttataccaagagcacttccaaaatttgtatctctaaacaattctgaaacaataaatgaatttgtcacaattgatgacgtaatttgtaaatttgctaatgaaatatttccagaccataatatcgaggcaagtttgcagtttaaaataattagagacagcgaaattgaaatagatgatgaagctgctgatcttgtgagatattttgaaaaagcaattaagaaaagaagaaggggaaacgtagttaaactcgaagtactcactaattcaaacaaaaaacttttaaattttatttcaaaaaaatttaaaatggatgaa

SEQ ID NO: 251265 - DNA, 765 bp, Unknown
  Bacterial polypeptide expressing nucleotide sequence isolated from the Sargasso Sea
taactcaataattgtaataccaaaagcattatctagatttattgaaatagagtcttctaaaaatcataagaagtttgttattctagatgacgtaataagtttttttgctaatgaaatttttccagatcatgatttagaaaataaaatgatttttagagtaataagagacagcgatgtagagattcaagaggaagcagaagatttagttagatcttttgaattggctttaaaaagacgtagaacgggtgatattgttcgtttagaggttcttgaaaatagcgataacgaattggtaagatttataactaataaattagatataaatcctgactatatttatgatgtatctggccttgttggaattcaagatatagatcaaatatgtaaagtaaaaaatccaaaattaagatttaagcattttacgcctagagaagttgaaagattaaaagaatataatgataatttttttgaaactattaaaaagaaagatttagttgttcatcatccttttgaaacatttgactcagtaattgaatttttaaaccaagcagcaaatgataaaaaagttatagctattaaacaaactttatatagaacaactctagactcaccaattgttaaagctttaataaccgctgcagagaacggaaaaacagttaccgctttaattgaaattaaagctagatttgatgaggaagctaatattcaactatcaagaagtttagaaaaagtaggtgttcaaattgtttatggttttgctaaata

SEQ ID NO: 251266 - DNA, 808 bp, Unknown
  Bacterial polypeptide expressing nucleotide sequence isolated from the Sargasso Sea
aaaagaagaaggggaaacgtagttaaactcgaagtactcactaattcaaacaaaaaacttttaaattttatttcaaaaaaatttaaaatggatgaagatcatatttatgaggttgaaggattggttggaatacaagatatagatgaaatttgtaaaaagaaagatccaaatctgagatttaaaaagtttaatcctagagaagttgaaagattgaaggaatttgatgataaatttttttcagctataagaagtaaagattttgttgtacaccacccttttgaaacttttgatgtagtaattcaatttttagaagctgcagcaaaagatcccaaagttatcggtatcaaacaaactttgtatcgaaccacacctgactctcctatcgtaaaagcacttagtagagcagcagaaaacggaaaagttgttacagccgtaatagaaataaaagctcgatttgatgaggaagctaatattgaattatctaggaaactagagaaagctggtgttcaaattgtttatggattcgcaaaatataaaacgcatgcaaaggcaagtttagttttaagaaaagaaggagctaaaacgcgaagctatgttcacttaggcacaggaaactatcatcctattaacgcaaaaatttatactgacttatcactgtttagctctaatcaagacttggccaaagatgtcgaaaaattttttaattatgtaactggttatgcaaaaccaaaaaaattgaataaaatttttatgtctccattaaatagtaggaatttttttgaagaaaaaattgaaaatgaaatagtaa

SEQ ID NO: 251267 - DNA, 994 bp, Unknown
  Bacterial polypeptide expressing nucleotide sequence isolated from the Sargasso Sea
tttctagagttgaaaaaagagctatcgagagaaaaaatttcatttcggaaaatatcagaactaaataggaaggatcttatgtatctaagagaatattttcaggaaacaatttatcctataataacacctactgccattgacccatcacatccctttccttttataccaaataaaggccaagcaatcttattaagaatgagcagaattaaaaaaaaaagagaactaaacgcaattatagttataccaagagcgcttccaaaatttatatcgttaaacaattctgaaaaaataaatgaatttgtgaaggttgatgacgtgatttgtaaatttgccaacgaaatatttccggaccataatatcgaggcaagtttgcagtttaaaataattagagacagtgaaatcgaaatagatgatgaagctgctgatcttgttagatattttgaaaaagcaataaagaaaagaagaaggggaaacgtagttaaacttgaggtacttactaattcaaataaaagccttttaaatttcatttcaaaaaaatttaaaatgaatgaagatcgtatttatgaagttgaaggattagttggaatacaagatatagatgaaatttgtaaaaagaaagatccaaagctgagatttaaaaagttcaatcccagagaagttgaaagattgaaggaatttgatgataaatttttttcagctataagaagtaaagattttgttgtacaccacccttttgaaacttttgatgtagtaattcaatttttagaagctgcagcaaaagatcccaaagttatcggtatcaaacaaactttgtatcgaaccacacctgattctcctatcgtaaaagcactaagtagagcagcagaaaacggaaaagttgttacagccgtaatagaaataaaagctcgatttgatgaggaagctaacattgaattatctaggaaactagagaaagctggcgttcaaattgtttacggatcgcaaaatacaaaac

SEQ ID NO: 251268 - DNA, 841 bp, Unknown
  Bacterial polypeptide expressing nucleotide sequence isolated from the Sargasso Sea
tctgaaatttttccagatcatttattagaaaagaaaatgatatttagagtaataagagatagtgatgtagaaattcaagaagaggctgaggatttagtcagatcatttgaactagcattaaagcgaagaagaactggtgatattgttagattagaaattttagaaaaaagcgacaaagaacttgtaaaatttataacaaataaattagaaattaatccaaattatatttatgaagtagcaggtttagttggaatccaggatatagaccaaatttgtaaaattaaaaattctaaattaaaatttaaaaactttacaccaagagaagtagaaagattaaaagaatacaataataatttttttgagacaattaagaaaaaagacctaatagttcatcatccatttgagacttttgatgctgtaattgaatttttaaatcaagctgctatggataaaaaagtaattgctattaaacaaacattgtacagaactactttagattcaccaattgttaaagcattaattagcgcttccgaaaatggcaaaacagttactgctttaattgaaatcaaagctagatttgatgaagaagcaaatatacagctggcaagaagtcttgaaaaagctggagttcaaattgtttatggttttgcaaaatacaaaacacatgctaaatcatcactaatacatcgacgtgagggtggtaaaattcaaacatatttccatttaggtactggcaattatcatcctgtaaatgcaaaaatatacacagacttatctctatttagctctgataaaaaaatggctgcagatgtagaaaaattctacaattacgtgactggat

SEQ ID NO: 251269 - DNA, 739 bp, Unknown
  Bacterial polypeptide expressing nucleotide sequence isolated from the Sargasso Sea
catgagtgcagctgtcctccccaagaatgcctacatcaaccgggaactgagctggatcgccttcaaccagcgtgtgctggctcaggcactggatgaacgcacaccagtgctggatcaggccaagttcagcgccatcttcagcaacaacctcgacgaatttttcatggtgagggtggcctccctgaaatcccaggtggaggcaggcatcaccagccccagtgaagacggcaaaacgccgctggagcagctgctcaccatccgcgaacacctgatccccctgctgcagcaacagcaggatcactaccggctgcatctgaagagcgagctgctcaaacacaaggtgcacctgctggattacgtccagctgaacgatgcccagaagaactgggttgacgacaccttccatacctcggtgttccccttgctgacgcccctgggagtggatccggcccaccccttcccgttcgtcagcaacctcagcctgaacgtcgcagcgatcatccacgatcctgaaaccggagaacgtcagttcgcgcgggtcaaggtgccccagaagaatctgccccgattcgtcgcgatcccatcggaactaagcgatgccgaaccggcaccgattcacacggcgattccccttgaacaggtgatcgccttcaacctggagctgctgtttcccgggatgaccgttgaagggcattacttcttccgggtcacccgcgatgccgacctcgaactgcgtgac

SEQ ID NO: 251270 - DNA, 895 bp, Unknown
  Bacterial polypeptide expressing nucleotide sequence isolated from the Sargasso Sea
aataatatcagtttagtaaacccagttaatttaaatactaaggataaaaaaaaacttctagaaatatttaaagaagagatttaccctttattaacaccatcagcaattgatcctgcacacccatttccttttataatcaatcaaggaagagcaattgtaatgaagttaagaaaaaaaaataaaaaaaggattttaaactcaataattgtaataccaaaagcattatctagatttattgaaatagagtcttcaaaaaatcataagaagtttgttattctagatgacgtaataagtttttttgctaatgaaatttttccagatcatgatttagaaaagaaaatgatttttagagtaataagagacagcgatgtagagattcaagaggaagcagaagatttagttagatcttttgaattggctttaaaaagacgtagaacgggtgatattgttcgtttagaggttcttgaaaatagcgataatgaattggtaaaatttattacaaataaattagatataaactctgactatatttataatgtatctggccttgttggaattcaagacatagatcaaatatgtaaagtaaaaaatccaaaattaagatttaaacattttatacctagagaagttgaaagattaaaagaatataatgataattttttcgaaactatcaaaaagaaagatttagttgttcatcatccttttgaaacatttgactcagtaattgaatttttaaatcaagcagcaaatgataaaaaagttatagctattaaacaaactttatatagaacaactctagactcaccaattgttaaagctttaataacagctgcagaaaacggaaaaacagttaccgctttaagtgaaattaaagctagatttgatgaggaagcta

SEQ ID NO: 251271 - DNA, 482 bp, Unknown
  Bacterial polypeptide expressing nucleotide sequence isolated from the Sargasso Sea
ggcttctgcagcgggagtaaaaattgaattgttcattagaggaatttgctgcttaagaccaggagtaaaaaaactctctgaaaatattgttgttaaaagtatcattggccggtatttagagcatgctagaatcttctgttttgcaaacgaatctaatataccatcaaaaaacaacaccgttttaattggatcagctgatcttatgcctagaaatctggatagaagagttgaaatattaacccccataaagaactccactgtccatgagcaaatattgaatcaaataatggttgccaatttcctagataatgagcaaacgtggataatgaacgatgatggcacatacaaaagagttaaacaaaaaggtaagacgtttaatgcacataaatacttcatgtcaaatccaagtttgtcaggtagagggaaattaaaaggaaatagaaagcctaagaaactactctctctgatgcattatgaataat

SEQ ID NO: 251272 - DNA, 952 bp, Unknown
  Bacterial polypeptide expressing nucleotide sequence isolated from the Sargasso Sea
aaaaataaaaaaagatataaaaattcaatcatcgtaattcccaaagctttatcaagatttatagaaatagatggaggaaaaaattacaaaaaatacgttattcttgatgatataattagttttttttcctctgaaatttttccagatcacaatctagagagtaaaatgatatttagggttattagagatagtgacgtcgaaatacaagaggaagctgaagatctggtaagatcatttgaattagcactcaagagaagaagaattggagatatagttcgtttagaagtaatcaaaaacagtaataaagatttaataaaatttattactaataaactagaagtaaacccagattatatatacgaaacagaaggacttgtaggtattgaagatatagatcaaatatgtaagttaaaaaactctaaactcagatttaaaaattttaatcctcgagaagtagaaagattaaaagaatttaataacaatttttttgatactataaaacaaaaagatttagttgttcatcacccctttgaaacatttgatgccgtaattgaatttttaaatcaagccgcttatgataaaaaagttattgcaataaaacaaaccctttatagaacaactttagactcacccatagttaaagcgcttatctcagctgcagaaaatggaaaaactgtcacagctcttattgaaattaaagcgagatttgatgaagaggccaatattcaattagctagaagtttagaaaaagctggggttcaaattgtttacggttttgcaaagtataagacacacgctaagtcttctttagtgcttagacgagaactaggtaaaatacaaacctatgttcatttaggtactggaaattatcaccctgtaaacgcaaaaatttacacagacttatctttatttagctccaataaaaaaattgctggtgatgtagaaaaaattt

SEQ ID NO: 251273 - DNA, 347 bp, Unknown
  Bacterial polypeptide expressing nucleotide sequence isolated from the Sargasso Sea
gatgagcatccgtcaaaacacgacagaaagcagagtcgcttcatcgactcgtgctccggtgaaacccaagaaaaaccggaaatcggctctccccctggaccatcccagtctttataccaaccgtgaattgagttggcttgaattcaatcaaagagtgttggatcaggctctggacgaaagacacccgcttttggaaagggttaaattcctggcgattacggggaccaatctcgatgaatttttcatggtccgtgtagccaccatcctgcgtcagatcaaaaacggaagtgaaagtctgacttcagacggactgactcctaaacagcagttttctgaaatccatggac

SEQ ID NO: 251274 - DNA, 658 bp, Unknown
  Bacterial polypeptide expressing nucleotide sequence isolated from the Sargasso Sea
tatggaatattgtcatccaataataaaatggctgaagatgtacagaaattttttatgcagctaacaggatcaaataaaaagttcaattacaaccatttaatcctatctccttttgatgcaagccaagaaattatcaaaaaagtaaataatgaaattaaaaattgcaagaaaggcagggaggcaatcatcaaagctaagatgaatcagctcacagaaatcaatattatcaagaaattatatcaagcatcatctgcaggcgttaaaatagaattacatattagaggagagtgcagactaataccaggagtcaaaggtatctccgataacataaaagtatattcgactatagggagatttttggaacactctagagtatattatttttatgatgtaggcaaagaacaagtctatttatcgagcgcagactggatgacacgtaatatgcataatagagtagaaataatatttccaattctagaaaagaatcataaatcacgaatttatcatgaatgctttatatatccactggaagataattcaaatctatggaaattaaaaaataatggatcttatgataaggttaaaattcaaagaggctctagaagaaatttatcacaagttgtaatatgtaataaatatggagagtttattgactgag

SEQ ID NO: 251275 - DNA, 769 bp, Unknown
  Bacterial polypeptide expressing nucleotide sequence isolated from the Sargasso Sea
gttggaattcaagatatagatcaaatatgtaaagtaaaaaatccaaaattaagatttaagcattttacgcctagagaagttgaaagattaaaagaatataatgataatttttttgaaactattaaaaagaaagatttagttgttcatcatccttttgaaacatttgactcagtaattgaatttttaaaccaagcagcaaatgataaaaaagttttagctattaaacaaactttatatagaacaactctagactcaccaattgttaaagctttaataacagctgcagaaaacggaaaaacagttaccgctttaattgaaattaaagctagatttgatgaggaagctaatattcaactatcaagaagtttagaaaaagtaggtgttcaaattgtttatggttttgctaaatataaaactcatgcaaaatcatcattagttttaagaagagaacagggtaaaatacaaacttattttcatttaggaactggcaattatcatccagtaaatgctaaaatttatactgatttgtctttatttagttgtgataagaaaatggcatcagatgttgaaaagtttttcaattatgtaacaggatacgcaaaaccaaaaaatttaaataaaatttctatttcgccagtaaatatgaggcaaaccttaaatgaaaatattgatgctgaaattaaaaattctaaaaatggacaatttgcagctatttgggcaaaaatgaactctttagtagatccagaaattattgataaattttatgaag

SEQ ID NO: 251276 - DNA, 169 bp, Unknown
  Bacterial polypeptide expressing nucleotide sequence isolated from the Sargasso Sea
gttgaaatctaaatatataaatagagagctttcttggttaaaattcaacgatagagtacttttagaggcgcaaaatatcgaaaatcctctttatgaaagagtaaagtttttatcaattgctgggtctaatctagatgaattttttatggtccgtgtagctgggttatat

SEQ ID NO: 251277 - DNA, 178 bp, Unknown
  Bacterial polypeptide expressing nucleotide sequence isolated from the Sargasso Sea
atgttaaaaaaaaataccacttataactatgcaaacagggaattgtcttggctaaaatttaatgaaagagtcttaagtcagacatctgatagtaaaattccacttttagaaagggttagatttttatcaatagcattctctaatttagatgaattttttatggttagagtagcaggat

SEQ ID NO: 251278 - DNA, 598 bp, Unknown
  Bacterial polypeptide expressing nucleotide sequence isolated from the Sargasso Sea
aatgaaaagccaggctgacgtctttattaatagagaattaagttggattgaatttaataaaagagtactcctaactggtatggaaaaggagtacaaaatcctagataaagtaaaattttgttcaatttttagtaataatctagatgaattttttatggtaagggtagcttcactaaaagctcaagttgaagcaggcattacaaaaaaaagcgttgatgggcttacccctaaagagcaattaacaaaaataaataatgaagtaaagaaattaactaccctacaagaaaactatataaataatgaattaaataatgaattaaaagaaaaaggtgtaattttaaaaaaatataatgacctaagtgaaaatcaaaaaaattggtgcaataactactttatttcatctatttttcctttattaactccattagttgttgatccagcacatccatttccttttataagtaatttaagtctcaacttggcagctttaataagggatggggaagattctaaaaatcagtttgtcagagtaaaaataccaacaaaaaatacaaatagatttatacaaattcccaatgaaattattcaacatggtgat

SEQ ID NO: 251279 - DNA, 316 bp, Unknown
  Bacterial polypeptide expressing nucleotide sequence isolated from the Sargasso Sea
tatgactgctttaaaaaaacaacataaagaagagctaaaatctaaatatattaatagagagctttcttggttaaaattcaacgacagagtacttttagaggcgcaaaatatcgaaaatcctctttatgaaagagtaaagtttttatcaattgctgggtctaatctagatgaattttttatggtccgtgttgctgggttatatagtcaaataaaacaagaagttgaatcattaagttctgatggtttgacacctgaagagcaaatggatgaagtagtgcttgaaactaagaatttattaaaaaaacagaataaaatt

SEQ ID NO: 251280 - DNA, 697 bp, Unknown
  Bacterial polypeptide expressing nucleotide sequence isolated from the Sargasso Sea
gctaatattcaactatcaagaagtttagaaaaagtaggtgttcaaattgtttatggttttgctaaatacaaaactcatgcaaaatcatcacttgttttaagaagagaacagggtaaaatacaaacttattttcatttaggaactggcaattatcacccagtaaatgctaaaatttacactgatttgtctttatttagttgtgataagaaaatggcatcagatgttgaaaagtttttcaattatgtaacaggatacgcaaaaccaaaaaatttaaataaaatttctatttcgccagtaaatatgaggcaaaccttaaatgaaaatattgatgctgaaattaaaaattctaaaaatggaaaatttgcagctatttgggcaaaaatgaactctttagtagatccagaaattattgataaattttatgaagcttcgaatgctggtgtaaaaattcatttatttgtaaggggtgtttgttgtttaagaccaggagttaaagatagatcagaaaacatagttgtaaaaagtatcataggaagatttttagagcattctagaatttactgctttagtaatggtacaaaaaaaatgcctaatagaaatgcaaaagtatatatttcgtcagctgatttaatgccgagaaatttaaatcgaagggtagaacttctagtcccaattgaaaatgagactgttcatgaac

SEQ ID NO: 251281 - DNA, 891 bp, Unknown
  Bacterial polypeptide expressing nucleotide sequence isolated from the Sargasso Sea
gcagaagatttggttagatcttttgaatcggctttaaaaagacgtagaacgggtgatattgttcgtttagaggttcttgaaaatagtgataacgaattgataagatttataactaataaattagatataaatcctgactatatttatgatgttgctggccttgttggaattcaagatatagatcaaatatgtaaagtaaaaaatccaaaattaagatttaaacattttacacctagagaagttgaaagattaaaagaatataatgataatttttttgaaactattaaaaagaaagatttagttgttcatcatccttttgaaacatttgactcagtaattgaatttttaaaccaagcagcaaatgataaaaaagttatagctataaaacaaactctatatagaacaactctagactcacctattgttaaagctttaataacagctgcagaaaacggaaaaacagttaccgctttaattgaaattaaagctagatttgatgaggaagctaatattcaactatcaagaagtttagaaaaagtaggtgttcaaattgtttatggttttgctaaatataaaactcatgcaaaatcatcattagttttaagaagagaacagggtaaaatacaaacttattttcatttaggaactggcaattatcatccagtaaatgctaaaatttatactgatttgtctttatttagttgtgataagaaaatggcatcagatgttgaaaagtttttcaattatgtaacaggatacgcaaaaccaaaaaatttaaataaaatttctatttcgccagtaaatatgaggcaaaccttaaatgaaaatattgatgctgaaattaaaaattctaaaaaatggaaaatttgcagctatttgggcaaaaatgaa

SEQ ID NO: 251282 - DNA, 451 bp, Unknown
  Bacterial polypeptide expressing nucleotide sequence isolated from the Sargasso Sea
ggtgtatgttgtttaagacctggtattaaaaataaatcggaaaatattattgtaaaaagtatcattggaagatttcttgaacactcaagaatatattgttttgcaaatggaaaattaatgcctaacagaaatgcaaaagtttatatttcatctgcagatttgatgccaagaaatctagatagaagagtcgaacttctcgtgccaattgaaaatcaaactgttcatgaacaggttttagaccaaataatgatggccaattatctagacacgaatcagagctgggaactttatcctaatggaaattatcaaaaaattaaatatagtcgaaaagattctttttctgcacatgattatttcatgaataatccaagtttatcaggaagaggaaaggcaaaactaaaaattaaacctaaaaaattaaacttaaggttggttaaagatggaacttaaa

SEQ ID NO: 251283 - DNA, 837 bp, Unknown
  Bacterial polypeptide expressing nucleotide sequence isolated from the Sargasso Sea
aaaaaaagagaactaaacgcaattatagttataccaagagcacttccaaaatttatatctctaaaaaattctgaaacaataaatgaatttgtcacaattgatgacgtaatttgtaaatttgcaaatgaaatatttccagaccataatatcgaggcaagtttgcagtttaaaataattagagacagcgaaattgaaatagatgatgaagctgctgatcttgtgagatattttgaaaaagcaattaagaaaagaagaaggggaaacgtagttaaacttgaagtactcactaattcaaataaaaaccttttaaattttatttcaaaaaaatttaaaatggacgaagatcatatttatgaggttgaaggattggttggaatacaagatatagatgaaatttgtaaaaagaaagatccaaagctgagatttaaaaagtttaatcctagagaagttgaaagattgaaggaatttgatgataaatttttttcagctataagaagtaaagattttgttgtacaccacccttttgaaacttttgatgtagtaattcaatttttagaagctgcagcaaaagatcccaaagttatcggtatcaaacaaactttgtatcgaaccacacctgactctcctatcgtaaaagcactaagtagagcagcagaaaacggaaaagttgttacagccgtaatagaaataaaagctcgatttgatgaggaagctaatattgaattatctaggaaactagagaaagctggcgttcaaattgtttacggattcgcaaaatacaaaacgcatgcaaaagcaagtttagttttaagaaaagaaggagcaaaaacgctaagc

SEQ ID NO: 251284 - DNA, 833 bp, Unknown
  Bacterial polypeptide expressing nucleotide sequence isolated from the Sargasso Sea
cgataatgaattggtaaaatttataactaataaattagatataaatcccgattatatttacgatgtatctggccttgttggaattcaagatatagatcaaatatgtaaagtaaaaaatccaaaattaagatttaagcattttacacctagagaagttgaaagattaaaagaatataatgataacttttttgaaactattaaaaagaaagatttagttgttcatcatccttttgaaacatttgactcagtaattgaatttctaaaccaagcagcaaatgataaaaaagttatagctattaaacagactttgtatagaacaactctagactcaccaattgttaaagctttaataacagcagcagaaaacggaaaaacagttaccgctttaattgaaattaaagctagatttgatgaggaagctaatattcaactatcaagaagtttagaaaaagtaggtgttcaaattgtttatggttttgctaaatataaaactcatgcaaaatcatcattagttttaagaagagaacagggtaaaatacaaacttattttcatttaggaactggcaattatcatccagtaaatgctaaaatttacactgatttgtctttatttagttgtgataagaaaatggcatcagatgttgaaaagtttttcaattatgtaacaggatacgcaaaaccaaaaaatttaaataaaatatctatttcgccagtaaatatgaggcaaaccttaaatgaaaatattgatgctgaaattaaaaattctaaaaatggaaaatttgcagctatttgggcaaaaatgaactctttagtagatccaggaaattattgat

SEQ ID NO: 251285 - DNA, 820 bp, Unknown
  Bacterial polypeptide expressing nucleotide sequence isolated from the Sargasso Sea
gcaaaatataaaacacatgcaaaatcatctttaatattaagaaaagagcagggaaaaattcaaacttatatacatctaggaactggcaattatcacccagttaatgcaaaaatctatactgacttatctttatttagctctgataaaaaaatagcaactgatgtggaaaaattttttaattatgtaaccggttattcaaaaccacgaaatcttagtaaaatatctatatcaccaattaatcttagggaaactttgaacaaatgtattgctaacgagatagcaaatgtcaaaaaaggtaaaaaaggtgaaatatgggccaaaatgaattccttagtagatccagcgataattgataaattttacgaagcttcaaatgctggcgtaaagatatttttatttgtaagaggtgtttgttgtttaagacctggagttaaagataaatctgaaaatataatagttaaaagcatgattggaagatttttggaacactcaagaatttattgttttgcaaatggaaaaacaatgcctagtagagatgcaaaagtttttatttcatcagcagatttaatgccaagaaatttaaatcgaagagtagaacttctagttccaattgaaaaccaaacagtccacgaacaagttcttgatcaaattatgttagctaattatttagataaaaaacaaagttgggaacttgatgctaatggaaattataaaaaaattaaatatagtgaaaatgattctttttcagcccatgattattttatgaataatcctagtttatctggaagaggtaaagctaaattaaaaatgaaaccgaaaa

SEQ ID NO: 251286 - DNA, 479 bp, Unknown
  Bacterial polypeptide expressing nucleotide sequence isolated from the Sargasso Sea
tatgaaatacgaagctaacaattttattaatagagaattaagttggatcgactttaataaaagagttcttcttaccggaatggagaaagactataaagtactggataaaattaaatttttttcaattttcagtaataatcttgatgaattttttatggttagagttgcgtcattaaaagctcaagttgaagccggagttagaaaaaaaagtattgatggacatactcctaaagaacaattaaaaaaaattaacaaagaagtacaaaaactcacatcccttcaagaaaagtattttaataatgaattaaatgaagagcttaaaaataaaggaatttttataaaaaaatatagtgaactcaatgaaaatcaaaaagattggtgtgatagctatttcctatcttcaatttttcctttattaacaccattagtagttgatcctgcgcacccattcccttttataagtaatttaagtcttaatt

SEQ ID NO: 251287 - DNA, 339 bp, Unknown
  Bacterial polypeptide expressing nucleotide sequence isolated from the Sargasso Sea
aaaaaaaaagatttgatagttcatcacccttttgaaacatttgatgctgtcattgagtttttaaatcaagccgcatatgataaaaaagttatagcaattaaacaaaccctatacagaacaactttagactctccaattgttaaagccttaataacagcagctgaaaatggaaagacagtgactgctttaatagagatcaaagcaagatttgatgaagaagcaaacattcaactttcaagaagtttagaaaaggcaggaattcaaatagtttatggttttgcaaaatataaaacacatgcaaaatcatctttaatattaagaaaagagcagggaaaaatt

SEQ ID NO: 251288 - DNA, 238 bp, Unknown
  Bacterial polypeptide expressing nucleotide sequence isolated from the Sargasso Sea
gctgaaatctaaatatctaaatagagagctttcttggttaaaattcaacgatagagtacttctagaagcgcaaaatattgaaaatcctctttatgaaagagtaaagtttttatcaattgctggttctaatctagatgaattttttatggtccgagttgctggattatatagtcaaataaaacaagaagttgactcattaagttctgatggtttgacacctgatgaacaaatggatgag

SEQ ID NO: 251289 - DNA, 847 bp, Unknown
  Bacterial polypeptide expressing nucleotide sequence isolated from the Sargasso Sea
cgacagagtacttttagaggcgcaaaatatcgaaaatcctctttatgaaagagtaaagtttttatcaattgctgggtctaatctagatgaattttttatggtccgtgttgctgggttatatagtcaaataaaacaagaagttgaatcattaagttctgatggtttgacacctgaagagcaaatggatgaagtagtgcttgaaactaagaatttattaaaaaaacagaataaaatttttattaaactgattatggaattaaaaaaaaataatatcagtttagttaaaccagttaatttaaatactaaggataaaaaaaaacttctagaaatatttaaagaagagatttaccctttattaacaccatcagcaattgatcctgcacacccatttccatttataatcaatcaaggaagagcaattgtaatgaagttaagaaaaaaaaataaaaaaaggattttaaactcaataattgtaataccaaaagcattatctagatttattgaaatagagtcttcaaaaaatcataagaagtttgttattctagatgacgtaataagtttttttgctaatgaaatttttccagatcatgatttagaaaagaaaatgatttttagagtaataagagacagcgatgtagagattcaagaggaagcagaagatttagttagatcttttgaattggctttaaaaagacgtagaactggtgatattgttcgtttagaggttcttgaaaatagcgataaagaattggtaagatttataactaataaattagatataaatcctgactatatttatgatgtatctggccttgttggaattcaagatatagatcaaatatgtaaa

SEQ ID NO: 251290 - DNA, 606 bp, Unknown
  Bacterial polypeptide expressing nucleotide sequence isolated from the Sargasso Sea
aatgaaaaataccgcaccagattatcaagaattctatctaaatagagaactgagccaattagaatttaacgcgcgtgttttagagcaagccagagatgaaaacataccggtattagaaagactccgctatctatgcattagtagcagtaatttagatgagttttttgagatacgtgtagcaggactcaaagaacaagaaataagcctaagttcgtttggacaagacacagaaggggaatcaccagccctccagctttccgcaatcgctcgaagggctcgtgatctcgtgaaggatcagtacaacttatataatcaatctgtgctgccaaccatggaagacaaaaagatcttttttttagacaaaaataaatggaatccaacccagagaagatggataagaaactattttcacagggagcttttacctgttcttagtcctgtcagcctggatccctcccaccccttcccaaaggttttaaacaaaaatctgtgtttcgctgtcaatctagacggagttgatgcctatggccggcagggaaacctagctatcttacaagcccccagagcactacctagaatcgttaaaatacccaatacgtcaagaaa

SEQ ID NO: 251291 - DNA, 796 bp, Unknown
  Bacterial polypeptide expressing nucleotide sequence isolated from the Sargasso Sea
catatttatgaggttgaaggattggttggaatacaagatatagatgaaatttgtaaaaagaaagatccaaagctgagatttaaaaagtttaatcctagagaagttgaaagattgaaggaatttgatgataaatttttttcagctataagaagtaaagattttgttgtacaccacccttttgaaacttttgatgtagtaattcaatttttagaagctgcagcaaaagatcccaaagttatcggtatcaaacaaactttgtatcgaaccacacctgactctcctatcgtaaaagcactaagtagagcagcagaaaacggaaaagttgttacagccgtaatagaaataaaagctcgatttgatgaggaagctaatattgaattatctaggaaactagagaaagctggcgttcaaattgtttacggattcgcaaaatacaaaacgcatgcaaaagcaagtttagttttaagaaaagaaggagcaaaaacgcgaagctatgttcacttaggcacaggaaactatcatccaattaacgcaaaaatttatactgacttatcattgtttagctctgatcaagacttggccaaagatgttgaaaaatttttcaattatgtaactggttatgcaaaacccaaaaaattgaataaaatttttatgtctccattaaatagtaggaatttttttgaagaaaaaattgaaaatgaaattgtaaatgcaagtaaaggaaaacctgcagaaatatgggcaaaaatgaattctcttgtagaccctggaattattaagaaattttatgaagctt

SEQ ID NO: 251292 - DNA, 871 bp, Unknown
  Bacterial polypeptide expressing nucleotide sequence isolated from the Sargasso Sea
tatgaggatattgacaaaaaaaatcttaaatttccgatttataaaccaaagcctatcttatctagcctcaaaaataataaagattattttaatattatcaagaaccaagatatcttattacatcacccttacaatgacttcgattatattaacaattttatcaaggcagctgttaaagataaaaataccgttgctataaaacagacattatacagaacgactattaaatccaagattattaatactcttgtgaaagctgcgaaaaaagatattgctgtcactgtcgtcatagagctaagagctaaatttgatgaggaaaaaaatattaaaatagccaaaaaacttgaaaatgcgggcgttcaagtaacttatggacttaaaaattttaaaacccatgcaaaagccctattaatagttagaaaggagaatgggactcttgttaattactttcatttagggacgggcaattatcatgaaaacacagctaaattatatactgactttagtttaatatctgccaataaagaaattgcttctgatgtacacaaatttttccttcagttgacgggttcaaacaaagatatcaaatataatcatctatttttatctccaattgacagtagcaagaaggttttaaaattgatatcaaatgaaatagaaaataaaaaaaataaacatgatgcttacataaatataaaaatgaatcagctcacggaaagacaaattattaataaactctatgaggcatcacaggtaggtgtaaaaatagaactcttcataagaggagaatgtatattaaaacctggcatttctggtttgtctgaaaatattaaagtatactcaactatcggaagatttttagaacattcac

SEQ ID NO: 251293 - DNA, 483 bp, Unknown
  Bacterial polypeptide expressing nucleotide sequence isolated from the Sargasso Sea
aatgaaaagccaggctgatgtttttattaatagagaactaagttggattgaattcaataaaagagtactcctaactggtatggaaaaggagtacaaaatcctagataaagtaaaattttgttcaatttttagtaataatctagatgaattttttatggtaagggtggcttcattaaaggctcaggttgaagcaggaattacaaaacaaagtattgatggactcacaccaaaagagcaattagaaacaataaacaaagaagtaaaaaaattaaccactcttcaagaaagttatgtaaataatgaattaaaaaatgaattacaagaaaaaggtgtgattttaaaaaaatataatgacctaagtgaaaatcaaagaaattggtgtaataacttctttacttcttctattttccctttattaacaccattagttgttgatccagcacatccattcccatttataagtaatttaagtctaaattttgg

SEQ ID NO: 251294 - DNA, 496 bp, Unknown
  Bacterial polypeptide expressing nucleotide sequence isolated from the Sargasso Sea
atgacagaaagcagagtcgcttcatcgactcgtgctccggtgaaacccaagaaaaaccggaaatcggctctccccctggaccatcccagtctttataccaaccgagaattgagttggcttgaattcaatcaaagagtgttggatcaggctctggacgaaagacacccccttttggaaagggttaaattcttgtcgattacggggaccaatctcgatgaatttttcatggtccgtgtggccaccatcctgcgtcagatcaaaaacggaagtgaaagtctaacttcagacggcctgactcctaaacagcagttttctgaaatccatggaaggacggaaaagatgcttcaggatcagcactcggcatggtcgtttttgaggccactgctagaaaaaaatggagtgaaatttcttgaaatgcgctcttatgatgatgggatcaaggattatctgcatgggcgtttcatgaacgagatttatcctgtgctgactccgatgg

SEQ ID NO: 251295 - DNA, 535 bp, Unknown
  Bacterial polypeptide expressing nucleotide sequence isolated from the Sargasso Sea
catgaaaaaccggaaatcggctctccccctggaccattccagtctttataccaaccgagaattgagttggcttgaattcaatcaaagagtgttggatcagtctctggacgatcgacacccgcttttggaaagggttaaattcctggcgattacggggaccaatctcgatgaatttttcatggtccgtgtggccaccatcctgcgtcagatcaaaaacggaagtgaaagcctgacttcagacggcctgactcctaaacagcagttttctgaaatccatggacggacggaaaagatgcttcaggatcagcactcggtatggtcattgttgaggccactgctagaaaaaaacggagtgaaattccttgaaatgcgatcttataacgatgggatcaaggattatctgcatgggcgtttcatgaacgagatttatcctgtgctgactccgatggcatttgatccgggacatccctttccgcacatctcaagcctcagcatgaaccttgcggtggtggttcgacacaatcaggaaaccaaa

SEQ ID NO: 251296 - DNA, 855 bp, Unknown
  Bacterial polypeptide expressing nucleotide sequence isolated from the Sargasso Sea
atttagagtaataagagatagtgatgtagaaattcaagaagaggctgaggatttagtcagatcatttgaactagcattaaagcgaagaagaactggtgatattgttagattagaaattttagaaaaaagcgacaaagaacttataaaatttataacaaataaattagaaattaatccaaattatatttatgaagtagcaggtttagttggaatccaggatatagaccaaatttgtaaaattaaaaattctaaattaaaatttaaaaactttacaccaagagacgtagaaagattaaaagaatacaataataatttttttgagacaattaagaaaaaagacctaatagttcatcatccatttgaaacttttgatgctgtaattgaatttttaaatcaagcggctatagataaaaaagtaattgctattaaacaaacattgtataggactactttagattcaccaattgttaaagcattaattagcgcttccgaaaatggcaaaacagttactgctttaattgaaatcaaagccagatttgatgaagaagcaaatatacagctggcaagaagtcttgaaaaagctggagttcaaattgtttatggttttgcaaaatacaaaacacatgctaaatcatcactaatacatcgacgtgagggtggtaaaattcaaacatatttccatttgggcactggcaattatcatcctgtaaatgcaaaaatatacacagacttatctctatttagctctgataaaaaaatggctacagatgtagaaaaattctacaattacgtgactggatattctaaaccaaaaaatttaaataaaatttccatttcacctgtaaatttaagaaa

SEQ ID NO: 251297 - DNA, 439 bp, Unknown
  Bacterial polypeptide expressing nucleotide sequence isolated from the Sargasso Sea
atgtcgaaagcatcattttcagaaaacgctaatattagcaatctactcataaacagagaattatcttggcttcagtttaatgatcgtgttttagaagagtcaaaagataaaacaaatcctctatttgaaagagtaaaatttttatcaatcgcaggtacaaatttagatgaattttttatggtaagagtcgctggactttttaatcaaattaaagatggttttgacgaattaagcgcagatggattaactgcaaaggatcaattaaacggggtcgtattaaaaactaaagatctattaaagaagcaaaacgaagcgttcctagagttgaaaaaagagctatcaaaagaaaaaattttcattcgaaaaatgtcagaactaaataagaaggatcttatgtatctaagagaatattttcaggaaacaatttatcctataataa

SEQ ID NO: 251298 - DNA, 847 bp, Unknown
  Bacterial polypeptide expressing nucleotide sequence isolated from the Sargasso Sea
gaattaagttggattgaattcaataaaagagttctcctaactggtatggaaaaggattacaaaatcctagataaagtaaaattttgttcaatttttagtaataatttagatgaattttttatggtaagggtagcttcattaaaagctcaagttgaagcaggaattactaaaaaaagcgttgatggattaacccctaaagagcaattaacaaaaatcaacgaagaagtaaaaaaattaactagtcttcaagaaaactatgtaaataatgaattaagtaatgatttaaaagaagaaggtgtaattttaaaaaaatatggggatcttactgaaaatcaaaaaaattggtgcaataactattttacttcatctattttccctttattaaccccattagttgttgatccagcacatccatttccttttataagtaatttaagtctaaatttagcagctctaattagggatggggaagattctaaaaatcagtttgtcagagtaaaaatcccaacaaaaaatataaaccgatttatacaaattcctaatgaaattattcaacaaggtgatgaaaatacatattttttcataagtgttgaagatttaattgggaataatataaatactttatttaacggaatggaatgtataaattactctttttttagagtgacaagagatgcagatttagaattaaaagaacttgaagctgatgatcttcttttagcagttgaacaaagtttgcaaaagagaagattaggtggagacgtagttagattagaagttgaatcggatatgccagaaaatattctgaaattactaattgaaagtatctcaatacaaaaagagtata

SEQ ID NO: 251299 - DNA, 487 bp, Unknown
  Bacterial polypeptide expressing nucleotide sequence isolated from the Sargasso Sea
gacgctatgtatgacgctagtaatgcaggtgtaaagattgatttaattgttagaggtatttgtgctcttaggcctggtattaactgcttatcagaaaatattagagtaaaatcgatagtaggaagatttctagagcattcaagaattgcttgttttggtaatggttcagatcttccatcatttgaatcaagagtatatatttcctcagctgattggatgagtagaaacttaaatagaagagttgaagtattagttaagataaataacaatactgttaaagcacaaattgtaaatcaaataatggcagcaaatttaagagatcaagcccaatcttgggttctccagtccgatggctcatacattagagacaatattacaactcaaaataaattttcttgccatgatttttttatgcaaaatccttcgctatctggtaggggaagagctttaagaaaaaaccctcctgaattattaattgaaaactaaa

SEQ ID NO: 251300 - DNA, 286 bp, Unknown
  Bacterial polypeptide expressing nucleotide sequence isolated from the Sargasso Sea
cactcgattttttatattttgctctggaggtgaaaataaaacttatatttcttcggctgactggatgactagaaacttagacaacagaattgaagtaacatgtccaattcttgacccttctaataaaaaagagatcctagaaatatttaatatttattggtcagataatttaaaatcacgaaaactcaatacgttgaaaataaatgagtactcaaagaataatgaggaaccattaaaatcccaagattcaatatataattattatcaaaaaagtcttgaaaaataa

SEQ ID NO: 251301 - DNA, 796 bp, Unknown
  Bacterial polypeptide expressing nucleotide sequence isolated from the Sargasso Sea
tattgaaaatcctctttatgaaagagtaaagtttttatcaattgctggttctaatctagatgaattttttatggtccgagttgctggattatatagtcaaataaaacaagaagttgactcattaagttctgatggtttgacacctgatgaacaaatggatgaggtagtgcttgaaactaagaatctattaaaaaaacagaacaagatttttactcaactgattatgggattaaaaaaaaataatatcagtttagtaaaacctgttaatttaaatactaaggataaaaaaaaacttttagaaatatttaaagaagagatttaccctttattaacaccatcagcaattgatcctgcgcacccatttccatttataatcaatcaaggaagagcaatcgtaatgaagttaagaaaaaaaaataaaaaaaggattttaaactcaataattgtaataccaaaagcattatctagatttattgaaatagagtcttcaaaaaatcataagaagtttgttattctagatgacgtaataagtttttttgctaatgaaatttttccagatcatgatttagaaaagaaaatgatttttagagtaataagagacagcgatgtagagattcaagaggaagcagaagatttagttagatcttttgaattggctttaaaaagacgtagaacgggtgacattgttcgtttagaggttcttgaaaatagcgataacgaattggtaagatttataactaataaattagatataaatcctgactatatttatgatgtatctggccttgttggaatt

SEQ ID NO: 251302 - DNA, 789 bp, Unknown
  Bacterial polypeptide expressing nucleotide sequence isolated from the Sargasso Sea
aaagcattattttcagaaaaatctaatattagcaatcaactcataaacagagaattatcttggcttcagtttaatgatcgtgttttagaagagtcaaaagatgaagcaaatcctctattcgaaagagtaaaatttttatcaatcgcaggtacaaatttagatgaattttttatggtaagagtcgctggactttttaatcaaattaaagatggttttgacgaattaagcgcagatggattaactgcagaggatcaattgaatagggtcgtattaaaaactaaagatctattaaagaagcaaaacgaagcattcctagagttgaaaaaagagctatcgaaagaaaaaattttcattcgaaaaatatcagaactaaataagaaggatcttatgtatctaagagaatattttcaggaaacaatttatcctataataacacctactgccattgacccatcacatccctttccttttataccaaataaaggccaagcaattttactaagaatgactagaataaaaaaaaaaagagaactaaatgcaattatagttataccaagagcacttccaaaatttgtatctctaaacaattctgaaacaataaatgaatttgtcacaattgatgacgtaatttgtaaatttgctaatgaaatatttccagaccataatatcgaggcaagtttgcagtttaaaataattagagacagcgaaattgaaatagatgatgaagctgctgatcttgtgagatattttgaaaaagcaattaagaaaagaagaaggggaaacgtagtt

SEQ ID NO: 251303 - DNA, 463 bp, Unknown
  Bacterial polypeptide expressing nucleotide sequence isolated from the Sargasso Sea
tccgtcgctgaccagaaagtgatcaccaaactttatgaagcgtcaaaggcaggagtgagacaggatctgattgttcgtgggatatgctgtctcagacctggagtggagggagtcagcgaaaaaatccgggtacgttcgatcatcggccgttttctggaacattctagaatttattattttgagaatggtggaaaaccggaaatttactgcggcagcgcggatttgatggaacggaatttgagccgaagggttgaaatcctttttccggtaatcgaccaggaaatcctcgatcacctaaaacaaaatcttgatttgatgctttcagacaacactttggctttcaaccttcagcaggacggcagttacagaaggatcagtaaaaaagctcaagatcctgagatcaattcacaattaaaattgctggaatggtacgctgaggaaaacctgttcggcagcgtttgat

SEQ ID NO: 251304 - DNA, 529 bp, Unknown
  Bacterial polypeptide expressing nucleotide sequence isolated from the Sargasso Sea
agtagatccagaaattattgataaattttatgaagcttcgaatgctggtgtaaaaattcatttatttgtaaggggtgtttgttgtttaagaccaggagtaaaagatagatcagaaaacatatttgtaaaaagtatcataggaagatttttagagcattctagaatttactgctttagtaatggcacaaaaaaaatgcctaatagaaatgcaaaagtatatatttcgtcagctgatttaatgccgagaaatttagatcgaagggtagaacttctagtcccaattgaaaatgagactgttcatgaacagatcttagatcaaataatgttggcaaattatcttgatactaatcagagctgggaacttgaagctgatggtaattataaaaaaattaaatatagtaagagcgattccttttcagctcatgaatattttatgaataatccgagcttatctggaagaggtaaagctaaactaagaatgcagcctaaacaactgcacttaagattgattaaaagtggaagtaattaa

SEQ ID NO: 251305 - DNA, 757 bp, Unknown
  Bacterial polypeptide expressing nucleotide sequence isolated from the Sargasso Sea
gatatagatcaaatatgtaaagtaaaaaatccaaaattaagatttaaacattttacacctagagaagttgaaagattaaaagaatataatgataatttttttgaaactattaaaaagaaagatttagttgttcatcatcctttcgaaacatttgactcagtaattgaatttttaaaccaagcagcaaatgataaaaaagttatagctataaaacaaactctatatagaacaactctagactcaccaattgttaaagctttaataacagctgcagaaaacggaaaaacagttaccgctttaattgaaattaaagctagatttgatgaggaagctaatattcaactatcaagaagtttagaaaaagtaggtgttcaaattgtttatggttttgctaaatataaaactcatgcaaaatcatcattagttttaagaagagaacagggtaaaatacaaacttattttcatttaggaactggcaattatcatccagtaaatgctaaaatttatactgatttgtctttatttagttgtgataagaaaatggcatcagatgttgaaaagtttttcaattatgtaacaggatacgcaaaaccaaaaaatttaaataaaatttctatttcgccagtaaatatgaggcaaaccttaaatgaaaatattgatgctgaaattaaaaattctaaaaatggaaaatttgcagctatttgggcaaaaatgaactctttagtagatccagaaattattgataaattttatgaag

SEQ ID NO: 251306 - DNA, 625 bp, Unknown
  Bacterial polypeptide expressing nucleotide sequence isolated from the Sargasso Sea
tatgtcgaaagcatcattttcagaaaacgctaatattagcaatcaactcataaacagagaattatcttggcttcagtttaatgatcgtgttttagaagagtcaaaagataaaacaaatcctctatttgaaagagtaaaatttttatcaatcgcaggtacaaatttagatgaattttttatggtaagagtcgctggactttttaatcaaattaaagatggttttgacgaattaagcgcagatggattaactgcagaggatcaattgaatagggtcgtattaaaaactaaagatctattaaagaagcaaaacgaagcattcctagatttgaaaaaagagctatcgaaagaaaaaattttcattcgaaaaatgtcagaactaaataagaaggatcttatgtatttaagagaatattttcaggaaacaatttatcctataataacacctacagccattgacccatcacatccctttccttttataccaaataaaggccaagcaattttactaagaatgactagaataaaaaaaaaaagagaactaaatgcaattatagttataccaagagcacttccaaaatttatatcgctaaataattctgaaacaataaatgaatttgtcacaatt

SEQ ID NO: 251307 - DNA, 199 bp, Unknown
  Bacterial polypeptide expressing nucleotide sequence isolated from the Sargasso Sea
ctgaaatctaaatatataaatagagagctttcttggttaaaattcaacgacagagtacttttagaggcacaaaatatcgaaaatcctctttatgaaagagtaaagtttttatcaattgctgggtctaatctagatgaattttttatggtccgagttgctggattatatagtcaaataaaacaagaagtgactcattaag

SEQ ID NO: 251308 - DNA, 172 bp, Unknown
  Bacterial polypeptide expressing nucleotide sequence isolated from the Sargasso Sea
gttgaaatctaaatatataaatagagagctttcttggttaaaattcaacgatagagtacttctagaagcacaaaatactgaaaatcctctttatgaaagagtaaaatttttatcaattgctgggtctaatctagatgaattttttatggtccgtgttgcaggattatttagt

SEQ ID NO: 251309 - DNA, 859 bp, Unknown
  Bacterial polypeptide expressing nucleotide sequence isolated from the Sargasso Sea
tgaattgcaagcaagatttgatgaagaaaataacttaaatatcgcagatagacttgaaaaatctggagtccaaataattatgggtgtaagaggattgaaagttcactcaaagatttgtttggttttaagagatgaaaaaaataagatcaaaaaatatggttttataagtacaggtaatttcaatgagcaaactgctaaaatatacactgattatacattgtttacttcaaatcaaaaaatcttaaaggacgtatccaaggtttttaattttttagaagttaactatgaatttaagagatataagcatttaattgtttctccacattacacatatcaaagattagtagagttgattgataacgaaattcaaaataaaaatcttggtaaaaaatcaaaaattaaactaaaattaaatagcatcacgaattataaaataatatcaaaactatatgaagctagcaatgctggagttaaaattgaaatgattgtaagaggtgtatgttgcctaattccaggtgtaaaagatatgagtgaaaacataaaagtcattggtgtagttgataaatatttagaacatccaagaatttatatttttgaaaatgctggcaagccaaatatatatatatcatctgctgattggatgactagaaattttgaaaataggatagaggtgacttgtcctatatatgatattgatcttcaaaatcaaattttagatacctttgacatcagctggagggacaacgtgaaaagtagatttataaacgaattgaaaggaaatattaaaagaaaaaaaaatatcataaatacaagatctccatttgagacatatagatattttaaaaacttatcctcctaa

SEQ ID NO: 251310 - DNA, 890 bp, Unknown
  Bacterial polypeptide expressing nucleotide sequence isolated from the Sargasso Sea
aaataagaaaaataaaaaaagagttttaaatgcaataatagtaattccaaaagctttatcaagatttattgaaatagatggaaataaaagttttaaaaaatttttaattattgatgatgttataagtttttttgcttctgaaatatttcctgatcatgatttagataaaaaaatgttatttagagttataagagatagtgatgtagaaattcaagaggaggccgaagatttagtaagatcttttgaattggctttaaaaagaagaagaacaggtgacatcgtacgtttagaaattttaaaaaatagtaataatgacttaattaagtttataaccaataagttaaacgtaaaatctgaatacatctatgaaattgaaggcattgttggaattcaagatatcgaccaagtttgtaaaattaaaaattctaaattaagatttaaaaattttaatcccagagaggttgagagattaaaggaatttaataataatttttttgatactataaaaaaaaaggatttaatagttcatcacccttttgaaacatttgatgctgtcgttgagtttttaaatcaagctgcatatgataaaaaagttatagcaattaaacaaactctatacagaacaacgttagactctccaattgttaaagccttaataacagcagctgaaaatggaaagacagtaaccgctttaatagagatcaaagcaagatttgatgaagaagcaaacattcaactttcaagaagtttagaaaaggcaggaattcaaatagtttatggttttgcaaaatataaaacacatgcaaaatcatctttaatattaagaaaagagcagggaaaaattcaaacttatatacatctgggaactggtaattatcacccgagttaat

SEQ ID NO: 251311 - DNA, 883 bp, Unknown
  Bacterial polypeptide expressing nucleotide sequence isolated from the Sargasso Sea
tattttcaggaaacaatttatcctataataacacctactgccattgacccatcacatccctttccttttataccaaataaaggccaagcaattttactaagaatgactagaataaaaaaaaaaagagaactaaatgcaattatagttataccaagagcacttccaaaatttgtatctctaaacaattctgaaacaataaatgaatttgtcacaattgatgacgtaatttgtaaatttgctaatgaaatatttccagaccataatatcgaggcaagtttgcagtttaaaataattagagacagcgaaattgaaatagatgatgaagctgctgatcttgtgagatattttgaaaaagcaattaagaaaagaagaaggggaaacgtagttaaactcgaagtaatcactaattcaaacaaaaaacttttaaattttatttcaaaaaaatttaaaatggatgaagatcatatttatgaggttgaaggattggttggaatacaagatatagatgaaatttgtaaaaagaaagatccaaagctgagatttaaaaagtttaatcctagagaagttgaaagattgaaggaatttgatgataaatttttttcagctataagaagtaaagattttgttgtacaccacccttttgaaacttttgatgtagtaattcaatttttagaagctgcagcaaaagatcccaaagttatcggtatcaaacaaactttgtatcgaaccacacctgactctcctatcgtaaaagcactaagtagagcagcagaaaacggaaaagttgttacagccgttatagaaataaaagctcgatttgatgaggaagctaatattgaattatctaggaaactagagaaagctggcgttcaaattgtttacg

SEQ ID NO: 251312 - DNA, 948 bp, Unknown
  Bacterial polypeptide expressing nucleotide sequence isolated from the Sargasso Sea
cccagcgcagatggtctttcaccatctcagcagttatcactcataaaaaaggaagttcatgccttgatcgatcatcagcaaatggtctggcgaaaccttcttgttgaattgaaagctgctaagattgcgatattagatacaaatgacctatcaaatacagatttaaaacttttagaaacggtattttttgaacaagttttcccagtgttgactccactggcaatcgatcctgcacacccctttccttttattccatcgggcgggtttgctttggctttaatcctacaaagaaagtcagacgcatttaggcttgaagctctcttgccagtgcctggccagattgcaagattttacaggatctctgatggaccaaaaggtttgataagatttcttccactcgaaaaaatgctggaaaggtttctcgataaattatttcctggttacgatatcattgctaagtcggcttttaggatattacgagatacctatctagaggttgaagaagaggctgaagatctagttcgggaatttgagactgcattaaaacgtcggaggaggggagacgtaattcgaatgaaagtaactgcggacacttccaaggaattactgaaagttatttgtagatctcttgatgtgccggaaaatgaggtaattaaagttgatggtatggttggaatggccgatctatcagagctaatgcttgaggagcgggatgatttattatggcctccattcgcttcaagaataccagagagacttgaagaccataatggagatattttttctgcaattagacaaaaagatttgctattgcatcatccttacgaaagttttgatactgtagtaagatttttgcaacaagctgcaactgacccccatgtagttgctattcgtcagacattgtatagaactagcaaagatagcccaattgtggaggcactctgtgag

SEQ ID NO: 251313 - DNA, 214 bp, Unknown
  Bacterial polypeptide expressing nucleotide sequence isolated from the Sargasso Sea
ctgaaatctaaatatctgaatagagagctttcttggttaaaattcaacgatagagtacttctagaagcacaaaatactgaaaatcctctttatgaaagagtaaaatttttatcaattgctggttctaatctagatgaattttttatggtccgagttgctggattatatagtcaaataaaacaagaagttgactcattaagttctgatggtttga

SEQ ID NO: 251314 - DNA, 412 bp, Unknown
  Bacterial polypeptide expressing nucleotide sequence isolated from the Sargasso Sea
aatgacaaagcaggccgatatttttattaatagagaattaagttggattaaattcaaccaaagggtactcctaactggtatggaaaaagagtacaaaatcctagataaagtaaaatttttctcaatttttagtaataatcttgatgagttttttatggtaagagttgcttctttaaaagctcaagttgaagcaggaattacaaaaaaaagtattgatggacttaccccaaaagagcaattagaaaaaatcaacaaagaagtaaaaaatttaactactcttcaagaaaactttgtaaacagtgagttaaataatgaattaaaaaaagaaggtataattttaaaaaaatataaggatctaagtgaaaatcaaaaaaattggtgtgataacttctttacttcatctatatcccct

SEQ ID NO: 251315 - DNA, 517 bp, Unknown
  Bacterial polypeptide expressing nucleotide sequence isolated from the Sargasso Sea
tatgtcgaaagcatcattttcagaaaacgcaaatattagcaatcaactcataaacagagaattatcttggcttcaatttaatgatcgtgttttagaagagtcaaaagataaaacaaatcctctatttgaaagagtaaaatttttatcaatcgcaggtacaaatttagatgaattttttatggtaagagtcgctggactttttaatcaaattaaagatggttttgacgaattaagcgcagatggattaactgcagaggatcaattaaatagggtcgtattaaaaactaaagatctattaaagaagcaaaacgaagcgttccttgagttgaaaaaagagctatcaaaagaaaaaattttcattcgaaaaatatcagaactaggtaagaaggatcttacgtatctaagagaatattttcaggagacaatttatcctataataacacctactgccattgacccatcacatccctttccttttataccaaataaaggccaagcaattttattaagaagacaa

SEQ ID NO: 251316 - DNA, 845 bp, Unknown
  Bacterial polypeptide expressing nucleotide sequence isolated from the Sargasso Sea
atttatgatgttgctggccttgttggaattcaagatatagatcaaatatgtaaagtaaaaaatccaaaattaagatttaaacattttacacctagagaagttgaaagattaaaagaatataatgataatttttttgaaactattaaaaagaaagatttagttgttcatcatccttttgaaacatttgactcagtaattgaatttttaaaccaagcagcaaatgataaaaaagttatagctataaaacaaactctatatagaacaactctagactcacctattgttaaagctttaataacagctgcagaaaacggaaaaacagttaccgctttaattgaaattaaagctagatttgatgaggaagctaatattcaactatcaagaagtttagaaaaagtaggtgttcaaattgtttatggttttgctaaatataaaactcatgcaaaatcatcattagttttaagaagagaacagggtaaaatacaaacttattttcatttaggaactggcaattatcatccagtaaatgctaaaatttatactgatttgtctttatttagttgtgataagaaaatggcatcagatgttgaaaagtttttcaattatgtaacaggatacgcaaaaccaaaaaatttaaataaaatttctatttcgccagtaaatatgagacaaaccctaaatgaaaatattgatgctgaaattaaaaattctaaaaatggaaaatttgcagctatttgggcaaaaatgaactctttagtagatccagaaattattgataaattttatgaagcttcgaatgctggtgtaaaagttcatttatttgtaaggggtgtttgttgtttaag

SEQ ID NO: 251317 - DNA, 338 bp, Unknown
  Bacterial polypeptide expressing nucleotide sequence isolated from the Sargasso Sea
tatgtcgaaagcattattttcagaaaaatctaatattagcaatcaactcataaacagagaattatcttggcttcagtttaatgatcgtgttttagaagagtcaaaagatgaagcaaatcctctattcgaaagagtaaaatttttatcaatcgcaggtacaaatttagatgaattttttatggtaagagtcgctggactttttaatcaaattaaagatggttttgacgaattaagcgcagatggattaactgcagaggatcaattgaatagggtcgtattaaaaactaaagatctattaaagaagcaaaacgaagcattcctagagttgaaaaaagagc

SEQ ID NO: 251318 - DNA, 616 bp, Unknown
  Bacterial polypeptide expressing nucleotide sequence isolated from the Sargasso Sea
aatgaaaagccaggctgatgtttttattaatagagaattaagttggattgaattcaataaaagagtactgctaactggtatggaaaaggattacaaaatcctagataaagtaaaattttgttcaatttttagtaataatctagatgaattttttatggttagggtagcttcattaaaagctcaagttgaagcagaacttactaaaaaaagtattgacggacttacccctaaagagcaattaaaaaaaatcaataatgaaataaaaaagttaactattctccaagaaaactatgtaaataatgaattaaaaaatgaattaaaagaaaaaggtgtaattttaaaaaaatatgtggacctaagtgaaagtcaaagaaattggtgtaataacttctttacaacatctattttccctttattaactccattagttgttgatccggcacatccatttccttttataagtaatttaagtctaaatttagcagctttaataaaggatgaggaggattctaaaaatcagtttgtcagggtaaaaataccaacgaaaaatataccccgatttatacgaattcccaatgaaattactcaacttagtgatgaaagttctactatttca

SEQ ID NO: 251319 - DNA, 753 bp, Unknown
  Bacterial polypeptide expressing nucleotide sequence isolated from the Sargasso Sea
aaagcattatctagatttattgaaattgagtcttcaaaaaatcataagaaatttgtgattctagatgatgtaataagtttttttgctaatgaaatttttccagatcatgatttagaaaagaaaatgatttttagagtaataagagacagcgatgtagagattcaagaggaagcagaagatttggttagatcttttgaattagctttaaaaagacgtagaacgggtgatattgttcgtttagaggttcttgaaaatagtgataacgaattgataagatttataactaataaattagatataaatcctgactatatttatgatgttgctggccttgttggaattcaagatatagatcaaatatgtaaagtaaaaaatccaaaattaagatttaaacattttacacctagagaagttgaaagattaaaagaatataatgataatttttttgaaactattaaaaagaaagatttagttgttcatcatcctttcgaaacatttgactcagtaattgaatttttaaaccaagcagcaaatgataaaaaagttatagctataaaacaaactctatatagaacaactctagactcacctattgttaaagctttaataacagctgcagaaaatggaaaaacagttaccgctttaattgaaattaaagctagatttgatgaggaagctaatattcaactatcaagaagtttagaaaaagtaggtgttcaaattgtttatggttttgctaaatataaaactcat

SEQ ID NO: 251320 - DNA, 763 bp, Unknown
  Bacterial polypeptide expressing nucleotide sequence isolated from the Sargasso Sea
gttaagaaaaaaaaataaaaaaaggattttaaactcaataattgtaataccaaaagcattatctagatttattgaaatagagtcttctaaaaatcataagaagtttgttattctagatgacgtaataagtttttttgctaatgaaatttttccagatcatgatttagaaaataaaatgatttttagagtaataagagacagcgatgtagagattcaagaggaagcagaagatttagttagatcttttgaattggctttaaaaagacgtagaacgggtgatattgttcgtttagaggttcttgaaaatagtgataacgaattgataagatttataactaataaattagatataaatcctgactatatttatgatgttgctggctttgttggaattcaagatatagatcaaatatgtaaagtaaaaaatccaaaattaagatttaaacattttacacctagagaagttgaaagattaaaagaatataatgataatttttttgaaactattaaaaagaaagatttagttgttcatcatcctttcgaaacatttgactcagtaattgaatttttaaaccaagcagcaaatgataaaaaagttatagctataaaacaaactctatatagaacaactctagactcacctattgttaaagctttaataacagctgcagaaaacggaaaaacagttaccgctttaattgaaattaaagctagatttgatgaggaagctaatattcaactatcaagaagtttaaaaaaagta

SEQ ID NO: 251321 - DNA, 388 bp, Unknown
  Bacterial polypeptide expressing nucleotide sequence isolated from the Sargasso Sea
atgtcgaaagcatcattttcagaaaacgctaatattagcaatcaactcataaacagagaattatcttggcttcagtttaatgatcgtgttttagaagaatcaaaagataaaacaaatcctctatttgaaagagtaaaatttttatcaatcgcaggtacaaatttagatgaattttttatggtaagagtcgctggactttttaatcaaattaaagatggttttgacgaattaagcgcagatggattaactgcagaggatcaattgaatagggtcgtattaaaaactaaagatctattaaagaagcaaaacgaagcattcctagagttgaaaaaagagctatcgaaagaaaaaattttcattcgaaaaatgtcagaactaaataagaagg

SEQ ID NO: 251322 - DNA, 925 bp, Unknown
  Bacterial polypeptide expressing nucleotide sequence isolated from the Sargasso Sea
aatgatagagttcttttagaagcccaaaatgctgaaaacccgctatatgaaagagttaaatttttatctatagcaggatcaaatcttgatgagttctttatggttcgagttgcaggcctatttagtcagataaaacaagaagtagattctttaagttccgatggtctcaatcctgaagagcaaatgaacgaagttgttagtgagaccaaaaaacttctcaaaaaacaaaataaaatttataaggaactcttatcacaattaaaaaaaacaaatattattttagtaaagccagaaagtttaagtaaatctgagaaaaaaaaaatatttaaaattttttatgaagaaatttatcctctattaactccttctgcaattgatcctgctcatccttttccatttataattaatcaaggacgtgcattggcaatgaaattgaagaagaaaaataaaaaaagaatattaaattctataattgttattccaaaagcacttccaagattttttgaagtaagcggaactaagaattcaaaaaaatatgtaattattgatgatttaataagtttttttgcatcagaaatatttccagatcatgaagtagaatttaagatgatttttagggtaattagagacagtgatgtagaaattcaagaagaagctgaagatctagttagatcttttgagttagcattaaaaaaaagaagaacaggtgacattgtaagattagaaattttaaaaaatagtaataaagaattagttaaatttataacaaataaacttaatataaatgccgattatatttattatatagaaggattagttggtattcaggatattgatcaaatatgtaaagttaaaaatcagaaactaaaatttaaaagtttcaatcccagggatgttgagagattaaaagaaaataattatgatt

SEQ ID NO: 251323 - DNA, 887 bp, Unknown
  Bacterial polypeptide expressing nucleotide sequence isolated from the Sargasso Sea
caaaattttcccgggcttacctgccgcattagaagaaggtgaggacatcttttccgcaattgagaaagaagaccaattgttactccatccattcgaatcttttttaccaataatcgattgggtcagacaagcagcgaaagatccaaccgttctatcaataaagcaaacactgtatcggacaaatgagtcttctgagttagttgaagctctttcagaggcggcgcgaaacggtaaagaggtcacagtagttatcgaactgagagccagattcgatgaagaagagaatataaacttcgcgaacctattgcaggaagctggggcggttgttgtatatggtgttatgggttacaagacacatgctaagatgcttttgtttgttagaagagtcggaaccaaactaagacgttatgctcatttagggaccggcaactatcaccgaaagaactctctgacttatacggattacagcttactaacggctgataagatagtgtgcgcagatgtgcataaagtttttcaacaaataactggtatgggtaagaaaattcaaccaaaggaactaattcatgctccttttaacctaaaaaaatccatactaaagatgatccaagcagaaaagaaagctgccgctcagggaaagcccgctcgaattctggcaaaaatgaacgccttaacagatccggctgttatccaagctttgtatgaagcttctcaagcaggtgtcgaagtgcacttgattatccgcggaacctgttgccttaaacctggcatcaaaggggtcagtgacaacattcgtgttatctcggtggttggacggtttttagagcattcgcgagtctatttctttcaaaataatccgaatcaggttttctgctctagcgcagact

SEQ ID NO: 251324 - DNA, 671 bp, Unknown
  Bacterial polypeptide expressing nucleotide sequence isolated from the Sargasso Sea
aatggtaagacaggctgatctttttattaatagggaattaagttggattgaattcaataaaagagtacttcttactggtatggagaaggattacaagatcttagatcaagtaaagttttgttcaatttttagtaataatcttgatgaattttttatggtaagagtagcttcattaaaagctcaagttgaagcgggaataaacaaaaaaagtattgatggactaacacctaaagagcaattaaaaaaaatcaatacagaagtaaaaaaattaactactcttcaagaaaactttgtaaataatgaactaaataatgaactcaaaaaaaaagggatagttttaacaaaatataatgaccttaatgaaaatcaaaaaaattggtgtaataactactttacttcatctatttttccattattaactccattagtagttgatccttctcatccgttcccttttatcagtaatttaagccttaacttagcagctttaataaaggatgaagaacattccaaaaatcagtttgtcagaataaagataccaacaaaaaatataaatcgttttataaaaattcctaatgaattggttgaaaatgctcataataatacccattgttttataactgttgaagatttaattgggaataatatcaacactttgtttaatggaatgg

SEQ ID NO: 251325 - DNA, 877 bp, Unknown
  Bacterial polypeptide expressing nucleotide sequence isolated from the Sargasso Sea
ctggtgaagagcgatacggtgtttaacgcggagatgtcgtggttggcgttcaactggcgcgtgttggccatggcggcgaacgaggaggtgccgatttttgagcggttgcggttcgtcgccatcagcgcgaggaatttggatgagttttttgccaagcgggtcggggccatcaagcggcaggcggcggcgggggtggagaatttggtcaagcgacgcgggcgagacgtgtggacgccggaggagacgttgcaaaacgtggcggtggaggtggagagacaggtggacgcgcaggcggcgttgttggaggatcacatcgtgccgagactgcgcgaagaacacgatgtttcgttggaacagtacgatgatttggattcggagcttcagcgcaagttggagaagtactttgaggcgcaaatcgaacccgtgctcgatcctcgcgccatcgatccgtgtcacccgtttccgtttctcggttcactctcgctctcgatcgcggtcgagctcgaggatgcgttcaagcaggataagtttgccatcgtgagcgttccaccgtcgctcgaacgttggattcgtatcgccaccgagaaaaacgatccggtgcaacgttttttaccgctcgagcaactcatcgaggcgcacatggagaagctttttcgagggtgtaacattcgagacacgcacgtgtttcgagtgacgcgcaacgctgacatcgagcgcaacgaggacgaggcggaagatcttctcgagatgatgacggatgaagtgcgcgagcgtcggttcgcgtcattcgttcgtctcgagattcaggacaccatgcccgagtacattcgcgacaagctcatcgcgtcgctcgacggcatcacgcagacggatgtca

SEQ ID NO: 251326 - DNA, 379 bp, Unknown
  Bacterial polypeptide expressing nucleotide sequence isolated from the Sargasso Sea
tatgactgcattaaaaaaacaagataaagaaatacttaaatctaaatatataaatagagaattatcttggcttaaattcaatgacagagttcttctagaggctcaaaatatagaaaatcctctttacgaaagaattaaatttttatctatagctggatcaaatttagatgaatttttcatggtacgtgttgcaggtttatatagtcaaatcaagcaagacgtagactctcttagttctgatggtcttactcctgatgaacaaatgaatgaagttattttggaaactaacaatcttcttaataaacaaaataaaatatataaagatttaattcttcaattaaaaaaagtaaatataagtatagttaaacctgaaaattaa

SEQ ID NO: 251327 - DNA, 424 bp, Unknown
  Bacterial polypeptide expressing nucleotide sequence isolated from the Sargasso Sea
tatgtcgaaagcattattttcagaaaaatctaatattagcaatcaactcataaacagagaattatcttggcttcagtttaatgatcgtgttttagaagagtcaaaagatgaagcaaatcctctattcgaaagagtaaaatttttatcaatcgcaggtacaaatttagatgaattttttatggtaagagtcgctggactttttaatcaaattaaagatggttttgacgaattaagcgcagatggattaactgcagaggatcaattgaatagggtcgtattaaaaactaaagatctattaaagaagcaaaacgaagcgttcctagagctgaaaaaagagctatcaaaagaaaaagtttttattcgaaaaatgtcagaactaaacaagaagaatcttatttatctgaaagaatattttcaggaaaca

SEQ ID NO: 251328 - DNA, 776 bp, Unknown
  Bacterial polypeptide expressing nucleotide sequence isolated from the Sargasso Sea
aggattttaaactcaataattgtaataccaaaagcattatctagatttattgttatagagtcttctaaaaatcataagaagtttgttattctagatgacgtaataagtttttttgctaatgaaatttttccagatcatgatttagaaaataaaatgatttttagagtaataagagacagcgatgtagagattcaagaggaagcagaagatttagttagatcttttgaattggctttaaaaagacgtagaacgggtgatattgttcgtttagaggttcttgaaaatagcgataacgaattggtaagatttataactaataaattagatataaatcctgactatatttatgatgtatctggccttgttggaattcaagatatagatcaaatatgtaaagtaaaaaatccaaaattaagatttaagcattttacgcctagagaagttgaaagattaaaagaatataatgataatttttttgaaactattaaaaagaaagatttagttgttcatcatccttttgaaacatttgactcagtaattgaatttttaaaccaagcagcaaatgataaaaaagttatagctattaaacaaactttatatagaacaactctagactcaccaattgttaaagctttaataaccgctgcagagaacggaaaaacagttaccgctttaattgaaattaaagctagatttgatgaggaagctaatattcaactatcaagaagtttagaaaaagtaggtgttcaaattgtttatggttttgctaaatataa

SEQ ID NO: 251329 - DNA, 876 bp, Unknown
  Bacterial polypeptide expressing nucleotide sequence isolated from the Sargasso Sea
acccgcgaaattatcaacgtcgaaaagcctactctgaagtttgtgccttttgacgcgcgatttccagagcgtgtgcgtgaacttggcggctactgctttgaagcaatccgtcaaaaggaatttattgttcatcacccctatgaaagttttgacgttgtggttcagttcattcgccaggcggcgcgcgatccagacgtggttgccgtcaaacagaccctttatcgtaccagcaacgattccccaacagtggccgcacttgttgaggcggcggaggcgggcaaatctgtgaccgccatggtcgaattgaaggcgcgcttcgacgaggaggcaaatatccgatgggcgcgggacttggagcgcgcaggtgcacaggttgtattcggatttctcgacaaaaagacccacgcgaaaattagtctcgtcgtgcgcagagaaggcggtaagcttcgttcctatgcgcatttcggtaccgggaattatcatccggatactgcgaaggtatacacggatctttcatacttcacttgcgaccaggacctgtgtcgggacgccgctcaggttttcaattttatgaccggctacacagagccaaaggaacttatgaaaatttcggtctctccgctcaatctgcgggaaaccttggaggctcaatttgatgcagagatcgcgtatgcaaaggcgggccgcccggcaacgatatgggccaagatgaatgcgctggtggatactgatatcatcgatgcgttgtatcgggcctctcagtctggtgtcaaaatagaacttattgttcggggcatttgttgtttgcgacctggcgtgccaggtctatccgagaatattcaggttaaaagcataattgggcgtttcctcgaacac

SEQ ID NO: 251330 - DNA, 269 bp, Unknown
  Bacterial polypeptide expressing nucleotide sequence isolated from the Sargasso Sea
aatgaaaagcaaagctgatatttttataaatagagaattaagttggattgaattcaataaaagagtactccttactggtatggaaaaagagtacaaaattctagataaagtaaaattttgctcaatttttagcaataaccttgatgaattttttatggtaagggtagcttcattaaaggctcaagttgaagcaggaattactaaaaaaagtattgacggacttacccctaaagagcaattaaagaaaatcaatgaagaagtaaaaaatt

SEQ ID NO: 251331 - DNA, 391 bp, Unknown
  Bacterial polypeptide expressing nucleotide sequence isolated from the Sargasso Sea
tatgttaaaaaaaaataccgcttataactatgcaaacagggaattgtcttggctaaaattcaatgaaagagtcttaagtcagacatctgatagtaaaattccacttttagaaagggttagatttttatcaatagcattctctaatttagatgaattttttatggttagagtagcaggattgaatgttcaaaaattttcacgaaataaaagttttgatggattaacaccacaacaacaactcaagctgatagataaagaaacatcgaagatgatttcaaatataaaatcaatatggatagatttactaagagaactttcagaaaacaaaatccatatagatgtagaaaaaacactgaaaacaaaagataaaacatttattaaaaattattta

SEQ ID NO: 251332 - DNA, 739 bp, Unknown
  Bacterial polypeptide expressing nucleotide sequence isolated from the Sargasso Sea
aaagtaaaaaatccaaaattaagatttaagcattttacgcctagagaagttgaaagattaaaagaatataatgataatttttttgaaactattaaaaagaaagatttagttgttcatcatccttttgaaacatttgactcagtaattgaatttttaaatcaagctgcaaatgataataaagttatagccataaaacaaactttatatagaacaactctagattcaccaatagttaaagccttaataacagctgcagaaaatggaaaaacagttaccgctttaattgaaattaaagctagatttgatgaggaagcaaatattcaactatcaagaagtttagaaaaagtaggtgtccaaattgtttatggttttgccaaatataaaactcatgcaaaatcttcattagttttaagaagagaacaaggtaaaatacaaacttattttcatttaggaactggcaattatcatcctgtaaatgctaaaatttacactgatttgtctttatttagttgtgataagaaaatggcatcagatgttgaaaagtttttcaattatgtaacaggatacgcaaaaccaaaaaatttaaataaaatttctatttcgccagtaaatatgaggcaaaccttaaatgaaaatattgatgctgaaattaaaaattctaaaaatggaaaatttgcagctatttgggcaaaaatgaactctttagtagatccagaaattattgataaattttatgaag

SEQ ID NO: 251333 - DNA, 481 bp, Unknown
  Bacterial polypeptide expressing nucleotide sequence isolated from the Sargasso Sea
gatgtagtaattcaatttttagaagctgcagcaaaagatcccaaagttatcggtatcaaacaaactttgtatcgaaccacacctgactctcctatcgtaaaagcactaagtagagcagcagaaaacggaaaagttgttacagccgtaatagaaataaaagctcgatttgatgaggaagctaatattgaattatctaggaaactagagaaagctggcgttcaaattgtttatggattcgcaaaatacaaaacgcatgcaaaggcaagtttagttttaagaaaagaaggagctaaaacgcgaagctatgttcacttaggtacaggaaactatcatccaattaacgcaaaaatttatactgacttatcactgtttagctctaatcaagacttggccaaagatgtcgaaaaatttttcaattatgtaactggttatgcaaaaccaaaaaaattgaataaaatttttatgtctcctattaaatagt

SEQ ID NO: 251334 - DNA, 850 bp, Unknown
  Bacterial polypeptide expressing nucleotide sequence isolated from the Sargasso Sea
gagacagagtacaaaactcttgataaggtaaagttttgctcaatttttagcaataatcttgacgaattttttatggtgagagtagcttctctaaaagctcaagttgaagcaggaataaacaaaaaaagtatcgatggactaacacctaaagatcaattaaaaaaaatcaataaagaagtaaaaaatttaactactctccaagaaaactttgtaaataatgatctaaataatgaactcaaaaaaaaagggatcgttttaaaaaaatataaagaacttaatgaaaatcaaaaaaattggtgcaataatttatttcaaacatctatatttccattactaactccacttgtagtagatcctgcacatccattcccgtttataagtaatttaagtcttaatttagcagctttaataaaggataaagaacattccaaaaatcagtttgtcagaattaaaataccaacaaaaaatattaatcgctttataaaaattcctaatgaaataattgagaatagcgatgaatcttctcatttttttataactgttgaagatctaattggtaataatataaacgctttatttaatggaatggaatgcataaattactctttttttagagtaacaagagatgcggatttagaattaaaagaacttgaagctgatgatctgcttcttgcagtagaacaaagtctacagaaaaggagattaggtggagatgtagttagattagaagtagaggcagatataccagaaataatcttaaagttactcattgagagtattcaaatacaagaagaatatatatacttttgcaaaagtttattaggacttgatgattttaatcaacttacaa

SEQ ID NO: 251335 - DNA, 769 bp, Unknown
  Bacterial polypeptide expressing nucleotide sequence isolated from the Sargasso Sea
taacgaattgataagatttataactaataaattagatataaatcctgactatatttatgatgttgctggccttgttggaattcaagatatagatcaaatatgtaaagtaaaaaatccaaaattaagatttaaacattttacacctagagaagttgaaagattaaaagaatataatgataatttttttgaaactattaaaaagaaagatttagttgttcatcatccttttgaaacatttgactcagtaattgaatttttaaaccaagcagcaaatgataaaaaagttatagctataaaacaaactctatatagaacaactctagactcacctattgttaaagctttaataacagctgcagaaaacggaaaaacagttaccgctttaattgaaattaaagctagatttgatgaggaagctaatattcaactatcaagaagtttagaaaaagtaggtgttcaaattgtttatggttttgctaaatataaaactcatgcaaaatcatcattagttttaagaagagaacagggtaaaatacaaacttattttcatttaggaactggcaattatcatccagtaaatgctaaaatttatactgatttgtctttatttagttgtgataagaaaatggcatcagatgttgaaaagtttttcaattatgtaacaggatacgcaaaaccaaaaaatttaaataaaatttctatttcgccagtaaatatgagacaaaccctaaatgaaaatattgatgctgaaattaaaaattctaaaaat

SEQ ID NO: 251336 - DNA, 232 bp, Unknown
  Bacterial polypeptide expressing nucleotide sequence isolated from the Sargasso Sea
atgtcgaaagcattattttcagaaaaatctaatattagcaatcaactcataaacagagaattatcttggcttcagtttaatgatcgtgttttagaagagtcaaaagatgaagcaaatcctctattcgaaagagtaaaatttttatcaatcgcaggtacaaatttagatgaattttttatggtaagagttgcaggactttttaatcaaattaaagatggtttgacgaattaag

SEQ ID NO: 251337 - DNA, 800 bp, Unknown
  Bacterial polypeptide expressing nucleotide sequence isolated from the Sargasso Sea
aattcaaacttatatacatctaggaactggcaattatcacccagttaatgcaaaaatttataccgacttatctttatttagctctgataaaaaaatagcaactgatgtagaaaaattttttaattatgtaactggttattcaaaacctcgaaatcttagtaaaatatctatatcaccaataaatcttagggaaactttgaacaaatgtattgctaacgagatagcaaatgtcaaaaaaggaaaaaacggtgaaatatgggccaaaatgaattccttagtagacccagcgataattgataaattttacgaagcttcaaatgctggagtaaagatatttttatttgtaagaggtgtttgttgtttaagacctggagttaaagataaatctgaaaatataatagttaaaagcatgattggaagatttttggaacactcaagaatttattgttttgcaaatggaaaaacaatgcctagtagagatgcaaaagtttttatttcatcagcagatttaatgccaagaaatttaaatcgaagagtagaacttctagttccaattgaaaaccaaacagtccacgaacaagttcttgatcaaattatgttagctaattatttagataaaaaacaaagttgggaacttgatgctagtggaaattataaaaaaattaaatatagtgaaaatgattctttttcagcccatgattattttatgaataatcctagtttatctggaagaggtaaagctaaattaaaaatgaaaccgaaaaaattaaacttaagacttattaaaagtggaaattaaa

SEQ ID NO: 251338 - DNA, 749 bp, Unknown
  Bacterial polypeptide expressing nucleotide sequence isolated from the Sargasso Sea
tgcaattatagttataccaagagcacttccaaaatttgtatcgctaaataattctgaaacaataaatgaatttgtcacaattgatgacgtaatttgtaaatttgctaatgaaatatttccagaccataatatcgaggcaagtttgcagtttaaaataattagagacagcgaaattgaaatagatgatgaagctgctgatcttgtgagatattttgaaaaagcaattaagaaaagaagaaggggaaacgtagttaaactcgaagtaatcactaattcaaacaaaaaacttttaaattttatttcaaaaaaatttaaaatggatgaagatcatatttatgaggttgaaggattggttggaatacaagatatagatgaaatttgtaaaaagaaagatccaaagctgagatttaaaaagtttaatcctagagaagttgaaagattgaaggaatttgatgataaatttttttcagctataagaagtaaagattttgttgtacaccacccttttgaaacttttgatgtagtaattcaatttttagaagctgcagcaaaagatcccaaagttatcggtatcaaacaaactttgtatcgaaccacacctgactctcctatcgtaaaagcactaagtagagcagcagaaaacggaaaagttgttacagccgtaatagaaataaaagctcgatttgatgaggaagctaatattgaattatctaggaaactagagaaagctggagttcaaattgtttacg

SEQ ID NO: 251339 - DNA, 325 bp, Unknown
  Bacterial polypeptide expressing nucleotide sequence isolated from the Sargasso Sea
gctgaaatctaaatatataaatagagagctttcttggttaaaattcaatgacagagtgcttttagaggcgcaaaatatcgaaaatcctctttatgaaagagtaaagtttttatcaattgctgggtcaaatctagatgaattttttatggtccgtgttgctgggttatatagtcaaataaaacaagaagttgactcattaagctctgatggtttgacacctgaagagcaaatggatgaagtagtgcttgaaactaagaatctattaaaaaaacagaataaaatttttattcaactgatcatggaattaaaaaaaaataatatcagt

SEQ ID NO: 251340 - DNA, 436 bp, Unknown
  Bacterial polypeptide expressing nucleotide sequence isolated from the Sargasso Sea
atgaaaagccaggctgatgtttttattaatagagaattaagttggattgaattcaataaaagagtactcctaactggtatggaaaaagagtataaaatcttagataaagtaaaattttgttcaatttttagtaataatcttgatgaattttttatggtaagggtagcttctttaaaggctcaagttgaagcaggaattactaaaaaaagtgtagatggattaacccctaaagagcaattaacaaaaatcaacaaggaagtaaaaaaattaactactattcaagaaaactatataaataatgaattaattgatgaattacaaaaacgaggcataattttaaaaaaatatgagaatctaagtgaaaatcaaaaaaattggtgtaataacttctttatttcatctatttttcctttattaactcccattagttgttgat

SEQ ID NO: 251341 - DNA, 738 bp, Unknown
  Bacterial polypeptide expressing nucleotide sequence isolated from the Sargasso Sea
aaaaggattttaaactcaataattgtaataccaaaagcattatctagatttattgaaatagagtcttcaaaaaatcatacgaagtttgttattctagatgacgtaataagtttttttgctaatgaaatttttccagatcatgatttagaaaagaaaatgatttttagagtaataagagacagcgatgtagagattcaagaggaagcagaagatttagttagatcttttgaattggctttaaaaagacgtagaacgggtgatattgttcgtttagaggttcttgaaaatagcgataatgaattggtaaaatttattacaaataaattagatataaactctgactatatttataatgtatctggccttgttggaattcaagacatagatcaaatatgtaaagtaaaaaatccaaaattaagatttaaacattttatacctagagaagttgaaagattaaaagaatataatgataattttttcgaaactatcaaaaagaaagatttagttgttcatcatccttttgaaacatttgactcagtaattgaatttttaaatcaagcagcaaatgataaaaaagttatagctattaaacaaactttatatagaacaactctagactcaccaattgttaaagctttaataacagctgcagaaaacggaaaaacagttaccgctttaattgaaattaaagctagatttgatgaggaagctaatattcaactatcaagaagtttagaa

SEQ ID NO: 251342 - DNA, 313 bp, Unknown
  Bacterial polypeptide expressing nucleotide sequence isolated from the Sargasso Sea
gctgaaatctaaatatataaatagagagctttcttggttaaaattcaacgacagagtacttttagaggcacaaaatatcgaaaatcctctttatgaaagagtaaagtttttatcaattgctgggtctaatctagatgaattttttatggtccgagttgctggattatatagtcaaataaaacaagaagttgactcattaagttctgatggtttgacacctgaagagcaaatggatgaggtagtgcttgaaactaagaatctattaaaaaaacagaacaaaatttttattcaactgattatggaattaaaaaaa

SEQ ID NO: 251343 - DNA, 865 bp, Unknown
  Bacterial polypeptide expressing nucleotide sequence isolated from the Sargasso Sea
ttaaatactaaggataaaaaaaaacttttagaaatatttaaagaagagatttaccctttattaacaccatcagcaattgatcctgcacatccatttccatttataatcaatcaaggaagagcaattgtaatgaagttaagaaaaaaaaataaaaaaaggattttaaactcaataatagtaataccaaaagcattatctagatttattgaaattgagtcttcaaaaaatcataagaaatttgttattctagatgacgtaataagtttttttgctaatgaaatttttccagatcatgatttagaaaagaaaatgatttttagagtaataagagacagcgatgtagaaattcaagaggaagcagaagatttggttagatcttttgaattggctttaaaaagacgtagaacgggtgatattgttcgtttagaggttcttgaaaatagcgataacgaattggtaagatttataactaataaattagatataaatcctgactatatttatgatgttgctggccttgttgggattcaagatatagatcaaatatgtaaagtaaaaaatccaaaattaagatttaagcattttacgcctagagaagttgaaagattaaaagaatataatgataatttttttgaaactattaaaaagaaagatttagttgttcatcatccttttgaaacatttgactcagtaattgaatttttaaaccaagcagcaaatgataaaaaagttatagctataaaacaaactctatatagaacaactctagactcacctattgttaaagctttaataacagctgcagaaaacggaaaaacagttaccgctttaattgaaattaaagctagatttgatgaggaagcta

SEQ ID NO: 251344 - DNA, 836 bp, Unknown
  Bacterial polypeptide expressing nucleotide sequence isolated from the Sargasso Sea
gctaatattagcaatcaactcataaacagagaattatcttggcttcagtttaatgatcgtgttttagaagaatcaaaagataaaacaaatcctctatttgaaagagtaaaatttttatcaatcgcaggtacaaatttagatgaattttttatggtaagagtcgctggactttttaatcaaattaaagatggttttgacgaattaagcgcagatggattaactgcagaggatcaattgaatagggtcgtattaaaaactaaagatctattaaagaagcaaaacgaagcattcctagagttgaaaaaagagctatcgaaagaaaaaattttcattcgaaaaatgtcagaactaaataagaaggatcttatgtatctaagagaatattttcaggaaacaatttatcctataataacacctactgccattgacccatcacatccctttccttttataccaaataaaggccaagcaattttattaagaatgacaagaattaaaaaaaaaagagaactaaatgcaattatagttataccaagagcacttccaaaatttgtatcgctaaataattctgaaacaataaatgaatttgtcacaattgatgacgtaatttgtaaatttgctaatgaaatatttccagaccataatatcgaggcaagtttgcagtttaaaataattagagacagcgaaattgaaatagatgatgaagctgctgatcttgtgagatattttgaaaaagcaattaagaaaagaagaaggggaaacgtagttaaactcgaagtaatcactaattcaaacaaaaaacttttaaattttatttcaaaaaaatttaaaatgga

SEQ ID NO: 251345 - DNA, 832 bp, Unknown
  Bacterial polypeptide expressing nucleotide sequence isolated from the Sargasso Sea
tttaaaagacgtagaacgggtgatattgttcgtttagaggttcttgaaaatagtgataatgaattggtaaaatttataactaataaattagaaataaattctgactatatttatgatgttgctggccttgttggaattcaagatatagatcaaatatgtaaaataaaaaatccaaaattaagatttaaacattttacacctagagaagttgaaagattaaaagaatacaatgataatttttttgaaactattaaaaagaaagatttagttgttcatcatccttttgaaacatttgactcagtaattgaatttttaaaccaagcagcaaatgataaaaaagttatagctataaaacaaactctatataaaacaactttagactcacctattgttaaagctttaataacagcagcagaaaatggaaaaacagtaactgctttaattgaaattaaagctagatttgatgaggaagctaatattcaactatcaagaagtttagaaaaagtaggtgttcaaattgtttatggttttgccaaatataaaactcatgcaaaatcttcattagttttaagaagagaacaaggtaaaatacaaacttattttcatttaggaactggcaattatcatcctgtaaatgctaagatttatactgatttgtctttatttagttctgataaaaaaatggcatcagatgttgaaaagttttttaattatgtaacaggttacgcaaaaccaaaaaatttaaacaaaatttctatttcaccagtaaatatgagacaaaccttaaataaaaatattgatgctgaaattgaaaattctaaaaatggaaaat

SEQ ID NO: 251346 - DNA, 595 bp, Unknown
  Bacterial polypeptide expressing nucleotide sequence isolated from the Sargasso Sea
ttcctcgcgatctcagcaaacaacctcgatgagttctatatggtccgcgtggcaggcttgcatgggcaggtgcaggctggcgtgcagcagcgcagcttcgacgggctgacgccaagcgagcaactgcagcgcgtaatccaggccaccaccggtcttatcgaacgtcagcaagaagcatggcgagatttgcgaaaagagcttgccgtggcgggcacgacaattgtctacccggaggatatgaccggttctgaccggcagtggttggaaagccatttcctcaagcgcatcttccctgtccttacaccacttgccatcgatcctgcgcacccgttcccattcatccccaatttcggcttcggtgtcgtactcgcgctcgcgcatcgcgaagattctacgctccgcaatgcgcttgttagggtcccgccgcagattggtcgttttgtcaaactacccggtagctatgaccgctacattacggtcgaaaacacgatcgagatgttttttgataagttgtttcccaactatcgcgtggcttcacggggtttgttcaggattatccgtgacagcgacattgagatcgaggaagaagcggacg

SEQ ID NO: 251347 - DNA, 819 bp, Unknown
  Bacterial polypeptide expressing nucleotide sequence isolated from the Sargasso Sea
gagaacagggtaaaatacaaacttattttcatttaggaactggcaattatcatccagtaaatgctaaaatttatactgatttgtctttatttagttgtgataagaaaatggcatcagatgttgaaaagtttttcaattatgtaacaggatacgcaaaaccaaaaaatttaaataaaatttctatttcgccagtaaatatgaggcaaaccttaaatgaaaatattgatgctgaaattaaaaattctaaaaatggaaaatttgcagctatttgggcaaaaatgaactctttagtagatccagaaattattgataaattttatgaagcttcgaatgctggtgtaaaaattcatttatttgtaaggggtgtttgttgtttaagaccaggagtaaaagatagatcagaaaacatatttgtaaaaagtatcataggaagatttttagagcattctagaatttactgctttagtaatggtacaaaaaaaatgcctaatagaaatgcaaaagtatatatttcgtcagctgatttaatgccgagaaatttaaatcgaagggtagaacttctagtcccaattgaaaatgaaactgttcatgagcaaattttagatcaaataatgttagcaaattatcttgatactaatcagagctgggagctcaatgctgatggtaattataaaaaaattaaatatagtaataacgattccttttcagctcatgaatattttatgaataatccgagcttatctggaagaggtaaagctaaactaaaaatgcagcctaaacaactgcacttaagattgattaaaagtggaagtaattaaa

SEQ ID NO: 251348 - DNA, 919 bp, Unknown
  Bacterial polypeptide expressing nucleotide sequence isolated from the Sargasso Sea
tccgagatcgtcgacgcgctcatcgatgcggcgcgtgccgggaaggcggtcacggtcttgatcgagctgcgtgctcgcttcgatgaggccaacaatatcaagctggccactcgactccagcaggcgggcgccaatgtggtctatggcgtcgtcggctacaaggtccacggcaaggcgctgatgattgtgcgtcgagtgggagacgggatccggcgctatgtgcatctgggcacgggcaactaccacgccggcacggctcgcttctacaccgactttggcctcatgagctcggatcctgagctgggagaggacctgcaccggctcttcctccaggttgctggactcggagccgcaccgcgtatgaagaccctgattcaggctccatttcacctcgccgatcggctgaacgacttcatcgaagatgagatcaaggcggctgagaaggggcgagaggcctggatccgcgcgcggatgaattcactgacggatcccggcatcattcgggcgctctatcgagccagtcaggctggggtaagggttgaactcttggtgcgaggcgtctgccgtctgcgtccaggaattcccggcatcagcgagaatgtggtggtgagatctctggtcggccgcttcttagagcacagccgggtctttcaattttgtgcgaatggagaaggacgagcgttctttagcagtgccgactggatggagcgaaatctccatcgtcgtgtcgagctctgtgtacctctgacgaatccaccgattcgggagcggattctgcacgaaggattaaatgtctattttcagccgggcaccgccacctgggagcttcagccagatgggcgctggtctaggactgaccccggcgatgacggatatatagacgtgcaagaacagctactcaaggagcttttcggatgac

SEQ ID NO: 251349 - DNA, 631 bp, Unknown
  Bacterial polypeptide expressing nucleotide sequence isolated from the Sargasso Sea
atgaaaagccaggctgatgtttttattaatagagaattaagttggattgaattcaataaaagagtactcctaactggaatggaaaaggagtacaaaatcctagacaaagtaaaattttgttcaatttttagtaataatctagatgaattttttatggtaagggtagcttcattaaaagctcaagttgaagcaggcattacaaaaaaaagtgttgatggacttacccctaaagagcaattaacaaaaataaataatgaagtaaagaagttaactaccctacaagaaaactatataaataatgaactaaataatgaattaaaagaaaaaggtgtaattttaaaaaaatataaagacctaaaagaaaatcaaagaaattggtgcaataactactttatttcatctatttttcctttattaactccattagttgttgatccagcacatccatttccttttataagtaatttaagtctaaatttggcagctttaataagggatggggaagattctaaaaatcagtttgtcagagtaaaaataccaacaaaaaatatcaatagatttatacgaattcccaatgaaaatattcaacacggtgatgaaagtacatattttttcataagtgtgaagattt

SEQ ID NO: 251350 - DNA, 979 bp, Unknown
  Bacterial polypeptide expressing nucleotide sequence isolated from the Sargasso Sea
ttgtatagaactacggatgactcaccaattgaaaaaagtttaattaaagctgctaataaaggaaagcttgtaactgtaattattgaacttcaggcaagatttgatgaggaacgaaatctaaaatgggcaagagaattagaattagcaggtgcacaagtggtttttggaagtattgaaaagaaaacacatgcaaaaattactttaattacgcgaaaagaaaaatcattaacagaaaattatatgcattttggaacaggtaattatcaccctaaaaatgcaaccgtttatatggatttatcgtatttcaccaaaaacagtgttttagccagagattccagtaaaatatttaactatgtaacaagctattcaatacctaggggaataaaaaaaattacatactcacctattttggctagagaaaaatttaatgaattaataaataaagaaataacaaacgcttcaaaaaataaaccagcaggattcgttgggaaaatgaattctcttgtcgacaaggaaatgattgacatattctatagagcatcaacgaataatgtgaaaattcaactgatcattcgaggtatatgttcgcttataccaggtttacaaaatatatctgaaaacatttatgtaaaaagtattattggaagatttttagagcatagtcgaatatattgtttttataatggttataaatttccacataaaaaaaataagatattcatttcatcagctgatctaatgcaacgaaatttagatagaagggtggaaacattcgtacctatagaaaacgaaactgtccatgagcaaattcttaatcaaatattaatagcgaacatcttagataatacaaattcttggattcttaatcacgaaggaaattatttaaaaaaagaaatatccaaaaagtcaaaaaaattttcttcacatacttactttattaaaaatccgagtttctcaggccccagaggtccaggctaaa

SEQ ID NO: 251351 - DNA, 421 bp, Unknown
  Bacterial polypeptide expressing nucleotide sequence isolated from the Sargasso Sea
catggcaggggtgaagatccgtattatggtgcgtggtatgtgttcactgatccccggtattaaaggcttgagcgacaatattcatgtcacaagcgtcctggacagattccttgaacacgcccgggtttatgtctttaacaatggcggcgaaacagacttgtatatctcttccgccgactggatgacgcgtaatctggatcaacgggttgaagtgggtgtgcctatttacgatgcagctattaaacagcaaattctgaccacgctggatattcagtggcacgacaacgtcaaggctcggattattgataaagatcaaagcaatcactatgtaaaaagaggcaataagcgtagcattcgctcccaacaggaaatctatgactactttgctgtattgcagcaatccattcaggccggaacatga

SEQ ID NO: 251352 - DNA, 1576 bp, Unknown
  Bacterial polypeptide expressing nucleotide sequence isolated from the Sargasso Sea
ctgccgcgcttcatcaagctgcccttggagctggctgacagcagtgacagcctctacaccgcattgcccctggagcaattggtggccttcaaccttggcctgctcttcccaggcatgaccattgaggggcactacttcttccgtgtcacccgcgacgctgatctggaactgcgtgaattggaagcggacgatctcatgattgccctgcaggaaggcctgcgcaaacgccgcatggggggcgaggtggtgcgcgttgaggtcaccgatgagatgccccaagacgtggtggatctgctgatggagggcatggccgtggaagccgaggatctctaccgggtgaacggccccttgggtctggatgacctctttggcttgatgggggtgcccctaccgcagttgaaggacgagccacaacaggcgcgggtggctgcgcccctggccagggcacaaaaagccttgctgaccgatggctcggtggccgaagaggaatttgaaagcgtctttgacgtattgcgacggggcgatgtgctggtgcaccacccctatgacctgtttccctcctcggtggaggaattcatcatgcaagcggccgaggaccctgatgtcctggccatcaagatgaccctctaccgggtgtccaaggattcacctgtgatcagctcgctgatcacagctgctgagaacggcaagcaagtcatggccctcgtcgaactcaaagcccgctttgatgaagaaaacaacatccagtgggcccgccagcttgaaaatgcaggcgtgcacgtggtgtacggggtgattggcttaaagacacacacaaaaatcacacttgttctgaagcgggaaaaggaagaattgcggtcctatgtgcacattggcactggcaattataactcgaagacatcacgcttatacaccgatcttggcttgctgagtgcacgtcaggacctgggacaagacctcgtggagctgttcaactacctcaccggtttctcaaagcagcaaagtttccgcaagctgctagtggctccagtcacccttcgctctggcatggaggccttgatccggcgcgaaatcgagcatgtcaacgccggtcgcagcggccacatcatcgccaagatgaattcattggttgacccaaggctgattgccttgctctacgaagcctcccgcgctggcgtgaagatcgagctggtgatcagggggatctgcagcttgattcccggcctgcctggcctcagcgaaaacgtcacagtgatcagcatcatcggccgattccttgagcactcccgcatcttctggttcggcaatgctggagctgcggaggtcttcatcgggagtgccgattggatgggccgcaacttggatcgccgtgtcgaggcggtaacgcctgtagaggactccgtattaagggaacgcctcgagcagctgctgcgcacctatctcgatgacaaccgaggcgcctgggatatgcagagcaatggccacttcatccagcggcaacccgagggcaacgaacttaattctcaactgcaactgatgcatgaatggtgctcaatccagggccagcctgtgtgat

SEQ ID NO: 251353 - DNA, 1447 bp, Unknown
  Bacterial polypeptide expressing nucleotide sequence isolated from the Sargasso Sea
tatgactagtccaaaaatcaataatgaaacttatattaatcgtgaactcagttggatagattttaacaaacgtgttttagaacttgctatagaagaggaaacgccattactagaaaaaattaaattcagttcaatttttagcaataatttagacgaattttttatggttagagttgcttcattaaaatcacaagtagaaggtggaatctcaaaaagaagccaagatggaaaatcacctgaagaacaacttatcgaaattcgaaattatttagaccctattttgaagacgcagcaatctaaaacaaagcaatatatggaagataactttaaaaaagagaatatatttattcttgaatataaagaattaaatgaaagacaaaaagtttggatagataattattttacaactgcaatttttccgatactaactcccttagcagttgacccttctcatccattcccgtttataagtaatcttagtttaaatttagctgcaattatcgtcgatagtgaatcagataaagagcaatttacccgtataaaaattcctggagagagtatttccagatttataagtattccagttgaactacatgataatgaatcaacaaaatacacaggaatagcgattgagcaaatcattgcaaataatctgtccatgctattccctggaatgtgtgttaaagaatattcgttctttcgcgttacaagagatgctgatctagagcttcgagaccttgaagctgatgatttaatgagtgcactagaagaaggtttacgcaagcggcgcaaaggaggtgaagtagtcaggctagaagtctctacaaatacgccaaaagttattcttgatcttttacaagaagggatgaatattgacaaagaaaacttatatcaaattgaggggttactagcattagatgaattaatagaattaactaattttaatcttcctaaattaaaatttagagagcatcaaggcgttactcataattcactcaaaaatagtcaattacgagaacaagaagagttagatactagaaataacagcaattttaaaagtatattctccattattcgccgtagtgatttactagtccatcacccatacaatctattctccacatcagtcgaagagtttattaatcaagctgcggaagataagcaagtcatgggaatcaaaatgaccttgtatagaatttccaaagactctttaattattgatgccctaataagagctgctgagaaaggaaagcaagtcatggctctagttgaactaaaagcaagatttgatgaagataataatatccaatgggcaaaacaattagagcaagctggagtgcatgttgtctatggagtaattggactaaaaactcatacaaaaatcgctttgattataagaaaagaaaaaaacagattaagaactatactttcatattgggactggtaa

SEQ ID NO: 251354 - DNA, 901 bp, Unknown
  Bacterial polypeptide expressing nucleotide sequence isolated from the Sargasso Sea
ggacgtcagtgaggcggaggtcttccgtcttcccggcccccttgatatgacgggtctctggacgatcgtgagcctcgaccgcgacgatctcaaacagcggaagtttgtcccgaagacttcgcgtcaactcagcgaggtagagagcgctcaagcccctgatgtgctctccgttgttcgcgagagagacgtgcttctgcatcacccgtacgactccttttccacaagcgttcaactctttctcgagcaagcggcgctagatccacacgttctggcgatcaagcaaactctctaccgaacgtccggcgattcacccatcgtggatgccctgatccgtgccgccgaagaaggcaagcaggtcctggcgatcgttgagatcaaagctcgcttcgacgaagagaacaacatcgagtgggcacgaaagctcgagcaggctggtgtgcacgtcgtgtacggcctcgttggcttgaagacccacagcaaattgtcaatggtcgttcgtgacgagggcggtcagcttcgtcgctactgtcacatcggcaccgggaactaccaccccaagacggctcgcttgtacgaagacttcggcttgctgacgtccaagccggacattggcgaagacatctcgaacctgttcaacgttctctccggatattcacgcaataccgagtaccaaagattgatcatcgccccgcattccgtgcggtccgggcttatcgaacgcatcaatcgggaaatcgaccaccacatggcagggcggccatccggcatccgcatcaagtgcaactcagtggtggacgaggagaccatcgatgcgctgtatcgagcgtcggcggtcggggtgccgatcgacatttgggtaccgggggacgtgcgctcttcgccccgggatgcccgggtgtga

SEQ ID NO: 251355 - DNA, 706 bp, Unknown
  Bacterial polypeptide expressing nucleotide sequence isolated from the Sargasso Sea
tatgtcgaaagcatcattttcagaaaacgctaatattagcaatcaactcataaacagagaattatcttggcttcaatttaatgatcgtgttttagaagagtcaaaagataaaacaaatcctctatttgaaagagtaaaatttttatcaatcgcaggtacaaatttagatgaattttttatggttagagtcgcaggactttttaatcaaataaaagatggttttgacgaactaagcgcagatggattaaccgcagaagatcaattaaatagagttgtattaaaaactaaagatctattagagaagcaaaacgaagcgttccttgagttgaaaaaagagctatcaaaagaaaaaattttcattcgaaaaatatcagaactaaataagaaggatcttatttatttaagagaatattttcaggaaacaatttaccctataataacacctactgctattgacccatcacatccctttccttttataccaaataaaggccaagcaatattattaagaatgagtaggattaaaaaaaaaagagaactaaacgcaattatagttataccaagagcacttccaaaatttatatcgttaagtaattctgaaacaataaatgaatttgttacaattgatgacgtaatttgtaaatttgcaaatgaaatatttccagaccattatatcgaggcaagtttgcagtttaagataattaga

SEQ ID NO: 251356 - DNA, 1690 bp, Unknown
  Bacterial polypeptide expressing nucleotide sequence isolated from the Sargasso Sea
tttgataaaaaaaagaaatgagatcaatgctaattttctaaataacttagattataggtcccagtttttaaatgaagtagataaaagttctgttaaaagattttttaatcgtgaactttcttggattgcttttaatgatagagttttagaagaagctggtaacaacaaagttccactattagaacgtgtaaggtttttggcgatttctgcagaaaatttggacgaattttattctgtcagggttgcaggactaaaggaattagtacgagaaaatttatctcgagtaagtgtagatggattattgcctcaagaacagattgaaaagattgaaaaattgacaagatctcttatggaaaagcaacaaattatatggaaagaattattaaatgagctcaagaattctggtatatgtattctttcaaagcatgatttacttacttctgatttaaaacctttagagaaatattttacagaacaagtattcccactgattactcctttggcaattgatcctgctcatccatttcctttcattacatcaggtggatttaccctagctgtaagattaaagagattaaccgacggatctttttttgaaacacttataccgataccttctcaaatcccgcggtttcataggttaacaaatagcaaaaagagagagataagatttatacctttagaagtaattttagatagatttctaccaattatttttcccggatatagtatttttggcaaatgtacatttagaattctgagaaacagtgacctagaacttgaagaagaggctgaagatttagttcgtgaatttgaaacagctctaaagaagcgtagacgaggtgacgtagtaagcttgaccatatctaaagatgctccaaaagaactatttgatttggtaacgggttctttatctgttctgccagaagagataatccaagtcgatggagttattgggatgactaagctttccgagttagtaatttctgataaacctaatttactttggaaaccatttaagcctaggaatccggagagagtagaggaaaacaatggtgatatattcgcaactattaaaagaaaagatatgttattacatcatccttatgaaacttttaatgtagttgtaagctttttgcagcaggctgcaaatgatcctaatgttgttgcaataagacaaacactttatagaacaagtaagaatagtccaattgttaaggctttatgtgaagctgctgaagctggaaagtcagttactgcattggtagagctgagagctcgcttcgatgaagcagcaaacattcaccagtctcgtgctttagaaagggctggagctcatgttgtttatggatttctggatttaaaaacacatgcaaaaatttcaattgtagtgagaaaagaaggaagaaaattagtttcttacacacattttggaactggaaattatcatccaataactgcaaacttctataccgatttaagtttttttacaaaagaaccagatctcgcacgcgatgccaccaaagtatttaattatgtatcaggttatatagagccttctaaatttgaaaatatcagtttagctccaatcgatttgaaaaaaaccattcttcaaaatttattaaacgaggttagattagcaaaacaaggaaaacctgctagagcctggataaaacttaattcctggtag

SEQ ID NO: 251357 - DNA, 1978 bp, Unknown
  Bacterial polypeptide expressing nucleotide sequence isolated from the Sargasso Sea
tatgacagatatagatcttcttgatcgtgaatcatcctggttagagttcaacaaaagagtattaactttatcaaaagatagcagtgttcctttcaaggatcgtttatttttattcggtataacacattctaatttagatgagttttttcagattcgaatttctggattgcttgaaaaagtttacgagactattaaccaaaagctggatgtttcaatttcgaaagaaacatttgtatattttatagatattcttgaagaagctaaaaaggagatgataaatagaaacacagtttggaaagaatattttgtaaaagatctagaaaagcatggtgtaaattttaagaggatgaaagacctcactgaatctgagcttgatatcttagaagattattttgataacaatataaaacccctccttactcccttggctgcagaccctacacatccatttccatacatttctgatttatcattgtctatcggcgtagtcatcaaaaacgaatttgaagataatcaatttatacgtataaaaatcccagcaagtttaggttcatttgtaaatttaaataaggaacaacttgtatggatacatgaattggttcttcactatattgataaactgttttttccacacacagttattgaaaagttttggtttagaacaactcgtgatgcagatttagaatttagagcaagtttaaagcgaaattttctggaagttgtaaaagagggattagaaaatagaaaattaggaaaaattgtaagattagaaatccaagagggagtttcagtaacaactcaaaaatacttaaaaaataatttagaaatagattatgaccttcaagtagaattaaaggacccacttactagatttcaaattaattctttgatagaccatatcgaattttctacaagttggaaattacatgagactgaatttgaatttagcaatgatatgtttgaaattattaaaaataatgatgtgatggtacatcatccttatgattcatttgagaaaacagttttgcgatttttagaaaaagcatgttttgatccatatgtacgtgccataaaaatgacacaatatagaactggtttaactgctgaaaacgataagataacatccctattagcaagtgcagcgagaggaggtaaacaagttgctgttttagttgaattgagagcacggttcgatgaagagcaaaacatctcgaatgctgaatacttagaagaatcaggtgttcatgttacgtatggagatccaagatataaagctcataccaaaatgattttagttgttcgtgaagaaaataatgaattagtaccatatatgcactttggaacaggtaattacaatgttttaacatcaaagggatatgaggatattggcattttcacatctgataaaagtattggtaatgattgtggaatagtttttaattcgttaactgcttatgctgatagagaaaatcttgatgagttgctagtagcccctgagtctttagagaaaaatattaactcattaattgaagaacaaatagatttaggagaagaaggaaaaattgttttaaaattgaataatcttactgatccattaatcatacaaaaattatatgatgcggctaatgcaggtaatcagataaatattatagtaaggggaatttgttgtctcataccaattaaaaatataaatgttatttctatacttggtccttttttagaacactcaagaatatataaatttggaagatcagatatagaaaaaatatatatagggtctgcagatttaatgcaaagaaacttaagacatagaattgaagtattagtacctataaaaagcccgataataaaaaagaaactcagtagtctcttagaaaaatatataaagtctgacaagtattcatggacgttaaaaaatgatggaacatggaaaaaattagatggaaactacaatatccaagagaagttaaacaaataa

SEQ ID NO: 251358 - DNA, 2101 bp, Unknown
  Bacterial polypeptide expressing nucleotide sequence isolated from the Sargasso Sea
ttgtctttaaataaaatcacaaaaaaattaattaataatcaaaatgacaggtattttgacagagaaattagctggttatcttttaatgaaagagttttactacaagcatatgataagacaattccttatggtgaaagacttagatttgtaacaatttcttcagaaaatttagatgaattttatatggttcgaatagctgggctacatcagcttataagtcaaggtttcaatacagtacctgaaactggaatgagggcagatgaattgttaaaaacagtacttaatgcttccaaagatttaaaaaataaacagcaaagatgtttgaattatttattgaatgaaaaggaagattgtgatgtttcaattttgtttgataataaatggactaaaaatgaattagaatggcttaaagaatattataaacaaaatattctacctcttttaactccaaccacgttagatcctgcacacccttttccttttatccaaaataaaggcaaatgtgtattaatggagatgaaagatacaaaaaacaaaaatataaattgtgttgttttacttcctgataatatagctagatttataagattacctggtgaaaatcagagatatgctatgctggagaccttagttacaaagtttgttcatttaatttatcctgaatataaattattaaaatcaggcatgtttagagttatcagagatgccgaaattgaaatagatgatgaagcagatgacttaatagggcaatttgaaactgcaattaaagccagaaaaagaggtggtattgtatctttaaccttttctcatgatttatctaaatctgctcaaaaacttttaactagggaattaaatatccctgacgatcatatatatgttgcgcaaggatttgttgggatcaatgactttactgaaataataaataatttacccaaacaaaatatattcaaaccttacaaacccagaatgccacaaagaatattagactttaaaggagattgcttttcggcgataaaaaataaagaaataattgttcatcatccttacgaaagttttgatgtagttttaagtttgcttcaacaggcagcaacagataaaaatgttttaacaataaggcaaactttatatagaacaacacctgattcaccaatagtagaagctttggtgtccgctgctgagtcaggaaaatctgttattgcagtaattgagctgaaagctcgatttgatgaagaaaataatgtccaactagctagaatattagaacaagctggtgcacaagttgcttacggcctagttgatttaaaagtacatgcaaaattatctttaataacaagaaaagagggtaaaaaattagtttcttatgctcattgtggaactggtaattatcatccacatactgctaaaatttatactgacttttcgttattcactatcgataaaaatatttgtgatgatgctagatcagtctttaattttcttaccagtcacgttcagccaaaacgattaaataagatgatcatttcacccaactcttcttatgattggttaattgagaaaattgataatgaaatacaaaatgctaaagatggttttgaaagtggaatttggattaaatgtaatgcgattgtagatcaaaaaataattgaaaaattctatgaagcatctaatgcaggggtaagaattcacttgatggttaggggtatttgctgcctacgccctaatgttaaaggaatgtctgaaaacattacagtaactgcaattataggaagatttcttgaacatggaagaatatatgtttttgcaaataaaggaaaatttcagtctgaaagtaatttagtttatatagcatctgctgatataatgcctcgtaatttataccatagagttgaagcttttatccctttagaaaacaaaacagttcgaagtcaagtcctagatcaagtattacctgctctaataaatgacacaaaaaacacttggcaattaaataaaaatggagaatactccaaaaaagaaaataaggacaaatcattttgtgcgcacacttattttatgaaaaacccaagtttatcaggtcagggaagcttagctaaaatataag

SEQ ID NO: 251359 - DNA, 817 bp, Unknown
  Bacterial polypeptide expressing nucleotide sequence isolated from the Sargasso Sea
catgactgatgcaggtatacgcgttgtacttggcgtgcctactcttaaaattcactctaaactttgtattgtgacccgtgaagaacggggcagtttggtgaactatgcgcatttcggtacgggtaacttcaacgagaaaacagcaaagatttataccgactacagcttattcacccgtaatcaagaactcgccgatgaaggcgtggcggtattcgatcttattcaatacccttaccgacgctacaagttccagcatcttcaaatatcgccattaaacgctagaaccaaaattcagtcgttaattcgtcaagaaattcagcatttgaaccaaggccaaaaggcacaaatcactttcaaaattaacaaccttgttgataaagaactcattgatgatttgtaccgggctagccaggcgggggttaagatccgcggtatagtgcgcggtatgtgctcacttaatccggggataaaaggaataagcgaaaacatcgaaattatctctattgttgatagatttctcgaacaccctcgcgtgatgatttttgaaggtggcggcgatagaaaagtgtatatctcttctgctgactggatgacccgtaacatggacaaccgcattgaagtaggttgtccagtgtatgataaaggtcttcaacagcgcattgttgatataatggagctacaatttaaagataccctgaaggctcgagtgattgacaaggatcagagcaacaagtacgttcgcaggggaaatcgtaaaaaacttcgttctcagatagaaatttatgactatttgaagaagctagaagacactttgtag

SEQ ID NO: 251360 - DNA, 2080 bp, Unknown
  Bacterial polypeptide expressing nucleotide sequence isolated from the Sargasso Sea
atgaaaagccaggctgatgtttttattaatagagaattaagttggattgaatttaataaaagagttctcctaactggtatggaaaaggagtacaaaatcctagataaagtaaaattttgttcaatttttagtaataatctagatgaattttttatggtaagggtagcttccttaaaagctcaagttgaagcaggaattactaaaaaaagtattgatggacttacccctaaagagcaattaacaaaaataaataaagaagtaaagagtttaactaacctacaagaaaactatataaataatgaattaaataatgaactaaaagaaaaaggtgtaattttaaaaaaatataaggacctaagtgaaaatcaaagaaattggtgcaataactactttacttcatctattttccctttattaactccattagttgttgatccagcacatccatttccttttataagtaatttaagtctaaatttagcagctctaataagggatggggaagattctaaaaatcagtttgtaagagtaaaaataccaacaaaaaatataaatagatttatacaaattcctaatgaaattattcaatatggtgatgaaagtacttattttttcataagtgttgaagatttaattgggaataatataaatactttatttaacggaatggaatgtataaattactctttttttagagtgacaagggatgcagatttagaattaaaagaacttgaagctgatgatcttcttttagcagttgaacaaagtttgcaaaagagaagattaggtggagacgtagttagattagaagttgaatcgaatatgccagaaaatatcctaaaaccactcattgaaagtatctcaatacaagaagaatatatttacttttgcaaaagtttattaggccttaacgatttaaatcagcttacgaaaattaatagagatgatttaaaagaaaatctgctaattgggaaaactcacccaaaattaaaaaatttagaattatcttcaaacaaaaacctcaattctatttttcatatacttagaaaaaaaaatattctgcttcatcatccatacgacttatttagaacttcagttgaagaatttataaacaaggcagctgatgatccacttgtaatggctataaaaattactttatatcgagtttcaaaggattcccctatcattgcagctttaatgagagctgcagagaatgggaaagaagttatgacgcttgttgagctaaaagcaagatttgatgaagacaataatattcaatgggcaaaacaacttgagcaagctggaattcatgttgtatatggaatcataggatttaaaacacatacaaaaatagctttaatagtaagaaaagaaaaaggacgattaaggaattatttccatattggaacaggaaattataactctaatacttcaaagttttatacagatttaggtttactttcaactgatcctgatattgcctcagatttacttgagttatttaactacttatcaggtttttctaaacaaaaaagttatcaaaagttattagtttctccctcatcgatgagggaaaaatttatatttctgataaagagagaaattaaaaatgcagaggaaggcaaaaaagccgaaataatcgcaaaaatgaattctttagtagacccagaaataattaaactgctttatttagcttcagactcaggtgtaaaaattagcctcatcataagaggtatttgttgcctatatccccaaagaaaaaatttaagtgaaaatattaaagttataagcattattggccattttcttgaacactcaagaattttttggttttgtaataacggggataatgaggtttttatagggagtgcagattggatgagaagaaatcttgatagaagaatagaagctgttactcctatagaggattatgaattgaaatctaaaatatacacgcttttgcaaacttacattaaagataattacttttcttggataatgaaagatgatggttcatattcgaaatatgaattagattcatcgcataatcgttcgcaaattgacctcatagaaaaataaa

SEQ ID NO: 251361 - DNA, 400 bp, Unknown
  Bacterial polypeptide expressing nucleotide sequence isolated from the Sargasso Sea
tatgttaaaaaaaaataccacttataactatgcaaacagggaattgtcttggctaaaattcaatgaaagagtcttaagtcagacatctgatagtaaaattccacttttagaaagggttagatttttatcaatagcattctctaatttagatgaattttttatggttagagtagcaggattgaatgttcaaaaattttcacgaaataaaagttttgatggattaacaccacaacaacaactcaagctgatagataaagaaacatcgaagatgatttcaaatataaaatcaatatggatagatttactaagagagctttcagaaaacaaaatccatatagatgtagaaaaaacactgaaaacaaaagataaaacatttattaaaaattatttagaagaaaat

SEQ ID NO: 251362 - DNA, 991 bp, Unknown
  Bacterial polypeptide expressing nucleotide sequence isolated from the Sargasso Sea
ctggtcaaaaatcctgatcaaaacaaacgaattcagccgcaattcgaagatattgaccttgaggagcctcgttacttcgagaatagggagttgtctcatttcaagtttaatctcagagttttaagccaggcaaaaaatctaagccatcccctgctggaacggcttaggtttttattaatattcagctccaatttagacgagttctttgagataagaatatctggcctgaagaagcaattagagtccggcagacaaagaccagggccagacggcaagttcccagaccagatccttaaaataattcatgaacaagttcgagaagctttggacgaacaatatcggattcttaacgaggatttgttgccggatttagctagggagcatatccatttcttgcaaagacatgaatggtcaaaacatctgcaagcgtggacgaaaaactatttcactgatgaagtgttaccagtaattagtccgttggggttggacccagctcatccgttccctcggttagtaaacaaaagcttaaattttatcttaacattggagggtaaggatgcattcggcagagagagcggtctagccatagttcctgctccaagagcgcttccaagactgatcaaggtaccccgcgacatcatacctgaaggcgacaactttattttcttgtcttcaattatccatgagtatgttgaggaatttttccctggcatgactgtcaaagggtgtcatcagtttcgcgttacgcgaaattctgacttagaaatgtctaaagtagaagtggaggatgtcgctagcgcacttcgaggagagctccacagccgacgattcggagccgccgcaaaacttgaagttgacaaagattgtccaccgaaacttacagaattcttacttgatcgtttcaatctgtccaaaagtgaactattcacgctggatggaccggtaaacttacagagactcacggcagtattcaacatggtggagaggcctg

SEQ ID NO: 251363 - DNA, 487 bp, Unknown
  Bacterial polypeptide expressing nucleotide sequence isolated from the Sargasso Sea
aatgaagaaaccagctaataattttattaatagggaattaagttggattgaattcaataaaagggtactccttaccagtatggaagaggagtacaaaatacttgataaagtgaaactttgttctatttttagcaataatcttgatgaattttttatggttagagtagcctctctcaaagctcaagttgaagcaggaatcgccaaaaaaagtattgatggacttacacccaaagagcaattaaaagaaataaacaaagaggtaaaaagtttaacttctcttcaagaaaactatgtaaatcatgaattaaacattgaactcaaaaaaaaaggaatcataataaaaaagtatgatgaactttgtgaaaatcagaaaaattggtgtaataacttctttatttcatctgtatttcctttattaactcctttagttgttgatccagcacatccattcccttttataagtaatttatacattccattccgctaa

SEQ ID NO: 251364 - DNA, 2074 bp, Unknown
  Bacterial polypeptide expressing nucleotide sequence isolated from the Sargasso Sea
gcttctttttaccaaagagttttagatgaggctaatgatactaaagtgccgttaatcgaaagagttaattttctctcaatttctgcaagtaatctggatgaattttacatggtaagaataccaagtcttttggaggtagttgaaaacaaacccgatgaagtaagcaatgacgggatgactgggcagcagcaattaaaagcagcctataatgcttgtgcaaaaatatttaaaaatcaggatgttttttttagaaagctagtaagagaattgaacggagaaaaaataattcacattacgcctaataaattaaatcttaaattgagaaaaaatttaaaaaaattttttaacgaggaaatactgcctatattaacgccaatttctatagacccggtccatccatttccctttattccgaatgaaggattgtgtatttctttaaatttaaaagcaagaggcgcaaataaaacctttaactcggtaatcattgttccgcgggcattaaaaagaatcgtgttcatacaagagggcaacaaaggatattatttatttgttgaagatgttattaaatattattttaaagatttatttccaaatacaaaattgttagatagtgctgtatttagagctataagagacagtgatattgattatgaatatgaagacgatgaagatgtcatcaaatattttgaaaaagctctaactaaaagaagaagaggggaaattgttaggcttgaaattttaaaaaatacatcatctaaaaagaaaaactttttaaaaaaaaatttgaagcttcaagatgcacaagtaattactctatcaaagtatgtaggattgcaagatttatcgcttattcatgatttaaataagccaaaattgaaatttaagaaatatatttcaagacccgttgaaagattaaaacaatttgataataattgttttgctgccatcagatcaaaagattttgttgttcatcatccatatgaaacctttgatgtcgttgtcgattatttgaatcaagccgcggttgaccccaaagtagtagcaattaaacaaacgatttacagaacgactattgatagtccaattattaaagctcttacaaaagcggcagataacgggaagagcgtaaccgctgtggtcgagattaaagccagatttgatgaggaggctaatttggcacttgctaatcaaatggagaaatctggagttcaaatcgtatatggttttgctcaattgaaaactcacgcaaaggcaagcctcatcattcgaagagaagcagataaattaaaaagctatgctcatgtaggtacaggaaattatcatccaaaaaatgctaaaacttatgaagacttgtcattattcacagctgatgaaaaaatctgtaaagacattgagaagatttttaattacatgacgggatatgcatcacccgccaatttaaatggtatcctactctcaccactttcaatgcgaaatcaacttaatgcaatgattgatactgaaattaaaaatataaaaagaggtaaaccagctggaatttggcttaaaatgaattccttagtagattcccaaatgatcttgaagctctatgaggcttcagaagctggagttaaaatcgaattgttcataagaggaatttgctgcttgaggccaggagttaaaaaactttctgaaaatattgttgttaaaagcattgttggccgatatttagaacatgccagaatcttctgttttgctaacgaatctaatataccctctaaagataatattgttttaattggatcagctgatcttatgcctagaaatttggatagaagagttgaaatattaacccctataatgaatcctactgttcatgagcagatattgaatcaaataatggttgccaatttcctggacaatgagcaaacgtggataatgaacgatgatggcacttataaaaaaattaaacaaaaaggtaagacgtttaatgcacataaatacttcatgtccaatccaagtttgtcaggtagaggaaaaataaaaggaaatagaaagccaaagaaattactctctctgatgacctatgaataat

SEQ ID NO: 251365 - DNA, 2143 bp, Unknown
  Bacterial polypeptide expressing nucleotide sequence isolated from the Sargasso Sea
ctgtcgatcgataaagaaatctcttggttgtcattcaacgagcgggtgctgcaggaggcctgtgatcccaatgtgccaatcgtggagcgggtgcgctttttaggcatattctccaataatatggatgagttcttccgggtgcgggtggccgcggtcagacgctcaattctgctctctgcgctgcaggaaggtcgcagcaatagccgccacctcatggccaaaattcaaaccaaagtgatggcattgcaggaacgtttcgatagcatttacgtcgagctgatgcgtgagttagtccgccgcaatattttgttaatcaacgaaaaacaattaagcgagttccacagtaactggcttaaaaagcattttcgcgatcactttaaacgccatatcgcgccgctcatcgtcaacaacaatcgcgacctagtaaagcatatcaacgacgacgccacctatctgtgtgtgtgtttgttcactaaatcccgcagacaatatgccctcgtggaagtgcccaccaaaaatgtgccacgtttcattgagttacccgccgaaaaatcgaaggcgaaaaaatacttaatcctgctggataatattattcgccactgtgtggacgatctctttggtcccttcttcgagtacgatgcgattgaagtctattcgatgaagctgacccgcgacgccgagttcgatattaccgacgaacttgaacagacccagctcgaaaaaatgaccaagggtttgaaaaaacgcctgaccgccgaacccgtgcgcttggtgtacgacaaagaaatgcccgagcatatgcttgaaatgctgaaggaaaatttaaacatcagctcgactgagtgtttgatccccggtgggcgctaccacagcttcaaagactttatcggcttccctaaccctagccgtgattacctcgaaaatgagaaattgcctgcgctcaatagctcgggctttggccgcagcgccaatagtttcgatgcgatcaagatgggcgatattatggtcaactacccgtaccataagttttcccactttaccgaaatggtgcgtcaggccgcctacgatcctgcggtgcgttttattcgcatcaacctttaccgtgttgcgaaaaaatcccatgtgatgcaatcgcttatcgatgcggtgaaaaatggtaaacaagtcaccgccgtgattgagctgcgggcacgctttgacgagcaatctaatattgagtggacacgggtgctcgccgaggcgggtgtcaaagtccaccatgggatcaccagcttaaaagtacactcaaagttgtgtttgattggccgcgaagagcaaggcgagatgaaactctattgccacgtaggctcaggcaactttaacgaaggcacggcgcgggtctataccgacttatcgctgtttaccgccaatcaggaaatcgcccgcgaagtggagcaagtgtttgacctgattgaacatccttaccgccgcgataacttccagcatttgattgtgtcgccctatgatgcgagacaaaaactgacccatttgattgataacgaaatcgtcaatgcccagagccatattaaggcagcgattaccttaaaattgaataacctgctcgatgagtccttagtccaaaaactttacgaggcctcggctgcgggggtcaaaatcaaactgttgatccgcggtatgtgctcgctgattccacaaattccggggatcagcgacaacatcgagatttacagtattgtcgaccgatttttagaacattcacgggtgatgctgttccatgccggtggtgagaataaattatttatcagctccgccgattggatgagccgcaacatagataaccgcgttgaagtaagtgtgcctatttatgatccgcgtctaaaacaaatggtgatggatattttatcgttacagttcaatgacaacactaaggcgcgcatcatcaataaggaacagagcaatccttatcgtaaccgcggtaataaacgtaaagtgcgttctcaaattgccatttatcaatatctgattaattatgagaagcgattgcagcaagaatttagcgcccagcgcgaagccgcaaagcttgaagcggagcacacggcggaacttgcccacaatctcgaattacaggccaaagccagctaac

SEQ ID NO: 251366 - DNA, 622 bp, Unknown
  Bacterial polypeptide expressing nucleotide sequence isolated from the Sargasso Sea
atgaaaagcaaggctgatgtttttattaatagagaattaagttggattgaattcaataaaagagttctcctaactggtatggaaaaagagtacaaaatcctagataaagtaaaatttttttcaatttttagcaataatcttgatgaattttttatggtaagggtagcttcattaaaggcccaagttgaagcaggtattactaaaaaaagtattgacggactcactcctaaagagcaattaacgaaaataaacaaggaagtaaaaaaattaactaatctgcaagaaaactatgtaaataatgaattaaataatgaactaaaaaagcaaggcataattttaaaaaaatataaggaactaaatgaaaatcaaagaaattggtgtgataacttctttacttcatctatatttcctttattaactccattagttgttgatccagcacatccatttccatttataagtaatttaagtctaaacttagcagctttaataaaggatagagaagcttctaaaaatcagtttgtaagaataaaaataccaacaaaaaatataaatcgatttatacaaattcctaatgaaataattgaaagtaattatgaaagttcccactttttcataagtg

SEQ ID NO: 251367 - DNA, 1132 bp, Unknown
  Bacterial polypeptide expressing nucleotide sequence isolated from the Sargasso Sea
gttgaaaaaagagctatcgaaagaaaaaattttcattcgaaaaatgtcagaactaaataagaaggatcttatgtatctaagagaatattttcaggaaacaatttatcctataataacacctactgccattgacccatcacatccctttccttttataccaaataaaggccaagcaattttattaagaatgacaagaataaaaaaaaaaagagaactaaatgcaattatagttataccaagagcacttccaaaatttgtatctctaaacaattctgaaacaataaatgaatttgtcacaattgatgacgtaatttgtaaatttgctaatgaaatatttccagaccataatatcgaggcaagtttgcagtttaaaataattagagacagcgaaattgaaatagatgatgaagctgctgatcttgtgagatattttgaaaaagcaattaagaaaagaagaaggggaaacgtagttaaactcgaagtactcactaattcaaacaaaaaacttttaaattttatttcaaaaaaatttaaaatggatgaagatcatatttatgaggttgaaggattggttggaatacaagatatagatgaaatttgtaaaaagaaagatccaaagctgagatttaaaaaatttaatcctagagaagttgaaagattgaaagaatttgataataaatttttttcagctataagaagcaaagattttgttgtacaccacccttttgaaacatttgatgtagtaattcaatttttagaagctgcagcaaaagatcccaaagttatcggtatcaaacaaactttgtatcgaaccactcctgactctcctattgtaaaagcacttagtagagcagcagaaaacggaaaagttgtaacagctgtagtagaaataaaagctcgatttgatgaggaagctaatattgaattatctaggaaactagagaaagctggcgttcaaattgtttatggattcgcaaaatacaaaacgcatgcaaaggcaagtttagttttaagaaaagagggaactaaaacgcgaagctatgttcacttgggtacaggaaactatcatccaattaatgcaaaaatttatactgacttatcactgtttagctctaatcaagacctggccaaa

SEQ ID NO: 251368 - DNA, 811 bp, Unknown
  Bacterial polypeptide expressing nucleotide sequence isolated from the Sargasso Sea
actgcagtccgaggacattgaccttaatgactctcattattatgaaaatagggagttgtctcatttcaagtttaatctcagagttttaagtcaagcaaagaatctaaatcatcccctgctggaacggcttaggtttttattaatattcagctccaatttagacgaattttttgagataagaatatctggccttaaaaagcaattagaatccggcaggcaaagaccaggaccagacggaaagtttccagaacaggtccttaaaataattcatgagcaagtccgagaagctttagacgagcaatatcggattcttaacgaggatttactgccggatttagccagagagcatatccatttcttacagagacatgaatggtcaaaaaacctgcaagcgtggacgaaaagctatttcactgatgaagtgctcccagtaattagtccgttgggcttagatcctgctcatccgttccctcggttagtaaacaaaagtttaaactttatcttaacattggagggtaaggatgctttcggaagagaaagtggtctagccatagttcctgctccaagagcacttccaagactgatcaaggtaccccgcgacataatgcctgaaggcgacaattttattttcttatcctcaattattcatgagtatgttgaggaatttttccctggtatgacagtcaaagggtgtcatcagtttcgcgttacaagaaattccgacttagaaatgtctaaagtagaagtagaggatgttgccagtgcccttcgaggagagcttcacacccgacgattcggagccgctgcaaaa

SEQ ID NO: 251369 - DNA, 1054 bp, Unknown
  Bacterial polypeptide expressing nucleotide sequence isolated from the Sargasso Sea
tatgtcgaaagcaccattttcagaaaacgctaatattagcaatcaactcataaacagagaattatcttggcttcagtttaatgatcgtgttttagaagagtcaaaagataaaacaaatcctctatttgaaagagtaaaatttttatcaatcgcaggtacaaatttagatgaattttttatggtaagagtcgctggactttttaatcaaattaaagatggttttgacgaattaagcgcagatggattaactgcagaggatcaattaaacagggtcgtattaaaaactaaagatctattaaagaagcaaaacgaagcgttcctagagttgaaaaaagagctatcaaaagaaaaaattttcattcgaaaaatgtcagaactaaataagaaggatcttatgtatctaagagaatattttcaggaaacaatttatcctataataacacctactgccatcgacccatcacatccctttccttttataccaaataaaggccaagcaatcttattaagaatgagcagaattaaaaaaaaaagagaactaaacgcaattatagttataccaagagcacttccaaaatttatatctctaaacaattctgaaacaataaatgaatttgtcacaattgatgacgtaatttgtaaatttgcaaatgaaatatttccagaccataataccgagacaagtttgcagtttaaaataattagagacagcgaaattgaaatagatgatgaagctgctgatcttgtgagatattttgaaaaagcaattaagaaaagaagaaggggaaacgtagttaaacttgaagtactcactaattcaaataaaaaccttttaaattttatttcaaaaaaatttaaaatggacgaagatcatatttatgaggttgaaggattggttggaatacaagatatagatgaaatttgtaaaaagaaagatccaaagctgagatttaaaaagtttaatcctagagaagttgaaagattgaaggaatttgatgataaatttttttcagctataagaagtaaagattttgttgtacaccaccccttttga

SEQ ID NO: 251370 - DNA, 708 bp, Unknown
  Bacterial polypeptide expressing nucleotide sequence isolated from the Sargasso Sea
atctaggtactggtaattataattatcagactgcaaagctatacactgattatggaatattgtcatccaataataaaatggctgaagatgtacagaaattttttatgcagctaacaggatcaaataaaaagttcaattacaaccatttaatcctatctccttttgatgcaagccaagaaattatcaaaaaagtaaataatgaaattaaaaattgcaagaaaggtagggaggcaatcatcaaagctaagatgaatcagctcacagaaatcaatattatcaagaaattatatcaagcatcatctgcaggcgttaaaatagaattacatattagaggagagtgcagactaataccaggagtcaaaggtatctccgataacataaaagtatattcgactatagggagatttttggaacactctagagtatattatttttatgatgtaggcaaagaacaagtctatttatcgagcgcagactggatgacacgtaatatgcataatagagtagaaataatatttccaattctagaaaagaatcataaatcacgaatttatcatgaatgctttatatatccactggaagataattcaaatctatggaaattaaaaaataatggatcttatgataaggttaaaattcaaagaggctctagaagaaatttatcacaagttgtaatatgtaataaatatggagagtttattgactgag

SEQ ID NO: 251371 - DNA, 412 bp, Unknown
  Bacterial polypeptide expressing nucleotide sequence isolated from the Sargasso Sea
tatgactgcattaaaaaaacaagataaagaaatacttaaatctaaatatataaatagagaattatcttggcttaaattcaatgacagagttcttctagaggctcaaaatatagaaaatcctctttacgaaagaattaaatttttatctatagctggatcaaatttagatgaatttttcatggtacgtgttgcaggtttatatagtcaaatcaagcaagacgtagactctcttagttctgatggtcttactcctgatgaacaaatgaatgaagttattttggaaactaacaatcttcttaataaacaaaataaaatatataaagatttaattcttcaattaaaaaaagtaaatataagtatagttaaacctgaaaatttaagtaaatcggatcagaaaaaattatttaaagtt

SEQ ID NO: 251372 - DNA, 1207 bp, Unknown
  Bacterial polypeptide expressing nucleotide sequence isolated from the Sargasso Sea
agcattattttcagaaaaatctaatattagcaatcaactcataaacagagaattatcttggcttcagtttaatgatcgtgttttagaagaatcaaaagataaaacaaatcctctatttgaaagagtaaaatttttatcaatcgcaggtacaaatttagatgaattttttatggtaagagtcgctggactttttaatcaaattaaagatggttttgacgaattaagcgcagatggattaactgcagaggatcaattgaatagggtcgtattaaaaactaaagatctattaaagaagcaaaacgaagcattcctagagttgaaaaaagagctatcgaaagaaaaaattttcattcgaaaaatgtcagaactaaataagaaggatcttatgtatctaagagaatattttcaggaaacaatttatcctataataacacctactgccattgacccatcacatccctttccttttataccaaataaaggccaagcaattttactaagaatgactagaataaaaaaaaaaagagaactaaatgcaattatagttataccaagagcacttccaaaatttgtatctctaaacaattctgaaacaataaatgaatttgtcacaattgatgacgtaatttgtaaatttgctaatgaaatatttccagaccataatatcgaggcaagtttgcagtttaaaataattagagacagcgaaattgaaatagatgatgaagctgctgatcttgtgagatattttgaaaaagcaattaagaaaagaagaaggggaaacgtagttaaactcgaagtactcactaattcaaacaaaaaacttttaaattttatttcaaaaaaatttaaaatggatgaagatcatatttatgaggttgaaggattggttggaatacaagatatagatgaaatttgtaaaaagaaagatccaaagctgagatttaaaaaatttaatcctagagaagttgaaagattgaaagaatttgataataaatttttttcagctataagaagcaaagattttgttgtacaccacccttttgaaacatttgatgtagtaattcaatttttagaagctgcagcaaaagatcccaaagttatcggtatcaaacaaactttgtatcgaaccactcctgactctcctattgtaaaagcacttagtagagcagcagaaaacggaaaagttgtaacagctgtagtagaaata

SEQ ID NO: 251373 - DNA, 634 bp, Unknown
  Bacterial polypeptide expressing nucleotide sequence isolated from the Sargasso Sea
ttggaagatgaagtaaagtttttcaatcgtgaattaagttggttaaagtttaaccagagagttattgcccagtcaaagtccaattctatacccttgggtgaacgtttaagattttctgctattgctgctgaaaaccttgatgaatttttcatggttagggttgcaggattgcttcaattacgtagaagtggggtaaagttcctccaaggagagaaaagaaacttagatgaacttttagatgagattataacaaaaagtcattttctctatctagaaattcaaaaagaactttcaaatatatttcttctattacagaaatccaatgtatttattaccgattatgatgatttagatgatgatgataaagcatggatttcaaaacatttcaaaaagtctattgaacctttaatagttccaacaacaattgacccttcccacccttttccttttatgcctaataaaggatcaggattaatccttaacctcaaaaataaattaggcaagcgtatgaggggcgtcataatgttatctaatttaaccaggtttattcgtctgcccggcagaaacctgaggtatatttccgttgaaaaggtagtattaaaatttattgaggatttgtatcccagggtttaaa

SEQ ID NO: 251374 - DNA, 1584 bp, Unknown
  Bacterial polypeptide expressing nucleotide sequence isolated from the Sargasso Sea
tatgacaaaaagatataataatagggagctatcctggttagaatttaattcaagggtattatccgaagcaggcaatactgatctgccactttttgaaagactaagatttttatcaattgcctctaataacttagatgaattttatatggttcgtgtggcaggtgtatatgcacagattaaagaaaaaattaaacacgaaacaatagatggattatctcctaaggagcaattgaaaaaaataaaaatcaaatcatccgagttattaaaaaaatcaaattatatttggtcaaaattaaaaaaagatttatcaaaacaaagaatattttttaaaagttttgtagaaattaatcaggatgagaaatcaaatcttttaaatattttcaatactaatatagcaccagtcttaacacctcaagccattgatccttcgcatccctttccatttctttttaaccaaggacactttttgcttatggaaatgcaaaaaaaaggaaaaaaaagatcaatttattcaattattattttacctaaaaatttaaagcgattttacaatgtcagcaacattgaagctgtaaaaaattatgtatcattagaagaaaccgtaagctcatatgcctcaaatctttttccaggttatgaaatcaaaaattatatatctgctcgtgtaacaagagatagcgatattgaagttgaagatgaggcggaagatctggtggttttctatgagaaagctttgaaaaaaagaaaaagaggcagaattgtgaggttggaattaaggaaaggatctgaacgtcatttaaaaaaattcttgataaaaaaaattaaagcagacccagatacagtggatgagattgaggagtttgttggaactcacgaaatctcacaaatccttgaacaaggcaaaaaagagttctatttcaaaaaatttaattcaagacaagttgaaagagtaaatcaatttaatggtgattattttaaagcaattaaatctaaggatatgattgtacatcatccttatgaaacttttgatgcagttatagaatttttaaatcaggcggtaaatgatccaaatgttcaagcaattaaacagactttgtatagaacaactttagactcaccaattgtaaaagctctcaaaattgccgcagaaaatggaaagtcagtcacagcaatagttgaaatcaaagcaagatttgatgaagaagcaaatataagtttagcaaaatctttagaaagatcaggtgttcaggttgtttatggttttgttcatttaaaaacacatgccaaatctagtttggttgtgcggttagaaaatggagtcttaaataaatacgttcatataggaacaggaaactaccatcccataaacgcaaaaatttatactgacctgtcattatttagtgcagaccccgattatgcaaatgatattgaaaagttttttaattttgtaactggttatggagatcctggagaattagaaaatgtgatacttgccccaagatttttgagaccaaaattaaatgacttaattgacaatgaaattgaaaacgcaaaatctggaaagcccgcagaaatttgggcaaa

SEQ ID NO: 251375 - DNA, 748 bp, Unknown
  Bacterial polypeptide expressing nucleotide sequence isolated from the Sargasso Sea
caaaatttatactgacttatctttatttagctctgataaaaaaatagcaactgatgtggaaaaattttttaattatgtaactggttattcaaaaccacgaaatcttagtaaaatatctatatcaccaattaatcttagggaaactttaaacaaatgtattgctaacgagatagcaaatgtcaaaaaaggtaaaaaaggtgaaatatgggccaaaatgaattccttagtagatccagcgataattgataaattttacgaagcttcaaatgctggagtaaagatatttttatttgtaagaggtgtttgttgtttaagacctggagttaaagataaatctgaaaatataatagttaaaagcatgattggaagatttttggaacattcaagaatttattgttttgcaaatggagaaacaatgcctagtagagatgcaaaagtttttatttcatcagcagacttaatgccaagaaatttaaatcgaagagtagaacttctagttccaattgaaaatcaaacagtccacgagcaagttcttgatcaaattatgttagctaattttttagataaaaaacaaagttgggaacttgatgttagtggaaattataaaaaaattaaatatagtgagaatgattctttttcagctcatgattattttatgaataatcctagtttatctggaagaggtaaagctaaattaaaaataaaaccaaaaaaattaaacttaagattaattaaaagtggaaattaa

SEQ ID NO: 251376 - DNA, 361 bp, Unknown
  Bacterial polypeptide expressing nucleotide sequence isolated from the Sargasso Sea
ctgaaatctaaatatataaatagagaactttcttggttaaaattcaacgacagagtacttttagaggcgcaaaatatcgaaaatcctctttatgaaagagtaaagtttttatcaattgctgggtctaatctagatgaattttttatggtccgtgttgcaggattatatagtcaaataaaacaagaagttgactcactaagctctgatggtttgacacctgaagagcaaatggatgaggtagttcttgaaactaagaatctattaaaaaaacagaacaaaatttttattcaactgattatggaattaaaaaaaaataatatcagtttagttaaaccagttaatttaaatactaaggataaaa

SEQ ID NO: 251377 - DNA, 325 bp, Unknown
  Bacterial polypeptide expressing nucleotide sequence isolated from the Sargasso Sea
ttggctaagaaacctgaaataacgattggaccagaagcatttatcaatcgtgaattaagttggcttgagtttaatctgcgagtccttgaggaagcagaaaatgaagagaatccgctgcttgaacggatgaaatttcttgccattttcagctccaacctcgatgagttttttatggtccgggtggccggtgttcgagagcaggcatttggtgacggtgcaccacaggactttgcggctgatggtctgacggctagtgagcagttgcgggccatagctgctcgaagtcaggaacttgtggcaaggcaatatcggtgtctccgcgaaa

SEQ ID NO: 251378 - DNA, 1834 bp, Unknown
  Bacterial polypeptide expressing nucleotide sequence isolated from the Sargasso Sea
aaattttgttcaatttttagcaataatctagatgaattttttatggtgagggtagcttcattaaaagctcaagttgaagcaggtattacaaaaaaaagtattgatggacttacccctaaagagcaattaacaaaaatcaataaagaagtaaaaaaattaactaccctacaagaaaactacattaataatgaattaaataatgaattaaaagaaaatggtgtaattttaaaaaaatataaggacctaaatgaaaatcaaagaaattggtgcaaaaactacttttcttcctctattttccctctattaactccattagttgttgatccagcacatccatttccttttataagtaatttaagtctaaatttggcagctctaataagaaatggggaagattcaaaaaatcagtttgtcagagtaaaaataccaacaaaaaatataaatagatttatacaaattcctaatgaaatcattcaacatgatgatgaaaaaacatattttttcataagtgttgaagatttaattgggaataacataaatactttatttaacggaatggaatgtataaattactctttttttagagtgacgagggatgcagatttagaattaaaagagcttgaagctgatgatcttcttttggcagttgaacaaagtttgcaaaagagaagattaggtggggacgtagttaggttagaagttgaatcggatatgccagaaaatattctgaaattactcattgaaagtatctcaatacaaaaagaatatatttacttttgcaaaagttttttaggccttgacgatttaaatcaacttacaaaaattaatagaaatgatttaaaagaaaatctaataattgggaaaactcacccaaaattaaaaattttagatttgccttcaaacaaaaacctaaattctatttttaatatacttagaaaaaaaaatattctccttcatcatccatatgatttatttagaacttcagttgaagaatttataaacaaagcagccgatgatccacttgtaatggctataaaaattactttatatcgagtgtccaaggattcgcctatcattgcagctttaatgagagctgcagagaatgggaaagaagtaatgactcttgttgaactaaaagcaagatttgatgaagataataatattcaatgggcaaaacaacttgaacaagctggaattcatgttgtatatggaatcataggatttaaaacacatacaaaaattgcattaatagttcgcaaagaaaaaggaaggttaagaaattattttcatattggaacaggtaattataactctaatacttcaaggttttatacagatttaggattactttcaacagatcctgatatcgcttcagatttacttgagctatttaattacttatcaggtttttcaaaacaaaaacgttatcaaaaactattagtttctccatcatcaatgagggagaaatttataactctaataaaacgagaaattaaaaatgctgaagaaggtaaaaaagccgaaataattgcaaaaatgaattcattagtagatccagaaataatcaaactactttatttagcttctagtgcaggtgtaaaaattagtctcatcataagaggaatttgttgcttgtatccacaaagaaaaaatttaagtgaaaatattcaggtcataagcattattggacattttcttgaacactcaagaattttttggttttgtaataacgattatcatgaagttttcattgggagtgcagattggatgagaagaaatcttgatagaagaatagaagctgttactcccatgaagataagaataaaagatagaa

SEQ ID NO: 251379 - DNA, 232 bp, Unknown
  Bacterial polypeptide expressing nucleotide sequence isolated from the Sargasso Sea
atgtcgaaagcatcattttcagaaaaagctaatattagcaatcaactcataaacagagaattatcttggcttcagtttaatgatcgtgttttagaagagtcaaaagataaaacaaatcctctatttgaaagagtaaaatttttatcaatcgcaggtacaaatttagatgaattttttatggtaagagtcgctggactttttaatcaaattaaagatggttttgacgaataag

SEQ ID NO: 251380 - DNA, 1703 bp, Unknown
  Bacterial polypeptide expressing nucleotide sequence isolated from the Sargasso Sea
ttttgactcaagaattctgccgatcctcacgcctgttgggctagatagcaataaacctggcctcagcagcagacatccatttccaaaagttcagaataaaagcttaaactttatggtgaaacttagtggcaaaactgcttatggcagaagctcacaaatggcagttgttaccgcccctagagtcttgcctcgatttgtagagttgccaaaagaattaagcaaacaaaaaaaatactttatgtttttgtcatctatcattcatgaaaacatatctaaactttttccaggtttaaaaataagaggttgccatcaatttagggtgactatgaatagtaatcttgaaatcgatgatgaggacttaagagattttaagcaatcgatttcacttcaacttccagatagaaaatataatgaagctattaggttagaagttgtaaaagactgccctgctgacattattaaatttttaaaagcgcaataccaattgaatgataatgatgtttataaagttaatggtccagtgaacttaaataggctggttgattttggtaaaaaaattgatgacgatagtcttaaatacaaaacttacacaccagatggaaattatactttaaaaggaaagcctgaagaaatttttaagcaaataaaatctgaagagtttcttcttcaccatccttacaacagctatgattcggttgtaaattttttaaaagctgcggttgaggatgaaaatgttcttgcgataaaacaaactatatacagaacagaaaaaaattcacaaatagttaaaaatttaatcgatggagtaaaaaaaggtaaacaagttactgcagttatagagctaagtgcaaaatttgatgaaactcataatattgatatttcccaaaaacttgaggccaacggagttcaagtaacttatggaattattgggttaaagactcatgcaaaagcaattctagttgtaagaaaagaaggaaagtttttacaaagatatgctcacttaggtactggtaattataataaaaaaactgcctctgcttacactgattttggctatatcactgctgacaaagatatcacagaagatattcataactttttcatccaattaactggctcttcaaaaaaaacaaaatataaaaaagtatatgtctctcctttcgacttaggaaaaaaaattaaaaacaaaataaatcgtgaaattatgcttgccaagaaaggcaaaccagctcttattatggcaaaaatgaatcaacttacagagagcaagattattgaaaaattatacgaggcatcaaaagctggagtaaaaatcgatttatttataagaggtgaatgtatattgaagcctggtattcaaggcctttctgaaaatatcagagtattttctactattggtaagtttcttgaacatactagagccttttatttttttaataatggtaaaaaagatgtttatctttccagtgctgattggatgccaagaaacatacacaaccgcattgaattaatgtttcctattaaaaaagatagtttcaaaaatagaatcataaaagagtgttttgatatgcatttaagagataattactcgctctggcaattagataaaaatggaaactataaaaaaagaaatattggaaaaggtagaaaaaaggtgtcagctcaaagtatactatgtaacgaacatggagattatttatgaa

SEQ ID NO: 251381 - DNA, 2063 bp, Unknown
  Bacterial polypeptide expressing nucleotide sequence isolated from the Sargasso Sea
tgtttttattaatagagaattaagttggattgaattcaataaaagagtactcctaactggtatggaaaaggagtacaaaatcctagataaagtaaaattttgttcaatttttagtaataatctagatgaattttttatggtaagggtagcttcattaaaggctcaagttgaagcaggtattacaaaaaaaagtattgatggacttacccctaaagagcaattaacaaaaatcaataaagaagttaaaaacttaactactcttcaagaaaactatataaataatgaattaattaatgaattaagagaacaaggtatacttttaaaaaaatataatgacttaagtgaaaatcaaaagaattggtgcaataactactttacgtcatctattttccctttattaactccattagttgttgatccagcacatccatttccttttataagtaatttaagtctaaatttggcagctcttatacgggatggggaagattctaaaaatcagtttgtaagagtaaaaataccaacaaaaaatatcaatagatttatacaaattcccaatgaaattattaaacatggtgatgaaggtacatatttttttataagtgttgaagatttaattgggaataatataaataatttattcaacgggatggaatgtataaattactctttttttagagtgacaagggatgcggatttagaattaaaagaacttgaagctgatgatcttcttttagccgttgaacaaagtttgcaaaagagaagattaggtggagacgtagttagattagaagttgaatcggatatgccagaaaatattctgaaattactcattgaaagtatctcaatacaaaaagagtatatttacttttgcaaaagttttttaggccttgacgattttaatcagcttacgaaaattaatagagatgatttaaaagaaaatctactaattgggaaaactcacccgaaattaaaaaatttagacttacctgggaacaacaaccttaattctatttttaatatacttagaaaaaacaatatactgcttcatcatccatacgacttatttaaaacttcagttgaagaatttataaacaaagcagctgatgatccacttgtaatggctataaaaattactttatatcgagtttccaaggattcgccgatcatagcagctttaatgagagctgcagagaacgggaaagaagtaatgactcttgttgaactaaaagcaagatttgatgaagacaataatattcaatgggcaaaacaacttgaacaagctggaattcatgttgtatatggaatcataggatttaaaacacatacaaaaatagctttagtagtaagaaaagaaaaaggacgattaaggaattatttccatattggaactggaaattataactctaatacttcaatgttttatacagatttaggattactttcaactgatcctgatattgcatcagatttacttgagttatttaactacttatcaggtttttctaaacaaaaaagttatcagaagttattagtttctccctcatcgatgagagaaaaatttatatttctgataaagagagaaattaaaaatgcaaaggaaggcaaaaaagccgaaataattgcaaaaatgaattctttagtagatccagaaataattaaacttctttatttagcttcagactcaggtgtaaaaattaacctcatcataagaggtatttgttgcttatatccacaaagaaaaaatttaagtgaaaatattaaagtcataagcattattggccactttcttgaacactcaagaattttttggttttgtaacaacggtaataatgaggtttttattgggagtgctgattggatgagaagaaatcttgatagaagaatagaagctgttactccaatagaggattatgaattgaaatgtaaaatatactcacttttgcaaacctatattaaagatgattacttttcttggataatgaaagaggatggttcttattcgaaatatgaattagatttctcggataatcgttcacaaattgacctaatagaaaaataaa

SEQ ID NO: 251382 - DNA, 1033 bp, Unknown
  Bacterial polypeptide expressing nucleotide sequence isolated from the Sargasso Sea
ttcaaaaaatttaaaatggatgaagatcatatttatgaggttgaaggattggttggaatacaagatatagatgaaatttgtaaaaagaaagatccaaagctgagatttaaaaagtttaatcccagagaagttgaaagattgaaggaatttgatgataaatttttttcagctataagaagtaaagattttgttgtacaccacccttttgaaacttttgatgtagtaattcaatttttagaagctgcagcaaaagatcccaaagttatcggtatcaaacaaactttgtatcgaaccacacctgactctcctatcgtaaaagcactaagtagagcagcagaaaacggaaaagttgttacagccgtaatagaaataaaagctcgatttgatgaggaagctaatattgaattatctaggaaactagagaaagctggcgttcaaattgtttacggattcgcaaaatacaaaacgcatgcaaaggcaagtttagttttaagaaaagaaggagctaaaacgcgaagctatgttcacttaggtacaggaaactatcatccaattaacgcaaaaatttatactgacttatcactgtttagctctaatcaagacttggccaaagatgtcgaaaaatttttcaattatgtaactggttatgcaaaaccaaaaaaattgaataaaatttttatgtctccattaaatagtaggaatttttttgaagaaaaaattgaaaatgaaatagtaaatgcaagtaaaggaaaacctgcagaaatatgggcaaaaatgaattctcttgtagaccctggaattattaagaaattttatgaagcttcaaacgcaggagtaaaaataaatttatcagtaagaggagtgtgttgcttaagacctggaattaaaggtcaatctgaaaatataaaagtaaaaagccttattggcagatttttagaacactcaagaatttattgttttgcaaatggtagctctatgccctctcgagagaatcaagtatatatttcatctgcagatttaatgcctagaaatt

SEQ ID NO: 251383 - DNA, 1072 bp, Unknown
  Bacterial polypeptide expressing nucleotide sequence isolated from the Sargasso Sea
gatttggctttaaaaagacgtagaactggtgatattgttcgtttagaggttcttgaaaatagcgataaagaattggtaagatttataactaataaattagatataaatcctgactatatttatgatgtatctggccttgttggaattcaagatatagatcaaatatgtaaagtaaaaaatccaaaattaagatttaagcattttacccctagagaagttgaaagattaaaagaatataatgataatttttttgaaactattaaaaagaaagatttagttgttcatcatccttttgaaacatttgactcagtaattgaatttttaaaccaagcagcaaatgataaaaaagttatagctattaaacaaactttatatagaacaactctagactcaccaattgttaaagctttaataacagctgcagaaaacggaaaaacagttaccgctttaattgaaattaaagctagatttgatgaggaagctaatattcaactatcaagaagtttagaaaaagtaggtgtccaaattgtttatggttttgctaaatataaaacccatgcaaaatcatcattagttttaagaagagaacaaggaaaaatacaaacttattttcatttaggaaccggcaattatcatccagtaaatgctaaaatttacactgatttatctttatttagttgtgataaaaaaatggcctctgatgttgagaaattttttaattatgtaactggatacgctaaaccaaaaaatcttaataaaatttctatttcgccaattaatatgaggcaaacgttaaataaaaatattgatgctgaaattagaaattctaaaaatggaaaatttgcagctatttgggcaaaaatgaattcattagtagatccagaaattattgataaattttatgaagcttcaaatgctggtgtaaaaattcatttatttgtgagaggtgtttgttgtttaagaccaggagttaaaaatagatcagaaaacatagtggtaaaaagcatcataggaagatttttagagcattctagaatttactgctttagtaacggtacaaaaaaaatgcctg

SEQ ID NO: 251384 - DNA, 894 bp, Unknown
  Bacterial polypeptide expressing nucleotide sequence isolated from the Sargasso Sea
gctgctgcagcaggcagcgcgcgaccccgacgtggtcgcaatcaagcagaccgtctaccgcaccggcaacgaatccacggtgatggaagcgctcatcaaagctgcgcacaacggtaaggaggtgaccgtcgtcgtcgaactgctcgcgcgctttgacgaagagacgaacatcaactgggcggaccagcttgaatcggccggcgctcatgtcgtgtatggcgtggtcggtcacaagtgccacgcgaagatgctgctggtggtgcgccgcgaagtatccggcaagggcaaggccgtcaggctgcgccgctacgcgcatctgggcacgggcaactaccaccccaagaccgcccgcctctacaccgacttcggcctgatgacggcgaacgagcagatctgcgaagacgtgcatcacgtgttccagttgctcacgggcacgggcgcacaggtcaagctgcatcatctgtggcactcgccattcacgatgcacgacaacctgatcgagcacattcgagctgaagcacgcgccgctcgagcaggcaaacgtgcgcgcatcatcggcaagatgaatgcgctgctggagccggccatcatcgacgagctgtacaaggcgtcgcgggcgggcgtgaaggtcgacttgattgtgcgcggtgtctgcgccctcaagccgggcgtgccggggctgtcggagaacatcagcgttcgctccatcgtcgggcgtttcctggagcatcaccgcgtctactacttccatgccggtggcgaggaggtcgtctacctctccagcgccgactggatggaccgcaacctgttccgtcgcgtggaagtggccttccccgtgcttgatcgcaagctcaaggcgcgcgtcatcaaggaaagcctccaggtgcatctgcg

SEQ ID NO: 251385 - DNA, 925 bp, Unknown
  Bacterial polypeptide expressing nucleotide sequence isolated from the Sargasso Sea
aaagtaattgctattaaacaaacattgtacagaactactttagattcaccaattgttaaagcattaattagcgcttccgaaaatggcaaaacagttactgctttaattgaaatcaaagctagatttgatgaagaagcaaatatacagctggcaagaagtcttgaaaaagctggagttcaaattgtttatggttttgcaaaatacaaaacacatgctaaatcatcactaatacatcgacgtgagggtggtaaaattcaaacatatttccatttaggtactggcaattatcatcctgtaaatgcaaaaatatacacagacttatctctatttagctctgataaaaaaatggctgcagatgtagaaaaattctacaattacgtgactggatattctaaaccaagaaatttaaataaaatttccatttcacctgtaaatttaagaaaaactttaaatcagaatatagataaggaaataagtaatgcaaaaaaagggaaacacgctgagatttgggctaaaatgaattcattagttgattcacaaataattgataaattttatgaggcttctagtgtcggtgtaaaagtctctttatttgtaagaggtgtatgttgtttaagacctggtattaaaaataaatcggaaaatattattgtaaaaagtatcattggaagatttcttgaacactcaagaatatattgttttgcaaatggaaaattaatgcctaacagaaatgcaaaagtttatatttcatctgcagatttgatgccaagaaatctagatagaagagtcgaacttctcgtgccaattgaaaatcaaactgttcatgaacaggttttagaccaaataatgatggccaattatctagacacgaatcagagctgggaactttatcctaatggaaattatcaaaaaattaaatatagtc

SEQ ID NO: 251386 - DNA, 1144 bp, Unknown
  Bacterial polypeptide expressing nucleotide sequence isolated from the Sargasso Sea
attgatcctgcacatccatttccatttataatcaatcaaggaagagcaattgtaatgaagttaagaaaaaaaaataaaaaaaggattttaaactcaataatagtaataccaaaagcattatctagatttattgaaattgagtcttcaaaaaatcataagaaatttgtgattctagatgatgtaataagtttttttgctaatgaaatttttccagatcatgatttagaaaagaaaatgatttttagagtaataagagacagcgatgtagagattcaagaggaagcagaagatttggttagatcttttgaattggctttaaaaagacgtagaacgggtgatattgttcgtttagaggttcttgaaaatagtgataacgaattgataagatttataactaataaattagatataaatcctgactatatttatgatgttgctggccttgttggaattcaagatatagatcaaatatgtaaagtaaaaaatccaaaattaagatttaaacattttacacctagagaagttgaaagattaaaagaatataatgataatttttttgaaactattaaaaagaaagatttagttgttcatcatccttttgaaacatttgactcagtaattgaatttttaaaccaagcagcaaatgataaaaaagttatagctataaaacaaactctatatagaacaactctagactcacctattgttaaagctttaataacagctgcagaaaacggaaaaacagttaccgctttaattgaaattaaagctagatttgatgaggaagctaatattcaactatcaagaagtttagaaaaagtaggtgttcaaattgtttatggttttgctaaatataaaactcatgcaaaatcatcattagttttaagaagagaacagggtaaaatacaaacttattttcatttaggaactggcaattatcatccagtaaatgctaaaatttatactgatttgtctttatttagttgtgataagaaaatggcatcagatgttgaaaagtttttcaattatgtaacaggatacgcaaaaccaaaaaatttaaataaaatttctatttcgccagtaaatatgagacaaaccctaaatgaaaatattgatgctgaaattaaaaattctaaaaatggaa

SEQ ID NO: 251387 - DNA, 466 bp, Unknown
  Bacterial polypeptide expressing nucleotide sequence isolated from the Sargasso Sea
gttgaaatctaaatatataaatagagagctttcttggttaaaattcaacgatagagtacttttagaggcgcaaaatatcgaaaatcctctttatgaaagagtaaagtttttatcaattgctgggtctaatctagatgaattttttatggtccgtgtagctgggttatatagtcaaataaaacaagaagttgactcactaagctctgatggtttgacacctgaagagcaaatggatgaggtagtgcttgaaactaagaatctattaaaaaaacagaacaaaatttttattcaactgattatggaattaaaaaaaaataatatcaatttagttaaaccagttaatttaaatacaaaggataaaaaaaaacttttagaaatatttaaagaagaaatttatcctttattaacaccatcagcaattgatcctgcgcatccatttccatttataatcaatcaaggaagagca

SEQ ID NO: 251388 - DNA, 913 bp, Unknown
  Bacterial polypeptide expressing nucleotide sequence isolated from the Sargasso Sea
aattttttttgaaactattaaaaagaaagatttagttgttcatcatcctttcgaaacatttgactcagtaattgaatttttaaaccaagcagcaaatgataaaaaagttatagctataaaacaaactctatatagaacaactctagactcaccaattgttaaagctttaataacagctgcagaaaacggaaaaacagttaccgctttaattgaaattaaagctagatttgatgaggaagctaatattcaactatcaagaagtttagaaaaagtaggtgttcaaattgtttatggttttgctaaatataaaactcatgcaaaatcatcattagttttaagaagagaacagggtaaaatacaaacttattttcatttaggaactggcaattatcatccagtaaatgctaaaatttatactgatttgtctttatttagttgtgataagaaaatggcatcagatgttgaaaagtttttcaattatgtaacaggatacgcaaaaccaaaaaatttaaataaaatttctatttcgccagtaaatatgaggcaaaccttaaatgaaaatattgatgctgaaattaaaaattctaaaaatggaaaatttgcagctatttgggcaaaaatgaactctttagtagatccagaaattattgataaattttatgaagcttcgaatgctggtgtaaaaattcatttatttgtaaggggtgtttgttgtttaagaccaggagtaaaagatagatcagaaaacatatttgtaaaaagtatcataggaagatttttagagcattctagaatttactgctttagtaatggtacaaaaaaaatgcctaatagaaatgcaaaagtatatatttcgtcagctgatttaatgccgagaaatttaaatcgaagggtagaacttctagtcccaatt

SEQ ID NO: 251389 - DNA, 949 bp, Unknown
  Bacterial polypeptide expressing nucleotide sequence isolated from the Sargasso Sea
tttatatagaacaactctagactcaccaattgttaaagctttaataacagctgctgaaaacggaaaaacagttaccgctttaattgaaattaaagctagatttgatgaggaagctaatattcaactatcaagaagtttagaaaaagtaggtgttcaaattgtttatggttttgctaaatataaaactcatgcaaaatcatcattagttttaagaagagaacagggtaaaatacaaacttattttcatttaggaactggcaattatcatccagtaaatgctaaaatttatactgatttgtctttatttagttgtgataagaaaatggcatcagatgttgaaaagtttttcaattatgtaacaggatacgcaaaaccaaaaaatttaaataaaatttctatttcgccagcaaatatgaggcaaaccttaaatgaaaatattgatgctgaaattaaaaattctaaaaatggacaatttgcagctatttgggcaaaaatgaactctttagtagatccagaaattattgataaattttatgaagcttcgaatgctggtgtaaaaattcatttatttgtaaggggtgtttgttgtttaagaccaggtgttaaagataaatcagaaaacatagttgtaaaaagtatcataggaagatttttagagcattctagaatttactgctttagtaatggtgcaaaaaaaatgcctaatagaaacgcaaaagtatatatttcttcagccgatttaatgccgagaaatttaaatagaagagtagaacttctagtgccaattgaaaatgaaactgttcatgagcaaattttagatcaaataatgttagcaaattatcttgatactagtcagagctgggcgctcaatgctgatggtaattataaaaaaattaaatatagtaagaacgattccttttcagctcatgaatattttatgaataatccg

SEQ ID NO: 251390 - DNA, 1091 bp, Unknown
  Bacterial polypeptide expressing nucleotide sequence isolated from the Sargasso Sea
acataaagaagagttgaaatctaaatatataaatagagagctttcttggttaaaattcaacgatagagtacttttagaggcgcaaaatatcgaaaatcctctttatgaaagagtaaagtttttatcaattgctgggtctaatctagatgaattttttatggtccgtgtagctgggttatatagtcaaataaaacaagaagttgactcattaagttctgatggtttgacacctgaagagcaaatggatgaggtagtgcttgaaactaagaatctattaaaaaaacagaacaaaatttttattcaactgattatggaattaaaaaaaaataatatcaatttagttaaaccagttaatttaaatactaaggataaaaaaaaacttctagaaatatttaaagaagagatttatcctttattaacaccatcagctattgatcctgcacacccatttccatttataatcaatcaaggaagagcacttgtaatgaaattaagaaaaaaaaataaaaaaaggattttaaactcgataatagtaataccaaaagcattatctagatttattgaaatagagtctacaaaaaatcataagaaatttgttattctagatgacataataagtttttttgctaatgaaatttttccagatcatgatttagaaaagaaaatgatttttagagtaattagagatagcgacgtagagattcaagaagaagctgaagatttagttagatcttttgaattggctttaaaaagacgtagaacaggtgatattgttcgtttagagattcttgaaaatagtgataacgaattgataagatttataactaataaattagatataaatcctgattatatttatgatgtatctggccttgttggaattcaagatatagatcaaatatgtaaagtaaaaaatccaaaattaagatttaagcattttacacctagagaagttgaaagattaaaagaatataatgataattttttcgaaactatcaaaaagaaagatttagttgttcatcatccttttgaaacgtttgactcagtaattgaatttttaaaccaagcagcaaatgataataaagttatag

SEQ ID NO: 251391 - DNA, 923 bp, Unknown
  Bacterial polypeptide expressing nucleotide sequence isolated from the Sargasso Sea
caaattaagatttaaacattttacacctagagaagttgaaagattaaaagaatataatgataatttttttgaaactattaaaaagaaagatttagttgttcatcatccttttgaaacatttgactcagtaattgaatttttaaaccaagcagcaaatgataaaaaagttatagctataaaacaaactctatatagaacaactctagactcacctattgttaaagctttaataacagctgcagaaaacggaaaaacagttaccgctttaattgaaattaaagctagatttgatgaggaagctaatattcaactatcaagaagtttagaaaaagtaggtgttcaaattgtttatggttttgctaaatataaaactcatgcaaaatcatcattagttttaagaagagaacagggtaaaatacaaacttattttcatttaggaactggcaattatcatccagtaaatgctaaaatttatactgatttgtctttatttagttgtgataagaaaatggcatcagatgttgaaaagtttttcaattatgtaacaggatacgcaaaaccaaaaaatttaaataaaatttctatttcgccagtaaatatgagacaaaccttaaatgaaaatattgatgctgaaattaaaaattctaaaaatggaaaatttgcagctatttgggcaaaaatgaactctttagtagatccagaaattattgataaattttatgaagcttcgaatgctggtgtaaaaattcatttatttgtaaggggtgtttgttgtttaagaccaggagtaaaagatagatcagaaaacatatttgtaaaaagtatcataggaagatttttagagcattctagaatttactgctttagtaatggtacaaaaaaaatgcctaatagaaatgcaaaagtatatatttcgtcagctg

SEQ ID NO: 251392 - DNA, 898 bp, Unknown
  Bacterial polypeptide expressing nucleotide sequence isolated from the Sargasso Sea
agagcagcagaaaacggaaaagttgttacagccgtaatagaaataaaagctcgatttgatgaggaagctaatattgaattatctaggaaactagagaaagctggcgttcaaattgtttacggattcgcaaaatataaaacgcatgcaaaggcaagtttagttttaagaaaagaaggagctaaaacgcgaagctatgttcacttaggtacaggaaactatcatccaattaacgcaaaaatttatactgacttatcactgtttagctctaatcaagacttggccaaagatgtcgaaaaatttttcaattatgtaactggttatgcaaaaccaaaaaaattgaataaaatttttatgtctccattaaatagcaggaatttttttgaagaaaaaattgaaaatgaaattgtaaatgcaagtaaaggaaaacctgcagaaatatgggcaaaaatgaattctcttgtagaccctggaattattaagaaattttatgaagcttcaaacgcaggagtaaaaataaatttatcagtaagaggagtgtgttgcttaagacctggaattaaaggtcaatctgaaaatataaaagtaaaaagccttattggcagatttttagaacactcaagaatttattgttttgcaaatggtagctctatgccctctcgagagaatcaggtatatatttcatctgcagatttaatgcctagaaatttagatagaagaattgaaattataattccgatagaaaacaatactgtgcatgagcaaattttagatcaaattatgttagccaactttaaagataaatcagaaacatggtatttagatagtttgggaaactaccataaagaacaagaaaaaggcttttccgcacattcctatttcatgaagaacccaagtttat

SEQ ID NO: 251393 - DNA, 844 bp, Unknown
  Bacterial polypeptide expressing nucleotide sequence isolated from the Sargasso Sea
taagcattttacgcctagagaagttgaaagattaaaagaatataatgataatttttttgaaactattaaaaagaaagatttagttgttcatcatccttttgaaacatttgactcagtaattgaatttttaaatcaagcagcaaatgataaaaaagttatagctattaaacaaactttatatagaacaactctagactcaccaattgttaaagctttaataacagctgcagagaatggaaaaacagttactgctttaattgaaattaaagctagatttgatgaggaagctaatattcaactatcaagaagtttagaaaaagtaggtgttcaaattgtttatggttttgctaaatataaaactcatgcaaaatcatcattagttttaagaagagaacagggtaaaatacaaacttattttcatttaggaactggcaattatcatcctgtaaatgctaaaatttatactgatttgtctttatttagttgtgataagaaaatggcatcagatgttgaaaagtttttcaattatgtaacaggatacgcaaaaccaaaaaatttaaataaaatttctatttcaccagtaaatatgaggcaaaccttaaatgaaaatattgatgctgaaattaaaaattctaaaaatggaaagtttgcagctatttgggcaaaaatgaactctttagtagatccagaaattattgataaattttatgaagcttcgaatgctggtgtaaaaattcatttatttgtaaggggtgtttgttgtttaagaccaggagtaaaagatagatcagaaaacatagttgtaaaaagtatcataggaagatttttagagcattctagaatt

SEQ ID NO: 251394 - DNA, 781 bp, Unknown
  Bacterial polypeptide expressing nucleotide sequence isolated from the Sargasso Sea
aaacggaaaaacagttaccgctttaattgaaattaaagctagatttgatgaggaagctaatattcaactatcaagaagtttagaaaaagtaggtgttcaaattgtttatggttttgctaaatataaaactcatgcaaaatcatcattagttttaagaagagaacagggtaaaatacaaacttattttcatttaggaactggcaattatcatccagtaaatgctaaaatttatactgatttgtctttatttagttgtgataagaaaatggcatcagatgttgaaaagtttttcaattatgtaacaggatacgcaaaaccaaaaaatttaaataaaatttctatttcgccagtaaatatgagacaaaccctaaatgaaaatattgatgctgaaattaaaaattctaaaaatggaaaatttgcagctatttgggcaaaaatgaactctttagtagatccagaaattattgataaattttatgaagcttcgaatgctggtgtaaaagttcatttatttgtaaggggtgtttgttgtttaagaccaggagtaaaagatagatcagaaaacatatttgtaaaaagtatcataggaagatttttagagcattctagaatttactgctttagtaatggtacaaaaaaaatgcctaatagaaatgcaaaagtatatatttcgtcagctgatttaatgccgagaaatttaaatcgaagggtagaacttctagtcccaattgaaaatgagactgttcatgaacagatcttagatcaaataatgttggcaaat

SEQ ID NO: 251395 - DNA, 619 bp, Unknown
  Bacterial polypeptide expressing nucleotide sequence isolated from the Sargasso Sea
ctgaaatctaaatatataaatagagagctttcttggttaaaattcaatgacagagtgcttttagaggcgcaaaatatcgaaaatcctctttatgaaagagtaaagtttttatcaattgctgggtcaaatctagatgaattttttatggtccgtgttgctgggttatatagtcaaataaaacaagaagttgactcattaagctctgatggtttgacacctgaagagcaaatggatgaagtagtgcttgaaactaagaatctattaaaaaaacagaataaaatttttattcaactgatcatggaattaaaaaaaaataatatcagtttagttaaaccagttaatttaaatactaaggataaaataaaacttctaaaaatatttaaagaagagatttaccctttattaacaccatcagcaattgatcctgcacacccatttccttttataatcaatcaaggaagagcaattgtaatgaagttaagaaaaaaaaataaaaaaaggattttaaactcaataattgtaataccaaaagcattatctagatttgttgaaatagagtcttcaaaaaatcataagaagtttgttattctagatgacgtaataagtttttttgctaatg

SEQ ID NO: 251396 - DNA, 913 bp, Unknown
  Bacterial polypeptide expressing nucleotide sequence isolated from the Sargasso Sea
agaagaagaacaggtgacatcgtacgtttagaaattttaaaaaatagtaataatgacttaattaagtttataaccaataagttaaacgtaaaatctgaatacatctatgaaattgaaggcattgttggaattcaagatatcgaccaagtttgtaaaattaaaaattctaaattaagatttaaaaattttaatcccagagaggttgagagattaaaggaatttaataataatttttttgatactataaaaaaaaaggatttaatagttcatcacccttttgaaacatttgatgctgtcgttgagtttttaaatcaagctgcatatgataaaaaagttatagcaattaaacaaactctatacagaacaacgttagactctccaattgttaaagccttaataacagcagctgaaaatggaaagacagtaaccgctttaatagagatcaaagcaagatttgatgaagaagcaaacattcaactttcaagaagtttagaaaaggcaggaattcaaatagtttatggttttgcaaaatataaaacacatgcaaaatcatctttaatattaagaaaagagcagggaaaaattcaaacttatatacatctgggaactggtaattatcacccagttaatgcaaaaatttatactgacttatctttatttagctctgataaaaaaatagcaactgatgtagaaaaattttttaattatgtaactggttattcaaaaccacgaaatcttagtaaaatatctatatcaccaattaatcttagggaaactttgaacaaatgtattgctaacgagatagcaaatgtcaaaaaaggtaaaaaaggtgaaatatgggccaaaatgaattccttagtagatccagtgataattgataaattttacgaagcttcaaatgctggagtaaaga

SEQ ID NO: 251397 - DNA, 556 bp, Unknown
  Bacterial polypeptide expressing nucleotide sequence isolated from the Sargasso Sea
tatgctaggtaaaacaaaatacattaatagagagttgtcttggttagagtttaaccaaagagttctagaagaagcagagaactcaaaaatacctttagcagaacgtttaaattttctatctatttctggatcaaatttagatgaattctttatggtaagagttgcaggcctcaaaggtcaagttgatagtgaagtttttgtagaaactattgatgggcttatgccagaacaagttttatatgaagtaataaaaaaatcaaaatttataaaaaaaaaacaaaatgaatgctgggaaaatattttaaaagcattaagtaaaaatggaattaaagtatgtgagactaagcaactaaatgtgaatgaaaagaggtggttgaaaaattactttgtaaaggaaatttttcctttattaactccagtagcaatagaccctgcacatccctttcctttcgtgcctaatttaggtttaagcattgtattaaagttaaaaagtaaaaattctaaaaatataattcgagtagtgatcccttttccaaaaggacttaaaaatttataa

SEQ ID NO: 251398 - DNA, 861 bp, Unknown
  Bacterial polypeptide expressing nucleotide sequence isolated from the Sargasso Sea
tttaaaaatagtaataatgacttaattaagtttataaccaataagttaaacgtaaaatctgaatacatctatgaaattgaaggcattgttggaattcaagatatcgaccaagtttgtaaaattaaaaattctaaatcaagatttaaaaattttaatcccagagaggttgagagattaaaggaatttaataataatttttttgatactataaaaaaaaaggatttaatagttcatcacccttttgaaacatttgatgctgtcgttgagtttttaaatcaagctgcatatgataaaaaagttatagcaattaaacaaactctatacagaacaacgttagactctccaattgttaaagccttaataacagcagctgaaaatggaaagacagtaaccgctttaatagagatcaaagcaagatttgatgaagaagcaaacattcaactttcaagaagtttagaaaaggcaggaattcaaatagtttatggttttgcaaaatataaaacacatgcaaaatcatctttaatattaagaaaagagcagggaaaaattcaaacttatatacatctgggaactggcaattatcacccagttaatgcaaaaatttatactgacttatctttatttagctctgataaaaaaatagcaactgatgtagaaaaattttttaattatgtaactggttattcaaaaccacgaaatcttagtaaaatatctatatcaccaattaatcttagggaaactttgaacaaatgtattgctaacgagatagcaaatgtcaaaaaaggtaaaaagggtgaaatatgggccaaaatgaattccttagtagatccagcgataattgataaattttacgaagcttca

SEQ ID NO: 251399 - DNA, 787 bp, Unknown
  Bacterial polypeptide expressing nucleotide sequence isolated from the Sargasso Sea
atcttcagcgtggtcagcaagcaggacatcctcctgctgcatcccttcgagtccttcaccccggtagtggacctgctgcgccaggcggcgaaagacccgcacgtgctggcgatcaagcagaccctgtatcgttctggcgccaactcggagatcgtcgacgccctggtggaggcagcgcgtaacggcaaggaagtcaccgcggtgatcgagctgcgtgcgcgcttcgacgaagagtccaacctggccctggccagccgtctgcaggccgctggtgcagtggtgatctacggtgtggtcggcttcaagacccacgccaagatgatgctgatcctgcgccgcgagaacggcgagatcgtccgctacgctcaccttggcaccggcaactaccacgctggcaacgccaagctgtataccgactacagcctgctcaccgccgacgtggccctgggcgaggacgtgtccaagctgttcagtcagctgattggcatgggcaagaccctgcgcatgaagaagctgctgcatgcacccttcaccttgaagaagaccctgctcgacctgatcgccaaggaaaccacagcggcggccgaaggcaagccggcgcatatcatcgccaagttcaactcgctgaccgaccccaaggtcatccgcgcgctatacaaggccagccagaccggggtgaagatcgacctggtggtgcgtggcatgtgctgcctgcgaccgggtattgccggggtctcgcataacatccaggtgcgttcgatcatcggccgcttcctcgagcacacgc

SEQ ID NO: 251400 - DNA, 865 bp, Unknown
  Bacterial polypeptide expressing nucleotide sequence isolated from the Sargasso Sea
aagacagtaaccgctttaatagagatcaaagcaagatttgatgaagaagcaaacattcaactttcaagaagtttagaaaaggcaggaattcaaatagtttatggttttgcaaaatataaaacacatgcaaaatcatctttaatattaagaaaagagcagggaaaaattcaaacttatatacatctgggaactggcaattatcacccagttaatgcaaaaatttatactgacttatctttatttagctctgataaaaaaatagcaactgatgtggaaaaattttttaattatgtaactggttattcaaaaccacgaaatcttagtaaaatatctatatcaccaattaatcttagggaaactttgaacaaatgtattgctaacgagatagcaaatgtcaaaaaaggtaaaaaaggtgaaatatgggccaaaatgaattctttagtagatccagcgataattgataaattttacgaagcttcaaatgctggagtaaaaatatttttatttgtaagaggtgtttgttgtttaagacctggtgttaaagataaatctgaaaatataattgtaaaaagcatgataggaagatttttggaacactcaagaatttattgttttgcaaatggaaacacaatgcctagtagagatgcgaaagtttttatttcatcagcagatttaatgccaagaaatttaaatcgaagagtagaacttctagttccaattgaaaaccaaacagtccacgagcaagttcttgatcaaattatgttagctaattatttagataaaaaacaaagttgggaacttgatgctagtggaaattataaaaaaattaaatatagtgaaaatgattctttttcagccccatgat

SEQ ID NO: 251401 - DNA, 769 bp, Unknown
  Bacterial polypeptide expressing nucleotide sequence isolated from the Sargasso Sea
attgttaaagctttaataacagctgcagaaaatggaaaaacagttaccgcttttattgaaattaaagctagatttgatgaggaagctaatattcaactatcaagaagtttagaaaaagtaggtgttcaaattgtttatggttttgctaaatataaaactcatgcaaaatcatcattagttttaagaagagaacagggtaaaatacaaacttattttcatttaggaactggcaattatcatccagtaaatgctaaaatttatactgatttgtctttatttagttgtgataagaaaatggcatcagatgttgaaaagtttttcaattatgtaacaggatacgcaaaaccaaaaaatttaaataaaatttctatttcgccagtaaatatgaggcaaaccttaaatgaaaatattgatgctgaaattaaaaattctaaaaatggaaaatttgcagctatttgggcaaaaatgaactctttagtagatccagaaattattgataaattttatgaagcttcgaatgctggtgtaaaaattcatttatttgtaaggggtgtttgttgtttaagaccaggagtaaaagatagatcagaaaacatatttgtaaaaagtatcataggaagatttttagagcattctagaatttactgctttagtaatggtacaaaaaaaatgcctaatagaaatgcaaaagtatatatttcgtcagctgatttaatgccgagaaatttaaatcgaagggtagaacttctagtcccaattgaaaatgaga

SEQ ID NO: 251402 - DNA, 993 bp, Unknown
  Bacterial polypeptide expressing nucleotide sequence isolated from the Sargasso Sea
gcttttactaatcactcgagtgtgtttgatgccatctcagagcaagatattttactttattacccctatcacacctttaatcatttacttgagtttgtgcgccaagcagcttttgaccctgatgttacacaaattaaggtcaatatttatcgtgtagccagccagtctcgccttgtttctacgctaataaatgcagcaaaaaacggtaaacacgtcacggtaatggtagagcttaaagcgcgctttgatgaacaaaataatatcgaatgggcgaaaacgctcagtaatgcaggtattaaagttatctttggtatccctgctttaaaagtacacagtaaattatgcgtcattcatcgcaaagaaaagcataacatcgttaaatacgcgcacattggcacgggtaacttccatgaaaaaaccgcaaaaatttataccgactttagtttgtttactaagcatgagggcataacggaagaatctgacagcgtatttaggtttattgaaagtagttacaaaccattccaattcgatcacttgatgatttcacctgtcaatgccagagaaacaatcacctcattgatcaataaagaaataactcatgctgagcagggtaaaacgggtcgaattacagtaaaaataaataaccttgtcgataaagaactcgttgatcatctttatttcgccgcaaggcgtggggtaaagatacgcattattgtacgtggcatgtgctctttagttccgtcatcacttagcggcaatgataatattcgtattatcagtattgtagaccgcttcttagagcacccccgagtaatggtgtttcacaataatggcaaggagaaagtctatatttcctcagccgattggatgacccgaaacctcgaccaccgtgttgaagtgggcacaccaatatatgatgcaaaattaaagcagctcattattgatatttctgagctacagtttaaagatagaactaaagcgcgcataatcgat

SEQ ID NO: 251403 - DNA, 565 bp, Unknown
  Bacterial polypeptide expressing nucleotide sequence isolated from the Sargasso Sea
attaaacaaactctatacagaacaacgctagattctccaattgttaaagcattaataacagcagctgaaaatggaaagacagtaaccgctttaatagagatcaaagcaagatttgatgaagaagcaaacattcaactttcaagaagtttagaaaaggcaggaattcaaatagtttatggttttgcaaaatataaaacacatgcaaaatcatctttaatattaagaaaagagcagggaaaaattcaaacttatatacatctgggaactggcaattatcacccagttaatgcaaaaatttatactgacttatctttatttagttctgataaaaaattagcaactgatgtggaaaaattttttaattatgtaactggttattcaaaaccacgaaatcttagtaaaatatctatatcaccaattaatcttagggaaaccttgaacaaatgtattgctaacgagattacaaatgtcaaaaaaggtaaaaaaggtgaaatatgggccaaaatgaattccttagtagatccagcgaaaattgataaattttacgaagcttcaaatgctggag

SEQ ID NO: 251404 - DNA, 826 bp, Unknown
  Bacterial polypeptide expressing nucleotide sequence isolated from the Sargasso Sea
gttgctattaaacaaacactttacagaactagtaatgactctcctatagtaaaagcattaattgaagctgctgaaaacggtaaatctgtaacagctctaatagaacttaaagcaagatttgatgaagaggcaaatattaaatgggccagagatatggagaaagcgggagtgcatgtagtatatggttttctccaattaaaaactcatgccaaagtttctctagtagtaagaagggaaaaaaataaattgagaagttatgttcactttggaacaggtaattatcacccagttacagcaaaggtctatacagatctatctttttttaccgtggatgaatctttgtgtagagatgcagctaaattatttaattatttaactgggtacgctaaaccaaaaaaatgggaaaaattagatatttctccaattaatatgagagaaagtcttattaaattaattaaacaagaagtgaagtttgcaaaaacaggaaaaaatgcagaaatttgggcaaaaatgaactcattagttgatccagaagtcatagatgaactttatcttgcatctcaagcaggtgttaaaataagtttaattattagaggtatttgttgtctaaggccgggtataaaaggtttttcagaaaatatatttgtaaaaagtataattgggaggtttttagagcactcaagaattgtatgctttgggaatggtaagaagcttccttctttatcttcaaaagtctttataagttcagctgattggatgcccaggaatttagatagaagagtagagacattaattccaattgaaaatcaaactgttcatcagcaaa

SEQ ID NO: 251405 - DNA, 876 bp, Unknown
  Bacterial polypeptide expressing nucleotide sequence isolated from the Sargasso Sea
ttaatagagatcaaagcaagatttgatgaagaagcaaacattcaactttcaagaagtttagaaaaggcaggaattcaaatagtttatggttttgcaaaatataaaacacatgcaaaatcatctttaatattaagaaaagagcagggaaaaattcaaacttatatacatctgggaactggcaattatcacccagttaatgcaaaaatttatactgacttatctttatttagttctgataaaaaattagcaactgatgtggaaaaattttttaattatgtaactggttattcaaaaccacgaaatcttagtaaaatatctatatcaccaattaatcttagggaaaccttgaacaaatgtattgctaacgagattacaaatgtcaaaaaaggtaaaaaaggtgaaatatgggccaaaatgaattccttagtagatccagcgataattgataaattttacgaagcttcaaatgctggagtaaagatatttttatttgtaagaggtgtttgttgtttaagacctggagttaaagataaatctgaaaatataatagttaaaagcatgattggaagatttttggaacactcaagaatttattgttttgcaaatggaaaaacaatgcctagtagagatgcaaaagtttttatttcatcagcagatttaatgccaagaaatttaaatcgaagagtagaacttctagttccaattgaaaaccaaacagtccacgaacaagttcttgatcaaattatgttagctaattatttagataaaaaccaaagttgggaacttgatgctagtggaaattataaaaaaattaaatatagtgaaaatgattctttttcagcccatgattattttatgaataatcctagtttatct

SEQ ID NO: 251406 - DNA, 994 bp, Unknown
  Bacterial polypeptide expressing nucleotide sequence isolated from the Sargasso Sea
atttagagttataagagatagtgatgtagaaattcaagaggaggccgaagatttagtaagatcttttgaattggctttaaaaagaagaagaacaggtgacatagtacgtttagaaattttaaaaaatagtaataatgacttaattaagtttataaccaataagttaaacgtaaaatctgaatacatctatgaaattgaaggcattgttggaattcaagatatagaccaagtttgtaaaattaaaaattctaaattaagatttaaaaattttaatcccagggaggttgagagattaaaggagtttaataataatttttttgatactataaaaaaaaaagatttaatagttcatcacccttttgaaacatttgatgctgtcgttgagtttttaaatcaagctgcatatgataaaaaagttatagcaattaaacaaactctatacagaacaacgctagattctccaattgttaaagccttaataacagcagctgaaaatggaaagacagtaaccgctttaatagagatcaaagcaagatttgatgaagaagcaaacattcaactttcaagaagtttagaaaaagcaggaattcaaatagtttatggttttgcaaaatataaaacacatgcaaaatcatctttaatattaagaaaagagcagggaaaaattcaaacttatatacatctgggaactggcaattatcacccagttaatgcaaaaatttatactgacttatctttatttagttctgataaaaaattagcaactgatgtggaaaaattttttaattatgtaactggttattcaaaaccacgaaatcttagtaaaatatctatatcaccaattaatcttagggaaaccttgaacaaatgtattgctaacgagataacaaatgtcaaaaaaggtaaaaaaggtgaaatatgggccaaaatgaattccttagtagatccagcgataattgataaattttacgaagcttcaaatgctggagtaaag

SEQ ID NO: 251407 - DNA, 894 bp, Unknown
  Bacterial polypeptide expressing nucleotide sequence isolated from the Sargasso Sea
tgtaaaaagaaagatccaaagctgagatttaaaaagtttaatcctagagaagttgaaagattgaaggaatttgatgataaatttttttcagctataagaagtaaagattttgttgtacaccacccttttgaaacttttgatgtagtaattcaatttttagaagctgcagcaaaagatcccaaagttatcggtatcaaacaaactttgtatcgaaccacacctgactctcctatcgtaaaagcactaagtagagcagcagaaaacggaaaagttgttacagccgtaatagaaataaaagctcgatttgatgaggaagctaatattgaattatctaggaaactagagaaagctggcgttcaaattgtttacggattcgcaaaatacaaaacgcatgcaaaagcaagtttagttttaagaaaagaaggagcaaaaacgctaagctatgttcacttaggcacaggaaactatcatccaattaacgcaaaaatttatactgacttatcactgtttagctctaatcaagacttggccaaagatgttgaaaaatttttcaattatgtaactggttatgcaaaacccaaaaaattgaataaaatttttatgtctccattaaatagtaggaatttttttgaagaaaaaattgaaaatgaaattgtaaatgcaagtaaaggaaaacctgcagaaatatgggcaaaaatgaattctcttgtagaccctggaattattaagaaattttatgaagcttcaaacgcaggagtaaaaataaacttatcagtacgaggcgtatgctgcttaagacctggagttaaaggtcaatctgaaaatataaaagtaaaaagccttattggcagatttttagaacactcaagaatttattgttttgcaaatggtaat

SEQ ID NO: 251408 - DNA, 644 bp, Unknown
  Bacterial polypeptide expressing nucleotide sequence isolated from the Sargasso Sea
catgagtcgagtgccttcacgttttattaatcgcgaattgagctggttggagttcaaccagcgtgtgatggaggaggctctggattcaaccaacccgctactcgagcggttaaagtttttttgcatcgccaattctaacctcgatgagtttttcgaggtccgcattgcgggcctgaagcaacagattgaaagtgccgtggttaagcgtagcctggacgggcgcacgcccacggagacttatcaggcggcttcgctgcgaatacatcggatggtggatgatctgtgtcggtgctggcgcgatgatttgcagccgcagttgaataagaaaggatttcgctttcatgaaatcgaagctttatcagacagcaatcgaaaatggttggaggagtttttcgatgaaaaagttcgccccgtactgacgccactggcggtggatccctccaaggcgtttccactgatcctcaacaaatcgctcaatatcatcacgcgcgtcgaacgccaaagcaaacgcggcattgaacaacgcctgtgcattgtacaggtgccacgggtgatcccacgtctggtccagctaccgcatggagacacctcgcatgagtacgtgtttctggcagatatcatttcgcatttcatcgagtccctgt

SEQ ID NO: 251409 - DNA, 845 bp, Unknown
  Bacterial polypeptide expressing nucleotide sequence isolated from the Sargasso Sea
agaggccagtaacacggcccatcccattctggaacgcgtacggtttctatcaatttccgcaagcaatctggatgaattctttatggtgcgggttgccgggctaaaaggccaggttgctgccggcatcgtcgaatatagtaaggagtatctgacgccggcccagcaactggatgctgtcaaagagtcggtaacgcaactcgtcgctcggcagcaacagacatggaaagagctgcgggcagagatgaacaaggaaggaatggaagtccttcgaacggaagaactaacaaccgccgaaacaagctgggtcgaaacctattttactgaagaaatctttcccgtcctaacgccaattgctgtcgatcccgcccatccgtttccgtttatgccgaaccttgggttggcaatggttctcaagctctcacggacccgcaacgacgttcaacttagcgggttgatcccgatcccggcgcaacttgaccggttcgtccggctgcccggcaccctgccccgctttattcggattgaacagattatccgaatgcatttcgacagattgtttccgcgatttgaggtcatggagtacggcatggtccggatattgcgagacagcgatatagaagtggaagatgatgcagaagatctggtgaggttgttcgagagcgccctcaaacgacggcggcggggcgatgtcatccggctgtccatcaatagtaatatgggtcttgccctgcggaacttcctgatccatcagctgaatgtttaccgcgacgacgtgttttcagaagagggtattgtcgggcttgtcgacaccaaagagctgatcattgacgacaaaccggattgaa

SEQ ID NO: 251410 - DNA, 834 bp, Unknown
  Bacterial polypeptide expressing nucleotide sequence isolated from the Sargasso Sea
caagatttgatgaagaagcaaacattcaactttcaagaagcttagaaaaggcaggaattcaaatagtttatggttttgcaaaatataaaacacatgcaaaatcatctttaatattaagaaaagagccgggaaaaattcaaacttatatacatctgggaactggcaattatcacccagttaatgcaaaaatttatactgacttatctttatttagctctgataaaaaaatagcaactgatgtagaaaaattttttaattatgtaactggttattcaaaaccacgaaatcttagtaaaatatctatatcaccaattaatcttagggaaactttgaacaaatgtattgctaacgagatagcaaatgtcaaaaaaggtaaaaaaggtgaaatatgggccaaaatgaattccttagtagatccagcgataattgataaattttacgaagcttcaaatgctggagtaaagatatttttatttgtaagaggtgtttgttgtttaagacctggagttaaagataaatctgaaaatataatagttaaaagcatgattggaagatttttggaacactcaagaatttattgtttttcaaatggaaaaacaatgcctagtagagatgcaaaagtttttatttcatcagcagatttaatgccaagaaatttaaatcgaagagttgaacttctagttccaattgaaaaccaaacagtccatgaacaagttcttgatcaaattatgttagctaattatttagataaaaaacaaagttgggaactcgatgctagtggaaattataaaaaaataaaatatagtgaaaatgattctttttcagccccatgat

SEQ ID NO: 251411 - DNA, 725 bp, Unknown
  Bacterial polypeptide expressing nucleotide sequence isolated from the Sargasso Sea
agattctccaattgttaaagccttaataacagcagctgaaaatggaaagacagtaaccgctttaatagagatcaaagcaagatttgatgaagaagcaaacattcaactttcaagaagtttagaaaaagcaggaattcaaatagtttatggttttgcaaaatataaaacacatgcaaaatcatctttaatattaagaaaagagcagggaaaaattcaaacttatatacatctgggaactggcaattatcacccagttaatgcaaaaatttatactgacttatctttatttagttctgataaaaaattagcaactgatgtggaaaaattttttaattatgtaactggttattcaaaaccacgaaatcttagtaaaatatctatatcaccaattaatcttagggaaaccttgaacaaatgtattgctaacgagataacaaatgtcaaaaaaggtaaaaaaggtgaaatatgggccaaaatgaattccttagtagatccagcgataattgataaattttacgaagcttcaaatgctggagtaaagatatttttatttgtaagaggtgtctgttgtttaagacctggagttaaagataaatctgaaaatataatagttaaaagcatgattggaagatttttggaacactcaagaatttattgttttgcaaatggaaaaacaatgcctagtagagatgcaaaagtttttatttcatcagcagatttaatgc

SEQ ID NO: 251412 - DNA, 906 bp, Unknown
  Bacterial polypeptide expressing nucleotide sequence isolated from the Sargasso Sea
agcagaaaatggaaaaacagtaactgctttaattgaaattaaagctagatttgatgaggaagctaatattcaactatcaagaagtttagaaaaagtaggtgttcaaattgtttatggttttgccaaatataaaactcatgcaaaatcttcattagttttaagaagagaacaaggtaaaatacaaacttattttcatttaggaactggcaattatcatcctgtaaatgctaagatttatactgatttgtctttatttagttctgataaaaaaatggcatcagatgttgaaaagttttttaattatgtaacaggttacgcaaaaccaaaaaatttaaacaaaatttctatttcaccagtaaatatgagacaaaccttaaatgaaaatattgatgctgaaattaaaaattctaaaaatggaaaatttgcagctatttgggctaaaatgaattctttagtagatccagaaattattgataaattttatgaagcttcgaatgctggtgtaaaaattcatttatttgtaaggggtgtttgttgtttaagaccaggagtaaaagatagatcagaaaacatagttgtaaaaagtatcataggaagatttttagagcactctagaatttactgctttagtaatggtacaaaaaaaatgcctaatagaaatgcaaaagtatatatttcttcagccgatttaatgccgagaaatttaaatagaagagtagaacttctagtgccaattgaaaatgaaactgttcatgagcaaattttagatcaaataatgttagcaaattatcttgataccagtcagagctgggagctcaatgctgatggtaattataaaaaaattaaatatagtaagaacgattccttttcagctcatgaatattttatgaataatccgagcttatc

SEQ ID NO: 251413 - DNA, 733 bp, Unknown
  Bacterial polypeptide expressing nucleotide sequence isolated from the Sargasso Sea
cgagatcgtccgctatgcacacttgggcaccggcaactaccacgccggcaacgccaagctgtacaccgactacagcctgctcaccgccgacgtggctctgggcgaggacgtgtcgaagctgttcagccagctgattggcatgggcaagaccctgcgcatgaagaaactgctgcacgcgccgttcaccttgaagaaaaccctgctcgacctgatcgcgaaggaaaccgccgcagcggccgaaggcaagccggcgcacatcatcgccaagttcaactcgctgaccgaccccaaggtgatccgcgcgctgtacaaggccagccagaccggggtgaagattgacctggtggtgcgtggcatgtgctgcctgcgcccgggtatcgccggggtgtcgcacaacatccaggtgcgctcgatcatcgggcgcttcctcgagcatacgcgggtgttctacttcctcaatggcggtgacgagaagatctacctgtccagcgccgactggatggagcgcaacctcgacaagcgcgtggagacctgcttcccggtggagggcaagaagctcatcacgcgcgtcaagaaggagctggaaagctacctgaccgacaacacccaggcctgggtgctgcagtccgatggtcgttacctgcgccaacagcccaccggcaaccagaacccgcgcagcgcacagtccggcttgctggagaaactcaccgcaccagtgatcgtgacgcgttaa

SEQ ID NO: 251414 - DNA, 857 bp, Unknown
  Bacterial polypeptide expressing nucleotide sequence isolated from the Sargasso Sea
ttttgaattggctttaaaaagaagaagaacaggtgacatagtacgtttagaaattttaaaaaatagtaataatgacttaattaagtttataaccaataagttaaacgtaaaatctgaatacatctatgaaattgaaggcattgttggaattcaagatatagaccaagtttgtaaaattaaaaattctaaattaagatttaaaaattttaatcccagggaggttgagagattaaaggagtttaataataatttttttgatactataaaaaaaaaagatttaatagttcatcacccttttgaaacatttgatgctgtcgttgagtttttaaatcaagctgcatatgataaaaaagttatagcaattaaacaaactctatacagaacaacgctagattctccaattgttaaagccttaataacagcagctgaaaatggaaagacagtaaccgctttaatagagatcaaagcaagatttgatgaagaagcaaacattcaactttcaagaagtttagaaaaggcaggaattcaaatagtttatggttttgcaaaatataaaacacatgcaaaatcatctttaatattaagaaaagagcagggaaaaattcaaacttatatacatctgggaactggcaattatcacccagttaatgcaaaaatttatactgacttatctttatttagttctgataaaaaattagcaactgatgtggaaaaattttttaattatgtaactggttattcaaaaccacgaaatcttagtaaaatatctatatcaccaattaatcttagggaaaccttgaacaaatgtattgctaacgagattacaaatgtcaaaaaaggtaaaaaaggtgaaatat

SEQ ID NO: 251415 - DNA, 790 bp, Unknown
  Bacterial polypeptide expressing nucleotide sequence isolated from the Sargasso Sea
ttgaaatctaaatatataaatagagagctttcttggttaaaattcaacgatagagtacttctagaagcacaaaatactgaaaatcctctttatgaaagagtaaaatttttgtcaattgctgggtctaatctagatgaattttttatggtccgtgttgcaggattatttagtcaaataaaacaagaagttgactcactaagttctgatggtttgacacccgaggaacaaatggatgaggtagttcttgaaaccaagaatctattaaaaaaacagaacaaaatttttatgcaactgattatggaattaaaaaaaaacaatatcagtttagttaaaccagttaatttaaatgctaaggataaaaaaaaacttttagaaatatttaaagaagagatttaccctttattaacaccatcagcaattgatcctgcacacccatttccatttataatcaatcaaggaagagcaatcgtaatgaagttaagaaaaaaaaataaaaaaaggattttaaactcaataattgtaataccaaaagcattatctagatttattgaaatagagtcttcaaaaaatcataagaagtttgttattctagatgacgtaataagtttttttgctaatgaaatttttccagatcatgatttagaaaagaaaatgatttttagagtaataagagacagcgatgtagagattcaagaggaagcagaagatttagttagatcttttgaattggctttaaaaagacgtagaacgggtgatattgttcgtttagaggttcttgaaaatagtgata

SEQ ID NO: 251416 - DNA, 892 bp, Unknown
  Bacterial polypeptide expressing nucleotide sequence isolated from the Sargasso Sea
gatgtaaccccagattatatatacgaaacagaaggactggtaggtattgaagatatagatcaaatatgtaagttaaaaaactctaaactcagatttaaaaattttaatcctcgagaagtagaaagattaaaagaatttaataacaatttttttgatactataaaacaaaaagatttagttgttcatcacccttttgaaacatttgatgccgtaattgaatttttaaatcaagccgcttatgataaaaaagttattgcaataaaacaaaccctttatagaacaactttagactcacccatagttaaagcgcttatctcagctgcagaaaatggaaaaacggtcacagctcttattgaaattaaagcaagatttgatgaagaagcgaatatacaattggctagaagtttagaaaaagctggggtgcaaattgtttacggttttgctaagtataagacacatgctaagtcttctttagtgcttagacgagaactaggtaaaatacaaacctatgttcatttaggtactggaaattatcaccctgtaaacgcaaaaatttacacagacttatctttattcagctccaataaaaaaattgctggtgatgtagaaaaattttttaattacgttacaggttattcaaaacctagaaatttaaataaattatcaatttcaccaattaatctaagaattactcttaacaaatgtatagatatagaaatttcaaatgctaaaaaaggaaaaaaagctgaaatatgggcaaaaatgaactctctggttgacccaatcatcattgataaattttatgaggcttcaaacgcaggtgttaaaatttatctttttgtaagaggagtctgctgtttgagaccgggtgtaaaagataaatctgaaaata

SEQ ID NO: 251417 - DNA, 850 bp, Unknown
  Bacterial polypeptide expressing nucleotide sequence isolated from the Sargasso Sea
caaacaaacattgtatcgaaccacacctgattctcctatcgtaaaagcactaagtagagcagcagaaaacggaaaagttgttacagccgtaatagaaataaaagctcgatttgatgaggaagctaatattgaattatctaggaaactagagaaagctggcgttcaaattgtttacggattcgcaaaatacaaaacgcatgcaaaggcaagtttagttttaagaaaagaaggagcaaaaacgcgaagctatgttcacttaggtacaggaaactatcatccaattaacgcaaaaatttatactgacttatcactgtttagctctaatcaagacttggccaaagatgttgaaaaatttttcaattatgtaactggttatgcaaaacccaaaaaattgaataaaatttttatgtctccattaaatagtaggaatttttttgaagaaaaaattgaaaatgaaattgtaaatgcaagtaaaggaaaacctgcagaaatatgggcaaaaatgaattctcttgtagaccctggaattattaagaaattttatgaagcttcaaacgcaggagtaaaaataaatttatcagtaagaggagtatgttgcttaagacctggaattaaaggtcaatctgaaaatataaaagtaaaaagccttattggcagatttttagaacactcaagaatttattgttttgcaaatggtagctctatgccctctcgagagaatcagttatatatttcatctgcagatttaatgcctagaaatttagatagaagaattgaaattataattccgatagaaaacaataccgtgcatgagcaaattttagatcaaattatgttagccaacttttaa

SEQ ID NO: 251418 - DNA, 847 bp, Unknown
  Bacterial polypeptide expressing nucleotide sequence isolated from the Sargasso Sea
gacatagtacgtttagaaattttgaaaaatagtaataatgacttaattaagtttataaccaataagttaaacgtaaaatctgaatacatctatgaaattgaaggcattgttggaattcaagatatagaccaagtttgtaaaattaaaaattctaaattaagatttaaaaattttaatcccagggaggttgagagattaaaggagtttaataataatttttttgatactataaaaaaaaaagatttaatagttcatcatccttttgaaacatttgatgctgtcgttgagtttttaaatcaagctgcatatgataaaaaagttatagcaattaaacaaacactatacagaacaacgttagactctccaattgttaaagccttaataacagcagctgaaaacggaaagacagtgactgctttaatagagatcaaagcaaggtttgatgaagaagcaaacattcaactttcaagaagtttagaaaaggcaggaattcaaatagtttatggttttgcaaaatataaaacacatgcaaaatcatctttaatattaagaaaagagcagggaaaaattcaaacttatatacatctaggaactggcaattatcacccagttaatgcaaaaatttataccgacttatctttatttagctctgataaaaaaatagcaactgatgtagaaaaattttttaattatgtaactggttattcaaaacctcgaaatcttagtaaaatatctatatcaccaataaatcttagggaaactttgaacaaatgtattgctaacgagatagcaaatgtcaaaaaaggaaaaaacggtgaaatatgggccaaaatgaattccttagtag

SEQ ID NO: 251419 - DNA, 718 bp, Unknown
  Bacterial polypeptide expressing nucleotide sequence isolated from the Sargasso Sea
actgaaatctaaatatataaatagagagctttcttggttaaaattcaacgatagagtacttctagaagcacaaaatactgaaaatccactttatgaaagagtaaaatttttatcaattgctgggtctaatctagatgaattttttatggtccgagtcgctggattatatagtcaaataaaacaagaagttgactcattaagttctgatggtttgacacctgaagaacagatggatgaggtagtacttgaaactaaaaatttattaaaaaaacagaacaaaatttttactcaactgattatagaattaaaaaaaaaaaatatcagtttagttaaacctgttaatttaaatactaaggataaaaaaaaacttctagaaatatttaacgaagagatttaccctttattaacaccatcagcaattgatcctgcgcacccatttccattcataatcaatcaaggaagagcacttgtaatgaaattaagaaaaaaaaataaaaaaagggttttaaactccataatagtaataccaaaagcattatctagatttattgaaattgagtcttcaaaaaatcataagaaatttgtaattctagatgatgtaataagtttttttgctaatgaaatttttccagatcatgatttagaaaagaaaatgatttttagaataataagagatagtgatgtagaaattcaagaagaagcggaagatttagttaga

SEQ ID NO: 251420 - DNA, 2110 bp, Unknown
  Bacterial polypeptide expressing nucleotide sequence isolated from the Sargasso Sea
ctgaatagagagctttcttggttaaaattcaacgatagagtacttctagaagcacaaaatactgaaaatcctctttatgaaagagtaaaatttttatcaattgctggttctaatctagatgaattttttatggtccgagttgctggattatatagtcaaataaaacaagaagttgactcattaagttctgatggtttgacacctgaagaacagatggatgaggtagtacttgaaactaaaaatttattaaaaaaacagaacaaaatttttactcaactgattatagaattaaaaaaaaataatatcagtttagttaaacctgttaatttaaatactaaggataaaaaaaaacttctagaaatatttaaagaagagatttaccctttattaacaccatcagcaattgatcctgcgcacccatttccattcataatcaatcaaggaagagcgcttgtaatgaagttgagaaaaaaaaataaaaaaagggttttaaactccataatagtaataccaaaagcattatctagatttattgaaatagagtcttcaaaaaatcataagaaatttgtaattctagatgatgtaataagtttttttgctaatgaaatttttccagatcatgatttagaaaagaaaatgatttttagagtaataagagatagtgatgtagaaattcaagaagaagcggaagatttagttagatcttttgaattggctttaaaaagacgtagaacgggtgatattgttcgtttagagatcctcgaaaatagcgataatgaattggtaaaatttattacaaataaattagaaataaatcccgattatatttacgatgtatctggccttgttggaattcaagatatagatcaaatatgtaaagtaaaaaatccaaaattaagatttaagcattttacacctagagaagttgaaagattaaaagaatataatgataacttttttgaaactattaaaaagaaagatttagttgttcatcatccttttgaaacatttgactcagtaattgaatttttaaaccaagcagcaaatgataaaaaagttatagctataaaacaaactctatatagaacaactctagactcaccaattgttaaagctttaataacagcagcagaaaacggaaaaacagttaccgctttaattgaaattaaagctagatttgatgaggaagctaatattcaactatcaagaagtttagaaaaagtaggtgttcaaattgtttatggttttgccaaatataaaactcatgcaaaatcttcattagttttaagaagagaacaaggtaaaatacaaacttattttcatttaggaactggcaattatcatcctgtaaatgctaagatttatactgatttgtctttattcagttgtgataaaaaaatggcatcagatgttgaaaagttttttaattatgtaacaggttacgcaaaaccaaaaaatttaaacaaaatttctatttcaccagtaaatatgagacaaaccttaaataaaaatattgatgctgaaattgaaaattctaaaaatggaaaatttgcagctatttgggcaaaaatgaattcattagtagatccagaaattattgataaactttatgaagcttcgaatgctggtgtaaaaattcatttatttgtaaggggtgtttgtagtttaagaccaggagttaaagatagatcagaaaacatagttgtaaaaagtatcataggaagatttttggagcattctagaatttactgctttagtaatggtacaaaagaaatgcctaatagaaatgcaaaagtatatatttcttcagccgatttaatgccgagaaatttaaatagaagagtagaacttctagtgccaattgaaaatcaaactgttcatgagcaaattttagatcaaataatgttagcaaattatcttgatactagtcagagctgggagctcaatgctgatggtaattataaaaaaattaaatatagtaagaacgattccttttcagctcatgaatactttatgaataatccgagcttatctggaagaggtaaagctaaactaaaaatgcagcctaaacaactgcacttaagattgattaaaagtggaagtaattaaa

SEQ ID NO: 251421 - DNA, 1384 bp, Unknown
  Bacterial polypeptide expressing nucleotide sequence isolated from the Sargasso Sea
aaaaagaagaagaacaggtgacatagtacgtttagaaattttaaaaaatagtaataatgacttaattaagtttataaccaataagttaaacgtaaaatctgaatacatctatgaaattgaaggcgttgttggaattcaagatatcgaccaagtttgtaaaattaaaaattctaaattaagatttaaaaattttaatcccagagaggttgagagattaaaggaatttaataataatttttttgatactataaaaaaaaaggatttaatagttcatcacccttttgaaacatttgatgctgtcgttgagtttttaaatcaagctgcatatgataaaaaagttatagcaattaaacaaactctatacagaacaacgttagactctccaattgttaaagccttaataacagcagctgaaaatggaaagacagtgactgctttaatagagatcaaagcaagatttgatgaagaagcaaacattcaactttcaagaagtttagaaaaggcaggaattcaaattgtttatggttttgcaaaatataaaacacatgcaaaatcatctttaatattaagaaaagagcagggaaaaattcaaacttatatacatctgggaactggcaattatcacccagttaatgcaaaaatttatactgacttatctttatttagctctgataaaaaaatagcaactgatgtggaaaaattttttaattatgtaactggttattcaaaaccacgaaatcttagtaaaatatctatatcaccaattaatcttagggaaactttgaacaaatgtattgctaacgagatagcaaatgtcaaaaaaggtaaaaaaggtgaaatatgggccaaaatgaattccttagtagatccagtgataattgataaattttacgaagcttcaaatgctggagtaaagatattattatttgtaagaggtgtttgttgtttaagacctggagttaaagataaatctgaaaatataatagttaaaagcatgattggaagatttttggaacactcaagaatttattgtttttcaaatggaaaaacaatgcctagtagagatgcaaaagtttttatttcatcagcagatttaatgccaagaaatttaaatcgaagagttgaacttctagttccaattgaaaaccaaacagtccatgaacaagttcttgatcaaattatgttagctaattatttagataaaaaacaaagttgggaactcgatgctagtggaaattataaaaaaataaaatatagtgaaaatgattctttttcagcccatgattattttatgaataatcctagtttatctggaagaggtaaagctaaattaaaaatgaaaccgaaaaaattaaacttaagattaattaaaagtggaaattaa

SEQ ID NO: 251422 - DNA, 2128 bp, Unknown
  Bacterial polypeptide expressing nucleotide sequence isolated from the Sargasso Sea
atgtcgaaagcatcattttcagaaaacgctaatattagcaatcaactcataaacagagaattatcttggcttcagtttaatgatcgtgttttagaagagtcaaaagataaaacaaatcctctatttgaaagagtaaaatttttatcaatcgcaggtacaaatttagatgaattttttatggtaagagtcgctggactttttaatcaaattaaagatggttttgacgaattaagcgcagatggattaactgcagaggatcaattgaatagggtcgtattaaaaactaaagatctattaaagaagcaaaacgaagcgttcctagagctgaaaaaagagctatcaaaagaaaaagtttttattcgaaaaatgtcagaactaaacaagaagaatcttatttatctgaaagaatattttcaggaaacaatttatcctataataacacctactgccatcgacccatcacatccctttcctttcataccgaataaaggccaagcaattttattaagaatgagcagaattaaaaaaaaaagagaactaaacgcaattatagttataccaagagcgcttccaaaatttatatcgctaaacaattttgaaacaataaatgaatttgtcacaattgatgacttaatttgtgaatttgccaatgaaatatttccagatcataatattgaggcaagtttgcagtttaaaataattagagacagtgaaatcgaaatagacgatgaggccgctgatcttgtgagatattttgaaaaagcaataaagaaaagaagaaggggaaacgtagttaaacttgaagtacttactaattcaaataaaaaacttttaaattttatttcaaaaaaatttaaaatgaatgaagatcatatttatgaggttgaaggattagttggaatacaggatatagatgaaatttgtaagaagaaagatccaaagctgagatttaaaaaatttaatcctagagaagttgaaagattgaaagaatttgataataaatttttttcagctataagaagcaaagattttgttgtacaccatccttttgaaacatttgatgtagtaattcaatttttagaagctgcagcaaaagatcccaaagttatcggtatcaaacaaactttgtatcgaaccactcctgactctcctattgtaaaagcacttagtagagcagcagaaaacggaaaagttgtaacagctgtagtagaaataaaagctcgatttgatgaggaagctaatattgaattatctaggaaactagagaaagctggcgttcaaattgtttatggattcgcaaaatacaaaacgcatgcaaaggcaagtttagttttaagaaaagaaggagttaaaacgcgaagctatgttcacttaggtacaggaaactatcatccaattaatgcaaaaatttatactgacttatcactgtttagctctaatcaagacctggccaaagatgttgaaaaatttttcaattatgtaactggttatgcaaaaccaaaaaaattaaataaaatctttatgtcaccaataaatagtaggaatttctttgaaaaaaaaattgaaaatgaaattgcaaatgcaaataaaggaagacctgcagaaatatgggcaaaaatgaattctcttgtagaccctggaattattaagaaattttacgaagcttcaaacgcaggcgttaaaataaatttatcagtaagaggcgtatgttgcttaagacctggaattaaagctcaatctgaaaatataaaagtaaaaagccttattggcagatttttagaacactcaagaatttattgttttgcaaatggtagttctatgccctctagagagaatcaggtatatatttcatctgcagatttaatgcctagaaatttagatagaagaattgaaattataattccaatagaaaacaatactgtgcatgagcaaattttagatcaaattatgttagccaactttaaagataaatcagaaacatggtatttagatagcttaggaaactatcataaagaacaagaaaaaggcttttcagcacatacctattttatggaaaactcaagtttatcaggtcgtggtaagtcacttttaaaagctaaacctcaaaatttaagattggtgaaatgaa

SEQ ID NO: 251423 - DNA, 2152 bp, Unknown
  Bacterial polypeptide expressing nucleotide sequence isolated from the Sargasso Sea
atgactgcattaaaaaaacaagataaagaaatacttagatctaaatacataaatagagaattgtcttggctcaaattcaacgacagagttcttctagaagcccaaaatattgaaaacccactttatgaaagaattaaatttttatctatagctggatcaaatttagatgaattctttatggtacgtgtcgcgggtttatatagtcaaatcaagcaagaggtagattctcttagctctgatggtcttactcctgatgaacaaatgagtgaagttattttggaaacaaataatcttcttaataaacaaaataaaatatatagagatttaattcttcaattaaaaaaagcaaatataagtatagttaaacctgaaaatttaagtaaatcggatcaaaaaagattatttaaaatttttaatgaagaaatttaccctctgctaacaccatcggcaatagacccagctcatccctttccatttattgcaaatcaaggaagagcattagttatgagattaaataagaaaaataaaaaaagagttttaaatgcaataatagtaattccaaaagctttatcaagatttattgaaatagatggaaataaaagttttaaaaaatttttaattattgatgatgttataagtttttttgcttctgaaatatttcctgatcatgatttagataaaaaaatgttatttagagttataagagatagtgatgtagaaattcaagaggaggccgaagatttagtaagatcttttgaattggctttaaaaagaagaagaacaggtgacatcgtacgtttagaaattttaaaaaatagtaataatgacttaattaagtttataaccaataagttaaacgtaaaatctgaatacatctatgaaattgaaggcattgttggaattcaagatatcgaccaagtttgtaaaattaaaaattctaaattaagatttaaaaattttaatcccagagaggttgagagattaaaggaatttaataataatttttttgatactataaaaaaaaaggatttaatagttcatcacccttttgaaacatttgatgctgtcgttgagtttttaaatcaagctgcatatgataaaaaagttatagcaattaaacaaactctatacagaacaacgttagactctccaattgttaaagccttaataacagcagctgaaaatggaaagacagtaaccgctttaatagagatcaaagcaagatttgatgaagaagcaaacattcaactttcaagaagtttagaaaaggcaggaattcaaatagtttatggttttgcaaaatataaaacacatgcaaaatcatctttaatattaagaaaagagcagggaaaaattcaaacttatatacatctgggaactggcaattatcacccagttaatgcaaaaatttatactgacttatctttatttagctctgataaaaaaatagcaactgatgtagaaaaattttttaattatgtaactggttattcaaaaccacgaaatcttagtaaaatatctatatcaccaattaatcttagggaaactttgaacaaatgtattgctaacgagatagcaaatgtcaaaaaaggtaaaaaaggtgaaatatgggccaaaatgaattccttagtagatccagcgataattgataaattttacgaagcttcaaatgctggagtaaagatatttttatttgtaagaggtgtttgttgtttaagacctggagttaaagataaatctgaaaatataatagttaaaagcatgattggaagatttttggaacactcaagaatttattgttttgcaaatggaaaaacaatgcctagtagagatgcaaaagtttttatttcatcagcagatttaatgccaagaaatttaaatcgaagagtagaacttctagttccaattgaaaaccaaacagtccacgaacaagttcttgatcaaattatgttagctaattatttagataaaaaacaaagttgggaacttgatgctagtggaaattataaaaaaattaaatatagtgaaaatgattctttttcagcccatgattattttatgaataatcctagtttatctggaagaggtaaagctaaattaaaaatgaaaccgaaaaaattaaacttaagacttattaaaagtggaaattaaa

SEQ ID NO: 251424 - DNA, 2158 bp, Unknown
  Bacterial polypeptide expressing nucleotide sequence isolated from the Sargasso Sea
atgactgctttaaaaaaacaacaaaaagaagaactcaagaacaaatatattaatagggaactttcctggttaaaattcaatgatagagttctttttgaagcacaaaatcttgaaaatcccttgtatgaaagagtaaaatttttatcaattgccggttcaaatcttgatgaattttttatggttcgggtagcaggtctatatagtcaaataaaacaagaagttgattcattaagttctgatggtctgacacctgatgaacaaatggaagaggtaatttccgaaactaaaaaactattaatcaaacaaaataagatttatattcaacttatcgcagaattaaaaaaaaacaatatcagtttagttaagccagttaatttaaatactaaggataaaaaaaaacttctagaaatattcaaagaagagatttatcctttattaacaccatctgctattgatcctgcgcatccatttccatttataatcaaccaaggaagagcgcttgtaatgaggttaagaaaaaaaaataaaaaaagaattttaaactcaataatagtaataccaaaagcattatctagatttattgaaatagagtcttcaaaaaatcataaaaaatttgttgttctagacgatgtaataagtttttttgctaaagaaatttttccagatcatgatttagaaaaaaaaatgattttcagggtaataagagatagtgatgttgaaattcaagaggaagcagaagatctagttagatcttttgaattagccttaaaaagacgtagaacgggcgatattgttcgtttagaggtccttgaaaatagtgatcatgaattgataaaatttataacaaacaaattagatgtaaatcctgattatatttataatgtatttggccttgttggaattcaagatatagatcaaatatgtaagttaaaaaatccaaaattaagatttaaaaattttgtacctagagatgttgaaagattaaaagaatataatgataatttttttgaaaccatcaaaagaaaagatttagttgttcatcatccttttgaaacatttgactcagtaattgaatttttgaaccaagcagcaaatgataaaaaagtaatagctatcaaacaaactttgtatagaacaactttagattcaccaattgttaaagctttgataacagctgcagaaaatggaaaaacagttactgctttaatagaaattaaagcaagatttgacgaggaagcaaatattcaattatcaagaagtttagaaaaggtaggtgttcaaattgtttatggttttgcaaaatacaaaactcatgcaaaatcatcattagttttaagaagagaacaaggtaaaatacaaacttattttcacttaggaactggtaattatcatcctgtaaatgctaaaatctatactgatttgtctttattcagctgtgatagaaaaatggcatcagatgttgaaaaattttttaattatgtaacaggatacgcaaaaccaaaaaatttaaataaaatttctgtttcgccaattaatatgagacaaaccttaaataaaaacattgatgctgaaattgaaaattctaaaaatggaaaatttgcagccatttgggcaaaaatgaattcattagtagatccggaaattattgataaattttatgaagcttcgaatgctggtgttaatattcatttatttgtaaggggtgtttgttgtttgagaccaggtattaaaaatagatctgaaaatatagttgtaaaaagtattataggaagatttttagagcattctagaatttattgttttagtaacggtactaaaaaaatgcctaatagaaatgcaaaagtatatatttcctcagctgatcttatgccaagaaatttaaatagaagagtagagcttttagtgccaattgaaaatgagactgttcatgagcagattctagatcaaataatgttagcaaattatcttgatactaatcagagctgggagctcaatgcagatggtaattataaaaaaattaagtatagtaagaacgattccttttcagctcatgaatactttatgaataatccgagcttatctggaagaggtaaagctaaattaactatgcaacctaagaaattgcatttaagactgattaaaagtggaagtaattaat

SEQ ID NO: 251425 - DNA, 1044 bp, Unknown
  Bacterial polypeptide expressing nucleotide sequence isolated from the Sargasso Sea
gctgaaatctaaatatataaatagagagctttcttggttaaaattcaacgacagagttcttttagaagcgcaaaatatcgaaaatccactttatgaaagagtaaaatttttatcaattgctgggtctaatctagatgaattttttatggtccgtgttgctggattatatagccaaataaaacaagaagttgactcattaagttctgatggtctgacacccgatgaacaaatggatgaggtagtacttgaaactaaaaatttatttaaaaaacagaacaaaatttttattcaactgattatggaattaaaaaaaaataatatcagtttagttaagccagttaatttaaatactaaggataaaaaaaaacttctagaaatatttaaagaagagatttaccctttattaacaccatcagcaattgaccctgcacatccatttccatttataatcaatcaaggaagagcaattgtaatgaagttaagaaaaaaaaataaaaaaaggattttaaactcaataattgtaataccgaaagcattatctagatttattgaaatagagtcttcaaaagatcataagaagtttgttattctcgatgatgtaataagtttttttgctaatgaaatttttccagatcattatttagaaaaaaaaatgatttttagagtaataagagatagcgatgtggagattcaagaggaagcagaagatttggttatatcttttgaattggctttaaaaagacgtagaacgggtgatattgttcgtttagaggttcttgaaaatagtgataatgaattggtaaaatttataactaataaattagaaataaattctgactatatttatgatgttgctggccttgttggaattcaagatatagatcaaatatgtaaaataaaaaatccaaaattaagatttaaacattttacacctagagaagttgaaagattaaaagaatacaatgataatttttttgaaactattaaaaaaaaagatttagttgttcatcatccttttgaaacatttgactcagtaattgaatt

SEQ ID NO: 251426 - DNA, 1410 bp, Unknown
  Bacterial polypeptide expressing nucleotide sequence isolated from the Sargasso Sea
gtaagatctttttgaatttggctttaaaaagaagaagaacaggtgacatagtacgtttagaaattttaaaaaatagtaataatgacttaattaagtttataaccaataagttaaacgtaaaatctgaatacatctatgaaattgaaggcattgttggaattcaagatatagatcaagtttgtaaaattaaaaattctaaattaagatttaaaaattttaatcccagggaggttgagagattaaaggagtttaataataatttttttgatactataaaaaaaaaagatttaatagttcatcacccttttgaaacatttgatgctgtcgttgagtttttaaatcaagctgcatatgataaaaaagttatagcaattaaacaaactctatacagaacaacgctagattctccaattgttaaagccttaataacagcagctgaaaatggaaagacagtaaccgctttaatagagatcaaagcaagatttgatgaagaagcaaacattcaactttcaagaagtttagaaaatgcaggaattcaaatagtttatggttttgcaaaatataaaacacatgcaaaatcatctttaatattaagaaaagagcagggaaaaattcaatcttatatacatctgggaactggtaattatcacccagttaatgcaaaaatttatactgacttatctttatttagctctgataaaaaaatagcaactgatgtggaaaaattttttaattatgtaactggttattcaaaaccacgaaatcttagtaaaatatctatatcaccaattaatcttagggaaaccttgaacaaatgtattgctaacgaaataacaaatgtcaaaaaaggtaaaaaaggtgaaatatgggccaaaatgaattccttggtagatccagcgataattgataaattttacgaagcttcaaatgctggagtaaagatatttttatttgtaagaggtgtttgttgtttaagacctggagttaaagataaatctgaaaatataatagttaaaagcatgattggaagatttttggaacactcaagaatttattgttttgcaaatggaaaaacaatgcctagtagagatgcaaaagtttttatttcatcagcagatttaatgccaagaaatttaaatcgaagagtagaacttctagttccaattgaaaaccaaacagtccacgaacaagttcttgatcaaattatgttagctaattatttagataaaaaacaaagttgggaacttgatgctagtggaaattataaaaaaattaaatatagtgaaaatgattctttttcagcccatgattattttatgaataatcctagtttatctggaagaggtaaagctaaattaaaaatgaaaccaaaaaaattaaatttaagattaattaaaagtggaaattaaa

SEQ ID NO: 251427 - DNA, 2101 bp, Unknown
  Bacterial polypeptide expressing nucleotide sequence isolated from the Sargasso Sea
atgttaaaaaaaaataccgcttataactatgcaaacagggaattgtcttggctaaaattcaatgaaagagtcttaagtcagacatctgatagtaaaattccacttttagaaagggttagatttttatcaatagcattctctaatttagatgaattttttatggttagagtagcaggattgaatgttcaaaaattttcacgaaataaaagttttgatggattaacaccacaacaacaactcaagctgatagataaagaaacatcgaagatgatttcaaatataaaatcaatatggatagatttactaagagagctttcagaaaacaaaatccatatagatgtagaaaaaacactgaaaacaaaagataaaacatttattaaaaattatttagaagaaaataattggggggttttaacgccaattattattgatccatctcacccatttccttttataccaaataaagaaacaaccttagtatgtcgtttaataaataataaaaaaactttttatggaatactaagagtgccagagggattagaaaaatttattaaattacctggtaaaaaaacacgttttgtatctatggagacagccctacttatttctttaaaagaaattttccagtgtgatagggttttggataaaggtgtttttagaccaattaggaatagtgaattagaattagggggtgaaggagaagatttatttttagtatttcaaaaagctatttttgagagaagaagacaagaggtaataagaattgattttgatgaaagtatatctagtcacttaattaaattcataaataaaaaacttaactataaggatgtaaatacatataaactgccaatacccgttaatctttcgagtatagagtcaatttttttgaaagattttaaaaaattattttttccaaaatttaaggtacgatttcctgaaagaattaaagattttaaaaatgattattttaaagctatagcaaataaagatattgttattcatcacccttttgaatcttttgaagtagtgactcagtttattgatcaagctgcagatgatccaaaagtcttatcaataaaacatactttatatcgaactactgatgactcaccaatagaagcaagtttagttagagcagcacaaaaaggaaaattagtaactgtcattatagagttgcaagcacgttttgatgaagagcgtaacttaaaatgggcaaaagaattagaattagctggagcgcaagttgtttttggcaatattgatatgaaaactcatgcaaaaattacacttgtaacaaggaagcaaatgaattctgttgtaaattacgcacattatggaacaggtaattatcacccgagaaatgcaagagtttatatggatttatcttacttcacctgtgacaaaacattaacaaatgatgctgcaaaaatgtttaattatttaactagttattcagaaccaaccacaataaaaaaaatagtatattctccaataactgcaagaaacaaattaaatgaactaattagaaatgaaattacaaatgctggaaaaaataaaccatctggaatagtatgtaagtgtaatgctcttgttgataaacaaattattgatgaattttataaagcatctcaaaaaaatgtaaaaattgaattgttgataagaggaatttgctctctaatacctggtaaagaaaatctatcagaaaatatagttgttaaaagcataattggtcgttttttagaacatacgagaatatattgtttttataacggtcataaattccctcatagaaaaaatatcttgtttatttcttctgccgatttaatgcaaagaaatctagataggcgggttgaaacatttattcctattgaaaatgaaactgtacatgaacaaatattaaatcagatcttaattgccagtatgacagataatacaaattcttggcaaatgttaagtaatggcaattatcagaaaaaagaaatatcaagcaaagagaaaaaattttcctctcacaatttttttatcaaaaatccaagcttgtctgggaggggttcagcaaaactcaaatctagagctaagtctaatttaaaaatttgaa

SEQ ID NO: 251428 - DNA, 1111 bp, Unknown
  Bacterial polypeptide expressing nucleotide sequence isolated from the Sargasso Sea
ctgaaatctaaatatataaatagagagctttcttggttaaaattcaacgacagagtacttttagaggcacaaaatatcgaaaatcctctttatgaaagagtaaagtttttatcaattgctgggtctaatctagatgaattttttatggtccgagttgctggattatatagtcaaataaaacaagaagttgactcattaagttctgatggtttgacacctgaagagcaaatggatgaggtagtgcttgaaactaagaatctattaaaaaaacagaacaaaatttttattcaactgattatggaattaaaaaaaaataatatcaatttagttaaaccagttaatttaaatactaaggataaaaaaaaacttttagaaatatttaaagaagagatttaccctttattaacaccatcagcaattgatcctgcgcacccatttccatttataatcaatcaaggaagagcaattgtaatgaagttaagaaaaaaaaataaaaaaaggattttaaactcaataattgtaataccaaaagcattatctagatttattgaaatagagtcttctaaaaatcataagaagtttgttattctagatgacgtaataagtttttttgctaatgaaatttttccagatcatgatttagaaaataaaatgatttttagagtaataagagacagcgatgtagagattcaagaggaagcagaagatttagttagatcttttgaattggctttaaaaagacgtagaacgggtgatattgttcgtttagaggttcttgaaaatagcgataacgaattggtaagatttataactaataaattagatataaatcctgactatatttatgatgtatctggccttgttggaattcaagatatagatcaaatatgtaaagtaaaaaatccaaaactaagatttaagcattttacgcctagagaagttgaaagattaaaagaatataatgataatttttttgaaactattaaaaagaaagatttagttgttcatcatccttttgaaacatttgactcagtaattgaattttttaatcaagcagcaaatgataaaaaagttatagctattaaacaaactttatatagaacaactctag

SEQ ID NO: 251429 - DNA, 1468 bp, Unknown
  Bacterial polypeptide expressing nucleotide sequence isolated from the Sargasso Sea
aatgatatttagagtaataagagatagtgatgtagaaattcaagaagaggctgaggatttagtcagatcatttgaactagcattaaagcgaagaagaactggtgatattgttagattagaaattttagaaaaaagcgacaaagaacttgtaaaatttataacaaataaattagaaattaatccaaattatatttatgaagtagcaggtttagttggaatccaggatatagaccaaatttgtaaaattaaaaattctaaattaaaatttaaaaactttacaccaagagacgtagaaagattaaaagaatacaataataatttttttgagacaattaagaaaaaagacctaatagttcatcatccatttgaaacttttgatgctgtaattgaatttttaaatcaagcggctatagataaaaaagtaattgctattaaacaaacattgtataggactactttagattcaccaattgttaaagcattaattagtgctgccgaaaatggtaaaacagttactgctttaattgaaatcaaagctagatttgatgaagaagcaaatatacagctggcaagaagtcttgaaaaagctggagttcaaattgtttatggttttgcaaaatacaaaacacatgctaaatcatcactaatacatcgacgtgagggtggtaaaattcaaacatatttccatttgggtactggcaattatcatcctgtaaatgcaaaaatatacacagacttatctctatttagctctgataaaaaaatggctacagatgtagaaaaattctacaattatgtgactggttattcaaaaccaagaaatttaaataaaatttccatttctccagtaaatttaagaaaaactttaaatcagaatatagataaggaaataagtaatgcaaaaaaagggaaacacgctgagatttgggctaaaatgaattcattagttgatccacaaataattgataagttttatgaggcttctagtgtcggtgtaaaagtctttttatttgtaagaggtgtatgttgtttaagacctggtattaaaaataaatcggaaaatattattgtaaaaagtatcattggaagatttcttgaacactcaagaatttattgttttgcaaatggaaaatttatgcccaacagaaatgcaaaagtttatatttcatctgcagatttgatgccaagaaatcttgatagaagagtcgaacttctcgtgccaattgaaaatcaaactgtgcatgaacaggttttagaccaaataatgatggccaattatctcgacacgaatcagagctgggaactttatcctgatggaaattatcaaaaaattaaatatagtcgaaaagattctttttctgcacatgattatttcatgaataatccaagtttatcaggaagaggaaaagcaaaactaaaaattaaacctaaaaaattaaacttaaggttggttaaaggtggaacttaa

SEQ ID NO: 251430 - DNA, 1351 bp, Unknown
  Bacterial polypeptide expressing nucleotide sequence isolated from the Sargasso Sea
atgattaaaaataataattcttttaactatattaatagagaattatcttggcttaaatttaatgaaagagtcttaagtcagacacttgataataaaacgccattattagaaagagttaggtttctatcaatagcattctctaatcttgatgaattttttatggttagagtggcaggattaaatgttcaaaaatattcacgaaataaaagttttgatggattaacaccacaacagcaactcaagctgatagataaagaaacatcaaagatgatttcagatataaaatcaatatggatagatttactaaaagagctttcagaaaataagatccatatagatgtagaaaaaacactgaaaacaaaagataaaacatttataaaaaattatttagaagaaaataattggggggttttaacgccaattattattgatccatctcacccatttccttttataccaaataaagaaacaacattagtatgtcggttaataaataataaaaaaactttttatggaatactgagagtgccagagggattagaaaaatttattaaattacctggtaaaaaaatacgttttgtctctatggagacagccttgcttatttctttaaaagaaattttccagtgtgatagagttttggataaaggtgtttttagaccaattaggaatagtgaattagaattagggggtgaaggagaagatttatttttagtatttcaaaaagctatttttgagagaagaagacaagaggtaataagaattgattttgatgaaaacatatctagtcacttaattaaattcataaataaaaaacttaactataaggatgtaaatacatataaacttccaatacccattaatctttcgagtatagagtcaatttttttaaaagattttaaaaaattattttttccaaaatttaaggtacgatttcctgaaagaattaaagattttaaaaatgattattttaaagctatagcaaataaagatattgttattcatcacccttttgaatcttttgaagtagtgactcagtttattgatcaagctgcagatgatccaaaagtcttatcaataaaacatactttataccgaactactgatgactcaccaatagaagcaagtttagttagagcagcacaaaaaggaaaattagtaactgtcattatagagttgcaagcacgttttgatgaagagcgtaacttaaaatgggcaaaagaattagaattagctggagcgcaagttgtttttggcaatattgatatgaaaactcatgcaaaaattacacttgtaacaaggaagcaaatgaattctgttgtaaattacgccacattatggaacaggtaat

SEQ ID NO: 251431 - DNA, 1233 bp, Unknown
  Bacterial polypeptide expressing nucleotide sequence isolated from the Sargasso Sea
catgagcaccgacaagcagtatgaagagaaggagctgagttggctctcattcaatgaacgggtgttgcaagaggcaatggacaagacggtcccgctcatcgagcgggtccgcttcctcgggatcttctcctccaaccaggacgagttctttaaagtgcgggtatcggacgtcaagcgccgcatcctgatcaacgaagtgcacggcggcgacgacgaggccaaggtgctgctgcgcgccatccagcagaaggtaatggcgctcggcgaggcgttcgacaacacctacaaggagctgttgatagcgctcgcccgccacaacatcttcctggtcaacgagtaccagctctccgagtccatccagcagtggctgcgggtcttcttcaaggagaaggtgctgcgccacatcatcccgatcctgctcaacaaagaggtcaacccggtcaagtttctgaaagacgagtacacctatctggccatcgagatgaagaagaacggccaggtgatccagtacgcgctggtggaggtaccgaccgacgatctgccccgcttcttccagctgccgccggagggcacccgccgcaagaagcagatcatcatcctcgacaacgtcatccgcttctgtctcgacgagatcttcaagggcttcttcgactacgacgagatagccgcctacgcggtcaagctgacccgggatgccgagtatgatctctccgaccagctggatctgagcctggtcgacaagatgagtgatggcttgaagcagcgcctcaccgccatgccggtgcgcttcgtctacgagcgggagatgccggcagccatgatcagcttcctgaagctcaagctgcagatcagctcctacgacgccatcatgccgggcggccgttatcacaacttcaaggatttcatcggcttccccaacgtgggccgggattatctggaaaaccccaagctgccggcgctggattgccgcgattttgacggcttcgtcaacgccttcgacgccatcaccaagcaggacatactgctctactacccgtaccacaagttccaccacttcaccgagctggtgcgccaggcggcgttcgatccggcggtcagcgccattcgcatcaacatctaccgggtggccaagaagtcacgcatcatccactccctcatcgacgccgccaacaacggcaagaaggtgaccgtggtggtggagctgcgcgcccgcttcgacgaggcggccaacac

SEQ ID NO: 251432 - DNA, 2131 bp, Unknown
  Bacterial polypeptide expressing nucleotide sequence isolated from the Sargasso Sea
atgataagaaaaaatacaaattcagacaataagttcttaaacagagaattatcatggcttctttttaaccaaagagttttagatgaggctaatgatactaaagtgccgttaatcgaaagagttaattttctctcaatttctgcaagtaatctggacgaattttatatggtaagaataccaagtcttttggatgaaatagaaaataatccaaacaaaataagccatgacggcatgactggacatcagcaattaaaagcagcacaaaatgcatcagcaaaaatatttaagaatcaggatgtttcttttagaaagcttgttagagaattaaatgcagaaaaaataattcatattacgcctaataaattaaatataagattgaaaaaaaatctaaaaaaacttttcaatgaagaaatactgcctatattaacgccaatttcaattgacccagtgcatccatttccatttattccaaatgaaggactgtgtatttcattgagtttagtggcaggaggttcaaataaaccgtttaattcggtaatcattgttccgcgagcattaaacagacttgtgtttattcaagagggtaaaaaagaatactatttatttgttgaagatattattagatatttttttaaagatctattcccaaattctaaattgttggatagtgcaatattcagagttataagagacagtgatatcgattacgaatatgaggatgatgaagatgttattaaatattttgaaaaagctttaacaaaaagaaaaagaggggaaatagtaaggctagaaattttaaaaaacatatcatctaaaaagaaaaactttttaaaaaaaaatttgaatcttaaagatgcgcaagtcattgctctatcaaagcatgttggtttacaagatttatcgcagattcataatttaaatagaccaaaattaaaatttaaaaaattcatatcaagacctgttgaaaggttaaagcaatttgataataattgttttgctgccatcagatcaaaagattttgttgtccatcatccatatgaaacttttgatgtcgttgttgattatttaaatcaggctgctatagatccaaaagtagtagcaattaaacaaacgatttacagaaccactgctgatagtcctattataaaagcccttacaaaagcagcagataacggcaagagtgttacagctgttgttgagatcaaagcaagatttgatgaggaatctaatttagctcttgccaatcaaatggagaaatcaggagttcaaattgtatatggtttcgctcaattgaagacgcacgcaaaggcaagtctaattatcagaagagaagcaggcaaattaaaaagctatgtgcatgttggcacaggaaactatcatccaaaaaacgctaaaacttatgaagacctgtcattatttacggcagatgaaaaaatctgcaaagatattgaaagaatctttaattacatgactgggtatgcttctccaatgaaattaaatgatatagtgctctctccacccgcaatgcgaaatcaaattaatgcaatgattgataatgaaattaaaaatgcaaagaaaagtaaaccatctggtatctggcttaaaatgaactctttggttgaccctcaaatgatctccaagctttatgaggcttctgcagcgggagtaaaaattgaattattcattagaggaatttgctgcttaagaccaggagttaaaaaactttctgaaaatattgttgttaaaagtatcattggccgatatttagagcatgctagaatcttctgttttgcaaacgaatctaatataccatcaaaaaaaaacaccgttttaattggatcagctgatcttatgcctagaaatctggatagaagagttgaaatattaacccccataaaaaactccactgtccatgagcaaatactgaatcaaataatggttgccaatttcctagataatgagcaaacgtggataatgaacgatgatggcacatacaaaagagttaaacaaaaaggtaagacgtttaatgcacataaatacttcatgtcaaatccaagtttgtcaggtagaggaaaattaaaaggaaatagaaagcctaagaaactactctctctgatgcattatgaataat

SEQ ID NO: 251433 - DNA, 2140 bp, Unknown
  Bacterial polypeptide expressing nucleotide sequence isolated from the Sargasso Sea
catgagctccgctgttctgagcccggaccgctacatcaaccgggaactgagctggatcgccttcaaccagagagtcctcgcccaggcgctggatcagcgcacccccctgctggaccaggccaagttcagcgccatcttcagcaacaaccttgatgagttcttcatggtgcgcgtggcgtccctgaagtctcaggtggaagctggcatcaccacccccagcgaagacggaaagacgccgctcgaacagctgctgaccattcgcgaacggctgatacccctgctgcagcaacagcaggaccactaccgcaaacaactgcgcaaacaactgcttgaccacaacgtgcagctgctggattacagccagttgaacaagcaacaacagcaatgggtcagcgacaccttccgccattcggtgtttccggtgctgactccgctggccgttgacccggcacatcccttccccttcgtcagcaacctcagcctcaacgttgccgctgtcattcacgacccggaatcaggccaacgtcaattcgcacgggtgaaggttccccagaagaacctcccccgcttcgtctccattcccaccgagctgagtgagagcgatcccaaacccatccacaccgccgtaccgctggaacaggtgatcgccttcaacctcgatctcctctttccggggatgagcgtgcaggggcattacttcttccgcgtgacgcgcgatgccgacctggaactgcgggatctcgaagccgatgacctgatgcttgcccttgagcagggtctgcgcaaacggcggatgggaggcgaagtggtgcgactcgaagtgcccaacgacatgcccgaggacgtcgttgaaatgttgatgaatggcctcgccgttgaggaagaagacctctacaggattgatggacccctgggtctggatgatctcttcggtttgatggccctgcctcttccgaaactgaaggacaaacagcacagcggacagactccagcggtgctggccagaacccaacagcatctgattgacgaaggtgccatcaaacccgaggaattcgaaaacatcttctcggtgatgcgtcagcaagacatcctcttgcatcacccctatgacctgttctccaccacggtggaggaattcatcaaccaggccgctgatgatccccaggtgatggggatcaagatgaccctgtatcgaacctcgaaggattcaccgatcatcgcggcactcatccgtgccgctgaaaatggcaagcaggtgatggccctggtggaactcaaagccagatttgatgaagacaacaacatccagtgggcccgacaactggaacgctccggcgtccatgtggtgtatggcgttctgggcttgaaaacccataccaagatcgttctggtggtccgcaaagagcaagaaaagctgcgcagttacgttcatatcgggaccgggaattacaactcaaagacttcgaagctctacaccgatctcgggcttctctccacgcggccggagctgggccaagacctggtggaactattcaactacctaaccggattctcaaagcagcagagtttccgccgactgctggtggctccggtgaccctgcgcaaagggatggaatccctgatccggcgcgaaatcgaacatgccagggaaggtcgggacggtcacatcagagccaagatgaattccttggtggatccggacatcatcgcgttgttgtacgaagccgcagcagcgaatgtgcgggttgaactgatcatccggggcatgtgcagcctctacccaggccgagaaggactgagtgaaagcatcagcgttgtgagcatcatcggccagttcctcgaacactcgcgcattttctggttcggaaacggtggctcacctgaggtgtatatcggaagcgcagactggatgagtcgcaacctggatcgccgggtggaagctgtgacacccgtggaagatcccaaccttcgcggccgactggagcggttgctggagctttacctgaaggacaaccggggcgcctgggacatgcaaagcgatggcagctttatccaacggcaaccagaggacggagaggacgttcgcaactctcaagttcaactgatcaagcaatggagccaaggcgtgccgcaatcgtga

SEQ ID NO: 251434 - DNA, 2161 bp, Unknown
  Bacterial polypeptide expressing nucleotide sequence isolated from the Sargasso Sea
atgactccattaaaaaaacaacagaaacaagagttaaaatctaaatatatcaacagagaattatcttggcttaaatttaatgatagggtgttacttgaagctcaaaatatagataatccactatatgaaagagtaaaatttctgtccatagctggatctaatttagatgagttttttatggttcgtgttgctggtttatatagccagataaaacaagaggtagagtcgttaagttcggatggattaaatccagaagaacaaatgagtgaagttgttcaagaaactaaaaatcttcttgttaaacagaacttaatttacaaaaatctaatttcacaactaaagaaaaattatattactttagtgaaaccacaagatcttagcaaaaacgaaaaaatcaaattaaaaaatattttttatgaggaaatatatcctttactgacaccttcagctattgatcctgcacatccatttccgttcatagtaaatcaaggcagagcagtggttatgaaacttaaaaaaaaaaataaaaaaagattattaaattcaatcatcgtaattcccaaagctttatcaagatttatagaaatagatggaggaaaaaattacaaaaaatatgttattcttgatgatataattagttttttttcctctgaaatatttccagatcacaatctagagagtaaaatgatatttagggttattagagatagtgacgtcgaaatacaagaggaagctgaagatctggtaagatcatttgaattagcactcaagagaagaagaattggagatatagttcgtttagaagtaatcaaaaacagcaataaagatttaataaaatttattactaataaactagaagtaaacccagattatatatacgaaacagaaggacttgtaggtattgaagatatagatcaaatatgtaagttaaaaaactctaaactcagatttaaaaattttaatcctcgagaagtagaaagattaaaagaatttaataacaatttttttgatactataaaacaaaaagatttagttgttcatcacccctttgaaacatttgatgccgtaattgaatttttaaatcaagccgcttatgataaaaaagttattgcaataaaacaaaccctttatagaacaactttagactcacccatagttaaagcgcttatctcagctgcagaaaatggaaaaacggtcacagctcttattgaaattaaagcgagatttgatgaagaggccaatattcaattagctagaagtttagaaaaagctggggttcaaattgtttacggttttgcaaagtataagacacacgctaagtcttctttagtgcttagacgagaactaggtaaaatacaaacctatgttcatttaggtactggaaattatcaccctgtaaatgcaaaaatttacacagacttatctttattcagctccaataaaaaaattgctggtgatgtagaaaaattttttaattacgttacaggttattcaaaacctagaaatttaaataaaatatcaatttcaccaattaatctaagaattactcttaacaaatgtatagatatagaaatttcaaacgctaaaaaaggaaaaaaagctgaaatatgggcaaaaatgaactctctggttgatccaatcatcattgataaattttatgaggcttcaaacgcaggtgttaaaatttatctttttgtaaggggagtctgctgtttgagaccgggtgtaaaagataaatctgaaaatatagtggtcaaaagtatgataggaagatttcttgaacactcaagaatatattgttttgcaaatggaaaagagatgcctaacagaaatgcaaaagtttttatttcttcagctgatttaatgcctagaaatttgaatagaagagttgaacttctagtaccaattgaaaattcaacagttcatgaacaaatattagatcaaataatgttagcaaattatttagacaacaagcaaagttggcaattagatccaactggaaattataaaaaaattaaatatagtaaggatgattctttttcagcccatgaatattttatgaataatccaagtttgtcaggtagaggtaaagcaaaattaaaaattcgtccaaaaaaacttaatttgagattaattaaaaatgacactcaaagttcttaaa

SEQ ID NO: 251435 - DNA, 2152 bp, Unknown
  Bacterial polypeptide expressing nucleotide sequence isolated from the Sargasso Sea
atgactgcattaaaaaaacaagataaagaaacactaaaatctaaatacataaatagagagctgtcttggctaaaattcaacgacagagttcttcttgaggcccaaaattttgaaaatcctctttatgaaagaattaaatttttatctatagctggatcaaatttagatgaatttttcatggttcgtgttgcaggtttatatagtcaaatcaaacaagatgtagattcacttagttctgatggtcttactcctgatgaacaaatgagtgaagttattttggaaacaaataatcttcttaataaacaaaataaaatatatagagatttaattcttcaattaaaaaaagcaaatataagtatagttaaacctgaaaatttaagtaaaactgaacaaaaaagattatttaaaatttttaatgaagaaatttaccctctgctaaccccatcagcaatagacccagctcatccctttccatttattgcaaatcaaggaagagcattagttatgagattaaataagaaaaataaaaaaaggactttaaatgcaataatagtaattccaaaagctttatcaagatttattgaaatagatggaaataaaagttttaaaaaatttttaattatagatgatgttataagtttttttgcctctgaaatatttcctgatcatgatttagataaaaaaatgttatttagagttataagagatagtgatgtagaaattcaagaggaggccgaagatttagtaagatcttttgaattggctttaaaaagaagaagaacaggtgacatagtacgtttagaaattttaaaaaatagtaataatgacttaattaagtttataaccaataagttaaacgtaaaatctgaatacatctatgaaattgaaggcattgttggaattcaagatatagaccaagtttgtaaaattaaaaattctaaattaagatttaaaaattttaatcccagggaggttgagagattaaaggagtttaataataatttttttgatactataaaaaaaaaagatttaatagttcatcacccttttgaaacatttgatgctgtcgttgagtttttaaatcaagctgcatatgataaaaaagttatagcaattaaacaaactctatacagaacaacgctagattctccaattgttaaagccttaataacagcagctgaaaatggaaagacagtaaccgctttaatagagatcaaagcaagatttgatgaagaagcaaacattcaactttcaagaagtttagaaaatgcaggaattcaaatagtttatggttttgcaaaatataaaacacatgcaaaatcatctttaatattaagaaaagagcagggaaaaattcaaacttatatacatctgggaactggtaattatcacccagttaatgcaaaaatttatactgacttatctttatttagctctgataaaaaaatagcaactgatgtggaaaaattttttaattatgtaactggttattcaaaaccacgaaatcttagtaaaatatctatatcaccaattaatcttagggaaaccttgaacaaatgtattgctaacgagataacaaatgtcaaaaaaggtaaaaaaggtgaaatatgggccaaaatgaattccttggtagatccagcgataattgataaattttacgaagcttcaaatgctggagtaaagatatttttatttgtaagaggtgtttgttgtttaagacctggagttaaagataaatctgaaaatataatagttaaaagcatgattggaagatttttggaacactcaagaatttattgttttgcaaatggaaaaacaatgcctagtagagatgcaaaagtttttatttcatcagcagatttaatgccaagaaatttaaatcgaagagtagaacttctagttccaattgaaaaccaaacagtccacgaacaagttcttgatcaaattatgttagctaattatttagataaaaaacaaagttgggaacttgatgctagtggaaattataaaaaaattaaatatagtgaaaatgattctttttcagcccatgattattttatgaataatcctagtttatctggaagaggtaaagctaaattaaaaatgaaaccgaaaaaattaaacttaagacttattaaaagtggaaattaaa

SEQ ID NO: 251436 - DNA, 1642 bp, Unknown
  Bacterial polypeptide expressing nucleotide sequence isolated from the Sargasso Sea
taaaggccaagcaattttactaagaatgactagaataaaaaaaaaaagagaactaaacgcaattatagttataccaagagcacttccaaaatttatatctctaaaaaattctgaaacaataaatgaatttgtcacaattgatgacgtaatttgtaaatttgcaaatgaaatatttccagaccataatatcgaggcaagtttgcagtttaaaataattagagacagcgaaattgaaatagatgatgaagctgctgatcttgtgagatattttgaaaaagcaattaagaaaagaagaaggggaaacgtagttaaacttgaagtactcactaattcaaataaaaaccttttaaattttatttcaaaaaaatttaaaatggacgaagatcatatttatgaggttgaaggattggttggaatacaagatatagatgaaatttgtaaaaagaaagatccaaagctgagatttaaaaagtttaatcctagagaagttgaaagattgaaggaatttgatgataaatttttttcagctataagaagtaaagattttgttgtacaccacccttttgaaacttttgatgtagtaattcaatttttagaagctgcagcaaaagatcccaaagttatcggtatcaaacaaactttgtatcgaaccacacctgactctcctatcgtaaaagcactaagtagagcagcagaaaacggaaaagttgttacagccgtaatagaaataaaagctcgatttgatgaggaagctaatattgaattatctaggaaactagagaaagctggcgttcaaattgtttacggattcgcaaaatacaaaacgcatgcaaaagcaagtttagttttaagaaaagaaggagcaaaaacgcgaagctatgttcacttaggcacaggaaactatcatccaattaacgcaaaaatttatactgacttatcactgtttagctctaatcaagacttggccaaagatgttgaaaaatttttcaattatgtaactggttatgcaaaacccaaaaaattgaataaaatttttatgtctccattaaatagtaggaatttttttgaagaaaaaattgaaaatgaaattgtaaatgcaagtaaaggaaaacctgcagaaatatgggcaaaaatgaattctcttgtagaccctggaattattaagaaattttatgaagcttcaaacgcaggagtaaaaataaacttatcagtacgaggcgtatgctgcttaagacctggagttaaaggtcaatctgaaaatataaaagtaaaaagccttattggcagatttttagaacactcaagaatttattgttttgcaaatggtaattctatgccttctcgagagaatcaggtatatatttcatctgcagatttaatgcctagaaatttagatagaagaattgaaattataattccgatagaaaacaatactgtgcatgagcaaattttagatcaaattatgttagccaactttaaagataaatcagaaacatggtatttagatagcttaggaaactataataaagaacaagaaaaaggcttttccgcacattcctatttcatgaagaacccaagtttatcaggtcgtggtaagtcaattttaagagctaaacctcaaaatttaagattggtaaaatga

SEQ ID NO: 251437 - DNA, 2158 bp, Unknown
  Bacterial polypeptide expressing nucleotide sequence isolated from the Sargasso Sea
atgactgctttaaaaaaacaacaaaaagaagaactcaagaacaaatatattaatagggaactttcctggttaaaattcaatgatagagttctttttgaagcacaaaatattgaaaatcccttgtatgaaagagtaaaatttttatcaattgccggttcaaatcttgatgaattttttatggttcgagtagcaggtctatatagtcaaataaaacaagaagttgattctttaagctcagatggtctaacacctgatgaacaaatggaagaggtaatttccgaaactaaaaaactattaatcaaacaaaataagatttatattcaacttctcacagaattgaaaaaagacaatataagtttagttaagccagttaatttaaatactaaggataaaaaaaaacttctagaaatattcaaagaagagatttatcctttattaacaccatctgctattgatcctgcgcatccatttccatttataatcaaccaaggaagagcgcttgtaatgaggttaagaaaaaaaaataaaaaaagaattttaaactcgattatagtagtaccaaaagcattatctagatttattgaaatagagtcttcaaaaaatcataaaaaatttgttgttctagatgatgtaataagtttttttgctaaagaaatttttccagatcatgatttagaaaaaaaaatgattttcagggtaataagagatagtgatgttgaaattcaagaggaagcagaagatttagttagatcttttgagttagccttaaaaagacgtagaacgggcgatattgttcgtttagaggtccttgaaaatagcgatcctgaattgataaaatttataacaaataaattagatgtaaatcctgattatatttataatgtatttggccttgttggaattcaagatatagatcaaatatgtaaagtaaaaaatccaaaattaagatttaaaaattttatacctagagatgttgaaagattaaaagaatataatgataatttttttgaaactatcaaaaggaaagatttagttgttcatcatccttttgaaacatttgactcagtaattgaatttttgaatcaagcagcaaatgataaaaaagtaatagctataaaacaaactttgtatagaacaaccttagactcaccaattgttaaagctttaataacagctgcagaaaatggaaaagcagttactgctttaatcgaaattaaagcaagatttgacgaggaagcaaatattcaactatcgagaagtttagaaaaggtaggtgttcaaattgtttatggttttgcaaaatacaaaactcatgcaaaatcatcattagttttaagaagagaacaaggtaaaatacaaacttattttcacttaggaactggtaattatcatcctgtaaatgctaaaatctatactgatttgtctttattcagctgtgataggaaaatggcatcagatgttgaaaaattttttaattatgtaacaggatacgcaaaaccaaaaaatttaaataaaatttctatttcgccaataaatatgagacaaaccttaaataaaaacattgatgctgaaattgaaaattctaaaaatggaaaatttgcagctatttgggcaaaaatgaattcattagtagatccagaaattattgataaattttatgaagcttcgaatgctggtgttaaaattcatttatttgtaaggggtgtttgttgtttgcggccaggtattaaaaatagatctgaaaatatagttgtaaaaagtattataggaagatttttagagcattctagaatttattgttttagtaacggtactaaaaaaatgcctaatagaaatgcaaaagtatatatttcctcagctgatctaatgccaagaaatttaaatagaagagtagagcttctagtgccaattgaaaatgaaactgttcatgagcagattttagatcaaataatgttagcaaattatcttgatactaatcagagctgggagctcaatgctgatggtaattataaaaaaattaagtatagtaagaacgattccttttcagctcatgaatactttatgaataatccgagcttatctggaagaggtaaagcaaaattaactatgcaacctaaaaaattgcatttaaaactaattaaaagtggaagtaattaat

SEQ ID NO: 251438 - DNA, 1763 bp, Unknown
  Bacterial polypeptide expressing nucleotide sequence isolated from the Sargasso Sea
catgagctccgccgttctgagcccggatcgctacatcaaccgggaactgagctggatcgccttcaacgaaagagtcctcgcccaggctctggatcagcgcacaccactgctggatcaggccaaattcagcgccatcttcagcaacaacctcgatgagttcttcatggtgcgcgtggcgtccctgaagtcccaggtggaagccggcatcaccacccccagcgaggacggcaagacgccgcttgaacagctgctcaccatccgagaacggctcatcccgctcctgcaacaacagcaggaccacttccgcaaacacctgcgcaaacaactgctcgaccacgacgttgaactgctggattacgaccagttgaacaagcaacaaaagcagtgggtgaatgacaccttccgccattcggtgttcccggtgctgacgccactggccgtcgacccggcacaccccttccccttcgtcagcaacctcagtctcaacgttgccgcggtgatccacgatccggaatcgggacaacgtcagttcgcgcgggtgaaggttccccagaagaatctgtcccgcttcgtctccattcccaccgagctgagtgagagcgatcccaggcccatccacaccgccgtgccgttggagcaggtcatcgccttcaacctggatctgctcttcccggggatgagcgtgcagggtcactacttcttccgcgtgacccgtgacgccgacctggagctgcgcgatctcgaagccgacgacctgatgcttgccctggagcagggtctgcgcaaacgacgaatgggtggcgaagtggtgcgactcgaggtgcccaacgacatgccggaggacgtcgttgacatgttgatgagtggcctcgccgttgaagaggaagacctctacagagttgatggccccttgggtctggatgatctcttcgggctgatggcgttaccgctgccgaacctgaaggacaaacaacacagtggacagaccccagcggtgctggccagaacgcaacagcatctgattgatgaaggcgcgatcaaacccgaggaattcgagaacatcttctcggtgatgcggcagcaggacatccttttgcatcacccctatgacctgttctccaccaccgtggaggaattcatcaaccaggccgctgatgaccccctggtgatggggatcaagatgacgctctaccgcacatccaaggattcacccatcattgcggcactcatccgtgctgctgaaaatggcaagcaggtgatggcccttgtggaactcaaggccagatttgatgaagacaacaacatccaatgggcccgacacctggaacgtgccggcgtccatgtggtgtatggggttctgggcttgaaaacccacaccaagatcgttttggtggtccgcaaagagcaggagaaactgcgcagttacgtccacattggaaccggaaactacaactccaaaacctcgaagctctacaccgatctcggtcttctctccacgcgcccggaactgggccaggatctggtggagctgttcaactacctgaccggattctcaaagcagcagagtttccgacgactgctggtggctcccgtgaccctgcgcaaaggcatggagtctctgatccggcgcgaaatcgagcatgcccgggaaggtcgggacggacacatcagggcaaagatgaactccctggtggatccggacatcattgctttgctttatgaagccgcggctgcgaatgtgcgtatcgagctgatcatccgcg

SEQ ID NO: 251439 - DNA, 2101 bp, Unknown
  Bacterial polypeptide expressing nucleotide sequence isolated from the Sargasso Sea
atgttaaagaaaaatatctcttataactatgtaaacagagaattatcttggctaaaattcaatgaaagagtcttaagccaagcaactgatagtaaaattccactattagaaagagttaggtttttatcaatagcattctctaatttagatgaattttttatggttagagtggcaggattaaatgttcaaaaattttcacgaattaaaagttttgatggattaacaccacaacaacaactcaaactcatagataaagaaacatcgaagatgatttcaaatataaaatcaatatggatagatttactaagagagctctcagaaaataagattcatatagatgtagaaaaaacgcttaaaataaaagataaaacatttattaaaaattatttagaagaaaataattggggggttttaacgccgattattattgatccatctcacccatttccttttataccaaacaaagaaacaactttggtatgtcgtttaataaataataaaaaaactttttatggaatactgagagtgccagaaggattagaaaaatttattaaattaccaagtaaaaaaacacgttttgtatctatggagacagccttacttatttctttaaaaaaaattttccagtgtgatagagttttagataaaggtgtttttagaccaattaggaatagtgaattagagttagggggtgaaggagaggatttatttttagtatttcagaaagcaatttttgagagaagaaggcaagaggtaataagaattgattttgatgaaaatatatctagtcacttaattaaattcataaataaaaaacttaactataaggatgtaaatacatataaacttccaatacccattaatctttctagtatagagtcaatttttttaaaagattttaagaaattattttttccaaaatttaaggtacgatttcctgaaagaattaaagattttaaaagtgattattttaaagctataacaaataaagatattgttattcatcacccttttgaatcttttgaagtagtaactcagtttattgatcaagctgcagatgatccaaaagttttatcaataaaacatactttatatcgaactactgatgactcaccgatagaaactagtttagttcgagcagcacaaaaagggaaattggtaactgtcattatagagttgcaagcacgttttgatgaagagcgtaacttaaaatgggcaaaagaattagaattagctggggcgcaagtaatttttggtaatatcaatatgaaaactcatgcaaaaattacacttgtaacaaggaagcaaatgaattctgttataaattacgcacactatgggacaggtaattatcacccgagaaatgcaaaaatttatatggatttatcttatttcacctgtgataaaacattaacaaatgatgcagcaaaaatgtttaattatttaactagttattcagaaccaacaacaataaaaaaagtagtatattctccaataacagcaagaaacaaattaaatgaactaatcagaaatgaaattacaaatgccggaaaaaataagccatctggaatagtgtgtaaatgtaattctcttgttgataaacaaattattgatgaattttataaagcatctcaaaaaaatgtaaaaattgaattgttaattagaggaatttgctctctaattcctggtaaagaaaatctatcagaaaatatagttgttaaaagtataatcggtcgttttttagaacatacgagaatatattgtttttataatggtcataaatttcctcataaaaaaaatatcttgtttatttcttctgcggatttaatgcaaagaaatctagataggcgggttgaaacatttattcctatcgaaaatgaaactgtgcatgaacaaatattaaatcagatcttaattgccagtatgacagataataccaattcttggcaaatgttaagtaatggcaattatcagagaaaagaaatatcaagcaaagagaaaaagttttcttctcacaatttttttatcaaaaatccaagcttatctggaaggggttcagcaaaactcaaatctagagctaagtctaatttaaaaatttgag

SEQ ID NO: 251440 - DNA, 2119 bp, Unknown
  Bacterial polypeptide expressing nucleotide sequence isolated from the Sargasso Sea
tttgaattgttgtaaatcaagttttgtgaataataatcttgctaaatatatcaatagagaattgtcatggataaaatttaatgagagagttttatatcaagcattggataaaaaaattcctctgctagaaagaataaggtttttatctatttgtttttctaatctagatgaattttttatggtgagagttgctggtctttttgtgcaacaaaaatcacaaaacagaagttttgatggattaaccccagcacagcaactaaggctcatacgtgtagaaacatcaaaaatgattgagaatattaaatctatttggttacagctatccaatgatttaaaaaaaaataacattattattgagtcagaaaaaagtttatcgaatacaaacaaaaaatatatacataattatttatcaagatcagcatttgaaattctaacaccaattataattgacccatctcatccctttccttttattccaaataatgaaactacgcttgtttgcaaaatagagaatagagggaaagaagcatatggaattttgagagttcctgacggattagaaaaatttattcgtttacctggtaaaaaaaataggtttgtttcactcgaaactgcgttgttaatttcattaaaagaaatcttccaatgtaaaattgttattgataaaggaatatttagacctattcgaaatagtgaattagaattgggtgaagagggtgaagatttatatttagtatttcaaaaagcaatcgccgaacgaagaaggcaggaagttataagagttgatttaaatgaaaatatatcctcagacttagaacaatttatcaaagaaaatttaaattttaaaagtgattatacctataagctaccaatacctataaatttacaatcgatagaagagttaatatcaaaagatttcaaaaaatttctttacccaaaatttaaagtgcgttttccagaaagagttagagactgtaattatgattactttaaagcaatatctaaaaaagattttattgttcatcatccttttgagtcttttgaagtagtaacacaatttattgatcaagcagctgatgatccacacgtgatctcaataaaacacaccttgtatagaactacggatgactcaccaattgaaaaaagtttaattaaagctgctaataaaggaaagcttgtaactgtaattattgaacttcaggcaagatttgatgaggaacgaaatctaaaatgggcaagagaattagaattagcaggcgcacaagtggtttttggaagtattgaaaagaaaacacatgcaaaaattactttaattacgcgaaaagaaaaatcattaacagaaaattatatgcattttggaacaggtaattatcaccctaaaaatgcaaccgtttatatggatttatcgtatttcaccaaaaacagtgttttagccagagattccagtaaaatatttaactatgtaacaagctattcaatacctaggggaataaaaaaaattacatactcacctattttggctagagaaaaatttaatgaattaataaataaagaaataacaaacgcttcaaaaaataaaccagcaggattcgttgggaaaatgaattctcttgtcgacaaggaaatgattgacatattctatagagcatcaacgaataatgtgaaaattcaactgatcattcgaggtatatgttcgcttataccaggtttacaaaatatatctgaaaacatttatgtaaaaagtattattggaagatttttagagcatagtcgaatatattgtttttataatggttataaatttccacataaaaaaaataagatattcatttcatcagctgatctaatgcaacgaaatttagatagaagggtggaaacattcgtacctatagaaaacgaaactgtccatgagcaaattcttaatcaaatattaatagcgaacatcttagataatacaaattcttggattcttaatcacgaaggaaattatttaaaaaaagaaatatccaaaaagtcaaaaaaattttcttcacatacttactttattaaaaatccgagtttctcaggcagaggtcaggctaaattgaaatcaaaggccaaaatgattcttttaaaataa

SEQ ID NO: 251441 - DNA, 1950 bp, Unknown
  Bacterial polypeptide expressing nucleotide sequence isolated from the Sargasso Sea
tatgactgcattaaaaaaacaagacaaagaagagcttaaatccaattatataaatagagaattatcatggttaaaatttaacgatagagttcttttagaggcgcaaaatattgaaaatcctctttatgagagagtaaaatttttatctattgcaggctcaaatttagacgaattttttatggttcgagttgctggactatacagtcaaattaaacaagaagtcgactcactaagttcagatggactaacacctgaagaacagatggagatggttatcaatgatacaaaaaatctattaaataaacaaaataccatatttaataatctatcaaatcagctgaagagaaataatattttattaactaagccagaaaaccttaacacaaaggaaaaaaagaaattattagaaatatttaaggaagaaatttatcctctacttacaccatcagcgattgatccttctcatccttttccatttattattaatcaaggtagagctttagttatgaagctgaagaaaaagaaaaaaaagagaattcttaattcaattatcgtaattcctaaagctttatcaagatttattgaaatagatggaggaaaatcatttaagaaatttttagttctagacgatgttattggttactttgcctctgaaatttttccagatcatttattagaaaagaaaatgatatttagagtaataagagatagtgatgtagaaattcaagaagaggctgaggatttagtcagatcatttgaactagcattaaagcgaagaagaactggtgatattgttagattagaaattttagaaaaaagcgacaaagaacttgtaaaatttataacaaataaattagaaattaatccaaattatatttatgaagtagcaggtttagttggaatccaggatatagaccaaatttgtaaaattaaaaattctaaattaaaatttaaaaactttacaccaagagaagtagaaagattaaaagaatacaataataatttttttgagacaattaagaaaaaagacctaatagttcatcatccatttgagacttttgatgctgtaattgaatttttaaatcaagctgctatggataaaaaagtaattgctattaaacaaacattgtacagaactactttagattcaccaattgttaaagcattaattagcgcttccgaaaatggcaaaacagttactgctttaattgaaatcaaagctagatttgatgaagaagcaaatatacagctggcaagaagtcttgaaaaagctggagttcaaattgtttatggttttgcaaaatacaaaacacatgctaaatcatcactaatacatcgacgtgagggtggtaaaattcaaacatatttccatttaggtactggcaattatcatcctgtaaatgcaaaaatatacacagacttatctctatttagctctgataaaaaaatggctgcagatgtagaaaaattctacaattacgtgactggatattctaaaccaagaaatttaaataaaatttccatttcacctgtaaatttaagaaaaactttaaatcagaatatagataaggaaataagtaatgcaaaaaaagggaaacacgctgagatttgggctaaaatgaattcattagttgattcacaaataattgataaattttatgaggcttctagtgtcggtgtaaaagtctctttatttgtaagaggtgtatgttgtttaagacctggtattaaaaataaatcggaaaatattattgtaaaaagtatcattggaagatttcttgaacactcaagaatatattgttttgcaaatggaaaattaatgcctaacagaaatgcaaaagtttatatttcatctgcagatttgatgccaagaaatctagatagaagagtcgaacttctagtgccaattgaaaatcaaactgtgcatgaacaggttttagaccaaataat

SEQ ID NO: 251442 - DNA, 739 bp, Unknown
  Bacterial polypeptide expressing nucleotide sequence isolated from the Sargasso Sea
ctgaaatctaaatatataaatagagagctttcttggttaaaattcaacgacagagtacttttagaggcgcaaaatatcgaaaatcctctttatgaaagagtaaagtttttatcaattgctgggtctaatctagatgaattttttatggtccgtgttgcaggattatatagccaaataaaacaagaagttgactctttaagttctgatggtttgacacctgaagaacaaatggatgaggtagtacttgaaactaagaatctattaagaaaacagaacaaaatttttattcaactgattatggaattaaaaaaaaataatatcaatttagttaagccagtaaatttaaatactaaggataaaaaaaaacttctagaaatatttaaagaagagatttaccctttattaacaccatcagcaattgatcctgcacacccatttccatttataatcaatcaaggaagagcaattgtaatgaagttaagaaaaaaaaataaaaaaaggattttaaactcaataattgtaataccaaaagcattatctagatttattgaaatagagtcttctaaaaatcataagaagtttattattctagatgacgtaataagtttttttgctaatgaaatttttccagatcatgatttagaaaagaaaatgatttttagagtaataagagacagcgatgtagagattcaagaggaagcagaagatttagttagatcttttgaattggctttaaaaa

SEQ ID NO: 251443 - DNA, 1405 bp, Unknown
  Bacterial polypeptide expressing nucleotide sequence isolated from the Sargasso Sea
tttgaattggctttaaaaagacgtagaacgggtgatattgttcgtttagaggttcttgaaaatagtgataatgaattggtagattttataactaataaattagacataaatcctgactatattaatgatgttgctggcctgtggaaaattcaagatatagatcaaatatgtaaagtaaaaaatccaaaattaagatttaaacattttacacctagagaagttgaaagattaaaagaatataatgataatttttttgaaactattaaaaagaaagatttagttgttcatcatccttttgaaacatttgactcagtaattgaatttttaaaccaagcagcaaatgataaaaaagttatagctataaaacaaactctatatagaacaactctagactcaccaattgttaaagctttaataacagcagcagaaaacggaaaaacagttaccgctttaattgaaattaaagctagatttgatgaggaagctaatattcaactatcaagaagtttagaaaaagtaggtgtccaaattgtttatggttttgctaaatataaaacccatgcaaaatcatcattagttttaagaagagaacaaggaaaaatacaaacttattttcatttaggaaccggcaattatcatcctgtaaatgctaaaatttatactgatttatctttatttagttgtgataagaaaatggcgtcagatgttgaaaagttttttaattatgtaacaggatacgcaaaaccaaaaaatcttaataaaatttctatttcgccagtaaatatgaggcaaactttaaatgaaaatattgatgctgaaattagaaattctaaaaatggaaaatttgcagttatttgggcaaaaatgaactctttagtagatccagaaattattgataaattttatgaagcttcaaatgctggtgtaaaaattcatttatttgtgagaggtgtttgttgtttaagaccaggagttaaagatagatcagaaaacatagttgtaaaaagtatcataggaagatttttagagcattctagaatttattgttttagtaacggcactaaaaacatgcctaatagaaatgcaaaagtatatatttcttcagctgatttaatgccgagaaatttaaatagaagagtagaacttctagttccaattgaaaatgaaactgttcatgaacagattttagatcaaataatgttagcaaattatcttgatactaatcagagctgggagctcaatgctgatggtaattataaaaaaattaaatatagtaagaacgattctttttcagctcatgaatattttatgaataatccgagcttatctggaagaggtaaggctaaattaaaaatgcagcctaaacaactgcacttaagattgattaaaagtggaagtaattaaa

SEQ ID NO: 251444 - DNA, 1104 bp, Unknown
  Bacterial polypeptide expressing nucleotide sequence isolated from the Sargasso Sea
catgtgcgcagcagccttagccccggagcactacatcaaccgggagctgagctggatcgccttcaacgaaagggtgctggcccaggccctggatccacgcacacctctgctcgatcaagccaagttcagcgccatcttcagcaacaacctcgacgaattcttcatggttcgcgtggcgtcactgaagtctcaggtagaggcgggcgtcagcaagccaagtgaggatggcaaatcgcccttggagcagctgctggcgatccgagaacgactgattcccctcctgcgagagcaacaggtgcattaccgcgagcacctgaagccgaagctgctggaacacaaggttgagctgctcgattacaaacaactgaatgacgaccaacgccagtgggttgacgacaccttccagacctcggtgtttccggtgctcacacccctggctgtggacccggcccatccgttccccttcgtcagcaacctgagcctcaacgttgcggccatggttgctgatccggaaacaggacaacggcaatttgcccgggtcaaagttccccagaaaaatcttcctcgcttcatcgacatcccctcgcacctgaacggccaggagcacaaacccgttcacaccgccatcgccctcgagcaggtgatcgccttcaacctgaaggagctgttccctggcatgacgattgaggggcactacttcttccgcgtgacgcgggatgcggatctggaactgagggatctggaagccgatgacctgatgctggccctggaacaaggactgcgaaagcgacgcataggcggtgaggtggtgcgcctcgaggtgcccaacgaaatgcctcaggacgtggtggagatgctgatgacaggactcagcgttgaagaggaagacgtctatgtgattgatggccccctgggcctggacgacctgctcagcctgaccgcactaccgcttccgcaactcaagagccaaagccacggaggccagacaccaacggtgcttgcccgcagtcagcaacacctgctggacgagggagcgatcaagccggatgagttcagatcgatcttctcggtgattcgccgtcaggacatccttctgcaccatcc

SEQ ID NO: 251445 - DNA, 1354 bp, Unknown
  Bacterial polypeptide expressing nucleotide sequence isolated from the Sargasso Sea
ttagaaattttaaaaaatagtaataatgacttaattaagtttataacaaataagttaaacgtaaattctgaatatatctatgaaaccgaaggtattgttggaattcaagatatcgatcaagtttgtaaaattaaaaattctaaattaagatttaaaaattttaatcccagggaggttgagagattaaaggaatttaataataatttttttgatactataaaaaaaaaagatttaatagttcatcatccttttgaaacatttgatgctgtaattgagtttttaaatcaagctgcatatgataaaaaagttatagcaattaaacaaactctatacagaacaacgttagactctccaattgttaaagccttaataacagcagccgaaaacggaaaaacagtgactgctttaatagagatcaaagcaagatttgatgaagaagcaaatattcaactttccagaagtttagaaaaggcaggaattcaaatactttatggttttgcaaaatataaaacacatgcaaaatcatctttaatattaagaaaagagcaaggaaaaattcaaacctatatacatctgggaactggcaattatcacccagttaatgcaaaaatttatactgacttatctttatttagctctgacaaaaaaatagcaactgatgtggaaaaattttttaattatgtaactggttattcaaaaccgcgaaaccttaataaaatatccatatcaccaataaatcttagggaaactttaaacaaatgtattgctaatgagatagcaaatgtcaaaaaaggaaaaaacggtgaaatatgggcaaaaatgaattccttagtagacccagtgataattgataaattttatgaagcttcaaatgctggcgtgaagatatttttatttgtaagaggtgtttgttgtttaagacctggagttaaagataaatcagaaaatataatagttaaaagcatgataggaagatttttagaacactcaagaatttattgttttgcaaatggaaaaacaatgcctagtagagatgcaaaagtctttatttcatcagcggacttaatgccaagaaatttaaatcgaagagtagaacttctagttccaattgaaaaccaaacagtccatgagcaagttcttgatcaaattatgctagctaattatttagataaaaaacaaagttgggaactcgatgcgagtggaaattataaaaaaattaaatatattgaaaatgattctttttcagctcacgattatttcatgaataatcctagtttatctggaagaggtaaagctaaattaaaaatgaaaccaaaaaaattaaacttaaaattaattaaaagtggaaattaaa

SEQ ID NO: 251446 - DNA, 2146 bp, Unknown
  Bacterial polypeptide expressing nucleotide sequence isolated from the Sargasso Sea
attgtcatcagcacgtcatcgtaccgtgagagtttccgagcgtcctttcgaatcatcgcccgaatcaccccctactctgccgatgtccgtccgttacccgcttctcaatcgtgaactcggcatcctcggtttcaacgagcgcgtgctggcccaggcagccgatcctcaagtcccgttgctcgagcgtctccgcttcatctgcatcaccagcagcaacctcgacgaattcttcgaagtccggatggcgggcctgcaggagcagatccgcgacaaccccggcgcactgacgcccgacggcatgtcgttacaacatgcttacgacctcgtcgtcgaacgcgcgcagcggctcgtgcatcgacagtacacgatgctgcacgaaaccgtgctgcccgcgctcgaacaggaaggcatctacttccatgcgagcgacacgtggaacgacgagcagctcgaatgggcgcggaattacttcctcgacgagttgctgccggtgctcacgccgatcggcctcgatcccgcccacccgttcccgcgcgtgctgaacaagagcctgaacttcgtcgtcgagctcgaaggccgcgacgcattcggccgccaggccgtgatgggcatcgtgcaggcgccgcgtgcactgccgcgcgtcgtgcgcatgccgcacgcgctgtcgggcttcgagcacggcttcgtgctgttgagctcgttcatgcagcgcttcgtcggcgaactcttcccgcagctgagcgtgaagagctgcaaccagttccgcatcacgcgcaacagcgagctgttcgtcgacgaggacgaaatcacgaacctgcgcgtcgcgctgcagggcgagctgcccgcgcgccacctcggcaatgcagtgcgcctcgaggtatcggccgacacgccgccgcatatcgtgcgccgcctgctcgtggaaagcgaactgagcgagaaggactgctatcgcgtgtccggatcggtgaacctcgtgcggctgatgcagattcccgatctcgtcgaccgtcccgacctgaagttcgcgccgttcaccgcgtcgaccccgtccgcgatcacgaacgcgccgacgatgttcgacgcgatcgacaacggcgacatcctgctgcaccacccgtacgagagcttccagccggtgctcgaactgctgcagcaagccgcgagggatccgagcgtcgtcgcgatcaagcagacgatctaccgcaccggcaccgattcgccgctgatggacgcgctgatggaagccgcgcgcaacggcaaggaagtgaccgtcgtcgtcgagctgctcgcgcgcttcgacgaggaaaccaacatcaactgggcgtcgcagctcgaagcggtcggcgcgcatgtcgtgtacggcgtggtgggccacaagtgccacgcgaagatgatgctgatcgtgcggcgcgtcgtgcaggccggcaaggcgtcgctgcgccgctacgtgcacctcggcaccggcaactaccacccgcgcacggcacgcctctacaccgacttcgggctgatgacggccgaccagaagatctgcgaggacgttcatcacgtgttccagcaactgaccggcatcggcggcgaactcacgctgcacgagctgtggcagtcgccgttcacgctgcatccgcgcatcatcgactcgatccgcgcagagatcgacaatgcacgcgccggcaagcgcgcacgcgtcgtcgcgaagatgaacgcgctgctggagccgacggtgatcgcggcgctgtacgaagcgtcgcaggccggcgtcaaggtcgacctgatcgtgcgcggtgtctgcgcgctgaagcccggcgtgccggggctgtcggaaaacatcacagtgcgctcgatcgtcggccgcttcctcgagcaccaccggatctactatttccacgcgaacggcaccgaggacgtctatctgtcgagcgcagactggatggaccgcaacctgttccgccgcgtcgaagtcgcgttcccgatccgcgatcgcaagctgaagcggcgcgtgatcgcagaaggcctgtcggtgtgcctcggcgacaaccagtcggcgtggcagatgcaaagcgacggccactaccgccggcgccgcgccggcaagacgatccgcaacgcgcaactcgggttgctcgcgaagttctgctcctga

SEQ ID NO: 251447 - DNA, 1383 bp, Unknown
  Bacterial polypeptide expressing nucleotide sequence isolated from the Sargasso Sea
ttgagaatgttttgagacaaagaaagcgcggcactataattaggctaatggttgaaaaaacgatctcaaaagatttagttaattttttaattaatgagttaaagctagagaatgaatcagtggtttattcggatggaattttagcacttgaggatacaaaacaaataattaaatacaagcaaaataaaatgatttataaaaatttttatccaagatttcctgagagaattagagaattcaatggtgattgtcttgctgccatatcacaaaaagatattatcgtccatcatccatatgaaagttttgatgttgttattcagtttataaaacaagctgctgaagatcccaatgttgttgctataaaacaaacattatatagaacaagtgaagactcgcctattataaagtccttgattgaagcagcagaaaaaggaaagtctgtaacagccctaattgaattaaaagcacgttttgatgaagaggcaaatattaggtgggctagagatatggaaaaagcaggtgttcatgttgtctatggatttcttcaattgaaaactcatgctaaagtttctttagttattcgcagagagaataataaattaaaaagttatgtgcattttggaacaggtaattatcatccaataactgcgaaaatatatacagatttatctttttttacagttgatgaatcattatgtagggatgcaactaaattatttaattatttgacaggttatgcggagcctaaaagttgtgaaaagttatcaatttcgcctatttctatgagatctaatataattaatatgatagatgatgaaataaaattagtcagatcaggtaaatctggtgggatatgggccaaattaaattctttagttgatccagaggtaatagataagctttatattgcgtctcaagaaggtgtcaaaattgaactaatagttagaggtatttgttgtttaagacctggaattaaagatttttctgagaatatatctgttaggagtataattggaagatttttagagcattcaagaattatttgttttgggaatggtgagatgctcccttcatctaaggcaaaagtttttattagttcagctgattggatgcagagaaatttagatagaagagttgaagctctagttccaatagaaaacactactgttcatcaacaaattcttaatcaaataatggttgcaaatctcaaagataactgccaatcatggaaattaaatgaatttggagattataaaagaatttattcaaatgaatcagaaaaattttctgctcataactattttatcaataatcctagtctgtcaggtagaggtagtgctgtagatgaaccagatttattacaattaaaacttaaaaactaaa

SEQ ID NO: 251448 - DNA, 1082 bp, Unknown
  Bacterial polypeptide expressing nucleotide sequence isolated from the Sargasso Sea
tatgaccccgttaaaaaaacaacagaaacaagagttaaaatctaagtatatcaacagagaattatcttggcttaaatttaatgatagagtgttacttgaagctcaaaatttagaaaatcctctttatgaaagagtaaaatttctttctattgcaggatctaatttagatgagttttttatggttcgtgttgctggattacatagccagattaaacaagaggttgaatcattaagttcagatggattaaacccagaagaacaaatgagagaagttgttagagaaaccaaaaatcttctttttaaacagaataggatttataaaaatctaatatctcaattaaagaaaaacaatgttattctggttaaaccagaagatcttagtaaaaatgaaaagatcaaattgaaaaatatttttagtgaggaaatatatccattactaacaccctcagctattgatcctgctcacccatttccgttcatagtaaaccaaggcagggcagtagtaatgaaacttaaaaaaaagaataaaaaaagattactaaatgcaattatcgtcattccaaaagctctctctagatttatagagatagatggaggaaaaaatttcaaaaaatatgtaattattgatgatgtaattagttttttttcttctgaaatatttccagatcacaatttagaaagtaaaatgatatttagagttataagagatagtgacgtcgaaatacaagaagaggctgaagatctagtaagatcatttgaattagcactcaaaagaagaagaattggagatatagtccgtctagaggtcatcaaaaaaagtaataaagatttaattaaatttattaccaacaagctagaagtaaattcagaatatatatatgaaacagaaggacttgtgggtattcaagatatagatcaaatatgtaagttaaaaaattctaaacttagatttataaaatttaatcctcgagaagtagatagattaaaagaatttaataataatttttttgataccataaaacaaaaagatttagttgttcatcacccttttgaaacatttgatgctgtaattgaatttttaa

SEQ ID NO: 251449 - DNA, 1216 bp, Unknown
  Bacterial polypeptide expressing nucleotide sequence isolated from the Sargasso Sea
gttgaaatctaaatatataaatagagagctttcttggttaaaattcaacgatagagtacttttagaggcgcaaaatatcgaaaatcctctttatgaaagagtaaagtttttatcaattgctgggtctaatctagatgaattttttatggtccgtgtagctgggttatatagtcaaataaaacaagaagttgactcactaagctctgatggtttgacacctgaagagcaaatggatgaggtagtgcttgaaactaagaatctattaaaaaaacagaacaaaatttttattcaactgattatggaattaaaaaaaaataatatcaatttagttaaaccagttaatttaaatactaaggataaaaaaaaacttttagaaatatttaaagaagagatttaccctttattaacaccatcagcaattgatcctgcacatccatttccatttataatcaatcaaggaagagcaattgtaatgaagttaagaaaaaaaaataaaaaaaggattttaaactcaataatagtaataccaaaagcattatctagatttattgaaattgagtcttcaaaaaatcataagaaatttgtgattctagatgatgtaataagtttttttgctaatgaaatttttccagatcatgatttagaaaagaaaatgatttttagagtaataagagacagcgatgtagagattcaagaggaagcagaagatttggttagatcttttgaattggctttaaaaagacgtagaacgggtgatattgttcgtttagaggttcttgaaaatagtgataacgaattgataagatttataactaataaattagatataaatcctgactatatttatgatgttgctggccttgttggaattcaagatatagatcaaatatgtaaagtaaaaaatccaaaattaagatttaaacattttacacctagagaagttgaaagattaaaagaatataatgataatttttttgaaactattaaaaagaaagatttagttgttcatcatccttttgaaacatttgactcagtaattgaatttttaaaccaagcagcaaatgataaaaaagttatagctataaaacaaactctatatagaacaactctagactcacctattgttaaagctttaataacagctgcagaaaacggaaaaacagttaccgctttaattgaaattaaagctagatttgatgaggaagctaatattcaa

SEQ ID NO: 251450 - DNA, 1231 bp, Unknown
  Bacterial polypeptide expressing nucleotide sequence isolated from the Sargasso Sea
gttccctggaatgaaggttaaagagagctatcaatttcgggtgactcgcaatagtgatctttttatagaagaagaggctggtgatttattggaagctttggagggagagctctcaactaggagttatggtgacgctgttagacttgagatagcaagcaattgtccgggggatttagttatttttatggcttctcagtttgatctgacgatgcaagaagtctatctctgtgaaggcccagtcaacctaatgcgcctggcggcggtttatgatctcgtagagagagaagagctgaagtttcaaagtttagttcctgtgatgcccgctattttcgaagatgaacagacagtgttcgatcaaatcacagagaaagatatcctgttgcattatccttttgagtccttcgatttttatctggcgtttttgaagcaagctacagaggaccctaaagttgtatcgatacgacacacactctatcggaccggctcagatagcactgtcgtagatctgctgattacagctgcgaagaaaggcaaagaagtgttcgtcgtaattgagctgagagcccggtttgacgaagaagccaacattgaagtcgcatcaaaattgcaggaagcaggggtccaggtagtctacggggttgttggttataagacgcatgcgaagatgtgtatggtcgttcgtaaagaagggcgaactttgaggcgttatgtccacctaggtactggaaactatcacgcgggaacgtcccgcttgtatacggactatagttactttaccagtgatcgagatataggcgaggacgtgcataaactatttcaaaggatcgctacgatgagtaagcaagccaagctgaaaaaaattgagcatgcaccgttcactttgcatccgaaagtgctgagcttaattgagcgagaagctagtaatgccaagaaaggcaaaccggcggcaatatacgcgaagatgaatgctctgacagaacctgaggtgatcaaagctctatatagagcctccattgccggggtcaaaatagaactcattgttagaggcatctgttgtttgaagccgggggtaaaaggtgtatcagataatataagggtccgatcgatagtgggccgatttcttgaacacacgagagtgttttgcttcgaaaacgggggtgctcgagaagtgtatctatcgagtgctgactggatggatcgaaaattgtttacaagggtcgaaatattgttt

SEQ ID NO: 251451 - DNA, 1004 bp, Unknown
  Bacterial polypeptide expressing nucleotide sequence isolated from the Sargasso Sea
agcaaatgataaaaaagttatagctattaaacaaaccttatatagaacaactctagactcgccaatagttaaagccttaataacagctgcagaaaatggaaaaacagttaccgctttaattgaaattaaagctagatttgatgaggaagcaaatattcaactatcaagaagtttagaaaaagtaggtgtccaaattgtttatggttttgccaaatataaaactcatgcaaaatcttcattagttttaagaagagaacaaggtaaaatacaaacttattttcatttaggaactggcaattatcatcctgtaaatgctaaaatttatactgatttgtctttattcagttgtaataaaaaaatgtcatcagatgttgagaaattttttaattatgtaacaggatacgcaaaaccaaaaaatttaaataaaatttctatttcgccagtaaatatgaggcaaaccttaaatgaaaatattgatgctgaaattaaaaattctaaaaatggaaaatttgcagctatttgggcaaaaatgaactcattagtagatccagaaattatcgataaattttatgaggcttcgaatgctggtgtaaaaattcatttatttgttaggggtgtttgttgtttaagaccaggagttaaagatagatcagaaaacatagttgtaaaaagtatcataggaagatttttagagcattctagaatttattgttttagcaatggttcaaaaaaaatgcctaatagaaatgcaaaagtatatatttcttcagctgatttaatgccaagaaatttaaatagaagagtagaacttctagtgccaattgaaaatgaaactgttcatgaacagattttagatcaaataatgttagcaaattatcttgatactaatcagagctgggagctcaatgctgatggtaattataaaaaaattaaatatagtaagatcgattccttttcagctcatgaatattttatgaataatccgagcttatctggaagaggta

SEQ ID NO: 251452 - DNA, 709 bp, Unknown
  Bacterial polypeptide expressing nucleotide sequence isolated from the Sargasso Sea
atgactccattaaaaaaacaacagaaacaagagttaaaatctaaatatatcaacagagaattatcttggcttaaatttaatgatagggtgttacttgaagctcaaaatttagaaaatcctctttatgaaagagtaaaatttctttctattgcaggctcaaatttagatgagttttttatggttcgtgttgctggattacatagccagattaaacaagaggttgaatcattaagttcagatggattaaacccagaagaacaaatgagtgaagttgttagagaaaccaaaaatcttctttttaaacagaataggatttataaaaatctaatatctgaattaaagaaaaacaatgttattctggtaaaaccagaagatcttagtaaaaatgaaaaggtcaaattgaaaaatatttttagtgaggaaatatatccattactaacaccctcagctattgatcctgcacatccatttccgttcatagtaaatcaaggcagagcagtggttatgaaacttaaaaaaaaaaataaaaaaagattattaaattcaattatcgtaattccaaaagctctctctagatttatagagatagatggaggaaaaaatttcaaaaaatatgtaattattgacgatgtaattagttttttttcttctgaaatatttccagatcacaatttagaaagcaaaatgatatttagagttataagagata

SEQ ID NO: 251453 - DNA, 2125 bp, Unknown
  Bacterial polypeptide expressing nucleotide sequence isolated from the Sargasso Sea
gttgaaatctaaatatataaatagagagctttcttggttaaaattcaacgatagagtacttctagaagcacaaaatactgaaaatcctctttatgaaagagtaaaatttttatcaattgctgggtctaatctagatgaattttttatggtccgtgttgcaggattatttagtcaaataaaacaagaagttgactcactaagttctgatggtttgacacccgaggaacaaatggatgaggtagttcttgaaaccaagaatctattaaaaaaacagaacaaaatttttatgcaactgattatggaattaaaaaaaaacaatatcagtttagttaaaccagttaatttaaatactaagaataaaaaaaaacttctagaaatatttaaagaagagatttaccctttattaacaccatcagcaattgaccctgcacatccatttccatttataatcaatcaaggaagagcaattgtaatgaagttaagaaaaaaaaataaaaaaaggattctaaactcaataattgttataccaaaagcattatctagatttatcgaaatagagtcttcaaaaaatcataagaagtttgttattatcgatgatgtgatcaatttttttgctaatgaaatttttccagatcatgatttagaaaagaaaatgatttttagagtaataagagatagtgatgtagagattcaagaggaagcagaagatttagttagatcttttgaattggctttaaaaagacgtagaacgggtgatattgttcgtttagaggttcttgaaaatagtgataacgaattgataagatttataactaataaattagatataaatcctgactatatttatgatattgttggccttgttggaattcaagatatagatcaaatatgtaaagtaaaaaatccaaaattaagatttaaacactttacgcctagagaggttgaaagatttaaagaatataatgataatttttttgaaactattaaaaaaaaagatttagttgttcatcatccttttgaaacatttgactcagtaattgaatttttaaaccaagcagcaaatgataaaaaagttatagctataaaacaaactctatatagaacaactctagactcacctattgttaaagctttaataacagccgcagaaaatggaaaaacagtaaccgctttaattgaaattaaagctagatttgatgaggaagctaatattcaactatcaagaagtttagaaaaagtaggtgtccaaattgtttatggttttgctaaatataaaactcatgcaaaatcatcattagttttaagaagagaacagggtaaaatacaaacttattttcatttaggaactggcaattatcatccagtaaatgctaaaatttatactgatttgtctttatttagttgtgataagaaaatggcatcagatgttgaaaagtttttcaattatgtaacaggatacgcaaaaccaaaaaatttaaataaaatttctatttcgccagtaaatatgaggcaaaccttaaatgaaaatattgatgctgaaattaaaaattctaaaaatggaaaatttgcagctatttgggcaaaaatgaactctttagtagatccagaaattattgataaattttatgaagcttcgaatgctggtgtaaaaattcatttatttgtaaggggtgtttgttgtttaagaccaggagtaaaagatagatcagaaaacatatttgtaaaaagtatcataggaagatttttagagcattctagaatttactgctttagtaatggtacaaaaaaaatgcctaatagaaatgcaaaagtatatatttcgtcagctgatttaatgccgagaaatttaaatcgaagggtagaacttctagtcccaattgaaaatgagactgttcatgaacagatcttagatcaaataatgttggcaaattatcttgatactaatcagagctgggaacttgaagctgatggtaattataaaaaaattaaatatagtaagagcgattccttttcagctcatgaatattttatgaataatccgagcttatctggaagaggtaaagctaaactaagaatgcagcctaaacaactgcacttaagattgattaaaagtggaagtaattaa

SEQ ID NO: 251454 - DNA, 2122 bp, Unknown
  Bacterial polypeptide expressing nucleotide sequence isolated from the Sargasso Sea
tatggtctttacagagctaatacatactgtgagcgatacgaattattttccccgcgaattaagctggctgtcttttaatggccgagtgctgcaggaagcggctgacgaacgtaatcctttgatcgagcgtttacgttttttaggtatttattccaacaacatggatgagtttttccgggttagggttgctgacgttaaacgtcgtattctgttgaaaaaataccatgccaacgagcaggaagacgcggaacaactgctgcacgatattcaacatatagtgctgaaactgggtgagcgttttaataaaatttatgacgacttacagcaggaactgcgcaaacacaatattgagctgattgacaactttaagctgactgatgcgcaggctcagtgggtcaaacgattctaccgtactgaagtacaacggcatttatcgcctattattttgtcagctgaagaagttaagctggcgaaacatttacaggacaatgccacctatctaatggtggaaatgacaggatcgaacaaagcggaatacgctatagtgcaggttcctacagatgccatgtcgcgttttgttgaattaccactgcatctgaataaaagtaaaaagagaggccgcttccgtcggcagattattttactcgacgacatcatagtgcactgcttaaaagacttgttcgacggcttttttgaattctgtgaaattcaggcgttttccctgaaattaacccgcgatgccgaatacaacatcagcgatacgctggaccagtcgctcattgacaaaatgtcgaaaggcattaaacagcgactgaaatcagaacctgtgcgtatggtatatgacagccatatgcctgagcatatgttaaaaatgctgaaaaaattacttggctacagctcctatgactctttaatcccagggggtaagtaccggaacttcaaagactttattggttttccgaatataggccatccgtctttagaattccctgtgatgccggtactaaaaagtccggagtttgagcgtcataccaccagttttgaggccattcgcacttcagatattttgttgtattacccctaccatagctttggttattttaccgagtgggtgcgtcaggcctcttttgatcctaaagtcaccgccatcaaaatgaccatgtaccgagtggctaaaaactcacgggtgatccattccttgcttgatgctgtgcgtaacggcaaacaggtcacagtagtcgtcgagctcaaagcccgttttgatgaagaaaacaatatcaactgggcaaggcgcatgactgaagctggtattgaagttatttttggcctgcaaacgttaaaaattcactccaagctatgtttaatcacaaggctggaaaaaggtaaaaccgtgaagtttgcccatataggcactggcaactttaacgaaaaaaccgcccgcgtttatacagacatgagcttattcacctgccacgctgaaatttgtcatgaagtggatcaggtgtttgaatttattcagtacagctacaaacccttccagtttaaccatttggtggtatcccccacctggagccgacctaaactctgcgcgttaatagagcgggaaaccaacttcgctatttcaggccgtaaagccgaaattatattaaaaattaataacctggtagataatcagattgttgatttactctataaagccagtatggccggagtaaaagttcgtattatagtgcgcggcatgtgctctttgatcccgggtgtaaaaggcctgagccacaatattcatgtggtgagtgtactagacagatttcttgagcacgccagggtttatgtatttaacaatggcggtgaaacggatttgtatctctcgtcagcggactggatgacccgcaatctggatcaacgcgtagaagtgggcgtgcccatttacgatgccgctattaaacaacaaattatgaccactctggacatccagtggcatgacaacgtcaaagctcggattatcgataaagatcaaagcaaccactatgtaaaaagaggcaataagcgtagcattcgctcccaacaggaaatctacgattattttgctcagttgcagcaatccactcaggccggaacatga

SEQ ID NO: 251455 - DNA, 1002 bp, Unknown
  Bacterial polypeptide expressing nucleotide sequence isolated from the Sargasso Sea
tcgaatgaccgatttatcaaccgcgagctttcgtggctggaattcaacatgcgcgtgcttgccgaagccaataacaccgcaaatccgctgttggaacgtgtacggttcctatcgatttcatcgacgaatttggatgaatttttcatggttcgcgctgccggattaatggggcaggtcgccgctggtatcagcgagcggagccaagacggactaacgccgaacgaacaattgaatgcgatccggggaaaagtcgctgagctgttgcaaggtcaggacgaatgccttgaacgtcttttgacggaatgtaaaatgtccgacatcgaagttgtcggcggctcggaagtcggcgagcaagacaaggattggctcgcatcctggtttggtaagcaggtattccctgtattgacgccgcttgcggtcgatcctgcccatccatttcccttcattcaaaacggcagcgttgtatttgcgttggagcttcggcgcgaggctgatgaacgtgaaatgaagggcttgatcatcattcccaatcagatcaatcggtttgtgcgtctgcctggccctcgtattcgatttatcgcgctggaagacgtgatcgacatgaatttggggcgtctgtttcccggctttgacgtcgaagggtgcggcatgttccgaattattcgggacagcgaagtggagatcgatgaagaagcggaagacttggtgcggacgtttgaatccgccttgaaacgccgtcgccgtggccatgttattcgtctggattttgacgcgagcatgccggaagaattccgtcgtttcgttatgcaagagttcgatgttgcttatacccatgtattcttgcatcgtcggatgctcggcattacagatattgccgaaatcattgtggacgagcgccgggatctgcaatacggccggatgaaagtgcgctttccggagcgtgtgcgtgagtatggcggcgacatttttgccgcgatccgcgcgaaagatctcgtcgtgcat

SEQ ID NO: 251456 - DNA, 118 bp, Unknown
  Bacterial polypeptide expressing nucleotide sequence isolated from the Sargasso Sea
gatggttgatattattgcaattgatggtccagcttcttcaggaaaatcaactttagcaaaaaaaattgcaaaatatcttaactctcctattcttcatagcggtacactttaccgtcgt

SEQ ID NO: 251457 - DNA, 498 bp, Unknown
  Bacterial polypeptide expressing nucleotide sequence isolated from the Sargasso Sea
ttattttcaagtcgaatacaaattcacatcaggatgttaatatcaataactactgtgttactgaagaaattaggtcgcaaaagataagttccatcgtttctaaaatttcctcaataaaagaagtaagaaaattcctagtaaaagaacaaagaaaaattggagaatcaggcggacttgtagctgagggaagagatataggaactactgtttttccccatgcagaacttaaaatatttttaactgctagcatcgatgaaagagcaaaaagaagaaaatctgataaaaatagtaaagactcacaagaaatagaccttcatagattaaaagaacttataaaaaaaagagattttgaagattccaacagggaaatttcacctctaataaaagcgaatgacgcaatagaaattattacggatggatataaaattaatgaggtagtggataaaatcattgatctttatagtgacaagattcctaaagagactgagatcaaataaa

SEQ ID NO: 251458 - DNA, 487 bp, Unknown
  Bacterial polypeptide expressing nucleotide sequence isolated from the Sargasso Sea
aatgggtatccctgtattttttaaaacattagtagaagattatcatgatctccttttaccaatgaatcatcaaagagtgaatcataatctatttctagatctcaattgtttgatccatccttgttgtaatgaagtttctaagtttgatcctaaagaagatttaatgatcagtaatattattcataaaataaatgaattaatacaattagtcaatcccaaaaaaactatctttattgctattgatggacctgcccctaaagcaaaaatggttcagcaaagaactagaagatttaaaagctcatttgaagaaaaaccgtgggacactaatgctattactcctggaactaaatttatgaatactcttaattcggaattaaaatcatattatgaggaagataaaagaattcttttatctgattctacccaagcaggtgaaggagaacacaaaattctacaatatatgaaaaaacatagcaaaaaagataat

SEQ ID NO: 251459 - DNA, 345 bp, Unknown
  Bacterial polypeptide expressing nucleotide sequence isolated from the Sargasso Sea
cattatttaaactgcaaagagacttttatcaagattctggattagtagcagatggaagagatatgggaacagttgtcttccaagacgcaaaattaaaaatttttcttactgcctcacctgaagttagagcaaaaagacgttatttagagttgcagaatcgcaaacaagaagttaatatgcccgctctaatagatgatattaagcaaagggatttaagtgatagcacaagagaaatatcacctttattaccagcagatgatgctcacataattgactcatctgatatgtctataaaagatgtattcagctatgctgaaaatttaataaggaaggaatttatataaa

SEQ ID NO: 251460 - DNA, 247 bp, Unknown
  Bacterial polypeptide expressing nucleotide sequence isolated from the Sargasso Sea
cgcctgccgcgcggagcgccgttataagcagttgatttctaagggtttttcggctagtatcgaagaccttcgcgcggatctggaagcgcgcgacgcccgggacagttcccgcagcgttgcacccctcaagcccgcgcaggacgctctggtcctggacaactccgatttgacgattgaacaagccgtcgaacaggtgttggcctggtggcaggagcgtcagcccttcgcagcttctgcgcagcgctga

SEQ ID NO: 251461 - DNA, 558 bp, Unknown
  Bacterial polypeptide expressing nucleotide sequence isolated from the Sargasso Sea
aagagaatattgattataaaaaagaaaaaaaattattgattatttttaaagatatatctattgttttcaagtcaaatacaaattcgcatcaggatgtttatgttaataactactgtgttactgaagaaattaggtcgcaaaagataagttctatagtctctaaaatttcctcaataaaagaagtaagaaaattcttagtagaagaacaaagaaaaattggagaatcaggcggacttgtagctgagggaagagatataggaactactgtttttcctcatgcagaacttaaaatatttttaactgctagcattgatgaaagagcaaaaagaagaaaatttgataaaaatagtaaagacttacaagaaatagaccttaacacattaaaagaacttataaagaaacgagattttgaagattccaatagggaaatttcacctctaataaaagcgaatgacgcaatagaaattattacagatggatacacaattaatgaggtggtagataaaattattgatctttataatgccaagattcctaaagaaactgagatcaaataaa

SEQ ID NO: 251462 - DNA, 604 bp, Unknown
  Bacterial polypeptide expressing nucleotide sequence isolated from the Sargasso Sea
agcaaaaaattagctaataaatatggttatgcatatttagacactggtcttttgtatagaaaagttgctaatgaattgtatatccaaaaaaagaacaattctaatgatttagaaacttttagttgtaaaattgcaggagatttagattttttggaattagaaaaggaagatttacgatcagaaaaaatcgcaaatttagcctcatccattgcaatttttcctaaactgagggaaatcctatatttaaaacaaaaagaatttgtaatttttagtaaaaagaatttttctggatgtgtactagatggaagagacattggaacaaaaatactgccaaatgcaaattttaagttttttattgatgctgatgtagaaataagagcaaaaagaagattattagaaaaaaatatatctttcttgcatgaaaaagatgaaaagtgtatgttgcaatctttgattagggaaatgtcaagtagggatagattagatgctaacagatcagtctctcctctcttacctgctgttgatgcatacataattgatactagttcaattaatgctaatcaattatttttaaaagtgatgaaaattattgaaggaagataaa

SEQ ID NO: 251463 - DNA, 232 bp, Unknown
  Bacterial polypeptide expressing nucleotide sequence isolated from the Sargasso Sea
atgactttagtaattgcaattgatggccctgcaggatccggcaagggaacaatagcaaaaaaaatttcttcactttataattttccacatcttgacagtggtatattgtatcgatcagttgcatatttgtgtgaaacaggaggtgaaaagaatctagacgaaaatattgttttaaaatatgcacaaaatttaaatttagatgaaattgatactaataatttaagaacaaagg

SEQ ID NO: 251464 - DNA, 679 bp, Unknown
  Bacterial polypeptide expressing nucleotide sequence isolated from the Sargasso Sea
ctcggcatgacgcaggagttcgcgcatccgctggcgggcgtgctgtcggcatacgggatgggcctcgccgaccagaccgcgatgcgcgagcgcgcggtcgaggccgtgttgtccgacgattcattgccggtgctgaatgccgcgctcgaccggctggccgacgaggccgccggcgcgctgctcgaacagggcgtgccgccggagcggatcgcgaccgagcggcgcgtgcacctgcgctaccagggcaccgattcgacgctcgacgtgccggccggcagcgtcgaggcgatgcagcaggcgttcgaagccgcctaccggcagcgctacgcgttcctgatgccgggcacgccgctcgtcgccgaactcgcgtcggtcgaggcgatcggccgctccgacgcgccggtggagattgcaccgctcgcgccgcgcaacgagggcgacgaggccgcgctgcgcgcccattccgcggtgcgcttctactccggcggccgatggcacgacgcggcgctctacgtgcgcgacacgctgctggccggcgacgcgatcgacggcccggcgatcgtcgcggagcagaacggcacgaccgtcgtcgagcccggctggcgtgcgcagatgaccgcgcgccgacgacaaggccgaactcctgcggcggcagcgccgcgtccgagccttcctccat

SEQ ID NO: 251465 - DNA, 592 bp, Unknown
  Bacterial polypeptide expressing nucleotide sequence isolated from the Sargasso Sea
gcccatcgatttggatttgatattcttgacagtggacttttgtatagactttatgctttcttatctcatttaaagattggtatagatcatattagtgaagtaattaccaaagatatatcttttgttgtagaagatgatagtgtgcatgttatttatgagggaaacaaaataacgaatcagctaagatcagaggatattgcaaaaattgcatctgaacatagcgctaaaaaagaagtaagagaattgttatttgatattcaaagagatttttataatgagaatggcctagtagctgatggaagagatatgggtactgtagtctttaaagatgcaaaaataaaaatatttcttacagcatctcctgaaattagagcaaaaagacgttatttagagttgcagaatcgtggtcaagaagttaatatgcccgctctaatagctgatattgagaaaagagatttaaaagatagctcaagagaattatcacctctttttccagctgaagatgctcacataattgattcttcagaaatgtcactagaagaagtattcagttttactgaaaatttaattagtaatgaggaatttatataaa

SEQ ID NO: 251466 - DNA, 467 bp, Unknown
  Bacterial polypeptide expressing nucleotide sequence isolated from the Sargasso Sea
tatcaaatttactctacgtaaaacttcaagtatatttgttaataatcatgatgttatgagtaaattatttctaccaaaaatagatttatcggtgtcaaaattttcatctatatcttctataagaaaatttttggttacaaagcaaagattacttaccaaaaacaaaaatataataatgattggaagagatatagggacggttgttgtaccaaatgccaaatttaaattctatctaaatgcttcatcctacgttagggctaaaagaagatatgatcaaacaaagactaagtacaaatctattgaagaaataaaaaaatcaatagatctaagagataaaattgatagtacaaggaaggattcaccattaataccagcaaaggatgcaatgataattgatactgataatctttctttacttgaagttgtagataaaatgtacaatgtatttataggagaaaatttatgaa

SEQ ID NO: 251467 - DNA, 508 bp, Unknown
  Bacterial polypeptide expressing nucleotide sequence isolated from the Sargasso Sea
ccaaaaatgctaattaattctctatctcaaataaaaattaaatttaaacatactaaaaaagggcaattaatttttttaaacaataaggaagtaactgatgctattcgtcagtctgaggtaacgtctcatgttagtaatgttgctaaaattcctgaagttagatcttttttagttgcacaacaaaaaaaatttggaagtgagaaaggaatagtcatggatggaagagacatagggagttttgtttttccagaagcagaatgtaaatttttcttaattgcatcctctgaaataagagctaaaaggaggcatattgagcaattacaaaatggtatcaatgaatcttatggtaaggtacttgaaaatatcattactcgcgacaaattagatagttctagagaaacaagcccattaaagaaagcaagtgatgctatagaaatagatgtaagttatttgtcaattgatgatgtatttcaacggttgtggtttcatatatcaaaaaaattatgat

SEQ ID NO: 251468 - DNA, 564 bp, Unknown
  Bacterial polypeptide expressing nucleotide sequence isolated from the Sargasso Sea
aatgataatagctatcgacggaacagcagggtctgggaaaggaactttatcaaaaagactatcaaaaaaattaaatctgccatatttagatactggtatattatatagaaaagttgcttttgaattatttaaaaaagagaaaaaaacaacattcaattttgataaagatacaattaaacttatgatagaaataattaaatcaaacaatttcgtaaatataaagaaaaatgatttcttaagagatgataaaataggattattagcctctgaaataggtaaagtcaaaacgattagaactcatttaaactctatgcaaataaaatttgtaaatgattctgttgtgctcaaaaaaggatgtattttagacggaagagatataggaacgattattttacctaatgcagacataaagttttttattactgcttcaccagaggtccgcgcaaaaagaaagctaaaagaaaaagttaatgcaaacttgcaaccccatgaacaaaaatgtatgtttaataagtatttattcaaaataaatgagagagatgataatgatttcaatagaaaaat

SEQ ID NO: 251469 - DNA, 290 bp, Unknown
  Bacterial polypeptide expressing nucleotide sequence isolated from the Sargasso Sea
tatggtcgaaataatagcaattgatgggcctgcttcagttggaaaatcaactcttgcaaaaaaaatatcaaattattatgaagcaccattgttaaatagtggaagactttatcgtgcagtagcattaaaaataattaataaaaaaattaatattaataatagatataagatacttcagtgtgccaaatctttgacaggtgaaaacataaaatcagtgaatttattttctagcaaaatagataaagttgcatctgaaatttcctcaaaaaaatatctaagaaagcaattaa

SEQ ID NO: 251470 - DNA, 472 bp, Unknown
  Bacterial polypeptide expressing nucleotide sequence isolated from the Sargasso Sea
ctgaataatttaattatatctgttgatggcccagctggctcaggaaaagaaaaaattgcaaaatatatttcaaaaaaatataatttgtttcatctggattcaggaattttatacagaagagttgctaaatatctaatagaaaaaaaaattagttataagaatgtaaaaaaaattaaaattattttaaaatctataaaaaaaatatcacatagaagacacatagctttaagaagtgaaaatattagcaatctgacctctttaattgctatttatccttttgtcagaaaatttgttaataatcagcaaaagttagcagtttctaatattttaaaaaaaaataaaggatgtgttattgatggaagggatattgggacaaaagtttttaaaaatgctaaaataaagctttttattgatgcaaacagagaaataagggcaaaaagacgtcataaacagttgatgaacaaggcgaaaa

SEQ ID NO: 251471 - DNA, 640 bp, Unknown
  Bacterial polypeptide expressing nucleotide sequence isolated from the Sargasso Sea
ttgaaaaaaattgtaattactattgatggacctgcaggatctggcaagggccgtattgcaaaatatattgctaaaaagtataattttattcacatagattcaggtcttttatatagaaaaactgcaaaattattaattgagaataaaatcaatttaaacaaactagatcaaataaaacaaacactaatcaaaaataataatttttctctaagaaataataataatttaagaaacgagcatattggaaaaatatcatcgataattgcaaaaattaatttcgttagaattcatgtaaataaacaacagatttttcatacaaaacagaaaacaaagaaaaaggggtttgttattgatgggagagatattggttctgttgttttcaaaaatgctgatctcaagctatttatagaagtaaaccctgctgttagggctaaaagaagacataaacagttgattgatttgggtgaaaagtctatatacgccgaaattttaaaggaaattaaattgagagataaacaagatataattagaaaaaactcacctttagtagtgccaaaaggtgcacatattatagataattctaactcttttagaaaaacattaatcaaaataaaccaattaattggacaaataaaataat

SEQ ID NO: 251472 - DNA, 217 bp, Unknown
  Bacterial polypeptide expressing nucleotide sequence isolated from the Sargasso Sea
atgactatagtgattgcgatagatggacctgcaggatctggaaaaggaacgatagcaaaaaaaatatcttcattttataattttccacaccttgatagtggtattctgtatcggtcagttgcttatttatgtcataaaagtggagaaaagatttttgatgaaaagaatgtattgaggtatgcacaaaatcttaacctagataatatagatattgata

SEQ ID NO: 251473 - DNA, 647 bp, Unknown
  Bacterial polypeptide expressing nucleotide sequence isolated from the Sargasso Sea
catgaataaatcagctcagctagttgttacactggatgggcctgcggggtctggaaagtcgacaaccgccaaagaggtcgcccggaggttaggcttcaggcacctcgattccggagggctataccgagcactgacgttagcccttcttgaggagggtatacccctcacgctctgggccgatctgaccgatgaggatatgaacggtctcccagtccgtgtctcttcggaagacgctgagttcttgattgaggtcgcggggagaagggtccaagcggagcttcgtagtcccagagtgacagcgcatgtcgctttccttgcaagcctccctgcagccaggaggcgcttactgcgcttgcagcacatcgcgggagagaagggaggactggtggcggatggtcgagatatgggcagcgtagtatttccggacgcggacgtgaaagtctatctagtggccgatctccatgaacgagcgaggaggcgtttagaggaaagtggtattagtccgagtaatgtcgaagtcgagcgtgagtccaaagtgatcgcggagcgtgaccgtcaggattctgagcgggagctctcccctcttcgtgagccctcgaatgcacatctgatagacacgacgagacttaacttcatcgaacaggtag

SEQ ID NO: 251474 - DNA, 342 bp, Unknown
  Bacterial polypeptide expressing nucleotide sequence isolated from the Sargasso Sea
tatggtcgagataatagcaatagatggtcccgcatcagttggaaaatcatctcttgcaaaaaaaatatcaaattattatgacgtaccattgttaaatagtggaagactttatcgtgcagtagcattaaaaataattaataaaaaaattaatactaatgataaatataaggtacttcagtgtgccaaatctttgaaagatgaagacataaaatcagaaaatttattttctagcaaaatagataaaattgcgtctgaaatttcctcaaaaaaatatcttagaaagcaattaatgttctaccagaaaagatttccaagaaaatatgctagaggtaagaaattttg

SEQ ID NO: 251475 - DNA, 640 bp, Unknown
  Bacterial polypeptide expressing nucleotide sequence isolated from the Sargasso Sea
cttgataaaaaaaataattactattgatggtcctgctggttctggcaaaggtaaaattgctaaatatgtatcaaaaaagtggaatttaaaacatttagattcaggtattttttatagaagaatagcatatcttatttataaaaaaaaaattaatccaataaataaaaaacatatcgagaatttaattaataatattgatcaaatatcatcaagaataaataaaatgctacgaactgaaaaaataagtaaaattgcttcaaaaattgcagaatataattctgtaagagattttgtaaatactcaacaaaaattatcagtaaaaaagacaaataataaaaaaggatttgtgatagatgggagagatattggctctgtcgtttttaaaaatgcatatataaagctatatatagaagttgacgtaaatataagagcaaaaagaagacataaacagttgattgatatgggtgaaaagtctatatacccaaaaattttaaaggatatgaaattgagagataaaaaagataaaacaagaaaaaattccccattggttatacctgctggtgcttatattattgataattcttcaaattttaatctaacccgaaatcaaataaaaaaaataattggaaaagtatactaa

SEQ ID NO: 251476 - DNA, 643 bp, Unknown
  Bacterial polypeptide expressing nucleotide sequence isolated from the Sargasso Sea
atgattatagcaattgacggaacagcagcttcaggtaaaggttcactagcaaaaaacctatctaaatctttaaatctacaccacttagattcaggaattttttatagagttttagcatatcaagcaattaaactaaaaataaataataaaattgatttgattgagctttcaaacaacctttcaataaataagattatagaaatcaaaaaattaaaaaatgtaaatttaaggtcaacattgataagtaaaaaatcttcacaaattgctcctgataaaaatattagaaaagcacttgttaagcttcaaagagaatatgtaaatcaattcctaatttttcatgacggtgtagtaattgatggtagagatattggcactattgtttttccaaatgctgattttaaattttatttagatgctgatattaaaattagagcagaaagacgaacacaagagttgattcatttaaattatgaggttatataccaagatgtattaaatgacctaatttgtagggataaaagagataaaaataggattgaaggcccattgataatagctaaagatgctttttatattgatactgggaataaatctgaagagtttgttttgcaaaaggcattaaaatttattaaaagtttttaga

SEQ ID NO: 251477 - DNA, 616 bp, Unknown
  Bacterial polypeptide expressing nucleotide sequence isolated from the Sargasso Sea
tatgatatggtcaaaaatcatccagccaagattaatttctttgggctgcacctccaaacccattagaaaacaaaggagtaaggttgtgcctcaagctgaaggaagagttttagagattggttttggatctggtcataatctcccattttacaatgataagaaaattacaaatttaattggtttagagccttctgtctccatgcaaaaattgtcaaagaaaagattaaatgattcaaaagttaattttgaatttttaactgctagcgctgaagaaatacctatcaaaacaaattctatagacactgttgtttgcacctatactctatgttcaattcctaatcccgatattgcattaagtgaaattagcagggtcttaaaaaaagatggcaaatttctttttactgaacattcaaaatcacctgatgttaaagtaagtaagtttcaaaaaagattagcacccatttggaaaattttaggcgacggatgtcacctgacacgagacatacgaggtattctttctgactctggttttaatattgatagtactgaagacatgtatattcctggtacacctaaattcattgggtatcacgtatggggtttaattagaaaataa

SEQ ID NO: 251478 - DNA, 643 bp, Unknown
  Bacterial polypeptide expressing nucleotide sequence isolated from the Sargasso Sea
tatgattatagcaattgacggaacagcagcttcaggtaaaggttctctagcaaaaaacctatctaaatctctaaatctacaccacttagattcaggcatattttacagagttttagcttatcaagcaattaaactaaaaataaataataaaattgatttgattgagctttcaaacaacctttcaataaataagattatagaaatcaaaaaattaaaaagtgaaaatttaaggtcaacattgataagtaaaaaatcttctcaaattgctcctgataaaaatattagaaaagcacttgttaagcttcaaagagaatatgtaaatcaattcctaatttctcatgacggtgtagtaattgatggtagagatattggcactattgtttttccaaatgctgattttaaattttatttagatgctgatattaaaattagagcagaaagacgaacacaagagttgattcatttaaattatgaggttatataccatgatgtattaaatgacctaatttgtagggataaaagagataaaaacaggattgaaggcccattaataatagcaaaagatgctttttatattgatactgggaataaatctgaagagtttgttttgcaaaaggcattaaaatttattaaaagtttttag

SEQ ID NO: 251479 - DNA, 301 bp, Unknown
  Bacterial polypeptide expressing nucleotide sequence isolated from the Sargasso Sea
gatggttgaagtccctgtaatttcgatagatggcccatcaggatcgggaaaagggactattgcaagcagattagctcgtgaacttggttttaattatctagatagtggcgcgatatacagaactttaggtatagcattgcataaggaggatattggatttgaaaatattactaaaatatctgaaatatatagtaaatctgtgatagttttcgatccagacgagcccggaaaagtaatattgaacggagaggatgtaagcgtttcgatacgctctgagttaggaagcgactcggcttcaaag

SEQ ID NO: 251480 - DNA, 661 bp, Unknown
  Bacterial polypeptide expressing nucleotide sequence isolated from the Sargasso Sea
atgaaaaaaattaatgtggtagcgatagatggtccttcagcatcaggaaagggagcattatcaagaagcatagcgcatcgatttggatttgacattcttgatagtggactcttgtatagactttatgctttcttatctcatttaaagtttgatatagatgaaattaataaaaaaattagcaaagatatatcttttatttctgacgaagatagcgtacatgttatttatgaaggaaaagaaataactaatcatctaagatcagaaaatattgcaaaaatagcatctgaacatagcgccaaaaaagaagtaagaagatcattatttgagattcaaaggaatttttataatgaaaaagggctagtagctgatggaagagatatgggtactgtggtctttaaagatgcaaaaataaaaatatttcttacagcatctaaagaaattagagcaaaaagacgttatttagagttgcagaatcgcggtcaagaagttaatatgcccgctctgatagccgatattgagaaaagagatttaaaggatagctcaagagaattatcgcctcttttaccagctgaagatgctcatataattgactcttcagaaatgtctcttgaagaagtattcagtcttactgaaaatttaattaaaaaggaatttatataaa

SEQ ID NO: 251481 - DNA, 529 bp, Unknown
  Bacterial polypeptide expressing nucleotide sequence isolated from the Sargasso Sea
aactacgataaattttgataacgaaactgttgaacgagtaataaaagtaattagaacaattaattttacaaatatagaggatactaattctttgagagatgataaaataggattactagcttctgaaataagtaaaattaaagcaattagaaatattttaaacttgaaacaaactcaatttgttgaagattctattaaactcaaagaaggttgtattttagacggaagagatattggaacaataattttacctaatgctgacatcaaattttttataactgcatctccagaggttcgtgcaaaacgaaaacttaaagaagaaggtagagcaaacttgcaaccccatgaacaaaattgtatgtttaatgattatttattaaaaataaatcagagagatgaaaatgatttcaatagagagaactcacctctgaaaaaggcgatagatgcttatgaaatagatacgtcacttttaaccccaaaagaagtcgaggaaatagcaataaataaaatttataaaaaaaaaacttaa

SEQ ID NO: 251482 - DNA, 303 bp, Unknown
  Bacterial polypeptide expressing nucleotide sequence isolated from the Sargasso Sea
gatgaatactacaccccccgttattgcaatcgatggaccagtcggctctgggaaaggaacaattagtagaattcttgcacgcactcttggttggcacttgttggatagcggggctttgtatcgtcttgttgcgttgaggatgatacaagagaaagtatcggtcgatgattcatccgcgatggtgggtatagcaacgataatggatatctcgtttgctaatactgctaaagagcaaaaaatttttctagactctgtagatgtaactcttgatctgagaacagaggagtgtggaagtgttgcttc

SEQ ID NO: 251483 - DNA, 640 bp, Unknown
  Bacterial polypeptide expressing nucleotide sequence isolated from the Sargasso Sea
attgaaacataaaatcataaccattgatggtcctgcgggatctggaaaggcaaggatagctagctatattgcaaaaaagtggaaatattatcatttagattcaggaattttatatagaagattagcgtatttaattttaaaaaataatataaagttaagtgataaaaagcagattgaaaaatttctagccaaaactaatactatctctcctagaaatagcattaaattaagaactgaaaaaataagtaaggctgcatcaaaaattgcaatttatataaaaattagaaattatattaatatgcaacaaaaaaatattataaaaaaagagctaaaaaataggggctgcgtcatagatggaagagatataggctctgtggtctttaaaaaagcgaatataaaaatatttgtaattgtaaatgctaaaataagggcaaaaagaagatataaacagttgattgatataggtgaaaagtctatatacgcaaaaattttagaggaaataaagttgcgagataataaagataaaaaaagaaaaaattcaccaatgagagtaccttatcaggcacatattattgataattctgagtcattttcaaatactataattcagattaataaaataattcaaaaaaataattaa

SEQ ID NO: 251484 - DNA, 115 bp, Unknown
  Bacterial polypeptide expressing nucleotide sequence isolated from the Sargasso Sea
atgactaatgttattacaatcgatggaccaagcggtgtaggaaaaggaactatatctgagtatctatcagatgaactcaaatggaattatctgaacagtggcgcttttatataga

SEQ ID NO: 251485 - DNA, 265 bp, Unknown
  Bacterial polypeptide expressing nucleotide sequence isolated from the Sargasso Sea
atgaagaagattaatgtaattactatagatggaccatctgcatctggaaagggagctcttgccagaggaatagcccataaattcggcttcaatattcttgatagcggagttttatatagactatatgcttatttattagatatgagtttctcctcaaatgaaattgcaaatcaaatagaaaggcatgtagagtttataaaaagtaaagaaaaacttttagtaatctataaaaaaaatgatgtcacttcagagttaaaatcagaag

SEQ ID NO: 251486 - DNA, 364 bp, Unknown
  Bacterial polypeptide expressing nucleotide sequence isolated from the Sargasso Sea
atgatcatcgctgttgacggctcggcagccagcggcaagggcacgctcgccaaacggcttgcggcgcattacgaccttgcgcatcttgataccggtgccctctatcgctgtctcgcactgcacctgatcacggaaggaagaacggccacgaacgtgaccgaatccgaggccgccggtgccgtgggaagcattgatctgctgatggcgggttctgccgccatccgcaccgatgcggttgccggcatggcgtccgtcgtcgccgcgatgccggctgtcagacagaatttcgtgtccttgcagaggcagttcgccacccagacaccgaaccgtcgcggtgccgttctcgacggccgcgacatcggca

SEQ ID NO: 251487 - DNA, 628 bp, Unknown
  Bacterial polypeptide expressing nucleotide sequence isolated from the Sargasso Sea
aatgacttttgtgattgcagtcgatggacacgcggcctccggaaaaggaaccatttcaaaaggggtcgcgaagcattttgatttctcgtatcttgatacaggtttaatttacagagctgttgctcggatagcgttgaagcgaagtaaaacttttttgtctgctaaagaattggttcaaattgctaataaatttaaggtggaatatcttcaattagatggcttaagatcgcaaacggttggagtttatgcgagtaaaatagctgctttacctgaggtgagagcggcgctggtaaattttcagagaagctttgtcttaaatagtgagggtgctattctcgatggtagggatataggcagtgtaatttttcctgatgcacaattaaaaattttcgttactgcaaggcttaatattcgagcggagagaagatttcaggagttgttaacacaaaatatggatgttacgtttgatggagttgtacgtgatttggcagggagagacgatctagatagtaatagacagcatgctccgttaaaaataagcagtgatgcgcacttgatcgacacgagcgaattgtctatagaagcgtctatcgcgaaagtgattaacttcgtaaacatattgaaagat

SEQ ID NO: 251488 - DNA, 284 bp, Unknown
  Bacterial polypeptide expressing nucleotide sequence isolated from the Sargasso Sea
catgaacgccccggtaatcaccgtcgacgggccgagcgggtcgggcaagggcacgctttgcgccttgctggccaagcagctgggctggaatctgctcgactccggtgcgctctatcgcctgctggccttcgccgctggcaaccacggcatcgacctgaccaacgaagagtcgctcaagcagctggccgcgcatctggatgtgcagttcatcgacaagcgcatcatcctcgaaggcgaggaggtgaccgacgccatccgtaacgagcagataggggcgggcgctt

SEQ ID NO: 251489 - DNA, 685 bp, Unknown
  Bacterial polypeptide expressing nucleotide sequence isolated from the Sargasso Sea
tttgaaaaaaaaagttatagtagctattgatggaccatcatcctcaggtaaaagtacaatagctaaattggtagcaaaacattttaacttcacttatattgactctggatcgatctacagagctataacatacgttgctataaaaaacaatctaataaaaacaggaaatattgatgttgtttcattaattgatttattaaataattgctcaatttccttttcatttaactcaaataatcaaaatgttataaaaatagatgatgtttctgttgagaatgaaatcagaacttttgaaatttccaataatgttagcttgattgctgaaaaaaatgaaataagaaaatatgttttaaaaattcaaaaagatattagtaataataaatcagtagttatggacggaagagatattggttcagttgtctttcccaatgctgattttaagttttttttggatgcatcaatagatgtgagagcattaagaagatggaatgagctaaaattaactgaaaaagatttaaaatttgaagaagtaaaaaaagacctattaaaacgtgataagaaagatataaatagaaagttttcaccccttataagacccaaatattcaatactgataaattctgatagattagatatctcagaggttgttgaacatattattggcattattaagacagagatataa

SEQ ID NO: 251490 - DNA, 505 bp, Unknown
  Bacterial polypeptide expressing nucleotide sequence isolated from the Sargasso Sea
ttctaatgatttagaatattatatttatgacattgccaaaaatttaaatcttcttgaattaaaaaaagaagatttaagatcagaagatactgcaaagctagcttctgcaatcgcaacaaattcaagattgagagaaattttgaattttaaacaaaaagagtttgttgagataaataaaaaggagttttctggctgtatcctggatggaagagatatcggtactaaaattcttccaaatgctgattttaagttttttattaatgcgtctattgaagtaagagctaaaagaaggttattagaaaaaaatatatctttcttgcatgaaaatgatgaaaagtgtatgttgcaatctttaattaaacaaatgaatgatagagatagtttggatactaatagatcaatttcgccacttgttcctgctaaggacgcatacgtaattgattcaactttaattgatgcagatgaattattattaaaggtgacaaaaataattgatggaatttaa

SEQ ID NO: 251491 - DNA, 134 bp, Unknown
  Bacterial polypeptide expressing nucleotide sequence isolated from the Sargasso Sea
tatgagcttaaaaaataataatatcattactattgatggtccttctgcttccggcaaaggttcgctagcaatggcattagcaaaagagctaaattttattttgcttgacagtggtttactatacagagcatatt

SEQ ID NO: 251492 - DNA, 356 bp, Unknown
  Bacterial polypeptide expressing nucleotide sequence isolated from the Sargasso Sea
tttgaaaaataagattataactatagatggacctgctgcatcaggaaaagagaaaatatcaaaatacatatctaaaaaatggaagcttagacatttagattctggaattctttacagaagacttgcttatacatttttaaaagataaaattgatacgaataaaataactgaaattaaaaaaaaaattattcaaattaattctatttcatatagaaaaaataagcaaataagaacacaagaaataagtattttagcttcaaaaattgcagtttatagctttgtaagaaactacattaacaaattgcaacacaattttgtgaataaaaataaaaataagcatggttttgtaataagat

SEQ ID NO: 251493 - DNA, 213 bp, Unknown
  Bacterial polypeptide expressing nucleotide sequence isolated from the Sargasso Sea
gttgattgttgcaattgatggtctggctggttctggaaaaagtactacagctcgtaatgttgcttcgaaacttgattttctttatctggatactggtgctatgtatcgtgctgtcacgatggctatgctttcagattctatagatcttaaggataacaaagcaattaagtcttgcgttgcctcaattgaaattgattttgataggacgggctc

SEQ ID NO: 251494 - DNA, 619 bp, Unknown
  Bacterial polypeptide expressing nucleotide sequence isolated from the Sargasso Sea
atgagtaaaacattaataacgttggatggtccttctggtgtaggtaaaactacaataggtaaacgtttagcttctgaattaaacttagattttttttcatcaggtcttctttacagagttattgcattacataatgaaaaaaccaatacttttaatctacatgaatttcaaatagtatctagtgatccagtagtttgtaaaattgacgcaaatgtatacgaagaaaaaaatctatatactccacaaattaatacgaaaagttctgaaatagctcagttaagtgaaattagaatgattgtatctaatgtactccaatctatatatgataactcaaatgctggtttggttgtagaaggaagagatatgggtagtgttgtttttaagaatgcgaaattaaaaatatatttagatgctagcgaagtaacaagaagcgagagaagaatagctcaatctggtaataaagaatcagttaaagacttaagagctagggattcaagagatattaacagaaaaatttctccacttattattcctgctgatgcaatagttataaacaatgaaaataaaagtattgatgaggtaattaatattattaaagagaatttaaagcttcagtagc

SEQ ID NO: 251495 - DNA, 373 bp, Unknown
  Bacterial polypeptide expressing nucleotide sequence isolated from the Sargasso Sea
aaaaaaataaaaaatcataaactctatagtcctgaagtttcaaaattatcgtctataattgcgaaaaaaccttttgtaagaaaggaattaaaaaattttcaaaaagattttataaaaaaatcaaaattagttgtggttgaaggaagagatataggtacaaaaataatggtttatgcagatctaaaactcttttttaaatgctcaattaaagaaaaagcaaaaaggcgattaaaagagtttaaaaaattaaacaatagaattactttaaatgaagtcaaaaaagccttaattcaaagggataaagaggacactaaaagaaaaataagtcccttgattatgacaaaaaattctgtattagtcgacaccacgtaaa

SEQ ID NO: 251496 - DNA, 676 bp, Unknown
  Bacterial polypeptide expressing nucleotide sequence isolated from the Sargasso Sea
aatgggcattcctctattctttagatacttagttaataattatgataatattataactaacaaaaaacattatcctcaaatagataatttatatttagatctaaattgtgccattcactactgttgtagggaaattttaaaagatataacttttagtaaagcaaatcaatatagaattgaaggcaaaatgattaataatgtcattaaatatattgaaattcttttggattatagtaatccacaaaaattactttatattgccattgatggaccagcacctaaagccaaaatgattcaacaacgacaaagacgttttaaaaaatattatgaaaaaaatgccattgaaaaaattaagagagaaaatggagtagaaattattaaacaagaagaatgggatactaacgccattactccagggacagtttttatgcaaaatctttccattaaattgaaaactgccttaaaaaccaattccaaatgtaaacatctaaatattattatttcagattctaatgttcccggtgaaggagaacataaacttcttcatcatctaaaagaaaataatagtattaataatagtaatgtaaatgtcatatatggtttagatgctgatttaatcatgttgtgtatttcatcaaagttgaataatatccttcttttaaggggaagcgggtga

SEQ ID NO: 251497 - DNA, 307 bp, Unknown
  Bacterial polypeptide expressing nucleotide sequence isolated from the Sargasso Sea
tcttattgcagatggaagagatatggggagcgtagtttttcctaatgcaaatttaaaatttttccttgatgcatctcctgaagtaagagcaaaaagaaggcatttagagttgcagaaaagaggacaagaagttaatatgcacgacctaataaatgatattgttgaaagagataaaaaagacagaacaagagatttatctccactgattaaaacagaagattctattttattagattctacaaatttagatcaggaatctatcttaactgaggctcttcaacatattaaagaaaggaatattttatga

SEQ ID NO: 251498 - DNA, 670 bp, Unknown
  Bacterial polypeptide expressing nucleotide sequence isolated from the Sargasso Sea
atgcaaacaaaaaatcaaataacaatagatggcccagcagcttcaggaaaatctgtagttggtaaactgttaagtaaaaaattagactatctattcttagatactggattaatgtatagagccgcaacaaaaattattacagaatccaatattctttttagtgatcttaaaaatattaaacaattaatcaaaaaagcctcatttgagctaaattcaatttcacatgaaccccgattatttgttaactcaaaagatcttaccgattctcttaaaactagtcagatagacaaagatgtttcaactgtttccaaaatccctgaagttagagaaattcttgttaaccatcaacgtaaaatagcaaaacatacaaatatagtgatggtcggtagagatataggaagtattgtcttacctaatgctactttgaaaatttatttagatgcctctgtagaagtaagaacaaacagaagattaaatgacagtcaacaaaatttttcccataatgactttgatataatcaaacgcgacctgatccaaagagacaattcagattctaatagagaacattcacctctaatcatcccgaaaggttcagtagtcattgatacttcagatttaaaaatcacagaagtaattgattctatacttaaggagttagaaaatttatgaa

SEQ ID NO: 251499 - DNA, 157 bp, Unknown
  Bacterial polypeptide expressing nucleotide sequence isolated from the Sargasso Sea
tatgaaacttgataagaaaattatcaccattgacggaccttccgcatccggtaaaggcgttttatcttcctcattagcaaattatttaaattattctcttttagatagtggattactctatcgggcttatgcttattgttatgaatcatctcttgat

SEQ ID NO: 251500 - DNA, 631 bp, Unknown
  Bacterial polypeptide expressing nucleotide sequence isolated from the Sargasso Sea
gtttcaatagatgggccttcaggatcaggaaaagaaaaaatagctagatatatttcaaaaaagtatgatttttttcatttagattcaggaattctttacagaagaattacttcaattataataaaaaaaaaaattgaaatagataataaaaaaaacttaactaattttttgaatagcataaaatacctttcttcaagaaaacataaaagtttaagaaaagaagatgttagtaatcaaacttctttagttgcaaaaagcgcaattataagaaattttattaattctcagcaaaaaataatagtaaagaaaatgttaaaaaatcatgcaggttgtgtaattgatggtcgagatattgggtctaaagtttttaaaaatgccaaaattaagctattcattcgagttaaaccaagaattagagcagaaagacgacataaacagttgattgaacaaggtgaaaagtctatatacagccgaattttcaaggatataaatttgagagataaaactgataaaaatagaagggaatcacccttaattgtgcccaaaaaagcatatattatagataattccaaatcattcaagaatacgacttctcaaataaatttaatttttaaaaaagtagttaaataaa

SEQ ID NO: 251501 - DNA, 331 bp, Unknown
  Bacterial polypeptide expressing nucleotide sequence isolated from the Sargasso Sea
ttgaaaaataaaataataacaattgatggtccagcagcctcaggtaaagaaaaaatttcaaagtatattagtaaaaaatggaaactaaagcacttagactcagggatactttatagaagattagcacttatattatataaccaaaaaattgatattaatagtaaaagcgaaattaaaaaaaaaataggccttattaaatcactttcctatagaaaaaataaaaaaattagaacacaaaatatcagtagattagcttcaaaaattgctgtttataattttgtaagactttatataaacaagttacaacatgaatttgtgaaaaaaaataaaa

SEQ ID NO: 251502 - DNA, 339 bp, Unknown
  Bacterial polypeptide expressing nucleotide sequence isolated from the Sargasso Sea
gagaatcaggcgggcttgtagctgagggaagagatataggaactactgtttttccttatgcagaactcaaaatatttttaactgctagcattgatgaaagagcaaaaagaagaaaatctgataaaaattgtaaagactcacaagaaatagaccttcatacattaaaagaaatgataaagaaaagagattttgaagattccaatagggaaatttcacctctaataaaagcaagtgatgcaatagaaattattacggatggatattcaattaatgaggtagtggataaaattattgatctttataatgataaaattcctaaagagactgagatcaaataaa

SEQ ID NO: 251503 - DNA, 487 bp, Unknown
  Bacterial polypeptide expressing nucleotide sequence isolated from the Sargasso Sea
aattaataatgatatatcttttatattaaaagaagataattttaaaattttaaatcaaagcgatgatattactaattatttgcgctctgaggatattgcaaaagttgcttctatgttaagttcacaaaaagaagtaagagagtcattatttcagatacaaaggaatttttatgataaaaacggcttagttgcagatggaagggatatgggaactgtggtttttaaagatgctaagttaaaaatttttttaacagcttcaccagaggttagggcaaaaagacgttatttagagttgcagaatcgcggacaagaagttaatatgcccgctctgatagctgatattaaagaaagagatttaaaagatagctctagagaactatcacctcttttgccagctgatgaagctcatataattgactcatctgatatgtcacttgaagaagtatttagtattactaaaaatttagttaaaaaggaatttatataa

SEQ ID NO: 251504 - DNA, 390 bp, Unknown
  Bacterial polypeptide expressing nucleotide sequence isolated from the Sargasso Sea
tatgattattgcaattgacggaacagcagcatcaggaaaagggtctctagcaaaaaatttatctagatccttaattttacaacacttagattcaggaatattttatagagttttagcttatcaagctgtaaaactaaatataaataataaaagagacttaattgaattttcaaaaaaactctcaattaataaaattataaaaacaaagaaactagaaggtgaaaatttaagatcaacattgataagtgaaaaatcttcacaaattgcagctgaaaaaaatattagaaaatctttaattaagttacagagggaatatgtaaatcaattactatattctcataaaggtgttgttattgatggaagagatattggtactatcgtttttccaga

SEQ ID NO: 251505 - DNA, 673 bp, Unknown
  Bacterial polypeptide expressing nucleotide sequence isolated from the Sargasso Sea
tatgactgaggttctcacaattgatgggcctagtggtgttggcaaatggaccatatcagaatatttatcagatgagcttaaatggaattatctaaatagtggtgccttatacagatctatcgcttgggttgccaaaaatgattcgatagagctaaatgacattactgaattagagaatgcttcaaaaaatattctcttctctcttcaaaataagaaacttcacgtctcgtataaagatatagagataggttcattactctataatgaggaagttgctaagatcgcttcgaaaatatcttctgagcaaaaagtacgagaatctattcttaatattcagagatcttttaaaaaagaacctggcttagttgctgaaggtagagatatggggtcggtaatatttcctgaagcacaagtaaaattattccttacagcttcaatagaaacacgagctcaaagacgctttaagcagttgaaggataggaaatttaatgttagccttccggctctaattaaggatttagatgctcgtgataaaagagataaaaacagagaaagttctcctcttgttattcctgaaggagcatttgtaattgaaacggatgatttaactgtcatcgaggtaaaaaatatagctaaagataaggtgaataaaacctatggaacaaacatttga

SEQ ID NO: 251506 - DNA, 667 bp, Unknown
  Bacterial polypeptide expressing nucleotide sequence isolated from the Sargasso Sea
ttgaaacaactaaataaaaaaatagtatttaagatagctgcagatggaagtagtgcatcgggaaaaacaactggaagtaaattaattgctaaaaaatttaaaatgaattttttatctagtggaacattatatagatattgtgcattaaaaactctggagaataaaaatatttgcaatccaaaatttattaataaaatatcaaaaacaattactttaaaaaaattaaagaatcataaactctatagtcctgaggtttcaaaattatcgtctataattgcgaaaaaactttttgtaagaaaggcattaaaaaattttcaaaaagattttataaaaaaatctagactagttgtagttgaaggaagagatataggtacaaaaataatggtttatgcagatctaaaactcttttttaaatgctcaattaaagaaaaagcaaaaaggcgattaaaagagtttaaaaaattaaacaatagaattactttaaaggaagtcaaaaaagccttgattcaaagggataaagaggacactaaaagaaaaataagtcccttgattatggcaaaaaattctgtattagtcgacaccactaaattaacaataaaacaaatggaggcaaaacttattaatttagtacaaagatctattagtaaaaaatatggagatatataaa

SEQ ID NO: 251507 - DNA, 634 bp, Unknown
  Bacterial polypeptide expressing nucleotide sequence isolated from the Sargasso Sea
ttgaaaaaaattgtaacaattgatggccctgctgcatctggtaaagaaaaaatagcaaaatttattagtagaaaatggaaattaaaacacttagattctggaatactgtatagaagattagcatacattcttattaagaaaaatgtaaaattagatgataaaaatgaaattcaaaaaaaaataaaagaaattactaaaatttcttatagaaaaagtaagcaaataagaactcagaatataagcaaattagcatcgaaaattgctatttacgattttgtaagaaattatatcaataaattacaatacgattttgttaaaaatttcaaaaatactcgtggttttgtaattgatggaagagacataggatccgttgtttttaaaaaagcagacataaaactatatattgaggtaaatccagaaattagagcaaaaagaagatataaacagttgattgatagtggcgaaaagtctatatacccaaaaattttgaaggatattaaattgagagataaaaaagatagatttaggaaaaattcaccactagttattccaaaagatgcacatatagtcaacaatgatggtaattttagaaatacaattaaacaattagataatttgttatcaaaactttagc

SEQ ID NO: 251508 - DNA, 185 bp, Unknown
  Bacterial polypeptide expressing nucleotide sequence isolated from the Sargasso Sea
tttgagtaaattaataattactattgacggtcctgctgcttctggaaaagaaaaaatagcaaaatacataagtaaaacaagaaagttaaaacatctagattcaggtatattatataggagaatagcacttatttttttagtggaaaatatagatattaaaaatattaatatgggtaaaaaaaaaa

SEQ ID NO: 251509 - DNA, 166 bp, Unknown
  Bacterial polypeptide expressing nucleotide sequence isolated from the Sargasso Sea
taacgacattttatctaatatacaggctagagataaacgagatatggaacgtgctgttgcgccattaaagccagcagacgacgcatatatcattgatagttctaatattggcatcaatgaagtcttccaattaatggtggactatatcgatagccgtattcaatag

SEQ ID NO: 251510 - DNA, 610 bp, Unknown
  Bacterial polypeptide expressing nucleotide sequence isolated from the Sargasso Sea
gacaccggggcgatgtatcgctccgtcacctggcttgtgaggagccattgggtggaccctgccgatggggcggcgatcgagccgttgctggatggtctcgatcttcagctcaagtcgctgccggcgggtggtcagcaggttttggtgaatggagaggacgtgagcaccgtgatccgctcgccggaggtgacggcgtccgtgtccgcggtggcggcccatcggtgcgtgcgtcaggcgctcaccaaccagcaacaggcgatgggtgcgaagggaggactggtggcggagggacgtgacatcgggaccgcagtcttccccgacgccgagctgaaggtgtttctcaccgccacggtcgcggagcgagcccgtcgtcgagctctcgatctggaacagcgcggcttccctgttcctgagcgctcggagctggaggggcagatcgccgagcgggaccggctggacagcacccgggaggaagccccgttgataaaggcagccgatgctgtcgagctgatcaccgatggcatgagcatcgatgccgtgattgatgagctggtggggcagttccgctcgcgggttgctgaagaggtctggcctactcctgggaactgag

SEQ ID NO: 251511 - DNA, 319 bp, Unknown
  Bacterial polypeptide expressing nucleotide sequence isolated from the Sargasso Sea
ttatacagaaaaaggcctagttgctgatggtagggatatgggaacagtagtttttaaagatgcgaagttaaaaatttttctcactgcttcgccagaggtaagggcaaaaagaaggtatttagagttgcagaatcgtggtcaagaagttaatatgcccgcactgattgctgatattaagcaaagggatttaaaggatacatcgagagatttatcaccacttttgcaggctgaagattcttatttaattgattcatcagaaatgtcaccagaggatgtatttagcatagctaaaaattttattaaaaaggattatttataa

SEQ ID NO: 251512 - DNA, 222 bp, Unknown
  Bacterial polypeptide expressing nucleotide sequence isolated from the Sargasso Sea
gttgaaaaaaattattattactattgatggccctgcagcatctgggaaaggacgtattgcaaaatatattgctaaaaaatataatttcttacacatagactcaggcttattatatagaaaaattgcaaaattattaattgataacaaaattgatacaaaaagtataactcagataaaaaaattcttagtgaaaaataaaaggctttcattgagaaataataa

SEQ ID NO: 251513 - DNA, 452 bp, Unknown
  Bacterial polypeptide expressing nucleotide sequence isolated from the Sargasso Sea
tatgagtaaaacattaataaccttagatggcccatctggtgtaggtaaaactacaataggtagacgtttagcttctgagttaaactttgaatttttttcatcaggccttctttacagagttattgcattacataatgaaaaaacaaattcttttaatctaaatgaatttgaaattctatctaataatccagtagtttgtaaagttgacggaaatgtatacaaagaagaaaatctatacaccccacaaattaataaaaaaagttctgaaatagctcagctaagtgaaattagaatgcttgtgtctaatgtactcaaatttttatttgataattcaaatactgggttagttgttgaaggaagggatatgggtagtgtagtttttaagaatgctaatttaaaaatatatttagatgcaagtgaaacaacaagaagcgagagaagaatagctcaat

SEQ ID NO: 251514 - DNA, 646 bp, Unknown
  Bacterial polypeptide expressing nucleotide sequence isolated from the Sargasso Sea
aatgatcgtgacgattgacggccctgccggtgccggtaaatcgactgttgcccgcagactcgccgcgcagctcggctatgtctttctcgataccggggcgatgtatcgcgcggtgacctatgcggcgctgcaggcgaaaatagtgatggaagatgccgctgcacgcttagcgcttgtccgtgggacagccatcgaaccgaaaggcgccgcggtgaatgttaacggtgaagatgtctcggaaccgattcgcactgcagaagtgaccgcgagtatccaccacatggccgacgatccggcggtccgcgaactgcttgtgttgcgacagcgggaatgggcggtcggacgcaatgtggtgaccgaaggacgcgaccagggaacagtcgtatttccggatgcggaatgcaaaatttttctcaccgcatctgccggcgagcgcgcgcgacgaaggcaggccgagcgggagatcgcgggcgagaccgtttcgatcgatgagattcgcgcagcacaagatctccgcgatgagcgggacagaagtcgaactgtggggccactgcaaaaagctgccgacgcgatcgaggtggtaacggatgggatgacgattgacgacgtgatcgcctccttagaggcattggttcaaaagaaataa

SEQ ID NO: 251515 - DNA, 204 bp, Unknown
  Bacterial polypeptide expressing nucleotide sequence isolated from the Sargasso Sea
aatgaagaagattaatgtaattactatagatggcccgtcagcatctggaaagggagcccttgccagaggaattgcgcatagatttggtttgaatattcttgatagcggagtcctatacagactttatgcttatttatctaataagactttctcctcagatcaaattgctaataaaatagaaaagcatgcagaatttaaaaaaac

SEQ ID NO: 251516 - DNA, 370 bp, Unknown
  Bacterial polypeptide expressing nucleotide sequence isolated from the Sargasso Sea
cttgaaaagaaaaatcatcacaatcgatggtcctgcagcatcaggtaagggtaaaatagctaaatatatttcgagaaaatggaaatttaaacatctagactctggaattttgtatagaaaaattgcttattttttaattgaaaataaaattaattataaatcgcattctaaaataaaggattcaataaaaaaaattaatttcatttcttttcgaaatgataaaaaacttagatatagaaatgttagtaaattagcatccaaaattgcaacatttaaatttataaggatgcatgttaataaatttcaaagagattttgttagaaaagatgtaaaaaatgactgttttgttatagacggaagggatatggct

SEQ ID NO: 251517 - DNA, 673 bp, Unknown
  Bacterial polypeptide expressing nucleotide sequence isolated from the Sargasso Sea
tatgactaaagttgtcacaattgatggacctagtggcgttggtaaagggactatatcagagtatttatctgataagcttgcctggaattacctaaatagcggtgctctctatagggccattgcttgggttgtgaaaaatgattctattcgcctcagtgatataactacattagagaatgcttcaaaaaatattcatttcacaatacaagaaaacaagctacatattgaatatgaaaataaagagataagttcactaatatataatgaagaagtcgccaaagtagcttcgaaagtatcttctgttccaaaagtacgtgaatctattctcagcattcaaagatcttttaaaaaagagccgggcttgattgctgaaggaagagatatggggtcagtaatttttcctgaagcacaagttaaaatattccttacagcttcaatagaaacccgtgcacaaagacgctttaagcagttgaaggataggaaatttaatgttagccttccggctctaattaaggatttagatgctcgtgataagagagatgaaagcagagagagttctccgcttgtaattcctgaaggagcatttgtaatagaaacggatgatttgaatgtcatcgaagtaaaaaatatagttaaagataaggtaaataaaacctatggaacaaacatttga

SEQ ID NO: 251518 - DNA, 482 bp, Unknown
  Bacterial polypeptide expressing nucleotide sequence isolated from the Sargasso Sea
catggatagaataaatgtaatcacagttgatggtccatcagcttctggcaaaggatctcttgctagaaaaattgctcaaatttttgatttagccattcttgatagtggatcgctctatagactttatgcattttttcttcaagagggtattaatctgacgtctattcctaaaattattaagactaatattgaatttacgattactcaagatgacttaagaattactcatttaaaagatgatattactgataaactaagatcagaaaaaattgcagttaaagcatcagaattaagtacttcagcagaagtacgcgatgcattgtttggtattcagagagctttttacactcacaaaggccttgttgcagatggcagagatatgggaacagttgtgttcaaagatgcaaaacttaagatatatttgactgcaacagtcgaagtgagagcaagaagaagatatttagagttgcagaaacgtgaca

SEQ ID NO: 251519 - DNA, 616 bp, Unknown
  Bacterial polypeptide expressing nucleotide sequence isolated from the Sargasso Sea
tatggaaaagtttcttttaacaattgatggcccatctggagttggaaaaacctcagttggcaaaagtattgcaactattttaaattcttgttttttctcaagtggatctatttatagatctgttgcaaaatttttactaaataacaaaaacgttcaaattgaagatttaaaaatagaaattgtttctgaacagtgcaatgttaatggtgtaatttttaatgaagaagatttatatgacaatgaagtttctgtaaaaagttcagaaattgcaaaaaaagtagggttaagaatattggtaaaagattgtctaataagttactttgaaaacctcgacaaaccacttgtaattgagggtcgggacatgggtagtgttgtatttcctgatgctgaacacaaagtatatttagatgcagatttggaaaccagaggtaaaagaagagaaggtcaatcaaatatggaggaaacagtgtccgatgttaaaagaagagattttgaagataaaaatagagtattttctcctttaactattccagaaggtgcactggttgttgataattcgaatttaactattgatgaaacaattaaactcattatagagaacttaaagcttcagtag

SEQ ID NO: 251520 - DNA, 673 bp, Unknown
  Bacterial polypeptide expressing nucleotide sequence isolated from the Sargasso Sea
atgactaaaattctcacaattgatggaccaagtggtgtaggcaaagggacgatatcagagtatttatcaaatgagttgaaatggaattatctaaatagtggtgctctttatagggctattgcttgggttgccataaatgattcgattgaaatcaatgacattattgaactagagaaggcttcaaaaaatattcttttctctctgcaaaataaaaaacttcatatctcttataaaaatatagaaatagtttcactaatttataatgaagaagttgccaaaattgcttccaaaatatcatctgagacaaaaatacgtgaatctattcatagtattcaaagatcgtttaaaaaagaacctgggctagtagctgaaggcagagatatgggatcggtaatatttcctgaagcacaagtgaaattttttctaacagcttcaatagaaacgcgtgctcaaagacgctttaagcagttgaaggataggggatttaatgttagccttccggctctaattaaggatttagatgctcgtgataaaagagataaaagcagagaaagttctccacttgttattcctgaaggagcatttgtaatagaaaccgatgatttaagtgtcatcaaggtaaaaaaaatagctaaagataaggtgaataaaacctatggaacaaacatttgaa

SEQ ID NO: 251521 - DNA, 640 bp, Unknown
  Bacterial polypeptide expressing nucleotide sequence isolated from the Sargasso Sea
tatgactatagttattgcgatagatgggcctgcaggttcaggaaaagggacaatagcaaaagaaatttcttcattttataattttccacatcttgatagtggtgttttgtatcgatcagttgcttatctgtgtcatcaaggtggtgaaaaagtttttgacgaaaaaatagtcttgaaatatgcacaaaattttaattttgaaactatagatgttgataagctaagaacagaggaaatagatcaaatatcttcaaaaatttcttcttttagttcagtaagagaaaccctaaagatatttcaactgaattttaagaaaattcatagtgataaaaggggtattgttgttgatggaagagacataactacagtaatttttccagatgctgagataaaattttatataacagcatctctaaaagatagagcaaataggcgttttgaggagttagtattaaataatccaaaaatagataaaaaacttgtaataaaagaattgcaaaaaagggatcaaagagatatggaaaggagcaccgcacctttaaaaattgctaaagatgcgataataattgatacttctgatttaacgatagaagaggtaaattcaatagtgcgaagggaaattgaaaaggtaataaagtaa

SEQ ID NO: 251522 - DNA, 355 bp, Unknown
  Bacterial polypeptide expressing nucleotide sequence isolated from the Sargasso Sea
agaataagaaacgatatgatctcctttcagagaaactttttaaaaaaaccaggattaattgcagatggaagagatatgggtacagtggtattttctgactcaaaaataaagatattcctaactgctgatgtggatgtgcgtgctaaaagaagatacaaagagttgaaagaaaagggtataaatgttagcctagcggccgttttaagtgatatgaaaatacgtgataagcaagacaaagaacgtaaacatggccctttaacaatggcacatgattcaatcttagtcgactcaacaaataaatcaattgatatagttgtttcagagatactcaaatattacgaaaatatgtattaat

SEQ ID NO: 251523 - DNA, 616 bp, Unknown
  Bacterial polypeptide expressing nucleotide sequence isolated from the Sargasso Sea
tatgaaaaagtttgtcgtaacaattgatggcccatccggagttggaaaaacctcagttggcaaaagtattgcaactatattaaattcttgttttttctcaagtggatctatttatagatctgttgcaaaatttttactaaataacaaaaacgttaaaattgaagatttaaaaatagaaattgtttctgaacagtgcaatgttaatggtgtaatttttgatgaagaagatttatacgacaatgaagtttctgtaaaaagttcagaaattgcaaaaaaagtagggttaagaatattggttaaagattgtttaattagttattatgaaaatctcgacaaaccacttgtaattgaaggtcgggacatgggtagtgttgtatttccagatgctgaacacaaagtatatttagatgcagatttggaaaccagaggtaaaagaagagaaggtcaatcaaatatggaggaaactatttccgatgttaaaaaaagagatttcgaagataaaaatagactattttctcctttaactattccagaaggcgcacttgttattgataattcaaatttatcgatcgatgaaacaattgatcttattataaagaacttaaagcttcagtag

SEQ ID NO: 251524 - DNA, 640 bp, Unknown
  Bacterial polypeptide expressing nucleotide sequence isolated from the Sargasso Sea
tatgactttagtaattgcaattgatggccctgcaggatccggcaagggaacaatagcaaaaaaaatttctttattttataattttccgcatcttgacagcggtatattgtatcgatcagttgcatatctgtgtgaaataggaggtgaaaagaatctagacgaaaatattgttttaaaatatgcacaaaatttaaatttagatgaaattgatactaataatttaagaacaaaggaaatagacgaaatatcatcaaaaatatcttcttatagttcagttagagaaagtttgaagagttttcaaattaatttcaaaaaaatacatagtgataaaaaagggatagttgttgatggtagagatataactacagttattttccccaatgcagatttaaaattttatataacagcatctctaaaagatagagcaaacaggcgtttcaaggaattaatgctaattaatccaaaaatagatgaaaaacttgtaataaaagaattgcaaaaaagggatcaaagagatatggaaaggagcactgcacctttaaaaattgcagatgatgcaattataatcgatacttctgatttaacgatagaagaggttatggtaaaagtgcatagggagattgaagagattataaaataa

SEQ ID NO: 251525 - DNA, 448 bp, Unknown
  Bacterial polypeptide expressing nucleotide sequence isolated from the Sargasso Sea
ttcagttctattcgataatgaagatatctcaaggcacctaagaaccgaagagacagccattcaagcatcgaaaataagctctgtgccatcaacaagagaaacacttcttccaatacaaagatccttttcagaaacaagtaatcttattgcagatggtagagatatgggaagtgtagtttttccaagtgcaaatttaaaatttttccttgatgcagctcctgaagttagagcaaaaagaagacatttagagttgcagaaaaggggacaagaagttaatatgcacgacctaataaatgatattgttgaaagagataaaaaagacagaacaagagatttatctccactgattaaaacagatgattctatattattagattctacaaacttagatcaggaatctattttaaatgaggctcttcaacatattaaagaaaggaatattttatga

SEQ ID NO: 251526 - DNA, 262 bp, Unknown
  Bacterial polypeptide expressing nucleotide sequence isolated from the Sargasso Sea
aagagacagccattcaagcatcgaaaataagctctttgttatcaacaagagaaatactttcttccaatacaaagattccttttcagaaacaagtaatcttattgcagatggcagagatatggggagcgtagtttttcctaatgcaaatttaaaattttttcttgatgcagctcctgaagtaagagcaaaaagaaggcatttagagttgcagaaaaggggacaagaagttaatatgcacgacctaataaatgatattggttga

SEQ ID NO: 251527 - DNA, 1972 bp, Unknown
  Bacterial polypeptide expressing nucleotide sequence isolated from the Sargasso Sea
tcactgtaggttcagtgagattccctatgtctatccagtgaaaatttatggaatacagagccgggttgagaattgcctctttacaaacatggattggtgggcaaatccatacggaggcgcagctaacatgggtcaaatatgcagatacgtcacatttgagaatagtaagattggtggagttggtggaggctctctcatggaatattgtaggatcgaggacttcaaagatccctgcgactgtagcggtataaaccgaggtgcacatggcgctccgagatctatgacacgatataattggatcatcaatggcccaggtgccaatgggataaggatcgatggtggtcaaaatggtgctggaaatagaaggggtgacatccataacattattaccattgggaataatcgcgggatgaggttaaaaggggattttcatgatgtccatcatgtgaccgcctatgataatagaatgttagatgttgatctctttgtgggtaagtatggtgagccagatgaattcaatcaaggctttcatctgaactacacacctgggaatattaacactgagatcagtaactcttttattgaggcttcttttacctgcccttcaccagactgttggacctatcctgagtcagagaccggcataaaccaaccaatggatgcatcccatctactagatctaggaatctggtttggtagatcgctaggccatagcgcgatccatcgagaaatggcagatccatggtaccttaatctgtataatgatgaatcaagtggtgaacatcctactgatcgttctcaggactatgatttcaggcccagaaagggctctagtttaattgatgcaggtaagataatccctggaataaatgatggtcaagacctacagttcaattggcctccatcctttccagggcagaaccgaagatatgtgggtgatgctccagatattggtgcttacgagtatggcgactctgtctattggatccctggatatcgctatccccatcctagttttccgatccctcgaaataatgccgtggatgtgatcccagactatagtgtcgtatggaactatccatataagaaggattatgccgggacgacagcgaccgtaaccatcaatggtcctggtgtcaatagaactgaactgtttcattatccaaataacgtatgttttcagccattccaaccaagcggaaactatacctggtctgtgatggttgatgggaagagtggaggtctatggaccttccaagttgatgatgacatctatcccttgaatgatcgatccatagatactacgatgcaggacaccatcctgcctaccaagcaaccgtttctagatgtgaaacacaaccacgttgcattcattaagttcgaggtgccaccatcagtccagggggactgggacaccaatctgaatctttttgttaatgaagtacatcaacttgatagtggaattgttatctacaggtatgatcatgagggctggggtgaaagcaaaaatgagatgaacattggcgtggtcgatcacgatctaggcacggcattggatacgatctttcccttagaccccagttcaagcgtattgatcgacatgaatgatgttattactggtcctggagagtattcctttgcactaggtgtgatcgatagcagcgatcatgttagtttttatagcaatgaggcaaacaatttctcaaagtttacaccatatcccatttattacccgagtctctcctttatgccaagcatagacttagttgacatcgtattgactgcgcctgtgaatgataccactattgccatgaattcctcttcagatgacagtatccattttgagtggaatttttcccatggagtggatgtgaatatccaagaatatcatttggtcattggtcttcctatattcaaccggaacggaagggatatgggatacatcctacatagagttatatacccaagacaa

SEQ ID NO: 251528 - DNA, 661 bp, Unknown
  Bacterial polypeptide expressing nucleotide sequence isolated from the Sargasso Sea
aatgaataagattaatgttttaacaattgatggtccatcggcatctggcaagggagagcttgcaagaggcattgcaaaacattttgactttaagttacttgatagtggagtcttatatagattattcgcttattttaatcagttagaatttagcaataatgaaataacagcaaaaattaaaaatgagatatcttttaaattaatggaaaataaattaaatgttttagaaggtaatcaagatataacagagcatttaaggtctgaagaaattgcaaaaatagcttccaaacttagttcaaaaaaggaagtgagagtatctttgtttgatatacaaagaaatttttatgataaaaaaggtttagttgctgatggaagagatatgggaacagttgttttcaaagatgctaaattaaaaatttttttaactgcctctccagaaattagagcacaaagacgttatttagagttgcagaaatatggacaagaagttaatatgcccgagctaatagctgatattgaaaaaagagacttaaaagatagctctagggaattatctcctcttttacctgatgaagaagcatatgttattgactcatcagatatgtcactagaagaagtattcagttttactgaaaatttagttaaaaaggaacttatatag

SEQ ID NO: 251529 - DNA, 501 bp, Unknown
  Bacterial polypeptide expressing nucleotide sequence isolated from the Sargasso Sea
tttggcaaagttcgacctagttatagcaatagatggtacggcagcatccggtaaaggcacaatttcaaagaaaatagcacaaaattattctgtaccgcaccttgatactggccttctataccgatttgttggatataaagttcttaaaggatttgatccggtaagcgctgcagaccagttgagtatgtccgaaatggaagttttggatttaaaaacactaaaagtatcaaatgcagcctccgaggttgctaaaaaccccttggtccgagctaaattactagaatttcagagaagttttgcttcacaacctggtggtgccattttagatggacgcgatattggaacggtaatatgtcctaatgcagatataaaattttttataagtgcttcggctgagattagagcgcgaaggagatatgaagagctcttaggcttgggtcactcaatatcactcgacaaagttttaaaagatatacaagaaagagatgaacgagattctaa

SEQ ID NO: 251530 - DNA, 591 bp, Unknown
  Bacterial polypeptide expressing nucleotide sequence isolated from the Sargasso Sea
gatgaaaaaaattaatgtggtaacgatagatggtccttcagcatcaggaaagggagcattatcaagaagcatagcgcatcgatttggatttgacattcttgatagcggactcttatatcgactttatgctttcttatctcattcaaagtttgatatagatgaaattaataaaagaattatcaaagatatatcttttatttctggagaagatagcgtgcatgttatttatcaaggaaaagaaataacgaatcatttaaggtcagaaaatattgcaaaaatagcatctaaacatagcgccaaaaaagaagtaagaagatcattatttgatattcaaaggaatttttataatgaaaaagggctagtagctgatggaagagatatgggtactgtggtctttaaagatgcaaaaataaaaatatttcttactgcatctaaagaaattagggcaaaaagacgttatttagagttgcagaatcgtggtcaagaagttaatatgcccgctctgatagcagatattgaaaaaagagatttaaaagatagctcaagagaattatcgcctcttttaccagctgaagatgctcatataattga

SEQ ID NO: 251531 - DNA, 340 bp, Unknown
  Bacterial polypeptide expressing nucleotide sequence isolated from the Sargasso Sea
cgaaaccttattaaggatactcaaaggtctttttacgatccaaatataggtttaattgcagatggaagagatatgggatcagtggtcttcccagaagctggtattaaaatttatttggatgcatcaattgaagagagagcaaaaagacgtcaaattcagttgaaagaaaagggtatggaggttaacatgcgcaaccttatctcaagcttagaagatagagactttaaggataaaaatagagatgtatctcctcttttgattccacgcggagcaaaggtgattgattcaacaaatctatcaatagatgaggtagtaaataaaataatggatttaacttaaa

SEQ ID NO: 251532 - DNA, 451 bp, Unknown
  Bacterial polypeptide expressing nucleotide sequence isolated from the Sargasso Sea
atgaagaagattaatgtaattactatagatggtccatctgcatccgggaaaggagcccttgcaagaggaatagctaatagtatgggctttaacatacttgatagtggagttttatacagactttatgcttatctatctaacatgaataaatcttcagatgaaattgcaactcaaatacaaaagcatgctgtttttaaaaaaagtaaagaaaaactttctgtaatttataaaaataatgatgtttcaagtgagctaagatcagaaataattgcaaaatctgcatctgatcatagttcaaaaaaagaagtcagagatgctctatttaatatccaaaggagtttttataatggaaatgggcttgtagctgacggaagagacatgggtactgttgttttcaaagatgctaaattaaaaatttttctaacagcatcaccaaaagagagagcaaaaa

SEQ ID NO: 251533 - DNA, 460 bp, Unknown
  Bacterial polypeptide expressing nucleotide sequence isolated from the Sargasso Sea
acctattgctgctgctcaaagccttgaaagaagtgacttagacaaatatgatcttcaaaaaccggaaatagctcaagccgctagcgaaatagcttcgattcccgaagttagagccgctcttcttgaatttcagcgaaatttttcacaaaaattgccaggcgcagttttagatggaagagatatcggaacagtagtttgtcccgatgcaaggataaaaatctttctcactgcctctttagaggcgcgagctaaacgaagatatcttgaactgtataagcataataaaaaaataagtttcgacacaatcctgaagcaaataaaagaaagagatgaacgagatcaaactcgaacgtcctcaccaatggtcgctgcaagcgatgctaaaatatttgacacttcagaattatcaataaacgaagtagtggataaggtgctcggttatattcagactaaaatttaa

SEQ ID NO: 251534 - DNA, 502 bp, Unknown
  Bacterial polypeptide expressing nucleotide sequence isolated from the Sargasso Sea
atggtttgtagtgtaattgcaatagatggtcctgctggtgtaggcaagacaacaattgcaaaaaaattatctaaaaaaatgaatgctcctgttttgtttagtggtcaactttaccgggctgtagcttatgaaatgattaagaacaaaataagcatatctcaagaaaataagattatccagattgctaaaaaattagatatgagtatttatagtgaaggagctctttacacagcaaagatagatttaatttcatcaaaaatttcatcaaataaattactcagaaaagctctcataaactatcagagaagttttccaaaaatccaaaaaaaaagaattaagtacgtaatcattgaaggaagagatattggaactgtcatttttccaagagctaaagtgaagttttttatgtgggcatcctcaaaaattagggcaaaaagaagatatgatcaggtcaaaaaaacaagtaaaaaagccaaattattatcaatccacaaagaaattg

SEQ ID NO: 251535 - DNA, 496 bp, Unknown
  Bacterial polypeptide expressing nucleotide sequence isolated from the Sargasso Sea
caaaagaagataaataaggaaataaaatttgtattaaaaaatatgaatattgaggtcatatataaaaagaaagacatttccaacgaaattagatctgaagatatagccggattagcctctcagttaagcttaaaatcaatcgttagagaaaccttatttaatattcaaagaaatttttattttaaaaaagttttggtggcagatggaagagacatgggtacagtagtttttaaggatgcaagattaaaattatttttaaccgcctcaattgaggagagagcaaaaaggaggtatttagagttgcagaatcgtggacaagaagttaatatgctcgatcttatgacagatattgagaaaagagattttaaagatacatctagagatttatctccactcttcccggcagatgacgctcatattattgattcatctaatatgtctgcagaagaggtttttttatacacaaaagatatatatgagaaggaatttttttaaa

SEQ ID NO: 251536 - DNA, 685 bp, Unknown
  Bacterial polypeptide expressing nucleotide sequence isolated from the Sargasso Sea
tatgggttttaaaattattgccattgatgggccttccggagttggcaaaagcacaattgcacgaaaacttgcttttgaactcggttgtgtatacgtcgataccggagcaatgtttcgctgtttggcgctgaattggggtaagcagggttgtccggaaagcgatctttcgttggcaaaactaggggaacagacaaggatatattttgaagatgataaaacattttgtaatgaaattgatgtgactgatgaaattcggtcagaggatatttcatcacttgcttccagaataagccttttcccttctattcgtgaagtgatgaaaaaaacgcagcgcgctttagtgaaaatagaacgcgaagctggaaatttcaaaggtgcagtacttgaaggacgagatattggtacagttgtattcccttttgcagattataagttttacatagatgcatctcctgaaattcgtgcagagcgcaggtatctgcagttacggagtaagcatgttgatgcgaattttcaggaaattctctctgctattgttgaaagagactatcaggataaaaatcggagtttagctccattaaaggctgctgaggatgcgatgattatagatactggaaacatgaaaattgatgaagttatgaaacatttgcttgataatgttgataggacaaagatatatgcatag

SEQ ID NO: 251537 - DNA, 256 bp, Unknown
  Bacterial polypeptide expressing nucleotide sequence isolated from the Sargasso Sea
catgataccagttataactattgatggtccaagtggtgcaggtaaaggaacaattgcccaaatgctggcaattgaattgaactggaatattttagatagcggtgctttgtatagaacattggcttatttcatgaaagaaaactctataggcatagagaatttcgaagaaaatcaaaatatgttaaaaacaagatttaaagtttcattcgatcctggaactcctggagagccagtaaaggttttgtttgagaatcaa

SEQ ID NO: 251538 - DNA, 509 bp, Unknown
  Bacterial polypeptide expressing nucleotide sequence isolated from the Sargasso Sea
cttgaccactgaagcaaaggtgatcgcaatcgatggttctagtgcgtcaggcaaaggtactttagctaaaattatcgctgaaaaactaaattggcgaattttagattctggttcaatctatcgagtaataggcttagtggcaaagcggtataacttgcttgagaaagagcaattattgattaaaaagattggagacattgaaattcagtttttgaagcatggttgttttgtcgatgatgaggacgtaagcgaacagatacggacggaggaggtggggaagttagcctcgactattgcagcgtatccaaatctcagatcagaggttttagacctgcagagagggtttaggaaagcccctggtttggtggctgacggacgagatatgggaaccgtggtgttccctgaggcagaggttaaattttttttggaagcttccgctgacactcgtgcccaaagacgttataacgagttgaaaaataagggtttcgatgttacgttgccgctccttc

SEQ ID NO: 251539 - DNA, 463 bp, Unknown
  Bacterial polypeptide expressing nucleotide sequence isolated from the Sargasso Sea
atgataattgcaattgacggtgaggcctctactggcaaaagtactcaagcaaagaaaattgctaaaaagctaaatattaattatagagattcaggcgcttattatagggcaattacactttctttactaagaaaccaaataaaaccaaaagaaaaattaggaaatgatttttttagtaaaattgatattactcaaaaatttgaaaatgatagtttctccatctttttaaatggtgaagatgtaacatctgaaataagaggatataaggtctcagtgaatgttagtgaatatgcaaaaaaacctgaaatcagaaacttcgtatataaacttttaagaagatcatctgagtcaacttctatagttgttgatggtagggatattggaactgttgtgtttcctgatgcagatcataagttcttcttatatgctattcctgagattagagctcaaagacgtcataaag

SEQ ID NO: 251540 - DNA, 640 bp, Unknown
  Bacterial polypeptide expressing nucleotide sequence isolated from the Sargasso Sea
atgatttataaatctattgctatcgatggtccagcagcttcaggtaaatctgcagtaggaaaattgttagcagataagttatcttatagttttctagatacaggaattatgtatagagctgttacttatttagttgaagaaattaatatgagtcctgaaaatgcatcaaattattttaagaataaacaaatttctataagtttatctaaattaagaaatcaaatattttataaaaattcagacattactgataaattattcacagacaaaattgattcgaaggtttctgattactcaaagataaagctagttagagaaaatttagttttacaacaaaagaaaatatcagaaggaactaatattgtgatggtaggcagagatataggtacaaaagtacttcctaactctgatcttaaggtttatttagatgcttctttagaaataagggctcaaagaagagttaaagatcaagatgaattaacgcttgaagaggtgaagaaaagcttagaatctagagatgttatagataaaaacagggataattcacccctaattattgataaaaatgcttatgtaataaatacagacaaacttgatattttagaagttgttgatcaaataataactatatataaataga

SEQ ID NO: 251541 - DNA, 255 bp, Unknown
  Bacterial polypeptide expressing nucleotide sequence isolated from the Sargasso Sea
aatgataattgctatagatgggccagcagcctcaggaaagagtacagctgcaattggtgttgcaaaatgtttaggtataacctatctagatacaggagcaatgtatagagcagttacatttgggctaatagataataatattgatttcagagattcattaaatattgaaaaatttttagaaaagatagaaataaaattttctgaaagtccatatgggttgcttttagacttaaatggtcgtgatataacaaaaga

SEQ ID NO: 251542 - DNA, 613 bp, Unknown
  Bacterial polypeptide expressing nucleotide sequence isolated from the Sargasso Sea
tatgaaaaaaatcattactattgatggaccttctggcgtagggaaaacaactataggtcaagaaattgctttaaatctaaattattctttcttttctagtggaaaactttatagatatgtttctaaatattcttatgatgaaaaaactactaattatgatgaatttaatttgtctatagatatatctggaaaatgccttataaacaatataagttacagcgatgatgaactttataataaaaatattaataagcatagttcagaaaatgctaaagacccattagttagagaattagttaaaaatactttgttaacattttataacgacatcccaagtggacttgttattgaaggaagagacatgggaagtgttgtttttccaaatgctgaatttaaaatttatttagatgctgatgaaaatataagaggtaaaagaagagaagatcaatctggttcacaagaaactattgaagaaataaaagaaagagatcataaagatatgaatagagaggaatcaccattagtaattcctgaaaatgcaataataattgataatacaaacaaaacaaaagaagaaacgattgaagaaattatagagaagctaaagctttag

SEQ ID NO: 251543 - DNA, 625 bp, Unknown
  Bacterial polypeptide expressing nucleotide sequence isolated from the Sargasso Sea
gctggacagtggagcattatatcgtttggtcggcgtagctgcgcgagaggcggggtttaacctcgatggacaattgtttgatgagatggctttgtctgaattcagtcgacagttggacgtgtcttttagtctaactggtgaccttgaaaatccattagttgttagactatcgggagaagatgttacgcgccgagttaggtcagacaaggcagcggccgatgcgtcggtggtggcggcgattcaaggtgttcgggagggcctgatgactttgcaaaaatcctttaggcgcgagcctggtcttgtggccgacgggcgcgatatgggcaccgcgattttcccagacgcgattgttaagatttatctcacagcaagtgcggagacgagagcggaaagacgctataagcagttgaaagataaggatattggtgttagtctgcacgacctttttcagagcatccgggctcgggatgagagggatacgaatcgtagtgcctcgcctctcaaaccggctgatgacgctcatgtcattgacagcacgcatatgacgattgatgaagtcctcagggtcgtggagtccgtagtgacaaaaagtttgggctgttcgagcgcgccatcatctcgatag

SEQ ID NO: 251544 - DNA, 487 bp, Unknown
  Bacterial polypeptide expressing nucleotide sequence isolated from the Sargasso Sea
ttgagaaaaaatatattaattactattgatggtccggctgcatcaggtaagggagagatttcaagctacatttccaaaaagtggaaattaaaacatctggactcaggtatcttatatagagcattagcatttagattactaaaaaatgatataaatttagaatctgctaatgatattaaaaaatcattgagatttataaataaaatatcatttagaaagtataagcaattaaggaatgaaaatataagtaaagcagcctcaaaaattgcaatttatcaaagtgtaagaaattttattaataaaatccaacaaaattatgtaaaagaaaatataaaatctaacggatttgtggttgatggaagagatataggatcaaaagtttttaaaaatgcagatttaaaactatatatagaggtaaatgaggaaaatagagcaaaaagaagatataaacagttgattgatactggtgaaaagtctatatacccaa

SEQ ID NO: 251545 - DNA, 578 bp, Unknown
  Bacterial polypeptide expressing nucleotide sequence isolated from the Sargasso Sea
agctctgcatctaaccctcgcttacctggacacaggacttatttatcgggcggtggccaagaaggtgttgattgccggagccgacccggaagacgctgttgttgcggaagctgaggcccgcgccatgaaacctgcggcgttgcaattagagggcctgcgcacggatgaggtggcgcaagcggcgtcgatggtgtccgccgtgcctggtgtgcgtgcggccctattggaatttcagcgcgacttcgctatctccccacctgacggtaaagctggcgccgtgttggatgggcgcgacatcggtacggtggtgtgcccttgggcgacgctaaaactgtttgttacggcatccacagagatacgtgcgaaaaggcgcgttaaggagttgcaggaccggggccttaaagctatatatgcgcgcgttttagaggacatgagggaacgcgacgctcgcgacagtgagcgtgccgtgtctcctctacagccggctgaggatgcccgcaccctggataccagcgatttggatgcgaatcaggtgtttcaagcggctctcaatttaattgggtctccgaacgcataag

SEQ ID NO: 251546 - DNA, 689 bp, Unknown
  Bacterial polypeptide expressing nucleotide sequence isolated from the Sargasso Sea
gacaaataatcaaaataccaataatggcaaaattctcaccatcgcaatagatggacctgttgcgtcagggaaaagtacagtaggccaactcgtggcacaaaaattaaacttccagtacctagacacggggataatgtatagggcaattacttggttagcctacttttcgaaaacaaacatagaaaatcacgatgaaatcaaaaatcaaattatcagtaaccctataaagatcttaaataaaatgggtacacaaataagtttgggaggaaaaattctggaatcggaacttaggaaccctttaatagaccaattagtatcagatgtgtccaaaattaatattgttcgtgaactactcgttgagcagcaacggtccatagctgcaaatagctcaggaatagtaatggtgggcagagatataggcacggtagtattgaaggacgccggcttgaaaatatatttggaagctagtctccaaaatcgtgcccaaagacgagtggtagatcgaatgaaaatgggatcacctacaactttacccgatatgatagaagaaattaagaaaagggatttaattgacagcaccagagaaaactctccattaatagcagcaaacgatgcactcatcatcgatacagatgaattggatcaaaatgcagttgctgaactaatctccaatcatgcaaaaaaataag

SEQ ID NO: 251547 - DNA, 439 bp, Unknown
  Bacterial polypeptide expressing nucleotide sequence isolated from the Sargasso Sea
aatgattcctgttatcacgatagatgggcctggagggactggaaagggaagtctttcattacggctaaaacgaacgctaggttggtttatgttagattccggcgctttgtacagagcactcgctttcagcgtttcagagagagatgtttctagtcaagatgagaaaggactcctcgaagtagctcggtcaataaacgtagagtttctggatgacggcctccaaagctcggttttactaaacgggcaagatatctcaaacctcattaggacggaagatataggtacactggcttcaaaattggcagcttctgcatcgattagagcggttctcctgcagaagcaaagagattttttaaaaagccctggtttagtcgctgatgggagagacatggggactactgtctttccgggatgcagctctgaagattttccttaccgc

SEQ ID NO: 251548 - DNA, 388 bp, Unknown
  Bacterial polypeptide expressing nucleotide sequence isolated from the Sargasso Sea
tcaaaagccgcagctctacctgctgtccgtgcagccctccttgataaacagcgacaatttgccaaacagcccccctgcggcagcggagcaattctagatggccgggacattggcacagttatccttccagatgccgatagaaaaatttttgtggatgctgcagcggatattcgagctcagcgacgatttaacgaactaaaagctgcaggagaaaaatgcgattttgccgacgttcttgcaaatattatcaaacgcgaccgtcgtgacaaaaaccgaacaattgcgccaatgacagtcgctccagatgcatttatcattgactcttctgacaagaacgccgatgaagtattccgtattgctatggattatctaaagcaacgctcataac

SEQ ID NO: 251549 - DNA, 406 bp, Unknown
  Bacterial polypeptide expressing nucleotide sequence isolated from the Sargasso Sea
gttgaaatttcttcaaaggtgagtatgataagtgctataccagagataagaagaaaaatggttgatattcaaagaagcattgcaggtaaaagcgattgtgtcttggaaggaagggatattgggacagttgttttccccaatgctgattataaattctttttgattgcggatattgatattcgtgcccaaaggagattgatagaactgaaacagacaaatgaattaattacaattgaggaaatcatatcgagtatcaaaattagggatgaattagattcaaaaagaagtcattccccacttaaacaggctttagatgcgatagaaatcgatacaagcttattaacaatcaatcagcaaattgaaaaaatagtagaaatagtaaaacaaaacaaaaaggaaacataaa

SEQ ID NO: 251550 - DNA, 205 bp, Unknown
  Bacterial polypeptide expressing nucleotide sequence isolated from the Sargasso Sea
atgaataaggtaataactattgacggaccttcagcatcaggaaaaggcacattagcaattttgttagcagagagattgaactggaaaatactagatagtggtgctttatatagggcttttgcatatttctcaataagcgaaaatgatgagagattaattgaacaagatttaagaaagatcagctttaatatcgttaataatagta

SEQ ID NO: 251551 - DNA, 348 bp, Unknown
  Bacterial polypeptide expressing nucleotide sequence isolated from the Sargasso Sea
ctgttagatctagaatggttgaaattcagcgctccattgctaagggaaaggattgtgttttagagggccgtgatatcggtactgtagttttccctaatgcagattttaaattctttttaactgcagatatattggtcagagctaaaagaagactaaaagatcttgaaaaaattggagaagaaagtaccctaaatgatttaatgagtgatattgaaaaaagagatgtttcagactcatcgagagatgtctctccattagttcaggcaagggatgcaatcgcgataaatacaagtaatctaacaattaatgaacaagttgagaaaatagtacaaataataaataactaaa

SEQ ID NO: 251552 - DNA, 499 bp, Unknown
  Bacterial polypeptide expressing nucleotide sequence isolated from the Sargasso Sea
cgaagttgttaaatcgcttgattccataaaattaaatattgatttttcatctgaaagtgagatgcaaatttttttagatgaagatgatataagcttgaaaattcgtagtcaagaagttactagtaaagtaagtgcagttagtgcacttaaagatgtaagagagatgatggtaaacattcaaagatcttttacagcgaatggtaattttgttgtcgaaggaagagatattggtactgtagtttttccagatgccaagtataaattttaccttcaagcagattatgatattcgagctgaaagaaggttagctgattttgaaaaattgaatgaagctaaaaatattaacgaaataaaagaggatttggaaaaaagagataagtacgatagtagtcgtaaactgtctccattaaaaaaacctgataatgcaattataattgatacaactctttgcacttttgaggagcaggttgacaaaattctcaaatatatagagaaataa

SEQ ID NO: 251553 - DNA, 514 bp, Unknown
  Bacterial polypeptide expressing nucleotide sequence isolated from the Sargasso Sea
cgataataatatttatgaaaaatcgattgaagagggaataaatgaacttaaaattaactttgattcgttctctaatgcccttactttgaataaaagggatattactaatcaaataaggagtaagttagtgtcctctcatgttagccagattgcaaaactaccctttgttcgttattatttgttaaaacagcaaagacagatggggtccatacgtggtttggttatggatgggagagatataggtactaaagtttttcctgatgcagattttaaattttttttaactgccaaacctgaagttagagctcagagaagatgggaagaaatggaagctaatggatacttattgggttataatgaggttttaaaaaatatattagatcgagacaagattgacaccgaaagaaaagtttctccattaataaaagctgatgacgctattgaaatagattcaacatatctatcattacagcaagttttcgaaatttgtattgctaaaataaatggtaaataa

SEQ ID NO: 251554 - DNA, 554 bp, Unknown
  Bacterial polypeptide expressing nucleotide sequence isolated from the Sargasso Sea
tatccttgaaaataatattgatatttccaataaagattctttgacaaaatttttaaaaaattttgaaatcgacttaaagaaaactaataacaacctttctttttttgttaatggaaaaaatgttacaaataaaattagaaaaagcgatgtttcgcaaaaagtaagcgaggttagcgccattcctattattagggagtatatggttagaattcaacgtagttttactaaaaataatagctgtgttatggaaggaagagatattggaactgttgttttccctgatgcagaatttaaatttttttttattgccagcgatgaagttagggcaaaaagaagacagcttgagcttgaatctttaggagaaaaaaaatctttagttaatcttatgtatgaaataaaaaaaagagataagtttgactctgagcgtggacactcaccattgagaaaagcatttaatgcgattgaagttgatactacaaatatgacaattgatgaacaggtcaactttatgcttagtaaaattaaattaaaaataggaaaaaataataaatgag

SEQ ID NO: 251555 - DNA, 661 bp, Unknown
  Bacterial polypeptide expressing nucleotide sequence isolated from the Sargasso Sea
atgaataagattaatgttttaacaattgatggaccatctgcctctggcaagggtgaattagctaaaagcattgcccatcaatttaatttcaaactccttgatagcggcattttatatagattatttgcatatttttttaatttaaaattaagtaacgaagaaatagcatcaaaaattaataatgatatatcttttgaattaaaagaagataattttaaaattttaaatcaaagcgatgatattactaattatttgcggtctgaagatattgcaaaagttgcttctatgttaagttcacaaaaagaagtaagagagtcattatttcagatacaaaggaatttttatgataaaaagggcttagttgcagatggaagggatatgggaactgtagtttttaaagatgcgaagttaaaaatttttttaacagcatcaccagaggttagagcaaaaagacgctatatagagttgcagaatcgcggacaagaagttaatatgcccgctctgatagctgatattaaagaaagagatttaaaagatagctctagagaactatcacctcttttaccagctgatgaagctcatataattgactcatctgatatgtcacttgaagaagtatttagtattactaaaaatttagttaaaaaggaaattatataaa

SEQ ID NO: 251556 - DNA, 427 bp, Unknown
  Bacterial polypeptide expressing nucleotide sequence isolated from the Sargasso Sea
tcgtgatataacaaaagaaatacgatctaaaatagtgacagataacgtaagtgaagttagtgctttgaagagtgttagaaaatctatggttttaatacaaaggaaaatgggagaagccgatgattgcgtacttgaaggaagagatataggtactgttgtttttccaaatgctgaatttaagttttttctaattgctgatgaaaaagcaagggcagagcgccgtctaaaagatttaaagacaattggtgagcaaagttcaattgaaaatgttatgaaagatttgattaaccgtgatcacaaagattcaaccaggatgcattctccattaaaaaagtctgatgatgcaattattattgacacgagtaacttaggaatcaatgaggtaattgataaaatcgtaaacatagttaactataaaggacattag

SEQ ID NO: 251557 - DNA, 514 bp, Unknown
  Bacterial polypeptide expressing nucleotide sequence isolated from the Sargasso Sea
aaatcattttcatgctgcagagcttttttctaatttaaatataaagagcattgatcatgagatgcatgtttttgagaatgaaaaagatattacttcgatccttagacgtgaaggtgttgctaaatcagcatcagagctgagcagccttaaagaaaccagagagaatttaattaacttccaaagggatttagctagtgatcgcggattggttgctgatggcagggatatgggtactgttgtgtttcctgatgcagggaccaagatttttttagtggctgatgcagaagttagggctgagagaagatttttagagttgcagaatgctggtcaagaagttaatatgcgcgatctaattgatgatattagattgcgagatgaggcagataaggctagagaaatatctcctttaatacccgcagatgattcaattgaattgaattcatcaaatctaactcttcaagaagtattgataatagttttaaaaatttataaagagaaaatcaaggaagtataa

SEQ ID NO: 251558 - DNA, 505 bp, Unknown
  Bacterial polypeptide expressing nucleotide sequence isolated from the Sargasso Sea
atgaagaagattaatgtaattactatagatggtccatccgcatctggtaaaggagctcttgcaagaggaatagctaatagtttgggttttaacatacttgatagcggagttttgtacaggctatatgcttatctatctacgatgattaactcatctgatgaaattgcaactcaaatacaaaaccatgtaaggtttaaaaaaagtgaagaaaaactttctgtaatgtacaaaaataatgatgttacaaatgagctaaggtcagaaataattgcaaaatctgcatctgaacatagttcaaaaaaagaagtcagagatgctctttttaatattcaaagaaatttttatgatggaaatgggcttgtagctgatggaagggacatgggtactgttgttttcaaagatgctaaattaaaaatttttcttacagcatcaccaaaagagagagcaaaaagacgttacatagagttgcagaatcttggccaagaagttaatatgcccgctctga

SEQ ID NO: 251559 - DNA, 379 bp, Unknown
  Bacterial polypeptide expressing nucleotide sequence isolated from the Sargasso Sea
aaaatcgatgatgaaaattaatgtgataacaatagatggaccttcagcatcaggcaaaggagctcttgctttgagaattgcaaatattttcggttttaagattcttgatagcggagctttatatagactttatgcttatttttttaaaatgaatttttcaccagatgaaataataagtcaaatcaatatgaatattatctttaataatcataaaaatagactttcaattatctataaagaagatgatattgcatccgagttaaggtcagaatcaattgcaaaattagcttcagaacttagttcaaaaaaagaagttagagatacactttttaatatccaaaggaatttttatgacggagatatattggtagcagatggg

SEQ ID NO: 251560 - DNA, 464 bp, Unknown
  Bacterial polypeptide expressing nucleotide sequence isolated from the Sargasso Sea
gaaagtccccaatggagtgcttctatcattaaatgtttttgatataccaaaagaaattcgttctgcaatagtaactactaacgtcagtgaggttagtgccttaaaaagtgttcggaaagctatggtttcaatacaaagaaaaatggcagaaattgatgattgtatacttgaaggtagagatatagggactgttgtttttccaaatgctaactataagtttttcctaattgctaataaaaaagcaagggcagaacgacgtttagaagatttaaaagccattggtgagcaaagttcttttgaaaaggttatgaaagatttaatgaatcgtgactataaagattcaaccagagagcactcgccattaaagaaatctgataatgcaattatcattgatactagtgaattaggaatcaatgaggtaattgataaaatcgtaaacacagttaaccaaaaaggacattaga

SEQ ID NO: 251561 - DNA, 355 bp, Unknown
  Bacterial polypeptide expressing nucleotide sequence isolated from the Sargasso Sea
catgaaaaaggtaataactattgacggaccttcagcgtcaggaaaaggtactttagcaatcttattggcagaaagattgaattggaaaatactagatagtggggctttgtatagggcttttgcatatttctcaataagcgaaaatgatcagagattaattgaacaaaatttaaggaagatcagctttgatatcaatgatagtagtattcaagtcctatttgaaaatgaagatatctcagggcatctaagaactgaagagacagccattcaggcatcgaaaataagctctttgccatcaacaagggaaatacttcttcctattcaaagattcttttcaggaacaagtaatcttatt

SEQ ID NO: 251562 - DNA, 492 bp, Unknown
  Bacterial polypeptide expressing nucleotide sequence isolated from the Sargasso Sea
cggaagatccagcagtggtggtggcggcagcccaagcgctctctttttcagacctggagcaagacggtctgcgacgggaggaagcaggtgcggcggcctcgaaggtggcggccctgcccgaggtgcgggctgtcttacttgcatttcaacgtaactttgccgcttgtccgccaaatggcaaatcgggtgccgttatcgacggccgggatattgggaccgtggtatgcccggaggctccctttaaactgttcctggtggcgtctgctcacgtgcgcgcgtcgcggcgtcataaagagttgcaggcacgcggtgctgaagctatatatgcgcgaattctgcgggacataaaggaccgtgacaccagggacatgtctcgatccgtagcgccccttgagccggccaaagatgcttttgtgctcgacacgagtgatttggatgcggacgcggtgtttgccgcagcgcttcaatatatcaattcgcagaaccaataaa

SEQ ID NO: 251563 - DNA, 516 bp, Unknown
  Bacterial polypeptide expressing nucleotide sequence isolated from the Sargasso Sea
aaaatcaaataaatccaaaagaaataataggaagtgatatttttagtaaaattgatatctctcaaaagtttgaaaataatattttttccatttttttaaacggtcaagatgtaacatccaaaataagaggtcataaagtttctttgaatgttagtgaatacgcaaaaaaacctgaaataagaaagtttgtttataaccttttaagaaaatcatctgagtcaaattcaataatagtagatggtagagacattggaactgtagtatttcctgatgcagattttaaatttttcttattcgctatacctgaaattagggctcaaagacgtcacaaagagataaatgatgaaagtgtcaaaattgaatcaattgaaaaagagatattgataagagatgatattgactctaatagagatattgctcctttaaaaaaagcaacagatgcctttggaattgacgtaagttatctgagtattgaggaagttttcgaaaaaatactacaaaaaataattatttaag

SEQ ID NO: 251564 - DNA, 634 bp, Unknown
  Bacterial polypeptide expressing nucleotide sequence isolated from the Sargasso Sea
atggtagaaattattgcaattgatgggccagcttctgtaggtaaatcaactttagcaaagaagattgcgtataattatgaatctccgatattgtctagtggccgtctttatcgtgcggtagctgtagaggtaataaatagaaaaattagtccaaatgacgaaaaagctattgcgaattgtgtaaaattaattgatcaagataaacttaaatcaaaaaaattattttctagcgaagtagataaaatttcatcaataatatcagcaaataaatttcttcgaaatagattaaagtcttatcaaagaaattttcctaaatataattctaaaaataacaaatatgtggttatcgagggaagagacattggaacgattatatttccaaacgctaaatataaaatttttatgtgggcggatgcaaaaacaagggcaaagagaagatttgctcaaatattaaaaaatggcaaaaatcctagccttcagaggatttataaagaaattgttacgagggatatgaatgatttaactagatcaattgcgcctttaaaaccagctgtaaattcggtattgctagatactacttatcttgatatagaacaggcttttaatattgtaagaaagctaattaaaccataat

SEQ ID NO: 251565 - DNA, 302 bp, Unknown
  Bacterial polypeptide expressing nucleotide sequence isolated from the Sargasso Sea
tgcagacggtcgggatatgggtactgtggtttttccagatgcagaccttaaaatttatcttgacgcaaatattgaaattagagcaaaaagaagacaattagagttgcagaaaaggggacaagaagttaatattcacgacctaatgacggatattttggaacgtgacaacaaagatatgagacgtgatatctccccattgagaaaggctgatgatgctttcactattgactcttcaaatctttcttcagaacaagtattaaataacgccattgatgagataaaaaaaagaggacttatatgag

SEQ ID NO: 251566 - DNA, 574 bp, Unknown
  Bacterial polypeptide expressing nucleotide sequence isolated from the Sargasso Sea
atgagttttataattattgccattgatgggccttccggagttggcaaaagcacaattgcaagaaaactagccgctaaactcagttatttatatgtcgatacaggagcaatgtttcgttgtttggcacttagttggggaaagcagggttgtccggaaagcgatctttctttgcacgaacttggcgaaaatacaaagatagattttaaagataagaatatattttgtgatgaaattgacgtgacggacaaaatcagatcagagaaaatttcatcactagcttccagaattagtcttttcccttccatccgtgaagtgatgaaaaaaaaacagcaagctatggttaaagaagaacgtgaagccggaaattataaaggggcaatactggaaggacgtgatatcggcaccgttgtttttccttctgctgattataaatattatttggatgcatctcctgaaattcgtgccgagcgaaggtatctgcaattgcatagacagaatgttgatttggattttaaaaaaatactgtcagctagtcgtgaacgcgaccatcaggataaaaatagaactttagctc

SEQ ID NO: 251567 - DNA, 514 bp, Unknown
  Bacterial polypeptide expressing nucleotide sequence isolated from the Sargasso Sea
tttgaaaaaaacaacaataatagctatagatggtccctcatcttctggaaaaagcacgattgccaaattaattgctcaacattttaattacacttatatcgattcaggttcaatatatagagcaataacatatattgctgtaaaaaacaatttaatagataatttaaaggtcaatacgtcagctataattgaaattttaaaaaaaacatctatttctttttcatttaattcaaaagaccaaaatattattagtgtagatggtgttgatcttgataatgaaataagaacttttaaaatttcaagtttggtaagcttaattgctgaaaaaaatgaaattagacaatatgtggtaaaaattcaaaaagatataagcataaacaagtctatagtgatggatggtagagatattggctctgttgtttttcccagcgctgacgtaaagttctatcttgatgcttcattagaaaaaagagctgaaaggagatggatggaattacaaaagatccgaagaagt

SEQ ID NO: 251568 - DNA, 547 bp, Unknown
  Bacterial polypeptide expressing nucleotide sequence isolated from the Sargasso Sea
tatgagttttaaaattattgccattgatggtccttccggagttggcaaaagtacaattgcacgaaaactagctgatgaactcggttgtgtgtatgtcgataccggggcaatgtttcgttgcttggcactgaattggggtaagcagggttgtccggaaagcgatctttcgttagaagaactaggggaacagacaaggatatattttgaagacgataaaacattttgtaatgaaattgatgtgactgatgaaattaggtcagagaatatttcatcacttgcttccagaattagccttttcccttctatacgtgaagtgatgaaaaaaacgcagcgcgctttagtgaaaaaagaacgcgaagctggaaatttcaaaggtgcagtacttgaaggacgtgatatcggtacagttgtattcccttttgcagattataagttttacatagatgcatctcctgaaattcgtgcagagcgcaggtatctgcagttacggagtaagaatgttgatgctgattttcaggaaattctctctgctattgttgaacgagac

SEQ ID NO: 251569 - DNA, 271 bp, Unknown
  Bacterial polypeptide expressing nucleotide sequence isolated from the Sargasso Sea
atgaatggagatcatttgcattcaccgaatagcgtccgtccggctatagcgattgacggaccagctgcatccggaaaatcatcggctggaaaaatgtttgcatctcaacttggttatagatttctcgatactggtcttatgtatcgagctgccacctgggatgtgatgaataatgggatcgatatcaatgaatccgaagccgtttctcgtgtagttggaaagatggaattctcagttattgacggtgaatctggtgaaaatctcattttgg

SEQ ID NO: 251570 - DNA, 306 bp, Unknown
  Bacterial polypeptide expressing nucleotide sequence isolated from the Sargasso Sea
atagatcaattgtcattgatggaagagatattggtactgtagtttttcctgatgcagaatataagttttttataactgcatctatagaatctagagcgcaaagacgatttgatgaactaaaagatagtgattcaagtcttactctagaaaaaataaaggaagaaattaaaaatcgggatgactatgattcgagcagagaaaattctcccttaaaaaaagcaaatgacgcgatcgttattgatactactcatttaaatataagtgggcaagtcaatgagattttggaaataattaacaataactagg

SEQ ID NO: 251571 - DNA, 653 bp, Unknown
  Bacterial polypeptide expressing nucleotide sequence isolated from the Sargasso Sea
ttccggggttggcaaaagtacaattgccagaaaaatagctgctgagtttagctatgtatatgtcgatactggagcaatgtttcgctgcttggcactaagttggggtaaacaaggttgccctgaaaacgatctttctttacaggaactgggtgaaaagacaagaataaattttaaaaatgaaaaaatattttgcgatgaaattgatgttacggatgaaattaggtcagaggaaatttcattacttgcttcaaaaattagtttgtttccctccattcgtgaagtgatgaaaaaaaaacagcgagctatggtaaaagaagtatgtgaaatcggaaaacataaaggggcagtattggaaggccgtgatatcggtacggttgttttcccatctgcagatcataagttttatatagatgcatctcctgaaattcgtgccgatcgcaggtatatgcagttgctaaaacaagatattgatgttgattttcaggacattctgtctgcgattcttgaacgcgacaatcaggataaaaatcgaattttagctccattaaaagctgcagaggatgcgataattatagatactggaaacatgagaattgatgaagttatggaatatttgattaagagtttagatcgttcaaagatatacgtatagg

SEQ ID NO: 251572 - DNA, 461 bp, Unknown
  Bacterial polypeptide expressing nucleotide sequence isolated from the Sargasso Sea
aatgaaattagatgttgctattaaatccattcctacacaaagagattttgatggaattcctttaagttcacgtaatgtacatttatcaaaaaacgaaagaaaattgattagttttttttcaagtgagttattagaagcaaaaaaaaaatttcaacaagataaaaagatcaatttaaaccaaataattaagaagctatcagcaaaaaaaatttcaattgaatatttagaacatttacaccctcatacactccaaaaagcgagacttgaggataatatttcgttattggctggtgcgataaaatgtggagagacaagattaattgatcacgtttttctaatgaaaagaaggccgattattgcaattgatggtcctgcaggttcaggtaaaagtactgtaacaaagttaatagcgaagaaacttaaacttttatatttagatactggcgcaatgtacagggcat

SEQ ID NO: 251573 - DNA, 385 bp, Unknown
  Bacterial polypeptide expressing nucleotide sequence isolated from the Sargasso Sea
gaagaaatagccaagaaaacgtctgatttagctacagaaccttcaataagggattttattaaaccctgccaaagagattttatgcagcctccaggtctaattgccgacggacgcgatatgggaactgtcatatttaaagacgcaagaactaagatatttcttactgcttctctggaagaacgcgcaaaaagaaggaaagttcagttgaaaagacagggaagcgaggttaacatgcgcctccttttacaagagttagaagaaagagacaaaaaggacatagaacgagaacactctcctttaaagcctgctgctgactcggtaataatagatacaagtaatttagaaccagatggagttattgaaaaaataaagaaaaatctttaat

SEQ ID NO: 251574 - DNA, 358 bp, Unknown
  Bacterial polypeptide expressing nucleotide sequence isolated from the Sargasso Sea
tatgccaagtaaagttattactattgatggcccatcagcttcaggtaaaggaactttagcaaaattattatctaaacagattaacttcgatttacttgacagtggtgccctttatcgcgcatttgctttttttactaaccaaggattaagtcatgaagttatcacaaaaaaactatcatccatttcatttattttaaaacatgccaaagttcaaatcgtttctgacaatgaagatattaccaatgaattacggatggaaaggattagcatacttgcttcagaattgagttccaaatctctgacacgaaagtgctgttgccgattcaaagaggtatggagcaaattcaaatttggttgc

SEQ ID NO: 251575 - DNA, 571 bp, Unknown
  Bacterial polypeptide expressing nucleotide sequence isolated from the Sargasso Sea
aaaatactagatagtggtgctttatatagggcttttgcatatttctcaataagcgaaaatgacgagagattaattgaacaaaatttaagaaagatcagctttaatatcgttgataatagtattcaagttatatttgaagatgaagacatctcaaggcatctaagaactgaagagacagccattcaagcatcaaaaataagctctttgacatcaacaagagaaatacttcttccaatacaaagattcttttcagaaacaagtaatcttattgcagatggtagagatatggggagcgtagtttttcctaatgcaaatttaaaatttttccttgatgcagctcctgaagtaagagcaaaaagaaggcatttagagttgcagaaaagaggacaagaagttaatatgcacgacctaataaatgatattgttgaaagagataaaaaagacagaacaagagatttatctccactgattaaaacagaagattctattttattagattctacaaatttagatcaggaatctatcttaactgaggctcttcaacatattaaagaaaggaatattttatgag

SEQ ID NO: 251576 - DNA, 655 bp, Unknown
  Bacterial polypeptide expressing nucleotide sequence isolated from the Sargasso Sea
aatgagttataatataaaaattgctattgatggaactgctgcttcaggtaaaggaactttagctaaacgtttatgtgaagaatttaaatttgcttatttagatactggaaaattatataggttagttgcttatataactatcacagaaaatatagattatactaattcagaattagtagcagaacaatttttaaattatgatttaaatagaatatcttctttaggaacagaattaaaaggagatgaaataggaaaaatagcttcagtggttgctagctatcaaagcctgagaaaaattttattaaagtatcaacaggacttcgcaaataaaaaacaccataataagaaaggtgtaattttagatggtagagatataggaactgtggttttaccaaatgctcatattaagttttatgtagatgcttctatagaaattagagcagaaagaagatggaaagagttgatttctttgggacaaagtactataaagcgcaatgtcttggaagatttaagaagtagggataaacgtgatagccaaagaaaaatctcacctttattgcccgcttcagatgcgatcttactagataccacgaatttggacgctgatgaagtttttgatttggcgagaaaatacatagtaaattatttgaattaa

SEQ ID NO: 251577 - DNA, 406 bp, Unknown
  Bacterial polypeptide expressing nucleotide sequence isolated from the Sargasso Sea
ttgaaaaaaattcttattactattgatggacctgccgcatctggcaaaggacgtattgcaaaatacattgcaaaaaattataattttattcacatagactcaggtcttttatatagaaaagtagcaaaattaattattgataataaaattgatttaaaaaagatcaaagaaataaaggaaattcttataaagcataaaaatttatctttaagaaattctaatcaactaagaaatgagcatattggcaaagtaacttcaattgttgcaaaaatgaattttgttagaaatcatgtaaataaacagcaaattttacattcgaaacaaaaaactatcaaaaaagggtttgtcatagatggacgagatattggttctgtgttttcaaaaatgcagatctcaagctatatat

SEQ ID NO: 251578 - DNA, 320 bp, Unknown
  Bacterial polypeptide expressing nucleotide sequence isolated from the Sargasso Sea
ccgcagacccggcggcacggttctcgatggacgcgacacgggtacggttatttgtccggaagccgacgtgaagctcttcgttacggcatcggtcgaggagcgggcgcgacggcgtcatgccgagctcgtcgagcgcggcgaggccatttcgctcgaggaggtcaccgccgatgtgcaacggcgcgactatcgcgaccgtaatcgcagcgcatcacccctgcagcgggcgcctggggcatacttgctagacacctcgaatttgtctatagacagcgcgttcgcgaaggcgaaggcgtttattagcaagcatttagggtaag

SEQ ID NO: 251579 - DNA, 662 bp, Unknown
  Bacterial polypeptide expressing nucleotide sequence isolated from the Sargasso Sea
gttgaaaaaaataataattactattgatgggcctgcagcatctgggaaagggcgtattgctaaatatatttcaaaaaaatacaattttattcacatagactcaggtctattgtacagaaaaattgcaaaactattaattgataataaaattaatgtaaaaaacattaatcaaataaaaaaaatacttatgagaaataataatttttcattaagaaataacaataatctgagaaatgagcatatagggaaagtttcttcaattattgcaaaaatgaattttgttagaaatcatgtaaataaacagcaaattttacatacaaaacaaaaaaataaaaaaagggggtttgttatagatggaagagatattggttcagttgttttcaaaaacgctgatctcaagctatttatagaagtaaacccagttgttagggctaaaagaagacataaacagttgattgatttaggtgaaaagtctatatacgccgaaattttaaaggaaattaaattgagagatagacaagatataattagatcaaattcacctttagttgttccaaaaggtgctcatgttatagataattctggattatttaaacaaacattaaacaaaataaatcacttgattggacaactaaataatggaaaaaactgcacaaaaaaaa

SEQ ID NO: 251580 - DNA, 386 bp, Unknown
  Bacterial polypeptide expressing nucleotide sequence isolated from the Sargasso Sea
gttgagaaaaattattattactattgatgggcctgcagcatctggaaaagggcgtattgcaaaatatatagctaaaaaatataattttttccatatagactcaggcttattatatagaaagattgcaaaattattatttgacaacaaaattgatataaaaagtataaagcagataaaacaatttttagccaaaaataaaaaactttcattgagaaataataaaaatttaagaaatgagcaaattggaaaagcatcatctatcattgcaaaaatgaatttggttagagattacgtcaataaacaacaaattttgtatactacacagaaaacatccaaaaaggggtttgtaatagatggtagagatattggttcagtggtttttaaaa

SEQ ID NO: 251581 - DNA, 742 bp, Unknown
  Bacterial polypeptide expressing nucleotide sequence isolated from the Sargasso Sea
gctttcagctgctggtctcgaggtggagtatgtagagagggtcgatcccatcacgcttcagccctgtgggtctgaaacagccatctcgctgctggccgcggcggtgcgctgcggaacgacacgcttgatcgatcacgtctttttgatgacccgccagcctctcgttgccattgatggcccagccggtgctggcaaaagcaccgtcacccgggcctttgcggagcgaatgggcctgatttatctcgataccggtgcgatgtaccgatctgtgacctggcttgtgcagaagagcggtgttgatcccaccgacgctgccgccattacacctttgctccagagtttggatttgcagctgcggtcactgcctggcagtggccagcaggtgttggtgaatggtgaggacgtcagtgaagcgattcgatcccctgaggtgacgggcttggtgtcggttgttgcagcgcaccgttgcgtgcggcaggcgctcaccgcgcagcagaaggccatgggtgccaagggtggcttggtggcggagggtcgcgacatcggcaccgctgttttcccggatgctgatctgaaggtgttcctcacggccacggtgggcgaacgggcccggcgccgggctctcgacctggagcagcgggggtttcccgttccagagcgctccgagctggaggcgcagatcgccgagcgcgatcggctggacagcacccgggaggaggccccgttggtgaaggctgccgat

SEQ ID NO: 251582 - DNA, 535 bp, Unknown
  Bacterial polypeptide expressing nucleotide sequence isolated from the Sargasso Sea
ttattttattaagaataatttaaacattaatgaaatagatattgcctctgttatgaattcaatcaagcttgaggtattaatttctaatggcgaacaatctgttttgttaaatggagatgatgttacaagtatgttgagaagcaatgaggtatcaaagcttgttagtcgggtaagttcaatcagagaagtaagacaaaaaatggttaatatccaacgtgagatttcacaggatagatcaattgtcattgatggaagagatattggtactgtagtttttcctgacgcagaatataagttttttataactgcatctatagaatctagagcgcaaagacgatttgatgaactaaaagatagtgattcaaatcttactctagagaaaataaaggaagaaattaaaaatcgggatcactatgattcgaccagagaaaactctcccttaaaaaaagcaaatgacgcgatcgttattgatactactcatttaaatataagtgggcaagtcaatgagattttggaaataattaacaataactag

SEQ ID NO: 251583 - DNA, 604 bp, Unknown
  Bacterial polypeptide expressing nucleotide sequence isolated from the Sargasso Sea
ttatgtagatacaggagcaatgtatagagctataacttattattatttatctaacggattgcttcaaaataatttatttattgagggttgggagagtcatcttgactcaattgttctttcatttgaaaagcataaaaattataatactaatgttatttttctaaatggagaatgtgttgagcataaaataagaacaatgcaggtttcttcattggtttcctatgttagtaaacaagctataattagagaaaagcttgttgattttcagcaatctattgggaaaaacagtggggtggtaatggatggtagagatataggtagtgtagtatttccgaatgctgagattaaattttgggttactgcaagtgctagggtaagagctcaaagaagatatgaggaaattattaatagcggactttcggtagattttgaagatgttttacagaaccttaaggatagggattttgaagattctaatcgaaaaataagtccactgaaaagacctgaggattcttttctggttgatagttcaaatttaactattcagcaaacgctaaactattcaatggattttataacttcttattttgagaataaaaattga

SEQ ID NO: 251584 - DNA, 341 bp, Unknown
  Bacterial polypeptide expressing nucleotide sequence isolated from the Sargasso Sea
aatgagtaattcaaccaatgaaaaaattattgcgattgatggtccggcaggatcaggaaaatccacgatcgctaaagctttagcaaaaaaactaaacctagattatttagacacgggagcgatgtatcgagcggtgtcttttatctccattcagcagaacatcgatgtacttgacgagaaaaaagttttagcaattgctaaagaaatggattttaactttgaagatgggatttgtgtagtcaatggttttgatgcaaccagagacattagagggtctgaggttacaagagtcgtgagtgtggtcgcagcgatgcctacagtacgtcaagaaatggttgaca

SEQ ID NO: 251585 - DNA, 548 bp, Unknown
  Bacterial polypeptide expressing nucleotide sequence isolated from the Sargasso Sea
aatgataaataatttaaaatcaattgccatcgatggtcctgctgcttcaggtaagtctgcagtagggaagaaactttctgaattattaaattatgattttctagatactggaattatgtacagagcagttacgtatatttctatttcagagctattagatccagttttagtttcagcttattttgcaaagagtttacttaaggtaaagctcaagggtgaaaaaaataaaatatactataaaaataaggatataaccagctttttgttttcagattctgtagataaaaatgtttctgatatttcaaaaataactagagttagaaaaaatttagttaaggagcaaataaatatatccaaaatcaataatatagttatggtaggtagagacataggtacaatagtacttcctaactcaaatctaaaaatatatttagatgcatccatagatattcgagcaaaacgaagatcaaaagaacttggattaaattcttttgatgttgagaaaaaaataaaattaagagatgttgttgattctaatagaaaaaatt

SEQ ID NO: 251586 - DNA, 347 bp, Unknown
  Bacterial polypeptide expressing nucleotide sequence isolated from the Sargasso Sea
catgacaaacaactttagatctattgctattgatggtccagctgcatctggtaagtcagttgtgggtaaaaaattatctgaattgataaactatgaatttttagatacaggaattatgtacagggcagtaacttatgtatctaaaactgagtcaatagatcctattttggtttctaattattttaaagaaaaaattattgaagttatttttgatgataaaaataacaaaatatattataaaaaaaatgaaatcacaaatagtttattttcagacttagttgatacaaatgtctctgaaatatctaaaattattgaagtaagaaagaatttagtaatagaacagagaa

SEQ ID NO: 251587 - DNA, 448 bp, Unknown
  Bacterial polypeptide expressing nucleotide sequence isolated from the Sargasso Sea
tatgggttttataattattgctattgatggtccctctggagtgggaaaaagcacaattgccagaaaactagcaattgaacttagttgtgtatatgtcgatactggagcaatgtttcgcagtttggcgctgagttggggaagacagggttgtccggaaagcgatctttttctgcaggaactgggtgaacagacaaggatatattttgaggatgagaaaactttttgtaatgaaattgatgtgactgatgaaattaggtcagaggatatttcatcacttgcttctagaattagtcttttcccttccatccgtgaagtgatgaaaaaaaagcagcgagctttggtgaaagaagaatgtgaatccggaaattataaaggtgcagtactggaaggtcgtgatatcggtacagttgtattcccttatgcagatcataagtttttcatagatgca

SEQ ID NO: 251588 - DNA, 646 bp, Unknown
  Bacterial polypeptide expressing nucleotide sequence isolated from the Sargasso Sea
atgataatagcaattgatggagaagcctctacaggcaaaagtactcaagcaaagaaaattgctaaaaagttaaatattaattatagagattcaggtgcttattacagggcaataaccctttatttaattaggaatcatataaacccaaaagaaatattaggagaggatatttttagtacaattgatatttctcaaaaatttgaaaatgatagtttttcaatctttttaaatggtgaagatgtaacttctaagataagagctcgtaaggtatcattaaatgttagtgcatatgcaaaaaaatctgaaataagaaacttcgtttataatcttttaagaaaatcatctaaatcaaattctatagttattgatggaagggatattggtactgttgtgtttcctgatgcagattttaaattctttttgtatgctattcctgaaattagagctcaaaggcgtcataaagaaataaatgatgaaactgtcaaaattgaatcaattgaaagagagataaaagaaagggatgatatagactctactagagacattgctcctctcataaaagcagaagatgcttatggaattgatgtaagctatctagctattgatgaggtatttgaggaaatacttgaaaaaataactacttaaa

SEQ ID NO: 251589 - DNA, 664 bp, Unknown
  Bacterial polypeptide expressing nucleotide sequence isolated from the Sargasso Sea
ttgaaaaataataatattattactgttgatggtccatctgcatctggcaaaggatcgctggctaaagcattagcaaaagagctcgattttattttactagatagtggtttgctttatcgagcatattcatattgttattatcaaagtaaaaatcattctgctgcaaagggcctattttcaaatttaagaatcgaaagcgttgatcatgagatgcatgttcttgagaataacaaagatattacttcagtccttagacatgaaaatatagctaaatctgcatctcaattgagcagcttaaaagaaacaagagataacttaattagttttcaaagagacttggccagcgataatggattggttgcagatggcagggatatgggcactgttgtatttccagatgctggcactaaaatttttttagttgctgatgctgaagtaagagcaaagaggaggtttttagagttgcagaatgcgggtcaagacgttaatatgcgcgatctaattgaagatattagattgcgtgatgaggccgataaggtaagagaaatatctcctttgatgccagcggatgattccattgaagtgaattcctctaatctaactcctcaagaagtattgaaaatagttttaaaaatttataaagaacatacaaaggaagtataaa

SEQ ID NO: 251590 - DNA, 543 bp, Unknown
  Bacterial polypeptide expressing nucleotide sequence isolated from the Sargasso Sea
ttgagcatgatgtttcgccggacgacatcactgggcttgagcggttgattagaacagtcgatattggtttttcacggaccgttgccggcttgaatatcgtggcggatgggagagatatcaccgaccacgtccggagcgagagaggcgggaaacgagcctcgatttacgcgaaaattccgtcggttcggcaggggctcttggccaggcaacgacagatgcgggcagcgcctggactagtcgccgacggacgcgatatgggcacagtggtgttcccggatgccttcctgaagatcttccttgacgcctcagcatccatcagggcacaaaggcgctataaccagttgaaggaaaagggttttagtgttacattgcgccgcctcgaaaaagagattgcagaccgagacgcccaggaccggaatcgttcagtgtcgccactgattcctgcggtcgacgcggttgttctggatacatcggagaaggggattgtcgaagtcttcagtgaggtcgtgacacttatggaagatcgattgccaacctgctgaa

SEQ ID NO: 251591 - DNA, 544 bp, Unknown
  Bacterial polypeptide expressing nucleotide sequence isolated from the Sargasso Sea
tatagagcaataccttatttctttaaaaaaaagggaattactactgctaatagaattgataaaaatgacttaaacagaatatcgcttaactctaaatatgatgatggaaaaaattcaatctatttaaatgatgaagatgtttcaaatgatatcagatctactgatatttctgaaattgttagtgattttgctaaggaaaaaactgttagagaacatgtatacaagcatctaagagagttttccgaaaaccgatctactgttattgatggaagagacataggtactgttgtttttcccaatgcagattttaagttttttttatatgcaaaacctgaaattagagcaaaaagaagattttctgaaataaataaagatgatatcaattatgactctgttcttgataatcttaattatagagatatcactgattcaacaagaaagattgcccctctaaaaaaggcttatgatgcacattctattgatgtatcagatctttcaatagatcaggtatttgaaaaattactcagtataattgaaaaatagt

SEQ ID NO: 251592 - DNA, 232 bp, Unknown
  Bacterial polypeptide expressing nucleotide sequence isolated from the Sargasso Sea
atctttctaacagcttccgcagaagaaagagctaaaagaagacaaacacagttgaaaagacaaggtttggaggttaacatgccaacccttttacgagagttagaggagagggatcgtaaagatacggaaagagagcattctccgttaattcccgctgaagactctgtgttgattgatacaagtaatttaaaccctgaaggagtggtaaaggaaataaaaacttacctttaaa

SEQ ID NO: 251593 - DNA, 649 bp, Unknown
  Bacterial polypeptide expressing nucleotide sequence isolated from the Sargasso Sea
catgacaaacaactttagatctattgctattgatggtccagctgcatctggtaagtcagttgtgggtaaaaaattatctgaattgataaactatgaatttttagatacaggaattatgtacagggcagtaacttatgtatctaaaactgagtcaatagatcctattttggtttctaattattttaaagaaaaaattattgaagttatttttgatgataaaaataacaaaatatattataaaaaaaatgaaatcacaaatagtttattttcagacttagttgatacaaatgtctctgaaatatctaaaattattgaagtaagaaagaatttagtaatagaacagagaaaaatatcagaatctaacagtatagttatggttggaagagacataggtactatagtacttcctaagtctgaattaaaagtatacttagatgcttctattgcagttagagctaaaagaagatcagaggaattgggattagattcaagtgatattgaaaaaaaactaaaatcaagagatattactgattcaagtagaaaaaattcaccactaagaatagatgaagatgctcatcttataaatactgataacctaaatataggccaagttgtaatgatgattaaagatttaataccaaatgactaa

SEQ ID NO: 251594 - DNA, 658 bp, Unknown
  Bacterial polypeptide expressing nucleotide sequence isolated from the Sargasso Sea
ttggatacagtaattattgctatagatggtcaagcatcaacaggtaagagtactcaagcaaaaaaattagctgaaaatctcaaatatgactatagagattccggagcatattacagggcaattacactttatttgttagataatgatattaaattcgatttaaacatttctgataaaatactagataaaattaatattaaacagacttatcaagagggacaatttagtatttacctaaatgatgatgatgttacagataagataagaggccataaggtatctataaatgttagtaactatgcaaaaaaaccagagattagaaagtttgtctttaatcaattgaggaaatctagtgaatctaattctttagttgtagacggtcgagatattggaactgttgtcttcccttatgctgattttaaattttttttagttgctgaacctaaaattagagctgagagaagacataaacaaattaatgatgattctgtcaaagttgatattattgaagaagaaatcaaacaaagggataaaactgattcaactagagaaattgccccattaaagaaggctgtagatgcatttaagattgatgtatcaacccttacaattaatcaagtttttaataaaatactccaaaaaattaagtcagattaga

SEQ ID NO: 251595 - DNA, 3646 bp, Unknown
  Bacterial polypeptide expressing nucleotide sequence isolated from the Sargasso Sea
atgactgaccgacacctttcccccgttccctccgacgccgcgcgctggcaattctggatcgaccgcggcggcacgttcaccgacatcgtcgcgcgccggcccgacggcacgctcgtcacgcacaagctgctgtcggagaacccggagcaataccgcgacgcggccgtggccggcatccgccacctgctcggcctcgcggccggcgagccgatcacgcccgagcgcgtcgacatggtgaagatgggcacgacggtcgcgaccaacgcgctgctcgaacgcaagggcgaacgcaccgcgctcgcgacgacgcgcggctttcgcgacgtgctgcgcatcgcgtaccagaaccggccgcgcctgttcgacctcgacatcgtgctgcccgatgcgctgtacgagaccgtcgtcgagatcgacgagcgcgtcggcgcgcacggcgaggtggtcgtgccgctcgacgttcagggtgccgaagcgtcgttgcgccgcgtgttcgactcgggcgtgcgtgcgctcgcgatcgtgctgatccacggctatcgctacaccgcacacgaacgcatgctggccgaactcgcgcgccggatcggcttcacgcaggtgtcggtgtcgcacgaggtgtcgccgctgatgaagatggtgtcgcgtggcgatacgaccgtggtcgatgcgtacctgtcgccgatcctgcgccgctatgtcgagcaggtcgcgcacgagatgcccggcgtgaacctgcagttcatgcagagcagcggcgggctgacgcgcgccgatgcgttccagggcaaggacgcgatcctgtcgggcccggccggcggcatcgtcgggatggtgcgcgccgcgcaggcggccggcttcgagcgcgtgatcggcttcgacatgggcggcacgtcgaccgacgtgtcgcactaccacggcgagttcgagcgcgtgttcgagacgcaggtggccggcgtgcggatgcgtgcgccgatgatgagcatccatacggtggccgcgggcggcggctcggtgctcggcttcgacggcgcgcggctgcgcgtcgggcccgagtcggccggcgcgaacccggggccggccgcctaccggcgtggcggcccgctgacggtgaccgactgcaacgtgatgctcggcaagatccagcccgatcatttcccgcgcgtgttcggcccgcacgcggacgaaccgctcgaccgcgacggcgtggtcgcgaagttcgcggcgctcgccgacgagatccacgcggccaccgggcggcgcgagacgcccgaggcgctcgccgaaggcttcctggaaatcgcgatcggcagcatggcgaacgcgatcaagaagatttccgtgcagcgcggccacgacgtgtcgcgctacgtgctgacgacgttcggcggcgcgggcggccagcacgcgtgcggcgtggccgatgcgctcggcatgacgcaggtgttcgcgcatccgctggcgggcgtgctgtcggcatacgggatgggcctcgccgaccagaccgcgatgcgcgagcgcgcggtcgaggccgtgttgtccgacgattcattgccggtgctgaatgccgcgctcgaccggctggccgacgaggccgccggcgcgctgctcgaacagggcgtgccgccggagcggatcgcgaccgagcggcgcgtgcacctgcgctaccagggcaccgattcgacgctcgacgtgccggccggcagcgtcgaggcgatgcagcaggcgttcgaagccgcctaccggcagcgctacgcgttcctgatgccgggcacgccgctcgtcgccgaactcgcgtcggtcgaggcgatcggccgctccgacgcgccggtggagattgcaccgctcgcgccgcgcaacgagggcgacgaggccgcgctgcgcgcccattccgcggtgcgcttctactccggcggccgatggcacgacgcggcgctctacgtgcgcgacacgctgctggccggcgacgcgatcgacggcccggcgatcgtcgcggagcagaacggcacgaccgtcgtcgagcccggctggcgtgcgcagatgaccgcgcagggcaacctcgtgctgacgcgcaccacgccgctgccgacgcgccgctcgctcggcacggacgccgacccggtgcggctcgagatcttcaacaacctgttcatgtcgatcgccgagcagatggggctgcggctgcagaacaccgcgtactcggtgaacatcaaggagcggctcgacttctcgtgtgcgatcttcgacggcgacggcaacctgatcgcgaacgcgccgcacatgcccgtgcacctcggctcgatgggcgagagcatccgcacggtgatcgagcgcaaccgcggccgcatgcgcgacggcgacgtgttcatgctgaacgacccgtatcacggcggcacgcacctgccggacgtgacggtcatcacgccggtgttcgcggacggttcggacgcgccgctgttctacgtcggctcgcgcggccaccacgcggacatcggcggcacgacgccgggctcgatgccgcccgattcgacccacatcgacgaggagggcgtgctgatcgacaactggcagctcgtgtcggccggcacgctgcgcgatgcgcaaacccgcgcgctgctcgcgtcgggccgctacccggcgcgcaacgtcgagcagaacatggccgacctgcgcgcgcaggtcgccgcgaaccagaagggcgtcgacgagctgcgccggatggtcgcgcagttcggccgcgacgtcgtgctcgcgttcatggggcacgtgcaggacaacgcggaagaagccgtgcggcgcgtgatcggcgcgctgcaggacggcgcgtaccgctatccgctcgacaacggcgcggagatccgcgtcgcgattcgcgtcgaccgcgcggcgcggcgcgcggaaatcgatttcacgggcacgtccgcgcagctcgacaacaacttcaacgcgccgaaggccgtctgcatggccgccgtgctgtacgtgttccgcacgctggtcggcgacgacatcccgctgaacgccggctgcctgaagccgctcacggtgatcgtgcccgcgcgctcgatgctgaaccccgagtatccggcggcggtcgtgtcgggcaacgtcgagacgtcgtcggccatcaccaatgcgctgtacggcgcgctcggctgcgtcgcgtcgagccagggaacgatgaataacttcacattcggcaacgatcagtaccagtactacgagacgatcgcgggcggcagcggtgccggcgacggtttcgccggcgtcggcgcggtgcagacgcacatgacgaactcgcggctcaccgatccggaggtgctcgaatggcgctacccggtgcggctcgattcgcaccggatccgcgccgggtcgggcggcggcgggcgctggcgcggcggcgacggtgcggtgcggcggatccgcttcctggcgccgatgaccgcgtcgatcctgtctaacaaccggattcatgcgccgttcggtgcggcgggcggcgaggccggcgcgctcggccgcaacacgatcgagcgcgcggacggcacggtcgaggcgctcgaccatatcggccgcgcgcagatggcgccgggcgatgtcttcgtcgtcgaaacgccgggcggcggcggatacggcgcggcgggctgag

SEQ ID NO: 251596 - DNA, 616 bp, Unknown
  Bacterial polypeptide expressing nucleotide sequence isolated from the Sargasso Sea
atggaaaagttcattcttacaattgatggtccatcaggagtgggtaaaacatcaattggcaaacatttagctgatattcttaagtgtaattttttttcaagtggaaatgtttatagatctttagctatgtttataaataaaaatattgatgaggattatggaaaatatgatatcgagatattagatggtatttgttacgtaaatagagaaacatatagttcggaagacttgtattcaaatgaaattacaataattagttctaaaattgccaaggaagaaaagattagaaattatgttaaagaaagtttattaaaatattatcaaactttagataaatctttagttatcgaaggaagagatatgggcagtgtcgtatttcaaaatgcaaaatataagatatatctagatgctgatttgataactagaggtaaaagaagagaggatcagtcaaaaatgaatgagactgtatttgatttaaaaaaacgagatttagaagattcaaatagattaatttctccattaaaagttcccgatggagctttagtaattaacaatacagatttaactcttcaagaaacgattgatttaattataaagaagctaaggcttcagtagc

SEQ ID NO: 251597 - DNA, 549 bp, Unknown
  Bacterial polypeptide expressing nucleotide sequence isolated from the Sargasso Sea
cattttatagagcaataaccttattctttaaaaaaaagggaattactactgctaatagaattgataaaaatgacttaaataaaatatcgcttaattctaaatataatgatggaaaaaatttaatctatttaaatgatgaagatgtttcgaatgatatcagatctattgatatttctgaaattgtaagtgattttgctaaggaaaaaactgttcgagaacatgtatacaagcatctaagagagttctcaaaaaaccattctaccgttattgatggaagagatatcggaactgttgttttccccaatgcagactttaagttttttttatatgcaaaacctgaaattagagcaaaaagaagattttctgaaataaataaagatgacatcaattatgactctgttcttgataatcttaattatagagatatcactgactcaacaagaaagattgcacctcttaaaaaggcttatgatgcacactctattgatgtatcagatctttcaatagatcaggtattcgaaaaactgctcattataattgaaaaatagt

SEQ ID NO: 251598 - DNA, 283 bp, Unknown
  Bacterial polypeptide expressing nucleotide sequence isolated from the Sargasso Sea
gctgacggacgcgatatgggaactgtcatatttaaagacgcaagaactaagatatttcttactgcttctctggaagaacgcgcaaaaagaaggaaagttcagttgaaaagacagggaagcgaggttaacatgcgcctccttttacaagagttagaagaaagagacaaaaaggacatagaacgagaacactctcctttaaagcctgctactgactcggtaataatagatacaagtaatttagaaccagatggagttattgaaaaaataaagaaaaatctttaat

SEQ ID NO: 251599 - DNA, 637 bp, Unknown
  Bacterial polypeptide expressing nucleotide sequence isolated from the Sargasso Sea
atgatatttgttgtcgctattgatggtactgcagcatctggaaaggggactttaggcaaaaaaattgctgaacattttgattttcattacttagatacaggtattttgtatagagttgttgcttataatttgaaatataattcagatttttcaaaaatttcaaagcaaaaagtccaaaattccttaaagttattaaataataaaaattttaacatcactaatttaaggaatgaacaaataacccttagagctagtgaaatttctaagaataaaattgttagggataaccttttactacaccaaaggagatttgcgttacaaaatggtggagcagtattagatggtagagatattggtacagttgtatgccctgatgccgacgttaaaatatttatagatgcagacgtcaagattagagctaaaaggcgatatgatcaattagttaaaaataataaggatttaaatctaaaaaacataattaatgacctttccaagagagataatttagacaaaaacagggagttttcacccatggttcctgcgaaagatgcctttttgttagatacttcaaatctaactgttgaagaagcattaaaaaaattaattgtaattatttcaaaaaaattcaaaaaataac

SEQ ID NO: 251600 - DNA, 640 bp, Unknown
  Bacterial polypeptide expressing nucleotide sequence isolated from the Sargasso Sea
ttgaaaaaaataattatcactattgacggcccagcagcttcaggtaaggaaaaaattgctaaatatataagtaaaaaatggaatttgtatcatttggatacaggaactttatacagacaagttgcttttaattttttagaaaaaaaagtaaatataaagtcaattaaggatattaaaaaatatttaataaatcaaaattttcttacttttagacaaaataagaaattaagaactgaaaaaattagcaaattagcttcaaaaatagctgtattcaaatatattagaaaatatgtaaacaatttccaaatagagtttgttcaaaagcatattaaatataaaggttttgttatagatggtagagatataggatcagttgttttcaaaaatgctgaattaaaactatatatagatgtaaacgaagaaaatagagcaaaaagaagatataaacagttgattgatagtggtgaaaagtctatatacccacaaattttgaaggaaattaaattgagagataaaaaagataaatctagaaaaaactcgcctctagtggtgccaaaaggctcgtttgttattaacaacaatggcagttttaaagaaaccaaaaaacaaatagattttttaatttccaaaatatcataat

SEQ ID NO: 251601 - DNA, 661 bp, Unknown
  Bacterial polypeptide expressing nucleotide sequence isolated from the Sargasso Sea
atgaaaaagattaatgttgtaacaattgatggcccatcagcttctggcaagggcgagttagcaaaaggtattgccaatcattttaattttaagctacttgatagcggtattttatatagattatttgcatatttttttaatttaaatttaagtaatgaagaaatagcagcaaagattaataatgaaatatcttttaaattagaagaagaaagttttaaaattttcaatcaaagcgacgatattacgacttatttgcgctctgaggatattgcaaaagttgcttctaaattaagctcacaaaaagaagtaagaaaatcattatttcagatacaaagagatttttatgataaaaggggtttagttgcagatggaagggatatgggaaccgtggtttttaaagatgcgaagttaaaaatttttttaacagcatcgcctgaggttagagcaaaaagacgctatttagagttgcagaatcgtggacaagaagttaatatgcccgctctgatggctgatattgaaaaaagagatttaaaagatagctctagagaattatcacctcttttaccagctgatgaagctcatataattgactcatcagaaatgtcacttgaagaagtatttagtattactaaaaatttaattaaaaaggaacttatataaa

SEQ ID NO: 251602 - DNA, 358 bp, Unknown
  Bacterial polypeptide expressing nucleotide sequence isolated from the Sargasso Sea
tatgaatactaagcctgtttctgtcataacaatagatggtcctagcggagctggaaaaggaacaatagcgcagatgctagccttagagttgaaatggaatattcttgatagtggagctttgtatagaactttagcctactttatgatggaacaaaatattagtctggataactttgaacaaaaaaaatcatttgtaaaagagaattttatagttaattttgatcctggagttgtcggggaaccagtaaaagtaatttttaaagatgaggatattactaataaagttagaactgaagaaatagccaagaaaacgtctgatttagctacagaacctttaataagggattttattaaaccc

SEQ ID NO: 251603 - DNA, 340 bp, Unknown
  Bacterial polypeptide expressing nucleotide sequence isolated from the Sargasso Sea
atgataatcgctattgatggacctgcagcctctggtaagagtaccacagctaaattagttgctaaaaaattaaaagtaacttatttagatactggtgctatgtatagagctgttactttacaattattaagatctaaaattgattttgttgatattgataaagtttcggctattcttgatgatctcattattgatatgtttgatcataaaggtgtaaatattgtgaaaataaatgatgaggatgttactggggaaataaggtcaagtaatgttactaaatatgttagtgaggttagtgcattgctttctgttcgagagtctatggttgttatgcaaacga

SEQ ID NO: 251604 - DNA, 646 bp, Unknown
  Bacterial polypeptide expressing nucleotide sequence isolated from the Sargasso Sea
atgataatagcaattgatggtgaggcctctactggcaaaagtactcaagcaaagaaaattgctaagaagttaaatattaattacagagattcaggcgcttattatagagcaataactctttttttaatgaaaaatcaaataaactcaaaagaaacaataggaaatgatctttttagtaaaattgatatttctcaaaaatttgaaaatgaaagtctttttatctttttaaatggtgaaaatgtaacatctaaaataagaggacataaagtttcagtgaatgtaagtgaatatgcaaaaaaaccggaaataagaaacttcgtatataaacttttaagaaaatcatctgagttaacttctatagtagttgatggaagggatattggaactgtggtgttccctgatgcagattataagttcttcttgtatgctattcctgaaattagagcaaaaagacgtcataaagaaataaatgatgaaagtgtaaaaattgaatcaattgccagagagataaaagaaagagatgatacagattctaatagagatattgctccactaaaaaaagctgaggatgctcacggaattgatgtaagctatctaactattgatcaggtatttgaggaaatacttcaaaaaataattatttaaa

SEQ ID NO: 251605 - DNA, 613 bp, Unknown
  Bacterial polypeptide expressing nucleotide sequence isolated from the Sargasso Sea
atgaaaaaagtcattactattgatggaccttctggcgtagggaaaacaactattggtcaagaaattgctttaaatcttaattattctttcttttctagtggaaaactttataggtatatatctaaatattcttatgatgtaaaaactagcaattatgatgaaattaatttggtgatagatatatctggaaattgccttataaacaatattagttacagtgatgatgaactctataataaaaatattaataaccatagttcagaaattgctagagacccattagttagagaattagttaagaatactttgttaactttttataacgacatcccaggtggacttgttattgaaggcagagacatgggtagtgttgtttttccaaatgccgaatttaaaatttatcttgatgctgatgaaaatataagaggggagagaagagaacatcagtcaggctcacaagaaactattgaagagattaaacaaagagatcataaagatatgcatagagaggaatcacccttagtaattcctgaaaatgcagtagtaattgataatacaaacaagacaaaagaagaaacgataaaagaaattatagagaagctaaagctttagt

SEQ ID NO: 251606 - DNA, 488 bp, Unknown
  Bacterial polypeptide expressing nucleotide sequence isolated from the Sargasso Sea
aatgaataagattaatgttgtaacaattgatggaccatcagcctctggcaagggtgaattagctaaaagcattgcccatcaatttaatttcaaaatccttgatagcggcattttatatagattatttgcatatttttttaatttaaaattaagtaacgaagaaatagcatcaaaaattaataatgatatatcttttgaattaaaagaagataattttaaaattttaaatcaaagcgatgatattactaattatttgcggtctgaggatattgcaaaagttgcttctatgttaagttcacaaaaagaagtaagagagtcactatttcagatacaaaggaatttttatgataaaaagggcttagttgcagatggaagggatatgggaactgtggtttttaaagatgcgaagttaaaaatttttttaacagcctcaccagaggttagggcaaaaagacgttatttagagttgcagaatcgcggacaagaag

SEQ ID NO: 251607 - DNA, 673 bp, Unknown
  Bacterial polypeptide expressing nucleotide sequence isolated from the Sargasso Sea
aatgactaatgtaattacaatcgatggtccaagtggcgtaggcaaaggaaccatatctgagcatttatcagatcagcttaaatggaactatttaaacagtggagcactatatagagcaattgcatgggtggctagaaatgatttgataaatttgaatgatgcaaaaggactagagaaagcttcaaaaaatattatattttcacttgaaaataaaaaactaaaaattcaatacaaaaataaagacattggttcactaatatatgatgaagaagtagcaaaaattgcctctaaagtatcttcaaaaccaaaagttcgtgaatcaatcatagctattcaaagatcatttaaaaaagccccaggcttagtagctgaaggcagggatatgggttcagttatttttccagagtcacagctaaaaatctttttaacggcatctatagaaacaagagcgcaaagacgctttaagcagttgaaggatagggaatttaatgttagccttccggctctaattaaggatttagatgcccgtgataggagagataaggaaagagtaaattctcctcttgttatccccaaaggggcatttgtaatagaaacggataacttaacggttatcgaagtgaaaaatacagttaatgaaaaggtaaataaaacctatggaacaaacatttga

SEQ ID NO: 251608 - DNA, 562 bp, Unknown
  Bacterial polypeptide expressing nucleotide sequence isolated from the Sargasso Sea
gcgctttacaggctggttggattagtatctcaaagaatggactctaaagattcagagataatcgaaaaggaaattggttcaaaaaaaatagctatgaatttaaatccaaagctaatggagacagaaattttttttggaactgaaaatgtaacaaaattactcaaatcagatgaaattgctaatgaggcttcgaattttgcagctgataaaaaaataagagaaatattaaaaaattatcaaaaaaaattttatgatccagaattaggtctagtcgcagatggaagagacatgggcacagttatttttcctgaggctaagtggaagttttttctcattgcatcaattgaagagagggcaaaaagaagggaagagcagttgaaagatattggtttggaagttaatattgccaaccttatagatagcatcatggctagagacagcagagataccaatagagatgtttctcctgcaatcccagctgaagatgccatcacaatagattctagtaatttaagtattgaagaattaaagaaaaaaatattgggaatagtaaaaacttaat

SEQ ID NO: 251609 - DNA, 685 bp, Unknown
  Bacterial polypeptide expressing nucleotide sequence isolated from the Sargasso Sea
atgagatttataattattgccattgacggtccttccggagttggcaaaagcacaattgctagaaaactagctactgagctaagttgtttatatgtcgatacaggagcaatgtttcgttgtttggcacttagttgggggaagcagggttgtccggaaagcgatctttctttgcaagaacttggcgaaaatacaaagatagactttaaaaatgagaacatattttgtgatgaaattgatgtgacggatgaaatcagatcagaggaaatttcattactagcttccagaattagtctttttccttccatccgtgaagtgatgaaaaaaaaacagcaagctatggttaaagaagaatgtgaagccggaaattataagggcgcagtactggaaggacgtgatataggtaccgttgtttttccttctgcagattataaatattacttggatgcgtctcctgaaattcgtgccgagcgaaggtatctgcaattgcaagtacagaacattgatttggattttaaaaaaattctgtctgctattcgtgaacgcgaccatcaggataaaaatcgaattttagctccactaaaggctgctgaggatgcgataactatagatactggaaacatgaatattgacgaagttatgaaacatttacttaaagatatagaccgtaaaaagatatatacatagg

SEQ ID NO: 251610 - DNA, 664 bp, Unknown
  Bacterial polypeptide expressing nucleotide sequence isolated from the Sargasso Sea
gatgaaaagaattaaagtcatcacaattgatggacctgccgcgtcaggtaaaggatctttagctataagcattgcaaacaaattttcttttaagcttcttgatagcggctctctttatagattatttgcattgtttgaaagaagaaatatagatcatatagagattgttgaaactattaagaatcgagttgagttcgaattaactaaagatagtcaaaatataattttagataaaaatgttgatattactaatgagcttaagtctgaagaagttgccaaatctgcatcaatattgagctcacaaaaggaggttagaaaccatttatttaaactgcaaagagacttttatcaaggttctggattagtagcagatggaagagatatgggaacagttgtctttaaagatgcaaaattaaaaatttttcttactgcatcacctgaggttagagcaaaaagacgttatttagagttgcagaatcgtaaacaagaagttaatatgcccgctctaatagatgatatcaagcaaagggatttaagtgatagcacaagagaaatatcacctttattaccagcagatgatgcacaaataattgactcatctgatatgtctttagaagatgtatttagttatgctgaaaatttaataaggaaggaatttatataa

SEQ ID NO: 251611 - DNA, 640 bp, Unknown
  Bacterial polypeptide expressing nucleotide sequence isolated from the Sargasso Sea
atgatttataaatctattgctatcgatggtcctgcagcttcaggtaaatctgcagtaggaaaattgttagcagataagttgtcttatagttttcttgatacaggaattatgtatagagctgttacttatttagttgaagaaattaatatgagtcctgaaaatgcatcaacttattttaagaataaacaaatttctataagtttatctaacttaagaaatcaaatattttataaaaatactgatattactgataaattatttacagacaaaattgattcgaaggtttctgattattcaaagataaagttagttagagaaaatttagttttacaacaaaagaaaatatcagaaggaactaatattgttatggtaggtagagatataggtacaaaagtacttcctagctctgatcttaagatttatttagatgcctctttagaaataagggctcaaagaagagttaaagatcaagatgaattaacgcttgaagaggtgaagaaaagcttagaatctagagatgttatagataaaaacagagataattcacccctaattattgataaaaatgcgtatgtaataaatacagacaaacttgatattttagaagttgttgatcaaataataactatatataaataga

SEQ ID NO: 251612 - DNA, 316 bp, Unknown
  Bacterial polypeptide expressing nucleotide sequence isolated from the Sargasso Sea
catgaataagataataactattgacggaccttcagcatcaggaaaaggtacattagcaatcttgttggcaaacagattggactggaaaatacttgatagtggtgctttgtatagggcttttgcatatttctcaatttgtgaaaatgatcacaaattaattgaagaaaatttaagaaagatcagctttaatattgttgataatagtattcaagttctatttgaaaatgaagatatctcaaggcatctaagaactgaagagacagctattcaagcatcaaaaataagctctttgttatcaacaagagaaatactttct

SEQ ID NO: 251613 - DNA, 463 bp, Unknown
  Bacterial polypeptide expressing nucleotide sequence isolated from the Sargasso Sea
aatgactgatgttattacaatcgatggaccaagcggtgtaggcaaaggtactatatctgagtatttatcagatgatcttaaatggaattatcttaatagtggagctttatatagatcaatcgcatgggttgctattaatgattcaatcaatttatccgatattattggattagaagaagcctcaaagaacattcaattctcactcagaaataaaaaacttaagatcgaatacaaaaatttagaaattaattcattgatatacaatgaagaagtagcaaagattgcatcaaaagtatcgtctaaatctgaagtacgtcaatcaatcataactattcaaagagcttttaaaaaagaaccaggcttagtggctgaaggtagagatatgggatcagttatttttccagaggcgaaactaaaaatctttctaacagcatcgatagaaacaagggcacaaagacgcttt

SEQ ID NO: 251614 - DNA, 661 bp, Unknown
  Bacterial polypeptide expressing nucleotide sequence isolated from the Sargasso Sea
atgaaaaaaattaatgtggtagccattgatggcccttcagcatcaggaaagggaacattatcaagaagtatagctcatcgatttggattggatattcttgatagcggactcttgtatagactttacgctttcttatctcattcaaagtttgatacagatgaaattagtgaaaaaattagtaaagatatatcttttattcctgaggaagatagcctgcatgttatttatgaaggaaatgaaataacaaatcatctaaggtcagaagatattgcaaaaattgcatctgaatatagcaccaaaaaagaagtaagaaaatcattatttgatattcagaggaatttttataatgagaaaggcctagtagcggatggaagagatatgggcactgtagtctttaaagatgcaaaaataaaaatatttctaaccgcatccacagaaattagagcaaaaagacgctatttagagttgcagaatcgtggtcaagaagttaacatgcccgctctgatagatgatattgaaaaaagagatttaaaagatagctcaagagaattatcgcctcttttaccagctgaagatgctcatataattgactcttcagaaatgtctcttgaagaagtattcagttttactgaaaatttaattaaaaaggaatttatataaa

SEQ ID NO: 251615 - DNA, 301 bp, Unknown
  Bacterial polypeptide expressing nucleotide sequence isolated from the Sargasso Sea
aatgagccaaacagtaatagccatagatggaccagccgcctcgggcaagggaacgatatcaaaagcgatatcagagaaattgggatttaattatttagatactggaaaactctatagagcaattggggctaaatatttggatggatatcaacctattgctgctgctcaaagcctagaaagcaatgacttagaaaaatatgatcttgaaaaaccagaaatagcacaagccgcgagtgaaatagcctcgattcctgaagttagagccgctcttcttgagtttcagcagaaattttcacaaaaa

SEQ ID NO: 251616 - DNA, 313 bp, Unknown
  Bacterial polypeptide expressing nucleotide sequence isolated from the Sargasso Sea
aagagagttctcaaaaaaccaatctactgttattgatggaagagacataggaactgttgtttttcccaatgcagattttaagttttttttatatgctaaacctgaaattagagcaaaaagaagattttctgaaataaataaagatgatattaattatgactctgttcttgataaccttaattatagggacaccactgattcaacaagaaagattgcccctcttaaaaaggcttacgacgcacattctattgatgtatcagatctttcaatagatcaggtatttgaaaaagttctcagtataattgaaaaatag

SEQ ID NO: 251617 - DNA, 649 bp, Unknown
  Bacterial polypeptide expressing nucleotide sequence isolated from the Sargasso Sea
taatgttgtaacaattgatgggccatcagcttctggtaagggtgaattagcaaaaagcattgcacatcactttgatttcaaactccttgatagcgggattttatatagactatttgcatatttttttaatctaaaattcagcaataaagaaatagtagaaaaaattaataatgaagtatcttttaaattggatagagatagttttaaagttttcattcaaaaaaaagatattacgatacatttgcgatcagaggatattgcaaaagttgcttctaaattaagttccaaaaaggaagtgagagaatcattatttcaattacagagaagtttttatgacgaaagaggcttggttgctgatggaagagacatgggaactgtagtttttaaagatgctaagttaaaaatctatttaactgcatcacctgaggttagagcaaaaagacgctatttagagttgcagaatcgtggacaagaagttaatatgcccgctctgatagctgatattgaaaaaagagatttaaaagatagctctagagaattatctcctcttttaccagctgatgaagctcatataattgattcatcagacatgtcgcttgaagaagtattcagtcttactgaaaatttagttaaaaaggaatttatataa

SEQ ID NO: 251618 - DNA, 394 bp, Unknown
  Bacterial polypeptide expressing nucleotide sequence isolated from the Sargasso Sea
tatgaataaggtaataactattgatggaccttcagcatcaggaaaaggcacattagcaattttgttagcagagagattgaactggaaaatacttgatagtggtgctttatatagggcttttgcatatttttcaataaacgaaaatgatgagagattaattgaacaaaatttaagaaagatcagctttaatatagttgataatagtattcaagttctatttaaaaatgaagatatatcaaggcatctaagaactgaagagacggccattcaagcatcgaaaataagctctttgtcatcaacaagagaaatacttcttccaatacaaagattctttttacaaacaagtaatcttattgcagatggtagagatatggggagtgtagtttttcctaat

SEQ ID NO: 251619 - DNA, 691 bp, Unknown
  Bacterial polypeptide expressing nucleotide sequence isolated from the Sargasso Sea
gatgaacggcgaatggccggtcctcgccatcgatggccccagcggctcgggcaagggcaccgtcgccggcctgctggccaagcgcctgggctggaacctgctggactccggcgcgttgtatcgcctgctggcgttcgctgccggtaaccacggtatcgacctgaccaacgaggaagccctcaaggtcctggccgcacacctggacgtgcagttcacccatgccaagggcggacagggtcagcacatcatcctcgaaggcgaggatgtcactgataccatccgtacggagcaggtcggcgccggcgcgtcgcaagtcgccgcgctgccggcggtgcgcgatgcgctgctgcaacgccagcgcgccttcctcgaagcccccggccttgtcgccgacggccgcgacatgggcaccgtggtcttccccagcgcgccgctgaagatattcctgacagcgtcggccgaagagcgcgcccgtcgccgttacctgcagctcaagggcaagggtatcgacagcgatcaggcgcagctggcggaagaaatcagcgcccgcgacgagcgtgacagccagcgtgccgtggctccgctcaagcccgccgaaggcgccatcctggtggactccacctcgatgagcatcgaagaggtcgtggacagtatcctcgccgaggtttctcgtcgcggcctggcggactag

SEQ ID NO: 251620 - DNA, 658 bp, Unknown
  Bacterial polypeptide expressing nucleotide sequence isolated from the Sargasso Sea
atggtaattacaattgatggtgcggcaggagttggtaaaacatctactgcaaaagagttagcaaaaaggctaggataccagtactttgacacaggtgctatgtatcgtgcagtaacattcttttttattaatcagaatgttgatttaacatcagagagtgaggtggataattcactcaaatccataaaattgcgtatagatttttcgtctgaaagtgatatgagaatttttttagatgaagatgatattagtttgaaaattcgtagtcaagaagttactagtaaggttagtgcagtaagtgcaattaaagaagtaagagaaatgatggttcaaattcaaagatcttttactaaaaaaggtaactttgttgttgaaggtagagacattggcacagttgtatttcctgatgcaaaatataaattttatcttcaagcagactatgatattagagctaaaagaaggttggctgattttgagaaaattaatgaagccaagaatattaacgaaattaaagaggatttggaaactagagataagtacgatagcacacgtaaactatctccattaaaaaaaccagtagatgcaattataattgatactactctttgttcttttgaagaacaggttaaccaaattttaaaacatatagagaaataac

SEQ ID NO: 251621 - DNA, 664 bp, Unknown
  Bacterial polypeptide expressing nucleotide sequence isolated from the Sargasso Sea
atgaaaaaaattagcgttattacaatcgatggaccttcagcatccggcaaaggttcactagcaaaaaatattgcaaaccactttgattacaaccttcttgatagcggagtcctttataggttatttgcgatgcttgagagcaagcaaaaagattattttgaaattattaatataatcaaacatcaagtcgactttgcattgaaagaagaaggcctaaaaataatattagatcaaaaagtagacattacacatgatcttagatctgaagaaattgctaaatctgcatctcaattaagctctaaaaaacaagtgagagagcttttgtttggattacagagggatttttatgacggtggtggattggttgctgatggtagagatatggggacggttgttttcaaagatgcaaaattaaaaatttttcttacagcatcccctgaagtcagagcaaaaagaagatatttagagttgcagaatcgtggccaagaagttaatatgcccgctctgatagctgatattgaggctagagatttaaaagatagttctagagaattatcacctctcttgccagcagatgatgcaataataattgattcatcagatatgacgcttgaagaagtattcagttttactgaaaatttaataaaaaaggaatttatataaa

SEQ ID NO: 251622 - DNA, 628 bp, Unknown
  Bacterial polypeptide expressing nucleotide sequence isolated from the Sargasso Sea
gatgaattcaaaaattataactatcgatggcccaagtggagttgggaaaggcaccctggcaaagaatctctcagatgagttaggatggatcgtattagatagtggatctttatacagaatggttgggtatctttccttgaagagtgatacaaaagatttttctgagataagtaatataataaataaagaagaaatttcttttaaattcttaaaaaagaattcaaatatttctttatttttaggagaagaaaacctttcagaatttataagaaacgaagaagtagctaaactggcatcagaatttgcagttatgccagaggtaagggaatatctatttaaaattcaaagatcttttttagacaaaggcaaaggtcttattgcagatggaagagatatgggcacaattctttttcctgaagcaaaacataaatttttcataactgcatctgttgaagaaagagcaagaagaagagagaatcagttgaaagaatcaggattgagcgttaatatgcgcaaccttcaagagcgaattgaggaaagagataaaaaggattcgtctagagtaatttctcccttggttcccgctgaagatgcggtagtcatagattcttcaaatattggaatttat

SEQ ID NO: 251623 - DNA, 451 bp, Unknown
  Bacterial polypeptide expressing nucleotide sequence isolated from the Sargasso Sea
tatgaaaaataatattatcaccattgatggaccgtcagcatctggaaagggaacgcttgctaaagctatttcaaaagaatttaatttccatttacttgatagcggtcttttgtatagggcatacgcttttttaaaattaaaaggaatagataccctagatttggtaaatgagattaaaaataaatttatattcgatgcatctgaaagtgaaacaattattttttatgaaaatattgaaattactagtgaaataagaagcgaaaagatagcaaaatttgcctctaaaataagtacctttgataagactaggaaggatcttttaactatccagagatctttttataagctccctggacttgttgcagatggaagagatatgggtacagtagtatttcctgaggcaaagattaaaatttttttagacgcatccgcaacagaaagagcaaataga

SEQ ID NO: 251624 - DNA, 625 bp, Unknown
  Bacterial polypeptide expressing nucleotide sequence isolated from the Sargasso Sea
atgaagaagattaatgtaattactatagatggaccttctgcatctggaaagggagcgcttgccagaggaatagccgataaatttgattttaatattcttgatagtggggttttatacagattatatgcttatttatctaaaaagagtttttctccagatgaaattgctaatgaaatagaagggtatgtggagtttaaaaaaaataaagaaaaacttttagtgagttataaaagcaatgatgttacctctaagttaaggtcggaaataattgcaaagtctgcttccgaacatagctcaaaaaaagaggtcagagacgctctatttaatattcaaagaaatttttatgatggagatggtttagtggcagatggtcgagatatgggaacggttgtatttaaagatgcaaaattaaaaatttttcttacagcctcacctgaagagagggcaaaaagacgctttatagagttgcagaatcttggacaagaagttaatatgcccgctctgatagcagatattgaacaaagagataaaaaagatagttctagaaaattatcacctcttttgccagccgaagatgctcatataattgactcttcaaatatgaagcttgacgaagtattcagca

SEQ ID NO: 251625 - DNA, 621 bp, Unknown
  Bacterial polypeptide expressing nucleotide sequence isolated from the Sargasso Sea
aatgataattgctatcgacggaccagcggcctcaggaaagagtacagctgcaattggtgttgcaaagcgtttaggtataacctacttagataccggagcaatgtatagagcggtaacatttgggctaattgaaaataatattggatttgaggattcatacagaattgacagctttttagaaaaaatagaaataaaattttctgaaagtccaactggagttcttctaaccctaaatggtcgtgatataaccaaagaaattcgatctgcattaataactaataatgtcagtgagattagtgctttaaagactgttcgaagatctatggttataattcagcgaaaaatggcagaagttgacgattgcgtgcttgaaggtagagatataggtactgttgtttttcccaaggctgactttaagttttttctaattgctaataaaaaaactagagcagaacgccgattagaagatttgaaggctattggtgaggaaggttcaatagaaaaggttatgattgatttgaagaatcgtgatcacaaggattcaaccagaatgcactctccactaaaaaagtctgatgatgcaattatcattgatacaggtgacttaggaatcaatgaggt

SEQ ID NO: 251626 - DNA, 495 bp, Unknown
  Bacterial polypeptide expressing nucleotide sequence isolated from the Sargasso Sea
attgattattgcgatcgacgggcctgctggggcgggtaagacaacggtgagtgaacgcgttgcggaggctttaggctttattcgccttgataccggcgctctgtatcgcgccgtcgcttacgcggctctagccgccgaacttacgcctggcagctccgggttggggcaatttgtgaaggggttggatatctcttttgtggatggagacgtctgccttaacggggtcaacatcgcgaagagtattcgaacgcctgcggtcagtgctgcggcctcagctttttcggcggttggggatgttcgcgcgggccttcttgagctgcagaggtccataggtagcaagcaaaattcagtagtagatggcagagatattgggacagtcgtctttccggaggcggaactaaaaatctatcttaccgcgagcgttgaggcgagagccgagcgacgctggcgagagcttcaaggtaagggtcaagatgcggacctagaggtgatcaa

SEQ ID NO: 251627 - DNA, 586 bp, Unknown
  Bacterial polypeptide expressing nucleotide sequence isolated from the Sargasso Sea
atgaaatttatcgttgctattgatggaactgcagcttctggaaagggaactttagcaaaaaaaactgcaaatcatttcggttttaaatatctagatactggaattttatatagagttgtagcctattatttaaaatttgcagaaaagcattctgaaatttcaaaacaaaatgttcaagattcattaagactattaattgataaagatttccaattaagtcatttaagaaacgaagaaatatcgcttaaggcaagcataatatccaaaaataaaattgttagagataatcttttgacttatcagagagaatttgcgatgcaagaggggggtactgttttagatggtagagatattggaactgtagtatgtccaaaagctgatgtaaaaatatttgtagatgctgatatagagataagagctaaaaggaggtataaccaatatctgaaaaataattcaaatttgaatttaagtgatataattgatgatttaaaaaagagagattattttgatagaaacagacaactttctccattagtatcagcaaaagatgcctacttattagatacatcaaatatatacttctgaa

SEQ ID NO: 251628 - DNA, 676 bp, Unknown
  Bacterial polypeptide expressing nucleotide sequence isolated from the Sargasso Sea
aatgattattgcgattgatggtccagctgcttcaggaaaaagcacctcagcgaagctattggcaaaagaactaggatatctctatttagatacaggagctatgtaccggtgcatagctttttctatccttgagaataaaattgatatttccaatcaagattctttaacaaaatttttaaaaaattttgaaatcgacttaaagaaaactaacaacaacctttctttttttgttaatggaaaaaatgttacaaataaaattagaaaaagcgatgtgtcgcaaaaagtaagcgaggtcagtgccattcctattattagggagtatatggttagaattcaacgtagttttactaaaaataatagctgtgttatggaaggaagagatattggaactgttgttttccctgatgcagaatttaaatttttttttattgccaacgatgaagttagggcaaaaagaagacagcttgagcttgaatctttaggagaaaaaaaatctttagttaatcttatgtatgaaataaaaaaaagagataagtttgactctgaacgtggacactcgccattgagaaaagcatttaatgcgattgaagttgatactacaaatatgactattgatgaacaggtcaactttatgcttagtaaaattaaattaaaaataggaaaaaataataaatga

SEQ ID NO: 251629 - DNA, 667 bp, Unknown
  Bacterial polypeptide expressing nucleotide sequence isolated from the Sargasso Sea
atgaattcaaaaatcataactattgatggcccaagtggagtaggaaaaggcactctggcaaagaatctttcagatgagctagattggatcgtgctagatagcggctctttatataggatggttggatatctttctttgaagaatgatacaaaagacttttctgagataagttcaaaaataaataaagaagaaatttcttttaaattcttgaaaaagaattcaaatatttctttatttttaggagaagacgacctatcagagtttataagaaatgaagaggtagctagactggcgtctgaatttgcggttataccagaggtaagggaatatctctttaaaattcaaaggtcttttttagacaaaggaaaaggacttattgcagatggcagagacatgggaacaatcctttttcctgaagcaaaacataaatttttcataactgcatctgcagaagaaagagcaagaagaagagagaatcagttgaaagaattgggattgagcgttaatatgcgcaaccttcaagagcgaattgaggaaagagataaaaaagattcttctagagaaatttctcctttgattcctgctgaagatgcagtaattatagattcctcaaatattggaatttatgagctgaaagataaagttttagagttaataaggagttaaa

SEQ ID NO: 251630 - DNA, 610 bp, Unknown
  Bacterial polypeptide expressing nucleotide sequence isolated from the Sargasso Sea
aatgagccaaacagtaatagctatagatggaccagccgcctcgggcaagggaacggtatcaaaaattatatcaaaaaaaatgcgatttaactatttggatacaggaaaactttacagagcaattggagctaaatatttggagggacaccaacctattgctgctgctaaaaaccttaatatcaatgatttagacaaatatgatcttaaaaaaccggaaatagctcaggccgctagcgaagtagccgcgattcctgaagttagagccgcccttattgagtttcagcgaaatttttcacaaaaattgccaggcgcggttttagatggaagagatatcggaacagtagtttgtccagatgcaaagattaaaatctttctcacagcctctttagaagcgcgagctaaacgaagatatgttgaattatacaagcatgataaaaaaataagtttcgacacaatcctagagcaaataagagaaagagataaacgggatcaaactcgcaggtcctcaccaatggttgcggcaagggatgctaaaatatttgatacttcaaaattatcaataaacgaagtagtggataaagtgttaagttatattcatactaaaatttaa

SEQ ID NO: 251631 - DNA, 535 bp, Unknown
  Bacterial polypeptide expressing nucleotide sequence isolated from the Sargasso Sea
tatgtctgatgttaatatcataactatagatggaccaagtggaactggaaaaggaacggtatgtatttatttaactaaattactaaattggcattttcttgatagcggcgctctttatcgtgttttggcttatgctgcagaaactcttggtgtaaattatgaaaatgaggttgaattagtaaaattagtcaagagattgaatatagaatttaaattattaaacccagagagcgtggtcgatgtatttctcgatgggaaaaatgttacaaacaaaattcgcacagagacttgtggaaaagcagcatcgcttatagctcctaaagcatctatacgcaaagctttgctcgttttacaaagaggatttctaaagaagccaggtttgattgctgatggtcgagatatgggtactgttgtatttccaggcgcacaactaaagatatacttgactgcgagtattgaagttagggccaaaagacggttcaaacagttgaaggatgcaggttttagtgttaatctccgccgccttcacgcagaa

SEQ ID NO: 251632 - DNA, 577 bp, Unknown
  Bacterial polypeptide expressing nucleotide sequence isolated from the Sargasso Sea
aatgaagaagattaatgtaattactatagatggaccatccgcatctggaaagggggcgcttgccagaggaatagccaataagtttgatttcaatattcttgatagtggagttttatatagactctatgcttatttatcaaacatgaatttctcctcagatgaaattacaaatcaaatagaaaagtatgtggagtttaaaataaataaagataaacttttagtaagttataaaagtaatgatgtaacttctgagctaaggtcagaaataattgcaaagtctgcatccgaacatagctcaaaaaaagaggtcagagaggcactatttaatattcaaagagatttttacaatggagaaggacttgtagcagatggtcgagatatgggaacagtcgtatttaaagatgcaaaattaaaaatttttcttacagcttcacctgaagagagggcaaaaagacgctttatagagttgcagaatcttggacaagaagttaatatgcccgctctgatagcagatattgaacaaagagataaaaaagatagttatagaaaattatcacctcttttgccagatgaagat

SEQ ID NO: 251633 - DNA, 593 bp, Unknown
  Bacterial polypeptide expressing nucleotide sequence isolated from the Sargasso Sea
aatgaataagattaatgttataacaattgatggaccatcagcatcaggcaaaggcgaattggcaataagcattgcaaatcattttaattttaaacttcttgatagtggtgccttgtatagaatttttgcatttttatctgatttaaaatttaatagcctagaaatagcacaaaaaattaaaaatgaaatatcttttaaactagaaaaagataatctaagaattttatataaaaataaggacattacctctcaactaagatacgaagatcttgcaaaagttgcctctaaactgagctctaaaaaggaagttcgagcagcattatttcaaatacaaagaagtttttatcataaaaagggtttagttgctgatggaagagatatgggtactgtggtttttaaagacgcaaagttaaaaatttttttgacagcatcctcagaagttagagcgcaaagacgttatttagagttgcagaatcgtggacaagaagttaatatgcccgctctgatagcagatattgaacaaagagatttaaaagatagctctagagaattatctcctcttgttccggatgatgaagcttatattattgatt

SEQ ID NO: 251634 - DNA, 652 bp, Unknown
  Bacterial polypeptide expressing nucleotide sequence isolated from the Sargasso Sea
tgggccaagcggtgcgggaaaaggcacgctttgcaaggcaatggcggaagcgttgcaatggcatctgttggattcaggcgcaatttatcgtgtgctggcgctcgctgcactgcatcaccacgtcgatgtcacctcggaagaggtgctggttccgctggcggcgcatctggatgtgcgatttgtctcaaccgacggaaatctggaagtaatcctcgaaggtgaggatgtcagcagtgaaattcgcacccaggaagtagcgaatgcagcatcgcaggtggctgcgtttccgcgcgtgcgtgaagcgttattacgccgccagcgcgcgtttcgcgaagcaccgggtcttatagccgatggacgtgatatggggacggtcgttttccccgacgcgccggtgaaaattttccttgacgcttcttctgaagaacgtgcgaatcgtcgcatgctccagttgcaggagaaaggctttagtgttaactttgaacgccttttggccgagatcaaggaacgtgacgatcgcgatcgtaatcgtcctgtagcgccgctggttcccgctgccgatgctttagttctggattcaaccagtttaagcattgagcaagtgattgagaaagcgctacaatatgcacgccaaaaattggctctcgcgtaa

SEQ ID NO: 251635 - DNA, 712 bp, Unknown
  Bacterial polypeptide expressing nucleotide sequence isolated from the Sargasso Sea
tcacgtttttttaatgaaaagaagaccgattattgcaattgatggtcctgcaggatcaggtaaaagtacagtaacaaagttaatagcgaagaaacttaaacttttatatttagatactggagcaatgtatagagcattaagttggcttatgataaaagaaagtattgattttaaaaaagaaaaaaaattacagaacattcttaaagatatatctattgttttcaagtcgaataaaaattcacatcaggatgtttttattaataactactgtgttactgaagaaattagatctcaagagataagttccattgtttctaaaatttcttcaattaaagaagtaagaaaattcttagtagaagaacaaagaaaaattggaaaatcaggcggtcttgtggctgagggaagagatataggaactactgtttttcctaatgcagaacttaaaatatttctgactgctagcatagatgaaagagcaaaaaggaggaaatctgacgaacaaagtaaagactcacaagaaatagatcttgataccttaaaggaacttataaagaaaagagattttgaagattccaatagggaaatttcacctctaataaaagctaatgacgcaatagaaattattacggatagatattcaattcatgaggtagtagataaaattattgatctttataacgacaagattcctaaagagattgagatcaaataa

SEQ ID NO: 251636 - DNA, 635 bp, Unknown
  Bacterial polypeptide expressing nucleotide sequence isolated from the Sargasso Sea
aatgataattgcaattgatggtccctctgcatctggtaaaagtacaacagctaagggggttgcagaacgattgggaataacacatctggacacgggtgcaatgtaccgtgctgttactttaggaataattgaacatagtatagacttaaataatcatgaaagaatctgtgaatttctggaagagttagaaataaattttgattcattaaatgatatatggaaaaatggacagaacgtaacaggaaaaattagaaccaccgaagtctcatctaatgttagtgctgtaagtgcaattccacaagtcagagaaaaaatggttgctattcagcgagcaattgctgaaggctttgactgcgtactagaaggtcgtgatataggtactgttgtatttcctaatgcagactataaattttttctgatagcagatttagaaatacgggtaaaacgtagattgattgaattagaaaaaattggagaaataagttcattaaatgaattaaagtctgatatccaaaatagagacaggctagattcttcaagagatatatcgccattagttcaagcagaagatgcgatcactattgatacgggtaatttaacaattgatgagcaaattgaaaaaatagtagcaataa

SEQ ID NO: 251637 - DNA, 661 bp, Unknown
  Bacterial polypeptide expressing nucleotide sequence isolated from the Sargasso Sea
atgaagaagattaatgtaattactatagatggaccatctgcatctggaaagggagcgcttgccagaggaatagctcacaaatttggttttaatattcttgatagtggagttttatataggctctacgcttatttatctaaaatgagttacaccccaaatgaaattgcaaatcaaatagcagagtatgttgattttaaagaaaataaagaaaaacttttgataagctataaaagcaatgatgtcacctctgagttaaggtcagagataattgcaaagtctgcctccgagcatagctcaaaaaaagaggtcagagaggctctatttaacattcaaagaaatttttatgatggggcaggtttagttgcagatggtcgagacatgggtacagttgtatttaaagatgcaaaattaaaaatttttcttacagcctctcctgaagagagggcaaaaagacgcttaatagagttgcagaatcttggacaagaagttaatatgcccgatctgatagcagatattgaacaaagagatatgaaagatagttctagaaaattatcacctcttttgccagccgaagatgctcatataattgactcttcaaatatgaagcttgaagaagtattcagcttgactgaaaaattaataaaaaaggaatttatataaa

SEQ ID NO: 251638 - DNA, 465 bp, Unknown
  Bacterial polypeptide expressing nucleotide sequence isolated from the Sargasso Sea
tatgaatcatcagctagtgccagtaataacaatagatggtccaagtggagcaggaaaaggtaccatagctcagatgctagcattggacttaaactggaacatattagacagtggagcactatatagaacgttagcttactttatgctaatagaacaaatcaattctaatgattttgacaaaaatcaggaatatattaaggaaaactttaaagtaaaattcgaccctgggattattggagaaccagtaaaagtaattttcaatgatagggatattactaaaaaagttagaactgaagaaattgccagagaaacatcaaatttagccgcagatcctctgattagaagctttataaagccttgtcagagagaatttatggctttgccaggattaattgcagacggacgagacatgggaacagtgatttttaatgatgctaaacataagtttttcttaacggcctcttt

SEQ ID NO: 251639 - DNA, 640 bp, Unknown
  Bacterial polypeptide expressing nucleotide sequence isolated from the Sargasso Sea
tatgataattgccattgacggtccgtccgcgtctgggaagggcacgcttgcaaaacgattggccgcacaccttagctttgcccatttagatactggtaagatttatagggctgtggggcacgaggtcattcgccaaggcggcgacccggaggatgagcggatagcgctcttggtcgctcaaacacttaaccctactgctttatctgatcccgaattgtccggtgacgaagctgcccttgcggcatccaaggtggctcggatgaatgacgttcgcgatgtcttgctaaagttccaaagagattttgcagagaacccgccgggtggtgaagctggtgcggtcctggacggtcgtgacataggtactgtcgtctgcccggatgcagcggtgaaattgtacctggtggctagtgcggaggtacgcgccaaacgacgccataaagagttgctagaacgcggagaggccagtatatatgcccgcgttttgcaggatatgaaggatcgtgacgatcgtgataccaatcgatctgtctcaccgctgaaacaggcggacgacgcctttatactggatacgtccggactgaatgccgataaagcctttgaggcggccttggtggaagtcgagaaattcgggcaccgatag

SEQ ID NO: 251640 - DNA, 658 bp, Unknown
  Bacterial polypeptide expressing nucleotide sequence isolated from the Sargasso Sea
tatggtaattacaattgatggtgcggcaggagttggtaaaacatctactgcaaaagagttagctaagaggctaggctaccagtactttgacacaggtgctatgtatagagcagtaacattcttttttattaatcagaatgttgatttaacatcagttagtgaggtaaataattcacttaaatccataaaattgcacatagatttttcgtctgaaagtgatatgaaaatttttttagatgaagatgatattagtttgaaaattcgtagtcaagaagttactagtaaggttagtgcagtaagtgcaatcaaagaagtaagagaaatgatggttcaaattcaaagatcttttactaaaaaaggtaactttgttgttgaaggtagagacattggcacagttgtatttcctgatgcaaaatataaattttatcttcaagctgactatgatattagagctaaaagaaggttggctgattttgagaaaattaatgaagccaagaatattaacgaaattaaagaggatttggaaactagagataagtacgatagcacacgtaaactatctccattaaaaaaaccagtagatgcaattataattgatactactctatgttcttttgaagaacaggttaaccaaattttaaaacatatagagaaataa

SEQ ID NO: 251641 - DNA, 661 bp, Unknown
  Bacterial polypeptide expressing nucleotide sequence isolated from the Sargasso Sea
tatgagcactaagcctgtttctgtcataacaatagatggtcctagcggagcaggaaaaggaacaatagcgcagatgctggcattagagttgaaatggaatattcttgatagtggagctttgtatagaactttagcctactttatgttggaacaaaatattagtttggataattttgaacaaaacaaatcattcataaaagagaattttatagttaattttgatcctggagttgtaggggaaccagtaaaagtaatttttcaagacgaggatattactaataaagttagaactgaagaaatagccaagaaaacatctgatttagctacagaaccttcaataagggaatttattaaaccctgccaaagggattttatgcagcccccaggcctgattgctgacggacgggatatgggaactgtcatatttaaagacgcaagaactaagatatttcttacagcttctctggaagaacgcgcaaaaagaaggaaagttcagttgaaaagacaaggaagcgaggttaacatgcgcctccttttacaagagttagaagatagagacaaaaaggatattgaacgagaacactctcctttaaaacctgctcctgactctgtaataatagatacaagtaatttagaaccagatggagtggtagaaaaataa

SEQ ID NO: 251642 - DNA, 475 bp, Unknown
  Bacterial polypeptide expressing nucleotide sequence isolated from the Sargasso Sea
catgaatccactcgctcccgtcctgaccatcgacggcccatccggggccggcaagggtaccatcagccgcatcatcgcgcgcaggctgggctggcattacctggattcgggcgcgctgtaccgggcggtgggcgtggccgcaagctgggccgacatcgacacctccgacgcctccgcgctggtccgctgcacctttgacacccacgttcagtttgtcgagcagggcgatgccatgcgggtcatggtcaacggcaccgatgccaccgacgagctgcgcctggagaccaccggggcgctggcctcggcgattgccgccatcccggaggtccgggccgccctgaaagagcggcagcgcgcattcagggagctgccaggcctggtcgccgacggccgcgacatgggcacggtgatctttccggacgccccctacaaggtcttcctgaccgccagtgccgaggagcgcgccgagcgccgg

SEQ ID NO: 251643 - DNA, 664 bp, Unknown
  Bacterial polypeptide expressing nucleotide sequence isolated from the Sargasso Sea
atgataattgctatagatggaccagctgcttcaggaaagagtacagctgcagtgggtgttgcaaagcgtttaggtataacttacttagatactggtgcaatgtatagggctgtcacatttgggctaatagataatcagattgggtttaaaaattcgcttgaaatcgaaaactttttagaaaaaatagaaattaagttttctgagaaccaaattggaacttttataaccctaaatggtagagatataaccaatgtaataagatcagaagcagtgacaaaaaacgtaagtgaggttagtgccttaaatagtgttagaaaatctatggttttaatacaaagaaaaatggcagaagttgatgattgtatccttgaaggtagagacataggtactgttgtttttccgaatgctgattttaagttttttctaactgctgataaaaaatcaagagcagagcgtcgcttgaatgacctaaaagcgattggtgagaaaagttcggttgagaaggtcatgtatgatttgattagtcgtgaccataaagattcaactagatcgcattctccattaaaaaagtctgatgatgcaattatcattgatacaagcgaattaggaatcaataaggtaattgataaaatcgtaaacatagttaaacataaaggacattaaa

SEQ ID NO: 251644 - DNA, 616 bp, Unknown
  Bacterial polypeptide expressing nucleotide sequence isolated from the Sargasso Sea
tatgaataaggtaataactattgacggaccttcagcatcaggaaaaggtacattagcaattttgttagcagagagattgaactggaaaatactagatagtggtgcgttatatagggcttttgcatatttctcaataagcgaaaatgacgagagattaattgaacaaaatttaagaaagatcagctttaatatcgttgataatagtattcaagttatatttgaagatgaagacatctcaaggcatctaagaactgaagagacagccattcaagcatcgaaaataagctctttgacatcaacaagagaaatacttcttccaatacaaagattcttttcagaaacaagtaatcttattgcagatggtagagatatggggagcgtagtttttcctaatgcaaatttaaaatttttccttgatgcagctcctgaagtaagagcaaaaagaaggcatttagagttgcagaaaagaggacaagaagttaatatgcacgacctaataaatgatattgttgaaagagataaaaaagacagaacaagagatttatctccactgattaaaacagaagattctattttattagattctacaaatttagatcaggaatctattttaact

SEQ ID NO: 251645 - DNA, 448 bp, Unknown
  Bacterial polypeptide expressing nucleotide sequence isolated from the Sargasso Sea
aatgataattgcaattgatggcccctctgcatctggtaagactacaacagctaagggcatcgcagaacggttgggaataacccatctggatacgggtgcgatgtaccgtgctgttactctagaaataattgaatatggtataaatctcagtgaggatgaaagaatctgtgaatttctggaagagttagaaataaaatttgattcatcaaatggtatatggtcaaatggacataacgtaacagataaaattagaaccattgaagtctcatccaatgttagtgctgtaagtgccattcctcaaattagagaaaaaatggtcacgattcagcgagcaattgcagaaggatctgactgcgtactagaaggtcgcgatataggtactgttgttttccctaatgcagactataaattttttctggtagcagatttagaaatacgggtaaaacgt

SEQ ID NO: 251646 - DNA, 673 bp, Unknown
  Bacterial polypeptide expressing nucleotide sequence isolated from the Sargasso Sea
tatgcaaataagtaaaataattgctattgatggtccggcggcgtctggaaaatcaactgtttcaaaagcagttgctaaagaattaagttatatatatgtcgattcaggtgcattgtatagagctgttgcgtggattgccttacaattgaatcttgatggttctgatgaggaaaaggtcttaaatgcaatcaataataaaaaatggaattttttcgtagatgaaggtgaagtaaaattttcagtagatgatttaattctaaaaaaagttttgcgtggtacatttattacagaggctgtttcaaattttgcaaaattacctaatgtaagaacatttgttcgtaataaattacgttcatacgcttcattaggttcattagttgtagaggggcgtgatatcggcagtattgtttttccagatgcaactttaaagttttatttagatgcagatcctaatgagagggcattgagacgacacggtgatttattaaaaatgggtgaatcagaaaaagctgaagaggttttatttagtttaagaaaaagagatgatatggattctaagagaatgcataatcccttacaagtggctgaaggtgcactacttattgatagtactgatattggtatagatgaggttgttaatttgattgttcgcaaaattaaggagtctacttaa

SEQ ID NO: 251647 - DNA, 641 bp, Unknown
  Bacterial polypeptide expressing nucleotide sequence isolated from the Sargasso Sea
tatgaataaggtaataactattgatggaccttcagcatcaggaaaaggcacattagcaattttgttagcagagagattgaactggaaaatactagatagcggtgctttatatagggcttttgcatatttctcaataagcgaaaacaaccagaaattaattgaagagaatttaagaaagatcagctttgatattgtagataatagtatccaagttctatttaagaatgtagatatttcaaggcatctaagaaatgaagagatagccattcaggcatcgaaattaagctctttgtcatcgacaagagaaatacttcttccaatacaaagattcttttgggaaacaagtaatcttattgcagatggaagagatatggggagcgtagtctttcctgatgcaaatttaaaatttttccttgatgcagcccctgaagtaagagcaaaaagaaggcatttagagttgcagaaaaggggacaagaagttaatatgcacgacctaataaatgatattgttgaaagagataaaaaagacagaacaagagatttatctccactgattaaaacagaagattctattttattagattctacaaatttagatcaggaatctatcttaaacgaggctcttcaacatattaaagaaa

SEQ ID NO: 251648 - DNA, 577 bp, Unknown
  Bacterial polypeptide expressing nucleotide sequence isolated from the Sargasso Sea
tatgaataaggtaataactattgacggaccttcagcatcaggaaaaggcacattagcaattttgttagcagagagattgaactggaaaatactagatagtggtgctttatatagggcttttgcatatttctcaataagcgaaaatgacgagagattaattgaacaaaatttaagaaagatcagctttaatatcgttgataatagtattcaagttatatttgaagatgaagacatctcaaggcatctaagaactgaagagacagccattcaagcatcgaaaataagctctttgacatcaacaagagaaatacttcttccaatacaaagattcttttcagaaacaagtaatcttattgcagatggtagagatatggggagcgtagtttttcctaatgcaaatttaaaatttttccttgatgcagctcctgaagtaagagcaaaaagaaggcatttagagttgcagaaaagaggacaagaagttaatatgcacgacctaataaatgatattgttgaaagagataaaaaagacagaacaagagatttatctccactgattaaaacagaagattctatttta

SEQ ID NO: 251649 - DNA, 868 bp, Unknown
  Bacterial polypeptide expressing nucleotide sequence isolated from the Sargasso Sea
ccttatagaagaaaaacaactcaacatcaaaattatccctgttcctactgaaagagattctgatggggtcccatttagttcgcgtaataagcatttatctaaaaatgaaaggaaaactcttaaattcttctcaaatgaactagaaaatgcaaaaataatttttaaaaaggataaaaagattgacttgaaacaactaacaaaaaaactcaaatcaaaaaatatttcaattgaatatttagaacatttacatccatacagcttgaaaaaagttcaagcaaacgataatatttcaattttagcaggtgcgataaaatgtggaaaaacaagattaattgatcacgtttttcttatgaaaagaaagccaattattgcaattgatgggccagctggttcgggaaaaagtaccataacaaagttaattgccaaggagttaaatcttttatatctagatactggagcaatgtatagagcaataagttggctctttaaaaaagaaaagattgattatgaagaagagtcagaattaaaaaaaactcttaataatatttctattatttttaagtcaaattctatttctcagcaagatgtatttataaataatttttgtgtaactgaagaaattcgttcacaagaaataagtgctattgtttctaaaatttcatcaataaaaaaagtgagggaatttttggtttatgagcaaagaaaaattggccaatctggaggcttggtggctgaagggagagacataggaacaacagtttttccaaatgcagaacttaaaatattcctaacagctagtattgacgaaagagctaaaagaagaaagtcagagttagatttaagagggaatgaagaaatagacttcaat

SEQ ID NO: 251650 - DNA, 483 bp, Unknown
  Bacterial polypeptide expressing nucleotide sequence isolated from the Sargasso Sea
tttgataatagcaatagatggacccgctgcatctggaaagggaactattgccaggaaactggcaaaacatttcaatttaggttatctggatactgggatcctatatcgcgcagtagctttgcaaatgctgcaaggaggcattaatatcgacgacccaaaatgtgctgagaagatcgctcgtgagtttactgtatcttttattgataagaaaaatataaggactgaagcagtttctgttttggcgtctaaaattgctgcttttcctggagtacgtcatgaactgcttcattatcaaaaaacctttgcaaaaaaccctggaccagataaatatggtgccattttagatgggcgggatattggaacaattgtctgcccgaatgccgattttaaaatatttatcaccgcggatttgaaaataagagcgaaaagacgttggaaacagttgcttcaaagtgatcagaccgttatatactctgatattct

SEQ ID NO: 251651 - DNA, 508 bp, Unknown
  Bacterial polypeptide expressing nucleotide sequence isolated from the Sargasso Sea
aatgattgataatttacatattgctattgatggtccagctgcatccggaaaaacagcatctgctaaaaaattatctcaagaattaaagattccttatattgacacagggataatgtatagaggattgtcttattatttgttaactaaaatcgaagatttcaattctaaaaatgttatagaaaattttgattttgataataatgtaactatgttagttgatgaagatcaaaaaatccttattaatgattgtgatataactcagtatttatatactgaagaagtcacaaaattagtatcattttttgcaagtattgaagcggttagagtttttttagtaaaagaacaaagattaatggcaaaaaataaggatttaataatgattggtagagatattggaactgtagtgttgccaaatgcgaaatataagttttttctagactgcaatatacaaacaagagcaaatagaagaattgatcaagaaaaaaaacactatggaaacaatgttgat

SEQ ID NO: 251652 - DNA, 517 bp, Unknown
  Bacterial polypeptide expressing nucleotide sequence isolated from the Sargasso Sea
atgcaacaagcgccggtaattaccattgatggtccaggtggctcagggaaaggcactatttgccgtttagtttcccaaaaactgggctggcatctgctggatagcggagctatttatcgtgtgttagctttagctgctatccatcatcagattgccccttctgacgaagaagccttacagccattggctgcacaccttgatgtacagtttagctgcgacgagcaaggcaatacccgcattacgctggaaggcgaaaatgtcactcataccatacgtactgaagaagtaggctcagtggcctcaaaaattgcctcgttgccgcgggtacgtgaagccttgttacgccgtcaacgtgcctttaaagaagctcctggcttagtggcagatggtcgtgatatgggcactgtggtgtttccacaggcagaagttaaaatctttttaacagccgacgcctcagagcgcgccagacggcgttatttagagttgaaagaaaagggccatgagttaacatcggcga

SEQ ID NO: 251653 - DNA, 667 bp, Unknown
  Bacterial polypeptide expressing nucleotide sequence isolated from the Sargasso Sea
tatgatcattgccattgatggacctgcaggtagtggtaaaagcactattgcaaaatatatagcgaagaaccttaattaccgctatatcgatactggcgccatgtatagagcagttgcttggtctgcaaataatgaaggtattgacctagatgatgaaaatgctgtgggtcaatgggtagcagatttagaaattgaatttgtagctgacccggcggggcagcaagtaaaggtcaacggagaaaatgctgctgggttactaaaaaatgaaatcgtggggcggggtgctgcaaaagtcgcagcgcaaaaaagagttcgagaaatcctcgttgctaaacagaaggaaataggtcagtcagggaacgtggtgatggatggtcgtgacattggtactcaggtgtttccaaatgcggaattaaaattctttatggatgcggatgcagaagagcgtggcaagagacgatatctggaattgaaagaaaaaaatatgaatgtcgatttggaaaatatcattgctgaaataaaactaagggatcacgaagacaagactcgtactatttcaccgcttcaccctgcagaagacgctattgaagttgacactacgaaatttactattgaagaagtcatagatcaggtcatgaaacaaattaatttaaagcagaaaagttaa

SEQ ID NO: 251654 - DNA, 661 bp, Unknown
  Bacterial polypeptide expressing nucleotide sequence isolated from the Sargasso Sea
aatgaagaagattaacgtaattacaatagatggaccatcagcatctggaaagggagcgcttgctagaggaatagctcacaaatttggtttcaacattcttgatagcggagttttatacagactatatgcttatttatctaacatgagtttctccccagatgaaattgcaaatcagatagaaggctatgtagagtttaaaaaaaataaaaaaaaacttttaataagctataaaagcaatgatgttacttctgagttaaggtcagaaataattgcaaagtctgcctcagaatatagctcaaaaaaagaggtcagagaggctttatttaatattcaaagaaatttttatgatggagaaggtttagtggcagatggtcgagatatgggaacagttgtatttaaagatgcaaaattaaaaatatttcttacagcctcacctgaagagagggcaaaaagacgctttttagagttgcagaatcttggacaagaagttaatatgcccgctctgatagcagatattgagaaaagagacatgagagatagttcaagagatttatcacctcttttacctgctgaagacgctcatgttattgattcttcagatttgacgcttgatgaagtattaagttttactgaaagtttaataaaaaaggaatttatatag

SEQ ID NO: 251655 - DNA, 610 bp, Unknown
  Bacterial polypeptide expressing nucleotide sequence isolated from the Sargasso Sea
atgagccaaacagtaatagccatagatggaccagctgcctcaggcaaaggaacagtatcaaaagttctatcaaaaaaattgcgatttaactatttggatactgggaaactttacagagcaattggggctaagtatttggagggaattcaacctattgctgctgctcaaagcctagaaaaaaatgatttagacaaatatgatcttcaaaaaccggaaatagctcaagccgctagcgaaatagcttcgattcctgaagttagagccgctcttcttgaatttcagcgaaatttttcaaaaaaaccaccaggcgcagttttagacggaagagatatcggaacagtagtttgtcccgatgcaaggataaaaatctttctcacagcctctttagaagctcgggctaaacgaagatatgttgaactgtgtaagcatgatgaaaaaataagtttcgacacaatcctggagcaaataagagaaagagatgaacgagatcaaactcgaacttcctcaccaatggttgctgcaagcgatgctaaaatatttgatacttcaaaattatcaatacccgaagcagtggataaggtgttccgttatattcagaccaaaatttaat

SEQ ID NO: 251656 - DNA, 694 bp, Unknown
  Bacterial polypeptide expressing nucleotide sequence isolated from the Sargasso Sea
tatgtctgaacgggctcctgtagtcacaatcgacggcccaagtggtgctggtaaagggacaattagccaattattggctaagcatctaggttggcaactgcttgatagtggtgcaatttatcgagtacttgcactagctgccattcatcacgacgtagaattggaaaatgaagagtccatcaccttgctagcttcacacctcgatgtgaaatttttaacgggcaatgagaaagaccccgttcaagtgatcttagaaggtgaagacgtcaccacagcgatacgtacccaagaatgttcaaatgctgcctctaaagtggcggcgtttccccgtgttagggaagccttattgcgtcgccaacgagcctttagaacggcaccgggattgatcgccgatggccgcgatatggggacggtagttttcccaacagcatcggctaaattatatttaacggcatctgcacaagagcgggctcaaagacgctataatcagttgcaggacaagggcttcgatgttaatatcgagcgccttttagctgaaattatcgaacgtgatgaccgcgatatgaatcgtcctgtggcaccattggtcccagccgaggatgcgctcgttatcgatacaagcgataaaggtattgatgaagtactggagcttgcgctcaactttatcaagcaaaaattatccagcactaactaa

SEQ ID NO: 251657 - DNA, 652 bp, Unknown
  Bacterial polypeptide expressing nucleotide sequence isolated from the Sargasso Sea
atggataaattaataaccattgacggaccaggaggttctggcaaaggaacagtagctaaaatattagctgcaaaattaggatggaatattttagatagcggagctctatatagattaatagccctgatttctgaaaatattaaagaaactgatccagatttaattggaaaagaattaaaagataagagtatcttttttgagcttgcaaaagatcaataccatcttttttttgacggtaaggatgtaacaaattttattagaagagaggaaataggggtaaaggcttcagacttggcacataatcaaaacattcgaaacctaattaaagacactcaaaggtctttttacgatcctaatataggtttaatagctgatggaagagatatgggatcagtggtttttcctgaagctggaataaaaatttatttagatgcatcaatagaagagagagcaaaaagacgtcaaattcagttgaaagaaaagggtatggaggttaacatgccctaccttatctcaagcttacaaaatagagatttaaaggataaaaatagagatgtatctcctcttttgattccacaaggggcaaaagtgattgattccactaatctatcaatagatgaggtagtaaataaaataatggatttaatttaaa

SEQ ID NO: 251658 - DNA, 664 bp, Unknown
  Bacterial polypeptide expressing nucleotide sequence isolated from the Sargasso Sea
aatgataattgcgatagatggccctgctgcaactggaaaaagtactacagcaaaagctttagctaaaagattagggtttacttatttagatactggagcaatgtacagagcaataactctgctaatattgcaaaaaaaagttcaaataagtgaaaactttgctttgatttctttgcttaaaaaatttgatttaaaaattcaacagcatgaaaaacaaatattggtaattcttaatggcgaagatgtatcaaatgaaatccgtcgattagatgttaccaagtatgttagtgaagtaagtgctcttcctgctgtaagaaaatcattagtaaaaattcaaagaaaaattgctaaagatcaaaattgtgtagtggagggaagggatattgggactattgtttttcctgatgctgaagtcaagttttatgttgttgctgattatgatgtgagggcaaaacgaagattgcttgactttaaaaaactaggagaagaaaaatcaattgatgaacttattgaagaacttaagaatagagacaaatatgattctgaaagagaacattctccactattaaaagctaatgatgcaattgaagttgatacaactaatttgactattgaagagcaggttaactttatgtttaaaaaagtaaaattaattaaaggataa

SEQ ID NO: 251659 - DNA, 688 bp, Unknown
  Bacterial polypeptide expressing nucleotide sequence isolated from the Sargasso Sea
gatgaaatcgacccgcccctttcacccgacccccgtcatcacgatcgacggcccgactgcttccggcaagggcaccgtcgccgcgctcgtcgccgcgcatcttggcttccacttgctcgacagcggcgcgctgtaccggctcgccgcgctcgcgagcgtgcgctacggcatcgaggcggaggacatcgacgcgctggtgaagctgatcgacgatctccacatcacgttccgcgaaggctgcgcgcagctcgacggcgtcgatgtgtcgaacgacatccgcgccgaggcggtcggcaaccgcgcatcggcgattgccgtgcacgggccggtgcgcaccgcgctcgtcgcgcgccagcgcgcgttccgcaagacgccgggcctcgttgcagacgggcgcgacatgggtaccgtgatcttcccggacgccgtgctgaaggtgttcctgacggccagcgccgaggcgcgcgcgaccaggcggcataagcaattgatgcaaaaaggtttttctgctaatatagatgacttgctccgggatcttcgtgaacgtgatgcgcgcgacagcaatcgcgcggccgcgccgctgaagccggcggcagatgccaagctgctcgatacgtcggcgctttcggtcgatgaagccgtcgaccaggtgctgcagtggtaccgggcgctcggccagcccgcctga

SEQ ID NO: 251660 - DNA, 686 bp, Unknown
  Bacterial polypeptide expressing nucleotide sequence isolated from the Sargasso Sea
gattattgcaattgatggtcctgcagggtcaggtaaaagtactgtaacaaagttaatagcgaagaaacttaaacttttatatttggatactggagcaatgtatagggcattgagttggcttgtgatagaagaaagtattgattataaaaaagaaaaaaaattacagaatatacttaaagatatatctattgttttcaagtcgaatatcaattcacatcaggatgtttatgttaataactactgtgttacaaaagaaattaggtcgcaaaagataagttccatcgtttctaaaatttcctcaataaaagaagtaagaaaattcttagtagaagaacaaagaaaaattggacaatcaggcggacttgtagctgagggaagagatataggaactactgtttttcctcatgcagaacttaaaatatttttaactgctagcatcgatgaaagagcaaaaagaagaaaatctgataaaaatagtaaagactcacaagaaatagacctacatacattaaaagaacttataaagaaaagagattttgaagattccaatagagaaatttcacctctaataaaagcgaatgacgcaatagaaattattacggatggatattcaattaatgaagtagtagataaaattgttgacctttataatgacaagattcctaaagagactcagatcaaataaa

SEQ ID NO: 251661 - DNA, 655 bp, Unknown
  Bacterial polypeptide expressing nucleotide sequence isolated from the Sargasso Sea
atgaataaggtaataactattgacggaccttcagcatcaggaaaaggcacattagcaattttgttagcagagagattgaactggaaaatactagatagtggtgctttatatagggcttttgcatatttctcaataagcgaaaatgataagagattgattgaaaaagatttaagaaagatcagctttaatatcgttgataatactattcaagttctatttgaaaatgaagatatatcaaggcatctaagaactgaagagacagccattcaagcatcgaaaataagctctttgttatcaactagagagatacttcttccaatacaaagattcttttcagaaacaagtaatcttattgcagatggcagagatatggggagcgtagtttttcctgatgcaaatttaaaatttttccttgatgcagctcctgaagtaagagcaaaaagaaggcatttagagttgcagaaaaggggacaagaagttaatatgcacgacctaataaatgatattgttgaaagagataaaaaagacagaacaagagatttatctccactgattaaaacagaagattctattttattagattctacaaatttagatcaggaatctatcttaaccgaggctcttcaacatattaaagaaaggaatattttatgag

SEQ ID NO: 251662 - DNA, 658 bp, Unknown
  Bacterial polypeptide expressing nucleotide sequence isolated from the Sargasso Sea
tatggtaataactattgatggagcagcaggagttggtaaatcatctactgcaaaagagttagcaaaaaggctagaatataagtacttcgacactggtgctatgtatagagctgtaacattctattttctggctgaaaatgttgatttaagctccaatagtcaggtgattgaatcactagattccataaaattgcatattgatttttcatcagagaatgaaatgaaaatttttctagatgaagatgacattagtttgaaaattcgtagtcaagaagttactagcgctgttagtattgttagtgcaataaaagaagtaagagaaatgatggttcaaatccaaagatcttttactgaaaatggtaattttgtcgttgaaggtagagatattggtacagttgtttttcctgatgctgaacataagttttatctccaagcagattatgatattagagctaaaagaaggttggcagattttgaaaaaattaatgaagccaaaaatattaacgaaattaaggaggatttggaaaaaagagataagtacgatagtactcgtaaactatctcctttaaaaattcctgatggtgcaattataattgacacaacttattgttcttttgatgatcaggtaaaccaaatcttaaaacacatagagaaataa

SEQ ID NO: 251663 - DNA, 682 bp, Unknown
  Bacterial polypeptide expressing nucleotide sequence isolated from the Sargasso Sea
aatgaactcatctacgcctgttataacaatagatggaccaagtggtgctggaaaagggacaattgctcagatgctcgcattagaacttaattggaatatcctcgatagtggagctctttatagaacattagctttcttgcttcatcaagaaaatatttctctgaatcaatttgctgaaaaaaaggaaaaaatccaaaaagatttcaaagttcagtttgatcctggtgtcataggagaaccagttagagttatctttaacaatacagatataacaaataaggtaagaaatgaagaaatagcaaaaaaaacttcaatgttggcagcagatccatctatcagagagtttattaggccttgtcagagagaatttatgaaacacccaggacttattgctgatggaagagacatgggtacagttatatttcctgatgcagatttaaaaattttcttgactgcttctttagaagaaagagccaaaagaagagaacagcagttgaaaagacaaggcatggaggttaacatgcgcgtccttttagaggagttagaagatagagatcaaaaagaccgagaaagagagcattcacctttagtggctgcaaaagattcggttgaattagatactacgaacattaaacctgagggagtaataaaaaaaataaaggctttgccattttttaattag

SEQ ID NO: 251664 - DNA, 658 bp, Unknown
  Bacterial polypeptide expressing nucleotide sequence isolated from the Sargasso Sea
atgataattgctattgatggacctgctgcttctggtaaaagtaccacagctaaattagttgctgaaaaattaaatattatatatttagatactggtgcaatgtatagaactgtaactttacaattattgagatctaatgttaactttgataatacctataaagtttctacgattcttgataatatgattattgatatgtatgattataatggtaagattgtagttaaactaaacaatgaggatgtatctgaattaataaggtcaactgatgttactaagcatgttagtgaggtaagctcattgtctgaagtgagaaaatctatggttgctatgcagagagaaattggcaataaatctgattgtgttgttgaaggaagagatattggaacaatagtttttccaaatgctgaatataaattttatatagttgcagatattaaaatgcgagcacaaagaagattaaaagaacaagaacaaatagggataattaaatcattagaagatgttatgtcagatttaaaagtacgagatcataaagattcaaatcgagataattctcccttgcgaaaagctaatgatgcagttcaaattgatacttcaaatttatctatcgatgaacaagtaaattttatcattaatcatataaaaaataattaaa

SEQ ID NO: 251665 - DNA, 664 bp, Unknown
  Bacterial polypeptide expressing nucleotide sequence isolated from the Sargasso Sea
catgatacccgttataacaattgatggtccaagtggtgcaggtaaaggaacaattgcgcagatgctagcacttgaactggattggaatattttagacagcggagctttataccgaacattggcttactttatgagggaaaatactatcaatttagataatttcgaagaaaatcaacatttattaaaagagagatttaaagtttcatttgatccaggaataccaggcgagcccgtcagagttttgtttgaagatgaggatataacatcgaaagtaagaacagaagagatggcaaaattaacttctacattagctgcagaacccttaataagagagttcattaagccctgtcaaagagattttatgaagttacctggtttgattgcagatggacgagatatgggtactgtaattttttccgatgcaaaacataaaatctttctgacagcctctttggaagaaagagctaaaagacgacaaacacagttgaaaagacaaggtttggaggttaacatgcgctcccttttacaagagttaatggatagggacaataaagatatggagagagaacattctccattaattcccgctaaagactctgtgttaattgatacaagtaatttaaaccctgaaggagtggtaaaggaaataaaaacttacctttaa

SEQ ID NO: 251666 - DNA, 574 bp, Unknown
  Bacterial polypeptide expressing nucleotide sequence isolated from the Sargasso Sea
aatggcactggtgattgcaatcgacgggccggcggcggccggcaaggggacgctggcgcgcaagctcgcagcccattacggtctgccgcatctcgataccggcctgacataccgcgccaccgccaaggctctcatcaatgccggcaagcccctcgacgacgaggcgatcgccgccgaaatggccggcgcgatcgatcttggcggcctcgaccgcgcagtgctttccgcacacgaaatcggcgaggcggcctcgaaggtggccgcgatgccccgggtccgcacggcgctcgttgccgcgcagcgccgctttgcggaaaccggcgccggcgcggtgctcgacgggcgcgacatcggcacggtggtctgcccggacgcgacggtgaagctttatgtgaccgccgatgccgaactgcgcgccagacgccgttatgacgagatcgtcgccggcggcggcgctgccgatttcgacgaaatcttcgaagacgtgaagcgccgcgacgcgcgcgacatgggccgtaaggacagtccgctgaggccggcggacgatgcgcacttgcttgatacgtccaaaatg

SEQ ID NO: 251667 - DNA, 515 bp, Unknown
  Bacterial polypeptide expressing nucleotide sequence isolated from the Sargasso Sea
taaaaaagcacttataaaagacttacctcatataaatttgcaatttcatttcaatgatagtttaggttttgctgaaatatatgtcaatggtacaaatgtgaaaaaagaaatcagaacgcttgaagtttctcgttgcgtaagtaaagtagccgaaatctctgaagtgcgaagtaaattagtagcttctcaacaagaaatgggaaaaaacaaagctattgtaatggacggaagagacattggaaccgtagtttttcctgatgctgaattgaaaatttttatgaactccagcgcagaaacgcgtgccgaaagacgttttaaggaattaattgaaaaaggccaacacgtgacatatgaagaagtgttgcaaaacgtacaagaacgcgattatattgacactcaccgagaagattctccactagaaaaagcagttgatgctatagaaatcgacaattctgccatgagcaaacaagaacaatttgatttggtgatggaattggtaggagagagggtttaac

SEQ ID NO: 251668 - DNA, 676 bp, Unknown
  Bacterial polypeptide expressing nucleotide sequence isolated from the Sargasso Sea
catgaatgagttgactgttccagtaattactattgatgggccgagtggagctggaaagggaactattgctcaaatgttagcacttgaactgagttggaatatcttagacagcggcgccttgtataggactcttgcttattttatgaaagagaaccagatatctttagcagaatttgaagcaagagccgatgagattagagataacttcaaggtgtcatttgatccaggaattcctggtgaacctgtaaaggttatatttaataatgaagatattactgcttcagtaagaacagaagagatggcaaaactcacatctactctagctgctgaaccagttatcagagacttcattaagccttgtcaaagagattttatgattccacctggacttatagctgacggtagagatatgggcacagttatcttttcagatgctaaatacaaaatttttctaaccgcctctgcagaagaaagggcgaaaagacgacaatcacagttgaaaagacaaggtttggaggttaacatgcgctcccttttacaggagttagaggagagggatcgtaaagataccgaaagggagcattctccactggtacccgccgaagactctgttgtaattgatacaagtaacttaaaccctggaggagtggttaagaaaataaaaacttacctataa

SEQ ID NO: 251669 - DNA, 670 bp, Unknown
  Bacterial polypeptide expressing nucleotide sequence isolated from the Sargasso Sea
atggttgaagtccctgtaatctcgatagatggcccatcaggatcgggaaaagggactatcgcaaccagattagctcgtgtgcttggttttaattatctagatagtggcgcgatatacagaactttaggtatagcattgcataaggagaatattggatttgaaaatattgctcaaatatctgaaatatatagtaaatctgtgatatttttcgatccagacgagcccggaaaagtaatattgaacggagaggatgtaagcgtttcgatacgctctcagttaggaagcgactcggcttcaaagcttgggcaaatcccagaaataagaaagattttactgaaaggtcagagagaatatagagttaagccaggattagtggcggatggtcgagatatgggtactgtagtctttcctagtgcaaacctaaaaatatttctcacggctagcattgaagaacgtgctaaaagaagacataagcagttgattagtaagggtattggtgctatgctccccgaccttttacgggatctgggtgagagagataaacgtgatactgagcgatcgatttcacctttaaagcctgcaaatgacgctgtaattttggattcgactaatctagatatagacgaggtggtagataagattctgcagcgctttcagagttgtgcttaaa

SEQ ID NO: 251670 - DNA, 664 bp, Unknown
  Bacterial polypeptide expressing nucleotide sequence isolated from the Sargasso Sea
cttgaaaaataataatattattaccattgatgggccatcagcatctggaaaaggctccctcgcaaaagctctggctaaagagcttgattttattttactagacagcggtttgctttaccgagcatactcgtattgttttgagcagagtcaaaaccatgttaacgcgaagaacctattttcaaatttgcaaattaatagcatagaccaccaaatgcatgtttttgagagtaataaagatattactccaattcttagggatgaaaatgttgcgaaatcagcatctatattaagcagcttaaaagaaacaagagataatttaataagttttcaaagagacctagctagtaatcgcggattggttgcagatgggagggatatgggtactgttgtgtttcctgatgctgggactaaaatttttttagttgctgattctgaagtgagggcaaagagaaggtttttagagttgcagaatgcgggtcaagacgttaatatgcgcgatctaattgatgatattagattgcgagatgaagcagacaaggcaagagaaatatctcccttgatgccagcagatgattcggttgaagtgaattcctccaatcttactcctcaagaagttttggaaattgttttaaaaatttataaagaaaagattagggaagattaa

SEQ ID NO: 251671 - DNA, 694 bp, Unknown
  Bacterial polypeptide expressing nucleotide sequence isolated from the Sargasso Sea
atgtctgaacgggctcctgtagtcacaatcgacggcccaagtggtgctggtaaagggacaattagccaattgttggctaagcatctcggatggcaactacttgatagtggtgctatttaccgagtgcttgcgttagctgcaattcaccacgatgtagaactggaaaatgaagaatccatcacactccttgctgcgcaccttgatgtgaaatttttaaccggcaatgagaaagacccagttcaagtgatcttagaaggtgaagacgtcactactgcgatacgtactcaagaatgctcaaatgcggcctctaaagtggcggcatttccccgtgtgcgggaagccttattacgtcgtcaacgtgcctttagaacggcacccggattaatcgccgatggccgcgatatgggcacggttgttttcccaacggcatcggctaaattatatttaactgcttctgcagaggagcgggctcaaagacgctataatcagttgcaggacaagggcttcgatgttaatatcgagcgccttttagctgaaattatcgagcgtgacgaccgcgatatgaatcgtccagtggcccctttggtccctgccgaggatgcgctcgttatcgatactagcgataaaggtattgatgaagtacttgagcttgcgctcaactacatcaaccaaaaattatccaacactaactaag

SEQ ID NO: 251672 - DNA, 466 bp, Unknown
  Bacterial polypeptide expressing nucleotide sequence isolated from the Sargasso Sea
aatgttcggtgagtttggtttcttactagatggacttgctactccatttgcaataatcatttacgtattgtgtacagttcttgcattatactcaaaaccatacatggttcacaaattcgaagaactattcaaagaacactatcaccaaaacacaaccactgacggtcaaacaactgcagtagttgattctgcagcactaaagaaatatgtcaatcatcaatctggtttgtactttgcaatgttcctggtctttgccatgggaatgcttggtacagttcttgcaaccaacctgattgaattttacatcttctttgaggtaatgctcatcccatcattcttcttagttgccttctatggtgacggaaacagaagaagaatcgctttacaattcctattttggactcacgtaggtgcagtcgttttactacttggtttcttagcaatcggtcttagcgtggaagctttg

SEQ ID NO: 251673 - DNA, 451 bp, Unknown
  Bacterial polypeptide expressing nucleotide sequence isolated from the Sargasso Sea
taaaaccaagttgggaattgaggcaaaatcttatctagatagtggagatttagtacctgattcagtaacaatcaaaatgttggagaatgaagtcttacaaaacaaaaaagtaaaaggatatatctttgatgggtttccaagaactttggcacaagctaaatctttagacacttttttaaactcaattaatctaaaaataaatgctacaattgcactcgatgttgatgaaaatgaattaataataagactgttagatcggggaaaaactactaatagatctgatgaccaggatttagaaaaaatccaaaacagatttaacgagtataacaataagacctcaatactcatagatttttatgacaagcaaggtaaattctattcggttgatgggaaaggatcagtagatgatatcactataaggctatttgatctagttgaaagcttaatctaa

SEQ ID NO: 251674 - DNA, 844 bp, Unknown
  Bacterial polypeptide expressing nucleotide sequence isolated from the Sargasso Sea
catgcaaaaagagatcgaagctatgtgggaggtttcagccagatttttttcgcaaacaatagaggaaaaacgaaagctttacaggacagtaagcaatccacttggctatttcgataaagaactaaccaagaagaagcgtgacaagaaagaagtttttgattacatgcaaccgagagctgattcaactgatttcaatcaatggccgctaaaagataaaaccttccgtattgtttcagagaatttttttaatgccgcatcggagactgcggagaaaactctcgggcttgtgtataaggcttatctttcgacgagtccttctaaccttcatctgccggggggcgacaaaagaaccagcaccgtgaggttcaatttttaccctgaagtcgatccgttaactgaaaaagaacgatccgaagaaatgcctctaggcgaattggcgctaaactatcacactgatccgggcatcttaaccttactgtttcaagatatggtcggagggctgcaggccctttctaaatctaggggatggattgatgtgcggcccgaggaggacgctattgtcgttaatcttggtgattcgttgcaggtctggactaatgataattatcgtgctgccgttcacagagtcttgttgatggacgaggttcctagatacagtagtccttatttttttaacccggcgcgagacgcggttctagagccgctctcggctttatcaaaagatcctcctatttatcgcccctttacctggcaagagtatatccgtggacgagtggatgataacttcgctgaactggacgaagatgacattcaaatatcaaaatatcgttttaaggccatttag

SEQ ID NO: 251675 - DNA, 530 bp, Unknown
  Bacterial polypeptide expressing nucleotide sequence isolated from the Sargasso Sea
tcaatcaaaatttatagtcgaaagatataatctctatcaattatccacaggcgatcttttacgtaatgaaattaaaaataaaaccgaactcggttttaaaatttcctcaattatggcttctggagaattagtttcagactcaatcgtaggaagtcttattgaaaaatttatttcaaatgacacgtataaaaataaaattatttttgatggttatcctaggactttaaaacaagcaaaaaatttagataatttactaaataaatataaccaacaaattgatttagttttaaaattatcagtaagtctagagacaataaaaaaaagaatatcagaaagattaatgcaagagaatcgggctgacgacaatgaggagatagctcttcgaagatttaagacatacgaaatttcatcagaaccagttattgaatattataagcaatctaatttagttaaagaaataaatggcgagggttcaattactgaaattagtgctgaaataagcggtttaattgaaactatcaagggttgac

SEQ ID NO: 251676 - DNA, 505 bp, Unknown
  Bacterial polypeptide expressing nucleotide sequence isolated from the Sargasso Sea
aaaacaatattttgatatttatcatctgtcaaccggtaaatttttaagaaatgaaataaataagaaaactaaaattggtttaaaatcctcagtgtttatagataggggagaattagtcccagatgatatattacttgaaatagtagaaaaacacatatcagaaagggaatatttaaatggttatataatagatggattccctcgtactttgcctcaagccgaaggttttaataaaatacttattgattctggtcaaaaactagatgcagtcgtaagtctttacgctgaagagaatgaattggtagatagattgattttgcggagcaaaaattctggaagaagtgatgataatctagatataataaaaaatcgccaaaaaatctattggcaacaaacgtccccattactagaatattaccgctcaaaacaaattttaaaggaaattaatggtgttggggaaatatcgcaaatcacaaaacttattatacaatcaataatagactaa

SEQ ID NO: 251677 - DNA, 219 bp, Unknown
  Bacterial polypeptide expressing nucleotide sequence isolated from the Sargasso Sea
ccgaccgggacgacgagaccggcgaggaactggttcagcgggacgacgacaacgaggaaacagttcgtgcacggctcaatacctataacgaacagaccgcaccgctgtcggaccactaccgcaaacagaaccttttgaaggccatcgacggcatgggcagccccgacgaagtttacgagcggttgcgtcaatccctggaagacctcaacccggtctgaa

SEQ ID NO: 251678 - DNA, 643 bp, Unknown
  Bacterial polypeptide expressing nucleotide sequence isolated from the Sargasso Sea
ccctgaagtttttaaaaaaatatatgcagcatctcgagtttatttggatggaaataatgtagttatagaagttgatggtgctcctgaccataaaagtccctattactcgagaaatcatgaattatatgagccttacaacggaagtaataccaactttaaccaaaatccaaattcaattaaaacatttgatttcaaatttaaaattcccctcaatcctaaagaagcgtctaataaagtctcaactcaattgggttcaataggagtatctcttaatggtgtagctttttataaccaatatgcagggcccaataatcagcctttaacaaatgaaattaattcatttgaccaatatgcaggtcatccccaaaatcaaggtgtttatcattatcacctcgaaccaacttacctaacctcaaataaaggtcaagatgcactattagggtttttattagatggatttccagtttatggtccatatgaaaatgacgtaaaaattacaaatgagaatcttgacgaataccatggccatagtcatattacagctgattatccaaatggtatttatcattatcatattactgacactgacccctacataaatggaaatggatattacggttcccctggaacagtatctcaatag

SEQ ID NO: 251679 - DNA, 607 bp, Unknown
  Bacterial polypeptide expressing nucleotide sequence isolated from the Sargasso Sea
tatgcagcctcagtgggtgctcgacctccccacccgggttactggcgtcgtggggtctggcgcgcgctctggcgcggcggggaaggccggcggggctgggagcgcaggcggcgccgccggggcttcctcctcccagcaacagcagcaacatcagcaacagcagcagcagcagcagcagcagcaacaaacacttcggcagcagcagcagactcagcggaaaccgggggcccccacggaggtggccaagaagggggccgcagccgccgacgccgctctgaacgcggccttggcgaagatgagccccgcccaggtgggggccctcctctcaaaatatgggggcggccctcgtccccacccggccctaaccacggcccagcgcgtcctcgggggcccgacgggtcctcctgcggcgggggcttccccctccctcgatgccactctcaggggggtggaagccacgatgaaggcgctggggacccggctgggacagctggaggattctgctctgcgccctcctctgggggcgtcccaggcccctgccaagccccctcgctccacggcggcgtcctctcctctcttgggggctccgggagctttggcgggcgga

SEQ ID NO: 251680 - DNA, 212 bp, Unknown
  Bacterial polypeptide expressing nucleotide sequence isolated from the Sargasso Sea
taatcttgatgatgtgactggcgaaccacttattcaacgaaaggatgatttacctgaaactgttaaacacagacttgctgtttatcatgatgagactcttccacttgcaaatttttataaagcactgtcactgcaatatttcaaagtggacggaaatcaagcagttgattctgtttttaatcagataaaagatggagccttaattcattgaa

SEQ ID NO: 251681 - DNA, 118 bp, Unknown
  Bacterial polypeptide expressing nucleotide sequence isolated from the Sargasso Sea
atgaaattaattttatttggacctcctggttctggaaaaggtattcaggcatctatattggcaaaaaaaaacaaaatacctcatctctccacaggagatattttaagatctaaacttg

SEQ ID NO: 251682 - DNA, 307 bp, Unknown
  Bacterial polypeptide expressing nucleotide sequence isolated from the Sargasso Sea
tttaatccaagctaaaaatttagatgatttattaaaaaaatacaaacaaaagatagatattgtcttaaaattgtctgtgagtttagaaactgttaaaaaaaggattttagaaagacaaatccaagaaaaaagagccgatgacaatgaagagacagctattaagagatataaaacttatgaaaaatcatctgaaccagttatagattattataagcaatcgaatttactcaaatttgtaaacggtgaggcaggaatatctcaaattaatactgaaattagcgggttaattgacgctatcaagggttga

SEQ ID NO: 251683 - DNA, 417 bp, Unknown
  Bacterial polypeptide expressing nucleotide sequence isolated from the Sargasso Sea
aaatggggtttatttttgatggatttcccagaactttagcacaggcagatgctttaggtaatttgctagattctattggacaatcattagatcacgttgttgaactatatgttgacgacgaaaaattagttcaaagaataataggtagatttacatgttcttcttgtggggaactttatcataaaattaccaaaccacctgaaaatgcaggaatatgtgatgtgtgcggtagtaaggataaatttaactttaggcaagatgacaatgaagattcatttaaaatcagacttcttgcatattatagagatacttctccattgattggatattatcatgtattaaataagttaagaaaaattaatggtcttggaagtgttgatgaaattcaaaataatatcagaaatattatcaaataaa

SEQ ID NO: 251684 - DNA, 349 bp, Unknown
  Bacterial polypeptide expressing nucleotide sequence isolated from the Sargasso Sea
gaatcagataatggtttcattctggacggttatccaagaactttgaatcaatctcaatttttaaataattttcttttacaaacttcaaattcaataaactttatttttaatattcagataagttttgaaattttaaggagtagaattctaaagagatcatctgaagaaagtagagatgatgacaatatagatgttattgaaactagatataatgaatatattaactcaactcagaaagtatccaactattataaagatagtcttcaatcaatattttatgaattagatggatcattacaaatcgatgaaataactgaaaaaattaagcaaattttaaaaaaaccatgaa

SEQ ID NO: 251685 - DNA, 296 bp, Unknown
  Bacterial polypeptide expressing nucleotide sequence isolated from the Sargasso Sea
gcggcgcatcgccgggcgccgatttcatctggctagcggccgcagttaccacatcgagttcaatccgcctaaagttgcagaccgagacgacgataccggcgaggaactggttcagcgggacgatgacaacgaacaaacggttcgtgcacggctcaatacctacaatgaacagaccgcacccctgtcggaccactaccgcaaacagaaactgttgaaagccatcgacggcatgggcagccccgacgaagtttacgagcggttgcgccaatccctggaagacctcaacccggcctgaa

SEQ ID NO: 251686 - DNA, 394 bp, Unknown
  Bacterial polypeptide expressing nucleotide sequence isolated from the Sargasso Sea
gccagattcggtaaccattaaaatgcttcaatctgaagttttaaaaaatccagatgcaaatgggtttatttttgatggttttccaagaacaaatgcccaggcagatgccttggatgtttttttatcccaaatgaatacttcaatttctttgatgctttctttagatgtaaatgaagaggaacttaaaaatagattactaaagcgagcagaagttagtggacgtgccgatgatgcagatgaatctatcatcaaaaacagaatcgctgtttataatgctgaaactgctcctgtcaaagatttttatgctacacaaaataagttgatttctattgatgggcagggttcgataacggatataacaaatcgcttgtttaaagcaattgatagcttgtaa

SEQ ID NO: 251687 - DNA, 386 bp, Unknown
  Bacterial polypeptide expressing nucleotide sequence isolated from the Sargasso Sea
aaatgttattaaagaaagagtttcagaaaatgattgtgatcaaggttttattttagatggatatccaagaaatattattcaagcaaaatcattaaatatagttttaaaagatattgatagaaatatagatagaattttatttttagatgttgatttttcaatccttcaatcaagaatcgaggcaagatctaaggaaaataatgaagaaaaaagagttgatgatacatcagaagtcctaattaagagactagaagaatataaagctcaaacagaacctttgagcgagtattatagaaataacaaaaaatttaagaaaatcaatgggatgaaatctataagtgaagtttcacttgatattgaaaattttttggataatggcatttagt

SEQ ID NO: 251688 - DNA, 667 bp, Unknown
  Bacterial polypeptide expressing nucleotide sequence isolated from the Sargasso Sea
tcatctaacagacctgaacatgaatcagtttattggcaagcttcaaatgctctttatgaagcatttgattatgcaacaaatctttacaagtatgctacaaccaaaaccgcaacagggtatacaggtactcctgcctctgctggacccaataagattgaagaacaatgcatcactatgaaaatgcctataagtcctgcggaagcatcgagcaagaccaatacgtcatacagtactattggtttgtctttaaatggaatttcgttttttaatgaaaatgctgcacccggagatgatattacaaacgaattattcacttttgatcaatgctccggacatccacagaatgatggtgtatatcactatcatgttgatcccgtatgtttgataagagatctgggaggtagtgtcactgataacagtacaactgtcgatggaaccacttattcatggattgaagataatggcagtaatggaggattacttttaggatttctgctagatggattcccagtttatggaccggtaggtaacaaccatactgattattcaggttcttcaacacccagcattgattcatacaatggccatactcattcaacaacagaatttcagagcggcatatatcactaccatgttaaaacaggcaatataggcggtacgaaatagt

SEQ ID NO: 251689 - DNA, 379 bp, Unknown
  Bacterial polypeptide expressing nucleotide sequence isolated from the Sargasso Sea
ggttcccttctacaatcatatgcgggtggaggcgctccactgtctaacgaaataaattcttttgaccaatacaatggtcatcctgccccgggtagaggtggtggaggtggaagatatcattatcacatggaacctttttggcttactcaaaattatggtaaaaacacgcttcttggatttttgcttgatggatttccaatatacgggcccgaagaaaacggaagcgatttaaaaagtagtgacttggatagtcatcacgggcactcgcatccaacatcagattttcctggcggagtttaccattatcacataacttcagatgctccatatttaaacggtattggctattatggtgccccaggaacagttaatgaataaa

SEQ ID NO: 251690 - DNA, 490 bp, Unknown
  Bacterial polypeptide expressing nucleotide sequence isolated from the Sargasso Sea
actgggcgatatattaagaaaaaaacttttagaaaaagatagtctttcaattaaattaaaaaatataattgatggaggtacattagtttcagatgaaattataaatgaaattgtccttcaaaggttacaggaaactgattgttcaaatggattcattttagatggttatccgagaactaaaatgcaagctgagtttttaaattcttattttcaaaaaattaatcttcaaatagattatattatcgaaattttactgagtgataatgatattaaaaaaagaattaaatcaagatctgcaattgaaaacagacaagatgataaagaagaagttataaatataagattaaaaaaatacctttctgaaacaaaaccactttttcaatactttagagaaaaaaatagggataaatataatgttgtagatggaaatcaaaatattgaaaaaatcacctctgatattatagaaatagtaaaaaatgacgatttatag

SEQ ID NO: 251691 - DNA, 502 bp, Unknown
  Bacterial polypeptide expressing nucleotide sequence isolated from the Sargasso Sea
aatggtgccacattcctttcaacgggagatatatttgagaaaaaagttactagaaaaagataatttggcaatcgaattaaaaaaaatcatggcttcaggcaatttagtctccgatgatattttgaattcaattgtatcttcaagactaagtaaagaatctggcaaagggtttattttagatggttatcctagaactttgcatcagtcagaatttcttaataattttctctctaaaacttctagctcgataaattatctttttaatattcaaataaattttgaaactttaaaaaatagaatattaaaaagatcctcagaagaaagtagagaagatgataatgttgatgttattgaaacgagatataatgaatatctaaattcaacacaaaaggtaactaactcttacaaagataaatataggcctaacttctacgaattagatggatctttagaaattgaagaaattactcaaaatatcaaagaaattttaaaaaaatcatga

SEQ ID NO: 251692 - DNA, 377 bp, Unknown
  Bacterial polypeptide expressing nucleotide sequence isolated from the Sargasso Sea
acctgctcttttattggctgtagaacgaggtagacctgatatggtcatatttttattacaaaaaggtgcaagagttgatcaaagagatgatgataaaagaacagccttgtcgattgcatcgagaaaaaataattttaatctcgtttcagaattaattaaatttggtgctaatcccgatagaactggtcccaacaaagagactcctctaattatagcttcaagatttggaaattttgagtctgttaaggctttacttgagggtggagcttaccccgatgacaccgatcttactggaaggacagctttacagtgggctaaaatcaaacattataaaaaaatacaagaaatcctgattgagtatggttcatatgattaat

SEQ ID NO: 251693 - DNA, 186 bp, Unknown
  Bacterial polypeptide expressing nucleotide sequence isolated from the Sargasso Sea
aacgagacgatgataaagaaggaacggtacgaaatcgattagcggtttatcatgaacaaacagagccattggttaatttttacacagagctttcgagtgctggtaataatgtacatgttattaaagttaatggagtagcttcggtagaacaaataaaaagtgaaatcattgcgtcattaaactaaa

SEQ ID NO: 251694 - DNA, 255 bp, Unknown
  Bacterial polypeptide expressing nucleotide sequence isolated from the Sargasso Sea
gatgaacctcatcttattgggtccccctggctgcggtaagggtacgcaagcagtaaaccttgttaagaaatatgattattatcagctttcaaccggtgatatgcttagggaagctgttgcaaatgatacacaaactggaaaaattgtaaagaatgtattggcaagcggaaaactagttgatgacgatttaatcatcaagataatggaagataaattaattgcgacaagatctaatccaggacgaatatttgatgg

SEQ ID NO: 251695 - DNA, 445 bp, Unknown
  Bacterial polypeptide expressing nucleotide sequence isolated from the Sargasso Sea
tatgtcagacctattacactcaattcaggtaggcggatcgccaagtgagcttgattttgatgaagtacctgctcttttattggctgtagagagaggaagacttgatatggttagatttttattacaaaaaggtgcaagagttgatcaaagagacgatgataaaagaacagctttgtcgcttgcatcaaggaaaaataattttaatctcgtttcagaattaattaaatttggtgccaatccagatagatctggtcccaacaaagagactcctctaattatagcttcaagatttggaaattttgagtctgttaaggctttgcttgagggtggggcctaccctgatgataccgaccttactggaaggacagctttacagtgggctaaaatcaaacattataaaaaaatacaagaaatcctgattgaatatggttcatatgattattga

SEQ ID NO: 251696 - DNA, 451 bp, Unknown
  Bacterial polypeptide expressing nucleotide sequence isolated from the Sargasso Sea
gcagaaagatgaattggcattaaaagtaaaaaatataattgacgcaggtaaacttgtatctgatgatattttaaacgctattgtttcagaaaaaattactaaagattgtaaagatggttttattttagatggttatcctagaactttagatcagtctaactttttagaaaatttactagttaaaaataatcaaatattaaactttattatcaatattgatatagaatttaatgttatcgaaaaaagaattttaaaaagatctaaggaagaaaatagagaagacgataacatcaatataattaaaacacgttatttagaatataaaaactcaactcaaaaagtatctgaattttacagatcaaattattcaaacattttccacgatttggatggaagccttgaaatttctgaaatcaccaataaaattgttaaaataatagaaaatcggtga

SEQ ID NO: 251697 - DNA, 812 bp, Unknown
  Bacterial polypeptide expressing nucleotide sequence isolated from the Sargasso Sea
aatgtttggtgagtttggtttcttactagatggtcttgctacaccatttgcaataatcatttacgtactttgtacagttcttgcattatactcaaaaccatacatggttcacaaattcgaagaactattcaaagaacactaccaccaaaacacaaccactgacggtcaaacaactgcagtagttgattctacagcattaaagaaatatgtcaaccatcaatctggtctgtactttgcaatgtttctggtctttgccatgggaatgcttggtacagttcttgcaacaaacctgattgaattttacatcttctttgaggtaatgcttatcccatcattcttcttggttgccttctatggtgatggaaacagaagaagaatcgctttacaattcttattttggactcacgtcggtgcagtcgttttactacttggcttcttagcaatcggtcttagcgttggaagctttgactttgtagatatttctgaagcagcaattgatcccgatatactggtgatttccgcagttgccatcatcttgggattgggtgtaaaactggcagccttcatcttccacgtttggttgccttatgcgcacggtgcggcaccaacgccaatcagtgcactgttatctccagccatgatcggaattggagcatatggattattcagattaattgtagaattcctgccgcaaacatacggcgacatctcaatcatgctaaacatctggggtgttgttacaatgttctatggtggtgctatggctctcatgcaagacgacttcaaacgaatgcttgcatattctagtatca

SEQ ID NO: 251698 - DNA, 428 bp, Unknown
  Bacterial polypeptide expressing nucleotide sequence isolated from the Sargasso Sea
taaaaatttgaaagaaattatgtcaagtggtggattagtttctgatgaaatactaaataaaattgttaatgaaaaattaaatgattgcaataatggttttattttggatggttatccaagaactttggatcaatctaattttttaaataacaaccttttgcaatctcgccgaagtttggattttatttttaatatcgatattaactttgatttattaaaagatagaatacttaaaagatcgcaagaagaagacagagatgatgataatatagatgcattagaaacaagatacacaaaatatatggacgaaacaaagccggtatcagaagaatacaaacacaataattcttcaatcttttatgaaattaatggaggtaatcaaattcaagaaataacttcagaaatcatcaaaatacttgaaaaataat

SEQ ID NO: 251699 - DNA, 336 bp, Unknown
  Bacterial polypeptide expressing nucleotide sequence isolated from the Sargasso Sea
gatgtttttgccgattgttttttttatatttcttgtcggtgctttttatgttggtttacagcgtgatgacgataagtctttgccatccgttctaattggggaattagctccagatataaccaaaaacgaattatactcgggttctgaggtaactcctgaattaatgaagtctcctggtattaaactcgtgaacttttgggcgagttggtgccctccttgtagggctgaacatgaaaaattacttgaaatagctgaaactggtacagttatttttggagtaaaaataaaagatgataaggaaaatgcactctcatatctgcagaggtatggtaaccc

SEQ ID NO: 251700 - DNA, 418 bp, Unknown
  Bacterial polypeptide expressing nucleotide sequence isolated from the Sargasso Sea
aatgttcggtgagtttggtttcttactagatggacttgctactccatttgcaataatcatctatgtactttgtactgttcttgcattatactcaaaaccatacatggttcacaaattcgaagaactattcaaagaacactatcaccaaaacacaaccacagacggtcaaacaactgcagtagttgattctacagcattaaagaaatatgtcaatcatcaatctggtttgtactttgcaatgttcctggtctttgccatgggaatgcttggtactgttcttgcaactaacctgattgaattttacatcttctttgaggtaatgctcattccatcatttttcttagttgcattctatggtgacggaaacagaagaagaatcgctttacaattcctatttggactcacgtcggtgcagtcg

SEQ ID NO: 251701 - DNA, 1558 bp, Unknown
  Bacterial polypeptide expressing nucleotide sequence isolated from the Sargasso Sea
aatggactttgctcttctacaggcggtatttttaccactgttattgtctccagttgcttacataattggaagaaactatggccctacacctgcaacatggttcaccttcggtttacttctttactgctctgtaatactgattaatgcatcacttggtggaacatacgaagaacattatccatggactacaatgtttggagaatttggtttcttacttgacggacttgcaacaccatttgcaatcatcatctacgtattgtgtacagttcttgctttgtactcaaaaccatacatggttcacaaatttgaagaattattcaaagaacactatcatcaaaacacaactactgatggtcaaacaactgcagtagttgattctgtagcattaaagacatacgtcaacagacaatctggtctctactttgcaatgttcctagtatttgcaatgggaatgcttggaaccgttttggctaccaacctcattgaattttacatatttttcgaagtcatgcttataccatcatttttcctagtagccttctacggagacggtaacagacgcagaattgctctacagttcttgttttggacacatgtaggtgcagttgtattactacttggtttcttagcaatcggtctcagtgttggaagctttgactttgtagatattgtagaagctgaaattgacccagacatacttgtggtttcagctgttgctattatcctgggattaggtgtaaaacttgcagcatttgtcttccacgtctggttgccttatgcgcacggcgcggcaccaacaccaatcagtgcgttactttcacctgcaatgatcggaattggtgcttatggattattcagattaattgtagagttcctgccgcagacatacggcgacatctccatcatgctaaacatctggggtgtagttacaatgttctatggtggcgccatggcgctcatgcaagacgatttcaaacgaatgcttgcatattctagcatcagtcagatgggctatcttctatttgcaattggttcattttcaacatacggtcttgccggtgctgaaatgatgtacatctctcacggtttaggtaaaggactcctgttcatgaccgccggtgtaattatcgttcaagttggaacaagaagtttcaagaaactcggtggacttgcaagcaaaatgccaatcaccgcagtttgtgctgtaattggtggtttaacaatcatgggaattccaccaacaagtggattcatgggagaatggatggttttctatggtgcattagaaactgcagtttcagaaggaaacgatatacgaagtctcatgtttgcattaggattaattgctactgcattaacaatgtcttacattctatggatgctcaaacgagtattctttggaaaattacctgagaatttacaaaatgtcaaagaaggaagttggtacatgttggcaccgatgatggttcttgccggctttactatcgttgtcggaatttatcctgacgtattccttggacaaattatgccttacatgcagggagtgatgggggtctag

SEQ ID NO: 251702 - DNA, 280 bp, Unknown
  Bacterial polypeptide expressing nucleotide sequence isolated from the Sargasso Sea
aatgtcaggaagaagagtgcatttaccgtccggaaggtcatatcatattgctcacaacccaccaaaagtcgaaggaaaagacgatttaaccggtgaaactcttatacaaagagaagatgatcaccctgatgttataaaaaagcgtcttgaggtctattatgatgagactgagccacttttaagcttttataggcagaaagatataagtttttacgaaatcgatgcttctaaaaccctggaagaggtcacagaagatatacggaaagtcatttcgcattga

SEQ ID NO: 251703 - DNA, 291 bp, Unknown
  Bacterial polypeptide expressing nucleotide sequence isolated from the Sargasso Sea
ctaagcttctagataaattgatgtcagaacttaaagacaagatatcatgcgtaattcagttagatgttgatgaaaaacatttaaaagacagaatattatctagagctaaagaagaaggaagatccgatgataatgaagaaactcttcttaaaagacttgaaacatatttcaatgaaactatgcctttaataaaatattatgatgaagcaaaactgctaaaaaaagtcagtggtgtaggtgaaattatgcatataaatcaatcaattaacacaattatagatcatctttaat

SEQ ID NO: 251704 - DNA, 292 bp, Unknown
  Bacterial polypeptide expressing nucleotide sequence isolated from the Sargasso Sea
gcaaagcttctaaataaattgatgttagagcttgaagaaaagattttttgtgtaattcagttagatgttgaagaaaaacatctaaaagaaagaataatatctagaagtaaagaagaaggaagatccgacgataatgaagaaactctcttaaaaagactggaaacatatttccatgaaactatgcctttaataaaatattatgatgaattaggactgttaaaaaaagttagtggtgtaggtgaaattatgcatataaatcaatcaattaacttaattatagatcatctttaat

SEQ ID NO: 251705 - DNA, 460 bp, Unknown
  Bacterial polypeptide expressing nucleotide sequence isolated from the Sargasso Sea
ttgaaggttcaatcaatagtaaataaaggtggttttgtaaatgacgacataattttaagtatggtgtcaaatagaatacttatgaaagattgtaagtcaggttttattttagatggttttccaagaaatgtaaaacaggcgaaaatttttgatcaaattcttaaagaaagaaaaataaaaattaattttgtaatagaactaaaagttaataaagaaagtttgtttgaaaggataaaaaacagagcatttgaatcaaacgaagcacgtgaagatgataaagatgatgttttagaaaatagattaaaaatttatgaggagcaaactgaacccctagtaccttattatcaagatttagggctacattttgaggttaatggaatgaaaaaagtttatgaaattgcagaagatattgagaatattataaaaattaaatttaagaccaataaggagataatttagt

SEQ ID NO: 251706 - DNA, 438 bp, Unknown
  Bacterial polypeptide expressing nucleotide sequence isolated from the Sargasso Sea
ttgtaaaaaatgtcatggcaaaaggtgagttggtttcagatgagttagtcctacaaattattaaagaaagaatttcacaaaatgattgtgataaaggctttattttagatggatatcctaggaatatagcgcaagcagaatccttaaaagaagttttaaaagatattaatcgaaatatagatagaattattttcttagatgtcgattttaaggttcttcagtcaagaatcgaaactaggtcaaaggaaaataatgacgaaataagagctgatgatacatcagaagttctaattaaaaggttggatgagtataaattacaaactgcacctttagctgaatattatagtagagataaaaaattcaagaaaatcaatgggatgaatacaataagtgatgtttcacatgatattgaaaattttttggatattagcatttagt

SEQ ID NO: 251707 - DNA, 1558 bp, Unknown
  Bacterial polypeptide expressing nucleotide sequence isolated from the Sargasso Sea
aatggaatttgttcttctacaggcggtatttttgccactgttactatctccagttgcatatctaattggcagaaactatggagccactccagcaacctggtttacctttggtctattgttatactgcacagtcattctgataaatgccgcacttggaggaacatacgaagaacattatccatggactacaatgtttggtgagtttggtttcttactagatggacttgctacaccatttgcaataatcatttacgtactttgtacagttcttgcattatactcaaaaccatacatggttcacaaattcgaagaactattcaaagaacactaccaccaaaacacaaccactgacggtcaaacaactgcagtagttgattctacagcattaaagaaatatgtcaaccatcaatctggtttgtactttgcaatgttcctggtctttgccatgggaatgcttggtacagttcttgcaacaaacctgattgaattttacatcttctttgaggtaatgctcatcccatcattcttcttagttgccttctatggtgatggaaacagaagaagaatcgctttacaattcctattttggactcacgtcggtgcagtcgttttactacttggcttcttagcaatcggtcttagcgttggaagctttgactttgtagatatctctgaagcagcaattgatcccgatatactggtaatttccgcagttgccatcatcttaggattgggtgtaaaactggcagcattcatcttccatgtttggttgccttatgcgcacggtgcggcaccaacgccaatcagtgcactgttatctccagccatgatcggaattggagcatatggattattcagattaattgtagaattcctgccgcaaacatacggcgacatctcaatcatgctaaacatctggggtgttgttacaatgttctatggtggtgctatggctctcatgcaagacgacttcaaacgaatgcttgcatattctagtatcagccagatgggatatctgctgtttgcaatcggttcattttcaacttatggtcttgccggcgctgagatgatgtatgtctctcatggtttaggtaaagcactcctcttcatgactgcaggtgtaatcattgtccaagttggtacacgaagcttcaagaaacttggtggacttgcaagtaaaatgccaatcactgcagtttgtgcagtaattggaggtctaacaatcatgggcgttccgccaacaagcggattcatgggagaatggatggtattctatggcgcactagaaactgcagtttcagaaggaaatgatatacgaagtctcatgtttgcattaggattagttgctactgtaatgacaatgtcttacattctatggatgctcaagagagtattctttggaaaattacctgagaatttacaaaatgtcaaagaaggaagttggtacatgcttgcaccaatgatggttctagcaggctttactatcgttgtaggaatttatcctgacgtattccttggacaaattatgccttacatgcaaggagtgatgggggtatag

SEQ ID NO: 251708 - DNA, 364 bp, Unknown
  Bacterial polypeptide expressing nucleotide sequence isolated from the Sargasso Sea
catgagcgaggcgggcgtgattttagatgcagtggttgagattcaagttggcgacgaagagctggttaagcgagctacggggcgacgagttcatccaggttcgggaagggtctaccatattttatacaacccgccaaaggtagaaggtaaagacgatgagagcggagaagcgttggtgcatagggaggacgacatggaagagactgttcgcgagcgtttgtcggtttattatcaggagacctacccactagttgagtactacaaagctttggtaagtaaagggttgaagtacatagaggttgacggtcagggccatgatttgaaagagattcaggagaacatttctaaagagctaagctcataa

SEQ ID NO: 251709 - DNA, 710 bp, Unknown
  Bacterial polypeptide expressing nucleotide sequence isolated from the Sargasso Sea
cgacgaagcgaccgaagccgcagtgatcgcgctacagacgaaaacaggactcgtcgacgatggcatcgcaggcccgaaaacgctggccgcgctcgcgaccggccggcgcgatcctaaacacctgtccatctgcgatctggtcgccgccgctgacaaactcggcgtgccgctcgcaagcgtgcgcgcagtcaatgaggtggagtcaactggatcgggctttctgctcgacggccgcccgaaaatcctgtttgaacgtcacattttctggaagagcctgcaggcgcgcggcatcgacccggcaccgatcgcggcaaagtatccgaatatctgttcgcagacgcgtggcggctatatgggcaacgcggccgaatacacccgccttgcaacagccgagctgatcgaccctgttgcgtcctatgagtcggcgagctggggcgcgctccaggtgatgggttatcactggcaacggctcggctattcgtgcgtcgatgagttcgttgcacgcatggagaacagcgaagccgaccagctcgacgcgttcgtacgatatgtggcggccgatgcgggcttgctggccgcgctcaaggccaggaagtgggcggcgttcgccaagggctacaacggcccggattacgccagcaacctgtacgacgcaaagctcgcgcgagcgtggctcaagtacgccgacaccgacaaggcggcggcatgaa

SEQ ID NO: 251710 - DNA, 518 bp, Unknown
  Bacterial polypeptide expressing nucleotide sequence isolated from the Sargasso Sea
caatttaatctgtgaaaaatataatttaagtcacttatctacaggtgatctgcttaggacggagatagctaataagagtgaaattggagtaaaagctaaacaaatcattgatgagggaaaactagtttctaacgatattataattgatgttattaaatcattttttaataataacaaaaatttaaatggatacctactcgatggctttcccagaaatacagagcaggcaaagcttctagataaattgatgttagaactcaaagacaagatatcatgcgtaattcagttagatgttggtgaaaaatatttaaaagacagaatattatctagaggtaaagaagaaggaagatctgatgataatgaggaaactctttttaaaagactcgaaacatatttcagtgaaactatgcctttaataaaatattatgatgaagcaaaacttctaaaaaaagtcagtggtgtaggtgaaattatgcatataaatcaatcaattaacacaattatagatcatctttaat

SEQ ID NO: 251711 - DNA, 542 bp, Unknown
  Bacterial polypeptide expressing nucleotide sequence isolated from the Sargasso Sea
aggaacacaagcaaatttgttagttagtagtttaaatattccacatttatcaactggtgatatacttagatcaaaactaaaggaacaagatagtctatctgattctttaagacaaatcatttcatctggtaatttagtatctgatgaaattacaaataaaattatatcagaaaaattattaagctctgattgtaaatcaggttttattttggatggttatcctagaaccttatctcaatctaattttttaatttcattttttgaaaataataatattgaccttgatttgatagtatattttaagttagatcaaaaaaatgttgaaaatagaatcatctctagatctaaaattgaaaaaagatctgatgataatatagatgtaataaaaactagaataaaaaaatataatgaagagactgctcctttagtgcaaatatataggcaaaagttccctgaaatatttattgaaataaatgcggctcaagatatttcaaaaatacaagatgagatcaaaaatatgctaaaaaatgccatattttaga

SEQ ID NO: 251712 - DNA, 631 bp, Unknown
  Bacterial polypeptide expressing nucleotide sequence isolated from the Sargasso Sea
tctgattggacctccagcatcaggaaaaggtactcaggctaaatatatagttaaaaaatataattattttcaattatcaacaggtgatttgttaagagatgaaataaagaaacaaactaaattaggtgaagagatttcaaaaaaaattgataaaggtgaatttgttaacgaccaaattgtaaatactttgttaaataatgtaataactgataaatctaaaagaaataaaattatttttgatggatatccaagaaatttatctcaagctaaaaacttagaagttcttcttaaaggtgataaacaaaccgttggttcaataatttatttaaatttatctaaagatgaaatttcaaaaagaatttcaggtagatatatatgtgaaaaatgtaatagaactttaaatgagtttactgataatgaggaatttactactcataaatgtgacaaaaaatatttaaaaaaaagacccgatgacaataaagatactatattaaaaagatacgatacttatgtactgcaaaccaaacctgttttagattactattctttaaatcctaattttaacgaaatagatggaagtcttaaaatcgatcaaattatgagcaaaatagacgaaattgttaatgtttaa

SEQ ID NO: 251713 - DNA, 369 bp, Unknown
  Bacterial polypeptide expressing nucleotide sequence isolated from the Sargasso Sea
aggcaaaggaacttgcaaaaatgaatattaattttacacatgtaattgaaatatttgttgaagatcaaattattgtaaatagaatgtctggaagaagagttcatcctgcatcgggtaggaattatcatattgaattcaatccacctaaaaataaaggatttgatgatgagacaaacgaacctcttattcaaagagaagatgataagccagagacagtattaaaaaggcttaatgtatatcatgagcaaactaaacctcttgctgttttttatgaaaacttatcaagtaaaggatatttaagctttttcaaagttgatggttctaattcggtagatgacgtttttaaagaaatttcgtctcaaatatagg

SEQ ID NO: 251714 - DNA, 301 bp, Unknown
  Bacterial polypeptide expressing nucleotide sequence isolated from the Sargasso Sea
attgtagagcgtatgagcggccgtcgtgtgcaccctgcttcaggacgtgtttatcatgtcagttacaatccaccaaaagtggatggtaaagatgatctgaccggcgaagatttagtgatccgtgaagacgacaaagaagaaactgtacgtaagcgtttaggtatttatcacgagcagactgaactgctggtcggttattaccgtaaagaagctgaacagggccgcactcagtaccactatatggttgggaccttgccagttgaacaagtcagtgcaaaactcgaggcgttattaggttaat

SEQ ID NO: 251715 - DNA, 574 bp, Unknown
  Bacterial polypeptide expressing nucleotide sequence isolated from the Sargasso Sea
atgaatatagttattttgaggcctccaggtgctggcaaaggtactcaatcaaaatttattgtaaataaatttaatctatttcaattatctactggagatcttttacgaaatgaaattaataaaaaaacacaattagggtctgaaatttcatctattataaattctggtgaattagtatcagataaaatagtaaataatttaatagaaaaaatcgtttcaaacaatatttataaaaacaaaattatctttgatggatatcctagaactttaacgcaagctaagaacttagacaatctgttaaatagatttgatcaaaaaatagatattgttttaaaactctctgttagtcttgaaactgtaaagaaaagaattttagaaagacaaaatcaagagaatagagctgatgacaatgaagaggtagcaattaaaagatataaaacttacgagaaatcatccgaacctgttattgattattacaagcaatcaaatatgctcaaagtagtaaacggcgaggctggaatatctgaaattaatagtgaaattagcgggttaattgacgctatcaagggttgac

SEQ ID NO: 251716 - DNA, 184 bp, Unknown
  Bacterial polypeptide expressing nucleotide sequence isolated from the Sargasso Sea
atgaaccccaaaattattattttgctcggtgcccctggatctggaaaaggaactcaatctgagctgttatcaaaagaatcgaacttagacatcatatgtatgggtgatatagtgaggcatgagttatcacaagaaactgatctgggaaaacaaatgaaaacttatatatccaatggagatcttg

SEQ ID NO: 251717 - DNA, 228 bp, Unknown
  Bacterial polypeptide expressing nucleotide sequence isolated from the Sargasso Sea
catgataattattttgttaggaccaccaggctctggaaaaggcacacaagctaattttattcaaaacaaactttcaatacctcatttatcaactggagatattttaagacaatcagttaagaatgaaactgatctaggtaataaagtaaaaaatataatggctaaaggggaattagtatcagatgatttagttttagatgttattaaggagagagtttcacaaagtga

SEQ ID NO: 251718 - DNA, 499 bp, Unknown
  Bacterial polypeptide expressing nucleotide sequence isolated from the Sargasso Sea
gttgaagatattcttaactcgggcaagctcgtctcagatgatattattattgaattaataaatgatcgtatccatcagtcagattgtaagtctggttacttattcgatggagtgccaagaactcttgggcaagccaatctttttttacagaatgatattgaggtaaaaaaggtaatagatatatcacttgatgatgaattaattatcaaaaggatgtcaggcaggagatttcacatagcatctggaagaagctaccatattgaatttaacccaccaaaagctgaaggcttagatgacgaaacaggagaaccattaattcaaagagaggatgatttccctgagaccgtaaaaaaaagacttgaggtctattatgcacaaaccaaaccattaacagatttttacaaatcaaaggcttcagaggggattatgagttttatttctattaacggtaatcagtcagttgatgaagtttttagtgaaattaagtcatatttataaa

SEQ ID NO: 251719 - DNA, 640 bp, Unknown
  Bacterial polypeptide expressing nucleotide sequence isolated from the Sargasso Sea
tatgcaaataattttacttggtcctccgggatgcgggaaaggaactcaagctcaaaaattaataaatgagttcggttttgtccagctttcaacaggcgacatgcttcgtgaagcaatcagcaaagggacagaaattggattacaggcaaaatccattattgaaaaaggtgaccttgtatctgatgaaatagttataggtatagttagggaaagaatttttagtaaagaatgtgaacgcggatacatgcttgatggtttccctcgtacattcgctcaggcaaagagattggatcaaatacttttagatcgtaatgaaaaaattgacgtggtaattagattatgcgttccagatgagatgttaataagaaggattgcaggtagacgttttcatgtaaagagtggcagaagctacaatatagaaactaatcctccaaaagtacaaggcaaagatgacattaccggagaaaaacttgtacagcgtgaagatgataaagaaggaatagcggaatccagactaaaaacatattatgagttaactgaaccccttgtaggatactataagaaaaagaaattgctcaaagaaattgacgggactaaatcaccggaaaatatttatatcgagattaaaaaaactctaaaa

SEQ ID NO: 251720 - DNA, 582 bp, Unknown
  Bacterial polypeptide expressing nucleotide sequence isolated from the Sargasso Sea
cacacaagcccggtaggatagttgaactacccagtaaaccgcaagtatccactggcgatatgttacgagcagcagtaaagctagggtcaccaatggggctggccgcaaaagaatacatggatgcagggttattggtgcccgacgaggtgataattggcttaatccaagagcgattacaggaagacgacgccggccaaggagtactctttgatggcttccctcgaaccatccctcaagcagaatctctcgagaaaatagctacggtttcttcagtaatttcaatagaagtcccagatgatgcgattgtcgatagaatagtcggaagacggatggatccggagactggagaaatctttcatgttcaattcaaaccggccccacctgaaattgaaggccgactaatccaaagaccagatgataccgaagaaaccgttaggtctagattagaggcctatcataatcaaacagctccgttggcagattggtactcagatagaggattactaatacgcatagatggaaatgcctcgattaaccaagtaggagtttcggttgaacgcgcaatttctaggattttatgag

SEQ ID NO: 251721 - DNA, 400 bp, Unknown
  Bacterial polypeptide expressing nucleotide sequence isolated from the Sargasso Sea
tctgattggaccacctggatcaggaaaaggtactcaagctaaatttctagcagaaaaactaaataattttcaagtttcaacaggagatatgcttagagaagaaattaaaaataatacagaaattggtaaaaaaattataaataatatgaatgatggaaaatatgttgaagatgaaatagttaataaacttcttgaaaaaataatatttgacacaaaaaaaataaataaactgatttttgatggttatccaagaactataaatcaagctaaaaatttagaaaacttattgaataaatctagtcaaaaacttgaccatatctttttccttaatgtgaataaagaaactataataaaaagaattgagaaaagaaaaattttagaaaaaagatctgatgacgat

SEQ ID NO: 251722 - DNA, 202 bp, Unknown
  Bacterial polypeptide expressing nucleotide sequence isolated from the Sargasso Sea
atgaaattaattatatttggacctcctggttctggaaaaggtactcaggcatctatattggcaaaaaaaaacaaaatacctcatctctccacaggagatattttaagatctaaacttgaggaaggcgatgatttgggtaaagagttatctaaaataatgtcagtcggcaatcttgcccctgattcaattataaatccaatag

SEQ ID NO: 251723 - DNA, 810 bp, Unknown
  Bacterial polypeptide expressing nucleotide sequence isolated from the Sargasso Sea
gtacctcgctttcgcagcggcctcgagcttacgccccgctgtggcgcagccatatgctggcgaagggacgggtctagggactttcgaaaacccaaaacaccctattccggcgttcgtcttactcggcgccccaggcggagggaaaggaacgatatcaaagaagatcgtggatcacgcggctaaccatggatttggttcaggagacaaaggccgcggaaagtgctcaatcatccacctctccgtcggcgatctcctacgagccgagaccgtgaagaaaacgccccttggcattcgcgtccaagagttcatcgacgccggcaagctcgctcccgaagacctagtcaggcaggtcttggagaaaggaatcgtggagagtgttggtgctgcgaagcagaacgcgatgtcacagactgcagcagacgctgataatatgcctatcatagtgatgctcgacggctatccccgcaacctggcgcaggccgaatacctcgacactctgctgcctatcaagcaagctgttagtctcaatgtaccagccaaagagatcgttaccagggtgagcgcacggtggatacaccccgaatccggtcgtgtgtacaactatttatttaatccgccgaaggtggagggtgtagacgacataacgggcgaaaagctggagcgtcggaaagacgacagccccgaggtagtgcaaaaacgattggaattgtttcgagaggaaacggagccgattttagaatactacagaaagaccggcaatcggctagcggaatttaatggggagagcttcaggaaaggaaaagtgctggt

SEQ ID NO: 251724 - DNA, 535 bp, Unknown
  Bacterial polypeptide expressing nucleotide sequence isolated from the Sargasso Sea
ggtactcaggcatctttattagcaaaaaaatataaaataccacatctttcaactggagatattttaagatttagacttaaacaggatgataaatttgctcaagatttatctaaaataatgtcaggaggtaatcttgtgcctgatacaattataaatccaatagttgctgataaattacttagcaatgattgtaaaaatggatttatacttgatggctatcctcgtaataaatgtcaatctgattttttaattgattttttgaataaaaataatttagatatcgatttaataatagattttatagctgataacaatactgtaaaaaaaagaataatggaaagatcaaagattgaaaatagatcagatgataatttagaagttattaaaactagattagagaaatattttgctgaaactctaccattagctgctatgttcaaggaaaaatttaaagacaagttttttgagataaatgcaacacacgaaataacaaaaattcaatatgatattgaaaatgtgcttaaaaatgcctaaa

SEQ ID NO: 251725 - DNA, 238 bp, Unknown
  Bacterial polypeptide expressing nucleotide sequence isolated from the Sargasso Sea
aatgaatttgatacttttagggatgcctggtgctggaaagggaacgcaagctgagataattcagagagagcagggaatagcaaatgtttcaactggagcaatgatgagagaggttagtcgagcagaaacagatctaggcaaaaaagtacaagaatatttatccacaggaaaattagtgccagatgacataataattcagatgctggtggaaagaattagccaaagtgattgtgaaaat

SEQ ID NO: 251726 - DNA, 233 bp, Unknown
  Bacterial polypeptide expressing nucleotide sequence isolated from the Sargasso Sea
tccgcctaaagttgccgatcgtgacgacgataccggtgaggaactgattcagcgggacgatgacaacgaggaaacagttcgtgcacggctcaatacctacaacgaacagactgcacctctgtcggaccactaccgcaaacagaaactgttgaaagccatcgacggtatgggcagccccgacgaagtttacgagcggttgcgtcaatccctggaagacctcaatccggcctgaa

SEQ ID NO: 251727 - DNA, 565 bp, Unknown
  Bacterial polypeptide expressing nucleotide sequence isolated from the Sargasso Sea
ccaaaaataagtactggcgatatgttgcgatctgctgtggcctctaaaagtgacttaggtaatagagttgaagatattcttaactccggcaagctcgtctcagacaatattattattgaattaataaatgatcgtatcaatcagtcagattgtgagtctggttacttattcgatggagtgccaagaactctagggcaagctaatctttttttacaaaatgatatagaggtaaacaaggtcatagatatatcacttgacgatgaactaattattaaaaggatgtctggcagaagatttcatatggcatctggtagaagctatcatattgaattcaatccgcccaaagctgaaggcttagatgacgagacaggagagccattaattcaaagagaggatgatttccctgagaccgttaaaaaaaggcttgaggtgtatcattctcaaaccaaaccattaacagatttttacaaatcaaaggcctcagaaggcattattagttttatttctattaacggtaatcagtcagttgatgaagtttttagtgaaattaagtcttatttataaa

SEQ ID NO: 251728 - DNA, 379 bp, Unknown
  Bacterial polypeptide expressing nucleotide sequence isolated from the Sargasso Sea
aatgaatttaatatttttaggacctccaggagttggtaaaggaacacaagctggcttagtctgcaatcattttggtatcttacatttatcaacgggtgatatacttagaactgaaatcaatagaaaaagcgatattggtaaaactgcaaaatctttcattgatcaaggtgcgcttgttcctgatgatgtcttattaaatattattgaagcaagattatctgagtcagatatacaaaaaggatatctcttagatggctttccacgaacaatgccccaagctaatggcttaaatagttttttagaaaaaaaatctcagaaaattgatactgtgatcagtttaactgctaatgaagatgagctaattcaaagactaattaaa

SEQ ID NO: 251729 - DNA, 407 bp, Unknown
  Bacterial polypeptide expressing nucleotide sequence isolated from the Sargasso Sea
tttgatggttttccaccgcacaattcctcaggcagaaggactagagaacttaaaggtttcgatagatatagtaattgagttagtcgtggaagacgatgaaatagtaaaaaggatgtcagggaggagagtgcacatgggatcaggaaggacctatcatgttatttataatccaccctctgttactgataaagacgacttgacaggggagccgctagttcagagagcggatgatatggaggaaacggtcaggaagagactggatgtgtattcccatcagaccaaacctcttatagcatggtttaaaaattatgaacaaagaaattctgctacgaagtttgttgaagtcaagggagtaggtagcgttgaatcgattagagatataataattcgggaattaaaaaaataaa

SEQ ID NO: 251730 - DNA, 235 bp, Unknown
  Bacterial polypeptide expressing nucleotide sequence isolated from the Sargasso Sea
catgataattattttgttaggaccaccaggctctggaaaaggcacacaagctaattttattcaaaacaaactttcaatacctcatttatcaactggcgatattttgagacaatcagttaagaatgaaactgatctagggaataaagtaaaaaatataatggctaaaggggaattagtatcagatgatttagttttagatgtaattaaagaaagagtttcacaaagtgattgtaat

SEQ ID NO: 251731 - DNA, 469 bp, Unknown
  Bacterial polypeptide expressing nucleotide sequence isolated from the Sargasso Sea
tttgcttagaatggagatagctaataaaagtgaaatcggggtaaaggctaaacaaattattgatgagggaaaactagtttctaacgacattataattaatgttattaaatcattttttaataataataaaaatttaagtggatacctactcgatggctttcccagaaatacagagcaggctaagcttctagataaattgatgtcagaacttaaagacaaaatatcatgcgtaattcagttagatgttgatgaaaaacatttaaaagacaggatattatctagaggtaaagaagaaggaagatccgatgataacgaggaaactctaattaaaagacttgaaacatatttcaaagaaactatgcctttaataaaatattatgatgaagcaaaactgctaaaaaaagtcagtggtgtaggtgaaattatgcaaataaatcaatcaattaacacaattttagatcatctttaa

SEQ ID NO: 251732 - DNA, 640 bp, Unknown
  Bacterial polypeptide expressing nucleotide sequence isolated from the Sargasso Sea
atgcgtttaatatttatcggtccaccaggcgttggtaaaggaactcaggccaaacttattaaacaatattttggtatcgttcatttatctacgggtgatatcttgcgagaagaaatatcacaagccacttccctaggaataaaagctaaacaatatattgataaaggatatttagtcccagatggtgagttattaaatattatggggaaaagactgaatcaagatgatactaaaaaaggatacctattagatggttatccaagaacgatacctcaagctgaaggattagatagttttattaataaaatgaatcaaaaaattgattctgtcatttccattgaacttgatgatcaatccataattaaaagattatcaagtagaagaacttgtaaggggtgcgggaatattacgaatttgttatttaatccacccaaaatagaaggtaagtgcaacaaatgtagtggtaaactattacaaagatcagacgatggaaatcaagtaattattaaaaggctcgaagtatataataaacaaactgcaccattgcttaaatattatcaaaaaaaagatcttataaaaagaattgatggtagtggaaatattgatagtgtttaccaacaaattgtaaaggttcttgaat

SEQ ID NO: 251733 - DNA, 667 bp, Unknown
  Bacterial polypeptide expressing nucleotide sequence isolated from the Sargasso Sea
atgaaaaaacacattcaaataattttgcttggtcctccaggatgcgggaaaggtactcaggctcaaaaattaataaatgaattcggatttgtacagctttccacaggagacatgctacgtgcagccattagcaagggtacagagattggagtagaggcaaaatcgattatcgacaaaggtgaacttgtatctgatgaaatagtgattggtatagtaagggaaagaattttcagtaaggaatgtgaacgtggatatatgcttgatggtttccctcgtacacttgctcaggctgaaaaattgaatcaaatcctttcagatcgtaatcagaaaattgatgtagtaatcagactatgcgttcctgaagaaatgctagtgagaaggattgcaggtagacgttttcatataaaaagtggtagaagctacaacatagagtttaatcctccaaaaatagaagggaaagatgatattactggagaaaagttagtacagcgtgaagatgacaaagaagaaattgtggaatccagactaaaaacatactatgagctaactgaacctcttgtggaatactataagaaagagggtttgctaaaagagattgacgggactggatcaccggaaaatatttatacagagataaaacaaacactaaacgcggttcctgcctaga

SEQ ID NO: 251734 - DNA, 277 bp, Unknown
  Bacterial polypeptide expressing nucleotide sequence isolated from the Sargasso Sea
tatgtttaatattgtgatttttggtaaaccaggatctgggaaaggaacacaggctgattttttaaaagataaatatgatttacatcacatatctacaggtgatttatttagaaaaaacattttaaataaaactgatctgggtattgaagcaaagtcatttcttgataatggagatcttgtacctgacattgttacaattaaaatgcttgaaaatgaagttttagtaaataaggatgctaaatggtttatttttgatggttttccaagaaacactaat

SEQ ID NO: 251735 - DNA, 151 bp, Unknown
  Bacterial polypeptide expressing nucleotide sequence isolated from the Sargasso Sea
atgaaattaattttattcggaccaccaggttctggaaaaggtacgcaagcttcattactagctaaaaaaatcaatataccacatttatcaactggagatattttaagatctaaacttaatgataatgataatttagcaccaagaactgtct

SEQ ID NO: 251736 - DNA, 588 bp, Unknown
  Bacterial polypeptide expressing nucleotide sequence isolated from the Sargasso Sea
ttatttcagctaatctaggtatcccaaaaataagtactggcgatatgctacgatctgctgtagcctctaaaagtgatttaggtaatagagttgaagatattcttaactccggcaagctcgtctcagatgatattattattgaattaataaatgatcgcatcaatcaatcagattgtaagtctggttacttattcgatggagtgccaagaactcttgggcaagccaatctttttttacaaaatgatatagaggtaaaaaaggttatagatatatcacttgatgatgaactaattattaaaaggatgtctggcagaagatttcatatagcatctggcagaagctatcatattgaattcaatccgccaaaagctgaaggcttagatgacgagacaggagagccattaattcaaagagaggatgatttccctgagaccgttaaaaaaaggcttgaggtttatcattctcaaaccaaaccattaacagatttttacaaatcaaaggcttcagaaggcattattagttttatttctattaacggtaatcagtcagttgatgaagtttttagtgaaattaaatattatttataaa

SEQ ID NO: 251737 - DNA, 556 bp, Unknown
  Bacterial polypeptide expressing nucleotide sequence isolated from the Sargasso Sea
agtactggcgatatgttgcgatctgctttggcgtctaaaagtgatttaggtaatagagttgaagatattcttaactcgggcaagctcgtctcagatgatattattattgaattaataaatgatcgcatcaatcagtcagattgtaagtctggttacttattcgatggagtgccaagaactttggggcaagccaatcttttttttaagaatgatatagaggttaaaaaggtaatagatatatcacttgatgatgaattaattattaaaaggatgtctggtagaagatttcatatagcatctggtagaagctatcatattgaatttaatccaccaaaagccgaaggcttagatgacgatacaggagaaccattaattcaaagagaggatgatttccctgagaccgttaaaaaaaggcttgaggtttatcatgctcaaaccaaacctttaacagatttctacaaatcaaaggcttcagagggcattatgagttttatttctattaatggtaatcagtcagttgacgaagtttttagtgaaattaagtcttatttataaa

SEQ ID NO: 251738 - DNA, 285 bp, Unknown
  Bacterial polypeptide expressing nucleotide sequence isolated from the Sargasso Sea
aatgaatttgatacttttaggaatgccaggtgctggaaaaggaacacaagctgagataattcagagagaacaaggtatagcaaatgtttcaacaggagcgatgatgagagaagtcagtagagcagaaacagatctaggcaaaaaagttcaagagtacttgtctacaggaagattggtgcctgatgaaataataatccaaatgctggtcgagagaattcatcaaagtgactgtgaaaatgggtttttacttaatggtttcccaagaaatttagatcaagcaaaggc

SEQ ID NO: 251739 - DNA, 554 bp, Unknown
  Bacterial polypeptide expressing nucleotide sequence isolated from the Sargasso Sea
tactggtgacatgctaagagaggccgttgcatcaggtagcgagcttggaaaaaaagtatctaatatacttgatacaggcggtttagtatctgatgaaattataggtgctctgatagataatagattgtcaaaacctgactgtgaacaaggtgctttgtttgatggagttccaagaaccattggtcaggcaaagcaattaagtcagatgggcattatatttacacatgtcattgaaatatttgttaatgatgaggaaatcgttaatcgaatgtctggaagaagggttcatcctggatctggaagaaattatcacattgtacacaatccacctcaaatcgaaggtattgatgatgttactggcgagtcattagttcaaagagaagatgacaaaccagagactgttctaaaaaggctagaggtttatcatgatcaaactaaacctttaactgatttctataattctttatcaaaaaaggataatattaaattttttagagtagacggttcaaagcatgttgaagaagtctttaaaagcatatctaaagaaatctaga

SEQ ID NO: 251740 - DNA, 408 bp, Unknown
  Bacterial polypeptide expressing nucleotide sequence isolated from the Sargasso Sea
acggttctttgtttgatggagtcccaagaactattggacaggctgagcaacttgcagcaatgggtatagatttcacgcatgtcatagaaattcaagtcgcagatgaaactattgttaataggatgtctggcagaagggtgcatccaggatctggtaaaaattatcatatcgagttcaatcctccaatgaatgagggaatagatgatgatactggtgaaccacttattcaaagggaagatgataagcctgaaacagtattaaagcgtttaaacgtttatcaggaacaaaccaaacctctgacagatttttatatgaatctagcaaatagtggaactttaaaatttattaaagtagatgggtctaactcagtagagaatgtttttaagagtatttcagataatttataaa

SEQ ID NO: 251741 - DNA, 493 bp, Unknown
  Bacterial polypeptide expressing nucleotide sequence isolated from the Sargasso Sea
caatatcttagatagtggaagattagtttcagacgacattattggttctttgataaaagacagacttacgaaaccagattgtataaatggctctttatttgatggggttccaagaactattggtcaagcagagcaattagctaaaatgaatattgacttcacacacgtaattgaaattcacgtagaagatcaaattatagtcgatagaatgtcaggaagaagagtacatccaaaatcaggtaggaattatcatattgactttaatccgccagataaggagggggttgataatgaaacaggtgatcctcttattcaaagagaagatgataaacctgaaacggtattaaaaagattacatgtttaccatgaacaaacaaaaccactcacagatttttatataaatctttcaaatgcgggagatttaaaattttttacaattgatggctctaagtctgtcgaaagtgtttttcaacaaatttcaattcagttataa

SEQ ID NO: 251742 - DNA, 106 bp, Unknown
  Bacterial polypeptide expressing nucleotide sequence isolated from the Sargasso Sea
aatgaaaaaacacttactatttttaggagcgccaggagccgggaaaggaactcaagcggaattactaagtaaaactaattcttatttacatctttcaatcgggtga

SEQ ID NO: 251743 - DNA, 336 bp, Unknown
  Bacterial polypeptide expressing nucleotide sequence isolated from the Sargasso Sea
taaacaatgttatagatatatcacttgatgatgaactaattattaaaaggatgtctggcagaagatttcatatagcatctggtagaagctatcatattgaattcaatccgcccaaagctgaaggcttagatgacgagacaggagaaccattaattcaaagagaggatgatttccctgagaccgttaaaaaaaggcttgaggtttatcattctcaaaccaaaccattaacagatttttataaatcaaaggcttcagaaggcattattagttttatttctattaacggtaaccagtcagttgatgaagtttttagtgaaattaagtcttatttataaa

SEQ ID NO: 251744 - DNA, 643 bp, Unknown
  Bacterial polypeptide expressing nucleotide sequence isolated from the Sargasso Sea
tatgcgtttaatatttattggaccaccaggagtaggaaaaggcacacaagctaaacttgttaaagaatattttcaaatagttcatttatcaactggtgatatactacgtaaggaaatatctcgaggatctaatttaggtaataaagccaaatcatttattgatagaggacatttagtaccagataacgaattattaaagataatgagtaaaaggcttaatgaaaaagatgtcaaaaaaggatttcttcttgatggatatccaaggacaattcctcaagctcaaggattggatgtttttcttcatcaaaaaaaccaaaaaatagatgcggttatatctatagagcttgataataaaaatataattaaaagattgtcaagcaggagatcttgcgaaaaatgtggaaacattacaaatttattgttttctcttcctaaaatggaaggtgtatgtgataaatgtgatggtaaattattacaaagatctgatgatagtgaagatgtaataattgaaaggcttgaagtttataataaacaaacatcgccactacttacgtattatcaaaaaaaagagattattaagaaagtcgatggtagcggtaatattgataatgtacataaaattattttaaaggttcttaagtaa

SEQ ID NO: 251745 - DNA, 154 bp, Unknown
  Bacterial polypeptide expressing nucleotide sequence isolated from the Sargasso Sea
atgaaaaatttcgtgctttttggtaaaccaggttcagggaaaggaactcaggcagaacatttaagtgaaaagtataaactttatcatatttcgacaggtgacttatttagaaataaatatatctcagaacacaaacctcggactcttagctaaa

SEQ ID NO: 251746 - DNA, 403 bp, Unknown
  Bacterial polypeptide expressing nucleotide sequence isolated from the Sargasso Sea
atgaatcttatccttcttggtcctcctggagcaggtaaggggactcaggcaaaacttctagaacaaaaacttaacatgcttcaactttccacaggggacatgcttcgcgccgcaaaagacaaaaagtctgaaattggcaaaaaaataaaactaataatggctgaaggaaatttggttactgatgaaatagtaattgagttgatctctgaaaatattgacaaatcatctaaatgtgcagggtttatttttgatgggtttccacgaacactttatcaggctgatgctttgtcagaacttatgagttcaaaaaaacaatctattgatcttgtaattgaaatgagggttgataatagccagttaatagaaagaattgtcggtaggtatagctgtaaggaatgtggtg

SEQ ID NO: 251747 - DNA, 454 bp, Unknown
  Bacterial polypeptide expressing nucleotide sequence isolated from the Sargasso Sea
tatgcgcattgttctgttgggggctccgggtgccggcaagggtactcaggctcagttcatcatggaaaaacacggtattccgcagatctccaccggcgacatgctgcgtgccgcgatcaaggcgggcaccgagctgggcctcaaggccaaagccgtgatggacgcaggtcagctcgtctctgacgacatcatcatcggcctggtcaaagagcgtattgcccaaccggattgcgccaacggcttcctgctggacggtttcccgcgcaccattccccaggcgcaagccatgaaggacgccggtgttgccgtggacttcgtactggaattcgacgtgccggacgaagagatcgtcaagcgcatgagcggtcgtcgcgttcactccggctccggccgtacctaccacgtggtgttcaacccgccgaaagtggaaggcaaggacgacgtgaccgggtga

SEQ ID NO: 251748 - DNA, 643 bp, Unknown
  Bacterial polypeptide expressing nucleotide sequence isolated from the Sargasso Sea
atgaggttaattttgatgggagctcccggttctgggaaggggactcaggcagaaaagctcatggatgactttggttgtcgccaaatatcgacaggtgtattactcagacaagccatagaatccggctctgaacttggcaaaaaggtacaaaaaatcatgtctgagggtttgcttgtttctgacaatatcgttttggatttaatcaagaatgagttatccgaaataggtgagagtggattccttttagatggctatccaagaaacatcaatcaagcaaaatcattgaatgatctacttgaaaatatagataaaccattggattacagcatattgattgatgtgccgagtgaaattttaattaaaagactgtctggaagaaggacatgctcattaacaggcaagactttgaatatttacttttcctcagaaaatgaaatagatgaatgtctttctaaaggtggcgaattgctacagcgagaggatgataacgaggagtcaattacgaaaagaattgaagtatacgaagagcagacagagccgatgattgatttttatagatcaacagggcttcttcatacaattgatggtcaaggttctgttgattatgtttatattaggctaaagcaactgatggaattatgaa

SEQ ID NO: 251749 - DNA, 304 bp, Unknown
  Bacterial polypeptide expressing nucleotide sequence isolated from the Sargasso Sea
catgaataccttcatactattaggaccacctggtgcaggaaagggcactcaagcagatcttatttcagctgatctaggtatcccaaaaataagtactggcgatatgttgcgatctgctgtggcttctaaaagtgatttaggtaatagagttgaagatattcttaactccggcaagctcgtctcagatgatattattattgaattaattaatgatcgcatcaatcagtcagattgtaagtctggttacttattcgatggagtgccaagaactctagggcaagccaatctttttttacaaaatgat

SEQ ID NO: 251750 - DNA, 79 bp, Unknown
  Bacterial polypeptide expressing nucleotide sequence isolated from the Sargasso Sea
aatgaatattatattacttggtccacctggagcgggtaaaggtactcaggcccgacaccttgtagaaaaaggaatatga

SEQ ID NO: 251751 - DNA, 643 bp, Unknown
  Bacterial polypeptide expressing nucleotide sequence isolated from the Sargasso Sea
tatgaggttaattttgatgggagctcccggttctgggaaggggactcaggcagaaaagctcatggatgactttggttgtcgccaaatatcgacaggtgtattactcagacaagccatagaatctggttctgatcttggcaaaaaggtacaaaagatcatgtctgagggtttgcttgtttctgacgatatcgttttggatttaatcaagaatgagttatccgaaataggtgagggtggattccttttagatgggtatccaagaaacatcaatcaagcaaaatcattgaatgatctacttgaaaatatagataaaccattggattacagcatattgattgatgtaccgagtgaaattttaattaaaagactgtctggaagaaggacatgctcattaacaggcaagattttgaatatttacttttcctcagaaaatgaaatagatgaatgcctatctaaaggtggtgaattgctacagcgagaggatgataacgaggagtcaatttcgaaaagaattgaagtatacgaagagcagacagagccgatggttgatttttatagatcaacagggcttcttcatacaattgatggtcaaggttctgttgatgatgtttatattaggctaaagaaactgatggaattatga

SEQ ID NO: 251752 - DNA, 633 bp, Unknown
  Bacterial polypeptide expressing nucleotide sequence isolated from the Sargasso Sea
aatgaatattatattacttggtccacctggggcgggtaaaggtactcaggcccgccaccttgtagaaaaaaggaatatgatacagctctctactggcgatatgttaagagaggctaaaaattcgggaagtgaaatgggaaacctagtcgccgaagttatggcgcgaggcgatttagtcacagatgagatcgttattgggttaataaaagaaaaaatttctggcgaaaaaggtggcggctttatttttgatggatttcctagaacacttaagcaggcagacgcattaggtaggctcttagaagagtgtggagaagacctagaccttgtcattgagatgaaggttgatgatgacgctcttgtttcgaggataagtggccgatcgtcttgtggaaactgtggtgaagtttttcacgatgtaacaaatccatggccagcttctggcgagtgtccaaaatgctccagcacggaagtagtgaggcgagctgatgacaatgaagatagtctacgccaacgtttgatggaatattacaaaaaaacttcgtcactaatagggtattattatgctaaaggtgatcatgtatctgtgaacggtcttgcttcggtggaaggagttgaaaagtcgatcgctgcagt

SEQ ID NO: 251753 - DNA, 571 bp, Unknown
  Bacterial polypeptide expressing nucleotide sequence isolated from the Sargasso Sea
atgatttttatattctttggtccaccgggggctggaaaaggtactcaagcagcaatactttcaaagaaatttaaaatacctcacttatcaactggagaaattttaagaaataatttacttggcactactactgaatcaataaaaataagaaaaatattaaataaaggtgatttagtatcagatgaaatattaaataaaataatcaaacaaaaattagactcgcctgaatgtattaatggttatatcttagatggttatccaagaactttaagtcaaaatgaatggcttgagaattatttaaattctaaaaatttagcaataacaaaaatttttgatataaacttagaaaaagatattattgttaaaagaattaaaaatcgagcaatattagaaaaaaggaaagatgatactgaagaggtaattaaaaatcgtgttaataaatatattgaagaaacaaaaccactttcaaaatattatttagaaaaatatcctaaaaattatcatttgattaacggtaatcaagaaattgaaatgatagagagtgatatcttaaaaattgttaaaaaatgag

SEQ ID NO: 251754 - DNA, 538 bp, Unknown
  Bacterial polypeptide expressing nucleotide sequence isolated from the Sargasso Sea
catgggtccgccaggagcaggcaaaggtacacaggccaaaattttgtctgatcaatataatcttgttcatctttctacaggagatattttaagaaatgaaattgataaccaaacaactattggccttgatgcaaaaaattatatggatcaagggcttttagtaccagacgaagtgttattatcaatgatggaaaataccttaactaatttaaagggatcgggaattatcttagatggttttcctagaactattcctcaagcagaagggttagatgcaatttttaaaaaattagatctcactattgatatggtaattaatatttatgttgataaagagattttaattaacagactaatcaaaagagctgaagattctggaagaagcgatgatactaaagaagttattgttaatcgtcaaaatgtatatttagaattaacagctcccttgcttgaattttataaaaatgaagtaattaatgttgatggtgatggaacgattgaggaagttactcaacgtgttttagcggcaataaaataa

SEQ ID NO: 251755 - DNA, 574 bp, Unknown
  Bacterial polypeptide expressing nucleotide sequence isolated from the Sargasso Sea
atgaagataattttatttggcccaccaggagctggtaaaggcactcaagcaaagttattaattgaaaaatataatatagtccagatatctactggtgatatgttgagagattgtgtagcaaaaggtactgaaatagggaaaaaagttaaatcaattatggaaaaaggagagttagtttctgatgacataataatttctctaatttcggatagaatatctgaagaggactgctctaatggttttattttagatggttttccaagaactattactcaagcacaatcactcgatgcaatgtttgatgaaagagaaatttcaatagatcatgttctagaaatagatgtagattttgatttgttgttaggcagaattgaaaaaagagctagtgaaaatgaagaagctcgccaagatgataattcaagtgtattgtcaaaaagattattggtttataaagaacaaacaatgcctgttttgacatactatcaagaaatgaataaattaaaaaaaattaatggaatgcttaacattgaagatgtttttaaagaaattttaaatgttgtggaatctgagtaaa

SEQ ID NO: 251756 - DNA, 652 bp, Unknown
  Bacterial polypeptide expressing nucleotide sequence isolated from the Sargasso Sea
gatgaatatcattcttctaggccctcctggctcgggaaagggcacacaagcacaggaactcaatcgtcgtcatggtttaattcacctttccactggggacatgctccgtgcggcaatcgtttcgggcagtgagcttggacaagacgttaagaatatcatggaagccggtgctcttgtgcccgatgacacaatgataaggatgatttctgagcggattgaacagccggattgtgcaaacggctttattttagatggttttccacggaccccagctcaagcggaagccttagacattatgctcagaaaaaaaaatatgaaaatagaccatgttattgagatgtctgttcatatagaaatacttaccaagagaatcgcgggacgctatagctgcgcggggtgcggtgctggatatcatgatgaatttcagcagcctgctcaggcaggagtttgtgattattgcggtgaaaccgagttctcgcgccggtcagatgataaaccggagacagtccgggctcggttagatgcttatgactcccagaccgcaccgctactcccttattaccaaaagtcgaattgtttgatcaccgtggatgccatggccgaaattgctaatgtaacagctgaaattgaagctgttttggggggtgtatga

SEQ ID NO: 251757 - DNA, 550 bp, Unknown
  Bacterial polypeptide expressing nucleotide sequence isolated from the Sargasso Sea
aatgaagaaacatttactatttttaggagctcctggagcagggaaagggactcaagcggaattgctaagtcaaactaattcttacttacacctttctactggtgaattattaagaaaagaaatcgaaatgaatactaccctgggtattcaggtgaaggatattatgaatcgaggagaacttgttagtgatgaacttgtattaaaaatcgttagacaaaatttagtcaaggataatagtggttggattctagatggttacccaagaaatttatctcaagcaaattcattaaatgaagtcttgaatgaaataaatcaacctttggaattagttttttatttagatattccagaagaagtactaattaagcgtttgcttttaagagggagaaaagatgatacggaagagacaattagaacaagagttgatatttataaaaaaactacagaaccattaattcaatattttaaggatctctcattgttagaatatattgatgctgatagagatttaaaaaccatttcctctgatatcaaacaaaaaatggcttga

SEQ ID NO: 251758 - DNA, 253 bp, Unknown
  Bacterial polypeptide expressing nucleotide sequence isolated from the Sargasso Sea
atgaatatagtaatatttggcccacctggagctggaaagggaactcaatcaaaatttattgtcaataaatatggccttcatcaattatctacaggcgatcttttacgtaatgaaattaaaaacaaaacagaattaggatctaaaattaccagaattatgaataatggagagttagtttcagatgaaattgtaggcaatttgatttcaaaatttatttctaatgatatttatagacataaaattatctttgatg

SEQ ID NO: 251759 - DNA, 553 bp, Unknown
  Bacterial polypeptide expressing nucleotide sequence isolated from the Sargasso Sea
ttgtttggaccgcctggtgctggtaagggtactcaagctaaatatttagtaaaaaaattaaattcctttcagatttcaactggtgaacttttaagagaagaaatatataaaaattctgatattggtaagaaaataaccaatgacatgaaaaatggtaaatttgtaagtgacgaaattgtaaataagcttattgaaaatttagtttctgaccctcaaaaaaaaaataggttaatatttgatggataccctagatctttgagccaagcaaaaaatttagatatcttacttgaggcatcaaatcaaaagatagatttaattttgtatcttaaagttgataaagatacggtggtaaaaagactagagaaaagaaaaattattgaaaatagatcagacgatgaaacaagtactattctaaaacgttttgatacatatatgaacactacaaagccagtgctgaattactactcagagaatcctaaatttaggcaaattgaagggagcttagaaatagacgaaataacaagcaaaatagacacttttataaatgtgtaag

SEQ ID NO: 251760 - DNA, 580 bp, Unknown
  Bacterial polypeptide expressing nucleotide sequence isolated from the Sargasso Sea
atgattataattttattagggcctccaggatctggaaaaggaactcaagcaagttttattcaaaataaactatccatccctcatttatcaactggtgatatccttaggcaatcagttaagaataaaactgaactcggtaacattgtaaaaaatatcatggccaaaggtgagttggtttcagatgaattagttctaaaaattattaaagaaagaatttcacaaaatgattgtgataaaggctttattttagatggatatcctagaaatataaaacaagcagaatctttaaaagaagttttaaaaggtgttaatcgaaatatcgatagaattattttcttagatgtcgattttaaagttcttcagtcaagaattgaaactagatcaaaggaaaataatgaggaaataagagctgatgatacatctgaagttctaattaaaaggttggaagagtataaattacaaactgcacccttgtcagaatattatagtattagtaaaaaatttaagaaaatcaatgggatgaataaaataagtgatgtttcacatgatattgaaaattttttagatattagcatttagt

SEQ ID NO: 251761 - DNA, 574 bp, Unknown
  Bacterial polypeptide expressing nucleotide sequence isolated from the Sargasso Sea
aatgaatttagtaatttttggtccacctggtgcaggaaaaggtacacaatcaaaatttattgtaaaaaaatttaatttatttcaattatctacaggtgaaattttaagaaatgagatagagaaaaaaactgagttgggtaatgaaatctcttcaattataaactcaggaaaattagtttcagataatatagtaagtaatttaattgaaaaatatgtttctaatgaaaaatttaaaaataaattaatttttgatggatatcctagaaacttatctcaagcaaaaaatttagatattttgctaaaaaaatataatcaaaaaattgatattgtttttaaattatctgtaagcttagaaactataaaaaaaagaatttcagagagactttctcaagaaaaaagagctgatgataacgaagaggtagtaattaataggttcaagacatatgaaaaatcaaccgaaccagttatagattattatgagcaatcaaatttacttaaggttgtaaacggtgaggccggaatatctgaaattaatactgaaattagccgaataattgacactatcaagggttga

SEQ ID NO: 251762 - DNA, 550 bp, Unknown
  Bacterial polypeptide expressing nucleotide sequence isolated from the Sargasso Sea
atgaagaaacatttactatttttaggagctcctggagcagggaaagggactcaagcggaattgctaagtcaaactaattcttacttgcatctttctactggtgaattattaagaaaagaaatcgaaatgaatactacccttggtatccaggtaaaagatattatgaatcgaggggaacttgttaatgatgaactcgttttaaaaatagtaagacaaaatttagttaaggataataaaggttggattctagatggttacccaaggaatttatctcaagcaaattcattgaatgaagtcttaactgaaataaatcaacctttagaagtggttttttatttagatattccagaagaagtgctaattaagcgtttgcttttaagagggagaaaagacgatacagaagagacaattagaactagagttgatatttataaaaaaactacagaaccattgattcaatattttaaagatctttcattgttaaaatatattgatgctaatagagatttaaaaaccatttcctctgatatcaaacaaaaaatggcttgat

SEQ ID NO: 251763 - DNA, 652 bp, Unknown
  Bacterial polypeptide expressing nucleotide sequence isolated from the Sargasso Sea
atgaatattattttactgggccccccgggtgcggggaagggtacccaatcaaaattactcgaagataaattcggaatgcaacagctatctacaggtgatatgctacgggcagcgaaaaactcggatagcgatatgggaaaaatagtagccggtgtgatggctagaggcgagctagtgactgacgatatcgttataggacttattgctgaacgcttggaatcggaaaaaaaaggcccccgttttatttttgatggtttcccaagaactttagcccaagctgacgccttacaaaaattgctcgaaaagaagaagatagaattaaaattggtcatcgaaattaaggtggaagacgatgatttgattaaaagagtgacgggtagatttagctgcagaaattgtggagcggtttaccacaaagatagcaataagcctaagaaaccaaacatatgtgataattgtaatggagtagatgtttttgttcagcgtgcagacgataatgaagagtcgtttaaaactaggttaatggcttattacagagataccgcgccgttgataggttactaccacgcgaaagaaaagttaagttcagtagccggttcatttgggattgaggcgactcatgagaaaatcagcgaagttttgagtgagtgaa

SEQ ID NO: 251764 - DNA, 553 bp, Unknown
  Bacterial polypeptide expressing nucleotide sequence isolated from the Sargasso Sea
attgtttggaccacctggtgctggaaaaggtactcagtctaaatatttagtgaaaaaattaaatgcttttcaaatctcaactggtgatctcttaagagaggaaatgaataaaaattcatcaattggtaaaatcataaagaatgatatgaaagagggatcatttataagcgacgatattgtgaacagccttatagaaaatttagtatttgatccgttaaaaaaaggtaaattaatttttgatggatatccaagaacgttgcgtcaagctgaaaatttaggttctttgcttaaaaattcagatcaagttatagatttaattttgtttcttaacgtagataaagaaacgataatcaaaaggctagaaaagagaaaaatattagaaaataggtctgatgatgaggaacatacaatactaaaaagatacgatacgtatatggaaacaactcagccagttctcaatttctattctaagaatccaaattttaaggagattgatggcagattagaaatcagtgaaataacaaggaaaatagacacttttatcaatgtttaa

SEQ ID NO: 251765 - DNA, 554 bp, Unknown
  Bacterial polypeptide expressing nucleotide sequence isolated from the Sargasso Sea
tttatttggacctcccggtgctggaaaaggtactcaagcaaaatatttagtaaaaaaatttaatagttttcaaatatctacaggtgatatgttaagagatgaaatccaaaaaaatactgaaattggaaaaaaaataataaacaacatgagcgaaggtaagtttgttgatgatcagatagtaaataaattgattgaaaacgcaatttttgatcctaaaaaaaaagaaaaattaatatttgatgggtatccgagatcattaaaacaagctaaaaacctagatttgttattaaataaatctaatcaaaaaattgattttgttttttttcttaacgtcaaaaaagatgtaatcattaaaagaattgagaaacgaaaattattggaaaaaagaacagatgatgatttagatactattttgaaaagatatgatacctatatggagacaacaaagcctgttttggatttctattcaaaaaattcaaatttctttgaactagatggaaattcaaaaattgacgaaattaccgctaaaattgagagttttatcaatgtttagg

SEQ ID NO: 251766 - DNA, 649 bp, Unknown
  Bacterial polypeptide expressing nucleotide sequence isolated from the Sargasso Sea
atgcgtgtgattctgctgggagcgcccgtgcccggaaaagtaccccaggctggcttcattaccaaaaaattcggtattccgcagatctccacgggcgacatgctgcgtgccgcagtcaaggcgggcaccgagctgggcctcaaggccaagagcgtaatggatgccggtggcctggtttccgatgatctgatcatcaatctggtcaaggagcgcatcgcgcagccggattgcgccaacggtttcctattcgacggtttcccacgcaccattcctcaggccgaagcgctgaaggaagccggcgtgcgtatcgacaacgtgatcgagatcgccgtggacgacgaggaaatcgtcggccgtatcgcgggtcgccgtgtgcatccggcttccggccgcgtctatcacaccgagcacaacccgccgaaggttgatggcaaggacgacgaaaccggcgatgagctgatccagcgcgaagacgacaaggaagagaccgtgcgtcatcgcctgtccgtctaccatgcgcagaccaagccgctggtggacttctaccagagcctggcagccgcggaaggcacgccgaagtacagctgcatcgaaggtgtcggttcggtggacgagattacggccaaggtgttcgctgcactgagctgat

SEQ ID NO: 251767 - DNA, 649 bp, Unknown
  Bacterial polypeptide expressing nucleotide sequence isolated from the Sargasso Sea
aatgaatatcatactgctaggacctcctggtgcaggtaagggaacacaagctcaatttttagttgagtctctgggtatggttcagttatctaccggtgatatgcttcgtgaggcaaaggatagtgggactgaaatgggtaaggttgttgctgaagtaatgtcgcgaggcgacttggtcactgacgacattgtaataggtctaattaaagaaaagctggatggtgacaaaggtgctggtttcatatttgacggtttcccgcggactctggcacaggccgatgctttaggtgctttgctagacgactgtaatatcgacttggatagtgttattgagattcaagttgatgataaagcattgataaaaagaataactggaagatcaacgtgtggtggttgcggtcaagtctatcatgatgaaacgaaaccttggcctactgacggaaaatgcagcacttgcggtagcaatgatgtaaagcgacgaactgacgataatgaggaaagcttaaaacagcgattaatggagtattataagaagacttctccgctcttgggttattactttgctaaaggaaaccttgtttctatcgatgggctgttatccatgaatgaggttcgtgatagccttaaaaaagttatcaacaaagaataa

SEQ ID NO: 251768 - DNA, 408 bp, Unknown
  Bacterial polypeptide expressing nucleotide sequence isolated from the Sargasso Sea
aatgcaacttattgtatttggaccaccaggtgccggtaaaggcactcaagctaaattactctcctcatacttatctattcctcacctctccactggtgacatattacgttcaaaattaaatgaaaaagatgaaatttctattaaactacagagcatcatgtcaagtggcaatcttgtatctgataatattttaaatcagattgtctctgaaaaaattatttccaaagaatgcaatagaggctttatattggatggatatccaagaactatagatcaaatgaattatttaaataattatattttaaataataatatagctattaatttaattattaatatatttgttgatgatctcactattcaaaaaagaatattaaaccgatcaaaaatagaaaatagagaagatga

SEQ ID NO: 251769 - DNA, 627 bp, Unknown
  Bacterial polypeptide expressing nucleotide sequence isolated from the Sargasso Sea
tatgaaaataattctccttggtcctcctggagcaggaaaggggacccaagcaaagctcttatgccaaaagttctcactcccccaaatctctactggagacatgttaagatcccttatccgtaaggaaaaccaccctctagctagtcaaataaaaaaaacgatagattctggctcacttatcagtgattctttgatgatggaaatactcgaagctagactcaaagaggatgactgtcaaaaaggctttctacttgatggctttcctcgcacacttgagcaaggaaagatgctgcatgagcgaaaaattattattgatcttgtccttgaaatggatctaccagaagaagtgcttattgagcgcatggcaggacgcctgattcatgaaccatctggcagaacctatcacagaacctacaatcccccaaaagaaacaggttatgatgacataacccgtgaagctctaataacccgtcaagatgacgaagagcaaacagtgcgccaccgtcttctagtctatcaaaaacagacagcacctctgattgcttattatcagaatctttgtaaacaaaaagaccattatatagtctctttttctcaaatttcaggagatgccccagtagaaaagat

SEQ ID NO: 251770 - DNA, 563 bp, Unknown
  Bacterial polypeptide expressing nucleotide sequence isolated from the Sargasso Sea
gacccatttagtagtttttttaggacctcctggtgctggaaaaggaacacaagcaataaaaattgcgtccgactttaatttggcgcatatttcaacaggcgatatgttaagacagcatgtaaaagaacaaacagatttgggtaaaattgcaaaatctttacttgatgaaggaaagttagttccagacgatcttgttattcaaatgttaattgaaagattaggtgatgatgattgtttaggaggcacaatacttgatggattcccaagaacactccctcaagctaaaagtttagaaaagataaacgataaatttccagtaataaaagtaattgtttttgaagctgatcaggaagaacttacaaaaagaatacttttaagaggtgaaactagtggtagaggagatgacactgaagactctataagggtcagattagaagtttatcagaaagatacagaacctcttattacttattatgaagataaaggaatcactacaaaaattaatgctgtaggtaatgttgatgatatttatgcagaaatttctaaagagtttattaactaag

SEQ ID NO: 251771 - DNA, 551 bp, Unknown
  Bacterial polypeptide expressing nucleotide sequence isolated from the Sargasso Sea
acctggagctggcaaaggcacgcaagcaaaatttttaatagaaaagtataatatagttcaaatttctactggtgatatgctgagagattctgtctccaaagggagtgatttaggtaaacaagttaagtctgtaatggataaaggcgaattagtttctgataagttaattatgtctttgatttcggaaagaattgacaatgaagattgttcaaatggttttattttagacggatttcctcgtacaattgcacaagcaattgctttagatgaattattaaaaaataaaaatatattaattgaccatgtaatacagattgatgtaaatgaaaatttattattagacagaataaaaaaaagagctagtgataaccaaagtattagagatgatgacaattctaaaattttagaaaatagaattttagtctataatgaacaaacaatgcctgtgttaaggcattatgatgatttaaatatgttaaaaaaagtaaatggaatgttaagtgtagaggcagtttctgaagaaattttaaatattttagaaaatcactaaa

SEQ ID NO: 251772 - DNA, 481 bp, Unknown
  Bacterial polypeptide expressing nucleotide sequence isolated from the Sargasso Sea
ctgtttggtcccccaggagcaggtaaaggaacacaagcaaaaaatttagaaaaaaaattaaataactttcaattgtcaactggagacatgttaagagatgaaattaacaaggatactgaaattggaaaaaaaataattaataacatgaatgaaggaaaatttgttgatgatgaaatagtaaacaaactcatgaaaaaagtaatatttgatcctcaaaaaaaaaacaaattaatttttgatggatatcccagagcaatagatcaagcaaagaatctggacatattattagcagagtctgatcagaaagtagattttattttttttctcaatgtaaataaagatgttattataaaaagaattgaaaagagaaaactattagaaaaaaggtcagatgacgatttggagactattttaaggagatatgatgcttacatggcaacaacaaaaccagtcttagattattattcatcgcataataatt

SEQ ID NO: 251773 - DNA, 191 bp, Unknown
  Bacterial polypeptide expressing nucleotide sequence isolated from the Sargasso Sea
catgcgtatcattctgctcggccctcccggtgccggcaaaggaactcaggcgaatcatctgattcgtgattttggactggttcagctttcaaccggggacatgctccgggcagcggtcaagtccggttcggagattggcaagaaagccaaagcggtgatggatgccggggagttggtttcagacgaaatcg

SEQ ID NO: 251774 - DNA, 643 bp, Unknown
  Bacterial polypeptide expressing nucleotide sequence isolated from the Sargasso Sea
atggtacttttcggtcctccaggatgtggaaaagggactcaagcaggtattatagctaaagatatagatattcctcatctttctacgggagatatgctaagggatgcggttaagtctgaaacagaaacagggcttaaagctgcttccattatggaagagggtaaattagtttccgatgaaattgtcattgatattattaaggatagaatatgtaacaatgattgtaaaaatgggtttattcttgacgggtttccaaggacagtttctcaagctaaagaattggatgttatgttaacttcagaaaatatgaagttagatctagttgttgatttctccgtaaatgatgaagccttaatctcaagaattgagggaaggttctcatgtggggattgtggagcgggttacaatgatcacactaaacttcctattaaagaaggaatatgtgatgaatgtggaagtagtaattttataagaagaaaagatgataatagagagacagtatctaaaagacttgaagcgtactataaagatactctacctatactaccttattataaggaaaagaaggttttacatagtattgatggtttagcagatatagatagtgttacaaatgaattaatgagtttaataaaaaaatgag

SEQ ID NO: 251775 - DNA, 574 bp, Unknown
  Bacterial polypeptide expressing nucleotide sequence isolated from the Sargasso Sea
aatgaagttaattctatttggacctccgggttctggcaaaggcacccaggcatctttattagccaaaaaaaacaatataccacatctttcaacaggagatattttaagatttaaacttcagaaagatgataattttgctaaagagttatctcaaataatatcagggggaaaccttgttcctgactcaataataaatccaatagttgctgataaattacttagcaatgattgtaaaaacggatttatacttgatggttatcctcgtaataaatttcagtctaattttttaatagattttttagaaaaaaataatttagagattgatttaataatagattttatagctgatacaactactgtaaaaaaaagaataattgaaagatcaaagattgaaaatagatcagatgataacatagaagtaatcaaaacaagattggataaatattttactgaaactcaacccttagcttctatttttaaggaaaaatttaaagataagttttttgagataaatgcgacacaggaaatagcaaaaattcaatctgatattgaaaataggttaaaaaatgcctaa

SEQ ID NO: 251776 - DNA, 558 bp, Unknown
  Bacterial polypeptide expressing nucleotide sequence isolated from the Sargasso Sea
tatgaatatattatttttaggtgcaccaggatgcgggaaagggactcagtcaaaaatattaattaaggaatatgggattccccaaatatcaacaggtgatctattacgagaagaaattaaagccggttcgaatcttggtaaagaattacaagatattatgtcatcaggtaagtttgtaagtgacgaattagttctctctttagtttcaaaaaaaattatgcaagatgaatgtaaatctggatttattcttgacgggtatccaagaaacatatctcaagcaaaaagcttagatgacttgtttgtagaaaaaaatataaatctagaatatgtttttttaattgatgttccttttgaaactctcattaaaagatgtacaggtagacttttatgtactacatgtgattacatcggtaatatggatcgcggtgaaaaagttggtgacaaatgtgaaaagggtgagttgtatcaacgagaagatgataaagaagagactgttaaaaatcgactaaatgtttaccaagagcagactgcaccaataatagacttttatgaaagcaa

SEQ ID NO: 251777 - DNA, 667 bp, Unknown
  Bacterial polypeptide expressing nucleotide sequence isolated from the Sargasso Sea
gatgaaaaaacatatacaaataattttgcttgttcctccaggatgtgggaaaggtactcaggcacaaaaattaataaatgaattcggctttgtacagctttctacaggagatatgcttcgcgcagccataagaaaggggacagaaattggaacacaagctaaatccattattgaaaaaggtgaacttgtatctgatgaaatagtgataggtatagtaaaggaaagaattttcagcaaggaatgtgaacgaggttacatgcttgatggtttccctcgtacacttgctcaggctgaaaatttgaatcaaatactttcagaacgtaaccaaaatattgacgtggtaattcgactctgcgttcctgatgagatgttaataagaagaattgcaggcagacgttttcacacaaaaagcggtagaagttacaatatagagtttcatcctccaaaaaacgaggggaaagatgacattactggagaaaaactggtgcagcgtggggatgataaagaagaaattgtggaatcaagactaaaaacatactatgagctaaccgaacctcttgtgggatactataagaaaaagggtgtgctaaaagagattgatggtacaggatcaccggagaatatttactctgagattaaacatactttaaatgaggtgcctgcctag

SEQ ID NO: 251778 - DNA, 550 bp, Unknown
  Bacterial polypeptide expressing nucleotide sequence isolated from the Sargasso Sea
aatgaagaaacatattctatttttaggagctcctggagcagggaaaggtactcaagcggaattgctaagtcaaactaattcttatttacacctttctactggtgaattattgagaaaagaaatcgagatgaatactatccttggtattcaggtaaaagatatcatgaatagaggggaacttgttagcgatgaacttgtattaaagatagtaagacaaaatttagaaaagaataataaaggctggattttagatggctacccaagaaatttatctcaagcaaattcattgaatgatgtcttaaccgaaataaaccaacctttggaagtggttttttatttagatattccagaagaagttttaattaagcgtttgcttttaagaggaagaaaagatgatacagaagagacaattagaacaagagttgaaatttataaaaaaactactgaaccattgattcaatattttagagatcaatcattgttagaatatattgatgcagatagagatttaaaaaccatttcatctgatatcaaacgtaaaatggcttga

SEQ ID NO: 251779 - DNA, 492 bp, Unknown
  Bacterial polypeptide expressing nucleotide sequence isolated from the Sargasso Sea
tggatgccggtggcctggtctccgacgacctgatcatcaatctggtcaaggagcgcatcgctcaggccgattgcgccaatggctttttgttcgacggtttcccgcgcaccattccgcaagccgaagcgctgcgcgatgccggcgtagcgctggatcacgtggttgaaatcgccgttgaggacgaggagatcgtcaagcgtctgtccggccgccgtgttcacccggcttccggccgcgtctaccacaccgagtacaacccgccgaaggttgccggcaaggacgacatcagcggtgaagagctggttcagcgcgaagacgacaaggaagaaaccgtgcgtcatcgcctgtccgtctaccactcgcagaccaagccgctggtggacttctatcagaagctctccgctgcatccggtaccccgaaatacagccatattccgggtgtcggcagcgtcgaagagatcaccgcaaagaccctggcggctctggactgag

SEQ ID NO: 251780 - DNA, 140 bp, Unknown
  Bacterial polypeptide expressing nucleotide sequence isolated from the Sargasso Sea
aatgaagaatattattttattagggcccccgggagctggaaaaggaactcaagcagatttgatatgtgacttatttgatattccaaagattagtactggcgatatgctcagagaagctgttacatctgggagtgagttag

SEQ ID NO: 251781 - DNA, 553 bp, Unknown
  Bacterial polypeptide expressing nucleotide sequence isolated from the Sargasso Sea
atgaaatcccgtctcctcttccttggcccccctggagcaggaaagggcacccaggcagcgcgcctgtgcaacgccaacggcatgagccacctctccaccggtgatttgttgcgatctgaagtcgcagccggcacagccctgggccaggaggccgaagcagtgatgaaccgtggggaactggtcagcgatgccctggtgctggcgatcgtggaaagccagttgaagggattgtccagcggaggttggctcctggacgggtttccccgcaccgtcccccaggctgacgcccttgaaccgctgctcgacgaactcaagcaaccgatcgaagccgttgtgttgctagagctggacgatgccgtgctgatcgagcgtctgctcgcccgtggccgcgacgacgacaatgaagcggtcatccgcaatcgtctggaggtctaccgggagaagacctcacccctgatcagcttctatcgggacaaaggcctgctggtgtcggtggaagcgaacggctccgtggaggagatcactcagcggattaccaaggtcctgagttgac

SEQ ID NO: 251782 - DNA, 361 bp, Unknown
  Bacterial polypeptide expressing nucleotide sequence isolated from the Sargasso Sea
aatgaaaataattttttttggcccacctgggtctggaaaaggcactcaagctaaattaattgctgaaaaactaaacatattacatttgtcaaccggggatattctaagagaaaaattagaagatgctgatgagttatcattaaaattaaaagaaattatgtcatcaggtaacttagtttctgataatatcctaaatcaaattatttctgaaaaactgaatagtgatgaatgtaaaagaggttttattttagatggttacccaagaacacttgctcaatcagaatttttgttatcattttttgaaaaaaataacattaatttagatatcatttttaattttaatatcgacttcaaaattgtt

SEQ ID NO: 251783 - DNA, 550 bp, Unknown
  Bacterial polypeptide expressing nucleotide sequence isolated from the Sargasso Sea
atgaaaaaacatatattattcttaggagcacctggcgcagggaaagggacccaggcggaattactaagcaaaaccaattcttacttgcatctttccacaggtgaattattaagaaaagaaattgaattgaatactatccttggtagacaggtaaaggatattattaatcgtggagaacttgtaagtgatgaacttgttttaaaaatagtaaggcataatttagataaggataatgatggttggatcctagatggctacccgagaaatttatcgcaagcaaattccttgaatgaggttttaattgaaataaatcaacctttagaaatagttttttacttagatattccggaagaagttctaattaagcgtttgcttttaagagggagaaaagatgatacggaagaaactattagaacaagagttgacatttataaaaaaactacagaaccattgattcaatattttaaagatctttctttactagagtatatcgatgctgatagagatttaaaaaccatttcctctgatatcaaacaaaaaatggcttgat

SEQ ID NO: 251784 - DNA, 646 bp, Unknown
  Bacterial polypeptide expressing nucleotide sequence isolated from the Sargasso Sea
catgcgaatcattcttctcggcgctcctggcgcgggtaagggcacacaagctcagtttctaatgggcaaatacggtattccacaaatttctacaggcgatatgcttcgcgcagcaataaaagctggtactgaacttggtttaaaagccaagcaggtaatggatgaaggtaagctggtttctgacgatatcattatcggtttggtgaaagagcgcattgcaatggatgattgcaaagacggttttttactcgacggctttcctcgcactattccccaagcggatgcaatgaaagaagccggtgtgaaagtagaccactgcattgaatttgatgttgcagatgacgtgattgttgagcgcatgggaggaagacgagtacaccctgcatctggtcgtgtttatcacgtggtatacaatccgcctaaagaagcaggcaaagacgacgccactggtgaagaccttattgtccgtgaagatgataaagaagacactgtacgtaagcgtttagctatttatcatgagcaaactaagccacttgttaactactacatggcagaagcagatgctggcaactgcgagtaccacaaactcgacggaaaccgcccggttgatgacgttagcgctgaccttgaaaagcgcttgagctaa

SEQ ID NO: 251785 - DNA, 367 bp, Unknown
  Bacterial polypeptide expressing nucleotide sequence isolated from the Sargasso Sea
catgaataccttcatactattaggaccacctggtgcaggaaagggcactcaagcagatcttatttcagctgatctaggtatcccaaaaataagtactggcgatatgttgcgatctgctgtggcttctaaaagtgatttaggtaatagagttgaagatattcttaactccggcaagctcgtctcagatgatattattattgaattaattaatgatcgcatcaatcagtcagattgtaagtctggttacttattcgatggagtgccaagaactctagggcaagccaatctttttttacagaatgatatagaggtaaacaaggttatagatatatcacttgatgataaattaattattaaaaggatgtct

SEQ ID NO: 251786 - DNA, 352 bp, Unknown
  Bacterial polypeptide expressing nucleotide sequence isolated from the Sargasso Sea
aatgaagaatattattttattagggcccccgggagctggaaaaggaactcaagcagatttgatatgtgacttatttgatattccaaagattagtactggcgatatgctcagagaagctgttgcatctgggagtgagttaggcattaaagtatcagaaattcttgatagcggagctttagtatctgatgaaattataggatcattgatagaagataggcttacgaaacctgactgtgtaaacggttctttgtttgatggagtcccaagaactattggacaggctgagcaacttgcagcaatgggtatagatttcacgcatgtcatagaaattcaagtcgcagatgaaaccatt

SEQ ID NO: 251787 - DNA, 295 bp, Unknown
  Bacterial polypeptide expressing nucleotide sequence isolated from the Sargasso Sea
aatgaaattaattctatttggacctcctggttctggaaaaggtacacaggcatctttactgtccaaaaaaaataacataccacatctttcaacaggagatattttaaggtttaaacttaaacaagatgataatttggctgaagagttatctaaaataatctcagatggtaatcttgttcctgattcaattataaatccaatagttgctgacaaattacttagcgatgattgtaaaaatggatttatacttgatggttaccctcgtaataaatatcagtgtgattttttaataaat

SEQ ID NO: 251788 - DNA, 533 bp, Unknown
  Bacterial polypeptide expressing nucleotide sequence isolated from the Sargasso Sea
tttgtttggtcctcctggagctgggaaaggcactcaagctaaatatttagtaaaaaaattaaatggatatcaaatttctacaggtgacattttaagagaagaaattaaaaaagattcagatataggaaaaaaaataataagtaatatgaatgaaggaaaatttgttagtgatgagattgttaataaccttttaaaaaatcatgtttttgatcctaataaaaaagaaaaattaatatttgatggttatcctagatctttagatcaagctaaaaatcttgatgaattattagcgaattcaaatcaaaagattaattatatcttttttctaaatgtagataaacaaactataataaaaagaattgaaaaaagaaaaattttagaaaaaagatctgacgatgatttagatactatattgaaaaggtatgatacttatattgaaacgactaaaccagtattagattactattctcaaaattctaattttcatgaaattgatggaactttagaaattgatcaaataacaagtaaaatag

SEQ ID NO: 251789 - DNA, 226 bp, Unknown
  Bacterial polypeptide expressing nucleotide sequence isolated from the Sargasso Sea
ttgtttggtcctccaggagctgggaaaggcactcaagccaaatatcttgtaaaaaaattaaatggtcatcaaatttctactggagatattttaagggaagaaattaaaaaagacactgatataggaaaaaaaataataaataatatgaatgaaggtaaatttgtcagtgatgatattgttaatagccttttaaaaaatcatgtttttgatcctaacaaaagagaaa

SEQ ID NO: 251790 - DNA, 580 bp, Unknown
  Bacterial polypeptide expressing nucleotide sequence isolated from the Sargasso Sea
tatgatcaacatagttttatttggaaagccaggtgccggaaaagggactcaagctaattttctaaaaataaaatacagtctggtccatatttctacgggagatttatttcgttataatcttaaaaataaaactgaattagggaaattggcaaaatcatttatggataagggagatttggttccagaccaggtgactattaaaatgttagaagaagaagtaaagcaaaacacaaatgcaaaaggatttctatttgatggatttcctaggactaaatctcaagctgaagcgttagacaattttttagaaaataataaaatgcaaattaatgcaacaatttcattagaagtcgaagataatgttatcataaaaagactattagagcgtgggaaatcaagtggaagaattgatgatcaaaatgaatcaaaaattataaatcgtttcaaagaatacaataagaaaacagctccattaaagacatattataatgaccaaaataaattttattctgttagtggtatcggtagtatagatattataaccaatcgtttagttcaggttatagacagtttacaaatctaa

SEQ ID NO: 251791 - DNA, 340 bp, Unknown
  Bacterial polypeptide expressing nucleotide sequence isolated from the Sargasso Sea
atgaataccttcatactattaggaccacctggtgcaggaaagggcactcaagcagatcttatttcagctgatttaggtatcccaaaaataagtactggcgatatgttgcgatctgctgtggcctctaaaagtgatttaggtaatagagttgaagatattcttaactccggcaagctcgtctcagatgatattattattgaattaataaatgatcgcatcaatcagtcagattgtaagtctggttacttattcgatggagttccaagaactcttggacaagccaatctttttttacagaatgatatagaggtaaacaaggttatagatatatcacttgatg

SEQ ID NO: 251792 - DNA, 544 bp, Unknown
  Bacterial polypeptide expressing nucleotide sequence isolated from the Sargasso Sea
gccgcctgcggccggcaagggcacccaggccaagcggctggtcgaagagcggggtttggtccagctttcgaccggcgacatgctgcgcgcggcgatcgcttccggctcggagctggggttgaaggtcaaggacgtgctggcgcgcggcgacctcgtcaccgacgagatcgtcatcgccctgatcgaagcccgtctgccggaggccgaggccgccggcggcgccatcttcgacggcttcccccgcacggtggctcaggctgaagccctggacgccatgctggccaagcggggcgcccagatcgacagtgtcatccgcctgaaggtggacgacgccgccctgaccgaccgtatcggcaagcgtttcgccgagcagggccgggcggacgacaaccccgagaccttcaaggaccgcctggccgtgtacaaccgccagaccgcgccgttgcttccctactatacagaccagggcaagctgaccgaggtcgacggcatgggcgacatcgcctccgtggccgccgctatcgacgcggcgctggacgcctga

SEQ ID NO: 251793 - DNA, 553 bp, Unknown
  Bacterial polypeptide expressing nucleotide sequence isolated from the Sargasso Sea
aatgaaatcccgtctcctcttccttggcccccctggagcaggaaagggcacccaggcagcgcgcctgtgcatcgccaacggcatgagccacctctccaccggtgatctgttgcgatctgaggtcgcagcaggcacagctctgggccaggaggccgaagcggtgatgaaccgtggggaattggtcagcgatgccctggtgctggcgatcgtggaaagccagttgaaaggattgtccagcgaaggctggctcctggacgggtttccccgcaccgtccctcaggccgatgccctcgaaccgctgctcgacgaactcaagcaaccgatcgaagccgtggtgctgctggaactggacgatgccgtgctgatcgagcgcctgctcgcccgtggccgcgacgacgacaatgaagcggtcatccgcaatcgtctggaggtttaccgggagaagacctcacccctgatcagcttttatcgggacaaaggcctgctggtgtcggttgaagcgaacggctccgtggaggagatcacggagcggattaccaaagtgctgagttga

SEQ ID NO: 251794 - DNA, 574 bp, Unknown
  Bacterial polypeptide expressing nucleotide sequence isolated from the Sargasso Sea
tatgaatataattatttttggccctccaggtgccggcaaaggcactcagtcaaaatttattgtaaataaatataaactttatcaattatcaaccggtgatttactgcgtaatgaaataaaaaataagaccgagttaggagagaaaatttcatcgataattaattcaggtgaacttgtttctgatgaaatagttaacagtttgatagaaaaatttgtttctaatgattcttataaaaataaaattatttttgatggatacccaaggaatttaattcaggcaaagaatttagataatttacttaaaaagtataatcaaaaaattgatgttgttttaaaactttcagtgagtcttgaaactataaaaaaaagaatatcaacaagacaaacacaagaaaaaagagctgatgataaaagcgaagtggcaattaaaaggtatgaaacttttgaacagtcaacaaaaccgatactcgaatattatgataaacaaaatcttatcaaagaggtaaatggagagcaaaaaatagacgtaattaacaaagaaataggcgatattattgatcttatagagggttga

SEQ ID NO: 251795 - DNA, 646 bp, Unknown
  Bacterial polypeptide expressing nucleotide sequence isolated from the Sargasso Sea
aatgaagaacattattttattagggccccctggagctggaaaaggaactcaagcagatttgatatgtgacttattaagtattccaaagattagtactggtgatatgttaagagaagctgtggcatctggcagtgagctaggaataaaggtatcagaaattcttgatagtggtgctttggtatctgatgagattattggatccttaatagaagatagacttacaaaatctgattgtgctaatggctctctatttgatggagttccaaggactattggacaggctgagcaactagcaacaatggggataaattttactcatgttattgaaatacaagtttcagacgataccattgtgaataggatgtctggcagaagggtgcatccaggatctggtaaaaattatcatatagaatttaatcctccaatcaatgaagggctagatgatgaaactggtgaaccacttattcaaagagaagatgataagcctgaaacagtattgcgacgtttaaacgtttaccatgaacaaactaagccattaacagatttttatataaatctatcagatactggaaatttaaaatttattaaagtagatggcgctgaatctgtagaaactgtttttcagaatatctcagaaaatatctaa

SEQ ID NO: 251796 - DNA, 649 bp, Unknown
  Bacterial polypeptide expressing nucleotide sequence isolated from the Sargasso Sea
tatgaaaataatacttttagggcctccaggagctggtaaaggcactcaagcagagtcgatttgtgaaaattatggaattccacatatatctacaggaaacatgcttagagaagcggtggaaggaggaacaaaactaggtttagaagctaagtcactaatggatgcaggcatcttggtttctgatgatgtaattgtaggtttagttgaagaaagaatctcttcagatgattgttctgaaggttttttatttgatggttttccaagaactattccacaagctgaggcacttattgaaagggatatacatatcgatgctgttgtagagattgctgttcctgaccaagatattattgatcggatggcaggtagaagaatgcatcctgcttcgggaagaaattatcacatcattttcaatccacctaaaaatgaaggtaaagatgatattactggtgaagatctaattctaagagaagatgataaacctgaaacggtaaaagatagattaaaggtatatgcagatcagacatctccgttagtagttttttattcaaatttatctgcttcgagtcagcttaaatatataaaagtttcagggactgaaactccgagtaacgtaactcaacaaatattaaaagacttagagatttaa

SEQ ID NO: 251797 - DNA, 574 bp, Unknown
  Bacterial polypeptide expressing nucleotide sequence isolated from the Sargasso Sea
attgaataatataatttttttcggccctcctggagcaggaaaaggaactcaagcaaaaataatatctaaatttttaaatgtaccacatctatctacgggtgatatacttagaaaaaaacttcaagatgaagacaaattagcaaatgagcttaaaaatattatgtcttcaggtaatttagtttcagatgacatcttgaattctattgtggcatcaagattagaaaatgaaataaacagaggttttatattagatggttatcctagaactttaaatcaatcccagtttcttgataattttcttttagaaacatctaattctataaattatatttttaatatccaaataaactttcaaatattgaaaggtaggatcttaaaaagatcttctgaggaaagtcgtgatgatgataatattgatgttatcgaaactagatataatgagtatctgaattccactcaaaaagtgtccaatttttatagagataagtatccttcttttttttatgaaatagatggatcattacaaattgaagaaattactagagaaattacaaaagttttaaaaagatcatga

SEQ ID NO: 251798 - DNA, 422 bp, Unknown
  Bacterial polypeptide expressing nucleotide sequence isolated from the Sargasso Sea
aatgagtcatcgactgctgtttgtcggcccacctggggccggcaaaggaacccaggccgaacgcttggccgccagccatgggctcttgcatctctccaccggagacctgcttcgcgccgaggtgaaagccggtagcgacctcggcaaagaagccgaagcggtgatgaaccgcggtgaattggtgagcgatgccctggtgctggcgattgtgcgctcacgcctgcaaaaccacagtggcggctggctcctcgatggattcccccggaaccttgcccaggctgaagccctcgatgagctgctcagcaaactcaaccaaccactacaaagcgtgctcttgatggagctcgatgacgaggagttggtgcaacgactgctggcccgcggtcgagctgatgacaacgaagaggtgattcgccatcgac

SEQ ID NO: 251799 - DNA, 364 bp, Unknown
  Bacterial polypeptide expressing nucleotide sequence isolated from the Sargasso Sea
ctgttcggacctccaggagcaggcaaaggcactcaagctaaaaaattagctaataaattaaatctttttcaactgtcaactggtgatctattaagaaatgaaattaaaaataaaactgacatcggaaaagaaattgacaatattatatccaaaggagattttgctacagataaaattgttaataaattattaaataaaattataactaatcaaaactatagaaatagaattatatttgatggttatccaagaaatttaaagcaagcaaaaaatttagaaattatgcttaattcagacaatcaatctaaaagtttcattttatttttaaaagtttctagagaaattatagaaaaaagaatttaaa

SEQ ID NO: 251800 - DNA, 436 bp, Unknown
  Bacterial polypeptide expressing nucleotide sequence isolated from the Sargasso Sea
atgaatatagtaatttttggacctcctggagcaggaaaaggaactcagtcaagatttattgttcaaaaatataaattacaccagttgtctacaggcgatcttttacgaaatgaaataaaaaaaaaaactgacttaggaaataaaatttccacaattatgaactcaggagaattagtttcagacgaaatcgtaggagaattaattgaaaaatttgtttctaacgatgtttttaaacataaaattatatttgatggatatccaagaactatattacaagctcaaaatcttgataatgttcttaaaaaatataatcagaaaattgatattgttttaaaactatctgtaagtttagaaacagttaaaaaaagaattattgaaaggcagtcacaagaaaatagagcggatgataatgaggatatagctatcaaaagatatc

SEQ ID NO: 251801 - DNA, 187 bp, Unknown
  Bacterial polypeptide expressing nucleotide sequence isolated from the Sargasso Sea
aatgaatattatattacttggtccgcccggagctggtaaaggtactcaagcccgctaccttgtagaaaagaagaatatgatacagctctcgacgggcgatatgttgcgagaggccaaagactcaggaagtgaaatgggaaatcgagtttccgaggttatggctcgaggagatttggttactgatgac

SEQ ID NO: 251802 - DNA, 545 bp, Unknown
  Bacterial polypeptide expressing nucleotide sequence isolated from the Sargasso Sea
tctgattctctttggtcctcctggtgctggcaaaggaacacaagctaaatttttagtagaaaaattaaatagttttcaagtatcaacaggtgatattctgagagacgaaattaaaaaagactcagaaattggtaaaaaaattataaataatatgaatgatgggaaatttgttgaagatgaaatagtaaataaacttcttgaaaaaataatatttgatccaaaaaaaaaaaataaactaatttttgatggttatccaagaactataaaccaagctaaaaatctagaaaatttattaagcaaatctaatcaaaaaataaactacatcttttttcttaatgtaagtaaagattcaataataaaaagaattgagaaaagaaaaattttagaaaaaagatcggatgatgactctaatattattttaaaaagatatgatatatacatgaaagaaactaaaccagttttggatttttattcctcaaaaaaaggattttatgaaattgatggaagcctaaatattgagcaaataaccaataaaatagatgata

SEQ ID NO: 251803 - DNA, 613 bp, Unknown
  Bacterial polypeptide expressing nucleotide sequence isolated from the Sargasso Sea
atgaatatcattcttctaggccctcctggctcgggaaagggcacacaagcgcaggaactcaatcgtcgtcatggtttaattcacctttccactggggatatgctgcgtgcggcaataggatcgggtagtgagcttgggcaaaacgttaaaaatatcatggaagccggttctcttgtgcccgatgatataatgatacggatgatttctgagcggattgaacagccggattgtgcaaacggttttattttagatggttttccgcgaactccagctcaagcggaagccttagacattatgctcagtaaaaaaaatataaaaatagaccatgttattgagatgtctgttcatatagaaatacttaccaagagaatcgcgggacgctatagctgcgtggggtgcggtgctggttatcatgatgaatttcagcagcctgctcggccaggaatttgtgattattgcggggaaacggaattctcgcgtcggtcagatgataaaccggagaccgtccgggctaggttagatgcttatgaatctcagaccgccccgctactcccttattaccaaaattcgaattgtttgatcaccgtcgatgccatggccgaaattgctaatg

SEQ ID NO: 251804 - DNA, 148 bp, Unknown
  Bacterial polypeptide expressing nucleotide sequence isolated from the Sargasso Sea
gatgattgttattttttttggtccgccaggagcaggaaaaggaactcaggccgaattattttctaaagaatttaatattcctcatttatctactggtgacattttaagaaaaaaaattcttgagaacaatcctttatctaataattaa

SEQ ID NO: 251805 - DNA, 571 bp, Unknown
  Bacterial polypeptide expressing nucleotide sequence isolated from the Sargasso Sea
atgattttaattttttttggtcctccaggagctgggaaaggaactcaagcaaaaattttatcaaaaaatttgaatatacctcatttatcaactggagatattctaagaaataaattgcttgataaagattcactttcaataaaattaaaaaacactatagatagtggaaatttagtttcagatgaaattttaaatggaattatttttgaaagattgcaaaagaaagattgcaataatggctttattttagatggttatccaagaacaatatttcaaaaaaattttcttgaaaattattttaaagaaaataatttgaaaatttttgcaatttttgatttagtaattgatgaaaattttattattgaaagaatcaaatctcgatcaaatattgagaaaagaggtgatgataaactctcaattgtcaaaaatcgtataactaaatatttgaaagaaactaaaccactttcagactattataagaaaaaatataagaataattatcatttgattaatggtaatcaagaaattgaaaagattagagaagatctaggaaaaatagtaaaaaaatgac

SEQ ID NO: 251806 - DNA, 589 bp, Unknown
  Bacterial polypeptide expressing nucleotide sequence isolated from the Sargasso Sea
tatgaggttaattttgatgggagctcccggttctgggaaggggactcaggcagaaaagctcatggatgactttggttgtcgccaaatatcgacaggtgtgttactcagacaagccatagaatctggctctgaacttggcaaaaaggtacaaaagatcatgtctgagggtttgcttgtttctgatgatatcgttttgggtttaattaagaatgagttatccgaaataggtgagagtggattccttttagatgggtatccaagaaacatcaatcaagcaaaatcattgaatgatctacttgaaaatatagataaaccattggattacagcatattgattgatgtaccgagtgagattttaattaaaagactgtctggaagaagaacatgctcattaacaggcaagactttgaatatttacttttcctcagaaaatgaaatagatgaatgcctttctaaaggtggtcaattgctacagcgagaggatgataacgaggagtcaattacgaaaagaattgaagtatacgaagagcagacggagccgatggttgatttttatagatcaacagggcttctttatacaattgatggt

SEQ ID NO: 251807 - DNA, 574 bp, Unknown
  Bacterial polypeptide expressing nucleotide sequence isolated from the Sargasso Sea
atgaatatagttatatttggcccacctggagctggaaagggaactcaatcaaaatttattgtcgataaatatggccttcatcaattatctacaggtgatcttttacgtaatgaaattaaaaataaaactgaattaggatctaaaattgacagtatcatgaataaaggagagttagtttcggatgaaattgtaagcaatttgatttcaaaatttatctctaatgatatttataaaaataaaattatttttgatggttatccaagaaccttatctcaagcgaacaatttaaataatttactaaaagcacataaacaaaaaataaacatagttttaaaattatctgttagtttagaaactgttaaaaagagaatacttgataggcaatctatagaaaatagagctgacgataatgaagaaatagcaattaagagatatcaaacttatgaaaaatcctcagaaccggtattaagttattataagcaatctaatttacttaaagttgtaaatggcgaggcaacaatatctgaaattaatactgaaattagctatttaattgacactatcaagggttgac

SEQ ID NO: 251808 - DNA, 580 bp, Unknown
  Bacterial polypeptide expressing nucleotide sequence isolated from the Sargasso Sea
ttggtaaataacaaagtgaatattattatattcggacctccaggagcaggtaaaggaacacaggctaaacatttagtaaaaaaattagacagttttcaggtttcaaccggtgatatgttgagagaagaaataaataatgatactgaaataggtaaaaaaatagtcagtaacatgaatgaaggaaaatttgtagatgatgtaatagtaaacaaacttttagaaaaaattatattcgatccaaataaagtaaatagattaatttttgatgggtatcccagaactattagtcaggctaaaaatttagataatttattagaccaatctaatcaaaaaattaattttgtattttttcttaacgtagaaaaagaaacaattataaaaagaattaaaaaaagaaaaattttagaaaaaagattagatgataacacagacactattttaaaaaggtacgatacctatatgaaaataacaaagcctgttcttgattattatttaaaaaatcaaaatttttatgaagtagatggatctatgaataaagaaaaaattgctcaaaaaatcgaggaaatacttaaggtttaag

SEQ ID NO: 251809 - DNA, 388 bp, Unknown
  Bacterial polypeptide expressing nucleotide sequence isolated from the Sargasso Sea
atgaatatagttttgtttggacccccaggtgccggcaaaggaactcaagcgaagttgatatgtgaaaaatatttccttaatcatctttcaacaggtgatttattaagaaaagaaagcagtaaagaaacaagtttaggtattcaaataaaaaatacaataaatgatggtaaattagtatcggatgaaacgacgattgaattgataaagcaatttataaatgaaaacaaaaataataagaaaggcttcttgtttgatggcttcccaagaaataaaaaacaggctgagctactcgaccatttaatggttagcattaatgaaaaaatactctgtgtaattttgcttaatgtcaacgaagatgtattaaaggaaagaattagaatagaagtac

SEQ ID NO: 251810 - DNA, 447 bp, Unknown
  Bacterial polypeptide expressing nucleotide sequence isolated from the Sargasso Sea
aatgaaattaattttattcggaccaccaggttctggaaaaggtacgcaagcttcattactagccaaaaaaatcaagataccacatttgtcaacaggagacattttaagatctaaacttaatgataatgataaattagcacaagagctgtctgaaattatgtctagtggtaaccttgtccctgactcaattttaaatccaatagtcactgaaaaactattaagtagcgaatgtaaaaatggtttcatcttagatggatatcctcgaaataaatctcaatctgactttcttttaaattttttaacaaaaaacaaaattactattaatttaattatagattttaaagctgatacaaataccataacaaatcgaatcatcgaaagatcaaaaattgaaaatcgttcagatgataatctagaagttattaagacacgtttagaaaaatattt

SEQ ID NO: 251811 - DNA, 553 bp, Unknown
  Bacterial polypeptide expressing nucleotide sequence isolated from the Sargasso Sea
aatgaagcttttaatcatggggcctccgggagcaggaaaaggaacccaggcaaaaattctagcaaagaaatttaaccttgttcatttatcgacaggagatattttacgaaaagagattgataagtcttcagagttaggacttaaagctcaaacatatatgaacgctggcaatcttgttccagatgatgttttgttagaaatgatgcaatcaaccttaactgaattagaggactcaggagtcatacttgatggttttcctagaacaattcctcaagcgatagggttatcaaaaatttttcagtcactaaatcaagcaattgatagtattataaacatcgaagttgataaggaagttttgattacaagattagttcaaagagcaaaaaattcaggaagagctgatgatactgaagaagtaattgtaaatcgtcaaaatgtttatatagaactcactgcacctttaattgaattttatcaaagcaatatcattcatgttgatggtgatggctcaatcgaagaagttacagaaagaattttaaaacgtatcccgtaa

SEQ ID NO: 251812 - DNA, 562 bp, Unknown
  Bacterial polypeptide expressing nucleotide sequence isolated from the Sargasso Sea
gaatttaattttatttggacctccgggcgctggaaaaggtacccaggctaaatatttagtaaaaaaattaaatgcttttcaaatatcaacaggtgatattctaagagatgaaattcaaaaaaattcagaaattggcaaaaagatacttaatgatatgaatgttggaaaatttgtaaatgatgaaatagttaatgagcttataaaaaatgcaatatttgatcctcaaaaaaaaaataaattaatatttgatgggtatcctagatcattaaaacaggctaaaaatttagatttattgttaaatagttcaaatcaaaaaatagattttattttttttctcaatgttaataaaaacacaattataaaaagaattgaaaaaagaaaaattatagaaaaaagatcagatgacgacctaaatactattcttaaaaggtatgacacttacgtggaaacaactaaacctgtcctagatttctattctaaaaacccaaatttttacgagatagatggcaatcttaaaattgagcaaataactgctaaaatagacgtttttctcaatgtttaa

SEQ ID NO: 251813 - DNA, 386 bp, Unknown
  Bacterial polypeptide expressing nucleotide sequence isolated from the Sargasso Sea
gcgcactattccgcaggccgatgcgatgaaagccaatggcgtagtggttgatcacgtgattgaatttgacgtaccagatgatgtgattgttgaacgcatgagtggtcgtcgtgttcaccctgcttcaggtcgtgtctatcatgtaagctacaacccgcctaaagtggaagggaaagacgatctgaccggcgaagatttagtgatccgtgaagatgataaagaagaaactgtacgcaaacgtttaggtatttaccatgagcaaactgaactgctggttggttattaccgtcaagaagcagaacaaggtcgcacccaatatcaccatatgatgggtaccttgcctgttgagcaagtcagtgcacaacttgaagccttgttaggttaag

SEQ ID NO: 251814 - DNA, 542 bp, Unknown
  Bacterial polypeptide expressing nucleotide sequence isolated from the Sargasso Sea
tatgtttaatatcgtgatttttggtaaaccaggttctggaaaaggaacccaggcagattttttaaaaggtaaatatgatctatatcatatatctacaggtgatttgtttagaaaaaatatttcaaataaaactgatctaggtattgaagcaatgtcatttcttgataatggagatcttgtgcctgatgtagttacaattaagatgcttgaaaatgaagtcttagcaaataaggatgttaatggttttatttttgatggttttccaagaacactaaatcaggctgaatcactcgatacttttcttgaatcaaataaccaaaagataaatgctacaattgctctagaagttgatgaaaatgagctcataaatagattaatagatagagggaaagctacaaatagatctgatgatcaggatattgaaaaaattaaaaatagatttaacgagtataataataagacatctatactaattaatttttatcaaaagcagtccaagttttactcagttaatggtcacggaagtgttgatgatattactt

SEQ ID NO: 251815 - DNA, 414 bp, Unknown
  Bacterial polypeptide expressing nucleotide sequence isolated from the Sargasso Sea
caaatggatatatattagatggttttccaagaactattcctcaagctaaaggattggatatacttttagaacaattaaacagtcctcttgataaagcagttgttattgatgttgatgataattcaatagtagagagaatgggtggaagacgtgttcacccatcatctggaagagtttatcatattaaatttaatcctccaaaagataaagataaagatgatataactggagaacctcttattataagacaagatgataaaaaagaaaccgtattaaaaagacttgaaatatatcatgaaatcacaagtccattaataaaatattatactaaaaaaaacattttaattactattaatggcgtaaatagtattgatggagtatatgacgatatactagaaaatttaaatgcttaaa

SEQ ID NO: 251816 - DNA, 580 bp, Unknown
  Bacterial polypeptide expressing nucleotide sequence isolated from the Sargasso Sea
atgaaacttatcttatttgggcctccaggttcaggaaaaggtactcaggcttctataatatcaaaaaaatataacatccctcacctctcaactggagatatattaagatctaaactcaatgataatgacgagctatctaaagagctatctaatatcatgtctagtggtaatcttgtaactgactcaatattaaatcctattgtcacagaaaaattattaggcaatgattgtaaaagaggttttattttagatggttacccaagaaataaaactcagtcaaattttcttttagattttatggaaaagaatcatattaatcttgatttagtaatagattttaaagcggatgaaaaaactgttaccaacagaattatcgaaaggtcaaaaactgaaaatagatctgatgataatattgatgtaataaaaacaagattagaaaagtatttcgaagaaactcaacctctagctttcatttttagagaaaaaatgaaagaaaagttctttgaaattgacgcaatgcaagaaatatcaaaaattaagtatgaaattgaaaatagacttaaaaatgccgaattttaag

SEQ ID NO: 251817 - DNA, 238 bp, Unknown
  Bacterial polypeptide expressing nucleotide sequence isolated from the Sargasso Sea
catgcgtattattctgctcggccctcccggtgccggcaaaggaacccaggcgaatcatctgattcgtgattttggactagttcagctttcaaccggggacatgctccgggcagcggtcaagtccggttcggaaatcggcaagaaagccaaagcagtgatggatgccggggagttggtttcagacgaaatcgtggtcggcatcgtcgaggaacggatcaaagaacccgactgcgaaaaa

SEQ ID NO: 251818 - DNA, 334 bp, Unknown
  Bacterial polypeptide expressing nucleotide sequence isolated from the Sargasso Sea
tctttctgaggatagtggaaaagggtttcttttggatggttttcctagaacaatatcacaagctgaagctttagatgaaatgcttagtttaaataatttgaaagtcaatcatgttgtatctctagaggtagaagattcaatattaatagagaggctactttcccgtggtagaagtgatgataatgaggagacaattaaaaatcgtttagatgtttataagaatcaaacactaccaattaaagaatattatcgttcatctaacatattggtagaaataaaaggagatgattctatagaagtagtatcagctaatattttcaatgcaataggctaa

SEQ ID NO: 251819 - DNA, 448 bp, Unknown
  Bacterial polypeptide expressing nucleotide sequence isolated from the Sargasso Sea
aatgaaaaaacatttactatttttaggaccacccggagcaggtaaaggaactcaagctgcccttttgagtgaagccaactcttatttacatttatctactggagaattattaagaaaagaaattgatttggatactgatttgggtaaacaagtaaaagatattatgaatagaggggaacttgtaagtgatcaattagttttagaaattgtaaaaaaaaatttggataaggataataatggttggattttagatggttatcctagaaatttgtctcaagtgaattctcttaatgatgtattgattaatataaatcaacctttagaaatcgtattttatttagatataccagacgaagttttaataaagcgtttacttattaggggtagaaaagatgataatgaaaaaactattaaaacaagattaaaaatttataaggaaactacagag

SEQ ID NO: 251820 - DNA, 531 bp, Unknown
  Bacterial polypeptide expressing nucleotide sequence isolated from the Sargasso Sea
tatgcgcattgttctgttgggagctccgggcgccggcaagggtacccaggctcagttcatcatggaaaaacacggtattccgcagatctccaccggcgacatgctgcgtgcggcgatcaaggcgggtaccgagctgggcctcaaggccaaagccgtgatggacgcaggtcagctcgtctccgacgacatcatcatcggcctggtcaaagaacgcatcgcgcaaccggattgcgccaacggcttcctgctggacggcttcccccgcaccattccccaggcgcaagccatgaaggatgccggtgtgaccgtggacttcgtgctggaattcgacgtgccggacgaagagatcgtcaagcgcatgagcggccgccgcgtgcactccggctccggccgtacctaccacgtggtgttcaacccgccgaaagtggaaggcaaggatgacgtgaccggcgaggatctggtgatccgtgccgacgacgaagagaccacagtgcgcaagcgtctggatgtctaccatcagcagaccgcgcc

SEQ ID NO: 251821 - DNA, 574 bp, Unknown
  Bacterial polypeptide expressing nucleotide sequence isolated from the Sargasso Sea
ttgaaaaatataatcttttttggcccacctggtgcaggaaagggaactcaggcaaaaattatttctaataaatataatataccccatttatctactggtgatatcctgagatcaaaaatagaagaaaaggatcaattaggtcttcaggttaaacaaattattgcaagtggaaaacttgtttcagatgatattttaaattctattgtatcagaaagattaaaaaatgaaaaaaaaaatggatttattttagatggttatccaagatcaagtgagcaagcacaatttcttaacaattttctcacaaataattcacttaaaatagattatattattaatatagaattaaattttgaaactttaaaaaaaagaataattaaaagatcagaagaagaaggtagggaggatgataatatcagcgtaattcaaactcgttattcagaatatatgaagacaacaaagcaagttactgaatactactctgaaaataaaaaggagatttttcatcagattaacggtcagcttgaaatcgatgaaattacttacaaaattgaaaaaatattgaaaattcaataaa

SEQ ID NO: 251822 - DNA, 589 bp, Unknown
  Bacterial polypeptide expressing nucleotide sequence isolated from the Sargasso Sea
tatgagattaattttgatgggagctcccggttctgggaaggggactcaggcagaaaagctcatggatgactttggttgccgccaaatatcgacaggtgtgttacttagacaagccatagaatctggttctgaacttggcaaaaaggtgcaaaagatcatgtctgagggtttgcttgtttctgacgatatagttttggatttaatcaataatgagttatcagaaataggtgagagtggattccttctagatgggtatccaagaaacatcaatcaagcaaaatcattgaatgatctacttgaaaatatagataaaccattggattacagcatattgattgatgtaccgagtgaaattttaattaaaagactatctggaagaaggacatgctcattaacaggtaagactttgaatatttacttttcctcagaaaatgaaatagatgaatgtctttctaaaggcggtgaattgctccagcgagaggatgataacgaggaatcaattacgaaaagaattgaagtatacgaagagcagacagagccgatggttgatttttatagatcaacagggcttcttcatacaattgatggt

SEQ ID NO: 251823 - DNA, 261 bp, Unknown
  Bacterial polypeptide expressing nucleotide sequence isolated from the Sargasso Sea
aatgaatataattcttttgggacctcctggttcaggaaaaggaactcaatcaaataatctagtagaaaaatacaaactctcacacatttcaactggagatatattaagatctcaaatagctggaaaaactaaattaggtaatgctgctaaagtatatatggataaaggtgatttagtacctgataatttaataattgatatggtttctagcacaactaaaacactccaatcaatacttcttgatggttttccaagaacaat

SEQ ID NO: 251824 - DNA, 451 bp, Unknown
  Bacterial polypeptide expressing nucleotide sequence isolated from the Sargasso Sea
atgaatattatcctttttggtcctccaggctgcggaaaaggaactcaagcttcctatatttccgattttttatctatacctcatttgtcaacaggagatatgttgagaagtgcagtaagctcaaagtctgatattggattacaagttcaagaaataatgcataaaggtgggctagtatcagatgaagtggttctctctatagtaaaagagcgagtgtcaaaagaagattgtttagaaggatttattttagatggttttcctagaacaataaatcaagcaaagggtttagacttgttgttaaaagaaaaccagagaattgaatttgtacttagaattaaagttgacgaagagaatataattaaaagattaattgatagaggtaggtctgatgataagccagaaataattaaaaatagatttaaatcgtacaactcacaaacgcaacccttaa

SEQ ID NO: 251825 - DNA, 364 bp, Unknown
  Bacterial polypeptide expressing nucleotide sequence isolated from the Sargasso Sea
aatgaaaattttattaataggacctccaggaggaggaaaaggaacgcaagctaaagtcttaattgaaaagtataaaattccacaaatttctactggtgatatgttaagagagcatgttaaaaaattaacgcctcttggacaaaaagcaaaaaactacatggaaaatggagaacttgttcctgattcattaattcttgatatgatggaattaagattaaatgataaagattgtattaatgggtatatacttgatggcttccctcgaactatacctcaagctgaaggattagattttttattagaaaagttaaatcataatcttgataacgtaattataattgatgttccagatgatagaatagtt

SEQ ID NO: 251826 - DNA, 427 bp, Unknown
  Bacterial polypeptide expressing nucleotide sequence isolated from the Sargasso Sea
tatgaacatagttatttttggtcctcctggtgcaggtaaaggtacccaatcaaaatttatagtaaataaatttaatctatatcaattatctacaggagaccttttgcgtaaagaaattaaaaataaaacaaaattaggatctgaaatttcatcaattataaattcaggagaattagtctcagataacatagttagtaatttgatagaaaaattcgtttccaatgataattataaaaacaaaattatattcgatggatatccaagaacattaactcaagcaaaagatttagataatatattaaaaaaatataatcaaaaaatagatattgtattaaaattgtctgttagtttggaaacagtaaaaaaaagaattttggaaagacaaactcaagaacaaagagcagatgacaatgaagaaatagcaata

SEQ ID NO: 251827 - DNA, 177 bp, Unknown
  Bacterial polypeptide expressing nucleotide sequence isolated from the Sargasso Sea
tttggtgaatgttataatttttggaccacctggagcaggaaaaggaacacaagcaaacaatttggttaaaaaatataatttgtatcaaatttctacaggagatcttttaagaaatgaagttgcaaataaaactgatataggtagaaatatcgagaatataatatccaaaggtgattt

SEQ ID NO: 251828 - DNA, 217 bp, Unknown
  Bacterial polypeptide expressing nucleotide sequence isolated from the Sargasso Sea
gatgaaaaaaataatcttattaggaccgcctggcgcaggcaagggcactcaagcagatttgatctgcaattatctaaaaatacctaagatcagtactggcgatatgctgcgtgaggcaatttcatcaggcagcagccttggtaaaagagtaaatgatgttatgaattcaggagcgctcgtctcagatgatattattatcgagttgattctagaaaga

SEQ ID NO: 251829 - DNA, 883 bp, Unknown
  Bacterial polypeptide expressing nucleotide sequence isolated from the Sargasso Sea
atgcgaattgtattactaggcgcaccaggatcgggtaagggcacacaggccaagcagttatccacgcattaccggattccccagatttcaacaggggacattctcagggccgctgtggacgcggacaacgagttgggcaaacgggtgtcagctagcctcaaggctggacagttggtgtctgatggtattgtcattgatgcggtgactgacagtctgcgcgcgcctgatagccgacgcggattcattctggacgggtttccaagaaatataccgcaggcacaagagcttgatactcggttgagttggatggatcgtcccgtgcaattggctctgaatttttgcatcgagcctgagcgtctgctgaaacgggtgaccggtcgtattacctgcagtgagtgtggggcgatttataatcgttatttcataccaactgagaaacgtggtgtttgtgatcagtgtggttctgcagatttaacacgccgctccgatgatcaagcaaagactttttctaagagactcgatgcttacttcgttgagtcagagcccctgattgattatttccgggcgcagcagaagttgcggacggtgcaggttgaagaagatacaacccaggtgtttgaggtgatctgtagcgtgattgatgcggagattcggccatttgacaagaaggtatcggcgggtgacatcacgacacgttcgacgtcgttgacatcccgggtgattagtggcggtgccgtcgagcgcgcgaaagcgaagaagaagccggcgactgcaaaagcgaagctaaaggcggttaccaagaaaaaagtagtgaagaagccagtggttgcgaaagcaaaggcaaagacgattaccaagaaaaaaatagcgaagaagccagtgg

SEQ ID NO: 251830 - DNA, 379 bp, Unknown
  Bacterial polypeptide expressing nucleotide sequence isolated from the Sargasso Sea
ttgtttggacctcctggtgctggcaagggtactcaggctaaatatttaataaagaaattaaattcttttcagatttcaactggtgaacttttgagggaagaaatatataaaaattcagatattggcaagataattaccaatgacatgaaaaatggtaaatttgtaagtgatgaaatagtaaatagccttattgaaaaatttatttcagaccctaaaaaaaaaaacaaattaatatttgatggatatcctagatctttgagccaagcaaaaaatctagatgttttacttgaagcatcaaatcaaaaggtagatctaatattatatcttaaagttgataaagaaacggtagtaaaaagattgagaaaagaaaaattatgaa

SEQ ID NO: 251831 - DNA, 646 bp, Unknown
  Bacterial polypeptide expressing nucleotide sequence isolated from the Sargasso Sea
atgaagaacattattttattagggccccctggagctggaaaaggaactcaagcagatttgatatgtgacttattaagtattccaaagattagtactggtgatatgttaagagaagctgtggcatctggcagtgagctaggaataaaggtatcagaaattcttgatagtggtgctttggtatctgatgagattattggatccttaatagaagatagacttacaaaatctgattgtgctaatggctctctatttgatggagttccaaggactattggacaggctgagcaactagcaacaatggggataaattttactcatgttattgaaatacaagtttcagacgataccattgtgaataggatgtctggcagaagggtgcatccaggatctggtaaaaattatcatatagaatttaatcctccaatcaatgaagggctagatgatgaaactggtgaaccacttattcaaagagaagatgataagcctgaaacagtattgcgacgtttaaacgtttaccatgaacaaactaagccattaacagatttttatataaatctatcagatactggaaatttaaaatttattaaagtagatggcgctgaatctgtagaaactgtttttcagaatatctcagaaaatatctaaa

SEQ ID NO: 251832 - DNA, 313 bp, Unknown
  Bacterial polypeptide expressing nucleotide sequence isolated from the Sargasso Sea
atgtttaatattgtgatttttggtaaaccaggatctgggaaaggaacccaggctgactttttaaaagataaatatgatttatatcatatatcaacaggtgatttatttagaaaaaatattttaaataaaactgatctgggtattgaagcaaagtcgtttcttgataaaggagatcttgtacctgatattgttacaattaaaatgcttgaaaatgaagttttagcaaataaggatgctaatggttttatttttgatggttttccacgaacacataaccaggctgaatctcttgatatttttcttgaatcaatta

SEQ ID NO: 251833 - DNA, 337 bp, Unknown
  Bacterial polypeptide expressing nucleotide sequence isolated from the Sargasso Sea
tatgttaaacattgttttatttggccctccaggagcaggaaaaggaacccaatctgaccgtttgattgacaaatataaattggttcatttatcaactggagatatttttagatctaatattaaaggtgaaacagatcttggtcttatggcaaagaaatttatgaataaaggtgaattggttcctgattcagtaacaataaaaatgttgcgtgatgttgttttaaaaaatccagaagcaaatggatttatttttgatggttttcctagaaccaacaaccaagcaattgctttagatgaatttttatcagaattaaatacctctattactgtcatgctt

SEQ ID NO: 251834 - DNA, 571 bp, Unknown
  Bacterial polypeptide expressing nucleotide sequence isolated from the Sargasso Sea
ttgacaaatataattttctttggcccacctggtgcaggcaaaggaacacaagcaaaaaaaatatcagatttttttaaacttcaacacctatctacaggtgaaattttgagattaaagatatcacaaaaagatgagttaggtttaaaattaaaagatattatagctagtggaaaattggtttccgatgatgtcctaaatgaaattgttgctgaaaagattgttacatgtaaagatactggttttatacttgatgggtatccaagaacacttaatcaatcccgatttttagaaaaaattcttaaaaataattttttaaaactaaattttatttttaatattaatattacttttgataaattaaaaaatagaataataaatcgctctaaagaggagggaagagaagatgataatctagatgctataaaaactagatatgatgcgtatctacaaactacaactgaggtttcaaactattacagttcagaaaatcctgaaattttctttgatattgatggaagtgatcaaatcgaggaaattacaaataaaattaaaaaaatcattgtaaaataat

SEQ ID NO: 251835 - DNA, 559 bp, Unknown
  Bacterial polypeptide expressing nucleotide sequence isolated from the Sargasso Sea
tttgattctctttggacctccaggagcaggaaaaggtacacaagctaaatttttagtagaaaaattaaataattttcaaatatcaacaggcgatatgcttagagatgaaattaaaaaagacacagaagttggtaaaaaaattataaacaacatgaatgacggtaaatttgttgaagatgaaatagtaaataaacttcttgaaaaaataatatttgactccaacaaaaaaaataaattaatttttgatggttatccaagaactttaaatcaagctaaaaatctagaaaatttattgaccaattctaaccaaaaaatagattatatttttttccttaatgtaaataaagactcaataataaaaagaattgagagacgaaaaattatagaaaaaagatctgatgatgacgctaatactattttaaaaagatatgatttttatatgaaagaaactaaaccagttttagatttttactcttcaaaaaaaggattttatgagattgatggaagcttaaatattgagcaaataagcaataaaattgatgatattatcaaggtttaa

SEQ ID NO: 251836 - DNA, 280 bp, Unknown
  Bacterial polypeptide expressing nucleotide sequence isolated from the Sargasso Sea
atgagaatcatattgttagggccaccaggtgcaggaaaaggaactcaggctaacatggtgagaaaaaaatttgatatcccgcaaatttcgacgggtgatatgttacgaacagcaattagacaaggaagtaagctaggtatttcagcgaaaaaagttatggatgttggcgctctagtatctgacgatctaatacttaatttagtaaaagaacgaattaatcaaaatgattgtaaaaatgggtatttatttgatggttttcctcgcacattaacacaagcaa

SEQ ID NO: 251837 - DNA, 580 bp, Unknown
  Bacterial polypeptide expressing nucleotide sequence isolated from the Sargasso Sea
atgaatatagttttgtttggacccccaggtgccggcaaaggaactcaagcaaaattgatatgtgaaaaatatttccttaatcatctctcaacaggtgatctattaagaaaagaaagcagtaaagaaacaagtttaggtattcaaataaaaaacacaataaatgatggtaaattagtatcgaatgaaacgacgattgaattgataaagcaatttataaatgaaaataaaaataataagaaaggtttcctgtttgatggtttcccacgaaataaaaaacaggctgagctactcgactatttaatggaaagcattaatgaaaaaatactctgtgtgattttgcttaatgttaacgaagatgtattaaaggaaagaattataaataggagtacaacagaaggtcggtcagatgataacttggaaatattatctaagagacttcatacttactcttctgaaacagagcccttaattgaatactattcttcccagaatcttgtcagaaaagttcacgggataggagaaataagtgatataaatcaagggattagttcccatatagaggcctctttaaatgcttgac

SEQ ID NO: 251838 - DNA, 493 bp, Unknown
  Bacterial polypeptide expressing nucleotide sequence isolated from the Sargasso Sea
cttgggcctgcaggccaaggccgtgatggactcgggcgccctggtcagcgacgacatcatcatcggtctcgtcaaggagcgcatcacgcagccagactgcgccaacggcttcctgtttgacggcttcccccgcaccattccccaggccgacgccatgaaggcagctggcgtcaagctcgactacgtactcgaaatcgatgtgccctttgacgccatcatcgaacgcatgagcggccgccgctcgcacccggccagcggccggacctaccacgtcaagttcaacccacccaaggtcgaaggcaaggatgacgtgaccggcgaagaactgatccagcgcgaagacgacaaggaagaaaccgtcaagaagcgcctgcaggtctacagcgatcagacgcgccccctggtggattactacagcaactgggccaaagccgaacccgccgcagcgcccaagtaccgcgccatcagtggtacgggcagcgtggacgagatc

SEQ ID NO: 251839 - DNA, 403 bp, Unknown
  Bacterial polypeptide expressing nucleotide sequence isolated from the Sargasso Sea
catgaataccttcatactattaggaccacctggtgcaggaaagggcactcaagcagatcttatttcagctgatctaggtatcccaaaaataagtactggcgatatgttgcgatctgctgtggcttctaaaagtgatttaggtaatagagttgaagatattcttaactccggcaagctcgtctcagatgatattattattgaattaattaatgatcgcatcaatcagtcagattgtaagtctggttacttattcgatggagtgccaagaactctagggcaagccaatctttttttacagaatgatatagaggtaaacaaggttatagatatatcacttgatgataaattaattattaaaaggatgtctggcagaagatttcatatagcatctggtagaagctat

SEQ ID NO: 251840 - DNA, 491 bp, Unknown
  Bacterial polypeptide expressing nucleotide sequence isolated from the Sargasso Sea
tatgaatctaattatatttggcccaccaggcgcaggtaaaggtactcaagctgatttcatcgtaaataaatttaatctatttaaattatctactggtgaggttctaagaaatgaaattaagagtaaaactcaattaggaaaagaaatttcatccatcattaattctggttccttagtttcagataatatagttgaaagattagttgaaacttttattaatgataaaaaatataaagatagattaatttttgatggttatcctagaaaccttactcaagccaaaacacttcaaaaacttcttataaaacatgggcaagaaattagtctggtattgaaactatcagtttctctggaaacaattacaaaaagaattttagaaagaagagctatagaaaaaagaaaagatgatagtaaagaaatagcaattaaaagatatcaaacttatgagaaatcaactgagccggttatcgaatattataaaaaattgaatt

SEQ ID NO: 251841 - DNA, 211 bp, Unknown
  Bacterial polypeptide expressing nucleotide sequence isolated from the Sargasso Sea
gatgaatatcatcttaatcgggccaccaggggcaggcaaaggaacccaagctgcgtttctggagaataattttagtctgaagcagttgtctacgggtgacatgtgccgtgtcacaatgaaagaaaatacagatcttggaaacaaagtccgagtcatcgtagaagcaggtgacctcgtacctgacgatataatggtccaaagatatcagagc

SEQ ID NO: 251842 - DNA, 200 bp, Unknown
  Bacterial polypeptide expressing nucleotide sequence isolated from the Sargasso Sea
tatgaatatagttatatttggcccacctggagcaggaaagggaacacaatctgacaagattgtagaaaaatataatctattcaaactttctactggagatttgttaagaaaagaaattaacaaaaagagtgatattggaaaaaaaattcaagaaatagttaattcaggaaaattagtttctgacgaactcataaacaatt

SEQ ID NO: 251843 - DNA, 297 bp, Unknown
  Bacterial polypeptide expressing nucleotide sequence isolated from the Sargasso Sea
tatgaatataataatttttggtccaccaggtgcaggaaagggcacccaatcaaaatttattgtaaataaatttaatctatatcaattatcaacaggtgatcttttacgaaaagagattaagaataaaacaaaattaggatcagaaatttcatcaatcattaattctggtgaactagtttcagatgaaatagttagtaatttgatagaaaaatttgtttcaaatgatacttataaaaataagattatttttgatggatatccgagaactttaaaccaagcaaagaatttagacaaatc

SEQ ID NO: 251844 - DNA, 430 bp, Unknown
  Bacterial polypeptide expressing nucleotide sequence isolated from the Sargasso Sea
atgaataaaattcttctattagggccgcctggtgctggaaaaggcactcaggcagaccttatttgcaaatctttagctattcctaaaataagtacaggtgacatgcttcgatcatccatcgcctctggaagtgaattaggcaaaaaggtaacaaatattatgaactctggggccttagtttctgatcagataattattgagttaattttagatcgaatttctcagcctgattgtaatcaaggctttctatttgatggtggcataagaacagtaggccaagcagatttgtgtgtcgaaaacaatattgagtttagtcatgtcattgaaattaaagtcgaagacaacgtcatcgtagataggatgtcaggaaggagggtgcatcctggttcaggtagaaattatcaccttgtctatcaaccacctaaaaaag

SEQ ID NO: 251845 - DNA, 553 bp, Unknown
  Bacterial polypeptide expressing nucleotide sequence isolated from the Sargasso Sea
tttgtttggtccaccaggagctggaaaaggtactcaagctaaatatttagtaaaaaaattaaacggttatcaaatttctactggtgatattttaagggaagaaataaaaaaagattcaaatataggaaaaaaaataataaataatatgaatgagggaaaatttgttagtgacgaaatcgtaaatagtcttttaaaaaatcatgtttttgatcctaataaaaaaggaaaattaatatttgatggatatccaagatctcttagccaagctaaaaatctagatttattattaaataattcaaatcagagtataaatcatattttttttttaaatgtaaataaagacactattgtagaaagaataaaaaaaagaaaaattttagaaaaaagatctgatgatgatttaaatactatattaaaaagatacgatacttatatcgcaacaactagaccggtattagatcactattcgaaaaattcaaattttcatgagattgatggatctatggaaattaatcaaattaccagtaaaatagagacttttttaaatgtttaa

SEQ ID NO: 251846 - DNA, 214 bp, Unknown
  Bacterial polypeptide expressing nucleotide sequence isolated from the Sargasso Sea
ttgataggacctcctggtgctggcaaaggtactcaggcaaaatatttagtaaagaagttaaaaaattttcaggtctcgactggtgatatgctaagagaggaaatacaaaaaaattcagaaattggtaaaaaaattcttgatgatatgagtagtggaaaatttgttcatgataacaaagtaaataaattaattgaaaatattttattagatccag

SEQ ID NO: 251847 - DNA, 601 bp, Unknown
  Bacterial polypeptide expressing nucleotide sequence isolated from the Sargasso Sea
tatgaaaaagataattcttcttgggcctccgggggccggaaaaggaacgcaagcagatttaatttgtgaagttctagatattccaaaaatcagtactggtgacatgcttcgagcagcaattgcctctcagagctcccttggtaaaaaggttgaaaatattttaagctcaggtgcattagtttctgatgatgtgatcatagaattaattaatgatcgattgttggccgatgattgtgctattgggtatttatttgatggagtgcctaggactcttggacaagcagaactttttgatcaaagtaatataggaattgatggggtgatccagattgatttacccgatgatgtgattgtcgagagaatgtctggaagacgttttcatatcgaatctggacgaagctatcacattaattttaatcctcccaagcaagaggggattgatgatgtaacaggagaacctcttattcaaagggaagacgatctgccagaaactgttttaaaaaggttgcaagtctatcatgaccaaactcaccctctcattgatttctacactgccaaagcaaatcaacaaaatttagaatacattctctgtcgatggtaa

SEQ ID NO: 251848 - DNA, 655 bp, Unknown
  Bacterial polypeptide expressing nucleotide sequence isolated from the Sargasso Sea
aatgatactattaggtccgcctggagcaggtaaaggcacacaagctgaggcaatttgtgaaaaatatgatattccacaaatttcaactggagatatgcttagatcggaaataaagagtgagtctcaacttggaatgtcagccaaaaaaataatggacgcaggaaaattggttgatgaccagcttattataaaacttgtactcagcagaatttccaaaccagattgttccaatggttatttatttgacggttttcctagaacaattccccaagcagaagccctcaaaactgcaaaagtacttttgaacgcggtagttgaaattaatgtgctagatgacgaaatagtaaccagagtttctgggagaagagttcatccaggaagtggcagggtctaccatatcgtcaataaaccacctaaaaaaaatggactggacgatatcaccggtgaacccataattcaaagagaggacgataacgagaagaccgtaaaaaaaagacttgatgtttatcaccaccaaacgaagccattaatttcattttacaaatcatggtatcaaaatgatgatcaatcaccaaagtttatctccgtttcaggtacaggttcaatagcagatattaaaacatcaattcttaattctctagagaatttgaactaa

SEQ ID NO: 251849 - DNA, 451 bp, Unknown
  Bacterial polypeptide expressing nucleotide sequence isolated from the Sargasso Sea
catgcgtatcattctgctcggccctcccggtgccggcaaaggaactcaagcgaatcatttgatccgtgactttggactggttcagctttcaaccggggacatgctccgggcagcggtcaagtccggttcggagatcggcaagaaagccaaagcggtgatggatgcgggggagttggtttcagacgaaatcgtggtcggcatcgtcgaggaacggatcaaagaacccgactgtgaaaaaggcttcctgctcgatgggtttcctaggaatattgtccaggcggaaaaattggatgaaatgctccgacgcagtgctcaaaagatcgactgtgtgctggagatcgaagtcgatgaagaggcggtggtgcggcgcatcgccgggcgccgattccacctggcaagcggacgtagttaccacatcgagttcaacccgcctaaagtgccgaccgagacg

SEQ ID NO: 251850 - DNA, 550 bp, Unknown
  Bacterial polypeptide expressing nucleotide sequence isolated from the Sargasso Sea
aatgaagaaacatttactatttttaggagctcctggagcagggaaagggactcaagcggaattgctaagtcaaacttattcttacttacacctctctactggtgaattattaagaaaagaaatcgaaatgaatactacccttggtatccaggtaaaagatattatgaatagtggggaacttgttagtgatgaactcgtattaaagatagtaagacataatttacttaaggataataaaggttggattctagacggttacccaagaaatttatctcaagcaagttcattgaatgaagttttaactgaaataaatcaacctttggaattagttttttatttagatattccagaagaagtactaattaagcgtttgctcttaagagggagaaaagacgatacggaagagacaattagaacaagagttgacatttataaaaaaactacagaaccattgattcaatattttaaggatctctcattgttagaatatattgatgctgatagagatttaaaaaccatttcctctgatatcaaacaaaaaatggcttga

SEQ ID NO: 251851 - DNA, 553 bp, Unknown
  Bacterial polypeptide expressing nucleotide sequence isolated from the Sargasso Sea
catgaaaaatcgtttgcttttccttggtcctcctggagctggcaaaggcacccaggccgctcggctctgcgctgccaacagcatgaagcacctgtccacaggagatctgctgcgctctgaagtcgcagccggcagcgaactcgggaaagaagctgaagcggtgatgaaccgtggtgagctggtcagtgacgccctcgttttggccatcgtggaaagccagatgaaggcattgacatcagacggctggcttctcgatggatttccccgcacagttccccaggctgaagcccttgaaccacttctgaccgaactccagcaacccatccaggccgtggttctgctggaactggatgacgctgttttgattgaacggctgttatcgcgaggtcgcgccgacgacaacgaagcggtgatccgcaatcgactggaggtgtaccgggagaagacagcccctctaattcgcttctacagcgacaaggaactgctggtttccgttcctgcccaaggctccgtggaagagatcaccaagcgaatcgagtcagtgctcgattga

SEQ ID NO: 251852 - DNA, 566 bp, Unknown
  Bacterial polypeptide expressing nucleotide sequence isolated from the Sargasso Sea
aatgatttttatattctttggtcccccaggggccggaaaaggtactcaagctgcattactttctaaaaaatataatatacctcatttatcaactggagaaatcttaagaaataatttacttggtgatagtcctgaatcaataaaaataaaaaaaattctagaaaaaggtgatttagtatcagatgaaatattaaatgagataattaaacaaaaattagactcacctgaatgtattcatggatatatattagatggctaccctagaactttaagtcaaaatgattggctccaaaattatttaaattttaaaaatttagaaataacaaaaatctttgatatcaacttagaaaaagatattattgttaaaagaattaaaaatcgagcaatattagaaaaaagaaaagatgatacggaagaagtaattaaaaatcgtgttagtaaatatattgaagaaacaaaacctctttcaaaatactaccttaaaagaaatcctaaaaattatcatttgattaatggcaatcaagaaattgaaatgataaagaatgatatcttaaaaattgttaaaa

SEQ ID NO: 251853 - DNA, 121 bp, Unknown
  Bacterial polypeptide expressing nucleotide sequence isolated from the Sargasso Sea
atgaaaaatataatcttattaggaccacctggcgctggaaaaggtactcaagcagatcttatatgtgacctatgcagtattccaaaaatcagcactggtgatatgctcagagaagcagtcg

SEQ ID NO: 251854 - DNA, 366 bp, Unknown
  Bacterial polypeptide expressing nucleotide sequence isolated from the Sargasso Sea
tatgaaaattatccttttagggcctccaggtgcaggaaaaggaactcaagcagaggtattatgcgaaacctttagtattccacatatctcaacaggaaatatgttgagagaagctgtagaagaggaaacagatcttggtcttgaagctaaggctttaatggatgcaggaattttagtttctgatgaagttatagttggacttgtagaagatagaatattaaaagatgattgcaataacgggtttttgtttgatggctttccaaggaccattcctcaggcacaggctttagttgatagagatataaatatagattccgtggtggaaatacacgtacccgatgaagatattattgaaagaatgtctgg

SEQ ID NO: 251855 - DNA, 649 bp, Unknown
  Bacterial polypeptide expressing nucleotide sequence isolated from the Sargasso Sea
atgaagatcatacttttaggacctcctggtgcaggaaagggaactcaagcagagacattatgtgaagcttttactattcctcatatatcaacaggaaatatgcttagagaggccgtggatgaggagacggaacttggtctagaagctaaagctttaatggatgcaggtattttagtttctgatgaagttatagttgggcttgtagaagataggatatcaaaaggagattgtaagaatggctttttgtttgatggatttcctagaaccattccccaagcgcaggctttggtacaaagagacataccaatagacgctgtgattgagatacatgtacctgatcaagacattatagaaagaatgtctggaagaaggatgcatccaggatcaggtagaaattaccatgtaatttacaaccctccaaagatcgatggcaaagatgacttaactggagaggatttagttcaaagagaggacgatgaaccggaaacagtaaaagatagacttaaggtttatgaagatcagacggcaccattaattgatttttattcagaaatgtctaaacaagaaaaattaaaatacattaaagtttctggaacttctactcctgaagaagtttcctctgagattttaagcatgttgaacatttgac

SEQ ID NO: 251856 - DNA, 658 bp, Unknown
  Bacterial polypeptide expressing nucleotide sequence isolated from the Sargasso Sea
atgcgtatcattctgctcggccctcccggtgccggcaaaggaacccaagcgaatcatctgatccgcgactttggactggttcagctttcaaccggggacatgctccgggctgcggttaagtccggttcagaaatcggcaagaaagccaaagcggtgatggatgccggggagttggtttcagacgaaatcgtggtcggcatcgtcgaggaacggatcaaagaacccgattgtgaaaaaggcttcctgctcgacggatttcccaggaatattgtccaggcggaaaaactggatgaaatgctccaacgcagtggtcaaaagatcgactgtgtgctggaaatcgaagtcgatgaagaggcggtggtgcggcgcatcgccggacgccgatttcatctggccagcggacgcagttaccacatcgagttcaacccgcctaaagttgccgaccgagacgacgataccggcgaggaactggttcagcgggacgatgacaacgaagaaacagttcgtgcacggctcaatacctataacgaacagaccgcacctctgtcggatcactatcgcaagcagaatctgttgaaagccatcgacggcatgggcagccccgacgaagtctacgagcggttgcgacaatccctggaagacctcaacccgtcctgaa

SEQ ID NO: 251857 - DNA, 130 bp, Unknown
  Bacterial polypeptide expressing nucleotide sequence isolated from the Sargasso Sea
gatgaagaatttaattttacttggacctcctggtgcgggaaaaggaacacaagcaaggacattatgtgaaaaatatggatttgttcaattgtctacaggagatatgttaagagaggctaaaaaagacgaa

SEQ ID NO: 251858 - DNA, 326 bp, Unknown
  Bacterial polypeptide expressing nucleotide sequence isolated from the Sargasso Sea
gatgaggatattacttttgggtcccccgggtgcgggcaaaggcactcaagcacaattcattaaagaaactctaggtattcctcagatttctacgggtgacatgttgcgagcggctgtaaaatccggaagtgaattaggtttgaaagtgaagcaagttatggaatcaggctcccttgtttcagacgaaattgttattgaattggtgcaggaaagaattagccgggctgactgccaaaacggatttctttttgatgggttcccaagaacaatccctcaagctaaggctatgaacgaggctggcgtgattttagatgcagtggttgaga

SEQ ID NO: 251859 - DNA, 237 bp, Unknown
  Bacterial polypeptide expressing nucleotide sequence isolated from the Sargasso Sea
tttgtttggaccaccaggagcaggcaagggcacgcaagcagataatattgtaaaatcttttgatttatttaaagtttcttctggcgatttattaagagacgagatttctagaaaaactgatcttggaaaccaaattaattctataattacaaaaggatcttttgtttctgatgatgttataaataaattaatagagaaaatcttatctgacatgaaatattttaataaattagtatt

SEQ ID NO: 251860 - DNA, 649 bp, Unknown
  Bacterial polypeptide expressing nucleotide sequence isolated from the Sargasso Sea
atgaatatcatactgctaggacctcctggtgcaggtaagggaacacaagctcaatttttagttgagtcgctgggtatggttcagttatctaccggtgatatgcttcgtgaggcaaaggatagtgggactgaaatgggtaaggttgttgctgaagtaatgtcgcgaggcgacttggtcactgatgacattgtaataggtctaattaaagaaaagctggatggtgacaaaggtgctggttttatatttgacggtttcccgcggactctggcacaggctgatgctttaggtgctttgctaaacgactgtaatatcgacttggatagtgttattgagattcaagttgatgataaagcattgataaaaaggataactggaagatcaacgtgtggtggttgcggtcaagtctatcatgatgaaacgaaaccttggcctaaagacggaaaatgcagcacttgcggtagtaatgatgtaaagcgacgaactgacgataatgaggaaagcttaaaacagcgattaatggagtactataagaagacttctccgctcttgggttattactttgctaaaggaaaccttgtttctatcgatggcctgttatctatgaatgaggttcgtgatagccttaaaaaagttatcaacaaagaataac

SEQ ID NO: 251861 - DNA, 356 bp, Unknown
  Bacterial polypeptide expressing nucleotide sequence isolated from the Sargasso Sea
tatgaggttaattttgatgggagctcccggttcaggtaagggtactcaggcagaaaagctcatggatgactatggttgtcgacaaatatcgacaggtgtgttactcagacaagctatagaatctggctctaaacttggaaaaaaggtacaaaagatcatgtctgagggtttgcttgtttctgacgatatcgttttgggtttaattaagaatgagttatccgaaataggtgagagtggattccttttagatgggtatccaagaaacatcaatcaagcaaaatcattgaataatctacttgaaaatatagataaaccattggattacagcatattgatcaatgtcccgagtgagattt

SEQ ID NO: 251862 - DNA, 187 bp, Unknown
  Bacterial polypeptide expressing nucleotide sequence isolated from the Sargasso Sea
atgaaaacccgccttctttttctcggtcccccaggagccggtaaaggcacccaggccgcccgtctgtgcgaaacccatggcatgaaacacctctcgacgggagatttactgcggagcgaggtggcagctggcagtgatctcggcaaggaggcggaggccgtgagaaccggggcgaactggtcagcga

SEQ ID NO: 251863 - DNA, 149 bp, Unknown
  Bacterial polypeptide expressing nucleotide sequence isolated from the Sargasso Sea
aatgaatatagttatatttggccctcccggagcaggtaaaggcacacagtcaaaatttatagttaaaaaatttggtatgtatcaattatcaacgggtgaccttttacgtaatgaaattaaaaataaaactgatttagggaaaaaaattt

SEQ ID NO: 251864 - DNA, 562 bp, Unknown
  Bacterial polypeptide expressing nucleotide sequence isolated from the Sargasso Sea
ttgagcaatttagtaatctttctaggaccacctggcgctggaaaaggaactcaagcagtatcaatagctaaagaaaaaaatcttgctcatatatctactggtgatatgcttcgtgagcatgtgggtaacgaaacagagcttggaaaaactgctaaaactcttctcgaagaaggtaagcttgttccagattctttagttattgaaatgttgcaagaacggcttctttccaaggattgtgtcaatggcgcaatactggatggctttccaaggacaattgcacaagcagaaagtcttgataacatcagcgccgaatttaaaatctctaaagttattgtttttgaagctgaccgtgatgagctaataaaaagaattttaaacagaggtgaaactagtggtagaagtgatgatacagaagagtccttaagtgtgaggcttgaagtttatgaaaatgataccgctcctttaattgaatactatgaactaaaaaatttagttgcaaagataaatgctgttggcgaagttgaaaatatttataacttaatactgaaagaatttaaataaa

SEQ ID NO: 251865 - DNA, 337 bp, Unknown
  Bacterial polypeptide expressing nucleotide sequence isolated from the Sargasso Sea
tttgtttggtcctcctggagctggcaaaggcactcaagctaaatatcttgtaaaaaagataaatggatatcaaatttctactggagatattttaagagaagaaattaaaaaagatactgatataggaaaaaaaatcataaataatatgaatgagggtaaatttgttagcgatgagattgtaaataatcttttaaaaaatcatgtttttgacccaaataagaaagaaaaattaatttttgatggttatccaaggtcactaagtcaagccaaaaatctcaatattttattgaatgattcaaatcagaaaatcgatttcattttttttctaaatgtaaat

SEQ ID NO: 251866 - DNA, 628 bp, Unknown
  Bacterial polypeptide expressing nucleotide sequence isolated from the Sargasso Sea
atgaggttaattttgatgggagctcccggttctgggaaggggactcaggcagaaaagctcatggatgactttggttgtcgccaaatatcgacaggtgtattactcagacaagccatagaatccggttctgatcttggcaaaaaggtacaaaagatcatgtctgagggtttgcttgtttctgacgatattgttttggatttaatcaagaatgagttatccgaaataggtgagggtggattccttttagatgggtatccaagaaacatcaatcaagcaaaatcattgaatgatctacttgaaaatatagataaaccattggattacagcatattgattgatgtaccgagtgaaattttaattaaaagactgtctggaagaaggacatgctcattaacaggcaagactttgaatatttacttttcctcagaaaatgaaatagatgaatgcctttctaaaggtggtgaattgctacagcgagaggatgataacaaggagtcaattacgaaaagaattgaagtatacgaagagcagacagagccgatggttaatttttatagatcaacagggcttcttcatacaattgatggtcaaggttctgttgatgatgtttatattaggctaaagcaac

SEQ ID NO: 251867 - DNA, 301 bp, Unknown
  Bacterial polypeptide expressing nucleotide sequence isolated from the Sargasso Sea
tatgatcaatatagttttatttggtaagcctggagcaggaaaagggactcaagctaattttctaaaaaaaaaatatagtctaattcacatttctacaggagatttatttcgttacaatattaaaaataaaactgaattagggaaactggcaaaatcatttatggataaaggagatttggttcccgataaggtaacaattaaaatgttagaagaagaagtaaagagaaatacaaatgcaaaaggatttctattcgatggatttcctaggactaaatctcaagctgaagcattagataatttt

SEQ ID NO: 251868 - DNA, 151 bp, Unknown
  Bacterial polypeptide expressing nucleotide sequence isolated from the Sargasso Sea
atgcgtatcattctgctcggccctcccggtgccggcaaaggaacccaggcgaatcatctgatccgcgactttggactggttcagctttctaccggggacatgctccgggcagcggtcaagtccggttcggagatcggcaagaaagccaaag

SEQ ID NO: 251869 - DNA, 574 bp, Unknown
  Bacterial polypeptide expressing nucleotide sequence isolated from the Sargasso Sea
attgaacaatattattttctttggcccaccaggagctgggaaaggaactcaagcaaaattaatttcaaataagcttaatattcctcattactcaactggagatattttaagatcaaaaataaaggaaaaagactctttggcaataaagttaaaagagattatgtcgagtggaaagttagtatctgatgaaatattaaattctatagttgcatctagattaataaattcatttgatgatggttttatattagatggatatcctagaactttaactcaatctgtatatttaaataattttttattaaatcattctcaaaaaattgattttatttttaatattgaaataagttttaattttttgaaagaaaggattctaaagagatcaatagaagatggcagagatgatgataaaatagaaattttagaaactagatattctgaatatctaagctcaacatcaaaagtgtcgcaaaattataagactttgtatccacaaattttcattgaattagatggaacgcttgaaattgatacaataacagaaaaaatattaggaattatcaaaaaatcatga

SEQ ID NO: 251870 - DNA, 553 bp, Unknown
  Bacterial polypeptide expressing nucleotide sequence isolated from the Sargasso Sea
catgaaaaatcgcttgctctttcttggcccccccggagccggcaaaggcacccaggccgctcggctgtgcaatgccaacagcatgaagcatctgtccacaggcgatctgctgcgctctgaagtagcagccggcagcgatctgggccaagaagctgaagcggtgatgaaccgcggcgaactggtgagcgacgccctcgtgctggcgattgtggaaagccagatgaaggcactcaccacagatggctggctgctggatgggttcccccgcacggtgccccaggctgaagcgctcgaacccctgctggccgaattgcagcaacccatccaggccgtggtactgctggagctggatgatgccgtcttaattgaacgccttctggcccgcggtcgcgccgacgacaacgaagcggtgatccgcaatcgcctagaggtttaccgggagaaaaccgcacccctgattcgcttctacagcgataagggactcctggtttccgtccccgcccagggctcagtggaggagatcaccaagcggatcgagtcagttctcggttga

SEQ ID NO: 251871 - DNA, 550 bp, Unknown
  Bacterial polypeptide expressing nucleotide sequence isolated from the Sargasso Sea
atgaagaaacatttactatttttaggagctcctggagcagggaaagggactcaagcggaattgctaagtcaaactaattcttacttacacctttctactggtgaattattaagaaaagaaatcgaaatgaatactacccttggtatacaagtaaaggatattatgaatcgaggggaacttgtcagtgatgacctcgtattaaagatagtaagacaaaatttagtcaaggataataaaggttggattctagatggttacccaagaaatttatcccaagcaaattcattgaatgaagttttgactgaaataaatcaacctttggaattagttttttatttagatattccagaagaagtactaattaagcgtttgctcttaagagggagaaaagatgatacggaagagacaattagaacaagagttgacatttataaaaaaactacagaaccattaattcaatattttaagaatctctcattgttagaatatattgatgctaatagagatttaaaaaccatttcctctgatatcaaacaaaaaatggcttgat

SEQ ID NO: 251872 - DNA, 613 bp, Unknown
  Bacterial polypeptide expressing nucleotide sequence isolated from the Sargasso Sea
ggaacccaaaggctcagtttatattcgaagaaattcaacatacctcaaatatccactggcgatatgcttagagcggcggtaaaggaaggtacagaagtaggtttaaaagcaaaaaaactgatggacgcaggtgaattagtatcggatgaaataatccttgacctggttcaagaaagaatttcacaagcagattgtaagaacggttttttgtttgatggctttccaagaactatcaatcaagcaaaggaacttagtaacagaggtattacgatagattttgttgttgaaataaacgttgatgatgatgaaattatcacaagaatgagtggtagaagagttcaccaagcgtcaggtagaacttaccatgtaaaatttaatccacccaaaatagagaatgtagacgatgaaactggcgagccgttaatacaaagagatgatgaccaagaggaaactgtaaagaaaagactgaagatttatcatgagtctacttttccactagttgaatactatgaaagcatgtcttctgaaggtaaaactaaatatgtaaaaattgatggtgttgggcaaatcaatgaaattcaagagaaaattacagaaaacttggctaaatagg

SEQ ID NO: 251873 - DNA, 568 bp, Unknown
  Bacterial polypeptide expressing nucleotide sequence isolated from the Sargasso Sea
gatgaatctagtgctatttggacctcctggcgcaggaaagggtacccaagcgaatgatctaaaaattaaatacaacttaagacatctatctactggagatattttaaggtctgagattgaaaaaggatcagaattgggtgaattggctcagagttttatgaacaaaggagaactcgttcctgacgaagttgtcatagatatgattgaaaactgtttgaacgaagaaacgaacactaacggattcatttttgacggttttcctaggacaaccgaacaagcacaggcattggataatcttcttcaaaaacatgatacagagatagataagatgttgtcgctggaggtggacgatgaagaattggtggctcgaattatcttaagaggaagggattctggtagagaggatgacaaaaatgaatcggtcatcttcaatcgaatcattacttataacaagaagacagctccactaaaaaagtattacgaggatcaggggaagtataatcgcattgaaggtgtaggagatgttgaacaagtatttgaacgattagtgtctgcaatagaaggttaa

SEQ ID NO: 251874 - DNA, 555 bp, Unknown
  Bacterial polypeptide expressing nucleotide sequence isolated from the Sargasso Sea
catgcgaatcattcttctcggcgctcctggcgcgggtaagggcacacaagctcagttcttaatgggcaaatatggcattccacaaatttcaacgggcgacatgcttcgtgctgcgataaaagcgggtacagagctaggccttgaagcaaagcgtgtaatggatgaaggcaaactagtatctgatgagattatcattggcctagtaaaagagcgtatcgcacaagacgactgtaaagacggcttcttgctagatggcttccctcgcaccattcctcaggctgatgcaatgaaagaagcgggcgtttctgttgatcactgtatcgagtttgacgttccagacgacgtaattgtagagcgtatgggtggccgtcgcgtacaccctgcatcaggtcgcgtttatcacgtagtttacaatccacctaaagtggaaggtaaagacaatgaaaccggtgatgacttaatcgttcgcgatgacgataaagaagaaacagtacgtaagcgtcttgcgatttaccacgagcaaacgaaaccgcttgtaaattactatagcgcaaa

SEQ ID NO: 251875 - DNA, 231 bp, Unknown
  Bacterial polypeptide expressing nucleotide sequence isolated from the Sargasso Sea
aatgaatgtaataatatttggaccacctggtgcaggtaaagggacccaatctaataacattgtaaaaaaatttaatttacatcaaatttcaactggtgatcttttaagaaatgaagttaaaaaccaaactgacctaggaaaagatattgaaaatattatttcaaaaggagattttgcaactgatgaaatagtaaatgaactaattaaaaaggctatatttgatcctaataa

SEQ ID NO: 251876 - DNA, 493 bp, Unknown
  Bacterial polypeptide expressing nucleotide sequence isolated from the Sargasso Sea
catgattataatcttattagggcctccaggatctggaaaaggaactcaagcaaattttattcaaaataaattatccatccctcatttatcaactggtgatatccttagacaatcagttaagaataaaactgaactcggtaacattgtaaaaaatatcatggcaaaaggtgagttggtttcagatgagttagtgctacaaattattaaagaaagaatttcacaaaatgattgtgataaaggctttattttagatggatatcctaggaatataacacaagcggaatccttaaaagaagttttaaaagatgttaatcgaaatatcgatagaattattttcttagatgtcgattttaaagttcttgagtcaagaatcgaaactagatcaagggaaaataatgacgaaataagagctgatgatacatcagaagttctaattaaaaggttggatgagtataaattacaaacagctcccttagctgaatattattgtaga

SEQ ID NO: 251877 - DNA, 551 bp, Unknown
  Bacterial polypeptide expressing nucleotide sequence isolated from the Sargasso Sea
aggcaatatgttgagagaagctgtagaagaggagacaaatcttggccttgaagctaaagctttaatggatgcaggaattttagtttctgacgaagtcatagtaggacttgttgaggataggatatcgaaggcagattgcaataaaggctttttatttgatggatttccaagaactattcctcaagcgcaagctttggttgatagagatatacacattgattccgtagtggaaatacatgttcccgacgaagatattattgaaagaatgtctggaaggagaatgcatcctggatctggacggaattatcatatagtttataaccctccaaagattgatggtaaagacgacttaactggagaagacttaattcagagggaggatgataagcctgaaacagtgaaagacagactgatagtttataagaaccagacttcacctttagttaatttctactctgagatgtcagaaaaaaataaattagagtatttcaaagtcttaggcacttcgtcacctgaagacgtttccaccgagatcttaagtaagctgtaat

SEQ ID NO: 251878 - DNA, 571 bp, Unknown
  Bacterial polypeptide expressing nucleotide sequence isolated from the Sargasso Sea
ttgacaaatataattttctttggcccacctggagcgggcaaaggaacacaagcaaaaaatatatcagattttttaaaacttcatcatctatctacaggtgaaattttgagattaaagatattacaaaaagatgagctgggtttaaaattaaaagatattatggctagtggaaaattggtttctgatgatatactaaacgaaattgttgctgaaaagattgttgcgtgtaaaaatattggttttatccttgatggatatccaagaactttaaatcaattgcaattcttagaaaaaattcttaaaaagaattctttaaaattaaattatatttttaatattaatatttcttttgatacattaaaaaatagaattataaatcgctctaaagaggagggaagagaagatgataatctagatgctatcaaaataagatatgatgcatacttacaaaccacaactgaggtctcaaactattatagtttggaaaatcgtgaaattttctttgatattgacggaagtgatcaaatcgaggaaattacaaataaaattaaaaaaatcattgtaaaataat

SEQ ID NO: 251879 - DNA, 170 bp, Unknown
  Bacterial polypeptide expressing nucleotide sequence isolated from the Sargasso Sea
gatgaggatattacttttgggccccccgggtgcaggcaaaggcactcaagcacaattcattaaagaaactttagggattcctcagatttctacgggtgacatgctgcgagcggctgtaaaatccggaagtgaattaggtttgaaagtgaagcaagttatggaatcaggtt

SEQ ID NO: 251880 - DNA, 550 bp, Unknown
  Bacterial polypeptide expressing nucleotide sequence isolated from the Sargasso Sea
atgaagaaacatttactatttttaggagctcctggggctggtaaagggactcaagcggaattgctaagtcaaacttattcttacttgcacctatctaccggtgaattattaagaaaagaaatcgaaatgaattctatccttggtattgaggtaaaagatattatgaatagaggggaacttgttagtgatgaacttgtattaaagatagtaaaacaaaatttagataataataacaaaggatggattttagatggctacccaagaaatctatctcaagcaaattcattgaatgaggtcttaactgaaattaatcaacctttggacgtggttttttatctagatattccagaagaagttttaattaaacgtttgctattaagaggaagaaaagacgatactgaagagacaattaaaacaagagttgacatttacaaaaaaactacagaaccattaattcaatattttaaaaatctctcattgttagaatatattgatgctgatagagatttaaaaactatttcctctgatatcaaacaaaaaatggcttgat

SEQ ID NO: 251881 - DNA, 580 bp, Unknown
  Bacterial polypeptide expressing nucleotide sequence isolated from the Sargasso Sea
gatgaatatagttttgtttggacccccaggtgccggcaaaggaactcaagcaaagttgatatgtgaaaaatatttccttaatcatctctcaactggtgatttattaagaaaagaaagtagtaaagaaacaagtttaggtattcaaataaaaaatacaataaatgatggtaaattagtatcgaatgaaacgaccattgaattgataaagcaatttataaatgaaaacaaaaacaaaaaaaaaggattcctgtttgatggtttcccccggaataaaaaacaggctgagttactcgaccatttaatggtaagtatcgatgaaaaaatactttgtgtaattttgcttaatgttaacgaagatgtattaaaggaaagaattatgaataggagtgcaacagaaggtcgatctgatgataatttagaaacattatctaaaagacttcatacttattcttctgaaacagagcctttaattgaatactattcttcccagaatcttgtcagaaaagttcacgggacaggagaaataagtgatataaatcaaggaattagttctcatatagaggcctctttaaatgcttga

SEQ ID NO: 251882 - DNA, 574 bp, Unknown
  Bacterial polypeptide expressing nucleotide sequence isolated from the Sargasso Sea
atgaaaaatattgtattatttggaccccctggtgcaggtaaaggaacacaggctgatagaataaaaaataagtacaacttatttcatatttcaactggagatgtttttaggtttaatataagaaataacactaagcttggggttcttgctaagcagtacatggataaaggagatttggtccccgacgaggttactattcaaatgttaaataatgttgttgaaaataatttagaagttaatggatttattttcgatggattcccaagaacaaaaagccaagcaaacgcactggatgacctattgttaaaatataattcaagtatctctgcaatgattgcattagaagttgcagatgaggttcttattgaaagattattagaaaggggaaagcaaagtggaagagcagatgattcaaacaaatcaattattgaaaatcggattaaagaatattatagtaaaacagcaatcttgaaggaattttatcagaaaaaaaactgctattttggaattgacggagttgggaaaattgatgaaattactgaaagaattgtcaaagtcattaatcaactttaga

SEQ ID NO: 251883 - DNA, 124 bp, Unknown
  Bacterial polypeptide expressing nucleotide sequence isolated from the Sargasso Sea
tatgaacctaattatatttggcccaccaggagcaggtaaaggaactcaagcagattttattgtagataaatttaatctatatcaattatcaacaggtgaagttcttagaaatgaaatcaaaaat

SEQ ID NO: 251884 - DNA, 574 bp, Unknown
  Bacterial polypeptide expressing nucleotide sequence isolated from the Sargasso Sea
atgaaattaattctgtttgggcctccaggatctggaaaaggtactcaggcatctttattagcaaaaaaaattaacattcctcatctttcgacgggtgatattttaagagctaaacttaatgacaatgatgaattagctcaagaattatctaaaataatgtcaagtggaaatcttgtaccagactcagttttaaatccaatagtttcagaaaaattgttaagcaatgaatgtaaaaatggttttattttagatgggtatccaagaaatatatctcaatctgattttttgataaattttttagaaaaaaacaaaattgaattagatttaattattgatttcactgctgatactgaaactgtaaaacaaagaattcttgaaagagcaaaaattgaaaataggtcagatgataacctagatgtaataagtactagattagaaaaatattttaatgaaacacaaccactagctgatttatttaagctgaaatttactggaaagtttattgagataaatgcgatgcaagaaatatcaaaaatacagtctgaaatccaaaataggcttgaaaatgcttaat

SEQ ID NO: 251885 - DNA, 640 bp, Unknown
  Bacterial polypeptide expressing nucleotide sequence isolated from the Sargasso Sea
catggactccagtattgttctctttggaccgcctggtgcaggcaagggtacgcaggctggacgcattgtcgaagtaacagggaaaccccaggtctctacaggtgatatgctcagagcggcagttgctgcaggaactgaacttggtcgaattgccaaggggcatatggaatctggagggcttgtaccggatgatgtgatcatcggattgattgaggaacgagtcaaagaatctgatgccaaaaatggcttgctgtttgatggttttccacgcaccgttgctcaagccgaggcccttgctgaaattgccccagtttctcttgtgattgctatcgaagttgaggatgaatcaatagttggtcgtattacaggccgcttcacttgtggtgaatgtggttcagtgtatcatgatttattccggccttgtaagcttgaagggatatgcgatgaatgtgggagttctaatttcaagcgtagggccgatgattctgaggagacagttagggctagattagcagcctatcatgagcaaacatcacctctggcatcatggtatgagcaaaggggcttactccatcgaatcgatggaaatgcgtcgattgatgaggtcggttctagaatctcaaagattctcgatgaatga

SEQ ID NO: 251886 - DNA, 535 bp, Unknown
  Bacterial polypeptide expressing nucleotide sequence isolated from the Sargasso Sea
atgaatatagttatttttggacctccaggtgcaggtaaaggaactcaatcaaaatttattgtaaataaatttaatttatatcaattatctacaggtgatcttttacgtaacgaaattaaaaataaaacacaattgggatcagaaatttcttcaattataaattctggtgaactggtttcagataaaatcgttggtaatttaatagaaaaatttatttcaaatgatacttataagcataaaattatctttgatggttatccaagaactttaatacaagcaaaaaatttagataatttattaaaaaagtataaacaaaaaatagatatcgtcttaaaattatctgtaagcttagaaactgttaaaaaaagaattttggaaagacagacccaggaaaaaagagctgatgacaatgaagaaatagcaattaaaagatataaaacttatgaaaaatcatctgaaccagttatagattattacaagcaatcaaatgtactcaaagttgtaaacggagaggcaggaatatcagaaattaata

SEQ ID NO: 251887 - DNA, 646 bp, Unknown
  Bacterial polypeptide expressing nucleotide sequence isolated from the Sargasso Sea
aatgaatattatattacttgggccacctggagcgggtaaaggtactcaggcccgcttccttgtagaaaaaaggaatatgatacagctgtctacgggagatatgttaagggaagctaagaactcgggtagtgaaatgggaaacctggttgccgaagttatggcacgaggtgatttagtcacagacgagattgttatagggcttataaaagaaaaaatttctggtgaaaaaggtgggggctttattttcgatgggtttcccagaacacttaagcaggcagacgccttaggcaacctcttagaagagtgtggagaaaacctggacgttgtcgtggagatgaaggttgatgatgatgctcttgtttcgaggatctgcggccgttcgtcttgtggaaactgcggtgaagtttttcatgatgtaacaaatccatggccaacttctggaaagtgtccaaaatgctcaagcaatgaagtagttaggcgagctgatgataatgaggaaagcctacggcaacgattaatggaatattataaaaaaacttcatctcttatagggtattattatgcaaaaggtgatcatgtatctgtgaacggtcttgcctcagtggaagaagttaaaaagtcgattgctggagttttggacggataa

SEQ ID NO: 251888 - DNA, 577 bp, Unknown
  Bacterial polypeptide expressing nucleotide sequence isolated from the Sargasso Sea
tatgactaacattgttttgtttggaaaacccggagcaggtaaggggactcaagctgattttttgaagatcaaatataatttattccatatttctacaggagatctatttcgatttaatattagtaataaaacatctcttggaaatttagcaaaaacttatatagataatggtgatttagttccggataaagtcacaattgagatgctaaaagaatgtgtagaaaaaaatttcaaatcagagggatttatttttgatggttttccaagaaccatttctcaagctaaagttcttgataaatttcttcatgaaaaaaaagtttctatttcagctatgatttccttagaagttgatgaagaaattttaattaaaagactaatcgatagaggtaagatcagtggaagaacagatgacatggatgaattgaaaattaggaatcgtttcagagaatacaacatgaagacatctattcttcaagattattacaaaaaacaaagtaaattccatagtataagcggaattggttccattgaagaaattaattctcgtttgactagattaatcgatagttttttatag

SEQ ID NO: 251889 - DNA, 505 bp, Unknown
  Bacterial polypeptide expressing nucleotide sequence isolated from the Sargasso Sea
atgaacctgatgcttttaggaccgccaggcgcaggaaagggcacccaggccaaacggctggaagatgctcgtgggctaattcagctttcgaccggcgatatgttgcgcgcggcggtggcgtccggcagcgaaactggtcagaaggccagggaaatcatggaacgcggtgaactggtttccgacgaaatcatgatcgccatgatacgcgacagaatccagcagcctgactgtgtgcacgggtttatcctcgatggttttccccggaccaccgtccaagcggaagttctggacgcgatgctcgccaatatggatgttaaaattgaccacgtcatcgagatgacagtcgatgatacggcgctggttgagcgtattaccggacggtatagctgtgtaaaatgcggcgcgggctaccatgataaattccagcagccggaagctgacggggtttgcgacaagtgcggatcgaccgagttttcccggcgcgaggatgacaatgaggaaacgg

SEQ ID NO: 251890 - DNA, 532 bp, Unknown
  Bacterial polypeptide expressing nucleotide sequence isolated from the Sargasso Sea
catgaataaaattcttctattagggcctcctggcgctggaaaaggcactcaggcagaccttatttgtaaatctttagctattcctaagataagcacaggtgacatgcttcgctcagctattgcctctggaagtgaattaggaaaaaaggtaacagatattatgaactctggagccttagtttctgatcagattattattgagctgattttagataggatttctcagcctgattgtacacaaggttttctatttgatggtggcataagaacagttggtcaagcagacttatgtgttgaaaataatattgagtttagccatgttattgaaattaaagttgaagataatgtcatcgtagatagaatgtcaggaaggagggtgcatcctggctcgggtagaaattaccatcttgtctatcagcctcctaaaaaagaaggcgttgatgatataactggtgaacccttaattcagagagatgatgacatgcctgaaacagttatgcatcgtttaaaagtttatcaaaatgagaccaaa

SEQ ID NO: 251891 - DNA, 658 bp, Unknown
  Bacterial polypeptide expressing nucleotide sequence isolated from the Sargasso Sea
ccaggggcgggtaaagggacgcaggcaaactttttaaagacggctttagccataccacaaattgcatctggggatatgcttcgagctgcgatggaatctggtagtgctttgggcaaggagattcgggcaaccatggatagtggttctttggtttcagatgctattattatcgagttgattaaagcgcgcattgccgaaccagactgtaaggatggttttttattagatggttttccgcgtacggttgagcaggctaagtctttgcgtgatgcgggtgtttttgttgattatgttgttgaaattcgggtacatgaagaaggtattgttgagcggatggctgggcgatggattcatcgtgcatcgggtcgggtgtatcacagtgtttttaatccacccaaggtgcctttttttgatgatgaaactggtgaagctttggtgcagcgtagtgatgataatgcagacacggtgcgacatcgtttacatgtttatgagaagcagactttaccggttatagagtattattctgatttaattcacatgggtgaaaagtgtgcgccgcgttatgtgagcattaatggcatggaatcggtagaggaagtcagaacgcatatttttaaagccatcaagcaaaccgcgcttttagagcaatttgcataga

SEQ ID NO: 251892 - DNA, 386 bp, Unknown
  Bacterial polypeptide expressing nucleotide sequence isolated from the Sargasso Sea
tttgtttggtcccccaggtgcaggcaaaggtacacaagctcaaattattgtaaataaatttaatttatttcaagtttcaactggtaaaatgttgagagaagaaataaataaagacactgaaattggtaaaaaaatcataaataatatgaatgatgggaaatttgttgaagacgaaatagttaacaaacttcttgaaaaaataatagttgatacaaaaaaaatgaataaactaatttttgatggatatccccgaactataaaccaagccaaaaatttagaaatcttactaaaaaagtctaatcaaaaaattgaatatgtattttttcttaatgtaaataaggatgcaatagtaaaacgtatagagagaagaaaaattttagaaaaaa

SEQ ID NO: 251893 - DNA, 220 bp, Unknown
  Bacterial polypeptide expressing nucleotide sequence isolated from the Sargasso Sea
ttgtataacataattttttttggccctcctggagcaggaaagggaactcaagctaaaattatatctgattttttaaaaatatcacatctttctactggggatatattaagaaaaaaattattggataacgataatcttgcactagagttaaaacaaattatgtcatctggtaatttggtatcagatgaaaatttgaataccattgtagcttcaaaataaa

SEQ ID NO: 251894 - DNA, 571 bp, Unknown
  Bacterial polypeptide expressing nucleotide sequence isolated from the Sargasso Sea
atgattttaattttttttggtcctcctggagcaggaaaaggaacccaagcttttttcatagcaaaaaaatttaatattcctcatttatcaacaggagatattttaagaggaaagttgtttgacaaagacgaactttcaaaaaaattaaaaagaattatagatagtggaaatttagtttctgatgaagttttaaatgaaattattgctaatagattagctttaacagattgtaaaaaaggttttattctagatggttatccaagaactattgctcaaaaagattttttagaaaattatttaaaattaaataatttacaaattttaagcatctttgatttaaaattagatgaaagtataataattgaaagaattaaatcacgatctaatattgaacaaagaggagatgataaattatcaattataaaaactcgtataaaaaaatatctcaaagagacagctcccttatctgaatattatagagctaaatatcctgaaaactactattcaattgatgcggatcgggaagtagaaaagatcaaagaagagttgctaaaaatactaaaaaaataag

SEQ ID NO: 251895 - DNA, 148 bp, Unknown
  Bacterial polypeptide expressing nucleotide sequence isolated from the Sargasso Sea
aatgataattattttttttggaccacctggttcaggaaaaggaacgcaagcttctttgttggctaaaaaatttaaaattcctcatatttcaacaggtgatatattaagaaagaagataaaagaaaatgatgatctttcaaaagattta

SEQ ID NO: 251896 - DNA, 553 bp, Unknown
  Bacterial polypeptide expressing nucleotide sequence isolated from the Sargasso Sea
ttgtataatattattttttttggccctcctggagcaggaaaagggacacaagctaaaataatttcacaatacttacacatttctcatctttcaacaggtgatatattaagaaaaaaattacttgatgatgatgatctagcttttgaattaaaaaaaattatgtcatcaggtaacttagtttcagatgaaattttaaattctatagtttcttcaagattaataaatgaatcaaataaaggatttatcttagatggttatcccagaacgttaaaacaatcagaatttcttaataaatttctattagattcatcaaatgaaataaactacatttttaatattcacataaatttcgaaattttaagagacagaatattaaaaagatctaaagaggaaagcagagatgatgataacatagatgttattgaaactagatataacgaatatatcaattccacacaaaaagtatccaatttctataaagataaaaatccagaatcattttatgaattagatggttcattacaaattgaagaaataactaaaaaaatcaaag

SEQ ID NO: 251897 - DNA, 186 bp, Unknown
  Bacterial polypeptide expressing nucleotide sequence isolated from the Sargasso Sea
tttgtttggacctcctggtgctggaaaaggtacacaagcaaaaaatttagaaaaaaaattaaataattatcaagtatcaactggcgatatgttgagagatgaaattaaaaaagactcagaaattggaaaaaaaataataaattacatgaatgacggtaagtttgttgatgatactattgtaaacaa

SEQ ID NO: 251898 - DNA, 574 bp, Unknown
  Bacterial polypeptide expressing nucleotide sequence isolated from the Sargasso Sea
tatgaacatagttatttttggacctccaggcgcaggtaaaggaactcaatcaaaatttatagttaataaatttaatttatatcaattgtcaactggtgatcttttacgtaatgaaattaaaaataaaacaaatttaggatctaaaatttcatctatcataaattcaggagaattagtttcagacaaaatagttagtaatttgatagaaaaatttatttcaaataacatttataaaaatcaaattatttttgatggttacccaagaactttaacccaagcaaagaatttggatgatttattaaaaaaatataaacaaaaaattgatattgtcttaaaattatctgtaagtttagagacagtgaaaaaaagaatttctgaaagacaagtccaggaaaaaagggctgatgataatgaagaaatagcaattaaaagatataaaacttatgaaatttcatctgaaccagttataaattattataagcaatcaaatttacttaaagttgtaaacggtgaggcaggaatatccgaaattaatagtgaaattagcgcgttaattgacactatcaagggttga

SEQ ID NO: 251899 - DNA, 319 bp, Unknown
  Bacterial polypeptide expressing nucleotide sequence isolated from the Sargasso Sea
aatgaaaaatattattttattaggtcctcccggtgctggtaaaggaacacaagctgatttgatctgtaacttattagaaattccaaaaattagtactggagatatgctaagagaagccgttgcatcaggaagtgaactgggagccaaagttagtgatattttagattcaggcgcattagtttcagacgagataataggatctcttatcaacgcaaggttatctatgccagattgccaaaaaggctcattatttgatggcgttccaagaacacttggacaagcatcaattttaaatgagatgaacataaacttttcggat

SEQ ID NO: 251900 - DNA, 619 bp, Unknown
  Bacterial polypeptide expressing nucleotide sequence isolated from the Sargasso Sea
gctgggaatgcctggttctggtaaaggcactcaatctgaaatacttaaacaaaaattctccatcgccaatatttcaactggagctattttaagacaggccagtagagaacaaggaaaacaagcagaactaattagatcatttattgataaggggcaattagtaccagataaaattattattcaaatgcttgtaaatagaattcaccaaaaggattgttctaaaggatatattcttgacggctttccaagaaatttagcacagggtgaatccctagataatacaggaattaaggttgatttcgtaatttacttagaaatatctgaacaggcaataatatctagaatggccggaagaagaatacacccagcatctgggagaagttatcatttgcaacataatcctcctcaaaaagatggtcttgatgatataagtggagaaccacttatccaaagggatgacgatactccagaagtaataaagaaaagagttgcaagttttaacaaggaaacaagaccacttttagaattttataaaactaaaaaggttaaattcgtggaggtagacgcctcaaaggaactaaatgatgtaagctgttcaatcttagggcaaataaattga

SEQ ID NO: 251901 - DNA, 574 bp, Unknown
  Bacterial polypeptide expressing nucleotide sequence isolated from the Sargasso Sea
atgaacatagttatttttggaccaccaggtgctggaaaaggcactcaatcaaaatttattgttaataaatttaatctatatcaattatcaacaggcgaccttctacgtaacgaaatcaaaaataaaacaaaattaggatctgaaatttcatcaatcataaattcaggtgaattagtttcagataaaatagttagtaatttgatagaaaaattcatttcaaacgataattataaaaataaaattatctttgatggatatccaagaaccttaattcaagcaaagaatttagatgatttattaaaaaaatataaacaaaaaatagatattgttttaaaattgtctgtaggattagaaacagttaaaaaaagaatttctgaaagacaggcacaagaaaaaagaactgatgataatgaagaaatagcgattaaaagatacaaaacttatgagaaatcatctgagcctgttatagattattacaagcaatctaatttactgaaagttgtaaacggtgaggctggaatatctgaaattaatagtgaaattagggggttaattgacgctatcaagggttgac

SEQ ID NO: 251902 - DNA, 532 bp, Unknown
  Bacterial polypeptide expressing nucleotide sequence isolated from the Sargasso Sea
attgtttggtccaccaggtgctggtaaaggaactcaagctaagtatctagtaaaaaaactcaatggatttcaaatttcaactggtgatattttaagggaagaaataaaaaaagacaccgaaattggaagaaaaattattaataatatgaacgaaggaaaatttgtaagtgatgaaattgttaataatcttttaaaaaaatatgtctttgaccaaaacaaaaaagaaaaattaatatttgatggttaccctagatccttaagccaagctaaaaatttagatttattattaaatgggtcaaatcagaaaatagatcacattttttttttaaatgtaaataaagaaacaatcatagagagaataaaaaaaagaaaaataatagaaaaaagatccgacgatgatttagacacgatcttaaaaagatatgacacttatatagaaacgacaagaccagtattagattactattctaaaaattcaaattttcatgagattgatggatcaatggaaattaccaaattaccagcaaaatag

SEQ ID NO: 251903 - DNA, 553 bp, Unknown
  Bacterial polypeptide expressing nucleotide sequence isolated from the Sargasso Sea
ttgttcggtcctcctggtgctggtaaaggaactcaggccaaatatctagtaaaaaagatcaatggttatcaaatttcaacaggagatatgttgagagatgaaattaagaaaaattctgagattggtcaaaatataattcatgatatgaatgatggcaaatttataagtgacgaaattgtaaacaaactgataaggacttttgtatttgatactaaaaaaaaaaataaattaatatttgatggataccctagaacattaagtcaggctaaaaatttagacacattgttagatgagtcaaatcaatatattgattatattttctatctgaatgtcaataaagacacaatcatagaaagaattcaaaaaagaaaaacagaagaaaatagatctgacgatgaattagatactattcttaaaagatatgacacttatatggaaacaactaaaccggtcttaaatttctactcaaaaaatccaaattttcatgagattgatggatctcaaaaaattgacgaaataactagtaaaatagacacttttatcaatgtataag

SEQ ID NO: 251904 - DNA, 640 bp, Unknown
  Bacterial polypeptide expressing nucleotide sequence isolated from the Sargasso Sea
actgtttggaccacctggggcaggaaaaggaactcaagcaaataacttagtaaacgaatataatctttataaagtttctactggtgatcttttaagagaagagataaaaaataaaactcctttaggaactaaaattcaatcaattatagacaaaggttcatttgtatctgataatacaataaacgatttaatccataatattttatctaataataagctgaataatagacttatatttgatggctatccaagaaatttacttcaagctaaagatctagatgcttttattaaaaataataatttaaaaatttcttgtgtcttaagcttaaatgtagataaagatttaataattaaaagaattttaggtcgtcaaacttgtgctaaatgtgggttaatatttaatgaatttttttatccagctaacaaaaataatcacaaatgtgatgaaaaatttttaattaaaagatctgatgacaatgaaaaaactattactaacaggtataatgcttacactcaaaaaactttacctatattagatttttacaaacaacaaaaattacttcatgaaattaatggaactgcggaaattagccaaatatttgaggaaatacgaggtattatagcttctttagatacttga

SEQ ID NO: 251905 - DNA, 136 bp, Unknown
  Bacterial polypeptide expressing nucleotide sequence isolated from the Sargasso Sea
tatgaatataataatttttggaccaccaggtgctggtaaaggtactcaatcaaaatttattgtaaaaaaatttaaactataccaattatccacaggcgatcttttacgaaacgaaattaatacaaaacaaaattag

SEQ ID NO: 251906 - DNA, 535 bp, Unknown
  Bacterial polypeptide expressing nucleotide sequence isolated from the Sargasso Sea
ttgaacgttattatttttggtccaccaggcgcaggaaaaggcactcaatctcattatatatctaaaaaatataacttgtatcagttgtctactggtgacttattaagaaatgaaataaaaaataaaactgaaattggtcaagaaattgagcacataatatcacgtggtgattttgctacagatgatgttgttaatagacttttaaaaaaaataattacatcaaacgaatatagaaataggattatttttgatggttatccaagaaatataagccaggcacaaaatttagaattaatattaaattctgataatcaatcaattcaatttattttatttttaaaagtatccagaaatattatagaagaaagaattttaggcagaattacatgcagcaagtgcaataaaacatttaatgaatttaatttagatgatgaaataaagttacattcttgtggcaaagaatatttacaaaagagaaaagatgataataaagactcaatactaaatagatatgaagaatatatgaaaaaaacta

SEQ ID NO: 251907 - DNA, 643 bp, Unknown
  Bacterial polypeptide expressing nucleotide sequence isolated from the Sargasso Sea
atgaatatactttttttaggggcgcctggttcaggaaaaggaactcaatcaaaaaacattgaagagaaatttaatattcctcagatatctactggagatttactgcgagctgagacagcatctgaatcaaaaatggggcaggagctaaaaaatattatgtcatcaggaaagtttgtgagtgatgacatagtacttaagttggtttccaagaaaatcacttccaatgactgcaaaaatggctttatacttgatggatttccaagaaatttagcacaagcctctagcttagatagtttactgagtaccctaaacctttcattagagtatgtttttcttatagacgttccagctgatttgataatcaaaaggtgcgttgggcgaataacctgcaacacatgtggaaaaattgaaaatgagtatttttcagagtttagggagggagataaatgtggtgaaggtatttttgttaaaagggcggatgatgacgaagaaactgtctcaaatcgtctcaaagtctatgcagagcaaactgaaccaatcatcgacttctacgaagaaaaaggtgtcctccataggataattggcggtgaagatggccctcagaggctaactgacgaaattatttcaatcataaaaaattgat

SEQ ID NO: 251908 - DNA, 205 bp, Unknown
  Bacterial polypeptide expressing nucleotide sequence isolated from the Sargasso Sea
aatgaatatagtaatttttggcccaccaggtgcaggcaaaggaacccaatcaaaatatatagtagataaatataagttataccaactatcaaccggtgatttgttgcggaatgaaacaagaaataaaacaaaattaggtttaaaaatatcatcaattattaattctggtgaacttgtttctgacaaaattgtaggggatctgata

SEQ ID NO: 251909 - DNA, 546 bp, Unknown
  Bacterial polypeptide expressing nucleotide sequence isolated from the Sargasso Sea
catgcgtatcattctgctcggccctcccggtgccggcaaaggaacccaggcgaatcatctgattcgtgattttggactggttcagctttcaaccggggacatgctccgggcagcggtcaagtccggttcgaaaatcggcaagaaagccaaagcggtgatggatgccggggagttggtttcagacgaaatcgtggtcggcatcgtcgaggaacggatcaaagaacccgattgtgaaaaaggcttcctgctcgatgggtttcccaggaatattgtccaggcggaaaaactggatgaaatgctccaacgcagtggtcaaaagatcgactgtgtactggagatcaaagtcgatgaagaggcggtggtgcggcgcatcgccggacgccgatttcatctggccagcggccgcagttaccacatcgagttcaatccgcctaaagttgccgaccgagacgacgataccggcgaggaactggttcagcgggacgatgacaacgaggaaacagttcgtgcacggctcaatacctacaacgaacagaccgcaccgct

SEQ ID NO: 251910 - DNA, 637 bp, Unknown
  Bacterial polypeptide expressing nucleotide sequence isolated from the Sargasso Sea
atgaataatattattttattaggtcctcctggagcaggtaaaggtactcaagcagatttgatatgcgatttgtgtgatattccgaaaatcagtactggcgatatgcttagagaggctgttgcatcaggcagtgacctaggcgcaagggtttcagagattcttgattctggtggtttagtctctgatgatattattggctctttaattcaagaaaggcttcaaaaaccagattgtgaaaatggatctctgtttgacggcgttccaagaacaataggacaagctgaacagctttctgacatgaaaattaactttacacatgtaattgaaatttttgtagaggatgaaattattgttaaaagaatgtctggtagaagagtccatcctgcatcgggaagaaattatcacattgatcataatccaccaaaaaatagcggattagatgatgaaacaggtgagccactagttcaacgagaggatgataagcctgatacagtcctaaagagattggatgtatatcacgaacaaacaaaacctcttacaactttttataaaggtcaaagcgactctggactattaaaattcataaaagtggatggttctaattctgtaaataaagtttttagagcaatatcatctc

SEQ ID NO: 251911 - DNA, 250 bp, Unknown
  Bacterial polypeptide expressing nucleotide sequence isolated from the Sargasso Sea
atgaataaaattcttctattagggccgcctggtgctggaaaaggcactcaggcagaccttatttgtaaatctttagctattccaaagataagtacaggtgacatgcttcgctctgccattgcctctagaagtgaattagggaaaaaggtaacagatattatgaactctggagccttagtttctgatcagataattattgagctgattttagataggatttctcagcctgattgcactcaaggttttctat

SEQ ID NO: 251912 - DNA, 478 bp, Unknown
  Bacterial polypeptide expressing nucleotide sequence isolated from the Sargasso Sea
ttgtttggaccgcctggtgctggtaaaggtactcaagccaaatatttagtaaaaaaattaaactcctttcagatctcaactggtgaacttttaagagaagaaatatataaaaattcagctattggtaagacaattaccaatgacatgaaaaatggtaaatttgtaagcgataaaatagtaaataagctaattgaaaatttagtttttgaccctcaaaaaaaaaatagattaatatttgatggataccccagatctttgagccaagcaaaaaatttagatattttactagagtcgtcaaatcaaaagatagatttaatattgtaccttaaagttgataaagatgcggtagtaaaaagactggaaaagagaaaaattattgaaaatagatcggatgatgaaacaagcactatactaaaacgttttgacacatacatgaacataacagcgccagtactgaattactactctgagaatccta

SEQ ID NO: 251913 - DNA, 652 bp, Unknown
  Bacterial polypeptide expressing nucleotide sequence isolated from the Sargasso Sea
catgaataccttcatactattaggaccacctggtgcaggaaagggcactcaagcagatcttatttcagctgatttaggtatcccaaaaataagtactggcgatatgttgcgatctgctgtggcctctaaaagtgatttaggtaatagagttgaagatattcttaactctggcaagctcgtctcagatgatattattattgaattaatcaatgatcgaatcaatcagtcggactgtaagtctggttacttattcgatggagtgccaagaactctggggcaagccaatctttttcttaagaatgatatagaggttaaaaaggtaatagatatatcacttgatgatgaattaattattaaaaggatgtcaggcagaagatttcatatagcatctggtagaagctatcatattgaatttaatccaccaaaagccgaaggcttagatgacgatacaggagaaccattaattcaaagagaggatgatttccctgagaccgttaaaaaaaggcttgaggtttatcatgctcaaacaaaaccattaacagatttctacaaatcaaaggctttagagggcattatgagttttatttctattaacggtaatcaatcagttgatgaagtttttagtgaaataaagtcttatttatataaatga

SEQ ID NO: 251914 - DNA, 649 bp, Unknown
  Bacterial polypeptide expressing nucleotide sequence isolated from the Sargasso Sea
tatgaagattatacttttaggacctcctggtgcaggaaaaggaacccaagcagagacattatgtgaagcttttaatattcctcatatatcaacaggaaatatgctcagagaggccgttgatgaggagacggaacttggtctggaggctaaagctttaatggatgcaggtattttagtttctgatgaagttatagttgggcttgttgaagataggatatcaaaaggagattgtaagaatgggtttttgtttgatggatttcctagaaccattccccaagcacaggctttgatagatagagacattccaatagacgctgtgattgagatacatgtacctgatcaagacattatagaaagaatgtctggaagaaggatgcatccaggatcaggtagaaattaccatgtaatttataaccctccaaagatcgatggcaaagatgacttaactggagaggatttagttcaaagggaggacgatgaaccgaaaacagtaaaagatagacttaaggtttatgaagatcagacggcaccattaattgatttttattcagaaatgtctaaacaagaaaaattaaaatacattaaagtttctggaacttctgcgcctgaagaagtttcctctgagattttaagcatgttgaacatttga

SEQ ID NO: 251915 - DNA, 658 bp, Unknown
  Bacterial polypeptide expressing nucleotide sequence isolated from the Sargasso Sea
tatgcgtgtcatcctgcttggtgcccccggtgcgggcaagggcacccaggcgcagttcatcaaggaacagttcaatattcctcagatttccaccggtgacatgctgcgcgctgcggtaaaagcaggcactcccttgggcctggaagctaaaaaagtgatggatgcgggtggtctcgtttccgacgatattatccttggtctagtgaaagaacgtattacggaaaatgattgtgccaacgggttcctgttcgatggcttcccacgcactatcccacaggcgcaatcgctagttgagcagggcgttgatatcgattttgtagtggagatcgatgtcgatgatgaagaaattattgaacgtttgagcgggcgtcgtgttcacccggcctccggtcgtgtgtatcacaccaagtacaatccgccaaaagttgaaggcaaagacgatgaaaccggtgatgagctggttcagcgcgatgacgatcaagaagagacggtgcgtaagcggctagaggtttaccaagcgcagacacgtcctctggtggacttctaccaggatctggctaaacagggagaagctaacgccccacgttatgtgcgtgttgccggcgttggctccgtggacgatatccgcgatcgagtactgtctgctcttaaaggctga

SEQ ID NO: 251916 - DNA, 646 bp, Unknown
  Bacterial polypeptide expressing nucleotide sequence isolated from the Sargasso Sea
catgaataaaatacttctattaggaccgcctggtgccggaaaaggcactcaagcagaccttatttgtaaatcattagctattcctaaaataagtactggtgacatgcttcgatcatccatcgcctctgaaagtgaattaggcaaaaaggtaacaaatattatgaactctggagccttagtttctgatcagataattattgagttaattttagatcgaatttctcagtctgattgtaatcaaggctttctatttgatggtggaataagaacagtaggccaagcagatttatgtgtcgaaaacaatattgagtttagtcatgtcattgaaattaaagtcgaagacaatgtcatcgttgatagaatgtcaggaaggagggtgcatcctggttcaggtagaaattatcaccttgtctatcaaccacctaaaatagagggtgttgatgatattactggggagcctcttatacagagagatgatgatatgcccgaaacagttatgcatcgcttagaagtctatcaaaatgagactaaacctcttgttgcgtattataaatcacttgaaagcaagagttcacttaaatatgttgccgtagatggctctcaagcagttgagaaagtatttgaggatatcgaacgttctttttag

SEQ ID NO: 251917 - DNA, 523 bp, Unknown
  Bacterial polypeptide expressing nucleotide sequence isolated from the Sargasso Sea
atgaaaataatacttttagggcctccaggagctggtaaaggtactcaagcagagtcaatttgtgaaaattatggcataccacatatatccacaggaaacatgcttagagaagcggtagaagcaggaacaaaactaggtttggaagctaagtcactaatggatgcaggcatcttagtttctgatgatgtaattgtaggtttggttgaagagagaatctccgcagatgattgttctgaaggttttttatttgatggttttccaagaactattccacaagccgaggcgcttattgaaagagatataaatatcgatgccgttgtagagattgatgtccctgatcaagacataattgatcggatggcaggcagaagaatgcatcctgcctcaggaagaaattatcacatcattttcaatccacctaaaaatgaaggtaaagatgatattactggtgaagatttaatcctaagagaagatgataaacctgaaacggtaaaagatagattaaaggtatatgcagatcaga

SEQ ID NO: 251918 - DNA, 610 bp, Unknown
  Bacterial polypeptide expressing nucleotide sequence isolated from the Sargasso Sea
aatgaagaatattattttattagggcccccaggagctggaaaaggaactcaagcagatttgatatgcgatttatttgatattccaaagattagtaccggcgatatgcttagagaagctgttgcatctgggagtgagttaggcattaaagtatcagaaattcttgatagcggagctttagtatctgatgaaatcataggatcattgatagaagataggcttacgaaacctgattgtgtaaatggttctttgtttgatggagtcccaagaactattggacaggctgagcaacttgcagcaatgggtatagattttacgcatgttatagaaattcaagtcgcagatgaaaccattgttaataggatgtctggcagaagggtgcatccaggatctggtaaaaattatcatatcgagttcaatcctccaatgaatgagggaatagatgatgatactggcgaaccactcattcaaagggaagatgataagcctgaaacagtattaaagcgtttaaacgtttatcaggaacaaaccaaacccctgacagatttttatatgaatctagcaaatagcgggactttaaaatttattaaagtagatgggtctgactcagta

SEQ ID NO: 251919 - DNA, 634 bp, Unknown
  Bacterial polypeptide expressing nucleotide sequence isolated from the Sargasso Sea
aatgaatctaatattattaggcatgcccggtgcgggaaagggcacacaagctgatttgatcaaaaataaatttcatataccaactatatctacaggcgccatcctaagagaagtaagcaactcaaattcaccactcgctaagaaagtaagaggatttcttgacgctggcacattagttcctgatgaaattatcgtggagatgcttgtgcaaagagtagaggaagatgattgtaaagacggcttcatactagacggttttccaagaaatctcgatcaggctaaagctcttgaaaacgcaggcattgcaataagtaatgttatctttttgaagatttcagaatctgagattatttcgagaatgtctggtagaagagttcacctcccttcaggaaggtcttatcatattgtgcataatcctccaaaaaatgagggaagagatgatgaaactggagaagagttagtgcttagagatgacgataaacctgaagtcataaaaaaaagattggaagtatattttcaagagactgagcctttattagatttctacatcaaaagtgaaattatatttgatgaggttgatgcatctaaaagtgttgaagacttaactaacgaaatttttaaaatattaacttga

SEQ ID NO: 251920 - DNA, 646 bp, Unknown
  Bacterial polypeptide expressing nucleotide sequence isolated from the Sargasso Sea
aatgaataccttcatattgttaggaccaccgggagcaggtaagggcactcaagcagatcttatttcagctcatttaggcattccaaaaataagcactggtgatatgttgcgctctgctgtggcctcaaaaagtgatttaggtaatagagttgaagatattcttaactcgggcaagctcgtctcagatgatattattatcgaattaataaatgaccgcatccatcagtcagattgtaagtccggttacttattcgatggtgtaccaagaactcttggacaagccaatctttttttacagaatgatatagaagtaaaaaaggtaatagatatatcacttgatgatgaattaattattaaaaggatgtcaggtaggagatttcatatagcatctggtagaagctatcatattgaatttaatccaccaaaagcagaagacttagatgacgaaacaggagaaccattaattcaaagagaagatgattttcctgagaccgttaaaaaaaggcttgaggtttattatgcccaaactaaaccattaactgatttttacaaatcaaaagcttcagagggcattatgagttttatttctattaacggcaatcagtcagttgatgaagtttttagtgaaattaaatcttttttataa

SEQ ID NO: 251921 - DNA, 625 bp, Unknown
  Bacterial polypeptide expressing nucleotide sequence isolated from the Sargasso Sea
atgacaggctcaattgtgctgttcggacctcccggagcaggaaaggggactcaggcggataagatagtagaattgaccggtaagccacaggtttcaaccggggatatgcttagattggctctttccaatgagacggaactcggtttagaggcgaagaaatatatggagtcaggacaactagtaccagataacgtgattattggactaattaaagacagaatgaatgaatcagatgctagcaatggggtcttattcgatgggtttccgaggactattcctcaagcagaggcccttgaatcaataactgaggtatcgacagttatctccatagaggttccagatgaagatatagttaacaggattgtaggaaggaggatggaccctgaaactggcgaaatctaccatgtcagtttcaaaacccctcctcctgaaatcgcacaccgccttatccagagaaaggacgacaatgaggaaacagtgaggatgcggctatcatcataccacgagcaaacaaagccacttggcgattggtaccttgaaaaaggaatcctatacgccgtagaagggacagggtccattgacgaagtggcacgatccatttctaagatattgacatatctttgag

SEQ ID NO: 251922 - DNA, 643 bp, Unknown
  Bacterial polypeptide expressing nucleotide sequence isolated from the Sargasso Sea
atgaggttaattttgatgggagctcccggttctgggaaggggactcaggcagaaaagctcatggatgactttggttgtcgccaaatatcgacaggtgtattactcagacaagccatagaatccggttctgatcttggcaaaaaggtacaaaagatcatgtctgagggtttgcttgtttctgacgatattgttttggatttaatcaagaatgagttatccgaaataggtgagggtggattccttttagatgggtatccaagaaacatcaatcaagcaaaatcattgaatgatctacttgaaaatatagataaaccattggattacagcatattgattgatgtaccgagtgaaattttaattaaaagactgtctggaagaaggacatgctcattaacaggcaagactttgaatatttacttttcctcagaaaatgaaatagatgaatgcctttctaaaggtggtgaattgctacagcgagaggatgataacaaggagtcaattacgaaaagaattgaagtatacgaagagcagacagagccgatggttaatttttatagatcaacagggcttcttcatacaattgatggtcaaggttctgttgatgatgtttatattaggctaaagcaactgatggaattatgaa

SEQ ID NO: 251923 - DNA, 496 bp, Unknown
  Bacterial polypeptide expressing nucleotide sequence isolated from the Sargasso Sea
tatgaaaataatacttttagggcctccaggagcaggtaaagggactcaagcagagtcgatttgtcaaaattatgctattccacacatatccacaggaaacatgctcagagaagcggtagaagcaggaacaaaacttggattagaagctaagtccctgatggatgctggcatcttagtttctgacgaaataattgtggggcttgtggaagaaagaatctcagaagatgattgttctgaaggttttttatttgatggttttcctaggactatcccacaagcagaagcacttattgatcgagatatagagattaatgctgttgtagagattgatgttccagaccaagacataattgatcgaatggcaggtagaagaatgcatcccgcttcaggaagaaattatcacatcattttcaatccacctaaaaaagaaggtaaggatgatattacgggcgaagatctaattctaagagaagatgataaacctgaaacggtaaga

SEQ ID NO: 251924 - DNA, 493 bp, Unknown
  Bacterial polypeptide expressing nucleotide sequence isolated from the Sargasso Sea
atgaatcttatattgttaggtccgccaggagcaggtaagggaactcagtcggcaaggatagtaacagtttataacttagttcagatatctactggagatatattgagagcagaggtaaaatcaagtacggagttaggtaaaatagctaaatcacttatggatgatggaaaacttgtccccgataatttaataattgatatgatttctggttatatagagaaagaagccgggtccagcggattcatattagatggttttcctagaacggaagaacaagctaaggcacttgatgttatgctacttgagaaggatttaaagatagattatgtgatcaaattagaagttgatgaaaaagctttgattgagagagtagtaggtagattttcttgtggggattgcggtcagggttatcatgataaatttgcacccaccaagttggataatatctgcgatgtttgtggcagtaaaaactttgtaagaagggcggatgata

SEQ ID NO: 251925 - DNA, 640 bp, Unknown
  Bacterial polypeptide expressing nucleotide sequence isolated from the Sargasso Sea
atgagaatagtcatgctcggcgctccgggatctgggaagggaactcaagctaaaaaactgatgaatgacaaaaggatttctcatatatcaacaggtgatatgcttcgttcagctgttgaagagggaactcatcttggattagaagctaaagatgttatggaatcaggaaagcttgtttcagataatttaatgattggcttgattaaagaatgcttatcatcaaaagaattagaaaatggttttatattggacggatttccaagaacaaccaaacaagcaattgatttaaaagatttgttggaagacatgaatatgcctttagactcagcgttattgatggatgtggacttcgagatacttatgaaacgtctcgttggaagaagaacatgttcagttacaggaaaactcctaaatgtatatttttctagtccagaggagttagaggagtgtgaaaatctcggcggagaactaattaaaagagaagatgacaatgaacacacaataagaaacagattagatgtctacaaagaaaagacagaaccattaatcagttattatgaaaatgaaaatcttttaaagagagtcaatgctgaaggttcaatggaggaggtctacaggggattattagctgcaatttaga

SEQ ID NO: 251926 - DNA, 664 bp, Unknown
  Bacterial polypeptide expressing nucleotide sequence isolated from the Sargasso Sea
atgcgtttgatcctgttgggcgcgcccggcgcgggaaagggcacccaggcaaacttcatcaaggaaaaattcggcatcccgcaaatctcgacgggcgacatgctgcgcgcggccgtgaaggccggcacgccgctcggcgtcgaggcgaagggctacatggacgccggcaagctcgtgccggacgcgctgatcatcggcctcgtcaaggagcgcctgaaggaatccgactgcgcgaacggctatctgttcgacggtttcccgcgcacgatcgcgcaggctgacgccatgaaggaagccggcgtcgcgatcgactacgtgctcgagatcgatgtgccgttctcggaaatcatcgagcgcatgagcggccgccgcacgcacccggcatcgggccgcacgtaccacgtcaagttcaacccgccgaaggtcgaaggccatgacgacgtgacgggcgagccgctgatccagcgcgacgacgacaaggaagaaaccgtcaagaagcgtctcgaagtgtacgaagcgcagaccaagccgctgatcacgtactacggcgactgggcgcagcgcggcgaggaaaacggcctgaaggcgccgcagtatcgcaagatctcgggcctcggcagcgtcgaggaaatccgcgagcgcgcgtttggcgcactgaagtaag

SEQ ID NO: 251927 - DNA, 643 bp, Unknown
  Bacterial polypeptide expressing nucleotide sequence isolated from the Sargasso Sea
atgaatatactttttttaggagcacctggctcagggaaaggaactcaatcaaaaaatattgaagaaaaattcagtattcctcagatatctacaggtgatttacttcgagccgagacagcatcggaatcaaagatggggcaggaactaaaaaaaattatgtcatcaggcaaatttgtgagtgatgatatcgtactgaaattagtttcaaaaaaaattacctccgaggattgcaaaaatggtttcatactcgatggattccccagaaacttatctcaagcctctagtttagatagcttactgaataacctaaacctctccatcgaatatgtctttctaatagacgttccgaccgatttgataattaaaagatgtgttgggcgaataacttgcaatacatgcgggaaaatagaaaatgagtatttttcagatttcagggagggggataagtgcggagagggtgtttttgttaaaagggctgatgataacgaggaaactgtcacaaatcgtctcaaagtctatgcagagcagactgaaccaattatagacttttataggggaaaaggtatccttcatagaataatcggtggtgaagatggccctcaaaggctcactgacgagattatctcaatcataaaaaagtgat

SEQ ID NO: 251928 - DNA, 643 bp, Unknown
  Bacterial polypeptide expressing nucleotide sequence isolated from the Sargasso Sea
gatgaaaattctatttttaggtgcgcctggttgtggtaaaggaacgcaatcaaaaaaaattataaaaaaatataatataccgcagatatctactggtgatttacttcgagaggaaattaaatctggaagcgcaataggcgaagaaattaaaaacataatgtcgactggacaatttgtaaatgatgatttagttgtttcattagtttcgaaaaaaatagattctcaggagtgtgaaaatggttttattttagatggttttcctagaaatatcagtcaagccaacaatttggacagaatgtttgaagaaaaaaatctctgtcttgatcatgtaatattaattgatgtccctgatgaagatctagttgcgagatgcacgggtagactactttgtgatacttgtgattatattggaaatacagataagggagaaaaagttggtgataagtgtccggtagccgaagggacgctatatcagagagatgatgataaagaggaaactgtgagaaatagattaaaagtttatcatgaacaaacatctccaataatcgatttctatgaaaaaaaaggaattttaaagaaattcgttggtggtaatgaccctgacgctttagccagtaaaattgaagctgtactaattgcttag

SEQ ID NO: 251929 - DNA, 577 bp, Unknown
  Bacterial polypeptide expressing nucleotide sequence isolated from the Sargasso Sea
atgttgaatattgtcatttttggtaagccaggttcaggtaagggcacacaagcctctctagtaaaagataattatgatcttgttcatatttcaacaggagatgtttttagaaagaatacatcacaaggtacagagctaggtaaagttgctgttcagttcatgagtaaaggtgagttggtccctgatgaaattactatttctatgttaaaagacgaaattaaaagtttcatgccatgtaatggatttatatttgacggttttcctagaactattttgcaagctgaatcactagatgatctcttaaaaagtatggaattaaaaattgatttagttgttgctttagatgttgataataaaaaattaattgaaagattactaaaaagagggaagaccagcgggaggagtgatgatcaaagtgaagaaaaaataaataaaaggttagaagaatatgataataaaactaaaccactaattaatttttataaaattcaagaaaaatttatttcaattaatggagttggagagtttaatgaagtaacaaacagattaatttcaaccatagattcaaagatttaaa

SEQ ID NO: 251930 - DNA, 550 bp, Unknown
  Bacterial polypeptide expressing nucleotide sequence isolated from the Sargasso Sea
aatgaagaaacatatactatttttaggtgctcctggagcagggaaagggactcaagcggaattgcttagtcaaacttattcttatttacacctttctactggtgaattattaagaaaagaaatcgaaatgaatactgcccttggtattcaggtaaaggatattatgaatcgaggggaacttgttagtgatgaactcgtattaaagatagtaagacaaaatttacttaaggataacaaaggttggattctagatggttacccaagaaatttatcacaagcaaattcattgaatgaagtcttaaataaaataaatcaacctttggaattagttttttatttagatatccctgaagaagtactaattaagcgtttgcttttgagaggtagaaaagatgatacggaagagacaattaaaacaagagttgacatttataaaaaaactacagaaccattgattcgatactttaaagatctctcattgttagaatatattgatgctgatagagatttaaaaaccatttcctctgatatcaaactaaaaatggcttga

SEQ ID NO: 251931 - DNA, 565 bp, Unknown
  Bacterial polypeptide expressing nucleotide sequence isolated from the Sargasso Sea
ttgacccatttagtagtttttttaggacctcctggtgctggaaaaggaacacaagcaataaaaattgcgtccgactttaatttggcgcatatttcaacaggcgatatgttaagacagcatgtaaaagaacaaacagatttgggtaaaattgcaaaatctttacttgatgaaggaaagttagttccagacgatcttgttattcaaatgttaattgaaagattaggtgatgatgattgtttaggaggcacaatacttgatggattcccaagaacactccctcaagctaaaagtttagaaaagataaacgataaatttccagtaataaaagtaattgtttttgaagctgatcaggaagaacttacaaaaagaatacttttaagaggtgaaactagtggtagaggagatgacactgaagactctataagggtcagattagaagtttatcagaaagatacagaacctcttattacttattatgaagataaaggaatcactacaaaaattaatgctgtaggtaatgttgatgatatttatacagaaatttctaaagagtttattaactaag

SEQ ID NO: 251932 - DNA, 202 bp, Unknown
  Bacterial polypeptide expressing nucleotide sequence isolated from the Sargasso Sea
atgaataccttcatactattaggaccacctggtgcaggaaagggcactcaagcagatcttatttcagctgatctaggtatcccaaaaataagtactggcgatatgttgcgatctgctgtggcctctaaaagtgatttaggtaatagagttgaagatatttcttactccggcaagctcgtctcagatgatattatttattgaa

SEQ ID NO: 251933 - DNA, 565 bp, Unknown
  Bacterial polypeptide expressing nucleotide sequence isolated from the Sargasso Sea
attgacccatttagtagtttttttagggcctcctggtgctggaaaaggaacacaagcaataaaaattgcgtccgaatttaatttagctcatatttcaacaggcgatatgttaagacagcatgtaaaagaacaaacagatctgggcaaaattgcaaaatccttacttgatgaaggaaagttagttccagatgatcttgttattcaaatgttaattgaaagattaagtcatgatgattgtttaggaggcacaatacttgatggattcccaagaacactccctcaagctaaaagtttagaaaagataaacgataaatttccagtagtaaaagtaattgtttttgaagctgatcaggaagagcttacaaaaagaatacttttaagaggtgaaaccagtggtagaggagatgacactgaagattctataagggtgagattagaagtttaccagaaagatacagaacctcttattacttattatgaggataaaggaatcacaacaaaaattaacgctgtaggtaatgttgatgatatttataaagaaatttctaaagagtttattaagtag

SEQ ID NO: 251934 - DNA, 646 bp, Unknown
  Bacterial polypeptide expressing nucleotide sequence isolated from the Sargasso Sea
catgcgaatcattcttctcggcgctcctggcgcgggtaagggcacacaagctcagtttttaatgggcaaatatggcattccacaaatttcaacgggcgacatgcttcgtgctgcaattaaagcaggtacagagctaggccttgaagcaaagcgtgtaatggatgaaggcaaactagtatctgatgagattatcattggcctagtaaaagagcgtattgcacaagatgactgtaaagacggtttcttgttagacggtttccctcgcactattcctcaggctgatgcaatgaaagaagcaggtgtcactgttgatcattgcatcgagtttgacgttcctgatgatgtaatcgtagaacgtatgggtggccgtcgtgtacaccctgcatcaggtcgcgtttaccacgttgtttacaacccaccaaaggtggaaggtaaagacaatgagacaggcgatgacttaatcgttcgtgatgacgataaagaagaaacagtgcgtaagcgtcttgcgatttaccatgagcaaacaaagccgcttgtgaactactacagcgctgaagcggaagctggaaactgtgagtaccacaagcttgacggtacgcgcccagttgaagaggtgagtgctgaacttgctgaacgtttaggttaa

SEQ ID NO: 251935 - DNA, 667 bp, Unknown
  Bacterial polypeptide expressing nucleotide sequence isolated from the Sargasso Sea
catgcgtttgatccttttgggtgcgcccggcgcgggcaagggcactcaggcaaacttcatcaaggaaaaattcggcattccgcaaatttccaccggtgacatgctgcgtgccgccgttaaggcaggcacgccgctcggcattgaagcaaagcgcttcatggacgccggcgagctggtaacagacgagttgatcatcaatctggtgaaggaacgtctgcagcagccggattgcgcgaacggctatctgttcgacggttttccgcgcaccattccacaagccgaagcgatgaagcaggcaggcgtcgcgatcgattacgtgctggaaatcgacgtgccgttcgacgagatcatcgtgcggatgagcggccgccgctcgcacgccgcgtcgggccgtacgtaccacgtcaagttcaacccgccgaaggtcgaaggtgtggacgacgtgaccggcgaaccgctgatccagcgcgacgacgacaaggaagaaacggtcaagaagcgcctcgacgtctacgttgcgcaaaccaagccgctgatcgagtactacaacaactgggcgcagaacggcgacccgactaccccgttgaaggcgccgcaatatcgccgcatttcgggcctcggcacggtcgaagaaattcgcaaccgcgcgttcgacgcgttgaagtaa

SEQ ID NO: 251936 - DNA, 646 bp, Unknown
  Bacterial polypeptide expressing nucleotide sequence isolated from the Sargasso Sea
atgaataccttcatactattaggaccacctggcgcaggaaagggcactcaagcagatcttatttcagctgatctaggtatcccaaaaataagtactggcgacatgttgcgatctgctgtggcctctaaaagtgacttaggtaatagagttgaagatattcttaactccggcaagctcgtctcagatgacattattattgaattaataaatgatcgtatcaatcagtcagattgcaagtctggttatttattcgatggagtgccaagaactctggggcaagccaatctttttttgcagaatgatatagaggtaaacaaggttatagatatatcacttgatgatgaactaattattaaaaggatgtctggcagaagatttcacatagcatctggcagaagctatcatattgaattcaatccgcccaaagctgaaggcttagatgacgagacaggagagccattaattcaaagagaggatgatttccctgagaccgttaaaaaaaggcttgaggtttatcattctcaaaccaaaccattaacagatttttacaaatcaaaggcctcagagggcattattagttttatttctattaacggtaatcagtcagttgatgaagtttttagtgaaattaagtcttatttataaa

SEQ ID NO: 251937 - DNA, 646 bp, Unknown
  Bacterial polypeptide expressing nucleotide sequence isolated from the Sargasso Sea
aatgaagaacattattttattagggccccctggagctggaaaaggaactcaagcagatttgatatgtgacttattaagtattccaaagattagtactggtgatatgttaagagaagctgtggcatctggcagtgagctaggaataaaggtatctgaaattcttgatagtggtgctttggtatctgatgagattattggatccttaatagaagatagacttacaaaatctgattgtgctaatggctctctatttgatggggttccaaggactattggacaggctgagcaactagcaacaatggggataaattttactcatgttattgaaatacaagtttcagacgataccattgtgagtagaatgtctggcagaagggtgcatccaagatctggtaaaaattatcatatagaatttaatcctccaatcaatgaagggctagatgatgaaactggcgaaccactcattcaaagagaagatgataagcctgaaacagttttgagacgtttaagcgtttaccatgaacaaactaagccattaacagatttttatataaatctatcagatactggaaatttaaaatttattaaagtagatggcgctgaatcagtagaaactgtttttcagaatatctcagaaaatatctaa

SEQ ID NO: 251938 - DNA, 553 bp, Unknown
  Bacterial polypeptide expressing nucleotide sequence isolated from the Sargasso Sea
atgaagttgttaattatggggcctccaggggcaggaaaaggaacccaagccaaaattttagcaaagaaatttaacctcgttcatctatcaacaggagatatccttagaaaagaaattgataaatcctccgaagtagggcttaaagctcaaacttatatgaatgctggcaatcttgttccagatgaggtcttgttagaaatgatgcaatcaaccttaaccgaattaaaagattcaggagtcatacttgatggtttccctagaacaattcctcaagcaataggattatcaaaaatttttcaatctttaaatcaagccattgatagtattataaacatcgaagttgataagaatgttttaatcaccagattagttgaaagagcaaaaaaatcaggaagagctgatgacacagaagaggtaattgtaaatcgacaaaatgtttatttagagctcacagcacctttaattgagttttatcaaagtaacattattcatattgatggtgatggatcaattgatgaagttacagaaagaattttaaaccacattccgtaat

SEQ ID NO: 251939 - DNA, 646 bp, Unknown
  Bacterial polypeptide expressing nucleotide sequence isolated from the Sargasso Sea
atgcgtattattttgttgggtgccccgggtgctggtaaaggaactcaggcgcagtttctgatgaacaagtatgggatcccacaaatttcgactggtgacatgctgcgtgctgccatcaaagagggtagtgctttaggtttggctgctaagcaagtgatggatgcaggccaacttgtgtctgacgacctaattattggtttagtgaaagaacggatcagtaaagaagattgtgccaaaggcttcttattggatggtttcccgcgcactattccacaagctgatgccatgaaagccaatggcgtagtggttgatcacgtcattgaatttgatgtaccggatgatgtgattgttgagcgtatgagcggccgtcgtgtgcacccggcatcaggtcgtgtttatcatgtcagttacaatccaccaaaagtggatggtaaagacgacttaacgggtgaggatttagtgatccgtgaagacgacaaggaagaaactgtgcgtaagcgtttaggtatttatcacgagcagactgaactgctggtcggttattaccgtaaagaagccgagcaaggtcgcactcagtaccattatatggtaggtaccttacctgttgagcaagtcagtgcaaaacttgaagcgttattaggttaac

SEQ ID NO: 251940 - DNA, 637 bp, Unknown
  Bacterial polypeptide expressing nucleotide sequence isolated from the Sargasso Sea
aatgaatttgatacttttaggaatgcctggtgctggaaaaggaacgcaagctgagataattcagagagagcagggaatagcaaatgtttcaactggagcaatgatgagagaggttagtcgagcagaaacagatctaggcaaaaaagtacaagaatatttatccacaggaaaattagtgccagatgacataataattcagatgctggtggaaagaattggccaaagtgattgtgaaaatggctttttgcttgatggttttccaagaaatctagatcaagcaaaggcactagatgaagctaaagtcgaaataaacctaattttattcttgaaaatatctgaaaaagaaataattgagagaatgtcaggaagaagagtgcatttaccgtccggaaggtcataccatattgttcacaacccaccaaaagtcgaaggaaaagacgatttgaccggtgaaactcttatacaaagagaagatgatcatcctgatgtcataaaaaagcgtcttgaggtctattacgatgagactgagccacttttaagcttttataggcagaaagatataagtttttacgaaatcgatgcttctaaaaccctagaagaggtcacagaagatatacggaaagtcatttcgcattga

SEQ ID NO: 251941 - DNA, 550 bp, Unknown
  Bacterial polypeptide expressing nucleotide sequence isolated from the Sargasso Sea
aatgaagaaacatttactatttttaggagctcctggagcagggaaagggactcaagcggaattgctaagtcaaactaattcttacttacacctttctacgggtgaattattaaggaaagaaatcgaaatgaatactactcttggaattcgggtaaaggatattatgaatcgaggggaacttgttagtgatgaactagtattaaagatagtaagacaaaatttagtcaaggataataaaggttggattctagatggttacccaagaaatttatcgcaagcaaattcattgaatgaagtcttgaatgaaataaatcaacctttggaattagttttttatttagatattcccgaagaagtacttattaagcgtttgcttttaagagggagaaaagatgatacggaacagacaattagaaaaagatttgacatttataaaaaaactacagaaccattaattaaatattttgaggatctctcattgttagagtatattgatgctgatagagatttaaaaaccgtttcctctgatatcaaacaaaaaatggcttga

SEQ ID NO: 251942 - DNA, 634 bp, Unknown
  Bacterial polypeptide expressing nucleotide sequence isolated from the Sargasso Sea
atgagcagtatagtattgttcgggcctcctggtgctggaaagggcactcaggctcaaaggattacagattctacaggtttaccacagattagtacaggtgatatgttacgtgctgctgtgaaggcagaaacacccactggaatggaagcaaaaaaattcatggatgctggaaaattagttcctgatgaaataataattgatttaattagagaccgtattcttcaggatgatgctcttaatggggttatgtttgacggttttcccagaacagttcctcaagctgaagcactcgattcaataacaactgtatcacatgtaatcgctattgaagtcccagatagtagaatagttgagcgaatttgcggaagatacacatgtgcagtttgtgatgctgttttccatgatactttcaatcctaccagtgtcccaggaatctgtgattcatgttcgagtacagagtttaagcgccgtgctgacgacaatgcagatactgttttgatgagactaggcgcatatcatgagcaaacttcaccacttgcagaatggtatgagcaaaagggaatttttcatagaataaatggagataggccgattgacacaatctctcaagatattctttctgcactaaattgag

SEQ ID NO: 251943 - DNA, 553 bp, Unknown
  Bacterial polypeptide expressing nucleotide sequence isolated from the Sargasso Sea
tttgtttggacctccaggagctggtaaaggcacacaagctaaatttttagttaaacaattaaataattttcaaatttctacaggtgatatgctgagagatgaaattcaaaaaaattctgaaataggaaaaaagatagttgaagacatgagcgaaggtagatttgttagtgatgaaatagttaactcattaattgaaaatgtagtatttgatccaaaaaagaagaatagattaatatttgatgggtatcctagatccctgacacaagcaaaaaacttagaaaaattattagaaaaaacaaatcaaaaaattgattttgtattttttcttaatgtaaataaggagacgataatcaaaagaattgaacaaagaaaaagtatagaaaatagatctgatgacgatttaaatattattgtgaaaaggtacgataaatacatggaaaccactaaacctgttctagacttctattctaaaaattccaatttttatgagctagatggcagttctaaaattgaggaaataacagctaaaatcaacagttttctcaatgtttaa

SEQ ID NO: 251944 - DNA, 217 bp, Unknown
  Bacterial polypeptide expressing nucleotide sequence isolated from the Sargasso Sea
tatgaaaaatataattttattaggccctccaggtgcaggaaaaggtactcaagctgatttaatttgtgagttatgtcatattcctaagattagtactggagatatgctaagagaagcagttgcctctggaagtgatcttggaaataaggtttctaatattttagataccggcggtttagtgtctgacgaaattataggcgctcttaataaaagatag

SEQ ID NO: 251945 - DNA, 646 bp, Unknown
  Bacterial polypeptide expressing nucleotide sequence isolated from the Sargasso Sea
aatgaataatattattttattagggcctcctggagcaggtaaaggtactcaagcagatttgatatgcgatttgtgtgatattccaaaaatcagtactggcgacatgcttagagaggctgttgcatcaggcagtgacttaggtgcaagggtttcagagattcttgattctggtggcttagtctctgatgatattattggctctttaattcaagaaaggcttctaaaaccagattgtgaaaatggatctctgtttgatggtgttccaagaacaataggacaggctgagcagcttgctgacatgaaaattaactttacacatgtaattgaaatttttgtagaggatgaaatcattgttaaaagaatgtctggtagaagagtccatcctgcatcaggaagaaattatcacattgatcataatccaccaaaaaatagcggattagatgatgaaacaggtgagccactagttcaacgagaggatgataagcctgatacagtcctaaagagattggatgtatatcatgaacaaacaaaacctcttacaactttttacaaaggtcaaagcgactctggacttttaaaattcataaaggtggatggttctaattctgtagatgatgtttttagagcaatatcatctcaaatatag

SEQ ID NO: 251946 - DNA, 637 bp, Unknown
  Bacterial polypeptide expressing nucleotide sequence isolated from the Sargasso Sea
atgaatctgatacttttaggaatgccgggtgctggaaagggaacacaagctgagataatccagagagaacagggcatagcaaatgtctcgactggcgcaatgatgagagaaatcagccgagcagagaccgatttaggcaaaaccgttcaagagtacttgtctagcggaacattagtcccagacagcataataatacaaatgctggtagaaagaattagtcaaagtgattgcgataatggcttcctgcttgacgggtttccaagaaatttagaccaagcaaaagcattggacgaagctaatgttgaaattaacctaattttattcttaaaaatttctgaagaagaaataattaatagaatgtcaggaagaagagttcatctagcgtctggaaggtcataccatattgctcataatccaccaaaagtcgatggaaaagatgatttaactggtgaaactcttattcaaagagaagatgaccatcctgatgtcataaaaaagcgtcttcaggtctattatgatgagacagagccgcttttaagcttttataggcagaaagatataagtttttacgaaatcgacgcttctaaaaccttagaagaagtcacagaagatatacggacagtcatttcgcattgaa

SEQ ID NO: 251947 - DNA, 646 bp, Unknown
  Bacterial polypeptide expressing nucleotide sequence isolated from the Sargasso Sea
gatgcgcattatcctattgggcgccccaggtgccggtaaaggtacccaggcccagttcattatggaacagtatggtatcccacaaatttctactggcgacatgttacgtgctgccgttaaagccggtactccgctgggtttagaagcgaagaaagtgatggatgcaggccaactggtttctgatgatctgatcattggactggttaaagagcgtatcgcacaggacgactgtgttaaaggtttcctgttagacggtttcccacgcactatcccacaagcggatgcgatggcggcaaacggtatcagcattgatcacgtgatcgaaatcgatgtgccagacgaagaaatcgttaagcgcatgagcggtcgtcgcgttcacccaggttctggccgtgtttaccacgtggtattcaatccacctaaagtggaaggcaaggacgatgtgactggcgaagacttagcgattcgtccagatgacgaagaagccacagtgcgcaaacgtttaggcatttaccacgagcaaactaagccattggttgaatactatggcaaagtggctgcggcgggtaacactcaataccacaaatttgatggtactcagtcggtagcggctgtgagtgcacaattagccagcgtgctgaaataa

SEQ ID NO: 251948 - DNA, 646 bp, Unknown
  Bacterial polypeptide expressing nucleotide sequence isolated from the Sargasso Sea
aatgaaaaatataattttgttaggtcctcctggagctggaaaaggcacacaagctgatcttatttgtgatttatgtgatattccaaagataagcactggagacatgctaagggaagctgttgcttcagaaagtgatcttggcctaaaagtttcaaatatccttgattcaggtggccttgtttctgatgagattatagggtctttgataaaagatcgactaaatatgccagattgtgaaaatggatcgctctttgatggagttcctagaacaattggtcaggcagagcaattggctaacatgggtatagattttactcatgtaatagagattcacgttgatgaccaagacatagtaaacaggatgtctggaagaagagtgcatcctggctcaggtagaaattatcacattgaattcaaccctcctgaaaatgagggtattgatgatatttcaggagaacctttaattcagcgagaggatgacaagcctgaaactgttttaaaaagattaaatgtatatcatgaacaaaccaaaccactaactgatttttataaaaacctcgcagataaaggaattttaattttttataaagtagatggatcagaaagtgttgaaacagtatttaagaacatttcagataatttataa

SEQ ID NO: 251949 - DNA, 424 bp, Unknown
  Bacterial polypeptide expressing nucleotide sequence isolated from the Sargasso Sea
atgaaactcttaattatgggtcccccaggagcaggcaaaggaactcaagctaaaattcttgcacaaaaatttaacctggtgcacctttctactggagatattcttagaaaagagattgatagaaattcagaagttggattaaaggcacaaacatacatgaacgcaggaaatcttgtgccagatgaagttctattagaaatgatgaattcaacattaactgaattaaaggataatggagtgatactagatggttttccaagaacaattcctcaagctgatggtttatcaaaaatttttcaatctttaaatcaagatattgatgccattattaatatagaggttgataaagatgttctgataagaagattagttgaaagggctaaaaattctggtagagctgatgatacgggaagaagttattaaa

SEQ ID NO: 251950 - DNA, 517 bp, Unknown
  Bacterial polypeptide expressing nucleotide sequence isolated from the Sargasso Sea
aatgaggaaacatttattatttttaggagctcctggagcagggaaagggactcaagcggaattgctaagtcaaacttattcttacttacacctctctactggtgaattattaagaaaagaaatcgaaatgaatactacccttggtatccaggtaaaagatattattaatagtggggaacttgttagtgatgaactcgtattaaaaatagtaagacataatttagttaaggataataaaggttggattctagacggttacccaagaaatttatctcaagcaagttcattgaatgaagttttaactgaaataaatcaacctttagaagtggttttttatttagatattccagaagaagtgttaattaagcgtttgcttttaagagggagaaaagatgatacagaagagacaattagaacaagagttgatatttataaaaaaactacagaaccattgattcaatattttaaagatctctcattgttagaatatattgatgctgatagagatttaaaaacc

SEQ ID NO: 251951 - DNA, 625 bp, Unknown
  Bacterial polypeptide expressing nucleotide sequence isolated from the Sargasso Sea
aatgagaattattttacttgggccaccaggagcaggaaaaggaactcaagctgaaaaaataatacaggctctcaatatacctcatatttccaccggaaatatgcttagagaagctattgaggaggggtcgcctttaggaattgaagctaaaaaggtcatggataaaggagcacttgtttctgatgacattattgtaggattggtagtagaaagattaaaaaaacctgactgctcaaatggagtcttatttgatggttttccaagaacaattcctcaggcccaagcattagatgatgccaatataggaattgatctaattattgaaattcagctagatgatgaaaatattattgaaagaatgtccggaagaagagttcacatatcgtctggcaggaactaccacgttaaatttaatcccccaaaaaaggaaggttttgatgacttaactggagaagagttaattcaaagagatgatgataaaagagaggtggttgaagagagattggttgtctatagaaatcagactgagccattaataagtttctacaaagccaagcaaacaaataatgatcttgattatcttacagttgatggttctgggagcgttgaatcaatcagtcaatta

SEQ ID NO: 251952 - DNA, 571 bp, Unknown
  Bacterial polypeptide expressing nucleotide sequence isolated from the Sargasso Sea
atgaacatattacttttcggcccacctggtgctggaaaaggtacccaggcaaaattaatttgtaaaaaatttagcttagaacatgtttctacaggagatatcttgagaaatgaaattttaaaaggtagcaaacttggggcaactgcaaaacaaataatagactcaggacatttggtatctgatgagatcattattgatataattaaaattcgcttatctgaaataaaaaaaaacaatacaagttttcttcttgatggattccctagatcaattaatcaagcaaatcttctctcgagcattatggaagaattagatgttaagcttaaagctgcaatactaattgatgtagaacaacacgttctcataaatcgtattataaaccgtaagaatactgaaggtagagaagatgacagcgtagaggtcctagcgtcacgattaaaggtttattatgatcaaacagctccattaatacaattctataaagatttaaacttgcttaagtggataaatggagtgggtgaaattagtgaagtaaatcaacaaattaattcaattatggagcaactttaat

SEQ ID NO: 251953 - DNA, 571 bp, Unknown
  Bacterial polypeptide expressing nucleotide sequence isolated from the Sargasso Sea
attgaaaaggattgtcttttttggaccacctggagctggcaaaggcacacaagctaagttgatatcaaaatatttaaatattccccatctttcaactggagatattttgagaaaaaaaatcagtggagatgattatattgcagatgaaataaaaaatattttggcaagtggagacttagttccagataatattttaaacaaaatagttactgaaaatttatttaataattttgataatggttttattctggatggatatccaagaactgtagatcaatcaaattatttaaatatttttcttgaaaataataacatagaattaactcaaattttttctattgtgattgatgatgatacaatagaaaaaagaattattaaaagatcacatattgaaaatagggaggatgacagtgttgaagttatcaataacaggatagataattacaataatactactttaacggtaagtaaaatgtataagtcaaaaaatcccaatattttccatgaaatagatggaaatcaagatattgataaaatccaatctgaaatattaaaaatacttaaaaaataa

SEQ ID NO: 251954 - DNA, 637 bp, Unknown
  Bacterial polypeptide expressing nucleotide sequence isolated from the Sargasso Sea
aatgaagattatccttttgggaatgccgggagcaggcaagggaacacaagctgaacttattaaagttaattgcagcattcctagcatatctacaggagcaattttaagagacataagcaatactaattcagatctaggagcaaaagtacaaaactacttacagtctggaaggctagttccagatgaaatcataattgaaatattggtcaatagaattagtgaagacgattgttccaatggattccttttagatggattcccaagaaatattgaccaagccaaagctcttgaaaaagccaatattgatattgattttgtggttttcttaaatattgaagagcaagaaataattaaacgcatgtctggtagaagaatgcacttaaaatccggcaggtcttatcacatagactttaatccaccaaaaaattttaataaagatgacctcacaggagaggatttaattcaaagagaagatgataagccagaagtcataaaaaaaaggttagaagtttactataaggaaacatttccacttttagatttttatagaaaagaatcaaacaatttttttgaaatagatggctcgcttccggtagaggaggttgcaaaagctatagatcatatattttcctcgtga

SEQ ID NO: 251955 - DNA, 550 bp, Unknown
  Bacterial polypeptide expressing nucleotide sequence isolated from the Sargasso Sea
atgaaaaaacatttactatttttaggagctcctggagcaggtaaagggactcaagctgaattgctaagtcaaactaattcttacttgcacctttctactggtgaattattaagaaaagaaatcgaaatgaatactaaccttggtattcaggtgaaggatattatgaatcgaggggaacttgtaagtgatgaattagtattaaagatagtaagacaaaatttagtgaaggataataaaggttggattctagatggttacccaagaaatttgtctcaggcaaattcattgaatcaagtattgaatgaaataaaccaacctttggaattagttttttatttagatattccagaagaagtactaattaagcgtttgcttttaagagggagaaaagatgatacggaagatacaattagaacaagagttgacatttataaaagaactacagaaccattaattcaatattttaaggacctctcattattagaatatattgatgctgatagagatttaaaaactatttcctctgatatcaacaaaaaaattgcttgat

SEQ ID NO: 251956 - DNA, 646 bp, Unknown
  Bacterial polypeptide expressing nucleotide sequence isolated from the Sargasso Sea
atgaatattatattacttggtccacctggagcgggtaaaggtactcaggcccgccaccttgtagaaaaaagaaatatgatacaactctctactggtgacatgctaagagaggctaaaacctcgggaagtgaaatgggaaatctagttgccaaagttatggcgcgaggtgatttagtcacggatgaaatcgttattggtttaataaaagaaaaaatttctggcgaaaagggtgggggttttatttttgatggttttcctagaacacttaaacaggcagatgctttaggtaggatcttagaagagtgtggagaaaatctagacattgtcgttgagatgaaagttgatgatgatgctcttgtttcgaggataagtggccgttcgtcttgtgggaactgcggtgaagtttttcacgatgtaacaaatccatggccagcttctggcgaatgtccaaattgctccagtacggaagtagtgaggcgagctgatgacaatgaagatagtctacgccaacgtttgatggaatattacaaaaaaacctcgtcactaataggctattattatgcaaaaggtaatcatgtgtctgtgaacggtcttgcttcggtggaagaagttcagaagtcgattgctgcagttttggatggataaa

SEQ ID NO: 251957 - DNA, 451 bp, Unknown
  Bacterial polypeptide expressing nucleotide sequence isolated from the Sargasso Sea
atgatctttttattctttggccctccaggagcgggaaaaggtactcaagcagcaatattatccaaacaatacaatatacctcatttgtcaactggtgaaattttaagaaataatttattaggcactagcactcaatcaaaaaaaataaaaaaaataatagaaaaaggtaatttagtatcagatgaaatattaaatgaaataattgaacaaaaattaaactcatatgaatgtagcaaaggatatatattagatggttaccctagaacgttaagtcaaaatgattggcttcaaagttatttaaattctaaaaatttaaaaataacaaaaatttttgatataaatttagaaaaaaatattattgttgaaagaattaaaaatcgagcaaaattagaaaaaagaaatgatgatactgaagaagtaattaaaaatcgtgttaataaatatattgaag

SEQ ID NO: 251958 - DNA, 559 bp, Unknown
  Bacterial polypeptide expressing nucleotide sequence isolated from the Sargasso Sea
atgaagaaacatttactatttttaggtgctcctggagcagggaaaggaactcaggcagaattattaagtcaaaactattcttatttgcacctttctacaggtgaattattaagaaaagaaattgaaataaatactatccttggtagacaagtaaaggatattattaatagtggagcacttgttagtgatgaacttgtattaaaaatagtaaggcaaaatttagatagtgatcataataaaaaaggttggattttagatggctacccaagaaatttatctcaagcaaattcattgaatgaggttttaaatgaaataaatcaacctttagaagtagttttttacttagatattccagaagaagttctaattaagcgtttacttttaagaggtagaaaagacgatactgaagagactattagaactagagttgatatttataaaaaaactacagaaccattaattcaatattttaaagatctttcattgctagaatatattgatgctgatagagatttaaaaactatttcatctgatatcaaacaaaaaatggctagatgat

SEQ ID NO: 251959 - DNA, 580 bp, Unknown
  Bacterial polypeptide expressing nucleotide sequence isolated from the Sargasso Sea
catgataattattttgttaggaccaccaggctctggaaaaggcacacaagctaattttattcaaaacaaactttcaatacctcatttatcaactggcgatattttgaggcaatcagttaagaatgaaactgatctagggaataaagtaaaaaatataatggctaaaggggaattagtatcagatgatttagttttagatgtaattaaggaaagaatttcacaaagtgattgtaatctaggttttattttagatggttatccaagaaatattactcaggctgaatcgttaaatatagttttaaaagatattgatcgaaatatagatagaattttatttttagatgttgattttgaagttcttgagtcaagaatcgagtcaagaactaaggaaaataatgaagaaaagagagctgatgatacatctgaggttctaattaaaagactggaggagtataaaattcaaacagctcctttaggagagtattacagtaataataaaaaattcaagaaaatcaatgggatgaaatctataagtgaagtttcacttgatattgaaaattttttggataatggtatttag

SEQ ID NO: 251960 - DNA, 649 bp, Unknown
  Bacterial polypeptide expressing nucleotide sequence isolated from the Sargasso Sea
tatgaaaatagtacttttagggcctccaggagctggcaaagggactcaagcagagtcgatttgtgaaaattatggaattccacatatatccacaggaaacatgctcagagaagcggtagaagcaggaacaaaactaggtttagaggctaagtcacttatggatgcaggcatcttagtttctgatgatgtaattgtaggtttagttgaagagagaatcttggaagatgattgttctgaaggttttttatttgatggttttcctagaactatcccacaagcagaagcacttattgaaagagatataaatattgatgctgttgtagagattgatgttcctgatcaagacataattgatcggatggcaggtagaagaatgcatcctgcttctggaaggaattatcacatcattttcaatccacctaaaaatgaaggtaaagatgatattactggtgaagatctgatcttaagagaagatgataagccggaaacggtaaaagatagattaaaggtatatgcagatcagacatctccgttagtagtcttctactcaaatttatctgtttctagtcaacttaagtatataaaagtttcaggaactgcaactccaagtaacgtaactcaacagatattaaaagacttagagatttaa

SEQ ID NO: 251961 - DNA, 547 bp, Unknown
  Bacterial polypeptide expressing nucleotide sequence isolated from the Sargasso Sea
attgacggatatcactatttttcttggaccacctggtgcaggaaaagggactcaagctgaaaaaatatctgaaaaatttaacatacctcacatctctactggtgtgatgcttagagaacatgttgagaacgagacagaattgggtcttgttgctaaagaaatattgaataaaggaaatcttgtttctgatgagctagttacttctatgcttattgaaagattagaaaatgatgattgtgaaaaaggtgcaattttagatggtttccctagaacaattacccaagctgaaagtcttaacatcgaaggcttgaatataaaaactgtcattttatttgaagtaaatgaaactgagttaataaaacgaatggttgaaagaggcagagaagacgacacagaagagtcaataaaggttaggttagatgtgtatcgagatgaaactttacctttaataaaattttatgatgataaagatgtactaaaaactgttgatgcatttggagatatagatgaaattttcaaccatatctcaggtcttataaaaacatga

SEQ ID NO: 251962 - DNA, 646 bp, Unknown
  Bacterial polypeptide expressing nucleotide sequence isolated from the Sargasso Sea
aatgaataatattattttattagggcctcctggagcaggtaaaggtactcaagcagatttgatatgcgatttgtgtgatattccaaaaatcagtactggcgatatgctaagagaggctgttgcatcaggcagtaacttaggtgcaagagtttcagagattcttgattctggtggcttagtctctgatgatattattggctctttaattcaagaaaggcttctaaaaccagattgtgaaaatggttctctgtttgacggcgttccaagaacaataggacaagctgagcagctttctgacatgaaaattaactttacacatgtaattgaaatttttgtagaggatgaagtcattgtcaaaagaatgtctggtagaagagtccatcctccatcgggaagaaattatcacattgatcataatccaccaaaaaatagcggattagatgatgaaacaggtgagccactagttcaacgagaagatgataagcctgatacagtcctaaagagattagatgtatatcatgaacaaacaaaacccctcacaactttttatgaaggtcaaagcgactctggacttttaaaattcattaaggtggatggttctaaatctgtagatgaagtttttagactaatatcatctcaaatatag

SEQ ID NO: 251963 - DNA, 553 bp, Unknown
  Bacterial polypeptide expressing nucleotide sequence isolated from the Sargasso Sea
aatgaagcttttaataatgggaccacctggagctggtaaaggaactcaagctaaaattttagcggaaaaatttaacttagtacatctttctaccggggatatattaagaaaggaaattgataaagcttcaaagactggacttaaggcacagacatacatgaatgctgggaatcttgttcccgatgaagtgttacttgaaatgatgaatacaactttgactgaattaaaaaatcaaggagttattcttgatggttttcctagaacaataccacaagcagtgggtttatcaaaaatttttcagtctttaagccaagctattgacggaattataaatattgaagttgataaaaatgttttaattaaacgtttggttgaaagggcaaaaaactcaggaagagctgatgatacagaagaagtgattataaatcgccaaaatgtttattcagaattaactgccccattgattgaattttatcagagcgatataatcagtatcgatggagatggttcaattgaaaaagtcaccgaaagaatcttaaagcgtattcactaa

SEQ ID NO: 251964 - DNA, 649 bp, Unknown
  Bacterial polypeptide expressing nucleotide sequence isolated from the Sargasso Sea
atgaaaattattcttttgggacctcccggagctggaaaaggaactcaagctgaatcaatttgcaagaattataaaattccacatatttcaacaggcaatatgctgagagaagccgttgatgcaggaacagagcttggtttagaggctaagtctcttatggatgcaggaattttagtttcagacgaagtcatagtcggcttggttgaagaaagaatatctcaatcggattgttctgacggattcctttttgatggctttccacgaactatccctcaagcagaagcgcttattgaaagaaatatcaatatagacgcggttgtggagatagatgtacctgatcaagatatcattgatcgcatgtctggaagaagaatgcatcctgcatcgggaagaaattatcatgtaatctataaccctcccaaaattgaaggcaaagatgatatcactggagaagatcttatcttgagggaagatgataagcctgagactgttaaggacagattaaaggtatatgcagatcagacgtctcccctgatctctttttactcagaattgtcctcccaggctaaactggattatataaaagtttctggaacagcttcacccatagaagttacagaagaaattttaaaaaatttgaatagttaat

SEQ ID NO: 251965 - DNA, 571 bp, Unknown
  Bacterial polypeptide expressing nucleotide sequence isolated from the Sargasso Sea
atgaatctaatatttttaggaccacctggcgtaggaaaaggaacacaagcaggacatgtttgcgaacattatggaataatccatttgtccactggagatatgcttagatctgaaataaaagagtcaagtgaagtagggaggattgctaaatcctatattgataaaggggcactagttccagataacgtattattagatattataaatctaaggcttggtaaggatgatgctaaaaatggatatctactggatggttttccaagaacaattcctcaggctgaaggtcttgatgatataatgaatagtaaaaaacataagcttgatgtagtggtcagtttggttgcagaagaaaatgaattaatccaaagattaattaatagaggtcaagactctggtcgtaccgatgatactcctgagattatcaaacaacgacaagaagtatactggaaccaaacggctccattaattgatttttactcaaacaaaaatgtgcttgttgaagttgatggtattggcagtatccctgaaataaaaaataaaatatttgtggcattagatagctatgcttaag

SEQ ID NO: 251966 - DNA, 580 bp, Unknown
  Bacterial polypeptide expressing nucleotide sequence isolated from the Sargasso Sea
gatgaatatagttttgtttggacccccaggtgccggcaaaggaactcaagcaaagttgatatgtgaaaaatatttccttaatcatctttcaacaggtgatttattaagaaatgaaagcagtaaaaaaacaagtttaggtattcaaataaaaaatacaataaatgatggtaaattagtatcgaatgaaacgacgattgaattgataaagcatttcattgatgagaataaaaataataagaaaggcttcttgtttgatggcttcccaagaaataaaaaacaggctgagttactcgaccatttaatggtaagcattaatgaaaaaatactctgtgtaattttgcttaatgtcaacgaagatgtattaaaggaaaggattatgaatagaagtacaacagaaggtagatctgatgataatttagaaacattatctaaaagactgcatacttattcttctgaaacagagcctttaatcgaatactattcttcccagaatcttgtcagaaaagttctcggaacaggagcaataagtgatataaatcaagggattaactctcatatagaggcctctttaaatgcttga

SEQ ID NO: 251967 - DNA, 248 bp, Unknown
  Bacterial polypeptide expressing nucleotide sequence isolated from the Sargasso Sea
aatgaacataattttatttggacctcctggagctggtaaaggcacacaaagtgataaattaatagaagaatataaacttactcatttatcaactggagatttatttagacttcatttaaataataatactcctttaggtatagaagctaagagatatatggatgaaggagagttagttcccgatacagttgtaatagaaatggtaaaaaataaaattgaagaaaacccttcatctagtggatttattt

SEQ ID NO: 251968 - DNA, 550 bp, Unknown
  Bacterial polypeptide expressing nucleotide sequence isolated from the Sargasso Sea
aatgaagaaacatatactatttttaggagctcctggggcagggaaagggactcaagcggaattgttaagtcaaagtaattcttatttacacctttctacaggtgaattactaagaaaagaaatcgaaatgaataccgcccttggtatacaggtaaaggatattatgaatcgtggggaacttgtaagtgatggacttgtattaaagatagtaagacaaaatttagtcaaggataataaaggttggattctagatggttacccaagaaatttatctcaagcaaattcattgaatgaagtcttaaatgaaataaatcaacctttggaattagttttttatttagatattcccgaagaagtactaattaagcgcttgcttttaagaggtagaaaagatgatacagaagagacaattagaacaagagttgacatttataaaaaaactacagaaccattgattcaatattttaaagatctctctttgttaaattatattgatgcagatagagatttaaaaaccatttcctctgatatcaaacaaaaaatggcttga

SEQ ID NO: 251969 - DNA, 580 bp, Unknown
  Bacterial polypeptide expressing nucleotide sequence isolated from the Sargasso Sea
atgataattattttgttaggacctccagggtctggaaaaggtacacaagctaattttattcaaagtaagctttctatacctcatttatctactggcgatattttaaggcagtcagttaaaaatgaaacaaatctaggtcgcaaagtaaaagatataatggctaaagggaaactggtatccgatgatttagttttggatgttattaaagaaagagtttcacaaagtgattgtgatcaaggttttattttagatggatatccaagaaatattattcaagcagaatcattaaacatagttttaaaagatattaatcgaaatatagataaaattttatttttagatgttgattttacagttcttcactcaagaatcgagtcaagatctaaggaaaataatgaagaaaagagagctgatgatacatcagagatcctaattaaaagattggatgagtataaatctcaaacagcacctttaggtgagtattacagtaatgataaaaaattcaaaaaaatcaatgggatgaattctataagtcaagtttcacttgatattgaaaattttttggataatgacgtttagt

SEQ ID NO: 251970 - DNA, 586 bp, Unknown
  Bacterial polypeptide expressing nucleotide sequence isolated from the Sargasso Sea
gatgaatattatattaataggccctccgggtgctggtaaaggtactcaagctgtatttatagaggaagagtttggtttaaagcagttgtccactggcgacatgtgccgagctacaatgaaagaggatacagatctaggacataaggttcgagaaattgtagaggcaggggaccttgtccccgatgatataatgctgcaaatgatatcagaacgtatagtgagccctgattgtgttaacggagttatcctggatgggtttccgcgcaccgtgccacaggctgaagctctcatgaaggtgttggatgataataagcttaatatagaccatgtgctttatttttcagtggatagtgaaattctattagagcgtataagaaataggattgctgaaacaccactagaggagcgacgtaaagacgataatgaggaaactttgaaccatcggctcaaagtgtatgaagatcagactgctccgcttctgccattctataaaagacacggcattttatcgacaatcgacggaatgctgcctgtcgaagaggtaagttttaaattgagaggcattttagggagtaaaaaggcttaa

SEQ ID NO: 251971 - DNA, 544 bp, Unknown
  Bacterial polypeptide expressing nucleotide sequence isolated from the Sargasso Sea
catgcttcgcgcggcggtcgcggccaagtccccgaacggcgtcaaggcaaagcaagccatggagagcggcgcgctcgtgtcggatgacatcgtcgtcggcattatcgaggaggccatcaaggcgccggagtgcagaaatggtttcatcttggatgggttcccgagaacggtgccgcaggcggtgaagctggatgagatgctgggcgcgaagggcgtcgccatcgactccgttctgaatttcgaagttccggatgaagtcttggtcgagcgagtggagggacgatggatccaccaggcgagcggtcgatcgtaccacaccaagttcgcgccgccgaaggttccgggtaaggatgacttcacgggtgagcctctcatgaagcgaaaggatgacaacgccgagacgttaaagtcgcgattatcggcgttccacacgcaaaccgctccggtgatcgattactacaacaagaaggaaaaggtcaccggaatcgacgcgaacaagcccgcggcgaccgtcgaggcgcaaatcgccaaggcgttggcgtaa

SEQ ID NO: 251972 - DNA, 568 bp, Unknown
  Bacterial polypeptide expressing nucleotide sequence isolated from the Sargasso Sea
ttgaataatataattttttttggcccacctggtgctggaaaaggaactcaggcaaaaataatttcaaatcatcttaatgttccacatttatcaacgggagatatattaagaactagaattttgcaagaagacgatctttctaaaaagttgaaagaaattatgtcaagtggtggattagtctctgatgaaatactaaataaaattgttaatgaaaaattaaatgattgcaatgatggttttattttagatggttatccaagaactttagatcaatcaaattttttaaacaactatcttgtgcaatcccactatagtttagattttatcttcaatatcgatattagctttgatgtattaaaagatagaatacttaaaagatcacaagaagaagatagagatgatgataatatagatgcattagaaacaagatactctaaatatacggaagaaaccaagccggtatcagaagaatacaaacacaataattcttcaatcttttatgaaattaatgggcgcaaccaaattcaagaaataacttcagaaatcatcaaaatactagaaaaataat

SEQ ID NO: 251973 - DNA, 564 bp, Unknown
  Bacterial polypeptide expressing nucleotide sequence isolated from the Sargasso Sea
ttgacccatttagtagttttttaggacctcctggtgctggaaaaggaacacaagcaataaaaattgcgtccgactttaatttggcgcatatttcaacaggcgatatgttaagacagcatgtaaaagaacaaacagatttgggtaaaattgcaaaatctttacttgatgaaggaaagttagttccagacgatcttgttattcaaatgttaattgaaagattaggtgatgatgactgtttaggaggcacaatacttgatggattcccaagaacactccctcaagctaaaagtttagaaaagataaacgataaatttccagtaataaaagtaattgtttttgaagctgatcaggaagaacttacaaaaagaatacttttaagaggtgaaactagtggtagaggagatgacactgaagactctataagggtcagattagaagtttatcagaaagatacagaacctcttattacttattatgaagataaaggaatcactacaaaaattaatgctgtaggtaatgttgatgatatttatacagaaatttctaaagagtttattaactaag

SEQ ID NO: 251974 - DNA, 188 bp, Unknown
  Bacterial polypeptide expressing nucleotide sequence isolated from the Sargasso Sea
tatgaatcttattatttttggtccgcctggcgctggaaagggcacacaatcagatttaattgcaaaagattttaaattaaagaaaatatccacaggtgatttgctgcgacttgaaataagtaaaaaaactcatttgggtaataaaataaaatcaatcattgatgagggaaaatttgttcagataatta

SEQ ID NO: 251975 - DNA, 646 bp, Unknown
  Bacterial polypeptide expressing nucleotide sequence isolated from the Sargasso Sea
atgaaaattatccttttaggacccccaggtgcaggaaaaggaactcaagcagaggtattatgcaaaaactttaatattccacatatctcaacaggaaatatgttgagagaagctgtagaagcggagacggatcttggccttgaagctaaagctttaatggatgcaggaattttagtttctgatgaagttatagttggacttgtggaagacaggatatcaaaagaagattgcaagagcgggtttttgtttgatggctttccgagaaccattcctcaggcacaagctttagttgatagggatatatttatagatgccgtagtggtaatacacgtacccgatgaagaaattattgagagaatgtcaggaagaagaatgcatcaaggatcgggaaggaattaccatatagtttataaccctccgaagatagacggtaaagatgacataactggagaagatttaattcaaagggaagacgacaaacctgaaactgtaaaagatagacttaaggtttacgaaaaccagacttctcctttaattaatttttatacagaaatgtctgaacaaggaaaattggattatgtctcagtttcagggactgcttcacctgaggaagtctccaccgaaatcttaagttggctgtcataac

SEQ ID NO: 251976 - DNA, 577 bp, Unknown
  Bacterial polypeptide expressing nucleotide sequence isolated from the Sargasso Sea
atgaacctcatcttattaggtcctcctggttgcggtaagggtacgcaagcagtaaaccttgttaagaaatatgattattgtcagctttcaaccggtgatatgctcagggaagctgttgcaaatgagacccaaactggaaaaattgtaaaggatgttttggcaagcggaaaactagtcgatgacgagttaatcatcaagataatggaagaaaaattaattgcgacaaaatctaagccagggcgaatatttgatggctttccgaggacgctaattcaagcgaatgaactcgaaagcttattaaagcgtaaccaaatgaaacttgacttagttattgaattggtagttgaccagcattctctttttgagaggattctaaaaagagcacaagacagtgaagagaaaagagatgatgataattcagttattgtgaaaaaaagattagaggtatataacaaggaaacaaagccaatagttgatttttatagctcaaaatataacttaaacaagattgacggtatgcagagcattcaagaggtaagcaacacaatcgagaatttgattgaaaataaacattaat

SEQ ID NO: 251977 - DNA, 646 bp, Unknown
  Bacterial polypeptide expressing nucleotide sequence isolated from the Sargasso Sea
aatgaataatattattttattaggtccaccaggtgctgggaagggaacacaggcagatttaatatgtgaaatgtgtgacatacccaaaattagtactggcgatatgttaagagaggcagttgcatctggcagcgatcttggagtaaaggtttcaaatattcttgattctggaggcttggtttcagacgacattattgggtctttaattaaagaaaggcttaccaaaccagattgtgcaaaaggttctttgtttgatggcgtacctagaacaattggtcaagcagaacaattagctgatatgggaattaatttcacacatgttattgaaatatttgttgaagatgaaactattgttaatagaatgtcaggcaggagagtgcatccatcttctggtcgaaattatcacatagactttaatccaccaaagaatgaaggaatagatgatgaaacaggagaacctttaattctaagagaagatgacaaaccagatactgttttaaaaagacttagcgtatatcacgaacaaacaaaaccattaaccgacttttatgcaagcttatcaaatgatggaagtttaaagttttttaaagttgatggatcaaaaaaagttgatgaagtatttaatagcatttcttctcagatatag

SEQ ID NO: 251978 - DNA, 577 bp, Unknown
  Bacterial polypeptide expressing nucleotide sequence isolated from the Sargasso Sea
tatgtttaatattgtgatttttggtaaaccaggatctgggaaaggaactcaggctgattttttaaaagataaatatgatttatatcatatatctacaggtgatttatttagaaaaaatattttaaataaaactgatctgggtattgaagcaaagtcatttcttgataatggagatcttgtgcctgacattgttacaattaaaatgcttgaaaatgaagttttagcaaataaggatgctaatggttttatttttgatggttttccaagaacacataatcaggctgaatccctcgatatttttcttgaatctattaaccagaagataaatgcaactattgctctagaagttgatgaagatgagctaataactaggttattagatcgaggtaaaactactaatagatctgatgatcaggatatcgaaaaaattaaaaatagatttaacgagtataacaataagacatctatactaattgatttttatcaaaaacagtcaaagttttactcagttaatggtcacggaagtgttgatgatattacttcaagattattcaatcttgttgatagtttaatctag

SEQ ID NO: 251979 - DNA, 580 bp, Unknown
  Bacterial polypeptide expressing nucleotide sequence isolated from the Sargasso Sea
atgaagaatttaattctacttggacctcctggagcaggaaaggggactcaagctagaactttatgtgaagcatttgggtttgttcaattatcaaccggagacatgttgagagaagctaagagtgatcattctgaactaggaaaaaaagttgccaatattatggcaagaggtgagttagttactgatgacatagtgataggacttatcgaaaaaaaacttacaaatgaaaaaaatagtaaaggatttatttttgatgggtttcccagaactctagcacaagctgatgttttgggagatttgctagaaacaattggtcagaaactggatcatgtagtagaattgtatgtggatgatgaaaaattagttcagcgcataattgggcgtttcacatgttcagcttgtggtgaattatatcacaaaactaccaaaattcctaaaaatcccaatatttgtgatatatgcggtagtagagacacatttaactataggcaagatgataatgaagattctttaaaaattagattgctagcttattatagagatacttctccgctgattggaatattatcattcacataat

SEQ ID NO: 251980 - DNA, 646 bp, Unknown
  Bacterial polypeptide expressing nucleotide sequence isolated from the Sargasso Sea
atgcgcattatcctattgggcgccccaggtgccggtaaaggtacccaggcccagttcattatggaacagtatggtatcccacaaatttctactggcgatatgttacgtgctgctgttaaagccggtactccgctgggtttagaagcgaagaaagtgatggatgcaggccaactggtttctgatgatctgatcattggactggttaaagagcgtatcgcacaggacgactgtgctaaaggtttcctgttagacggtttcccacgcactatcccgcaagcggatgcgatggcggcaaacggtatcagcattgatcacgtgattgaaatcgatgtgccagacgaagaaatcgttaagcgtatgagcggccgtcgcgttcacccaggttctggccgtgtttaccacgtggtattcaatccacctaaagtggaaggcaaagacgatgtgactggcgaagacttagcaattcgtccagatgacgaagaagccacagtgcgtaagcgtttaggcatttaccacgaacaaactaagccattggttgaatactatggcaaagtggctgcggcgggtcacactcaataccataaatttgatggtactcagtcggttgctgctgtgagtgaacagttagccagcgtgctgaaataag

SEQ ID NO: 251981 - DNA, 553 bp, Unknown
  Bacterial polypeptide expressing nucleotide sequence isolated from the Sargasso Sea
aatgaagcttttgattatgggaccaccgggagctggtaaaggaactcaagcaaaaattttagcgcaaaaatttaacctagttcatctttctacgggagatattcttagaaaggagattgataaagcttcaaagactggactgaaagcacagacatatatgaatgctggaaatcttgttcctgataaagtgttattagcgatgatgaactcaactttaactgaattaaaagatcacggggttattcttgatggttttcctagaacaataccacaggcaatgggtttatcaaaaatttttcaatctttaaaccagactattgatggaattataaatattgaagttgataaaaatgttttaattaatcgtttggttgaaagggcgaaaaactcaggaagagctgacgatacagaagaagtaattataaatcgtcaaaatgtttatttagaattaaccgccccattgattgaattttatcaaagcgatataatcactatcaatggagatggttcgattgaaaaagtcaccgaaagaatcttaaagcgtattcactaa

SEQ ID NO: 251982 - DNA, 574 bp, Unknown
  Bacterial polypeptide expressing nucleotide sequence isolated from the Sargasso Sea
aatgaaattaattatatttggacctcctggttctggaaaaggtactcaggcatctatattagcaaaaaaaaacaaaataccccatctctcaacaggagatattttaagatctaaacttgaggacgttgatgatttgggtcaagagttatctaaaataatgtcagttggcaatcttgtgcctgattcaattataaatccaattgttgctgataaattacttagcaatgattgtaaaaatggatttatacttgacggctatcctcgtaacaaatatcaatctgattttttaatagattttttaaaaaaaaataatttagatatcgatttaatcatagattttatagctgacacaactactgtaaaaaaaagaatcatggaaagatcaaggattgaaaataggtcagatgataacttagaagtaatcaaaactagattggataaatattttgctgaaactcaacctttagcagttatgttcaaggcaaaatttaaagacaagttttttgagataaatgcgacacaggaaataacaaaaattcaatatgatattgaaaataagcttaaaaatgcctaa

SEQ ID NO: 251983 - DNA, 547 bp, Unknown
  Bacterial polypeptide expressing nucleotide sequence isolated from the Sargasso Sea
ttgacaaatatcactatttttcttggaccaccaggtgcaggaaaaggaactcaggctgaaaaattatctgaaacttttaagcttccccatatatctactggggtaatgttaagagatcatgttgaaaatgaaacggaactaggtctcatagctaaagacattttaaacaaaggtaatcttgtatctgatgatttagtcacggcaatgttgattgaaaggataggaaaacctgattgtgataacggagctatattagatggatttcccaggacaatcgctcaggcagaaagtcttgagattgatgacttgaaaattaaaaacgtaattttatttgaggttaatgaagaagaattagttaagcgtatgttggatcgtggaagagaagatgataccgaagaatccataaaagtacgatttgaagtttataaaaaagagactgctccattggttgactattacagcaacaagggagttctaaattctgtaaatgcatttggtgagattgatgacatattcaatgaaatttcaaagtttatgaaattatgat

SEQ ID NO: 251984 - DNA, 886 bp, Unknown
  Bacterial polypeptide expressing nucleotide sequence isolated from the Sargasso Sea
aaaaaaatatcaagaatcgagagaaaaagcgcaatcatagctttttcagcagaggaagtttatgcaatagctgaactaataagaaggcaaaagggtgggtctgcaatagttatgggttcacttagcccaaaaactagaaatgcacaggtaagcttgtatcaatctggagatgtcgattacttagttgctacggatgcaattggtatgggaattaacatggatttagataatgtatatttttcaagtttaaaaaaattcgatggtaaaaaattaaggagacttaaacttccagaaataggtcaaatagcaggccgggcaggaagacacttaaatgatggatattttggagtgacaggtgattgcgacccattaaattcagaagaagttgatcttttagaaggtcataattttcctgaattaaattcaatcttttggagaaactcaaatttgaatttttcgaatagtgaaagcttgattagatcattagaggaaaaacctaacgaaagttggctcagaagaatacatgaatgtgaggatgaaaaagttttaaaatattttttaaaagataataagttatatgatttaagtaatgatagtaataaattaaaaatactttgggaatgttgtcaaattcctgattttgttaaaaaaacatatggtcaccactatgaagttgtaaaaaaagtatttgaatttttaattagtaaaaataatagaattcccaatcaatatttaaaacagcaattgacttatcttgataagcttgatggaaatgtagactctatatcaaacagaattgcaaatgtaagaacatggtcatatgtaaccaataaagccaactgggtagaaaatcaggattactggatagaaagaacaaatttttaga

SEQ ID NO: 251985 - DNA, 336 bp, Unknown
  Bacterial polypeptide expressing nucleotide sequence isolated from the Sargasso Sea
aatgagcactaaaacatttgcaatgataaaacctgatgcaatgcttaatgggtatatgggtaaaattcttgacgatacaattagtgcaggatttaatattcttgctgcaaaactaatacgtatgacaaaagcagaagcagaaggtttttatgctattcataaagatcgttcattttttgatgaactaaccacttttatgtcttcatcgcagacaatggtttttgtattgcaaaaagaaaatgctgtttcagcctggcgtaaaacgattggagcgacgaatccagaagaagctgatgaaggaacaattcgaaaaaagtttgccacttcattaagtaa

SEQ ID NO: 251986 - DNA, 118 bp, Unknown
  Bacterial polypeptide expressing nucleotide sequence isolated from the Sargasso Sea
gcagaagaagggtactatcagaaaaaaatatggaatatctatagataaaaactcagtccacggctcagatagtccagaaaatgcaaaaattgaaatcgatttcttttttaaagattag

SEQ ID NO: 251987 - DNA, 211 bp, Unknown
  Bacterial polypeptide expressing nucleotide sequence isolated from the Sargasso Sea
tatggccattgaaagaacattttctatgataaagcctgacgcaacagagagaaatttgactggtaagatttgtgcaatgcttgaaaaaaatggtttgaagatcattgcctcgagaagaacaagaatgactcctgaaaaagctgctcaattttactctgttcattcagaaagacctttttttcaaagtctttgtgacttcatgtgttcggga

SEQ ID NO: 251988 - DNA, 256 bp, Unknown
  Bacterial polypeptide expressing nucleotide sequence isolated from the Sargasso Sea
tatgagtaatattgaacagacgttatcgataattaaacctgacgcgatggagagaagtttggacgctgaaataaaattaatgtttgaacaagatggctttaggataacaaaagaaaaaaaaatccaattagcaaaacatgaagcagaacaattttataaagtacacgaaactaaaccattttataatgatttatgtgaatatttatcatcaggccctataacggtgatgattcttgaaaagaaaacgctgtattag

SEQ ID NO: 251989 - DNA, 886 bp, Unknown
  Bacterial polypeptide expressing nucleotide sequence isolated from the Sargasso Sea
aagactctccaagaggtccctgttgctgtatcagtaattagtgctgacgaaatagacaaagcaaatgtggtcgatgcttttgatttaatgcaagttgtggcttctttggacacaagacaatatcaatcttcaaaaaatgctgctttctttatcagaggcttcggaaatggctctaataataacggtgttgagccctctgtagctttatttgttgacggagtgtatcgatcaaaaatgcaaagtagaattaacgacttgccaatggttgaaagagttgaggttcttcgtggaccccaaagtactttgtttggtaaaaatgcaactgccggtgttattaatataattacaaaaaagccttcttttgagaaattcggaaagatttcaacgtcaattggtaattacaattcaagaatagtaaaagcttattacacggcaccacttagtgagactatggcttttagtttgaatgctaatactaaccaagctgatggtcatgctaaaaatacagtgacaggcaatgataccaacaacagagatagatattctttaagagcagatttattaatcgaaactgcagacgatttagaaattaggatcactgctgattacgatgaatacgatgagttttgttgccaagtaggtaatgtttctgcaggtcctgcgaaagaacttgcttatgctcttggtgctcaagctgctccaaataatccattcaccgatcaggtgcatttcaatttcgactcttttgcaaaaggtgaaaattccggaatttcagtaaacattgttaaagaaatggaaaatatgactttcacaagtattacttcatcaagggattcagacagccttgaaagtcaagatattgattttgatagctctagaatactta

SEQ ID NO: 251990 - DNA, 397 bp, Unknown
  Bacterial polypeptide expressing nucleotide sequence isolated from the Sargasso Sea
atgaataatacacttgccctaattaaacctgatgctatgcaaaaaggatttaaagatgaaattagagaagatataatgaataacggttttataatcgctgaagaaaaaacacttcatcttagtgttgaacaagctaaaggtttttactctattcataaagataaaccattttttgaagaacttgttgaattcatgacttcaagcgaaactcatatcatgaaactggaaaaagctaatgcagtttcagaatggagaaatttaatgggtgcaacaaatcctgcagaagctgaagcaggtacaataagagcaaaatatggaacagatatttcaatgaatgctactcacggatctgacagtaatgaaaatgcagaaattgaaataaacttctttttctagg

SEQ ID NO: 251991 - DNA, 322 bp, Unknown
  Bacterial polypeptide expressing nucleotide sequence isolated from the Sargasso Sea
gcaaaactacttcgtatgacaaaaactcaggcagaaggtttttatgcaattcataaagatcgcccctttttcgatgaattaacttcctttatgtcttcaatcaaaacaatggtaattgtatacaaaaaagaaaatgccgttttagcttggcgtaaaacaataggagcaactaatccagagaatgctgaagaaggaacaatacgtaaaaaattcgctacttcattaagtgagaatgctgttcatggggcagatagtgacgaaaatgcaataaaagaaattggatttttttttactgaacacgaattaatatcaaataactaac

SEQ ID NO: 251992 - DNA, 269 bp, Unknown
  Bacterial polypeptide expressing nucleotide sequence isolated from the Sargasso Sea
aatgattgaaaaaacgttatcaattattaaacctgatgcaatagaaagaaaccttgttaaagatataaaggacatttttacaaagaataatctaactattaaaaatagtagaaaaatacatatttcaaaagaagaagcttctgagttttacaaagttcatcaatcaaaacctttttacaatgatttatgtgcgtatttatcatctggacctatagttgtaatgattttagaaggagacaatgcagtttcggaaatagaaaaattatggg

SEQ ID NO: 251993 - DNA, 175 bp, Unknown
  Bacterial polypeptide expressing nucleotide sequence isolated from the Sargasso Sea
aatgcgatttcaacatatagaaagcttatggggagccacaaatccagaagaagccgaagaagggaccttaagagcaaggtttgcagaatctctttcaaaaaatgcagttcatggttcagattctgctgactcagcgattagagaaattgatataatgtcgaaaattttcgactaa

SEQ ID NO: 251994 - DNA, 108 bp, Unknown
  Bacterial polypeptide expressing nucleotide sequence isolated from the Sargasso Sea
aatggcactggaacaaactttatcaatcatcaagccagacggagtaaggcgaaatcttgtgggaaaaatactcagtcgatttgaagaaaataatctgcgcattgttgc

SEQ ID NO: 251995 - DNA, 145 bp, Unknown
  Bacterial polypeptide expressing nucleotide sequence isolated from the Sargasso Sea
tccaaaagaagcagctgaaaacactataagaaaagattttgctacaaatgtacaagaaaatgcggttcatgggtcagacagtaatgaaaatgcccaaaaagaaattgcctttttctttacggatagtgaacttctcagtaattga

SEQ ID NO: 251996 - DNA, 148 bp, Unknown
  Bacterial polypeptide expressing nucleotide sequence isolated from the Sargasso Sea
catgaaacaaactttagtactttgtaaacccgatgcagttgaacgtggtttagtaggggaaatcatttcacggtttgaacaaaaaggaatgaaaatcattgctctacgaatgctagctataggacctgacctagcagagaaacactac

SEQ ID NO: 251997 - DNA, 661 bp, Unknown
  Bacterial polypeptide expressing nucleotide sequence isolated from the Sargasso Sea
gccgtcgacgcgacgggcgagccgcacctcgtgcatatcgccgcgcccggcacgatccgagacacgcaccacaacctcgccggcgagccgcgcgacacgctcgacctgaccggctgcaccgtctccaccggcgaagtccgggctgcgccgggctgggccaccggagcgggtgtgccggccgtcgaggcggtcggcgcctgggtccgggcgcagcagatggtgggtgccctggagagctgtctcggctccgccctcgatcatgcgcaggagcggcagcaattcggccggccgctcgccaagttccaggcgatccagcacatgctggccgaggccgcgggccacgtcgcggcggcgagtgcggccgccgacctcgcggccgcctgctggggcgacccgcgcttcgtcctcgccaccgctatcgcgaaggcgcgctgcggcgaggcggcgggccacgtcgcggcgatcggccaccagatccacggggccatgggcttcacccaggagcacccgctccaccgcgcgacgcggcggctgtggtcctggcgcgacgaattcggatccgacgccctctggcaggagcggatcgggcgcgcggtctgcgcgggcggcggcgcggccctctggccgatgctggtccggctccggggcggcgccggctgag

SEQ ID NO: 251998 - DNA, 130 bp, Unknown
  Bacterial polypeptide expressing nucleotide sequence isolated from the Sargasso Sea
atggaaagaactttatcaataattaaacctgatgctactaaaagaaatattactggatccataaataatattattgaaaattcaggtttgagaattattgctcaaaaaagaatacatctaaataaggaac

SEQ ID NO: 251999 - DNA, 263 bp, Unknown
  Bacterial polypeptide expressing nucleotide sequence isolated from the Sargasso Sea
tatgaataatatagaaaaaactttgtcaattattaaaccagatgcaattgagagaaatttagataatgaaattaaagaaatatttaaaaataaaggtttttcaattgctaaagaaaaaaaaattcagatagaaaaatctgaagcagaaaaattttacaaagttcatgaaacaaaaccattttataatgatctttgcttgtatctttcatctggaccaattttagtaatggtacttgagagagaaaatgctgttcttgcaaata

SEQ ID NO: 252000 - DNA, 385 bp, Unknown
  Bacterial polypeptide expressing nucleotide sequence isolated from the Sargasso Sea
ttgtctgaacaaactttattcattgtaaaacctgatggtgtaaaaagaaaattaattggagaaatagtctcaagatttgaaaaaaaaggatttacaattttaaaattaaaaatgttcacattcaccaaagaattagccactgaattttattcagtgcataaagataaaccattttttggtgaattattggaatacatgacatctggtcctgtagttgttacagtagttgaaggaaataatgctgttgcaacaacaagacaaatggtaggtgcaacaaaatcattcgaggcagaacctggttccatccgaggtgattttggtctaggtttcactgaaaatattattcatgcatctgattcaactgaaagctttgataaggaagtaa

SEQ ID NO: 252001 - DNA, 103 bp, Unknown
  Bacterial polypeptide expressing nucleotide sequence isolated from the Sargasso Sea
aataagagcagattttgcaaccaaactagaagaaaatgtagtacatggttctgattcagaagagagtgctgagagagaattaggccttttttttaacaattaa

SEQ ID NO: 252002 - DNA, 265 bp, Unknown
  Bacterial polypeptide expressing nucleotide sequence isolated from the Sargasso Sea
tatggataaaacattctcaataatcaaacctgatgcaacaaagagaaatttaaccggttctataaataaaattattgaagaaaatggtttaagaattattgctcaaaaaagaattaaacttgatattgaaaaagctagaggtttttattcagttcatcaagataaatctttttttaatgaattaatagattacatgatttcagagccaatagtagtgcaagtcttgaaaggagaaaatgcagtaaacaagtatagagatataatg

SEQ ID NO: 252003 - DNA, 184 bp, Unknown
  Bacterial polypeptide expressing nucleotide sequence isolated from the Sargasso Sea
attctggaaggaaatgatgcagtagcagaaaatagaaggattatgggctctacagatcctaaaaatgcaaatgatggtacgttaagaaaatcatatggcctatcgattgataaaaacactgtgcatggctcagactcattggagaatgcaaaaaaagaaatagattttttctttaaagaataaa

SEQ ID NO: 252004 - DNA, 139 bp, Unknown
  Bacterial polypeptide expressing nucleotide sequence isolated from the Sargasso Sea
ggccgacgccgctgcaggcacgatccgtgcggaattcgccgaatccatcgaggccaactcggtccatggatccgatgctccggagaccgcggccgaggagatcaagttcttcttcacggatgaagagatcgtcggctga

SEQ ID NO: 252005 - DNA, 169 bp, Unknown
  Bacterial polypeptide expressing nucleotide sequence isolated from the Sargasso Sea
tatgagtaataacgagagaactctttcaattataaaacctgatgctatagaaagaaatttatctgaacagattaaattaatttttacaaaaaataatttaacaataatagactcaaaaaaacttcatatttcaaaagatgaagctgctgagttttataaagttcatcaa

SEQ ID NO: 252006 - DNA, 2134 bp, Unknown
  Bacterial polypeptide expressing nucleotide sequence isolated from the Sargasso Sea
gaaatgtcaaaaaataaagttacagcagttcttggtccaacaaatactgggaaaacctttctagcaatagaaactatgctttcttttgaatcaggaatgattggtttcccattgagattattagcaagagaggtctatgacaaaattataaaaaaaattgatccattaaaagtagctctaataacaggagaggaaaagattatcccaattaatgcaaaatattttctttgcacagtagaatcaatgcccattgataaaaatcttgagtttgtgggtgtagatgaaattcagatgtgtagcgataatgaaaggggtcatatttttacagataggttattaaatcttcgaggtgaaaaattaacaatgctaatgggatctaatacaataaaacccattttacaaaaactgagtgatgatattgaatttattaataaagaaagattttcaaaactttcatttgggggacataaaaaaatatcaagaatagagagaaaaagtgctgtaatagctttttcaactgaagaagtttatgcaatagctgagctcattagaagacaaaaaggtggagctgctattgttatgggttcattaagtccaaaaacacgtaatgctcaagttagtttgtatcaatctggggacgtagattatttagttgcaactgatgcaataggaatgggtataaatatggacttagatcaagtttttttttcaaatattaagaaatttgatggtaaaaaattaagaagacttaatatttctgaaatagggcagattgcaggacgagctggaagatacttgaacgatggttcgtttggaataactggtgaatgtggtgagattaatcctgaagaaattgaagcattagaacaacataaatttcctgaaatacagcaaatattttggaggaattcaaaattaaactttagtagtaaattaaatttaattaaatctcttgaagagaaaccggataaagaatggcttagaagaatttatgaatgtgaagatgaaaaagccttaaaatattttttaaaagatgcaactgactttcaaattctggagaattcatatgatttaaaaattttatgggaatgctgccaaattcctgattttgtaaagaaaacatatggaaatcatttagaaattattagtaaagtttttaaattcctaaccagtaaaaataaaagaattccaaatcaatatatgaaagaacagctagcttcgttagataaaattgagggaaatgttgactctatatcaaatagaattgcaaatgttagaacatggtcttacgtcgcaaacaaagcaaattgggtagaaaatcaggattactgggttgaaagagcaaaaaatcttgaagataaactttctgatagattgcatgaagaattaacaaaaacttttattgataaaagagcaagtgtgcttgctagagggttaaaacaagatatcactttgagaaccgaaattatagaagatgaaaaagtgatgattaataatcaatatattgggaatttaaaaggtttaaaattgcatttagatttaaaggttgatgctctagatgctgatataaaatctcttaaaaaagcagctagacaaaatgtaagtccagaaataatcaaaagaataaagcagataattgatactggattaatagaattaaaaaaagattttaaaatttattggaaaaataatcaaatagctaaattattaccaggtgaagattatttaaatccaaaagtacatctccttatagacgatatgattgaaaatgacgagagaagtaaacttgatttatttattcaaggatggatacaaaaaaaaataaatacggaattaaaaagcctggttgatttaaaaaatactcaagaaaaaaactcagaccttagagctttagcgtatcacctatatgaaaacaatggggttgtgaagagagagaatgttttatcttatcttaaaaagcttgatcaaaatgagagaaaaaagttaagaaatttgggagtaagatttggacgttatcatatctttttatttaaattatttaaaccaagcacagtatctttgagaactctattgtggaaaaactataatgaaaaaaatgaaaaattagaacctcccaacgtttggattgaatttt

SEQ ID NO: 252007 - DNA, 307 bp, Unknown
  Bacterial polypeptide expressing nucleotide sequence isolated from the Sargasso Sea
tatgaatagaatagagcaaactctatctatagtaaaaccagatgcagtcgaaagaaatcttactgaaaatatcaaaaaaatttttttagaaaataacttaaaaattgttcaagaaaagaaaattcaaatatcaaaagaggaagcggctgaattctacaaagtccaccaaacgaaacctttttatgaaagactttgtagttatttgtcctcaggtccaattacagtaatgatattggaaggcgaagatgccgtaaaaacaaacagaagaataatgggagctacagacccaaaaaatgcgacgaaggca

SEQ ID NO: 252008 - DNA, 397 bp, Unknown
  Bacterial polypeptide expressing nucleotide sequence isolated from the Sargasso Sea
atgaataatacacttgccctaattaaacctgatgctatgcaaaaaggatttaaaaatgaaattagaaaagatataattgataatggctttgtaatagctgaagaaaaaacactacatctaagcgttgaacaagctgaaggtttttactctatacataaagataaaccattttttgaagaacttgttgagttcatgacttcaagcgaaactcatattatgaagcttgaaaaagttaatgcagtttcagaatggagaaatttgatgggcgcaacaaatcctgcagaagctgaagcaggtacaataagagcaaaatatggaacagatatttcaatgaatgctactcatggctcagatagtaatgaaaatgcagaaattgaaataaacttctttttctaag

SEQ ID NO: 252009 - DNA, 85 bp, Unknown
  Bacterial polypeptide expressing nucleotide sequence isolated from the Sargasso Sea
aatggctattgagcgcacactatcaatcattaaacctgatgcaacttctagaaatattcatcggaaagataataagcagatttga

SEQ ID NO: 252010 - DNA, 955 bp, Unknown
  Bacterial polypeptide expressing nucleotide sequence isolated from the Sargasso Sea
atggataaagatcaaaatacaaaaggtattttatacataatgactggaatggcttttttttccattcaagattctttaataaaatttatatataacgatattgcgttatttgagctatacttgataagaacaataatacaagcaagtctacttttagctttagtgttagtaacaaagcgtaatgtttcttttaaaacacactaccctttcttaactcttttaagagttgtatgtttcttttttggttttagttttttttatatttctttgacctttatgacacttgcaatgacaagtgccttgtttttctcttgcccattttttatgtcaatgtttgcaaaattctttctaaaagaacaaattggtattagaagatggtcagcaatagttgtaggttttattggtgtaattgtagttttaaatccaaccctagaggaatttaattatcttaaattggcaccagtagcttgtgctatttgttatgctatttcgatgactataactaaatatacttctgacaaggatgatatttatacacaaatgtcttggttatatgtattcgctatttctgcggggataataatttttttagtaagtggtgacggtaaatttaacactttctctgatccgacttttcaattcattaccagagagtggtttacaaatccttcagaggcatggccttatgtagtggtaatgggtattgttgcttttatatcatttttgtgcgttttctcagcttatagtattgcatcaccttctatcatttctttatttgaatactcatatataatttgggcaatgcttgctggatatattttatttgaaacaattcctttaccaagaacattttttggtgccgcaattattatagctgccggtgtttatatttactatagagaaaaagtaaaaggtcaaatgattgcaacagatactccaactgttaatagatgat

SEQ ID NO: 252011 - DNA, 427 bp, Unknown
  Bacterial polypeptide expressing nucleotide sequence isolated from the Sargasso Sea
ttgaacaataaaacttttgcaataataaaaccagatgctgtaaaaaatggccactcaggacaaataatcgatagaatcattatcaatgattttaaaatattaggattaaaactaatacgaatgacaaaatctcaagccgaaggtttttataaagtacactctgacaaacctttcttcactgagctgacagagtttatgtcctcaggaaaatgcattgtaatggcacttgaaaaagttgatgccgtaaatcagtggagaaatttaattggcgcaacaaaccctgatgaagctgcagatggtaccattagaaaagacttcgcttcttcattaggtgaaaatgcagtacatggagccgacagcgatgaaaatgcaaacagagaaataggttttttcttttccaatgttgaattaatagcaaatcactaac

SEQ ID NO: 252012 - DNA, 1366 bp, Unknown
  Bacterial polypeptide expressing nucleotide sequence isolated from the Sargasso Sea
ctgcagttgttcgacccgcttactgggcgcgtcaagcagaagatcccgcgttttaccgtctaccccagcagccactacgtgacgccgcgcgacaaggtgctggccgccgtcgagaccatcaagctggaactggctgagcgcctgcaacagctggtggccgacggcaagctggtcgaagcgcagcggctggagcagcgcacgcggtttgatctggaaatgctcagcgaggtgggccactgcaagggcatcgagaactacacgcgtcacctgtcgggcgctgcgccgggcgatccgcccagcacgctgacggactacatgcccaaggacgcgctcatgttcctggacgagagccaccagatgatcggccagctcagcgccatgtacaacggcgaccgtgcgcgcaagaccacgctggtggagtacggctttcggctaccgtcggcactggataaccggccgctcaagttcgaggagttcgagcagcgcatgcggcaggtgatctttgtatcggccacgcccgccgattacgaaaagacccattcagggcaggtggtggaccaggtggtgcgccccacgggtctggtggatccggtggtggaggtgcgacctgccacccatcaagtggatgatgtgttgcaagaaatacgcattcgggttgaaaagcgcgagcgcgtactcattaccacgctgaccaagcgcatggccgagcagttgaccgactatttgacggataacggtgtgaaggtgcgctacctgcacagcgatgtggacaccgtggaacgcgtggagatcatccgggacctgcggctgggcgcgtttgacgtgctggtgggcatcaacctgctgcgtgaagggttggacatccccgaggtgtcgctggtggcgatcttggatgccgacaaggaaggcttcttgcgcgcagagcgcagcctgatccagacgattggccgtgctgcgcgcaacttgagcggccatgccatcctgtacgccgaccgcatcaccgactccatgaaaaaagccatgggcgaaacggaacgccggcgcatcaagcagatcgcatacaacgaggccaatgggatcacgccgcgcagcattgtcaagcgggtaagagacctgattgacggggtgtacagcgaaaaagcgggcaaggacgctgaacgcctggagcaagaagccctgcagcgtgcgcaggtggaggacatgtccgagaaggacgtggcccgcgagatcaagcgcctggagaagctcatgctggaacatgcgcgcaacctggagttcgagcaggccgcccgggtgcgcgaccagctgacgcggctcaaggaccaagcgtttggagcccacggcagcgattccgtagccttgtaga

SEQ ID NO: 252013 - DNA, 397 bp, Unknown
  Bacterial polypeptide expressing nucleotide sequence isolated from the Sargasso Sea
atgaataatacactcgccttaattaaacctgatgctatgcaaaaaggatttaaagataaaattagaaaagatataatggataacggctttgtaatcgctgaagaaaaaacacttcatctgagtgttgagcaagctgaaggtttttactctattcataaagataaaacattttttggagaacttgttgaatttatgacctcaagcgaaactcatattatgaaacttgaaaaagctaacgcagttttagaatggagaaatttgatgggtgcaacaaatccagcagaagctgaaccaggttcaataagagcaaagtatggaacagatatttcaacgaatgcaactcatggctcagatagtaatgaaaatgcagaaattgaaataaacttctttttctaag

SEQ ID NO: 252014 - DNA, 950 bp, Unknown
  Bacterial polypeptide expressing nucleotide sequence isolated from the Sargasso Sea
gatggacacaaaccaaaatactaaaggcattttttttataatgactggtatggcctttttttcaattcaagatggtttaattaaatttatttttgaggatatagcgttatttgaactttattttggaagaacacttatccaagcaatatttttgctgtgttttattattataacaaaaaaatcaatttcgttaaaaactcactaccccatgttgaccttggtaagggttgtttgttttttctttggatttagttttttttatatttctttaacattcatgacacttgctatgacaagtgcgttattcttctcttgtcctttttttatgtccatgtttgcaaagttttttttaaaagaaaaaattggtataagaagatggagtgcaattgttgttgggtttattggtgtattaatagttttaaatccaacattagaagaatttaatttttttaaattagcaccagttgcttgtgcgctttgttattcaatatctatgacaataactaaatatacatcagataaagatagcatttacacacaaatgacatggctttatatttttgcattacttgcaagtttattaatatttgctgtgagtggagatggaaaatttaataccttcactgatccaacattacaatttattgttagagaatggtttacaaacccatctgaagcttggccttatgttttaattatgggaacagttgcatcaatttcatttttttgtgtttttactgcttacagcattgcgtcaccttcagttgtatcattgtttgaatattcttatattgtttgggcaatattagctggatatattttatttgaaactattccagttccaagaaccttgtttggtgcatgcataattataggagctggtgtttatatttattttagagagaaagtgagaggacaaatgattgcaactgatacaccacctaataaat

SEQ ID NO: 252015 - DNA, 2475 bp, Unknown
  Bacterial polypeptide expressing nucleotide sequence isolated from the Sargasso Sea
ataaaatcacagcagttctcgggcctacaaatactggaaaaaccttcctagcatttgaaactatgctttcttttgattcgggcatgattggtttccctttaagacttttagcaagagaagtttatgacaaaattataaaaaaaatagatccatcaaaagttgctttgattacaggtgaagaaaaaataattccaatgaatgcaaaatattttctttgcactgttgaatctatgccattggataaaagtttagaatttgttggaatagatgaaatacaaatgtgtaatgatcacgagcgaggtcatatttttacagatagattgttaaatatgagaggtgaaaagcttacaatgctcatgggttcaaactctattaaaaaaattattcaaaaacttgatgatgacattgaatttaaaaatcgagaaaggctttctaaattatcttttggtggtcacaaaaaaatttcaagaatagagagaaaaagtgcagtaattgctttttctactgaagaggtatacgcgattgcagaattgataagacgtcaaaaaggtggcgccgctattgttatgggttcacttagccccaaaacaagaaactcacaggtaagtttatatcaatctggggatgttgattatttagttgctactgatgcaattggaatgggaataaatatggatttagataatgtttatttttcaaatttaaaaaaatttgatggaaaaaaactaagaaatttaaatattccagaaattgggcaaatagcaggtagagcaggaagatatttaaatgatggtatgtttggtacaactggagaatgcaaagaggttggacctgaggaaattgaagcattagaatctcatagctttccagatatacaaactatcttttggagaaactcaaaattgaattttagtaataaagtttcattattaaaatctttagaagagagaccacaaaaagagtggctaaaacgaattaatgaatgccaggatgaaaaggtattaaaatattttttaaaagaatcatctagtattaaaattcaagataatagtgaagtcttacaaatactttgggaatgttgccaaatacctgattttgtaaaaaaaacgtatggtcatcactttgaagttgtaagtaaaatttttaattttttaacacttggggaaaaaaaagttccaaatcactatatgaaagaacagctatctttattggataaattagatggaaacgttgactctttatccaatagaattgctaatgtcagaacctgggcttatgtttcaaataaatcaaattgggttgaaaatcaggactattggattgagagaactaaaaatctagaagataagctatctgatagacttcatgaagagttaacaaaaacatttatagataaaagagcaagtgttttggccagaggtttaaaacaagacattacgtttgaaacagagattattaatgatgaagaggtaatgataaatgaacaatttattggtcgtttaaaaggtttaaaattagaattagatcttaaagttgatacgttggatgctgatgtaaaatcattaaaaaaggctgcaagacaaaacgtagttcctgaaattataaaaagaataaatcaaataattgatactggcttaattgaactgaaggatgattttaaaatttattggaacaataatcaaattgctaaattaattccgggctccgattatctaaatccacaaattcaaataattattgatgaaatgattgaaaatactgaaaaatcaagacttaatttttatttacagtcctggctaaatgataaaattgaaacagagctacaaagtctaatagatttaaaaaatgttaaggataataattcagaactaagagctttagcttatcatctctatgaaaataatggagttgttaaaagagatgaagttataaattatttaaataaacttaatcaagatgaaaggaaaaaattaagaaacttaggtgtaaaatttggcagatatcatatttttttgtttaaattatttaaaccaagctctgtatccttaagaattcttttatggaaaaacttttatgaaaggaattttgacttcttgccaccaacttttggattgaactttttggaagaaaagaaaacacttaataaaaatttaatgcttttatgtggttttgaaaaatttgaaaatctatacgttaggatagatattttagagaggttatttttaatgatttttaatactaaatctgaagataaaattaaagagataaaattaattcctgaaatgttgaatttgctaggttgtaataaagaaaattttgtgaaattaattaaaaaaatgaattataaaacttatgaaaaagataataatcttcactttagatatattccattgagaaaaataataaaaaaagatactaaaaagaatattaatgataatccatttaatgttctttcacagcttaacttaaaataat

SEQ ID NO: 252016 - DNA, 1057 bp, Unknown
  Bacterial polypeptide expressing nucleotide sequence isolated from the Sargasso Sea
catgagaacggactgctcgcatcttactgttgaagcctattacgctgctgcggaggctgcctggaatgctatttggtctgcaccagagtcaccagctgtggtcgaagatgccacaaatgcgtacggcgatgcacttgtcggtcttctgcaaacagcacgagagcaggggcggctccagcccgaaggcctctggatcgggtcacgatatagaccaatccgaatcccaattgttctcaaagggttaccgatttctgcaagtacaattgaaagtattgagccatttcaaccacccaaagacaaacgactttcgcgcaggcactatcggccgggttttggtttgccggtcactattcgtgtgaaacctggccctgaaggaaccattcgtggtgactttgatccaccacggctttctcttgtggcaacagcagtccttcgattccaagttcctgggaatgaaaaaccaatacgaaagtttgtcggtccgttaacaagagaacgcgctcctgcggtgcttgacctggttgagcctttgtcggtgtcgggtgttcacattggtgttgctcatcctccggtggccgccgatctcagtatgcccatgcttgacatgcttgagggcatgccgaagtccggacttgaaggtttcattatgccgtttgaaggcggagtgacggagccgcggctggaatttctacagccccacgtcaagggtcggatacccgtggtattcattcatggactcgccagtgatgaaggcacctggtttgacttgatcaatgatttgcgtgcgtgtccgttctttcagcggtactacgagccgtgggtgtatcactatccaacaggggcttcgtttcttcccgcctcagcaatattacggcagagtttgcgtcgaatagtaaaagaacttgatcctgatggtgaggagaagcagttacaaaaccttgtgcttattgggcatagcatgggtgggctgcatgcaaaacttcaggtcgtggcatcaggagatcatatgtggaatgccatggcgactgtgccatttgatacagtccgaatgcctcga

SEQ ID NO: 252017 - DNA, 430 bp, Unknown
  Bacterial polypeptide expressing nucleotide sequence isolated from the Sargasso Sea
atgttaaaaaacatcacattttcaatgataaaacctgatggagttgaaaatggtcaaattggatcaattataagtaaaattgacagtgctggttttaatattattgctcttaagatgactcaactttcaagaaaaagggctgaatctttctattcaattcatagacaaagaccattttttcaagatttaattaattttataactagagggcctattgtagcaatggtactagaaaaggttgatgcagtaaatgattttagaactttaatcggctcaactgatccaaatgaggctgctgatggcactattagaaagttgtacgcaacttcaaaaggtgagaatgtaattcatggctcagattcggatgagaatgcacaaatagaatgtttttttcacttttcaaattgtgagttattcaatgaaaaataat

SEQ ID NO: 252018 - DNA, 397 bp, Unknown
  Bacterial polypeptide expressing nucleotide sequence isolated from the Sargasso Sea
atgaataatacacttgctttaattaaacctgatgctatgcaaaaaggatttaaagatgaaattagaaaagatataatggataacggctttgtaatcgctgaagaaaaaacactttatctaagcgttgaacaagctgaaggtttttactctatacataaagataaaccattttttgaagaacttgttgaatttatgacttcaagcgaaactcatatcatgaaacttgaaaaagctaatgcagtttcagaatggagaaatttaatgggtgcaacaaatcctgcagaagctgaagcaggtacaataagagcaaaatatggaacagatatttcaatgaatgctacgcatggctccgatagtaatgaaaatgcagaaattgaaataaacttctttttctaag

SEQ ID NO: 252019 - DNA, 2245 bp, Unknown
  Bacterial polypeptide expressing nucleotide sequence isolated from the Sargasso Sea
atgacaaaaaataaaatcactgcagttcttggacctacaaatactggaaaaacctttcttgcgattgaaactatgctttcttttgactctggaatgatcggttttccattgaggcttttagcaagagaagtgtacgataagataactaaaaaaattgatccatcaaaagtagctttaatcactggtgaagaaaaaattattccaataaatgctaaatattttttatgcactgttgaatcaatgcctttagacaagaatttagagtttgtgggtatcgatgagatacaaatgtgcaatgatcatgaaagaggtcatatatttacagatagattattaaatatgagaggtgaaagactcacaatgttaatgggatcaaactcgataaaaaaaattatacaaaaacttgatgatgatattgaatttaaaaatagggagagattatcaaaattatcatttggaggtcataagaaaatttcaagaattgagaggaaaagtgctgtgattgctttttctacagaggaagtatacgcaatcgctgagttaataagacggcaaaaaggaggggcagcgattgtgatgggttcacttagtccaaaaacaagaaatgcacaagtaaatttatatcaatccggtgatgttgattatttagttgctactgatgcaattggaatgggaataaatatggatcttgataatgtttatttttcaaatttaaaaaagtttgatgggaaaaaattaagaaatctaaatatctctgaaataggacaaattgcaggaagagcaggtagatatttaaatcatggaatttttggtacaaccggagaatgtaaagaaattcaacctgaagagatcgaagcattggaaactcatggctttccagatatccaaacaatcttttggagaaactcaagtttaaattttagcaataaagtttcattgttaaaatctttagaagataaacctcaaaaagactggctaagaagaataagtgaatgccaagatgaaaaggttttaaaatatttcttgaaagaagcacaaaatatagaaattcaagataatacggaaactttaaaaatactttgggaatgttgtcaaatacctgattttgttaaaaaaacttatggtcatcatttcgaagtagtaagcaaaatctttaattttttaacaactggaaacaaaagtgttccaaaccattatatgaaagaacaattatcattattagataaattagatggaaatgtagactctttatctaacagaattgcaaatgttagaacatgggcatatgtttcgaataagtctaattgggttgaaaatcaggattattggatagaaagaacaaaaaatcttgaagataaattatctgatagacttcatgaagaattaacaaaaacattcattgacaaaagagcaagtgttttagcaaaaggtttgaaacaagacattaattttgagacagaaattgttaatgatgaagaggtgatgattaatcaacaatacatcggccgcttaaaaggccttaaattagaattagatttaaaggtcgatactttagatgcagatgtaaaatcattaaaaaaagctgcaagacaaaatgtcgggcctgaaatcgtcaaaaggattggtcaaataattaccactggcttgatcgaactaaaaaatgatttcaagatttattggaatggtaatcaaatagcgaaattaatccctggatctgattatctaaatccagaaatttatttaataattgatgaaatgattgagaatagtgaaaaattaagactaaactcttatttgcaaaactggataaatgttaaaattgaaacagagttaaaaagtctaatagatttaaaaaatataaaagataacaatactgaacttagagctcttgcgtatcatttgtatgaaaataatggagttgtaaaaagagatgaagttttaaaatacttaacaaaactaaatcaagaagaaagaaaaaaattgagaaacttgggtgtaaaatttggcaggtatcatatttttttatacaaactgtttaaaccaagttcagtttcattaagaattcttttatggaaaaattttaatgaaaaaaactttgagtttttacctccaacctttggattaaattttttagaggaaaagaaagtattaaataaaaatcttatgttattatgtggttttgaaaagtttgaaaatttgtacgtaagaatagatattttagaaaggttgtttcttatgatattta

SEQ ID NO: 252020 - DNA, 2032 bp, Unknown
  Bacterial polypeptide expressing nucleotide sequence isolated from the Sargasso Sea
tttggtggtcataaaaagatttcaagaatagaaagaaaaagtgctgtaattgctttttctactgaagaagtatatgcgattgcagaattaataagaaggcaaaaaggtggggctgctattgttatgggctcacttagccccaaaacaagaaactcacaggtaagtttatatcaatctggagatgttgattatttagttgcaactgatgcaattggaatgggaataaatatggatctagacaatgtttatttttcaaatttgaaaaagttcgatggcaaaaagttaagaaatttaaatatttctgaaactggacaaattgcaggaagagcaggaagatatttgaatgatggtaaatttggtacaacaggtgaatgtaaagaaataggacctgaagagattgaggcattagaaacgcacaattttccagatatacaaacgatcttttggagaaattcaaaattaaattttgctaataaagtttggttattaaaatctttagaagagagacctcagaaagattggcttagaagaataagtgaatgtcaagatgaaaaagtattaaaatattttctgaaagatgctccaaatataaaaattgaagataatactgaaattttacaaatactttgggaatgttgtcaaatacctgattttgtaaagaaaacttacggtcatcattttgaagttgtaagtaagatttttaattttttaacaaatgtaaataaaaaagttcctaatcattatatgaaggaacagctatccttgctagataaattagatggaaacgtagactctttatctaataggattgcaaatgtcagaacatgggcttatgtatcaaataaatctaattgggttgaaaaccaggactattggatagaaagaactaaaaaccttgaggataagctatctgatagacttcatgaggaattaacaaaaacatttattgacaaaagagccagtgttttggctagaggtttaaagcaagatattatgtttgaaactaagattgttaatgatgaagaagtaatgataaacgaacaatatattggtcgtttaaaaggtttaaaattagaattagatttgaaagttgacacattggatgccgatataaagtctttaaaaaaagctgcaagacaaaacgttgtgccggagattataaagagaataacacaaataattgatactggcttaattgaacttaaagatgattttaaaatttattggaataaaaatcaaatagctagattaattccaggtccagattacctaaatcctcaaattcaattaattattgatgaaatgattgagagtagtgaaaaatcgagactaaatagttatttacaaaactggacaaatggtaaaattgaaacagagttaaaaagtctaatagatttaaaaaatgttaaagataataactcagagttaagagctttagcataccatctttatgaaaataatggggttgttaaaagagatgaagttttaaattatttaaataagcttgatcaagatgaaaggaaaaaattaagaaacttaggtgtaaaatttggaagataccatgtttttttgtttaaattatttaaaccaagttctgtgtcattaaggattcttttatggaagaactttaatgaaaacaatctcgacttcttgcctccaacttttggattaaactttttagaggaaaagaaaatgttaaataaaaacctaatgctcttatgtggttttgaaaaatttgataatttttatgttaggatagatattttagagagattatttttaatgatttttaacactaaatcagaagataaaattaaagacattaagttaattcctgaaatgctgaatttgttaggttgcaataaagaaaattttgtgaaattaattaagaaaatgaattacaaaacttatgaaaaaaataataatatacactttaaatatattcctataagaaaaatagttaaaaaaaataccaataaaaatgttaatgacaatccatttaatgttctttctcaacttaacttaaaataat

SEQ ID NO: 252021 - DNA, 1357 bp, Unknown
  Bacterial polypeptide expressing nucleotide sequence isolated from the Sargasso Sea
ttgaataaaaaacctgtgcgtaattctatagtaattacaataattttactattaatccaaagttttcttattactgaaatggtttttggaattgaacgcaggaaaaagcaggttagtgatgagatttcttatttcatttaccctctaatttatcaggttccaggattaggttcaggaaatggagcaggtgctacatttgttaatcttgtcggagacggttcaactcttagtttgttaaaaattaaaggggaaattgaggttgatagcattgttgcttctgatattcctttattcactcagcatatcactctatctgctgcatatgcagacgggaaaaagggagggtttgctttttatgacagaggaccggattccccagaagatccagaattcactttgaaatttaaacacagttgggcacgtgctgctgaccttggactgaatttttttgagagacaactggaattctattatggaggtgcgtttgctttcccagagattgacctggaaagaagcgaccttgcagactttgatgattgggaaaacatgaccactactgagcaggaggacagtattgcagatttcataaaaaattttctgctttacattgatcttgtaaacatctttgtcaccaggcaaggactcaggattgatttgactgatgaccgaatagacccgagggatggataccgatttcagtatgaaaaatatggatttgaaggggagggactaaaaaattttgatgtcgaagatcattcattgactgcctactatccaaatgaggatctaagttcagttttagttgccaatttatttttttcaaagtcaaacgtaaagaaacgtttaagtattttcggagatagcgatgtggaagatactgaaaaggcagtttctgaatgtattgaggaatctaaaaaagaggagagggattcttcaatttcaatagaaacatcttgcaggggatttgtcaggggagtacaggactttaatttggaaggtaataattcaaacgctacatctcttggtgggccaaacagattaagaagctatccaatatccagattttatgataagtactcattttttgccggacttgaatttagaacttactatttagaaagctcaactccttttaattttatttttgaaaaaggtgtttttgaggcagttcaatcagcggtcttttatgagattgggcaggtatccccgactaataattctgaattgtacagcaatttcaagtattcaacaggaatagggctaaggcttgtattttcatcagttgttttacgtgcagattatgccacaggaaaagagggtcaggagaccacagttttcattggttatggattttagt

SEQ ID NO: 252022 - DNA, 239 bp, Unknown
  Bacterial polypeptide expressing nucleotide sequence isolated from the Sargasso Sea
accattttataatgatttgtgtgcttatttatcctctggaccaattgttgtaatgagtcttcaaaaagaaaatgctgttctagaaaatagaaaatttatgggagcaactaaccctaaagatgcagaagaaggaacgcttcgaaaaaaatatggtatttcaattgataaaaattctgttcatggatcagatagtgttgaaaatgctaagatcgagttagattttttttttaaagattagt

SEQ ID NO: 252023 - DNA, 178 bp, Unknown
  Bacterial polypeptide expressing nucleotide sequence isolated from the Sargasso Sea
tgcaattctaaaaaatagagaaatcatgggagctacaaatcctgatgatgctgaagagggaacaattagaaaacagtttgctctatcaatagaggcaaattctgtacacggctctgattcctctgagacagcaattgaagaaattaaatacttctttgatgagtctgagattatataa

SEQ ID NO: 252024 - DNA, 181 bp, Unknown
  Bacterial polypeptide expressing nucleotide sequence isolated from the Sargasso Sea
atcctgtcagtgcggggccctggaacaataagaggagattttgctgtcgatatcggacgaaatgtagtccatggatcagacggccctgaaacagcggaaagagaattaaacatattcttcaaaccagaagaattagttaactatgagaaaaatgcagatacgtgggttagagaatcctaac

SEQ ID NO: 252025 - DNA, 175 bp, Unknown
  Bacterial polypeptide expressing nucleotide sequence isolated from the Sargasso Sea
cttgaagcagagcctggaacaattagaggtgatttagctattgatattggtaggaatattattcatggttctgatggagaagatactgcaaaatttgaaattgatctatggtttaacgaagaggaattatgtgagtgggaaacttctgatgcaaaatggcgatctgaaaattaaa

SEQ ID NO: 252026 - DNA, 130 bp, Unknown
  Bacterial polypeptide expressing nucleotide sequence isolated from the Sargasso Sea
aaccctaaagatgctgaggaaggaacaatcaggaaaaaatatggcatttctatagataaaaattcagtacatggttctgatagtgttgaaaatgcaaaaattgaaattgattttttctttaaagactaac

SEQ ID NO: 252027 - DNA, 184 bp, Unknown
  Bacterial polypeptide expressing nucleotide sequence isolated from the Sargasso Sea
agttttggagggaaataatgcagtagcagaaaatagacgaattatgggtgctactgatcctaaaaatgcgggagagggcactctaagaaaattatatggtatttctattgataagaattcagttcacgggtccgactcaactgataacgccaaaaaagaaataagttttttctttaaagattaa

SEQ ID NO: 252028 - DNA, 265 bp, Unknown
  Bacterial polypeptide expressing nucleotide sequence isolated from the Sargasso Sea
tcatcaagataaatcattttttaatgacctaatatcttatatgacatctgaaccagttatagttcaaattctagaatcagatgatgcagttaataaatatagaaatataatgggtgccacaaacccagaaaatgcagaaaaaggaacaataagaaatgaatatgcactaaatgttcaagaaaattcagtacatggttcagattcacttgaaaacgctaaaatagaaataaatttcttttttagtaatgatgaaattgttggataa

SEQ ID NO: 252029 - DNA, 340 bp, Unknown
  Bacterial polypeptide expressing nucleotide sequence isolated from the Sargasso Sea
aaaaaatgaatttaggaataacaattttgatattctgaaagaaaaaaaggtaaaaatatcaaaatcagaagcagaaaaattttatcaagtacatcaatcaaaaccattttataacgatctatgtgaatatctttcatcagggcccattgtcgtaatggtgcttgaaaaaaacgatgcaatacttgaaaatagaaagttaatgggtgcaacagatccaataaaagccgaagaagggaccttaagaaaaaaatatggtatttctatagataaaaattctgtgcatggatcagacagtttagataatgcaaaaatagaaatagattttttctttaaagattga

SEQ ID NO: 252030 - DNA, 143 bp, Unknown
  Bacterial polypeptide expressing nucleotide sequence isolated from the Sargasso Sea
tccagaagaagctgatgagggaacgattagaaaaaaattcgctttatctctagaaaaaaattctgtgcatggatcagacagtcctgaaaatgctgaaatcgaaataaatcacttttttgatgaagcagatatcatttcataag

SEQ ID NO: 252031 - DNA, 243 bp, Unknown
  Bacterial polypeptide expressing nucleotide sequence isolated from the Sargasso Sea
tatgagtgatgctcaacaaacactctcaataataaaacctgatgcggttgagagaaatttaggcgatacaataaaaaatgaatttttaaaaaacgatttcaaaattattaaagaaaaaaaaataaaacttgaaaaacaagaagcagaaaaattttatcaagtacaccaaacaaaaccattttataacgaattatgctcatatttagcctctgggccaattattgttatgttgctagagaaaga

SEQ ID NO: 252032 - DNA, 295 bp, Unknown
  Bacterial polypeptide expressing nucleotide sequence isolated from the Sargasso Sea
atagaccaagctgaaaatttctatgatatccatagagaaaaacccttttttagagatttaattgtatatatgacttcagaaccagttgttgtacaagttttaagtggaaataatgctgtagaaaaatatcgatcaataatgggagcaactaatcctgaaaatgcagaagatggtacaattagaaaactttttgctttaaatgttcaagaaaattcagttcatggatctgactcagatgaaaatgcaaaaaaagaaattgattttttttttaaatcagaagaaattgtaggttaat

SEQ ID NO: 252033 - DNA, 384 bp, Unknown
  Bacterial polypeptide expressing nucleotide sequence isolated from the Sargasso Sea
aaaccggacgctgtgaaagaaagttagttggcgagataattcgacgacttgaagaagcaaacttgactatcgtcgccgctgagttgaggaatttaaatcctgagcttctttcaagacattatgaagagcatgtcggaaaacctttttacgatgaactggtaacttttatgtctaggtcacccgcaatgcttatggtcttggaaggtgaaggagaggcctttgctgttgcccgagagttgatgggagccacggatcctgctcaggcagcggcaggaaccattaggggtgatttaggcactgaaatgcctgaaaaccttatacacggttcagattctgaagagtctgcagcgcgtgaaatcggcattttttttccagagttatgaa

SEQ ID NO: 252034 - DNA, 214 bp, Unknown
  Bacterial polypeptide expressing nucleotide sequence isolated from the Sargasso Sea
tatctatcatctggtccaattgtagttatggttttagaaaaaaataatgccgttctagaaaatagaacactaatggggtcaacaaatccaaaagaggcacaagaaggtacaattaggaaaaaatatggtctatcaattgataagaattctgttcatggatctgatagcgtagagaatgctagaatagaaatagatttcttttttaaagattaaa

SEQ ID NO: 252035 - DNA, 279 bp, Unknown
  Bacterial polypeptide expressing nucleotide sequence isolated from the Sargasso Sea
tatgagtaaaattgagaatacattgtcaataattaaaccagacgctgttgaaagaaacctacaagatcagataaaaaatgaattcatgaacaaaggatttaaaatattgcaggaaaaaaaaatccatatttctaaagaggaagctgaaaaattttataaagttcacgagtctaaaccattttataatgatttatgtgcatatttatcatccggaccaattgtcgtaatgaaccttcaacgagaaaatgcggtattagagaatagaaaatttatgggagc

SEQ ID NO: 252036 - DNA, 238 bp, Unknown
  Bacterial polypeptide expressing nucleotide sequence isolated from the Sargasso Sea
tatgagtaatatagaacaaactttatcaattataaagcctgatgcagttgaaagaaacttagaaaatgaaataaaaaatatttttttagaaaataaatttaaaattataaaagataagaaaatacatattacaaaggcagaagcagaagaattttataaagtacatcaaactaaacctttttataatgatttatgttcatatttatcctcaggacctatagttgtaatgatacttgag

SEQ ID NO: 252037 - DNA, 283 bp, Unknown
  Bacterial polypeptide expressing nucleotide sequence isolated from the Sargasso Sea
tatgagtaacatagagcatacattgtcaataattaaaccggatgctgttgaaagaggtctgcaagataagataaaaaatgaatttaaaaataaagggtttgaaatattaaatgaaaaaaaaatccacattacaaaagcagaggcagaaaaattttacaaagttcatgaatccaaaccattttataatgatttatgtacatatttatcttcaggaccaattgttgtgatgaaacttcaaagagataatgcggtaatagaaaatagaaaattaatgggtgcaaca

SEQ ID NO: 252038 - DNA, 307 bp, Unknown
  Bacterial polypeptide expressing nucleotide sequence isolated from the Sargasso Sea
tatgagtaatgcagaacaaactttatccattataaaacctgatgcaactgaaagaaatctacaggatgaaattaaaaaagaatttaaaaaaaatggttttttaattgttaaagagaaaaaaatccatatttcaaaaacagaagctgaacaattttataaggtacatcaaacaaaacctttttataacgacctatgtgcttatttatcatcagggccaattttagttatggtccttgaaaaagataatgcagttctagataatagacaattaatgggagccactaatccaaaagaagcagatgaagga

SEQ ID NO: 252039 - DNA, 178 bp, Unknown
  Bacterial polypeptide expressing nucleotide sequence isolated from the Sargasso Sea
cattcaaagaatagagagataatgggagcgactaatcccgatgaagctgacgagggtacaatcagaaaaaaatttgctctctctttagagaaaaactctgttcatggttcagatagctctgaaaatgctgcgattgaaattaaacattttttttcagaagatgatattatttcttaag

SEQ ID NO: 252040 - DNA, 217 bp, Unknown
  Bacterial polypeptide expressing nucleotide sequence isolated from the Sargasso Sea
atgagtaattttgaacaaacattgtcaattattaaacccgatgcagttgaacgaaatcttgttgaagagataaaaggaatatttacttcaaataatttaaaaataaaagagtctaaaaaaattcaaatttctaaggaggaagctgcagagttttacaaagtccaccagtcaaaaccattttatgaaaatttgtgttcatatttatcttctggcccta

SEQ ID NO: 252041 - DNA, 336 bp, Unknown
  Bacterial polypeptide expressing nucleotide sequence isolated from the Sargasso Sea
tatgagtagtgtagaacaaacactatcaatcattaaacctgacgctgtagaaagaaatttagctgacaaaattcaaaaaaaatttatacaagagaaactaaaaatactaaaaactaaaaaaattcaaatctcgaaagaagaagcgtctgaattttataaagttcatcaaacaaaacctttttttgaaagattgtgctcctatttatcatcgggaccaattgtagtaatggttttagaaggaaataacgcaatagcagaaaataggaggattatgggtgccacagatcctaataatgcagaagaaggtacgctaaggaaattatatggtatttctat

SEQ ID NO: 252042 - DNA, 285 bp, Unknown
  Bacterial polypeptide expressing nucleotide sequence isolated from the Sargasso Sea
tatgagtaatattgaacaaactttatcaataatcaaacctgatgcagttgagagaaatctggagaatgaaataaaagaaatgtttaaaaataatggtttttcaattttaaaacaaaaaaagattcaaattgaaaaatctgaagctgagaatttttataaagttcatgaaacaaagccattttataatgatttgtgtgaatatttatcttcgggtccgatagtggttatggtacttgaaaaagaaaacgcagtattgggaaatagagaatttgatgggcgcacaaa

SEQ ID NO: 252043 - DNA, 209 bp, Unknown
  Bacterial polypeptide expressing nucleotide sequence isolated from the Sargasso Sea
tatgagtaatattgaaaaaacattatcaataattaagccagatgccgttgaaagaaatttgcaagatcagattaaaaatgaatttaaaaataatggatttgaaattttaaaggaaaaaaaaattcatatttctaaagaagaagctgaaaagttttataaagttcatgagtctaaaccattttataatgatttgtgcgcttacttatcat

SEQ ID NO: 252044 - DNA, 424 bp, Unknown
  Bacterial polypeptide expressing nucleotide sequence isolated from the Sargasso Sea
atgaattcaaatagaacatttactatgcttaagcctgactcaatagagcaggggtacatgctttcaattctaaacataataaaagaagctgggtttaaaataattgcactgaagtacaaaaaaatgactaaagaagaagctgaacaattctactcagttcactcagataagcctttttttaaagatttaattcagttcatgacaagaggtccaatagttgcagcagcattagaaaagagtaatgcagttgttgactttagaaaacttattggttctactgaccccaaagaagctaaggagggcacaattagaaaaagatatgctaaatctataggagaaaatgcagtacatggatcagacagtgatgagaatgcttctatggaaataagctttcactttagcgatagcgaaatttttagttaag

SEQ ID NO: 252045 - DNA, 229 bp, Unknown
  Bacterial polypeptide expressing nucleotide sequence isolated from the Sargasso Sea
aatgacttatgctcgtatttatcatcttggcccaatacttgtaatggtattagagaaggaaaatgcaataattgagaataggaaattaatgggatcaactgaccctagcaaggcagaagaggggactattagaaaaaaatatggaatttctatagataaaaattcagttcatggctcagatagtcttgaaaatgcaaaaattgaaatcaacttcttttttaaagattag

SEQ ID NO: 252046 - DNA, 334 bp, Unknown
  Bacterial polypeptide expressing nucleotide sequence isolated from the Sargasso Sea
tgaatttaaaaaaaatgattttatcattactaaagagaagaaaatccatataacaaaagaagaagcagaaaagttttataaagtgcatgaaactaagcctttttatgatgatttatgtgcatatttatcatcaggtccaataattgtgatgattcttcaaaaagagaacgctgtgctggaaaatagaaagttaatgggtgccacaaatccaaacgaagcagaagaaggaactataagaaaaaaatatggtatttcaattgataaaaattcagttcatggatctgatagcatagaaaatgcaaaattagaaattgaatttttttttaaagactag

SEQ ID NO: 252047 - DNA, 210 bp, Unknown
  Bacterial polypeptide expressing nucleotide sequence isolated from the Sargasso Sea
tatcatcaggacccataattgttatggctcttgaaaagcaaaatgcagtactagacaatagaaaactaatgggagcaacaaaccctaaagaagcagaagatggatcgctaagaaagaaatatggtatttcaattgataaaaattcagtacatggctctgatagcattgaaaacgcaaaaattgaaattaattttttttttaaaaattaga

SEQ ID NO: 252048 - DNA, 189 bp, Unknown
  Bacterial polypeptide expressing nucleotide sequence isolated from the Sargasso Sea
aagatgttgtatctagatacagaaaactgatgggcgcaactaacccagctaatgcagatgatgatacaattaggaaattatacgggttaagcgttgaagaaaattctgtgcatggttctgatagtagtgaaaatgctagaatagaaataaattttttctttgctgaaagagaagtatataaaacctaaa

SEQ ID NO: 252049 - DNA, 274 bp, Unknown
  Bacterial polypeptide expressing nucleotide sequence isolated from the Sargasso Sea
gatgtctgtagaaaatactctttcgattattaaaccagatgctgtcaagagagacctaactggtaaaattattgctatgtttgaagaaaaagggcttagagtagtagcacaaaaaaaaatttggttgtccaaagagcaggctggctctttttatgacatacacagagacaggccgttttttggcgaattatgtgagttcatgtcttcaggcacaatcgttgtccaggttcttcaaggtaacagtgcaatagagcttaatagagaaatcatggag

SEQ ID NO: 252050 - DNA, 99 bp, Unknown
  Bacterial polypeptide expressing nucleotide sequence isolated from the Sargasso Sea
gaaagtatggtgaaaattcagtgcatggttctgatgcacctgaaaccgctgctatcgaaattgcctatttcttttcgggaatagaattggtcggttagt

SEQ ID NO: 252051 - DNA, 360 bp, Unknown
  Bacterial polypeptide expressing nucleotide sequence isolated from the Sargasso Sea
tacagttagtcggtcttaaacagatatacccaacagaagacatagccaagaaacattatgatgtacattctgataaaccattttttccaggattaatcaaatttatcacaagtggccctgttgtttgcatggcttggtctggtaaggatgcaataagtgttgcccgtaatttgataggtcctacaaatggtcgagaagcatcacccggaactattcgtggagattatggaatggatataggttacaatatgattcatggatctgatgcagctgaaactgcagagtttgagctaaacctatggttcccagatggtttgaatgaatggacgcaagatagtcaatcttgggtctacgagtaaa

SEQ ID NO: 252052 - DNA, 117 bp, Unknown
  Bacterial polypeptide expressing nucleotide sequence isolated from the Sargasso Sea
aatggcaacagaacgcacactatctataatcaaaccagatgcagtatcaaagaatattattggcaaaataatctccagatttgaggacaatggtcttcatattgttgccggcaaact

SEQ ID NO: 252053 - DNA, 202 bp, Unknown
  Bacterial polypeptide expressing nucleotide sequence isolated from the Sargasso Sea
tatgagtaatatcgaacaaacactttcaatcataaaaccagatgctgttgaacgaaatttagaaagtgaaataaaagaaatgtttataagaaatggctttaaaattgtaaatgacaaaaaaataaaaattgaaaaatcagaagctgaaaaattttataaagttcatgaaacaaaacctttttatgatgatctttgcaattat

SEQ ID NO: 252054 - DNA, 265 bp, Unknown
  Bacterial polypeptide expressing nucleotide sequence isolated from the Sargasso Sea
atgagtaatattgaacaaactttgtcaattatcaaaccagatgcagttgagagaaatcttgaaaacgaaataaaagaaatgtttaaaaacaatggtttttcaattttgaaagaaaaaaaaattcaaattgaaaaatctgaggcagaaaatttttatagagttcatgaaacaaagccattctataatgatttatgtgaatacttatcttcgggtccaatagtagtaatggtactagaaaaagaaaatgcagttttgggaaatagag

SEQ ID NO: 252055 - DNA, 154 bp, Unknown
  Bacterial polypeptide expressing nucleotide sequence isolated from the Sargasso Sea
aatcccgctgaagcggcagaaggaaccatccgcaaggattttgcccaaagcattggggagaacacggttcatgggtctgacagtctggaaaacgctgcaatcgaaatcgcctattttttcgctcagactgaattggtcaacggcaaggcttgaa

SEQ ID NO: 252056 - DNA, 208 bp, Unknown
  Bacterial polypeptide expressing nucleotide sequence isolated from the Sargasso Sea
tatgagtaatatcgaacaaaccctgtcaataataaaaccagatgcagtcgaaagaaatttagaaaatgaaattaaaacaatatttaaaaaaaatggttttaagatagtaaatgaaaaaaagttgaaacttgaaaaaatggaagcagaacaattttataaagttcatgaaaccaaaccgttttataatgatttatgtacgtatttatcc

SEQ ID NO: 252057 - DNA, 332 bp, Unknown
  Bacterial polypeptide expressing nucleotide sequence isolated from the Sargasso Sea
tatgagtaatattgaacaaacattatctataattaaaccagatgctgttgaaagaaatttacaagatcagattaaaaatgaatttaaaaataatggattcgaaattttaaaagaaaaaaaaattcatatttctaaagatgaggctgaaaaattttataaagttcatgcgtctaaaccgttttataatgatttatgtgcttatttatcatctggaccaattgttgtaatgaatcttcaaaaagataatgcagttttagaaaatagaaaattaatgggagcaactaaccctaaagacgcagaagagggaaccctaagaaaaaaatatggtattt

SEQ ID NO: 252058 - DNA, 274 bp, Unknown
  Bacterial polypeptide expressing nucleotide sequence isolated from the Sargasso Sea
gaagctgaaaagttttataaagttcatgagactaaacctttttataaggatttgtgtgcctacttatcttctggaccaattgttgtaatgagtcttcaaaaagacaatgctgttctagaaaatagaaaatttatgggagcgactaaccctcaagatgcagaagaaggaacgcttcgaaaaaaatatggtatttcaattgataaaaattctgttcatggatcagatagtgttgaaaatgctaagatcgaattagactttttttttaaagattagt

SEQ ID NO: 252059 - DNA, 208 bp, Unknown
  Bacterial polypeptide expressing nucleotide sequence isolated from the Sargasso Sea
gtggtacaagtattaggaggggaaaattctattgaaaaatacagatctgtaatgggagctactaatcctgaaaatgcagataatggcactataagaaaattattcggtttaaatgttcaggaaaattctgttcatggatcagattcaaaagaaaatgcagaaattgaaattaattttttttttaaagaagaagaaatcgttggttagc

SEQ ID NO: 252060 - DNA, 361 bp, Unknown
  Bacterial polypeptide expressing nucleotide sequence isolated from the Sargasso Sea
ttaatagagaaaaataaaatgagaattattgcacagaaaatgttacatctctcattaattgatgcaaaaggtttttattttgtacataaagaaagagcattttttaatgatttatgtgaatacatgacatcaggtccaattgttgtacaagttctaatgggtaaaaacgttataaataattataggaaattaatgggagcaactaacccaactaatgcagatgacggtactataagaaaaaagtatggtttgtctgtagaagcaaattctgtccatggctcagatagcaaagaaaattcagcaatagaaatcaactatttcttttcaaaaagagagatatttaatcaattaggaggttaga

SEQ ID NO: 252061 - DNA, 352 bp, Unknown
  Bacterial polypeptide expressing nucleotide sequence isolated from the Sargasso Sea
atgagtaacctagaaaagacattatctatcattaaacctgatgctgttgaaagaaatttgtcagatgaaataaaaaatatttttaaaaagaataaattatctataatagacagtaaaaaaattcatattaataaagatgaagcctccgagttttataaagtgcatcaatcaaaaccattttataatgatctttgctcttatttagcttcaggacctatagtagtaatgatattagagggagaaaatgctattaaattaaatagagaaataatgggatcaacgaacccaaaagatgcaaaggacggaactattagaaaattatatgggatttcaatagataaaaattcagtcc

SEQ ID NO: 252062 - DNA, 178 bp, Unknown
  Bacterial polypeptide expressing nucleotide sequence isolated from the Sargasso Sea
tatgaataatattgaacagacattgtctataattaaaccagatgctgttgaaagaaatttgcaagatcagattaaaaatgaatttaaaaataatggatttgaaattttaaaagaaaaaaaaattcatatttcaaaaaacgaggctaaaaagttttataaagttcatgagtctaaacca

SEQ ID NO: 252063 - DNA, 328 bp, Unknown
  Bacterial polypeptide expressing nucleotide sequence isolated from the Sargasso Sea
tataaacaaaggatttgaaataataaaagaaaaaaaaatccatatatctaaagaggatgctgaaaagttttataaagtacatgagtccaaaccgttttataacgatttatgcaattatttgtcttcaggccctattgttgtcatgactttacaacgagaaaatgctgttatggaaaatagaaagttgatgggagcaacaaatccagttgacgcagatgagggtactttgaggaaaaaatacggtatatcaattgataaaaactctgttcatggttcagacagtcttgaaaatgctaagattgaactagattttttttttaatcactag

SEQ ID NO: 252064 - DNA, 121 bp, Unknown
  Bacterial polypeptide expressing nucleotide sequence isolated from the Sargasso Sea
gatgcagaggaaggtactattccgaaaaaaatatggaatttcaatagataaaaattctgttcatggatcagatagcgttgaaaatgctaaaattgaaatagattttttctttaaagattaa

SEQ ID NO: 252065 - DNA, 187 bp, Unknown
  Bacterial polypeptide expressing nucleotide sequence isolated from the Sargasso Sea
atgaatcttcaaaaagacaatgctgttctagaaaatagaaaattgatgggagcaactaaccctaaagatgcagaagaaggaacgcttcgaaaaaaatatggtatttcaattgataaaaattctgttcatggatctgatagtgtcgagaacgctaagatagagttagattttttttttaaagattagt

SEQ ID NO: 252066 - DNA, 247 bp, Unknown
  Bacterial polypeptide expressing nucleotide sequence isolated from the Sargasso Sea
gaaactaagccattttataatgatttatgtgaatatttgtcctcgggacctgtggttgtcatggtgttagaaaaggaagacgcaatattagccaatagaagaataatgggtgcaacagatccaaaaaaagcagaagatggtacaattagaaaacagtttggaatatctatagacaaaaattcagtacatggctcagatagcattgataacgcaaaaatagaaatagattttttctttaaaaactaat

SEQ ID NO: 252067 - DNA, 233 bp, Unknown
  Bacterial polypeptide expressing nucleotide sequence isolated from the Sargasso Sea
tatgaataatgtagaacaaactttatcaataattaaaccagacgcggtagaaagaagtctagagagtcaaattaaagaaatgtttaaaagtaatggatttaaaattttaaaagaaaaaaaaattcaaattgaaaaatctgaagcagaaaaattttataaagttcacgaaacaaagccattttattacgatttatgtgattatctctcatctgggtccattgttgttatgatac

SEQ ID NO: 252068 - DNA, 196 bp, Unknown
  Bacterial polypeptide expressing nucleotide sequence isolated from the Sargasso Sea
aattgttgtaatggtattagagagagaaaatgcaatattagaaaatagaaaactaatgggggcaacagatccaattaaagcagaagaaggtactattagaaaaaaatatggaatatctatagataaaaactcagttcatggctcagatagtccagaaaatgcaaaagttgaaatcgatttcttttttaaagattag

SEQ ID NO: 252069 - DNA, 298 bp, Unknown
  Bacterial polypeptide expressing nucleotide sequence isolated from the Sargasso Sea
acaaaagaacaagcggagcaattttatgaagttcataatgataaatcttttttttctgaattaatcgaattcatgacttcagagcccgttgttgtccaagttttatcagctgatggagctgttaataaatatcgagaagtaatgggagcaactaacccggataatgcaaatgagggaacaataagaaaactttttgcgttaaatgtgcaggaaaactcagttcatggttctgactcagatgtaaatgcaaaaaaagaaattgattttttcttcaaaaatgaagagatagtaggttaat

SEQ ID NO: 252070 - DNA, 351 bp, Unknown
  Bacterial polypeptide expressing nucleotide sequence isolated from the Sargasso Sea
tatgagtaatatagagcaaactttatcaatcataaaaccagatgcggtagagagaaatttacaagaagaaataaaaaaaatttttttagataataattttaaaattaatgatgaaaaaaaaatccatatttcaaaaaacgaggctgaagaattttataaagtgcatcaatctaagccgttttatgaagaattatgtaattatttatcttcaggtccaatagtagtaatgatacttgaaaaagataatgctgtaacagaaaatagaaaacttatgggtgcaacagacccagcaaaggcagaagagggaactcttagaaaaaaatatggaatttcaattgataaaaactctgt

SEQ ID NO: 252071 - DNA, 137 bp, Unknown
  Bacterial polypeptide expressing nucleotide sequence isolated from the Sargasso Sea
tgctgcgggtacgatccgggcagactttgcacaatctatcgatgctaactcggtgcacggctcggactcaccaacgtcagccgagcgcgagatcaacttcttcttcgctgatggcggcatctgcccgcgcgactgag

SEQ ID NO: 252072 - DNA, 166 bp, Unknown
  Bacterial polypeptide expressing nucleotide sequence isolated from the Sargasso Sea
cagggaagtaatgggtgccacaaatcctgaaaatgctgagcagggtacgattagaaaagagtttgcattaaatattcaagaaaattcagttcatggctctgattctttagaaaatgctaaaattgagataagttatttttttgaagataatgaaattacaagataa

SEQ ID NO: 252073 - DNA, 478 bp, Unknown
  Bacterial polypeptide expressing nucleotide sequence isolated from the Sargasso Sea
cctgcaattaactagatttagctgggttaggagaccaaacgtggcgcttgagaaaacactcgggataattaaaccagatgctgttgccaaaaagtgtatagggaaaatattagcccatgcagaagaaaatggtctccacattattgcatgtaagatgactcgtttatctaaagaagatgcagaggaattttacagcgaacatgtagggcaatctttttatacaccactagttaattatatgacttcggggccaatcattattcaagtatttgagggcgagaatgcaattaaaactcttcgtaatattatgggatcaacgataccaaataaagcagatataggaacaatccgtaatctatacggcaatcataaaccggttaatggtacttatgaaaatgctatccatggatcagatagcaaagaaagcgccgaaagagagattagttttttctttactgatagtgaaatcaatatatga

SEQ ID NO: 252074 - DNA, 277 bp, Unknown
  Bacterial polypeptide expressing nucleotide sequence isolated from the Sargasso Sea
ctcgttgattacatcatatctggaccggtcgtgtgcatgatttggcaaggtccgactggtactgtagccgctgcgagaaagatgatcggagaaacgaatcctttagagtctttgcccgggtcaatccggggagacttcgccgtagaagttggcagaaatattatccacggttccgactcggtcgaatccgccgagagagaaatcaacttatggtttgcggatggtaacggcgtcgtggactgggaaatgacgaacaacgggtggattcgcgaataaa

SEQ ID NO: 252075 - DNA, 159 bp, Unknown
  Bacterial polypeptide expressing nucleotide sequence isolated from the Sargasso Sea
attcttatagagaattaatgggcgctacagatccaatccaagcaaaagaaggaacaattagaaaaaaatatggtatttcgatagacaaaaactcagttcatggatctgactcagaagaaaatgcagaaaaagagataaattttttttttaaaaactaat

SEQ ID NO: 252076 - DNA, 184 bp, Unknown
  Bacterial polypeptide expressing nucleotide sequence isolated from the Sargasso Sea
aatgcaattgataaatatagaaaagtaatgggagcaacaaatccagaaaatgcagaagcaggcactataaggaaattacatgccttaaatgttcaagaaaattcagttcatggttctgattctattgaaaatgcaaaaaaagaaataagttttttctttgaacctgatgaaatagttggctaat

SEQ ID NO: 252077 - DNA, 202 bp, Unknown
  Bacterial polypeptide expressing nucleotide sequence isolated from the Sargasso Sea
ggaccaattgttgtaatgagtcttcaaaaagataatgcggtattagaaaatagaaaattgatgggagcaacaaatccacaagaggcagaggaaggaacgcttagaaaaaaatttggaatttctattgataaaaactcagttcatggttctgatagtttagaaaacgctaagatagaaatagattttttttttaaagattagt

SEQ ID NO: 252078 - DNA, 343 bp, Unknown
  Bacterial polypeptide expressing nucleotide sequence isolated from the Sargasso Sea
atgagtaatattgagcaaactttatcaattataaaaccagatgctgttgaaagaaatttgcaggaagaaattaagaacgaatttaaaaaaaaaggtttttcaattgtaaaagaaaaaaaaatccatatttccaaatctgaagcagaacaattttataaggttcatcaaacaaaaccattttataatgatttatgtgcttatttatcttcaggaccgataatagtcatggctctcgaaaaagataatgcagtcttggataataggcaattaatgggagcgactaatccaaaagtagcagaagaaggcacattaagaaaaaaatatggcatatctattgataaaa

SEQ ID NO: 252079 - DNA, 240 bp, Unknown
  Bacterial polypeptide expressing nucleotide sequence isolated from the Sargasso Sea
aacctttttataatgatctttgtaactatctttcttctgggcctattgttgcaatgatacttgaaaaggttgatgcagtttctgaaaatcgaaaagttatgggagcaactgatcctgcaaaagcagatgaaggaacaatacgaaaaaaatatggaatatccattgataaaaattcagttcatggttcagacagtattgaaaacgctaataaagaaattaatttcttttttaagacctaac

SEQ ID NO: 252080 - DNA, 257 bp, Unknown
  Bacterial polypeptide expressing nucleotide sequence isolated from the Sargasso Sea
tatgagtaatatagagcaaactctttcaataattaaacctgatgctgtagaaagaaatctaatagatgaaatcaaaaaaatttttacaaaaaataatttaaatattaaggaagataaaaaaattcatttaacaaaagaagaagccgctgaattttataaagtacatcaatctaagcccttttatgatgatttgtgcacatatttatcatctggaccaatagtagttatgattttagagggtgaaaacgctgtgttat

SEQ ID NO: 252081 - DNA, 160 bp, Unknown
  Bacterial polypeptide expressing nucleotide sequence isolated from the Sargasso Sea
atgagtagtttagaacaaacattatcaattattaagccagatgctgtggagagaaatcttgaggtggaaattaaagaaatgtttaaaaataaaggtttccaaattcttaaagaaaaaaaaattcaaattgaaaagtctgaagctgaaaaattttataaag

SEQ ID NO: 252082 - DNA, 415 bp, Unknown
  Bacterial polypeptide expressing nucleotide sequence isolated from the Sargasso Sea
aatggaaagaacttttgcaattctaaagcctgacgcggtagagcgtaatttaatcggtaaaatattggagcgtgttgagtctaacggcttcaaaatagctgcgctgaagaaagtccagctaaccaaatctcaagctgaaggtttttattatgtacataaagaacgaccttttttcggcagcctgaccgatttcatgtgttcgggtcctgtaatactcctggtccttgaaaaagaaaatgcaataaaagcatggagagaccttatgggagcaaccaaccccgaagaagccggtgaaggaacaattcggaaagacttcgctgttaatattgaaaaaaactcaacacatggatctgactctgcggaaaatgcagcctttgaaatatcttatttttttagcgaaacagaaattctttag

SEQ ID NO: 252083 - DNA, 424 bp, Unknown
  Bacterial polypeptide expressing nucleotide sequence isolated from the Sargasso Sea
atgaattcaaatagaacattcacaatgctaaagcctgactcaattgagcaaggcaacatgcttccaatcctaaatatgattcaatcttcgggtttcaaaattattgctcttaaatataaaaggatgtccagagatgaagctgaaaaattttattcaattcactctgataagcctttttttaatgacctagtaagctttatgactcgtggtccaattgttgctgctgctcttgaaaaagataatgcagttgaagcttttagaactcttattggatctactgatcctaacgacgctgaagagggcacaattagaaaaaaatttgctaaatccaaaggagaaaatgctgttcatggttcagatagtgatgaaaatgcagaaatcgaaattagttttcacttcaacactgatgaaatttttagctaat

SEQ ID NO: 252084 - DNA, 130 bp, Unknown
  Bacterial polypeptide expressing nucleotide sequence isolated from the Sargasso Sea
tgctgagggaacgattagaaaaaaatacgcgttgtctttagaaaaaaattctgtgcatggatcagacagccctgaaaatgctgaaatcgagataaatcatttttttgatgaggcggatatcatttcgtaa

SEQ ID NO: 252085 - DNA, 215 bp, Unknown
  Bacterial polypeptide expressing nucleotide sequence isolated from the Sargasso Sea
tatgagtagtctagagaaaactctatctataataaaaccagatgctgtcgaaagaaatcttactaagaatattcaagaatattttttaaaaaataactttaaaatactaaaagagaaaaaaattcagataacaaaagatgaggcggctgaattttataaagtgcaccaaacaaaacctttttatgatagattatgcaattatctcgcttcaggtc

SEQ ID NO: 252086 - DNA, 433 bp, Unknown
  Bacterial polypeptide expressing nucleotide sequence isolated from the Sargasso Sea
atgagaaaagaaaaaacattatcgattattaaacctgatggagtccgtagaaatcttataggcaagattctaagtcgttttgaggaaaacaatttgaggattgtttgtacaaaaatgattcatatgtcaaaaagcgaagcagaaggattttatatggtacacaaggatcgacctttttttgaggaattgactgaatttatgagttcagggtcagtattggtatctattcttgaaggagaaaatgctattttacttcatagagaaattatgggggcgacaaatccaagtgatgctaaaccaggcacgataagatctgattttgctgaaagtttgggtgaaaatactgtacatggatcagacaatgctgaaaatgctgtaattgaatgttcatattttttttcaaaaacagaaatggtaaatggtagttcttgaa

SEQ ID NO: 252087 - DNA, 253 bp, Unknown
  Bacterial polypeptide expressing nucleotide sequence isolated from the Sargasso Sea
tatgaataaaatagaacaaacactttctattattaagccagatgccgtggaaagaaatctggataacgatattaaagaaatatttaagaacaatgggtttaatattgttaaggataaaaaaaatcaggtatcaaaatcagaggctgaacaattttataatgttcatcaaaacaagccattttataacgatttatgcaattatttatcatctggggtccattgtagttatgatactagaagaaagaaaatgctg

SEQ ID NO: 252088 - DNA, 304 bp, Unknown
  Bacterial polypeptide expressing nucleotide sequence isolated from the Sargasso Sea
aaattatcaaatgatcaagcagaagaattttattctgttcataaagataagcctttttttagagatcttattgaatacatgacatctgaaccagtgattgtacaagttttaagtggtgataatagtgttgaaaattatcgaaaaattatgggagctactaatccagaaaatgctgaaaagggaactattagaaaactttttggattaaatgttcaggaaaattctgttcatggatctgactcttcggagaatgcaaatatagaaattgattttttttttaattcagaagaaattgttggttaat

SEQ ID NO: 252089 - DNA, 286 bp, Unknown
  Bacterial polypeptide expressing nucleotide sequence isolated from the Sargasso Sea
gctgagggattttattctgttcataaagataaaccattttttaatgatcttattgaatatatgacatcaggcgcagtaatcatacaagtattaaaaggagataatgctgtagatcaatatagaaaaataatgggtgccacaaacccagataatgctgaagctggaactattagaaaagaatttgcattaaatatacaagaaaattctgttcacggttctgattctgaaaaaaatgctgagattgaaataaagtatttttttgatgaaggtgaaattatagattaat

SEQ ID NO: 252090 - DNA, 205 bp, Unknown
  Bacterial polypeptide expressing nucleotide sequence isolated from the Sargasso Sea
tatgattgagcaaaccttgtcgataataaaaccagatgccgtagaaagagatttggttagcaaaattaaacaaaaatttttagatgaaaaattaaaaattgttaagagtaaaaagattcagatatctaaagaggaggctgcagaattttataaagttcaccaaaccaaacctttttatgaaaattatgctcctacctttcttctg

SEQ ID NO: 252091 - DNA, 251 bp, Unknown
  Bacterial polypeptide expressing nucleotide sequence isolated from the Sargasso Sea
tatgaataatgtcgaacaaactctttcaataataaaacctgatgcggttgagagaaatttgattgaagaaattaaaaaaattttcactaaaaataatttgataattaaagaagataagaaaattcatattactaaagaagaggcagcagaattttataaagttcaccaaactaaacctttttatgatgatttgtgttcgtatttatcatctggccctatagtagtaatgattctagagggtaaaaatgctg

SEQ ID NO: 252092 - DNA, 421 bp, Unknown
  Bacterial polypeptide expressing nucleotide sequence isolated from the Sargasso Sea
atgtccaatataacttttataatgattaagccagacgctgttgaaaggggcttgataggaaatattttaaaagatattaatgatgcaggattcaatataagagctctcaaattaactaagttaagtattgatgaagcgaaaacattttattctgttcactcagaaagaccattttttgatgaattaacaaaatatatgagcagaagtcctattgttgcagcagtgcttgagaaggaaaatgctgtttcagaatttagaaaacttattggtgatacagatccatcaaccgctaagaaaggtactattaggagtaagtatgcaatatctaaaggtgaaaattcagtacacggttcagatagtgacgaaaatgcaaaaattgaggcacaatttcatttttcaggtagagaaatactattttaaa

SEQ ID NO: 252093 - DNA, 566 bp, Unknown
  Bacterial polypeptide expressing nucleotide sequence isolated from the Sargasso Sea
gatgataaaaaaagtaaaaaaagcggtttttcctgttggaggaatgggtacaagatttttgccagcaactaaagctttaccaaaagaaatgctgcctatagttgataagccacttattcaatacgctgtagaagaagcagtttctgcagggattgaagagtttgtatttataactggtagaggtaaaacagctatagaagatcattttgatcaatcaactgaattagtaaatcttttaaaaaaaagaaacaaaaataaagaattaaaaaatattattgactccatgccaaaacctggtgctgtagcatatacaagacaacaagagcctcttggtttaggtcacgctatttggtgtgctagaaatttaattggtgaagataattttgcagttttactggcggatgatatctttatgtctcgtaaaagttgtttaaaacaaatgattgaccaatatgatggaagaggcggtatggttgcggttgaagaaattgaaggggaggaaatatcaaattatggtgttttagatgttgattataacgaaggagataaaattaaaattaagggtt

SEQ ID NO: 252094 - DNA, 170 bp, Unknown
  Bacterial polypeptide expressing nucleotide sequence isolated from the Sargasso Sea
tatgagtaatattgaacaaaccttatctattattaaaccagatgctgtcgaaagaaatcttgagggcgaaattaaaaaaatgttcaaaagtaacggtttccaaattataaaagaaaaaaaaattcaaattgaaaagactgaggctgaaaaattttataaagttcacgaaa

SEQ ID NO: 252095 - DNA, 433 bp, Unknown
  Bacterial polypeptide expressing nucleotide sequence isolated from the Sargasso Sea
gtattaattaaacctgatggggtaaatcgggctttaattggaaaagtgattgaaaagcttgaatcaaccggcttaaaaattactggaatgaaacttatattaattgataaagatcttgcttcaaagcattatgaagagcataaagataaaccttttttctcaagcttagttaattttattacctctagcccagttgtagcactagctttaaatggtgaaaatgctattcagaaaacaagaacgatgatggggtcaacaaaccctttagaatcaaatccgggcacaataagaggtgattttggcctatctcttgagaaaaatattatacatggttctgcaaatgaaaacgatgcattaagagaaataaaattatacttctcagaggaggaaatcattaattacgacaggtctgtggataattgggtaagctgat

SEQ ID NO: 252096 - DNA, 215 bp, Unknown
  Bacterial polypeptide expressing nucleotide sequence isolated from the Sargasso Sea
tatgagtaacttagaacaaacattatcaataattaaaccagatgcagtggatagaaatttagaaaacgaaattaaagaaatgtttaaaagtaatggttttacaattttaaaagaaaaaaaaatccaaattgaaaaatcagaagctgaaaaattttataaagttcatgaaactaagccattttataacgatttatgtgcctatttatcatcaggcc

SEQ ID NO: 252097 - DNA, 406 bp, Unknown
  Bacterial polypeptide expressing nucleotide sequence isolated from the Sargasso Sea
attgagcggaaataaaacttttacaataattaaaccagatgcatttgaagaaggttatactggtccgataatccaaaagattgaagaagcgggttttaatttaaaaaacatgagacttataaggcttgaccaggagtctgctggaaaattttatgcaattcacaaagaaaagcctttttttggcagattatgtgattacatgtgttcaggtccaattatagttattcaattagaaaaagaaaatgctgttgaagatttcagaaaattaattggtgctacaaacccagaagatgctgaagaaggtacaataagaaaattatatgctacttcaatagaagctaatgctattcacggatctgattctgatgaaaatgctgaaattgaaattaatttctttttttcttaa

SEQ ID NO: 252098 - DNA, 210 bp, Unknown
  Bacterial polypeptide expressing nucleotide sequence isolated from the Sargasso Sea
tatcgtctggaccaattgttgtaatgagtcttcaaagagataatgcggtattagaaaatagaaaattgatgggagcaacaaatccacaagaggcagaagaaggaacactcagaaaaaaatttggaatttctattgataaaaactcagttcatggttctgatagtttagaaaacgctaagatagaaatagattttttttttaaagattagt

SEQ ID NO: 252099 - DNA, 183 bp, Unknown
  Bacterial polypeptide expressing nucleotide sequence isolated from the Sargasso Sea
tccttgaaaaaaatgatgcaatacttgaaaatagaaagctaatgggcgcaacagatcctataaaagcagaagaggggaccttaagaaaaaaatatggtatttcgatagataaaaattctgtgcatggatcagatagtttagggaacgcaaaaatagaaataaattttttttttaaagattaat

SEQ ID NO: 252100 - DNA, 203 bp, Unknown
  Bacterial polypeptide expressing nucleotide sequence isolated from the Sargasso Sea
tggcccaataatagttatgattttagagaaagaaaatgcaataatagctaatagagaattaatgggttctaccaacccaaaagatgctaaagagggcactattagaaaaaaatacggcatttcaattgataaaaattcagttcatggatcagatagcattgacaatgctaaaatcgaaatagacttcttttttaaagattaaa

SEQ ID NO: 252101 - DNA, 301 bp, Unknown
  Bacterial polypeptide expressing nucleotide sequence isolated from the Sargasso Sea
atggaacaaacattatcaataattaaacctgatgcagtcgaaagaaacttatctgttgaaataaaaaatatgtttttaaataatggttttaaaattataaatgaaaaaaaaatccaaatatcaaaagctgaagcggagcaattttatatagttcaccaaacaaaaccattttatgatgaactttgtaaatatttgtcctcaggtccaatagttgttatgattttggagaaagaaaatgcaatattagctaacagagaacttatgggtagcacaaatcctcatgaggcgagagaaggcacaa

SEQ ID NO: 252102 - DNA, 355 bp, Unknown
  Bacterial polypeptide expressing nucleotide sequence isolated from the Sargasso Sea
tggcgagatattcgccgtcttgaagaagcgaatttaacaattgtcgccgccgagtttaggagtttaaattctgaacttctttcacgccattatgaagagcatgttgataaacctttttacgatgagttggtgacttttatgtcgagatcacctgcgatgcttatggttttggaaggtgaaggggaaacgtttgcagtcgctagaggcttgatgggagcaacggaccccgctcaggcagcggcaggaaccattagaggagatttaggtactgcaatgcctgaaaaccttatacacggttctgattctgaagaatctgcagcacgtgaaattgaaatttttttcccagaattatgaa

SEQ ID NO: 252103 - DNA, 232 bp, Unknown
  Bacterial polypeptide expressing nucleotide sequence isolated from the Sargasso Sea
tttcttcaatgaactagtagcttttatgacttttggaccgctggtagttatggagctcgaaggggaagaggctataaatactaaccgaaaaataatgggtgctactaatccagccgaggcgctcgaaggcactattcgtgccaaatatggagatggaatgaccgaaaatgcggttcatggttcagatggattagagagtgcctccagagaaattaagtttttctttgggtga

SEQ ID NO: 252104 - DNA, 281 bp, Unknown
  Bacterial polypeptide expressing nucleotide sequence isolated from the Sargasso Sea
tatgagtagtatagagcaaactctttcgataataaaaccagatgcagttgaaagaaatcttactaaagaaataaaatctatatttctaaaaaatgatttaattgttaaggatagcaaaaaaatacatatcacaagagatgaggctgccgagttttataaagttcatcaatcaaagcctttttataacgatttatgtaattaccttgcttctggaccaatagtagtaatgatacttgaaggccaaaatgctgttatgtcgaataggaaacttatgggtgcaa

SEQ ID NO: 252105 - DNA, 439 bp, Unknown
  Bacterial polypeptide expressing nucleotide sequence isolated from the Sargasso Sea
ttgggaattgaaaggacattggggatcataaagccagatgctgttgctaagaattttgctaataaaatattggctcaaataaaaaaaaataatcttcaaatcataaccagtaaaatgacgcatctatcaaaagcagaagcagaagaattttacagtgagcatgctgaacgttccttttaccaatctcttatagattatatgacgtcaggacctgttatgattcaaatatttgaaggtgaaaatgctataactgtattacgtaatataatgggttcgacaatacccagcgaagcaaaagaaggaaccattagaaatctttacggtaattttgaagcggttaacggaacatatcaaaatgcaattcatggatcagatagcaaaaaaaatgcagaaagagaaattaattttttcttttcaaaaaatgaaattaataaataaa

SEQ ID NO: 252106 - DNA, 206 bp, Unknown
  Bacterial polypeptide expressing nucleotide sequence isolated from the Sargasso Sea
agttcaggttttagaagctgaaaatgctattactctgtatagaaatactatgggtgctactaatcctaaagaagcagatcaaggtactattagagctgaacacgctgaatctattgaggctaattcagttcatggttcagatagcccagaaaatgctgttatagaaataaattttttctttgaagaaaaagaaatagttgggtgaa

SEQ ID NO: 252107 - DNA, 484 bp, Unknown
  Bacterial polypeptide expressing nucleotide sequence isolated from the Sargasso Sea
ctgcaattaactggatttagctgggttaggagaccaaacgtggcgcttgagaaaacacttggaataattaaacccgatgctgttgccaaaaagtgtatagggaaaatattagcccatgtagaagagaatggtctttacattattgcatgtaagatgactcatttatctaaagaagatgcagaggaattttacaacgagcatgtaggacaatctttttatgcgcccctagttaattatatgacttcgggaccaatcattattcaggtatttgagggtgagaatgcaattaaaactctccgtaatattatgggatcaacaataccgaacaaagcagatagaggaacaatccgtaatctatatggtaatcataaaccagttaacggcacttatgaaaatgctattcatggctcagatagcaaagaaagtgccgaaagagagattagttttttcttcactgataatgaaattaataaatgggcctgat

SEQ ID NO: 252108 - DNA, 400 bp, Unknown
  Bacterial polypeptide expressing nucleotide sequence isolated from the Sargasso Sea
tgctaaaaattacgcggggaaaatacttgctcaaatagaagcaaatggtcttaaaattgtagctagtaaaatgacacatctcactaggaaaaaagcagagaaattttatagtgagcacgtagatcaaatattctataaacctctaatcaaatatatgtcctcagggcctattattgtaaaagtttttgagggagatcatgccatttccaatttacgtaaaattatgggtgcaactatacctagcaacgcaaaagaaggtgaaataagaaaactatatggtaatcatgagcctgttaatggtacctatgagaatgcaattcatggttcagatagtttagaaagtgctgaaagggaaattaatttttttttcactaatgatgagctctgtgaaaggatatga

SEQ ID NO: 252109 - DNA, 424 bp, Unknown
  Bacterial polypeptide expressing nucleotide sequence isolated from the Sargasso Sea
atgaattcaaatagaacatttactatgctaaagcctgactcaatagagcaggggtacatgcttccaattctaagcatgataaaagaagctgggtttaaaataattgcactgaagtataaaaaaatgactaaagaagaagctgaagaattctactcaattcattcagataagccattttttaaagatttaatccagtttatgacaagaggtccaatagttgcagcagcattagaaaaaaataatgcagtcgatgactttcgaaaacttattggttctactgatccttcagaagctgaagatggtacaattagaaaaagatatgctaaatctaaaggagaaaatgcagtacatggctcagatagtgatgagaatgcttctatcgaaataaattttcactttagcgataaggaaatttttacttaag

SEQ ID NO: 252110 - DNA, 370 bp, Unknown
  Bacterial polypeptide expressing nucleotide sequence isolated from the Sargasso Sea
atgagtagtattgagcaaactctttctataataaaacctgatgctgtcgaacggaatcttaacgaaaatattaaaaaattttttctaaaaaataaacttaaaatagttaaagagaaaaaaattcaaataacaaaagaagaagcagcagagttttacaaagtccatcaaactaagccgttttatgagagattatgcagttatttatcctctggaccaataacagtaatgattttagagggtgtaaatgcgatacaagaaaataggaaaataatggagcaacagacccaaagaatgctgaagatggaactattcgaaaagaatatggaatttctattgataaaaactcagtccacggatctgactcaataga

SEQ ID NO: 252111 - DNA, 415 bp, Unknown
  Bacterial polypeptide expressing nucleotide sequence isolated from the Sargasso Sea
atgggaaatcaaacatttgcaattataaaacctgatgctgtttcaaaaggatatactggtaaaatttatgataggattatacaagctggtttcaatatactatcagcaaaactaataaaactggataatgaacaagccgaaggcttttatatggtacataaaaaacgtccattttttaatgatttaattaattttatgacctcaggtccttgtatggtacttgttctgagtaagccaaatgctgttcaggattggagagaaactattgggtccacgaatcctgatgaagctgaagaaatacaattcgtaaagattttgcatctaatgttcaggagaatgcggtgcatggttcagatagcgatgaaaatgcagaaaaagaaattgcctttttctttacagatagtgaacttctagc

SEQ ID NO: 252112 - DNA, 301 bp, Unknown
  Bacterial polypeptide expressing nucleotide sequence isolated from the Sargasso Sea
aagtaaaaaaattcagatatctaaggaagaggctagcgatttttataaagtccaccagacaaagcctttttatgatagattatgctcttatttatcttctgggcccatagttgtaatgattttagaaggagaaaatgtaatccaggaaaacagaaaaattatgggcgcaactgatccaaaaaatgccgatgcaggtaccataagaaagctttacggtatctcaattgataaaaattcagttcacggttctgattcaatagagaatgctaaaaaagagatagattttttttttaaagactga

SEQ ID NO: 252113 - DNA, 463 bp, Unknown
  Bacterial polypeptide expressing nucleotide sequence isolated from the Sargasso Sea
gatggatcagaccttcgtaatgttcaagcctgactgcattgagcgtgggctcctgacaaaggttatgagtcggtttgaggataaggggcttcggcttgttgccttgaaactgctccgtgtgacacctgctcttgcgaaacagcattacgcagagcatgtcgaaaagccgttctatccgagccttgagtctttcattactgcagcgccagttgttgctgcaatttatgaggggctcgatgtcgtgcgagtagtccgtgaaatgctcggggcaacaagtggactgaaggcagctgctgggacaatccgcggcgatttctctgcaagtcgtcaaatgaatctcgtgcacgcatcggattcagctgagtcagccgcccgagagattggcatctactttacagagacagaaattgttgcgtgggagccacgctgtgacgatatgcttcgtgcggcggatgaggcctag

SEQ ID NO: 252114 - DNA, 178 bp, Unknown
  Bacterial polypeptide expressing nucleotide sequence isolated from the Sargasso Sea
tgttgatgcttttaggacccttattggatctacagatccaaatgaggctgaagaaggtactataaggaaaaaatacgctaaatctaaaggagaaaacgcagttcatggttcagatagtgatgaaaatgcagaaattgaaataagctttcattttgataataaagagattttcaactaa

SEQ ID NO: 252115 - DNA, 403 bp, Unknown
  Bacterial polypeptide expressing nucleotide sequence isolated from the Sargasso Sea
attgtctgaacaaacattattcattgtaaaacctgatggtgtacaaagaaaattaattggagaaataatttcaagatttgaaaaaaaaggttttacaattttaaaactaaagatgtttacatttactaaagaactagcaactgaattctattcagttcataaagataaaccattttttggtgaattattagaatacatgacatctggtccagttgttgtcacagttgttgaaggtaacaatgctgttgctacaacaagacagatggttggcgcaacaaaatcatttgaagctgaacctggttcaattcgaggtgattttggtttaggtttcactgaaaacataatacatgcatctgattcaacagaaagctttgataaggaagtaagtgtggtattcaagtga

SEQ ID NO: 252116 - DNA, 403 bp, Unknown
  Bacterial polypeptide expressing nucleotide sequence isolated from the Sargasso Sea
aatgaccaataaaacgcttgcaattattaaacctgatgcagtgaaaagaaatttaataggaaaaataataagtataattgaggaaaatgatttcgttgtaagccaaataaaatcatatcatcttaatgcagttgaagctgaaacgttttatgaaattcataaaggaaaaccatttttcgaagcactcatagactatatgacatcaggtaaaattatagttctattacttcataaaaataatgcagtttctcaatttaggaaactaataggaaatacaaatccagagttagctaatagtgggactataagaaaattatatgcagtaaatcaaacccaaaattctatccatggttctgatagtgatattaatgcaaatgtggagattaattttttttttaaatag

SEQ ID NO: 252117 - DNA, 205 bp, Unknown
  Bacterial polypeptide expressing nucleotide sequence isolated from the Sargasso Sea
agctgctgttcttgagaaagataatgcagtagaagcttttagaatgcttattggatctactgaccctaatgaggctgaagaaggtacaattagaaaaaaatatgcaaaatccaaaggagagaatgctgttcatggttcagacagtgatgaaaatgcagatatcgaaattagttttcactttgacactaatgaaatttttagctaa

SEQ ID NO: 252118 - DNA, 316 bp, Unknown
  Bacterial polypeptide expressing nucleotide sequence isolated from the Sargasso Sea
atgaataatattgaacaaacattatctataatcaaaccagatgctgttgagagaaatttgcaagatcagattaaaaatgaatttaaaaataatggatttgaaattttaaaagaaaaaaaaattcatatctctaaagatgaggcagaaaaattttataaagttcacgaatctaaaccattttacaacgatttatgtgcttatttatcttctggaccaattgttgttatgagtctgcaaaaagagaatgcggttttagaaaatagaaaattgatgggagcaactaatccaaaagacgcagaagagggaacgcttagaa

SEQ ID NO: 252119 - DNA, 454 bp, Unknown
  Bacterial polypeptide expressing nucleotide sequence isolated from the Sargasso Sea
tttggaaagaacacttatactaataaaacctgatggagtccaaaggtcactttctggtgaaatattatccagattagaaaagtcaggactaaaaattactggattaaagttattacatgtagacgaaaatttagctaaggaacattatgctgagcatgtagataagccattttttggtgatttagtaagttatatttgctccgctccaataatagccctcgctttgtctggtccaaatgctgttgagaaatcaagaagtcttattggaacaacaaatccactcgaatctccccctggaactataagaggagactatggattagaaatttctagaaacttaattcacggatctgcttctgtagatgatgccaatcgagaagtatctattttttttgataaatcagaaattatagattatgaaaaatccacagatggatgggttttagagttataa

SEQ ID NO: 252120 - DNA, 266 bp, Unknown
  Bacterial polypeptide expressing nucleotide sequence isolated from the Sargasso Sea
tatgagtaatttagaacaaaccttatcaattataaaaccagacgctgtagaaagaaatcttgaaaatgggataaaagaaatgtttaagaataatggattttcaattttaaaagaaaaaaaaatccaaattgaaaaatcagaagctgaaaaattttataaagttcatgaaaccaaaccattttataatgatttatgtgattatctttcatctggtccaattgttgttatggttcttgaaaaagaaaatgcagttttaggaaatagag

SEQ ID NO: 252121 - DNA, 352 bp, Unknown
  Bacterial polypeptide expressing nucleotide sequence isolated from the Sargasso Sea
tatgaataatttacaacaaactttatcaattataaaaccagatgcagttgaaaggaatttagataaagaaataaaagagatgtttaaaaataatggatttctaattttaaaagaaaaaaaaatacaattagaaaaatctgaagcagaaaaattctacaaagttcatgaaacaaaaccattttataatgatctttgtgcctacctttcatctggacctataatagtgatgattttagagaaagaaaatgcagttttagcaaatagagaactaatgggatctaccaacccaaaagaggcaaaagagggcaatattagaaaaaaatacggcatttcaattgataaaaattcagta

SEQ ID NO: 252122 - DNA, 418 bp, Unknown
  Bacterial polypeptide expressing nucleotide sequence isolated from the Sargasso Sea
atgcaaaaaaccctaatactcctgaaaccggattgcctggaacgaaaagtagccggagaggtcatcacacgcttcgagaagaaagggtatgacatcctggccagtaagatgattcaactggatgaagagttgctcaatgagcactattcacatgtggctcacctgcctttttttcccgagatagcttctttcatgagctcaaggcccgttctggctctcgtgctggaaggagaagacgtcatccagggaattcgtgacttacttgggccgaccgactcaacgactgctccatccggaaccattcggggggatcttggcaccgatcgaatgaggaacgttgtgcatgcttccgacagtccggaatccgccttggccgagatcgatcgtttcttcgatgccgaccagatttgcggctagg

SEQ ID NO: 252123 - DNA, 424 bp, Unknown
  Bacterial polypeptide expressing nucleotide sequence isolated from the Sargasso Sea
catgaaaacaaatagaacctttacaatgttaaaacctgattcaattgaagatggatatatgcttcctattcttaataaaataagtgaatcgggatttaagataatagcattaaaatacaagaaaatgaatagggaagaggcgcaagagttctattcaattcattctgaaaaacctttttttaatgacttaataaactttattacaagagggccaatagttgctgctgtcctagaaaaagacaatgctgttcaagattttagaaaattaattggttctacagaccctaatgaagctgaggaaggaacaattagaaaaagttttgctagatcaaagggagaaaatgctgtccatggctcagatagtgatgagaatgcgaatgtcgagatttcatttcactttgataaaactgaaattttcagttaa

SEQ ID NO: 252124 - DNA, 403 bp, Unknown
  Bacterial polypeptide expressing nucleotide sequence isolated from the Sargasso Sea
ttgtctgaacaaacattattcattgtcaaacctgacggtgtaaaaagaaaattagttggagaaataatttcacgatttgaaaaaaaaggatttacaattttaaaattaaaaatgttcacattcaccaaagaattagccaccgaattttattcagtgcataaagataaaccattttttggtgaattgttagaatacatcacatctggtcctgtagttgttactgtagttgaaggaaataatgctgttgcaacaacaagacaaatggtgggtgcaacaaaatcatttgaagcagaacctggttcaatacgtggagattttggtttaggcttcactgaaaatattattcatgcatctgattcaactgaaagctttgataaggaagtaaatgtggtattcaagtgat

SEQ ID NO: 252125 - DNA, 427 bp, Unknown
  Bacterial polypeptide expressing nucleotide sequence isolated from the Sargasso Sea
catgaataatagaactttcgcaattatcaagccagatgcagtaaaaaatggtaatactggaaaaatatatgatcgaatactcaaagcaggttttaaaatattatgcgctaaactactacgtatgacggtcgatcaagctgagggcttttatgctattcacagagagcgaccatttttcaatgaattaactgaatttatgtcatcaggtgcatgtatggttttagctttagaaaaggatgatgcagtgaatgaatggagaaaaacaataggtgcaacaaacccagatgatgcagaattaggtacgattagaaaggattttgctataaatgtacaagaaaatgcagtccatggttcagattctaatgaaaatgcagaaaaagagattggatttttcttctcgcagagtgaacttatagctaacaaataa

SEQ ID NO: 252126 - DNA, 147 bp, Unknown
  Bacterial polypeptide expressing nucleotide sequence isolated from the Sargasso Sea
atcccgaagaagctgcttcaggtacaataaggtcagattttgctgaatcaattgatgcaaatgctgttcatggatcagattctccagaaagtgctgaacgtgaaatttcttatttctttacagaatctgaaatttttaaaagctaaa

SEQ ID NO: 252127 - DNA, 382 bp, Unknown
  Bacterial polypeptide expressing nucleotide sequence isolated from the Sargasso Sea
tatgagtaatttagagcaaaccttatcaataattaaaccagatgcagtagaaagaaatcttgagaatgaaattaaagaagtgtttaaaagtaatggctttacaatattaaaagaaaaaaaaattcaaattgaaaaatctgaagcagaaaaattctataaagttcatgaaacaaagccattctataatgatttatgtgcgtatctttcatctgggccgattatagttatggcacttgaaaaagagaacgcagttttaggaaatagagagttaatgggcgccacaaatcctaaagatgcagaagaaggcactattagaaaaaaatatggaatttcaattgataaaaattcggtacatggatcagatagcgttgaaaatgctaaa

SEQ ID NO: 252128 - DNA, 400 bp, Unknown
  Bacterial polypeptide expressing nucleotide sequence isolated from the Sargasso Sea
atgaaaactttctttatggtaaaaccagatggtgtaaaaagaaatattgttggacaggtaattgatcgcgttgagcaagagggatttaaaataacaaaaatgaaaatgatgacaataactacagacctcgctgaacaacactatggtgaacacaaagataaaccattcttccaagatttagtttccttcataacaagtggcccagttgtagccatggaagttgaaggggaaaatgctgtaagcgaagttcgtagaataatgggtgccacaaatccagctgatgcagacccaggcacaataagagcagattttgcaaccaaactagaagaaaatgtagtgcatggctctgattcagaagagagtgctgagagagaattaggccttttctttaacaattaaa

SEQ ID NO: 252129 - DNA, 412 bp, Unknown
  Bacterial polypeptide expressing nucleotide sequence isolated from the Sargasso Sea
tatgagtaacgttgaacagactttatcaattataaaacctgatgcagtagaaagaaatttagataatgaaattaagcaaatgtttaaggataaaggttttcagattgttaaagaaaaaaaaattcaaatagaaaaatctgaagcagagatattttataaagtacatgaaacaaaaccattttataatgatttatgttcatatctttcctcaggaccaatagtagtaatggtgattgaaaaagtaaatggaatacttgctaatagagaattaatgggagcaactaatccaaaagatgctttagatggaactattagaaaaaaatatgggatttcaattgataagaattctgttcatggatctgatagtcctgagaatgctaaaattgaaattaactttttctttaaagactag

SEQ ID NO: 252130 - DNA, 412 bp, Unknown
  Bacterial polypeptide expressing nucleotide sequence isolated from the Sargasso Sea
tatgagtaataaagaacaaacattatcaattataaaaccagacgcagttgagagaaatttgattgaaaagataaaagatatatttacagaaaatggtttacaaataaaagagagtaaaaaaattcatgttacaaaagatgaagctgcagaattttataaagttcaccaatcaaaaccattttataatgatttgtgtcaatatctttcatctggacctatatttgttatggttttagagggagaaaacgcggtatcaaataataggaaattgatgggggccacagatccaaaaaatgctgaagaaaatacgataagaaaactttttggaatttcaattgataaaaactcggtgcatggatcagactcaattgataatgcaaaaaaagagataaattttttttttaaaaattaa

SEQ ID NO: 252131 - DNA, 460 bp, Unknown
  Bacterial polypeptide expressing nucleotide sequence isolated from the Sargasso Sea
tatggccgccgaacgtaccttcatcgccattaagcccgatggcgtccagcgcgggctggtgggtgaaattctcggacgcttcgagcgcaagggtttcaagcttgttggtctgaagcagctcacccccagccgcgagctggctgagcagcattacggcgtacacaaggagcgccccttctttgctggcttggttgacttcatcacctccggcccggtggtggcgatggtttgggaaggcgatggggtgatcgccagtgcccgcaagctgatcggggccaccaagcctcttgaagctgagcccggcaccatccgcggcgatctggcggtcaacatcggccgcaatgtgatccatggatcggatgcgccggaaacagctgaatttgaaattggtctctggtttggtgcgaccgaactcaatgattggacaccgtctgaccagagctggcgcgtcgagggttga

SEQ ID NO: 252132 - DNA, 412 bp, Unknown
  Bacterial polypeptide expressing nucleotide sequence isolated from the Sargasso Sea
tatggccattcagcaaacactatcaataatcaaaccagatgccgtttctaaaaatgttattggtgaaatcatatctagatttgaaaaaaataatttaaaaatcattgctgccaaattaattacattgtcagcttttgatgctggtggtttttatgctgagcatgagggaaagcctttttataatgatttaattgaatttatgacttccggcccagtttttattcaagttttggagggagaagatgcaattagcaaaaatagagagctgatgggaaacactgatccatccaaagcaaatccaggaacaataagagcagactttgcacaaacgatagatgcaaatgctgttcatggatccgattcagaaaaaagtgctgagagagaaatagctttcttctttagtgatttataa

SEQ ID NO: 252133 - DNA, 397 bp, Unknown
  Bacterial polypeptide expressing nucleotide sequence isolated from the Sargasso Sea
ttgggaaatcacacatttgcaattattaaacctgatgcagttaagaataaggatacaggattaattttagatcgaatactcaaagctgactttcagatcatgggtggaaaactaatacatatgagcattgaacaagcacaaggattttatgcaattcataaaggaaaaccattttacgatgaattaattgaatttatgtcttccggacaatgtatggttttagcgctaaaaaaagagaatgctgtagaagaatggagaaatacaattggagcaacaaatcctgatgaagcagcagaaggaaccatacgaaaagacttcgcaactaatgttggattgaatgcagtccatggatctgactcagatgacaatgcgcaaaaagagattgcctttttcttct

SEQ ID NO: 252134 - DNA, 412 bp, Unknown
  Bacterial polypeptide expressing nucleotide sequence isolated from the Sargasso Sea
tatgagtagtatagaacaaactttatcaattataaaaccagatgctgtggaaagaaatcttgataatgaaattaaagatatatttagaaataatggatttaaaattattaaagataaaaaaattcaaattgaaaaatcagaggctgaaaagttttacaaagttcatgaaacgaaacctttttatgatgatctgtgctcatatttgtcttcaggtccgatcgttgtgatggttcttgaaaaagaaaattcagttttagcaaatagagaaataatgggagcgaccaatcccaaagaagccaaagatggaaccataagaaaaaaatatggcatttcgattgataagaactcagttcatggatcagacagtgttgaaaatgctaaaattgaaatagattttttctttaaagattaa

SEQ ID NO: 252135 - DNA, 412 bp, Unknown
  Bacterial polypeptide expressing nucleotide sequence isolated from the Sargasso Sea
tatgagtaatattgaacaaacattatccataattaagccagatgctgttgaaagaaatttgcaagatcagattaaaaatgaatttaaaaataatggatttgaaattttaaaggaaaaaaaaattcatatttctaaagaagaagctgaaaagttttataaagttcatgagtctaaaccattttataatgatttgtgtgcttacttatcttctggaccaattgttgtaatgaaacttcaaaaagacaatgctgttctagaaaatagaaaatttatgggagcaactaaccctaaagatgcagaagaaggaacacttcgaaaaaaatatggtatttcaattgataaaaattctgttcatggatcagatagtgttgaaaatgctaagatcgagttagattttttttttaaagattag

SEQ ID NO: 252136 - DNA, 412 bp, Unknown
  Bacterial polypeptide expressing nucleotide sequence isolated from the Sargasso Sea
atgagtaatttagaacaaactttatcgattattaaacctgatgctgtcgaaagaaatcttgaaaaagagattaaagaaatgtttaaaagtaaagggttttcaatattaaaagaaaaaaaaattcaaattgaaaaatcagaagcagaaaagttttataaagttcatgaaacaaaaccattttataatgatttatgtgattatttatcatcaggcccaattgtagttatggttcttgaaaaagagaacgcagttttaggaaacagagaattaatgggtgcaacaaatccaaaagatgctgaagaaggcactatccgaaaaaaatatggaatttcaatagataaaaactctgtccatggatcagatagtgttgaaaatgcaaaaattgaaatagattttttctttaaagattaaa

SEQ ID NO: 252137 - DNA, 433 bp, Unknown
  Bacterial polypeptide expressing nucleotide sequence isolated from the Sargasso Sea
tatggcattggaacaaaccctatccatcatcaaacctgacggggttaagcgaaatctggtcggagaaattctgggacgttttgaacaaaagggtctcaggattgtagccactcgcatgcttcacctttccaaacgggaagccgaaggattttatgcggtccaccgtgaacgcccattttttgaagaactgaagactttcatgtcttccgggccggtcgtgatcagtgtacttgagggagaaaacgtcgttgcttatcaccgtgaaatcatgggagcgaccaatcccactgaagcagtagaaggaaccatccgtaaggattttgctcaaagcattggggaaaacacggttcatgggtctgacagtctggaaaacgcagcaatcgaaatcgcctattttttcgctcagactgaattggtcaacgggaaggcttga

SEQ ID NO: 252138 - DNA, 273 bp, Unknown
  Bacterial polypeptide expressing nucleotide sequence isolated from the Sargasso Sea
catggccgaacgcacgttcatcgccatcaagcccgacggcgtccagcgcggtctggtaggcgagatcctcggccgctttgagcgcaagggattcaagctggtgggtctgaagcagatcaccccaagccgcgccctggccgagcagcactacggcgtccataaggagcgtcccttctttgccggtctggtcgatttcatcacctccggtcctgtggtggcgatggtgtgggaaggcgatggtgttatcgccagcgctcgcaagctgatcggtgc

SEQ ID NO: 252139 - DNA, 415 bp, Unknown
  Bacterial polypeptide expressing nucleotide sequence isolated from the Sargasso Sea
aatgaccattcaaagaacattgtcaattattaaaccagatgcagttgcaaaaaatgtgattggacagattatttcaagatttgaatctaatggattaaaaataattgaaggacagcttttacaattatcaagatctcaagcagaagatttttataaagagcatataggaaaaccattttttgaaaaattacttgattttatgacttctggtaaagtttttattcaagttcttgagggtgaggatgcaattgaaaaaaatagagcattaatgggagctactaatccccaattagcagaaaaaggaactataagagctgattttgcagaaacaatcgatgcaaatgctgtacatggatcagattctcctgaaagtgctttgagagaaattgaatggttcctttcaaataaaggttaa

SEQ ID NO: 252140 - DNA, 439 bp, Unknown
  Bacterial polypeptide expressing nucleotide sequence isolated from the Sargasso Sea
catgcacgagcgcacactggcgattattaaaccggacgcggtttcatcccgttattctggagaaattctccgtcgcattgaagagtcagagcttcggttgatagccgtaaaaatgatgactctaagtggagatgatgcgggaggattctacgctgttcataaagagcgccccttctttcgtgagcttgtcaactttatgagttctgggccaattgtggtttgcgttctagaaggggagaactcgattttgcgctggcgagaattgatgggtccgactaactccgaggatgcacccaagggcacaatcaggggagatcttggcattgatattgaacggaacgcggttcatggatctgatgcccctggaactgcgaagctggaaatcgattacttctttaacgcaacagaaatttgcgctcctgttgaagcactaccttag

SEQ ID NO: 252141 - DNA, 451 bp, Unknown
  Bacterial polypeptide expressing nucleotide sequence isolated from the Sargasso Sea
ttgtcaatgaaacaggagaaccggatggcactagaacgcactttttcaattattaagcccgatgcagtaaaacggaatctgattggcgagatctattcgaggtttgaaaaagctggtcttgctatagtgggagcaagaatgttgaagttgactgctgagcaagctggaggcttctacgctgaacatgacggcaaaccgttttatgaagacctatgttcctacatgatgtctggaccggtaatggtccaggttttagagggcgaagatgctattagtgtaaatcgaaggataatgggcgcaacggatcccaaagaggctgctcccggaactataagagcggattttgctgaaagtatagatgcgaacgctgtccatggatcagattctccagattctgcaaaacgcgaaatcgcttttttcttcgatgacgaagagttgttgactagataat

SEQ ID NO: 252142 - DNA, 460 bp, Unknown
  Bacterial polypeptide expressing nucleotide sequence isolated from the Sargasso Sea
atgactaaagagagaacatttattgcaattaaacctgatggagttcaaagaggatatgttgcggatattatcggcagatttgaaaaaaaaggatttaaattggttggtttaaagcaattagtcccgtcaaaagatcttgctcaaaatcattatggagttcacagagaaagacccttttttggtgatttagtagattttatttcaagtggacctgttgttgcaatggtttgggaagggaaaggagttattttgagtgctagaaaattaataggtgcaacaaagcctcttgaagcagaccctggaacaattagaggggatttagctattgatattgggaggaatataattcatggttctgatggagaagatacagcaaaatttgaaattaatctatggttcaacaaagaggaattatgtgagtgggaaacttctgattcggaatggcgatcagaaaattaaa

SEQ ID NO: 252143 - DNA, 388 bp, Unknown
  Bacterial polypeptide expressing nucleotide sequence isolated from the Sargasso Sea
gatgcaaccccttgcaaataaaacaggagctattaccgctctcatcgagcaaagtggtttacgaataatagctcagcggcgaattagaatgactaaagcgcaagcacagcagttttacgcggttcattcagaaagacccttttacgatgagttggtggaatttatgatgtcaggacccgttgtcgttcaggttctagaaggagagaacgcgatagcaaaataccgcgaagtaatgggtgctactaatcccgcagatgctgcggagggtacaattagaaaactttacgcgaagagcgttggtgagaactcagttcacggttctgatgctgcagcgaccgctgcagaggaaataccgcagtttttttctgaggatgatatcgtgggttga

SEQ ID NO: 252144 - DNA, 412 bp, Unknown
  Bacterial polypeptide expressing nucleotide sequence isolated from the Sargasso Sea
atgaataatttagaacaaactttatcaatcattaaaccagatgcaatcgaaagaaatttaactgaagaaataaaaaaattatttattactaatggttttagtattataaaagaaaaaaaagtgcaaatatctaaaactgaggcgcaacaattttatcaagtacatcaagcaaaaccgttttataatgaattatgtaattatttatcatcaggaccaatttatgtcatgattttagagaaaaatggagctattttagccaatagagaactaatgggtgccacaaatccaatcgaagctaaggagggcacaattaggaagaagtatggcatttcaattgataagaactctgtgcatggctctgatagcgtagataacgcgaaaatagagatagattttttttttaaaaattaaa

SEQ ID NO: 252145 - DNA, 412 bp, Unknown
  Bacterial polypeptide expressing nucleotide sequence isolated from the Sargasso Sea
tatgagtaaagttgaacaaactctttcattgattaaacctgatgcggttgagagaaatttagaagaggaaataaaacaattttttattaaatctggttttaaaattactaaacaaaaaaaagtaaaattagaaaaaaaagatgctgagattttttataaagtgcatgaaacaaaacctttttatagtgatctgtgcaactatctttcgtctgggcctattgttgcaatgatacttgaaaaggttgatgcagtctctgaaaatagaaaagttatgggagcaactgatcctacaaaagcagatgagggaacaatacgaaaaaaatatggattatccattgataaaaattcagttcatggttcagacagtattgaaaacgccaataaagaaattaatttcttttttaagacctaa

SEQ ID NO: 252146 - DNA, 412 bp, Unknown
  Bacterial polypeptide expressing nucleotide sequence isolated from the Sargasso Sea
tatgagtaaagttgaacaaacgctttcactaattaaacctgatgcagttgagagaaatttagaggaggaaataaaacaattttttattaaatctggttttagaattgctaaacaaaaaaaagtaaaattagaaagaaaggatgcggagatattttataaagtgcatgagacaaaacctttttataatgaactttgcaactatctatcctcaggacctattgttgctttgatacttgaaaagattgatgcagtttcagaaaatcgaaaagttatgggcgcaacagatcctgccaaagcagacgagggaacaataagaaaaaaatatggtttatctatcgataaaaactcagtgcatggatctgacagcattgaaaacgctgctaaagaaattaattttttttttaagacctag

SEQ ID NO: 252147 - DNA, 408 bp, Unknown
  Bacterial polypeptide expressing nucleotide sequence isolated from the Sargasso Sea
tatgagtgacattgagcaaactttatcaatcataaaaccagatgcagttgaaagaaatttgcaggaagaaattaaaaacgaatttaaaaaaaaaaacttttcaattgtaaaagaaaaaaaaatccacatttctaaatcagaggcagaacaattctacaaagttcaccaaacaaaaccattttataatgatttatgtgcttatttatcctcaggaccaattatagttatggtgctcgaaaaagataatgcagtcttggataatagacaattaatgggagccacaaacccaaaagaagcagaagaaggcaccataagaaaaaagtatggcatgtctatagataaaaattctgtgcatggctctgatagtgttgaaaacgcaaaaatagaaattaattttttctttaaaga

SEQ ID NO: 252148 - DNA, 400 bp, Unknown
  Bacterial polypeptide expressing nucleotide sequence isolated from the Sargasso Sea
cgaacaaaccctatctataattaaacccgatgctgttgaaagaaatttagaaaatgagataaaagacttttttataaggaataatttaaaaatttcaaaaataaaaaaagtaaaaatatcgaaagaggaagcttctgagttttataaaattcatcaaaccaaacctttttttgaagatctgtgtaattatttatcatcaggacctatagttgttatggttttagagggtgataatgcagtgtcgaaaaatcgtgaattaatgggagctacagacccaagtaaagcaaacgaaggaacattaagaaaaatgtacggtctttcaatagataaaaactctgtacatggctcggatagtgttgctaatggaaaaatcgagatagattttttttttaaaaaataa

SEQ ID NO: 252149 - DNA, 146 bp, Unknown
  Bacterial polypeptide expressing nucleotide sequence isolated from the Sargasso Sea
ccctaaagaagctgctccaggaacaattagagcagattttgctaatagcattgatgcaaacgctgttcatgggtcagactctgctgaaagtgctaaaagggagattgagtatttctttaatacagaagaaatattgaataaataag

SEQ ID NO: 252150 - DNA, 406 bp, Unknown
  Bacterial polypeptide expressing nucleotide sequence isolated from the Sargasso Sea
atgagtagtttagaagaaactctttcaataattaaacctgatgcagttgaaagaaatttagaaaaagaaattaaagctttttttcaaaaaaatggacttaaaattaaacaaagtaaaaaagtaaaaatttctaaagaagaagctgcagatttttataaagtgcatcaaactaaaccattttatgatgctttatgtagttatttatcgtctggcccgatagttgtaatggtattagagggggaagatggtgtatctaaaaataggcaattgatgggtgctaccgatcctttaaaggcagaaaatggtacattaagaaaaatgtatggcatttcaattgataagaactcagtccatggttcagatagtgtagaaaatgccaaagttgaaataaatttttttttttaat

SEQ ID NO: 252151 - DNA, 250 bp, Unknown
  Bacterial polypeptide expressing nucleotide sequence isolated from the Sargasso Sea
tttaacgacctaaaaaaattcatgacttcaggaccagtttttgttcaagtattagaaggtgaaaatgcagttcaaaaaaatagagacttgatgggcagtactaaccctaaagaagccgctccaggaacaattagagcagattttgctaatagcattgatgcaaacgctgttcatgggtcagactctgctgaaagtgctaaaagggagattgagtatttctttaatacagaagaaatattgaataaataag

SEQ ID NO: 252152 - DNA, 213 bp, Unknown
  Bacterial polypeptide expressing nucleotide sequence isolated from the Sargasso Sea
gtcaagtactagaaggcgaaaacgcagttctagctacccgtgaaatcatgggcgcaactaacccagctgatgcagctgcaggtacactacgttcagactacgctgcgtcaatcgacgaaaacgcagttcacggttctgacgcaccagagtcagcagcacgtgaaattgcttacttcttctctgaagaagaaatctgcccacgtactcgctaag

SEQ ID NO: 252153 - DNA, 394 bp, Unknown
  Bacterial polypeptide expressing nucleotide sequence isolated from the Sargasso Sea
aatggaaagaacattatcgattatcaaaccagatggcgttgaaaagaatatcattggcaagatttattctcgttttgagaaagcaggcctaaaaatcgtcgaagcaaaaatgttgcatctgagtcgagaacaagcagaaggattttatgccgttcataaagaaagacctttctttaacgacttggttgattatatgacttctggaccggttatggtgcaagtacttgaaggtgaagatgcaatcaacctcaaccgtaagctaatgggcgctacaaatccagaagatgcagaagaaggaaccattcgaaaagatttcgctgaaagcatagaaaggaatgcagttcatggttcagatgggccagacacggcagctgtcgagatcgaatatttcttt

SEQ ID NO: 252154 - DNA, 412 bp, Unknown
  Bacterial polypeptide expressing nucleotide sequence isolated from the Sargasso Sea
atgagtaatattgagcaaacattatcaattataaaacctgatgcagtagaaagaaatcttgaaaatgaaattaaagaaatttttaaaaataatggattttcaattttaaaagaaaaaaaaatacaaattgaaaaatttgaggctgaaaaattctataaagttcatgaaactaagccattttatagtgatctatgtaattatctctcttctggaccaatagttgttatgattctccaaaaagagaacgcagttaaaggaaacagagaactcatgggtgccactgatccaaaaaatgcagaggatgggactatacgaaagagatatggtatttcaattgataaaaattctgtgcatggttctgatagtgtcgacaatgccaaaatagaaattgattttttttttaaagattaaa

SEQ ID NO: 252155 - DNA, 421 bp, Unknown
  Bacterial polypeptide expressing nucleotide sequence isolated from the Sargasso Sea
tatgggcgacacagtagaaaaaactttatcaataatcaaacctgatgcagtacagagaaattacatcggaaatatattatcacgttttgaaaatgcaggactaaaaatcgttgcaatgcgcatgcaaaaaatgaccaaacaagaggctgaaacattctatgcagtacacaaagaaagacctttttttgctgagctcgttgattacatcagttcagataaagttgtcattttagtactagaaggaccaaatgcaatcacagcgaacagagacatcatgggagcaacaaatccagatgatgcaaaagctgggactatacgacacgatatttcactatcaattggtgagaattctgtacacggatcagacagtgctgagaacgcactactagaaatcaagcaattttttccagagctggtgtag

SEQ ID NO: 252156 - DNA, 412 bp, Unknown
  Bacterial polypeptide expressing nucleotide sequence isolated from the Sargasso Sea
atgaccactcagcgaacactttcaataattaaaccggacgccgttgctaaaaatgtcataggtcaaataatatcgagatttgaggagaacaatttaaaagtagttgctgcaaaacttattactttgtcagcttctgatgctggtggtttttatgctgagcataagggtaagcctttttatgatgacttaattgaatttatgacttcaggcccagttttcattcaagttttggagggcgaggatgcaattagcaaaaacagagagctaatgggaaatactgatccatccaaagcaaatcctggaacaataagagcagactttgctcaaactattgacgcaaacgctgttcatggatccgattcagaaaaaagtgctgagagagaaatattttacttcttcaacaatttataaa

SEQ ID NO: 252157 - DNA, 388 bp, Unknown
  Bacterial polypeptide expressing nucleotide sequence isolated from the Sargasso Sea
tatggcgttagaacgcactttttcaattatcaagccggatgcagtagcaaaaaatgttatcggcgctatctacaaccgttttgaatctgcaggtttacgtatcgttgcagccaaaatgctacacttgagcaaagagcaggctgaaggtttctatgctgagcacaaagagcgtccattctttgctgcgctggtttctttcatgacatctggcccggttatggttcaggtattagaaggcgaagatgctgtgcgtaaaaaccgtgaaatcatgggtgcgactaacccgaaagatgcattagcaggtactttacgtgctgactatgctgccagcattgacgagaatgctgttcacggttcagatgctgctgcgtcagctgcacgcgaaatc

SEQ ID NO: 252158 - DNA, 418 bp, Unknown
  Bacterial polypeptide expressing nucleotide sequence isolated from the Sargasso Sea
tatgactaggacgctttcaatcatcaagccagatgcaactaaaagaaatgttacaggagcaataaacaaaattattgaggacagtaatttaaaaataattgcccaaaaaagaataaaattaactaaagagaaggctgagggcttttattttattcatagagataagcctttttttacagatttaattgattatatgacttcaggccctgtaataattcaagttttagaaggtaataatgctgttgatagttataggaaaataatgggcgcaactaatcctgaaaatgcagaacaaggtactatcagaaaagaatttgcattaaatattcaagaaaattcagttcatggttcagattcagatgaaaatgcggaaattgaaataaagtatttttttgatcacagcgaaattgtaatttaa

SEQ ID NO: 252159 - DNA, 412 bp, Unknown
  Bacterial polypeptide expressing nucleotide sequence isolated from the Sargasso Sea
tatgagtaatattgaacaaactttatcaattataaaacctgatgcagtagagagaaatctagagaatgaaataaaagaaatttttaaaaataatggtttttcaattttaaaagaaaagaaaattcaaattgaaaaatctgaggccgagaatttttacaaagttcatgaaacaaagccattttataatgatttgtgtgaatacctatcttcaggtccgatagtagtaatggtacttgaaaaagataacgcagtgttaggaaatagagagttgatgggtgccacaaaccctaaagatgctgaagaaggtacaattagaaagaaatatggaatttcaattgataaaaattctgtacatggatcagatagcgttgaaaatgctaaaattgaaattgatttcttttttaaagactaa

SEQ ID NO: 252160 - DNA, 412 bp, Unknown
  Bacterial polypeptide expressing nucleotide sequence isolated from the Sargasso Sea
atgagtaatttagaacaaactttatcaattataaaaccagacgcagtagagagaaatcttgaagataaaattaaaacagtatttaaaaatgagggttttaaaattgttaaagaaaagaaaattaaacttgaaaaaaaagatgctgaaaaattttacaaagttcacgaaacaaagccattttataatgatttatgtgaatatttatcttcaggaccaatagttgtaatggtattagaaaaaaatggagcagtattagataatagaaaactgatgggtgcaactgatccaaaaaaagcagaggatggaacaatcagaaaagaatttggtttatccattgataaaaacacagtacatggttcagatagtctggataatgcaaaagttgaaattgattttttttttgcacactaat

SEQ ID NO: 252161 - DNA, 412 bp, Unknown
  Bacterial polypeptide expressing nucleotide sequence isolated from the Sargasso Sea
tatgagtaaaattgagcaaacgctttcaattattaaaccagatgcagtagaaagaaacttaggcgaagaaataaaatctgaatttttaaaaaacaactttaaagtaataaaagaaaaaaaaattaaacttgaaaaacaagaagcagaaagattttatcaagttcatcaaacaaagccattttacaatgatttatgttcatatttatcatctggaccaattatcgttatggtgcttgaaaaagaaggcgctgtagcagaaaataggaaattaatgggtgcgacagatccaaaaaatgcagaagatggtacattgagaaaaaagtacggtttatcaattgataaaaactcagtgcacgggtctgatagttttgaaaatgctaaaattgaaatagattttttctttaaagattag

SEQ ID NO: 252162 - DNA, 399 bp, Unknown
  Bacterial polypeptide expressing nucleotide sequence isolated from the Sargasso Sea
tatgagtaatattgaacaaacactttcaattattaagccagatgcagtagaaagaaatttaggagatgaaataaaatctgaatttttaaaaaacaactttaaaatactcaaagaaaaaaaaattaaacttgaaaaacaagaagctgaaaaattttatcaagtacatcaaacaaagccattttataatgatttatgctcttatttatcatctgggccaattatcgttatggtacttgaaaaagaagacgctattgcgggtaacagaaaattaatgggcgcgacagatccaaaaaaggctgaggatggtacattgagaaaaaaacatggcctatcaattgataaaaattctgtacacgggtctgacagtctcgaaaatgccaaaatcgaaatagatttttt

SEQ ID NO: 252163 - DNA, 421 bp, Unknown
  Bacterial polypeptide expressing nucleotide sequence isolated from the Sargasso Sea
atgacaatccaacgtacattatcgattataaaaccagatgcaacgtcaagaaatattattggcaaaattattgatagatttgagagtaatggcctcaaggttgttgcaggaaagttaattcatatggaccaagataaagctgcgggattctacgctgagcacgatggaaagcccttttttgcaaatcttgttgaatatatgacatcagctccagtttttgttcaagtccttgagggggagaacgctattttaaaaaatagagatttaatgggagccactaatccaagtgaggcaaagtcaggaaccattagagctgattttgcagaaacaattgatgcaaatgcagtacatggatctgactcagtggaaagcgcatctagggagatttcttacttttttgacgatagtgagatcttttaag

SEQ ID NO: 252164 - DNA, 190 bp, Unknown
  Bacterial polypeptide expressing nucleotide sequence isolated from the Sargasso Sea
tagaaggagaaatgctgtagctaagtatcgtaaaataatgggtgccactaatccagctgaagctgaagaaggtactattagaaagttatacgctgagtctattgaggcaaactctgtacatggcagtgactcagaggaaaatgcaaaaattgaaattagtttctttttttctggatctgaattagcctag

SEQ ID NO: 252165 - DNA, 424 bp, Unknown
  Bacterial polypeptide expressing nucleotide sequence isolated from the Sargasso Sea
ttgaagaaaattacgaatagcgtggaacaaacactttcaataatcaaacctgatgcggttgagagggatctggtagaaaagataaaaaaaaactttattgataaacatttcaaaattgttaaaagtaaaaaaattcaaatatcaaaagaggaagcggcagaattttataaaatacatcaaacaaaaccattttacgataggttgtgctcttatttatcatcaggcccgattgttgtaatgattcttgaaaaagatagcgcagtaatagaaaacaggaggatcatgggtgcaactgatccaaaaaatgcggaagatggaacactaaggaaattgtatggtatttcaattgataaaaactcagtccacggatctgactcagtagataatgcaaaaaaagagataagttttttttttaaagattaat

SEQ ID NO: 252166 - DNA, 412 bp, Unknown
  Bacterial polypeptide expressing nucleotide sequence isolated from the Sargasso Sea
tatgagtaatatagagcaaacattatcaattataaaaccagatgcagtagaaagaaatttagataacgaaattaaacagttatttatcaacaaaggttttaaaattgtaaaagaaaaaaaaatacaattagaaaagtctgaagcagaaaaattttataaaattcacgaaacaaagcctttttacaatgatttatgcacatatttatcatctggtcctatagttgccttggttttagagaaagaaaatagtatttttgaaaatagatcactaatgggtgctacaaatccaaaagaagcaattgagggaactataagaaaaaaatatggtatctcaattgataaaaattcagtacatggttcagatagtgttgagaatgcaaaaattgaaattgactttttttttaataattaa

SEQ ID NO: 252167 - DNA, 412 bp, Unknown
  Bacterial polypeptide expressing nucleotide sequence isolated from the Sargasso Sea
atgagtagtgtagagcgaactctatctataataaaacctgatgcagtagaaagaaatttaactgaaaatattaaacaatattttgtgaacaacaagttaaggatagttaaagaaaaaaaaatccaagttacaaaagatgaagctgctgagttttataaagttcatcaaactaaaccattttatgacaaattatgtaactatttgtcatcaggcccaattacagtaattatcttagagggaaataacgcaattaaagaaaatagacgaataatgggtgcgacagatcctataaaagctgaagatggtacaattagaaaaaaatacggtatttctattgataaaaattcagtacacggatcagactcaatagaaaatgctaaaaaggaaatagaatttttctttaaaaattaat

SEQ ID NO: 252168 - DNA, 412 bp, Unknown
  Bacterial polypeptide expressing nucleotide sequence isolated from the Sargasso Sea
atgagtaatatagaacaaactttatcaatcattaaacctgatgcagtagagagaaatcttgataatgagataaaagaaatgtttaaaagtaaaggcttttcaattttaaaagaaaaaaaaattcaaatcgaaaaatctgaagcagaaaagttttataaagttcatgaaacaaagccattttataatgatttatgtgaatatttatcctcaggcccaattgtagttatggttcttgaaaaagaaaatgcagttttagcgaatagagagttaatgggcgctacaaatccaaaagatgctgaagaaggtactatccgaaaaaaatatggaatttcaattgataaaaactcagtacatggatcagatagtgctgaaaatgctaaaattgagatagattttttctttaaagattaaa

SEQ ID NO: 252169 - DNA, 415 bp, Unknown
  Bacterial polypeptide expressing nucleotide sequence isolated from the Sargasso Sea
catgcaaaaaacattttcaataattaaacctgatgccgtaaaaagaaatcttattggtcatataaatcaaataattgaaagttcaggactaagaatattggcctcaaagaaaatttatctaaacattaatcatgcaaagattttttatgaagtgcataaagaaagacccttttttaatagcttagttgaatatatgacttcaggtcctgttcaagttcaggttttagaaggagaagatgctgtatccaaatatcgtaaaattatgggtgctacaaacccagttgaagctgaagatggaactataagaaaattatatgcagagtctatcgaagcaaattctgtgcatggtagtgactcagaggaaaatgcaaaaattgaaatttctttctttttttctgagtcagaattaatttag

SEQ ID NO: 252170 - DNA, 281 bp, Unknown
  Bacterial polypeptide expressing nucleotide sequence isolated from the Sargasso Sea
aaatttttataaaatacataaagataagcctttttttaatgatttgattgaatatatgacttcagaaccagttgttcttcaagttttagagtctgaaaatgccgttaataaatatagagaaataatgggtgcaactaatccaaaagaagctaaagaaggaactataagaaatttacatgccttgaatgttcaagaaaattctgttcatggatctgactcaattgaaaatgcaaatattgaaatcaatttcttttttcatgacaatgagataactggataaa

SEQ ID NO: 252171 - DNA, 412 bp, Unknown
  Bacterial polypeptide expressing nucleotide sequence isolated from the Sargasso Sea
tatgagtaatattgagcaaacattatctataattaaaccagatgctgttgaaagaaatttgcaagatcagattaaaaatgaatttaaaaataacggatttgaaattttaaaagaaaaaaaaattcatatttctaaagatgaggcagaaaaattttataaaattcatgagtctaaaccattttataacgatttatgcacttatttatcctcaggaccaattgttgtaatgagtcttcaaaaagacaatgcagttttagaaaatagaaaattgatgggagcaactaatcctaaaaatgccgaagagggaacactcagaaaaaaatatggaatttcgattgataaaaattccgttcatggatcagatagtgttgaaaacgctaagatagaattggactttttttttaaagattag

SEQ ID NO: 252172 - DNA, 412 bp, Unknown
  Bacterial polypeptide expressing nucleotide sequence isolated from the Sargasso Sea
atgagtaaagtcgaacaaactttatcaataataaaaccagatgctattgaaagaaaccttgaggataaaattaaattagtttttttaaaaaacgattttaaaataataaaggaaaaaaaattaaaactagaaaaaatggaagctgaacaattttataaggttcatcaaactaaaccattttataatgatttatgcgagtatttatcatctggtcctattctcgcaatgattttggaaaaagaagatgccatacaggctaacaggaatattatgggtgcaacagaccctaaaaaagctgaagaagggacaattagaaaatcttttggaatttcaatagacaaaaattctgtgcatggatctgatagcgtcgaaaatgctaaaatagagatagattttttctttaaaagttaat

SEQ ID NO: 252173 - DNA, 386 bp, Unknown
  Bacterial polypeptide expressing nucleotide sequence isolated from the Sargasso Sea
aatggaaactactttagcaattgtaaaaccagatgcatataaaaacggctatgctggaaaaatcattgatagaataattgaagaaggctttgctatagatcagatgaaacagattctaatgactaaagaaaaggctgaaggtttttatgaagtacataaagaacgtcctttttttggagaattagtagactttatgtcttcaggtaactgtgttgtcctttcattgaaacgtgaaaatgcagttgcaaaatggagagaagttataggtgcaacgaatccagaagaagcagacggggaaactataagagcgctttatggcactaatactgggaataatgcagtccatggatctgattcagctgaaaatggaatcattgaatccaatt

SEQ ID NO: 252174 - DNA, 199 bp, Unknown
  Bacterial polypeptide expressing nucleotide sequence isolated from the Sargasso Sea
cctataatagtaatgattttagagggagaaaacgccatcaaagagaatagaagaataatgggcgcaacaaatcccaaggaggcggaagaggggacaattagaaaattatatggcatttctatagataaaaattctgtgcacggatcagactccttagaaaatgcaaaaaaagaaattaattttttctttaaagattaat

SEQ ID NO: 252175 - DNA, 157 bp, Unknown
  Bacterial polypeptide expressing nucleotide sequence isolated from the Sargasso Sea
gaaaataggaaattgatgggagcaacaaacccaaaagaagctgcagatggaacaattagaaaaaaatacggcatatccattgataaaaattcagtgcatggatctgacagcgttgaaaatgcaaaaatagaaattgattttttttttaaagattaat

SEQ ID NO: 252176 - DNA, 418 bp, Unknown
  Bacterial polypeptide expressing nucleotide sequence isolated from the Sargasso Sea
atggaaaaaacattttcaataattaaacctgatgcaacaaagcgtaatctaaccggtgctataaataaaataatagaacaaaataatttacgaatcattgcacaaaaaagaattttattaactaaatctaaagctgagggtttttattctattcataaagataaacccttttttaacgatctaattgaatatatgacctcgggtcctgttgttcttcaagttctggaaggaaatgatgcaataaaaaattatagaaaagttatgggagcaactgatccaaaaaaagcagactctggatctattagaaacgaatttgcattaaatattcaagaaaattcagtacatggttcagactctattgaaaatgcaataaacgaaataaaatatttttttgatgaaaatgaaattgttggataat

SEQ ID NO: 252177 - DNA, 289 bp, Unknown
  Bacterial polypeptide expressing nucleotide sequence isolated from the Sargasso Sea
aatcaggcacaaattttttatgaagttcataaagagagaccattttttaatagtttagttgattatatgacgtccggccctgttcaggtacaagttttagaaggagaggacgcagtaataaaatatcgtaaaattatgggtgctactaacccagatgaagctgaagaagggacaataagaaaacaatacgctgagtctattgaagcaaactcagtacatggaagcgactctgaggaaaatgcaaaaattgaaatcaatttctttttttccggatctgaactagtttagt

SEQ ID NO: 252178 - DNA, 197 bp, Unknown
  Bacterial polypeptide expressing nucleotide sequence isolated from the Sargasso Sea
aattgttgtaatggtattagaaaaagaaaatgctgtaattgaaaatagaagacttatgggtgctacagatcctgttaaggcagaagaggggactataagaaaaaaatatggtatttcaatcgataaaaattctgtacatggatcagatagtgtagagaatgcaaagactgaaatagatttcttttttaaatcttaga

SEQ ID NO: 252179 - DNA, 424 bp, Unknown
  Bacterial polypeptide expressing nucleotide sequence isolated from the Sargasso Sea
aatgactactgaaaaaactttttcaattattaaacccgatgcggtagaaagaaataaaattggtgaaattacggctatgcttgaatcagcaggattaagaattgttgcatcaaagagaattaaacttgatcaagaaaaagctgcagcattttatagtgttcatgctgataaacctttttttcagagcttatgtgatttcatgtgttcaggacctattgtagttcaggttcttgagggtgaaaatgcaattcaaaaaaatagggaggtaatgggagcaaccaaccctgacgaagcagctcagggcacaataagaaaaaagtttgctctttctttagaaaagaactctgttcatgggtcagatagtccggaaaatgctgtgatcgaaattaatcactttttttctgatgaggatatcatttcttaa

SEQ ID NO: 252180 - DNA, 396 bp, Unknown
  Bacterial polypeptide expressing nucleotide sequence isolated from the Sargasso Sea
aatgtcaaatgaaagaactttatcaataattaaacctgatgcaactaaaagaaatataatcggcaaaatattatcaagatttgaggaaaagggtcttagagttattgctttaaaaaaattacatttaaccttagatcaagcgagaaaattttattcgatacattctgataaaccattctttgacgaattatgtaattttatgacttcaggtccggttgtcgtccaagttctagagggagagaatgcaattattaaaaatagagaaattatggggtctactaacccaagtgatgctgaagaagggactattagaaaagattttgctttgtctctaactgaaaattcagttcatggttctgattctaaagaaaatgcaaaaattgagatagggttttt

SEQ ID NO: 252181 - DNA, 205 bp, Unknown
  Bacterial polypeptide expressing nucleotide sequence isolated from the Sargasso Sea
gtgcaagtattagaaggtgaaaatgcagttctaaaaaatagagaggtaatgggggcaacgaatccagaagatgcaggtgagggaacaattagaaagaaatttgctgtatcattggagaaaaattcagtacatggctcagacagtctagaaaatgcaaaaattgaaattgatcaattttttactgaagaagaaattttatcctagg

SEQ ID NO: 252182 - DNA, 412 bp, Unknown
  Bacterial polypeptide expressing nucleotide sequence isolated from the Sargasso Sea
tatgagtaatatcgaacaaacactctcaataataaaaccagatgctgttgaaagaaacttacaagatgaaattaaaaaagaatttagaaataagggttttgaaattaaaaaagaaaaaaaaattcatatttcaaaacaagaagctgaacagttttataaagttcatgagaccaaacctttctacaatgaactatgttcatatctatcttcagggcctatagtcgtcatggaattaagtagagaaaatgcaatttttgagaataggaaattaatgggggcgacaaaccctaaagatgctgaggaaggaactattagaaaaaaatatggtatttcaatagataaaaactcagttcatggctctgatagctctgaaaatgctaaaattgaattagactttttctttaaagactag

SEQ ID NO: 252183 - DNA, 424 bp, Unknown
  Bacterial polypeptide expressing nucleotide sequence isolated from the Sargasso Sea
atgagtattgaacaaacactatctataataaaacctgatgcaacaaaacgtgaccttacgggaaaaattaattcaaaattagaagaatcaggattaaaaatcatcgctcaaaaaagaattcttttatcaaaaacccaagctgaagatttctataaagttcatcaagagagaccattttataatgatttagtaaaatttatgatttctgggccagtagttgttcaagttttagagggtgaaaatgctgtgtctaaaaacagacagataatgggtgctactaatcctgctgaagcagaggatggaacaataagaaaagaatttgcagtaagtttagaagcaaactcagttcatggatcagattcattagagaacgctaaaattgaaatttcttttttcttttcgcaaattgaattagttcattaag

SEQ ID NO: 252184 - DNA, 409 bp, Unknown
  Bacterial polypeptide expressing nucleotide sequence isolated from the Sargasso Sea
gagtaataaagaacaaactctttcaatcataaaacctgacgcgtgtgaaaggaatttgtctgataaaattaaagctatcttttcaaaaaataatttatcaatcttaaactctaagaaacttcatatttcaaaagacgaagcggctgaattttataaagttcatcaatctaagccattttatgaccaactctgtaattatttatcctctggaccaatagaagtaatgatattagagggagaaaatgcaattttaaagaatagagaaataatgggtgctactgaccctaaaaacgcaaaagacggaacaataaggaagttatacggaatttctattgacaaaaactctgttcacggttctgattctgctgaaaatgctaaaattgaaataaatttctttttcaataaataa

SEQ ID NO: 252185 - DNA, 409 bp, Unknown
  Bacterial polypeptide expressing nucleotide sequence isolated from the Sargasso Sea
atgagtaatttagaacaaactctttcaataattaaaccggacgcagtagaaagaaatttagaaaaaaaaatagaggatcattttataaaaaatgattttaaaattgtaaaaaagaaaaaagttaaaatttctaaagaagaagctgctgaattttataaagttcatcaaacgaaacctttttataacgatttatgcagctacttatcatcggggcctatcgtagttatgatactagaaagagataatgctgtatctaaaaaccgagagattatgggagcaactgacccaaataaatcagaagaaggaacacttaggaaaatgtacggattatctattgataaaaattcagtacatggttctgacagcgtagataatgctaagttagaaataaattttttttttaaataat

SEQ ID NO: 252186 - DNA, 172 bp, Unknown
  Bacterial polypeptide expressing nucleotide sequence isolated from the Sargasso Sea
agttaatgcagtcctagataatagacaattaatgggagccactaatccaaaagaggcagaagaaggtacattacgtaaaaaatacggtatatccattgataaaaattctgttcatggatccgatagtgtcgaaaacgcaaagatagaaattgattttttctttaaagattaa

SEQ ID NO: 252187 - DNA, 292 bp, Unknown
  Bacterial polypeptide expressing nucleotide sequence isolated from the Sargasso Sea
actttgtcagcttctgatgctggtggtttttatgctgagcatgagggtaagcctttttataatgatttaattgaatttatgacctcaggaccggtttttattcaagttttggagggtgaaaatgcaattagcaaaaatagagagctaatgggaaacactgatccatctaaagcagatccaggaacaataagagcagactttgcacagacgattgatgcaaacgccgttcatggatcagattcagaaaaaagtgcaaagagagaaatagcttttttctttagtgatttataaa

SEQ ID NO: 252188 - DNA, 412 bp, Unknown
  Bacterial polypeptide expressing nucleotide sequence isolated from the Sargasso Sea
tatgagtaaagttgaacaaactctttcattgataaaacctgatgcagttgagagaaatttagaggacgagataaagcaattctttattaaatctggttttaaaattactaaacaaaaaaaagtaaaattagaaaaaaaagatgctgaaattttttataaagtacatgaaacaaaacctttttataatgacctttgcaattatctttcttctgggcccattgttgcaatgatacttgaaaaggttaatgcagtttctgaaaatagaaaagttatgggagcaactgaccctaccaaagcagatgaaggaacaatacgaaaaaaatatggattatctattgataaaaattcagttcatggttcagatagtatcgaaaacgctaataaagaaataaattttttttttaagacctaa

SEQ ID NO: 252189 - DNA, 358 bp, Unknown
  Bacterial polypeptide expressing nucleotide sequence isolated from the Sargasso Sea
aaaataatagaccgatttgaagaaaatggccttaaagtggtcgcaggtaaattaatacatatggatcaagccaaagctgctggtttttatgctgagcatgagggaagacctttttttccgaaccttgttgaatatatgacatctgctccagtatttgttcaagtgcttgagggagaaaatgctgttttaaaaaatagagagttaatgggcgccacaaatccaagtgaagcagatcctggaacgattagagcagactttgcagaaacaattgatgcaaatgctgttcatggttctgattcatctgatagcgcagcaagagaaatttcctatttttttgatgatagcgaaatcttttaat

SEQ ID NO: 252190 - DNA, 412 bp, Unknown
  Bacterial polypeptide expressing nucleotide sequence isolated from the Sargasso Sea
tatgagtaatttagaacagactttatcaataataaaacctgacgcagtagaaagaaatttagaaaacgaaattaaagaaatttttaggaacacaggatttaatattcggaaagaaaaaaaaatccagataacaaaatcagaagcagaacagttttataaggttcatgaaacaaagccattttacaatgatttatgtgcatatttatcatctggaccaattgtagttatgatacttgagcatgaaaatgctgtattacgaaatagagatttaatgggagcaaccaacccaaaagatgctgaagaaggaacaataagaaaaaaatatggaatttctatagataagaattctgtgcatggttctgacagcgtagaaaatgcaaaaatagaaattgattttttctttaaagattaa

SEQ ID NO: 252191 - DNA, 187 bp, Unknown
  Bacterial polypeptide expressing nucleotide sequence isolated from the Sargasso Sea
aatggttcttgaaaaaaataatgcagttttaggaaacagagaattaatgggtgctacaaatccagaagacgcagaagaaggtacaattagaaaaaaatatgggatttcaatagacaaaaactctgtccacggatcagatagtgttgaaaatgctaaaattgaaatagattttttctttaaagattaa

SEQ ID NO: 252192 - DNA, 412 bp, Unknown
  Bacterial polypeptide expressing nucleotide sequence isolated from the Sargasso Sea
tatgagtaatactgaacaaacattatcaattatcaaaccggatgcagttgaaagaaatttagaaaatgaaattaaagaaatgtttaaaaatgatggtttttcaattctaaaagaaaaaaaaattcaaattgaaaaatctgaggctgaaaagttttataaagttcatgaaacaaagcctttttataatgatctttgctcatatctttcatctggtccaattgttgttatggttctagagaaagaaaatgcaattcttgcaaatagagaactaatgggagcaacaaatcctaatgacgcaaaagaaggcacaattagaaaaaaatatggaatttctattgataaaaattcagttcatggatctgatagtgttgaaaatgctaaaattgaaatagattttttttttaaatactaa

SEQ ID NO: 252193 - DNA, 412 bp, Unknown
  Bacterial polypeptide expressing nucleotide sequence isolated from the Sargasso Sea
tatgagtaatattgaacaaactctttcaataattaaaccagatgcagttgagagaaatcttcaagatcaaattaaacaagaatttacaaataaaggttttaaaataattaaagaaaaaaaaattcatatttctaaagaggaagctgaaagattttataaagtccatgaatctaagccattttataatgatctttgcgcgtatttatcttccggtcccataatagttatgactttacagaaagaaaatgcagtaatggataacagaaaattaatgggggcaacaaatcctgtggatgcagaagagggaacattgaggaaaaaatatggtatttcaattgataaaaactccgttcatggttcagacagcctagaaaacgcaaaaattgaattagattttttttttaataattag

SEQ ID NO: 252194 - DNA, 460 bp, Unknown
  Bacterial polypeptide expressing nucleotide sequence isolated from the Sargasso Sea
aatgaccaaagagagaacctttattgctattaaaccagatggagttcaaagaggatatgtttctgagattattggcagatttgaaaaaaaaggatttaaattggttggtttaaagcaattaattccttcaaaagaacttgctcaaaatcattatggagtacatagagaaagacccttttttggtgatttagtagactttatttcaagtggacctgttgtagcaatggtgtgggaaggcgaaggagttattttgagtgccagaaaattaataggtgcaacaaaacctctggaagcagagcctggaacaattagaggtgatttagctattgatattgggaggaatattattcatggttctgacggagaagatacagcaaaatttgaaattgatctgtggtttaacgaagaggaattatgtgagtgggagacttctgattctaaatggcgatctgaaaattaa

SEQ ID NO: 252195 - DNA, 166 bp, Unknown
  Bacterial polypeptide expressing nucleotide sequence isolated from the Sargasso Sea
tatcgtaaaataatgggagctactaatccggcagaagctgaagaaggaactattagaaagctatatgctgagtctattgaggcaaattccgtgcatggtagtgactctgaagaaaatgcaaaaattgaaattagtttctttttttctggatctgaattagcttagt

SEQ ID NO: 252196 - DNA, 334 bp, Unknown
  Bacterial polypeptide expressing nucleotide sequence isolated from the Sargasso Sea
aatgtttgaaaaaagtggctttaagatagcaaaagaaaaaaaaatacaattagccaagaatgaagcagaacaattttataaagtacacgaaacaaaaccattttataatgatttgtgtgaatatttatcatcaggtcctataatggtgatgatccttgagaaagaaaatgctgtattagctaacaggaaattaatgggtgccacaaatccaaaagaagcagaagaaggtacaattaggaaaaaatttggaatctcaatagataaaaattcagttcatggatcagatagtgttgaaaatgcaaaaatagaaattgatttttttttcaaaaattaa

SEQ ID NO: 252197 - DNA, 409 bp, Unknown
  Bacterial polypeptide expressing nucleotide sequence isolated from the Sargasso Sea
tatgagtaatttagaacaaactttatcgattattaaacctgatgctgtcgaaagaaaccttgagaatgagattaaagaaatgtttaaaagtaaagggttttcaatattaaaagaaaaaaaaattcaaattgaaaagtcagaagcagaaaagttttatatagttcatgaaacaaaaccattttataatgatttatgtgattatttatcatcaggcccaattgtagtcatggttcttgaaaaagagaacgcagttttagaaaatagagaattaatgggcgcaacgaatccaaaagatgcagaagaaggcactatccgaaaaaaatatggaatttcaatagataaaaactctgttcatgggtcagatagtgttgaaaatgctaaaattgaaatagattttttctttaaagat

SEQ ID NO: 252198 - DNA, 430 bp, Unknown
  Bacterial polypeptide expressing nucleotide sequence isolated from the Sargasso Sea
aatggccatagaaaagacattatctatcattaagccagatgcggtacaaaaaaaacttattggaaaaatatattcacgatttgaggatggcggactccgtgtagtggcaactaagatgcttcatctcaatgatgagatggcaggtgggttttatgtcgagcacaagggacgccctttctacgaagcgcttataggatttatgacatcaggacctattttggttcaggtattagaaggagaagacgcggttgcattaaatagaaaactaatgggagctactgatcctcgcgaagcagaagcgggaaccattagggctgatttcgctagttccatagatgctaatgcagtgcatggctctgattctattgagtctgcacagcgtgaaatttattattttttcgaagaccgagaaatttgttcttttaattaa

SEQ ID NO: 252199 - DNA, 316 bp, Unknown
  Bacterial polypeptide expressing nucleotide sequence isolated from the Sargasso Sea
atgaaaacgttttttatgataaagcctgatggtgtgcaaagaaatttagttggagaaattatttcaagagttgaagccaaaggattttccatcacaaaaataaaaatgatgactatttctaaagaattagcagagcagcattatggggaacataaagataaatcattttttaatgatttagtatcctttataacaagtggtccagttgttgctatgcaggttgagggtgaaaatgttgttttacaaatcagaaaccttatgggcgctactaatccaagtgaatcaacacctggctcaattaggggtgatttagcta

SEQ ID NO: 252200 - DNA, 424 bp, Unknown
  Bacterial polypeptide expressing nucleotide sequence isolated from the Sargasso Sea
atggctattgaaagaaccctctcaattatcaaacccgatgcaacacgccgtaaccttacaggtctaattaatgcccggcttgaagctgctggtcttcgcattgttggacaaaaacgcaaacaactaaccggaccagaagctatggcattttatgcggtgcataaagagcgcccattttacaaggatctggttgcctttatgacatctggaccggtggttttgcaggtgctagagggtgaaaatgctgttgccaccaatcgtgaagtgatgggtgcaaccaacccgactgatgcggctgatggcacaattcgcaaagattttgccgagtccatcgaagcaaattctgtgcatggttcagatagcccggaaaatgcagctattgaaatcagctatttttttgctggctgtgaaatcacctcataaa

SEQ ID NO: 252201 - DNA, 308 bp, Unknown
  Bacterial polypeptide expressing nucleotide sequence isolated from the Sargasso Sea
tatgagtaatattgagcaaactctatcaataattaaacctgatgcggtagaaagaaatttaacagatgaaattaaaaatatatttgttaaaaataatcttaaaatttcagatagtaaaaaactagaaataacaaaagaggaagctgctgaattttataaagttcatcagtctaagcctttctttgatgcgctttgcaattatttatcatctggaccaattgttgtaatgattctagagggaactgatgctataaaacaaaatcgtgatttaatgggggctacagatcccaaaaatgccgccccaatac

SEQ ID NO: 252202 - DNA, 412 bp, Unknown
  Bacterial polypeptide expressing nucleotide sequence isolated from the Sargasso Sea
tatgagtaatatcgaacaaacgctctcaataattaaaccagatgcagttgaaagaaacttacaagatgaaataaaacaagaatttataaataaaggatttgatattaaaaaagaaaaaaaaattcatatttcaaaacaagaagctgaacaattttataaagtccatgaaacaaaatctttctacaatgaactatgctcatacctgtcttcaggtccaatagtggttatggaattaagtagagaaaacgctattttagagaacagaaagttaatgggtgcaacaaatcctaaagatgctgaagaaggaacgcttagaaaaaagtacggtatttcaatagataaaaactcagttcatggctctgatagccctgagaatgctaaaacagaattagactttttctttaaagattag

SEQ ID NO: 252203 - DNA, 412 bp, Unknown
  Bacterial polypeptide expressing nucleotide sequence isolated from the Sargasso Sea
atgagtaatattgagcaaacattatcaatcataaaaccagatgctgtagaaaggaatctacagaaccagataaaaaacgaatttaaaaataaggggtttgaaatattaaacgaaaaaaaaatacacattacgaaggaagaggctgagaatttctataaagttcatgagtctaaaccattttatagtgatttatgcgcttatttatcctctgggccaattatagtgatgaaacttcaaaaagaaaatgctgttacagagaacagaaaattaatgggcgcaacaaacccaaaagatgctgaagaggggactttaagaaaaaaatttggtatttctatagataaaaattctgttcatggatctgatagtctagaaaatgcgaaagtagaattagattttttttttaaggattagt

SEQ ID NO: 252204 - DNA, 241 bp, Unknown
  Bacterial polypeptide expressing nucleotide sequence isolated from the Sargasso Sea
aagcctttttataatgatctatgttcgtatttatcatctggaccaattattgttatgatattagagagagaaaatgcgatattagaaaatagagaactaatgggagcaacagatccgacaaaggcaaaggaaggaaccattagaaagaaatatggaatatcaatagataaaaactccgttcatggctcagacagtccagacaacgccaaaattgaaatcgattttttttttaaagattagt

SEQ ID NO: 252205 - DNA, 421 bp, Unknown
  Bacterial polypeptide expressing nucleotide sequence isolated from the Sargasso Sea
atgagtaatatagaacaaacactctcaataataaaaccagatgcagtagaaagaaatttaaaagatgaaataaaacaagaatttattaataaaggatttgaaattaaaaaagaaaaaaaaattcatatttcaaaacaagaagctgaacaattttataaagtacacgagactaaaccattttataatgaactatgttcatacctttcttcaggtcccatagtagttatggaattaagtaaagaaaacgccgttttagagaacagaaagttaatgggcgcaacaaatcctaaagatgctgaagaaggaacgcttagaaaaaagtatggtatttcaatagataaaaactcagttcatggctctgatagtcctgaaaatgccaaaatagaattagactttttttttaaagataagactttttaaa

SEQ ID NO: 252206 - DNA, 409 bp, Unknown
  Bacterial polypeptide expressing nucleotide sequence isolated from the Sargasso Sea
tatgagtagcatagaacaaactctttcaattataaaacctgatgccgtggaaagaaatctaacggaacaaataaaagaaaaatttttaaaaaataaattaaccattaaaaatcaaaaaaaaattcaaatttcaagagaggaagcggctgaattttataaagttcatcaaacaaagcctttttatgaaagattgtgtagttatttatcctcaggacctattgttgtgatgattttagaaggcgaaaatgccattgcaatcaacaggaaaatcatgggggcaactaatccagaaaaagcagaaaaaggaacaataagaaaagattttggtatttcaatagataaaaattccgtacacggatccgattctaaagataacgctaagaaggaaatcgatttcttttttaactaa

SEQ ID NO: 252207 - DNA, 412 bp, Unknown
  Bacterial polypeptide expressing nucleotide sequence isolated from the Sargasso Sea
tatgagtaacgtagagcaaacactttcgataattaaacctgatgctgttgaaagaaatttaatagataatattaaagcgatatttataaaaaatagtttaatgattaaagaagataaaaagatacacttaaccaaagaggaggcggccgagttttataaagtacaccaatccaagccgttttatgaggatttatgcacttatttatcttcaggaccaatagtagtgatggttctagaaggagaaaatgcagttattcttaataggaagttaatgggcaatactgatcctaaaaatgctgaagaaaatacgataagaaaactttatggtatttcaattgataaaaattctgttcacggatcagactcattagaaaacgcaaaaaaagaaataaattttttctttaaaaattaa

SEQ ID NO: 252208 - DNA, 412 bp, Unknown
  Bacterial polypeptide expressing nucleotide sequence isolated from the Sargasso Sea
tatgaataatattgagcaaaccctctcaataattaaacccgatgcagttgaaagaaatttagtagaaaatataaagtcaatttttacaaaaaataaatttaaaataaaagaaaataaaaaaattcatataacaaaggacgaagctgcagaattctataaagtccaccagtctaagccattttatgataatttatgtggctacctctcctctggaccaatagtggtaatgattttagaaggagaagatgcagtaaaaagaaatcgggatttaatgggagccactgaccctaaaaatgctgaagaaaatactattcggaaactttatggagtgtcaattgataaaaactctgttcatggatctgactcagttgaaaatgcaaaaaaggaaatagaatttttttttaaaaattag

SEQ ID NO: 252209 - DNA, 421 bp, Unknown
  Bacterial polypeptide expressing nucleotide sequence isolated from the Sargasso Sea
aatgaaaaatataacattcgctattattaagcctgatgccgtaaaaaatggaagtacaggaaaaatttatgaccgcattattagttcaggttttaaaattaaaagtgcaaaactgcttagaatgacagaatctcaagcacaaggtttttatgctgttcataaagaaagaccattctttggagaattaactgagtttatgtcttcaggtccatgcatggtactggctcttgaaaaggaaaatgcagttgaagaatggcgaaaaactattggtgcaaccaaccccgaagaagcagaaagtggaactattagaaaagattttgctacaaatatacaagaaaatgcagttcatggctcagattctgatgaaaatgcaaaaaaagagattggatttttcttctcagatagtgaacttatagcaaat

SEQ ID NO: 252210 - DNA, 415 bp, Unknown
  Bacterial polypeptide expressing nucleotide sequence isolated from the Sargasso Sea
tatgaataataaaatagaacaaacattatcaataattaaaccagatgcggtagaaagaaatttagaaaatgaaattaaagaaatgtttaaaaatacaggcttcaatattttaaaagaaaaaaaagttcaaatagaaaaatcagaggcagaaaaattttacaaagttcatgaaaccaaacctttttataaagatttatgcgcatatttagcttcaggacctattgtagttatgattcttgagaaacaaaatgctgtactggataacagagatttgatgggagcaactaatccaaaagaggctaaagaaggaacaattagaaagaagtacggtatttcaatagacaaaaattctgttcacggatcagatagtcttgaaaatgctcaaattgaaattgatttcttttttaaagattag

SEQ ID NO: 252211 - DNA, 460 bp, Unknown
  Bacterial polypeptide expressing nucleotide sequence isolated from the Sargasso Sea
catgtccaccgaacggactttcattgccatcaagcccgatggcgtccagcgcggtctcgtcggcgagatccttggccgcttcgagcgcaagggcttcaagttggtgggcctcaagcagctcaccccgagccgagagctcgctgagcagcactacggagtgcacaaggagcgtccgttctttgctggtttggtggacttcatcacctccggtcctgtggtggccatggtttgggaaggtgatggcgtgatcgccagcgcccgcaagctgatcggtgccaccaaacccctggaagcagagcccggcacgatccgcggcgatctggccgtcaacatcggccgcaacgtgatccatggctctgatgctgccgaaaccgctcagttcgaaattggtctgtggttccagccttccgaattgaatgattggaatccttcagatcagggttggcgcgttgaggactga

SEQ ID NO: 252212 - DNA, 370 bp, Unknown
  Bacterial polypeptide expressing nucleotide sequence isolated from the Sargasso Sea
gcttcaagctggtgggtctcaagcaaatcaccccgaccccgtgagctagctgagcagcactacggcgttcacaaggagcgtcctttctttgctggcttggtggacttcatcacctcgggcccagtggtggccatggtttgggaaggtgatggtgtcattgccagtgctcgcaagctcattggtgccaccaaaccacttgaggctgaacccggcaccattcgcggtgatttggctgtgaacattggccgcaatgtgatccacggttccgatgcaaccgaaaccgcccagttcgaaatcggtctttggttccagccttcggaattgaatgattggatgccttccgatcagggttggcgcgtcgagggctgat

SEQ ID NO: 252213 - DNA, 403 bp, Unknown
  Bacterial polypeptide expressing nucleotide sequence isolated from the Sargasso Sea
catgaaccaagaatcaacacttggaattattaagccagacgctgttagcagaaatttaattgggtcaattattaaaatgattgaagaaaataatatcactataagtaaaatgaaaatgattactttatctaatgatcaagccgaagctttttataaggtccataaagggaaagtattttatgataaattaatagagtatatgacatctggacctattgtaataatggttcttcaaggcatagatgttattaagagatatagagatttaatgggtaaaacgaatccagatgatgctgaagacggaaccattagaaagcttttcggattaaatacaactcataattctgttcatggctctgatagtcaagataatgctataatagaaattaatttatttttttaa

SEQ ID NO: 252214 - DNA, 412 bp, Unknown
  Bacterial polypeptide expressing nucleotide sequence isolated from the Sargasso Sea
atgagtaatttagaacaaactctttcgataatcaaaccagatgctgtggaaagaaatttaacagaagaaataaagaaaatttttaataaaaatagtctaaacattaaagatagtaagaaattacatgtaacaaaagatgaggcagctgagttttacagagttcatcagtctaaaccattttataatgatctatgtgcttacttatcttctggaccgattgttgtaatgatattagagggggagaatgcaatttctacttatagaaagctaatgggtgcgactgatccgaaagacgctgaggaaaatacaattagaaaattgtatggactttctattgataaaaattctgttcatggctcagactctctagaaaatgcgaagaaagaaattaatttcttttttaagaattaat

SEQ ID NO: 252215 - DNA, 169 bp, Unknown
  Bacterial polypeptide expressing nucleotide sequence isolated from the Sargasso Sea
atgacaaaagagagaacattttccataattaaacctgatgctacgagacgtaatttaattggaaaaataattacaaaacttgaggatggtggtctatgtattattgcgcaaaaaaaaattcatttaacaaaagagcaagcagagcagttctactccgtacataaagaga

SEQ ID NO: 252216 - DNA, 292 bp, Unknown
  Bacterial polypeptide expressing nucleotide sequence isolated from the Sargasso Sea
tatgagtaatttagaacaaacattatcaattataaaaccagatgcagtggagagaaatctagagaacgaaattaaagaaatgtttaaatctaatggttttacaattttaacagaaaaaaaaatccaaattgaaaaatcagaagctgaaaagttttataaagttcatgaaaccaaaccattttacaacgatttatgcagttatctctcatcaggtccgattgttgtaatggttcttgaaaaggataatgcagttttagctaatagagaattaatgggtgctacaaatccagaa

SEQ ID NO: 252217 - DNA, 403 bp, Unknown
  Bacterial polypeptide expressing nucleotide sequence isolated from the Sargasso Sea
atggaacaaacactttctataataaaacctgatgctgtagaaagaaatcttggcgaaaatataaaaaatatttttttgaaaaataatttcaagattaaagatagtaaaaaaatacatttatctaaagacgaagcagcagaattctataaagttcaccaatctaaaccattttacaatgatttgtgcgcttatttatcatcaggtccgattattgttatgatattagaaggagaaaatgcagtatttgctaatagaaaattaatgggagcaactaatcctaaagatgctgatgaaaatacaatcagaaaattatatggaatttcaatagataaaaattcagtacatggttctgactcagctgaaaatgctaaaaaagagatagaatttttcttcaaaagttagt

SEQ ID NO: 252218 - DNA, 229 bp, Unknown
  Bacterial polypeptide expressing nucleotide sequence isolated from the Sargasso Sea
gatgccttatgttcatatttatctttctggaccaattatagttatgattcttcaaaatgagaatgcggtaaaagcaaatcgagaattaatgggagccacaaatcccaaagaagctcaagaggggacaattagaaaaaaatacggaatttcaattgataagaattcggtacatggttctgatagtcttgaaaatgcaaaaaaagagattgagtttttttttaaaaactaa

SEQ ID NO: 252219 - DNA, 412 bp, Unknown
  Bacterial polypeptide expressing nucleotide sequence isolated from the Sargasso Sea
aatgacattatcaattataaagccagatgcagtggctaaaaatgtgataggcaaaattgagcaaagatttgaggatgcaggactaaaaattgtggcttcaaaaatgctccatttgagtgttgaaaaagctcaaggtttctacgctgaacatgaaggtaagcctttctttaatgctctagtagaattcatgacttctggtccagttatagtgcaagttcttgcaggagagaatgcaatcatgcttaatagagaattgatgggcaatacaaatccaaaagaggctgacgcaggaactataagagcagattttgctgagtctattgatgcaaatgctgttcatggttctgattcgtcagttagtgcaaagagagagatagcatatttcttcaaaagcacagaaatttttggttaa

SEQ ID NO: 252220 - DNA, 412 bp, Unknown
  Bacterial polypeptide expressing nucleotide sequence isolated from the Sargasso Sea
tatgagtaatattgaacagacattatcaattattaaaccagatgcggttgaaagaaaattagaaaatgaaattaaagaaatgtttaagaacacaggatttaatattcacaaagaaaaaaaaatacaaataacaaaatcagaagcggaacaattttataaggttcacgaaacaaagccattttataatgatttatgcgcatatttatcatctggaccaattgtagttatgatacttgagcatgatcatgctgtattacgaaatagagacttgatgggagcaactaacccaaaagatgctgaagaaggaacaataagaaaaaaatatggaatttctatagataagaattctgtacatggttctgatagtgttgaaaatgcaaaaatagaaattgattttttctttaaagattaa

SEQ ID NO: 252221 - DNA, 412 bp, Unknown
  Bacterial polypeptide expressing nucleotide sequence isolated from the Sargasso Sea
atgagtgataaagaacaaacactatcaattattaagccagatgctgttcaaagaaatttagaaaatgaaattaaagaaatgttcataaacaaggggttttctattcaaaaagaaaaaaaaatacagatagaaaaatctgaagctgaaaaattttataaggttcatgaaacaaagccattttataatgatttatgtgaatatctttcttctggtccaattgtggttatgattcttgaaaaagagaatgcagtattagctaatagagagcttatgggggcaacaaatcctaatgatgcagaagttggaactattagaaaaaaatatgggatttctattgataaaaattctgtccacggatctgatagtgtagaaaacgctaaaattgaaatagattttttctttaaagactaaa

SEQ ID NO: 252222 - DNA, 412 bp, Unknown
  Bacterial polypeptide expressing nucleotide sequence isolated from the Sargasso Sea
tatgaataatttagagcaaacattatcaataattaaaccagatgcagtagaaagaaatcttgaaaacgagattaaagaaatgtttaagaataatggattttcaattatgaaagaaaaaaaaattcaaattgaaaaatcagaggctgagaaattttataaagtacatgaaacgaagccattttataatgatttatgtgattatttatcatctggaccaattatagttatggttcttgaaaaaaaaaatgcagttttaggaaatagagagttaatgggagctacaaatccggaagatgcagtagagggaacaattagaaaaaaatatggtatttcaatagataaaaactcagttcatggatctgacagtgttgaaaatgctaaaattgaaatagattttttctttaaagattaa

SEQ ID NO: 252223 - DNA, 352 bp, Unknown
  Bacterial polypeptide expressing nucleotide sequence isolated from the Sargasso Sea
tgaagaaaataatttaaaaattgttgcatcgaaaatggttcacttaaccaaagaaaaagctgaaggattttattctattcataaagataagccgtttttcccgaagcttgttgaatttatgacatcaggccctgttatggtccaagttttagaaggcgaaaatgcaatacttaaaaatagagagattatgggggctacaaatccaaatgatgcagcagaaaaaacaataagaaaagacttcgcaactagcatagatgagaatgcagttcatggctcagatgcagaagataccgcaaaaatagaaattgcatttttttttaacgaaaatgagatttttaagcgaacaagataa

SEQ ID NO: 252224 - DNA, 307 bp, Unknown
  Bacterial polypeptide expressing nucleotide sequence isolated from the Sargasso Sea
ccatcttaatgatgaaatggcatctggtttctatgcggaacacgatggaaagcctttttttgatgctctaaagagctttatgacttctggaccggtttttgttcaagttcttcaaggtgaggacgcaattcataaaaatagagaattaatgggtgcaacaaaccctcaagaagcttcagcaggaacaataagggctgattttgcccaaagcattgatgcaaatgctgttcatggctcagattcagctgaaagtgcaaaaagggagattgagtatttcttttcatctgaagaaatattgaataagtaa

SEQ ID NO: 252225 - DNA, 352 bp, Unknown
  Bacterial polypeptide expressing nucleotide sequence isolated from the Sargasso Sea
aatggaaagaacattatcgattatcaaaccagatggcgttgaaaagaatatcattggcaagatttattctcgttttgagaaagcaggtttaagaatcatcgaagcaaaaatgttgcatctgagtcgagaacaagctgaaggattttatgccgttcataaagaaagacctttttttaacgacttggttgattatatgacttctggaccggttatggtgcaagtacttgaaggtgaagatgcaatcaaccttaaccgcaagctaatgggtgcaacaaatccagaagatgcagaagaaggaaccattcgaaaggattttgctgaaagcatagaaaggaatgcagttcatggttca

SEQ ID NO: 252226 - DNA, 403 bp, Unknown
  Bacterial polypeptide expressing nucleotide sequence isolated from the Sargasso Sea
tatggaagaaacattatcaataattaaacctgatgcagttgaaagaaatcttcaagatcagattaaaaatgagtttaagaacaatggatttgaaatattaaaggaaaaaaaaatccatatctcaaaagaagaggctgagaaattttataaagtgcatgaatctaaaccattttataatgaattatgtgcatatttatcctctggtccaatagtagtaatgaatcttcaaagagacaatgcagtattagagaacagaaaattgatgggagccacaaatcctgaagatgcagaggagggaacgcttagaaaaaaatatggtatttctattgataaaaattcagtacatggatctgatagtattgaaaatgctaaaattgaattagagttcttttttaaagattag

SEQ ID NO: 252227 - DNA, 418 bp, Unknown
  Bacterial polypeptide expressing nucleotide sequence isolated from the Sargasso Sea
atgagtagaactttctcaatcattaaaccagatgccactaaaagaaatttaaccggatcaatcaataagaaaatagaagagagtaatctaaaaattattgcccaaaaaagaattaaactttcaaaagataaagctcaaggattttatgctgttcataaagaaaaacctttttttaatgatcttattgaatatatgacatctgcgccagtagtagtacaggttttagagggtgaaaatgcagtaactttatatagggaattaatgggagcaacaaatcctaatgaagctaaagtaggaacaataagaaatgaatttgcaattgatattcaagaaaactctgttcatggatcagactcagatgaaaatgcaaaaattgagatagattatttttttaataatgaagaaattgttggttaat

SEQ ID NO: 252228 - DNA, 412 bp, Unknown
  Bacterial polypeptide expressing nucleotide sequence isolated from the Sargasso Sea
atgagtaatattgaacaaactttatcaattataaaacctgacgccgtagaaagaaatttagacaatgagatcaaacagatgtttaaaaaaaatggtttttctattcttaaagaaaaaaaaattcagattgaaaaatctgaggcagaaagtttttataaagttcatgagacaaagccattttacgacgatctatgcacatatctttcttcaggaccgattttagtaatggttttagaaaaagaaaacgcaattatagccaacagagagcttatgggtgctaccaacccccaagatgcagaagagggaacaataagaaaaaaatatggaatttccattgataaaaattctgtgcatggatcagatagtgtagaaaatgctaaaattgaaattgattttttctttaaagtctaaa

SEQ ID NO: 252229 - DNA, 412 bp, Unknown
  Bacterial polypeptide expressing nucleotide sequence isolated from the Sargasso Sea
tatgagtaaaattgaacaaacattgtcaataattaaaccagatgctgttgaaagaaatttgcatgatcaaattaaaaatgaatttaaaaataatggatttgaaattttaaaagaaaaaaaaattcatatctcgaaagatgaagcagaaaagttttataaagttcatgagtctaaaccattttacaatgatttatgtgcttatttatcctctgggccaattgttgtaatgagtcttcaaaaagagaacgcagttttagaaaatagaaaattgatgggagcaactaatccaaaagatgcagaagagggaacgctaagaaaaaaatatggtatttcaattgataaaaattctgttcatggatcagatagtgctgaaaatgccaaaatagagttagattttttctttaaagattag

SEQ ID NO: 252230 - DNA, 412 bp, Unknown
  Bacterial polypeptide expressing nucleotide sequence isolated from the Sargasso Sea
aacatttgcaataattaaacctgatgctgttaaaaatgaattcacaggtaaaatctatgataggattcaaaaagctggttttaatatacttgctgctaagctactaaaaatgacaagtgaagaagccggtggtttctataatgtccataaagataagccattcttcaatgagctcattgactttatgacctctggaccgtgcatggttctggcattggaaaaagaaaatgcagttctcgcttggagagagacaataggagcaaccaaccctaaagatgcattagaaaatacaattagaaaggactttgcaactagcgttcaagaaaatgcggtgcacggttctgacagtgatgaaaatgcagaaaaagaaattgcctttttctttgcagatagtgaacttcttggcaagtaa

SEQ ID NO: 252231 - DNA, 439 bp, Unknown
  Bacterial polypeptide expressing nucleotide sequence isolated from the Sargasso Sea
attgaaaataaaggaaataaatatgagtagaactttctcaataattaagccagatgcaactaaaagaaatttaacaggatcaatcaataaaaaaatagaagagagtaacctgaaaattattgcccaaaaaagaattaaactctcaaaggatcaagctcaaggattttatgcagttcataaagaaaaaccattttttaatgagctcattgaatatatgacatctgctccagtagtagtacaagttctagatggtgaaaatgcagtaaatatatatagagaactaatgggctcaacaaatccaaaagatgctaaagtagggacaataagaaatgaatttgcaatagatattcaagaaaactctgttcatggatcagactcagatgaaaatgcaaaaattgagatagattatttttttaataatgaagaaattgttggttaa

SEQ ID NO: 252232 - DNA, 371 bp, Unknown
  Bacterial polypeptide expressing nucleotide sequence isolated from the Sargasso Sea
tatcactggtaaaattaatgctatgatagaagacgcaggtttatccataattgctcaaaaacgtatcttgctttcagaagctcaagcagaggagttctacggagtacataaggagaggccattttttagagatttggtgaaatttattacatccggccctgtagtagttcaggttttagaagctgaaaatgctatttctttatatagaaatactatgggcgctactaatcctaaagaagcagatcaaggtactattagagctgaacatgctgaatctattgaggctaattcagttcatggttcagatagtccagaaaacgctattatagaaataaattttttctttgagaaaaaagaaatagttggatgaa

SEQ ID NO: 252233 - DNA, 373 bp, Unknown
  Bacterial polypeptide expressing nucleotide sequence isolated from the Sargasso Sea
aatttagttggcgctattactgcaatgatagaagacagcgacttaaggattattgcttcaaggcgaacaagaatgacccaggaaaaagctgctgcattttatggtgttcattatgataaaccttttttcaagagtttatgtgactttatgtgttctggtccaattatagttcaagtgttagaaggtaaaaatgcagttaaaaaaaatagagaaattatgggtgctacaaatccagaagatgctgaggaaggcactataagaaaaaaatatgctttatctttagaaaaaaattctgtgcatggttctgatagcttagaaaatgcagctattgaaatagcacactttttttcggagaatgagattcatccataaa

SEQ ID NO: 252234 - DNA, 424 bp, Unknown
  Bacterial polypeptide expressing nucleotide sequence isolated from the Sargasso Sea
atggcactcgaaagaacattttcaattatcaaacccgatgcaactcgccgaaatctaacaggccaaattactgcgcggcttgaatctgctggtcttcgtattgtggcgcaaaagcgaaaacggctaagcgaattggaggcgagagccttttatgctgttcataaagaacgtcccttttataatgaccttgtcgcctttatgacatcaggttcggttgttcttcaggtgcttgagggcgaaaatgctgtttctgtcaaccgcgaagtcatgggagcgacgaacccagatgatgctgctgatggcacaattcgcaaagattttgcggaatccattgaggcaaattcggtacatgggtcagatagtttggaaaacgcaaagattgaaatttcatttttcttcgctggatgtgagctgtcgggctagt

SEQ ID NO: 252235 - DNA, 412 bp, Unknown
  Bacterial polypeptide expressing nucleotide sequence isolated from the Sargasso Sea
tatgagtaaaattgaacaaactttatcaataataaaaccagatgctgttgagagaaatttaattgaagaaattaaaaatatttttactaaaaataaattgattatcaaagatagtaaaaagattcatataaataaagatgaagctgcagagttttataaaatacatcaatcaaaacctttttataatgatttgtgttcatacctttcttctgggcctatcgttgtcatgatcttagagggagaaaacgcagttataactaatagaaagttaatgggggcaactaatcctaaagatgctgaagaaaatacaattagaaaactatatggtatttctattgataaaaattctgtacacggctcggactctcctgataatgctaaaaaggaaattagttttttttttaaaaattaa

SEQ ID NO: 252236 - DNA, 403 bp, Unknown
  Bacterial polypeptide expressing nucleotide sequence isolated from the Sargasso Sea
atggaacaaactctgtcaataataaaaccagatgctgttgaaagacatttggaacatgaaataaaacaaatgtttttagaaaaaggttttaaaattataaaagaaaaaaaaattcaaatagaaaaaactgaagcagagcttttttatcaagtgcatcagactaaaccattttataatgatttatgcacttacctttcatcaggaccaatagtagtaatgatcattgagaaagaaaatgctattaaggaaaacagaaatttaatgggtgcaacaaatccaaaagatgccgaagaaggcacaataagaaaaaaatttggaatttcaattgataaaaattctgttcatggctctgacagtgttgaaaatgcaaaaaaagaaattgatttttttttcaaagattaaa

SEQ ID NO: 252237 - DNA, 302 bp, Unknown
  Bacterial polypeptide expressing nucleotide sequence isolated from the Sargasso Sea
tatgagtaatatagaacaaactttgtcaattataaaacctgatgcggttgaaagaaatctagaaaatgaaattaaacagatgtttaaggataaaggtttttcaataataaaagaaaaaaaaattcaaattgaaaaatctgaagctgaaaaattttataaagttcacgaaaccaaacctttttacaatgatttatgtacatatctatcttcaggacctattgtcgtaatggttcttgaaaaagataacgcagttcttggaaatagagagttaatgggagctaccaatccaaaaagacgctcaa

SEQ ID NO: 252238 - DNA, 403 bp, Unknown
  Bacterial polypeptide expressing nucleotide sequence isolated from the Sargasso Sea
atggaagagactttatcaataataaaacctgacgctatggaaagaaatcttgaaggtaaaattaaaaatatttttatcaaaaataattttgaaattatcaaagaaaaaaaggtgaaacttgaaaaaaaagatgcagaaatattctataaagttcacgaaacaaaaccgttttataatgatttgtgcaactatttgtcctctggtccggtattagttatgattttaaaaaaagaaaatgcaattgcagataatagaaaaataatgggagcaactaatccaaaagaagcagacgtggggacaataagaaaagaatttggtatttctatagataaaaattctgttcatggttcagatagcaaagaaaatgctgaaaaagaaataaattttttttttaaagagtaga

SEQ ID NO: 252239 - DNA, 400 bp, Unknown
  Bacterial polypeptide expressing nucleotide sequence isolated from the Sargasso Sea
aatggaaagaacattatcgattatcaaaccagatggcgttgaaaagaatatcattggcaagatttattctcgttttgagaaagcaggcctaaaaatcgtcgaagcaaaaatgttgcatctgagtcgagaaaaagctgaaggattttatgccgttcataaagaaagacctttctttaacgacttggttgattatatgacttctggaccggttatggtgcaagtacttgaaggtgaagatgcaatcaaccttaaccgcaagctaatgggtgcaacaaatccagaagatgcagaagaaggaaccattcgaaaagattttgctgaaagcatagaaaggaatgcagttcatggttcagatgggccagacacggcagctgtcgagatcgaatatttctttggttag

SEQ ID NO: 252240 - DNA, 460 bp, Unknown
  Bacterial polypeptide expressing nucleotide sequence isolated from the Sargasso Sea
atgacccaagagagaacctttattgcaattaaaccagatggagttcaaagaggatatatttctgagattataggcagatttgaaaaaaaaggatttaaattggttggattaaagcaattaattccttcaaaagaacttgctcaaaatcattatggagtacatagagaaagacccttttttggtgatttagtagactttatttcaagtggtcctgttgtagcaatggtgtgggaaggcgaaggagttattttgagtgctagaaaactaataggtgcaacaaaacctctggaagcagagcctggaacaattagaggtgatttagctattgatattgggaggaatattattcatggttctgatggagaagatacagcaaaatttgaaattgatctatggtttaacgaagaggaattatgtgagtgggaaacttctgattcgaaatggcgatctgaaaattaag

SEQ ID NO: 252241 - DNA, 412 bp, Unknown
  Bacterial polypeptide expressing nucleotide sequence isolated from the Sargasso Sea
tatgagtaatttagaacaaactttatcaattataaaaccagacgcagttgaaagaaatcttgaaaatgaaattaaaggaatatttaaaaataatggtttttcaatattgaaggaaaaaaaaatacaaatcgaaaaatttgaagctgaaaaattttataaagttcatgaaactaagcctttttttagtgatttatgtgcatatctgtcatcaggacctattgttgtaatgattcttgaaaaagacaatgcagttattggaaatagacagttgatgggagctacaaaccctaaagaagctaaagagggcactattcgaaaaaaatatggtatatcaatagataaaaattcagtacatggctctgatagtgttgagaacgcaaaaattgaaatagatttcttttttaaagattaa

SEQ ID NO: 252242 - DNA, 234 bp, Unknown
  Bacterial polypeptide expressing nucleotide sequence isolated from the Sargasso Sea
catggccgaacgcacgttcatcgccatcaagcccgacggcgtccagcgcggcctggtgggcgagatcctcggccgctttgagcgcaagggcttcaagctggtgggtctgaagcagatcacccccagccgcgccctggctgagcagcactacggcgtccataaggagcgtcccttctttgctggtctggtcgacttcatcacctccggccccgtggtggccatggtctgggaagg

SEQ ID NO: 252243 - DNA, 412 bp, Unknown
  Bacterial polypeptide expressing nucleotide sequence isolated from the Sargasso Sea
atgagtaatttagagcaaacactctcaataataaaaccagatgctgtagaaagaaatcttagcgaagaaataaaaaatatatttaaaaataaaggatttaaaatttcaaaagaaaaaaaaattaaattagaaaaacacgaagcagaaaaattttatcaagttcaccaaacaaaacctttttataatgatttgtgttcgtatttatcatctggaccaattttagttatgatattagagaaagaaaatgcaattttagataacagaaggttaatgggagcaaccgaccccacaaaagccgaagatgggactattagaaaaaagtatggaatatctatagataagaactctgttcatgggtctgatagcctcgacaatgccaaaattgaaatcgatttcttctttaaagattaga

SEQ ID NO: 252244 - DNA, 427 bp, Unknown
  Bacterial polypeptide expressing nucleotide sequence isolated from the Sargasso Sea
tatgaatattgaacgcactctttctattattaaaccagatgctgttggtaaaaatatcataggcaagattatttctagatttgaagataatggattaaatttagttgctggtaaattaatacatttaagtgataaagaagcttcagggttttatgctgaacatgatgggaaaccttttttcagcgatttgaagaaatttatgacatctggaccagtatttgttcaggttttagaaggagaaaacgctgttcaaaaaaatagagaattaatgggtagcacaaatccaaaggaagctgccgctggtactattagagcagattttgccatgagcattgatgcaaatgcagttcacggttctgattcaattgatagcgcaaaaagggagattgaatatttctttaatactgaagaaatattgaataaataa

SEQ ID NO: 252245 - DNA, 355 bp, Unknown
  Bacterial polypeptide expressing nucleotide sequence isolated from the Sargasso Sea
atgtctatagaaagaactctttcaattataaagcctgatgcaactaaaagaaatattaccggaaagataatatcttgctttgaagaatctggtttaaatattattgctcaaaagaaaattttattaacgaaagaactagctgaaggcttttattctgttcattccgaaaaacctttttttcaagatttggttacttttatgacctcagcaccaataattgttcaagttttagaaggcgagaatgcaattctaaaaaatagagaaatcatgggagctacaaatcctgatgatgctgaagagggaacaattagaaaacagtttgctctatcaatagaggcaaattctgtacacggct

SEQ ID NO: 252246 - DNA, 412 bp, Unknown
  Bacterial polypeptide expressing nucleotide sequence isolated from the Sargasso Sea
tatgagtgatattgaaaaaacattatcaattataaaaccagatgctgttgaaagaaatttgcaggaagaaattaaaaacgaatttaaaaataatggctttgaaattttacaagaaaagaaaattcatatttcgaaacaagaagctgaaacattttataaagttcatcaaacaaaacctttttataatgatttatgtacatatttgtcttctggaccaattattgtcatggagcttcaaaaagacaatgcaatattagataatagaaagctaatgggggcaacaaatcctgaattggcagaagaaggaactttaagaaaaaagtatggaatttcaatagataaaaattctgttcacggatcagacagtttagaaaatgctagaatagaaattgattttttctttaaagactag

SEQ ID NO: 252247 - DNA, 400 bp, Unknown
  Bacterial polypeptide expressing nucleotide sequence isolated from the Sargasso Sea
aatggaaagaacattatcgattatcaaaccagatggcgttgaaaagaatatcattggcaagatttattctcgttttgagaaagcaggtttaagaatcatcgaagcaaaaatgttgcatctgagtcgagaacaagcagaaggattttatgccgttcataaagaaaggcctttctttaacgacttggttaattatatgacttctggaccggttatggtgcaagtacttgaaggtgaagatgcaatcaaccttaaccgcaagctaatgggtgcaacaaatccagaagatgcagaagaaggaaccattcgaaaagattttgctgaaagcatagaaaggaatgcagttcatggttcagatgggccagacacggcagctgtcgagatcgaatatttctttggttag

SEQ ID NO: 252248 - DNA, 412 bp, Unknown
  Bacterial polypeptide expressing nucleotide sequence isolated from the Sargasso Sea
tatgagtaatattgaacaaacattatcaataattaagccagatgctgttgaaagaaacttgcaagatcagattaaaaatgaatttagaaataatggatttgaaattttaaaagaaaaaaaaattcatatttctaaagaagaagctgaaaagttttataaagtacatgaatctaaaccattttataatgatttatgtgcttacttatcttctggaccaattgttgtaatgaatcttcaaaaagacaatgctgttctagaaaatagaaaattgatgggagcaactaaccctaaagatgcagaagaaggaacgcttagaaaaaaatatggtatttcaattgataaaaattctgttcatggatctgatagtatcgagaatgctaagatagaattagattttttttttaaagattag

SEQ ID NO: 252249 - DNA, 412 bp, Unknown
  Bacterial polypeptide expressing nucleotide sequence isolated from the Sargasso Sea
tatgagtaatattgaacaaacattatcaattattaaaccggatgctattgagagaaatttggaaaatgaaattaaaaatatatttaaggaaaataaatttgtaattaataaggaaaaaaaagttcaaatttctaaatcagaggcggagaagttttataaaattcacgaaacaaagccattttacaatgatttgtgcaactatttatcttctgggccaattgtagttatggtattagaaaaagaaaatgctgtgcttgaaaataggaatttaatgggagcaacaaacccaaaagaagctgcagctggaacaattagaaaaaaatacggcatatctattgataaaaattcggtgcacggatctgacagtgttgaaaatgcaaaaatagaaattgatttcttttttaaagattaa

SEQ ID NO: 252250 - DNA, 312 bp, Unknown
  Bacterial polypeptide expressing nucleotide sequence isolated from the Sargasso Sea
aactgtccgagcgcgaagctgccggtatctacgctgagcacagcgagcgcggcttcttcaaggatctggtcgccttcatgacttccggtccggtcatcgtccaggttctggaaggtgaagacgccgttctgaagaaccgcgagctgatgggcgctaccaacccgaaagaagctgctccgggcaccatccgcgccgatttcgccgtctccatcgacgagaacgccgttcacggttcggactccgaagcttccgctgcgcgcgagatcgcctacttcttctccgctaccgagctgtgcgcgcgcattcgctgat

SEQ ID NO: 252251 - DNA, 384 bp, Unknown
  Bacterial polypeptide expressing nucleotide sequence isolated from the Sargasso Sea
tatggctttagaaaagacactttccatcattaaaccggatgcaattgcgaaaggctatgctgaagaaatttgtaaaagacttgaaaatgcaggactaagaattgtttcgaagaaatcactacatttatcagaggcagaggcggaaggtttttatatcgaacacaaaggtaagcctttttttccagatttaataacttttatgacttcaggacccattcaggtacaaatacttgagggtgaaaatgcaatttctaaatacagagaggtgatgggcaacacaaaccctaaggaagccaatccaggaaccttaagggctgattttgcagattcaatagacgctaacgctgttcatggttcggactctgaaacatcggctgaaagaga

SEQ ID NO: 252252 - DNA, 412 bp, Unknown
  Bacterial polypeptide expressing nucleotide sequence isolated from the Sargasso Sea
tatgagtagtattgaacaaactttatctattattaaaccagatgctgtagaaagaaatataggaaatgaaatcaaagaaatttttgtaaaaaatggttttaatattcttaaggaaaaaaaaattcaattaaccaaatccgaagctgaacttttttataaagttcacgagactaagccattttataatgatttgtgcacatatttatcatcaggacctattattgttatgatacttgaaaaagaaaatgcaatagcaaaaaatagagagttaatgggagcaactaaccctaatgatgcaaaagatggcacaattagaaaaaaatacggtatttctattgataaaaattctgttcatggatctgatagttcggaaaatgcaaaaattgaaataaattttttttttaaaagttaa

SEQ ID NO: 252253 - DNA, 297 bp, Unknown
  Bacterial polypeptide expressing nucleotide sequence isolated from the Sargasso Sea
aatgaccaaagagagaacctttattgctattaaaccagatggagttcaaagaggatatgttgctgagattattggcagatttgaaaaaaaaggatttaaattggttggattaaagcaattaatcccctcaaaagatcttgctcaaaatcattatggtgtacatagagaaaggcccttttttggcgatttagtagactttatttcaagtggtcctgttgtagctatggtatgggaaggcgaaggagttattttgagtgctagaaaactaataggtgcgacgaaacctcttgaaacaga

SEQ ID NO: 252254 - DNA, 271 bp, Unknown
  Bacterial polypeptide expressing nucleotide sequence isolated from the Sargasso Sea
gaacacgagggcaaaccattttttgaaaaactagttaattatatgatatcaggcccagtcattgttcaagtaatttgcggtgaaaatgcgattttaaagaatagagagcttatgggaaatacagatccatcgaaggcagatccaggaacaattcgagcagattttgctgattcaatcgatgctaatgcagttcatggctcagactctgaggaaagtgcaaagcgggaaatctcatattttttcaaagatgatgagctatttttaaggtaaa

SEQ ID NO: 252255 - DNA, 412 bp, Unknown
  Bacterial polypeptide expressing nucleotide sequence isolated from the Sargasso Sea
tatgagtaatatcgaacaaacactttcaataataaaaccagatgcagttgaaagaaacttacaagatgaaataaaacaagaatttataaacaaaggatttgaaattaaaaaagaaaaaaaaatccatatttcaaaacaagaagcagaacaattttataaagttcatgaaacgaaacctttctacaatgaattatgctcatacctttcttcaggtcctattgttgttatggaattaagcagagaaaatgctgttttagagaacaggaagttaatgggtgcaacaaatcctaaagatgctgaagaaggaacacttagaaaaaaatatggtatttcaatagataaaaactcagttcatggctctgatagtcctgaaaatgctaaaattgagttagactttttctttaaagactag

SEQ ID NO: 252256 - DNA, 397 bp, Unknown
  Bacterial polypeptide expressing nucleotide sequence isolated from the Sargasso Sea
tatgacaattgagaacaccttatcaataattaaaccagatgctacaagacgtaatctaactggttctataaatgctaaatttgaacaagctggtctaaatataatcgcacaaaaacgattacaattgacgaaggatatggctcaaagattttacgaaattcataaagataggccattttttaatgatttagttgattttatgatttctggacctgttatcactcaggtacttagaggtgaaaatgccgtaaaggtgaatagagaagttatgggagcaactaatccaaaggatgcagaaaaaggtacaatcagaaaagagtttgcagagagtatagaaagcaattctgttcatggttctgatagtcttgaaaatgcaaaatctgaaatatcatttttt

SEQ ID NO: 252257 - DNA, 418 bp, Unknown
  Bacterial polypeptide expressing nucleotide sequence isolated from the Sargasso Sea
aatgaacaatagaacatttgcaatcattaaacctgatgcagtaaaaaataaatatacaggtcttatatatgatgaaattttaaaagcagattttaaaatattaagttcaaaattaataaaaatgacaaaaaaacaagcagagcatttttacatgatacataaagatagacctttttatggagagctcactgattttatgtcttcaggtcaatgtatggtacttgcacttgagaaagtaaatgctgttttggaatggagaacattaattggtgctacaaaccctgaagaagctgcagataatactattagaaaaaaatttgctacaagtcttggagaaaatgctgtacatggttcagactctgatgaaaatgctattattgaaattaaatttttctttacagaaactgaattaatttaa

SEQ ID NO: 252258 - DNA, 361 bp, Unknown
  Bacterial polypeptide expressing nucleotide sequence isolated from the Sargasso Sea
cctacggctagaaggactaagacaagtcatacctccactcgagctagcagaggcacactatgaagttcataatgaaagaccattctattctggtcttatcgaatttatcacatcaggaccagtagtcgcaatggcttggactggtgtggatgcaatcagcgttgctcgtaatttaattggaccaacagacgggcgtaatgcttctcctggtacaattagaggtgatttcgcgatggacataggtcacaatgtaattcatggttctgatggtgaggacacggctgctttcgagctgggtctatggttcccagatggactcgtaaagtggactcttgacgcagaaaaccacatctatgagtga

SEQ ID NO: 252259 - DNA, 412 bp, Unknown
  Bacterial polypeptide expressing nucleotide sequence isolated from the Sargasso Sea
atgagtaatactcaaaaaacactctcaattataaaacctgacgctgtagagagaaatttgactgaagaaattaaaaatatatttaaaaaaaacggttttgaaataattagtgaaaaaaaaattaagatttcaagagaagaagccgagaaattttacatagttcatcaaacaaagccattttatgaagacttatgtaattatttgtcatcaggtccaatagttgtaatgattttaagtagagaaaatgcagttttggcaaacagagaattaatgggtgctactaacccagaagatgcaaaagagggtacaatacgcaaaaaatatggtctttctattgataaaaattcagttcatggatctgacagtgaggaaaacgctaagaaagaaatagattttttttttgatagttaga

SEQ ID NO: 252260 - DNA, 406 bp, Unknown
  Bacterial polypeptide expressing nucleotide sequence isolated from the Sargasso Sea
catgggaaacatagaaaaaacattggtatttatcaaacctgacggtgttgagcgtgggttaacgggagatattttaaaccgttttgaacagcgtggcatacaattacgtaaactagaacttaaacaactgactgctgaacaagttgatgcacattacgcagaacatattgataaaccgttttatccgaacttaaaaacatatattttgtctggaccgattgcacttatggtattagaagcagaaaatgttatttcaattgttcgtactatggttggtgtgaccaactcagcggaagcagcacctggtactattagaggggattatgcccttaatacacagaacaatattattcatgcctctgattcagttacaagtgctgaacgcgaaattgctaattttttctaa

SEQ ID NO: 252261 - DNA, 367 bp, Unknown
  Bacterial polypeptide expressing nucleotide sequence isolated from the Sargasso Sea
atgtcaattgagagaacactttcaataattaaaccagatgcagttggtaaaaatgttattggaaaaataatatcaagatttgaagaaaataatctttaccttgttgcgggtaaattagttcacttgtcagatgaaatggcatcgggattttatgctgaacatgaaggcaaaccattttttaacgatctaaaaaaattcatgacttcaggaccagtttttgttcaagtattagaaggtgaaaatgcagttcaaaaaaatagagacttaatgggtagtactaaccctcaagaagctgccccaggaacaattagagcagattttgctaatagtattgatgcaaacgctgttcatgggtctgactctgttg

SEQ ID NO: 252262 - DNA, 379 bp, Unknown
  Bacterial polypeptide expressing nucleotide sequence isolated from the Sargasso Sea
tgaaaaaaaaggatttaaattggttggattaaagcaattaattccttcaaaagaacttgctcaaaatcattatggagtacatagagaaagacccttttttggtgatttagtagactttatttcaagtggtcctgttgtagcaatggtttgggagggcgaaggagttatcttaagtgctagaaaactaataggtgcaacaaaacctctggaagcagagcctggaacaattagaggtgatttagctattgatattgggaggaatattattcatggttctgatggagaagatacggcgaaatttgaaattgatctatggtttaacgaagaggaattatgtgagtgggaaacttctgattcgaaatggcgatctgaaaattaa

SEQ ID NO: 252263 - DNA, 394 bp, Unknown
  Bacterial polypeptide expressing nucleotide sequence isolated from the Sargasso Sea
tatgagtagtatagagcaaactttatcaattattaaaccagatgcagtagaaagaaatttagaaaatgaaattaaacaaatatttaaagataaaggatttgcaatagttaaggaaaaaaaaatccaaatagaaaaatcggaagctgaagttttctataaaattcatgaaacaaagccattttataatgatttatgtgcttatctttcatctggtccaattctagtgatggttttacaaaaagaaaatggagtacatagtaatagggaattaatgggagctactaatcctaaagatgcaaaagatggcactatcagaaaaaaatatgggatttcaattgataaaaattctgtacatggttctgatagtgttgaaatgctaaaattgaaattgatt

SEQ ID NO: 252264 - DNA, 421 bp, Unknown
  Bacterial polypeptide expressing nucleotide sequence isolated from the Sargasso Sea
gcctagtgaaaaaacattatcgataattaagccagatgctacaaaaagaaatttgactggtttaattaatgcaaaatttgaaaatgttggattaaaaataatcgctcaaaaaagattgcaactaactagatctatggctgaaaaattttatgaaattcataaagaccgtccattttatatggacttggttaactttatggtttcaggtcctgttatagttcaagttttagaaggtgaaaatgctgtagaattaaatagaagtgttatgggtgctactaatccagaagaggctgaagaaggtacaattagaaaagaatttgctataagtattgaggcaaattccgttcatggatctgacagcttagaaaatgcaaagatagagatatctttcttttttgccaatatagagttactagcctaa

SEQ ID NO: 252265 - DNA, 424 bp, Unknown
  Bacterial polypeptide expressing nucleotide sequence isolated from the Sargasso Sea
atgcctgtacaacgcactttttcaattataaagccggatgccacaagacgtaatctgacgggtgccattaattcaaagatcgaatcaagtggattgcgtattatcgcgcaaaagcgaattcatatgtctgctgcagaggctaaagaattctactctgttcacgcagaacgccctttttataatggtttagtatcgtttatgacctctggtccagttattgtgcaagtgcttgagggagagaatgctatatccacatatcgcgaagttatgggtgcaactaacccatcagaggcagcagacggcaccataaggaaagagtttgctgagaatatcgaggctaactcagtccatggatctgacagtgatgagaatgcggctattgagatagcacatttttttaacgatgatgagattgtcggatagg

SEQ ID NO: 252266 - DNA, 403 bp, Unknown
  Bacterial polypeptide expressing nucleotide sequence isolated from the Sargasso Sea
gatgcccaatcaaaaaactttatcaattattaaaccagacgcagttaaagcagggcacgcaaatgctatcaatttaatgattgagaatgcaggtttaaaaattttgaaaaaaaaagaattaaatttaactacagaacaagctaaagaattttattctattcattctgacaaacctttttataacgaactttgtaattttatgacctctggcccaataatcgtacaaatgttagaaggtgagaatgcaatagaattatatagaaaagtaatgggagccacaaaccctgatgatgctgaagaaaatacaataagaaaaaaatttgcaacttctattcaggaaaacgcagttcatggttctgatagtgaggaaaatgctttaaaagaacttaatttttttttttaa

SEQ ID NO: 252267 - DNA, 412 bp, Unknown
  Bacterial polypeptide expressing nucleotide sequence isolated from the Sargasso Sea
atgagtaatttagaacaaacactttcaataataaaacctgatgcagtagagagaaatcttcaagaggaaattaaagaggaatttaaaaaaaatagttttaaaattttaaaagaaaaaaaaattaaacttgataaaagtgaggctgaaaaattttatcaggtacatcaatccaagcctttttataacgacctatgttcatatttatcatcaggacctattgtagttatgatactagagaaagaaaatgcaatactggaaaatagaaaattaatgggagcaactgatccaacaaaagcagaagaaggcactattagaaaaaaatatggaatttctatagataaaaactctgttcatggctcagatagcccagaaaatgcaaaaattgaaatcgattttttttttaaagattaag

SEQ ID NO: 252268 - DNA, 418 bp, Unknown
  Bacterial polypeptide expressing nucleotide sequence isolated from the Sargasso Sea
tatggaaagaactttatcaattattaaacctgatgcaacgagaagaaatataacaggtcaaatcaatgcaattatagaagcaaataatttaaaaattgttgctcaaaaaaaaattaaattaactagagagaaagctgaaaaattttacgaggttcataatgaaaaacctttttttgcagatttaattgattatatgatttctgactcaattgtagttcaggtacttgaatctgacaatgctatttctaaatatagagaaataatgggttctactaatcctgataatgcagctgatggaactataagaaaaatgcatgctttatcagttcaagaaaatgcagttcatggttcagattcattagaaaatgcaaataaagaaatagattttttcttcgaatcacaagaaatagttggttag

SEQ ID NO: 252269 - DNA, 415 bp, Unknown
  Bacterial polypeptide expressing nucleotide sequence isolated from the Sargasso Sea
tatgcaaaaaacattttcaataattaaacccgatgcagtaaagagaaatctaatcggacacatcaatcaaatgattgaaagctcaaacttaaaaatattagcatcaaaaaaaatgtatttaactaaaaatcaagcagagatattttatgaagtacataaagaaagacctttttttagaagcttggttgagtatatgacttcaggccctgttcaagttcaagttttagagggagaagatgctgtagctaaatatcgtaaaataatgggagctactaatccagcagaagctgaaaaaggcactattagaaggctatatgctgagtccattgaggcaaattctgtgcatggcagtgactctgaggagaatgcaaaaattgaaattagcttctttttttctggatcggaattagcttag

SEQ ID NO: 252270 - DNA, 412 bp, Unknown
  Bacterial polypeptide expressing nucleotide sequence isolated from the Sargasso Sea
atgagtgatactgaacaaacactatctattataaagcctgatgcagttgaaagaagtctgcaagatgaaattcaaaacgaatttaaaaaaaacggttttacaattttaaaagaaaaaaaaattcaaatatcaaaacaagaagcagaacagttttataaagttcatgaaactagaccattttataatgatttatgtacatatctgtcatcaggaccgattgttgtaatggtgcttcagaaagtgaatgctatattggataatagaaagttaatgggatcaacaaacccaaaagaagctgaagaaggcaccttaagaaaaaaatatggtatttcaatagataaaaattcagttcatgggtcagatagcatagaaaatgccaagatagaaattgactttttttttaataattaga

SEQ ID NO: 252271 - DNA, 340 bp, Unknown
  Bacterial polypeptide expressing nucleotide sequence isolated from the Sargasso Sea
aatgtctatagaaagaactctttcaattataaagcctgatgcaactaaaagaaatattaccggaaagataatatcttgctttgaagaatctggtttaaatattattgctcaaaagaaaattttattaacgaaagaacaagcggaaggcttttattccgttcactccgaaaaacctttttttcatgatttggttacttttatgacctcagcaccaataattgttcaagttttagaaggcgagaatgcaattctaaaaaatagagaaatcatgggagctacaaatcctgatgatgctgaagagggaacaattagaaaacagtttgctctatcaatagaggca

SEQ ID NO: 252272 - DNA, 412 bp, Unknown
  Bacterial polypeptide expressing nucleotide sequence isolated from the Sargasso Sea
atgagtaaccaagaacgaacactgtctattattaagcccgatgccgttgaaagaaatttagtagaaaagataaaagatgtatttttaaaaaataattttagtattttggaaattaaaaaattacatattactaaagatgaagcagcagaattttataaagttcatcaatccaaacctttttatagcgatctttgtacttatctatcatctgggccaatagtagtaatgattttagaaagcgaagatgcagtagtaaaaaatagaaaattgatgggtgccacagatccaaaaaaagcagatgataataccataagaaaaatgtttggaatttctatagataaaaactcggttcatggatcagactctttagaaaatgcaaaaaaagagataaattttttttttaaaaattagc

SEQ ID NO: 252273 - DNA, 412 bp, Unknown
  Bacterial polypeptide expressing nucleotide sequence isolated from the Sargasso Sea
atgagtaatattgagcaaactttatccataattaaaccagatgcagttgagagaaatcttcaagaacagattaagcaggaatttacaaataaaggatttgaaataataaaagaaaaaaaaatccatatatctaaagaggaagccgaaaggttttataaaatacatgagtccaaaccattttataacgatttatgcacttatttgtcttcaggtcctattgttgttatgactttacaacgagaaaacgctgttgcagaaaatagaaagttaatgggagcaacaaatccaattgatgcagaggaaggcactttaaggaaaaaatacggtatttcaattgataaaaactctgttcatggttcagacagtcctgaaaatgctaagattgaattagattttttttttaatcactagc

SEQ ID NO: 252274 - DNA, 226 bp, Unknown
  Bacterial polypeptide expressing nucleotide sequence isolated from the Sargasso Sea
tatggagcttacactatcaataattaaaccagatgcagtaaaaaggaacctcataggtgaaataaattcacttattgaaaaaaataatattaaaattgttgcccaaaaaatgcttcatttatcaaccaaagatgcagaaggcttttattttgttcataaagaaagggctttttttggagatttgtgtgaatatatgacatctggaccaattgtcgttcaagttcta

SEQ ID NO: 252275 - DNA, 427 bp, Unknown
  Bacterial polypeptide expressing nucleotide sequence isolated from the Sargasso Sea
tatggccgttgaacgcaccctgtccattatcaagcccgatgccgttgccaagaacgtcattggtgagattctgacccgttttgaaaaggctggtctgcgcgttgtcgctgccaagatggttcagctgtcccaggccgatgccgaaggcttctacgccgagcacaaagagcgtcccttcttcaaggatctggttggcttcatgacttccggtccggtcgttgtacaagtgctggaaggtgaaggcgcggtactgaaaaaccgtgacctgatgggcgctaccaacccgaaagaagccgctgccggcactatccgcgccgacttcgccgagtccatcgatgccaacgccgtgcacggttccgactccaccacttccgctgcccgtgaagtggcctacttcttcgccgaaaccgaactctgcccgcgctaa

SEQ ID NO: 252276 - DNA, 412 bp, Unknown
  Bacterial polypeptide expressing nucleotide sequence isolated from the Sargasso Sea
atgagtaatgtagaacaaacactctcaataattaagccggacgcagttgaaagagatttaattgatgaaatcaaagcaatttttactaaaaataatttaaaaattaaggaagataaaaaaattcatttaacaaaagaagaggcagcagaattttataaagttcatcaatctaagcctttttatgatgatttatgctcatacctgtcttctggtcctattgtagcaatgattttagagggtgaaaatgcagttttatttaatagagaattaatgggagctacagatccaaaaaaagctgaagataaaactataagaagactttatgggatttcaattgataaaaattctgttcatggatctgactcagtggaaaatgcaaaaaaagaaatagattttttttttaaaaattaat

SEQ ID NO: 252277 - DNA, 187 bp, Unknown
  Bacterial polypeptide expressing nucleotide sequence isolated from the Sargasso Sea
atggctattcaaagaactttatctatcatcaaaccagacgccacgcgtagaaacctaacaggcaaaattaacgcccgctttgaggaaaaagggctaacaattatcgcccaaaaacgtattcatttgactcatgcgcaagcggaggggttttatgcggtccatgccgaccgagcatttttagcgacct

SEQ ID NO: 252278 - DNA, 412 bp, Unknown
  Bacterial polypeptide expressing nucleotide sequence isolated from the Sargasso Sea
tatgagtaatacggaacaaactctctctttaataaaaccagatgctgtagaaagaaatcttactgaaaagatcaaagaaatttttatttcaaaaaacttaaaaattaaagatacaaaaaaaattcacatttcaaaggatgaggcagcagaattttacaaagttcaccagtctaagcctttttacaacgatttatgctcttacttatcatcaggtcctatagtggctatgatattagagggtgaaaacgctgttgaaaataatagaaaaattatgggtgccacagatccaaagaaagctgaaaaaaatacaattagacagctttttggcatctcaattgataaaaattctgtgcacggctcagattcaaaacaaaatgcactcaaagaaattgaatttttttttaaaaattaa

SEQ ID NO: 252279 - DNA, 394 bp, Unknown
  Bacterial polypeptide expressing nucleotide sequence isolated from the Sargasso Sea
atgaataggactttttcaattataaagcctgatgctaccaaaagaaatattacagggtcaattaataaaattatagaagataataatcttgttattattgctcaaaaaaggacaaaattatcaaaagaaaaagcagaaggtttttattcaattcataaagataaacctttttttaatgatctcattgaatacatgacttcaggtcctgtgattgtgcaggttttgcatggggataatgctgttgagaattatagaaaaattatgggagctacaaatcctgagaatgctgaagagggtacaattagaaaagagtatgcacttaatattcaagaaaattcagttcaaagatcggattcagaagaaaatgctaaaatagaaataaattattttttga

SEQ ID NO: 252280 - DNA, 325 bp, Unknown
  Bacterial polypeptide expressing nucleotide sequence isolated from the Sargasso Sea
gaagatgccggtctatcaattactgagaaaaaaagtattcatatggatgatgctttagcagagggattttatattgaacataaaggaaagcctttctttgaagatctgatcaaattcatgacttcagggcccattcaggttcaagttctagaaggcgataatgcaattttcaattatagagaagtcatgggtagcactaatcctaaagaagcgacacctgggactattagggcagactttgctgaatcaatagatgctaatgcggttcatggttctgactctccggaatctgcaaaaagggaaatcgactatttctttggctaaa

SEQ ID NO: 252281 - DNA, 412 bp, Unknown
  Bacterial polypeptide expressing nucleotide sequence isolated from the Sargasso Sea
atgagtaatatagaacaaactttatctattataaaacctgatgctgttgaaagaaatctagaaaatgaaattaaacagatgtttaacaacaaaggtttttcaatattgaaagaaaaaaaaattcaaattgaaaaatccgaagctgaaaaattttataaagttcacgaaactaaacctttttacaatgatttatgtgcatatctgtcttcaggacctattgttgttatggttcttgaaaaagataacgcagttcttggaaatagagagctaatgggagctaccaatccaaaagatgctgaagagggcactattagaaaaacatatgggatatcaatagataaaaattcagtacatggatcagatagtgttgaaaatgcaaaaattgaaatagatttcttttttaaagattaaa

SEQ ID NO: 252282 - DNA, 409 bp, Unknown
  Bacterial polypeptide expressing nucleotide sequence isolated from the Sargasso Sea
atgagtaacttagaacaaacattatctattataaaacctgatgcagttgagaggaacttaattgaagaaataaaaaacatttttttatcaaataattttactatttctcaggaaaaaaaaattcaaatttcaaagtcagaggcagaagaattttataaggtgcaccaatctaagactttttacaacgaactttgtgagtacttatcttcgggaccaatttacgtaatgattctggaaaaagataacgcagtaatagataacagaaaattaatgggatcaaccaatccaaaagaggcagaagaggggactataagaaaaaaatatggtctatcaattgataaaaattcggttcatggatctgacagtgtggataacgctaaaatagaaataaattttttttttaaataac

SEQ ID NO: 252283 - DNA, 367 bp, Unknown
  Bacterial polypeptide expressing nucleotide sequence isolated from the Sargasso Sea
tatggaccgaacattttcaattattaagcctgatgccacaaaaagaaatttaactggctctattaacagcctaatcgaaaaaaatggtttaagaataatcgcgcaaaaaagaataaagatgagcactgagcaagcggaaaaattttatgcagttcataacgacaaaccctttttttcagatttagtaaaatatatgacatctgagccagtagttgtgcaagttttgtatggtgaaaatgctgttaaaaaatatagagaggtaatgggtgcaactaatccagataatgctgaggaaggcacaataagaaaactttttgcattaaatgttcaagaaaattcagtacatggctctgactctgatgaaaat

SEQ ID NO: 252284 - DNA, 196 bp, Unknown
  Bacterial polypeptide expressing nucleotide sequence isolated from the Sargasso Sea
gtccttgagggggagaatgctattttaaaaaatagagatttaatgggagctactaatccaagtgaggcagaatcaggaaccatcagagctgattttgctgaaacgattgatgcaaatgcagttcatggatctgactcagtggaaagtgcatccagggagatttcttacttttttgacgatagtgagattttttaat

SEQ ID NO: 252285 - DNA, 412 bp, Unknown
  Bacterial polypeptide expressing nucleotide sequence isolated from the Sargasso Sea
tatgagtaataaggaacaaacactttcaattataaagccagatgcagttgaaagaaatctcgataatgaaattaaagaaatgtttagaaataaaggctttgaaatagttaatgaaaagaaaattcaaatagaaaaatctgaggctgaaaaattttataaagttcatgaaacaaagccattttacaatgatttatgtacatatttatcatcagggccaattatagtgatgatattagaaaaagaagatgcaattttagctaacagagaattaatgggatcaactaatcctaaagatgctaaagaaggaactatcagagagaaatatggaatttcaattgataaaaattcagtccatggatctgatagtgttgaaaatgcaaaaattgaaatagatttcttttttaaagattag

SEQ ID NO: 252286 - DNA, 397 bp, Unknown
  Bacterial polypeptide expressing nucleotide sequence isolated from the Sargasso Sea
tattaaacctgatgctacaagaagaaatataactggctctataaatgttaaatttgaagaatctggtttagaaataattgcacaaaagagattgcaattaactaaggaaatggctcaaaaattttatgaagttcataaagacagaccattttttaatgatttaattgactttatgatttcaggtcctgtgattgctcaggttcttagaggcgaaaatgctataaatcttaacagacaagttatgggagcaactaatccagaagaagcagaaatagggactattagaaatgagtttggagaaagcatagaagcaaactcagttcacggctcggacagctcagaaaatgcaaaatctgaaattacattttttttctctgaaattgaattaattcactaa

SEQ ID NO: 252287 - DNA, 412 bp, Unknown
  Bacterial polypeptide expressing nucleotide sequence isolated from the Sargasso Sea
atgagtaatacagaacaaactttatccattataaaacctgacgcagttgagagaaatctagaaaatgaaattaaagaaatttttaaaaataaaggttttataatcgtaaaagaaaagaaaattcaaattgaaaaatcagaagctgaaaagttttataaagttcatgaaactaaagctttttttagtgatttatgctcatatctttcttcaggacctattgttgcaatggttcttgaaaaagataatgcaatacttgctaatagagagcttatgggtgcgaccaatccgaaggatgctgaagaaggtactattagaaaaaaatatggaatatcaatagataaaaattcagtacatggttctgatagtgcagaaaatgcaaaaattgaaatagactttttttttaaagattaaa

SEQ ID NO: 252288 - DNA, 249 bp, Unknown
  Bacterial polypeptide expressing nucleotide sequence isolated from the Sargasso Sea
atgaaactaaacccttttatagtgatttatgtgcatatctgtcatcaggaccaattgtggttatggttcttgaaaaagaaagtgcagtaattggaaatagagagctgatgggagccacaaaccctggagacgctaaagaaggcactattagaaaaaaatatggaatatcaatagataaaaattcagtacatggttctgacagtgttgagaacgcaaaaattgaaatagacttcttctttaaagactaaa

SEQ ID NO: 252289 - DNA, 415 bp, Unknown
  Bacterial polypeptide expressing nucleotide sequence isolated from the Sargasso Sea
atgcaaaaaacattttcaattattaagccagatgctgtaaagcgcaatttaataggccatattaatcaaatgattgaaagttcaagtttgaaaatattagcttcaaagaaaatataccttactaaaaaacaagctgaaatattttatggagttcataaagatagaccttttttcactagccttgttgagtttatgacctctggtccagtccaagttcaagttcttgagggagaggatgcagtcatcaaatatcgaaaaataatgggcgcaactaatcctgctgaagcagaggatggaactattagaaaattgtatgctgagtccattgaggcaaattcagtgcatggaagtgactctgaggaaaatgcaaagcttgaaattaatttctttttttcagagtctgaattagtttagt

SEQ ID NO: 252290 - DNA, 412 bp, Unknown
  Bacterial polypeptide expressing nucleotide sequence isolated from the Sargasso Sea
atgaataaaattgagcaaactttatcaattattaaaccagatgcagttgaaagaaatttagaaaatgaaattaaagagatgttcaaaaataatggttttaccataagtaaagaaaaaaaaattcaaattgataaatccgaagcagaaaaattttatgaagtacatgaaaccaagcctttttataatgaattatgctcctatctttcttcaggaccaattgttgtaatggtgcttgaaaaagataacgctatagtcgcgaacagagagctaatgggagcaacaaatccaaaagacgctattgatggaactattagaagtaaatatggattatcaatagataaaaattctgttcatgggtccgatagtcctgaaaatgcaaaaaaagaaatagattttttttttaacacttaaa
